(19) United States
(12) Patent Application Publication
(10) Pub. No.: US 2009/0305900 A1
(43) Pub. Date: Dec. 10, 2009

(54) GENEMAP OF THE HUMAN GENES ASSOCIATED WITH LONGEVITY

(76) Inventors: Abdelmajid Belouchi, Ville St-Laurent (CA); John Verner Raelson, Hudson (CA); Walter Edward Bradley, Montreal (CA); Bruno Paquin, Chateaugny (CA); Quynh Nguyen-Huu, Longvevil (CA); Pascal Croteau, Laval (CA); Rene Allard, Montreal (CA); Johanne Cousineau, Beaconsfield (CA); Nouzha Paquin, Chateaugny (CA); Paul Van Eerdewegh, Carlisle, MA (US); Randall David Little, Laval (CA); Tim Keith, Bedford, MA (US); Jonathan Segal, Efrat (IL)

Correspondence Address: DOWELL & DOWELL P.C., 103 Oronoco St., Suite 220, Alexandria, VA, 22314, US

(21) Appl. No.: 11/917,896

(22) PCT Filed: Jun. 19, 2006
(86) PCT No.: PCT/US06/23724

§ 371 Date: May 11, 2009

Related U.S. Application Data
(60) Provisional application No. 60/691,309, filed on Jun. 17, 2005.

(51) Int. Cl. C40B 30/00; C12Q 1/68; C07H 21/00; C40B 40/06; C12N 5/00; C12Q 1/02; G01N 33/68; G01N 27/26

(52) U.S. Cl. 506/7; 435/6; 536/23.1; 536/24.3; 506/16; 435/375; 435/29; 436/86; 204/450

(57) ABSTRACT

The present invention relates to the selection of a set of SNP markers for use in genome wide association studies based on linkage disequilibrium mapping. In particular, the invention relates to the fields of pharmacogenomics, diagnostics, patient therapy and the use of genetic haplotype information to predict an individual's longevity, their protection against age-related diseases and/or their response to a particular drug or drugs.

### PRIORITY

[0001] The present application claims priority from U.S. provisional application No. 60/691,309, Attorney Docket No. GENI-007/00US, filed Jun. 17, 2005, entitled GENEMAP OF THE HUMAN GENES ASSOCIATED WITH LONGEVITY, which is incorporated herein by reference.

[0002] The contents of the submission on compact discs are incorporated herein by reference in their entirety: A compact disc copy of the computer readable format copy of the Sequence Listing (HOME COPY) (filename: GENI00701WO SeqList, date recorded: Jun. 19, 2006, file size 14,313,000 bytes); a duplicate compact disc copy of the computer readable format copy of the Sequence Listing (SEARCH COPY) (filename: GENI00701WO SeqList, date recorded: Jun. 19, 2006, file size 14,313,000 bytes); and a triplicate copy of the computer readable format copy of the Sequence Listing (RECORD COPY) (filename: GENI00701WO SeqList, date recorded: Jun. 19, 2006, file size 14,313,000 bytes).

### FIELD OF THE INVENTION

[0003] The invention relates to the field of genomics and genetics, including genome analysis and the study of DNA variations. In particular, the invention relates to the fields of pharmacogenomics, diagnostics, patient therapy and the use of genetic haplotype information to predict an individual's longevity, their protection against age-related diseases and/or their response to a particular drug or drugs, so that drugs tailored to genetic differences of population groups may be developed and/or administered to the appropriate population.

[0004] The invention also relates to a GeneMap for longevity, which links variations in DNA (including both genic and non-genic regions) to an individual's longevity and susceptibility to age-related diseases and/or response to a particular drug or drugs. The invention further relates to the genes disclosed in the GeneMap (see Tables 4, 5 and 6), which are related to methods and reagents for detection of an individual's increased or decreased risk for aging related diseases by identifying at least one polymorphism in one or a combination of the genes from the GeneMap. Also related are the candidate regions identified in Table 1, which are associated with longevity. In addition, the invention further relates to nucleotide sequences of those genes including genomic DNA sequences, cDNA sequences, single nucleotide polymorphisms (SNPs), alleles and haplotypes (see Sequence Listing and Table 2, 3 and 7).

[0005] The present invention relates to the use of genes from Tables 4, 5 and 6, for determining an individual's likelihood of longevity, of being protected against cardiovascular related diseases (e.g., hypertension, diabetes mellitus, myocardial infarction, stroke, and/or transient ischemic attack), metabolic syndrome and/or other age-related diseases, and of retaining cognitive function with aging.

[0006] The invention further relates to isolated nucleic acids comprising these nucleotide sequences and isolated polypeptides or peptides encoded thereby. Also related, are expression vectors and host cells comprising the disclosed nucleic acids or fragments thereof, as well as antibodies that bind to the encoded polypeptides or peptides.

[0007] The present invention further relates to ligands that modulate the activity of the disclosed genes or gene products. In addition, the invention relates to diagnostics and therapeutics for aging related diseases, utilizing the disclosed nucleic acids, SNPs, chromosomal regions, gene maps, polypeptides or peptides, antibodies and/or ligands and small molecules that activate or repress relevant signaling events.

### BACKGROUND OF THE INVENTION

[0008] Many studies have documented the inheritance of human longevity (McGue et al., 1993); Ljungquist et al., 1998). Studies have also documented that centenarians (individuals who live for 100 years or more) are more likely than non-centenarians to have siblings who are long-lived. In particular, one study has shown that the siblings of centenarians have an approximately four-fold greater probability of survival to age 91 than siblings of non-centenarians (Perls et al., 1998). In addition, individuals who achieve exceptional longevity, such as centenarians, tend to live the majority of their lives in excellent health, demonstrating a rapid decline only at the end of their lives (Hitt et al., 1999). Genetic studies in other species including mammals indicate that specific genetic polymorphisms have powerful influences upon life span (defined by the age of the oldest member of the species). A number of studies on non-human species indicate that a relatively few genetic polymorphisms have a powerful influence upon the ability to achieve exceptional longevity. Many of those polymorphisms appear to play roles in basic mechanisms of metabolism and aging.

[0009] The DNA sequences between two human genomes are 99.9% identical. The variations in DNA sequence between individuals can be, for example, deletions of small or large stretches of DNA, insertions of stretches of DNA, variations in the number of repetitive DNA elements in non-coding regions, or changes in single base positions in the genome called “single nucleotide polymorphisms” (SNPs). Human DNA sequence variations account for a large fraction of observed differences between individuals, including susceptibility to disorders or a genetic link to traits, such as exceptional longevity.

[0010] Complex traits such as longevity are believed to involve several genes rather than single genes, as observed in rare traits. This makes detection of any particular gene substantially more difficult than in a rare trait, where a single gene mutation segregating according to a Mendelian inheritance pattern is the causative mutation. Any one of the multiple interacting gene mutations involved in the etiology of a complex and common trait will impart a lower relative risk for the trait than will the single gene mutation involved in a simple genetic trait. Low relative risk alleles are more difficult to detect and, as a result, the success of positional cloning using linkage mapping that was achieved for simple genetic trait genes has not been repeated for complex traits.

[0011] Several approaches have been proposed to discover and characterize multiple genes in complex genetic traits. These gene discovery methods can be subdivided into hypothesis-free disorder association studies and hypothesis-driven candidate gene or region studies. The candidate gene approach relies on the analysis of a gene in patients who have a disorder or a genetic trait in which the gene is thought to play a role. This approach is limited in utility because it only provides for the investigation of genes with known functions. Although variant sequences of candidate genes may be identified using this approach, it is inherently limited by the fact that variant sequences in other genes that contribute to the phenotype will be necessarily missed when the technique is employed. A genome-wide scan (GWS) has been shown to be efficient in identifying longevity susceptibility markers, such as the APOE gene on chromosome 19 and APOB gene on chromosome 2. In contrast to the candidate gene approach, a GWS searches throughout the genome without any a priori hypothesis and consequently can identify genes that are not obvious candidates for the complex genetic trait as well as genes that are relevant candidates for the trait. Furthermore, it can identify structurally important chromosomal regions that can influence the expression of specific, trait-related genes.

[0012] Family-based linkage mapping methods were initially used for disorder locus identification. This technique locates genes based on the relatively limited number of genetic recombination events within the families used in the study, and results in large chromosomal regions containing hundreds of genes, any one of which could be the trait-causing gene. Population-based, or linkage disequilibrium (LD) mapping is based on the premise that regions adjacent to a gene of interest are co-transmitted through the generations along with the gene. As a result, LD extends over shorter genetic regions than does linkage (Hewett et al., 2002), and can facilitate detection of genes with lower relative risk than family linkage mapping approaches. It also defines much smaller candidate regions which may contain only a few genes, making the identification of the actual trait gene much easier.

[0013] It has been estimated that a GWS that uses a general population and case/control association (LD) analysis would require approximately 700,000 SNP markers (Carlson et al., 2003). The cost of a GWS at this marker density for a sufficient sample size for statistical power is economically prohibitive. The use of a founder population (genetic isolates), such as the French Canadian population of Quebec, is one solution to the problem with LD analysis. The French Canadian population in Quebec (Quebec Founder Population—QFP) provides one of the best resources in the world for gene discovery based on its high levels of genetic sharing and genetic homogeneity. By combining DNA collected from the QFP, high throughput genotyping capabilities and proprietary algorithms for genetic analysis, a comprehensive genome-wide association study is facilitated. The present invention relates specifically to a set of longevity-related genes (GeneMap) and targets which present attractive points of therapeutic intervention for aging-associated diseases.

[0014] In view of the foregoing, identifying susceptibility genes associated with longevity and elucidating their respective biochemical pathways will facilitate the development of effective treatments for aging-associated diseases. This will also lead to the identification of diagnostic markers, which will predict the propensity for any such disease and allow therapeutic intervention before such disease occurs. The identification of genetic markers associated with longevity will lead to the development of effective therapeutic interventions for a much greater proportion of the individuals affected by aging-associated diseases. Knowledge of longevity-associated polymorphisms not only provides the benefit of predicting individual longevity, but also provides the ability to predict the likelihood of aging-associated diseases. The present invention satisfies this need and provides related advantages as well.

### BRIEF DESCRIPTION OF THE DRAWINGS

[0015] FIG. 1. Method employed by the inventors to permit the identification of genes predisposing to a particular genetic trait, such as longevity. The method can be applied for any given trait and the end result is the construction of a GeneMap for a particular trait or disorder. Briefly, a genetically heritable disorder or trait is selected followed by the preparation of an in-depth literature review on the prevalence, phenotypes, and available treatments (if relevant) of that trait. The literature review includes a list and description of candidate genes and regions associated with the trait. A clinical specialist in the field of the genetic trait is consulted for the definition of phenotype. Inclusion and exclusion criteria are then set and a study protocol is prepared. IRB and ethical approval are sought prior to patient recruitment. A network of physicians is required to recruit the necessary cases and controls for the study from the Quebec Founder Population. Individuals (cases and controls) are then recruited and DNA extraction and dosage is performed from the blood samples obtained. Samples are pooled into several cases and control pools. A GWS is performed on the pooled case and control samples using, as a minimum, the marker density determined from a study of linkage disequilibrium in the Quebec Founder Population; a study that led to the formulation of the Quebec linkage disequilibrium map (QLDM, a proprietary map of Genizon Biosciences Inc.). The results from the GWS genotyping are analyzed and candidate regions are selected for confirmatory mapping followed by fine mapping at a higher marker density in individual case and control samples in order to validate and/or refine the signal. The gene content of the candidate regions is analyzed and characterized. The representative haplotypes are then selected and sequenced. Once polymorphisms are identified by sequencing efforts the frequencies of genotypes and haplotypes in individual cases and controls are analyzed in a similar manner as for the GWS and fine mapping data. Ultrafine mapping is performed on all the samples to identify the polymorphisms that are most associated with the trait phenotype as part of the search for the actual DNA polymorphisms that confer susceptibility to the trait. The genes found associated with the trait, are then corroborated in a different population. The corroborated genes are used for the construction of a GeneMap.

### DESCRIPTION OF THE FILES CONTAINED ON THE CD-R

[0016] The contents of the submission on compact discs are incorporated herein by reference in their entirety: A compact disc copy of the computer readable format copy of the Sequence Listing (HOME COPY) (filename: GENI00701WO SeqList, date recorded: Jun. 19, 2006, file size 14,313,000 bytes); a duplicate compact disc copy of the computer readable format copy of the Sequence Listing (SEARCH COPY) (filename: GENI00701WO SeqList, date recorded: Jun. 19, 2006, file size 14,313,000 bytes); and a triplicate copy of the computer readable format copy of the Sequence Listing (RECORD COPY) (filename: GENI00701WO SeqList, date recorded: Jun. 19, 2006, file size 14,313,000 bytes).

[0017] The CD-R labeled “GeneMap of the Human Gene Associated with Longevity” contains the following one file of sequence listing. Each electronic copy of the sequence listing was created on Jun. 19, 2006 with a file size of 14,313 KB. The file name is as follows: GENI00701WO SeqList

### DEFINITIONS

[0018] Throughout the description of the present invention, several terms are used that are specific to the science of this field. For the sake of clarity and to avoid any misunderstanding, these definitions are provided to aid in the understanding of the specification and claims:

[0019] Allele: One of a pair, or series, of forms of a gene or non-genic region that occur at a given locus in a chromosome. Alleles are symbolized with the same basic symbol (e.g., B for dominant and b for recessive; B1, B2, Bn for n additive alleles at a locus). In a normal diploid cell there are two alleles of any one gene (one from each parent), which occupy the same relative position (locus) on homologous chromosomes. Within a population there may be more than two alleles of a gene. See multiple alleles. SNPs also have alleles, i.e., the two (or more) nucleotides that characterize the SNP

[0020] Amplification of nucleic acids: refers to methods such as polymerase chain reaction (PCR), ligation amplification (or ligase chain reaction, LCR) and amplification methods based on the use of Q-beta replicase. These methods are well known in the art and are described, for example, in U.S. Pat. Nos. 4,683,195 and 4,683,202. Reagents and hardware for conducting PCR are commercially available. Primers useful for amplifying sequences from the trait region, are preferably complementary to, and preferably hybridize specifically to, sequences in the trait region or in regions that flank a target region therein. Genes from Tables 4, 5 and 6 generated by amplification may be sequenced directly. Alternatively, the amplified sequence(s) may be cloned prior to sequence analysis.

[0021] Antigenic component: is a moiety that binds to its specific antibody with sufficiently high affinity to form a detectable antigen-antibody complex.

[0022] Antibodies: refer to polyclonal and/or monoclonal antibodies and fragments thereof, and immunologic binding equivalents thereof, that can bind to proteins and fragments thereof or to nucleic acid sequences from the trait region, particularly from the trait gene products or a portion thereof. The term antibody is used both to refer to a homogeneous molecular entity, or a mixture such as a serum product made up of a plurality of different molecular entities. Proteins may be prepared synthetically in a protein synthesizer and coupled to a carrier molecule and injected over several months into rabbits. Rabbit sera are tested for immunoreactivity to the protein or fragment. Monoclonal antibodies may be made by injecting mice with the proteins, or fragments thereof. Monoclonal antibodies will be screened by ELISA and tested for specific immunoreactivity with protein or fragments thereof (Harlow et al. 1988, Antibodies: A Laboratory Manual, Cold Spring Harbor Laboratory, Cold Spring Harbor, N.Y.). These antibodies will be useful in assays as well as therapeutics.

[0023] Associated allele: refers to an allele at a polymorphic locus that is associated with a particular phenotype of interest, e.g., a predisposition to a trait (e.g., longevity) or a particular drug response.

[0024] cDNA: refers to complementary or copy DNA produced from an RNA template by the action of RNA-dependent DNA polymerase (reverse transcriptase). Thus, a cDNA clone is a duplex DNA sequence complementary to an RNA molecule of interest, included in a cloning vector or amplified by PCR. This term includes genes from which the intervening sequences have been removed.

[0025] cDNA library: refers to a collection of recombinant DNA molecules containing cDNA inserts that together comprise essentially all of the expressed genes of an organism or tissue. A cDNA library can be prepared by methods known to one skilled in the art (see, e.g., Cowell and Austin, 1997, “DNA Library Protocols,” Methods in Molecular Biology). Generally, RNA is first isolated from the cells of the desired organism, and the RNA is used to prepare cDNA molecules.

[0026] Cloning: refers to the use of recombinant DNA techniques to insert a particular gene or other DNA sequence into a vector molecule. In order to successfully clone a desired gene, it is necessary to use methods for generating DNA fragments, for joining the fragments to vector molecules, for introducing the composite DNA molecule into a host cell in which it can replicate, and for selecting the clone having the target gene from amongst the recipient host cells.

[0027] Cloning vector: refers to a plasmid or phage DNA or other DNA molecule that is able to replicate in a host cell. The cloning vector is typically characterized by one or more endonuclease recognition sites at which such DNA sequences may be cleaved in a determinable fashion without loss of an essential biological function of the DNA, and which may contain a selectable marker suitable for use in the identification of cells containing the vector.

[0028] Coding sequence or a protein-coding sequence: is a polynucleotide sequence capable of being transcribed into mRNA and/or capable of being translated into a polypeptide or peptide. The boundaries of the coding sequence are typically determined by a translation start codon at the 5′-terminus and a translation stop codon at the 3′-terminus.

[0029] Complement of a nucleic acid sequence: refers to the antisense sequence that participates in Watson-Crick base-pairing with the original sequence.

[0030] Trait region (can also be referred to as a disorder region, such as age-related disorder for the longevity trait): refers to the portions of the human chromosomes displayed in Table 1 bounded by the markers from Table 1.

[0031] Trait-associated nucleic acid or polypeptide sequence: refers to a nucleic acid sequence that maps to a region of Table 1 or the polypeptides encoded therein (Table 2, 3 and 7 SNPs, nucleic acids, and polypeptides). For nucleic acids, this encompasses sequences that are identical or complementary to the gene sequences from Tables 4, 5 and 6, as well as sequence-conservative, function-conservative, and non-conservative variants thereof. For polypeptides, this encompasses sequences that are identical to the polypeptide, as well as function-conservative and non-conservative variants thereof. Included are the alleles of naturally-occurring polymorphisms causative of longevity such as, but not limited to, alleles that cause altered expression of genes of Tables 4, 5 and 6 and alleles that cause altered protein levels or stability (e.g., decreased levels, increased levels, expression in an inappropriate tissue type, increased stability, and decreased stability).

[0032] Expression vector: refers to a vehicle or plasmid that is capable of expressing a gene that has been cloned into it, after transformation or integration in a host cell. The cloned gene is usually placed under the control of (i.e., operably linked to) a regulatory sequence.

[0033] Function-conservative variants: are those in which a change in one or more nucleotides in a given codon position results in a polypeptide sequence in which a given amino acid residue in the polypeptide has been replaced by a conservative amino acid substitution. Function-conservative variants also include analogs of a given polypeptide and any polypeptides that have the ability to elicit antibodies specific to a designated polypeptide.

[0034] Founder population: also called a population isolate, this is a large number of people who have mostly descended, in genetic isolation from other populations, from a much smaller number of people who lived many generations ago.

[0035] Gene: refers to a DNA sequence that encodes through its template or messenger RNA a sequence of amino acids characteristic of a specific peptide, polypeptide, or protein. The term “gene” also refers to a DNA sequence that encodes an RNA product. The term gene as used herein with reference to genomic DNA includes intervening, non-coding regions, as well as regulatory regions, and can include 5′ and 3′ ends. A gene sequence is wild-type if such sequence is usually found in individuals unaffected by the trait or condition of interest, e.g., longevity. However, environmental factors and other genes can also play an important role in the ultimate determination of the genetic trait. In the context of complex traits involving multiple genes (oligogenic traits), the wild type, or normal sequence can also be associated with a measurable risk or susceptibility, receiving its reference status based on its frequency in the general population.

[0036] GeneMaps are defined as groups of gene(s) that are directly or indirectly involved in at least one phenotype of a trait, e.g., longevity. As such, GeneMaps enable the development of synergistic diagnostic products, creating “theranostics”.

[0037] Genotype: Set of alleles at a specified locus or loci.

[0038] Haplotype: The allelic pattern of a group of (usually contiguous) DNA markers or other polymorphic loci along an individual chromosome or double helical DNA segment. Haplotypes identify individual chromosomes or chromosome segments. The presence of shared haplotype patterns among a group of individuals implies that the locus defined by the haplotype has been inherited, identical by descent (IBD), from a common ancestor. Detection of identical by descent haplotypes is the basis of linkage disequilibrium (LD) mapping. Haplotypes are broken down through the generations by recombination and mutation. In some instances, a specific allele or haplotype may be associated with susceptibility to a trait or condition of interest, e.g., longevity. In other instances, an allele or haplotype may be associated with a decrease in susceptibility to a trait or condition of interest, i.e., a protective sequence (see Table 7 for the significant haplotypes associated with longevity).

[0039] Host: includes prokaryotes and eukaryotes. The term includes an organism or cell that is the recipient of an expression vector (e.g., autonomously replicating or integrating vector).

[0040] Hybridizable: nucleic acids are hybridizable to each other when at least one strand of the nucleic acid can anneal to another nucleic acid strand under defined stringency conditions. In some embodiments, hybridization requires that the two nucleic acids contain at least 10 substantially complementary nucleotides; depending on the stringency of hybridization, however, mismatches may be tolerated. The appropriate stringency for hybridizing nucleic acids depends on the length of the nucleic acids and the degree of complementarity, and can be determined in accordance with the methods described herein.

[0041] Identity by descent (IBD): Identity among DNA sequences for different individuals that is due to the fact that they have all been inherited from a common ancestor. LD mapping identifies IBD haplotypes as the likely location of trait genes shared by a group of cases.

[0042] Identity: as known in the art, is a relationship between two or more polypeptide sequences or two or more polynucleotide sequences, as determined by comparing the sequences. In the art, identity also means the degree of sequence relatedness between polypeptide or polynucleotide sequences, as the case may be, as determined by the match between strings of such sequences. Identity and similarity can be readily calculated by known methods, including but not limited to those described in A. M. Lesk (ed), 1988, Computational Molecular Biology, Oxford University Press, NY; D. W. Smith (ed), 1993, Biocomputing. Informatics and Genome Projects, Academic Press, NY; A. M. Griffin and H. G. Griffin, H. G (eds), 1994, Computer Analysis of Sequence Data, Part 1, Humana Press, NJ; G. von Heinje, 1987, Sequence Analysis in Molecular Biology, Academic Press; and M. Gribskov and J. Devereux (eds), 1991, Sequence Analysis Primer, M Stockton Press, NY; H. Carillo and D. Lipman, 1988, SIAM J. Applied Math., 48:1073.

[0043] Immunogenic component: is a moiety that is capable of eliciting a humoral and/or cellular immune response in a host animal.

[0044] Isolated nucleic acids: are nucleic acids separated away from other components (e.g., DNA, RNA, and protein) with which they are associated (e.g., as obtained from cells, chemical synthesis systems, or phage or nucleic acid libraries). Isolated nucleic acids are at least 60% free, preferably 75% free, and most preferably 90% free from other associated components. In accordance with the present invention, isolated nucleic acids can be obtained by methods described herein, or other established methods, including isolation from natural sources (e.g., cells, tissues, or organs), chemical synthesis, recombinant methods, combinations of recombinant and chemical methods, and library screening methods.

[0045] Isolated polypeptides or peptides: are those that are separated from other components (e.g., DNA, RNA, and other polypeptides or peptides) with which they are associated (e.g., as obtained from cells, translation systems, or chemical synthesis systems). In a preferred embodiment, isolated polypeptides or peptides are at least 10% pure; more preferably, 80% or 90% pure. Isolated polypeptides and peptides include those obtained by methods described herein or other established methods, including isolation from natural sources (e.g., cells, tissues, or organs), chemical synthesis, recombinant methods, or combinations of recombinant and chemical methods. Proteins or polypeptides referred to herein as recombinant are proteins or polypeptides produced by the expression of recombinant nucleic acids. A portion as used herein with regard to a protein or polypeptide refers to fragments of that protein or polypeptide. The fragments can range in size from 5 amino acid residues to all but one residue of the entire protein sequence. Thus, a portion or fragment can be at least 5, 5-50, 50-100, 100-200, 200-400, 400-800, or more consecutive amino acid residues of a protein or polypeptide.

[0046] Linkage disequilibrium (LD): a statistical association between particular alleles at separate but linked loci, normally the result of a particular ancestral haplotype being common in the population studied. LD can also be defined as the situation in which the alleles for two or more loci do not occur together in individuals sampled from a population at frequencies predicted by the product of their individual allele frequencies. In other words, markers that are in LD do not follow Mendel's second law of independent random segregation. LD can be caused by any of several demographic or population artefacts as well as by the presence of genetic linkage between markers. However, when these artefacts are controlled and eliminated as sources of LD, then LD results directly from the fact that the loci involved are located close to each other on the same chromosome so that specific combinations of alleles for different markers (haplotypes) are inherited together. Markers that are in high LD can be assumed to be located near each other and a marker or haplotype that is in high LD with a genetic trait can be assumed to be located near the gene that affects that trait. The physical proximity of markers can be measured in family studies where it is called linkage or in population studies where it is called linkage disequilibrium.

[0047] LD mapping: population based gene mapping, which locates trait genes by identifying regions of the genome where haplotypes or marker variation patterns are shared statistically more frequently among cases compared to healthy controls. This method is based upon the assumption that many of the cases will have inherited an allele associated with the trait from a common ancestor (IBD), and that this allele will be in LD with the trait gene.

[0048] Locus: a specific position along a chromosome or DNA sequence. Depending upon context, a locus could be a gene, a marker, a chromosomal band or a specific sequence of one or more nucleotides.

[0049] Minor allele frequency (MAF): the population frequency of one of the alleles for a given polymorphism, which is equal or less than 50%. The sum of the MAF and the Major allele frequency equals one.

[0050] Markers: an identifiable DNA sequence that is variable (polymorphic) for different individuals within a population. These sequences facilitate the study of inheritance of a trait or a gene. Such markers are used in mapping the order of genes along chromosomes and in following the inheritance of particular genes; genes closely linked to the marker or in LD with the marker will generally be inherited with it. Two types of markers are commonly used in genetic analysis, microsatellites and SNPs.

[0051] Microsatellite: DNA of eukaryotic cells comprising a repetitive, short sequence of DNA that is present as tandem repeats and in highly variable copy number, flanked by sequences unique to that locus.

[0052] Mutant sequence: a sequence that differs from one or more wild-type sequences. For example, a nucleic acid from a gene listed in Tables 4, 5 and 6 containing a particular allele of a single nucleotide polymorphism may be a mutant sequence. In some cases, the individual carrying this allele has increased susceptibility toward the trait, or condition of interest. In other cases, the mutant sequence might also refer to an allele that decreases the susceptibility toward a trait or condition of interest and thus acts in a protective manner. The term mutation may also be used to describe a specific allele at a polymorphic locus.

[0053] Non-conservative variants: are those in which a change in one or more nucleotides in a given codon position results in a polypeptide sequence in which a given amino acid residue in a polypeptide has been replaced by a non-conservative amino acid substitution. Non-conservative variants also include polypeptides comprising non-conservative amino acid substitutions.

[0054] Nucleic acid or polynucleotide: purine- and pyrimidine-containing polymers of any length, either polyribonucleotides or polydeoxyribonucleotide or mixed polyribo polydeoxyribonucleotides. This includes single- and double-stranded molecules, i.e., DNA-DNA, DNA-RNA and RNA-RNA hybrids, as well as protein nucleic acids (PNA) formed by conjugating bases to an amino acid backbone. This also includes nucleic acids containing modified bases.

[0055] Nucleotide: consist of a ribose or deoxyribose sugar joined to a purine or pyrimidine base and to a phosphate group and that are the basic structural units of RNA and DNA. For its incorporation in DNA, nucleotides need to possess three phosphate esters but they are converted into monoesters in the process of incorporation.

[0056] Operably linked: means that the promoter controls the initiation of expression of the gene. A promoter is operably linked to a sequence of proximal DNA if upon introduction into a host cell the promoter determines the transcription of the proximal DNA sequence(s) into one or more species of RNA. A promoter is operably linked to a DNA sequence if the promoter is capable of initiating transcription of that DNA sequence.

[0057] Ortholog: denotes a gene or polypeptide obtained from one species that has homology to an analogous gene or polypeptide from a different species.

[0058] Paralog: denotes a gene or polypeptide obtained from a given species that has homology to a distinct gene or polypeptide from that same species.

[0059] Phenotype: any visible, detectable or otherwise measurable property of an organism such as symptoms of, or susceptibility to, a disorder or trait.

[0060] Polymorphism: occurrence of two or more alternative genomic sequences or alleles between or among different genomes or individuals at a single locus. A polymorphic site thus refers specifically to the locus at which the variation occurs. In some cases, an individual carrying a particular allele of a polymorphism has an increased or decreased susceptibility toward a trait or condition of interest.

[0061] Portion and fragment: are synonymous. A portion as used with regard to a nucleic acid or polynucleotide refers to fragments of that nucleic acid or polynucleotide. The fragments can range in size from 8 nucleotides to all but one nucleotide of the entire gene sequence. Preferably, the fragments are at least about 8 to about 10 nucleotides in length; at least about 12 nucleotides in length; at least about 15 to about 20 nucleotides in length; at least about 25 nucleotides in length; or at least about 35 to about 55 nucleotides in length.

[0062] Probe or primer: refers to a nucleic acid or oligonucleotide that forms a hybrid structure with a sequence in a target region of a nucleic acid due to complementarity of the probe or primer sequence to at least one portion of the target region sequence.

[0063] Protein and polypeptide: are synonymous. Peptides are defined as fragments or portions of polypeptides, preferably fragments or portions having at least one functional activity (e.g., proteolysis, adhesion, fusion, antigenic, or intracellular activity) as the complete polypeptide sequence.

[0064] Recombinant nucleic acids: nuclei acids which have been produced by recombinant DNA methodology, including those nucleic acids that are generated by procedures which rely upon a method of artificial replication, such as the polymerase chain reaction (PCR) and/or cloning into a vector using restriction enzymes. Portions of recombinant nucleic acids which code for polypeptides can be identified and isolated by, for example, the method of M. Jasin et al., U.S. Pat. No. 4,952,501.

[0065] Regulatory sequence: refers to a nucleic acid sequence that controls or regulates expression of structural genes when operably linked to those genes. These include, for example, the lac systems, the trp system, major operator and promoter regions of the phage lambda, the control region of fd coat protein and other sequences known to control the expression of genes in prokaryotic or eukaryotic cells. Regulatory sequences will vary depending on whether the vector is designed to express the operably linked gene in a prokaryotic or eukaryotic host, and may contain transcriptional elements such as enhancer elements, termination sequences, tissue-specificity elements and/or translational initiation and termination sites.

[0066] Sample: as used herein refers to a biological sample, such as, for example, tissue or fluid isolated from an individual or animal (including, without limitation, plasma, serum, cerebrospinal fluid, lymph, tears, nails, hair, saliva, milk, pus, and tissue exudates and secretions) or from in vitro cell culture-constituents, as well as samples obtained from, for example, a laboratory procedure.

[0067] Single nucleotide polymorphism (SNP): variation of a single nucleotide. This includes the replacement of one nucleotide by another and deletion or insertion of a single nucleotide. Typically, SNPs are biallelic markers although tri- and tetra-allelic markers also exist. For example, SNP A\C may comprise allele C or allele A (Table 2, 3 and 7). Thus, a nucleic acid molecule comprising SNP A\C may include a C or A at the polymorphic position. For a combination of SNPs, the term “haplotype” is used, e.g. the genotype of the SNPs in a single DNA strand that are linked to one another. In certain embodiments, the term “haplotype” is used to describe a combination of SNP alleles, e.g., the alleles of the SNPs found together on a single DNA molecule. In specific embodiments, the SNPs in a haplotype are in linkage disequilibrium with one another.

[0068] Sequence-conservative: variants are those in which a change of one or more nucleotides in a given codon position results in no alteration in the amino acid encoded at that position (i.e., silent mutation).

[0069] Substantially homologous: a nucleic acid or fragment thereof is substantially homologous to another if, when optimally aligned (with appropriate nucleotide insertions and/or deletions) with the other nucleic acid (or its complementary strand), there is nucleotide sequence identity in at least 60% of the nucleotide bases, usually at least 70%, more usually at least 80%, preferably at least 90%, and more preferably at least 95-98% of the nucleotide bases. Alternatively, substantial homology exists when a nucleic acid or fragment thereof will hybridize, under selective hybridization conditions, to another nucleic acid (or a complementary strand thereof). Selectivity of hybridization exists when hybridization which is substantially more selective than total lack of specificity occurs. Typically, selective hybridization will occur when there is at least about 55% sequence identity over a stretch of at least about nine or more nucleotides, preferably at least about 65%, more preferably at least about 75%, and most preferably at least about 90% (M. Kanehisa, 1984, NucL Acids Res. 11:203-213). The length of homology comparison, as described, may be over longer stretches, and in certain embodiments will often be over a stretch of at least 14 nucleotides, usually at least 20 nucleotides, more usually at least 24 nucleotides, typically at least 28 nucleotides, more typically at least 32 nucleotides, and preferably at least 36 or more nucleotides.

[0070] Wild-type gene from Tables 4, 5 and 6: refers to the reference sequence. The wild-type gene sequences from Tables 4, 5 and 6 used to identify the variants (single nucleotide polymorphisms, alleles, and haplotypes) described in detail herein.

[0071] Technical and scientific terms used herein have the meanings commonly understood by one of ordinary skill in the art to which the present invention pertains, unless otherwise defined. Reference is made herein to various methodologies known to those of skill in the art. Publications and other materials setting forth such known methodologies to which reference is made are incorporated herein by reference in their entireties as though set forth in full. Standard reference works setting forth the general principles of recombinant DNA technology include J. Sambrook et al., 1989, Molecular Cloning: A Laboratory Manual, 2d Ed., Cold Spring Harbor Laboratory Press, Cold Spring Harbor, N.Y.; P. B. Kaufman et al., (eds), 1995, Handbook of Molecular and Cellular Methods in Biology and Medicine, CRC Press, Boca Raton; M. J. McPherson (ed), 1991, Directed Mutagenesis: A Practical Approach, IRL Press, Oxford; J. Jones, 1992, Amino Acid and Peptide Synthesis, Oxford Science Publications, Oxford; B. M. Austen and O. M. R. Westwood, 1991, Protein Targeting and Secretion, IRL Press, Oxford; D. N Glover (ed), 1985, DNA Cloning, Volumes I and 11; M. J. Gait (ed), 1984, Oligonucleotide Synthesis; B. D. Hames and S. J. Higgins (eds), 1984, Nucleic Acid Hybridization; Quirke and Taylor (eds), 1991, PCR-A Practical Approach; Harries and Higgins (eds), 1984, Transcription and Translation; R. I. Freshney (ed), 1986, Animal Cell Culture; Immobilized Cells and Enzymes, 1986, IRL Press; Perbal, 1984, A Practical Guide to Molecular Cloning, J. H. Miller and M. P. Calos (eds), 1987, Gene Transfer Vectors for Mammalian Cells, Cold Spring Harbor Laboratory Press; M. J. Bishop (ed), 1998, Guide to Human Genome Computing, 2d Ed., Academic Press, San Diego, Calif.; L. F. Peruski and A. H. Peruski, 1997, The Internet and the New Biology. Tools for Genomic and Molecular Research, American Society for Microbiology, Washington, D.C. Standard reference works setting forth the general principles of immunology include S. Sell, 1996, Immunology, Immunopathology & Immunity, 5th Ed., Appleton & Lange, Publ., Stamford, Conn.; D. Male et al., 1996, Advanced Immunology, 3d Ed., Times Mirror Int'l Publishers Ltd., Publ., London; D. P. Stites and A. L Terr, 1991, Basic and Clinical Immunology, 7th Ed., Appleton & Lange, Publ., Norwalk, Conn.; and A. K. Abbas et al., 1991, Cellular and Molecular Immunology, W. B. Saunders Co., Publ., Philadelphia, Pa. Any suitable materials and/or methods known to those of skill can be utilized in carrying out the present invention; however, preferred materials and/or methods are described. Materials, reagents, and the like to which reference are made in the following description and examples are generally obtainable from commercial sources, and specific vendors are cited herein.

### DETAILED DESCRIPTION OF THE INVENTION

[0072] Aging is a process in which all individuals of a species undergo a progressive decline in vitality leading to death. In metazoans, aging at the level of the whole organism is clearly evident. Aging of an organism represents the effects of entropy over time and has also been shown by many to be genetically programmed. While the effect of genetics on life expectancy is minimal across ages, this is not the case with centenarians (a rare phenotype achieved by 1 in 10,000 individuals). Siblings of current centenarians have odds ratios of between 8 and 17 of achieving 100 years of age, and parents of centenarians have an odds ratio of 7 for achieving ages 90-99 compared to appropriate controls. Furthermore, the offspring of long-lived parents have a significantly lower prevalence (50%) of hypertension, diabetes mellitus, myocardial infarctions and strokes/transient ischemic attacks compared with several age-matched control groups. In support of the inheritance of longevity, the New England Centenarian Study reported a statistically significant linkage between a genetic locus on chromosome 4 and exceptional longevity among siblings of centenarians.

[0073] Evidence in support of a genetic determinant for aging has been obtained in various organisms. For instance, in the yeast Saccharomyces cerevisiae, the patterns of expression of certain genes change in a specific manner during the life span, and these changed patterns suggest that the aging process is subject to gene regulation. Controlled expression of the transforming gene of Harvey murine sarcoma virus (v-Ha-ras) was found to extend yeast life span (as measured by the number of cell divisions) nearly two-fold (Jazwinski et al., 1993). RAS1 and RAS2, which are yeast homologs of the v-Ha-ras oncogene, play central roles in the integration of cell growth and the cell cycle in yeast. The primary role of these RAS proteins in yeast is the GTP-dependent regulation of adenylate cyclase activity. Curiously, mutations in RAS1 and RAS2 have opposite effects on yeast life span. The deletion of RAS1 lengthened life span while deletion of RAS2 decreased life span. D'mello, N. P. et al. (1994) isolated a yeast gene denoted longevity-assurance gene-1 (LAG1). LAG1 expression is highest in young cells and decreases as yeast cells age.

[0074] Furthermore, numerous diseases and disorders are associated with aging. Diseases which show age-dependent onset of symptoms include Alzheimer's disease, Pick's disease, Huntington's disease, Parkinson's disease, adult onset myotonic dystrophy, multiple sclerosis, adult onset leukodystrophy, diabetes mellitus, arteriosclerosis, and cancer.

[0075] Patients who suffer from premature aging syndromes exhibit numerous defects associated with more advanced age groups. Symptoms of Werner's syndrome include scleroderma-like skin changes, cataracts, subcutaneous calcification, premature arteriosclerosis, and diabetes mellitus. A striking aspect of Werner's syndrome, presumably arising from the same genetic defect, is a dramatic shortening of the replicative life-span of dermal fibroblasts in vitro (Faragher et al., 1993).

[0076] Scientists have also found that substantially reducing an organism's caloric intake increases longevity in mammals. Caloric restriction also known as “undernutrition without malnutrition” refers to a daily diet having about 30 to 40% fewer calories than the typical daily diet, but which contains the required nutrients and vitamins to support life. Caloric restriction extends both the maximal and the average life span of mice. In addition, preliminary studies suggest that calorie-restricted monkeys are healthier and tend to live longer than their freely fed counterparts (Mattison et al., 2003). In addition to increasing an organism's life span, caloric restriction plays a role in preventing or delaying many age-associated diseases and conditions, such as heart disease, dementia, and cancer. It has been found that caloric restriction not only slows the effects of aging on the nervous system, but studies suggest that it boosts the immune system and delays the onset of certain age-related cancers.

[0077] Mitochodria have also been implicated in age-related diseases. Mitochondria are cellular organelles often referred to as the “powerhouses” of the cell because they are the sites for cellular respiration or energy production in the cell. Indeed, mitochondria generate most of the energy of the cell primarily through oxidative phosphorylation, a complex process that uses electrons generated through oxidation of glucose and fatty acids to generate ATP. Aging mitochondria suffer from impaired function, which is associated with a variety of functional deficits (both physical and cognitive) and also the development of degenerative diseases. Proteins of the mitochondria oxidative phosphorylation complex have been shown to be impaired upon aging, which leads to a higher production of reactive oxygen species (ROS) and a decrease in efficiency of energy production. Free radicals produced by aerobic respiration cause cumulative oxidative damage resulting in aging and cell death. The biggest impact of age-related increase in ROS appears to be on somatic tissues composed of post-mitotic non-replicative cells including muscles, e.g., cardiac and skeletal, and nervous tissues, e.g., brain, retinal pigment epithelium. Numerous age-related changes have been reported in mitochondria. For example, oxidative damage to mitochondria DNA (mt DNA) increases with aging (Beckman et al., 1999) along with the oxidation of glutathione (GSH) a major intracellular antioxidant system, which plays an important role in protection against age-related mt DNA oxidative damage.

[0078] A relative lack of polymorphic variants associated with diseases of aging may be one prerequisite to achieving exceptional longevity. For example, the absence of genetic polymorphisms among centenarians is exemplified by the rarity of the apolipoprotein E E4 allele that has been associated with Alzheimer's disease and cardiovascular disease (Schachter et al., 1994). Another prerequisite to achieving exceptional longevity may be the ability to modulate the rate of the aging process, which also appears to have a genetic component. For example, one study has shown that the offspring of centenarians had more favorable lipid profile characteristics (Barzilai et al., 2001).

[0079] Thus, while there are a number of genetic studies and markers known, longevity and age-related diseases are not well understood. There is also a continuing need in the medical arts for genetic markers of longevity and guidance for the use of such markers. Compositions and methods of the invention are useful for predicting the propensity for exceptional longevity in humans. Additionally, compositions and methods of the invention are useful for predicting the propensity for age-related diseases including, but not limited to heart disease, cardiovascular disease, stroke, Alzheimer's disease, cancer, and ocular disease. Additionally, compositions and methods of the invention are useful for indicating possible early therapeutic intervention to prevent or to lessen the effects of diseases associated with aging. The present invention fulfills this need and provides further related advantages.

### Genome Wide Association Study to Construct a GeneMap for Longevity

[0080] The present invention is based on the discovery of genes associated with longevity. In the preferred embodiment, trait-associated loci (candidate regions; Tables 1-7) are therefore identified by the statistically significant differences in allele frequencies between the cases and the controls. For the purpose of the present invention, 47 candidate regions showing a difference with a −log 10 P value of 3.0 or higher are identified. The only previously replicated locus associated with longevity is at 4q24-q25 (Puca et al., 2001).

[0081] The invention provides a method for the discovery of genes associated with longevity and the construction of a GeneMap for longevity in a human population, comprising the following steps (see FIG. 1 and Example section herein):

### Step 1: Recruit Cases and Controls

[0082] In the preferred embodiment, 500 cases ascertained to be 94 years old or older along with 500 control individuals are recruited from the Quebec Founder Population (QFP).

[0083] In another embodiment, 615 cases ascertained to be 94 years old or older along with 615 control individuals, ascertained to be 65 years old or younger, are recruited from the Quebec Founder Population (QFP).

[0084] In another embodiment, the present invention is performed as a whole or partially with DNA samples from individuals of another founder population than the Quebec population or from the general population.

### Step 2: DNA Extraction and Dosage

[0085] Any sample comprising cells or nucleic acids from patients or controls may be used. Preferred samples are those easily obtained from the patient or control. Such samples include, but are not limited to blood, peripheral lymphocytes, buccal swabs, epithelial cell swabs, nails, hair, bronchoalveolar lavage fluid, sputum, or other body fluid or tissue obtained from an individual.

[0086] In the preferred embodiment, DNA is extracted from such samples in the quantity and quality necessary to perform the invention using conventional DNA extraction and dosage techniques. The present invention is not linked to any DNA extraction or dosage platform in particular.

[0087] The extracted DNA from case and control samples from recruited individuals is pooled together in various pools. Pools are designed to segregate cases from controls, and males from females.

[0088] In the preferred embodiment, proband pools consist of DNA extracted from recruited cases and control pools consist of DNA extracted from control individuals. The probands are also segregated according to their age at the time of recruitment and the proband females are further separated in two groups, those who failed a cognitive test and those who passed the test. Two proband male pools contain preferably 53-74 individuals, separated by age group. One proband female pool contains the 71 females who failed a cognitive test whereas the 7 remaining pools consist of 43-80 proband females who passed the test, separated by age group. Preferably, the ten (10) control pools consist of 8 pools of 61 female samples and 2 pools of 63-64 male samples.

[0089] In the preferred embodiment proband samples of 615 cases (127 males and 488 females) are used to construct the case pools and 615 controls (127 males and 488 females) are used to construct the control pools.

### Step 3: Genotype the Proband and Control Pools

[0090] In the preferred embodiment, assay specific and/or locus-specific and/or allele-specific oligonucleotides for every SNP marker of the present invention (Table 2) are organized onto one or more arrays. The genotype at each SNP locus is revealed by hybridizing short PCR fragments comprising each SNP locus onto these arrays. The arrays permit a high-throughput genome wide association study using DNA samples from individuals of the Quebec founder population. Such assay-specific and/or locus-specific and/or allele-specific oligonucleotides necessary for scoring each SNP of the present invention are preferably organized onto a solid support. Such supports can be arrayed on wafers, glass slides, beads or any other type of solid support.

[0091] In another embodiment, the assay-specific and/or locus-specific and/or allele-specific oligonucleotides are not organized onto a solid support but are still used as a whole, in panels or one by one. The present invention is therefore not linked to any genotyping platform in particular.

[0092] In another embodiment, one or more portions of the SNPs maps (publicly available maps, proprietary maps from Perlegen Sciences, Inc. (Mountain View, Calif., USA), and our own proprietary QLDM map) are used to screen the whole genome, a subset of chromosomes, a chromosome, a subset of genomic regions or a single genomic region.

Step 4: Exclude the Markers that Did not Pass the Quality Control of the Assay

[0093] Preferably, the quality controls consist of, but are not limited to, the following criteria: eliminate SNPs that are non-polymorphic in the Quebec founder population or have ≦10% minor allele frequency (MAF).

### Step 5: Perform the Genetic Analysis on the Results Obtained

[0094] In the preferred embodiment, genetic analysis is performed on all the genotypes from step 3.

[0095] In another embodiment, genetic analysis is performed on a total of 248,535 SNPs.

[0096] In one embodiment, the data analysis compares the relative fluorescence intensities of features corresponding to the reference allele of a given SNP with those corresponding to the alternate allele, to calculate a p-hat value. The latter is proportional to the fluorescence signal from perfect match features for the reference allele divided by the sum of fluorescence signals from perfect match features for the reference plus the alternate alleles. P-hat assumes values close to 1 (typically 0.9) for pure reference samples and close to 0 (typically 0.1) for pure alternate samples, and can be used as a measured estimate of the reference allele frequency of a SNP in a DNA pool. The difference between case and control pools, delta p-hat, is calculated using the weighted average of case and control p-hats. Delta p-hat is a reliable estimate of the allele frequency difference between the cases and controls.

[0097] In yet another embodiment, the data is analyzed according to the p-hat value obtained from the previous embodiment on each pool. Single marker P values are calculated for all markers within the genome wide scan map as described in Example 3 herein, using the p-hat value.

[0098] In another embodiment, the combined P values across multi-marker sliding windows are calculated after the method of Fisher (described in Example 3 herein).

### Step 6: Fine Mapping and Confirmatory Mapping

[0099] In this step, the candidate regions that were identified by step 5 are further mapped and confirmed for the purpose of refinement and validation.

[0100] In the preferred embodiment, the cases and controls are individually genotyped to confirm the candidate regions. The confirmed candidate regions are processed by fine mapping to refine the candidate regions.

[0101] In the preferred embodiment, this fine mapping is performed with a density of genetic markers higher than in the genome wide scan (step 3) using any genotyping platform available in the art. Such fine mapping can also be performed with fewer genetic markers than in the GWS. Such fine mapping can be, but is not limited to, typing the allele via an allele-specific elongation assay that is then ligated to a locus-specific oligonucleotide. Such assays can be performed directly on the genomic DNA at a highly multiplex level and the products can be amplified using universal oligonucleotides. For each candidate region, the density of genetic markers can be, but is not limited to, a set of SNP markers with an average inter-marker distance of 1-4 Kb distributed over about 400 Kb to 1 Mb, roughly centered at the highest point of the GWS association. The preferred samples are those obtained from longevity samples including the ones used for the GWS.

[0102] In the preferred embodiment, the genetic analysis of the results obtained using haplotype information (available after confirmatory mapping of individual samples, see Examples section herein) as well as single-marker association (as performed as in step 5, described herein) are performed as described herein (see Example section). The candidate regions that are validated and confirmed after this analysis proceed to a gene mining step described in Example 5, herein, to characterize their marker and genetic content.

### Step 7: SNP and DNA Polymorphism Discovery

[0103] In the preferred embodiment, all the candidate genes and regions identified in step 6 are sequenced for polymorphism identification.

[0104] In another embodiment, the entire region, including all introns, is sequenced to identify all polymorphisms.

[0105] In yet another embodiment, the candidate genes are prioritized for sequencing, and only functional gene elements (promoters, exons and splice sites) are sequenced.

[0106] In yet another embodiment, previously identified polymorphisms in the candidate regions can also be used. For example, SNPs from dbSNP, Perlegen Sciences, Inc., or others can also be used rather than resequencing the candidate regions to identify polymorphisms.

[0107] The discovery of SNPs and DNA polymorphisms generally comprises a step consisting of determining the major haplotypes in the region to be sequenced. The preferred samples are selected according to which haplotypes contribute to the association signal observed in the region to be sequenced. The purpose is to select a set of samples that covers all the major haplotypes in the given region. Each major haplotype is preferably analyzed in at least a few individuals.

[0108] Any analytical procedure may be used to detect the presence or absence of variant nucleotides at one or more polymorphic positions of the invention. In general, the detection of allelic variation requires a mutation discrimination technique, optionally an amplification reaction and optionally a signal generation system. Any means of mutation detection or discrimination may be used. For instance, DNA sequencing, scanning methods, hybridization, extension based methods, incorporation based methods, restriction enzyme-based methods and ligation-based methods may be used in the methods of the invention.

[0109] Sequencing methods include, but are not limited to, direct sequencing, and sequencing by hybridization. Scanning methods include, but are not limited to, protein truncation test (PTT), single-strand conformation polymorphism analysis (SSCP), denaturing gradient gel electrophoresis (DGGE), temperature gradient gel electrophoresis (TGGE), cleavage, heteroduplex analysis, chemical mismatch cleavage (CMC), and enzymatic mismatch cleavage. Hybridization-based methods of detection include, but are not limited to, solid phase hybridization such as dot blots, multiple allele specific diagnostic assay (MASDA), reverse dot blots, and oligonucleotide arrays (DNA Chips). Solution phase hybridization amplification methods may also be used, such as Taqman. Extension based methods include, but are not limited to, amplification refraction mutation systems (ARMS), amplification refractory mutation systems (ALEX), and competitive oligonucleotide priming systems (COPS). Incorporation based methods include, but are not limited to, mini-sequencing and arrayed primer extension (APEX). Restriction enzyme-based detection systems include, but are not limited to, restriction site generating PCR. Lastly, ligation based detection methods include, but are not limited to, oligonucleotide ligation assays (OLA). Signal generation or detection systems that may be used in the methods of the invention include, but are not limited to, fluorescence methods such as fluorescence resonance energy transfer (FRET), fluorescence quenching, fluorescence polarization as well as other chemiluminescence, electrochemiluminescence, Raman, radioactivity, colometric methods, hybridization protection assays and mass spectrometry methods. Further amplification methods include, but are not limited to self sustained replication (SSR), nucleic acid sequence based amplification (NASBA), ligase chain reaction (LCR), strand displacement amplification (SDA) and branched DNA (B-DNA).

### Step 8: Ultrafine Mapping

[0110] This step further maps the candidate regions and genes confirmed in the previous step to identify and validate the responsible polymorphisms associated with longevity in the human population.

[0111] In a preferred embodiment, the discovered SNPs and polymorphisms of step 7 are ultrafine mapped at a higher density of markers than the fine mapping described herein using the same technology described in step 6.

### Step 9: GeneMap Construction

[0112] The confirmed variations in DNA (including both genic and non-genic regions) are used to build a GeneMap for longevity disorder. The gene content of this GeneMap is described in more detail below. Such GeneMap can be used for other methods of the invention comprising the diagnostic methods described herein, the susceptibility to longevity, the response to a particular drug, the efficacy of a particular drug, the screening methods described herein and the treatment methods described herein.

[0113] As is evident to one of ordinary skill in the art, all of the above steps or the steps of FIG. 1 do not need to be performed, or performed in a given order to practice or use the SNPs, genomic regions, genes, proteins, etc. in the methods of the invention.

Genes from the GeneMap

[0114] In the preferred embodiment the GeneMap consists of genes and targets, in a variety of combinations, identified from the candidate regions listed in Table 1. In the preferred embodiment, all genes from Tables 4, 5 and 6 are present in the GeneMap.

### Nucleic Acid Sequences

[0115] The nucleic acid sequences of the present invention may be derived from a variety of sources including DNA, cDNA, synthetic DNA, synthetic RNA, derivatives, mimetics or combinations thereof. Such sequences may comprise genomic DNA, which may or may not include naturally occurring introns, genic regions, nongenic regions, and regulatory regions. Moreover, such genomic DNA may be obtained in association with promoter regions or poly (A) sequences. The sequences, genomic DNA, or cDNA may be obtained in any of several ways. Genomic DNA can be extracted and purified from suitable cells by means well known in the art. Alternatively, mRNA can be isolated from a cell and used to produce cDNA by reverse transcription or other means. The nucleic acids described herein are used in certain embodiments of the methods of the present invention for production of RNA, proteins or polypeptides, through incorporation into cells, tissues, or organisms. In one embodiment, DNA containing all or part of the coding sequence for the genes described in Tables 4, 5 and 6, or the SNP markers described in Tables 2, 3 and 7, is incorporated into a vector for expression of the encoded polypeptide in suitable host cells. The invention also comprises the use of the nucleotide sequence of the nucleic acids of this invention to identify DNA probes for the genes described in Tables 4, 5 and 6 or the SNP markers described in Table 2, 3 or 7, PCR primers to amplify the genes described in Tables 4, 5 and 6 or the SNP markers described in Tables 2, 3 and 7, nucleotide polymorphisms in the genes described in Tables 4, 5 and 6, and regulatory elements of the genes described in Tables 4, 5 and 6. The nucleic acids of the present invention find use as primers and templates for the recombinant production of longevity-associated peptides or polypeptides, for chromosome and gene mapping, to provide antisense sequences, for tissue distribution studies, to locate and obtain full length genes, to identify and obtain homologous sequences (wild-type and mutants), and in diagnostic applications.

### Antisense Oligonucleotides

[0116] In a particular embodiment of the invention, an antisense nucleic acid or oligonucleotide is wholly or partially complementary to, and can hybridize with, a target nucleic acid (either DNA or RNA) having the sequence of SEQ ID NO:1, NO:3 or any SEQ ID from Tables 2-7. For example, an antisense nucleic acid or oligonucleotide comprising 16 nucleotides can be sufficient to inhibit expression of at least one gene from Tables 4, 5 and 6. Alternatively, an antisense nucleic acid or oligonucleotide can be complementary to 5′ or 3′ untranslated regions, or can overlap the translation initiation codon (5′ untranslated and translated regions) of at least one gene from Tables 4, 5 and 6, or its functional equivalent. In another embodiment, the antisense nucleic acid is wholly or partially complementary to, and can hybridize with, a target nucleic acid that encodes a polypeptide from a gene described in Tables 4, 5 and 6.

[0117] In addition, oligonucleotides can be constructed which will bind to duplex nucleic acid (i.e., DNA:DNA or DNA:RNA), to form a stable triple helix containing or triplex nucleic acid. Such triplex oligonucleotides can inhibit transcription and/or expression of a gene from Tables 4, 5 and 6, or its functional equivalent (M. D. Frank-Kamenetskii et al., 1995). Triplex oligonucleotides are constructed using the base-pairing rules of triple helix formation and the nucleotide sequence of the genes described in Tables 4, 5 and 6.

[0118] The present invention encompasses methods of using oligonucleotides in antisense inhibition of the function of the genes from Tables 4, 5 and 6. In the context of this invention, the term “oligonucleotide” refers to naturally-occurring species or synthetic species formed from naturally-occurring subunits or their close homologs. The term may also refer to moieties that function similarly to oligonucleotides, but have non-naturally-occurring portions. Thus, oligonucleotides may have altered sugar moieties or inter-sugar linkages. Exemplary among these are phosphorothioate and other sulfur containing species which are known in the art. In preferred embodiments, at least one of the phosphodiester bonds of the oligonucleotide has been substituted with a structure that functions to enhance the ability of the compositions to penetrate into the region of cells where the RNA whose activity is to be modulated is located. It is preferred that such substitutions comprise phosphorothioate bonds, methyl phosphonate bonds, or short chain alkyl or cycloalkyl structures. In accordance with other preferred embodiments, the phosphodiester bonds are substituted with structures which are, at once, substantially non-ionic and non-chiral, or with structures which are chiral and enantiomerically specific. Persons of ordinary skill in the art will be able to select other linkages for use in the practice of the invention. Oligonucleotides may also include species that include at least some modified base forms. Thus, purines and pyrimidines other than those normally found in nature may be so employed. Similarly, modifications on the furanosyl portions of the nucleotide subunits may also be effected, as long as the essential tenets of this invention are adhered to. Examples of such modifications are 2′-O-alkyl- and 2′-halogen-substituted nucleotides. Some non-limiting examples of modifications at the 2′ position of sugar moieties which are useful in the present invention include OH, SH, SCH3, F, OCH3, OCN, O(CH2), NH2 and O(CH2)nCH3, where n is from 1 to about 10. Such oligonucleotides are functionally interchangeable with natural oligonucleotides or synthesized oligonucleotides, which have one or more differences from the natural structure. All such analogs are comprehended by this invention so long as they function effectively to hybridize with at least one gene from Tables 4, 5 and 6 DNA or RNA to inhibit the function thereof.

[0119] The oligonucleotides in accordance with this invention preferably comprise from about 3 to about 50 subunits. It is more preferred that such oligonucleotides and analogs comprise from about 8 to about 25 subunits and still more preferred to have from about 12 to about 20 subunits. As defined herein, a “subunit” is a base and sugar combination suitably bound to adjacent subunits through phosphodiester or other bonds. Antisense nucleic acids or oligonucleotides can be produced by standard techniques (see, e.g., Shewmaker et al., U.S. Pat. No. 6,107,065). The oligonucleotides used in accordance with this invention may be conveniently and routinely made through the well-known technique of solid phase synthesis. Any other means for such synthesis may also be employed; however, the actual synthesis of the oligonucleotides is well within the abilities of the practitioner. It is also well known to prepare other oligonucleotide such as phosphorothioates and alkylated derivatives.

[0120] The oligonucleotides of this invention are designed to be hybridizable with RNA (e.g., mRNA) or DNA from genes described in Tables 4, 5 and 6. For example, an oligonucleotide (e.g., DNA oligonucleotide) that hybridizes to mRNA from a gene described in Tables 4, 5 and 6 can be used to target the mRNA for RnaseH digestion. Alternatively, an oligonucleotide that can hybridize to the translation initiation site of the mRNA of a gene described in Tables 4, 5 and 6 can be used to prevent translation of the mRNA. In another approach, oligonucleotides that bind to the double-stranded DNA of a gene from Tables 4, 5 and 6 can be administered. Such oligonucleotides can form a triplex construct and inhibit the transcription of the DNA encoding polypeptides of the genes described in Tables 4, 5 and 6. Triple helix pairing prevents the double helix from opening sufficiently to allow the binding of polymerases, transcription factors, or regulatory molecules. Recent therapeutic advances using triplex DNA have been described (see, e.g., J. E. Gee et al., 1994, Molecular and Immunologic Approaches, Futura Publishing Co., Mt. Kisco, N.Y.).

[0121] As non-limiting examples, antisense oligonucleotides may be targeted to hybridize to the following regions: mRNA cap region; translation initiation site; translational termination site; transcription initiation site; transcription termination site; polyadenylation signal; 3′ untranslated region; 5′ untranslated region; 5′coding region; mid coding region; and 3′ coding region. Preferably, the complementary oligonucleotide is designed to hybridize to the most unique 5′ sequence of a gene described in Tables 4, 5 and 6, including any of about 15-35 nucleotides spanning the 5′ coding sequence. In accordance with the present invention, the antisense oligonucleotide can be synthesized, formulated as a pharmaceutical composition, and administered to a subject. The synthesis and utilization of antisense and triplex oligonucleotides have been previously described (e.g., Simon et al., 1999; Barre et al., 2000; Elez et al., 2000; Sauter et al., 2000).

[0122] Alternatively, expression vectors derived from retroviruses, adenovirus, herpes or vaccinia viruses or from various bacterial plasmids may be used for delivery of nucleotide sequences to the targeted organ, tissue or cell population. Methods which are well known to those skilled in the art can be used to construct recombinant vectors which will express nucleic acid sequence that is complementary to the nucleic acid sequence encoding a polypeptide from the genes described in Tables 4, 5 and 6. These techniques are described both in Sambrook et al., 1989 and in Ausubel et al., 1992. For example, expression of at least one gene from Tables 4, 5 and 6 can be inhibited by transforming a cell or tissue with an expression vector that expresses high levels of untranslatable sense or antisense sequences. Even in the absence of integration into the DNA, such vectors may continue to transcribe RNA molecules until they are disabled by endogenous nucleases. Transient expression may last for a month or more with a nonreplicating vector, and even longer if appropriate replication elements are included in the vector system. Various assays may be used to test the ability of gene-specific antisense oligonucleotides to inhibit the expression of at least one gene from Tables 4, 5 and 6. For example, mRNA levels of the genes described in Tables 4, 5 and 6 can be assessed by Northern blot analysis (Sambrook et al., 1989; Ausubel et al., 1992; J. C. Alwine et al. 1977; I. M. Bird, 1998), quantitative or semi-quantitative RT-PCR analysis (see, e.g., W. M. Freeman et al., 1999; Ren et al., 1998; J. M. Cale et al., 1998), or in situ hybridization (reviewed by A. K. Raap, 1998). Alternatively, antisense oligonucleotides may be assessed by measuring levels of the polypeptide from the genes described in Tables 4, 5 and 6, e.g., by western blot analysis, indirect immunofluorescence and immunoprecipitation techniques (see, e.g., J. M. Walker, 1998, Protein Protocols on CD-ROM, Humana Press, Totowa, N.J.). Any other means for such detection may also be employed, and is well within the abilities of the practitioner.

### Mapping Technologies

[0123] The present invention includes various methods which employ mapping technologies to map SNPs and polymorphisms. For purpose of clarity, this section comprises, but is not limited to, the description of mapping technologies that can be utilized to achieve the embodiments described herein. Mapping technologies may be based on amplification methods, restriction enzyme cleavage methods, hybridization methods, sequencing methods, and cleavage methods using agents.

[0124] Amplification methods include: self sustained sequence replication (Guatelli et al., 1990), transcriptional amplification system (Kwoh et al., 1989), Q-Beta Replicase (Lizardi et al., 1988), isothermal amplification (e.g. Dean et al., 2002; and Hafner et al., 2001), or any other nucleic acid amplification method, followed by the detection of the amplified molecules using techniques well known to those of ordinary skill in the art. These detection schemes are especially useful for the detection of nucleic acid molecules if such molecules are present in very low number.

[0125] Restriction enzyme cleavage methods include: isolating sample and control DNA, amplification (optional), digestion with one or more restriction endonucleases, determination of fragment length sizes by gel electrophoresis and comparing samples and controls. Differences in fragment length sizes between sample and control DNA indicates mutations in the sample DNA. Moreover, sequence specific ribozymes (see, e.g., U.S. Pat. No. 5,498,531) or DNAzyme (e.g. U.S. Pat. No. 5,807,718) can be used to score for the presence of specific mutations by development or loss of a ribozyme or DNAzyme cleavage site.

[0126] SNPs and SNP maps of the invention can be identified or generated by hybridizing sample nucleic acids, e.g., DNA or RNA, to high density arrays or bead arrays containing oligonucleotide probes corresponding to the SNPS of Tables 2, 3 and 7 (see the Affymetrix arrays and Illumina bead sets at www.affymetrix.com and www.illumina.com and see Cronin et al., 1996; or Kozal et al., 1996).

[0127] A variety of sequencing reactions known in the art can be used to directly sequence nucleic acids for the presence or the absence of one or more SNPs of Tables 2, 3 and 7. Examples of sequencing reactions include those based on techniques developed by Maxam and Gilbert (1977) or Sanger (1977). It is also contemplated that any of a variety of automated sequencing procedures can be utilized, including sequencing by mass spectrometry (see, e.g. PCT International Publication No. WO 94/16101; Cohen et al., 1996; and Griffin et al., 1993), real-time pyrophosphate sequencing method (Ronaghi et al., 1998; and Permutt et al., 2001) and sequencing by hybridization (see e.g. Drmanac et al., 2002).

[0128] Other methods of detecting SNPs include methods in which protection from cleavage agents is used to detect mismatched bases in RNA/RNA, DNA/DNA or RNA/DNA heteroduplexes (Myers et al., 1985). In general, the technique of “mismatch cleavage” starts by providing heteroduplexes formed by hybridizing (labeled) RNA or DNA containing a wild-type sequence with potentially mutant RNA or DNA obtained from a sample. The double-stranded duplexes are treated with an agent who cleaves single-stranded regions of the duplex such as which will exist due to basepair mismatches between the control and sample strands. For instance, RNA/DNA duplexes can be treated with RNase and DNA/DNA hybrids treated with S1 nuclease to enzymatically digest the mismatched regions. In other embodiments, either DNA/DNA or RNA/DNA duplexes can be treated with hydroxylamine or osmium tetroxide and with piperidine in order to digest mismatched regions. After digestion of the mismatched regions, the resulting material is then separated by size on denaturing polyacrylamide gels to determine the site of a mutation or SNP. (see, for example, Cotton et al., 1988; and Saleeba et al., 1992). In a preferred embodiment, the control DNA or RNA can be labeled for detection.

[0129] In still another embodiment, the mismatch cleavage reaction employs one or more proteins that recognize mismatched base pairs in double-stranded DNA (so called “DNA mismatch repair” enzymes) in defined systems for detecting and mapping SNPs. For example, the mutY enzyme of E. coli cleaves A at G/A mismatches (Hsu et al., 1994). Other examples include, but are not limited to, the MutHLS enzyme complex of E. coli (Smith and Modrich Proc. 1996) and Cel 1 from the celery (Kulinski et al., 2000) both cleave the DNA at various mismatches. According to an exemplary embodiment, a probe based on a polymorphic site corresponding to a SNP of Tables 2, 3 and 7 is hybridized to a cDNA or other DNA product from a test cell or cells. The duplex is treated with a DNA mismatch repair enzyme, and the cleavage products, if any, can be detected from electrophoresis protocols or the like. See, for example, U.S. Pat. No. 5,459,039. Alternatively, the screen can be performed in vivo following the insertion of the heteroduplexes in an appropriate vector. The whole procedure is known to those ordinary skilled in the art and is referred to as mismatch repair detection (see e.g. Fakhrai-Rad et al., 2004).

[0130] In other embodiments, alterations in electrophoretic mobility can be used to identify SNPs in a sample. For example, single strand conformation polymorphism (SSCP) can be used to detect differences in electrophoretic mobility between mutant and wild type nucleic acids (Orita et al., 1989; Cotton et al., 1993; and Hayashi 1992). Single-stranded DNA fragments of case and control nucleic acids will be denatured and allowed to renature. The secondary structure of single-stranded nucleic acids varies according to sequence. The resulting alteration in electrophoretic mobility enables the detection of even a single base change. The DNA fragments may be labeled or detected with labeled probes. The sensitivity of the assay may be enhanced by using RNA (rather than DNA), in which the secondary structure is more sensitive to a change in sequence. In a preferred embodiment, the method utilizes heteroduplex analysis to separate double stranded heteroduplex molecules on the basis of changes in electrophoretic mobility (Kee et al., 1991).

[0131] In yet another embodiment, the movement of mutant or wild-type fragments in a polyacrylamide gel containing a gradient of denaturant is assayed using denaturing gradient gel electrophoresis (DGGE) (Myers et al., 1985). When DGGE is used as the method of analysis, DNA will be modified to insure that it does not completely denature, for example by adding a GC clamp of approximately 40 bp of high-melting GC-rich DNA by PCR. In a further embodiment, a temperature gradient is used in place of a denaturing gradient to identify differences in the mobility of control and sample DNA (Rosenbaum et al., 1987). In another embodiment, the mutant fragment is detected using denaturing HPLC (see e.g. Hoogendoorn et al., 2000).

[0132] Examples of other techniques for detecting SNPs include, but are not limited to, selective oligonucleotide hybridization, selective amplification, selective primer extension, selective ligation, single-base extension, selective termination of extension or invasive cleavage assay. For example, oligonucleotide primers may be prepared in which the SNP is placed centrally and then hybridized to target DNA under conditions which permit hybridization only if a perfect match is found (Saiki et al., 1986; Saiki et al., 1989). Such oligonucleotides are hybridized to PCR amplified target DNA or a number of different mutations when the oligonucleotides are attached to the hybridizing membrane and hybridized with labeled target DNA. Alternatively, the amplification, the allele-specific hybridization and the detection can be done in a single assay following the principle of the 5′ nuclease assay (e.g. see Livak et al., 1995). For example, the associated allele, a particular allele of a polymorphic locus, or the like is amplified by PCR in the presence of both allele-specific oligonucleotides, each specific for one or the other allele. Each probe has a different fluorescent dye at the 5′ end and a quencher at the 3′ end. During PCR, if one or the other or both allele-specific oligonucleotides are hybridized to the template, the Taq polymerase via its 5′ exonuclease activity will release the corresponding dyes. The latter will thus reveal the genotype of the amplified product.

[0133] Hybridization assays may also be carried out with a temperature gradient following the principle of dynamic allele-specific hybridization or like e.g. Jobs et al., (2003); and Bourgeois and Labuda, (2004). For example, the hybridization is done using one of the two allele-specific oligonucleotides labeled with a fluorescent dye, an intercalating quencher under a gradually increasing temperature. At low temperature, the probe is hybridized to both the mismatched and full-matched template. The probe melts at a lower temperature when hybridized to the template with a mismatch. The release of the probe is captured by an emission of the fluorescent dye, away from the quencher. The probe melts at a higher temperature when hybridized to the template with no mismatch. The temperature-dependent fluorescence signals therefore indicate the absence or presence of an associated allele, a particular allele of a polymorphic locus, or the like (e.g. Jobs et al., 2003). Alternatively, the hybridization is done under a gradually decreasing temperature. In this case, both allele-specific oligonucleotides are hybridized to the template competitively. At high temperature none of the two probes are hybridized. Once the optimal temperature of the full-matched probe is reached, it hybridizes and leaves no target for the mismatched probe (e.g. Bourgeois and Labuda, 2004). In the latter case, if the allele-specific probes are differently labeled, then they are hybridized to a single PCR-amplified target. If the probes are labeled with the same dye, then the probe cocktail is hybridized to twice to identical templates with only one labeled probes, different in the two cocktails, in the presence of the unlabeled competitive probe.

[0134] Alternatively, allele specific amplification technology that depends on selective PCR amplification may be used in conjunction with the present invention. Oligonucleotides used as primers for specific amplification may carry the associated allele, a particular allele of a polymorphic locus, or the like, also referred to as “mutation” of interest in the center of the molecule, so that amplification depends on differential hybridization (Gibbs et al., 1989) or at the extreme 3′ end of one primer where, under appropriate conditions, mismatch can prevent, or reduce polymerase extension (Prossner, 1993). In addition it may be desirable to introduce a novel restriction site in the region of the mutation to create cleavage-based detection (Gasparini et al., 1992). It is anticipated that in certain embodiments, amplification may also be performed using Taq ligase for amplification (Barany, 1991). In such cases, ligation will occur only if there is a perfect match at the 3′ end of the 5′ sequence making it possible to detect the presence of a known associated allele, a particular allele of a polymorphic locus, or the like at a specific site by looking for the presence or absence of amplification. The products of such an oligonucleotide ligation assay can also be detected by means of gel electrophoresis. Furthermore, the oligonucleotides may contain universal tags used in PCR amplification and zip code tags that are different for each allele. The zip code tags are used to isolate a specific, labeled oligonucleotide that may contain a mobility modifier (e.g. Grossman et al., 1994).

[0135] In yet another alternative, allele-specific elongation followed by ligation will form a template for PCR amplification. In such cases, elongation will occur only if there is a perfect match at the 3′ end of the allele-specific oligonucleotide using a DNA polymerase. This reaction is performed directly on the genomic DNA and the extension/ligation products are amplified by PCR. To this end, the oligonucleotides contain universal tags allowing amplification at a high multiplex level and a zip code for SNP identification. The PCR tags are designed in such a way that the two alleles of a SNP are amplified by different forward primers, each having a different dye. The zip code tags are the same for both alleles of a given SNPs and they are used for hybridization of the PCR-amplified products to oligonucleotides bound to a solid support, chip, bead array or like. For an example of the procedure, see Fan et al. (Cold Spring Harbor Symposia on Quantitative Biology, Vol. LXVIII, pp. 69-78 2003).

[0136] Another alternative includes the single-base extension/ligation assay using a molecular inversion probe, consisting of a single, long oligonucleotide (see e.g. Hardenbol et al., 2003). In such an embodiment, the oligonucleotide hybridizes on both side of the SNP locus directly on the genomic DNA, leaving a one-base gap at the SNP locus. The gap-filling, one-base extension/ligation is performed in four tubes, each having a different dNTP. Following this reaction, the oligonucleotide is circularized whereas unreactive, linear oligonucleotides are degraded using an exonuclease such as exonuclease I of E. coli. The circular oligonucleotides are then linearized and the products are amplified and labeled using universal tags on the oligonucleotides. The original oligonucleotide also contains a SNP-specific zip code allowing hybridization to oligonucleotides bound to a solid support, chip, and bead array or like. This reaction can be performed at a high multiplexed level.

[0137] In another alternative, the associated allele, a particular allele of a polymorphic locus, or the like is scored by single-base extension (see e.g. U.S. Pat. No. 5,888,819). The template is first amplified by PCR. The extension oligonucleotide is then hybridized next to the SNP locus and the extension reaction is performed using a thermostable polymerase such as ThermoSequenase (GE Healthcare) in the presence of labeled ddNTPs. This reaction can therefore be cycled several times. The identity of the labeled ddNTP incorporated will reveal the genotype at the SNP locus. The labeled products can be detected by means of gel electrophoresis, fluorescence polarization (e.g. Chen et al., 1999) or by hybridization to oligonucleotides bound to a solid support, chip, and bead array or like. In the latter case, the extension oligonucleotide will contain a SNP-specific zip code tag.

[0138] In yet another alternative, a SNP is scored by selective termination of extension. The template is first amplified by PCR and the extension oligonucleotide hybridizes in vicinity to the SNP locus, close to but not necessarily adjacent to it. The extension reaction is carried out using a thermostable polymerase such as Thermo Sequenase (GE Healthcare) in the presence of a mix of dNTPs and at least one ddNTP. The latter has to terminate the extension at one of the allele of the interrogated SNP, but not both such that the two alleles will generate extension products of different sizes. The extension product can then be detected by means of gel electrophoresis, in which case the extension products need to be labeled, or by mass spectrometry (see e.g. Storm et al., 2003).

[0139] In another alternative, SNPs are detected using an invasive cleavage assay (see U.S. Pat. No. 6,090,543). There are five oligonucleotides per SNP to interrogate but these are used in a two step-reaction. During the primary reaction, three of the designed oligonucleotides are first hybridized directly to the genomic DNA. One of them is locus-specific and hybridizes up to the SNP locus (the pairing of the 3′ base at the SNP locus is not necessary). There are two allele-specific oligonucleotides that hybridize in tandem to the locus-specific probe but also contain a 5′ flap that is specific for each allele of the SNP. Depending upon hybridization of the allele-specific oligonucleotides at the base of the SNP locus, this creates a structure that is recognized by a cleavase enzyme (U.S. Pat. No. 6,090,606) and the allele-specific flap is released. During the secondary reaction, the flap fragments hybridize to a specific cassette to recreate the same structure as above except that the cleavage will release a small DNA fragment labeled with a fluorescent dye that can be detected using regular fluorescence detector. In the cassette, the emission of the dye is inhibited by a quencher.

Methods to Identify Agents that Modulate the Expression of a Nucleic Acid Encoding a Gene Involved in Longevity.

[0140] The present invention provides methods for identifying agents that modulate the expression of a nucleic acid encoding a gene from Tables 4, 5 and 6. Such methods may utilize any available means of monitoring for changes in the expression level of the nucleic acids of the invention. As used herein, an agent is said to modulate the expression of a nucleic acid of the invention if it is capable of up- or down-regulating expression of the nucleic acid in a cell. Such cells can be obtained from any parts of the body such as the scalp, blood, dermis, epidermis and other skin cells, cutaneous surfaces, intertrigious areas, genitalia, vessels and endothelium. Some non-limiting examples of cells that can be used are red blood cells, muscle cells, heart cells, nerve cells, insulin-producing cells, pancreatic cells, brain cells, germ cells, keratinocytes, monocytes, neutrophils, langerhans cells, CD4+ and CD8+ T cells, B and T lymphocytes, leukocytes, hormonal cells, bone marrow cells, skin cells, buccal cells, spinal cord cells, bone cells, adipose cells, cartilage cells, dendritic cells, intestinal cells, hepatic cells, mucous cells, olfactory cells, retinal cells, somatic cells and arterial cells.

[0141] In one assay format, the expression of a nucleic acid encoding a gene of the invention (see Tables 4, 5 and 6) in a cell or tissue sample is monitored directly by hybridization to the nucleic acids of the invention. Cell lines or tissues are exposed to the agent to be tested under appropriate conditions and time and total RNA or mRNA is isolated by standard procedures such as those disclosed in Sambrook et al., (1989) Molecular Cloning: A Laboratory Manual, Cold Spring Harbor Laboratory Press).

[0142] Probes to detect differences in RNA expression levels between cells exposed to the agent and control cells may be prepared as described above. Hybridization conditions are modified using known methods, such as those described by Sambrook et al., and Ausubel et al., as required for each probe. Hybridization of total cellular RNA or RNA enriched for polyA RNA can be accomplished in any available format. For instance, total cellular RNA or RNA enriched for polyA RNA can be affixed to a solid support and the solid support exposed to at least one probe comprising at least one, or part of one of the sequences of the invention under conditions in which the probe will specifically hybridize. Alternatively, nucleic acid fragments comprising at least one, or part of one of the sequences of the invention can be affixed to a solid support, such as a silicon chip or a porous glass wafer. The chip or wafer can then be exposed to total cellular RNA or polyA RNA from a sample under conditions in which the affixed sequences will specifically hybridize to the RNA. By examining for the ability of a given probe to specifically hybridize to an RNA sample from an untreated cell population and from a cell population exposed to the agent, agents which up or down regulate expression are identified.

Methods to Identify Agents that Modulate the Activity of a Protein Encoded by a Gene Involved in Longevity.

[0143] The present invention provides methods for identifying agents that modulate at least one activity of the proteins described in Tables 4, 5 and 6. Such methods may utilize any means of monitoring or detecting the desired activity. As used herein, an agent is said to modulate the expression of a protein of the invention if it is capable of up- or down-regulating expression of the protein in a cell. Such cells can be obtained from any parts of the body such as the scalp, blood, dermis, epidermis and other skin cells, cutaneous surfaces, intertrigious areas, genitalia, vessels and endothelium. Some non-limiting examples of cells that can be used are red blood cells, muscle cells, heart cells, nerve cells, insulin-producing cells, pancreatic cells, brain cells, germ cells, keratinocytes, monocytes, neutrophils, langerhans cells, CD4+ and CD8+ T cells, B and T lymphocytes, leukocytes, hormonal cells, bone marrow cells, skin cells, buccal cells, spinal cord cells, bone cells, adipose cells, cartilage cells, dendritic cells, intestinal cells, hepatic cells, mucous cells, olfactory cells, retinal cells, somatic cells and arterial cells.

[0144] In one format, the specific activity of a protein of the invention, normalized to a standard unit, may be assayed in a cell population that has been exposed to the agent to be tested and compared to an unexposed control cell population may be assayed. Cell lines or populations are exposed to the agent to be tested under appropriate conditions and time. Cellular lysates may be prepared from the exposed cell line or population and a control, unexposed cell line or population. The cellular lysates are then analyzed with the probe.

[0145] Antibody probes can be prepared by immunizing suitable mammalian hosts utilizing appropriate immunization protocols using the proteins of the invention or antigen-containing fragments thereof. To enhance immunogenicity, these proteins or fragments can be conjugated to suitable carriers. Methods for preparing immunogenic conjugates with carriers such as BSA, KLH or other carrier proteins are well known in the art. In some circumstances, direct conjugation using, for example, carbodiimide reagents may be effective; in other instances linking reagents such as those supplied by Pierce Chemical Co. (Rockford, Ill.) may be desirable to provide accessibility to the hapten. The hapten peptides can be extended at either the amino or carboxy terminus with a cysteine residue or interspersed with cysteine residues, for example, to facilitate linking to a carrier. Administration of the immunogens is conducted generally by injection over a suitable time period and with use of suitable adjuvants, as is generally understood in the art. During the immunization schedule, titers of antibodies are taken to determine adequacy of antibody formation. While the polyclonal antisera produced in this way may be satisfactory for some applications, for pharmaceutical compositions, use of monoclonal preparations is preferred. Immortalized cell lines which secrete the desired monoclonal antibodies may be prepared using standard methods, see e.g., Kohler & Milstein (1992) or modifications which affect immortalization of lymphocytes or spleen cells, as is generally known. The immortalized cell lines secreting the desired antibodies can be screened by immunoassay in which the antigen is the peptide hapten, polypeptide or protein. When the appropriate immortalized cell culture secreting the desired antibody is identified, the cells can be cultured either in vitro or by production in ascites fluid. The desired monoclonal antibodies may be recovered from the culture supernatant or from the ascites supernatant. Fragments of the monoclonal antibodies or the polyclonal antisera which contain the immunologically significant portion(s) can be used as antagonists, as well as the intact antibodies. Use of immunologically reactive fragments, such as Fab or Fab′ fragments, is often preferable, especially in a therapeutic context, as these fragments are generally less immunogenic than the whole immunoglobulin. The antibodies or fragments may also be produced, using current technology, by recombinant means. Antibody regions that bind specifically to the desired regions of the protein can also be produced in the context of chimeras derived from multiple species. Antibody regions that bind specifically to the desired regions of the protein can also be produced in the context of chimeras from multiple species, for instance, humanized antibodies. The antibody can therefore be a humanized antibody or a human antibody, as described in U.S. Pat. No. 5,585,089 or Riechmann et al. (1988).

[0146] Agents that are assayed in the above method can be randomly selected or rationally selected or designed. As used herein, an agent is said to be randomly selected when the agent is chosen randomly without considering the specific sequences involved in the association of the a protein of the invention alone or with its associated substrates, binding partners, etc. An example of randomly selected agents is the use of a chemical library or a peptide combinatorial library, or a growth broth of an organism. As used herein, an agent is said to be rationally selected or designed when the agent is chosen on a non-random basis which takes into account the sequence of the target site or its conformation in connection with the agent's action. Agents can be rationally selected or rationally designed by utilizing the peptide sequences that make up these sites. For example, a rationally selected peptide agent can be a peptide whose amino acid sequence is identical to or a derivative of any functional consensus site. The agents of the present invention can be, as examples, oligonucleotides, antisense polynucleotides, interfering RNA, peptides, peptide mimetics, antibodies, antibody fragments, small molecules, vitamin derivatives, as well as carbohydrates. Peptide agents of the invention can be prepared using standard solid phase (or solution phase) peptide synthesis methods, as is known in the art. In addition, the DNA encoding these peptides may be synthesized using commercially available oligonucleotide synthesis instrumentation and produced recombinantly using standard recombinant production systems. The production using solid phase peptide synthesis is necessitated if non-gene-encoded amino acids are to be included.

[0147] Another class of agents of the present invention includes antibodies or fragments thereof that bind to a protein encoded by a gene in Tables 4, 5 and 6. Antibody agents can be obtained by immunization of suitable mammalian subjects with peptides, containing as antigenic regions, those portions of the protein intended to be targeted by the antibodies (see section above of antibodies as probes for standard antibody preparation methodologies).

[0148] In yet another class of agents, the present invention includes peptide mimetics that mimic the three-dimensional structure of the protein encoded by a gene from Tables 4, 5 and 6. Such peptide mimetics may have significant advantages over naturally occurring peptides, including, for example: more economical production, greater chemical stability, enhanced pharmacological properties (half-life, absorption, potency, efficacy, etc.), altered specificity (e.g., a broad-spectrum of biological activities), reduced antigenicity and others. In one form, mimetics are peptide-containing molecules that mimic elements of protein secondary structure. The underlying rationale behind the use of peptide mimetics is that the peptide backbone of proteins exists chiefly to orient amino acid side chains in such a way as to facilitate molecular interactions, such as those of antibody and antigen. A peptide mimetic is expected to permit molecular interactions similar to the natural molecule. In another form, peptide analogs are commonly used in the pharmaceutical industry as non-peptide drugs with properties analogous to those of the template peptide. These types of non-peptide compounds are also referred to as peptide mimetics or peptidomimetics (Fauchere, 1986; Veber & Freidinger, 1985; Evans et al., 1987) which are usually developed with the aid of computerized molecular modeling. Peptide mimetics that are structurally similar to therapeutically useful peptides may be used to produce an equivalent therapeutic or prophylactic effect. Generally, peptide mimetics are structurally similar to a paradigm polypeptide (i.e., a polypeptide that has a biochemical property or pharmacological activity), but have one or more peptide linkages optionally replaced by a linkage using methods known in the art. Labeling of peptide mimetics usually involves covalent attachment of one or more labels, directly or through a spacer (e.g., an amide group), to non-interfering position(s) on the peptide mimetic that are predicted by quantitative structure-activity data and molecular modeling. Such non-interfering positions generally are positions that do not form direct contacts with the macromolecule(s) to which the peptide mimetic binds to produce the therapeutic effect. Derivitization (e.g., labeling) of peptide mimetics should not substantially interfere with the desired biological or pharmacological activity of the peptide mimetic. The use of peptide mimetics can be enhanced through the use of combinatorial chemistry to create drug libraries. The design of peptide mimetics can be aided by identifying amino acid mutations that increase or decrease binding of the protein to its binding partners. Approaches that can be used include the yeast two hybrid method (see Chien et al., 1991) and the phage display method. The two hybrid method detects protein-protein interactions in yeast (Fields et al., 1989). The phage display method detects the interaction between an immobilized protein and a protein that is expressed on the surface of phages such as lambda and M13 (Amberg et al., 1993; Hogrefe et al., 1993). These methods allow positive and negative selection for protein-protein interactions and the identification of the sequences that determine these interactions.

### Method to Diagnose Longevity Trait and Age-Related Disease

[0149] The present invention also relates to methods for diagnosing longevity trait or a related disorder, preferably age-related diseases, a disposition to such trait, predisposition to such a trait and/or disorder progression. In some methods, the steps comprise contacting a target sample with (a) nucleic molecule(s) or fragments thereof and comparing the concentration of individual mRNA(s) with the concentration of the corresponding mRNA(s) from at least one healthy donor. An aberrant (increased or decreased) mRNA level of at least one gene from Tables 4, 5 and 6, at least 5 or 10 genes from Tables 4, 5 and 6, at least 20 genes from Tables 4, 5 and 6, at least 30 genes from Tables 4, 5 and 6 determined in the sample in comparison to the control sample is an indication of longevity or a related disorder or a disposition to such kinds of disorders. For diagnosis, samples are from any parts of the body such as the scalp, blood, dermis, epidermis and other skin cells, cutaneous surfaces, intertrigious areas, genitalia, vessels and endothelium. Some non-limiting examples of cells that can be used are red blood cells, muscle cells, heart cells, nerve cells, insulin-producing cells, pancreatic cells, brain cells, germ cells, keratinocytes, monocytes, neutrophils, langerhans cells, CD4+ and CD8+ T cells, B and T lymphocytes, leukocytes, hormonal cells, bone marrow cells, skin cells, buccal cells, spinal cord cells, bone cells, adipose cells, cartilage cells, dendritic cells, intestinal cells, hepatic cells, mucous cells, olfactory cells, retinal cells, somatic cells and arterial cells.

[0150] For analysis of gene expression, total RNA is obtained from cells according to standard procedures and, preferably, reverse-transcribed. Preferably, a DNAse treatment (in order to get rid of contaminating genomic DNA) is performed. Some non-limiting examples of cells that can be used are: red blood cells, muscle cells, heart cells, nerve cells, insulin-producing cells, pancreatic cells, brain cells, germ cells, keratinocytes, monocytes, neutrophils, langerhans cells, CD4+ and CD8+ T cells, B and T lymphocytes, leukocytes, hormonal cells, bone marrow cells, skin cells, buccal cells, spinal cord cells, bone cells, adipose cells, cartilage cells, dendritic cells, intestinal cells, hepatic cells, mucous cells, olfactory cells, retinal cells, somatic cells and arterial cells.

[0151] The nucleic acid molecule or fragment is typically a nucleic acid probe for hybridization or a primer for PCR. The person skilled in the art is in a position to design suitable nucleic acids probes based on the information provided in the Tables of the present invention. The target cellular component, i.e. mRNA, e.g., in skin, may be detected directly in situ, e.g. by in situ hybridization or it may be isolated from other cell components by common methods known to those skilled in the art before contacting with a probe. Detection methods include Northern blot analysis, RNase protection, in situ methods, e.g. in situ hybridization, in vitro amplification methods (PCR, LCR, QRNA replicase or RNA-transcription/amplification (TAS, 3SR), reverse dot blot disclosed in EP-B10237362) and other detection assays that are known to those skilled in the art. Products obtained by in vitro amplification can be detected according to established methods, e.g. by separating the products on agarose or polyacrylamide gels and by subsequent staining with ethidium bromide. Alternatively, the amplified products can be detected by using labeled primers for amplification or labeled dNTPs. Preferably, detection is based on a microarray.

[0152] The probes (or primers) (or, alternatively, the reverse-transcribed sample mRNAs) can be detectably labeled, for example, with a radioisotope, a bioluminescent compound, a chemiluminescent compound, a fluorescent compound, a metal chelate, or an enzyme.

[0153] The present invention also relates to the use of the nucleic acid molecules or fragments described above for the preparation of a diagnostic composition for the diagnosis of longevity or a disposition to such a trait.

[0154] The present invention also relates to the use of the nucleic acid molecules of the present invention for the isolation or development of a compound which is useful for therapy of age-associated diseases. For example, the nucleic acid molecules of the invention and the data obtained using said nucleic acid molecules for diagnosis of longevity trait might allow for the identification of further genes which are specifically dysregulated, and thus may be considered as potential targets for therapeutic interventions.

[0155] The invention further provides prognostic assays that can be used to identify subjects having or at risk of developing age-associated diseases. In such method, a test sample is obtained from a subject and the amount and/or concentration of the nucleic acid described in Tables 4, 5 and 6 is determined; wherein the presence of an associated allele, a particular allele of a polymorphic locus, or the likes in the nucleic acids sequences of this invention (see SEQ ID from Tables 2-7) can be diagnostic for a subject having or at risk of developing age-associated diseases. As used herein, a “test sample” refers to a biological sample obtained from a subject of interest. For example, a test sample can be a biological fluid, a cell sample, or tissue. A biological fluid can be, but is not limited to saliva, serum, mucus, urine, stools, spermatozoids, vaginal secretions, lymph, amiotic liquid, pleural liquid and tears. Some non-limiting examples of cells that can be used are red blood cells, muscle cells, heart cells, nerve cells, insulin-producing cells, pancreatic cells, brain cells, germ cells, keratinocytes, monocytes, neutrophils, langerhans cells, CD4+ and CD8+ T cells, B and T lymphocytes, leukocytes, hormonal cells, bone marrow cells, skin cells, buccal cells, spinal cord cells, bone cells, adipose cells, cartilage cells, dendritic cells, intestinal cells, hepatic cells, mucous cells, olfactory cells, retinal cells, somatic cells and arterial cells.

[0156] Furthermore, the prognostic assays described herein can be used to determine whether a subject can be administered an agent (e.g., an agonist, antagonist, peptidomimetic, polypeptide, nucleic acid such as antisense DNA or interfering RNA (RNAi), small molecule or other drug candidate) to treat age-associated diseases. Specifically, these assays can be used to predict whether an individual will have an efficacious response or will experience adverse events in response to such an agent. For example, such methods can be used to determine whether a subject can be effectively treated with an agent that modulates the expression and/or activity of a gene from Tables 4, 5 and 6, or the nucleic acids described herein. In another example, an association study may be performed to identify polymorphisms from Tables 2, 3 and 7 that are associated with a given response to the agent e.g., an efficacious response or the likelihood of one or more adverse events. Thus, the present invention provides methods for determining whether a subject can be effectively treated with an agent for a disorder associated with aberrant expression or activity of a gene from Tables 4, 5 and 6 in which a test sample is obtained and nucleic acids or polypeptides from Tables 2, 3 or 7 are detected (e.g., wherein the presence of a particular level of expression of a gene from Tables 4, 5 and 6 or a particular allelic variant of such gene, such as polymorphism from Tables 2, 3 or 7, is diagnostic for a subject that can be administered an agent to treat a trait or age-associated disease). In one embodiment, the method includes obtaining a sample from a subject suspected of having age-associated diseases or an affected individual and exposing such sample to an agent. The expression and/or activity of the nucleic acids and or genes of the invention are monitored before and after treatment with such agent to assess the effect of such agent. After analysis of the expression values, one skilled in the art can determine whether such agent can effectively treat such subject. In another embodiment, the method includes obtaining a sample from a subject having or susceptible to developing an age-associated disease and determining the allelic constitution of one or more polymorphism from Tables 2, 3 or 7 that are associated with a particular response to an agent. After analysis of the allelic constitution of the individual at the associated polymorphisms, one skilled in the art can determine whether such agent can effectively treat such subject.

[0157] The methods of the invention can also be used to detect genetic alterations in a gene from Tables 4, 5 and 6, thereby determining if a subject with the lesioned gene is at risk for an age-associated disorder. In preferred embodiments, the methods include detecting, in a sample of cells from the subject, the presence or absence of a genetic alteration characterized by at least one alteration linked to or affecting the integrity of a gene from Tables 4, 5 and 6 encoding a polypeptide or the misexpression of such gene. For example, such genetic alterations can be detected by ascertaining the existence of at least one of: (1) a deletion of one or more nucleotides from a gene from Tables 4, 5 and 6; (2) an addition of one or more nucleotides to a gene from Tables 4, 5 and 6; (3) a substitution of one or more nucleotides of a gene from Tables 4, 5 and 6; (4) a chromosomal rearrangement of a gene from Tables 4, 5 and 6; (5) an alteration in the level of a messenger RNA transcript of a gene from Tables 4, 5 and 6; (6) aberrant modification of a gene from Tables 4, 5 and 6, such as of the methylation pattern of the genomic DNA, (7) the presence of a non-wild type splicing pattern of a messenger RNA transcript of a gene from Tables 4, 5 and 6; (8) inappropriate post-translational modification of a polypeptide encoded by a gene from Tables 4, 5 and 6; and (9) alternative promoter use. As described herein, there are a large number of assay techniques known in the art which can be used for detecting alterations in a gene from Tables 4, 5 and 6. A preferred biological sample is a peripheral blood sample obtained by conventional means from a subject. Another preferred biological sample is a buccal swab. Other biological samples can be, but is not limited to, urine, stools, spermatozoids, vaginal secretions, lymph, amniotic liquid, pleural liquid and tears. In certain embodiments, detection of the alteration involves the use of a probe/primer in a polymerase chain reaction (PCR) (see, e.g., U.S. Pat. Nos. 4,683,195 and 4,683,202), such as anchor PCR or RACE PCR, or alternatively, in a ligation chain reaction (LCR) (see, e.g., Landegran et al., 1988; and Nakazawa et al., 1994), the latter of which can be particularly useful for detecting point mutations in a gene from Tables 4, 5 and 6 (see Abavaya et al., 1995). This method can include the steps of collecting a sample of cells from a patient, isolating nucleic acid (e.g., genomic DNA, mRNA, or both) from the cells of the sample, contacting the nucleic acid sample with one or more primers which specifically hybridize to a gene from Tables 4, 5 and 6 under conditions such that hybridization and amplification of the nucleic acid from Tables 4, 5 and 6 (if present) occurs, and detecting the presence or absence of an amplification product, or detecting the size of the amplification product and comparing the length to a control sample. PCR and/or LCR may be desirable to use as a preliminary amplification step in conjunction with some of the techniques used for detecting an associated allele, a particular allele of a polymorphic locus, or the like described herein.

[0158] Alternative amplification methods include: self sustained sequence replication (Guatelli et al., 1990), transcriptional amplification system (Kwoh et al., 1989), Q-Beta Replicase (Lizardi et al., 1988), isothermal amplification (e.g. Dean et al., 2002); and Hafner et al., 2001), or any other nucleic acid amplification method, followed by the detection of the amplified molecules using techniques well known to those of ordinary skill in the art. These detection schemes are especially useful for the detection of nucleic acid molecules if such molecules are present in very low number.

[0159] In an alternative embodiment, alterations in a gene from Tables 4, 5 and 6, from a sample cell can be identified by identifying changes in a restriction enzyme cleavage pattern. For example, sample and control DNA is isolated, amplified (optionally), digested with one or more restriction endonucleases, and fragment length sizes are determined by gel electrophoresis and compared. Differences in fragment length sizes between sample and control DNA indicates an associated allele, a particular allele of a polymorphic locus, or the like, in the sample DNA. Moreover, sequence specific ribozymes (see, e.g., U.S. Pat. No. 5,498,531 or DNAzyme e.g. U.S. Pat. No. 5,807,718) can be used to score for the presence of specific associated allele, a particular allele of a polymorphic locus, or the likes by development or loss of a ribozyme or DNAzyme cleavage site.

[0160] The present invention also relates to further methods for diagnosing the longevity trait or a related disorder, preferably an age-associated disorder, a disposition to such disorder, and predisposition to such a disorder and/or disorder progression. In some methods, the steps comprise contacting a target sample with (a) nucleic molecule(s) or fragments thereof and determining the presence or absence of a particular allele of a polymorphism that confers a disorder-related phenotype (e.g., predisposition to such a disorder and/or disorder progression). The presence of at least one allele from Tables 2, 3 or 7 that is associated with the longevity trait (“associated allele”), at least 5 or 10 associated alleles from Tables 2, 3 or 7, at least 50 associated alleles from Tables 2, 3 or 7, at least 100 associated alleles from Tables 2, 3 or 7, or at least 200 associated alleles from Tables 2, 3 or 7 determined in the sample is an indication of the longevity trait or a related age-associated disorder, a disposition or predisposition to such kinds of disorders, or a prognosis for such disorder progression. Samples may be obtained from any parts of the body such as the scalp, blood, dermis, epidermis and other skin cells, cutaneous surfaces, intertrigious areas, genitalia, vessels and endothelium. Some non-limiting examples of cells that can be used are red blood cells, muscle cells, heart cells, nerve cells, insulin-producing cells, pancreatic cells, brain cells, germ cells, keratinocytes, monocytes, neutrophils, langerhans cells, CD4+ and CD8+ T cells, lymphocytes, hormonal cells, bone marrow cells, skin cells, buccal cells, spinal cord cells, bone cells, adipose cells, cartilage cells, dendritic cells, intestinal cells, hepatic cells, mucous cells, olfactory cells, retinal cells, somatic cells and arterial cells.

[0161] In other embodiments, alterations in a gene from Tables 4, 5 and 6 or a locus from Tables 2, 3 or 7, or different alleles of the polymorphisms from Tables 2, 3 or 7 can be identified by hybridizing sample and control nucleic acids, e.g., DNA or RNA, to high density arrays or bead arrays containing tens to thousands of oligonucleotide probes (Cronin et al., 1996; Kozal et al., 1996). For example, alterations in a gene from Tables 4, 5 and 6 or a locus from Tables 2, 3 or 7, or different alleles of the polymorphisms from Tables 2, 3 or 7 can be identified in two dimensional arrays containing light-generated DNA probes as described in Cronin et al., (1996). Briefly, a first hybridization array of probes can be used to scan through long stretches of DNA in a sample and control to identify base changes between the sequences by making linear arrays of sequential overlapping probes. This step allows the identification of point mutations or different alleles of polymorphisms. This step is followed by a second hybridization array that allows the characterization of specific mutations, associated alleles or alleles of a particular polymorphic locus, by using smaller, specialized probe arrays complementary to all variants or mutations detected. Each mutation array is composed of parallel probe sets, one complementary to the wild-type gene and the other complementary to the mutant gene or associated alleles or particular allele of a polymorphic locus.

[0162] In yet another embodiment, any of a variety of sequencing reactions known in the art can be used to directly sequence a gene from Tables 4, 5 and 6 and detect an associated allele, a particular allele of a polymorphic locus, or the like by comparing the sequence of the sample gene from Tables 4, 5 and 6 with the corresponding wild-type (control) sequence. Examples of sequencing reactions include those based on techniques developed by Maxam and Gilbert (1977) or Sanger (1977). It is also contemplated that any of a variety of automated sequencing procedures can be utilized when performing the diagnostic assays (Bio/Techniques 19:448, 1995) including sequencing by mass spectrometry (see, e.g. PCT International Publication No. WO 94/16101; Cohen et al., 1996; and Griffin et al. 1993), real-time pyrophosphate sequencing method (Ronaghi et al., 1998; and Permutt et al., 2001) and sequencing by hybridization (see e.g. Drmanac et al., 2002).

[0163] Other methods of detecting an associated allele, a particular allele of a polymorphic locus, or the likes in a gene from Tables 4, 5 and 6 include methods in which protection from cleavage agents is used to detect mismatched bases in RNA/RNA, DNA/DNA or RNA/DNA heteroduplexes (Myers et al., 1985). In general, the art technique of “mismatch cleavage” starts by providing heteroduplexes formed by hybridizing (labeled) RNA or DNA containing the wild-type gene from Tables 4, 5 and 6 sequence with potentially mutant RNA or DNA obtained from a tissue sample. The double-stranded duplexes are treated with an agent that cleaves single-stranded regions of the duplex such as which will exist due to basepair mismatches between the control and sample strands. For instance, RNA/DNA duplexes can be treated with RNase and DNA/DNA hybrids treated with S1 nuclease to enzymatically digest the mismatched regions. In other embodiments, either DNA/DNA or RNA/DNA duplexes can be treated with hydroxylamine or osmium tetroxide and with piperidine in order to digest mismatched regions. After digestion of the mismatched regions, the resulting material is then separated by size on denaturing polyacrylamide gels to determine the site of an associated allele, a particular allele of a polymorphic locus, or the like. (see, for example, Cotton et al., 1988; Saleeba et al., 1992). In a preferred embodiment, the control DNA or RNA can be labeled for detection, as described herein.

[0164] In still another embodiment, the mismatch cleavage reaction employs one or more proteins that recognize mismatched base pairs in double-stranded DNA (so called “DNA mismatch repair” enzymes) in defined systems for detecting and mapping point an associated allele, a particular allele of a polymorphic locus, or the likes in a gene from Tables 4, 5 and 6 cDNAs obtained from samples of cells. For example, the mutY enzyme of E. coli cleaves A at G/A mismatches (Hsu et al., 1994). Other examples include, but are not limited to, the MutHLS enzyme complex of E. coli (Smith and Modrich., 1996) and Cel 1 from the celery (Kulinski et al., 2000) both cleave the DNA at various mismatches. According to an exemplary embodiment, a probe based on a gene sequence from Tables 4, 5 and 6 is hybridized to a cDNA or other DNA product from a test cell or cells. The duplex is treated with a DNA mismatch repair enzyme, and the cleavage products, if any, can be detected using electrophoresis protocols or the like. See, for example, U.S. Pat. No. 5,459,039. Alternatively, the screen can be performed in vivo following the insertion of the heteroduplexes in an appropriate vector. The whole procedure is known to those ordinary skilled in the art and is referred to as mismatch repair detection (see e.g. Fakhrai-Rad et al., 2004).

[0165] In other embodiments, alterations in electrophoretic mobility can be used to identify an associated allele, a particular allele of a polymorphic locus, or the likes in genes from Tables 4, 5 and 6. For example, single strand conformation polymorphism (SSCP) can be used to detect differences in electrophoretic mobility between mutant and wild type nucleic acids (Orita et al., 1993; see also Cotton, 1993; and Hayashi et al., 1992). Single-stranded DNA fragments of sample and control nucleic acids from Tables 4, 5 and 6 will be denatured and allowed to renature. The secondary structure of single-stranded nucleic acids varies according to sequence; the resulting alteration in electrophoretic mobility enables the detection of even a single base change. The DNA fragments may be labeled or detected with labeled probes. The sensitivity of the assay may be enhanced by using RNA (rather than DNA), in which the secondary structure is more sensitive to a change in sequence. In a preferred embodiment, the method utilizes heteroduplex analysis to separate double stranded heteroduplex molecules on the basis of changes in electrophoretic mobility (Kee et al., 1991).

[0166] In yet another embodiment, the movement of mutant or wild-type fragments in a polyacrylamide gel containing a gradient of denaturant is assayed using denaturing gradient gel electrophoresis (DGGE) (Myers et al., 1985). When DGGE is used as the method of analysis, DNA will be modified to insure that it does not completely denature, for example by adding a GC clamp of approximately 40 bp of high-melting GC-rich DNA by PCR. In a further embodiment, a temperature gradient is used in place of a denaturing gradient to identify differences in the mobility of control and sample DNA (Rosenbaum et al., 1987). In another embodiment, the mutant fragment is detected using denaturing HPLC (see e.g. Hoogendoorn et al., 2000).

[0167] Examples of other techniques for detecting point mutations, associated alleles or alleles of a particular polymorphic locus include, but are not limited to, selective oligonucleotide hybridization, selective amplification, selective primer extension, selective ligation, single-base extension, selective termination of extension or invasive cleavage assay. For example, oligonucleotide primers may be prepared in which the known associated allele, particular allele of a polymorphic locus, or the like is placed centrally and then hybridized to target DNA under conditions which permit hybridization only if a perfect match is found (Saiki et al., 1986; Saiki et al., 1989). Such allele specific oligonucleotides are hybridized to PCR amplified target DNA or a number of different associated allele, a particular allele of a polymorphic locus, or the likes where the oligonucleotides are attached to the hybridizing membrane and hybridized with labeled target DNA. Alternatively, the amplification, the allele-specific hybridization and the detection can be done in a single assay following the principle of the 5′ nuclease assay (e.g. see Livak et al., 1995). For example, the associated allele, a particular allele of a polymorphic locus, or the like locus is amplified by PCR in the presence of both allele-specific oligonucleotides, each specific for one or the other allele. Each probe has a different fluorescent dye at the 5′ end and a quencher at the 3′ end. During PCR, if one or the other or both allele-specific oligonucleotides are hybridized to the template, the Taq polymerase via its 5′ exonuclease activity will release the corresponding dyes. The latter will thus reveal the genotype of the amplified product.

[0168] The hybridization may also be carried out with a temperature gradient following the principle of dynamic allele-specific hybridization or like (e.g. Jobs et al., 2003; and Bourgeois and Labuda, 2004). For example, the hybridization is done using one of the two allele-specific oligonucleotides labeled with a fluorescent dye, an intercalating quencher under a gradually increasing temperature. At low temperature, the probe is hybridized to both the mismatched and full-matched template. The probe melts at a lower temperature when hybridized to the template with a mismatch. The release of the probe is captured by an emission of the fluorescent dye, away from the quencher. The probe melts at a higher temperature when hybridized to the template with no mismatch. The temperature-dependent fluorescence signals therefore indicate the absence or presence of the associated allele, particular allele of a polymorphic locus, or the like (e.g. Jobs et al. supra). Alternatively, the hybridization is done under a gradually decreasing temperature. In this case, both allele-specific oligonucleotides are hybridized to the template competitively. At high temperature none of the two probes is hybridized. Once the optimal temperature of the full-matched probe is reached, it hybridizes and leaves no target for the mismatched probe. In the latter case, if the allele-specific probes are differently labeled, then they are hybridized to a single PCR-amplified target. If the probes are labeled with the same dye, then the probe cocktail is hybridizes twice to identical templates with only one labeled probes, different in the two cocktails, in the presence of the unlabeled competitive probe.

[0169] Alternatively, allele specific amplification technology that depends on selective PCR amplification may be used in conjunction with the present invention. Oligonucleotides used as primers for specific amplification may carry the associated allele, particular allele of a polymorphic locus, or the like of interest in the center of the molecule, so that amplification depends on differential hybridization (Gibbs et al., 1989) or at the extreme 3′ end of one primer where, under appropriate conditions, mismatch can prevent, or reduce polymerase extension (Prossner, 1993). In addition it may be desirable to introduce a novel restriction site in the region of the associated allele, particular allele of a polymorphic locus, or the like to create cleavage-based detection (Gasparini et al., 1992). It is anticipated that in certain embodiments amplification may also be performed using Taq ligase for amplification (Barany, 1991). In such cases, ligation will occur only if there is a perfect match at the 3′ end of the 5′ sequence making it possible to detect the presence of a known associated allele, a particular allele of a polymorphic locus, or the like at a specific site by looking for the presence or absence of amplification. The products of such an oligonucleotide ligation assay can also be detected by means of gel electrophoresis. Furthermore, the oligonucleotides may contain universal tags used in PCR amplification and zip code tags that are different for each allele. The zip code tags are used to isolate a specific, labeled oligonucleotide that may contain a mobility modifier (e.g. Grossman et al., 1994).

[0170] In yet another alternative, allele-specific elongation followed by ligation will form a template for PCR amplification. In such cases, elongation will occur only if there is a perfect match at the 3′ end of the allele-specific oligonucleotide using a DNA polymerase. This reaction is performed directly on the genomic DNA and the extension/ligation products are amplified by PCR. To this end, the oligonucleotides contain universal tags allowing amplification at a high multiplex level and a zip code for SNP identification. The PCR tags are designed in such a way that the two alleles of a SNP are amplified by different forward primers, each having a different dye. The zip code tags are the same for both alleles of a given SNP and they are used for hybridization of the PCR-amplified products to oligonucleotides bound to a solid support, chip, bead array or like. For an example of the procedure, see Fan et al. (Cold Spring Harbor Symposia on Quantitative Biology, Vol. LXVIII, pp. 69-78, 2003).

[0171] Another alternative includes the single-base extension/ligation assay using a molecular inversion probe, consisting of a single, long oligonucleotide (see e.g. Hardenbol et al., 2003). In such an embodiment, the oligonucleotide hybridizes on both side of the SNP locus directly on the genomic DNA, leaving a one-base gap at the SNP locus. The gap-filling, one-base extension/ligation is performed in four tubes, each having a different dNTP. Following this reaction, the oligonucleotide is circularized whereas unreactive, linear oligonucleotides are degraded using an exonuclease such as exonuclease I of E. coli. The circular oligonucleotides are then linearized and the products are amplified and labeled using universal tags on the oligonucleotides. The original oligonucleotide also contains a SNP-specific zip code allowing hybridization to oligonucleotides bound to a solid support, chip, bead array or like. This reaction can be performed at a highly multiplexed level.

[0172] In another alternative, the associated allele, particular allele of a polymorphic locus, or the like is scored by single-base extension (see e.g. U.S. Pat. No. 5,888,819). The template is first amplified by PCR. The extension oligonucleotide is then hybridized next to the SNP locus and the extension reaction is performed using a thermostable polymerase such as ThermoSequenase (GE Healthcare) in the presence of labeled ddNTPs. This reaction can therefore be cycled several times. The identity of the labeled ddNTP incorporated will reveal the genotype at the SNP locus. The labeled products can be detected by means of gel electrophoresis, fluorescence polarization (e.g. Chen et al., 1999) or by hybridization to oligonucleotides bound to a solid support, chip, bead array or like. In the latter case, the extension oligonucleotide will contain a SNP-specific zip code tag.

[0173] In yet another alternative, the variant is scored by selective termination of extension. The template is first amplified by PCR and the extension oligonucleotide hybridizes in vicinity to the SNP locus, close to but not necessarily adjacent to it. The extension reaction is carried out using a thermostable polymerase such as Thermo Sequenase (GE Healthcare) in the presence of a mix of dNTPs and at least one ddNTP. The latter has to terminate the extension at one of the alleles of the interrogated SNP, but not both such that the two alleles will generate extension products of different sizes. The extension product can then be detected by means of gel electrophoresis, in which case the extension products need to be labeled, or by mass spectrometry (see e.g. Storm et al., 2003).

[0174] In another alternative, the associated allele, particular allele of a polymorphic locus, or the like is detected using an invasive cleavage assay (see U.S. Pat. No. 6,090,543). There are five oligonucleotides per SNP to interrogate but these are used in a two step-reaction. During the primary reaction, three of the designed oligonucleotides are first hybridized directly to the genomic DNA. One of them is locus-specific and hybridizes up to the SNP locus (the pairing of the 3′ base at the SNP locus is not necessary). There are two allele-specific oligonucleotides that hybridize in tandem to the locus-specific probe but also contain a 5′ flap that is specific for each allele of the SNP. Depending upon hybridization of the allele-specific oligonucleotides at the base of the SNP locus, this creates a structure that is recognized by a cleavase enzyme (U.S. Pat. No. 6,090,606) and the allele-specific flap is released. During the secondary reaction, the flap fragments hybridize to a specific cassette to recreate the same structure as above except that the cleavage will release a small DNA fragment labeled with a fluorescent dye that can be detected using regular fluorescence detector. In the cassette, the emission of the dye is inhibited by a quencher.

[0175] Other types of markers can also be used for diagnostic purposes. For example, microsatellites can also be useful to detect the genetic predisposition of an individual to a given disorder. Microsatellites consist of short sequence motifs of one or a few nucleotides repeated in tandem. The most common motifs are polynucleotide runs, dinucleotide repeats (particularly the CA repeats) and trinucleotide repeats. However, other types of repeats can also be used. The microsatellites are very useful for genetic mapping because they are highly polymorphic in their length. Microsatellite markers can be typed by various means, including but not limited to DNA PCR fragment sizing, oligonucleotide ligation assay and mass spectrometry. For example, the locus of the microsatellite is amplified by PCR and the size of the PCR fragment will be directly correlated to the length of the microsatellite repeat. The size of the PCR fragment can be detected by regular means of gel electrophoresis. The fragment can be labeled internally during PCR or by using end-labeled oligonucleotides in the PCR reaction (e.g. Mansfield et al., 1996). Alternatively, the size of the PCR fragment is determined by mass spectrometry. In such a case, however, the flanking sequences need to be eliminated. This can be achieved by ribozyme cleavage of an RNA transcript of the microsatellite repeat (Krebs et al., 2001). For example, the microsatellite locus is amplified using oligonucleotides that include a T7 promoter on one end and a ribozyme motif on the other end. Transcription of the amplified fragments will yield an RNA substrate for the ribozyme, releasing small RNA fragments that contain the repeated region. The size of the latter is determined by mass spectrometry. Alternatively, the flanking sequences are specifically degraded. This is achieved by replacing the dTTP in the PCR reaction by dUTP. The dUTP nucleosides are then removed by uracyl DNA glycosylases and the resulting abasic sites are cleaved by either abasic endonucleases such as human AP endonuclease or chemical agents such as piperidine. Bases can also be modified post-PCR by chemical agents such as dimethyl sulfate and then cleaved by other chemical agents such as piperidine (see e.g. Maxam and Gilbert, 1977; U.S. Pat. No. 5,869,242; and U.S. Patent pending Ser. No. 60/335,068).

[0176] In another alternative, an oligonucleotide ligation assay can be performed. The microsatellite locus is first amplified by PCR. Then, different oligonucleotides can be submitted to ligation at the center of the repeat with a set of oligonucleotides covering all the possible lengths of the marker at a given locus (Zirvi et al., 1999). Another example of design of an oligonucleotide assay comprises the ligation of three oligonucleotides; a 5′ oligonucleotide hybridizing to the 5′ flanking sequence, a repeat oligonucleotide of the length of the shortest allele of the marker hybridizing to the repeated region and a set of 3′ oligonucleotides covering all the existing alleles hybridizing to the 3′ flanking sequence and a portion of the repeated region for all the alleles longer than the shortest one. For the shortest allele, the 3′ oligonucleotide exclusively hybridizes to the 3′ flanking sequence (U.S. Pat. No. 6,479,244).

[0177] The methods described herein may be performed, for example, by utilizing pre-packaged diagnostic kits comprising at least one probe nucleic acid selected from the SEQ ID of Tables 2-7, or antibody reagent described herein, which may be conveniently used, for example, in a clinical setting to diagnose patient exhibiting symptoms or a family history of a disorder or genetic trait, or disorder involving abnormal activity of genes from Tables 4, 5 and 6.

### Method to Treat an Animal Suspected of Having Age-Associated Diseases

[0178] The present invention provides methods of treating a disorder associated with the longevity trait, such age-associated diseases by expressing in vivo the nucleic acids of at least one gene from Tables 4, 5 and 6. These nucleic acids can be inserted into any of a number of well-known vectors for the transfection of target cells and organisms as described below. The nucleic acids are transfected into cells, ex vivo or in vivo, through the interaction of the vector and the target cell. The nucleic acids encoding a gene from Tables 4, 5 and 6, under the control of a promoter, then expresses the encoded protein, thereby mitigating the effects of absent, partial inactivation, or abnormal expression of a gene from Tables 4, 5 and 6.

[0179] Such gene therapy procedures have been used to correct acquired and inherited genetic defects, cancer, and viral infection in a number of contexts. The ability to express artificial genes in humans facilitates the prevention and/or cure of many important human disorders, including many disorders which are not amenable to treatment by other therapies (for a review of gene therapy procedures, see Anderson, 1992; Nabel & Felgner, 1993; Mitani & Caskey, 1993; Mulligan, 1993; Dillon, 1993; Miller, 1992; Van Brunt, 1998; Vigne, 1995; Kremer & Perricaudet 1995; Doerfler & Bohm 1995; and Yu et al., 1994).

[0180] Delivery of the gene or genetic material into the cell is the first critical step in gene therapy treatment of disorder or genetic traits. A large number of delivery methods are well known to those of skill in the art. Preferably, the nucleic acids are administered for in vivo or ex vivo gene therapy uses. Non-viral vector delivery systems include DNA plasmids, naked nucleic acid, and nucleic acid complexed with a delivery vehicle such as a liposome. Viral vector delivery systems include DNA and RNA viruses, which have either episomal or integrated genomes after delivery to the cell. For a review of gene therapy procedures, see the references included in the above section.

[0181] The use of RNA or DNA viral based systems for the delivery of nucleic acids take advantage of highly evolved processes for targeting a virus to specific cells in the body and trafficking the viral payload to the nucleus. Viral vectors can be administered directly to patients (in vivo) or they can be used to treat cells in vitro and the modified cells are administered to patients (ex vivo). Conventional viral based systems for the delivery of nucleic acids could include retroviral, lentivirus, adenoviral, adeno-associated and herpes simplex virus vectors for gene transfer. Viral vectors are currently the most efficient and versatile method of gene transfer in target cells and tissues. Integration in the host genome is possible with the retrovirus, lentivirus, and adeno-associated virus gene transfer methods, often resulting in long term expression of the inserted transgene. Additionally, high transduction efficiencies have been observed in many different cell types and target tissues.

[0182] The tropism of a retrovirus can be altered by incorporating foreign envelope proteins, expanding the potential target population of target cells. Lentiviral vectors are retroviral vector that are able to transduce or infect non-dividing cells and typically produce high viral titers. Selection of a retroviral gene transfer system would therefore depend on the target tissue. Retroviral vectors are comprised of cis-acting long terminal repeats with packaging capacity for up to 6-10 kb of foreign sequence. The minimum cis-acting LTRs are sufficient for replication and packaging of the vectors, which are then used to integrate the therapeutic gene into the target cell to provide permanent transgene expression. Widely used retroviral vectors include those based upon murine leukemia virus (MuLV), gibbon ape leukemia virus (GaLV), Simian Immuno deficiency virus (SIV), human immuno deficiency virus (HIV), and combinations thereof (see, e.g., Buchscher et al., 1992; Johann et al., 1992; Sommerfelt et al., 1990; Wilson et al., 1989; Miller et al., 1999; and PCT/US94/05700).

[0183] In applications where transient expression of the nucleic acid is preferred, adenoviral based systems are typically used. Adenoviral based vectors are capable of very high transduction efficiency in many cell types and do not require cell division. With such vectors, high titer and levels of expression have been obtained. This vector can be produced in large quantities in a relatively simple system. Adeno-associated virus (“AAV”) vectors are also used to transduce cells with target nucleic acids, e.g., in the in vitro production of nucleic acids and peptides, and for in vivo and ex vivo gene therapy procedures (see, e.g., West et al., 1987; U.S. Pat. No. 4,797,368; WO 93/24641; Kotin, 1994; Muzyczka, 1994). Construction of recombinant AAV vectors are described in a number of publications, including U.S. Pat. No. 5,173,414; Tratschin et al., 1985; Tratschin, et al., 1984; Hermonat & Muzyczka, 1984; and Samulski et al., 1989.

[0184] In particular, numerous viral vector approaches are currently available for gene transfer in clinical trials, with retroviral vectors by far the most frequently used system. All of these viral vectors utilize approaches that involve complementation of defective vectors by genes inserted into helper cell lines to generate the transducing agent. pLASN and MFG-S are examples are retroviral vectors that have been used in clinical trials (Dunbar et al., 1995; Kohn et al., 1995; Malech et al., 1997). PA317/pLASN was the first therapeutic vector used in a gene therapy trial (Blaese et al., 1995). Transduction efficiencies of 50% or greater have been observed for MFG-S packaged vectors (Ellem et al., 1997; and Dranoff et al., 1997).

[0185] Recombinant adeno-associated virus vectors (rAAV) are a promising alternative gene delivery systems based on the defective and nonpathogenic parvovirus adeno-associated type 2 virus. All vectors are derived from a plasmid that retains only the AAV 145 bp inverted terminal repeats flanking the transgene expression cassette. Efficient gene transfer and stable transgene delivery due to integration into the genomes of the transduced cell are key features for this vector system. (Wagner et al., 1998, Kearns et al 1996).

[0186] Replication-deficient recombinant adenoviral vectors (Ad) are predominantly used in transient expression gene therapy; because they can be produced at high titer and they readily infect a number of different cell types. Most adenovirus vectors are engineered such that a transgene replaces the Ad E1a, E1b, and E3 genes; subsequently the replication defector vector is propagated in human 293 cells that supply deleted gene function in trans. Ad vectors can transduce multiple types of tissues in vivo, including nondividing, differentiated cells such as those found in the liver, kidney and muscle system tissues. Conventional Ad vectors have a large carrying capacity. An example of the use of an Ad vector in a clinical trial involved polynucleotide therapy for antitumor immunization with intramuscular injection (Sterman et al., 1998). Additional examples of the use of adenovirus vectors for gene transfer in clinical trials include Rosenecker et al., 1996; Sterman et al., 1998; Welsh et al., 1995; Alvarez et al., 1997; Topf et al., 1998.

[0187] Packaging cells are used to form virus particles that are capable of infecting a host cell. Such cells include 293 cells, which package adenovirus, and ψ2 cells or PA317 cells, which package retrovirus. Viral vectors used in gene therapy are usually generated by producer cell line that packages a nucleic acid vector into a viral particle. The vectors typically contain the minimal viral sequences required for packaging and subsequent integration into a host, other viral sequences being replaced by an expression cassette for the protein to be expressed. The missing viral functions are supplied in trans by the packaging cell line. For example, AAV vectors used in gene therapy typically only possess ITR sequences from the AAV genome which are required for packaging and integration into the host genome. Viral DNA is packaged in a cell line, which contains a helper plasmid encoding the other AAV genes, namely rep and cap, but lacking ITR sequences. The cell line is also infected with adenovirus as a helper. The helper virus promotes replication of the AAV vector and expression of AAV genes from the helper plasmid. The helper plasmid is not packaged in significant amounts due to a lack of ITR sequences. Contamination with adenovirus can be reduced by, e.g., heat treatment to which adenovirus is more sensitive than AAV.

[0188] In many gene therapy applications, it is desirable that the gene therapy vector be delivered with a high degree of specificity to a particular tissue type. A viral vector is typically modified to have specificity for a given cell type by expressing a ligand as a fusion protein with a viral coat protein on the viruses outer surface. The ligand is chosen to have affinity for a receptor known to be present on the cell type of interest. For example, Han et al., 1995, reported that Moloney murine leukemia virus can be modified to express human heregulin fused to gp70, and the recombinant virus infects certain human breast cancer cells expressing human epidermal growth factor receptor. This principle can be extended to other pairs of virus expressing a ligand fusion protein and target cell expressing a receptor. For example, filamentous phage can be engineered to display antibody fragments (e.g., Fab or Fv) having specific binding affinity for virtually any chosen cellular receptor. Although the above description applies primarily to viral vectors, the same principles can be applied to nonviral vectors. Such vectors can be engineered to contain specific uptake sequences thought to favor uptake by specific target cells.

[0189] Gene therapy vectors can be delivered in vivo by administration to an individual patient, typically by systemic administration (e.g., intravenous, intraperitoneal, intramuscular, subdermal, or intracranial infusion) or topical application. Alternatively, vectors can be delivered to cells ex vivo, such as cells explanted from an individual patient (e.g., lymphocytes, bone marrow aspirates, and tissue biopsy) or universal donor hematopoietic stem cells, followed by reimplantation of the cells into a patient, usually after selection for cells which have incorporated the vector.

[0190] Ex vivo cell transfection for diagnostics, research, or for gene therapy (e.g., via re-infusion of the transfected cells into the host organism) is well known to those of skill in the art. In a preferred embodiment, cells are isolated from the subject organism, transfected with a nucleic acid (gene or cDNA), and re-infused back into the subject organism (e.g., patient). Various cell types suitable for ex vivo transfection are well known to those of skill in the art (see, e.g., Freshney et al., 1994; and the references cited therein for a discussion of how to isolate and culture cells from patients).

[0191] In one embodiment, stem cells are used in ex vivo procedures for cell transfection and gene therapy. The advantage to using stem cells is that they can be differentiated into other cell types in vitro, or can be introduced into a mammal (such as the donor of the cells) where they will engraft in the bone marrow. Methods for differentiating CD34+ cells in vitro into clinically important immune cell types using cytokines such a GM-CSF, IFN-γ and TNF-α are known (see Inaba et al., 1992).

[0192] Stem cells are isolated for transduction and differentiation using known methods. For example, stem cells are isolated from bone marrow cells by panning the bone marrow cells with antibodies which bind unwanted cells, such as CD4+ and CD8+ (T cells), CD45+(panB cells), GR-1 (granulocytes), and lad (differentiated antigen presenting cells).

[0193] Vectors (e.g., retroviruses, adenoviruses, liposomes, etc.) containing therapeutic nucleic acids can be also administered directly to the organism for transduction of cells in vivo. Alternatively, naked DNA can be administered.

[0194] Administration is by any of the routes normally used for introducing a molecule into ultimate contact with blood or tissue cells, as described above. The nucleic acids from Tables 2-7 are administered in any suitable manner, preferably with the pharmaceutically acceptable carriers described above. Suitable methods of administering such nucleic acids are available and well known to those of skill in the art, and, although more than one route can be used to administer a particular composition, a particular route can often provide a more immediate and more effective reaction than another route (see Samulski et al., 1989). The present invention is not limited to any method of administering such nucleic acids, but preferentially uses the methods described herein.

[0195] The present invention further provides other methods of treating disorders, such as age-associated disorders, by for example administering to an individual having an age-associated disorder (or suspected of having a age-associated disorder) an effective amount of an agent that regulates the expression, activity or physical state of at least one gene from Tables 4, 5 and 6. An “effective amount” of an agent is an amount that modulates a level of expression or activity of a gene from Tables 4, 5 and 6, in a cell in the individual at least about 10%, at least about 20%, at least about 30%, at least about 40%, at least about 50%, at least about 60%, at least about 70%, at least about 80% or more, compared to a level of the respective gene from Tables 4, 5 and 6 in a cell in the individual in the absence of the compound. The preventive or therapeutic agents of the present invention may be administered, either orally or parenterally, systemically or locally. For example, intravenous injection such as drip infusion, intramuscular injection, intraperitoneal injection, subcutaneous injection, suppositories, intestinal lavage, oral enteric coated tablets, and the like can be selected, and the method of administration may be chosen, as appropriate, depending on the age and the conditions of the patient. The effective dosage is chosen from the range of 0.01 mg to 100 mg per kg of body weight per administration. Alternatively, the dosage in the range of 1 to 1000 mg, preferably 5 to 50 mg per patient may be chosen. The therapeutic efficacy of the treatment may be monitored by observing various parts of the body and mind, such as the response to a cognitive test, by any monitoring method known in the art, such as the MMSE (mini-mental state examination). Others ways of monitoring efficacy can be, but are not limited to monitoring well-being, memory, mental state and psychological state of the patient.

[0196] The present invention further provides a method of treating an individual clinically diagnosed with a trait or age-associated disorder. The methods generally comprises analyzing a biological sample that includes a cell, in some cases, a skin cell, from an individual clinically diagnosed with an age-associated disorder for the presence of modified levels of expression of at least 1 gene, at least 10 genes, at least 30 genes from Tables 4, 5 and 6. A treatment plan that is most effective for individuals clinically diagnosed as having a condition associated with a trait or age-associated disorder is then selected on the basis of the detected expression of such genes in a cell. Treatment may include administering a composition that includes an agent that modulates the expression or activity of a protein from Tables 4, 5 and 6 in the cell. Information obtained as described in the methods above can also be used to predict the response of the individual to a particular agent. Thus, the invention further provides a method for predicting a patient's likelihood to respond to a drug treatment for a condition associated with the longevity trait, comprising determining whether modified levels of a gene from Tables 4, 5 and 6 is present in a cell, wherein the presence of protein is predictive of the patient's likelihood to respond to a drug treatment for the condition. Examples of the prevention or improvement of symptoms accompanied by age-associated disorders that can monitor for effectiveness include response to a cognitive test, by any monitoring method known in the art, such as the MMSE (mini-mental state examination). Others ways of monitoring efficacy can be, but are not limited to monitoring well-being, memory, mental state and psychological state of the patient.

[0197] The invention also provides a method of predicting a response to therapy in a subject having age-associated disorders by determining the presence or absence in the subject of one or more markers associated with the longevity trait described in Tables 2, 3 and/or 7, diagnosing the subject in which the one or more markers are present as having an age-associated disorder, and predicting a response to a therapy based on the diagnosis e.g., response to therapy may include an efficacious response and/or one or more adverse events. The invention also provides a method of optimizing therapy in a subject having an age-associated disorder by determining the presence or absence in the subject of one or more markers associated with a clinical subtype of age-associated disorders, diagnosing the subject in which the one or more markers are present as having a particular clinical subtype of age-associated disorders, and treating the subject having a particular clinical subtype of age-associated disorders based on the diagnosis.

[0198] Thus, while there are a number of treatments for age-associated disorders currently available, they all are accompanied by various side effects, high costs, and long complicated treatment protocols, which are often not available and effective in a large number of individuals. Accordingly, there remains a need in the art for more effective and otherwise improved methods for treating and preventing age-associated disorders. Thus, there is a continuing need in the medical arts for genetic markers of longevity trait and guidance for the use of such markers. The present invention fulfills this need and provides further related advantages.

### EXAMPLES

### Example 1

### Identification of Cases and Controls

[0199] All individuals were sampled from the Quebec founder population (QFP). Membership in the founder population was defined as having four grandparents with French Canadian family names who were born in the Province of Quebec, Canada or in adjacent areas of the Provinces of New Brunswick and Ontario or in New England or New York State. The Quebec founder population has two distinct advantages over general populations for LD mapping. Because it is relatively young, about 12 to 15 generations from mid-17th century to present, and because it has a limited but sufficient number of founders, approximately 2600 effective founders (Charbonneau et al. 1987), the Quebec population is characterized both by extended LD and by decreased genetic heterogeneity. The increased extent of LD allows the detection of genes affecting the trait using a reasonable marker density, while still allowing the increased meiotic resolution of population-based mapping. The number of founders is small enough to result in increased LD and reduced allelic heterogeneity, yet large enough to insure that all of the major genes affecting the trait involved in general populations are present in Quebec. Reduced allelic heterogeneity will act to increase relative risk imparted by the remaining alleles and so increase the power of case/control studies to detect genes and trait associated alleles within the Quebec population. The specific combination of age in generations, optimal number of founders and large present population size makes the QFP optimal for LD-based gene mapping. The family relationships among samples are routinely examined using proprietary algorithms and information from the genealogical data bases. When two subjects are found to be too closely related for LD analysis, one of them is removed from the sample.

[0200] Case inclusion criteria for the study included being 94 years of age or older. Control inclusion criterion for the study included being 65 years of age or younger and gender matched to cases.

[0201] All human sampling was subject to ethical review procedures.

[0202] All enrolled QFP subjects (cases and controls) provided a 30 ml blood sample (3 barcoded tubes of 10 ml). Samples were processed immediately upon arrival at Genizon's laboratory. All samples were scanned and logged into a LabVantage Laboratory Information Management System (LIMS), which served as a hub between the clinical data management system and the genetic analysis system. Following centrifugation, the buffy coat containing the white blood cells was isolated from each tube. Genomic DNA was extracted from the buffy coat from one of the tubes, and stored at 4° C. until required for genotyping. DNA extraction was performed with a commercial kit using a guanidine hydrochloride based method (FlexiGene, Qiagen) according to the manufacturer's instructions. The extraction method yielded high molecular weight DNA, and the quality of every DNA sample was verified by agarose gel electrophoresis. Genomic DNA appeared on the gel as a large band of very high molecular weight. The remaining two buffy coats were stored at −80° C. as backups.

[0203] The samples were collected as 615 cases and 615 controls (127 males and 488 females, for both cases and controls). The DNA extracted from cases and control samples was pooled together in various case and control pools.

[0204] Separate case and control and male and female pools were constructed. The probands are also segregated according to their age at the time of recruitment and the proband females are further separated in two groups, those who failed a cognitive test and those who passed the test. Two proband male pools contain 53-74 individuals, separated by age group. One proband female pool contains the 71 females who failed a cognitive test whereas the 7 remaining pools consisted of 43-80 proband females who passed the test, separated by age group. Ten (10) control pools consisted of 8 pools of 61 female samples and 2 pools of 63-64 male samples.

### Example 2

### Genome Wide Association

[0205] Genotyping was performed using Perlegen Life Sciences ultra-high-throughput platform. Loci of interest were amplified and hybridized to wafers containing arrays of oligonucleotides. Allele discrimination was performed through allele-specific hybridization. In total, 248,535 SNPs, spread over 3 microarrays, were genotyped. This set of markers contained the QLDM (Quebec LD Map), a map created specifically for the Quebec founder population, which possesses a base density of one marker per 40 kb and up to one marker per 10 kb in low-LD regions, the lower the LD is in a given area, the higher the marker density will be. The QLDM markers and other markers were selected from various databases including the ˜1.6 million SNP database of Perlegen Life Sciences (Patil, 2001), the hapmap consortium database and dbSNP at NCBI. The SNPs were chosen to maximize uniformity of genetic coverage and as much as possible, with a minor allele frequency of 10% or higher.

[0206] The genotyping information was entered into a Unified Genotype Database (a proprietary database under development) from which it was accessed using custom-built programs for export to the genetic analysis pipeline. Analyses of these genotypes were performed with the statistical tools described in Example 3. The GWS permitted the identification of 47 candidate regions that are further analyzed by the Confirmation Mapping and Fine Mapping approaches described below.

### Example 3

### Genetic Analysis

[0207] The raw data generated by the GWS approach (Example 2 herein) was analyzed by various means to identify candidate regions (see also Confirmatory Mapping and Fine Mapping described in Example 5).

### Raw Data Analysis by Perlegen

[0208] The data analysis process compares the relative fluorescence intensities of features corresponding to the reference allele of a given SNP with those corresponding to the alternate allele, to calculate a p-hat value. The latter is proportional to the fluorescence signal from perfect match features for the reference allele divided by the sum of fluorescence signals from perfect match features for the reference plus the alternate alleles. P-hat assumes values close to 1 (typically 0.9) for pure reference samples and close to 0 (typically 0.1) for pure alternate samples, and can be used as a measured estimate of the reference allele frequency of a SNP in a DNA pool. The difference between case and control pools, delta p-hat, is calculated using the weighted average of case and control p-hats. Delta p-hat is a reliable estimate of the allele frequency difference between the cases and controls.

### Data Analysis by Genizon

[0209] Analysis of the data by Genizon was based upon Perlegen's p-hat values.

### Data Analysis of P-Hat

[0210] The data consisted of 10 pools of cases and 10 pools of controls, with a p-hat value for each pool (provided by Perlegen's analysis methods described above). The weighted mean p-hat value for all case pools was calculated as X̅=NᵢPhatᵢ/ΣNᵢ where Nᵢ is the number of alleles (2× the number of people) in each case pool and the weighted p-hat value for all control pools were calculated as Y̅=ΣLⱼPhatⱼ/ΣLⱼ where Lᵢ is the number of alleles in each control pool. The estimate of delta-phat, the difference in allele frequency between cases and controls was X̅- Y̅ and the significance of delta-phat was determined using a Student's t statistic where

$$t = \frac{\overline{X} - \overline{Y}}{\sqrt{{S}_{p} ( {( \sum {N}_{i} )}^{- 1} + {( \sum {L}_{i} )}^{- 1} )}}$$

where Sₚ is the pooled variance under the assumption that both case and control variances are equal. The variance of X̅ was calculated as S_{X}=(¹/₈₋₁)ΣNᵢ(Phatᵢ− X̅)² and similarly the variance of Y̅ was calculated as S_{Y}=(¹/₈₋₁)ΣLⱼ(Phatⱼ− Y̅)². The Student's t test was performed with 8+8−2=14 degrees of freedom. Single Marker P values were calculated for all markers within the genome wide scan map.

### Combined P Values

[0211] In addition to single marker P values, combined P values across multi-marker sliding windows were calculated after the method of Fisher (Statistical Methods for Research Workers, 14^{th} edition Hafner Press N.Y. 1970 pp 99-100) where χ²=lnPᵢ with 2 k degrees of freedom where Pᵢ is the P value for association of each of k markers within the sliding window. The combined P values identify regions of multiple single marker associations. However, Fisher's method assumes independence of association for each marker which is known not to be the case because of strong LD between adjacent markers. Therefore the magnitude of the combined P value was affected both by LD and association and these cannot be taken at face value. The combined P values were best used as a means to identify regions of multi-marker association which can then be assessed on the basis of the magnitude of single marker association.

### Permutation Test for Exact P Values

[0212] There were 10 case and 10 control pools, each giving an estimate of p-hat. Therefore there are 20!(20 factorial)/10!×10!=184756 ways to group the pools into 2 groups of 10. The POOLEX exact test calculates the mean difference in phat for single markers between the two groups for all of these possible arrangements of the pools into two groups as well as the combined P values for 5, 9, and 15 marker windows for all combinations. These values are then arranged in order in each case and the relative rank among all combinations of the actually observed combination for real cases and controls is determined. The exact P value for the observed case and control combination is calculated as:

No. of combinations with a value greater than or equal to the actual observed value 184756 total combinations

[0213] For example, if the actually observed combined P value for a 5 marker window corresponding to the actual cases and controls combination, were the largest combined P value of all 184756 possible combinations of 2 groups of 10, then the exact probability (P value) for observing this event by chance given no difference between cases and controls would be 1/184756=0.000005412.

### Example 4

### Confirmatory Mapping and Fine Mapping

[0214] 42 of the 47 top regions identified as being associated with longevity by the GWS are further analyzed by confirmatory mapping (genotyping all cases and controls samples individually) followed by fine mapping using a denser set of markers, in order to validate and/or refine the signal. Both confirmatory and fine mapping are carried out using the Illumina BeadStation 500GX SNP genotyping platform. Alleles are genotyped using an allele-specific elongation assay that involves ligation to a locus-specific oligonucleotide. The assay is performed directly on genomic DNA at a highly multiplex level and the products are amplified using universal oligonucleotides. For each candidate region, a set of SNP markers is selected with an average inter-marker distance varying with the mean extent of LD throughout the region as determined by delta-M (Δ_{M}), where M is the number of markers present in the 300 kb window centered at each reference marker is defined as the square root of the average r² or Δ²ᵢⱼ measures of LD between all ({M(M−1)}/2) pairwise comparisons of all (M) markers within the 300 kb window (Dawson et al., 2002). This produces an average multi-marker measure of LD analogous to Hill's Δ statistic for two marker LD. Regions with a signal harboring a high −Log₁₀ P value and with mean delta-M of 0.3 or below are mapped with a target density of one marker per 10 kb. Regions showing a signal with a high −Log₁₀ P value and with mean delta-M between 0.3 and 0.35 as well as selected regions with a signal with a lower −Log₁₀ P value and a delta-M value below 0.35 are mapped with a target density of one marker per 10-20 kb. The principle is that low-LD regions will be mapped at a higher SNP density. Selected regions with a delta-M value above 0.35 are mapped with a density of one marker per 20-30 kb, including the markers used in the GWS. The selected regions are delimited by the location where the LDSTATS −Log₁₀ P values reach the background level. The cohort consists of 615 cases and 615 controls (as used for the GWS).

[0215] Table 3 lists the fine mapping SNPs for the 42 confirmed regions and their respective p values using 615 cases and 615 controls trios and two analysis methods: LDSTATS(v4.0) and SingleType. For each region that was associated with longevity in the fine mapping analyses, we report in Table 7 the allele frequencies and the relative risk (RR) for the haplotypes contributing to the best signal at each SNP in the region. The best signal at a given location was determined by comparing the significance (p-value) of the association with longevity for multiple window sizes, and selecting the most significant window. For a given window size at a given location, the association with longevity was evaluated by comparing the overall distribution of haplotypes in the cases with the overall distribution of haplotypes in the controls. Haplotypes with a relative risk greater than one increase the risk of longevity while haplotypes with a relative risk less than one are protective and decrease longevity.

### Haplotype Association Analysis

[0216] Haplotype association analysis was performed using the program LDSTATS. LDSTATS tests for association of haplotypes with the disease phenotype. The algorithm LDSTATS (v4.0) defines haplotypes using multi-marker windows that advance across the marker map in one-marker increments. Windows can contain any odd number of markers specified as a parameter of the algorithm. Other marker windows can also be used. At each position the frequency of haplotypes in cases and controls was calculated and a chi-square statistic was calculated from case control frequency tables. LDSTATS v4.0 calculates significance of chi-square values using a permutation test in which case-control status is randomly permuted until 350 permuted chi-square values are observed that are greater than or equal to chi-square value of the actual data. The P value is then calculated as 350/the number of permutations required.

### Singletype Analysis

[0217] The SINGLETYPE algorithm assesses the significance of case-control association for single markers using the genotype data from the laboratory as input in contrast to LDSTATS single marker window analyses, in which case-control alleles for single markers from estimated haplotypes are used as input. SINGLETYPE calculates P values for association for both alleles, 1 and 2, as well as for genotypes, 11, 12, and 22, and plots these as −log₁₀ P values for significance of association against marker position.

### Example 5

### Gene Identification and Characterization

[0218] A series of gene characterization steps was performed for each candidate region described in Table 1. Any gene or EST mapping to the interval based on public map data or proprietary map data was considered as a candidate longevity gene. The approach used to identify all genes located in the critical regions is described below.

### Public Gene Mining

[0219] Once regions were identified using the analyses described above, a series of public data mining efforts were undertaken, with the aim of identifying all genes located within the critical intervals as well as their respective structural elements (i.e., promoters and other regulatory elements, UTRs, exons and splice sites). The initial analysis relied on annotation information stored in public databases (e.g. NCBI, UCSC Genome Bioinformatics, Entrez Human Genome Browser, OMIM—see below for database URL information).

Database URLs

| Name | URL |
|---|---|
| Biocarta | http://www.biocarta.com/ |
| BioCyc | http://www.biocyc.org/ |
| Bimolecular Interaction Network | http://bind.ca/ |
| Database (BIND) | |
| Database of Interacting Proteins | http://dip.doe-mbi.ucla.edu/ |
| Gene Expression Omnibus | http://www.ncbi.nlm.nih.gov/geo/ |
| Human Genome Browser | http://www.ensembl.org/Homo_sapiens/ |
| Intercom | http://interdom.lit.org.sg/help/term.php |
| Kyoto Encyclopedia of Genes and | http://www.genome.jp/kegg/ |
| Genomes (KEGG) | |
| Molecular Interactions Database | http://mint.bio.uniroma2.it/mint/ |
| (MINT) | |
| National Center for Biotechnology | http://www.ncbi.nlm.nih.gov/ |
| Information (NCBI) | |
| Online Mendelian Inheritance in | http://www.ncbi.nlm.nih.gov/entrez/query.fcgi?db=OMIM |
| Man (OMIM) | |
| OmniViz | http://www.omniviz.com/applications/omni_viz.htm |
| Pathway Enterprise | http://www.omniviz.com/applications/pathways.htm |
| Reactome | http://www.reactome.org/ |
| Transpath | http://www.biobase.de/pages/products/transpath.html |
| UCSC Genome Bioinformatics | http://genome.ucsc.edu/index.html?org=Human |
| UniGene | http://www.ncbi.nlm.nih.gov/entrez/query.fcgi?db=unigene |

[0220] For some genes the available public annotation was extensive, whereas for others very little was known about a gene's function. Customized analysis was therefore performed to characterize genes that corresponded to this latter class. Importantly, the presence of rare splice variants and artifactual ESTs was carefully evaluated. Subsequent cluster analysis of novel ESTs provided an indication of additional gene content in some cases. The resulting clusters were graphically displayed against the genomic sequence, providing indications of separate clusters that may contribute to the same gene, thereby facilitating development of confirmatory experiments in the laboratory. While much of this information was available in the public domain, the customized analysis performed revealed additional information not immediately apparent from the public genome browsers.

[0221] A unique consensus sequence was constructed for each splice variant and a trained reviewer assessed each alignment. This assessment included examination of all putative splice junctions for consensus splice donor/acceptor sequences, putative start codons, consensus Kozak sequences and upstream in-frame stops, and the location of polyadenylation signals. In addition, conserved noncoding sequences (CNSs) that could potentially be involved in regulatory functions were included as important information for each gene. The genomic reference and exon sequences were then archived for future reference. A master assembly that included all splice variants, exons and the genomic structure was used in subsequent analyses (i.e., analysis of polymorphisms).

[0222] An important component of these efforts was the ability to visualize and store the results of the data mining efforts. A customized version of the highly versatile genome browser GBrowse (http://www.gmod.org/) was implemented in order to permit the visualization of several types of information against the corresponding genomic sequence. In addition, the results of the statistical analyses were plotted against the genomic interval, thereby greatly facilitating focused analysis of gene content.

### Computational Analysis of Genes and GeneMaps

[0223] In order to assist in the prioritization of candidate genes for which minimal annotation existed, a series of computational analyses were performed that included basic BLAST searches and alignments to identify related genes. In some cases this provided an indication of potential function. In addition, protein domains and motifs were identified that further assisted in the understanding of potential function, as well as predicted cellular localization.

[0224] A comprehensive review of the public literature was also performed in order to facilitate identification of information regarding the potential role of candidate genes in the pathophysiology of longevity trait and/or age-associated disorders. In addition to the standard review of the literature, public resources (Medline and other online databases) were also mined for information regarding the involvement of candidate genes in specific signaling pathways. The Ingenuity Pathway Analysis System was also used to generate protein interaction networks. A variety of pathway and yeast two hybrid databases were mined for information regarding protein-protein interactions. These included BIND, MINT, DIP, Interdom, and Reactome, among others. By identifying homologues of genes in the longevity candidate regions and exploring whether interacting proteins had been identified already, knowledge regarding the GeneMaps for longevity was advanced. The pathway information gained from the use of these resources was also integrated with the literature review efforts, as described above.

### 3. Expression Studies

[0225] In order to determine the expression patterns for genes, relevant information was first extracted from public databases. The UniGene database, for example, contains information regarding the tissue source for ESTs and cDNAs contributing to individual clusters. This information was extracted and summarized to provide an indication in which tissues the gene was expressed. Particular emphasis was placed on annotating the tissue source for bona fide ESTs, since many ESTs mapped to Unigene clusters are artifactual. In addition, SAGE and microarray data, also curated at NCBI (Gene Expression Omnibus), provided information on expression profiles for individual genes. Particular emphasis was placed on identifying genes that were expressed in tissues known to be involved in the pathophysiology of longevity trait and/or age-associated disorders.

### 4. Polymorphism Analysis

[0226] Polymorphisms identified in candidate genes, including those from the public domain as well as those identified by sequencing candidate genes and regions, are evaluated for potential function. Initially, polymorphisms are examined for potential impact upon encoded proteins. If the protein is a member of a gene family with reported 3-dimensional structural information, this information is used to predict the location of the polymorphism with respect to protein structure. This information provided insight into the potential role of polymorphisms in altering protein or ligand interactions, as well as suitability as a drug target. In a second phase of analysis we evaluate the potential role of polymorphisms in other biological phenomena, including regulation of transcription, splicing and mRNA stability, etc. There are many examples of the functional involvement of naturally occurring polymorphisms in these processes. As part of this analysis, polymorphisms located in promoter or other regulatory elements, canonical splice sites, exonic and intronic splice enhancers and repressors, conserved noncoding sequences and UTRs are localized.

### Example 6

### SNP and Polymorphism Discovery (SNPD)

[0227] Candidate genes and regions are selected for sequencing in order to identify all polymorphisms. In cases where the critical interval, identified by fine mapping, was relatively small (˜50 kb), the entire region, including all introns, is sequenced to identify polymorphisms. In situations where the region is large (>50 kb), candidate genes are prioritized for sequencing, and/or only functional gene elements (promoters, exons and splice sites) are sequenced.

[0228] The samples to be sequenced are selected according to which haplotypes contribute to the association signal observed in the region. The purpose is to select a set of samples that covered all the major haplotypes in the given region. Each major haplotype must be present in a few copies. The first step therefore consisted of determining the major haplotypes in the region to be sequenced.

[0229] Once a region is defined with the two boundary markers, all the markers used in fine mapping that are located within the region are used to determine the major haplotypes. Long haplotypes covering the whole region are thus inferred using the middle marker as an anchor. The results included two series of haplotype themes that define the major haplotypes, comparing the cases and the controls. This exercise is repeated using an anchor in the peripheral regions to ensure that major haplotype subsets that are not anchored at the original middle marker are not missed.

[0230] Once the major haplotypes are determined as described above, appropriate genomic DNA samples are selected such that each major haplotype and haplotype subset are represented in at least two to four copies.

[0231] The protocol includes the following steps, once a region is delimited:

### Primer Design

[0232] The design of the primers is performed using a proprietary primer design tool. A primer quality control is included in the primer design process. Primers that successfully passed the control quality process were synthesized by Integrated DNA Technologies (IDT). The sense and anti-sense oligos are separated such that the sense oligos are placed on one plate in the same position as their anti-sense counterparts are on another plate. Two additional plates are created from each storage plate, one for use in PCR and the other for sequencing. For PCR, the sense and anti-sense oligos of the same pair are combined in the same well to achieve a final concentration of 1.5 μM for each oligonucleotide.

### PCR Optimization

[0233] PCR conditions are optimized by testing a variety of conditions that included varying salt concentrations and temperatures, as well as including various additives. PCR products are checked for robust amplification and minimal background by agarose gel electrophoresis.

### PCR on Selected Samples

[0234] PCR products to be used for sequencing are amplified using the conditions chosen during optimization. The PCR products are purified free of salts, dNTPs and unincorporated primers by use of a MultiScreen PCR384 filter plate manufactured by Millipore. Following PCR, the amplicons are quantified by use of a lambda/Hind III standard curve. This is done to ensure that the quantity of PCR product required for sequencing had been generated. The raw data was measured against the standard curve data in Excel by use of a macro.

### Sequencing

[0235] Sequencing of PCR products is performed by DNA Landmarks using ABI 3730 capillary sequencing instruments.

### Sequence Analysis

[0236] The ABI Prism SeqScape software (Applied Biosystems) is used for SNP identification. The chromatogram trace files were imported into a SeqScape sequencing project and the base calling is automatically performed. Sequences are then aligned and compared to each other using the SeqScape program. The base calling is checked manually, base by base; editing was performed if needed.

### Example 7

### Ultra Fine Mapping (UFM)

[0237] Once polymorphisms are identified by sequencing efforts as described in Example 6, additional genotyping of all newly found polymorphisms is performed on the samples used in the fine mapping studies. Various types of genotyping assays may need to be utilized based on the type of polymorphism identified (i.e., SNP, indel, microsatellite). The assay type can be, but is not restricted to, Sentrix Assay Matrix on Illumina BeadStations, microsatellite on MegaBACE, SNP on ABI or Orchid. The frequencies of genotypes and haplotypes in cases and controls are analyzed in a similar manner as the GWS and fine mapping data. By examining all SNPs in a region, polymorphisms are identified that increase an individual's susceptibility to longevity. The goal of ultra-fine mapping is to identify the polymorphism that is most associated with disorder phenotype as part of the search for the actual DNA polymorphism that confers susceptibility to disorder. This statistical identification may need to be corroborated by functional studies.

### Example 8

### Confirmation of Candidate Regions and Genes in a General Population

[0238] The confirmation of any putative associations described in Example 7 is performed in an independent general population patient sample. These DNA samples consist of at least 400 male controls and 400 male patients with longevity.

[0239] All publications, patents and patent applications mentioned in the specification and reference list are herein incorporated by reference in their entirety for all purposes. Various modifications and variations of the described method and system of the invention will be apparent to those skilled in the art without departing from the scope and spirit of the invention. Although the invention has been described in connection with specific preferred embodiments, it should be understood that the invention as claimed should not be unduly limited to such specific embodiments. Indeed, various modifications of the described modes for carrying out the invention that are obvious to those skilled in molecular biology, genetics, or related fields are intended to be within the scope of the following claims.

[0240] The practice of the present invention will employ, unless otherwise indicated, conventional techniques of cell biology, cell culture, molecular biology, transgenic biology, microbiology, recombinant DNA, and immunology, which are within the skill of the art. Such techniques are explained fully in the literature. See, for example, Molecular CloningA Laboratory Manual, 2nd Ed., ed. by Sambrook, Fritsch and Maniatis (Cold Spring Harbor Laboratory Press: 1989); DNA Cloning, Volumes I and H (D. N. Glover ed., 4); Oligonucleotide Synthesis (M. J. Gait ed., 1984); Mullis et al U.S. Pat. No. 4,683,195; Nucleic Acid Hybridization (B. D. Hames & S. J. Higgins eds. 1984); Transcription And Translation (B. D. Haines & S. J. Higgins eds. 1984); Culture Of Animal Cells (R. 1. Freshney, Alan R. Liss, Inc., 1987); Immobilized Cells And Enzymes (IRL Press, 1986); B. Perbal, A Practical Guide To Molecular Cloning (1984); the treatise, Methods In Enzymology (Academic Press, Inc., N.Y.); Gene Transfer Vectors For Mammalian Cells (J. H. Miller and M. P. Calos eds., 1987, Cold Spring Harbor Laboratory); Methods In Enzymology, Vols. 154 and 155 (Wu et al. eds.), Immunochemical Methods In Cell And Molecular Biology (Mayer and Walker, eds., Academic Press, London, 1987); Handbook Of Experimental Immunology, Volumes I-IV (D. M. Weir and C. C. Blackwell, eds., 1986); Manipulating the Mouse Embryo, (Cold Spring Harbor Laboratory Press, Cold Spring Harbor, N.Y., 1986).

### REFERENCES

[0241] Alwine, J. C., D. J. Kemp, et al. (1977). “Method for detection of specific RNAs in agarose gels by transfer to diazobenzyloxymethyl-paper and hybridization with DNA probes.” Proc Natl Acad Sci USA 74(12): 5350-4.
[0242] Alwine, J. C., Reed, S. I., & Stark, G. R. (1977). Characterization of the autoregulation of simian virus 40 gene A. J Virol, 24(1), 22-27.
[0243] Anderson, W. F. (1992). “Human gene therapy.” Science 256(5058): 808-13.
[0244] Antonarakis, S. E. (1987). “Hemophilia A persistence and gene mutational vulnerability.” Hosp Pract (Off Ed) 22(12): 93-5, 99-102.
[0245] Antonarakis, S. E., H. Youssoufian, et al. (1987). “Molecular genetics of hemophilia A in man (factor VIII deficiency).” Mol Biol Med 4(2): 81-94.
[0246] Barany, F. (1991). “Genetic disease detection and DNA amplification using cloned thermostable ligase.” Proc Natl Acad Sci USA 88(1): 189-93.
[0247] Barre, F. X., S. Ait-Si-Ali, et al. (2000). “Unambiguous demonstration of triple-helix-directed gene modification.” Proc Natl Acad Sci USA 97(7): 3084-8.
[0248] Barzilai, N., I. Gabriely, et al. (2001). “Offspring of centenarians have a favorable lipid profile.” J Am Geriatr Soc 49(1): 76-9.
[0249] Beckman, K. B. and B. N. Ames (1999). “Endogenous oxidative damage of mtDNA.” Mutat Res 424(1-2): 51-8.
[0250] Bourgeois, S. and D. Labuda (2004). “Dynamic allele-specific oligonucleotide hybridization on solid support.” Anal Biochem 324(2): 309-11.
[0251] Cale, J. M., C. E. Shaw, et al. (1998). “Optimization of a reverse transcription-polymerase chain reaction (RT-PCR) mass assay for low-abundance mRNA.” Methods Mol Biol 105: 351-71.
[0252] Chen, X., L. Levine, et al. (1999). “Fluorescence polarization in homogeneous nucleic acid analysis.” Genome Res 9(5): 492-8.
[0253] Chien, C. T., P. L. Bartel, et al. (1991). “The two-hybrid system: a method to identify and clone genes for proteins that interact with a protein of interest.” Proc Natl Acad Sci USA 88(21): 9578-82.
[0254] Cohen, A. S., D. L. Smisek, et al. (1996). “Emerging technologies for sequencing antisense oligonucleotides: capillary electrophoresis and mass spectrometry.” Adv Chromatogr 36: 127-62.
[0255] Cotton, R. G., N. R. Rodrigues, et al. (1988). “Reactivity of cytosine and thymine in single-base-pair mismatches with hydroxylamine and osmium tetroxide and its application to the study of mutations.” Proc Natl Acad Sci USA 85(12): 4397-401.
[0256] Cronin, M. T., R. V. Fucini, et al. (1996). “Cystic fibrosis mutation detection by hybridization to light-generated DNA probe arrays.” Hum Mutat 7(3): 244-55.
[0257] Dean, F. B., S. Hosono, et al. (2002). “Comprehensive human genome amplification using multiple displacement amplification.” Proc Natl Acad Sci USA 99(8): 5261-6.
[0258] Dillon, N. (1993). “Regulating gene expression in gene therapy.” Trends Biotechnol 11(5): 167-73.
[0259] D'Mello N, P., A. M. Childress, et al. (1994). “Cloning and characterization of LAG1, a longevity-assurance gene in yeast.” J Biol Chem 269(22): 15451-9.
[0260] Drmanac, R., S. Drmanac, et al. (2002). “Sequencing by hybridization (SBH): advantages, achievements, and opportunities.” Adv Biochem Eng Biotechnol 77: 75-101.
[0261] Elez, R., A. Piiper, et al. (2000). “Polo-like kinase1, a new target for antisense tumor therapy.” Biochem Biophys Res Commun 269(2): 352-6.
[0262] Evans, B. E., K. E. Rittle, et al. (1987). “Design of nonpeptidal ligands for a peptide receptor: cholecystokinin antagonists.” J Med Chem 30(7): 1229-39.
[0263] Fackler, O. T. and B. M. Peterlin (2000). “Endocytic entry of HIV-1.” Curr Biol 10(16): 1005-8.
[0264] Fakhrai-Rad, H., J. Zheng, et al. (2004). “SNP discovery in pooled samples with mismatch repair detection.” Genome Res 14(7): 1404-12.
[0265] Faragher, R. G., I. R. Kill, et al. (1993). “The gene responsible for Werner syndrome may be a cell division “counting” gene.” Proc Natl Acad Sci USA 90(24): 12030-4.
[0266] Fields, S. and O, Song (1989). “A novel genetic system to detect protein-protein interactions.” Nature 340(6230): 245-6.
[0267] Frank-Kamenetskii, M. D. and S. M. Mirkin (1995). “Triplex DNA structures.” Annu Rev Biochem 64: 65-95.
[0268] Freeman, W. M., S. J. Walker, et al. (1999). “Quantitative RT-PCR: pitfalls and potential.” Biotechniques 26(1): 112-22, 124-5.
[0269] Gasparini, P., A. Bonizzato, et al. (1992). “Restriction site generating-polymerase chain reaction (RG-PCR) for the probeless detection of hidden genetic variation: application to the study of some common cystic fibrosis mutations.” Mol Cell Probes 6(1): 1-7.
[0270] Gibbs, R. A., P. N. Nguyen, et al. (1989). “Detection of single DNA base differences by competitive oligonucleotide priming.” Nucleic Acids Res 17(7): 2437-48.
[0271] Griffin, H. G. and A. M. Griffin (1993). “DNA sequencing. Recent innovations and future trends.” Appl Biochem Biotechnol 38(1-2): 147-59.
[0272] Grossman, P. D., W. Bloch, et al. (1994). “High-density multiplex detection of nucleic acid sequences: oligonucleotide ligation assay and sequence-coded separation.” Nucleic Acids Res 22(21): 4527-34.
[0273] Guatelli, J. C., K. M. Whitfield, et al. (1990). “Isothermal, in vitro amplification of nucleic acids by a multienzyme reaction modeled after retroviral replication.” Proc Natl Acad Sci USA 87(5): 1874-8.
[0274] Hafner, G. J., I. C. Yang, et al. (2001). “Isothermal amplification and multimerization of DNA by Bst DNA polymerase.” Biotechniques 30(4): 852-6, 858, 860 passim.
[0275] Hardenbol, P., J. Baner, et al. (2003). “Multiplexed genotyping with sequence-tagged molecular inversion probes.” Nat Biotechnol 21(6): 673-8. Epub 2003 May 5.
[0276] Hayashi, K. (1992). “PCR-SSCP: a method for detection of mutations.” Genet Anal Tech Appl 9(3): 73-9.
[0277] Helbock, H. J., K. B. Beckman, et al. (1999). “8-Hydroxydeoxyguanosine and 8-hydroxyguanine as biomarkers of oxidative DNA damage.” Methods Enzymol 300: 156-66.
[0278] Hermonat, P. L. and N. Muzyczka (1984). “Use of adeno-associated virus as a mammalian DNA cloning vector: transduction of neomycin resistance into mammalian tissue culture cells.” Proc Natl Acad Sci USA 81(20): 6466-70.
[0279] Hitt, R., Y. Young-Xu, et al. (1999). “Centenarians: the older you get, the healthier you have been.” Lancet 354(9179): 652.
[0280] Hogrefe, H. H., R. L. Mullinax, et al. (1993). “A bacteriophage lambda vector for the cloning and expression of immunoglobulin Fab fragments on the surface of filamentous phage.” Gene 128(1): 119-26.
[0281] Hoogendoorn, B., N. Norton, et al. (2000). “Cheap, accurate and rapid allele frequency estimation of single nucleotide polymorphisms by primer extension and DHPLC in DNA pools.” Hum Genet 107(5): 488-93.
[0282] Hsu, I. C., Q. Yang, et al. (1994). “Detection of DNA point mutations with DNA mismatch repair enzymes.” Carcinogenesis 15(8): 1657-62.
[0283] Jazwinski, S. M., J. B. Chen, et al. (1993). “A single gene change can extend yeast life span: the role of Ras in cellular senescence.” Adv Exp Med Biol 330: 45-53.
[0284] Jobs, M., W. M. Howell, et al. (2003). “DASH-2: flexible, low-cost, and high-throughput SNP genotyping by dynamic allele-specific hybridization on membrane arrays.” Genome Res 13(5): 916-24.
[0285] Kanazawa, N., M. Kurosaki, et al. (2004). “Regulation of hepatitis C virus replication by interferon regulatory factor 1.” J Virol 78(18): 9713-20.
[0286] Kanehisa, M. (1984). “Use of statistical criteria for screening potential homologies in nucleic acid sequences.” Nucleic Acids Res 12(1 Pt 1): 203-13.
[0287] Kohno, T., T. Otsuka, et al. (1995). “Identification of a novel phospholipase C family gene at chromosome 2q33 that is homozygously deleted in human small cell lung carcinoma.” Hum Mol Genet 4(4): 667-74.
[0288] Kohler, G. and C. Milstein (1992). “Continuous cultures of fused cells secreting antibody of predefined specificity. 1975.” Biotechnology 24: 524-6.
[0289] Kotin, R. M. (1994). “Prospects for the use of adeno-associated virus as a vector for human gene therapy.” Hum Gene Ther 5(7): 793-801.
[0290] Kozal, M. J., N. Shah, et al. (1996). “Extensive polymorphisms observed in HIV-1 clade B protease gene using high-density oligonucleotide arrays.” Nat Med 2(7): 753-9.
[0291] Krebs, S., D. Seichter, et al. (2001). “Genotyping of dinucleotide tandem repeats by MALDI mass spectrometry of ribozyme-cleaved RNA transcripts.” Nat Biotechnol 19(9): 877-80.
[0292] Kremer, E. J. and M. Perricaudet (1995). “Adenovirus and adeno-associated virus mediated gene transfer.” Br Med Bull 51(1): 31-44.
[0293] Kulinski, J., D. Besack, et al. (2000). “CEL I enzymatic mutation detection assay.” Biotechniques 29(1): 44-6, 48.
[0294] Law, S. W., K. J. Lackner, et al. (1986). “The molecular biology of human apoA-I, apoA-II, apoC-II and apoB.” Adv Exp Med Biol 201: 151-62.
[0295] Leppert, M., J. L. Breslow, et al. (1988). “Inference of a molecular defect of apolipoprotein B in hypobetalipoproteinemia by linkage analysis in a large kindred.” J Clin Invest 82(3): 847-51.
[0296] Livak, K. J., J. Marmaro, et al. (1995). “Towards fully automated genome-wide polymorphism screening.” Nat Genet 9(4): 341-2.
[0297] Lizardi, P. M., X. Huang, et al. (1998). “Mutation detection and single-molecule counting using isothermal rolling-circle amplification.” Nat Genet 19(3): 225-32.
[0298] Ljungquist, B., S. Berg, et al. (1998). “The effect of genetic factors for longevity: a comparison of identical and fraternal twins in the Swedish Twin Registry.” J Gerontol A Biol Sci Med Sci 53(6): M441-6.
[0299] Maiato, H., C. L. Rieder, et al. (2003). “How do kinetochores CLASP dynamic microtubules?” Cell Cycle 2(6): 511-4.
[0300] Mansfield, E. S., M. Vainer, et al. (1996). “Sensitivity, reproducibility, and accuracy in short tandem repeat genotyping using capillary array electrophoresis.” Genome Res 6(9): 893-903.
[0301] Maxam, A. M. and W. Gilbert (1977). “A new method for sequencing DNA.” Proc Natl Acad Sci USA 74(2): 560-4.
[0302] McGue, M., J. W. Vaupel, et al. (1993). “Longevity is moderately heritable in a sample of Danish twins born 1870-1880.” J Gerontol 48(6): B237-44.
[0303] Mehrabian, M., R. S. Sparkes, et al. (1986). “Human apolipoprotein B: chromosomal mapping and DNA polymorphisms of hepatic and intestinal species.” Somat Cell Mol Genet 12(3): 245-54.
[0304] Miller, A. D. (1992). “Human gene therapy comes of age.” Nature 357(6378): 455-60.
[0305] Miller, A. D., J. V. Garcia, et al. (1991). “Construction and properties of retrovirus packaging cells based on gibbon ape leukemia virus.” J Virol 65(5): 2220-4.
[0306] Mitani, K. and C. T. Caskey (1993). “Delivering therapeutic genes—matching approach and application.” Trends Biotechnol 11(5): 162-6.
[0307] Muzyczka, N. (1994). “Adeno-associated virus (AAV) vectors: will they work?” J Clin Invest 94(4): 1351.
[0308] Myers, R. M., Z. Larin, et al. (1985). “Detection of single base substitutions by ribonuclease cleavage at mismatches in RNA:DNA duplexes.” Science 230(4731): 1242-6.
[0309] Myers, R. M., N. Lumelsky, et al. (1985). “Detection of single base substitutions in total genomic DNA.” Nature 313(6002): 495-8.
[0310] Nabel, G. J. and P. L. Felgner (1993). “Direct gene transfer for immunotherapy and immunization.” Trends Biotechnol 11(5): 211-5.
[0311] Nagley, P. and Y. H. Wei (1998). “Ageing and mammalian mitochondrial genetics.” Trends Genet 14(12): 513-7.
[0312] Nathan, C. and M. U. Shiloh (2000). “Reactive oxygen and nitrogen intermediates in the relationship between mammalian hosts and microbial pathogens.” Proc Natl Acad Sci USA 97(16): 8841-8.
[0313] Niu, T., Z. S. Qin, et al. (2002). “Bayesian haplotype inference for multiple linked single-nucleotide polymorphisms.” Am J Hum Genet 70(1): 157-69.
[0314] Orita, M., H. Iwahana, et al. (1989). “Detection of polymorphisms of human DNA by gel electrophoresis as single-strand conformation polymorphisms.” Proc Natl Acad Sci USA 86(8): 2766-70.
[0315] Odley, A., H. S. Hahn, et al. (2004). “Regulation of cardiac contractility by Rab4-modulated beta2-adrenergic receptor recycling.” Proc Natl Acad Sci USA 101 (18): 7082-7. Epub 2004 Apr. 22.
[0316] Overgaard, M. T., H. B. Boldt, et al. (2001). “Pregnancy-associated plasma protein-A2 (PAPP-A2), a novel insulin-like growth factor-binding protein-5 proteinase.” J Biol Chem 276(24): 21849-53. Epub 2001 Mar. 22.
[0317] Perls, T. T., E. Bubrick, et al. (1998). “Siblings of centenarians live longer.” Lancet 351(9115): 1560
[0318] Permutt, M. A., Wasson, J. C., Suarez, B. K., Lin, J., Thomas, J., Meyer, J., Lewitzky, S., Rennich, J. S., Parker, A., DuPrat, L., Maruti, S., Chayen, S., & Glaser, B. (2001). A genome scan for type 2 diabetes susceptibility loci in a genetically isolated population. Diabetes, 50(3), 681-685.
[0319] Raap, A. K. (1998). “Advances in fluorescence in situ hybridization.” Mutat Res 400(1-2): 287-98.
[0320] Remick, D. G. (1995). “Applied molecular biology of sepsis.” J Crit Care 10(4): 198-212.
[0321] Ronaghi, M., M. Uhlen, et al. (1998). “A sequencing method based on real-time pyrophosphate.” Science 281(5375): 363, 365.
[0322] Rosenecker, J., K. H. Harms, et al. (1996). “Adenovirus infection in cystic fibrosis patients: implications for the use of adenoviral vectors for gene transfer.” Infection 24(1): 5-8.
[0323] Saiki, R. K., T. L. Bugawan, et al. (1986). “Analysis of enzymatically amplified beta-globin and HLA-DQ alpha DNA with allele-specific oligonucleotide probes.” Nature 324(6093): 163-6.
[0324] Saiki, R. K., P. S. Walsh, et al. (1989). “Genetic analysis of amplified DNA with immobilized sequence-specific oligonucleotide probes.” Proc Natl Acad Sci USA 86(16): 6230-4.
[0325] Saleeba, J. A. and R. G. Cotton (1993). “Chemical cleavage of mismatch to detect mutations.” Methods Enzymol 217: 286-95.
[0326] Samulski, R. J., L. S. Chang, et al. (1989). “Helper-free stocks of recombinant adeno-associated viruses: normal integration does not require viral gene expression.” J Virol 63(9): 3822-8.
[0327] Sanger, F., S. Nicklen, et al. (1977). “DNA sequencing with chain-terminating inhibitors.” Proc Natl Acad Sci USA 74(12): 5463-7.
[0328] Sauter, E. R., M. Herlyn, et al. (2000). “Prolonged response to antisense cyclin D1 in a human squamous cancer xenograft model.” Clin Cancer Res 6(2): 654-60.
[0329] Schachter, F., L. Faure-Delanef, et al. (1994). “Genetic associations with human longevity at the APOE and ACE loci.” Nat Genet 6(1): 29-32.
[0330] Simon, H., I. Fortsch, et al. (1999). “Triple helix formation inhibits DNA gyrase activity.” Antisense Nucleic Acid Drug Dev 9(6): 527-31.
[0331] Sommerfelt, M. A. and R. A. Weiss (1990). “Receptor interference groups of 20 retroviruses plating on human cells.” Virology 176(1): 58-69.
[0332] Sterman, D. H., J. Treat, et al. (1998). “Adenovirus-mediated herpes simplex virus thymidine kinase/ganciclovir gene therapy in patients with localized malignancy: results of a phase I clinical trial in malignant mesothelioma.” Hum Gene Ther 9(7): 1083-92.
[0333] Storm, N., B. Darnhofer-Patel, et al. (2003). “MALDI-TOF mass spectrometry-based SNP genotyping.” Methods Mol Biol 212: 241-62.
[0334] Tornillo, L., Carafa, V., Richter, J., Sauter, G., Moch, H., Minola, E., Gambacorta, M., Bianchi, L., Vecchione, R., & Terracciano, L. M. (2000). Marked genetic similarities between hepatitis B virus-positive and hepatitis C virus-positive hepatocellular carcinomas. J Pathol, 192(3), 307-312.
[0335] Tratschin, J. D., M. H. West, et al. (1984). “A human parvovirus, adeno-associated virus, as a eucaryotic vector: transient expression and encapsidation of the procaryotic gene for chloramphenicol acetyltransferase.” Mol Cell Biol 4(10): 2072-81.
[0336] Walker, J. M. (1998). Pathomechanics and classification of cartilage lesions, facilitation of repair. J Orthop Sports Phys Ther, 28(4), 216-231.
[0337] West, A. B., Lockhart, P. J., O'Farell, C., & Farrer, M. J. (2003). Identification of a novel gene linked to parkin via a bi-directional promoter. J Mol Biol, 326(1), 11-19.
[0338] West, M. H., J. P. Trempe, et al. (1987). “Gene expression in adeno-associated virus vectors: the effects of chimeric mRNA structure, helper virus, and adenovirus VA1 RNA.” Virology 160(1): 38-47.
[0339] Wilson, C., M. S. Reitz, et al. (1989). “Formation of infectious hybrid virions with gibbon ape leukemia virus and human T-cell leukemia virus retroviral envelope glycoproteins and the gag and pol proteins of Moloney murine leukemia virus.” J Virol 63(5): 2374-8.
[0340] Wu, L., T. Sun, et al. (2002). “Identification of a family of mastermind-like transcriptional coactivators for mammalian notch receptors.” Mol Cell Biol 22(21): 7688-700.
[0341] Yajnik, V., Paulding, C., Sordella, R., McClatchey, A. I., Saito, M., Wahrer, D. C., Reynolds, P., Bell, D. W., Lake, R., van den Heuvel, S., Settleman, J., & Haber, D. A. (2003). DOCK4, a GTPase activator, is disrupted during tumorigenesis. Cell, 112(5), 673-684.
[0342] Yang, B., Wen, X., Kodali, N. S., Oleykowski, C. A., Miller, C. G., Kulinski, J., Besack, D., Yeung, J. A., Kowalski, D., & Yeung, A. T. (2000). Purification, cloning, and characterization of the CEL I nuclease. Biochemistry, 39(13), 3533-3541
[0343] Yu, M., E. Poeschla, et al. (1994). “Progress towards gene therapy for HIV infection.” Gene Ther 1(1): 13-26.

### Books

[0344] Abbas A K, Litchman A H. Cellular and Molecular Immunology. Philadelphia: Saunders; 1991. 417 p.
[0345] Austen B M and. Westwood O M R. Protein Targeting and Secretion. Oxford: IRL Press; 1991. 85 p.
[0346] Bishop M J, editor. Guide to Human Genome Computing, 2d ed. San Diego: Academic Press; 1998. 306 p.
[0347] Cowell I G, Austin C A, editors. DNA Library Protocols. Methods in Molecular Biology. Vol. 69 Totowa, N.J.:Humana Press; 1997. 321 p.
[0348] Freshney R I, editor. Animal Cell Culture: A Practical Approach. Oxford: IRL Press; 1986.
[0349] Freshney R I. Culture Of Animal Cells: A Manual of Basic Technique. New York: AR Liss; 1987. 397 p.
[0350] Glover D M, editor. DNA Cloning: A Practical Approach. Vols 1 & 2. Oxford; Washington: IRL Press; 1985.
[0351] Gribskov M, Devereux J, editors. Sequence Analysis Primer. Oxford University Press; 1994. 296 p.
[0352] Griffin A M, Griffin H G, editors. Computer Analysis of Sequence Data, Part 1. Totowa, N.J. Humana Press; 1994. 392 p.
[0353] Hames B D, Higgins S J, editors. Nucleic Acid Hybridization: A Practical Approach. Oxford: IRL Press; 1985. 245 p.
[0354] Hames B D, Higgins S J, editors. Transcription and Translation: A Practical Approach. Oxford: IRL Press; 1984. 328 p.
[0355] Harlow Ed, Lane D. Antibodies: A Laboratory Manual. New York: Cold Spring Harbor Laboratory; 1988. 726 p.
[0356] Heinje G. von. Sequence Analysis in Molecular Biology. San Diego: Academic Press; 1987. 188 p.
[0357] Hogan B, Costantini F, Lacy E, editors. Manipulating the Mouse Embryo: A Laboratory Manual. New York: Cold Spring Harbor Laboratory Press; 1986. 332 p.
[0358] Huber B E, Carr B I. Molecular and Immunologic Approaches. Mt. Kisco, N.Y.: Futura Publishing Co; 1994.
[0359] Jones J. Amino Acid and Peptide Synthesis. Oxford; New York: Oxford Science Publications; 1992. 86 p.
[0360] Kaufman P B, William W, Donghern K, editors. Handbook of Molecular and Cellular Methods in Biology and Medicine. Boca Raton: CRC Press; 1995. 484 p.
[0361] Lesk A M, editor. Computational Molecular Biology: sources and methods for sequence analysis. New York: Oxford University Press; 1988. 254 p.
[0362] Male D, Cooke A, Owen M, Trowsdale J, Champion B, editors. Advanced Immunology. 3rd ed. London; Baltimore: Mosby; 1996. 273 p.
[0363] McPherson M J, editor. Directed Mutagenesis: A Practical Approach. New York: IRL Press; 1991. 257 p.
[0364] McPherson M J, Quirke P, Taylor J R, editors. PCR: A Practical Approach. Oxford; New York: IRL Press; 1991. 253 p.
[0365] Miller J H, Calos M P, editors. Gene Transfer Vectors for Mammalian Cells. New York: Cold Spring Harbor Laboratory Press; 1987. 169 p.
[0366] Miller J H, Calos M P, editors. Gene Transfer Vectors For Mammalian Cells. New York: Cold Spring Harbor Laboratory; 1987. 169 p.
[0367] Pawlowitzki I H, Edwards J H, Thompson E A, editors. Genetic Mapping of Disease Genes. Academic Press London; 1997. 288 p.
[0368] Perbal B V. A Practical Guide to Molecular Cloning. 1st ed. New York: Wiley Interscience Publication; 1984. 554 p.
[0369] Perbal B V. A Practical Guide To Molecular Cloning. New York: Wiley; 1984. 554 p.
[0370] Peruski L F, Peruski A H. The Internet and the New Biology. Tools for Genomic and Molecular Research. Washington, D.C.: American Society for Microbiology Press; 1997.
[0371] Sambrook J. Molecular Cloning: A Laboratory Manual. 2nd ed. 3 vols. New York: Cold Spring Harbor Laboratory Press; 1989.
[0372] Sell S. Immunology, Immunopathology & Immunity. 5th ed. Stamford, Conn.: Appleton & Lange; 1996. 1014 p.
[0373] Smith D W, editor. Biocomputing. Informatics and Genome Projects, New York: Academic Press; 1993. 336 p.
[0374] Stites D P, Terr A T, editors. Basic and Clinical Immunology. 7th ed. Norwalk, Conn.: Appleton & Lange; 1991. 870 p.
[0375] Walker J M. Protein Protocols on CD-ROM, Humana Press, Totowa, N.J.
[0376] Weir D M, Herzenberg L A, Blackwell C, editors. Handbook Of Experimental Immunology. 4 vols. Oxford: Blackwell; 1986.
[0377] Woodward J. Immobilized Cells And Enzymes: A Practical Approach. Oxford: IRL Press; 1986.
[0378] Wu R, Grossman L, editors. Methods in Enzymology: Recombinant DNA Part E. Vol. 154. Amsterdam: Elsevier Science; 1987. 576 p.
[0379] Wu R, Grossman L, editors. Methods in Enzymology: Recombinant DNA Part F. Vol. 155. Amsterdam: Elsevier Science; 1987. 628 p.

### Patent

[0380] WO 30/42661A2
[0381] WO 1997US0005216
[0382] PCT/US94/05700
[0383] WO 0181628A1
[0384] WO 94/16101
[0385] WO 93/24641
[0386] U.S. Pat. No. 60/335,068
[0387] U.S. Pat. No. 5,869,242
[0388] U.S. Pat. No. 6,090,606
[0389] U.S. Pat. No. 5,888,819
[0390] U.S. Pat. No. 5,459,039
[0391] U.S. Pat. No. 5,498,531
[0392] U.S. Pat. No. 5,807,718
[0393] U.S. Pat. No. 4,683,195
[0394] U.S. Pat. No. 4,683,202
[0395] U.S. Pat. No. 4,797,368
[0396] U.S. Pat. No. 6,090,543
[0397] U.S. Pat. No. 6,107,065
[0398] U.S. Pat. No. 4,952,501.
[0399] U.S. 20040009479A1
[0400] U.S. Pat. No. 5,315,000
[0401] U.S. Pat. No. 5,585,089
[0402] U.S. Pat. No. 6,090,606
[0403] U.S. Pat. No. 5,869,242
[0404] U.S. Pat. No. 6,479,244
[0405] U.S. Pat. No. 4,797,368
[0406] U.S. Pat. No. 5,173,414

TABLE 1
List of Longevity candidate regions identified from the
genome wide scan and Fine Mapping association analyses. The first
column denotes the region identifier. The second and third columns
correspond to the chromosome and cytogenetic band, respectively.
The fourth and fifth columns correspond to the chromosomal start
and end coordinates of the NCBI genome assembly derived from
build 35 (B35).

| Region | Chromosome | Cytogenetic Band | B35 Start | B35 End |
|---|---|---|---|---|
| 1 | 1 | 1q23-q25 | 172922500 | 173790737 |
| 2 | 1 | 1q42-q43 | 225466378 | 225987741 |
| 3 | 1 | 1q42.13-q43 | 227029796 | 227560738 |
| 4 | 1 | 1q41-q44 | 236154391 | 236644953 |
| 5 | 2 | 2p24-p23 | 20891681 | 21414379 |
| 6 | 2 | 2p16.3 | 49817753 | 50101824 |
| 7 | 2 | 2p16.3 | 50101825 | 51414723 |
| 8 | 2 | 2q14.2-q14.3 | 121573870 | 122352090 |
| 9 | 2 | 2q14.3 | 127494872 | 128057833 |
| 10 | 2 | 2q23-q24 | 162067733 | 163003491 |
| 11 | 2 | 2q33 | 198533144 | 199078721 |
| 12 | 3 | 3p26.1-p25.1 | 6629288 | 8005030 |
| 13 | 3 | 3p21.33 | 32775326 | 33350489 |
| 14 | 3 | 3p21.3 | 39582260 | 40686361 |
| 15 | 4 | 4q21 | 77038761 | 77559991 |
| 16 | 4 | 4q23 | 100854365 | 101421476 |
| 17 | 4 | 4q28.1 | 126424833 | 127003431 |
| 18 | 4 | 4q31.21 | 143068047 | 143957383 |
| 19 | 6 | 6p22.1 | 27042873 | 27452810 |
| 20 | 6 | 6q25 | 152286110 | 153283388 |
| 21 | 7 | 7p14.3 | 30326902 | 30949204 |
| 22 | 7 | 7p14 | 32696611 | 33661735 |
| 23 | 7 | 7q31.3 | 127239803 | 127721306 |
| 24 | 7 | 7q35-q36 | 145001785 | 147803868 |
| 25 | 7 | 7q36.1 | 149454345 | 149955253 |
| 26 | 7 | 7q36.1 | 150075668 | 150561177 |
| 27 | 7 | 7q36 | 156602277 | 158116469 |
| 28 | 9 | 9p21.2 | 26700092 | 27297163 |
| 29 | 9 | 9q21.11 | 70132969 | 70960548 |
| 30 | 9 | 9q22.31 | 93175798 | 93764675 |
| 31 | 9 | 9q31.3-q32 | 110265356 | 110882740 |
| 32 | 10 | 10p12.31 | 19899999 | 20848770 |
| 33 | 10 | 10q23-q24 | 99966729 | 101219517 |
| 34 | 11 | 11p15.2 | 11697651 | 12231441 |
| 35 | 11 | 11p15.1 | 19443295 | 20335244 |
| 36 | 11 | 11q21 | 95101359 | 95908847 |
| 37 | 12 | 12q13 | 56066088 | 56635863 |
| 38 | 12 | 12q21.31 | 81345981 | 82268637 |
| 39 | 14 | 14q21.3 | 49608345 | 50174491 |
| 40 | 14 | 14q31 | 80247029 | 80930316 |
| 41 | 16 | 16q12.1 | 46450036 | 46985312 |
| 42 | 16 | 16q22-q23 | 73578487 | 74088978 |
| 43 | 16 | 16q23.3-q24.1 | 76445659 | 78049764 |
| 44 | 18 | 18q11.2 | 22503963 | 23258373 |
| 45 | 18 | 18q22-q23 | 61324317 | 61945465 |
| 46 | 22 | 22q11.21 | 16451100 | 17003269 |
| 47 | X | Xq13.3 | 80030757 | 80606131 |

TABLE 2

Longevity genome wide association study results in the Quebec Founder Population (QFP). SNP markers
found to be associated with longevity from the analysis of genome wide scan (GWS) data. Columns
include: Region ID; Chromosome; Build 35 location in base pairs (bp); rs#, dbSNP data base
(NCBI) reference number; Sequence ID, unique numerical identifier for this patent application;
Sequence, 21 bp of sequence covering 10 base pair of unique sequence flanking either side of central
polymorphic SNP; −log10 P values for GWS, −log10 of the P value for statistical significance
from the GWS for single SNP markers (both T test and Permutation test p-values are displayed; see
Example section) and for the most highly associated multi-marker haplotypes centered at the
reference marker and defined by the sliding windows of specified sizes (W05, W09 and W15).

Poolex

| | | | | | | | | | | |
|---|---|---|---|---|---|---|---|---|---|---|
| | | | | | | Single | Single Marker | | | |
| | | | | | | Marker | (Permutation | | | |
| Region ID | Chr | B35 Position | RS# | Seq ID | Flanking Sequence | (T test) | test) | W05 | W09 | W15 |

| | | | | | | | | | | |
|---|---|---|---|---|---|---|---|---|---|---|
| 1 | 1 | 172922500 | 12758275 | 4805 | GCAGTTTACTRATTCTTAGAT | 1.646 | 1.581 | 1.481 | 1.111 | 1.019 |
| 1 | 1 | 172951095 | 1553770 | 4806 | AAATGCTCAGYCTGTCTAATT | 1.216 | 1.269 | 1.377 | 1.148 | 1.035 |
| 1 | 1 | 172953249 | 1858537 | 4807 | GGGTCCTGGAWTGATGGTGTA | 1.153 | 1.099 | 1.170 | 0.925 | 0.952 |
| 1 | 1 | 172969990 | 352333 | 4808 | GTGCATCTGARAATAGAGGCT | 0.063 | 0.068 | 0.788 | 1.123 | 0.923 |
| 1 | 1 | 172980523 | — | 4809 | CCTGCTTTATRAAGACTATAT | 0.027 | 0.028 | 0.409 | 1.010 | 0.914 |
| 1 | 1 | 173002087 | 181280 | 4810 | CAAAAATACAWGTGTTTTTCA | 0.754 | 0.699 | 0.323 | 0.599 | 0.840 |
| 1 | 1 | 173006422 | 1503120 | 4811 | ATAGAGGGGTYATTTGCAAGT | 0.236 | 0.225 | 0.311 | 0.421 | 0.843 |
| 1 | 1 | 173016407 | 2504511 | 4812 | GTCTAGTGTCRCTTGGCTGTT | 0.825 | 0.856 | 0.398 | 0.265 | 0.787 |
| 1 | 1 | 173024350 | — | 4813 | CAAGTCAAACMGATTTTAAGC | 0.113 | 0.111 | 0.347 | 0.368 | 0.664 |
| 1 | 1 | 173030154 | 2455729 | 4814 | GATCGACATAMGTCTGCACAC | 0.202 | 0.204 | 0.458 | 0.465 | 0.835 |
| 1 | 1 | 173037068 | 2455727 | 4815 | CAAAGTGAGARTAGAATGAGA | 0.577 | 0.575 | 0.298 | 0.346 | 0.863 |
| 1 | 1 | 173049316 | 2455760 | 4816 | GACTGTGCTGSATTAACCAAT | 0.450 | 0.454 | 0.406 | 0.563 | 0.859 |
| 1 | 1 | 173067383 | 1354286 | 4817 | GAAAACTATAYATCATTGTAA | 0.590 | 0.550 | 0.408 | 0.856 | 0.947 |
| 1 | 1 | 173077283 | 12139848 | 4818 | CCCTGAGGAARAAAAGAAGTA | 0.410 | 0.404 | 0.588 | 1.148 | 0.920 |
| 1 | 1 | 173085783 | 1503124 | 4819 | GCTTGGTCCARTGTGTTTTGG | 0.242 | 0.237 | 1.316 | 1.144 | 0.927 |
| 1 | 1 | 173119991 | 2455725 | 4820 | ACAGGGTTTTSTTGCATAGAC | 1.016 | 1.023 | 1.505 | 1.177 | 0.724 |
| 1 | 1 | 173134901 | 1503116 | 4821 | TGTGAAAAGARCCTACTGTTC | 2.096 | 2.074 | 1.360 | 1.268 | 1.032 |
| 1 | 1 | 173143278 | 4652175 | 4822 | TTTGAGGCAGRATTTTATAAA | 1.293 | 1.312 | 1.588 | 1.148 | 1.586 |
| 1 | 1 | 173146438 | 4650943 | 4823 | TTGTAGAATTRTGACTAGTCT | 0.204 | 0.202 | 1.665 | 1.015 | 1.486 |
| 1 | 1 | 173157471 | 6425384 | 4824 | CTTAAAATGGRTATTTTTACT | 0.000 | 0.000 | 0.569 | 1.539 | 1.449 |
| 1 | 1 | 173164621 | — | 4825 | ATCCTCTGCASACACCTTCTC | 0.000 | 0.000 | 0.025 | 2.137 | 1.387 |
| 1 | 1 | 173171836 | 12742614 | 4826 | AGGTGATAGCYTGTGATATGC | 0.143 | 0.139 | 0.552 | 1.318 | 1.503 |
| 1 | 1 | 173177355 | — | 4827 | AATCTGTCTGSCACGCCTGCC | 0.031 | 0.028 | 1.454 | 0.776 | 1.851 |
| 1 | 1 | 173188880 | 6676641 | 4828 | TGCATGATATKGTTGTTTCTC | 1.511 | 1.420 | 1.185 | 0.872 | 1.813 |
| 1 | 1 | 173194705 | 1569639 | 4829 | CTTAGTTAGAKAATTTTTTTG | 2.272 | 2.155 | 1.118 | 0.951 | 1.433 |
| 1 | 1 | 173204977 | 10157031 | 4830 | CTAAGCAGCARTTTTTGAAAA | 0.011 | 0.011 | 1.340 | 1.264 | 1.168 |
| 1 | 1 | 173219357 | 10489473 | 4831 | TAATGCCTTTMAGTGCAGTTA | 0.088 | 0.088 | 0.952 | 1.445 | 1.080 |
| 1 | 1 | 173227979 | 6692448 | 4832 | GATATTGTATYGAAGAAGAAC | 0.404 | 0.395 | 0.508 | 1.651 | 0.990 |
| 1 | 1 | 173235591 | 7530550 | 4833 | GCTTCAACTGSAAGTATATAG | 0.710 | 0.769 | 0.909 | 1.298 | 0.905 |
| 1 | 1 | 173245194 | 2206510 | 4834 | GATTTGGAAAYACTGATGGCC | 1.288 | 1.230 | 1.331 | 0.655 | 1.057 |
| 1 | 1 | 173256851 | 2294654 | 4835 | AAGGACTAAARTACAGCAAGA | 0.866 | 0.857 | 1.266 | 0.682 | 1.188 |
| 1 | 1 | 173262289 | 1569638 | 4836 | CAGTTTGCTARATTGTAAAAT | 0.825 | 0.861 | 0.930 | 0.693 | 0.913 |
| 1 | 1 | 173268546 | 10913204 | 4837 | TACTGAGAGTRACTGGTCCTG | 0.736 | 0.722 | 0.543 | 0.848 | 0.498 |
| 1 | 1 | 173274944 | 10798461 | 4838 | ACAAGGCAGGWTTTGCCAGCT | 0.050 | 0.048 | 0.270 | 0.772 | 0.533 |
| 1 | 1 | 173280130 | 10489475 | 4839 | GTTGTATGCTSTTCCCATTAG | 0.080 | 0.082 | 0.244 | 0.476 | 0.913 |
| 1 | 1 | 173298693 | 16849993 | 4840 | CTCCTCAGAGYTTCCCTTTAT | 0.093 | 0.092 | 0.123 | 0.353 | 0.958 |
| 1 | 1 | 173303088 | 240104 | 4841 | TTGCCCATGGYACACTCCCCT | 0.875 | 0.869 | 0.195 | 0.163 | 0.793 |
| 1 | 1 | 173314633 | 10489479 | 4842 | GTAATGTGACYTCCAGGAAAT | 0.000 | 0.000 | 0.350 | 0.363 | 0.558 |
| 1 | 1 | 173328155 | — | 4843 | AAATTCTAGAYAAGAATCTGA | 0.284 | 0.285 | 0.370 | 0.509 | 0.460 |
| 1 | 1 | 173339083 | 6670258 | 4844 | CAAACACAATRCACATTAGAA | 0.459 | 0.457 | 0.718 | 0.556 | 0.323 |
| 1 | 1 | 173353855 | 6689901 | 4845 | TTAGTCACTTWGTCTGTTACT | 0.151 | 0.146 | 0.718 | 0.671 | 0.344 |
| 1 | 1 | 173364672 | — | 4846 | TTGTCTTTCTWAGTATCTGTA | 1.559 | 1.512 | 0.688 | 0.486 | 0.397 |
| 1 | 1 | 173370788 | 953541 | 4847 | GACGCTGTGAWAGGAACATTC | 0.000 | 0.000 | 0.643 | 0.410 | 0.524 |
| 1 | 1 | 173378657 | 17546000 | 4848 | CCATAGATAGRATAATGAAAA | 0.218 | 0.218 | 0.772 | 0.581 | 0.510 |
| 1 | 1 | 173385960 | 10494501 | 4849 | CAGACTGCACRTAGAATAATA | 0.405 | 0.401 | 0.190 | 0.532 | 0.857 |
| 1 | 1 | 173391904 | 726252 | 4850 | CTGTCTCTCAYGCCTTCCTTG | 0.355 | 0.361 | 0.341 | 0.678 | 1.087 |
| 1 | 1 | 173403942 | 791030 | 4851 | TGAACAAATGRCCTATTCTGC | 0.201 | 0.212 | 0.364 | 0.248 | 1.430 |
| 1 | 1 | 173409624 | 17354671 | 4852 | TGAACATGAARAAAAGGAAAT | 0.857 | 0.851 | 0.452 | 0.749 | 1.994 |
| 1 | 1 | 173424493 | 1995651 | 4853 | CCCAAAAAAAWTTCTATCATT | 0.348 | 0.319 | 0.308 | 1.167 | 3.026 |
| 1 | 1 | 173445270 | 10913246 | 4854 | GACTCAGTAGSATTTTACCTT | 0.656 | 0.630 | 1.205 | 1.437 | 2.702 |
| 1 | 1 | 173455106 | 10494502 | 4855 | TAGTGACTTAYCATAGTTCCT | 0.037 | 0.036 | 1.361 | 1.999 | 2.766 |
| 1 | 1 | 173462360 | 17352504 | 4856 | ACTATTAGATRTGCTATGTTT | 2.261 | 2.177 | 1.735 | 2.812 | 2.955 |
| 1 | 1 | 173469910 | 1325601 | 4857 | CAGAAACTGTKTAGAGCAGGC | 1.461 | 1.398 | 2.220 | 2.840 | 2.850 |
| 1 | 1 | 173475519 | 1325599 | 4858 | TTATTTCCCCRCATGAAAATG | 1.434 | 1.360 | 3.143 | 2.892 | 3.454 |
| 1 | 1 | 173481447 | 10913248 | 4859 | TGGCAGCTCTSTCAGGTCAGT | 2.400 | 2.348 | 3.044 | 3.065 | 3.198 |
| 1 | 1 | 173491681 | 10913254 | 4860 | TTTAAGCAGAMAGGCAAAAAC | 4.146 | 3.804 | 3.289 | 3.039 | 3.198 |
| 1 | 1 | 173503616 | 760939 | 4861 | TATTCTCTTGRCATAAGGATT | 0.618 | 0.587 | 3.542 | 3.748 | 3.130 |
| 1 | 1 | 173510267 | 10913257 | 4862 | CTTCTCTGTTKTCTTGGACCT | 1.061 | 1.032 | 2.688 | 3.526 | 3.369 |
| 1 | 1 | 173522159 | 10732997 | 4863 | ATTATTTGAARTAGATTTGAA | 0.604 | 0.590 | 2.231 | 3.496 | 3.262 |
| 1 | 1 | 173525723 | 1325596 | 4864 | GACCCTGATGRCACTACAGCT | 0.299 | 0.296 | 1.676 | 2.522 | 2.888 |
| 1 | 1 | 173539000 | 16850237 | 4865 | AGATTAGAAGYGACCCTTGTT | 2.965 | 3.014 | 1.463 | 1.778 | 2.700 |
| 1 | 1 | 173548489 | 6681309 | 4866 | AGTCAGAATTKAGTCTGGTAG | 0.471 | 0.464 | 1.283 | 1.400 | 2.492 |
| 1 | 1 | 173558611 | 16850265 | 4867 | CAGGACAAAASGGCATGTAAG | 0.386 | 0.372 | 2.165 | 1.157 | 1.934 |
| 1 | 1 | 173566293 | 4652196 | 4868 | GATCCTCTCAYTCAGTTGTGT | 0.010 | 0.010 | 0.584 | 1.038 | 1.090 |
| 1 | 1 | 173572622 | 16850279 | 4869 | CAATTGCAGGYTCACAGAAAC | 1.855 | 1.775 | 0.467 | 1.104 | 0.992 |
| 1 | 1 | 173579759 | 16850292 | 4870 | GTAGGAAGTCYGTCCTCTGCC | 0.026 | 0.026 | 0.381 | 0.309 | 0.767 |
| 1 | 1 | 173586269 | 4652202 | 4871 | TTCAAGATGASTGGATTCTGG | 0.176 | 0.177 | 0.573 | 0.363 | 0.809 |
| 1 | 1 | 173592666 | — | 4872 | AAGATGTAGAYACACACACAA | 0.149 | 0.149 | 0.039 | 0.347 | 0.767 |
| 1 | 1 | 173599953 | 12131188 | 4873 | TAAATAAATGYCATTTGCTTT | 0.494 | 0.488 | 0.211 | 0.350 | 0.296 |
| 1 | 1 | 173606740 | 11585886 | 4874 | CTGGACATGGRAGGAAACAAA | 0.130 | 0.130 | 0.245 | 0.132 | 0.302 |
| 1 | 1 | 173613449 | 10489303 | 4875 | TAGGTCATACRGATTTCAAAG | 0.751 | 0.746 | 0.238 | 0.170 | 0.318 |
| 1 | 1 | 173624043 | 760690 | 4876 | AATCATTTGCYGAGTTTATAG | 0.294 | 0.292 | 0.327 | 0.220 | 0.348 |
| 1 | 1 | 173632495 | 17379085 | 4877 | AAAACCCACAYGGAAGTCACC | 0.043 | 0.041 | 0.316 | 0.311 | 0.112 |
| 1 | 1 | 173637961 | 17313493 | 4878 | GTTGCAGTAAYTGACTCAGCC | 0.751 | 0.750 | 0.225 | 0.301 | 0.111 |
| 1 | 1 | 173651588 | 4652211 | 4879 | TGTATACATAYCGCCAACAAG | 0.135 | 0.135 | 0.321 | 0.311 | 0.139 |
| 1 | 1 | 173660586 | 2235300 | 4880 | ACCTACTTCTYTGACCAGTTG | 0.459 | 0.448 | 0.468 | 0.173 | 0.176 |
| 1 | 1 | 173667964 | 16850479 | 4881 | TACCTAGAGGYAAGAATTGGC | 0.533 | 0.513 | 0.244 | 0.124 | 0.252 |
| 1 | 1 | 173674919 | — | 4882 | TATATGTGCASACAGGTGCTT | 0.000 | 0.000 | 0.230 | 0.205 | 0.354 |
| 1 | 1 | 173682085 | — | 4883 | TCTCCTTCAGSACCTACAGCT | 0.280 | 0.268 | 0.093 | 0.133 | 0.278 |
| 1 | 1 | 173691633 | 228006 | 4884 | TCAGCCTAAAYGTTTCTTTCT | 0.126 | 0.128 | 0.093 | 0.320 | 0.426 |
| 1 | 1 | 173703286 | 228015 | 4885 | ATAAAACCAGSAGTATGAGCA | 0.001 | 0.002 | 0.132 | 0.389 | 0.405 |
| 1 | 1 | 173710122 | 6661023 | 4886 | GGTCTTTGTCYTTTTAGTGGT | 0.449 | 0.448 | 0.366 | 0.340 | 0.275 |
| 1 | 1 | 173724072 | 13375529 | 4887 | CAGGCAGTCCRCATGGTCTAG | 0.533 | 0.525 | 0.583 | 0.516 | 0.355 |
| 1 | 1 | 173730025 | 10753142 | 4888 | CTTGCCTAGCWCAAACCCAAG | 1.058 | 0.991 | 0.736 | 0.432 | 0.378 |
| 1 | 1 | 173735903 | — | 4889 | TGTTCAAAAGRTTCCTCACTT | 0.685 | 0.705 | 0.999 | 0.425 | 0.278 |
| 1 | 1 | 173741051 | 6672689 | 4890 | GTCTTTAATCRTGTGGAAAGG | 0.320 | 0.319 | 0.727 | 0.601 | 0.483 |
| 1 | 1 | 173748025 | 6667588 | 4891 | GTCATGGGGCRAAACTGAATT | 1.036 | 1.035 | 0.358 | 0.657 | 0.552 |
| 1 | 1 | 173767376 | — | 4892 | CCAAGTGCCCKGTTCCCTCTT | 0.003 | 0.003 | 0.324 | 0.482 | 0.566 |
| 1 | 1 | 173773076 | 6704507 | 4893 | AGTTATTAACYTATTCACACT | 0.148 | 0.148 | 0.427 | 0.615 | 0.597 |
| 1 | 1 | 173784395 | 2068331 | 4894 | GTTTCTAACCYCTGGAATAAA | 0.580 | 0.593 | 0.093 | 0.561 | 0.516 |
| 1 | 1 | 173790737 | 1028304 | 4895 | AACATCAAAAYCATCAGTTGT | 0.570 | 0.583 | 0.599 | 0.524 | 0.466 |
| 2 | 1 | 225466378 | 537250 | 4896 | ACAGATACTCRGTCGGCCCAG | 0.098 | 0.096 | 0.093 | 0.330 | 0.319 |
| 2 | 1 | 225472223 | 484947 | 4897 | ATTGAGCCTGMTCAGTAATGA | 0.249 | 0.256 | 0.058 | 0.139 | 0.319 |
| 2 | 1 | 225479994 | 627512 | 4898 | ATCATACATTYTCTACTTCGT | 0.137 | 0.136 | 0.079 | 0.101 | 0.306 |
| 2 | 1 | 225488350 | 1380024 | 4899 | CTTAATTCTAYTTGAGTCACC | 0.111 | 0.110 | 0.083 | 0.240 | 0.316 |
| 2 | 1 | 225496212 | 682283 | 4900 | GATCCAGGGTRTTATGATGGA | 0.496 | 0.494 | 0.134 | 0.217 | 0.165 |
| 2 | 1 | 225504626 | 12122684 | 4901 | ATTACCCTTTYCTGTGCCCTT | 0.139 | 0.139 | 0.415 | 0.231 | 0.427 |
| 2 | 1 | 225511143 | 1359150 | 4902 | AAGGCCATAGSTAGGAGCATG | 0.484 | 0.464 | 0.505 | 0.208 | 0.490 |
| 2 | 1 | 225519198 | 630685 | 4903 | GGAACCTGCARTGAGAAGTAA | 1.062 | 1.094 | 0.411 | 0.194 | 0.400 |
| 2 | 1 | 225531481 | 12139882 | 4904 | TTGTCACTCAYAGGGCCAATG | 0.330 | 0.344 | 0.431 | 0.906 | 0.494 |
| 2 | 1 | 225537876 | 619422 | 4905 | GGAAAACCCAMAGAAGAATAT | 0.225 | 0.239 | 0.294 | 0.939 | 0.664 |
| 2 | 1 | 225610045 | — | 4906 | AATCCAGCTCRCAAACCAAGA | 0.217 | 0.220 | 0.967 | 0.960 | 0.744 |
| 2 | 1 | 225616273 | 9435811 | 4907 | CCTCTAATGGSTTGGTCACAC | 0.131 | 0.130 | 1.032 | 1.009 | 0.904 |
| 2 | 1 | 225623289 | 12026629 | 4908 | TTCTTTCATGYATCATGTAGA | 2.452 | 2.384 | 0.927 | 0.944 | 0.884 |
| 2 | 1 | 225626459 | — | 4909 | CACGCCTTTCYAGCCTCACAC | 0.596 | 0.592 | 1.169 | 0.927 | 3.052 |
| 2 | 1 | 225633768 | 342782 | 4910 | ATTTATGTATKCAGGTATTCA | 0.030 | 0.030 | 1.729 | 1.041 | 4.062 |
| 2 | 1 | 225645683 | 342785 | 4911 | AGGAGAAGAGMCTTCAAACTG | 0.557 | 0.551 | 0.455 | 1.205 | 3.966 |
| 2 | 1 | 225660552 | — | 4912 | CACATCTACCRACCATCTGAC | 0.927 | 0.883 | 0.414 | 3.775 | 3.710 |
| 2 | 1 | 225667166 | — | 4913 | AGTGGAGGTCRTTAGGAGAGG | 0.319 | 0.312 | 0.603 | 3.761 | 3.447 |
| 2 | 1 | 225673850 | 342818 | 4914 | ACATTTAAATYATCCAGTCTG | 0.513 | 0.500 | 3.447 | 3.735 | 4.665 |
| 2 | 1 | 225680359 | 7526949 | 4915 | CCCATTGTTCRTTTTTGGAAT | 0.441 | 0.436 | 3.789 | 4.364 | 3.966 |
| 2 | 1 | 225687492 | 12041301 | 4916 | AGACAACATCRTGTTCTTCCA | 4.536 | 2.865 | 3.687 | 3.761 | 3.221 |
| 2 | 1 | 225692972 | 16849638 | 4917 | TCATCTCTTAWGCAACTGAAC | 2.478 | 2.365 | 3.966 | 3.108 | 2.686 |
| 2 | 1 | 225703254 | — | 4918 | GCACATTTCAYCAAGCTGATA | 0.397 | 0.398 | 3.397 | 2.886 | 2.545 |
| 2 | 1 | 225722322 | — | 4919 | TGAATATAATYATAAACTGAG | 1.197 | 1.054 | 1.447 | 3.327 | 2.372 |
| 2 | 1 | 225730168 | 9435835 | 4920 | AAGGATCTTASCCTGCATTTT | 0.150 | 0.153 | 0.328 | 2.847 | 2.310 |
| 2 | 1 | 225738651 | 237777 | 4921 | TTACATTACAYTTCTTGACAT | 0.030 | 0.031 | 0.872 | 1.260 | 2.290 |
| 2 | 1 | 225746316 | 9069 | 4922 | TTGGGACACAWTCGTTGGAAC | 0.199 | 0.197 | 0.484 | 0.525 | 2.409 |
| 2 | 1 | 225756176 | 9435838 | 4923 | TCAAAGCCGCWTGAGAAGGTG | 1.719 | 1.730 | 0.550 | 0.591 | 2.457 |
| 2 | 1 | 225765367 | 237799 | 4924 | TTGGGTTCTCYGTTTCAGACT | 0.279 | 0.276 | 0.571 | 0.292 | 0.955 |
| 2 | 1 | 225771581 | 10916465 | 4925 | AGGACCAAGASTAAAGGGAAA | 0.294 | 0.274 | 0.790 | 0.443 | 0.402 |
| 2 | 1 | 225807183 | 16849715 | 4926 | AGGAATTCAAWCCTCAAGACC | 0.139 | 0.136 | 0.117 | 0.487 | 0.391 |
| 2 | 1 | 225815451 | 238098 | 4927 | GAGCCAGGGTYCAGTTTGTGC | 0.652 | 0.637 | 0.245 | 0.485 | 0.315 |
| 2 | 1 | 225829949 | 6587333 | 4928 | GTCATAAATGRGTATTTGTTA | 0.000 | 0.000 | 0.227 | 0.143 | 0.316 |
| 2 | 1 | 225843520 | 12131147 | 4929 | TGTGCCATTCSAATGTGGCTT | 0.708 | 0.712 | 0.255 | 0.153 | 0.418 |
| 2 | 1 | 225845432 | 683116 | 4930 | ATCTGGATAGWGATCACTGAG | 0.242 | 0.241 | 0.194 | 0.283 | 0.377 |
| 2 | 1 | 225862235 | 4925479 | 4931 | AATGTCAACTYGATTTTAGAT | 0.207 | 0.212 | 0.272 | 0.297 | 0.097 |
| 2 | 1 | 225867901 | 482442 | 4932 | GTTACAGACAMACAAGTTAAG | 0.416 | 0.418 | 0.331 | 0.273 | 0.082 |
| 2 | 1 | 225872563 | 500639 | 4933 | AAACGAGTTTRTTACTTTGAG | 0.328 | 0.328 | 0.324 | 0.256 | 0.155 |
| 2 | 1 | 225894215 | — | 4934 | CTTACAGCACWCAAAAGATAA | 0.903 | 0.848 | 0.423 | 0.122 | 0.204 |
| 2 | 1 | 225902995 | 1328219 | 4935 | CTTCTCAGGTRTATGACAGTA | 0.154 | 0.158 | 0.278 | 0.106 | 0.147 |
| 2 | 1 | 225909019 | 7555749 | 4936 | CAACCTTATAMATTATCGGCA | 0.525 | 0.524 | 0.163 | 0.225 | 0.194 |
| 2 | 1 | 225914901 | 4925489 | 4937 | GTGAAGCAATRGCTCTAGATT | 0.047 | 0.045 | 0.026 | 0.235 | 0.138 |
| 2 | 1 | 225921466 | — | 4938 | GGATCTGATGYACAGTAGTCC | 0.046 | 0.038 | 0.194 | 0.211 | 0.172 |
| 2 | 1 | 225930073 | 17355666 | 4939 | GACCGTCAACYGACACAAAAT | 0.099 | 0.099 | 0.167 | 0.133 | 0.219 |
| 2 | 1 | 225938469 | 11805194 | 4940 | CATTTACTGAYGTTTGAACTC | 0.890 | 0.884 | 0.209 | 0.144 | 0.185 |
| 2 | 1 | 225947206 | 12033236 | 4941 | GACTGAATTTYGCATATACAG | 0.387 | 0.389 | 0.325 | 0.129 | 0.209 |
| 2 | 1 | 225949387 | 6671385 | 4942 | TTACATGGTCYTCAACAGCAG | 0.126 | 0.124 | 0.342 | 0.236 | 0.110 |
| 2 | 1 | 225971007 | 927205 | 4943 | AAGAAAGTGAYTCCAGAGACA | 0.484 | 0.438 | 0.212 | 0.264 | 0.213 |
| 2 | 1 | 225982078 | — | 4944 | CCCAGTCTGTYGAATGAAGAA | 0.258 | 0.248 | 0.287 | 0.341 | 0.220 |
| 2 | 1 | 225987741 | 927204 | 4945 | GGGTCCTCTTYCAGAGGTTTG | 0.499 | 0.516 | 0.249 | 0.155 | 0.262 |
| 3 | 1 | 227029796 | 12135204 | 4946 | ATCCATGATTRCAAGTGATTG | 0.273 | 0.270 | 0.441 | 0.265 | 0.471 |
| 3 | 1 | 227038868 | 200580 | 4947 | TTGGTTGTAARATCTTAGAAA | 0.155 | 0.159 | 0.101 | 0.371 | 0.406 |
| 3 | 1 | 227056681 | 853465 | 4948 | CTAGAAATCCWGCAGACAGTA | 0.351 | 0.352 | 0.187 | 0.466 | 0.267 |
| 3 | 1 | 227062143 | 699900 | 4949 | CTATTTACCASAAGCAAGCAT | 0.232 | 0.237 | 0.255 | 0.257 | 0.298 |
| 3 | 1 | 227068583 | 10779849 | 4950 | TGCAGATGGTYTCACTCACTC | 0.524 | 0.532 | 0.399 | 0.230 | 0.309 |
| 3 | 1 | 227082261 | 3761950 | 4951 | GCTAAGCCAGRCAGTAACCCT | 0.464 | 0.476 | 0.495 | 0.312 | 0.696 |
| 3 | 1 | 227102376 | 2225146 | 4952 | GGTTGTTTTCRTTAGCAGCTG | 0.663 | 0.656 | 0.420 | 0.334 | 0.414 |
| 3 | 1 | 227108750 | 16852170 | 4953 | CCTTCACTAAYGAGGCTAGAC | 0.612 | 0.597 | 0.467 | 0.265 | 0.389 |
| 3 | 1 | 227115479 | 2148964 | 4954 | GGCCTTTGCAKTACCCTCTCT | 0.078 | 0.068 | 0.393 | 0.911 | 0.568 |
| 3 | 1 | 227122216 | 2493144 | 4955 | AAGAGTCATTKTTGCAGATTC | 0.644 | 0.621 | 0.176 | 0.774 | 0.571 |
| 3 | 1 | 227129065 | 2296800 | 4956 | AAATGTATTAYGCTATGTTAT | 0.268 | 0.301 | 0.868 | 0.599 | 0.475 |
| 3 | 1 | 227135608 | 3789662 | 4957 | AAATCCTCACRTTTTACAACA | 0.141 | 0.139 | 0.889 | 0.751 | 0.479 |
| 3 | 1 | 227147004 | 11122575 | 4958 | AAAATCCTTCRTGTCATTTGC | 1.937 | 1.984 | 0.587 | 0.589 | 0.485 |
| 3 | 1 | 227153414 | 11122576 | 4959 | TTTCATTGTCYCAATATTCCC | 0.263 | 0.254 | 0.900 | 0.541 | 0.402 |
| 3 | 1 | 227160094 | 9804147 | 4960 | CTTGGAAGAGRCATGTGAGCC | 0.067 | 0.067 | 0.887 | 0.426 | 0.456 |
| 3 | 1 | 227167331 | 7548604 | 4961 | ACAGAATATTSCTGGCAAAAT | 1.051 | 0.999 | 0.169 | 0.490 | 0.410 |
| 3 | 1 | 227174605 | 2478518 | 4962 | TTACTTATGTSCTGGTTTATG | 0.179 | 0.178 | 0.153 | 0.483 | 0.449 |
| 3 | 1 | 227186246 | 2478542 | 4963 | GTGAAGCTTCYGAGCATTTGT | 0.006 | 0.006 | 0.285 | 0.223 | 0.525 |
| 3 | 1 | 227196981 | 2493148 | 4964 | TTTACCTAAGYGCATCTCTGT | 0.252 | 0.262 | 0.048 | 0.250 | 0.540 |
| 3 | 1 | 227205229 | 2282319 | 4965 | CCGACCACAAYGAGTTCTGGA | 0.527 | 0.528 | 0.256 | 0.293 | 0.903 |
| 3 | 1 | 227213689 | 6677009 | 4966 | TCTTGGACTCYGAAGAGTTGA | 0.088 | 0.095 | 0.402 | 0.287 | 0.663 |
| 3 | 1 | 227219919 | 11122597 | 4967 | ATTCTTCACCRGCTCTAGGAT | 0.911 | 0.895 | 0.397 | 0.349 | 0.818 |
| 3 | 1 | 227231640 | 12082061 | 4968 | GCATAACACAYGGCTAGCGCA | 0.439 | 0.414 | 0.581 | 0.819 | 1.742 |
| 3 | 1 | 227238473 | 11122604 | 4969 | TTTCTAATCTRTGTTCCATAG | 0.258 | 0.265 | 0.678 | 1.044 | 2.642 |
| 3 | 1 | 227246905 | 10864783 | 4970 | TAGTATACACRAGCTATCTAA | 0.969 | 0.975 | 1.022 | 1.241 | 2.983 |
| 3 | 1 | 227258633 | 1202525 | 4971 | TGAGGCTGCASGGAGGCCAGA | 0.414 | 0.388 | 1.250 | 2.377 | 3.250 |
| 3 | 1 | 227265670 | 1202534 | 4972 | GTTTTCCCCCRAAAAGGTTGG | 1.595 | 1.513 | 1.512 | 3.676 | 3.127 |
| 3 | 1 | 227270465 | — | 4973 | ATGGCCCCGTRAGGTTAGCGG | 1.029 | 1.010 | 2.517 | 3.665 | 3.447 |
| 3 | 1 | 227281064 | 6673201 | 4974 | AGGTGTCGCARAGATTAAGGC | 0.939 | 0.918 | 4.364 | 3.886 | 3.585 |
| 3 | 1 | 227291324 | 16852841 | 4975 | TGCTCAGCTCYAAAAACTCCA | 3.457 | 3.237 | 4.966 | 3.735 | 3.623 |
| 3 | 1 | 227301328 | 1999903 | 4976 | CTCTGAGGAAYGAAGACTTAG | 4.565 | 4.153 | 4.966 | 4.011 | 3.534 |
| 3 | 1 | 227307747 | 16852927 | 4977 | ACCGGCTCCTYTCCTTTTGCT | 1.713 | 1.578 | 4.364 | 4.011 | 3.386 |
| 3 | 1 | 227320088 | 1202594 | 4978 | TTTTTCCAATKGTAGAGAGAG | 0.031 | 0.031 | 3.159 | 3.604 | 3.312 |
| 3 | 1 | 227328505 | 4028814 | 4979 | AATTCTCTACYTCAGAAAGCA | 0.078 | 0.076 | 0.771 | 2.759 | 2.944 |
| 3 | 1 | 227334767 | 6704527 | 4980 | TTACTTCCTGKTAAGAGGTCT | 0.800 | 0.818 | 0.138 | 1.946 | 2.526 |
| 3 | 1 | 227343240 | 3762404 | 4981 | AGACGGAAGTYAGAGATTTTT | 0.581 | 0.550 | 0.244 | 0.662 | 2.282 |
| 3 | 1 | 227354652 | 4846878 | 4982 | AAGAAGGCCAYAGACCAGGAA | 0.053 | 0.054 | 0.544 | 0.238 | 2.167 |
| 3 | 1 | 227362159 | 11122622 | 4983 | GGGCAGTCTAYTTAGAAATTG | 0.344 | 0.338 | 0.447 | 0.294 | 1.379 |
| 3 | 1 | 227372902 | 7533671 | 4984 | CAGTCATGGTRTAAAGGGCTC | 0.797 | 0.812 | 0.288 | 0.314 | 0.347 |
| 3 | 1 | 227381046 | 6667425 | 4985 | GTCAGGCAGTYCTCAAGCAAT | 0.624 | 0.586 | 0.348 | 0.242 | 0.093 |
| 3 | 1 | 227388039 | 6673085 | 4986 | CAGCTCTACTKCTTTATGCTA | 0.091 | 0.092 | 0.272 | 0.127 | 0.102 |
| 3 | 1 | 227394719 | 6679473 | 4987 | TGGATGCCTCYAAATTATTCT | 0.228 | 0.238 | 0.161 | 0.187 | 0.108 |
| 3 | 1 | 227396393 | 16853489 | 4988 | ATTAAGTTAAWCATGAAGATC | 0.146 | 0.147 | 0.048 | 0.129 | 0.046 |
| 3 | 1 | 227417148 | 7413309 | 4989 | TGTTGTTAAAYGGTATGTAAC | 0.548 | 0.544 | 0.124 | 0.033 | 0.031 |
| 3 | 1 | 227432026 | 6541249 | 4990 | ATTTCAGACTYTTAAGAATTA | 0.039 | 0.040 | 0.074 | 0.012 | 0.075 |
| 3 | 1 | 227458465 | 4551581 | 4991 | TAAATTACACMATAAATCATT | 0.442 | 0.455 | 0.055 | 0.013 | 0.071 |
| 3 | 1 | 227469378 | 4506448 | 4992 | TGCTCAAAAAYCATGGAAGAA | 0.008 | 0.008 | 0.014 | 0.020 | 0.024 |
| 3 | 1 | 227486664 | 4332346 | 4993 | ATTACTTTGARAGCAACTGTG | 0.122 | 0.119 | 0.022 | 0.063 | 0.052 |
| 3 | 1 | 227496553 | 6679453 | 4994 | ATTAATTTACRCAAAGTCATC | 0.151 | 0.152 | 0.017 | 0.042 | 0.138 |
| 3 | 1 | 227511349 | 6663912 | 4995 | CAAACTACCCMGAGTTAGCAC | 0.103 | 0.104 | 0.133 | 0.051 | 0.257 |
| 3 | 1 | 227518492 | 6541254 | 4996 | TTGGCATTCARTGATCTGAAA | 0.375 | 0.388 | 0.190 | 0.139 | 0.234 |
| 3 | 1 | 227541095 | 7518479 | 4997 | GTTGCCTGTCRATGGCAGTCT | 0.682 | 0.685 | 0.169 | 0.338 | 0.157 |
| 3 | 1 | 227551201 | 9431925 | 4998 | ACTTCCTTCCMTTCCGTTAGA | 0.309 | 0.307 | 0.543 | 0.580 | 0.191 |
| 3 | 1 | 227560738 | 10864669 | 4999 | TCTGCAAACARATCAAAACAG | 0.104 | 0.106 | 0.746 | 0.539 | 0.134 |
| 4 | 1 | 236154391 | 16838637 | 5000 | TCGGTCTCTGRAAAAAAATGG | 0.649 | 0.661 | 0.578 | 0.423 | 0.609 |
| 4 | 1 | 236161654 | 7541783 | 5001 | CTTCCTTTTGWCAGCAGGAGA | 0.994 | 0.971 | 0.677 | 0.453 | 0.576 |
| 4 | 1 | 236168996 | 10925949 | 5002 | AGATTAATGTMCCTGATTTAA | 0.471 | 0.482 | 0.601 | 0.467 | 0.443 |
| 4 | 1 | 236176629 | 6688537 | 5003 | ATGGCAGCCCMTGCCACTTTT | 0.331 | 0.331 | 0.663 | 0.529 | 0.478 |
| 4 | 1 | 236183565 | 2355237 | 5004 | AAAGAATTAGRTGATCGATAC | 0.280 | 0.277 | 0.385 | 0.574 | 0.444 |
| 4 | 1 | 236196816 | 10802795 | 5005 | CTCAATGTTCYGAATTATGAG | 0.844 | 0.802 | 0.348 | 0.545 | 0.484 |
| 4 | 1 | 236203307 | 6429154 | 5006 | TTAATACGGCRGATTTCTTTC | 0.176 | 0.170 | 0.456 | 0.455 | 0.490 |
| 4 | 1 | 236209843 | 10925956 | 5007 | GCCACTCAACSCCAGACTTTT | 0.321 | 0.315 | 0.516 | 0.444 | 0.453 |
| 4 | 1 | 236217552 | 6657343 | 5008 | TAACAAACACWTACTTCACAA | 0.690 | 0.661 | 0.416 | 0.454 | 0.390 |
| 4 | 1 | 236227047 | 11579382 | 5009 | TGTTTGTAATSTTATGCTGCT | 0.548 | 0.522 | 0.514 | 0.401 | 0.617 |
| 4 | 1 | 236235692 | 11585281 | 5010 | ATTTTTAAAAYTCTGTGATAC | 0.000 | 0.000 | 0.534 | 0.220 | 0.620 |
| 4 | 1 | 236237040 | 934344 | 5011 | GTTTTCAAACYATTTTATAAG | 0.000 | 0.000 | 0.252 | 0.226 | 1.292 |
| 4 | 1 | 236245819 | 10925972 | 5012 | TACCAATTTAKTTCAGGGAGA | 0.394 | 0.387 | 0.089 | 0.918 | 1.426 |
| 4 | 1 | 236257599 | 865213 | 5013 | ATCTTAGGATYAGCGTTCACT | 0.115 | 0.113 | 0.091 | 0.873 | 1.613 |
| 4 | 1 | 236274676 | 658842 | 5014 | AAAACATTATWAAACCCGGTT | 0.158 | 0.158 | 0.889 | 2.569 | 1.847 |
| 4 | 1 | 236286446 | 6661317 | 5015 | CAGAAACACARAATCAAATAC | 0.343 | 0.351 | 1.017 | 2.365 | 1.952 |
| 4 | 1 | 236300211 | 1110615 | 5016 | TCTGAAAATCRCCATCTGTAA | 2.208 | 2.317 | 3.735 | 2.650 | 1.742 |
| 4 | 1 | 236311513 | 6429161 | 5017 | TCTGCATAGAWATCTAATTCA | 0.000 | 0.000 | 3.687 | 2.691 | 1.509 |
| 4 | 1 | 236324113 | 477507 | 5018 | CACCAACTAGRTTGAAAATTG | 3.741 | 3.312 | 3.924 | 2.327 | 1.509 |
| 4 | 1 | 236339319 | 613228 | 5019 | TCCTTTTAATWTAAATATGTT | 0.297 | 0.379 | 2.589 | 2.459 | 1.749 |
| 4 | 1 | 236365881 | 17598757 | 5020 | ACTCTCTCTAYGTCTCTATAT | 0.981 | 0.944 | 1.965 | 2.235 | 2.389 |
| 4 | 1 | 236372267 | — | 5021 | TCCTGGAGACWCATCAGCCCA | 0.062 | 0.062 | 0.145 | 1.326 | 2.635 |
| 4 | 1 | 236381514 | 10495448 | 5022 | TTTTAATCCCRTAGAGCCAGA | 0.043 | 0.043 | 0.079 | 1.654 | 2.886 |
| 4 | 1 | 236391685 | 10926012 | 5023 | TCGTCTCAAARTAGTCAAGTA | 0.135 | 0.132 | 0.002 | 0.807 | 3.173 |
| 4 | 1 | 236403350 | 4659554 | 5024 | AGGGGCTCACRTCTCAGTTGC | 0.021 | 0.021 | 0.246 | 0.898 | 2.701 |
| 4 | 1 | 236415559 | — | 5025 | TAATAGCACCKGAAATAAAGA | 0.000 | 0.000 | 1.231 | 0.930 | 2.549 |
| 4 | 1 | 236429275 | 12404902 | 5026 | TCACCTCTTGYCAGTTAATAA | 1.195 | 1.253 | 1.706 | 1.466 | 0.868 |
| 4 | 1 | 236436879 | 6671685 | 5027 | TCCAGCAAAAYCGTTTATTTT | 2.138 | 1.968 | 2.197 | 1.658 | 0.771 |
| 4 | 1 | 236443827 | 10926032 | 5028 | GATCTCACGTWGACTCTGTCT | 0.000 | 0.000 | 2.299 | 1.874 | 0.555 |
| 4 | 1 | 236450356 | 4659556 | 5029 | ATACCCATTAYGTAGCTTTTC | 0.935 | 0.986 | 1.995 | 1.793 | 0.541 |
| 4 | 1 | 236456129 | 10926042 | 5030 | TTAAAACATGYCTCATGTGAA | 1.160 | 1.149 | 0.932 | 1.389 | 0.530 |
| 4 | 1 | 236461974 | 4659557 | 5031 | AGGGCGTGCARCTGAGCGGTG | 0.000 | 0.000 | 0.629 | 0.862 | 0.557 |
| 4 | 1 | 236467860 | 12744283 | 5032 | TAGAACTTCCRTCCCTCATAA | 0.115 | 0.113 | 0.243 | 0.231 | 0.679 |
| 4 | 1 | 236474186 | 12407556 | 5033 | ACATGCATAGRTGTTGTTCTG | 0.046 | 0.046 | 0.012 | 0.166 | 0.659 |
| 4 | 1 | 236479700 | 2169453 | 5034 | AAGAAAAAATYTACACTTGGA | 0.051 | 0.053 | 0.003 | 0.062 | 0.458 |
| 4 | 1 | 236485357 | 12743555 | 5035 | TAGGTAGAAAKAGGATTACAG | 0.139 | 0.143 | 0.003 | 0.012 | 0.133 |
| 4 | 1 | 236493915 | 7512443 | 5036 | AGGGAGTATTWATTGAGCAGT | 0.050 | 0.042 | 0.009 | 0.018 | 0.118 |
| 4 | 1 | 236500948 | 12073505 | 5037 | TTGATGGGAGMCTTAGGACAT | 0.104 | 0.084 | 0.056 | 0.032 | 0.068 |
| 4 | 1 | 236508885 | 2883722 | 5038 | TGAGGTTAAGRTTTAGAATTT | 0.225 | 0.226 | 0.103 | 0.039 | 0.013 |
| 4 | 1 | 236518457 | 10926084 | 5039 | TTTTCTACAAYGAATGATTCT | 0.550 | 0.529 | 0.164 | 0.053 | 0.011 |
| 4 | 1 | 236528295 | 12075485 | 5040 | GTGAAGTCCCRCAAGAGAGGT | 0.416 | 0.415 | 0.188 | 0.083 | 0.017 |
| 4 | 1 | 236533851 | 12239766 | 5041 | GAAAAAGTGCRCAAAATCTGC | 0.334 | 0.323 | 0.202 | 0.084 | 0.019 |
| 4 | 1 | 236545865 | — | 5042 | CATCACGTTGMATTTTTAAAT | 0.174 | 0.165 | 0.174 | 0.095 | 0.033 |
| 4 | 1 | 236557741 | — | 5043 | TAGAGATCCCYATAGTCTATC | 0.261 | 0.284 | 0.100 | 0.112 | 0.028 |
| 4 | 1 | 236561988 | — | 5044 | AGCACCTTTTYCAGTAGTCTC | 0.443 | 0.461 | 0.079 | 0.066 | 0.035 |
| 4 | 1 | 236584566 | 12143985 | 5045 | GTGACATTCAYGTATATAGTT | 0.113 | 0.116 | 0.116 | 0.065 | 0.164 |
| 4 | 1 | 236591444 | 16839420 | 5046 | TTTTCCTACTRTTGAATATGC | 0.262 | 0.231 | 0.092 | 0.043 | 0.199 |
| 4 | 1 | 236597432 | 1545727 | 5047 | TCAGTGAATTWTGATTCCTCC | 0.302 | 0.281 | 0.086 | 0.055 | 0.212 |
| 4 | 1 | 236605709 | 16839444 | 5048 | GCGAGATTATRGGAGAGAATA | 0.168 | 0.169 | 0.075 | 0.276 | 0.272 |
| 4 | 1 | 236625805 | — | 5049 | TTTTAAGACAMTGACATACTT | 0.431 | 0.423 | 0.094 | 0.278 | 0.240 |
| 4 | 1 | 236632495 | 12071494 | 5050 | TTGAGCTAACYGGCGCAACAT | 0.114 | 0.117 | 0.539 | 0.418 | 0.360 |
| 4 | 1 | 236638476 | 10737842 | 5051 | AACATTGAACYTGCAGAATGT | 0.331 | 0.341 | 0.684 | 0.590 | 0.406 |
| 4 | 1 | 236644953 | 6666380 | 5052 | TGAGAGCCCARAGTGATTGAG | 1.572 | 1.626 | 0.782 | 0.525 | 0.425 |
| 5 | 2 | 20891681 | 661929 | 5053 | AGGAAACTCTRTGTTATTATG | 0.058 | 0.057 | 0.275 | 0.303 | 0.182 |
| 5 | 2 | 20901381 | 16988063 | 5054 | CTACTTCATCRATCCATAAGG | 0.054 | 0.054 | 0.090 | 0.224 | 0.184 |
| 5 | 2 | 20910027 | 535022 | 5055 | CTCATACCACYAGAGAGACGT | 0.347 | 0.326 | 0.098 | 0.197 | 0.168 |
| 5 | 2 | 20916346 | 16982026 | 5056 | TACTTCACCAYTTAAACCTCC | 0.411 | 0.410 | 0.138 | 0.090 | 0.277 |
| 5 | 2 | 20926604 | 649018 | 5057 | TGAAAATCAARCTCAGTCTAT | 0.359 | 0.370 | 0.213 | 0.077 | 0.283 |
| 5 | 2 | 20933936 | 16988079 | 5058 | TCATGACTTCYCTGCTGCCAT | 0.197 | 0.191 | 0.246 | 0.127 | 0.243 |
| 5 | 2 | 20952607 | 340602 | 5059 | TGACTGCCTGYTTCATTTGGT | 0.217 | 0.221 | 0.162 | 0.273 | 0.104 |
| 5 | 2 | 20968923 | 6709100 | 5060 | GCCCTCCATAYGGTTCAGAGA | 0.480 | 0.495 | 0.167 | 0.342 | 0.108 |
| 5 | 2 | 20975686 | 6743521 | 5061 | AAAGCCAATGRGCCTAAAATT | 0.172 | 0.171 | 0.361 | 0.277 | 0.153 |
| 5 | 2 | 20984059 | 11891188 | 5062 | AAAGTCAGAGWTCTTCGGAGG | 0.478 | 0.485 | 0.540 | 0.202 | 0.156 |
| 5 | 2 | 20992564 | 1437404 | 5063 | AATATAAAAGYTAAAAGGCAA | 0.824 | 0.828 | 0.413 | 0.237 | 0.164 |
| 5 | 2 | 20998690 | 16988112 | 5064 | TCCTCCTCCARCTCTTACGTT | 0.603 | 0.604 | 0.376 | 0.305 | 0.166 |
| 5 | 2 | 21005714 | 28538171 | 5065 | AAGACACCCAYGTCCTGAGAG | 0.178 | 0.182 | 0.316 | 0.201 | 0.115 |
| 5 | 2 | 21023010 | 6722139 | 5066 | AGCACACATGMGGAATTTTAT | 0.082 | 0.082 | 0.204 | 0.245 | 0.174 |
| 5 | 2 | 21047370 | 4468779 | 5067 | AAGAACCCATYCTAGCAGGTC | 0.379 | 0.372 | 0.068 | 0.230 | 0.179 |
| 5 | 2 | 21060496 | 4606879 | 5068 | GTCCTAGGAARATGAAAAAGA | 0.473 | 0.479 | 0.112 | 0.088 | 0.240 |
| 5 | 2 | 21100722 | 17397826 | 5069 | AGAATGATTGYGTTTTTGATT | 0.043 | 0.055 | 0.227 | 0.107 | 0.259 |
| 5 | 2 | 21107056 | 17041679 | 5070 | TAGAACAAATYTGTGCTGTTG | 0.385 | 0.386 | 0.129 | 0.121 | 0.309 |
| 5 | 2 | 21112994 | 17041694 | 5071 | AGCTGCACAAYCCACCTTGCA | 0.535 | 0.487 | 0.192 | 0.292 | 0.278 |
| 5 | 2 | 21124837 | 4665642 | 5072 | CCAGTGGAGARTTTCCATCTC | 0.021 | 0.022 | 0.259 | 0.270 | 0.250 |
| 5 | 2 | 21137405 | 1042031 | 5073 | ATATGGAATTYTTGAGTAACT | 0.620 | 0.626 | 0.411 | 0.335 | 1.064 |
| 5 | 2 | 21149196 | 673548 | 5074 | CAAAAATACCRATTTGACAAG | 0.161 | 0.167 | 0.341 | 0.461 | 1.039 |
| 5 | 2 | 21157019 | 3791981 | 5075 | TGATCTCTCCRGAGCTATTGT | 0.925 | 0.917 | 0.596 | 0.467 | 0.978 |
| 5 | 2 | 21162692 | 17240674 | 5076 | CAAAATGTCTKGATTTCATTG | 0.285 | 0.281 | 0.609 | 1.536 | 0.919 |
| 5 | 2 | 21172253 | 17240549 | 5077 | ACTCCTCAATRACTGTTTTAA | 0.802 | 0.757 | 0.703 | 1.628 | 0.947 |
| 5 | 2 | 21182206 | 585967 | 5078 | TTCTCTGGGAMCAGCCCAGTT | 0.621 | 0.618 | 2.097 | 1.396 | 0.952 |
| 5 | 2 | 21188053 | 11892073 | 5079 | GCATAAACATRCGGAAATACC | 0.404 | 0.403 | 2.202 | 1.345 | 0.915 |
| 5 | 2 | 21199203 | — | 5080 | GCCGTCCATCYATCCGTTACT | 3.828 | 3.687 | 1.756 | 1.193 | 1.102 |
| 5 | 2 | 21204658 | 594677 | 5081 | ACTGAGTAATYGTCTAATGAA | 0.075 | 0.075 | 1.382 | 1.173 | 1.040 |
| 5 | 2 | 21217337 | 17399144 | 5082 | ATGCTTCAATRAACAGCCAGT | 0.198 | 0.196 | 1.386 | 1.035 | 0.992 |
| 5 | 2 | 21223437 | 675430 | 5083 | CATTTTAATGMGGACAAATCT | 0.289 | 0.286 | 0.130 | 1.080 | 1.056 |
| 5 | 2 | 21229137 | 645456 | 5084 | CCTTCATCATYGATCTCTGGA | 0.358 | 0.334 | 0.234 | 1.106 | 1.138 |
| 5 | 2 | 21233518 | 312942 | 5085 | GTATTCCTCCYTACCTGATTT | 0.349 | 0.350 | 0.451 | 0.202 | 1.344 |
| 5 | 2 | 21253964 | 312957 | 5086 | ATGATTGATARTTAATTTACT | 0.484 | 0.451 | 0.479 | 0.437 | 1.386 |
| 5 | 2 | 21259931 | — | 5087 | AGGGTTGTGTKAGGAAGAGAT | 0.898 | 0.878 | 0.355 | 0.520 | 1.409 |
| 5 | 2 | 21270933 | 1517471 | 5088 | TGTATAGTTCMTCCTAATATC | 0.398 | 0.392 | 0.690 | 0.932 | 0.595 |
| 5 | 2 | 21282720 | 11687710 | 5089 | CAGTTCCTACYTTGTTGAGTT | 0.038 | 0.037 | 0.750 | 1.161 | 0.724 |
| 5 | 2 | 21294098 | 17041836 | 5090 | CATTAAGTCCRATCTGTCCTT | 1.225 | 1.217 | 1.262 | 1.127 | 0.740 |
| 5 | 2 | 21308834 | 506585 | 5091 | CTCTACTAGGRCTACAAGCTT | 0.519 | 0.527 | 1.639 | 1.118 | 0.704 |
| 5 | 2 | 21312943 | 2030195 | 5092 | CAATTTAATARAATCATTTTC | 1.700 | 1.753 | 1.595 | 0.980 | 0.650 |
| 5 | 2 | 21334933 | 4387830 | 5093 | TATACAACTTRAGAAACAAAG | 1.032 | 0.994 | 1.041 | 0.963 | 0.578 |
| 5 | 2 | 21339837 | 312052 | 5094 | TGCCTTCTATRGAATATGTCT | 0.113 | 0.111 | 1.080 | 0.964 | 0.536 |
| 5 | 2 | 21350446 | 437775 | 5095 | CCCATTTCAGRTTGCCTTTCT | 0.179 | 0.178 | 0.341 | 0.555 | 0.683 |
| 5 | 2 | 21360686 | 13420469 | 5096 | TCTCACTCTGYTCAGATTGCT | 0.568 | 0.567 | 0.110 | 0.421 | 0.829 |
| 5 | 2 | 21371828 | 10166647 | 5097 | ATACATTTTGYCTGTGTTCTA | 0.274 | 0.274 | 0.089 | 0.101 | 0.998 |
| 5 | 2 | 21386917 | 4665243 | 5098 | GCAAACAGCTRTCGCAAGCCA | 0.189 | 0.188 | 0.073 | 0.167 | 0.767 |
| 5 | 2 | 21395207 | 1397400 | 5099 | GATTACAGAAKTCTCCTTTGT | 0.034 | 0.035 | 0.023 | 0.355 | 0.666 |
| 5 | 2 | 21403500 | 17042055 | 5100 | TATGCATGCAKCCTGCACCTC | 0.094 | 0.090 | 0.293 | 0.515 | 0.404 |
| 5 | 2 | 21412996 | 4665662 | 5101 | TGCAAATGAAKCTATTCCTGA | 0.211 | 0.208 | 0.590 | 0.459 | 0.229 |
| 5 | 2 | 21414379 | 13396400 | 5102 | GAAGGTGGAARTGGAATAAAA | 1.514 | 1.392 | 0.856 | 0.411 | 0.400 |
| 6 | 2 | 49817753 | 1022369 | 5103 | ATATAGCTCAMCAAAAATATT | 0.450 | 0.424 | 1.326 | 0.817 | 0.697 |
| 6 | 2 | 49820321 | 17180320 | 5104 | TTAATAATTTSAGCACTGTCA | 0.403 | 0.396 | 1.215 | 0.886 | 0.654 |
| 6 | 2 | 49826561 | 17180439 | 5105 | ATTGAATTGASTCTTCCAGGG | 1.506 | 1.592 | 0.680 | 1.065 | 0.663 |
| 6 | 2 | 49856216 | 10185615 | 5106 | TATTAATCTTMTTTGGACACG | 0.007 | 0.007 | 0.629 | 1.205 | 0.675 |
| 6 | 2 | 49869232 | 13407557 | 5107 | ATGCAATGCARTAAAACACTG | 0.648 | 0.618 | 0.850 | 0.683 | 0.683 |
| 6 | 2 | 49876262 | 12713075 | 5108 | TGGTTACTATYCTCTCCCCAG | 0.300 | 0.277 | 0.435 | 0.583 | 0.786 |
| 6 | 2 | 49894129 | 6737293 | 5109 | TGTTCCTTCTYTTTGGGCATA | 0.901 | 0.906 | 0.599 | 0.615 | 1.409 |
| 6 | 2 | 49908869 | 870168 | 5110 | AGCACTTCCCRTTTATGAGAG | 0.555 | 0.545 | 0.391 | 0.268 | 0.929 |
| 6 | 2 | 49921274 | 10174758 | 5111 | CTACTGTGACWATATATTTAA | 0.409 | 0.406 | 0.483 | 0.473 | 1.258 |
| 6 | 2 | 49933375 | 2350705 | 5112 | TTCCCAAAGGSTAACGGTAAC | 0.074 | 0.071 | 0.225 | 0.948 | 1.170 |
| 6 | 2 | 49948039 | 7584378 | 5113 | CTCTATGTCAMTGTCCGTCTA | 0.492 | 0.494 | 0.291 | 0.869 | 1.478 |
| 6 | 2 | 49958503 | 17795388 | 5114 | GATTTTTTAARTCAAAAGAAA | 0.176 | 0.175 | 1.095 | 1.153 | 2.016 |
| 6 | 2 | 49969040 | 17039353 | 5115 | GTTTCCCTGAYAGCCATGGCT | 0.805 | 0.803 | 1.106 | 1.064 | 2.682 |
| 6 | 2 | 49991254 | 10495984 | 5116 | AATGATTTATSTGTTCCTATG | 2.244 | 2.279 | 1.707 | 2.081 | 2.920 |
| 6 | 2 | 49999544 | 17039373 | 5117 | TTTTCTACCAYACTTTTTTCA | 0.041 | 0.040 | 1.682 | 2.662 | 2.829 |
| 6 | 2 | 50004404 | 17490406 | 5118 | GTTTATGTGAYTGTGACATTC | 1.689 | 1.693 | 2.435 | 3.187 | 2.569 |
| 6 | 2 | 50010410 | 1981797 | 5119 | AATTTTTCTCYTTAATATATC | 0.213 | 0.212 | 2.258 | 3.258 | 2.432 |
| 6 | 2 | 50037491 | 1156742 | 5120 | AATGGTATAARAATATTAGGG | 2.618 | 2.545 | 3.275 | 2.886 | 2.518 |
| 6 | 2 | 50048374 | 17039425 | 5121 | CTATTTGCCTRTGATTTTTAA | 1.846 | 1.799 | 3.303 | 2.512 | 2.671 |
| 6 | 2 | 50055972 | 12465974 | 5122 | ATCAAAGATTYCAATTCTTGG | 2.962 | 3.009 | 3.364 | 2.444 | 2.665 |
| 6 | 2 | 50064931 | 10495987 | 5123 | TTGGAAGCTAMTGATTATTCT | 1.835 | 1.901 | 2.362 | 2.249 | 2.575 |
| 6 | 2 | 50077180 | 6758043 | 5124 | ATCATTGCTTRTGTAATCTGA | 0.548 | 0.539 | 1.855 | 2.738 | 2.420 |
| 6 | 2 | 50083309 | 12618646 | 5125 | TAGTTGCTTCRTTGCGCTTAC | 0.738 | 0.723 | 1.215 | 2.305 | 2.425 |
| 6 | 2 | 50089802 | 1363046 | 5126 | CTGTTTAAAAWGTATGCAATG | 0.429 | 0.449 | 1.267 | 2.113 | 2.252 |
| 6 | 2 | 50095750 | 6713560 | 5127 | AGCTTTTAACRGTTCTCAAAG | 1.039 | 1.073 | 1.404 | 1.467 | 2.497 |
| 6 | 2 | 50101824 | 17039579 | 5128 | ACAGGAAATAWCACGGATTCA | 1.856 | 1.760 | 1.294 | 1.021 | 2.086 |
| 7 | 2 | 50107806 | 17039592 | 5129 | GGGTGCTTAGWAATTACTTAT | 0.663 | 0.680 | 1.326 | 1.111 | 1.801 |
| 7 | 2 | 50114259 | 10495989 | 5130 | CCAAAGCTCARTTTGTCTTGG | 0.235 | 0.203 | 0.930 | 0.914 | 1.050 |
| 7 | 2 | 50127794 | 17439837 | 5131 | CCCAGCACAAYGTGGCAGCCA | 0.316 | 0.334 | 0.321 | 0.854 | 0.613 |
| 7 | 2 | 50135085 | 1897924 | 5132 | TGTAGAGAAGRTAGAAGAACA | 0.251 | 0.259 | 0.181 | 0.605 | 0.628 |
| 7 | 2 | 50142762 | 1421577 | 5133 | AGAGATACAAMATAATAATTC | 0.557 | 0.563 | 0.216 | 0.165 | 0.463 |
| 7 | 2 | 50148980 | 10495992 | 5134 | ACACCAAATAKTATTTCATGA | 0.245 | 0.245 | 0.220 | 0.074 | 0.498 |
| 7 | 2 | 50155053 | 6731061 | 5135 | TTCAACATTAYTCACAGAAGG | 0.266 | 0.276 | 0.180 | 0.144 | 0.321 |
| 7 | 2 | 50161986 | 4971634 | 5136 | TCTTCCTGGARAGAAAGTCCT | 0.322 | 0.327 | 0.074 | 0.097 | 0.109 |
| 7 | 2 | 50168831 | 17039678 | 5137 | TGGGTAACTAYGTGTCAAGTG | 0.144 | 0.148 | 0.166 | 0.136 | 0.098 |
| 7 | 2 | 50174623 | 2117560 | 5138 | AAAATACATTYATGTACCTTA | 0.076 | 0.073 | 0.099 | 0.075 | 0.095 |
| 7 | 2 | 50180362 | 10191989 | 5139 | CTCTTTGAAAYGGGCAAGCTA | 0.637 | 0.609 | 0.135 | 0.090 | 0.093 |
| 7 | 2 | 50187712 | 12470518 | 5140 | AGTCAAAAACYAGAATCTCTC | 0.002 | 0.002 | 0.121 | 0.152 | 0.090 |
| 7 | 2 | 50194688 | 17039734 | 5141 | ATAGATCTAAMCTAAGTGAGA | 0.588 | 0.577 | 0.213 | 0.114 | 0.058 |
| 7 | 2 | 50201562 | 17039741 | 5142 | TTCATTTTAGYTCTTCACTCT | 0.172 | 0.177 | 0.211 | 0.132 | 0.100 |
| 7 | 2 | 50208052 | 1563021 | 5143 | CAAAGAAGGGYCACAGAAACC | 0.383 | 0.378 | 0.270 | 0.165 | 0.099 |
| 7 | 2 | 50215591 | 10490244 | 5144 | AACACTATTAYGAGAATGCTT | 0.603 | 0.586 | 0.200 | 0.091 | 0.147 |
| 7 | 2 | 50225689 | 1563026 | 5145 | TGTTCATTAGSTTTTACAGTG | 0.106 | 0.106 | 0.224 | 0.225 | 0.137 |
| 7 | 2 | 50233983 | 17039807 | 5146 | CTGATTTTACKTTTTATGTCT | 0.269 | 0.270 | 0.151 | 0.150 | 0.203 |
| 7 | 2 | 50244051 | 9309176 | 5147 | AGCATTAAATYAGTCCAGTTG | 0.265 | 0.261 | 0.183 | 0.286 | 0.139 |
| 7 | 2 | 50251406 | 12469244 | 5148 | GATAGGATTCYATGAGGGTGC | 0.030 | 0.030 | 0.150 | 0.222 | 0.168 |
| 7 | 2 | 50258695 | 896685 | 5149 | AGTATTGTAARAAGTCTCTCT | 0.681 | 0.659 | 0.315 | 0.208 | 0.162 |
| 7 | 2 | 50265931 | 985132 | 5150 | CCTCCATTCAYTAGGGAGATA | 0.173 | 0.171 | 0.278 | 0.192 | 0.200 |
| 7 | 2 | 50273114 | 10490240 | 5151 | TTCCCTCACCRTATTTCTAAC | 0.922 | 0.897 | 0.475 | 0.172 | 0.249 |
| 7 | 2 | 50278945 | 17039985 | 5152 | TGAAAGATTGYTTTGTCTCTT | 0.097 | 0.099 | 0.256 | 0.231 | 0.174 |
| 7 | 2 | 50285638 | 10490238 | 5153 | GTCATACTTASGTCAGTCTTC | 0.624 | 0.604 | 0.283 | 0.313 | 0.256 |
| 7 | 2 | 50293510 | 17040013 | 5154 | AGGTATTCTGYAGATATAATT | 0.068 | 0.067 | 0.163 | 0.319 | 0.266 |
| 7 | 2 | 50298927 | 6723207 | 5155 | AGAACTAGTAYATAGTGAGGG | 0.221 | 0.254 | 0.260 | 0.321 | 0.248 |
| 7 | 2 | 50312072 | 12994146 | 5156 | ATGAAAGCAASTTAAGTCTCA | 0.553 | 0.538 | 0.287 | 0.293 | 0.439 |
| 7 | 2 | 50318605 | 1377241 | 5157 | GCTGCTTAGGRGTGCTTAACC | 0.000 | 0.000 | 0.294 | 0.344 | 0.315 |
| 7 | 2 | 50324810 | 17040123 | 5158 | AGTTAAATACYGATTTATAAA | 0.671 | 0.664 | 0.521 | 0.217 | 0.318 |
| 7 | 2 | 50331889 | 4971658 | 5159 | GCACAATAGTRTTGCATTCCT | 0.067 | 0.068 | 0.464 | 0.502 | 0.184 |
| 7 | 2 | 50337287 | 4971659 | 5160 | CCCAACCTCTYGAATGCCCAT | 0.740 | 0.736 | 0.327 | 0.436 | 0.214 |
| 7 | 2 | 50344043 | 1712886 | 5161 | TTATCATCTGMAAAATGAAAA | 0.412 | 0.411 | 0.484 | 0.333 | 0.176 |
| 7 | 2 | 50350726 | 1915221 | 5162 | GTACTCTACAYAAATCTTGCA | 0.115 | 0.115 | 0.468 | 0.252 | 0.239 |
| 7 | 2 | 50353927 | 6724128 | 5163 | ACTTCCTTTAYGTTTTCTTAT | 1.139 | 1.112 | 0.255 | 0.182 | 0.314 |
| 7 | 2 | 50363405 | 17509125 | 5164 | AAATGGAGAAYCAATTTTACC | 0.056 | 0.056 | 0.177 | 0.236 | 0.251 |
| 7 | 2 | 50375352 | 1618655 | 5165 | CAGAATTAAGRGGAATTCACA | 0.164 | 0.182 | 0.259 | 0.198 | 0.209 |
| 7 | 2 | 50388807 | 633128 | 5166 | TAAATAACTTKTCTAATAAAT | 0.133 | 0.133 | 0.061 | 0.266 | 0.141 |
| 7 | 2 | 50395288 | 2682005 | 5167 | CTAAATTTTGRTACTTCAATA | 0.397 | 0.369 | 0.162 | 0.268 | 0.205 |
| 7 | 2 | 50402259 | 1712896 | 5168 | GTAGCTATTARGTCTTCAAAC | 0.302 | 0.306 | 0.307 | 0.092 | 0.131 |
| 7 | 2 | 50405457 | 13030223 | 5169 | TTAGTTGTCARTAACACTGGC | 0.462 | 0.474 | 0.310 | 0.098 | 0.107 |
| 7 | 2 | 50417935 | 7422036 | 5170 | AATACAAATARTGGTGTTAGT | 0.690 | 0.720 | 0.232 | 0.162 | 0.166 |
| 7 | 2 | 50428271 | — | 5171 | ATGAATGTGTRGTATAAAGCT | 0.125 | 0.124 | 0.171 | 0.155 | 0.113 |
| 7 | 2 | 50434710 | 7592085 | 5172 | GTTTATTACASTAATTTCCCT | 0.074 | 0.078 | 0.204 | 0.112 | 0.105 |
| 7 | 2 | 50442046 | 1712891 | 5173 | ATTTTCACATWTCTATGCATG | 0.139 | 0.138 | 0.058 | 0.173 | 0.094 |
| 7 | 2 | 50452128 | 10490229 | 5174 | AATATTGCTCYTCTGAGTGCC | 0.616 | 0.623 | 0.060 | 0.212 | 0.112 |
| 7 | 2 | 50463718 | — | 5175 | CTGGTTGTGASGAAGCTGTGC | 0.116 | 0.117 | 0.201 | 0.089 | 0.098 |
| 7 | 2 | 50479374 | 17040473 | 5176 | AAATATCTCCMGTTACAATAT | 0.142 | 0.133 | 0.385 | 0.084 | 0.099 |
| 7 | 2 | 50492880 | 12475979 | 5177 | TCCAATATAAYTACAGGCAGA | 0.688 | 0.682 | 0.191 | 0.118 | 0.084 |
| 7 | 2 | 50505813 | 4377361 | 5178 | GTACGCCAGCYGAGGCCTCCA | 0.679 | 0.677 | 0.167 | 0.142 | 0.054 |
| 7 | 2 | 50513350 | 4971667 | 5179 | TCCACTGAAGYTACTATTATC | 0.055 | 0.052 | 0.223 | 0.100 | 0.117 |
| 7 | 2 | 50519950 | 1402126 | 5180 | AAAGAGTTCARGTTGAAGAGA | 0.026 | 0.026 | 0.107 | 0.124 | 0.141 |
| 7 | 2 | 50530709 | 10191436 | 5181 | TCTATGTTTCYGACAATAAAA | 0.275 | 0.273 | 0.028 | 0.157 | 0.195 |
| 7 | 2 | 50537843 | 12713098 | 5182 | ATGGATTTTCRAAAGTAAAAC | 0.256 | 0.256 | 0.077 | 0.184 | 0.252 |
| 7 | 2 | 50545936 | 13392422 | 5183 | ATGGCCTCAAYATTCTACTCT | 0.262 | 0.267 | 0.137 | 0.104 | 0.252 |
| 7 | 2 | 50555070 | 1915170 | 5184 | AATAAAATATRCCAAGAAAGG | 0.345 | 0.346 | 0.326 | 0.192 | 0.305 |
| 7 | 2 | 50564676 | 7423850 | 5185 | GTCACTTCACYGGTATTCTTC | 0.218 | 0.225 | 0.329 | 0.410 | 0.225 |
| 7 | 2 | 50571943 | 2160444 | 5186 | TGGAAAGATGWAAAGCTCCTT | 0.819 | 0.825 | 0.404 | 0.388 | 0.133 |
| 7 | 2 | 50578856 | 12613343 | 5187 | AAAGATTTACSGACACTTCAA | 0.179 | 0.194 | 0.651 | 0.427 | 0.144 |
| 7 | 2 | 50584538 | — | 5188 | CAGCAAATGARCAAACGGTAT | 0.514 | 0.510 | 0.618 | 0.394 | 0.302 |
| 7 | 2 | 50594113 | 1005431 | 5189 | TTTACATGGCYATAGCTTTCA | 1.024 | 1.002 | 0.465 | 0.315 | 0.336 |
| 7 | 2 | 50608708 | 17040688 | 5190 | GATTATGTGGRTAAACAACAC | 0.194 | 0.181 | 0.440 | 0.282 | 0.338 |
| 7 | 2 | 50614171 | 17040693 | 5191 | ATTGAGGCCAYGGTAGAAAAG | 0.489 | 0.480 | 0.268 | 0.367 | 0.571 |
| 7 | 2 | 50619827 | 10197380 | 5192 | CTACAAGAGGRGTAAAGGTTA | 0.185 | 0.181 | 0.055 | 0.427 | 0.503 |
| 7 | 2 | 50627282 | 6726707 | 5193 | TGGGCAGCTTYTGGGAGGCAG | 0.037 | 0.035 | 0.291 | 0.371 | 0.505 |
| 7 | 2 | 50634579 | 2241175 | 5194 | TGCTGAAAATKAAATTCTGGT | 0.168 | 0.167 | 0.305 | 0.502 | 0.517 |
| 7 | 2 | 50640296 | 17476739 | 5195 | ACAAAAAGATMATTTCACAGA | 1.132 | 1.149 | 0.345 | 0.456 | 0.544 |
| 7 | 2 | 50647858 | 1014428 | 5196 | ACCTTTACATKATTAATCTGC | 0.473 | 0.472 | 0.962 | 0.382 | 0.471 |
| 7 | 2 | 50655269 | 17536202 | 5197 | GAAGCATAGTKGAGTCACCTT | 0.284 | 0.274 | 0.942 | 0.599 | 0.336 |
| 7 | 2 | 50662806 | — | 5198 | GGAAGAAACARTACTGGAAAT | 1.328 | 1.157 | 0.499 | 0.717 | 0.320 |
| 7 | 2 | 50668252 | 17040792 | 5199 | TCTTGTATGGRTAACACAAAC | 0.027 | 0.027 | 0.694 | 0.723 | 0.233 |
| 7 | 2 | 50675296 | 10175222 | 5200 | TTTTGCCATAKGTAGTAGCGG | 0.264 | 0.254 | 0.757 | 0.460 | 0.285 |
| 7 | 2 | 50681836 | 11125316 | 5201 | TTGCCAAACTSTATATATCAA | 0.875 | 0.853 | 0.187 | 0.361 | 0.281 |
| 7 | 2 | 50696829 | 17040825 | 5202 | GTGGTATCTARCAACAGCGGC | 0.372 | 0.371 | 0.301 | 0.284 | 0.320 |
| 7 | 2 | 50710112 | 12713112 | 5203 | CAGTAAGTCASGAGTTTGAAG | 0.157 | 0.151 | 0.241 | 0.079 | 0.299 |
| 7 | 2 | 50719478 | 11125320 | 5204 | TCAACACATTSTAGATATCTG | 0.364 | 0.330 | 0.038 | 0.076 | 0.248 |
| 7 | 2 | 50727713 | 10179269 | 5205 | TGAGCTCATASAATAAATCCT | 0.117 | 0.118 | 0.055 | 0.096 | 0.361 |
| 7 | 2 | 50735982 | 12713117 | 5206 | TTGTCTTGAGRAGGGACATGG | 0.018 | 0.017 | 0.033 | 0.128 | 0.361 |
| 7 | 2 | 50751973 | 12476492 | 5207 | AACTTCTGCCRAAAACATTAA | 0.480 | 0.473 | 0.038 | 0.109 | 0.403 |
| 7 | 2 | 50764421 | 17040906 | 5208 | ATTGGGCACAMGTACAACTAT | 0.011 | 0.011 | 0.278 | 0.242 | 0.646 |
| 7 | 2 | 50772700 | 10176888 | 5209 | AGGGAAGTTGWTTTAGATGAT | 0.417 | 0.423 | 0.340 | 0.554 | 0.645 |
| 7 | 2 | 50779781 | 13390911 | 5210 | TCCTGAAACASTTTAAGAGAA | 1.037 | 1.024 | 0.498 | 0.596 | 0.858 |
| 7 | 2 | 50788335 | 12713120 | 5211 | CTTAGTGAGAYTGGTTGGTTT | 0.158 | 0.157 | 1.162 | 1.082 | 0.893 |
| 7 | 2 | 50803660 | 858928 | 5212 | ACCTTCTTTGMAGAACAATAC | 0.908 | 0.914 | 1.085 | 1.277 | 0.870 |
| 7 | 2 | 50810606 | 9309186 | 5213 | ATATAATAGTYGTAACTGCAC | 1.522 | 1.552 | 1.301 | 1.763 | 0.876 |
| 7 | 2 | 50821305 | 2194393 | 5214 | TCGTGACTTGSTTGACACACA | 0.268 | 0.268 | 1.662 | 1.705 | 1.561 |
| 7 | 2 | 50831786 | 2352074 | 5215 | TTATCAGTTASTGTGTCAATG | 1.317 | 1.324 | 1.893 | 1.331 | 1.423 |
| 7 | 2 | 50837738 | 10490221 | 5216 | AAAAGTTCTCWCTATATATAC | 0.805 | 0.810 | 1.208 | 1.347 | 2.248 |
| 7 | 2 | 50844593 | 1518548 | 5217 | TAATTCAGGARTTGCCCTTAT | 1.185 | 1.256 | 1.095 | 1.720 | 2.339 |
| 7 | 2 | 50851819 | 858936 | 5218 | AAATTTAAAAYAGCTGAGTGT | 0.244 | 0.233 | 0.564 | 1.078 | 2.763 |
| 7 | 2 | 50858024 | 17040976 | 5219 | ACCTCTTACCRTAATTCCAGT | 0.237 | 0.241 | 1.112 | 1.743 | 2.599 |
| 7 | 2 | 50866998 | — | 5220 | CTCATAATGTMCTTCTGCTAC | 0.118 | 0.124 | 0.588 | 1.829 | 2.564 |
| 7 | 2 | 50876758 | 10184889 | 5221 | CAAAGACACARAGGTTTATCA | 1.801 | 1.960 | 1.453 | 2.450 | 2.705 |
| 7 | 2 | 50883768 | 17502407 | 5222 | GCTTCACATGYTGCCCTCTCA | 0.284 | 0.293 | 2.128 | 2.293 | 2.682 |
| 7 | 2 | 50896377 | 9309194 | 5223 | CACACATGCARTATCTCCCTT | 1.989 | 1.989 | 2.977 | 2.177 | 2.399 |
| 7 | 2 | 50905547 | 9309197 | 5224 | GGGAGGGTCARTTACCAGGAC | 1.352 | 1.357 | 2.243 | 2.498 | 2.297 |
| 7 | 2 | 50914257 | 3850332 | 5225 | GATCTGGAAARTAACTATTAT | 1.828 | 1.766 | 1.974 | 2.630 | 1.780 |
| 7 | 2 | 50922546 | 3850335 | 5226 | CTTTTCCAAGYGTGGGAATAA | 1.000 | 1.007 | 1.930 | 2.088 | 1.869 |
| 7 | 2 | 50933139 | 17568791 | 5227 | GGACATGTTAYGGCTGTGAAA | 0.303 | 0.310 | 1.698 | 2.193 | 1.842 |
| 7 | 2 | 50940313 | 2352077 | 5228 | ATGCGAGGACYAAAGCATTCT | 1.215 | 1.239 | 1.162 | 1.471 | 1.914 |
| 7 | 2 | 50948363 | 9750635 | 5229 | GCTATTAAAAYTCCTGAGATA | 0.892 | 0.870 | 1.040 | 1.286 | 1.346 |
| 7 | 2 | 50959009 | 9309203 | 5230 | GAACTTACTAYCCTTTCTATT | 0.508 | 0.512 | 0.896 | 0.768 | 1.319 |
| 7 | 2 | 50974365 | — | 5231 | TGCCAGCACAYGACATTTGCT | 0.715 | 0.702 | 0.558 | 0.584 | 1.273 |
| 7 | 2 | 50985100 | 17504439 | 5232 | CTCAAAGTGTYAGGTGTAAGG | 0.042 | 0.042 | 0.248 | 0.520 | 1.161 |
| 7 | 2 | 50992132 | 17504614 | 5233 | GAGAAATAATYCTTCATGTCC | 0.468 | 0.500 | 0.217 | 0.269 | 1.618 |
| 7 | 2 | 50998498 | 6710741 | 5234 | TACAGAGTACMCACAGTTCTC | 0.117 | 0.117 | 0.069 | 0.517 | 1.719 |
| 7 | 2 | 51013463 | 2193413 | 5235 | TACTTCCAACRGGAGAATTCT | 0.448 | 0.438 | 0.111 | 0.578 | 1.985 |
| 7 | 2 | 51019436 | 983935 | 5236 | CAATTTGCACRAGGTTAACAG | 0.090 | 0.085 | 0.593 | 1.624 | 2.003 |
| 7 | 2 | 51025393 | 10490172 | 5237 | TTGCTGCTTASAAACAAATTC | 0.296 | 0.282 | 0.831 | 2.248 | 2.616 |
| 7 | 2 | 51032119 | 17041091 | 5238 | GGACAGACAAKTATTTTGTAG | 1.864 | 1.796 | 2.938 | 2.329 | 3.723 |
| 7 | 2 | 51039440 | 17041095 | 5239 | TAGGGCTCTTMAATAGTAGGA | 0.679 | 0.695 | 4.036 | 2.584 | 3.676 |
| 7 | 2 | 51046992 | 1160595 | 5240 | TGTTTCATGTYTTAAAGTGGG | 3.562 | 4.153 | 4.036 | 3.775 | 4.225 |
| 7 | 2 | 51052993 | 1003017 | 5241 | TGGACATACAMTAATGTATCT | 1.320 | 1.479 | 3.511 | 5.267 | 4.568 |
| 7 | 2 | 51058686 | 741421 | 5242 | CTGTCATTCAKTCTAACTTGC | 0.900 | 0.851 | 3.988 | 5.267 | 4.568 |
| 7 | 2 | 51065534 | 7602202 | 5243 | AATATTTAGCYCAATTTCTCT | 1.333 | 1.285 | 3.944 | 4.036 | 5.267 |
| 7 | 2 | 51076203 | 1541602 | 5244 | CTATCAGTAGYATGGGAATGA | 2.030 | 1.966 | 3.481 | 4.153 | 5.267 |
| 7 | 2 | 51083805 | 7579976 | 5245 | CATTCTAACAYCTACAAAGAG | 2.947 | 2.726 | 3.488 | 3.966 | 5.267 |
| 7 | 2 | 51091598 | — | 5246 | ATCTATGCCASATTCCACTGA | 0.074 | 0.074 | 2.730 | 3.966 | 3.869 |
| 7 | 2 | 51096961 | 10205578 | 5247 | TGGAAAGATTKTAATCAGAAA | 1.090 | 1.045 | 2.689 | 3.966 | 3.988 |
| 7 | 2 | 51103966 | 12612704 | 5248 | TATAGATATAYGATATATTGT | 0.000 | 0.000 | 1.609 | 3.225 | 3.422 |
| 7 | 2 | 51107252 | 10174398 | 5249 | TCTGTACCCAYGCTCTCTCCA | 1.535 | 1.429 | 2.171 | 3.153 | 3.364 |
| 7 | 2 | 51117400 | — | 5250 | GCATACAATGYTTGGCTAATG | 0.945 | 0.904 | 2.165 | 2.245 | 3.275 |
| 7 | 2 | 51126792 | 17041161 | 5251 | AGAAAATCCAYAAGTCTAAAT | 1.110 | 1.128 | 2.105 | 2.396 | 3.031 |
| 7 | 2 | 51134758 | 888242 | 5252 | TAAGTATTTAYATAGGTTATC | 0.873 | 0.894 | 1.629 | 2.107 | 2.694 |
| 7 | 2 | 51141925 | 17574007 | 5253 | TTCTATGCAGMCCTCATAAGG | 0.931 | 0.932 | 1.641 | 1.847 | 1.807 |
| 7 | 2 | 51148326 | 17041184 | 5254 | TCAAGTTCCAYTATGCCTGCA | 0.705 | 0.698 | 1.282 | 1.468 | 1.743 |
| 7 | 2 | 51158533 | 12474437 | 5255 | TTTGTGCTCCRTGGATGCAAG | 1.386 | 1.326 | 0.973 | 1.254 | 1.738 |
| 7 | 2 | 51174609 | — | 5256 | ATGGAAATGCMTGCTCACCTA | 0.285 | 0.277 | 0.894 | 1.213 | 1.657 |
| 7 | 2 | 51181930 | — | 5257 | TCCTAGGAGTRTAGGATGAGT | 0.209 | 0.217 | 0.776 | 0.978 | 1.281 |
| 7 | 2 | 51195568 | 6545191 | 5258 | TTTAGAGTTTWTTGTTTTATG | 0.893 | 0.816 | 0.716 | 1.101 | 1.061 |
| 7 | 2 | 51207597 | — | 5259 | AGTACACACASTGACATAATC | 0.408 | 0.402 | 0.594 | 0.995 | 0.884 |
| 7 | 2 | 51219646 | 6545192 | 5260 | AATGGGCTAASTTTCTACTAC | 1.232 | 1.239 | 1.068 | 0.588 | 0.849 |
| 7 | 2 | 51226179 | 17041243 | 5261 | GAAATCTAAGKTTCTCTTTTA | 0.025 | 0.025 | 0.900 | 0.552 | 0.672 |
| 7 | 2 | 51232787 | 1549704 | 5262 | CAGCTGGAATKCACAACGAGA | 1.400 | 1.371 | 0.728 | 0.556 | 0.560 |
| 7 | 2 | 51239401 | 12618610 | 5263 | TTTCTATTAGMCCCTTAAAAA | 0.303 | 0.299 | 0.240 | 0.490 | 0.356 |
| 7 | 2 | 51246851 | — | 5264 | AGGACAAGCTYGTTGGAAGTA | 0.025 | 0.025 | 0.345 | 0.436 | 0.533 |
| 7 | 2 | 51257125 | 4971569 | 5265 | AGGTGCTTTCMTGGGAGTCCC | 0.120 | 0.122 | 0.107 | 0.168 | 0.618 |
| 7 | 2 | 51267562 | 1013164 | 5266 | CACTGGGACTRGGTATGGATC | 0.258 | 0.245 | 0.087 | 0.263 | 0.435 |
| 7 | 2 | 51280190 | 10186486 | 5267 | CCATTTCCCTRGAGATTAAAT | 0.634 | 0.606 | 0.130 | 0.216 | 0.373 |
| 7 | 2 | 51286897 | — | 5268 | GTTATGTATGYGTGTACATGT | 0.260 | 0.257 | 0.216 | 0.271 | 0.246 |
| 7 | 2 | 51292648 | 13404753 | 5269 | GCTAGGAGGARTTAAAATAGC | 0.177 | 0.180 | 0.523 | 0.276 | 0.374 |
| 7 | 2 | 51298389 | 13428293 | 5270 | CAGTTTGCTCKGCTAAGAGGT | 0.441 | 0.431 | 0.522 | 0.272 | 0.170 |
| 7 | 2 | 51306221 | 880384 | 5271 | AGAGGGCCAARGCTTTTTTTC | 1.141 | 1.087 | 0.430 | 0.336 | 0.171 |
| 7 | 2 | 51312996 | 17518964 | 5272 | TTAAATGATTKCAGGTCTTTA | 0.589 | 0.597 | 0.392 | 0.372 | 0.232 |
| 7 | 2 | 51313386 | 17578308 | 5273 | GAAGTTGCTAYGTAGTGTGGC | 0.014 | 0.013 | 0.423 | 0.339 | 0.314 |
| 7 | 2 | 51338825 | 3732051 | 5274 | ACTTAATGCAYCAAAGTAATA | 0.139 | 0.130 | 0.284 | 0.367 | 0.431 |
| 7 | 2 | 51344632 | 12477826 | 5275 | TCTATAATTAMCTCTTGCTGA | 0.484 | 0.478 | 0.133 | 0.378 | 0.363 |
| 7 | 2 | 51350968 | 1468896 | 5276 | TGATCTTTGAKGTTCAAAAAA | 0.710 | 0.755 | 0.220 | 0.234 | 0.374 |
| 7 | 2 | 51356868 | 17041444 | 5277 | TATGCCATCTRCAATGACTGG | 0.110 | 0.113 | 0.334 | 0.325 | 0.539 |
| 7 | 2 | 51362562 | 6745538 | 5278 | AATAATTGGTYCCCTTGTGAC | 0.329 | 0.322 | 0.407 | 0.382 | 0.497 |
| 7 | 2 | 51378902 | 2041947 | 5279 | CTGTATAAACRTATGAAATTA | 0.000 | 0.000 | 0.473 | 0.437 | 0.264 |
| 7 | 2 | 51389580 | 7583309 | 5280 | ATTTAAAATGRTATTACCACT | 0.610 | 0.600 | 0.527 | 0.591 | 0.237 |
| 7 | 2 | 51403035 | 13431262 | 5281 | TACATAGTTAYGCAAACACTA | 0.883 | 0.870 | 0.519 | 0.405 | 0.248 |
| 7 | 2 | 51408733 | 6721829 | 5282 | TTGCAAGCCARGAGGTTCTAG | 0.222 | 0.239 | 0.742 | 0.395 | 0.328 |
| 7 | 2 | 51414723 | 12470385 | 5283 | CAACCCTTCASTAATTCCAAA | 0.341 | 0.336 | 0.541 | 0.425 | 0.708 |
| 8 | 2 | 121573870 | 12477717 | 5284 | AGCCCTGGAGKGTTGGTCTGA | 1.145 | 1.120 | 1.004 | 0.851 | 1.428 |
| 8 | 2 | 121575378 | 17005869 | 5285 | TGTGGGGCTAYGGGCCAGGAA | 1.463 | 1.496 | 1.163 | 0.989 | 1.320 |
| 8 | 2 | 121590453 | 17005870 | 5286 | GAAGCAAATAYGGTAAAATTT | 0.443 | 0.447 | 1.707 | 0.979 | 1.575 |
| 8 | 2 | 121599976 | 10169502 | 5287 | AAACGGGAATRATGGTCAGAC | 0.276 | 0.269 | 1.085 | 1.693 | 1.341 |
| 8 | 2 | 121612456 | 12475346 | 5288 | TGCAGATCACYGAATTTCCCC | 1.048 | 1.010 | 0.486 | 1.687 | 1.418 |
| 8 | 2 | 121618246 | — | 5289 | ACCGTGCAGCYACAGCTCAAA | 0.348 | 0.340 | 0.975 | 1.686 | 1.451 |
| 8 | 2 | 121626028 | 6724707 | 5290 | ATGCTCTTTTYGTGCACCTTT | 0.420 | 0.409 | 1.100 | 1.283 | 1.644 |
| 8 | 2 | 121627437 | 12616919 | 5291 | TTGGACTGTCYGGTTATTGTC | 1.475 | 1.423 | 1.237 | 1.148 | 1.721 |
| 8 | 2 | 121633564 | 10189645 | 5292 | GCTAATGTAAYTTTGGCCACA | 0.657 | 0.658 | 1.452 | 1.205 | 1.278 |
| 8 | 2 | 121646388 | 13015322 | 5293 | CAGGTAAGAAYAAGAAAACCA | 1.479 | 1.528 | 1.452 | 1.060 | 0.816 |
| 8 | 2 | 121654594 | — | 5294 | GAAACAGCATYATCACATACC | 0.000 | 0.000 | 0.873 | 1.224 | 0.814 |
| 8 | 2 | 121664020 | 17179427 | 5295 | GAGCCTTGTGMATGGGCCGGG | 0.191 | 0.185 | 0.783 | 1.071 | 0.890 |
| 8 | 2 | 121674800 | 17006162 | 5296 | AAACACAGGAYCTCTTTTCTT | 0.327 | 0.322 | 0.342 | 0.518 | 0.845 |
| 8 | 2 | 121684644 | 4073806 | 5297 | GTCACCATATRGCAGCTTGCC | 0.000 | 0.000 | 0.178 | 0.458 | 0.838 |
| 8 | 2 | 121692872 | 17794420 | 5298 | CATGCAACCCRAGCGGAAGTG | 0.728 | 0.697 | 0.182 | 0.160 | 0.877 |
| 8 | 2 | 121700701 | 12473888 | 5299 | CAAGTCATGARCCCTGGACAA | 0.027 | 0.027 | 0.206 | 0.248 | 0.526 |
| 8 | 2 | 121710285 | 3768905 | 5300 | CCCCGAGAGCYTGGTCCCACA | 0.143 | 0.147 | 0.241 | 0.279 | 1.162 |
| 8 | 2 | 121723608 | 2119021 | 5301 | AGCTCAGCTCMCTCTCTGGAC | 0.000 | 0.000 | 0.231 | 0.314 | 1.198 |
| 8 | 2 | 121734993 | 17006292 | 5302 | GCCTGATGGAMTATCACCTGC | 0.474 | 0.476 | 0.360 | 0.299 | 1.342 |
| 8 | 2 | 121746144 | 11122852 | 5303 | GCTGAGGTTCWCGCCTACCAG | 0.768 | 0.767 | 0.547 | 1.036 | 1.462 |
| 8 | 2 | 121753101 | 2953083 | 5304 | AGTTGGTAGCMCTTGACCTTC | 0.291 | 0.314 | 0.491 | 1.859 | 1.421 |
| 8 | 2 | 121768706 | — | 5305 | ATGCACTGCASCAGCTCTCCA | 0.000 | 0.000 | 1.621 | 2.055 | 1.765 |
| 8 | 2 | 121775314 | 13028716 | 5306 | TGCCTTTCCAYCTGGACTTAT | 0.380 | 0.381 | 2.154 | 1.930 | 2.827 |
| 8 | 2 | 121794928 | 2580373 | 5307 | AACTGTGCCAYCTCATTGTCC | 2.612 | 2.642 | 2.390 | 1.746 | 2.636 |
| 8 | 2 | 121820468 | 12622908 | 5308 | CTGTTGCCACYACTGATGCCC | 1.503 | 1.574 | 2.247 | 2.043 | 2.476 |
| 8 | 2 | 121833968 | 12479320 | 5309 | TGGTGCCAATRTCTCTAAAAG | 0.910 | 0.883 | 1.897 | 3.093 | 2.476 |
| 8 | 2 | 121834342 | 17006394 | 5310 | CCTAAAAAATRGCAAGAAGGA | 0.385 | 0.395 | 1.392 | 2.712 | 2.449 |
| 8 | 2 | 121859795 | 6716602 | 5311 | CAGAGGGAAAYTTGAGGGAGT | 0.275 | 0.270 | 2.539 | 2.510 | 2.203 |
| 8 | 2 | 121870433 | 10496566 | 5312 | ATATAGAATAWGTTTCAGCCC | 1.420 | 1.483 | 2.237 | 2.010 | 2.204 |
| 8 | 2 | 121886006 | 10191223 | 5313 | ACCACAGAAAKGGAGAAAAAT | 4.004 | 4.153 | 2.200 | 1.819 | 2.021 |
| 8 | 2 | 121891735 | 10496567 | 5314 | CTACGTCTAAKTATTATAAAA | 0.206 | 0.207 | 2.677 | 1.574 | 2.096 |
| 8 | 2 | 121897370 | 10496568 | 5315 | AACAGACATCMTATAAACTTA | 0.394 | 0.401 | 2.153 | 1.799 | 1.718 |
| 8 | 2 | 121911303 | 756504 | 5316 | TTGTTTGTGTSCTGTGGACAC | 0.000 | 0.000 | 0.183 | 1.718 | 1.730 |
| 8 | 2 | 121923785 | 17006485 | 5317 | TATCAATGCAYTGCCCAAGAG | 0.438 | 0.414 | 0.421 | 1.667 | 1.631 |
| 8 | 2 | 121930788 | 17006497 | 5318 | ACGACTTGCTRGAAAGAGGGT | 0.228 | 0.224 | 0.324 | 0.593 | 2.019 |
| 8 | 2 | 121936188 | 2118387 | 5319 | TTGCTCCAACRTTTTCTGGTC | 0.761 | 0.773 | 0.823 | 1.071 | 2.097 |
| 8 | 2 | 121950085 | 17039719 | 5320 | CTCCACTGAASTCCCTAAGAA | 0.162 | 0.164 | 0.790 | 1.212 | 1.815 |
| 8 | 2 | 121958256 | 17006551 | 5321 | ACATCCCATGSTCCCCTTTGT | 1.661 | 1.585 | 1.488 | 1.531 | 0.947 |
| 8 | 2 | 121964620 | — | 5322 | GGAAACACTTYCCTAAGATAC | 0.366 | 0.318 | 1.551 | 1.391 | 0.909 |
| 8 | 2 | 121989999 | 6730694 | 5323 | GTACAGGCCAYATGAAGTCCC | 1.813 | 1.761 | 2.134 | 1.540 | 0.873 |
| 8 | 2 | 121994411 | 7608301 | 5324 | ACCAAACTCARCAAGAGGGCC | 0.752 | 0.737 | 1.549 | 1.291 | 0.795 |
| 8 | 2 | 122017375 | 2164797 | 5325 | AGCCCCCAGCSCGCCAACAGG | 1.546 | 1.546 | 1.690 | 1.212 | 0.740 |
| 8 | 2 | 122041926 | 4848712 | 5326 | TTCATCCACTYGTCTAGAGGG | 0.026 | 0.027 | 0.693 | 0.767 | 0.752 |
| 8 | 2 | 122042281 | — | 5327 | AATGAAACAARCATTTCTTTA | 0.593 | 0.591 | 0.420 | 0.733 | 0.648 |
| 8 | 2 | 122065350 | 10496574 | 5328 | CAGTACTAAAKTCCTATACTA | 0.062 | 0.067 | 0.037 | 0.299 | 0.628 |
| 8 | 2 | 122070442 | 10496573 | 5329 | AGTCTACCAARGAAGTGCTAA | 0.103 | 0.103 | 0.068 | 0.192 | 0.321 |
| 8 | 2 | 122093087 | 287790 | 5330 | TCTTATCTTTRTGCTTTCCTG | 0.139 | 0.143 | 0.018 | 0.020 | 0.315 |
| 8 | 2 | 122102558 | 10185512 | 5331 | TAAAAAGTAGYAATACATAGG | 0.224 | 0.230 | 0.033 | 0.024 | 0.138 |
| 8 | 2 | 122108669 | 192608 | 5332 | CTTCTGTCAARCTTTTTAGAC | 0.165 | 0.168 | 0.036 | 0.004 | 0.125 |
| 8 | 2 | 122119204 | 6541792 | 5333 | TGCCTGCAGTSTGACACTGAT | 0.241 | 0.249 | 0.035 | 0.009 | 0.051 |
| 8 | 2 | 122132877 | — | 5334 | CAGCAAAACTWTTTATACATC | 0.214 | 0.215 | 0.017 | 0.025 | 0.073 |
| 8 | 2 | 122138380 | 6541794 | 5335 | TTTCTTATCARTGGGCCCTCT | 0.093 | 0.096 | 0.035 | 0.061 | 0.122 |
| 8 | 2 | 122165738 | 17833009 | 5336 | AGAATTCATAYACAAACCCCA | 0.037 | 0.037 | 0.078 | 0.138 | 0.159 |
| 8 | 2 | 122184058 | 17039745 | 5337 | ATAATTTCCTYCTTTCCAATG | 0.277 | 0.274 | 0.179 | 0.177 | 0.251 |
| 8 | 2 | 122191938 | — | 5338 | ATAGTGGTAGWTTCTGTCCTG | 0.512 | 0.507 | 0.372 | 0.392 | 0.326 |
| 8 | 2 | 122206162 | 6726677 | 5339 | TCACATATTCYGGGGACTGTT | 0.581 | 0.573 | 0.546 | 0.471 | 0.390 |
| 8 | 2 | 122224032 | 287803 | 5340 | AGTGCTAACASGTCAATAATA | 0.773 | 0.771 | 0.998 | 0.661 | 0.481 |
| 8 | 2 | 122232697 | — | 5341 | GCTTACAACTMGGCAAACATC | 0.000 | 0.000 | 1.059 | 0.846 | 0.559 |
| 8 | 2 | 122238287 | 7565841 | 5342 | CGTATGTTGASAGTGCACTAA | 1.103 | 1.112 | 1.048 | 0.949 | 0.547 |
| 8 | 2 | 122263080 | 17006811 | 5343 | AAGATTGAAARTCACTTATGA | 0.000 | 0.000 | 0.973 | 0.935 | 0.563 |
| 8 | 2 | 122273164 | 4848159 | 5344 | GCATGAGCATYTTTCATTGTC | 0.760 | 0.746 | 0.955 | 0.982 | 0.653 |
| 8 | 2 | 122285711 | 4848719 | 5345 | CCATGGCCTTRGCCTGTCTGC | 0.564 | 0.573 | 0.694 | 0.794 | 0.572 |
| 8 | 2 | 122311345 | 6761861 | 5346 | AACGATGACCSAGAGGCTCTT | 0.559 | 0.553 | 0.720 | 0.669 | 0.687 |
| 8 | 2 | 122315106 | 6541810 | 5347 | CACACAGGCTSTTTAAGGTAA | 0.565 | 0.587 | 0.484 | 0.428 | 0.562 |
| 8 | 2 | 122336423 | 4430963 | 5348 | GGCTGAGTAAMAATCTTTTTG | 0.664 | 0.591 | 0.314 | 0.329 | 0.421 |
| 8 | 2 | 122352090 | 4254513 | 5349 | CAGAATTCTARGTTGGTGGTG | 0.135 | 0.140 | 0.267 | 0.393 | 0.612 |
| 9 | 2 | 127494872 | 17014773 | 5350 | GAATTCTTTGSTGTAAAGCTT | 0.488 | 0.454 | 0.754 | 0.234 | 0.962 |
| 9 | 2 | 127507108 | 11893989 | 5351 | GTATTTGATCRAATCTCTCAT | 1.817 | 1.824 | 0.552 | 0.385 | 1.199 |
| 9 | 2 | 127513886 | 11902275 | 5352 | GGACCACAGCMTGGCAGAGGA | 0.248 | 0.246 | 0.616 | 0.383 | 0.781 |
| 9 | 2 | 127526927 | 17014818 | 5353 | GACCGGCCCAYTTCTGTCTGG | 0.106 | 0.108 | 0.701 | 0.744 | 0.754 |
| 9 | 2 | 127536416 | 17014851 | 5354 | CAGGCACGAGMGGAGGTTTAT | 0.162 | 0.160 | 0.073 | 1.289 | 1.256 |
| 9 | 2 | 127542763 | 17844995 | 5355 | TCTTTTTGGCRGTTTGAAGGG | 0.628 | 0.659 | 0.592 | 1.379 | 1.247 |
| 9 | 2 | 127549063 | 6754017 | 5356 | TTGCATAGATSTCTGTCAAAC | 0.019 | 0.019 | 1.459 | 0.841 | 1.058 |
| 9 | 2 | 127553271 | 13430599 | 5357 | CCTCACACCGKGTCCAGGCTG | 1.786 | 1.860 | 1.642 | 1.390 | 1.355 |
| 9 | 2 | 127559423 | 13425613 | 5358 | GAGGAAGGAGMCCGAAAGAAA | 1.569 | 1.611 | 1.341 | 1.402 | 1.332 |
| 9 | 2 | 127594668 | 4663100 | 5359 | TTCCCGTTTGSGGTTGGGGAC | 0.645 | 0.637 | 2.190 | 1.338 | 0.835 |
| 9 | 2 | 127606162 | 6710467 | 5360 | ATCCGAAGGTRAGTGGTATTT | 0.132 | 0.136 | 1.258 | 1.478 | 0.848 |
| 9 | 2 | 127613550 | 3943703 | 5361 | CATTATTTTAYTTTCCCTTAT | 1.556 | 1.582 | 0.493 | 1.680 | 0.842 |
| 9 | 2 | 127620718 | 10208217 | 5362 | CTAATACTTASGTGTACATCA | 0.087 | 0.083 | 0.630 | 0.896 | 1.364 |
| 9 | 2 | 127630065 | 729666 | 5363 | TCACTCTGCTYTTTGGAATGT | 0.064 | 0.065 | 0.742 | 0.454 | 1.745 |
| 9 | 2 | 127638462 | 17701884 | 5364 | TGCTAAACATRAGATACTCAG | 0.931 | 0.962 | 0.186 | 0.283 | 2.625 |
| 9 | 2 | 127644972 | 17015008 | 5365 | AGCTGAAAGGRCTCTGAATGT | 0.381 | 0.386 | 0.282 | 0.732 | 3.364 |
| 9 | 2 | 127650421 | 4662708 | 5366 | AGTCGGCAGAKGCTCTGAGAT | 0.161 | 0.164 | 0.253 | 0.798 | 3.735 |
| 9 | 2 | 127668493 | 13006847 | 5367 | GCTGAACAGGYCAAACTATTT | 0.277 | 0.260 | 0.494 | 1.511 | 3.551 |
| 9 | 2 | 127692604 | 6710496 | 5368 | AAGCCCCCATMCCAGAAATAA | 0.050 | 0.068 | 1.208 | 3.267 | 3.775 |
| 9 | 2 | 127723916 | 6430936 | 5369 | CCCGAACAGGMTTTTGTTCAC | 1.597 | 1.809 | 2.784 | 4.187 | 3.403 |
| 9 | 2 | 127729734 | 4662717 | 5370 | GTTCCTGGGGYTTGCACTGAT | 1.757 | 1.935 | 4.187 | 4.062 | 3.488 |
| 9 | 2 | 127749557 | 4150474 | 5371 | ACAAACCCACMAAGAAAACAG | 2.034 | 2.101 | 4.789 | 4.312 | 3.568 |
| 9 | 2 | 127754774 | 4150454 | 5372 | CCATCACTTTYAGACCTGTCC | 4.078 | 4.488 | 4.312 | 4.153 | 3.735 |
| 9 | 2 | 127776393 | 4233584 | 5373 | CCTGGATTTCYTACTCACTGT | 4.250 | 3.804 | 4.568 | 4.036 | 3.735 |
| 9 | 2 | 127802584 | 12613413 | 5374 | TTTTGATGGTYCACATGCCAA | 0.498 | 0.536 | 4.153 | 3.775 | 3.761 |
| 9 | 2 | 127810283 | 17015199 | 5375 | TTTTCTTTCTRCTTCCCAAAG | 2.959 | 2.899 | 2.959 | 3.723 | 3.698 |
| 9 | 2 | 127828431 | 6714840 | 5376 | GCAAAGGATCWGTTTCCAAGT | 1.018 | 1.018 | 1.933 | 3.835 | 3.944 |
| 9 | 2 | 127831525 | 6727155 | 5377 | TTTAAAGGGCWAAGGCTATTC | 0.731 | 0.715 | 1.960 | 2.972 | 3.467 |
| 9 | 2 | 127862992 | 2276683 | 5378 | AAACACAGAGSTCAGTGGAAA | 0.386 | 0.393 | 1.160 | 1.860 | 2.951 |
| 9 | 2 | 127880407 | 7599210 | 5379 | TCCTTGGCCARGCATACTGGC | 0.000 | 0.000 | 0.823 | 1.794 | 2.448 |
| 9 | 2 | 127886129 | 6753288 | 5380 | ATTATAGCGCRCTTAAGTTAC | 1.310 | 1.269 | 0.745 | 0.722 | 1.996 |
| 9 | 2 | 127906285 | 1568277 | 5381 | AAGAGAAACAYGGATGGAGCG | 0.247 | 0.251 | 0.750 | 0.526 | 1.315 |
| 9 | 2 | 127912750 | 12478656 | 5382 | TCATGGGCAGKAAACTGTTCT | 0.587 | 0.586 | 0.536 | 0.377 | 1.299 |
| 9 | 2 | 127930463 | 17015274 | 5383 | GTGCTTAGATRTGGAGAGCAT | 0.377 | 0.384 | 0.221 | 0.603 | 0.723 |
| 9 | 2 | 127937786 | 3889307 | 5384 | CGGTCTCAACYTGGTTTTGTT | 0.017 | 0.017 | 0.165 | 0.720 | 0.642 |
| 9 | 2 | 127945128 | 10496663 | 5385 | ATGACAAGTGYTATATGTTAG | 0.299 | 0.304 | 0.399 | 0.442 | 0.748 |
| 9 | 2 | 127955157 | 777557 | 5386 | TTAGAAACGCRTATTAAACTC | 0.112 | 0.110 | 0.581 | 0.433 | 0.676 |
| 9 | 2 | 127963870 | 334156 | 5387 | CCTTGAAGAGYCCATTATTTC | 1.292 | 1.359 | 0.662 | 0.441 | 0.682 |
| 9 | 2 | 127971045 | 11681225 | 5388 | CCCGGAACTTKTCATGCACTA | 0.932 | 0.970 | 0.652 | 0.677 | 0.475 |
| 9 | 2 | 127982848 | — | 5389 | CACGAAAACAYAGCATTATGT | 0.209 | 0.218 | 0.953 | 0.705 | 0.589 |
| 9 | 2 | 127988904 | 334137 | 5390 | CAGTTTAATCRCTCATTTTCT | 0.292 | 0.285 | 0.917 | 0.794 | 1.068 |
| 9 | 2 | 128006344 | 11684705 | 5391 | TTCAAGGTTASCTGAATATTT | 0.633 | 0.642 | 0.458 | 0.873 | 1.011 |
| 9 | 2 | 128015247 | 2052954 | 5392 | GTGAACGTCAYTACAAAGTGC | 1.193 | 1.233 | 0.587 | 0.688 | 1.310 |
| 9 | 2 | 128023821 | 17015401 | 5393 | ATAGCTCCTGKTACTTTTGGC | 0.030 | 0.031 | 0.581 | 1.356 | 1.335 |
| 9 | 2 | 128033130 | 11688201 | 5394 | GCTTAAAGTTRTGTCTATAGC | 0.536 | 0.569 | 0.678 | 1.209 | 1.618 |
| 9 | 2 | 128040262 | — | 5395 | ATCCCATCTTYCCAGAGGAGA | 0.258 | 0.258 | 1.269 | 1.394 | 1.181 |
| 9 | 2 | 128057833 | 10928772 | 5396 | ATGCAGCTGTKTGCAGATGGC | 0.861 | 0.822 | 1.262 | 1.237 | 0.907 |
| 10 | 2 | 162067733 | 10193429 | 5397 | TGTGGAAATAYTGTTGTAAAA | 0.218 | 0.222 | 0.178 | 0.176 | 0.084 |
| 10 | 2 | 162078126 | 12463483 | 5398 | TTTCAAGCTGKCCAACACCCA | 0.292 | 0.292 | 0.172 | 0.166 | 0.079 |
| 10 | 2 | 162084212 | 2216941 | 5399 | AGTCTTTCCCWTTCAAATCAA | 0.138 | 0.123 | 0.248 | 0.178 | 0.126 |
| 10 | 2 | 162090777 | 16845844 | 5400 | TCTGGTCATCRTTATTTTTGG | 0.211 | 0.218 | 0.233 | 0.190 | 0.091 |
| 10 | 2 | 162114653 | 12470386 | 5401 | TTACTCTTCAYCTAAGTTTAG | 0.807 | 1.157 | 0.159 | 0.088 | 0.105 |
| 10 | 2 | 162122423 | 918964 | 5402 | ATTGATTTCCRTGAGCTGAGC | 0.182 | 0.178 | 0.244 | 0.145 | 0.203 |
| 10 | 2 | 162130415 | 963758 | 5403 | ATTTGGAGCAYTTGCCAGAGC | 0.057 | 0.056 | 0.205 | 0.131 | 0.424 |
| 10 | 2 | 162147459 | 6742389 | 5404 | ATATTTTGTAYGATTCTAATT | 0.000 | 0.000 | 0.110 | 0.182 | 0.387 |
| 10 | 2 | 162156767 | 994383 | 5405 | ATCCTAATCCRTCATCTTCTA | 0.089 | 0.089 | 0.111 | 0.315 | 0.681 |
| 10 | 2 | 162174354 | 6731620 | 5406 | TAACTTTCTGYTGAAATGAAA | 0.625 | 0.591 | 0.194 | 0.489 | 0.622 |
| 10 | 2 | 162176411 | 3849351 | 5407 | CAGAATTACCRTAAGACAGGC | 0.166 | 0.169 | 0.334 | 0.543 | 0.713 |
| 10 | 2 | 162200351 | 3914093 | 5408 | CATTAATTTCRGAGAAATTGT | 0.000 | 0.000 | 1.042 | 1.095 | 0.664 |
| 10 | 2 | 162237504 | 13410944 | 5409 | ACTTTTAGGTYTCAGGAAATT | 0.779 | 0.780 | 0.924 | 0.900 | 0.553 |
| 10 | 2 | 162264719 | — | 5410 | AGCAGACTAASAAAAATTTAT | 1.571 | 1.539 | 1.761 | 1.093 | 0.640 |
| 10 | 2 | 162270121 | 971027 | 5411 | ACACTTAGACWGATTCCATGT | 0.360 | 0.368 | 1.391 | 0.910 | 0.614 |
| 10 | 2 | 162283074 | 16845940 | 5412 | AGGTTTGACARATGCTGGCTT | 1.720 | 1.820 | 1.354 | 1.114 | 0.547 |
| 10 | 2 | 162298795 | — | 5413 | GTCAGAGTTTRTTGGAATTTT | 0.015 | 0.015 | 0.559 | 1.120 | 0.593 |
| 10 | 2 | 162310868 | — | 5414 | TATTAATATTRTGTTTATGAT | 0.000 | 0.000 | 0.644 | 0.762 | 0.575 |
| 10 | 2 | 162330250 | 10803781 | 5415 | GTGAAATGGCRGCATTCTCTT | 0.005 | 0.005 | 0.043 | 0.339 | 0.545 |
| 10 | 2 | 162343872 | 2389424 | 5416 | ATTTTACTATMAATGAATATT | 0.000 | 0.000 | 0.042 | 0.293 | 0.615 |
| 10 | 2 | 162354105 | — | 5417 | ACGTAGGGTASATGGTGGGAT | 0.279 | 0.555 | 0.038 | 0.032 | 0.845 |
| 10 | 2 | 162365216 | 9677118 | 5418 | CAGCTTGAGTWATAGTTTGAA | 0.004 | 0.004 | 0.114 | 0.043 | 0.625 |
| 10 | 2 | 162374606 | 1567981 | 5419 | TTGAGTGTTARCGTTGCTAAT | 0.181 | 0.183 | 0.137 | 0.115 | 0.575 |
| 10 | 2 | 162383186 | 7578900 | 5420 | AATTGGTAGTSTGCCTCCATA | 0.284 | 0.280 | 0.061 | 0.606 | 0.224 |
| 10 | 2 | 162393175 | 17728078 | 5421 | TAAACTGTGARTCAGTAAAAT | 0.461 | 0.457 | 0.248 | 0.584 | 0.227 |
| 10 | 2 | 162407761 | 4664048 | 5422 | AATTTTCCTAWTGTATTGGCT | 0.050 | 0.051 | 1.019 | 0.473 | 0.248 |
| 10 | 2 | 162412390 | 16846076 | 5423 | ATTTTGGTTTYATTTGTCCAT | 0.845 | 0.843 | 1.052 | 0.475 | 0.321 |
| 10 | 2 | 162434172 | 971282 | 5424 | AAAAAGGAAGYACATCTTGTG | 1.929 | 1.967 | 0.899 | 0.450 | 0.321 |
| 10 | 2 | 162444883 | 7609393 | 5425 | CACTTAAAAAMCTAGCTCTTA | 0.460 | 0.448 | 0.901 | 0.519 | 0.240 |
| 10 | 2 | 162454850 | 10193728 | 5426 | AAGATGCTATYGAGGGTTCTG | 0.185 | 0.181 | 0.556 | 0.517 | 0.243 |
| 10 | 2 | 162498178 | 7608076 | 5427 | AGTGAGAATAYATGACATTTC | 0.000 | 0.000 | 0.099 | 0.653 | 0.312 |
| 10 | 2 | 162512676 | 1710513 | 5428 | ATAAAATTTTWAAAAAAAGCC | 0.000 | 0.000 | 0.094 | 0.403 | 0.328 |
| 10 | 2 | 162525680 | 1227925 | 5429 | ATCTAAAAACRCTAATTTTTG | 0.534 | 0.523 | 0.133 | 0.036 | 0.301 |
| 10 | 2 | 162536523 | 1227936 | 5430 | AACAGGCCCCWAATTATGCTA | 0.446 | 0.419 | 0.151 | 0.055 | 0.317 |
| 10 | 2 | 162542388 | 1227932 | 5431 | AATTAAAAATMATAAACATAT | 0.000 | 0.000 | 0.126 | 0.075 | 0.175 |
| 10 | 2 | 162550936 | 10179404 | 5432 | ACAGAAATAAYTGAACATTGC | 0.044 | 0.043 | 0.140 | 0.122 | 0.020 |
| 10 | 2 | 162557433 | 11683174 | 5433 | AAAAAGGTCTYTATTCATCTT | 0.022 | 0.024 | 0.107 | 0.118 | 0.059 |
| 10 | 2 | 162563221 | 6707956 | 5434 | ATAGTAGAAAKGTCAGAAAAT | 0.632 | 0.590 | 0.108 | 0.046 | 0.240 |
| 10 | 2 | 162568431 | 16846177 | 5435 | TGTTGGTTCARTCTGAATCTT | 0.327 | 0.319 | 0.112 | 0.023 | 0.631 |
| 10 | 2 | 162578850 | 17729070 | 5436 | ACTAATCAAASAGTGCCATAT | 0.265 | 0.273 | 0.106 | 0.108 | 0.978 |
| 10 | 2 | 162586481 | 7594396 | 5437 | TTGTCTCACARGAGGTCCATT | 0.131 | 0.133 | 0.023 | 0.493 | 1.313 |
| 10 | 2 | 162605465 | 6432705 | 5438 | ACAATCTCTAYTTACTTATGT | 0.077 | 0.073 | 0.197 | 1.106 | 1.720 |
| 10 | 2 | 162610830 | 10930036 | 5439 | ATATGCCATGYGTATAGCAAC | 0.035 | 0.036 | 0.760 | 1.332 | 2.008 |
| 10 | 2 | 162628500 | 12474587 | 5440 | GTTCATATTTKTCTCCAAGAT | 1.212 | 1.159 | 1.358 | 1.665 | 2.106 |
| 10 | 2 | 162636693 | 4637136 | 5441 | TTTGGTTTACRTTAAATCAAG | 1.717 | 1.711 | 1.747 | 2.129 | 2.277 |
| 10 | 2 | 162644128 | 4500960 | 5442 | TCCAGCAGCAYGTTACTGTCT | 1.911 | 1.835 | 2.098 | 2.442 | 2.361 |
| 10 | 2 | 162653508 | 4664442 | 5443 | CTTTTAATGGRTCCTATGTAA | 1.537 | 1.515 | 2.562 | 2.350 | 2.299 |
| 10 | 2 | 162657263 | 4295021 | 5444 | CCTGTTGATTKTTTAGCTGAA | 2.045 | 2.188 | 3.102 | 2.531 | 2.369 |
| 10 | 2 | 162671072 | 1861979 | 5445 | TTAAAGCCTGYAAGCACCAAA | 2.474 | 2.222 | 2.983 | 2.795 | 2.451 |
| 10 | 2 | 162680415 | 2287509 | 5446 | CCTCCTTGTTKCTCTCCAAAT | 2.232 | 2.264 | 2.916 | 2.905 | 2.655 |
| 10 | 2 | 162688346 | — | 5447 | CTTTTGGAGAYCCCTAACAAT | 0.394 | 0.395 | 2.740 | 2.784 | 2.683 |
| 10 | 2 | 162694710 | 1014445 | 5448 | TCTGTAAAGCRCTCTCATTTC | 1.404 | 1.396 | 1.830 | 2.596 | 2.755 |
| 10 | 2 | 162702535 | 12692646 | 5449 | GATTTCCACTWCAAGTTGGTT | 1.488 | 1.513 | 1.425 | 2.543 | 2.914 |
| 10 | 2 | 162712470 | 2284873 | 5450 | GGATATGGCCYAACAGGAAAA | 0.038 | 0.039 | 1.570 | 2.023 | 2.779 |
| 10 | 2 | 162726834 | 16822665 | 5451 | TTGATGGAATYTTTACGATCT | 1.562 | 1.526 | 1.662 | 1.446 | 2.399 |
| 10 | 2 | 162741920 | 10490422 | 5452 | CATTCTTATGKTGTTCTTCTA | 0.779 | 0.793 | 1.227 | 1.574 | 2.380 |
| 10 | 2 | 162749424 | 12469968 | 5453 | CTCTACCTCARTTATACATCC | 1.477 | 1.503 | 1.267 | 1.178 | 1.731 |
| 10 | 2 | 162764974 | 10930042 | 5454 | TATCTTCACCRTCTGTTTCTG | 0.154 | 0.142 | 0.834 | 0.735 | 1.187 |
| 10 | 2 | 162777856 | 4420712 | 5455 | GGAAAGATTAKATTTGAGCCA | 0.253 | 0.222 | 0.519 | 1.282 | 1.080 |
| 10 | 2 | 162789104 | 16846291 | 5456 | AGGCACTTCAKTTCAAAAATC | 0.660 | 0.621 | 0.105 | 0.723 | 1.083 |
| 10 | 2 | 162797892 | 10185151 | 5457 | CCTGTCTCTARGTCATGCATT | 0.066 | 0.068 | 0.549 | 0.475 | 0.720 |
| 10 | 2 | 162807953 | 10490423 | 5458 | GCACATGAATYGATATAAAGA | 0.238 | 0.235 | 0.483 | 0.129 | 0.849 |
| 10 | 2 | 162824895 | 6732914 | 5459 | CAGACAATGGYAAAGAAGCTT | 1.503 | 1.538 | 0.272 | 0.395 | 0.648 |
| 10 | 2 | 162835518 | 13001107 | 5460 | CTACTTGAAGSCCACAGAGAT | 0.054 | 0.052 | 0.246 | 0.356 | 0.729 |
| 10 | 2 | 162839680 | 4664450 | 5461 | TATGCCCAGTKTTCTGGTGAA | 0.032 | 0.033 | 0.675 | 0.370 | 0.445 |
| 10 | 2 | 162857841 | 6707966 | 5462 | TAAGGTTGCAYTGCCTCGTGA | 0.028 | 0.027 | 0.157 | 0.536 | 0.461 |
| 10 | 2 | 162869862 | 6715552 | 5463 | TTTTCCTGAARATCATCATTA | 1.359 | 1.378 | 0.349 | 0.815 | 0.424 |
| 10 | 2 | 162880231 | 4664452 | 5464 | AAAGGTTCATYTTCTATCCCC | 0.071 | 0.068 | 0.580 | 0.449 | 0.333 |
| 10 | 2 | 162888686 | 6706926 | 5465 | GAAGCACTAGKTTCCTTTGAT | 0.645 | 0.639 | 1.122 | 0.493 | 0.360 |
| 10 | 2 | 162898589 | 16846387 | 5466 | TTTATACTTTYCTTGTTTTGT | 0.735 | 0.688 | 0.614 | 0.478 | 0.332 |
| 10 | 2 | 162906489 | 16846391 | 5467 | ATACCTTTGARTAATCACTTT | 1.196 | 1.201 | 0.696 | 0.497 | 0.183 |
| 10 | 2 | 162911936 | 3788970 | 5468 | GCCATAATGARAATAATCCTC | 0.207 | 0.198 | 0.444 | 0.244 | 0.188 |
| 10 | 2 | 162920558 | — | 5469 | CAAACTTGATKTCTTTATCTT | 0.256 | 0.251 | 0.238 | 0.230 | 0.299 |
| 10 | 2 | 162928735 | 16846429 | 5470 | CCAGTGTTACYACCTTACATT | 0.020 | 0.020 | 0.018 | 0.196 | 0.382 |
| 10 | 2 | 162934353 | 1125605 | 5471 | CATATCGTCAYATCATACTGT | 0.095 | 0.095 | 0.008 | 0.101 | 0.171 |
| 10 | 2 | 162940042 | 16846499 | 5472 | TTTTTTTATCWACTATGCAAA | 0.205 | 0.204 | 0.031 | 0.048 | 0.221 |
| 10 | 2 | 162946354 | 6755575 | 5473 | TTGTGAACTGYACTAATTAAT | 0.075 | 0.077 | 0.063 | 0.081 | 0.145 |
| 10 | 2 | 162954331 | 3747517 | 5474 | AACTGTCTCAYGTTCGATAAC | 0.546 | 0.536 | 0.199 | 0.055 | 0.188 |
| 10 | 2 | 162960189 | 4664053 | 5475 | TAAACATGGGWTAAACTAAGT | 0.114 | 0.131 | 0.312 | 0.119 | 0.063 |
| 10 | 2 | 162966835 | 10179671 | 5476 | GACAAGATCTRCATTTGATTT | 0.778 | 0.746 | 0.288 | 0.115 | 0.113 |
| 10 | 2 | 162973735 | 6758639 | 5477 | TGCAAATTCTRTAATACTTTT | 0.567 | 0.574 | 0.278 | 0.274 | 0.296 |
| 10 | 2 | 162980587 | 2163215 | 5478 | TAATCCTCACKCCTGGAAGGT | 0.012 | 0.012 | 0.276 | 0.275 | 0.368 |
| 10 | 2 | 162989298 | 12478709 | 5479 | CTGACCGTCAYGTTTAGGAAG | 0.510 | 0.495 | 0.357 | 0.342 | 0.688 |
| 10 | 2 | 163003491 | 12468353 | 5480 | AGTTTAGTGARAAACCCTGGA | 0.107 | 0.104 | 0.188 | 0.761 | 0.665 |
| 11 | 2 | 198533144 | 3851979 | 5481 | TTTGCTAGGCWGTAAGGAATA | 3.455 | 3.551 | 3.241 | 2.210 | 1.583 |
| 11 | 2 | 198538737 | 6707521 | 5482 | TGAAGACAAGRACTAGGCCGA | 0.000 | 0.000 | 2.149 | 1.954 | 1.124 |
| 11 | 2 | 198546560 | 700686 | 5483 | TAGAAGTCGARATAAGTTAGA | 0.082 | 0.083 | 2.141 | 2.240 | 1.112 |
| 11 | 2 | 198554006 | 700692 | 5484 | CTTGAAGTCAYCCCGTGTATA | 0.227 | 0.224 | 0.243 | 1.372 | 1.235 |
| 11 | 2 | 198561218 | — | 5485 | TTTTCTGGATRTTAAACTACA | 1.052 | 1.043 | 0.217 | 1.087 | 1.303 |
| 11 | 2 | 198569830 | 9288280 | 5486 | AACCCTGAGGRAAATTTAATA | 0.015 | 0.015 | 0.300 | 0.138 | 1.397 |
| 11 | 2 | 198577143 | 2060488 | 5487 | CCTTAGGTTTKTATATTCTGT | 0.275 | 0.286 | 0.387 | 0.127 | 0.886 |
| 11 | 2 | 198585479 | 6734781 | 5488 | TCCTCCATTCRTCTCCATTTC | 0.296 | 0.301 | 0.040 | 0.171 | 0.739 |
| 11 | 2 | 198593672 | 6760891 | 5489 | CAAAAATCTAKGTATCTTCCT | 0.000 | 0.000 | 0.079 | 0.199 | 0.581 |
| 11 | 2 | 198602052 | 4241195 | 5490 | CTTTTGTCCCRAGTTCCAGTT | 0.006 | 0.006 | 0.076 | 0.052 | 1.012 |
| 11 | 2 | 198617826 | 1401092 | 5491 | ATTACATAAGMCAACTCACAG | 0.257 | 0.274 | 0.080 | 0.217 | 1.437 |
| 11 | 2 | 198624136 | 1464211 | 5492 | CAGTATTTAARTTACTGAGCT | 0.000 | 0.000 | 0.062 | 0.815 | 1.458 |
| 11 | 2 | 198631344 | 11887138 | 5493 | AAACTAGACAWCTATACCAAT | 0.261 | 0.273 | 0.373 | 1.782 | 1.657 |
| 11 | 2 | 198644132 | — | 5494 | TCCTGAGTAGWCACCAATGCC | 0.169 | 0.175 | 1.407 | 2.237 | 2.230 |
| 11 | 2 | 198651174 | 10497809 | 5495 | TTGGCAAATARTATTCGATTA | 0.892 | 0.891 | 2.530 | 2.343 | 2.628 |
| 11 | 2 | 198671129 | 16826320 | 5496 | TTTGCAGTTAYAATGGAGCTG | 2.505 | 2.450 | 3.024 | 2.977 | 2.794 |
| 11 | 2 | 198678142 | 2139050 | 5497 | CTTATGTTGGRGAAGTTGATT | 3.055 | 2.742 | 3.221 | 3.198 | 2.533 |
| 11 | 2 | 198684689 | 1518369 | 5498 | AAAGTCATCTRAGTCAGAAAT | 2.168 | 1.994 | 3.271 | 3.221 | 2.605 |
| 11 | 2 | 198693707 | 1976772 | 5499 | CTGGACTCTTKTATTGGTTCG | 0.574 | 0.599 | 3.156 | 3.369 | 2.563 |
| 11 | 2 | 198704803 | 1440090 | 5500 | TTTTGTTGTTKATGTTATCTT | 2.221 | 2.000 | 3.071 | 3.071 | 2.388 |
| 11 | 2 | 198707174 | 1016883 | 5501 | CTCAAAGTTARAGACCATGAA | 2.439 | 2.314 | 2.462 | 2.749 | 2.417 |
| 11 | 2 | 198719433 | 16826740 | 5502 | GGCTTTTCTGRTGATTCTTAC | 2.259 | 2.181 | 2.482 | 2.260 | 2.592 |
| 11 | 2 | 198730776 | 892514 | 5503 | TTCTCCTTGGYGGGTGGAATT | 0.006 | 0.009 | 1.647 | 1.746 | 2.607 |
| 11 | 2 | 198736751 | 10497812 | 5504 | CTTTATAATCRAGGGCTAAAT | 0.426 | 0.447 | 1.145 | 1.843 | 2.226 |
| 11 | 2 | 198746066 | 13382697 | 5505 | TAGGGATGAAMTAATCACTGT | 0.137 | 0.141 | 0.576 | 1.308 | 1.866 |
| 11 | 2 | 198755222 | 6434954 | 5506 | GAGGGGCAGCYAAGATTTATG | 1.326 | 1.355 | 0.577 | 0.916 | 1.462 |
| 11 | 2 | 198765757 | 7590828 | 5507 | CTCATAACTGYGTACGAAGCA | 0.689 | 0.706 | 0.519 | 0.348 | 1.729 |
| 11 | 2 | 198773023 | 16827521 | 5508 | TAGGAAGGACRATAGGTGAGA | 0.024 | 0.023 | 0.772 | 0.474 | 1.363 |
| 11 | 2 | 198785109 | 3755333 | 5509 | TGCCTATCTARTATTTTGTGC | 0.286 | 0.290 | 0.238 | 0.389 | 0.792 |
| 11 | 2 | 198791257 | 7570678 | 5510 | TACATTTATTYGACAGCTACT | 0.755 | 0.786 | 0.175 | 0.671 | 0.347 |
| 11 | 2 | 198798289 | — | 5511 | ATCTTTTTCTRTACGATTCTT | 0.057 | 0.058 | 0.211 | 0.460 | 0.417 |
| 11 | 2 | 198808027 | 16827729 | 5512 | AAGCTTCTTARCAATGTATAT | 0.494 | 0.515 | 0.545 | 0.297 | 0.352 |
| 11 | 2 | 198814784 | 16827788 | 5513 | TAGTCCTGGGWAATTGGGACC | 0.134 | 0.135 | 0.501 | 0.321 | 0.521 |
| 11 | 2 | 198821526 | 16827819 | 5514 | TTCATGGACASCTCACCTTCT | 1.115 | 1.064 | 0.526 | 0.353 | 0.264 |
| 11 | 2 | 198834891 | 16827923 | 5515 | GAAAATGGCCMAGATAAAAAT | 0.695 | 0.703 | 0.363 | 0.201 | 0.187 |
| 11 | 2 | 198843361 | 11896429 | 5516 | ATTGAGGCACWACTGAAAAAG | 0.112 | 0.113 | 0.452 | 0.428 | 0.259 |
| 11 | 2 | 198850476 | 13031577 | 5517 | TAAAAGTTATRTTGACTGGCT | 0.124 | 0.124 | 0.143 | 0.316 | 0.232 |
| 11 | 2 | 198863571 | 1368990 | 5518 | ACACTAACTTYTTTGCTCTCA | 0.393 | 0.395 | 0.229 | 0.323 | 0.267 |
| 11 | 2 | 198873644 | 1434293 | 5519 | GTGGCCATGCMTGAGGTTGAG | 0.155 | 0.150 | 0.219 | 0.198 | 0.270 |
| 11 | 2 | 198882620 | 3937566 | 5520 | GTTTGTATGGYCTATTGCATA | 0.991 | 0.984 | 0.243 | 0.101 | 0.264 |
| 11 | 2 | 198899396 | 4850447 | 5521 | CCATTTATAGYGTTCCATGTG | 0.045 | 0.045 | 0.274 | 0.245 | 0.281 |
| 11 | 2 | 198905312 | 1598660 | 5522 | TTCACTCTGAYTAATGGATGG | 0.162 | 0.164 | 0.233 | 0.239 | 0.142 |
| 11 | 2 | 198912596 | 6746027 | 5523 | CAAGGTTTCAYTTGAGGTGCC | 0.516 | 0.504 | 0.237 | 0.256 | 0.080 |
| 11 | 2 | 198918962 | 13411216 | 5524 | ATGACTGGTAYACTTTACACA | 0.132 | 0.133 | 0.239 | 0.267 | 0.078 |
| 11 | 2 | 198924942 | 12693836 | 5525 | AACAGGAGAAYGGAATCCCTG | 1.012 | 0.999 | 0.364 | 0.096 | 0.098 |
| 11 | 2 | 198934154 | 11674810 | 5526 | CTGCTTTTCTRTGGTCACATC | 0.066 | 0.068 | 0.274 | 0.100 | 0.154 |
| 11 | 2 | 198940187 | 6434961 | 5527 | TAAGCAAATTYGGAGATACAG | 0.426 | 0.432 | 0.272 | 0.108 | 0.175 |
| 11 | 2 | 198947953 | 1456556 | 5528 | AAGCCAAGGAYTGGATCATTT | 0.250 | 0.258 | 0.037 | 0.094 | 0.121 |
| 11 | 2 | 198954384 | 16829186 | 5529 | GATATGGTTCRGCTGTGGCGA | 0.068 | 0.068 | 0.051 | 0.239 | 0.124 |
| 11 | 2 | 198964749 | 4850838 | 5530 | AGGAAATCTCRTAATTGAGAA | 0.106 | 0.106 | 0.041 | 0.114 | 0.359 |
| 11 | 2 | 198977567 | 12471228 | 5531 | TGAACTTAATYCTTTATCCAA | 0.170 | 0.171 | 0.188 | 0.193 | 0.289 |
| 11 | 2 | 198987602 | 1037663 | 5532 | CCTCCAAATCSTTCCTGAGAG | 0.357 | 0.369 | 0.281 | 0.125 | 0.346 |
| 11 | 2 | 198995021 | 13398693 | 5533 | CTTAATGTTAYGGTGATTTTT | 0.909 | 0.920 | 0.430 | 0.423 | 0.221 |
| 11 | 2 | 199003237 | 2529670 | 5534 | TACTACTTTCSCTTAACAAGG | 0.353 | 0.357 | 0.375 | 0.446 | 0.367 |
| 11 | 2 | 199009513 | 13022622 | 5535 | CTGACAAATCRAAGCAGAAAA | 0.493 | 0.521 | 0.992 | 0.552 | 0.359 |
| 11 | 2 | 199015891 | 2727767 | 5536 | TCATATGCTTRTTGTGACTTG | 0.069 | 0.070 | 0.586 | 0.595 | 0.372 |
| 11 | 2 | 199018779 | 16829952 | 5537 | GCTTTTTCCARATAGAGGTGT | 1.610 | 1.708 | 0.618 | 0.762 | 0.477 |
| 11 | 2 | 199030492 | 10490082 | 5538 | TCTGTATTATWCTTAATGGTG | 0.145 | 0.148 | 0.527 | 0.579 | 0.468 |
| 11 | 2 | 199042202 | — | 5539 | CTAGGAATCTKGCAAAGTGGA | 0.451 | 0.444 | 0.900 | 0.562 | 0.436 |
| 11 | 2 | 199049683 | 12468958 | 5540 | TGAAAGAGACRGAGTCTAAGA | 0.268 | 0.289 | 0.368 | 0.570 | 0.537 |
| 11 | 2 | 199056937 | 2467041 | 5541 | ATATGTATTCYGGCTAGACTG | 0.885 | 0.922 | 0.455 | 0.578 | 0.381 |
| 11 | 2 | 199063519 | 6744584 | 5542 | TGTAAGTACAYTGGCTTTTAT | 0.362 | 0.361 | 0.496 | 0.180 | 0.330 |
| 11 | 2 | 199071714 | 2880591 | 5543 | CTTTATAGGTRCATACTTATG | 0.287 | 0.304 | 0.387 | 0.341 | 0.360 |
| 11 | 2 | 199078721 | 2041080 | 5544 | GGATATTGGCSTGAAGATGTA | 0.558 | 0.563 | 0.095 | 0.288 | 0.435 |
| 12 | 3 | 6629288 | 6774186 | 5545 | TGAGATGGCASATTTTTAATA | 1.051 | 1.052 | 1.199 | 1.388 | 1.231 |
| 12 | 3 | 6641674 | 2323812 | 5546 | CTAAAGCCCARTGATATATAA | 0.807 | 0.786 | 1.785 | 1.427 | 1.339 |
| 12 | 3 | 6654184 | 17045432 | 5547 | TCCAGCTGGCSAAACTCATGT | 1.147 | 1.141 | 1.678 | 1.203 | 1.579 |
| 12 | 3 | 6661203 | 9843107 | 5548 | GGCTGCTGCARGGAATCAGTT | 1.403 | 1.442 | 1.261 | 1.774 | 1.602 |
| 12 | 3 | 6668609 | 17045515 | 5549 | TTTAGCCTCAYTGGGATTCTG | 0.195 | 0.199 | 1.060 | 1.777 | 2.133 |
| 12 | 3 | 6674962 | 17045532 | 5550 | GTTGTCAGATMCCAAGGTTTT | 0.287 | 0.275 | 1.167 | 1.376 | 2.144 |
| 12 | 3 | 6681752 | 17045568 | 5551 | CCATAGGGACMGGTGCACACT | 0.471 | 0.497 | 0.545 | 1.426 | 2.204 |
| 12 | 3 | 6687829 | 9822640 | 5552 | TAAATCATTCKGGGGCTTCCA | 1.403 | 1.330 | 0.638 | 1.337 | 2.051 |
| 12 | 3 | 6694368 | 17045665 | 5553 | GTTGGTCGCCMAAACACTAAA | 0.279 | 0.270 | 1.034 | 1.306 | 1.590 |
| 12 | 3 | 6700175 | 17045707 | 5554 | GCAAAACATCYTGCAATATTA | 0.389 | 0.387 | 1.270 | 1.518 | 1.373 |
| 12 | 3 | 6715694 | 17045781 | 5555 | ATAAATGTTGYCAAATTTGGA | 1.238 | 1.187 | 1.206 | 1.370 | 0.978 |
| 12 | 3 | 6723760 | 9817687 | 5556 | AAATGCCTTAYGATTTAATCT | 1.001 | 0.980 | 1.439 | 1.175 | 0.560 |
| 12 | 3 | 6732331 | 17460972 | 5557 | TGCCTGAAAARTGGTAGGTAG | 1.202 | 1.234 | 1.269 | 0.733 | 0.709 |
| 12 | 3 | 6745752 | 345233 | 5558 | GGGATTGCTAYTTTAAGAAGT | 0.640 | 0.608 | 0.697 | 0.651 | 0.626 |
| 12 | 3 | 6753268 | 163966 | 5559 | AGTAGGTAACRCCCATTTGTT | 0.176 | 0.177 | 0.399 | 0.523 | 0.513 |
| 12 | 3 | 6759934 | 347078 | 5560 | GACTAATCAASATCAATTCAC | 0.005 | 0.005 | 0.053 | 0.388 | 0.362 |
| 12 | 3 | 6770637 | 345224 | 5561 | GCAGCCATAASTCTCTAAAAG | 0.295 | 0.289 | 0.002 | 0.167 | 0.451 |
| 12 | 3 | 6780770 | 191525 | 5562 | CCAGCTGTATWGGTTTTGCTT | 0.018 | 0.017 | 0.061 | 0.022 | 0.426 |
| 12 | 3 | 6789988 | 6781770 | 5563 | TGTGGTTTGAYTACCTGAACG | 0.004 | 0.004 | 0.062 | 0.026 | 0.207 |
| 12 | 3 | 6798823 | 11714467 | 5564 | ACTTCTTTTGRCAGGTATGTG | 0.779 | 0.765 | 0.023 | 0.070 | 0.239 |
| 12 | 3 | 6807712 | 12635360 | 5565 | ACAGTTGCCAMCTCTCTACCC | 0.024 | 0.024 | 0.168 | 0.112 | 0.098 |
| 12 | 3 | 6825351 | 6776458 | 5566 | ACTCATTTCGKTTGTTTCCTT | 0.036 | 0.036 | 0.375 | 0.076 | 0.067 |
| 12 | 3 | 6834633 | 11929454 | 5567 | ATTGTGCCTCRGCTCATAAAG | 0.739 | 0.707 | 0.223 | 0.299 | 0.058 |
| 12 | 3 | 6842256 | 17046136 | 5568 | CACTTCCTAAYGGGAAACCAC | 0.632 | 0.630 | 0.224 | 0.331 | 0.181 |
| 12 | 3 | 6849819 | 437555 | 5569 | ACACCAGCAGRGCGTCCAATG | 0.297 | 0.291 | 0.690 | 0.215 | 0.420 |
| 12 | 3 | 6858651 | 449379 | 5570 | TACTCTTGCCRGTTTTATACT | 0.042 | 0.041 | 0.433 | 0.225 | 0.415 |
| 12 | 3 | 6868897 | 7651971 | 5571 | CTAGAGACTCYACTAAATGCT | 1.217 | 1.169 | 0.278 | 0.546 | 0.495 |
| 12 | 3 | 6880612 | 340660 | 5572 | ACTAGGCTGASGGACTGTGTT | 0.143 | 0.145 | 0.202 | 0.867 | 0.348 |
| 12 | 3 | 6887801 | 460041 | 5573 | TCTGCAGTAAWACTGAACAAA | 0.289 | 0.285 | 0.678 | 0.595 | 0.546 |
| 12 | 3 | 6899331 | 1240966 | 5574 | TGTTTGTGGGKGTACACACAG | 0.041 | 0.042 | 0.848 | 0.616 | 0.936 |
| 12 | 3 | 6913008 | 9882865 | 5575 | TGAAAGAATTRTGTGTCTTCT | 1.216 | 1.177 | 0.768 | 0.663 | 0.764 |
| 12 | 3 | 6920735 | — | 5576 | TGTATATATCRTCTACGTGTC | 1.532 | 1.535 | 0.792 | 0.533 | 0.635 |
| 12 | 3 | 6928331 | 17046336 | 5577 | CATCTTTGCTRTTTATTTTTC | 0.027 | 0.026 | 0.836 | 0.914 | 0.703 |
| 12 | 3 | 6939637 | 339013 | 5578 | GGCCACTGACRGGAATAAAGT | 0.302 | 0.315 | 0.658 | 0.888 | 0.910 |
| 12 | 3 | 6946081 | 1516561 | 5579 | TGCCCAAAATKAACTCAGAAT | 0.116 | 0.117 | 0.522 | 0.932 | 0.599 |
| 12 | 3 | 6952098 | 17693917 | 5580 | ATATGGCAAARCTCAAAGAAT | 0.855 | 0.848 | 0.631 | 0.728 | 0.555 |
| 12 | 3 | 6956587 | 535178 | 5581 | TTTTCATTTCRTGATTTACAA | 1.247 | 1.238 | 0.599 | 0.469 | 0.501 |
| 12 | 3 | 6969753 | 6443077 | 5582 | TTTTAGTGACYGAACGTGAAG | 0.252 | 0.231 | 0.795 | 0.491 | 0.492 |
| 12 | 3 | 6978781 | 483162 | 5583 | TTTATGGTACRTCCTCATTCA | 0.313 | 0.302 | 0.722 | 0.397 | 0.268 |
| 12 | 3 | 6986240 | 802783 | 5584 | ATAAAGAGCTMTGTCAGGTTC | 0.565 | 0.542 | 0.229 | 0.364 | 0.101 |
| 12 | 3 | 6993932 | 781388 | 5585 | ATGTTATCTTYACCAAAAACG | 0.674 | 0.685 | 0.162 | 0.163 | 0.342 |
| 12 | 3 | 7000186 | 655620 | 5586 | GGTCAGAAAGRGATACATCAA | 0.057 | 0.058 | 0.097 | 0.025 | 0.300 |
| 12 | 3 | 7006247 | 28407476 | 5587 | ATTGTCAATCYTGATCATACA | 0.054 | 0.055 | 0.023 | 0.030 | 0.286 |
| 12 | 3 | 7018599 | 2201924 | 5588 | ATGTGTGTGCWTGGACTCTTA | 0.048 | 0.046 | 0.000 | 0.235 | 0.436 |
| 12 | 3 | 7024917 | 1240472 | 5589 | GAAGGAGTTAYAGGGCTAATT | 0.044 | 0.043 | 0.005 | 0.150 | 0.230 |
| 12 | 3 | 7030300 | 17046535 | 5590 | TATATGAGTTYGTTTGAATTA | 0.065 | 0.065 | 0.355 | 0.061 | 0.203 |
| 12 | 3 | 7036890 | 1154367 | 5591 | TAGGATAATAYGTTAAAAGGT | 0.336 | 0.336 | 0.366 | 0.353 | 0.327 |
| 12 | 3 | 7043889 | 6800531 | 5592 | CCTCTTTTGTRTTGTTAGCTG | 1.668 | 1.609 | 0.357 | 0.402 | 0.277 |
| 12 | 3 | 7055901 | 234790 | 5593 | GAGTTTGCATSGTTCCTTTCA | 0.052 | 0.054 | 0.990 | 0.382 | 0.241 |
| 12 | 3 | 7061757 | 1499147 | 5594 | GTTAATGTGAKGAAGGGTGGT | 0.066 | 0.066 | 0.975 | 0.673 | 0.271 |
| 12 | 3 | 7068995 | 17046736 | 5595 | TAGTTTGTTARTTGAACTCCT | 1.566 | 1.514 | 0.263 | 0.712 | 0.456 |
| 12 | 3 | 7077260 | 6443079 | 5596 | TGAGTCAGGARCATCATTAAT | 0.205 | 0.209 | 0.664 | 0.779 | 0.961 |
| 12 | 3 | 7084915 | 1499156 | 5597 | CAGTGGAACARCTGAGCAAAG | 0.011 | 0.011 | 0.737 | 0.349 | 1.055 |
| 12 | 3 | 7095417 | — | 5598 | TTTAACTTGTRAGGTGTAGCC | 1.025 | 1.046 | 0.289 | 0.649 | 1.159 |
| 12 | 3 | 7102850 | 7625532 | 5599 | ATTCTAGTTAYGTTCACTGGA | 0.242 | 0.243 | 0.298 | 1.367 | 1.793 |
| 12 | 3 | 7114845 | 6769115 | 5600 | TTCTGTCTTCYGATCATTCAA | 0.000 | 0.000 | 0.799 | 0.967 | 3.559 |
| 12 | 3 | 7122158 | 17046783 | 5601 | TCATGAATTTYGGCATTTTTT | 0.269 | 0.270 | 1.489 | 1.084 | 3.441 |
| 12 | 3 | 7128652 | 6778030 | 5602 | TTGACTATCTRTGAAAACTGT | 1.010 | 1.026 | 1.363 | 2.097 | 3.415 |
| 12 | 3 | 7136316 | 17234935 | 5603 | TCATAATCTASGACTGGATAT | 2.104 | 2.063 | 1.272 | 4.120 | 4.568 |
| 12 | 3 | 7142442 | 11915246 | 5604 | TATTAGAGACYTGTTGGCAGT | 0.405 | 0.400 | 2.306 | 3.966 | 4.568 |
| 12 | 3 | 7148002 | 1878164 | 5605 | ATGACACTTCRTCTACTTGAA | 0.584 | 0.576 | 4.488 | 3.643 | 4.789 |
| 12 | 3 | 7155162 | 6804466 | 5606 | ACTTTATAGGYATACTGGTAG | 2.722 | 2.430 | 4.120 | 4.153 | 4.364 |
| 12 | 3 | 7162872 | 17234969 | 5607 | ACAACCATGAYCCTGACCTTG | 6.278 | 4.966 | 3.886 | 4.789 | 4.187 |
| 12 | 3 | 7168821 | 7623514 | 5608 | TCCTCAAGAAMGACTTGCATT | 0.651 | 0.690 | 4.312 | 4.966 | 4.225 |
| 12 | 3 | 7174495 | 6443093 | 5609 | AATGTAGAAGYGGCAGAAGAC | 0.979 | 0.966 | 4.789 | 5.267 | 4.091 |
| 12 | 3 | 7187512 | 17235018 | 5610 | AAACCTACATSATTCTGTATG | 4.807 | 4.789 | 3.454 | 4.966 | 4.091 |
| 12 | 3 | 7193175 | 1400166 | 5611 | TCATCCTTTCRTCTTTATTCA | 0.785 | 0.786 | 3.093 | 5.267 | 3.886 |
| 12 | 3 | 7198739 | 13082571 | 5612 | GGCTAAAGAAYAGTACAAACC | 0.735 | 0.742 | 2.601 | 1.870 | 4.062 |
| 12 | 3 | 7204619 | 11708019 | 5613 | CAGTTGTCTCRATGCCTAGTA | 0.120 | 0.121 | 0.354 | 1.694 | 3.924 |
| 12 | 3 | 7211588 | 11918486 | 5614 | TTGCTCAGGGWTTCTATGATA | 0.378 | 0.363 | 0.122 | 1.687 | 3.665 |
| 12 | 3 | 7220908 | 2133440 | 5615 | GACAGAAAGAMAATGGTTGTG | 0.111 | 0.107 | 0.020 | 0.521 | 1.766 |
| 12 | 3 | 7227190 | 10510354 | 5616 | TGTTACAGAASGTATGTGTTT | 0.028 | 0.028 | 0.213 | 0.346 | 1.711 |
| 12 | 3 | 7233031 | 17638908 | 5617 | TGATAATTGASTAAAGGCAAG | 0.083 | 0.078 | 0.504 | 0.252 | 1.455 |
| 12 | 3 | 7239504 | 6414460 | 5618 | TTCAAGTGTTWGTTTGGAATA | 1.117 | 1.030 | 0.503 | 0.430 | 0.371 |
| 12 | 3 | 7251549 | 1508713 | 5619 | TATTTAATATYCTTGAAAGGT | 0.929 | 0.856 | 0.629 | 0.420 | 0.285 |
| 12 | 3 | 7259458 | 870440 | 5620 | CTCTGATCTAYTCCAGAGCTG | 0.137 | 0.135 | 1.064 | 0.406 | 0.231 |
| 12 | 3 | 7266260 | 2136153 | 5621 | GTCTCTGATAMGGGAAACAAA | 0.353 | 0.340 | 0.684 | 0.511 | 0.267 |
| 12 | 3 | 7274331 | 9873905 | 5622 | AGAAACCTAGYGGTAGCAAGT | 0.870 | 0.845 | 0.227 | 0.589 | 0.238 |
| 12 | 3 | 7286253 | 9829398 | 5623 | TGAAGGGCCAYGTACTACCTC | 0.339 | 0.330 | 0.334 | 0.392 | 0.286 |
| 12 | 3 | 7295514 | 6443099 | 5624 | CTTCACTGAAYGGATAGATAC | 0.068 | 0.069 | 0.331 | 0.207 | 0.316 |
| 12 | 3 | 7305179 | 7609608 | 5625 | CTGGTCCTGCRTTTGGCTCTG | 0.388 | 0.389 | 0.179 | 0.214 | 0.369 |
| 12 | 3 | 7318584 | 17047063 | 5626 | GTTAACTTCARATACTTTGTC | 0.331 | 0.325 | 0.176 | 0.230 | 0.243 |
| 12 | 3 | 7329377 | 9866393 | 5627 | AGGATGAACARGTGACTTAAT | 0.393 | 0.370 | 0.176 | 0.107 | 0.302 |
| 12 | 3 | 7336512 | 2030154 | 5628 | TTGTTGCCTTWGATTATTATT | 0.382 | 0.386 | 0.168 | 0.106 | 0.297 |
| 12 | 3 | 7344342 | 9311986 | 5629 | GCAGTTGGATSACTTGATTTT | 0.087 | 0.087 | 0.136 | 0.144 | 0.318 |
| 12 | 3 | 7357930 | 17047171 | 5630 | CTTTCTAGAGWTTACATGAGG | 0.413 | 0.401 | 0.144 | 0.408 | 0.217 |
| 12 | 3 | 7367719 | 17047199 | 5631 | TTTGTCGAGGWTGCTAAAACC | 0.165 | 0.165 | 0.143 | 0.345 | 0.174 |
| 12 | 3 | 7379067 | 2221668 | 5632 | AAATTCAAAAYGAGAGAAAAT | 0.368 | 0.363 | 0.685 | 0.370 | 0.228 |
| 12 | 3 | 7386549 | 1548146 | 5633 | AAATAAGATTYTTTTGAATAG | 0.370 | 0.378 | 0.553 | 0.331 | 0.214 |
| 12 | 3 | 7394156 | 9883258 | 5634 | ATCAATAGTGRGTGCTTACGG | 1.589 | 1.755 | 0.688 | 0.335 | 0.416 |
| 12 | 3 | 7400433 | 4686127 | 5635 | GCATTCAAGTMATTCAAATAT | 0.105 | 0.110 | 0.630 | 0.347 | 0.379 |
| 12 | 3 | 7408728 | 1499079 | 5636 | GCTGGTGCAGKTTCACGTTTT | 0.458 | 0.459 | 0.516 | 0.388 | 0.531 |
| 12 | 3 | 7415256 | — | 5637 | TTTAAAGGCARTTGGAGAAAA | 0.219 | 0.224 | 0.151 | 0.696 | 0.640 |
| 12 | 3 | 7420630 | 1066658 | 5638 | GATATATGAGYGATGAAATTG | 0.106 | 0.109 | 0.186 | 0.631 | 0.705 |
| 12 | 3 | 7426750 | 17700470 | 5639 | TGACAACCACRTACAGCTCAA | 0.474 | 0.478 | 0.519 | 0.499 | 0.774 |
| 12 | 3 | 7433710 | 712775 | 5640 | CCTCTGACTTYTATGAGCTTA | 0.253 | 0.263 | 0.505 | 0.620 | 0.799 |
| 12 | 3 | 7441454 | 17047321 | 5641 | ATTCCAGTACRGGAGGCAGAA | 1.440 | 1.485 | 0.924 | 0.688 | 1.117 |
| 12 | 3 | 7448956 | 11717280 | 5642 | TAGGAGTGAAYGCCAGTGTAA | 0.160 | 0.163 | 0.993 | 0.767 | 0.746 |
| 12 | 3 | 7461021 | 712786 | 5643 | TCTATGGCTTRTAGAAGAGGA | 1.079 | 1.097 | 1.287 | 0.910 | 0.716 |
| 12 | 3 | 7467488 | — | 5644 | TGGTATTTAARTGAGATACAT | 0.576 | 0.553 | 0.714 | 1.397 | 0.694 |
| 12 | 3 | 7473748 | 713291 | 5645 | TTTCGAATCCRTTGTGAAAAA | 0.701 | 0.657 | 0.875 | 1.430 | 0.737 |
| 12 | 3 | 7481105 | 1450092 | 5646 | AGCTCAGACARCAGTTGTGAA | 0.490 | 0.482 | 1.210 | 0.780 | 0.751 |
| 12 | 3 | 7487728 | 779708 | 5647 | TTCCTGAACCRCAATTCCCTT | 0.413 | 0.406 | 0.929 | 0.852 | 0.959 |
| 12 | 3 | 7499103 | 779705 | 5648 | AAAACTGATAYGTAGGTAACC | 1.720 | 1.853 | 0.584 | 0.591 | 1.097 |
| 12 | 3 | 7508618 | 10222587 | 5649 | CTGTTCTACCYGGCAAGGACC | 0.137 | 0.132 | 0.493 | 0.438 | 0.796 |
| 12 | 3 | 7517268 | 1375923 | 5650 | TGATATTGGAYGATACTGATT | 0.004 | 0.004 | 0.502 | 0.596 | 0.893 |
| 12 | 3 | 7526367 | 924354 | 5651 | CAGTAACAATKTTTCTTTAGT | 0.298 | 0.294 | 0.041 | 0.654 | 0.675 |
| 12 | 3 | 7532504 | 1145137 | 5652 | TAAACTAGGGRACAATGACTT | 0.396 | 0.392 | 0.307 | 0.673 | 0.704 |
| 12 | 3 | 7540619 | 1144026 | 5653 | TAGTTTTCTGSGTTTTGTTGT | 0.143 | 0.135 | 0.598 | 0.344 | 0.657 |
| 12 | 3 | 7552841 | 17721161 | 5654 | TGCTGGGACTYGGTTTCTGAA | 1.200 | 1.222 | 0.667 | 0.379 | 0.553 |
| 12 | 3 | 7562251 | 779736 | 5655 | TTTTAACCAGRAAGTCTTTGT | 0.699 | 0.664 | 0.728 | 0.574 | 0.466 |
| 12 | 3 | 7571446 | 779719 | 5656 | TCCCTTCTCTRTAATCAGCAG | 0.523 | 0.511 | 0.790 | 0.631 | 0.324 |
| 12 | 3 | 7578708 | 1485179 | 5657 | GAGTTTGAAAYTCCAACTGCT | 0.501 | 0.513 | 0.553 | 0.536 | 0.467 |
| 12 | 3 | 7579955 | 1145141 | 5658 | AGGCTCAAGCRCAAAAGAAGA | 0.228 | 0.234 | 0.472 | 0.502 | 0.482 |
| 12 | 3 | 7592025 | 1531939 | 5659 | TTTTCTTAATSTTTCTGCACC | 0.731 | 0.680 | 0.301 | 0.455 | 0.656 |
| 12 | 3 | 7604004 | 4686140 | 5660 | AATTAGAGTAWGTAAAGCTCT | 0.000 | 0.000 | 0.142 | 0.488 | 0.682 |
| 12 | 3 | 7614708 | 3804883 | 5661 | TCAGGAAGACRAAAGGACCAA | 0.121 | 0.120 | 0.440 | 0.358 | 0.672 |
| 12 | 3 | 7620217 | 11713266 | 5662 | TTGTGCAAGCKAGTTAAATTT | 0.004 | 0.004 | 0.471 | 0.506 | 0.394 |
| 12 | 3 | 7629492 | 1485170 | 5663 | AGAATTCTTGRAAACAGCTTC | 1.036 | 1.057 | 0.312 | 0.579 | 0.319 |
| 12 | 3 | 7635133 | 7640685 | 5664 | AATGCCAAAAYGAACATTTAG | 0.785 | 0.786 | 0.687 | 0.397 | 0.320 |
| 12 | 3 | 7643760 | 3804866 | 5665 | GCTTTGGGTCWCAGCTTCCAC | 0.102 | 0.099 | 0.910 | 0.304 | 0.285 |
| 12 | 3 | 7650322 | 9832222 | 5666 | TACTCCTGCASCTTCTAATTC | 1.019 | 1.011 | 0.478 | 0.368 | 0.320 |
| 12 | 3 | 7656966 | 17724199 | 5667 | AACTACATGCYACTGGGACAG | 0.460 | 0.469 | 0.216 | 0.501 | 0.298 |
| 12 | 3 | 7663564 | 4686146 | 5668 | TTTCCTCAGGKAGCCATGTAA | 0.109 | 0.109 | 0.297 | 0.297 | 0.319 |
| 12 | 3 | 7680399 | — | 5669 | GTTATGGAGASCATGGATTTT | 0.116 | 0.109 | 0.153 | 0.213 | 0.328 |
| 12 | 3 | 7685841 | 2324209 | 5670 | GTCTAGCAAGSGGACACGTAT | 0.327 | 0.324 | 0.113 | 0.334 | 0.414 |
| 12 | 3 | 7691409 | 9845583 | 5671 | TGCAACTAGAMTGGAGCTTTC | 0.513 | 0.513 | 0.191 | 0.233 | 0.251 |
| 12 | 3 | 7698179 | 10514663 | 5672 | AGTGAATGTCRTGAAATACTT | 0.317 | 0.318 | 0.333 | 0.160 | 0.204 |
| 12 | 3 | 7706991 | 1354405 | 5673 | AATGAGTAGCRCACAATACTT | 0.394 | 0.387 | 0.417 | 0.228 | 0.254 |
| 12 | 3 | 7713566 | 162773 | 5674 | ATTTATATATYGGGAGAGCTT | 0.521 | 0.513 | 0.282 | 0.229 | 0.146 |
| 12 | 3 | 7720781 | 13099271 | 5675 | ATATAAAACAWGATAACATTG | 0.509 | 0.532 | 0.358 | 0.271 | 0.106 |
| 12 | 3 | 7733107 | 1857697 | 5676 | AGTTTGTAAAYTGAACATTAT | 0.128 | 0.124 | 0.255 | 0.246 | 0.111 |
| 12 | 3 | 7744798 | 162723 | 5677 | TTGACTGTGAYGGCACACACG | 0.479 | 0.479 | 0.260 | 0.221 | 0.115 |
| 12 | 3 | 7755175 | 17047887 | 5678 | TAACCTCATCRTGATTTTAAC | 0.152 | 0.156 | 0.193 | 0.164 | 0.099 |
| 12 | 3 | 7761554 | 17047896 | 5679 | CTTGTTCCAGRATGCTAGCTT | 0.421 | 0.428 | 0.205 | 0.126 | 0.110 |
| 12 | 3 | 7772492 | 161885 | 5680 | GTCCTTCGAARTCAAAACAGA | 0.334 | 0.325 | 0.089 | 0.067 | 0.222 |
| 12 | 3 | 7780780 | 9817941 | 5681 | ATGTAGCACAYAGGGTGATAT | 0.221 | 0.214 | 0.109 | 0.060 | 0.198 |
| 12 | 3 | 7786740 | 1473278 | 5682 | ATTTTTTTAGSTTCTAGACTC | 0.088 | 0.089 | 0.042 | 0.057 | 0.410 |
| 12 | 3 | 7792722 | 9849633 | 5683 | CTATTAGAGGRTAAGCAGACA | 0.160 | 0.151 | 0.017 | 0.233 | 0.520 |
| 12 | 3 | 7798160 | 1550277 | 5684 | AAGGCTGTTGYTAAGCTGTCC | 0.166 | 0.166 | 0.064 | 0.185 | 0.611 |
| 12 | 3 | 7805201 | — | 5685 | CATATTAGTCYAGTTTTACCA | 0.124 | 0.121 | 0.421 | 0.586 | 0.574 |
| 12 | 3 | 7812783 | 11708939 | 5686 | AGTTTGTGGCMTTTTACACTG | 0.581 | 0.596 | 0.469 | 0.929 | 0.617 |
| 12 | 3 | 7818918 | 1354400 | 5687 | AGTTTGGCATMCTTTGGCATC | 1.244 | 1.272 | 1.293 | 1.207 | 0.587 |
| 12 | 3 | 7825284 | 6780542 | 5688 | GACAATTATAYGCATTGTTTC | 0.290 | 0.295 | 1.827 | 1.215 | 0.625 |
| 12 | 3 | 7831694 | 17048003 | 5689 | TGAATGGTACYAAGAAAGAAT | 1.817 | 1.908 | 1.973 | 1.265 | 0.660 |
| 12 | 3 | 7838157 | 162707 | 5690 | GAAGGGTTTARAATCCTTGTT | 1.120 | 1.094 | 1.233 | 1.227 | 0.882 |
| 12 | 3 | 7850799 | 12488799 | 5691 | GCATAAACTCRGGAAACGACA | 0.525 | 0.523 | 1.210 | 1.094 | 0.822 |
| 12 | 3 | 7859798 | 17048056 | 5692 | TTGTGTTTTGKATCAGAGCTG | 0.335 | 0.326 | 0.542 | 0.819 | 0.875 |
| 12 | 3 | 7871679 | 11718722 | 5693 | AACCCTGGAGYCAGATTTGTC | 0.351 | 0.343 | 0.343 | 0.992 | 1.002 |
| 12 | 3 | 7877712 | 17740513 | 5694 | ACAGGGCAAGRATGGTGTGAT | 0.303 | 0.308 | 0.286 | 0.523 | 0.864 |
| 12 | 3 | 7884368 | 9813540 | 5695 | TTTTTGAGGTYGAAGCTTTAT | 0.524 | 0.501 | 0.469 | 0.336 | 0.621 |
| 12 | 3 | 7890962 | 401263 | 5696 | GACATGAAAAYGGAATGAGAT | 0.362 | 0.351 | 0.401 | 0.354 | 0.572 |
| 12 | 3 | 7900483 | 378055 | 5697 | GCGATTAAAARTAGATATTCT | 0.930 | 0.889 | 0.388 | 0.324 | 0.323 |
| 12 | 3 | 7909333 | 1001254 | 5698 | GAATGTTTTASCTAGCAGCCT | 0.149 | 0.146 | 0.416 | 0.282 | 0.170 |
| 12 | 3 | 7924234 | — | 5699 | AGCGTTGATTKGCACTAGAGT | 0.317 | 0.325 | 0.359 | 0.239 | 0.117 |
| 12 | 3 | 7929783 | 17048336 | 5700 | CCCTTACATAWCATAATAGCA | 0.602 | 0.618 | 0.145 | 0.169 | 0.122 |
| 12 | 3 | 7937060 | 7625080 | 5701 | CACTCCAAATRCCCATTCCTG | 0.167 | 0.165 | 0.118 | 0.128 | 0.109 |
| 12 | 3 | 7942629 | 17048368 | 5702 | AGACCTTTGARAAAGAAGTTG | 0.157 | 0.156 | 0.111 | 0.026 | 0.074 |
| 12 | 3 | 7950061 | 10510379 | 5703 | TTATATAGTARTTGTCACGCA | 0.058 | 0.057 | 0.020 | 0.037 | 0.038 |
| 12 | 3 | 7957884 | 7652192 | 5704 | ATTTGACAGTKTATTTACCAG | 0.208 | 0.203 | 0.006 | 0.038 | 0.027 |
| 12 | 3 | 7967737 | 7428715 | 5705 | AGACTCTAATRTTATTTGGTT | 0.120 | 0.119 | 0.021 | 0.006 | 0.007 |
| 12 | 3 | 7980225 | 17693661 | 5706 | TGTCAGTCCTRTATTTTCTGT | 0.035 | 0.034 | 0.043 | 0.004 | 0.005 |
| 12 | 3 | 7987346 | 4459890 | 5707 | GGTAATATGGYTTTTGAATAT | 0.390 | 0.373 | 0.026 | 0.002 | 0.006 |
| 12 | 3 | 7994240 | 17048460 | 5708 | AAACTTTTCARTAAACCATGT | 0.000 | 0.000 | 0.034 | 0.007 | 0.001 |
| 12 | 3 | 8005030 | 17048480 | 5709 | ACTCTCTGTTKCTAAACTAGG | 0.105 | 0.104 | 0.038 | 0.006 | 0.005 |
| 13 | 3 | 32775326 | 6785966 | 5710 | GTAACTTAAAYGTTGTCTTCA | 0.098 | 0.100 | 0.262 | 0.195 | 0.110 |
| 13 | 3 | 32780201 | 6550159 | 5711 | TTACTCAAGAYTAGTGCTCAG | 1.185 | 1.197 | 0.453 | 0.127 | 0.060 |
| 13 | 3 | 32801772 | 7619274 | 5712 | CAGCCTGGGCRACACACAGCG | 0.119 | 0.120 | 0.406 | 0.128 | 0.024 |
| 13 | 3 | 32814515 | 6774262 | 5713 | TGTCTATCATMTATTGTTATA | 0.578 | 0.577 | 0.373 | 0.115 | 0.019 |
| 13 | 3 | 32851743 | 7644738 | 5714 | ATGGGGGGAGYGGGGGCAGAA | 0.243 | 0.320 | 0.067 | 0.076 | 0.019 |
| 13 | 3 | 32865318 | 6550166 | 5715 | GGTCACAGGAMAACCAGAAAG | 0.045 | 0.045 | 0.057 | 0.082 | 0.029 |
| 13 | 3 | 32879421 | 6550167 | 5716 | TTGCGAGATAKAACTTAAGAT | 0.077 | 0.078 | 0.009 | 0.008 | 0.067 |
| 13 | 3 | 32890863 | 7612206 | 5717 | CTACTACTACWACAACATATT | 0.039 | 0.039 | 0.002 | 0.011 | 0.057 |
| 13 | 3 | 32917788 | 1599831 | 5718 | GTCTGGAGTASGTAATGCCAA | 0.173 | 0.178 | 0.003 | 0.005 | 0.114 |
| 13 | 3 | 32930887 | 7643959 | 5719 | GGTATTTGAASAGCCACTCCT | 0.066 | 0.067 | 0.008 | 0.018 | 0.040 |
| 13 | 3 | 32942855 | 6786990 | 5720 | TTTTCTTTGTKAAGCTCTTCC | 0.109 | 0.109 | 0.058 | 0.036 | 0.037 |
| 13 | 3 | 32954092 | 6550177 | 5721 | GGGAGAGGGAYGAGGGGAGGA | 0.000 | 0.000 | 0.165 | 0.109 | 0.283 |
| 13 | 3 | 32970932 | 2228428 | 5722 | TCCAAATTTAYTCTGCTGACA | 0.388 | 0.382 | 0.300 | 0.189 | 0.452 |
| 13 | 3 | 32977803 | 6803961 | 5723 | CCAAAGCAGCWGAGATCAGGT | 0.660 | 0.677 | 0.587 | 0.166 | 1.384 |
| 13 | 3 | 32995794 | 4640506 | 5724 | TTCCTAATAARGAAAGATTTC | 0.000 | 0.000 | 0.587 | 1.039 | 1.309 |
| 13 | 3 | 33009602 | 4075736 | 5725 | TTTCATAAAGRAGAGAAATAA | 0.621 | 0.641 | 0.456 | 1.414 | 1.316 |
| 13 | 3 | 33019646 | 4074708 | 5726 | ATGGTTTCTCYATATTTTGGG | 0.000 | 0.000 | 1.434 | 2.229 | 2.381 |
| 13 | 3 | 33036155 | 6550190 | 5727 | TCCCGCCCAGRCTCCACATCT | 0.103 | 0.103 | 1.566 | 2.054 | 3.159 |
| 13 | 3 | 33046631 | 6762132 | 5728 | CAGGAGGTATRAACAGTGCTG | 2.293 | 2.228 | 2.616 | 2.048 | 3.604 |
| 13 | 3 | 33062204 | 6780220 | 5729 | CTGCCTTAATMGGGGCTATAG | 0.995 | 1.027 | 2.280 | 3.127 | 3.397 |
| 13 | 3 | 33074192 | 4438612 | 5730 | GTGTCCTGCCRAGGTGGGAGG | 3.074 | 2.951 | 2.595 | 3.852 | 3.332 |
| 13 | 3 | 33085660 | 7610916 | 5731 | TCACGGTGGGYGGATGGCTTG | 0.034 | 0.040 | 3.447 | 3.852 | 3.275 |
| 13 | 3 | 33121193 | 4578976 | 5732 | TCCAGAGATAYGAGTTGGGAC | 0.280 | 0.282 | 3.551 | 4.062 | 3.217 |
| 13 | 3 | 33133916 | 4678686 | 5733 | TGCAGCCTCARGTGCATCATA | 3.132 | 3.518 | 2.665 | 3.460 | 3.217 |
| 13 | 3 | 33151828 | 7652193 | 5734 | ACTGTGGTTTRCAAAGTATAG | 2.210 | 2.073 | 2.568 | 2.756 | 3.332 |
| 13 | 3 | 33179004 | 4678490 | 5735 | TTCTTTGAACWGACGAGTAAG | 0.000 | 0.000 | 2.807 | 1.901 | 3.447 |
| 13 | 3 | 33191738 | 4465894 | 5736 | CTGGCAGAATRCCTGGAATAG | 0.868 | 0.836 | 1.488 | 2.027 | 2.876 |
| 13 | 3 | 33204889 | 7636399 | 5737 | TCCCACTCACYCCACAACACA | 0.000 | 0.000 | 0.557 | 2.443 | 2.775 |
| 13 | 3 | 33217501 | 4678764 | 5738 | GGAACCAGAAYTAAAAAATTT | 0.620 | 0.601 | 0.380 | 1.261 | 2.269 |
| 13 | 3 | 33223374 | 4535176 | 5739 | TCTTTAGCGCYGGCACTGAGG | 0.169 | 0.175 | 0.619 | 0.590 | 2.349 |
| 13 | 3 | 33243630 | 6798379 | 5740 | ACAAAATTTGRTGGTAAAAGT | 0.162 | 0.147 | 0.449 | 0.918 | 2.446 |
| 13 | 3 | 33256297 | 6800399 | 5741 | TACTTTGGACRGAATAGAAAA | 1.347 | 1.379 | 0.421 | 1.192 | 1.491 |
| 13 | 3 | 33267546 | 4678512 | 5742 | TTCGTGGTAAYAGAGGAGAAT | 0.113 | 0.116 | 0.938 | 1.093 | 0.992 |
| 13 | 3 | 33273594 | 6798170 | 5743 | CAGAGAGCCARCTAGTACTGC | 0.531 | 0.529 | 1.523 | 1.076 | 0.944 |
| 13 | 3 | 33289743 | 4678832 | 5744 | CAGTAGAGGGRCCAATTCTTG | 1.423 | 1.447 | 1.086 | 1.037 | 0.753 |
| 13 | 3 | 33318826 | 6807330 | 5745 | ATGTGTGGTGKTGTGACACCT | 1.551 | 1.558 | 1.389 | 1.121 | 0.700 |
| 13 | 3 | 33348207 | 17029976 | 5746 | CCACACCTCAMTAATCGGATG | 0.308 | 0.309 | 1.149 | 0.817 | 1.002 |
| 13 | 3 | 33350489 | — | 5747 | AGTGTACTTTYAGCTGTGACC | 0.512 | 0.528 | 0.748 | 0.795 | 1.011 |
| 14 | 3 | 39582260 | 1620274 | 5748 | TGGAAACAAGYTCTGAAGTAT | 0.565 | 0.553 | 0.266 | 0.407 | 1.009 |
| 14 | 3 | 39586705 | 816502 | 5749 | CAGCTCTAGGYAATCTGGCCT | 0.278 | 0.281 | 0.156 | 0.616 | 0.979 |
| 14 | 3 | 39608066 | 7640123 | 5750 | CCTCAAATGAYGTGAGTAGAG | 0.419 | 0.411 | 0.199 | 0.951 | 1.085 |
| 14 | 3 | 39617791 | 9863522 | 5751 | TGCCAGCACCRATGCTTTCAA | 0.231 | 0.227 | 0.898 | 1.287 | 1.122 |
| 14 | 3 | 39628600 | 4676652 | 5752 | CTGTTTCTTTSTATTGCTATT | 0.142 | 0.146 | 1.373 | 1.177 | 0.766 |
| 14 | 3 | 39650458 | 4676655 | 5753 | GTGATTGATAYGAAGGAGCAT | 2.312 | 2.252 | 1.823 | 1.160 | 0.835 |
| 14 | 3 | 39663717 | 4586749 | 5754 | TTGTTTTGGARGTCCTAATTA | 1.213 | 1.162 | 1.677 | 1.169 | 0.687 |
| 14 | 3 | 39669773 | 1405796 | 5755 | CAAGTAGGGAYGTGGGTTTTC | 1.397 | 1.468 | 2.082 | 1.040 | 0.899 |
| 14 | 3 | 39680713 | 10510704 | 5756 | CAGTGCATTAMGAGGACAAGA | 0.050 | 0.050 | 0.900 | 1.184 | 0.792 |
| 14 | 3 | 39700502 | 17759069 | 5757 | TTTGGAATATYGATTACACTG | 0.501 | 0.505 | 0.422 | 1.108 | 0.969 |
| 14 | 3 | 39742324 | 17039611 | 5758 | AGTTCTGGACYGCCATATACT | 0.200 | 0.198 | 0.155 | 0.735 | 0.888 |
| 14 | 3 | 39751229 | 17076570 | 5759 | GAATGACTCCYGTGAATGACC | 0.180 | 0.179 | 0.191 | 0.423 | 1.074 |
| 14 | 3 | 39764195 | 1405788 | 5760 | AGTGTAACATYTACATCAATG | 0.568 | 0.551 | 0.373 | 0.350 | 1.054 |
| 14 | 3 | 39774785 | 1918028 | 5761 | TTTCCTTAACRTTTTGCAGTC | 0.029 | 0.029 | 0.324 | 0.347 | 0.545 |
| 14 | 3 | 39784586 | 4676512 | 5762 | TGTGTTGGCCRGCCTATATTG | 1.155 | 1.129 | 0.664 | 0.410 | 0.349 |
| 14 | 3 | 39794224 | 11717218 | 5763 | CACCTGTTAGYGCACCAGAAA | 0.084 | 0.084 | 0.431 | 0.371 | 0.219 |
| 14 | 3 | 39800003 | 11717991 | 5764 | ATAGAATTACRGCTGGGAACT | 1.063 | 1.094 | 0.791 | 0.373 | 0.399 |
| 14 | 3 | 39807162 | 7621402 | 5765 | ATTGAATAATMTCTGTGAGCA | 0.048 | 0.047 | 0.322 | 0.287 | 0.373 |
| 14 | 3 | 39817037 | 17030291 | 5766 | TACAGATTCAMCTTTCTAGTA | 0.827 | 0.804 | 0.362 | 0.427 | 0.788 |
| 14 | 3 | 39823345 | 1918029 | 5767 | ACAATGAACAYCATTTAACAT | 0.018 | 0.018 | 0.105 | 0.416 | 0.836 |
| 14 | 3 | 39837056 | 9867310 | 5768 | ACATGAATACRGTTTTGTTGC | 0.180 | 0.187 | 0.256 | 0.510 | 0.814 |
| 14 | 3 | 39848488 | 1918025 | 5769 | CACCTGGCACYCTGTTGGTCA | 0.215 | 0.212 | 0.346 | 0.838 | 0.842 |
| 14 | 3 | 39868177 | 28539759 | 5770 | GTTTTCAGCTYCTAGCCCTGT | 0.545 | 0.578 | 0.487 | 0.923 | 0.614 |
| 14 | 3 | 39884611 | 7612386 | 5771 | CCATATACTTYTGGGCCCTGC | 1.131 | 1.136 | 1.585 | 0.838 | 0.616 |
| 14 | 3 | 39895005 | 4676531 | 5772 | CAACAGTATGYGCCTGGTACT | 0.345 | 0.350 | 1.636 | 0.892 | 0.453 |
| 14 | 3 | 39898848 | — | 5773 | AGGCTTGTACRTTGGGCAACT | 2.077 | 2.079 | 1.583 | 0.916 | 0.561 |
| 14 | 3 | 39922940 | 7618607 | 5774 | GTGTTCCTCCRTTTAGGAGAG | 0.239 | 0.246 | 0.978 | 0.886 | 0.417 |
| 14 | 3 | 39930070 | 1599903 | 5775 | ATAAACTAGAMCCCCTGAAAT | 0.000 | 0.000 | 0.901 | 0.768 | 0.504 |
| 14 | 3 | 39936970 | 13060371 | 5776 | TCTTAGCTGCYGAGACATTTT | 0.206 | 0.210 | 0.048 | 0.530 | 0.476 |
| 14 | 3 | 39949399 | 6803701 | 5777 | TTGGCACACCSTCTGAATTAG | 0.227 | 0.218 | 0.067 | 0.484 | 0.447 |
| 14 | 3 | 39962741 | 725296 | 5778 | TACCAGAGACYCACCTACATA | 0.051 | 0.052 | 0.101 | 0.074 | 0.366 |
| 14 | 3 | 39967543 | — | 5779 | ACTGAGAAACRGTGGCCATAT | 0.383 | 0.362 | 0.100 | 0.052 | 0.161 |
| 14 | 3 | 39978902 | 17183401 | 5780 | AATTTGGAGAYGGATAAGGAC | 0.477 | 0.480 | 0.135 | 0.034 | 0.149 |
| 14 | 3 | 40028112 | 4309670 | 5781 | TTAAGCTCACRCAAAGCACTA | 0.223 | 0.219 | 0.147 | 0.032 | 0.206 |
| 14 | 3 | 40037923 | 7637285 | 5782 | AGGAGTTCACWTACAATGCAT | 0.410 | 0.411 | 0.090 | 0.021 | 0.294 |
| 14 | 3 | 40051924 | 7630287 | 5783 | AAGGTGCACTKACATAAAAAG | 0.089 | 0.086 | 0.037 | 0.033 | 0.263 |
| 14 | 3 | 40069799 | 11920120 | 5784 | GTTAAGATACYGCCCTGTCTA | 0.088 | 0.090 | 0.021 | 0.476 | 0.830 |
| 14 | 3 | 40076928 | 2887954 | 5785 | CTTATTTCAARGGAAAAACAC | 0.147 | 0.151 | 0.012 | 0.549 | 0.792 |
| 14 | 3 | 40082408 | 9816042 | 5786 | AGCCTGGACTRTGTTTCTCAG | 0.064 | 0.072 | 0.826 | 0.556 | 1.465 |
| 14 | 3 | 40088394 | 17184770 | 5787 | AGGGTCACGARGGAGCTGGCC | 0.325 | 0.323 | 1.182 | 1.309 | 1.413 |
| 14 | 3 | 40095453 | 6790823 | 5788 | GACCCTCTTCSTTCTCCAGTT | 2.441 | 2.719 | 1.130 | 1.286 | 1.387 |
| 14 | 3 | 40105656 | 17075569 | 5789 | AGGACTCCAGYTTTACTGCTA | 0.715 | 0.698 | 2.318 | 1.976 | 1.560 |
| 14 | 3 | 40116861 | 11720413 | 5790 | TGATGTTTTGSAACAGAACTA | 0.253 | 0.259 | 2.020 | 2.073 | 1.626 |
| 14 | 3 | 40124462 | 1799414 | 5791 | CAACTGCATCMGTGTCCCACA | 2.459 | 2.389 | 1.850 | 2.126 | 1.695 |
| 14 | 3 | 40132773 | 1616490 | 5792 | CCTCCATGAGWTGTGTAGACC | 0.053 | 0.054 | 1.727 | 2.433 | 1.812 |
| 14 | 3 | 40142195 | 882822 | 5793 | TGTAGGGATCRGAGAAATTGC | 2.142 | 2.074 | 1.829 | 1.790 | 2.253 |
| 14 | 3 | 40158347 | 7634072 | 5794 | CAACAGCTTCRTGGTGTATTT | 0.446 | 0.441 | 1.211 | 1.570 | 2.686 |
| 14 | 3 | 40170306 | 12486603 | 5795 | CCTACAGAACRTCTTCACTAT | 0.478 | 0.495 | 1.569 | 1.639 | 2.751 |
| 14 | 3 | 40180682 | 1799423 | 5796 | TGTCAGCTCTRTTTTCAATCT | 0.930 | 0.942 | 0.759 | 1.431 | 2.048 |
| 14 | 3 | 40194450 | 2255401 | 5797 | TGAATGGCCAYAGTATAGAAT | 0.681 | 0.683 | 0.775 | 1.854 | 1.975 |
| 14 | 3 | 40201689 | 2371176 | 5798 | GGAGCCTGTTMGTGCACAGTT | 0.543 | 0.544 | 1.383 | 1.365 | 2.336 |
| 14 | 3 | 40212567 | 2256927 | 5799 | GTTATGCATCMTCTAGTTTAT | 0.450 | 0.457 | 1.585 | 1.637 | 1.572 |
| 14 | 3 | 40223397 | 2371129 | 5800 | GCCTTGTAAAYTAGTCTTTCA | 1.766 | 1.771 | 1.513 | 1.838 | 1.958 |
| 14 | 3 | 40227350 | 1799422 | 5801 | TCTGCCTGCTSTCCTCCAGCA | 1.537 | 1.567 | 1.738 | 1.778 | 1.921 |
| 14 | 3 | 40232784 | 1714408 | 5802 | AAAGGCCTGGMAAGCAAGGCA | 0.516 | 0.492 | 1.746 | 1.465 | 2.264 |
| 14 | 3 | 40246701 | 1317217 | 5803 | ATGATTAATAKCTGGAGAAAG | 0.992 | 1.022 | 1.512 | 1.843 | 2.388 |
| 14 | 3 | 40249744 | 13092724 | 5804 | TTTCCTGTTCRCCCCCATGGT | 0.000 | 0.000 | 0.746 | 2.141 | 2.357 |
| 14 | 3 | 40286329 | 4974028 | 5805 | TCAATGAAGGRCAGCTGGTGA | 0.939 | 0.952 | 1.333 | 2.250 | 2.569 |
| 14 | 3 | 40301127 | 4974039 | 5806 | TCATATTTGCKTTTAGCATTA | 0.036 | 0.036 | 1.959 | 2.238 | 2.542 |
| 14 | 3 | 40320412 | 9868700 | 5807 | GGAGGCCTCTRAAGCCAAATC | 1.667 | 1.734 | 2.190 | 2.312 | 2.499 |
| 14 | 3 | 40327055 | 9826419 | 5808 | GAATGTAATCRAGATGACGCA | 2.448 | 2.367 | 2.104 | 2.619 | 2.452 |
| 14 | 3 | 40337126 | 11718621 | 5809 | TATCACATCAYTCTACATATG | 1.229 | 1.261 | 2.418 | 2.518 | 2.635 |
| 14 | 3 | 40342528 | 7652014 | 5810 | TAACAGTGGAYAAAAGCCTAT | 0.909 | 0.911 | 2.767 | 2.401 | 2.621 |
| 14 | 3 | 40349555 | 4974067 | 5811 | AAGTCTAACAYGCAGCTCTGA | 2.164 | 2.149 | 2.656 | 2.439 | 2.569 |
| 14 | 3 | 40354011 | 9821036 | 5812 | GGAGTTGTTCRGGGCAAGGAA | 2.835 | 2.815 | 2.305 | 2.669 | 2.578 |
| 14 | 3 | 40371258 | 17078511 | 5813 | GTAATTAGAARTTAACAACCA | 1.143 | 1.141 | 2.331 | 2.705 | 2.654 |
| 14 | 3 | 40378879 | 9860162 | 5814 | GGCTTGTAGTYAGCATACTTC | 1.939 | 1.966 | 2.606 | 2.568 | 2.816 |
| 14 | 3 | 40379774 | 10510708 | 5815 | TGAATCAAGTYGGTCTACAAT | 1.516 | 1.521 | 2.394 | 2.596 | 2.735 |
| 14 | 3 | 40398626 | 9854493 | 5816 | CTCTAGTCTAYAGTTAGCTAT | 2.970 | 3.031 | 2.456 | 2.768 | 2.781 |
| 14 | 3 | 40404187 | 2305521 | 5817 | ATGTTCTGAARAAAAGCCCCG | 2.236 | 2.313 | 2.511 | 2.689 | 2.772 |
| 14 | 3 | 40417584 | — | 5818 | CTGGAGAGGTSCTGAGATGTT | 0.463 | 0.453 | 3.082 | 2.580 | 2.778 |
| 14 | 3 | 40424355 | 6783755 | 5819 | TCTAAGAAGTYAGACAGACAT | 0.374 | 0.364 | 2.622 | 2.549 | 2.795 |
| 14 | 3 | 40431030 | 7645864 | 5820 | GCAAAAGGGAYTGTGGTGTAC | 1.021 | 1.048 | 2.042 | 3.057 | 2.669 |
| 14 | 3 | 40433045 | 9332450 | 5821 | TACCCTTATAYGGCAGAACTT | 2.326 | 2.340 | 1.963 | 2.718 | 2.623 |
| 14 | 3 | 40435771 | 13324109 | 5822 | AATGAACAAAYAGGTAATCTT | 1.437 | 1.410 | 2.816 | 2.748 | 2.654 |
| 14 | 3 | 40447322 | — | 5823 | ATTCACATACRGACACCTGAT | 0.412 | 0.402 | 2.552 | 2.761 | 2.613 |
| 14 | 3 | 40453155 | 6762997 | 5824 | TCTTCCTAACYCAAGCACAGG | 2.876 | 2.897 | 2.497 | 2.569 | 2.344 |
| 14 | 3 | 40462079 | 11707278 | 5825 | ATTGGCTACAWTTAACAACAA | 2.123 | 2.115 | 2.725 | 2.456 | 2.020 |
| 14 | 3 | 40481552 | 6771527 | 5826 | ACTGGTTCCCYTGGTAAGAGC | 2.217 | 2.533 | 2.480 | 2.068 | 1.824 |
| 14 | 3 | 40496322 | 4974029 | 5827 | CACTGCAGTTSTGACAACTAA | 0.931 | 0.959 | 1.993 | 2.009 | 1.831 |
| 14 | 3 | 40506140 | 6762251 | 5828 | AGATGCCTGARTATAGTAATC | 0.432 | 0.426 | 1.267 | 1.798 | 1.559 |
| 14 | 3 | 40515742 | 6599106 | 5829 | AAATCCAGAGRCATATATTTT | 0.651 | 0.633 | 0.454 | 1.099 | 1.306 |
| 14 | 3 | 40534082 | 4973907 | 5830 | GATTTTTCAASAGCAACCTTC | 0.026 | 0.025 | 0.234 | 0.710 | 1.104 |
| 14 | 3 | 40540598 | 6599108 | 5831 | AATATGAAAARTAAGTTCTTT | 0.345 | 0.344 | 0.165 | 0.291 | 1.096 |
| 14 | 3 | 40551065 | 3924444 | 5832 | TTACCATGTGYCTGAATTACA | 0.234 | 0.240 | 0.092 | 0.125 | 0.703 |
| 14 | 3 | 40574409 | 4973908 | 5833 | TGAGAGGACCRTCCAGAACAT | 0.072 | 0.073 | 0.177 | 0.103 | 0.403 |
| 14 | 3 | 40583767 | 6762428 | 5834 | TCCCTTTCTCYGAGTGGTTTT | 0.336 | 0.346 | 0.082 | 0.050 | 0.169 |
| 14 | 3 | 40592543 | 6774841 | 5835 | GTTGACTCTTYTGCTGGCTTC | 0.344 | 0.350 | 0.069 | 0.064 | 0.094 |
| 14 | 3 | 40609500 | 6599112 | 5836 | CTCTTTTTGGWTTGGTAGGCA | 0.027 | 0.028 | 0.067 | 0.048 | 0.070 |
| 14 | 3 | 40624764 | 6599113 | 5837 | GAGGTTGGCASTGTCAGATCA | 0.169 | 0.169 | 0.069 | 0.083 | 0.025 |
| 14 | 3 | 40634559 | 6772841 | 5838 | AGGATAGCCCRTCTTGGTTTG | 0.205 | 0.207 | 0.036 | 0.090 | 0.044 |
| 14 | 3 | 40647131 | 4577438 | 5839 | AGGCTTTTTGYTTTGAGGGCA | 0.294 | 0.304 | 0.177 | 0.072 | 0.052 |
| 14 | 3 | 40665380 | 4383488 | 5840 | TTGTCATCTGYGCAGTGTCCT | 0.220 | 0.216 | 0.195 | 0.026 | 0.180 |
| 14 | 3 | 40678197 | 7650783 | 5841 | TGAAAAATGGYTGCTTTCTCA | 0.625 | 0.632 | 0.186 | 0.073 | 0.289 |
| 14 | 3 | 40686361 | 6599117 | 5842 | AGGGCATACTRAGAGCCCCCA | 0.261 | 0.241 | 0.093 | 0.121 | 0.258 |
| 15 | 4 | 77038761 | 4859408 | 5843 | CTCTTTTAGTRTATCTGAGGT | 0.264 | 0.267 | 0.409 | 0.175 | 0.435 |
| 15 | 4 | 77044119 | 324719 | 5844 | ATCCTTTAAGSAGATCTGTAG | 0.166 | 0.166 | 0.211 | 0.157 | 0.409 |
| 15 | 4 | 77052318 | 3796479 | 5845 | CTCATAAATTRCATAATACCA | 0.095 | 0.094 | 0.022 | 0.223 | 0.439 |
| 15 | 4 | 77060174 | 17000863 | 5846 | GAGCTTACTTRTCGTTACGTA | 0.331 | 0.280 | 0.007 | 0.381 | 0.401 |
| 15 | 4 | 77065861 | 17000870 | 5847 | ACTTAGTCTTMCTCAACCGGC | 0.019 | 0.019 | 0.061 | 0.209 | 0.416 |
| 15 | 4 | 77076629 | — | 5848 | TACATTGTGGRTATATTTGGT | 0.029 | 0.029 | 0.530 | 0.228 | 0.421 |
| 15 | 4 | 77083718 | 11728073 | 5849 | CCTTGGATCTYTTAAGCCAGA | 0.664 | 0.690 | 0.474 | 0.407 | 0.396 |
| 15 | 4 | 77091522 | 17284996 | 5850 | ATATTAAATAYGTCTTTTTCC | 1.509 | 1.633 | 0.623 | 0.445 | 0.237 |
| 15 | 4 | 77093390 | 905954 | 5851 | GTTACCTCTCYGACCCCACAC | 0.155 | 0.153 | 0.992 | 0.458 | 0.191 |
| 15 | 4 | 77107327 | — | 5852 | GATTCTTTATYATTCTTTGTG | 0.363 | 0.365 | 0.826 | 0.676 | 0.504 |
| 15 | 4 | 77115063 | 7696758 | 5853 | ATTTCAAACTMCTCAGAGCAT | 0.946 | 0.919 | 0.298 | 0.712 | 0.526 |
| 15 | 4 | 77122212 | 17000922 | 5854 | GCAGGTGTCTYGCATTTGAGA | 0.212 | 0.207 | 0.524 | 0.474 | 0.679 |
| 15 | 4 | 77127596 | — | 5855 | CTGTTTCTCCRTGTGCTCACA | 0.323 | 0.337 | 0.398 | 0.550 | 1.221 |
| 15 | 4 | 77145093 | 6811934 | 5856 | TTAAAAAAAAYTAAACCACCT | 0.745 | 0.719 | 0.105 | 0.559 | 1.323 |
| 15 | 4 | 77157235 | 7669428 | 5857 | ACTCAAACTCRTGTTCTTAAT | 0.097 | 0.095 | 0.694 | 0.771 | 1.320 |
| 15 | 4 | 77163081 | 1976518 | 5858 | GTTCTGGCGAYGGGAGGCCAT | 0.002 | 0.002 | 0.610 | 1.217 | 0.851 |
| 15 | 4 | 77170444 | 17001165 | 5859 | GCACTACCCAYTGACGCCCAT | 1.769 | 1.768 | 0.714 | 1.319 | 0.830 |
| 15 | 4 | 77181257 | 9784511 | 5860 | CTAAGATGCTYGTGTGTGTGT | 0.162 | 0.170 | 1.892 | 1.362 | 0.892 |
| 15 | 4 | 77196287 | 6819442 | 5861 | GAAATTCCTCYGGAGGATAAA | 0.918 | 0.930 | 2.026 | 1.069 | 0.688 |
| 15 | 4 | 77204330 | 3733233 | 5862 | CCAGGCAAAAYAAAATTATGT | 2.059 | 1.991 | 1.183 | 1.027 | 0.810 |
| 15 | 4 | 77222469 | 17001237 | 5863 | TCTAGAATGCRTAAAGATCTC | 0.308 | 0.293 | 1.203 | 1.197 | 1.996 |
| 15 | 4 | 77228362 | 7154 | 5864 | TGAACTAAATRTATTCCAAAG | 0.428 | 0.442 | 0.709 | 0.649 | 1.969 |
| 15 | 4 | 77234514 | 17001277 | 5865 | CAACATACTTYAGGAGTCATC | 0.079 | 0.075 | 0.151 | 0.787 | 2.093 |
| 15 | 4 | 77239950 | 17001284 | 5866 | TTAAAGTCTTYAGGGCTATTA | 0.066 | 0.068 | 0.149 | 1.864 | 2.311 |
| 15 | 4 | 77247035 | 17506007 | 5867 | TCAAGAAAATRTGTATGCGTA | 0.599 | 0.591 | 0.223 | 1.312 | 1.784 |
| 15 | 4 | 77271152 | 6849878 | 5868 | AATGTCTGGTRTATTGAAACA | 0.285 | 0.275 | 2.116 | 1.529 | 2.412 |
| 15 | 4 | 77287534 | 7670156 | 5869 | CTGAGAGATGWAGGTGGATTA | 0.665 | 0.659 | 2.508 | 1.749 | 2.751 |
| 15 | 4 | 77291919 | 867562 | 5870 | CTGTGTATTTRAGTTGTTTCC | 4.089 | 4.568 | 2.693 | 1.826 | 2.096 |
| 15 | 4 | 77313707 | 4859415 | 5871 | TTAGTAATGCRTCTGATTGCA | 0.621 | 0.645 | 2.763 | 2.810 | 2.312 |
| 15 | 4 | 77322926 | 4859603 | 5872 | TTCTCTCTTCRACTTCTTTGT | 0.000 | 0.000 | 2.788 | 3.353 | 2.953 |
| 15 | 4 | 77338523 | 4621456 | 5873 | TTCTTCTTAASCTACTGATGT | 1.047 | 1.097 | 1.443 | 3.643 | 4.267 |
| 15 | 4 | 77352642 | 4304003 | 5874 | GACTCCTGACRAGGTACCTGA | 0.194 | 0.195 | 2.738 | 3.819 | 3.568 |
| 15 | 4 | 77359429 | — | 5875 | GAAGAGTACARTTAGGCCCAG | 1.702 | 1.743 | 2.514 | 2.491 | 3.819 |
| 15 | 4 | 77365621 | 17001359 | 5876 | GCGCACGTGTWCCATGTGTTT | 2.290 | 2.287 | 1.790 | 3.312 | 3.886 |
| 15 | 4 | 77378467 | 7654988 | 5877 | CATTTAGACTSTGACCGACAA | 0.504 | 0.498 | 2.676 | 2.924 | 3.568 |
| 15 | 4 | 77384429 | 10028141 | 5878 | AAATATTATTRACACTTCAGA | 0.381 | 0.376 | 3.139 | 2.816 | 3.102 |
| 15 | 4 | 77391640 | 17001424 | 5879 | AAACCCAACASGATGACTGGG | 2.131 | 2.037 | 2.135 | 2.879 | 2.872 |
| 15 | 4 | 77402183 | 11733489 | 5880 | TATATCTACGRTGATGCCTCT | 3.192 | 3.245 | 2.591 | 2.682 | 2.979 |
| 15 | 4 | 77416693 | 4481255 | 5881 | AGAAAATCTTYACCTTCTGTT | 0.499 | 0.503 | 2.477 | 2.459 | 3.120 |
| 15 | 4 | 77430723 | 6824251 | 5882 | CACATTCCAAMATAACAGAAC | 2.199 | 2.159 | 2.364 | 2.470 | 3.353 |
| 15 | 4 | 77439978 | 3733256 | 5883 | GGAGGTGGAGSGTTTCCCCAC | 0.305 | 0.313 | 1.847 | 2.637 | 3.267 |
| 15 | 4 | 77448185 | — | 5884 | TACCAGGAGGWAGTATGTACT | 1.896 | 1.817 | 2.092 | 3.052 | 3.007 |
| 15 | 4 | 77456563 | 17001573 | 5885 | TTATTTGGGCRTGTAGCTATG | 1.087 | 1.010 | 2.133 | 2.961 | 3.127 |
| 15 | 4 | 77467490 | 6824953 | 5886 | AGTCAGAGACSAAAGGACTTG | 0.256 | 0.251 | 3.019 | 3.293 | 3.233 |
| 15 | 4 | 77474753 | 999361 | 5887 | ACTTGGGCAGMAGCATGAAGC | 2.357 | 2.479 | 3.130 | 3.114 | 3.258 |
| 15 | 4 | 77481924 | 17001640 | 5888 | TTCAACCAGCRTAAGCTTCCA | 2.966 | 2.837 | 2.883 | 2.988 | 2.953 |
| 15 | 4 | 77488248 | 17001659 | 5889 | GCCCTGACTGYGGCCAGTTCT | 1.120 | 1.098 | 3.332 | 3.046 | 3.120 |
| 15 | 4 | 77501861 | 2034004 | 5890 | TTATCACCGCYCTCTTCCTCT | 0.321 | 0.335 | 1.902 | 2.633 | 2.593 |
| 15 | 4 | 77534206 | 17001726 | 5891 | GTGTACAAACRAAGGATATAT | 0.347 | 0.349 | 0.991 | 3.079 | 2.615 |
| 15 | 4 | 77543775 | 17236158 | 5892 | ACTGTCTTTGSTCTCTGTATT | 0.315 | 0.330 | 0.634 | 2.150 | 2.082 |
| 15 | 4 | 77550724 | 1441911 | 5893 | AGATTTAAGTKCCTAAGTTGG | 1.392 | 1.383 | 1.065 | 1.076 | 1.781 |
| 15 | 4 | 77559991 | 1530296 | 5894 | TAGTGGCAAARCACCCTTCTT | 0.364 | 0.373 | 0.983 | 0.730 | 1.909 |
| 16 | 4 | 100854365 | 28666735 | 5895 | CAATAGAGGGYTAAATTTAAA | 0.397 | 0.408 | 0.286 | 0.971 | 0.514 |
| 16 | 4 | 100861842 | 3816873 | 5896 | CTTCATCTAAYCCATGGAAAG | 0.257 | 0.262 | 0.475 | 0.901 | 0.647 |
| 16 | 4 | 100869590 | 982424 | 5897 | CTGGAAATTGYAAAGTGACCT | 0.239 | 0.234 | 0.840 | 0.672 | 0.636 |
| 16 | 4 | 100878983 | 17029215 | 5898 | TTCAAAAGTGMCAGCAGCATT | 1.510 | 1.493 | 0.994 | 0.421 | 0.822 |
| 16 | 4 | 100889431 | 2298747 | 5899 | CTTGGGAAACWGTCATTACAA | 0.827 | 0.874 | 0.928 | 0.660 | 0.704 |
| 16 | 4 | 100908302 | — | 5900 | AGCTCAGTCAWTCTTGTTTAG | 0.639 | 0.607 | 0.804 | 0.563 | 0.520 |
| 16 | 4 | 100914572 | 17029251 | 5901 | GCCAAGCTCARATCAGACTCC | 0.115 | 0.116 | 0.517 | 0.815 | 0.360 |
| 16 | 4 | 100921177 | 17600719 | 5902 | TCTCCACGCCRGCCTGTGCCC | 0.085 | 0.084 | 0.214 | 0.829 | 0.412 |
| 16 | 4 | 100929924 | 17029267 | 5903 | GTCTGATCACYGCTGTGGAGG | 0.796 | 0.834 | 0.334 | 0.374 | 0.355 |
| 16 | 4 | 100947301 | 17029309 | 5904 | TGAATCATCARGTGCTATTGT | 0.127 | 0.122 | 0.413 | 0.199 | 0.883 |
| 16 | 4 | 100958504 | 13123629 | 5905 | AGTCCACCCTMACCTAAAAAA | 0.967 | 0.993 | 0.408 | 0.142 | 0.909 |
| 16 | 4 | 100972443 | 17029332 | 5906 | TTTCCCCAGGYAGCTGAATCA | 0.306 | 0.298 | 0.177 | 0.143 | 0.559 |
| 16 | 4 | 100983727 | 10516451 | 5907 | TTTACTAACCRTCATTACAAA | 0.090 | 0.089 | 0.234 | 0.773 | 0.589 |
| 16 | 4 | 100993990 | 4699759 | 5908 | GTATTCAAATYGATCACCTAG | 0.152 | 0.153 | 0.054 | 0.637 | 0.460 |
| 16 | 4 | 101011970 | 6532828 | 5909 | CCTAGCAAGCRCTGCACGAGA | 0.293 | 0.294 | 0.733 | 0.641 | 0.531 |
| 16 | 4 | 101019807 | 7675455 | 5910 | TAGGCAAGACSTGGTATCCTA | 0.174 | 0.171 | 0.883 | 0.643 | 1.011 |
| 16 | 4 | 101026498 | 17537090 | 5911 | AATTCCATGARGACAGGTTTT | 2.394 | 2.261 | 0.875 | 0.561 | 0.828 |
| 16 | 4 | 101033818 | 1820495 | 5912 | TAAAAGTTTGYTCACCTCCCC | 0.465 | 0.455 | 1.185 | 0.677 | 1.320 |
| 16 | 4 | 101041979 | 716556 | 5913 | TACTAGCCAGRTTAAGTTCAG | 0.087 | 0.085 | 1.156 | 1.354 | 1.398 |
| 16 | 4 | 101062450 | 6831238 | 5914 | CCTCACACTGYCTCCATGGTT | 0.990 | 0.989 | 0.315 | 1.336 | 1.306 |
| 16 | 4 | 101070943 | 11735070 | 5915 | GAGGAAACAASTAGGAACAAT | 0.030 | 0.029 | 0.969 | 2.080 | 1.354 |
| 16 | 4 | 101082500 | 10031644 | 5916 | AGTAGGGAATKTATTTGCACA | 0.464 | 0.475 | 0.971 | 1.554 | 2.812 |
| 16 | 4 | 101095575 | 2282588 | 5917 | GAAAACAAGTWGGTTGAGAAA | 1.892 | 2.113 | 1.268 | 1.347 | 2.855 |
| 16 | 4 | 101103675 | 10031708 | 5918 | CAGAGCTTCTYGCATCATTTC | 0.140 | 0.143 | 2.088 | 1.269 | 3.551 |
| 16 | 4 | 101110330 | 2162386 | 5919 | AACAGGTTATMTTTCAAGGCC | 1.673 | 1.761 | 1.728 | 2.536 | 3.585 |
| 16 | 4 | 101116777 | — | 5920 | TTTGGTACGTKTTGTAGAACA | 1.136 | 1.131 | 0.820 | 2.801 | 3.434 |
| 16 | 4 | 101123160 | 4699387 | 5921 | TTTGACGACASCTACCGCTAT | 0.188 | 0.185 | 2.531 | 3.924 | 3.761 |
| 16 | 4 | 101129781 | 4699767 | 5922 | GCACCTTATCYGGGCCCAAGT | 0.232 | 0.225 | 1.924 | 3.447 | 3.924 |
| 16 | 4 | 101130928 | 11935615 | 5923 | CAGCTTGTTCRGGTCATGTTC | 3.916 | 3.585 | 3.146 | 3.102 | 4.187 |
| 16 | 4 | 101149661 | 6829912 | 5924 | GCTGAGCCTAYGGTCTGCTCT | 0.747 | 0.745 | 3.342 | 3.342 | 3.924 |
| 16 | 4 | 101158451 | 11723286 | 5925 | TTTATTTACARAGGCTATTTT | 3.996 | 3.761 | 2.961 | 3.503 | 3.503 |
| 16 | 4 | 101166087 | 11937985 | 5926 | TACTTTGATAYTATGAAAAAC | 0.327 | 0.328 | 2.708 | 3.665 | 3.966 |
| 16 | 4 | 101180236 | 11931053 | 5927 | AATGGCCAAARTAGAAGACAT | 0.859 | 0.872 | 3.434 | 3.761 | 3.761 |
| 16 | 4 | 101183482 | 17029641 | 5928 | TCTTACACATRAAGTATATGG | 1.691 | 1.656 | 1.776 | 2.633 | 3.422 |
| 16 | 4 | 101206644 | 17029667 | 5929 | CTCATCTCCARTTTGACAGAG | 1.131 | 1.165 | 1.851 | 3.322 | 3.241 |
| 16 | 4 | 101209057 | 17613664 | 5930 | AGTGTGTTCTYCAAAAAGATT | 0.816 | 0.815 | 1.655 | 2.238 | 3.187 |
| 16 | 4 | 101220468 | 17613746 | 5931 | AGCAAAAAATYAGGAAGAAAA | 0.896 | 0.890 | 2.289 | 2.277 | 2.536 |
| 16 | 4 | 101245150 | 6842840 | 5932 | TTATAATTCARTTTGCAGCCA | 0.416 | 0.430 | 1.971 | 2.415 | 2.471 |
| 16 | 4 | 101258022 | 7689566 | 5933 | AGAGCTATCARTTTATAGAGC | 3.091 | 3.139 | 1.879 | 1.853 | 1.876 |
| 16 | 4 | 101270627 | 6816635 | 5934 | AGAAATGCCARAATCTCTCAA | 0.843 | 0.898 | 1.718 | 1.515 | 1.931 |
| 16 | 4 | 101278022 | 11932783 | 5935 | TTATTTCATGKGATCCTTTCA | 0.106 | 0.110 | 1.799 | 1.428 | 2.229 |
| 16 | 4 | 101287921 | 6838495 | 5936 | TTATTTTAGAYATCTGTGGCA | 1.359 | 1.438 | 0.495 | 1.479 | 1.910 |
| 16 | 4 | 101295878 | — | 5937 | ACATTTGCCCKTAACTTTAGA | 0.067 | 0.065 | 0.530 | 1.682 | 1.666 |
| 16 | 4 | 101304621 | — | 5938 | GGTGATTAACYGCACTTGGCT | 0.056 | 0.054 | 1.103 | 1.511 | 1.610 |
| 16 | 4 | 101316549 | — | 5939 | TGTTGTCAATKAAAGGGAAAA | 0.951 | 0.986 | 1.086 | 1.441 | 1.464 |
| 16 | 4 | 101328817 | 17029724 | 5940 | TTTAGTTGCARTTAAATGCTG | 1.511 | 1.610 | 1.798 | 1.352 | 1.465 |
| 16 | 4 | 101350212 | 6532842 | 5941 | TGCTCATCTCYTCAGCTGACA | 1.276 | 1.262 | 1.782 | 1.114 | 1.014 |
| 16 | 4 | 101362457 | 7668076 | 5942 | GGTGTACAAAKGATTTTTTCA | 2.358 | 3.071 | 1.519 | 1.121 | 0.961 |
| 16 | 4 | 101376717 | 4699391 | 5943 | ACTGGAGACAYGCTCAGCCCC | 0.022 | 0.023 | 1.070 | 1.108 | 1.158 |
| 16 | 4 | 101395853 | 7671736 | 5944 | GATAATGAACRTTTTGTTATC | 0.084 | 0.079 | 0.603 | 1.061 | 1.332 |
| 16 | 4 | 101415183 | 4699777 | 5945 | CTACATATGGYATACTATTTT | 0.108 | 0.113 | 0.002 | 0.734 | 1.382 |
| 16 | 4 | 101421476 | 17029744 | 5946 | TTTTGAGCTCRTGATCATTCA | 0.121 | 0.125 | 0.056 | 0.655 | 1.560 |
| 17 | 4 | 126424833 | 1986513 | 5947 | CTTAGTTTTAWCTCCACAGAA | 0.000 | 0.000 | 0.340 | 0.605 | 0.906 |
| 17 | 4 | 126433664 | 4349615 | 5948 | TTGCCCTCTCMAGGTTTTCTT | 0.558 | 0.516 | 0.608 | 0.390 | 0.695 |
| 17 | 4 | 126443621 | 4240276 | 5949 | ACTGTGCAAARAAGTCGTGTC | 0.518 | 0.518 | 0.766 | 0.741 | 0.707 |
| 17 | 4 | 126456202 | 4532242 | 5950 | AAAAGTAAATRTAGAAATCAT | 1.070 | 1.091 | 0.678 | 0.568 | 0.572 |
| 17 | 4 | 126478116 | 11721960 | 5951 | TCATGTATAARTTTGTGTCAT | 0.390 | 0.410 | 0.957 | 0.906 | 0.473 |
| 17 | 4 | 126491841 | 4240277 | 5952 | CTCATTTTCTKAAACAGTCAA | 0.384 | 0.293 | 0.750 | 0.809 | 0.628 |
| 17 | 4 | 126504147 | 17009345 | 5953 | TCTGACCAAARGTGTGCATGA | 1.060 | 1.057 | 0.690 | 0.637 | 0.516 |
| 17 | 4 | 126518233 | 17009376 | 5954 | TCCTCTCACTSAGTTAATAGC | 0.088 | 0.091 | 0.627 | 0.645 | 0.507 |
| 17 | 4 | 126528678 | 17793037 | 5955 | AATTCACTCARGAAGTATTTA | 0.993 | 0.954 | 0.490 | 0.537 | 0.487 |
| 17 | 4 | 126539380 | 17009427 | 5956 | GTGTGGAAGARACCATACATT | 0.255 | 0.271 | 0.287 | 0.439 | 0.531 |
| 17 | 4 | 126554568 | 12512873 | 5957 | ATAGAAATTTWGGACAGTATT | 0.044 | 0.044 | 0.547 | 0.363 | 0.486 |
| 17 | 4 | 126562521 | 10518462 | 5958 | TCTAAGTTTAYGTTTTGAGAC | 0.538 | 0.530 | 0.208 | 0.191 | 0.382 |
| 17 | 4 | 126573834 | 1355167 | 5959 | AATAATTCTCYCCTTCAACAT | 0.756 | 0.745 | 0.150 | 0.333 | 0.562 |
| 17 | 4 | 126583321 | 11098804 | 5960 | TATGGTGTTAYGTCAATTGTT | 0.102 | 0.104 | 0.252 | 0.186 | 0.512 |
| 17 | 4 | 126594846 | 7677005 | 5961 | CGCTCAGACTRTCTGGATTCA | 0.038 | 0.040 | 0.300 | 0.260 | 0.313 |
| 17 | 4 | 126598940 | — | 5962 | TGAAGAAAGASAGTTTGCTAT | 0.392 | 0.298 | 0.160 | 0.576 | 0.403 |
| 17 | 4 | 126613149 | 10034706 | 5963 | AATCCCATTTRCAAAGATCCT | 0.667 | 0.674 | 0.340 | 0.468 | 0.237 |
| 17 | 4 | 126622721 | 17801021 | 5964 | TAGATGATTTSATAAAGACTT | 0.355 | 0.338 | 0.823 | 0.281 | 0.299 |
| 17 | 4 | 126628378 | 7676058 | 5965 | AAGTGAAATTKTATATGAAGT | 0.621 | 0.640 | 0.707 | 0.397 | 0.405 |
| 17 | 4 | 126634576 | 17009520 | 5966 | ATGATGATGAMAAAGTTGATT | 1.219 | 1.171 | 0.443 | 0.381 | 0.506 |
| 17 | 4 | 126643919 | 9307561 | 5967 | AGTTAGGGAAYACCGGATGAG | 0.143 | 0.137 | 0.513 | 0.451 | 0.511 |
| 17 | 4 | 126659459 | 17009559 | 5968 | AAGCAGACTGYGAGAATTCTA | 0.102 | 0.101 | 0.307 | 0.436 | 0.713 |
| 17 | 4 | 126664946 | 13146586 | 5969 | ACATTAAATGYCTTCTGTACC | 0.573 | 0.455 | 0.146 | 0.660 | 0.761 |
| 17 | 4 | 126671984 | 13146027 | 5970 | TCCGTTCATTRAGAAACATTT | 0.052 | 0.052 | 0.271 | 0.689 | 1.223 |
| 17 | 4 | 126683303 | 17009611 | 5971 | TATTGTATTCMTTTGATACGC | 0.648 | 0.643 | 0.690 | 0.640 | 1.079 |
| 17 | 4 | 126696793 | 4833325 | 5972 | ACAGTTTAATYTTATTTTCCA | 0.619 | 0.630 | 0.798 | 0.702 | 1.112 |
| 17 | 4 | 126705065 | 6842220 | 5973 | TAATGAAAATYGCTTGAAAAC | 1.061 | 1.033 | 1.293 | 1.399 | 2.245 |
| 17 | 4 | 126711912 | 1395233 | 5974 | AATAATATGGKAAGGTTGTGA | 0.826 | 0.750 | 1.043 | 1.401 | 2.040 |
| 17 | 4 | 126718936 | 9307564 | 5975 | ATTGAATGAAYGATTTTAATA | 1.073 | 1.058 | 1.758 | 1.599 | 2.206 |
| 17 | 4 | 126726483 | 13108706 | 5976 | CCTTATGGCARCTTTTCTGCA | 0.399 | 0.373 | 1.533 | 3.258 | 2.015 |
| 17 | 4 | 126732504 | 4834042 | 5977 | CTAATGGTTGRGTAGAAAGCA | 2.270 | 2.290 | 1.345 | 2.890 | 2.283 |
| 17 | 4 | 126738202 | 17009708 | 5978 | GAAAGTCTGCRGATACCATGG | 0.035 | 0.031 | 3.303 | 2.694 | 2.210 |
| 17 | 4 | 126744932 | 17009734 | 5979 | TGCTTCAGACRTTATAAAGGC | 0.315 | 0.318 | 2.988 | 2.368 | 2.207 |
| 17 | 4 | 126752525 | 12506486 | 5980 | GGACATGGGAKCAAGAGGTGA | 4.497 | 3.819 | 2.070 | 2.170 | 2.046 |
| 17 | 4 | 126759250 | 17009779 | 5981 | CACTAACTAAMCCTAATGGTT | 0.364 | 0.374 | 2.120 | 2.033 | 1.993 |
| 17 | 4 | 126765749 | 2068148 | 5982 | CAGCATAACAYACTCCAATGG | 0.361 | 0.362 | 2.185 | 1.733 | 1.975 |
| 17 | 4 | 126771743 | 7696949 | 5983 | ACTCTTTGTAYGCCCAATTGA | 0.130 | 0.126 | 0.429 | 1.748 | 2.255 |
| 17 | 4 | 126777331 | 10518469 | 5984 | TTTTAAACAGRTATTTGTCGA | 1.327 | 1.340 | 0.620 | 1.802 | 2.266 |
| 17 | 4 | 126784567 | 12643736 | 5985 | TTGCCAGCCCYAGTTCTCTAT | 0.121 | 0.119 | 0.605 | 0.542 | 2.084 |
| 17 | 4 | 126791603 | — | 5986 | AAAAACCCTARCAATGTGTTG | 0.908 | 0.884 | 0.789 | 1.035 | 2.058 |
| 17 | 4 | 126798362 | — | 5987 | GTACAATGTGRAGGAAAGTAC | 0.321 | 0.321 | 0.459 | 1.170 | 2.060 |
| 17 | 4 | 126804720 | 17009923 | 5988 | TGGGGAAAAGRGATTAAAAAT | 0.000 | 0.000 | 1.450 | 1.415 | 0.871 |
| 17 | 4 | 126817579 | 17009964 | 5989 | GCAAAGGAGARCTAGGAGGGT | 0.598 | 0.603 | 1.193 | 0.973 | 1.034 |
| 17 | 4 | 126820698 | 17818247 | 5990 | AACAAAGAATRAAAGTGCCAG | 1.692 | 1.676 | 1.529 | 1.118 | 1.240 |
| 17 | 4 | 126829646 | — | 5991 | ACAGCTCTACRTAATCGGGCA | 0.693 | 0.717 | 1.168 | 0.940 | 1.447 |
| 17 | 4 | 126839872 | 13138789 | 5992 | GCTACCCTAAYAGAGGCAGCT | 0.792 | 0.799 | 1.140 | 1.201 | 1.079 |
| 17 | 4 | 126873778 | 7441520 | 5993 | TTAACCACAASTTTGCAAAAT | 0.324 | 0.308 | 0.528 | 1.326 | 1.091 |
| 17 | 4 | 126882430 | 1864363 | 5994 | AGTCTTCTAAMCTTTCAGTCG | 0.348 | 0.338 | 0.645 | 1.414 | 0.865 |
| 17 | 4 | 126893281 | 1346715 | 5995 | TTTCAAGACTYGGTGGAAAGA | 0.427 | 0.441 | 0.799 | 0.915 | 0.817 |
| 17 | 4 | 126904971 | 6858650 | 5996 | TACCTCATAAWCCACCCCCAA | 0.937 | 0.984 | 1.060 | 0.706 | 0.786 |
| 17 | 4 | 126911493 | 9307573 | 5997 | CAGGACAGAARCCTTTTCGAG | 1.149 | 1.188 | 0.911 | 0.505 | 0.748 |
| 17 | 4 | 126921490 | 17010193 | 5998 | GACAGGAGGAYGGGATTCTCG | 0.895 | 0.911 | 0.813 | 0.453 | 0.721 |
| 17 | 4 | 126933969 | 13142551 | 5999 | GGTCTTGAGGYTGAGCAAATG | 0.134 | 0.134 | 0.480 | 0.489 | 0.680 |
| 17 | 4 | 126937821 | 17010216 | 6000 | TTCCTACTTAYGTATTTTCCA | 0.111 | 0.110 | 0.128 | 0.481 | 0.652 |
| 17 | 4 | 126949005 | 4466054 | 6001 | ACCTGCTGTAYTGGGAAGAAA | 0.117 | 0.104 | 0.052 | 0.618 | 0.679 |
| 17 | 4 | 126960644 | 17222107 | 6002 | GTTGTATCTTYGTTTTGAAGT | 0.103 | 0.100 | 0.094 | 0.440 | 0.721 |
| 17 | 4 | 126971660 | 1346716 | 6003 | GAGGCCTGAARTGCTGTATGG | 0.463 | 0.469 | 0.528 | 0.372 | 0.749 |
| 17 | 4 | 126981792 | 7697425 | 6004 | GGTAAACTTAMTATTCAGTCT | 0.398 | 0.396 | 0.741 | 0.433 | 0.623 |
| 17 | 4 | 127003431 | 7686488 | 6005 | ATATGATGAGRTGCATAAAAG | 1.526 | 1.581 | 1.082 | 0.573 | 0.455 |
| 18 | 4 | 143068047 | 1493023 | 6006 | CCAGGCCCTTMTACCTTGGTC | 0.202 | 0.189 | 0.387 | 0.562 | 0.141 |
| 18 | 4 | 143079592 | 4956411 | 6007 | CAATCTATGARCATTATCTAG | 0.000 | 0.000 | 0.362 | 0.532 | 0.124 |
| 18 | 4 | 143091542 | 4956305 | 6008 | TAGAAATTCTRGCCAATCTTT | 0.963 | 0.959 | 0.912 | 0.498 | 0.109 |
| 18 | 4 | 143100742 | 977569 | 6009 | AAAGAAGGAAYGACTAGAAAG | 0.346 | 0.362 | 0.982 | 0.406 | 0.149 |
| 18 | 4 | 143106130 | 17702304 | 6010 | ATTTTTCAGTSAATGATAATT | 1.498 | 1.494 | 0.731 | 0.364 | 0.139 |
| 18 | 4 | 143111727 | 2241911 | 6011 | TTATCAAGGTMATTTTCCTTT | 0.184 | 0.184 | 0.404 | 0.306 | 0.413 |
| 18 | 4 | 143118755 | 17645963 | 6012 | TGGCACCTGASGAAGACAGCG | 0.049 | 0.046 | 0.260 | 0.282 | 0.743 |
| 18 | 4 | 143127818 | 6843479 | 6013 | CAAGTACATCMAATAAGAACT | 0.118 | 0.116 | 0.001 | 0.127 | 0.940 |
| 18 | 4 | 143136103 | 6817546 | 6014 | TTGAGAATAARCTTCACTCTG | 0.000 | 0.000 | 0.004 | 0.424 | 0.967 |
| 18 | 4 | 143153576 | 11942550 | 6015 | CCTTTAAAATKTAAACACTTA | 0.031 | 0.030 | 0.012 | 0.608 | 0.881 |
| 18 | 4 | 143162329 | 17015129 | 6016 | TTTGCTTAACYTTTCTCATTC | 0.268 | 0.251 | 0.402 | 0.912 | 1.058 |
| 18 | 4 | 143169736 | 2218314 | 6017 | TTGTGCCATAYTTTCCTGCCT | 0.305 | 0.237 | 1.407 | 0.970 | 1.086 |
| 18 | 4 | 143180192 | 2840104 | 6018 | TCTCCTAAACSATCTCTAGGG | 1.693 | 1.733 | 1.818 | 1.020 | 0.791 |
| 18 | 4 | 143193702 | 1909868 | 6019 | GGAACTTACTRCAACAAGGCT | 2.172 | 2.290 | 1.752 | 1.568 | 0.780 |
| 18 | 4 | 143201428 | 6813602 | 6020 | GTGACCATTTYCTCACTTAAG | 1.288 | 1.350 | 1.666 | 1.606 | 0.803 |
| 18 | 4 | 143210622 | 1392779 | 6021 | CAACAAGTCCRTAAGAGTCAA | 0.316 | 0.322 | 1.954 | 1.572 | 1.266 |
| 18 | 4 | 143264681 | 168074 | 6022 | TCTCATACACRGTCTTCTAGC | 0.111 | 0.110 | 1.132 | 1.456 | 1.387 |
| 18 | 4 | 143274664 | 337237 | 6023 | CCTGAGGCTGYTGTCCTTAAA | 1.735 | 1.855 | 0.517 | 1.041 | 1.817 |
| 18 | 4 | 143299633 | 1988510 | 6024 | TCTATGGTTGYCACCACTGCT | 0.336 | 0.327 | 0.438 | 1.043 | 1.905 |
| 18 | 4 | 143305151 | 11100741 | 6025 | ATGCAGATGASTATGGTAATG | 0.022 | 0.022 | 0.469 | 0.798 | 3.358 |
| 18 | 4 | 143311890 | 4245935 | 6026 | GGGTCTCCAARGAGGCTTTTA | 0.117 | 0.114 | 0.585 | 1.219 | 3.348 |
| 18 | 4 | 143318966 | 1912714 | 6027 | TGTCCAGGAGSGTGAAGCCTT | 0.188 | 0.185 | 0.626 | 1.291 | 2.726 |
| 18 | 4 | 143325686 | 3775605 | 6028 | GCTCACCTTAYAAGGCTTATA | 2.082 | 1.983 | 1.516 | 2.213 | 2.252 |
| 18 | 4 | 143328144 | 2645800 | 6029 | GTCTGGTTTTRTGTTTGTATA | 0.457 | 0.442 | 1.574 | 2.892 | 2.467 |
| 18 | 4 | 143343738 | 336376 | 6030 | TTTGCAGTTTKAAAAAATTTA | 1.437 | 1.523 | 3.869 | 3.156 | 2.800 |
| 18 | 4 | 143351949 | 12501475 | 6031 | ATAATGATGTYATTCACACTC | 0.065 | 0.067 | 3.221 | 3.317 | 2.384 |
| 18 | 4 | 143358319 | 10519618 | 6032 | GTTGTATGTGYGGTAGGAAAT | 3.791 | 3.332 | 3.337 | 3.835 | 2.432 |
| 18 | 4 | 143364802 | 336325 | 6033 | TGACACCTGGYAACCCAAAGT | 1.119 | 1.209 | 2.245 | 2.622 | 2.469 |
| 18 | 4 | 143374465 | 336300 | 6034 | AAGTCAACATRGATTGCAAAG | 0.407 | 0.405 | 2.842 | 3.082 | 2.529 |
| 18 | 4 | 143380368 | 336330 | 6035 | GTGCAGTTTGYTAAAGAAGTC | 0.060 | 0.061 | 0.551 | 2.219 | 3.076 |
| 18 | 4 | 143390434 | 336336 | 6036 | TGTTATCTACRTTTTCTGTAA | 0.849 | 0.853 | 0.535 | 2.127 | 2.159 |
| 18 | 4 | 143403715 | 2667083 | 6037 | GCCACCCATCRGACCTCTCCA | 0.162 | 0.161 | 0.561 | 0.615 | 2.224 |
| 18 | 4 | 143413901 | 7697702 | 6038 | TCAACAGCAAYGGTAGATCCA | 1.129 | 1.110 | 0.549 | 0.570 | 1.941 |
| 18 | 4 | 143420416 | 336396 | 6039 | AAAACCTTGGYTCTCAAACAA | 0.476 | 0.469 | 0.403 | 0.496 | 2.032 |
| 18 | 4 | 143429323 | 336405 | 6040 | AACTGGCTATRAAATTTTCCT | 0.070 | 0.070 | 0.818 | 0.670 | 0.769 |
| 18 | 4 | 143439909 | 17015614 | 6041 | TTATCACCTCYTAAATGCTCT | 0.483 | 0.486 | 0.386 | 0.726 | 0.492 |
| 18 | 4 | 143448657 | 173045 | 6042 | TATTAAACAASGTCTATCAAT | 1.024 | 1.089 | 0.404 | 0.823 | 0.527 |
| 18 | 4 | 143454027 | 1219271 | 6043 | GACACCACTARGAAAAACTGA | 0.158 | 0.161 | 0.898 | 0.544 | 0.526 |
| 18 | 4 | 143460748 | 3822146 | 6044 | CTACATTTTAYTTCTCTCTGG | 0.538 | 0.520 | 0.873 | 0.421 | 0.566 |
| 18 | 4 | 143468215 | 3113519 | 6045 | CAGAAACGGCRTACAAGAAAA | 1.052 | 1.008 | 0.484 | 0.571 | 0.888 |
| 18 | 4 | 143475449 | 4574489 | 6046 | TATGAGTGGCYGGTCGGTTAC | 0.517 | 0.486 | 0.444 | 0.423 | 0.707 |
| 18 | 4 | 143489842 | 10452237 | 6047 | AAAAAAGGTAYGCATTCTGAA | 0.218 | 0.217 | 0.446 | 0.438 | 0.728 |
| 18 | 4 | 143502133 | 7672890 | 6048 | TATGTGCCAASTAGTAGATAT | 0.115 | 0.113 | 0.126 | 0.862 | 0.826 |
| 18 | 4 | 143520079 | 17015781 | 6049 | TTTTGGACCAYATCATTGTAT | 0.539 | 0.532 | 0.296 | 0.776 | 0.811 |
| 18 | 4 | 143530628 | 17654944 | 6050 | ATTCATTAACYTGATTATCAT | 0.018 | 0.016 | 0.851 | 0.650 | 0.665 |
| 18 | 4 | 143552356 | 3102439 | 6051 | TATCTATTCCSTTTCTTAAAG | 1.053 | 1.057 | 0.927 | 0.648 | 0.945 |
| 18 | 4 | 143559553 | 3113513 | 6052 | ATTATTAAAAYGTTATCCTCT | 1.568 | 1.508 | 0.994 | 0.727 | 0.895 |
| 18 | 4 | 143565954 | 2627813 | 6053 | CTATGACGTGYTTCTGAAGTT | 0.362 | 0.368 | 1.198 | 0.840 | 0.876 |
| 18 | 4 | 143572254 | 2636632 | 6054 | CTATTACTTCYGTCTTATTCT | 0.639 | 0.647 | 0.922 | 1.137 | 0.775 |
| 18 | 4 | 143579022 | 17015855 | 6055 | TTTATCTTTTWATCACTCTGA | 0.437 | 0.439 | 0.431 | 1.251 | 0.852 |
| 18 | 4 | 143585347 | 1907108 | 6056 | ATGAAAGGCTRCATCCACACT | 0.400 | 0.422 | 0.851 | 1.208 | 0.948 |
| 18 | 4 | 143592198 | 2636670 | 6057 | TGATGAGAGTRTGCATTTAGG | 0.442 | 0.445 | 0.655 | 0.658 | 0.908 |
| 18 | 4 | 143598256 | 17015920 | 6058 | AACAGAAATGYTTTGCCCTGC | 1.273 | 1.326 | 0.882 | 0.706 | 1.097 |
| 18 | 4 | 143601161 | 2635429 | 6059 | AGTATCATAAYGGTAGTGTTA | 0.264 | 0.249 | 0.737 | 0.640 | 0.930 |
| 18 | 4 | 143619115 | 2635421 | 6060 | TGTGTAACAAYGTTCCCCTTT | 1.006 | 1.010 | 0.769 | 0.595 | 0.623 |
| 18 | 4 | 143631056 | 1391093 | 6061 | ATTGGCAGTAYTAAGACAACA | 0.037 | 0.037 | 0.424 | 0.691 | 0.638 |
| 18 | 4 | 143639478 | 1497397 | 6062 | ATAATAGTCAMGATGATGGTT | 0.543 | 0.529 | 0.430 | 0.723 | 0.831 |
| 18 | 4 | 143647804 | 11938760 | 6063 | AAGGGTTCAARAAATGAGGAA | 0.407 | 0.413 | 0.334 | 0.442 | 1.556 |
| 18 | 4 | 143655337 | 17016027 | 6064 | CACTTCAAAAMGTGAGTCCCT | 0.304 | 0.307 | 0.567 | 0.487 | 1.812 |
| 18 | 4 | 143680514 | 13135641 | 6065 | AAAGCCAGTAWATGGAACGGA | 0.771 | 0.789 | 0.416 | 0.642 | 2.133 |
| 18 | 4 | 143688658 | 1489578 | 6066 | TCTGCTCCAGYAGTTCTCACT | 0.616 | 0.602 | 0.431 | 1.769 | 2.019 |
| 18 | 4 | 143695802 | 17016097 | 6067 | TCGTGGGAAAKAGTAGTTCTA | 0.196 | 0.194 | 0.965 | 2.228 | 2.573 |
| 18 | 4 | 143702078 | 3756125 | 6068 | GTCTGTAAAGYGATGAGACAT | 0.419 | 0.437 | 2.491 | 2.687 | 2.735 |
| 18 | 4 | 143712847 | 10428305 | 6069 | CAATCATCTAYAGAGACCGAG | 1.631 | 1.529 | 2.983 | 2.662 | 2.691 |
| 18 | 4 | 143718806 | 931637 | 6070 | CTGTCAGAACRTAAATTTGAT | 3.912 | 3.654 | 3.447 | 3.127 | 2.738 |
| 18 | 4 | 143739539 | 17016163 | 6071 | GATGCCCTTTSCAACACATAT | 1.868 | 1.756 | 3.397 | 3.364 | 2.730 |
| 18 | 4 | 143752462 | 3913164 | 6072 | ACTTCTGCCAYAACTTGGCTG | 2.760 | 2.658 | 3.460 | 3.187 | 2.720 |
| 18 | 4 | 143764438 | 3844178 | 6073 | TTAAGAAATARGGAACTGAAC | 0.921 | 0.914 | 2.845 | 3.114 | 2.787 |
| 18 | 4 | 143773529 | 1425537 | 6074 | TAGTCCCACAWAAATCTCATT | 3.010 | 2.879 | 2.696 | 3.073 | 2.909 |
| 18 | 4 | 143779157 | 12646243 | 6075 | TAGTAATTGTRGATTCTAGCC | 2.912 | 2.767 | 2.488 | 2.536 | 2.858 |
| 18 | 4 | 143802349 | 13107432 | 6076 | TCTTCCCACARTGTCCCTCCT | 0.683 | 0.632 | 2.425 | 2.471 | 2.789 |
| 18 | 4 | 143810140 | 10857395 | 6077 | ATAGGTTTTAMTGGAAAATTA | 0.404 | 0.408 | 1.383 | 2.061 | 2.740 |
| 18 | 4 | 143818067 | 2059513 | 6078 | ATTTGACTGASGAATTTTGCT | 0.597 | 0.593 | 0.263 | 1.779 | 2.297 |
| 18 | 4 | 143830301 | 17016354 | 6079 | ATTTCAGTGAYGTAAACCCCT | 0.063 | 0.063 | 0.151 | 0.839 | 1.899 |
| 18 | 4 | 143839071 | 16998560 | 6080 | GACAATCAGGSTCCTCTGTGG | 0.097 | 0.096 | 0.082 | 0.146 | 1.223 |
| 18 | 4 | 143845700 | 1473222 | 6081 | TAAGGACTACRTTCAGAGCCT | 0.309 | 0.277 | 0.069 | 0.146 | 0.977 |
| 18 | 4 | 143851164 | 1425523 | 6082 | CTGGTGTAGTRGTCTCTTAAG | 0.119 | 0.119 | 0.068 | 0.115 | 0.416 |
| 18 | 4 | 143865944 | 7688435 | 6083 | TATCCTGTAAYGGCCAGTGGG | 0.549 | 0.528 | 0.225 | 0.052 | 0.089 |
| 18 | 4 | 143873979 | 1364925 | 6084 | TCTCTTAGTGSTATTTCCTCT | 0.077 | 0.072 | 0.193 | 0.050 | 0.070 |
| 18 | 4 | 143886618 | 13120964 | 6085 | TTCCACTATTRCCCTTAATTC | 0.689 | 0.703 | 0.168 | 0.069 | 0.121 |
| 18 | 4 | 143896248 | 10857396 | 6086 | CAGGACAGCAYCAGAGGCAAA | 0.163 | 0.161 | 0.056 | 0.079 | 0.096 |
| 18 | 4 | 143900941 | 1443191 | 6087 | CTCCCAAAAARCTCAATGTGG | 0.084 | 0.079 | 0.071 | 0.111 | 0.136 |
| 18 | 4 | 143922224 | 1373039 | 6088 | GAGCAATTCARTGGAGGTGAA | 0.023 | 0.024 | 0.037 | 0.168 | 0.139 |
| 18 | 4 | 143933345 | 13125853 | 6089 | GCTTGATTACRTTTTTCTTGT | 0.154 | 0.148 | 0.074 | 0.220 | 0.127 |
| 18 | 4 | 143946527 | 17016550 | 6090 | AGAAGGAGGCYTCACAGTAGA | 0.515 | 0.508 | 0.290 | 0.172 | 0.141 |
| 18 | 4 | 143957383 | 1838087 | 6091 | AACGTAAGAGSATATAAAAAG | 0.345 | 0.347 | 0.380 | 0.136 | 0.134 |
| 19 | 6 | 27042873 | — | 6092 | AAACTGTGGASAAATTTCTTT | 0.000 | 0.000 | 0.001 | 0.002 | 0.462 |
| 19 | 6 | 27078381 | 9357029 | 6093 | GAGCCGGGCCRTGAGCGCCTG | 0.123 | 0.121 | 0.007 | 0.022 | 0.463 |
| 19 | 6 | 27091877 | 7752299 | 6094 | GCATTAAACCYTTCATGACTG | 0.059 | 0.057 | 0.041 | 0.177 | 1.802 |
| 19 | 6 | 27104110 | 6913271 | 6095 | CATACTGAGTSTTTTAATCCG | 0.220 | 0.211 | 0.091 | 0.351 | 1.152 |
| 19 | 6 | 27117491 | 7775041 | 6096 | TTGACTATATWCATGCATTCT | 0.324 | 0.335 | 0.531 | 0.492 | 1.522 |
| 19 | 6 | 27155895 | 994690 | 6097 | CTGAAATAACYCCTGAGGCAA | 0.591 | 0.605 | 0.879 | 2.191 | 1.267 |
| 19 | 6 | 27162476 | 2142685 | 6098 | TTTATGTTCTYTTGAAGATGA | 1.418 | 1.317 | 1.033 | 2.048 | 1.337 |
| 19 | 6 | 27172468 | — | 6099 | GTATTCACTCRAGATGTTAGT | 0.757 | 0.754 | 3.327 | 2.350 | 1.489 |
| 19 | 6 | 27183462 | 9348752 | 6100 | AGAATGTTCAYAGATATTTCT | 0.462 | 0.468 | 3.049 | 2.355 | 1.382 |
| 19 | 6 | 27201800 | 6456768 | 6101 | TGGAGGATGGSATAGTAAAGA | 4.046 | 4.011 | 3.024 | 2.137 | 1.451 |
| 19 | 6 | 27211559 | 2022272 | 6102 | ACAATTAAATRTACAGTGGTT | 0.000 | 0.000 | 2.029 | 2.150 | 1.577 |
| 19 | 6 | 27222031 | 9393790 | 6103 | TACTCAGTGTKATAAGATCAT | 0.785 | 0.758 | 1.901 | 1.807 | 1.659 |
| 19 | 6 | 27239937 | 4582379 | 6104 | TGATTAAAAGRAATTCAAGAA | 0.090 | 0.095 | 0.291 | 1.480 | 1.703 |
| 19 | 6 | 27248129 | — | 6105 | GCTTGCAGAGRTACTAAACCA | 0.284 | 0.277 | 0.370 | 1.513 | 1.630 |
| 19 | 6 | 27272736 | 6901448 | 6106 | GAAAACTAACMGTTTGAGGGT | 0.751 | 0.733 | 0.235 | 0.187 | 1.167 |
| 19 | 6 | 27281378 | 4711143 | 6107 | CTTGTCAGTTYTTAAGGACAG | 0.327 | 0.323 | 0.368 | 0.297 | 0.936 |
| 19 | 6 | 27309252 | 3800309 | 6108 | ATGATTTTTTMTCACCATGGA | 0.367 | 0.366 | 0.314 | 0.247 | 0.901 |
| 19 | 6 | 27318564 | 3800311 | 6109 | CAACAGCTTCRTAGCAAAAGG | 0.512 | 0.484 | 0.251 | 0.223 | 0.138 |
| 19 | 6 | 27324467 | 9468021 | 6110 | GTGAGCAAGTRAATAAACAAG | 0.000 | 0.000 | 0.352 | 0.201 | 0.145 |
| 19 | 6 | 27331221 | 3734577 | 6111 | CATGTGTCTGYAAACATCCTT | 0.527 | 0.519 | 0.208 | 0.133 | 0.074 |
| 19 | 6 | 27337540 | 11758636 | 6112 | TCCGATGGCTRTTCCCTCACA | 0.500 | 0.507 | 0.102 | 0.149 | 0.083 |
| 19 | 6 | 27343845 | 6915678 | 6113 | AGACCAAGAGKTCCGCTGCCA | 0.028 | 0.029 | 0.177 | 0.106 | 0.159 |
| 19 | 6 | 27364197 | 16897282 | 6114 | GCCGCTCCAGMGAGTTTAATT | 0.145 | 0.140 | 0.128 | 0.046 | 0.144 |
| 19 | 6 | 27371321 | 16897348 | 6115 | TACTGTTGCTYATACAAATCA | 0.356 | 0.345 | 0.044 | 0.066 | 0.112 |
| 19 | 6 | 27379322 | 7771953 | 6116 | ACAGAACGCGRATCCGTTGGA | 0.399 | 0.390 | 0.049 | 0.113 | 0.090 |
| 19 | 6 | 27385644 | 2281023 | 6117 | TGGGAAAGGTRGCCTTGAGCT | 0.101 | 0.099 | 0.073 | 0.133 | 0.078 |
| 19 | 6 | 27400907 | 16897710 | 6118 | TTTGTGTATGKACTTCTTCTC | 0.073 | 0.073 | 0.226 | 0.133 | 0.136 |
| 19 | 6 | 27406608 | 9379978 | 6119 | GAGGAAAACCRAAGTCACTAG | 0.281 | 0.272 | 0.300 | 0.138 | 0.128 |
| 19 | 6 | 27412565 | 6903160 | 6120 | CAATTTTTACWGTTTTTCCAA | 0.941 | 0.862 | 0.298 | 0.153 | 0.087 |
| 19 | 6 | 27428723 | 2393926 | 6121 | CTGATCACCCSAACAAAAAGG | 0.631 | 0.615 | 0.327 | 0.206 | 0.165 |
| 19 | 6 | 27438664 | 12213055 | 6122 | TATTCTGTCTYTTACAAGAAA | 0.045 | 0.046 | 0.370 | 0.303 | 0.301 |
| 19 | 6 | 27452810 | 6456774 | 6123 | AGGGAATTGTSAACAACTGAG | 0.216 | 0.177 | 0.274 | 0.323 | 0.439 |
| 20 | 6 | 152286110 | 1709183 | 6124 | TTCCCTTGTAYCGTTGTGGCT | 0.172 | 0.173 | 0.597 | 0.636 | 1.021 |
| 20 | 6 | 152300836 | 1913474 | 6125 | AAACCTTCTTRGAACCCTAGG | 1.921 | 1.863 | 0.446 | 0.745 | 1.033 |
| 20 | 6 | 152316850 | 9322341 | 6126 | ATTGCTAGACYTAATCATCCA | 0.057 | 0.057 | 0.737 | 0.479 | 1.131 |
| 20 | 6 | 152327453 | 12204714 | 6127 | TCAGGGCTCAYAATTTCTTTG | 0.023 | 0.022 | 1.100 | 0.952 | 0.787 |
| 20 | 6 | 152355742 | 6915819 | 6128 | CTTAAAATATRTAGTAAGTGC | 0.852 | 0.855 | 0.187 | 1.087 | 0.700 |
| 20 | 6 | 152369037 | 3020391 | 6129 | TAAACTCATGRCTCGGGGCTT | 0.757 | 0.789 | 0.846 | 1.287 | 0.715 |
| 20 | 6 | 152378739 | 985694 | 6130 | ATATAATACAYCCCTGAAGTT | 0.006 | 0.006 | 1.133 | 0.471 | 0.657 |
| 20 | 6 | 152392741 | 9340939 | 6131 | GTCTCATAATMATAAGAGAGT | 1.534 | 0.856 | 0.939 | 0.544 | 0.662 |
| 20 | 6 | 152402727 | 6916218 | 6132 | CAAAAGTATTWAAAAAAATCA | 0.510 | 0.514 | 0.558 | 0.817 | 0.675 |
| 20 | 6 | 152408861 | 17081994 | 6133 | TTCTATTTTCYAGTTAGACTT | 0.000 | 0.000 | 0.685 | 0.569 | 0.315 |
| 20 | 6 | 152424244 | 9340969 | 6134 | AACCACAATAYTATCAGTAAT | 0.059 | 0.065 | 0.382 | 0.439 | 0.322 |
| 20 | 6 | 152431729 | 7755185 | 6135 | TGTGTTTTTGRTTCACATGAA | 0.234 | 0.244 | 0.235 | 0.507 | 0.322 |
| 20 | 6 | 152435877 | 3020411 | 6136 | CAGTTTTTTGRGAAGTAGAGG | 0.753 | 0.812 | 0.217 | 0.180 | 0.259 |
| 20 | 6 | 152450293 | 2982712 | 6137 | TGTATTGCAGYGCCAATTGCT | 0.131 | 0.133 | 0.271 | 0.090 | 0.222 |
| 20 | 6 | 152459232 | 3020364 | 6138 | CTGGAATAACRCCTGAGATCT | 0.242 | 0.254 | 0.211 | 0.044 | 0.248 |
| 20 | 6 | 152472491 | 9397079 | 6139 | ATTTAAACATRAAAGCATGGA | 0.264 | 0.268 | 0.033 | 0.080 | 0.071 |
| 20 | 6 | 152477350 | 3778080 | 6140 | AAAACCCGGAMTCATCCATAG | 0.107 | 0.110 | 0.016 | 0.110 | 0.054 |
| 20 | 6 | 152500240 | 750686 | 6141 | TTCAACTCACRTAATGAGAAG | 0.037 | 0.037 | 0.028 | 0.040 | 0.079 |
| 20 | 6 | 152514449 | 2747648 | 6142 | TTGTTGGATAYTGAATGACAG | 0.004 | 0.004 | 0.071 | 0.047 | 0.166 |
| 20 | 6 | 152525016 | 910416 | 6143 | CTGCTTTACAYGTGGTCTCAG | 0.443 | 0.468 | 0.099 | 0.048 | 0.159 |
| 20 | 6 | 152533353 | 2813549 | 6144 | TCTTCAGTGAYGGGAGATGCC | 0.531 | 0.530 | 0.144 | 0.091 | 0.118 |
| 20 | 6 | 152542014 | 9397486 | 6145 | GATTAAACACRAGATATCTCA | 0.201 | 0.198 | 0.237 | 0.236 | 0.169 |
| 20 | 6 | 152550188 | 2813566 | 6146 | AGGATGGCTARGTAAAAGACA | 0.154 | 0.150 | 0.293 | 0.289 | 0.182 |
| 20 | 6 | 152556953 | 2256135 | 6147 | GTATCTGAAARCGGCTATCAT | 0.332 | 0.330 | 0.425 | 0.394 | 0.269 |
| 20 | 6 | 152563317 | 2813493 | 6148 | ATATCCCGATSATTTTAATTT | 0.607 | 0.620 | 0.443 | 0.431 | 0.485 |
| 20 | 6 | 152570021 | 6937954 | 6149 | ACCAAGGGCCWGTATATATGC | 0.957 | 0.962 | 0.557 | 0.388 | 0.482 |
| 20 | 6 | 152576877 | 4870079 | 6150 | GAGATATTCTRTCTTTGCTAC | 0.310 | 0.296 | 0.705 | 0.558 | 1.080 |
| 20 | 6 | 152584631 | 2763031 | 6151 | CAGCAAATACKGGAGTGACTG | 0.446 | 0.455 | 0.577 | 0.928 | 1.282 |
| 20 | 6 | 152590550 | 2247922 | 6152 | TGTGATTTAASTGACGATGAA | 0.621 | 0.622 | 0.531 | 0.840 | 1.275 |
| 20 | 6 | 152601623 | 2635430 | 6153 | GCCTTTCCACSAATCTTTCCC | 0.350 | 0.373 | 0.918 | 1.504 | 1.466 |
| 20 | 6 | 152615664 | 2253407 | 6154 | CAATATGAAGKTATGCCCACA | 0.815 | 0.834 | 0.791 | 1.660 | 1.694 |
| 20 | 6 | 152621374 | 3798756 | 6155 | GGCTGTCAATRATCCCCCGCC | 1.280 | 1.321 | 1.748 | 1.714 | 1.854 |
| 20 | 6 | 152627649 | 10872683 | 6156 | TTTGTCAGTGYTATGGGAAAG | 0.029 | 0.029 | 2.190 | 2.014 | 1.690 |
| 20 | 6 | 152641700 | 12528883 | 6157 | AGGTGTCTCCSTGTTAAATAG | 2.670 | 2.410 | 2.070 | 1.925 | 1.340 |
| 20 | 6 | 152647226 | 2296254 | 6158 | AAACAAGTAGYGATGTTCAAA | 1.339 | 1.328 | 1.940 | 2.146 | 1.343 |
| 20 | 6 | 152652592 | 4869757 | 6159 | GCAGATAGCCMAATGTACACA | 0.350 | 0.345 | 2.256 | 1.912 | 1.256 |
| 20 | 6 | 152662388 | 17215781 | 6160 | TTTCTCTTCTRGGAAAAGGCA | 0.548 | 0.575 | 0.908 | 1.201 | 1.238 |
| 20 | 6 | 152667818 | 7763242 | 6161 | ATATTCTTTCKCAATGTGTTT | 0.485 | 0.488 | 0.419 | 1.220 | 1.505 |
| 20 | 6 | 152680602 | 9383983 | 6162 | CCTGTATATCYTCTCAGTTGA | 0.684 | 0.678 | 0.290 | 0.406 | 1.727 |
| 20 | 6 | 152691531 | — | 6163 | CAGCATATTCWGCAGCAACAG | 0.233 | 0.228 | 0.234 | 0.219 | 1.392 |
| 20 | 6 | 152706238 | 630548 | 6164 | TGCATTTTAAMTTGACACATT | 0.039 | 0.037 | 0.106 | 0.387 | 1.464 |
| 20 | 6 | 152716034 | 674724 | 6165 | TTTAATTTCAYTTGCTTTTGA | 0.388 | 0.381 | 0.092 | 0.734 | 0.941 |
| 20 | 6 | 152724385 | 12206761 | 6166 | GCTCCTGCTCRGTCAAGCCCA | 0.027 | 0.027 | 0.350 | 0.645 | 0.892 |
| 20 | 6 | 152733065 | 1472023 | 6167 | TAGGAAAATTRATCCAGAGAA | 0.606 | 0.556 | 1.055 | 0.551 | 1.567 |
| 20 | 6 | 152739795 | 2306916 | 6168 | AGCTGTAACAWTTCTTGGGCA | 1.111 | 1.116 | 1.057 | 0.794 | 1.449 |
| 20 | 6 | 152745878 | 725235 | 6169 | ATGTGCTTTCYTTTGTGAAGA | 1.744 | 1.689 | 1.197 | 1.248 | 2.080 |
| 20 | 6 | 152752424 | 4870095 | 6170 | TCAATCTCACRTGAAACATTC | 0.213 | 0.210 | 1.397 | 1.981 | 2.116 |
| 20 | 6 | 152758998 | 7738089 | 6171 | AAAACTCTTTKTAGTGTCATT | 0.375 | 0.375 | 1.447 | 1.893 | 2.340 |
| 20 | 6 | 152767168 | 6905339 | 6172 | AACAATGTGAYACAAACTGTA | 1.031 | 0.950 | 1.613 | 2.495 | 3.130 |
| 20 | 6 | 152774905 | 6557214 | 6173 | CAGGCTGACCRATGATCATGC | 1.147 | 1.201 | 1.751 | 2.636 | 3.034 |
| 20 | 6 | 152781309 | 9371592 | 6174 | AAAAATGGGTRTAAACATAGA | 2.447 | 2.328 | 2.676 | 2.278 | 3.237 |
| 20 | 6 | 152789820 | 214955 | 6175 | GAAAAGGTGAYGCAAAAATTT | 0.630 | 0.617 | 2.564 | 3.460 | 3.559 |
| 20 | 6 | 152810619 | 549981 | 6176 | TCCTCAGGCCYTTTCTTTTCC | 2.950 | 2.714 | 2.634 | 3.623 | 3.988 |
| 20 | 6 | 152819217 | 17082645 | 6177 | CATAGCCCAAYTACTACTTGA | 0.581 | 0.593 | 3.245 | 3.474 | 3.676 |
| 20 | 6 | 152828926 | 761408 | 6178 | TGTTTAAAAAYAGATAATAAG | 0.670 | 0.668 | 3.392 | 3.403 | 3.988 |
| 20 | 6 | 152838247 | 6909684 | 6179 | TATATTAAAAYGAAATGGACT | 3.292 | 3.011 | 1.824 | 3.835 | 4.153 |
| 20 | 6 | 152848308 | 17082676 | 6180 | ATATAAAGTCYTCAAAATTTC | 0.000 | 0.000 | 1.696 | 3.905 | 3.748 |
| 20 | 6 | 152854769 | 214996 | 6181 | GTAAAGTCTTRGAAATGTAAA | 0.783 | 0.754 | 2.876 | 3.403 | 3.905 |
| 20 | 6 | 152861412 | 17082700 | 6182 | GTATCCCATAYAGCAAGAAGT | 0.520 | 0.532 | 2.301 | 3.835 | 3.676 |
| 20 | 6 | 152868292 | 214970 | 6183 | GTGACACAGTRTCTATACTAT | 3.367 | 3.258 | 3.130 | 3.595 | 4.225 |
| 20 | 6 | 152875047 | 579464 | 6184 | CTTAACTTCCRGATTCCACAG | 1.791 | 1.733 | 3.698 | 3.633 | 3.835 |
| 20 | 6 | 152887970 | 7755437 | 6185 | ATTCATAATTMCTTATATTGA | 0.000 | 0.000 | 3.481 | 3.869 | 3.869 |
| 20 | 6 | 152898003 | 9397512 | 6186 | TGTTGCCATAYCACTGTGTAG | 4.278 | 3.654 | 3.034 | 4.312 | 3.869 |
| 20 | 6 | 152913124 | 9479327 | 6187 | AATTTATTTTYTGGATGATTA | 0.000 | 0.000 | 3.428 | 3.869 | 3.496 |
| 20 | 6 | 152925152 | 11155857 | 6188 | CCAACAAAATRGACTTACATG | 1.043 | 1.023 | 3.723 | 3.206 | 3.676 |
| 20 | 6 | 152934088 | 17699371 | 6189 | CTGTTAGACAYGACACAGTCT | 0.217 | 0.206 | 0.689 | 2.672 | 4.568 |
| 20 | 6 | 152940828 | 11155858 | 6190 | AGCCATATACRGTCATTAAAA | 1.573 | 1.505 | 0.811 | 2.550 | 4.568 |
| 20 | 6 | 152941489 | 2141151 | 6191 | GCGACCTCTCMTAAACTTTGT | 0.061 | 0.062 | 0.531 | 0.566 | 3.676 |
| 20 | 6 | 152956242 | 11968876 | 6192 | AATATAAATTSGCATAATATG | 0.296 | 0.312 | 0.789 | 1.289 | 3.698 |
| 20 | 6 | 152964386 | 9397523 | 6193 | CAATGATCGGMTAGTAAAGTA | 0.429 | 0.431 | 0.231 | 2.386 | 3.262 |
| 20 | 6 | 152979559 | 2623964 | 6194 | CAAGCTGAAGYGAGCAACTAG | 0.789 | 0.744 | 1.137 | 2.424 | 1.633 |
| 20 | 6 | 152989528 | 7749912 | 6195 | TAAGGAATTASTAGGCATTTA | 0.245 | 0.251 | 2.494 | 1.852 | 1.802 |
| 20 | 6 | 152997160 | 2178009 | 6196 | ACTCAACATTRCCTAAAAACT | 1.999 | 1.908 | 2.240 | 1.735 | 1.873 |
| 20 | 6 | 153003053 | 17701297 | 6197 | AACCTTAGCTRGATCCATTTT | 2.910 | 2.696 | 2.287 | 1.709 | 2.276 |
| 20 | 6 | 153011820 | 10457880 | 6198 | TCCCATAATGWATCAGCTTCA | 0.042 | 0.042 | 2.208 | 1.676 | 2.172 |
| 20 | 6 | 153031553 | 1744387 | 6199 | AATCAGTGTARTTCTTGGCAA | 0.788 | 0.826 | 1.319 | 1.989 | 2.278 |
| 20 | 6 | 153037891 | 1407488 | 6200 | TTTAAATTGAKTAAAGTTCCA | 0.271 | 0.268 | 0.216 | 3.004 | 2.837 |
| 20 | 6 | 153044292 | 9383634 | 6201 | TGACACAGAGRCTATTTTTGA | 0.178 | 0.178 | 0.626 | 2.203 | 2.792 |
| 20 | 6 | 153058027 | — | 6202 | CCTTACGTGTRTGTAGTGCAT | 0.483 | 0.465 | 1.025 | 1.082 | 2.516 |
| 20 | 6 | 153070069 | 2984656 | 6203 | ATGGAGGAGAYACTAATGAAG | 1.076 | 1.052 | 1.330 | 1.620 | 2.803 |
| 20 | 6 | 153078353 | 2758768 | 6204 | TTAATTTACCYTGTCTGATAC | 1.525 | 1.458 | 1.659 | 1.659 | 2.258 |
| 20 | 6 | 153083723 | 873889 | 6205 | CTGAGAACTCYGGGCTGTTTC | 0.938 | 0.919 | 1.930 | 1.611 | 1.436 |
| 20 | 6 | 153090503 | 2758774 | 6206 | TTCAGCCCTGMTCTCCATTTT | 0.739 | 0.748 | 2.076 | 1.660 | 1.534 |
| 20 | 6 | 153097114 | 2758775 | 6207 | AAAACTCAACWTATGGAAGGC | 1.391 | 1.785 | 1.537 | 1.806 | 1.422 |
| 20 | 6 | 153109354 | 1936726 | 6208 | CAATCAGGTARCCTTTAATAA | 1.279 | 1.257 | 1.173 | 1.664 | 1.403 |
| 20 | 6 | 153116791 | 2078355 | 6209 | AAAGGCATCARTACAGTTCCC | 0.158 | 0.154 | 1.552 | 1.478 | 1.486 |
| 20 | 6 | 153135149 | 17710008 | 6210 | TTACACCCACRGCCTCAACAG | 0.348 | 0.340 | 1.001 | 1.193 | 1.487 |
| 20 | 6 | 153140084 | 9384043 | 6211 | CACATGATACYGGACAGCCAG | 1.837 | 1.743 | 0.691 | 1.054 | 1.447 |
| 20 | 6 | 153150872 | 1282450 | 6212 | GGGATCTAGGWGGGGAACAAG | 0.134 | 0.122 | 0.751 | 0.745 | 1.058 |
| 20 | 6 | 153159957 | 601240 | 6213 | TTTCTCTATASCCTTCTTTTT | 0.498 | 0.513 | 0.636 | 0.470 | 0.774 |
| 20 | 6 | 153166436 | 3823082 | 6214 | GATAACTAAAYAAAATGGTTC | 0.263 | 0.266 | 0.128 | 0.574 | 0.649 |
| 20 | 6 | 153172175 | 688136 | 6215 | TGAAGGAAAAYGATACGCAAC | 0.071 | 0.075 | 0.246 | 0.457 | 0.345 |
| 20 | 6 | 153183689 | 311347 | 6216 | TTTTTCATGTRTAATCCCAAA | 0.543 | 0.508 | 0.226 | 0.069 | 0.177 |
| 20 | 6 | 153199759 | 610111 | 6217 | AGTAATGCTCWTTCCTGCTAT | 0.467 | 0.489 | 0.137 | 0.097 | 0.182 |
| 20 | 6 | 153205685 | 311353 | 6218 | ATATATTGGCYATCTACATTG | 0.446 | 0.454 | 0.136 | 0.049 | 0.169 |
| 20 | 6 | 153213019 | — | 6219 | GCTGTATAGTRGCAAAGCTTC | 0.000 | 0.000 | 0.094 | 0.048 | 0.019 |
| 20 | 6 | 153219459 | 625764 | 6220 | TCGTTTGATGRCTTTAACAAA | 0.121 | 0.111 | 0.029 | 0.059 | 0.020 |
| 20 | 6 | 153227029 | 628410 | 6221 | GGTCATTTTARAGACTATTAT | 0.278 | 0.280 | 0.021 | 0.027 | 0.070 |
| 20 | 6 | 153235164 | 1328395 | 6222 | GCTCCTCTCTYCTCAAAGGGA | 0.034 | 0.035 | 0.047 | 0.009 | 0.081 |
| 20 | 6 | 153245407 | 9371268 | 6223 | TGTCGATGTTYTGAATCACAT | 0.381 | 0.376 | 0.052 | 0.004 | 0.112 |
| 20 | 6 | 153255860 | 1154023 | 6224 | AGAAAGTTTCRAAGGGGATTT | 0.292 | 0.258 | 0.023 | 0.106 | 0.141 |
| 20 | 6 | 153266113 | 9384046 | 6225 | CCAACACCATYGGCTCTTCTG | 0.098 | 0.101 | 0.036 | 0.172 | 0.185 |
| 20 | 6 | 153272074 | 17083127 | 6226 | ATGGGAGCATYTTATAATGTG | 0.059 | 0.061 | 0.250 | 0.194 | 0.165 |
| 20 | 6 | 153277784 | 9371269 | 6227 | GCTAGAATGCYATGGTGGATG | 0.146 | 0.150 | 0.356 | 0.371 | 0.199 |
| 20 | 6 | 153283388 | 17083144 | 6228 | AAATAGCCCAYGCAATTACAA | 1.280 | 1.287 | 0.507 | 0.495 | 0.246 |
| 21 | 7 | 30326902 | 38433 | 6229 | GATTACTGCAWCAATTCCTAG | 0.133 | 0.139 | 0.160 | 0.668 | 0.348 |
| 21 | 7 | 30332916 | 38437 | 6230 | ACCAATCCCGYGGACAATAAG | 0.039 | 0.042 | 0.171 | 0.454 | 0.470 |
| 21 | 7 | 30344024 | 38450 | 6231 | GCTCAAATATAMCTTCATTAA | 0.633 | 0.654 | 0.488 | 0.262 | 0.396 |
| 21 | 7 | 30359460 | 38466 | 6232 | CTATCATTAAWCTCTCCTTAA | 0.307 | 0.300 | 0.558 | 0.239 | 0.461 |
| 21 | 7 | 30363462 | 17159202 | 6233 | AAAATTGAAAYCCATAATGAA | 1.250 | 1.281 | 0.558 | 0.338 | 0.348 |
| 21 | 7 | 30378807 | 10227389 | 6234 | ATGGGATGAGYTCTCTCAGAC | 0.340 | 0.363 | 0.369 | 0.347 | 0.272 |
| 21 | 7 | 30398623 | 10243040 | 6235 | CAAGTCTCTTSATGCCTCTTC | 0.075 | 0.077 | 0.582 | 0.472 | 0.341 |
| 21 | 7 | 30409656 | 17159267 | 6236 | CTATGTCAGCYGAAAAATAAT | 0.241 | 0.242 | 0.183 | 0.425 | 0.364 |
| 21 | 7 | 30417902 | — | 6237 | ATGCATGTACRGCFGTCAATA | 0.740 | 0.760 | 0.240 | 0.480 | 0.427 |
| 21 | 7 | 30427347 | 6945035 | 6238 | TTATATGGGCRCAGAAGATGT | 0.183 | 0.185 | 0.375 | 0.309 | 0.481 |
| 21 | 7 | 30435477 | 10249885 | 6239 | TGGCATTATARCCTGAAAAAA | 0.541 | 0.515 | 0.457 | 0.329 | 0.464 |
| 21 | 7 | 30444327 | 14270 | 6240 | CTGCTGTAGTYGCTCCATTCA | 0.482 | 0.466 | 0.416 | 0.448 | 0.430 |
| 21 | 7 | 30462973 | 17159316 | 6241 | GGTTAAACAGRGACCCTAAGG | 0.000 | 0.000 | 0.569 | 0.467 | 0.175 |
| 21 | 7 | 30467015 | 4722999 | 6242 | TGGCTCTACCYGGTGCCATTT | 0.641 | 0.664 | 0.592 | 0.393 | 0.243 |
| 21 | 7 | 30481779 | 2008003 | 6243 | CCCAGGTGGGMTCTAATTTGA | 0.000 | 0.000 | 0.457 | 0.379 | 0.625 |
| 21 | 7 | 30489883 | 2267716 | 6244 | AGAAGGAAAAYGGACCATGGC | 0.000 | 0.000 | 0.506 | 0.228 | 0.885 |
| 21 | 7 | 30502912 | 17159371 | 6245 | TCTCCTAAAAMATCATCAGAG | 0.316 | 0.314 | 0.233 | 0.316 | 1.563 |
| 21 | 7 | 30505347 | 255105 | 6246 | AACTGGACATYGGAGCGGAAT | 0.568 | 0.568 | 0.124 | 0.753 | 1.616 |
| 21 | 7 | 30520933 | 255131 | 6247 | TACGTTCTTASGGATCCAGCC | 0.203 | 0.153 | 0.249 | 0.851 | 1.951 |
| 21 | 7 | 30535092 | 255152 | 6248 | TAATACCATCRTCAGAAATCC | 0.014 | 0.014 | 0.789 | 1.651 | 2.035 |
| 21 | 7 | 30540960 | 255160 | 6249 | ATGAAAGCTGYCTTGCCTAAG | 0.768 | 0.722 | 0.940 | 1.519 | 1.981 |
| 21 | 7 | 30552965 | 17159410 | 6250 | CTCACCTGGARAGAAAAGCTG | 1.693 | 1.726 | 2.390 | 2.036 | 2.968 |
| 21 | 7 | 30565088 | 4723010 | 6251 | CTACAGCTTCRATGGCAGCCC | 0.858 | 0.873 | 2.590 | 2.270 | 3.481 |
| 21 | 7 | 30579153 | 3901848 | 6252 | TGTCCTTCCARTGTAAAGTCC | 2.165 | 2.230 | 2.426 | 2.351 | 3.358 |
| 21 | 7 | 30592754 | 6949578 | 6253 | TTGAAAACTAYGCAAGTACAT | 0.303 | 0.302 | 2.012 | 3.511 | 3.905 |
| 21 | 7 | 30602279 | 11768076 | 6254 | TGTGGCCTTTRAGTACCTTGG | 1.690 | 1.617 | 1.882 | 3.988 | 4.153 |
| 21 | 7 | 30610787 | 7803974 | 6255 | AGCAGGGCTAYGTTCTGAGAA | 1.004 | 1.027 | 2.837 | 3.542 | 4.312 |
| 21 | 7 | 30618224 | 1990011 | 6256 | TGGATATGTCSAGTGGAGCTT | 0.552 | 0.565 | 3.835 | 3.835 | 4.312 |
| 21 | 7 | 30629046 | 10237363 | 6257 | CCCGGGTCTCRTATGCCAAAT | 3.996 | 3.576 | 3.496 | 3.775 | 4.422 |
| 21 | 7 | 30641902 | 17159487 | 6258 | GTAAGTTAACKAAGGTCTCCA | 2.330 | 2.254 | 3.676 | 4.153 | 4.312 |
| 21 | 7 | 30649882 | 10229281 | 6259 | TGGGAATAGARCTGCTTCATC | 1.197 | 1.159 | 3.511 | 3.723 | 4.225 |
| 21 | 7 | 30671937 | 17159526 | 6260 | TCAGGTTGTTSCAATGTCCCA | 3.110 | 2.896 | 3.415 | 3.710 | 3.988 |
| 21 | 7 | 30682866 | 17159567 | 6261 | CAAAGTTATAMATCTCTTAAA | 0.327 | 0.340 | 3.019 | 3.687 | 3.748 |
| 21 | 7 | 30688503 | 10216063 | 6262 | GCATTACAACRTGTGCCAGGT | 2.161 | 2.894 | 2.797 | 3.102 | 3.163 |
| 21 | 7 | 30701508 | 10281903 | 6263 | CAATCGGGGARCGATTCGATT | 0.547 | 0.570 | 1.020 | 2.687 | 3.085 |
| 21 | 7 | 30710418 | 1000597 | 6264 | AGGACAGTTTYGTAATCAGGA | 0.175 | 0.183 | 0.932 | 2.397 | 3.031 |
| 21 | 7 | 30719606 | 763422 | 6265 | ACTGGTGGCCYGCTAAATCCG | 0.237 | 0.244 | 0.408 | 0.943 | 2.669 |
| 21 | 7 | 30732804 | 765839 | 6266 | TCAGCAGTCASGAAGGCACAT | 0.218 | 0.220 | 0.432 | 0.999 | 2.127 |
| 21 | 7 | 30745035 | 10244884 | 6267 | TTGGAGCTATYGACTGATTTT | 1.090 | 1.087 | 0.464 | 0.331 | 1.819 |
| 21 | 7 | 30762253 | 7801005 | 6268 | GCCAGGCTAAYAAGGTCTCAG | 0.630 | 0.630 | 0.572 | 0.631 | 0.767 |
| 21 | 7 | 30768151 | 4723034 | 6269 | TAGACAAAATKTTAAAGTTAA | 0.221 | 0.222 | 0.534 | 0.698 | 0.805 |
| 21 | 7 | 30775780 | 17159769 | 6270 | ATGATGTGATYGGGCTGTAAA | 0.525 | 0.509 | 0.757 | 0.615 | 0.356 |
| 21 | 7 | 30776153 | 17159772 | 6271 | CCCCTTTTGCYGTGAGAGTTT | 0.123 | 0.126 | 0.647 | 0.553 | 0.316 |
| 21 | 7 | 30790343 | 4988505 | 6272 | AAGCTGAACCSGAATGTTTCC | 1.552 | 1.558 | 0.557 | 0.377 | 0.397 |
| 21 | 7 | 30797413 | 11771444 | 6273 | CGGAATGGGGYTGATCTCAGT | 0.383 | 0.387 | 0.390 | 0.296 | 0.460 |
| 21 | 7 | 30809401 | 6948808 | 6274 | CCCATTCAATYCACAATAGCG | 0.048 | 0.049 | 0.514 | 0.330 | 0.429 |
| 21 | 7 | 30818744 | 7786414 | 6275 | TCCGAACGTAYCTTTGGTGAA | 0.026 | 0.026 | 0.098 | 0.362 | 0.281 |
| 21 | 7 | 30827485 | 2391936 | 6276 | TATATATAGAYTGTATGTTAC | 0.000 | 0.000 | 0.067 | 0.469 | 0.283 |
| 21 | 7 | 30838336 | — | 6277 | TAAATGCACAYATAAAATCAT | 0.319 | 0.307 | 0.193 | 0.126 | 0.347 |
| 21 | 7 | 30848961 | 17159844 | 6278 | TGCTGGACATYTCACTGTTAC | 0.328 | 0.324 | 0.378 | 0.097 | 0.347 |
| 21 | 7 | 30858437 | 4439020 | 6279 | GGACTTGAGCYAATTACATGA | 0.643 | 0.584 | 0.246 | 0.182 | 0.457 |
| 21 | 7 | 30876872 | 17159871 | 6280 | GTTTTGAGTTRAAGGGACGGC | 0.562 | 0.565 | 0.253 | 0.326 | 0.195 |
| 21 | 7 | 30880688 | 17723231 | 6281 | CTAAGGACAGYGTATGGGATT | 0.081 | 0.080 | 0.357 | 0.348 | 0.218 |
| 21 | 7 | 30895706 | 2267729 | 6282 | TCGGGCAGAGWTACCCATCCC | 0.277 | 0.279 | 0.356 | 0.465 | 0.288 |
| 21 | 7 | 30911743 | 2284225 | 6283 | ATTTGCATCARGTCCAATCTG | 0.618 | 0.616 | 0.347 | 0.400 | 0.317 |
| 21 | 7 | 30921519 | 1541518 | 6284 | GGCCCTGCACKTAAGTGATTT | 0.602 | 0.592 | 0.610 | 0.392 | 0.262 |
| 21 | 7 | 30930958 | 10264624 | 6285 | TGTTTCAAACYGAGCAAAACA | 0.246 | 0.379 | 0.539 | 0.364 | 0.211 |
| 21 | 7 | 30936040 | 12672673 | 6286 | ATTGTAAACASTAACATAACT | 0.667 | 0.697 | 0.516 | 0.377 | 0.168 |
| 21 | 7 | 30949204 | 7785534 | 6287 | GCAAATAGGGRTAACAGCATT | 0.100 | 0.106 | 0.443 | 0.345 | 0.333 |
| 22 | 7 | 32696611 | 12154586 | 6288 | CAAATGTTTAYTGAATACTAA | 0.634 | 0.642 | 0.815 | 0.953 | 0.829 |
| 22 | 7 | 32708674 | — | 6289 | ATGTTTCCCAMAAAGACAATC | 1.663 | 1.571 | 1.446 | 0.883 | 0.575 |
| 22 | 7 | 32722241 | 7778110 | 6290 | GTGATGAAGAYGTCCCTGCTA | 0.291 | 0.288 | 1.489 | 0.965 | 0.526 |
| 22 | 7 | 32734764 | 2278819 | 6291 | AACTTTACTTKCAGAAGAGGG | 1.449 | 1.415 | 1.264 | 0.976 | 0.531 |
| 22 | 7 | 32745485 | 17469596 | 6292 | CAGGAGCTGARCAAACAACAT | 0.572 | 0.551 | 0.697 | 0.971 | 0.604 |
| 22 | 7 | 32816185 | 16881929 | 6293 | CTTCCACATCYGCTATTGAAG | 0.122 | 0.122 | 0.596 | 0.693 | 0.574 |
| 22 | 7 | 32829655 | 6942974 | 6294 | ATTAGAAAACSTTATTCAAAT | 0.000 | 0.000 | 0.141 | 0.257 | 0.619 |
| 22 | 7 | 32838422 | 17385980 | 6295 | CTTAATAAGGYTGTATCTTAA | 0.123 | 0.123 | 0.030 | 0.387 | 0.517 |
| 22 | 7 | 32847596 | 6462450 | 6296 | ATTTATTAAGYGTGACAAAAT | 0.379 | 0.377 | 0.062 | 0.125 | 0.406 |
| 22 | 7 | 32855971 | 7796184 | 6297 | ACTTGATAAGYGGCAGAAATG | 0.001 | 0.001 | 0.181 | 0.109 | 0.155 |
| 22 | 7 | 32862513 | 4723241 | 6298 | GCTTAGAAAGWCATCAAAATT | 0.293 | 0.279 | 0.206 | 0.100 | 0.164 |
| 22 | 7 | 32868656 | 10281012 | 6299 | TCTCTTAGTCRAGTGCAACTA | 0.755 | 0.734 | 0.217 | 0.078 | 0.054 |
| 22 | 7 | 32870950 | 10256717 | 6300 | AGAGAAAAACYGAAAATTTGC | 0.243 | 0.248 | 0.218 | 0.085 | 0.029 |
| 22 | 7 | 32891598 | 2392216 | 6301 | GCCACCTGAGRCCCTCCCCAG | 0.394 | 0.419 | 0.186 | 0.084 | 0.065 |
| 22 | 7 | 32900239 | 17393789 | 6302 | GTATACTAAGYCAGCCATTTC | 0.077 | 0.072 | 0.063 | 0.122 | 0.055 |
| 22 | 7 | 32906447 | 11981778 | 6303 | TTGTATTCCAMGGCCAAGAAT | 0.153 | 0.153 | 0.094 | 0.087 | 0.094 |
| 22 | 7 | 32914544 | 6964595 | 6304 | TACTAATCCCRGATCTGTTCC | 0.196 | 0.175 | 0.073 | 0.075 | 0.082 |
| 22 | 7 | 32944350 | 7796922 | 6305 | TTTGAACACTRCATGCATTTG | 0.442 | 0.440 | 0.053 | 0.072 | 0.086 |
| 22 | 7 | 32954589 | 17169808 | 6306 | CCCAAAGAAAYTGCCTTTTAT | 0.247 | 0.262 | 0.163 | 0.107 | 0.087 |
| 22 | 7 | 32961789 | 17169847 | 6307 | AAGTTTTCATRCTCTTTAGCA | 0.057 | 0.056 | 0.198 | 0.121 | 0.060 |
| 22 | 7 | 32969056 | 17169913 | 6308 | TGGGTACAAGYATAGTGTGCG | 0.686 | 0.687 | 0.228 | 0.102 | 0.058 |
| 22 | 7 | 33000206 | 759396 | 6309 | TCAGTTACCCSAAATTTACCT | 0.235 | 0.220 | 0.224 | 0.110 | 0.074 |
| 22 | 7 | 33011440 | 10486521 | 6310 | TTCCTCAACARTCTGTCTGAA | 0.627 | 0.583 | 0.220 | 0.101 | 0.094 |
| 22 | 7 | 33017621 | 6979640 | 6311 | AGGAAAAGAGSTGTATTGGGA | 0.202 | 0.201 | 0.085 | 0.094 | 0.100 |
| 22 | 7 | 33033399 | 1894872 | 6312 | GTGTGCATAARCATAAAGGCT | 0.039 | 0.039 | 0.138 | 0.196 | 0.222 |
| 22 | 7 | 33051018 | 17170131 | 6313 | GCCAAGGTTCRATATACATGT | 0.185 | 0.198 | 0.062 | 0.128 | 0.298 |
| 22 | 7 | 33057213 | 1420155 | 6314 | GGAATCACTGYTTTACTGAGT | 0.428 | 0.442 | 0.159 | 0.137 | 0.253 |
| 22 | 7 | 33063498 | 6952244 | 6315 | GATCAATCTCYACATATTTCT | 0.208 | 0.216 | 0.258 | 0.253 | 0.268 |
| 22 | 7 | 33069447 | 17170142 | 6316 | TTTCTATGCARTTTGATTTCT | 0.624 | 0.605 | 0.239 | 0.426 | 0.199 |
| 22 | 7 | 33076014 | 12671191 | 6317 | CTATGTCTTGSAAAATTTAAA | 0.355 | 0.357 | 0.495 | 0.418 | 0.233 |
| 22 | 7 | 33081762 | — | 6318 | TACAATATAAKGAGAAATATA | 0.135 | 0.143 | 0.801 | 0.393 | 0.166 |
| 22 | 7 | 33082095 | 7783612 | 6319 | TGTGACTTTTSATGATCTTTT | 1.170 | 1.160 | 0.555 | 0.356 | 0.274 |
| 22 | 7 | 33095157 | 9791453 | 6320 | TCAACCCTGAYATTTTTCTCT | 0.959 | 0.914 | 0.467 | 0.406 | 0.346 |
| 22 | 7 | 33102971 | 17170169 | 6321 | TAGGATTGAAWGTCGCAATAA | 0.008 | 0.008 | 0.495 | 0.272 | 0.341 |
| 22 | 7 | 33111593 | 17476738 | 6322 | AACAGTTCAARTCAGAGGGAG | 0.145 | 0.144 | 0.228 | 0.432 | 0.296 |
| 22 | 7 | 33124869 | 10273634 | 6323 | TTTTGTAATAYAAGGTTTCTT | 0.259 | 0.259 | 0.021 | 0.534 | 0.305 |
| 22 | 7 | 33141753 | 11771086 | 6324 | AATCCCACAARTATTTAATTT | 0.000 | 0.000 | 0.246 | 0.221 | 0.227 |
| 22 | 7 | 33147769 | 17170193 | 6325 | ACAGGGTTGCRTGTCACTGAC | 0.147 | 0.144 | 0.367 | 0.072 | 0.197 |
| 22 | 7 | 33154814 | 10230133 | 6326 | TGTAGAAATCWGTGTAGAAAT | 0.884 | 0.921 | 0.351 | 0.129 | 0.180 |
| 22 | 7 | 33166726 | 10951387 | 6327 | ATACTTGTCARATTAGAATTT | 0.000 | 0.000 | 0.255 | 0.143 | 0.089 |
| 22 | 7 | 33172356 | 17170203 | 6328 | ACTCACTTTASGAATGGGACA | 0.235 | 0.234 | 0.345 | 0.128 | 0.127 |
| 22 | 7 | 33180964 | 3735420 | 6329 | ATATGTAACTSATATATTCAC | 0.185 | 0.181 | 0.103 | 0.077 | 0.267 |
| 22 | 7 | 33184507 | 2109525 | 6330 | ACAGGAGGGAKCGTATGTACA | 0.319 | 0.311 | 0.066 | 0.136 | 0.343 |
| 22 | 7 | 33197001 | 17724206 | 6331 | TGAGCTTATCRGAGGCCATTT | 0.239 | 0.238 | 0.035 | 0.214 | 0.343 |
| 22 | 7 | 33206555 | 1419898 | 6332 | GCTCAAGTGCWTCTTTTTGGG | 0.177 | 0.176 | 0.080 | 0.324 | 0.276 |
| 22 | 7 | 33214153 | 6979138 | 6333 | TTCCCACTTTYGTGATTCAAG | 0.050 | 0.049 | 0.351 | 0.400 | 0.342 |
| 22 | 7 | 33224797 | 1419928 | 6334 | TACTCCTTATKGTAGTCATTT | 0.510 | 0.512 | 0.618 | 0.418 | 0.241 |
| 22 | 7 | 33232397 | 17170225 | 6335 | ATAAAATGTCRTGGAACCAGA | 1.212 | 1.190 | 0.802 | 0.350 | 0.549 |
| 22 | 7 | 33239234 | 9639675 | 6336 | TAACTTAATGMTTTTAAAGAG | 0.890 | 0.835 | 0.908 | 0.409 | 0.544 |
| 22 | 7 | 33245933 | 17170234 | 6337 | GTACCACATGYTAGGAGGCAC | 0.575 | 0.545 | 0.700 | 0.466 | 0.650 |
| 22 | 7 | 33251798 | 758779 | 6338 | GTTTATCATAWTTGGTAGGTA | 0.245 | 0.245 | 0.366 | 1.114 | 0.755 |
| 22 | 7 | 33257747 | 1860601 | 6339 | AGTTGAAAATKTTGCGAAAGC | 0.081 | 0.078 | 0.177 | 0.990 | 0.784 |
| 22 | 7 | 33271222 | 2392234 | 6340 | TGTTCATTTGWTCCATAGATT | 0.470 | 0.434 | 0.803 | 0.832 | 0.799 |
| 22 | 7 | 33276768 | 9886325 | 6341 | AATATTTTTCYGGATGTATCC | 0.322 | 0.349 | 0.766 | 0.811 | 0.768 |
| 22 | 7 | 33283598 | 4582453 | 6342 | TCACACACAARTTCACAAAGC | 1.954 | 2.124 | 1.095 | 0.740 | 0.958 |
| 22 | 7 | 33290160 | 11980608 | 6343 | GGCAGTCACTWTGAAGAACTA | 0.272 | 0.263 | 1.233 | 0.729 | 0.813 |
| 22 | 7 | 33297086 | 4723289 | 6344 | TCAGGAAAATMTACAAAAAAG | 0.722 | 0.712 | 1.145 | 0.708 | 0.668 |
| 22 | 7 | 33303288 | 6964756 | 6345 | TGTCATGTCCYTTTTTGTTTA | 0.790 | 0.791 | 0.457 | 1.047 | 0.554 |
| 22 | 7 | 33310906 | 11769528 | 6346 | GCTTTTACCGMGTATTGTTTT | 0.407 | 0.385 | 0.372 | 1.052 | 0.842 |
| 22 | 7 | 33319060 | 2392242 | 6347 | TTTTCAGGAAWGGATTATTTA | 0.244 | 0.255 | 0.661 | 0.500 | 0.954 |
| 22 | 7 | 33327456 | 17794801 | 6348 | ATGATTTACTRTAACATAAAA | 0.029 | 0.027 | 0.510 | 0.437 | 0.882 |
| 22 | 7 | 33342965 | 6462483 | 6349 | TTGTATTTTTRTTTAACAAAA | 1.449 | 1.398 | 0.409 | 0.703 | 0.893 |
| 22 | 7 | 33353932 | 6944252 | 6350 | TTCCATCTTCSTGCTCCCCTG | 0.447 | 0.441 | 0.315 | 0.546 | 0.420 |
| 22 | 7 | 33359477 | 2598408 | 6351 | TTTACTGATAYTGAAATACTC | 0.151 | 0.147 | 1.001 | 0.435 | 0.516 |
| 22 | 7 | 33367994 | 13226813 | 6352 | ATATAAACACWGTCTCAAATG | 0.021 | 0.022 | 0.482 | 0.492 | 0.392 |
| 22 | 7 | 33374179 | 1451018 | 6353 | TGTCTTATTTYCTACTTCTTC | 1.566 | 1.532 | 0.321 | 0.516 | 0.325 |
| 22 | 7 | 33380156 | 2252989 | 6354 | TGTGCATATTSCATATATCTC | 0.321 | 0.313 | 0.467 | 0.332 | 0.276 |
| 22 | 7 | 33391562 | 2598395 | 6355 | TATGCTTTTAYGTTGCATTGC | 0.048 | 0.048 | 0.493 | 0.264 | 0.284 |
| 22 | 7 | 33400828 | 1817055 | 6356 | ATGGATCCTTYTTCATTCGTT | 0.474 | 0.458 | 0.213 | 0.332 | 0.601 |
| 22 | 7 | 33409604 | 17170308 | 6357 | GTGTAGAAGTSCATACACAGA | 0.073 | 0.072 | 0.159 | 0.348 | 0.348 |
| 22 | 7 | 33414977 | 1451021 | 6358 | AAGGGAATATRTGAGGCCATG | 0.699 | 0.682 | 0.256 | 0.112 | 0.444 |
| 22 | 7 | 33423634 | 7791607 | 6359 | TGGGCTCAAAWGTAAGTACAC | 0.106 | 0.103 | 0.122 | 0.370 | 0.509 |
| 22 | 7 | 33440554 | 10486541 | 6360 | CCACAAAGCCRATAGTGATCA | 0.439 | 0.430 | 0.183 | 0.381 | 0.510 |
| 22 | 7 | 33446505 | 17170316 | 6361 | ACGATCTCTGKAATAGCTTCC | 0.100 | 0.099 | 0.535 | 0.496 | 0.279 |
| 22 | 7 | 33452874 | 1451011 | 6362 | AGAGATAGGCRAGGGTAAGGT | 0.287 | 0.277 | 0.540 | 0.629 | 1.407 |
| 22 | 7 | 33459609 | 16879181 | 6363 | GAGAAATCTTRCCATGTGGTG | 1.724 | 1.663 | 0.780 | 0.417 | 1.465 |
| 22 | 7 | 33466478 | 7811071 | 6364 | CAGCATTTGTRAGGCCAGGTG | 0.087 | 0.088 | 1.071 | 0.497 | 1.778 |
| 22 | 7 | 33478731 | 1451010 | 6365 | GGTTTTGTCAYCTGCTGGAAA | 0.949 | 0.998 | 0.929 | 2.997 | 1.890 |
| 22 | 7 | 33484293 | 4723309 | 6366 | TATCAGTTTTRTAAGTAAGCA | 0.000 | 0.000 | 0.254 | 3.046 | 1.808 |
| 22 | 7 | 33491746 | 6966497 | 6367 | CTTGTGGTGAYCAGCACTACT | 0.049 | 0.047 | 3.852 | 3.474 | 1.969 |
| 22 | 7 | 33497620 | 17170353 | 6368 | TACAACTTTCYTGCATGGAGA | 0.366 | 0.349 | 2.886 | 2.207 | 1.958 |
| 22 | 7 | 33505602 | 1376350 | 6369 | AACTGAGAGCRATTGTGGCAA | 5.035 | 4.267 | 2.738 | 2.352 | 1.809 |
| 22 | 7 | 33506023 | 990080 | 6370 | ATGCATCCACWACTTGATTCC | 0.286 | 0.288 | 2.775 | 1.879 | 2.037 |
| 22 | 7 | 33529577 | 7800309 | 6371 | ACCCTTGGAARGATAAAAAGC | 0.908 | 0.905 | 2.823 | 1.707 | 1.427 |
| 22 | 7 | 33540418 | 2232121 | 6372 | CAGATGTTGTRTGTTCTGGAA | 0.121 | 0.122 | 0.177 | 1.631 | 1.454 |
| 22 | 7 | 33549587 | 2042095 | 6373 | GGTTTTACAGRTAATGAGACA | 0.208 | 0.199 | 0.293 | 1.891 | 1.239 |
| 22 | 7 | 33557584 | 16879226 | 6374 | TATATACCCTRGTGACTGGTA | 0.131 | 0.131 | 0.071 | 0.226 | 1.130 |
| 22 | 7 | 33561770 | 2893475 | 6375 | AAAATCTATTYGAGAGCCCAG | 0.641 | 0.622 | 0.259 | 0.230 | 1.171 |
| 22 | 7 | 33572120 | 4723328 | 6376 | CTCCTTCCACYGCCACAGGAA | 0.030 | 0.030 | 0.244 | 0.135 | 1.164 |
| 22 | 7 | 33581291 | 12536852 | 6377 | TATTTTTGTGYATTTAATTTT | 0.821 | 0.912 | 0.332 | 0.144 | 0.170 |
| 22 | 7 | 33587768 | 10951394 | 6378 | CAGTCTTTCCYTCATACTCTT | 0.225 | 0.229 | 0.217 | 0.112 | 0.157 |
| 22 | 7 | 33593267 | — | 6379 | CTATCCTGGASAGCCTCCCTC | 0.328 | 0.314 | 0.274 | 0.158 | 0.098 |
| 22 | 7 | 33600653 | 10486618 | 6380 | GTGTACCCTTSTTTTCTATGT | 0.350 | 0.350 | 0.069 | 0.179 | 0.283 |
| 22 | 7 | 33607562 | 1362928 | 6381 | TTTTTGGGTAYAGTTCCCAGG | 0.220 | 0.220 | 0.098 | 0.217 | 0.315 |
| 22 | 7 | 33613722 | 17170440 | 6382 | ATCAAATCGTMAAAAAAAAAG | 0.081 | 0.082 | 0.210 | 0.120 | 0.393 |
| 22 | 7 | 33621606 | 7794034 | 6383 | TAAAAGAAACRTGAAACCCCA | 0.376 | 0.392 | 0.184 | 0.418 | 0.554 |
| 22 | 7 | 33627530 | 17740751 | 6384 | GCTAATGAGGSCGAGTCATGT | 0.777 | 0.740 | 0.217 | 0.446 | 0.556 |
| 22 | 7 | 33638981 | 7785398 | 6385 | ATTTGGCCCCYATTAGTAACA | 0.224 | 0.240 | 0.843 | 0.481 | 0.423 |
| 22 | 7 | 33645497 | 17740905 | 6386 | GACAGCCTGGRCACTGGAGAG | 0.315 | 0.313 | 0.853 | 0.826 | 0.533 |
| 22 | 7 | 33652339 | — | 6387 | ATAACAGTGTSTGACAAATGG | 1.550 | 1.472 | 0.663 | 0.814 | 0.474 |
| 22 | 7 | 33661735 | 10243554 | 6388 | GCTGGTTCAGRCATTTTCTCT | 0.365 | 0.356 | 1.120 | 0.775 | 0.589 |
| 23 | 7 | 127239803 | 17151653 | 6389 | TTATTTGAGGRGCTCCCCACC | 0.252 | 0.252 | 0.112 | 0.071 | 0.173 |
| 23 | 7 | 127254714 | 6467157 | 6390 | TCGGAGTGGAYGTGGACTTAC | 0.554 | 0.538 | 0.133 | 0.084 | 0.416 |
| 23 | 7 | 127262797 | — | 6391 | CTGTCCAGTGKGCCCCATGTG | 0.239 | 0.225 | 0.167 | 0.191 | 0.310 |
| 23 | 7 | 127282576 | 6962635 | 6392 | GGAAAAACACRCAGCCTGTTT | 0.173 | 0.174 | 0.248 | 0.266 | 0.320 |
| 23 | 7 | 127289004 | 6966724 | 6393 | AATAGGATGGRTATCTGCCCG | 0.359 | 0.347 | 0.321 | 0.753 | 0.240 |
| 23 | 7 | 127296399 | 17151707 | 6394 | GAGGCGTGAGRACAAAAGGAA | 0.570 | 0.526 | 0.424 | 0.705 | 0.315 |
| 23 | 7 | 127300637 | 3757754 | 6395 | GCATTGTTAAYGTTCATCATC | 0.780 | 0.778 | 1.294 | 0.600 | 0.318 |
| 23 | 7 | 127317264 | 124756 | 6396 | TTGGCAGGAGRCAAAGTCCTG | 0.000 | 0.000 | 1.099 | 0.553 | 0.283 |
| 23 | 7 | 127325849 | — | 6397 | GATCACAGAAYACCTGAATGC | 1.966 | 1.896 | 1.001 | 0.673 | 0.390 |
| 23 | 7 | 127333672 | 6954161 | 6398 | CCTCAGAGATKTCACAGTAGA | 0.010 | 0.010 | 0.615 | 0.586 | 0.276 |
| 23 | 7 | 127360351 | 10258271 | 6399 | TATCTTCTTGSACCCAATATA | 0.208 | 0.199 | 0.616 | 0.414 | 0.256 |
| 23 | 7 | 127377349 | 322740 | 6400 | ACAGCATTAGKTTTGAAAAAT | 0.081 | 0.079 | 0.033 | 0.401 | 0.321 |
| 23 | 7 | 127383147 | 53125 | 6401 | CTGAAACGCASTTTTTAAGAT | 0.557 | 0.516 | 0.032 | 0.289 | 0.285 |
| 23 | 7 | 127389755 | 10447854 | 6402 | ATATAATTGCYGGGGACATAC | 0.078 | 0.081 | 0.144 | 0.016 | 1.220 |
| 23 | 7 | 127396223 | 10954170 | 6403 | AATAAATCACMAAGTATGAGT | 0.037 | 0.037 | 0.132 | 0.049 | 1.073 |
| 23 | 7 | 127408308 | 17293437 | 6404 | ACAAAAAATARTAACAGCAGC | 0.753 | 0.742 | 0.043 | 0.047 | 1.047 |
| 23 | 7 | 127423722 | 896178 | 6405 | GGCCCAGACGMTGCCATCATT | 0.070 | 0.066 | 0.120 | 1.228 | 0.636 |
| 23 | 7 | 127435720 | — | 6406 | TGTTTATTACKTTGGACCGCA | 0.070 | 0.070 | 0.155 | 1.065 | 0.682 |
| 23 | 7 | 127442525 | 2060736 | 6407 | TAACCGCGCCSTTCATTCTGT | 0.523 | 0.510 | 1.803 | 1.211 | 0.624 |
| 23 | 7 | 127451999 | 11764840 | 6408 | CTTAGTTGCAWTCCGATATGC | 0.160 | 0.140 | 2.105 | 1.399 | 0.707 |
| 23 | 7 | 127464579 | 1376349 | 6409 | TGGTTTAAGCYTTTGAGCTCT | 4.300 | 4.364 | 2.069 | 1.113 | 0.737 |
| 23 | 7 | 127476021 | 4731426 | 6410 | TGCTAAATACSCGCTGTTGGC | 0.114 | 0.113 | 1.976 | 1.183 | 0.862 |
| 23 | 7 | 127484013 | 11763517 | 6411 | GTGGCCATTAYTTGAGAGTGA | 0.469 | 0.465 | 1.753 | 1.197 | 0.976 |
| 23 | 7 | 127493080 | 2060715 | 6412 | GCTAAGTGACRGATACATGGG | 0.442 | 0.460 | 0.093 | 1.284 | 0.965 |
| 23 | 7 | 127499508 | 10954175 | 6413 | CCAGGTGAAARGCCCAGCGCT | 0.199 | 0.203 | 0.153 | 1.353 | 0.948 |
| 23 | 7 | 127507182 | 10274395 | 6414 | CTACCCCATTSTGCAGTGAAA | 0.000 | 0.000 | 0.189 | 0.233 | 0.924 |
| 23 | 7 | 127517729 | 7811892 | 6415 | GGACTTGCTTYAGCCTTACAC | 0.345 | 0.353 | 0.239 | 0.357 | 0.912 |
| 23 | 7 | 127523017 | 12534540 | 6416 | CATGTTAAAARTTCAGAGGAA | 0.642 | 0.601 | 0.351 | 0.292 | 1.042 |
| 23 | 7 | 127542555 | 12538391 | 6417 | CCAAGTCATGYCTCGAGGTGA | 0.601 | 0.566 | 0.587 | 0.199 | 0.215 |
| 23 | 7 | 127550209 | 4731441 | 6418 | AGAGATGCATWCACAAATAAA | 0.461 | 0.481 | 0.510 | 0.252 | 0.239 |
| 23 | 7 | 127556786 | 12536858 | 6419 | CTAGGTGTTCRCTACCACAAA | 0.710 | 0.707 | 0.299 | 0.417 | 0.176 |
| 23 | 7 | 127567084 | 359650 | 6420 | GAAATCTAAAYGAAAACGTGA | 0.133 | 0.133 | 0.240 | 0.401 | 0.162 |
| 23 | 7 | 127581730 | 962294 | 6421 | AAATCTAACTSTGTCTCTATG | 0.034 | 0.033 | 0.313 | 0.307 | 0.149 |
| 23 | 7 | 127618814 | 885343 | 6422 | CAGCGTAGAGYCAACCCTCCA | 0.429 | 0.442 | 0.181 | 0.175 | 0.171 |
| 23 | 7 | 127667809 | 17152065 | 6423 | CTTACTATGCRTCAGACACCA | 0.773 | 0.744 | 0.229 | 0.155 | 0.173 |
| 23 | 7 | 127678648 | 13222212 | 6424 | ATTTTGGGTARAATCCCCTTT | 0.306 | 0.312 | 0.245 | 0.067 | 0.135 |
| 23 | 7 | 127684249 | 17152085 | 6425 | CTAAAAATAGYTTTGAGTAGT | 0.298 | 0.312 | 0.225 | 0.075 | 0.138 |
| 23 | 7 | 127704972 | — | 6426 | GGATGGCAAARTGTTTTATTT | 0.049 | 0.044 | 0.059 | 0.129 | 0.158 |
| 23 | 7 | 127721306 | 2562737 | 6427 | TCACTCAAATWATGAGCCCAA | 0.397 | 0.396 | 0.048 | 0.110 | 0.178 |
| 24 | 7 | 145001785 | 6943520 | 6428 | TTTATAATGAYGTTTTTACCA | 0.556 | 0.555 | 0.384 | 0.307 | 0.172 |
| 24 | 7 | 145018059 | 4601231 | 6429 | TCTTTTCTGAKACTACGGAAG | 0.639 | 0.617 | 0.519 | 0.228 | 0.139 |
| 24 | 7 | 145034566 | 10321215 | 6430 | CTCTCTCTTAMGCTCTAATGA | 0.118 | 0.119 | 0.317 | 0.212 | 0.283 |
| 24 | 7 | 145046677 | 4392813 | 6431 | ATCTCCCACTRTCTCCATTTG | 0.517 | 0.514 | 0.157 | 0.231 | 0.264 |
| 24 | 7 | 145055277 | 7780753 | 6432 | CCCAGGTCCARTTGGGGAAAT | 0.134 | 0.144 | 0.070 | 0.129 | 0.250 |
| 24 | 7 | 145071042 | 4355696 | 6433 | AAAATGTTAARGGGAATAAAA | 0.068 | 0.065 | 0.102 | 0.299 | 0.268 |
| 24 | 7 | 145083737 | 7799145 | 6434 | TATAGTTATCYGCAACTTACT | 0.333 | 0.342 | 0.044 | 0.186 | 0.261 |
| 24 | 7 | 145096619 | 7786054 | 6435 | GTAATACGTGYGTAGTGGTAT | 0.251 | 0.250 | 0.384 | 0.223 | 0.184 |
| 24 | 7 | 145114530 | 7777578 | 6436 | AGTGAGATTTKGTAGTGTTTC | 0.176 | 0.175 | 0.399 | 0.212 | 0.143 |
| 24 | 7 | 145126258 | — | 6437 | CCATTCCAAGSAAACTCCATT | 1.397 | 1.355 | 0.369 | 0.199 | 0.094 |
| 24 | 7 | 145137729 | 6968866 | 6438 | ACCACAAGTCYGATAAGGCTT | 0.069 | 0.070 | 0.473 | 0.240 | 0.119 |
| 24 | 7 | 145139853 | 10226110 | 6439 | GGTGGCCACAYTGTACTAGAC | 0.274 | 0.265 | 0.440 | 0.207 | 0.090 |
| 24 | 7 | 145155154 | 17169920 | 6440 | TGAAGTTTTAYACACAGTTCT | 0.482 | 0.496 | 0.102 | 0.192 | 0.096 |
| 24 | 7 | 145164360 | 17169926 | 6441 | GTCACTCAGGKTTATTACGCT | 0.144 | 0.142 | 0.115 | 0.244 | 0.093 |
| 24 | 7 | 145168812 | 4726779 | 6442 | ATAGCCAAGCYTCATTTTCCT | 0.270 | 0.275 | 0.104 | 0.054 | 0.066 |
| 24 | 7 | 145205736 | 10277243 | 6443 | TGCTTGCGTTRTTATCAGTGT | 0.208 | 0.210 | 0.064 | 0.068 | 0.110 |
| 24 | 7 | 145211439 | 2204466 | 6444 | CACAAGGAATRGCAAGAAGAG | 0.240 | 0.232 | 0.103 | 0.049 | 0.223 |
| 24 | 7 | 145222414 | 4726781 | 6445 | TTTTACTGCAWTATTAACTAT | 0.000 | 0.000 | 0.111 | 0.014 | 0.062 |
| 24 | 7 | 145231727 | 4726782 | 6446 | GATGACTTACYTAACAGATAT | 0.328 | 0.318 | 0.078 | 0.065 | 0.080 |
| 24 | 7 | 145241950 | 6464728 | 6447 | AAAGCACATTYGTAGATTATA | 0.280 | 0.276 | 0.046 | 0.194 | 0.300 |
| 24 | 7 | 145245095 | 2692359 | 6448 | CCATAATATTYCTCTAGTTCC | 0.012 | 0.011 | 0.146 | 0.173 | 0.288 |
| 24 | 7 | 145261967 | 1260126 | 6449 | ATCTATGCTGWTTTAGAGGAA | 0.001 | 0.001 | 0.340 | 0.209 | 0.770 |
| 24 | 7 | 145291239 | 7807672 | 6450 | TACAACTTTCRCCTATGCTAA | 0.681 | 0.700 | 0.240 | 0.533 | 0.785 |
| 24 | 7 | 145307229 | 1405115 | 6451 | AATTTTATTGWATTTATTCTC | 1.030 | 1.017 | 0.358 | 0.547 | 0.841 |
| 24 | 7 | 145319649 | 4612252 | 6452 | ATTATTTTCTRTTTTACAAGT | 0.038 | 0.039 | 1.133 | 1.141 | 0.894 |
| 24 | 7 | 145332263 | 7795190 | 6453 | TTTTTGTTCCMTGATACTATT | 0.367 | 0.368 | 0.964 | 1.277 | 0.780 |
| 24 | 7 | 145345572 | 6464738 | 6454 | AGACAAGACTRCTTCATTTTT | 1.770 | 1.730 | 1.512 | 1.435 | 0.835 |
| 24 | 7 | 145351794 | 802539 | 6455 | ATTTTTAGGARCTTTCATTTT | 0.395 | 0.384 | 1.882 | 1.534 | 0.814 |
| 24 | 7 | 145359146 | 2693307 | 6456 | AGCAAGTTACRTTTTTATCAA | 2.407 | 2.405 | 2.323 | 1.184 | 0.857 |
| 24 | 7 | 145366077 | 1526079 | 6457 | CGCAGGAGTGMACCTGTTTTC | 0.338 | 0.345 | 1.453 | 1.518 | 0.890 |
| 24 | 7 | 145372744 | 17170000 | 6458 | GTTCCAAAAGSAAGCTTATGT | 0.000 | 0.000 | 1.235 | 1.365 | 0.748 |
| 24 | 7 | 145385679 | 802522 | 6459 | AGTTTAGTGARCTCAAGGTGA | 0.000 | 0.000 | 0.115 | 0.632 | 0.657 |
| 24 | 7 | 145390594 | 2430327 | 6460 | TCCTGGAATTMATCATGAGAC | 0.041 | 0.041 | 0.012 | 0.599 | 0.887 |
| 24 | 7 | 145411268 | 6946638 | 6461 | AAGCACAATTYGAAGCACTGG | 0.000 | 0.000 | 0.012 | 0.008 | 0.903 |
| 24 | 7 | 145419484 | — | 6462 | TCAAAGCATGYAGTGAAGGGA | 0.077 | 0.072 | 0.015 | 0.042 | 0.677 |
| 24 | 7 | 145431326 | 10262823 | 6463 | TCATGATGTTRAGGGAAATAT | 0.157 | 0.159 | 0.014 | 0.145 | 0.730 |
| 24 | 7 | 145450428 | 7795585 | 6464 | ATACATTTGTWTTTTTTCAAT | 0.243 | 0.251 | 0.080 | 0.139 | 0.381 |
| 24 | 7 | 145460671 | 17170038 | 6465 | CACAAACTGARCTTACTTTAC | 0.059 | 0.057 | 0.342 | 0.368 | 0.377 |
| 24 | 7 | 145476714 | 10248899 | 6466 | AGCCTTCATTMTTAATGTTTG | 0.707 | 0.705 | 0.405 | 0.388 | 0.474 |
| 24 | 7 | 145489102 | 17170058 | 6467 | AGTCTAATTAYTATTGTAGAC | 0.915 | 0.923 | 0.696 | 0.630 | 0.474 |
| 24 | 7 | 145500557 | 12703803 | 6468 | GTCTATTAACKTAATAAGCCA | 0.351 | 0.364 | 0.892 | 0.689 | 0.536 |
| 24 | 7 | 145512007 | 17170073 | 6469 | GGAGGATTTTYGCCTATAAAA | 0.959 | 0.940 | 1.007 | 0.868 | 0.632 |
| 24 | 7 | 145520605 | 10238194 | 6470 | TTGTATTACARCTGTTTTAAA | 0.534 | 0.529 | 0.787 | 1.048 | 0.801 |
| 24 | 7 | 145528627 | 13247443 | 6471 | GTAGCCTCCAWATTTTGTTCA | 0.893 | 0.940 | 1.049 | 0.912 | 0.930 |
| 24 | 7 | 145535097 | 1358079 | 6472 | TGTTCTCGACYTTGTTTCTGC | 0.338 | 0.339 | 0.872 | 0.892 | 0.977 |
| 24 | 7 | 145541459 | 802194 | 6473 | TCTGGGGACTRCCTTGAGTCA | 0.879 | 0.875 | 0.737 | 1.082 | 1.096 |
| 24 | 7 | 145553353 | 1724513 | 6474 | TTATTAACTAYTCAAATACTC | 0.000 | 0.000 | 0.742 | 0.953 | 1.123 |
| 24 | 7 | 145557979 | 1718093 | 6475 | ATTGAACTTTSTGTCTTTTAA | 0.304 | 0.327 | 0.949 | 0.956 | 0.987 |
| 24 | 7 | 145568439 | 1724497 | 6476 | ATGGTCCCTCRTCACGCTGTG | 0.913 | 0.981 | 0.845 | 0.911 | 0.954 |
| 24 | 7 | 145579861 | 17505462 | 6477 | GTCACCAAAAYTTTTATCCAG | 0.792 | 0.827 | 0.860 | 1.071 | 0.766 |
| 24 | 7 | 145584471 | 1639470 | 6478 | GCATATTTCAYGAATGCCCCT | 0.721 | 0.767 | 1.011 | 0.898 | 0.764 |
| 24 | 7 | 145597926 | 7805539 | 6479 | ATACAAGAAGRGAACTGTTAT | 0.620 | 0.633 | 1.102 | 0.741 | 0.639 |
| 24 | 7 | 145606854 | 6968491 | 6480 | CAAATGCACCRTTACATAGGC | 0.642 | 0.661 | 0.775 | 0.666 | 0.603 |
| 24 | 7 | 145611435 | 17170116 | 6481 | TGATTTGGTTYAAATAAGACT | 0.951 | 1.005 | 0.466 | 0.572 | 0.421 |
| 24 | 7 | 145625916 | — | 6482 | AGTTTCCATGYACAACTAAAT | 0.183 | 0.177 | 0.276 | 0.437 | 0.369 |
| 24 | 7 | 145632277 | 10227262 | 6483 | CTACAGTGTAYTTCACCCAAA | 0.031 | 0.031 | 0.276 | 0.279 | 0.356 |
| 24 | 7 | 145656868 | 17584924 | 6484 | CGTCATTCTTMCTTAAAAGCA | 0.096 | 0.095 | 0.100 | 0.164 | 0.201 |
| 24 | 7 | 145664230 | 17170134 | 6485 | CAAGAACATTKATGATCCCTT | 0.597 | 0.604 | 0.079 | 0.093 | 0.152 |
| 24 | 7 | 145677193 | 2693406 | 6486 | GCAGAAACCAYCTAGACTTGT | 0.295 | 0.294 | 0.071 | 0.026 | 0.078 |
| 24 | 7 | 145684853 | 2693392 | 6487 | TTGGATTGATKAAACTTAGGG | 0.153 | 0.119 | 0.091 | 0.018 | 0.049 |
| 24 | 7 | 145691340 | 802013 | 6488 | AAATACTAGGRCAGTTAAGAA | 0.042 | 0.041 | 0.037 | 0.028 | 0.029 |
| 24 | 7 | 145697862 | 10249254 | 6489 | GTGAACFGATWAACTTTGCAG | 0.176 | 0.174 | 0.014 | 0.025 | 0.039 |
| 24 | 7 | 145704173 | 10249436 | 6490 | TCACATTTCAMACTTTATCTT | 0.291 | 0.285 | 0.020 | 0.006 | 0.042 |
| 24 | 7 | 145710348 | 10229049 | 6491 | AAACAGGAGTKGTGACTTTTC | 0.002 | 0.002 | 0.015 | 0.005 | 0.090 |
| 24 | 7 | 145717706 | 6960544 | 6492 | ATATATAATASTCATTAATAG | 0.000 | 0.000 | 0.009 | 0.084 | 0.090 |
| 24 | 7 | 145725199 | 7789059 | 6493 | ATCAAAGTCAMTAGAATATGA | 0.063 | 0.060 | 0.002 | 0.092 | 0.068 |
| 24 | 7 | 145734775 | 13247654 | 6494 | TCTAACATTTRTCTTTGAGAG | 0.117 | 0.113 | 0.352 | 0.189 | 0.074 |
| 24 | 7 | 145741781 | 347195 | 6495 | AATACTATTTRTCTTATTTAT | 0.000 | 0.000 | 0.262 | 0.161 | 0.155 |
| 24 | 7 | 145747802 | 17170192 | 6496 | CAAGCTAATTKTCTTCCTTAT | 1.064 | 1.073 | 0.494 | 0.261 | 0.181 |
| 24 | 7 | 145754722 | 347223 | 6497 | TGTAAACTTAYGTTCTCACAA | 0.121 | 0.115 | 0.492 | 0.261 | 0.188 |
| 24 | 7 | 145761651 | 6968860 | 6498 | ATTGGGTCATMTCTAATATAA | 0.732 | 0.724 | 0.492 | 0.453 | 0.215 |
| 24 | 7 | 145768739 | 13229953 | 6499 | GGAAGAGTACMCTATGGGCCA | 0.091 | 0.091 | 0.215 | 0.535 | 0.247 |
| 24 | 7 | 145775759 | 13235730 | 6500 | CCTTCCAATASTTTGCAATTG | 0.000 | 0.000 | 0.517 | 0.459 | 0.388 |
| 24 | 7 | 145781202 | 2215327 | 6501 | TATAGTAACARTAATGTATAA | 0.000 | 0.000 | 0.305 | 0.265 | 0.681 |
| 24 | 7 | 145790224 | 10277654 | 6502 | TGCCTGAAATYATGCCTTGTT | 0.729 | 0.726 | 0.390 | 0.273 | 0.700 |
| 24 | 7 | 145800130 | 2372761 | 6503 | CTGTTTTCAARTTATAATTTC | 0.345 | 0.365 | 0.360 | 0.408 | 0.714 |
| 24 | 7 | 145808805 | 1494459 | 6504 | GTCACCAAATSGTAGTTGTTT | 0.226 | 0.231 | 0.282 | 0.915 | 0.508 |
| 24 | 7 | 145826907 | 2642483 | 6505 | GTCTTCTACAYTTCCTTTTGT | 0.382 | 0.360 | 0.453 | 0.769 | 0.616 |
| 24 | 7 | 145839399 | 344453 | 6506 | TGTGAGGTCARTTGGTTAACC | 0.191 | 0.195 | 0.932 | 0.790 | 0.699 |
| 24 | 7 | 145845612 | 17170221 | 6507 | CATATATATCYGGTCTTGGCA | 1.219 | 1.199 | 0.919 | 0.600 | 0.716 |
| 24 | 7 | 145851145 | 344470 | 6508 | CTTGAGACCCYAAAACAGTAT | 1.543 | 1.548 | 0.979 | 0.636 | 0.885 |
| 24 | 7 | 145858219 | 344465 | 6509 | TAGACTTACTRAAATTATACC | 0.095 | 0.092 | 0.965 | 0.910 | 0.801 |
| 24 | 7 | 145865148 | 7811006 | 6510 | ATCCCATTTTRTAACATTGTA | 0.560 | 0.516 | 0.622 | 0.812 | 0.743 |
| 24 | 7 | 145879656 | — | 6511 | ATCCTCTAAGKAGAATATTTG | 0.151 | 0.190 | 0.379 | 1.134 | 0.724 |
| 24 | 7 | 145884415 | 6956550 | 6512 | CCCTGAATGARTGAAGCTATA | 0.490 | 0.468 | 0.463 | 0.783 | 0.757 |
| 24 | 7 | 145895515 | 10952659 | 6513 | TAGAACATTCSTCCAATAATG | 0.968 | 0.979 | 0.665 | 0.419 | 0.677 |
| 24 | 7 | 145902613 | 10952661 | 6514 | ATTAAACAAGYTGCCCCAATT | 0.262 | 0.258 | 0.700 | 0.525 | 0.706 |
| 24 | 7 | 145918045 | 11766778 | 6515 | AATATATTCTWTCTTTTAAAT | 0.708 | 1.157 | 0.750 | 0.485 | 0.432 |
| 24 | 7 | 145927493 | 1541512 | 6516 | AGTGTCCCCARCCATAAATTT | 0.274 | 0.257 | 0.422 | 0.470 | 0.149 |
| 24 | 7 | 145943250 | — | 6517 | AGGAATCACAYTTTTAAAAAT | 0.000 | 0.000 | 0.485 | 0.393 | 0.200 |
| 24 | 7 | 145962677 | 10234284 | 6518 | TTTTTATTGCSTTTATTTTTC | 0.340 | 0.340 | 0.113 | 0.155 | 0.350 |
| 24 | 7 | 145970176 | 10282480 | 6519 | GAACTGTATAYCTAACAGGTA | 0.368 | 0.366 | 0.106 | 0.103 | 0.628 |
| 24 | 7 | 145983299 | 7781516 | 6520 | CTAGGAAAGTSGTCTTATTCA | 0.050 | 0.042 | 0.071 | 0.038 | 0.569 |
| 24 | 7 | 145984741 | 6955151 | 6521 | ATACTGTTTTYCAGGTAGCTA | 0.262 | 0.264 | 0.026 | 0.222 | 0.383 |
| 24 | 7 | 145997122 | 4367451 | 6522 | GGATCATAACRTGCTATTTCC | 0.110 | 0.112 | 0.032 | 0.491 | 0.562 |
| 24 | 7 | 146008270 | 17170284 | 6523 | AACTGGAAGTSCATGCGATTC | 0.026 | 0.026 | 0.373 | 0.441 | 0.420 |
| 24 | 7 | 146015977 | 17170287 | 6524 | TGTATTGGTTKTCTCAAGAAT | 0.415 | 0.422 | 0.882 | 0.393 | 0.403 |
| 24 | 7 | 146022793 | 17483333 | 6525 | AGCCAATGAAWTAATCTATCA | 1.347 | 1.278 | 0.877 | 0.670 | 0.342 |
| 24 | 7 | 146029536 | 10216156 | 6526 | GCTACCATACRATCGATATCC | 1.466 | 1.411 | 1.036 | 0.756 | 0.296 |
| 24 | 7 | 146034961 | 10500168 | 6527 | TAGTGTTGTCYTGTAGCATAG | 0.177 | 0.178 | 1.204 | 0.718 | 0.344 |
| 24 | 7 | 146047361 | 11765622 | 6528 | ATCCCCTTTARACCTCAAGAA | 0.064 | 0.203 | 0.860 | 0.741 | 0.431 |
| 24 | 7 | 146059994 | 11773694 | 6529 | AATCGCACCTKTATTTCTGGC | 0.979 | 0.987 | 0.315 | 0.623 | 0.465 |
| 24 | 7 | 146074532 | 2049396 | 6530 | CTACAAAAAAWCTAAAGGAAT | 0.396 | 0.431 | 0.300 | 0.460 | 0.632 |
| 24 | 7 | 146083998 | — | 6531 | ATAAATGAAAYTGTCAAGATA | 0.135 | 0.135 | 0.273 | 0.284 | 0.865 |
| 24 | 7 | 146090580 | 13228798 | 6532 | GATAGGTTTGYCATCACAGAG | 0.116 | 0.114 | 0.134 | 0.330 | 0.868 |
| 24 | 7 | 146096763 | 12703865 | 6533 | CCAGTTACGCRGTGGTTACTT | 0.020 | 0.020 | 0.201 | 0.530 | 0.758 |
| 24 | 7 | 146112499 | 1524340 | 6534 | AACTGAAAACKGCAATTGTCA | 0.555 | 0.534 | 0.275 | 0.641 | 0.611 |
| 24 | 7 | 146119599 | 12703874 | 6535 | ATGCCGTCAGSTAAACATAAT | 0.522 | 0.521 | 0.601 | 0.646 | 0.601 |
| 24 | 7 | 146126667 | 13234249 | 6536 | ATCATAAATGYATTGTTACTG | 0.418 | 0.383 | 1.073 | 0.743 | 0.582 |
| 24 | 7 | 146139802 | 10281702 | 6537 | TTGGTCTCTCYGGAGGCAGGA | 1.230 | 1.198 | 1.163 | 0.876 | 0.445 |
| 24 | 7 | 146148505 | 17170304 | 6538 | CTATACTTCTSCAATACAATT | 1.566 | 1.522 | 1.301 | 0.936 | 0.439 |
| 24 | 7 | 146165900 | 1524347 | 6539 | TATTTAACATRTCACAAAATG | 0.000 | 0.000 | 1.508 | 0.833 | 0.406 |
| 24 | 7 | 146172529 | 982512 | 6540 | TAGATATATAMATGTTAGACG | 0.000 | 0.000 | 0.926 | 0.797 | 0.507 |
| 24 | 7 | 146178225 | 7812091 | 6541 | CTCTCACTAAYGTTGAAATGT | 0.000 | 0.000 | 0.056 | 0.792 | 0.655 |
| 24 | 7 | 146189573 | 10266622 | 6542 | TATCAGAATARTATCAGATCT | 0.089 | 0.087 | 0.064 | 0.332 | 0.755 |
| 24 | 7 | 146197132 | 6973868 | 6543 | TTAGAGCAGARTATGCATGCA | 0.180 | 0.175 | 0.093 | 0.094 | 0.646 |
| 24 | 7 | 146204462 | 6975159 | 6544 | CTCAAAGTTGYTTACTTACTA | 0.309 | 0.303 | 0.045 | 0.147 | 0.561 |
| 24 | 7 | 146215148 | 10952669 | 6545 | CAGGTGTATARCATGAACTTA | 0.423 | 0.413 | 0.156 | 0.246 | 0.397 |
| 24 | 7 | 146224977 | — | 6546 | TCAAATCAATYAGACAAATAC | 0.016 | 0.043 | 0.306 | 0.174 | 0.147 |
| 24 | 7 | 146230781 | 11973305 | 6547 | TATTGATTTASCATTAATCAT | 0.618 | 0.624 | 0.525 | 0.188 | 0.114 |
| 24 | 7 | 146238152 | 13238590 | 6548 | GTGTGTGAAAYTTGCAAAATA | 0.656 | 0.662 | 0.384 | 0.279 | 0.084 |
| 24 | 7 | 146252578 | 6958777 | 6549 | CACATTAAAGWTCTGATCTGA | 0.778 | 0.871 | 0.417 | 0.274 | 0.084 |
| 24 | 7 | 146269497 | 9640492 | 6550 | AAACAGTTAAKTCAGGATTCT | 0.106 | 0.102 | 0.409 | 0.213 | 0.087 |
| 24 | 7 | 146275727 | 6959187 | 6551 | TATGATGACARCTGTGATAAT | 0.112 | 0.112 | 0.283 | 0.232 | 0.078 |
| 24 | 7 | 146282531 | 17170336 | 6552 | CTACCTTTACWAACTTGCTCT | 0.642 | 0.600 | 0.089 | 0.184 | 0.079 |
| 24 | 7 | 146293204 | 1390718 | 6553 | GAACACATATYGACTGTATTT | 0.241 | 0.253 | 0.083 | 0.097 | 0.084 |
| 24 | 7 | 146302372 | 1826843 | 6554 | CAGCTGTCCTRTGATATCAGC | 0.027 | 0.027 | 0.122 | 0.024 | 0.102 |
| 24 | 7 | 146308562 | 4725706 | 6555 | ACTCTGCACAYGTTGCTGCTA | 0.024 | 0.024 | 0.024 | 0.038 | 0.089 |
| 24 | 7 | 146313964 | 1496543 | 6556 | TAACAGCAAARGGTTCTTCAA | 0.374 | 0.363 | 0.010 | 0.057 | 0.049 |
| 24 | 7 | 146320950 | 7801686 | 6557 | TTAATGCTTAYACTAAATTCT | 0.072 | 0.072 | 0.035 | 0.024 | 0.011 |
| 24 | 7 | 146327696 | 1018073 | 6558 | GTGAACAGAAYTGTATTTTTG | 0.066 | 0.063 | 0.080 | 0.036 | 0.013 |
| 24 | 7 | 146373578 | 1390723 | 6559 | CAATTGCTATRAAAGCATCAT | 0.309 | 0.287 | 0.056 | 0.033 | 0.050 |
| 24 | 7 | 146384563 | — | 6560 | TCCGTGCTCTKTGCTGGAGGC | 0.395 | 0.383 | 0.132 | 0.021 | 0.031 |
| 24 | 7 | 146392045 | 9769600 | 6561 | ACAGAAGTCTRTTGAACAGGA | 0.217 | 0.222 | 0.134 | 0.016 | 0.033 |
| 24 | 7 | 146399127 | 17170379 | 6562 | GTTTTTAGACYCTCCTCTGTG | 0.477 | 0.456 | 0.067 | 0.100 | 0.042 |
| 24 | 7 | 146405943 | 10279700 | 6563 | GCTAAGTAAGYTGATATTCCT | 0.089 | 0.090 | 0.044 | 0.149 | 0.035 |
| 24 | 7 | 146413128 | 10268597 | 6564 | AGTTGAGGACMATGTTTCAAA | 0.028 | 0.024 | 0.231 | 0.161 | 0.025 |
| 24 | 7 | 146435941 | 2620440 | 6565 | TCTTAAGTAAYGAAAAGATTA | 0.174 | 0.176 | 0.212 | 0.146 | 0.036 |
| 24 | 7 | 146448938 | 4269450 | 6566 | ATCTAATGGGRAAATTTGAAG | 1.071 | 1.148 | 0.266 | 0.102 | 0.059 |
| 24 | 7 | 146456215 | 2692146 | 6567 | AGCTTCTGAAWTAGGGATTTT | 0.000 | 0.000 | 0.389 | 0.060 | 0.079 |
| 24 | 7 | 146463556 | 16883333 | 6568 | ACTCAGCTCTSTTGGTGCAGC | 0.301 | 0.311 | 0.330 | 0.074 | 0.109 |
| 24 | 7 | 146470362 | 747139 | 6569 | AAACAGAGACKGAGGAAATCT | 0.232 | 0.230 | 0.041 | 0.160 | 0.081 |
| 24 | 7 | 146477116 | 16883356 | 6570 | CAGCTATAAAMACATTTGCTT | 0.051 | 0.052 | 0.037 | 0.215 | 0.068 |
| 24 | 7 | 146487462 | 10254249 | 6571 | CTGCTCTATTKCCTGTTACTA | 0.091 | 0.092 | 0.063 | 0.136 | 0.156 |
| 24 | 7 | 146496034 | 826825 | 6572 | GATTTTCTGAYAACAATGAAT | 0.232 | 0.234 | 0.116 | 0.083 | 0.167 |
| 24 | 7 | 146503811 | 13233234 | 6573 | GGTCTATACAWCGGAAAAAAG | 0.553 | 0.506 | 0.291 | 0.070 | 0.236 |
| 24 | 7 | 146510232 | 11972997 | 6574 | TCTGATAATTMCTCTTGCAAT | 0.428 | 0.426 | 0.231 | 0.182 | 0.128 |
| 24 | 7 | 146516306 | 1404709 | 6575 | AAAAAGACTAYGTAAAAAATA | 0.577 | 0.589 | 0.233 | 0.200 | 0.116 |
| 24 | 7 | 146524144 | 700304 | 6576 | CCTTGTTGTCYACCGTTTGCT | 0.015 | 0.014 | 0.386 | 0.303 | 0.142 |
| 24 | 7 | 146533742 | 6963863 | 6577 | ATAAGCCTCCRTTGAAAAGAT | 0.190 | 0.183 | 0.252 | 0.296 | 0.179 |
| 24 | 7 | 146542337 | 4726857 | 6578 | CTGGTACTAAWCTACACAATG | 0.950 | 0.951 | 0.273 | 0.245 | 0.196 |
| 24 | 7 | 146555102 | 10251377 | 6579 | AATTGGTGACRTTAAAGTTAA | 0.030 | 0.029 | 0.320 | 0.265 | 0.185 |
| 24 | 7 | 146562196 | 11773683 | 6580 | ACAGAGGCAAMGGTGACTGAG | 0.676 | 0.678 | 0.344 | 0.249 | 0.258 |
| 24 | 7 | 146567619 | 17170498 | 6581 | TGCTTTCCTTYACTGGCACTT | 0.178 | 0.188 | 0.210 | 0.267 | 0.247 |
| 24 | 7 | 146581895 | 826641 | 6582 | GCTTATTTCAWCCATGATGGA | 0.304 | 0.298 | 0.402 | 0.242 | 0.185 |
| 24 | 7 | 146593236 | 7779225 | 6583 | AAAATGAAGARCTATCACTTA | 0.568 | 0.566 | 0.218 | 0.196 | 0.113 |
| 24 | 7 | 146600422 | 16883479 | 6584 | TGGCTTGATGKGGTCAATTCC | 0.589 | 0.551 | 0.181 | 0.297 | 0.235 |
| 24 | 7 | 146610304 | 4726870 | 6585 | AAGAAAATGGYCCTTTGTCTA | 0.172 | 0.163 | 0.343 | 0.165 | 0.532 |
| 24 | 7 | 146620791 | 2286127 | 6586 | TGTGAGTGCCRATTTATCTCA | 0.056 | 0.057 | 0.296 | 0.136 | 0.423 |
| 24 | 7 | 146627388 | 2141388 | 6587 | AACTTACTTCYCCATCAGTTG | 0.785 | 0.789 | 0.144 | 0.282 | 0.618 |
| 24 | 7 | 146633513 | 1919190 | 6588 | ATTTCAGTTCMCATTCAAAGT | 0.455 | 0.430 | 0.128 | 0.585 | 0.541 |
| 24 | 7 | 146640013 | 6970064 | 6589 | ATCAATATTTRCCCAGTGCAA | 0.035 | 0.035 | 0.406 | 0.555 | 0.578 |
| 24 | 7 | 146646656 | 10282028 | 6590 | CAGGTGCCAAYGTAAACCTAG | 0.089 | 0.083 | 0.756 | 0.767 | 0.925 |
| 24 | 7 | 146655654 | 2888493 | 6591 | GACTCTTCACRGATTTCTGGA | 0.991 | 0.923 | 0.789 | 0.847 | 0.833 |
| 24 | 7 | 146663529 | 1024528 | 6592 | TATGTAAATCYGTTATAATAC | 1.685 | 1.671 | 1.148 | 0.725 | 0.723 |
| 24 | 7 | 146672375 | 12703926 | 6593 | CAATATAAGCRTGACTTAATT | 0.449 | 0.470 | 1.287 | 1.149 | 0.779 |
| 24 | 7 | 146678432 | 4118165 | 6594 | ATGTAATAAGSCAGTAATTGA | 0.826 | 0.832 | 1.013 | 1.163 | 0.838 |
| 24 | 7 | 146684627 | 3915304 | 6595 | CATTATATTTSAATTATTTGG | 0.378 | 0.368 | 0.997 | 1.191 | 0.722 |
| 24 | 7 | 146690849 | 6464821 | 6596 | GGTGTTTCGTRTTCTACTGGT | 0.403 | 0.417 | 0.882 | 1.049 | 0.744 |
| 24 | 7 | 146697376 | 2074712 | 6597 | CTTTTAGATCRTGACAGACCT | 1.701 | 1.626 | 0.664 | 0.664 | 0.925 |
| 24 | 7 | 146711455 | 2189998 | 6598 | TCTTCCACCARTGAAAAGTCA | 0.200 | 0.193 | 0.723 | 0.614 | 1.080 |
| 24 | 7 | 146719444 | 2158640 | 6599 | CCACTATTACYGATGTGAAAA | 0.270 | 0.270 | 0.694 | 0.549 | 1.385 |
| 24 | 7 | 146733806 | 7794693 | 6600 | CTAAAATAAAMTGTCCCAATA | 0.510 | 0.496 | 0.263 | 0.699 | 1.063 |
| 24 | 7 | 146741320 | 7807559 | 6601 | TATTTATTGASCACTAGAGTA | 0.394 | 0.395 | 0.301 | 0.749 | 1.098 |
| 24 | 7 | 146748760 | 988039 | 6602 | ATAAATATCTRACAACAGGTT | 0.287 | 0.292 | 0.546 | 0.874 | 1.208 |
| 24 | 7 | 146751457 | 727716 | 6603 | ATAAGTAAGTRAAATAAACGT | 0.000 | 0.000 | 0.585 | 0.971 | 1.277 |
| 24 | 7 | 146773166 | 17170626 | 6604 | AGGTTCTTAGWGATGCTTCTA | 0.903 | 0.919 | 1.572 | 1.161 | 1.238 |
| 24 | 7 | 146788719 | 10244236 | 6605 | GTATACCAAARGAAGCTTAAT | 0.568 | 0.573 | 1.488 | 1.339 | 0.954 |
| 24 | 7 | 146799052 | 17327617 | 6606 | ATCTCTGGCTRACAGGAAGAG | 2.136 | 2.122 | 1.432 | 1.469 | 0.959 |
| 24 | 7 | 146806955 | 17170638 | 6607 | AGCCATGTTCYTAATACCCAA | 0.305 | 0.311 | 1.410 | 1.384 | 1.055 |
| 24 | 7 | 146815406 | 12672959 | 6608 | CACTAAATATYAGCCATGGAC | 0.525 | 0.534 | 1.573 | 1.352 | 0.882 |
| 24 | 7 | 146819430 | 851735 | 6609 | TCATGCTCTASTCTAAGCTTC | 1.194 | 1.265 | 0.663 | 1.071 | 0.772 |
| 24 | 7 | 146837806 | 17170645 | 6610 | CACTTGAGGCRCATAGCAAGC | 0.532 | 0.518 | 0.800 | 1.041 | 0.811 |
| 24 | 7 | 146844658 | 700317 | 6611 | TGTCCAACTARTTACTAAATT | 0.235 | 0.246 | 0.569 | 0.359 | 0.994 |
| 24 | 7 | 146852926 | 4295581 | 6612 | GGAAGCACAGWTGTATTAGCC | 0.623 | 0.643 | 0.257 | 0.289 | 0.944 |
| 24 | 7 | 146866361 | 4308646 | 6613 | GTCTATTCTGMAGCCTGTGAA | 0.023 | 0.023 | 0.103 | 0.251 | 0.843 |
| 24 | 7 | 146880864 | 17417231 | 6614 | TTTACCTTTAYGTGCTTCCTT | 0.474 | 0.456 | 0.060 | 0.253 | 0.521 |
| 24 | 7 | 146888752 | 10952713 | 6615 | CCCTGCAGCCSTAAGTACCAC | 0.010 | 0.010 | 0.030 | 0.306 | 0.617 |
| 24 | 7 | 146899558 | 17823834 | 6616 | ATCATATCTCYGCTTGGTGCT | 0.017 | 0.017 | 0.347 | 0.266 | 0.721 |
| 24 | 7 | 146926019 | 851697 | 6617 | AATCTATCAGYTCACTTTTCA | 0.398 | 0.396 | 0.454 | 0.329 | 0.514 |
| 24 | 7 | 146935988 | 17226520 | 6618 | TTACTTCTTAKAAACGTGTAT | 1.218 | 1.204 | 0.502 | 0.530 | 0.676 |
| 24 | 7 | 146953728 | 17824995 | 6619 | TTCTAGAGACRTTGAATCCAG | 0.739 | 0.746 | 0.856 | 0.677 | 0.638 |
| 24 | 7 | 146963031 | 17825363 | 6620 | AAAATTGGATYGAAGTCCAGA | 0.097 | 0.101 | 1.017 | 0.820 | 0.890 |
| 24 | 7 | 146971654 | 17170691 | 6621 | ATGTCTTAATYTTTCTCCTCT | 0.914 | 0.828 | 0.887 | 1.244 | 1.079 |
| 24 | 7 | 146975755 | 851705 | 6622 | TTCAAATTCARTTAGGCCTTC | 0.694 | 0.710 | 0.762 | 1.152 | 1.008 |
| 24 | 7 | 146987578 | 10488352 | 6623 | CTGGTTGAAASCTAGACATTT | 0.901 | 0.905 | 1.383 | 1.313 | 1.138 |
| 24 | 7 | 146996863 | 6979528 | 6624 | GCAAACCACTKCAAGGAAGCT | 0.503 | 0.466 | 0.870 | 1.509 | 1.209 |
| 24 | 7 | 147007736 | 10085572 | 6625 | AAATATGAACWTTCAATAAAG | 1.097 | 1.125 | 1.448 | 1.411 | 1.595 |
| 24 | 7 | 147017267 | 2538991 | 6626 | TGTCAACATTMCCCTTGCAGA | 0.065 | 0.069 | 1.360 | 1.212 | 1.305 |
| 24 | 7 | 147023830 | 10488350 | 6627 | GAGACACTGTYAAGTTAAATA | 1.569 | 2.132 | 1.149 | 1.078 | 1.442 |
| 24 | 7 | 147029612 | 17170738 | 6628 | AAGCATTCGCYCTTGTGCTTC | 0.787 | 0.782 | 0.796 | 1.393 | 1.587 |
| 24 | 7 | 147035669 | 2710114 | 6629 | GACTTCTACARTCAATTTGTA | 0.090 | 0.097 | 0.977 | 1.310 | 1.722 |
| 24 | 7 | 147047727 | 17237331 | 6630 | TCTTCAGGGAYGCCTCCTGTA | 0.544 | 0.533 | 0.994 | 1.095 | 1.725 |
| 24 | 7 | 147055375 | 7805223 | 6631 | TCAGCTCATGYCTGAGTCCCT | 0.364 | 0.354 | 0.612 | 1.321 | 1.691 |
| 24 | 7 | 147062628 | 17170749 | 6632 | TACCTACCGAYTATCAATTAA | 1.685 | 1.713 | 0.947 | 1.063 | 1.611 |
| 24 | 7 | 147069783 | 2710093 | 6633 | ACGTCCTTTGSTCATACAGTT | 0.055 | 0.054 | 0.898 | 1.080 | 1.705 |
| 24 | 7 | 147075195 | 10808047 | 6634 | CGATCAATACRATCTTCAAAC | 0.796 | 0.765 | 1.276 | 1.398 | 1.837 |
| 24 | 7 | 147084835 | 1882687 | 6635 | GATAGCCCTGMAGAATCCTGG | 0.302 | 0.458 | 0.820 | 1.192 | 1.210 |
| 24 | 7 | 147093493 | 2708248 | 6636 | AGGAGTCAGAYGTATATTCTA | 1.022 | 1.044 | 1.289 | 1.726 | 1.262 |
| 24 | 7 | 147100208 | 7805706 | 6637 | ATCAGCTATTSAACTTTTTCT | 0.856 | 0.885 | 0.867 | 0.988 | 1.197 |
| 24 | 7 | 147106888 | 7797584 | 6638 | ATTTGTACTTMTATCTATGAG | 0.596 | 0.856 | 1.481 | 1.113 | 1.331 |
| 24 | 7 | 147113950 | 17170767 | 6639 | AAAATGCTACSTGTAAAATTG | 0.031 | 0.031 | 0.948 | 1.212 | 1.204 |
| 24 | 7 | 147127273 | 6958434 | 6640 | GGAATAGATGYCTAGTCCCAA | 1.445 | 1.543 | 0.596 | 0.985 | 0.778 |
| 24 | 7 | 147133198 | 17170777 | 6641 | ATAGCAGGCTRCAGATACAGA | 0.124 | 0.112 | 0.758 | 0.962 | 0.858 |
| 24 | 7 | 147140340 | 2214681 | 6642 | GAGTGGCACCRAGAGGAATGT | 0.285 | 0.296 | 0.756 | 0.675 | 0.659 |
| 24 | 7 | 147153042 | 17170785 | 6643 | ATAGTAATGGWCAAGCTCCCA | 1.104 | 1.047 | 0.569 | 0.516 | 0.622 |
| 24 | 7 | 147160642 | 993715 | 6644 | ATTAAGATGCMTATGTGGCTA | 0.085 | 0.085 | 0.526 | 0.588 | 0.463 |
| 24 | 7 | 147166630 | 4726916 | 6645 | TCACAATAAAYTCTCATTCCC | 1.023 | 0.996 | 0.503 | 0.218 | 0.616 |
| 24 | 7 | 147172614 | 2527059 | 6646 | GGTGGGACAGYGATCCATGTT | 0.035 | 0.036 | 0.238 | 0.259 | 0.526 |
| 24 | 7 | 147178895 | 2707558 | 6647 | TCCGAGTTCAWATCTAACTTG | 0.234 | 0.240 | 0.214 | 0.267 | 0.549 |
| 24 | 7 | 147186296 | 17170811 | 6648 | ACTGATTAGARTGTCAGAATA | 0.326 | 0.324 | 0.048 | 0.398 | 0.327 |
| 24 | 7 | 147192464 | 10485845 | 6649 | TTGATAACCAYTGTATTTCTG | 0.031 | 0.029 | 0.113 | 0.464 | 0.377 |
| 24 | 7 | 147197109 | 10485844 | 6650 | ACTTGAATTCRCAAAATACTC | 0.330 | 0.332 | 0.547 | 0.277 | 0.527 |
| 24 | 7 | 147208831 | 4726920 | 6651 | GAGAATTTCCRTACTACCTCC | 0.391 | 0.377 | 0.572 | 0.318 | 0.418 |
| 24 | 7 | 147218722 | 10485843 | 6652 | CACTCCGTAGRTGACCATAGA | 1.608 | 1.518 | 0.621 | 0.372 | 0.495 |
| 24 | 7 | 147230644 | 17170828 | 6653 | CTCTTTAAGCRTGTCAACTAG | 0.361 | 0.352 | 0.592 | 0.573 | 0.491 |
| 24 | 7 | 147237402 | 11974602 | 6654 | CTGCTCAATAMATGTAGAAGG | 0.159 | 0.163 | 0.638 | 0.694 | 0.490 |
| 24 | 7 | 147243946 | 6962625 | 6655 | ACTCTGCTAARTGTATTTCAT | 0.255 | 0.253 | 0.430 | 0.754 | 0.515 |
| 24 | 7 | 147254702 | 17170844 | 6656 | CTGGATAAGARTAATTGAAAG | 0.000 | 0.000 | 0.497 | 0.959 | 0.567 |
| 24 | 7 | 147259047 | 10228263 | 6657 | ATGGCAAAGARATATTGTTCA | 1.126 | 1.082 | 0.673 | 0.487 | 0.579 |
| 24 | 7 | 147271533 | 1557964 | 6658 | TCACTAAATCRTAACAAAAGT | 0.502 | 0.505 | 1.029 | 0.484 | 0.570 |
| 24 | 7 | 147284643 | 17170855 | 6659 | GCAGAAACAGWAATTTCAGAA | 0.501 | 0.533 | 0.803 | 0.614 | 0.590 |
| 24 | 7 | 147295938 | — | 6660 | TTTTGCTGCCKCTTCATGTCG | 0.965 | 0.946 | 0.447 | 0.556 | 0.345 |
| 24 | 7 | 147302259 | 2972108 | 6661 | GTCAGACATCRGTGCAAAGAA | 0.020 | 0.021 | 0.453 | 0.489 | 0.333 |
| 24 | 7 | 147309435 | 12534650 | 6662 | ACACGCCAAAWTATTAACTGT | 0.351 | 0.344 | 0.285 | 0.289 | 0.454 |
| 24 | 7 | 147316802 | 10260743 | 6663 | TGGCCAAGTGYGTGCCCTTTT | 0.561 | 0.541 | 0.094 | 0.297 | 1.036 |
| 24 | 7 | 147322254 | 2906313 | 6664 | CTACGTAAAAYGAGCTTCTGA | 0.134 | 0.123 | 0.194 | 0.239 | 0.965 |
| 24 | 7 | 147323182 | 13230925 | 6665 | GAGGAGATAGYTAAGATGACT | 0.255 | 0.265 | 0.256 | 0.173 | 0.770 |
| 24 | 7 | 147348080 | 4345484 | 6666 | GTTCTGGCTTYGGGATGGAGT | 0.439 | 0.426 | 0.177 | 0.842 | 0.647 |
| 24 | 7 | 147356671 | 2373346 | 6667 | TAGTGTTTACRTCATGGTGTC | 0.520 | 0.533 | 0.385 | 0.837 | 0.563 |
| 24 | 7 | 147363885 | 1529154 | 6668 | GCTGTCAGCCRATATGGGTCA | 0.266 | 0.282 | 1.223 | 0.830 | 0.391 |
| 24 | 7 | 147374780 | 4726933 | 6669 | ATCGTTTCTGRAGCCTGATTT | 0.687 | 0.665 | 1.183 | 0.789 | 0.533 |
| 24 | 7 | 147380226 | 6945371 | 6670 | ATATTCTGCGYGCTGCTCTTC | 2.201 | 2.132 | 1.250 | 0.795 | 0.481 |
| 24 | 7 | 147388963 | 4590355 | 6671 | CATCAACGGCWCTTACCGCAC | 0.314 | 0.328 | 1.080 | 0.707 | 0.365 |
| 24 | 7 | 147399321 | 17170932 | 6672 | CATTTATTATYAGCAGGCAAC | 0.000 | 0.000 | 0.939 | 0.736 | 1.916 |
| 24 | 7 | 147411605 | 17170936 | 6673 | AATGCACAAARCAGCTCACAT | 0.061 | 0.062 | 0.100 | 0.661 | 2.239 |
| 24 | 7 | 147414418 | 7809486 | 6674 | GTCTTGGCTTRACTAGGACAT | 0.245 | 0.239 | 0.186 | 0.479 | 2.560 |
| 24 | 7 | 147425911 | 7779924 | 6675 | TTCAGAGGCCRTACTGACTTC | 0.256 | 0.256 | 0.113 | 1.651 | 2.537 |
| 24 | 7 | 147437045 | 4726947 | 6676 | TTTAGATGTASATTAAGACCC | 0.639 | 0.649 | 0.110 | 2.252 | 2.672 |
| 24 | 7 | 147464095 | — | 6677 | AGAAGTCCCCRGTGGCTCAGG | 0.116 | 0.115 | 2.735 | 2.362 | 2.946 |
| 24 | 7 | 147473270 | 10281587 | 6678 | CTATCTCTTAYATTGCCCAGT | 0.058 | 0.060 | 3.029 | 2.300 | 1.865 |
| 24 | 7 | 147478836 | 11767934 | 6679 | TTGTCAGATGSTCTTCACACA | 4.904 | 4.364 | 3.526 | 2.788 | 1.909 |
| 24 | 7 | 147485200 | 2037869 | 6680 | TGAGGTCATGYGTAGTAAACA | 1.174 | 1.116 | 3.177 | 2.800 | 1.537 |
| 24 | 7 | 147491445 | — | 6681 | TTTTAGAAGTRTGCTCATTTA | 0.542 | 0.499 | 3.124 | 2.516 | 1.863 |
| 24 | 7 | 147502534 | 1637864 | 6682 | ACATGTCACCRAGAGAAAATG | 0.181 | 0.179 | 1.065 | 2.551 | 1.878 |
| 24 | 7 | 147508766 | 1730398 | 6683 | TATGTGACATRGAGCGTCAGT | 1.382 | 1.369 | 0.585 | 2.251 | 1.993 |
| 24 | 7 | 147515023 | — | 6684 | TAACATACTTYACTTGTAATA | 0.000 | 0.000 | 0.500 | 0.656 | 1.749 |
| 24 | 7 | 147524985 | 4726968 | 6685 | TTTACCTAAAYTTGAGGAGAA | 0.123 | 0.116 | 0.447 | 0.308 | 1.775 |
| 24 | 7 | 147530631 | 10242598 | 6686 | TTCCCCTGCCRCGAATTTCTT | 0.376 | 0.366 | 0.173 | 0.284 | 1.773 |
| 24 | 7 | 147541635 | 10215248 | 6687 | TGCTTCAGTAYATAATCTAAA | 0.033 | 0.033 | 0.091 | 0.276 | 0.468 |
| 24 | 7 | 147555290 | 2530310 | 6688 | AGTTTATTTTYCAGATAAAAT | 0.713 | 0.645 | 0.135 | 0.105 | 0.248 |
| 24 | 7 | 147567741 | — | 6689 | CCAAGGTTTAYGTAAAATAAG | 0.076 | 0.075 | 0.066 | 0.086 | 0.305 |
| 24 | 7 | 147573332 | 2530304 | 6690 | TCTCTAAAAGMAATATAAAAT | 0.000 | 0.000 | 0.263 | 0.184 | 0.298 |
| 24 | 7 | 147581090 | 7780899 | 6691 | GTGCTGCCACYGTCCTTTTGG | 0.125 | 0.128 | 0.120 | 0.139 | 0.442 |
| 24 | 7 | 147594288 | 17616888 | 6692 | TTGACTGAAGRTAGGTTTCAT | 0.617 | 0.580 | 0.340 | 0.328 | 1.033 |
| 24 | 7 | 147600941 | 17171023 | 6693 | TCTGAACCCCRATTCCATGGT | 0.215 | 0.224 | 0.259 | 0.188 | 1.752 |
| 24 | 7 | 147621152 | 6464905 | 6694 | CTTCAATAAAYGGGCAGGTAA | 0.676 | 0.688 | 0.500 | 0.761 | 2.238 |
| 24 | 7 | 147626181 | 6464907 | 6695 | AAGGACTGCTYGACTATTTTA | 0.206 | 0.207 | 0.305 | 1.533 | 2.855 |
| 24 | 7 | 147635310 | 17617268 | 6696 | TGCTGAAAAAKATTCCTTATA | 0.787 | 0.787 | 1.024 | 2.399 | 2.784 |
| 24 | 7 | 147649806 | 2538476 | 6697 | ATTGAAGGCCYCTGGAAAGAG | 0.141 | 0.137 | 1.913 | 2.584 | 3.026 |
| 24 | 7 | 147659874 | 2717817 | 6698 | TTCCATGAACYCTGCTCCAGT | 2.018 | 2.013 | 2.703 | 3.079 | 3.085 |
| 24 | 7 | 147665514 | 11766141 | 6699 | GAAGAACTTTSCAGAAGTAGT | 2.854 | 3.488 | 3.021 | 3.159 | 3.139 |
| 24 | 7 | 147665583 | 11769697 | 6700 | AGTAGAACATRAGGTCATAAT | 2.185 | 2.172 | 3.604 | 3.322 | 2.901 |
| 24 | 7 | 147676361 | 7790220 | 6701 | AAACTTATTTYAGTTATTGAT | 2.142 | 2.515 | 3.604 | 3.474 | 2.816 |
| 24 | 7 | 147695809 | 12704036 | 6702 | TTGATACAGAYTAGAGCCACA | 2.096 | 2.044 | 3.364 | 3.623 | 2.835 |
| 24 | 7 | 147709488 | 11767479 | 6703 | TTTTAAATCTKGCTATTTTAT | 0.479 | 0.453 | 2.979 | 3.386 | 2.872 |
| 24 | 7 | 147725167 | 6960877 | 6704 | ATTGTAGAGGYTTTAGATCAT | 1.368 | 1.857 | 1.426 | 2.185 | 2.652 |
| 24 | 7 | 147747106 | 6959357 | 6705 | TCAAAATGTTRGAACTATACA | 0.491 | 0.484 | 0.574 | 1.606 | 2.778 |
| 24 | 7 | 147758038 | 1015665 | 6706 | GGTTTCAGGAMAATATCAGAA | 0.133 | 0.130 | 0.523 | 1.025 | 2.143 |
| 24 | 7 | 147764071 | 12539045 | 6707 | ACAGGTGCACRGCCCTGAGTC | 0.252 | 0.247 | 0.190 | 0.433 | 1.439 |
| 24 | 7 | 147770295 | 10952770 | 6708 | AAATGAGAATYGCATAGTGCT | 0.274 | 0.272 | 0.253 | 0.339 | 1.115 |
| 24 | 7 | 147777033 | 17171069 | 6709 | TTTATTCTCCYAATATACTTA | 0.000 | 0.000 | 0.193 | 0.109 | 1.088 |
| 24 | 7 | 147790681 | 6963551 | 6710 | GGATAGCCACRGTCTAAGCAT | 0.657 | 0.652 | 0.163 | 0.113 | 0.777 |
| 24 | 7 | 147803868 | 10278049 | 6711 | GAAACAAGTGRGAGTCAGAGT | 0.052 | 0.052 | 0.135 | 0.209 | 0.807 |
| 25 | 7 | 149454345 | 11983355 | 6712 | GGTGCCTTTGMCTTTGGGAAG | 0.649 | 0.622 | 0.167 | 0.479 | 1.283 |
| 25 | 7 | 149463563 | 11764936 | 6713 | AAAATTTAGCKTTCCCAAGTC | 0.488 | 0.476 | 0.452 | 0.353 | 1.268 |
| 25 | 7 | 149471530 | 3735171 | 6714 | GGCGAGCACCRGCTGACCCCC | 0.187 | 0.197 | 0.541 | 0.390 | 0.955 |
| 25 | 7 | 149477203 | 3735167 | 6715 | GTTCCCACACYGCAGGGATCA | 0.949 | 0.925 | 0.552 | 1.199 | 1.331 |
| 25 | 7 | 149483883 | 28432021 | 6716 | GCTGTATTTTSAGAAGTACAA | 0.315 | 0.309 | 0.568 | 1.387 | 1.191 |
| 25 | 7 | 149497250 | 17173682 | 6717 | TGAATAATTTYCACATGACTT | 0.604 | 0.604 | 2.173 | 1.247 | 1.272 |
| 25 | 7 | 149518638 | 2272187 | 6718 | GGGGAGGACCYTGCCTCTTTC | 0.532 | 0.536 | 1.993 | 1.817 | 1.237 |
| 25 | 7 | 149530332 | 4725889 | 6719 | ACTTCTAACTYGTGGGTTCAT | 3.092 | 2.972 | 2.101 | 2.510 | 2.111 |
| 25 | 7 | 149545607 | 1048424 | 6720 | ACATTGAGCCYCGAGTCAAGG | 0.118 | 0.084 | 2.397 | 2.212 | 2.173 |
| 25 | 7 | 149556724 | 2888635 | 6721 | TGCATCGATCKGGTGAGACAC | 0.000 | 0.000 | 2.430 | 1.920 | 4.312 |
| 25 | 7 | 149571403 | 1524335 | 6722 | TGATATACCAYGCAACATTAT | 1.392 | 1.317 | 0.750 | 2.335 | 4.364 |
| 25 | 7 | 149591461 | 7810209 | 6723 | TTATAGTGGGYGATGTGTAAA | 0.600 | 0.592 | 0.638 | 2.414 | 4.312 |
| 25 | 7 | 149602928 | 2373748 | 6724 | TTCTTGCCTAWCCTATTTTAA | 0.776 | 0.793 | 1.585 | 3.503 | 4.187 |
| 25 | 7 | 149624893 | 2222524 | 6725 | ACAATGGGTGRCTTTATTTAT | 0.018 | 0.018 | 1.338 | 3.422 | 4.120 |
| 25 | 7 | 149649666 | 7810752 | 6726 | TGAAAATTCARCTTGTTCAAG | 2.307 | 2.313 | 4.665 | 3.585 | 4.153 |
| 25 | 7 | 149660076 | 7803234 | 6727 | TTTTGTTTTTRTTATTTGTTA | 0.689 | 0.681 | 4.488 | 3.447 | 3.623 |
| 25 | 7 | 149706735 | 13242186 | 6728 | ATCTCTGAGTSCAGCAGTAAC | 4.565 | 4.789 | 4.665 | 4.966 | 3.133 |
| 25 | 7 | 149727819 | 4358715 | 6729 | TCTGCCTCGTWTGGTTTCTGC | 0.101 | 0.100 | 3.206 | 3.748 | 2.656 |
| 25 | 7 | 149738096 | 4367453 | 6730 | TTAAAAAGGTYATTCCTACCC | 0.000 | 0.000 | 4.036 | 5.267 | 2.852 |
| 25 | 7 | 149749542 | — | 6731 | TCTGTTTTTCYCCAGCAGAAG | 0.252 | 0.261 | 0.254 | 2.218 | 3.143 |
| 25 | 7 | 149756449 | 10253121 | 6732 | ATGTGACAGTYTCTAGTTCCC | 0.987 | 1.030 | 0.559 | 1.721 | 2.630 |
| 25 | 7 | 149763839 | 10272462 | 6733 | AGGAATTTGARTGAATGGGCA | 0.107 | 0.102 | 0.450 | 0.601 | 2.812 |
| 25 | 7 | 149768593 | 6946579 | 6734 | TTGCCTAAGTRTTTAGAAAGT | 0.817 | 0.783 | 0.387 | 0.984 | 2.135 |
| 25 | 7 | 149784648 | 10227548 | 6735 | AAGAATCAAASCCCAGTGAAT | 0.261 | 0.250 | 0.663 | 0.998 | 2.209 |
| 25 | 7 | 149795507 | 2373845 | 6736 | TATAGGAAATRTTGGCAATTT | 0.089 | 0.089 | 1.183 | 0.903 | 0.894 |
| 25 | 7 | 149801383 | 16884586 | 6737 | CTCAGCAACAYGGGAAGACAT | 1.708 | 1.646 | 1.097 | 0.774 | 0.955 |
| 25 | 7 | 149825654 | 17173566 | 6738 | TTGTACAGTCYAAGTTCCTTC | 1.215 | 1.154 | 1.025 | 1.114 | 0.957 |
| 25 | 7 | 149852220 | 6464094 | 6739 | GTTAGGAATAYAGGATTCTAT | 0.690 | 0.657 | 1.476 | 1.098 | 1.065 |
| 25 | 7 | 149868951 | 17173583 | 6740 | TTTACCTGCTYTTTGATTTTC | 0.048 | 0.040 | 0.941 | 1.147 | 0.765 |
| 25 | 7 | 149878297 | 6598 | 6741 | TTAGCCAATARATTTCCTACT | 0.686 | 0.671 | 0.690 | 1.386 | 0.771 |
| 25 | 7 | 149894246 | 4725360 | 6742 | AAGAAAAATTRAAAGAACCAA | 0.911 | 0.840 | 0.533 | 0.855 | 0.624 |
| 25 | 7 | 149905239 | 17255187 | 6743 | ACATAGTACAKAATGAATCCT | 0.741 | 0.713 | 0.747 | 0.453 | 0.618 |
| 25 | 7 | 149914536 | 7806458 | 6744 | GTATTAAGACRTAAATGGGAT | 0.299 | 0.303 | 0.673 | 0.285 | 0.681 |
| 25 | 7 | 149921160 | 12669824 | 6745 | AGGAATTAATRCTATCTTCAG | 0.500 | 0.461 | 0.312 | 0.351 | 0.406 |
| 25 | 7 | 149928024 | 2072443 | 6746 | GCAAAGCCTGYCAGGGTGAGC | 0.000 | 0.000 | 0.077 | 0.241 | 0.346 |
| 25 | 7 | 149940256 | 7785283 | 6747 | TCCTAAAACTSCTTGATAAAA | 0.081 | 0.083 | 0.075 | 0.112 | 0.234 |
| 25 | 7 | 149948563 | 2888674 | 6748 | TATGGCCCCARTTGGCAAAGC | 0.050 | 0.048 | 0.034 | 0.101 | 0.228 |
| 25 | 7 | 149955253 | 9640170 | 6749 | ATTTATCTGASTGAAGAATGG | 0.240 | 0.237 | 0.033 | 0.220 | 0.213 |
| 26 | 7 | 150075668 | 2968855 | 6750 | TCAGAGGCATYCCAGAGCATG | 0.183 | 0.179 | 0.023 | 0.049 | 0.224 |
| 26 | 7 | 150104858 | 3807375 | 6751 | AAAAGGAGCAYTCTAAACGCA | 0.155 | 0.158 | 0.035 | 0.004 | 0.303 |
| 26 | 7 | 150107515 | 3778873 | 6752 | ACCTGCAAGTSGAATGGGTTG | 0.105 | 0.111 | 0.051 | 0.121 | 0.238 |
| 26 | 7 | 150118625 | 2373962 | 6753 | AATGCCCTGASAGTTTGCAGA | 0.389 | 0.384 | 0.042 | 0.250 | 0.165 |
| 26 | 7 | 150140429 | 3918188 | 6754 | CGTACAAGGGMGTTTGAGAGA | 0.184 | 0.180 | 0.357 | 0.355 | 0.118 |
| 26 | 7 | 150150382 | 3918216 | 6755 | TATGGGGCCTSTAACAATGAC | 0.123 | 0.122 | 0.663 | 0.348 | 0.601 |
| 26 | 7 | 150166860 | 6947821 | 6756 | TGGAGATACCYGCACTTGCTT | 1.320 | 1.304 | 0.696 | 0.336 | 0.598 |
| 26 | 7 | 150181468 | 4148854 | 6757 | GGGGTGTGATRCAGTGCATTG | 0.902 | 0.891 | 0.682 | 0.463 | 0.813 |
| 26 | 7 | 150195045 | 6464120 | 6758 | TCCAGGCGGGRAGTTCTGTGC | 0.472 | 0.449 | 0.672 | 1.112 | 1.020 |
| 26 | 7 | 150206434 | 2303937 | 6759 | GAGAGAAGACRCAGGACCTGA | 0.134 | 0.134 | 0.383 | 1.147 | 1.172 |
| 26 | 7 | 150212992 | 2303943 | 6760 | ACGAGCTGCAMGTGACTAATC | 0.086 | 0.085 | 1.141 | 1.430 | 2.368 |
| 26 | 7 | 150234900 | 4236428 | 6761 | TGGGGTGTCCYGAGCCCAACT | 0.628 | 0.631 | 1.041 | 1.474 | 2.778 |
| 26 | 7 | 150246812 | 6951528 | 6762 | CCTGGGCTGAMCCAATGAGCA | 2.586 | 2.450 | 1.491 | 1.460 | 3.026 |
| 26 | 7 | 150260307 | 6464131 | 6763 | GGTGCCCGCTSCTTCCCGTTC | 0.301 | 0.294 | 1.945 | 3.317 | 3.434 |
| 26 | 7 | 150269456 | 6979622 | 6764 | TGTGCCCTAAYGCAGCCCTCG | 1.000 | 0.949 | 2.042 | 3.526 | 3.250 |
| 26 | 7 | 150286812 | 6464132 | 6765 | GCTTCGTGAARGTAGGTATTC | 0.982 | 0.926 | 2.721 | 3.467 | 3.031 |
| 26 | 7 | 150295919 | 4725395 | 6766 | CTTCTTTCCARTTAAAATATT | 0.752 | 0.759 | 2.681 | 4.036 | 2.701 |
| 26 | 7 | 150312660 | 4726005 | 6767 | ACACAGAAGTYATCACTCACA | 4.390 | 3.835 | 2.450 | 2.486 | 3.217 |
| 26 | 7 | 150320869 | 2257069 | 6768 | GCAATTTCCCRATGCGGGCCA | 1.294 | 1.226 | 3.665 | 2.584 | 3.364 |
| 26 | 7 | 150348102 | 2608288 | 6769 | AGTAAAGGGASAAAGTTCTTC | 0.174 | 0.160 | 3.375 | 2.221 | 4.225 |
| 26 | 7 | 150355235 | 7784344 | 6770 | GGCTATATTAWAAACTAATAC | 0.953 | 0.947 | 0.584 | 3.153 | 2.533 |
| 26 | 7 | 150362605 | 3807386 | 6771 | CCCGCTGCCGMATTGTTAGGT | 0.097 | 0.087 | 0.154 | 3.375 | 3.245 |
| 26 | 7 | 150373700 | 1870238 | 6772 | AATGACCACASGGCTGCTGTC | 0.308 | 0.306 | 0.480 | 0.711 | 2.743 |
| 26 | 7 | 150402025 | 7799570 | 6773 | GACTATTACTRTATCCATTTT | 0.030 | 0.030 | 0.366 | 0.360 | 2.838 |
| 26 | 7 | 150429874 | 219254 | 6774 | TAAATCTGTGRCTGAAATCTT | 1.154 | 1.116 | 0.535 | 1.405 | 2.641 |
| 26 | 7 | 150432996 | 219271 | 6775 | CCATCATGGGYGTGGCCACAG | 0.643 | 0.715 | 0.507 | 0.943 | 0.835 |
| 26 | 7 | 150444177 | 6964641 | 6776 | TGGAAACCTCRAAGCTACATC | 0.436 | 0.421 | 1.958 | 1.009 | 0.510 |
| 26 | 7 | 150454523 | 17705372 | 6777 | TTTCAAATACRTCTCTGACCC | 0.243 | 0.237 | 1.272 | 0.924 | 0.606 |
| 26 | 7 | 150457561 | 760234 | 6778 | CCTCTGCTTTYTAAGGGACAT | 2.577 | 2.567 | 0.988 | 0.985 | 0.356 |
| 26 | 7 | 150478042 | 2063995 | 6779 | GTCCTGATTARCCTAATTCTT | 0.078 | 0.076 | 0.858 | 0.589 | 0.375 |
| 26 | 7 | 150484480 | 414168 | 6780 | GGACTGATCGRTGCCAGCACT | 0.270 | 0.272 | 0.806 | 0.497 | 0.337 |
| 26 | 7 | 150491281 | 11771465 | 6781 | TACTAGAGAAMCTTGTCCCCT | 0.051 | 0.052 | 0.013 | 0.372 | 0.791 |
| 26 | 7 | 150504189 | 13234689 | 6782 | AAAATTGTTTYTTCATGAGGT | 0.170 | 0.163 | 0.044 | 0.335 | 0.579 |
| 26 | 7 | 150532779 | 12703130 | 6783 | TATCTACACARAGCTATGGGT | 0.175 | 0.176 | 0.020 | 0.003 | 0.418 |
| 26 | 7 | 150540515 | 4726024 | 6784 | TTCACAGGGARTCTCCTATGC | 0.354 | 0.425 | 0.025 | 0.132 | 0.428 |
| 26 | 7 | 150561177 | 17712606 | 6785 | ACTGATAACCRGTCATTGCCA | 0.071 | 0.069 | 0.028 | 0.152 | 0.365 |
| 27 | 7 | 156602277 | 6976552 | 6786 | TTAAATTTCTYCGCAGCTTCA | 0.599 | 0.547 | 0.913 | 0.846 | 0.725 |
| 27 | 7 | 156641263 | 4716470 | 6787 | TGTTGCTCACSCTTATCTGGA | 0.452 | 0.452 | 0.548 | 0.582 | 0.565 |
| 27 | 7 | 156664996 | 4716472 | 6788 | TGAGGCTGAGRTGTGTCCCGT | 0.249 | 0.256 | 0.171 | 0.433 | 0.566 |
| 27 | 7 | 156681516 | 10255470 | 6789 | ATCTCTGTTAYTGATTGGCAG | 0.006 | 0.006 | 0.057 | 0.296 | 0.603 |
| 27 | 7 | 156693363 | 10440911 | 6790 | TCTTCAGTCGYGTACATGATT | 0.044 | 0.045 | 0.047 | 0.067 | 0.652 |
| 27 | 7 | 156700081 | 6952964 | 6791 | CCTGGTCGGGYGCCCTGGCAT | 0.106 | 0.109 | 0.045 | 0.033 | 0.514 |
| 27 | 7 | 156705616 | 17837758 | 6792 | TCAACAGCTCKAAGTTTGTCT | 0.490 | 0.451 | 0.041 | 0.051 | 0.363 |
| 27 | 7 | 156709697 | 2072421 | 6793 | TTACGATTACRAAGGATGAAA | 0.358 | 0.360 | 0.068 | 0.196 | 0.197 |
| 27 | 7 | 156728759 | 10242467 | 6794 | ACAATACAGCMTGGAATTTGA | 0.040 | 0.040 | 0.227 | 0.300 | 0.242 |
| 27 | 7 | 156758455 | 10807645 | 6795 | TGTTTTATGCYATATCATTTC | 0.254 | 0.239 | 0.580 | 0.356 | 0.233 |
| 27 | 7 | 156760145 | 2366564 | 6796 | CTAATGAAGTRTGTAAACCTC | 0.749 | 0.724 | 0.647 | 0.473 | 0.865 |
| 27 | 7 | 156779766 | 221216 | 6797 | GATATCACGGYGGATGAGAGT | 1.367 | 1.354 | 0.784 | 0.605 | 1.493 |
| 27 | 7 | 156789143 | 758925 | 6798 | TCCAAATCCTYGGCCCGACAT | 0.000 | 0.000 | 1.017 | 0.662 | 1.553 |
| 27 | 7 | 156795541 | 17667159 | 6799 | GTTCCAGGGAMGTGCTGCTGA | 0.235 | 0.237 | 1.013 | 1.712 | 1.732 |
| 27 | 7 | 156808554 | 1468649 | 6800 | TGGGCGGGTGMAGCAGCCACC | 0.000 | 0.000 | 0.486 | 2.286 | 1.728 |
| 27 | 7 | 156814282 | 10260168 | 6801 | TCCCTGGCCTWTTGTAAATAA | 0.794 | 0.792 | 1.604 | 2.267 | 1.804 |
| 27 | 7 | 156821109 | 221232 | 6802 | CCACACAAGCYGCATGGCCAA | 0.358 | 0.555 | 2.484 | 2.041 | 1.873 |
| 27 | 7 | 156834693 | 221258 | 6803 | GTGCTAATCCYGCAGAGCTGC | 2.581 | 2.463 | 2.243 | 1.884 | 1.899 |
| 27 | 7 | 156838212 | 221271 | 6804 | TTCGCATGGTYCCATTTCCTT | 2.101 | 2.287 | 2.353 | 2.033 | 1.955 |
| 27 | 7 | 156862087 | 221295 | 6805 | AAAGATGTGAMTACCCAGCAG | 0.687 | 0.683 | 2.054 | 1.815 | 1.561 |
| 27 | 7 | 156866999 | 221300 | 6806 | TGTGAAGCTTYCTGAGAATGT | 0.900 | 0.910 | 1.387 | 1.791 | 1.465 |
| 27 | 7 | 156881375 | 2021743 | 6807 | GGTGGAATGAYGGGAGGCTCA | 0.306 | 0.300 | 0.708 | 1.762 | 1.743 |
| 27 | 7 | 156889073 | 17837784 | 6808 | CAAATTTTAAYCCTATGCAAT | 0.877 | 0.850 | 0.566 | 1.009 | 1.775 |
| 27 | 7 | 156895693 | 17837785 | 6809 | GGTCTCTTTCRTAAGAAACAG | 0.287 | 0.291 | 0.441 | 0.417 | 1.741 |
| 27 | 7 | 156912409 | — | 6810 | ATTGGAACCTRCTATACACAT | 0.319 | 0.295 | 0.328 | 0.541 | 1.746 |
| 27 | 7 | 156919171 | 1263563 | 6811 | TAACAGCAGTYGTATAAATTT | 0.638 | 0.636 | 0.097 | 0.415 | 1.086 |
| 27 | 7 | 156927403 | 17837786 | 6812 | GCCTGGTACAMCCTACATGAT | 0.020 | 0.021 | 0.371 | 0.454 | 0.654 |
| 27 | 7 | 156934044 | 17837788 | 6813 | AGCTACCTGAYGTCTGGCTCA | 0.174 | 0.125 | 0.466 | 0.426 | 0.589 |
| 27 | 7 | 156952480 | 1638027 | 6814 | TGTGATTTGCYACCCATGGGA | 1.120 | 1.131 | 0.359 | 0.462 | 0.817 |
| 27 | 7 | 156964490 | 17731604 | 6815 | ACGTTTGGGGMTCACTTAACA | 0.530 | 0.499 | 0.734 | 0.520 | 1.240 |
| 27 | 7 | 156969688 | 17837795 | 6816 | GTACACTGCTYTTGGAAACTG | 0.395 | 0.396 | 0.863 | 0.472 | 1.047 |
| 27 | 7 | 156992288 | 7811860 | 6817 | AAGAAAACCARAAATCTAGTC | 0.783 | 0.784 | 0.535 | 1.204 | 1.116 |
| 27 | 7 | 157005136 | 7802459 | 6818 | TAAACGCCTGYTGTTTGAAGG | 0.388 | 0.374 | 0.501 | 1.802 | 1.095 |
| 27 | 7 | 157013152 | 7792857 | 6819 | TGGGGAGGTARGTGTGGGGGC | 0.000 | 0.000 | 1.144 | 1.365 | 1.156 |
| 27 | 7 | 157043714 | 1796286 | 6820 | TCTCTGTCCTYGGCGTGGGAG | 0.471 | 0.466 | 1.951 | 1.345 | 1.212 |
| 27 | 7 | 157070372 | 6949185 | 6821 | CCAACGCTCCRCCTGCATGGC | 1.724 | 1.703 | 1.666 | 1.300 | 1.155 |
| 27 | 7 | 157082642 | 4716494 | 6822 | GAAGATCAGCRTTCAGACCAG | 1.474 | 1.632 | 1.666 | 1.363 | 0.963 |
| 27 | 7 | 157093892 | 7783909 | 6823 | CAGGAGAGGCRGCTGCTGAAT | 0.210 | 0.207 | 1.568 | 1.270 | 1.781 |
| 27 | 7 | 157104944 | 870020 | 6824 | CCCACCACAGRTGGGTAGCTG | 0.000 | 0.000 | 0.810 | 1.012 | 1.737 |
| 27 | 7 | 157134398 | 7777198 | 6825 | CCAGGCCTCCYCCACACATTC | 0.249 | 0.241 | 0.187 | 1.036 | 1.922 |
| 27 | 7 | 157145415 | 1560962 | 6826 | AGACCCAGAGRCTCACGCTCA | 0.691 | 0.659 | 0.144 | 1.578 | 1.771 |
| 27 | 7 | 157158172 | 7788108 | 6827 | GCTGCCGCGCMACCTCTGACA | 0.211 | 0.207 | 0.144 | 0.818 | 1.621 |
| 27 | 7 | 157182316 | 731305 | 6828 | ATACATTTCTYGGAGTTTGAT | 0.043 | 0.044 | 1.440 | 1.171 | 1.400 |
| 27 | 7 | 157198659 | 4716509 | 6829 | GTGAGGCCCAYGAGGGGCCCC | 0.000 | 0.000 | 1.135 | 1.002 | 1.520 |
| 27 | 7 | 157213555 | 6459817 | 6830 | CTCTGTTTGAYGCTATGATGA | 2.727 | 2.620 | 1.684 | 1.025 | 1.458 |
| 27 | 7 | 157226309 | 1991963 | 6831 | CCATCTTGCCRCTGGTGACGT | 0.175 | 0.179 | 1.693 | 0.864 | 1.627 |
| 27 | 7 | 157237334 | 6977123 | 6832 | CGGAGGCCCCRGTGCTGGGTG | 1.121 | 1.076 | 1.484 | 1.729 | 1.724 |
| 27 | 7 | 157250123 | 6955761 | 6833 | CTAAGAACCARTATCCCTTAT | 0.261 | 0.274 | 0.280 | 2.515 | 1.736 |
| 27 | 7 | 157265078 | 4716857 | 6834 | ACTCCACACCRTGAGAACAGG | 0.089 | 0.091 | 1.099 | 2.515 | 1.725 |
| 27 | 7 | 157277737 | 1036373 | 6835 | GATGAAAATGYAGTTATACCA | 0.257 | 0.258 | 1.330 | 1.434 | 1.944 |
| 27 | 7 | 157280884 | 1347391 | 6836 | AGGTCATGCAYGTCCACACTT | 2.016 | 2.029 | 1.599 | 1.364 | 2.384 |
| 27 | 7 | 157328316 | 6951695 | 6837 | AATTAGGGGCRTAACAATAAC | 1.300 | 1.317 | 1.823 | 1.105 | 2.384 |
| 27 | 7 | 157342999 | 3935208 | 6838 | CTCTTTATGCMAAGAGGCACT | 0.000 | 0.000 | 1.785 | 1.261 | 1.437 |
| 27 | 7 | 157353794 | 7455546 | 6839 | ACGGAGGAAGSCTGTGGCTCC | 0.855 | 0.857 | 0.945 | 1.641 | 1.557 |
| 27 | 7 | 157368860 | 1806465 | 6840 | CCTCTCACCTKCAGCCCCTGA | 0.142 | 0.134 | 0.586 | 1.798 | 1.402 |
| 27 | 7 | 157379611 | 7780849 | 6841 | AAGAGCAGGARGAGTTTCTGA | 0.564 | 0.570 | 0.935 | 1.192 | 1.304 |
| 27 | 7 | 157405658 | 2335844 | 6842 | AGGAGTAGGASAATGGTAACA | 0.636 | 0.616 | 0.797 | 0.839 | 1.436 |
| 27 | 7 | 157418058 | 4909094 | 6843 | GGCTGCACCCYGTCCTGGCAC | 1.172 | 1.253 | 0.936 | 0.889 | 1.738 |
| 27 | 7 | 157434414 | 4909107 | 6844 | ACTCCAGGCCRCTGCCCTAGT | 0.000 | 0.000 | 0.946 | 0.648 | 1.040 |
| 27 | 7 | 157469377 | 2335836 | 6845 | TTGCATTCCCSCTAATTTGAG | 0.355 | 0.373 | 1.004 | 0.819 | 0.694 |
| 27 | 7 | 157493079 | 6963290 | 6846 | AAATTATTTAYGTGATTTCAT | 0.000 | 0.000 | 0.396 | 0.998 | 0.610 |
| 27 | 7 | 157500728 | 6942903 | 6847 | CAACAAAAATRCATTTCAAAT | 0.727 | 0.712 | 0.396 | 0.764 | 0.555 |
| 27 | 7 | 157525134 | 6950346 | 6848 | CCACAGCTAAYACCATAATGA | 0.235 | 0.237 | 0.737 | 0.368 | 0.660 |
| 27 | 7 | 157536873 | 4909053 | 6849 | GTGTGTGTGGKTGTGAGTTGT | 0.000 | 0.000 | 0.485 | 0.301 | 0.555 |
| 27 | 7 | 157548897 | 2001763 | 6850 | TTTGCCCGAGYTTAAAATTAA | 0.992 | 0.969 | 0.281 | 0.397 | 0.518 |
| 27 | 7 | 157564283 | 4909164 | 6851 | GTGAAAATGAYCACAGGGTGC | 0.067 | 0.068 | 0.288 | 0.397 | 0.292 |
| 27 | 7 | 157577455 | 896769 | 6852 | CTGTGCTATGWAGGGACAGGA | 0.266 | 0.273 | 0.393 | 0.250 | 0.508 |
| 27 | 7 | 157590205 | 6950401 | 6853 | TAGTGTTTTCYTACGATTCTT | 0.204 | 0.210 | 0.199 | 0.313 | 0.429 |
| 27 | 7 | 157602000 | 7790889 | 6854 | CCCAAACGTAMGTGCTGGAAT | 0.670 | 0.673 | 0.264 | 0.286 | 0.454 |
| 27 | 7 | 157616338 | 4909064 | 6855 | GTCTCCGCATRGACAAGACGG | 0.000 | 0.000 | 0.296 | 0.388 | 0.374 |
| 27 | 7 | 157619962 | 7782393 | 6856 | TGTAAATCCCRGTGCCCTGGG | 0.244 | 0.238 | 0.359 | 0.398 | 0.600 |
| 27 | 7 | 157654735 | 6459868 | 6857 | TGTCCCCTCTRCAAGGGACAA | 0.000 | 0.000 | 0.686 | 0.481 | 0.518 |
| 27 | 7 | 157667519 | 4909077 | 6858 | AGGCACAATGWGGGCAGCAGA | 0.334 | 0.325 | 0.464 | 0.531 | 0.381 |
| 27 | 7 | 157681505 | 896762 | 6859 | AAGTGAAAGCRCACTTTGACT | 1.344 | 1.323 | 0.645 | 0.690 | 0.829 |
| 27 | 7 | 157693852 | 4909210 | 6860 | TAGTAAAATAYCTTGATGATC | 0.065 | 0.067 | 0.559 | 0.572 | 0.809 |
| 27 | 7 | 157696513 | 4909212 | 6861 | ATGCTGAGGAKACAGAGATTC | 0.599 | 0.580 | 0.969 | 0.628 | 1.044 |
| 27 | 7 | 157716083 | 4909085 | 6862 | TTCTGCTGTGSTCTGTAGTTT | 0.358 | 0.322 | 0.410 | 1.124 | 1.555 |
| 27 | 7 | 157731429 | 1476199 | 6863 | CACCTCCTGCRCATGCCTCAG | 1.173 | 1.143 | 0.530 | 1.064 | 2.450 |
| 27 | 7 | 157784389 | 7788773 | 6864 | GTCCCTGGTCMCGGCTCTGGC | 0.184 | 0.179 | 1.153 | 0.937 | 2.535 |
| 27 | 7 | 157888770 | 1882247 | 6865 | GAGAAGCAACMTGTGATAATC | 0.350 | 0.354 | 1.019 | 1.689 | 2.535 |
| 27 | 7 | 157900851 | 6972776 | 6866 | GGAATCCCCARTGCCAACACA | 1.792 | 1.868 | 0.973 | 2.434 | 2.397 |
| 27 | 7 | 157910068 | 7788516 | 6867 | CTCACTAACTKGAGGAGATGG | 0.220 | 0.222 | 1.752 | 2.471 | 2.178 |
| 27 | 7 | 157927271 | 4909243 | 6868 | AATCAATTTTYTGAGAAAAAC | 1.010 | 1.014 | 2.544 | 2.349 | 2.192 |
| 27 | 7 | 157939751 | 3793177 | 6869 | TTTCCACCTGYAATAGCTGAG | 2.484 | 2.320 | 2.296 | 2.308 | 2.129 |
| 27 | 7 | 157963460 | 2290391 | 6870 | AAATACAATGSAAGGCAGGGG | 3.835 | 3.488 | 2.698 | 2.295 | 2.359 |
| 27 | 7 | 157979187 | 963177 | 6871 | GAAGCCACCCYGGCCAGGCCA | 0.000 | 0.000 | 2.816 | 1.930 | 2.193 |
| 27 | 7 | 157991785 | 1037458 | 6872 | CCAGGCCCACYGTGCTCTCCA | 0.000 | 0.000 | 2.243 | 2.290 | 2.240 |
| 27 | 7 | 158007683 | 7799553 | 6873 | AATTATAGGCYGAGTGAGGTG | 0.009 | 0.009 | 0.377 | 2.713 | 2.177 |
| 27 | 7 | 158031369 | 7800556 | 6874 | TACACGATAARATAATTTCTA | 0.352 | 0.325 | 0.377 | 2.531 | 1.906 |
| 27 | 7 | 158044510 | 1189191 | 6875 | AGCCATGAAGKTGTTGACTCA | 0.922 | 0.910 | 1.325 | 1.205 | 2.096 |
| 27 | 7 | 158055182 | 844521 | 6876 | TTAAAACATAYTTTTGATTAT | 0.000 | 0.000 | 1.710 | 1.098 | 2.061 |
| 27 | 7 | 158071349 | 842444 | 6877 | GATCAAAGGCRTCAAACATAG | 2.545 | 2.455 | 1.588 | 0.947 | 1.762 |
| 27 | 7 | 158084298 | 7780170 | 6878 | CGGCTACTTTMCTGAATTTAT | 0.776 | 0.750 | 1.440 | 1.154 | 1.010 |
| 27 | 7 | 158097267 | 2279881 | 6879 | ACATCAGTGGSGATCTCTGCT | 0.133 | 0.221 | 1.194 | 1.255 | 1.040 |
| 27 | 7 | 158116469 | 1154002 | 6880 | TTCAGGTGCTRAAGAAGCACT | 0.422 | 0.420 | 0.280 | 1.068 | 0.950 |
| 28 | 9 | 26700092 | 10511781 | 6881 | CACCAGTTCARTCACCAATGT | 1.189 | 1.192 | 0.651 | 0.737 | 1.002 |
| 28 | 9 | 26714384 | 7866709 | 6882 | ACCTTCTGTAWGTTCAAGTTC | 1.351 | 1.363 | 0.610 | 0.386 | 1.098 |
| 28 | 9 | 26715878 | 7028218 | 6883 | CAAGTGGGAAYGGCAGAACTG | 0.039 | 0.039 | 0.687 | 0.412 | 0.870 |
| 28 | 9 | 26731583 | 17693460 | 6884 | ACCATGCCCCRGGTCCTGTGC | 0.120 | 0.118 | 0.337 | 0.350 | 0.635 |
| 28 | 9 | 26739795 | 10967513 | 6885 | ATCACTTAATMACATTCATGA | 0.407 | 0.381 | 0.073 | 0.616 | 0.616 |
| 28 | 9 | 26749215 | 7871924 | 6886 | AAATTTGCCTRATCTGGTCTC | 0.054 | 0.053 | 0.056 | 0.310 | 0.567 |
| 28 | 9 | 26757842 | 12350711 | 6887 | CTATTTTGGAYTGCTTTGATG | 0.531 | 0.535 | 0.320 | 0.171 | 0.550 |
| 28 | 9 | 26766151 | 17760488 | 6888 | TTACCTACAAMCTTGAGGAAG | 0.030 | 0.029 | 0.227 | 0.480 | 0.656 |
| 28 | 9 | 26773300 | 17693816 | 6889 | ATGGAAAACAYGGAAAGGAGA | 1.113 | 1.146 | 0.473 | 0.534 | 0.452 |
| 28 | 9 | 26779940 | 1889899 | 6890 | AAGAGTAGTTRGTTGACCAGT | 0.044 | 0.045 | 0.883 | 0.456 | 0.317 |
| 28 | 9 | 26786160 | 10116852 | 6891 | TTGTTTGTTCRTTCATTTTCC | 0.733 | 0.742 | 0.976 | 0.676 | 0.330 |
| 28 | 9 | 26791741 | 17694003 | 6892 | GGGGTTATACKCTCTGCTTAG | 1.369 | 1.374 | 0.526 | 0.557 | 0.393 |
| 28 | 9 | 26798068 | 12000467 | 6893 | TACAATACACSCTGACATTAT | 0.226 | 0.231 | 0.828 | 0.725 | 0.356 |
| 28 | 9 | 26816017 | 10967550 | 6894 | GCTAGTTGTGRTATAGAAAAT | 0.143 | 0.146 | 0.560 | 0.446 | 0.391 |
| 28 | 9 | 26822939 | 17760657 | 6895 | CATGAAAGTCRGTCTCCTCAC | 0.750 | 0.752 | 0.292 | 0.539 | 0.341 |
| 28 | 9 | 26829501 | 17694087 | 6896 | GTGTTCAACARAAAGATGTGT | 0.206 | 0.197 | 0.255 | 0.405 | 0.347 |
| 28 | 9 | 26847244 | 1889901 | 6897 | TGCACACATAYACCTACACAT | 0.643 | 0.640 | 0.375 | 0.143 | 0.269 |
| 28 | 9 | 26856642 | 7036871 | 6898 | CTTTGAAGCTYGGGACCTTAA | 0.115 | 0.116 | 0.197 | 0.146 | 0.399 |
| 28 | 9 | 26868374 | 10511791 | 6899 | TTGGCGCTCASGTTTAGTAGC | 0.410 | 0.416 | 0.163 | 0.149 | 0.293 |
| 28 | 9 | 26876393 | 7857990 | 6900 | GAAGGGAATGYATAAACTTGT | 0.172 | 0.171 | 0.083 | 0.131 | 0.118 |
| 28 | 9 | 26883662 | 7038314 | 6901 | CAGGAGTTCCRTTAAGTATCA | 0.221 | 0.222 | 0.066 | 0.230 | 0.175 |
| 28 | 9 | 26889130 | 7860542 | 6902 | CTCAACACCTRATACATTACC | 0.264 | 0.262 | 0.089 | 0.118 | 0.267 |
| 28 | 9 | 26894699 | 16910873 | 6903 | TACAGTTTGAKGTACTCTTGC | 0.020 | 0.020 | 0.278 | 0.097 | 0.193 |
| 28 | 9 | 26900951 | 10967594 | 6904 | TTATTCCAAAKGATGTAGTAG | 0.571 | 0.562 | 0.232 | 0.142 | 0.176 |
| 28 | 9 | 26909666 | 16910888 | 6905 | TAAAATCTTCSTTTTTGGCAG | 0.852 | 0.826 | 0.182 | 0.265 | 0.395 |
| 28 | 9 | 26914621 | 10511793 | 6906 | CTTTCCATTCYTTGACTCCTC | 0.009 | 0.010 | 0.392 | 0.269 | 0.406 |
| 28 | 9 | 26925996 | 7045881 | 6907 | CAACCAGCAGWTTATGATTTA | 0.055 | 0.053 | 0.450 | 0.255 | 0.342 |
| 28 | 9 | 26938134 | 10511794 | 6908 | CCCCTGGTTTSGGAGATCATT | 0.655 | 0.665 | 0.204 | 0.694 | 1.014 |
| 28 | 9 | 26946868 | 7857396 | 6909 | CAGTTAGCAASTTTCCACTTA | 0.717 | 0.775 | 0.251 | 0.600 | 0.952 |
| 28 | 9 | 26952769 | 12352441 | 6910 | GACAGAAATARCAAGTACTGA | 0.094 | 0.090 | 0.922 | 0.437 | 0.973 |
| 28 | 9 | 26980826 | 17694499 | 6911 | TGAGTTAACTWGGGATACTCA | 0.104 | 0.101 | 0.769 | 1.478 | 1.269 |
| 28 | 9 | 26994338 | 10967655 | 6912 | TCAGCTCAAGRTAGATTCTGT | 2.095 | 2.085 | 0.530 | 1.439 | 1.235 |
| 28 | 9 | 26999738 | 17756299 | 6913 | CTGCTTAATAMACAGCTAACC | 0.212 | 0.202 | 2.534 | 1.485 | 1.221 |
| 28 | 9 | 27008020 | 12337896 | 6914 | AATCATTTCARAAAGGTATTA | 0.055 | 0.057 | 2.842 | 1.735 | 1.216 |
| 28 | 9 | 27018947 | 7390085 | 6915 | TGGAAAAGATRTCTAACCTCC | 4.340 | 4.062 | 1.692 | 2.035 | 1.341 |
| 28 | 9 | 27031315 | 7045747 | 6916 | ACATTCCTGTYAGAGCACTTA | 0.052 | 0.052 | 2.756 | 2.499 | 1.324 |
| 28 | 9 | 27037460 | 16910953 | 6917 | GGCTCACTATYGTATCTTCTC | 0.171 | 0.180 | 2.848 | 1.503 | 1.194 |
| 28 | 9 | 27040593 | 1413824 | 6918 | CCTGGAATTAMTACAGTTAGT | 1.388 | 1.387 | 0.358 | 1.719 | 1.288 |
| 28 | 9 | 27057529 | 10511798 | 6919 | AGAAAGAACTRTTATTAAATT | 0.063 | 0.062 | 0.393 | 1.804 | 1.318 |
| 28 | 9 | 27071879 | 16910976 | 6920 | TTATAATGCTMATCCAAGCCA | 0.437 | 0.466 | 0.540 | 0.216 | 1.016 |
| 28 | 9 | 27088940 | 1161603 | 6921 | AAGGTGAATARAAATGTAACT | 0.148 | 0.132 | 0.132 | 0.210 | 0.991 |
| 28 | 9 | 27096614 | 10967715 | 6922 | TTGGGGGCACRTATTTGATTT | 0.549 | 0.538 | 0.191 | 0.196 | 1.103 |
| 28 | 9 | 27104804 | 680739 | 6923 | AACCAGGGCCWTACTTAAGAT | 0.253 | 0.251 | 0.081 | 0.120 | 0.117 |
| 28 | 9 | 27115056 | 12339737 | 6924 | CCCAACCAGCRTGGGCTTGCA | 0.247 | 0.281 | 0.090 | 0.127 | 0.263 |
| 28 | 9 | 27122514 | 7044842 | 6925 | ACAGTGTCTTYCCTGGATATT | 0.005 | 0.006 | 0.203 | 0.110 | 0.278 |
| 28 | 9 | 27129817 | 10967731 | 6926 | TAGTACAGCARGAGTAACAAC | 0.150 | 0.154 | 0.146 | 0.112 | 0.129 |
| 28 | 9 | 27143055 | 7855848 | 6927 | AGGATTGTTAWGCTTCACTTG | 1.000 | 0.989 | 0.155 | 0.204 | 0.234 |
| 28 | 9 | 27153395 | 506685 | 6928 | CTATGAGGGCRTCTAACCTGT | 0.059 | 0.060 | 0.201 | 0.213 | 0.303 |
| 28 | 9 | 27159124 | 3818283 | 6929 | GCGATTATAGRTATCTCCTGG | 0.351 | 0.337 | 0.562 | 0.244 | 0.694 |
| 28 | 9 | 27166229 | 11791294 | 6930 | TATGTATCAGKGCTGGTTTCT | 0.162 | 0.166 | 0.276 | 0.443 | 0.650 |
| 28 | 9 | 27175762 | 17834811 | 6931 | CTTTAAAAAAKTATATGCATG | 1.062 | 1.090 | 0.412 | 0.649 | 0.600 |
| 28 | 9 | 27220196 | 1407300 | 6932 | CTCATAGCTAYTGCCACATGT | 0.273 | 0.268 | 0.580 | 0.993 | 1.129 |
| 28 | 9 | 27229343 | 17695236 | 6933 | CTGTGGAAATRTAACCTTTAA | 0.444 | 0.430 | 0.876 | 1.130 | 1.296 |
| 28 | 9 | 27240868 | 4879313 | 6934 | ACTTGGCTTAKTTAGGGAATA | 0.763 | 0.743 | 1.324 | 0.967 | 1.297 |
| 28 | 9 | 27249071 | 17695332 | 6935 | TGGCTTCCTTRCTTTATCCTG | 0.827 | 0.838 | 1.429 | 1.884 | 1.677 |
| 28 | 9 | 27257825 | 10812556 | 6936 | GAGGGATGAARAAAATCTTAA | 1.883 | 1.978 | 1.186 | 1.635 | 1.793 |
| 28 | 9 | 27264428 | 13288748 | 6937 | CGCTGATTGTRATCCAATGCA | 0.383 | 0.377 | 2.188 | 1.662 | 1.610 |
| 28 | 9 | 27273000 | 10967855 | 6938 | ATTTATCTGAYTTACCTGAAC | 0.056 | 0.057 | 1.895 | 2.387 | 1.795 |
| 28 | 9 | 27283009 | 7873922 | 6939 | TGGGTCCCTCYAGAGGAATGT | 1.909 | 1.914 | 0.740 | 2.210 | 1.843 |
| 28 | 9 | 27289620 | 17778819 | 6940 | ACAAATTAAGYCCAACTTGTG | 0.431 | 0.414 | 1.575 | 1.705 | 1.705 |
| 28 | 9 | 27297163 | 10967874 | 6941 | ACTGGCTGAGYGGAACCTGTC | 0.241 | 0.244 | 1.568 | 0.936 | 1.671 |
| 29 | 9 | 70132969 | 2182739 | 6942 | TTCTTAATTCRTTTTTCTGCT | 0.108 | 0.102 | 0.530 | 0.178 | 0.333 |
| 29 | 9 | 70141432 | 7038061 | 6943 | TAAAATCTCASAATATTAGTC | 0.188 | 0.183 | 0.285 | 0.204 | 0.428 |
| 29 | 9 | 70150928 | 17052748 | 6944 | AAATTATACARTGGACTCCAA | 0.604 | 0.595 | 0.055 | 0.343 | 0.420 |
| 29 | 9 | 70163512 | 7025228 | 6945 | AATAACAACASCATTTCCACA | 0.135 | 0.137 | 0.060 | 0.467 | 0.620 |
| 29 | 9 | 70168957 | 7851212 | 6946 | TCCAAAATCTYTTCCCAAAAA | 0.075 | 0.075 | 0.252 | 0.483 | 0.716 |
| 29 | 9 | 70186112 | 4610818 | 6947 | TTAGTTTATTKGCTATCAAAC | 0.112 | 0.115 | 0.510 | 0.552 | 0.714 |
| 29 | 9 | 70192722 | 4745004 | 6948 | TAATACCTTGWAACTCTTTTT | 0.920 | 0.899 | 0.860 | 0.860 | 0.909 |
| 29 | 9 | 70200766 | 17053503 | 6949 | CAGTGCAGGAWAGATTTGGGA | 1.278 | 1.251 | 0.947 | 0.832 | 0.734 |
| 29 | 9 | 70207772 | 10491653 | 6950 | TGCAGAAATAYTGTAATTAAT | 0.977 | 0.961 | 1.543 | 0.837 | 0.940 |
| 29 | 9 | 70215494 | 17053650 | 6951 | TTAGATACCGYGGCCTAAAAA | 0.292 | 0.302 | 1.449 | 1.390 | 0.900 |
| 29 | 9 | 70219386 | 4745008 | 6952 | GAATCCGGCTRCTTTAGGAAA | 1.226 | 1.223 | 0.832 | 1.426 | 0.913 |
| 29 | 9 | 70231043 | 10868816 | 6953 | GTGGGAGTTTYGTAGGAACAC | 0.492 | 0.465 | 1.112 | 1.366 | 1.032 |
| 29 | 9 | 70243909 | 11142398 | 6954 | CTTTGTTCAGMTATTTGTGGG | 0.184 | 0.182 | 0.995 | 1.010 | 1.064 |
| 29 | 9 | 70284062 | 17455513 | 6955 | CTGTTCACCTRAAGTTACTTT | 1.568 | 1.612 | 0.869 | 0.848 | 1.062 |
| 29 | 9 | 70295308 | 2184756 | 6956 | TTTTATCCTTYCAGTGTTTCA | 0.107 | 0.108 | 0.707 | 0.960 | 0.843 |
| 29 | 9 | 70300172 | 13299487 | 6957 | TTTGTAGCTTWTACAGCTGTG | 1.030 | 1.010 | 0.960 | 0.672 | 0.902 |
| 29 | 9 | 70317582 | 7864965 | 6958 | TTGCTTGGACRCCTCTCTTCC | 0.058 | 0.059 | 0.509 | 0.528 | 1.310 |
| 29 | 9 | 70326189 | 6560136 | 6959 | AGTGGATTCCYTTCTTTGGAG | 0.653 | 0.690 | 0.539 | 0.475 | 1.389 |
| 29 | 9 | 70333865 | 10868838 | 6960 | TTTATGGCAGWCTCAAAGGCA | 0.590 | 0.632 | 0.152 | 0.440 | 1.458 |
| 29 | 9 | 70339788 | 950840 | 6961 | GAGAGCATGAYGTAATCTTTC | 0.161 | 0.172 | 0.141 | 1.349 | 1.433 |
| 29 | 9 | 70345328 | 7856388 | 6962 | TCTGGAGAAGKTTCAAAGATG | 0.008 | 0.008 | 0.426 | 1.228 | 1.962 |
| 29 | 9 | 70354236 | 17535530 | 6963 | AAAGGGTACCRAGAAATAAGT | 0.040 | 0.041 | 1.548 | 1.885 | 1.845 |
| 29 | 9 | 70360083 | 17535600 | 6964 | TCTATGTACARGTGCCAGAAA | 1.472 | 1.449 | 1.964 | 1.601 | 1.962 |
| 29 | 9 | 70367841 | 7046672 | 6965 | CTACTTTTCCYGAAATCTCTT | 2.612 | 2.942 | 2.930 | 1.841 | 1.734 |
| 29 | 9 | 70376992 | 17535865 | 6966 | TCATGAAAATYGTACCCAAGC | 0.000 | 0.000 | 2.663 | 2.590 | 1.789 |
| 29 | 9 | 70385945 | 1932701 | 6967 | AAGGTTACCTRTGTTTGTTTC | 1.111 | 1.124 | 2.432 | 2.686 | 1.485 |
| 29 | 9 | 70395370 | 7034027 | 6968 | TATCACAGGGRACACTTGAGA | 0.371 | 0.355 | 1.654 | 2.703 | 1.265 |
| 29 | 9 | 70401966 | 17536713 | 6969 | AACCTAAAAASTGCTATGACT | 1.179 | 1.198 | 1.489 | 1.986 | 1.196 |
| 29 | 9 | 70409531 | 2871324 | 6970 | AGAATCCAGAYAATAGGCAGT | 1.480 | 1.618 | 0.990 | 0.922 | 1.314 |
| 29 | 9 | 70416448 | — | 6971 | CATCTTGACTKTTGGCATTTG | 0.321 | 0.318 | 0.971 | 0.769 | 1.478 |
| 29 | 9 | 70422125 | 12686512 | 6972 | TGCTTAAGTAYGACTGCCATA | 0.291 | 0.289 | 0.602 | 0.507 | 2.228 |
| 29 | 9 | 70433166 | 10735599 | 6973 | GAGGCAAGACRTCGTAGGGCA | 0.331 | 0.309 | 0.127 | 0.551 | 1.575 |
| 29 | 9 | 70443198 | 4744606 | 6974 | TTTTCAGCCCMGTTGGGAAGT | 0.311 | 0.301 | 0.077 | 0.403 | 1.763 |
| 29 | 9 | 70450287 | 7865398 | 6975 | ATGAATATTGWTAACTGCCCT | 0.104 | 0.103 | 0.118 | 1.249 | 1.518 |
| 29 | 9 | 70461216 | 11142508 | 6976 | AGAGAGTCCCYTTACACACAA | 0.045 | 0.046 | 0.187 | 1.235 | 1.691 |
| 29 | 9 | 70477224 | 7045775 | 6977 | TTCCTTCTTCYTCCCAAATTC | 0.530 | 0.535 | 2.059 | 1.586 | 1.638 |
| 29 | 9 | 70484986 | 1538669 | 6978 | AATACCCTTGSCCAACCAAAG | 0.653 | 0.625 | 2.452 | 1.675 | 1.338 |
| 29 | 9 | 70497790 | 11142532 | 6979 | ATGGAGAGAAYAGAGGAATGT | 4.337 | 4.091 | 3.308 | 1.912 | 1.271 |
| 29 | 9 | 70509554 | 11142536 | 6980 | TGGCTGACAGYGCCTCAGAAA | 0.104 | 0.106 | 3.004 | 2.084 | 1.228 |
| 29 | 9 | 70515182 | 11142540 | 6981 | GGAATTTTTARAACCCGTTTC | 1.413 | 1.413 | 2.995 | 2.113 | 1.236 |
| 29 | 9 | 70525093 | 1856655 | 6982 | CAACCATGACKCTACAGCAGG | 0.157 | 0.158 | 1.095 | 2.008 | 1.524 |
| 29 | 9 | 70541921 | 4745026 | 6983 | ACATAGAAACRTACATACATT | 1.483 | 1.510 | 1.196 | 1.845 | 1.652 |
| 29 | 9 | 70543565 | 1160742 | 6984 | TAAATGACAARTAGTCTATGT | 0.699 | 0.692 | 0.676 | 0.579 | 1.932 |
| 29 | 9 | 70591948 | 10511986 | 6985 | TGGACTGAAAYTGCAGGCAAA | 0.486 | 0.520 | 0.673 | 1.020 | 2.040 |
| 29 | 9 | 70599241 | 7849151 | 6986 | CAAAAGAAACYTGAAGGATAC | 0.082 | 0.082 | 0.155 | 0.728 | 1.951 |
| 29 | 9 | 70606611 | 11142569 | 6987 | TTGCAGCGTCMTGTCTAATTG | 0.161 | 0.163 | 0.518 | 0.979 | 1.068 |
| 29 | 9 | 70612919 | 17055769 | 6988 | GTGTGTATGCYTGGGTCAGCC | 0.094 | 0.091 | 0.442 | 0.687 | 1.058 |
| 29 | 9 | 70619595 | 1831144 | 6989 | TTAATCCACTRTATCCCTAGC | 1.686 | 1.706 | 0.755 | 0.586 | 0.740 |
| 29 | 9 | 70626414 | 7847799 | 6990 | ACCTGAGAAASCTGAAATGCT | 0.335 | 0.330 | 1.018 | 0.781 | 0.888 |
| 29 | 9 | 70632742 | 11142592 | 6991 | ACCTTAGCTGWTCATAAGCCT | 0.773 | 0.761 | 1.143 | 0.750 | 0.689 |
| 29 | 9 | 70638656 | 1328158 | 6992 | GGGCTTCCTTKCCAGCATAAC | 0.626 | 0.624 | 0.806 | 0.744 | 0.530 |
| 29 | 9 | 70644522 | 10780969 | 6993 | GCAGCATTGARCAAAGTTGAG | 0.376 | 0.374 | 0.665 | 0.948 | 0.560 |
| 29 | 9 | 70650613 | 17463001 | 6994 | CTTCTGCCTGSGATTTAGGAC | 1.049 | 1.049 | 0.409 | 0.593 | 0.563 |
| 29 | 9 | 70657059 | 12552572 | 6995 | GGCCATTCTASCACTGTGTAT | 0.057 | 0.052 | 0.372 | 0.510 | 0.562 |
| 29 | 9 | 70664548 | 560819 | 6996 | AAAAATCCTARTGCCATTTAT | 0.000 | 0.000 | 0.541 | 0.468 | 0.619 |
| 29 | 9 | 70672189 | 1034539 | 6997 | GCTCTGGCCCRGTAGAAATAA | 0.536 | 0.556 | 0.191 | 0.324 | 0.259 |
| 29 | 9 | 70674554 | 10868901 | 6998 | GGGTAAGACCMAAGCAGTCTG | 0.818 | 0.822 | 0.370 | 0.279 | 0.206 |
| 29 | 9 | 70683459 | 1932926 | 6999 | CTGTTTTACCKCCACACCCAA | 0.075 | 0.076 | 0.378 | 0.132 | 0.233 |
| 29 | 9 | 70697458 | 10868911 | 7000 | TTTTCCCATGKGTCAATTTTA | 0.619 | 0.612 | 0.245 | 0.127 | 0.210 |
| 29 | 9 | 70703724 | 10780979 | 7001 | AGACAACTCTRAGTTCCACAG | 0.137 | 0.137 | 0.106 | 0.100 | 0.188 |
| 29 | 9 | 70710180 | 1337024 | 7002 | TTAGGCAAGCRTGTGGCACCG | 0.178 | 0.167 | 0.095 | 0.160 | 0.200 |
| 29 | 9 | 70722520 | 1609625 | 7003 | TACTGACTTGRCTTGAGGCCA | 0.340 | 0.333 | 0.010 | 0.109 | 0.216 |
| 29 | 9 | 70730035 | 11142636 | 7004 | TTTTTACCCARCTAGGTCATT | 0.022 | 0.022 | 0.121 | 0.134 | 0.330 |
| 29 | 9 | 70736650 | 10511992 | 7005 | TTTTGGAAGAYTATATAGAGA | 0.013 | 0.013 | 0.214 | 0.236 | 0.349 |
| 29 | 9 | 70746659 | 4143736 | 7006 | ATCCTTGCAARCAAATGACAT | 0.910 | 0.904 | 0.201 | 0.240 | 0.267 |
| 29 | 9 | 70757996 | 11142642 | 7007 | TCAAAACTACSAGAGGGAAAA | 0.473 | 0.455 | 0.620 | 0.385 | 0.265 |
| 29 | 9 | 70765970 | 3010419 | 7008 | TAGTCCAGGARACAGAATATT | 0.257 | 0.253 | 0.692 | 0.473 | 0.207 |
| 29 | 9 | 70775011 | 2993024 | 7009 | TAAGTCACAGMATCTTAGTAT | 1.113 | 1.139 | 0.579 | 0.553 | 0.253 |
| 29 | 9 | 70782222 | 17056028 | 7010 | CTCCTTTTTCWAACAAAGCTC | 0.161 | 0.158 | 0.669 | 0.573 | 0.344 |
| 29 | 9 | 70788186 | 12351255 | 7011 | TCAAACTCTCYGATGCTGAAT | 0.736 | 0.705 | 0.699 | 0.387 | 0.358 |
| 29 | 9 | 70794271 | 3010423 | 7012 | TGAGTTAGTAMAAACTTGGTG | 0.641 | 0.653 | 0.286 | 0.392 | 0.364 |
| 29 | 9 | 70800561 | 7022875 | 7013 | GGGTGCCCGAYTGAGAATCAC | 0.326 | 0.323 | 0.316 | 0.529 | 0.416 |
| 29 | 9 | 70808080 | 1337022 | 7014 | TGCGCTTTTTSCAAGTGTGCT | 0.096 | 0.099 | 0.233 | 0.327 | 0.376 |
| 29 | 9 | 70814967 | — | 7015 | ATGGGCCTTCYGTGGGGAGTA | 0.253 | 0.243 | 0.269 | 0.301 | 0.378 |
| 29 | 9 | 70821303 | 2909300 | 7016 | TAGTGACTGCYTCAAAAGTGG | 0.448 | 0.442 | 0.291 | 0.215 | 0.494 |
| 29 | 9 | 70827862 | 1558924 | 7017 | AAGTGCCTACYAGATATACAG | 0.773 | 0.724 | 0.290 | 0.226 | 0.520 |
| 29 | 9 | 70839607 | 17056164 | 7018 | TCAGCATTTTMTTGCCTTACA | 0.378 | 0.384 | 0.311 | 0.255 | 0.673 |
| 29 | 9 | 70846825 | 10868940 | 7019 | TGGAGCCAGCRGTTTTAGCTT | 0.037 | 0.037 | 0.377 | 0.448 | 0.711 |
| 29 | 9 | 70874370 | 11142672 | 7020 | TGGACTGCTCRTATTTGAGTC | 0.297 | 0.306 | 0.296 | 0.715 | 0.599 |
| 29 | 9 | 70882519 | 573250 | 7021 | ATTTTAATGAWCCTACTGAAT | 0.677 | 0.700 | 0.483 | 0.840 | 0.678 |
| 29 | 9 | 70890955 | 625699 | 7022 | GCCCATAAAGYATCAAGGGAA | 0.481 | 0.488 | 0.920 | 0.848 | 0.677 |
| 29 | 9 | 70911110 | 659797 | 7023 | ATAATTAACARCTCTGAGTTT | 0.934 | 0.894 | 1.041 | 0.768 | 0.691 |
| 29 | 9 | 70919059 | 661604 | 7024 | TTAACACCCTMCTGCTTCAGG | 1.266 | 1.262 | 1.055 | 0.911 | 0.785 |
| 29 | 9 | 70925435 | 10868946 | 7025 | TTCTGGAATCMACTGTGTACC | 0.926 | 0.970 | 0.983 | 0.897 | 0.682 |
| 29 | 9 | 70931529 | 505676 | 7026 | AAAATTTTTGRACACCATTGC | 0.923 | 0.919 | 0.982 | 0.828 | 0.621 |
| 29 | 9 | 70932502 | 656875 | 7027 | ATGAGTCCCCRTTGTGCTTGA | 0.046 | 0.047 | 0.623 | 1.004 | 0.637 |
| 29 | 9 | 70948361 | 1329748 | 7028 | GAAATAATGGRGCAGATGATC | 0.689 | 0.665 | 0.362 | 0.819 | 0.609 |
| 29 | 9 | 70953863 | 10868950 | 7029 | CTGAGTCTAGYTTATTACAAA | 0.216 | 0.217 | 0.371 | 0.474 | 0.521 |
| 29 | 9 | 70960548 | 17521958 | 7030 | AAATTCTGCCYAACAATACAT | 0.315 | 0.308 | 0.449 | 0.288 | 0.535 |
| 30 | 9 | 93175798 | 2927567 | 7031 | ATGGAAACTAMCAACTACGTC | 0.775 | 0.750 | 1.705 | 2.027 | 1.799 |
| 30 | 9 | 93181986 | 2995992 | 7032 | ACCAGCATGTKTGTAGTCACA | 0.272 | 0.276 | 1.938 | 2.108 | 1.961 |
| 30 | 9 | 93206088 | 4744229 | 7033 | ATCGGGTGGCMCTATGACTGC | 1.418 | 1.377 | 1.690 | 1.769 | 1.691 |
| 30 | 9 | 93215235 | 11789033 | 7034 | AAGGACTTTAYGCATTTGCAC | 1.244 | 1.218 | 1.573 | 1.684 | 1.706 |
| 30 | 9 | 93221289 | 7021710 | 7035 | TGGAAGCACTYCACCTCTCAG | 0.976 | 0.930 | 1.690 | 1.501 | 1.677 |
| 30 | 9 | 93242815 | 7020852 | 7036 | GGTCCTACACYCCAAAAAGTT | 0.855 | 0.868 | 1.279 | 1.218 | 1.409 |
| 30 | 9 | 93245937 | 4744239 | 7037 | GGAACGTCCAYGAATGGAGAG | 0.250 | 0.262 | 1.039 | 1.449 | 1.324 |
| 30 | 9 | 93268664 | 7859267 | 7038 | TTGTCCTCTGKTTTCCTATTA | 0.559 | 0.573 | 0.511 | 1.097 | 1.286 |
| 30 | 9 | 93295671 | 1331588 | 7039 | GAGCGTAAAARTGTTCATAGT | 0.854 | 0.847 | 0.598 | 0.643 | 1.051 |
| 30 | 9 | 93308995 | 10512224 | 7040 | CAAATGCTGAKTCATCTTGTT | 0.000 | 0.001 | 0.629 | 0.541 | 0.991 |
| 30 | 9 | 93322209 | 4744245 | 7041 | TGGGATTCCTYGCTGCAGTCC | 1.024 | 1.063 | 0.389 | 0.643 | 0.772 |
| 30 | 9 | 93324842 | 11791374 | 7042 | GCATTTACCAYGTAACCTTGC | 0.361 | 0.362 | 0.326 | 0.582 | 0.614 |
| 30 | 9 | 93336138 | 1556416 | 7043 | GACATTTGAARGATGCACCTA | 0.012 | 0.011 | 0.788 | 0.501 | 0.457 |
| 30 | 9 | 93345702 | 16909211 | 7044 | TTTAAAGTAARGAGCTCGTTG | 0.642 | 0.644 | 0.439 | 0.406 | 0.352 |
| 30 | 9 | 93359002 | 4743928 | 7045 | GACCCAGGGCMGAGCTTACTG | 1.211 | 1.176 | 0.393 | 0.495 | 0.527 |
| 30 | 9 | 93368824 | 10739950 | 7046 | ATCACCTACCYTTTTGAAGCA | 0.111 | 0.107 | 0.524 | 0.311 | 0.586 |
| 30 | 9 | 93377480 | 10821152 | 7047 | TATAGGGAGCYGATAAAATTG | 0.242 | 0.235 | 0.432 | 0.253 | 0.514 |
| 30 | 9 | 93386292 | 10821158 | 7048 | ATACTGTTGAYGTTTTGAAGT | 0.420 | 0.395 | 0.138 | 0.541 | 1.219 |
| 30 | 9 | 93388594 | 928367 | 7049 | CCATGCTCCARTAACCTTCTC | 0.431 | 0.421 | 0.136 | 0.596 | 1.581 |
| 30 | 9 | 93422615 | 10821163 | 7050 | TATTCTGTACSGAGTTCAGAG | 0.097 | 0.098 | 0.470 | 0.423 | 1.792 |
| 30 | 9 | 93427445 | 1000852 | 7051 | CAAACATGAGRATCTGATTGG | 0.186 | 0.191 | 0.654 | 1.597 | 2.248 |
| 30 | 9 | 93437856 | 10821168 | 7052 | GGCTTACCCAYGGTCTGTCCT | 1.322 | 1.244 | 0.661 | 2.827 | 2.304 |
| 30 | 9 | 93446202 | 2989751 | 7053 | GACGGAGAGCRAGACTTCTTT | 0.893 | 0.878 | 2.824 | 3.149 | 2.088 |
| 30 | 9 | 93459352 | 12551314 | 7054 | TCCCAAGAGGMAATTGTGGGG | 0.418 | 0.431 | 3.676 | 2.959 | 2.513 |
| 30 | 9 | 93475886 | 1806458 | 7055 | GGTGTTCCTCRCAGGTGGTGA | 4.364 | 4.488 | 3.723 | 3.076 | 2.853 |
| 30 | 9 | 93485419 | 6479499 | 7056 | AGCCCTCTAGWTCCTTGAAGT | 3.119 | 3.149 | 3.380 | 2.972 | 2.688 |
| 30 | 9 | 93491981 | — | 7057 | ACCAACACGGYACACTCACAC | 0.000 | 0.000 | 4.568 | 3.198 | 2.674 |
| 30 | 9 | 93498640 | 10992831 | 7058 | CTTCCGATTGRACTGTCCCTT | 1.279 | 1.214 | 2.171 | 3.428 | 2.942 |
| 30 | 9 | 93527276 | 7024542 | 7059 | TACCTTCCAGYGCCATCAGGA | 0.921 | 0.880 | 1.487 | 3.454 | 2.926 |
| 30 | 9 | 93550895 | 7874616 | 7060 | CAAATGGGGAYTGTGGAAGAG | 1.056 | 0.999 | 1.529 | 2.252 | 2.885 |
| 30 | 9 | 93563775 | 2398871 | 7061 | CTACACGAGAYAACTGACATA | 1.156 | 1.158 | 1.032 | 1.524 | 3.117 |
| 30 | 9 | 93569564 | 16909421 | 7062 | AGGATCTGACMTTTTGAGTCA | 0.642 | 0.636 | 1.145 | 1.426 | 3.163 |
| 30 | 9 | 93590628 | 4392963 | 7063 | AGCAGCTCTTMCCCTGTGGAT | 0.003 | 0.003 | 1.029 | 1.017 | 1.937 |
| 30 | 9 | 93619309 | 2263356 | 7064 | GAAAATCACAYGTGTTGTAAA | 0.973 | 1.002 | 0.539 | 1.100 | 1.239 |
| 30 | 9 | 93634162 | 7030496 | 7065 | TTTTTGATTGYTGATTAAATC | 0.759 | 0.754 | 0.293 | 0.683 | 1.060 |
| 30 | 9 | 93657887 | 12003661 | 7066 | AGGGGGATTASTTTGCCAAGG | 0.280 | 0.238 | 0.788 | 0.335 | 0.719 |
| 30 | 9 | 93667688 | 3957506 | 7067 | GGGACCGACCYGAGGATGAAG | 0.066 | 0.067 | 0.379 | 0.376 | 0.887 |
| 30 | 9 | 93699974 | 3209003 | 7068 | CCATACCTTGKGTGTTTGTAT | 1.035 | 1.042 | 0.161 | 0.398 | 0.949 |
| 30 | 9 | 93706342 | 12337678 | 7069 | CTGGACCTGCYTGTGGTTCTT | 0.059 | 0.060 | 0.316 | 0.200 | 1.014 |
| 30 | 9 | 93714065 | 16909534 | 7070 | ATGGGGGTAGWTTGTAATGAG | 0.109 | 0.114 | 0.293 | 0.352 | 0.847 |
| 30 | 9 | 93729092 | 10761299 | 7071 | TGTGTGGAGGYCACTGCACTA | 0.782 | 0.774 | 0.065 | 0.672 | 1.303 |
| 30 | 9 | 93747094 | 17625535 | 7072 | CAAAAACATCWACGGAAAGGG | 0.009 | 0.009 | 0.494 | 1.249 | 1.067 |
| 30 | 9 | 93756862 | 10733751 | 7073 | CAGAACAAGGSCCACTGCAAG | 0.208 | 0.207 | 1.056 | 0.829 | 1.025 |
| 30 | 9 | 93764675 | 10992984 | 7074 | AGCCTAGAATRTGACCTCTTG | 1.383 | 1.364 | 1.347 | 1.427 | 1.154 |
| 31 | 9 | 110265356 | 7031072 | 7075 | GAGTGCTGACRGAAGTTAATG | 1.210 | 1.251 | 1.278 | 0.778 | 0.577 |
| 31 | 9 | 110272750 | 4978426 | 7076 | ATCTACAGATKCAGGGTCGGT | 0.668 | 0.649 | 0.978 | 1.096 | 0.571 |
| 31 | 9 | 110283987 | 16915037 | 7077 | TCCTTGGGTAMAGGCTTTCAT | 0.575 | 0.548 | 0.763 | 1.268 | 0.589 |
| 31 | 9 | 110293281 | 4421419 | 7078 | AACTTGACAGRACTTTAAGAC | 0.298 | 0.303 | 0.631 | 0.978 | 0.621 |
| 31 | 9 | 110299334 | 7875113 | 7079 | TTGCTGCCTGMATAACACTGG | 0.386 | 0.382 | 0.681 | 0.784 | 0.614 |
| 31 | 9 | 110314062 | 10817025 | 7080 | CCGTGAGGACYTGGCATTGCC | 0.900 | 0.956 | 0.465 | 0.405 | 0.700 |
| 31 | 9 | 110323375 | 3818766 | 7081 | CCTGTCTATCRCTATTTCTAG | 0.704 | 0.726 | 0.469 | 0.288 | 0.645 |
| 31 | 9 | 110350156 | 4427239 | 7082 | CGTGCTTCCTRTTAGTCTCCA | 0.104 | 0.106 | 0.379 | 0.169 | 0.517 |
| 31 | 9 | 110358254 | 17734141 | 7083 | TGAATGAAGGRAACACTTAAA | 0.302 | 0.303 | 0.158 | 0.249 | 0.315 |
| 31 | 9 | 110364426 | 2184245 | 7084 | GCTGAATGTCYGCCTGTCCTA | 0.152 | 0.156 | 0.025 | 0.349 | 0.211 |
| 31 | 9 | 110375601 | 4300064 | 7085 | ACATTGGCCAYCATCTAAACT | 0.200 | 0.205 | 0.124 | 0.227 | 0.247 |
| 31 | 9 | 110382596 | 10817036 | 7086 | CCTCTAACAAWGACTGGTATT | 0.049 | 0.048 | 0.262 | 0.129 | 0.215 |
| 31 | 9 | 110389092 | 10817039 | 7087 | AGACTGTGGTRTGGGTAAAAG | 0.646 | 0.661 | 0.321 | 0.110 | 0.220 |
| 31 | 9 | 110399504 | 16915129 | 7088 | TATTCAGTCAYAGTGTTTCCA | 0.730 | 0.741 | 0.301 | 0.204 | 0.113 |
| 31 | 9 | 110425355 | 16915134 | 7089 | TCTTTCTGCCRTGAATTTAAC | 0.378 | 0.375 | 0.306 | 0.182 | 0.059 |
| 31 | 9 | 110444019 | 12236915 | 7090 | CCTAGGGACCRGTTCCTGAAT | 0.135 | 0.137 | 0.360 | 0.213 | 0.130 |
| 31 | 9 | 110451178 | 4295728 | 7091 | GTTGTGCAATYTTTTTAACGT | 0.086 | 0.084 | 0.145 | 0.226 | 0.155 |
| 31 | 9 | 110457541 | 10980489 | 7092 | CAGGTTTTTGYTCCCTTTTCT | 0.789 | 0.796 | 0.131 | 0.133 | 0.307 |
| 31 | 9 | 110463553 | 10980495 | 7093 | TCCAGCAATTYCTACTCTAAC | 0.041 | 0.041 | 0.117 | 0.153 | 0.423 |
| 31 | 9 | 110474247 | 10521102 | 7094 | GTATTTCTGCRTAGGTAGAAT | 0.342 | 0.342 | 0.140 | 0.165 | 0.598 |
| 31 | 9 | 110483333 | 3001114 | 7095 | GATCCACTCAYGGGTTACACA | 0.115 | 0.120 | 0.143 | 0.394 | 0.735 |
| 31 | 9 | 110491782 | 3001153 | 7096 | TACATGTCTCMTCTGCCCTGT | 0.136 | 0.140 | 0.297 | 0.608 | 0.791 |
| 31 | 9 | 110501698 | 3010804 | 7097 | ACAGGCTATGMAGTGTGGAGT | 0.799 | 0.806 | 0.620 | 0.676 | 0.805 |
| 31 | 9 | 110511161 | 3001125 | 7098 | TGGATGATGAMAACCTTTTCG | 0.454 | 0.441 | 0.909 | 1.105 | 1.120 |
| 31 | 9 | 110541167 | 16915263 | 7099 | AGATGATTTTYGCACACATTT | 1.254 | 1.217 | 1.414 | 1.323 | 1.201 |
| 31 | 9 | 110548452 | 4401940 | 7100 | GGAATTTTCARTGAGGGTTTG | 0.887 | 0.924 | 1.968 | 1.446 | 1.083 |
| 31 | 9 | 110557083 | 10759461 | 7101 | CCCAGTTATGMGTTAGCTGCT | 0.973 | 0.973 | 2.063 | 2.150 | 2.504 |
| 31 | 9 | 110570331 | 10817087 | 7102 | TGTCATTTAAYAGTTTGCTTT | 1.284 | 1.292 | 1.445 | 1.778 | 2.681 |
| 31 | 9 | 110586553 | 4144418 | 7103 | ACAGCTAACTYAGAAAGACAG | 1.085 | 1.050 | 1.643 | 1.755 | 2.857 |
| 31 | 9 | 110597275 | — | 7104 | CAATTTAAACYTGACAGGTAC | 0.391 | 0.386 | 1.403 | 3.271 | 2.824 |
| 31 | 9 | 110603895 | 1013820 | 7105 | GGCCTCCTAGMAGAAGCGGAG | 1.187 | 1.160 | 0.816 | 2.695 | 2.375 |
| 31 | 9 | 110612005 | 10980564 | 7106 | TACGAATTTCRCAGGTTTTCA | 0.357 | 0.362 | 2.903 | 3.206 | 2.612 |
| 31 | 9 | 110625482 | — | 7107 | TTTTAATTCTRTCATTTGTGT | 0.223 | 0.219 | 2.857 | 2.252 | 2.157 |
| 31 | 9 | 110648651 | 1409686 | 7108 | TGCTCTGGTTMGTATTGGTAG | 4.295 | 4.153 | 3.060 | 1.934 | 2.134 |
| 31 | 9 | 110654946 | 1180281 | 7109 | ATGGCATCATRCTAACAGACA | 0.415 | 0.408 | 3.054 | 2.025 | 1.987 |
| 31 | 9 | 110663567 | 2767001 | 7110 | CAGTGAGAGGRATCAAATGAG | 0.446 | 0.405 | 2.496 | 1.600 | 1.649 |
| 31 | 9 | 110673638 | 12555499 | 7111 | TGGATTGCCTRTGATACTTCT | 0.056 | 0.043 | 0.161 | 2.049 | 1.402 |
| 31 | 9 | 110691415 | 526584 | 7112 | AAACTGAATGYTCATACATGT | 0.226 | 0.229 | 0.111 | 1.759 | 1.434 |
| 31 | 9 | 110692760 | — | 7113 | ACAGGGCCTCRAATTCTTCCC | 0.520 | 0.512 | 0.247 | 0.319 | 1.111 |
| 31 | 9 | 110715246 | 6833 | 7114 | GTATAAAGTAYGTGCAAACAC | 0.224 | 0.226 | 0.249 | 0.327 | 1.014 |
| 31 | 9 | 110737318 | 7851666 | 7115 | TCTTCTTAGCYGGGAAACTAG | 0.872 | 0.896 | 0.562 | 0.300 | 0.939 |
| 31 | 9 | 110743076 | — | 7116 | AGGAGAAGTCRTGGCCTAAAG | 0.017 | 0.017 | 0.538 | 0.298 | 0.289 |
| 31 | 9 | 110746832 | 3780528 | 7117 | TACTGGAGCAYGGACCATTTC | 1.044 | 0.995 | 0.565 | 0.278 | 0.312 |
| 31 | 9 | 110761555 | 2805386 | 7118 | CATATCCAAARTGCTTCGCTG | 0.389 | 0.392 | 0.261 | 0.213 | 0.346 |
| 31 | 9 | 110769583 | 2254841 | 7119 | ATAGTAGATGRTTTAGTTACT | 0.354 | 0.357 | 0.279 | 0.467 | 0.479 |
| 31 | 9 | 110779435 | 6477795 | 7120 | ATTTATGCCARATAAGTATTT | 0.018 | 0.018 | 0.059 | 0.380 | 0.494 |
| 31 | 9 | 110786780 | 7866715 | 7121 | GGATAAGAACKCTATATTTCA | 0.129 | 0.127 | 0.315 | 0.561 | 0.452 |
| 31 | 9 | 110806340 | 10817125 | 7122 | GCTAGGGATCYTAAAATACTT | 0.120 | 0.117 | 0.397 | 0.471 | 0.434 |
| 31 | 9 | 110812487 | 10817126 | 7123 | GGGAAAAATGYCCCTTGTTCT | 1.397 | 1.309 | 0.647 | 0.453 | 0.280 |
| 31 | 9 | 110819193 | 4366150 | 7124 | CAGAAAACACRTGGGAAAAAG | 0.529 | 0.521 | 0.885 | 0.437 | 0.453 |
| 31 | 9 | 110825551 | 2192591 | 7125 | ATGATAAGTGMAAAACAGGTT | 0.632 | 0.662 | 0.996 | 0.454 | 0.271 |
| 31 | 9 | 110832787 | 10817128 | 7126 | GTAGTATAGCMTTTTCTCCAC | 0.704 | 0.646 | 0.492 | 0.428 | 0.476 |
| 31 | 9 | 110843884 | 2192593 | 7127 | GAACAAGATTWAGCTTTTAAC | 0.313 | 0.309 | 0.341 | 0.686 | 0.436 |
| 31 | 9 | 110852489 | 10759480 | 7128 | TCAGACAATTWTTTTTGGTAC | 0.320 | 0.309 | 0.142 | 0.299 | 0.494 |
| 31 | 9 | 110859197 | — | 7129 | TCGAGTCTGASTTTTTTGAAG | 0.130 | 0.131 | 0.200 | 0.553 | 0.587 |
| 31 | 9 | 110862610 | — | 7130 | AGATCAGGAGSCTGGAGTCCT | 0.080 | 0.081 | 0.145 | 0.410 | 0.838 |
| 31 | 9 | 110871972 | 6477803 | 7131 | TGAAACTAAAYTGACAGCGTC | 0.952 | 0.902 | 0.557 | 0.314 | 0.857 |
| 31 | 9 | 110882740 | 10980705 | 7132 | TCCATAAAACYTAGCTCATTA | 0.078 | 0.079 | 0.580 | 0.381 | 0.738 |
| 32 | 10 | 19899999 | 3852478 | 7133 | TTTGAGTCTTRTGTTTTTCCA | 0.064 | 0.066 | 0.695 | 0.337 | 0.347 |
| 32 | 10 | 19905763 | 11010520 | 7134 | ATCCTCCCCAYAGGAAACCAC | 1.920 | 2.100 | 0.609 | 0.374 | 0.225 |
| 32 | 10 | 19916301 | 12249318 | 7135 | ATATCACTGCRTATGACAATG | 0.370 | 0.373 | 0.845 | 0.623 | 0.326 |
| 32 | 10 | 19924660 | 11010622 | 7136 | GGGAGATGCCRTTATGTGTTC | 0.188 | 0.189 | 0.919 | 0.588 | 0.478 |
| 32 | 10 | 19935038 | 3844359 | 7137 | CATTTTCAGARTTAATTGTGT | 0.640 | 0.642 | 0.399 | 0.607 | 0.586 |
| 32 | 10 | 19942794 | 3904905 | 7138 | GATCTTTATGYTCACCTTTAC | 0.197 | 0.189 | 0.349 | 0.956 | 0.688 |
| 32 | 10 | 19951897 | 12261476 | 7139 | ATTTGGAAAARGGTAAAATTA | 0.876 | 0.847 | 0.379 | 0.547 | 0.606 |
| 32 | 10 | 19958526 | 12219684 | 7140 | CCAAGCTTCAYGGGGTAGCCG | 0.228 | 0.240 | 0.497 | 0.592 | 1.002 |
| 32 | 10 | 19964003 | 10827695 | 7141 | TTGGATCAAAYCTTTTATAGG | 0.233 | 0.245 | 0.785 | 0.657 | 1.534 |
| 32 | 10 | 19976791 | 7474617 | 7142 | ACATGACACARCTTTTTTCCA | 0.937 | 0.949 | 0.635 | 0.481 | 1.417 |
| 32 | 10 | 19986172 | — | 7143 | TTTTGCTTTGYGGACTAATCT | 0.867 | 0.807 | 0.714 | 0.957 | 1.484 |
| 32 | 10 | 19994710 | — | 7441 | TTGCTCATCTRAATTAATCCT | 0.515 | 0.519 | 0.604 | 1.247 | 1.559 |
| 32 | 10 | 20004919 | 7916152 | 7145 | TATCCTTAAARGTAAAGATGA | 0.410 | 0.415 | 1.055 | 1.795 | 1.359 |
| 32 | 10 | 20014936 | 4748608 | 7146 | TATCTGAGTCRTGCAGCACCT | 0.047 | 0.047 | 1.485 | 2.083 | 1.581 |
| 32 | 10 | 20019440 | 16919291 | 7147 | CTCTAAATGGRTGACGAGGTT | 2.013 | 1.993 | 1.911 | 1.871 | 1.583 |
| 32 | 10 | 20031847 | 12256382 | 7148 | TTGAAGTAAAMTTTTGTATTG | 1.813 | 1.773 | 2.181 | 1.514 | 1.828 |
| 32 | 10 | 20042742 | 2025789 | 7149 | AGTCTGGTTCYGGAGTTAGCA | 1.610 | 1.603 | 2.324 | 1.735 | 1.943 |
| 32 | 10 | 20043985 | 2478746 | 7150 | AAATATGTACRTGCACTCTTT | 1.168 | 1.178 | 1.652 | 2.041 | 1.836 |
| 32 | 10 | 20050326 | 16919309 | 7151 | CAACTCAGATYCACCATTAAT | 0.441 | 0.452 | 1.471 | 2.369 | 1.773 |
| 32 | 10 | 20057858 | 7100283 | 7152 | ACACAACTTAMTCAAATTAAT | 0.155 | 0.157 | 1.320 | 1.910 | 1.667 |
| 32 | 10 | 20069776 | 7073601 | 7153 | TGGTCTGGCTYTTTTAGAGGT | 1.354 | 1.304 | 1.220 | 1.548 | 1.741 |
| 32 | 10 | 20106875 | 4748610 | 7154 | CTCAGTGCTTYGATATAGGAG | 1.144 | 1.210 | 0.936 | 1.180 | 1.887 |
| 32 | 10 | 20119156 | 12763948 | 7155 | GGTCTTTCAAYTGAAACTAGA | 0.740 | 0.732 | 1.132 | 0.702 | 1.467 |
| 32 | 10 | 20125405 | 12263244 | 7156 | CCTATCCCCARTTTGATACTA | 0.018 | 0.018 | 0.709 | 0.617 | 0.950 |
| 32 | 10 | 20131169 | 16919362 | 7157 | CAGCAGTCAGYATTGAATGGT | 0.444 | 0.450 | 0.252 | 0.801 | 0.667 |
| 32 | 10 | 20140825 | 11011581 | 7158 | CACTCTGCATYGTACAGCATA | 0.544 | 0.539 | 0.152 | 0.440 | 0.618 |
| 32 | 10 | 20150341 | 11011636 | 7159 | GACGTGTTGTYTTAGAATTCT | 0.083 | 0.085 | 0.382 | 0.199 | 0.516 |
| 32 | 10 | 20159308 | 12263862 | 7160 | TTCAGGTCAGYATCTACCATG | 0.292 | 0.296 | 0.283 | 0.147 | 0.727 |
| 32 | 10 | 20170064 | 333693 | 7161 | TCCTTCTCTTYAAATCTTACA | 0.781 | 0.746 | 0.146 | 0.345 | 0.581 |
| 32 | 10 | 20176365 | 7900249 | 7162 | GTCATTATCTSTGGTGGAAAA | 0.135 | 0.141 | 0.237 | 0.249 | 0.657 |
| 32 | 10 | 20182706 | 16919431 | 7163 | GGTGCTTGGTKCCACAGGTTG | 0.147 | 0.147 | 0.484 | 0.361 | 0.631 |
| 32 | 10 | 20189724 | 7895714 | 7164 | TCATTCTCTTWTGCGTTGCAA | 0.455 | 0.463 | 0.211 | 0.553 | 1.075 |
| 32 | 10 | 20196780 | 17756750 | 7165 | GTGTGTATGTRTAAATGTACC | 0.970 | 0.924 | 0.570 | 0.975 | 1.165 |
| 32 | 10 | 20203412 | 752319 | 7166 | AATCTTGTTCRTTGTAAAAGA | 0.019 | 0.020 | 0.837 | 0.923 | 1.131 |
| 32 | 10 | 20209606 | 11592226 | 7167 | GTATTCAGTAYTTTCCATGAG | 1.048 | 1.045 | 1.219 | 1.404 | 1.096 |
| 32 | 10 | 20216969 | 11011658 | 7168 | ACACGCCTATYACTCCACTTC | 0.716 | 0.704 | 1.178 | 1.634 | 1.105 |
| 32 | 10 | 20222872 | 17757908 | 7169 | TTAGGGGGTCRACCATGCTAA | 1.482 | 1.494 | 2.045 | 1.553 | 0.898 |
| 32 | 10 | 20234345 | 12774164 | 7170 | TATTATTTCTSCTAACTGGGT | 0.587 | 0.620 | 1.962 | 1.298 | 1.037 |
| 32 | 10 | 20241326 | 965787 | 7171 | TAACAAAATGRGCTAGAACTT | 1.561 | 1.522 | 1.645 | 1.396 | 1.125 |
| 32 | 10 | 20249001 | 1887035 | 7172 | GTATTTGCTAYCACTTTACCA | 1.012 | 0.984 | 0.908 | 1.076 | 1.142 |
| 32 | 10 | 20256253 | 17758689 | 7173 | CCGGAGGAAGYTGACATTTCA | 0.279 | 0.278 | 0.742 | 1.041 | 1.055 |
| 32 | 10 | 20263456 | 9651367 | 7174 | TGCGATCATTRCATTGGTCAC | 0.023 | 0.023 | 0.158 | 0.677 | 1.189 |
| 32 | 10 | 20276277 | 7898627 | 7175 | TGGGAAACACRCCACTGTTGA | 0.189 | 0.195 | 0.095 | 0.691 | 1.225 |
| 32 | 10 | 20283648 | 1926204 | 7176 | AGATTGCTCAYATAGAGAACA | 0.101 | 0.093 | 0.189 | 0.397 | 1.019 |
| 32 | 10 | 20290990 | 1409341 | 7177 | AGTGACGATAYTTATTTGTGT | 0.737 | 0.756 | 0.422 | 0.284 | 1.101 |
| 32 | 10 | 20298993 | 7922844 | 7178 | CTCATGCCTAYGTTCTTGAAC | 0.564 | 0.551 | 0.518 | 0.506 | 1.035 |
| 32 | 10 | 20313589 | 1111367 | 7179 | GGACCTCAGAYAGTATAAGTT | 0.691 | 0.671 | 0.728 | 0.501 | 0.721 |
| 32 | 10 | 20317089 | 4311960 | 7180 | ACTATCCTTTYGTTAGAATTT | 0.478 | 0.472 | 0.860 | 1.062 | 0.668 |
| 32 | 10 | 20331025 | 957210 | 7181 | CAATCTAGAAMTTTTGGATTT | 0.561 | 0.545 | 0.650 | 1.192 | 0.629 |
| 32 | 10 | 20340113 | — | 7182 | TATGTTGAACRAAGGGCTCAG | 1.078 | 1.074 | 1.323 | 1.005 | 2.177 |
| 32 | 10 | 20345947 | 10764184 | 7183 | TACTTAGCTARTTTCCTCTCT | 0.019 | 0.019 | 1.239 | 1.170 | 2.345 |
| 32 | 10 | 20351919 | 4311961 | 7184 | GAGACAAACAYTGTGGCAGTG | 1.821 | 1.776 | 1.064 | 0.894 | 2.459 |
| 32 | 10 | 20359898 | 10740960 | 7185 | AAATGAGACARCAAATGGAGA | 0.289 | 0.282 | 0.895 | 2.936 | 2.216 |
| 32 | 10 | 20366165 | 17688735 | 7186 | TAGAAATCTCRTACATATTCT | 0.394 | 0.379 | 0.895 | 2.660 | 1.923 |
| 32 | 10 | 20376501 | 2358915 | 7187 | CATTATTTCCWAAGTGTGTCT | 0.793 | 0.796 | 2.557 | 2.224 | 1.598 |
| 32 | 10 | 20387770 | 9664354 | 7188 | AGTTCTGTCARTGGAAAATTT | 0.185 | 0.184 | 2.623 | 2.062 | 1.628 |
| 32 | 10 | 20406431 | 12250505 | 7189 | ATGGGGTTACRATGGGGTTAG | 4.736 | 4.267 | 2.643 | 1.439 | 1.725 |
| 32 | 10 | 20413892 | 7917917 | 7190 | TTTTAATATGRTCTCAGTGGC | 0.563 | 0.533 | 2.205 | 1.295 | 1.600 |
| 32 | 10 | 20419570 | 11011792 | 7191 | GTAGAAAAAARTTACAGAAAA | 0.298 | 0.284 | 2.029 | 1.429 | 1.789 |
| 32 | 10 | 20430647 | 2358839 | 7192 | TGTGGGATTAKGTTCTCCTGA | 0.268 | 0.272 | 0.088 | 1.553 | 1.484 |
| 32 | 10 | 20438674 | 2460593 | 7193 | CCATTGCAATRAATCTTTAGA | 0.004 | 0.004 | 0.146 | 1.823 | 1.381 |
| 32 | 10 | 20445668 | 2461939 | 7194 | AATTTGAAGTYAGAATTGTTG | 0.059 | 0.058 | 0.389 | 0.682 | 1.426 |
| 32 | 10 | 20454519 | 2884565 | 7195 | AGGTTTGAGCSTGACCATAGG | 0.797 | 0.837 | 0.723 | 0.676 | 1.347 |
| 32 | 10 | 20464632 | 16919903 | 7196 | TATATTGGTAMTTTTATGAAC | 1.030 | 1.064 | 1.148 | 0.622 | 1.339 |
| 32 | 10 | 20471634 | 12217582 | 7197 | CTGCAAACATRTAGACTTTAT | 1.121 | 1.087 | 1.491 | 0.715 | 0.476 |
| 32 | 10 | 20477435 | 16919952 | 7198 | CAAACTGACARAGTAAAGAAT | 0.961 | 0.940 | 1.060 | 0.819 | 0.459 |
| 32 | 10 | 20483092 | 7895366 | 7199 | CAGCTTCTTCRTATTAAGTTG | 0.558 | 0.533 | 0.803 | 0.832 | 0.554 |
| 32 | 10 | 20495937 | 2358856 | 7200 | CAAACGTAGARTTCAGAGAAA | 0.014 | 0.015 | 0.485 | 0.730 | 0.509 |
| 32 | 10 | 20504910 | 11593311 | 7201 | AAACCCAGGCRAGCACATTAG | 0.539 | 0.557 | 0.201 | 0.547 | 0.770 |
| 32 | 10 | 20515216 | 2358871 | 7202 | AATTGAAGGCRTCAAAGAGAG | 0.377 | 0.366 | 0.121 | 0.427 | 1.501 |
| 32 | 10 | 20522577 | 17699919 | 7203 | GGATAAAAGGRGTGTGCTCTG | 0.090 | 0.089 | 0.228 | 0.199 | 1.702 |
| 32 | 10 | 20528200 | 10508617 | 7204 | GAGACAGAGGWTACTTACTAC | 0.000 | 0.000 | 0.307 | 0.313 | 1.529 |
| 32 | 10 | 20536276 | 11011870 | 7205 | CTGGGATTAAYTTAATAATTT | 0.000 | 0.000 | 0.190 | 1.242 | 1.299 |
| 32 | 10 | 20543273 | 16920111 | 7206 | GACCTAAATAKGTGATGTTTT | 0.700 | 0.701 | 0.707 | 1.605 | 1.122 |
| 32 | 10 | 20548945 | 6482103 | 7207 | CCTTTTTAGGMCATTGTTTAT | 0.090 | 0.090 | 1.680 | 1.653 | 1.190 |
| 32 | 10 | 20555548 | 11597607 | 7208 | CATCAGGATAYACTTTTTCCC | 1.117 | 1.012 | 1.970 | 1.694 | 1.217 |
| 32 | 10 | 20562077 | 1930227 | 7209 | TGTATAGTTGSACGAGTTGTA | 2.464 | 2.496 | 1.756 | 1.557 | 1.141 |
| 32 | 10 | 20564148 | 10827998 | 7210 | TGTCCTTGCTYTCACTCAGCA | 1.410 | 1.407 | 1.917 | 1.482 | 1.102 |
| 32 | 10 | 20574551 | 2778978 | 7211 | TTTTCAGTTCRAGCTTTCTGA | 0.874 | 0.871 | 1.662 | 1.344 | 1.052 |
| 32 | 10 | 20586343 | 2681951 | 7212 | TTACAGTTAAYGGAGGAAACT | 0.582 | 0.561 | 1.051 | 1.429 | 1.098 |
| 32 | 10 | 20595556 | 16920183 | 7213 | AGTAAATAACYGGAGATTAGG | 0.226 | 0.231 | 0.566 | 1.219 | 0.993 |
| 32 | 10 | 20601545 | 2681942 | 7214 | AAAGCTATGTRTTCCCAAGTA | 0.906 | 0.861 | 0.242 | 0.512 | 0.928 |
| 32 | 10 | 20607483 | 2681947 | 7215 | AAATAAATTTRCGGCATTCTG | 0.086 | 0.087 | 0.129 | 0.325 | 1.074 |
| 32 | 10 | 20614437 | — | 7216 | TAAAATGGGAWCTAGAAACTG | 0.070 | 0.074 | 0.094 | 0.162 | 0.938 |
| 32 | 10 | 20620131 | 10828003 | 7217 | ATCGTCCTCTKCATGTCTTCA | 0.192 | 0.201 | 0.058 | 0.132 | 0.582 |
| 32 | 10 | 20627631 | 10508620 | 7218 | TGTCATCTACRCATCTATTTC | 0.049 | 0.046 | 0.089 | 0.193 | 0.312 |
| 32 | 10 | 20637777 | 10764218 | 7219 | ATTTCGTGAAYTGAAGAATGC | 0.766 | 0.763 | 0.181 | 0.090 | 0.495 |
| 32 | 10 | 20648041 | 12262812 | 7220 | GGCACCCAGTRATGTTCCTCC | 0.184 | 0.170 | 0.294 | 0.250 | 0.458 |
| 32 | 10 | 20673489 | 11011990 | 7221 | TTGGATCATTYTTTTCATGTT | 0.442 | 0.435 | 0.412 | 0.263 | 0.559 |
| 32 | 10 | 20679847 | 1412558 | 7222 | AATCGGGACARTTGTGAAAGT | 0.612 | 0.569 | 0.462 | 0.722 | 0.407 |
| 32 | 10 | 20686226 | 4748669 | 7223 | ATCCTGAGAGRGAGAAAAAAG | 0.374 | 0.364 | 0.434 | 0.929 | 0.588 |
| 32 | 10 | 20718364 | — | 7224 | GATTTTTTTTWTTCGACCAAA | 0.917 | 0.856 | 1.127 | 0.870 | 0.640 |
| 32 | 10 | 20724009 | 12777485 | 7225 | GAAAAACCCARCCATCTCATA | 0.139 | 0.137 | 1.035 | 0.852 | 0.638 |
| 32 | 10 | 20735677 | 12783104 | 7226 | TGGCACTGAAYACCGACGCCA | 1.773 | 2.151 | 1.195 | 1.036 | 1.062 |
| 32 | 10 | 20742566 | 17783778 | 7227 | AACTTCATACRTTCTGATATC | 0.426 | 0.429 | 0.804 | 0.921 | 1.046 |
| 32 | 10 | 20747068 | 16920492 | 7228 | TGAATACATCYCTGATATAAG | 0.735 | 0.730 | 1.219 | 0.860 | 1.024 |
| 32 | 10 | 20760926 | 11818220 | 7229 | AGATCTATCCYAATACACTGT | 0.170 | 0.171 | 0.489 | 1.023 | 1.119 |
| 32 | 10 | 20783154 | 10828054 | 7230 | CATAAATAAGKGAAAATTTTT | 0.874 | 0.885 | 0.387 | 1.311 | 1.177 |
| 32 | 10 | 20786206 | 12769394 | 7231 | TCCTCAATTCRTGATTAAAAC | 0.295 | 0.281 | 0.695 | 0.676 | 1.494 |
| 32 | 10 | 20812441 | 16920534 | 7232 | TGAATTAGAGRTGGTAGCTCA | 0.251 | 0.227 | 1.007 | 0.764 | 1.293 |
| 32 | 10 | 20821183 | 12262779 | 7233 | TGACAATTTGYATGAGAAAGA | 1.412 | 1.398 | 0.609 | 0.786 | 1.356 |
| 32 | 10 | 20830242 | 12782055 | 7234 | TTCTCCTTGGYCCCTGGAAAA | 0.773 | 0.751 | 0.809 | 1.256 | 0.761 |
| 32 | 10 | 20835803 | 1361360 | 7235 | AAGAGTAGTTYTGTTCACTTA | 0.066 | 0.101 | 1.161 | 1.059 | 0.873 |
| 32 | 10 | 20848770 | 7913924 | 7236 | AAATGAGGATWGTAATATGTA | 0.656 | 0.645 | 1.061 | 0.953 | 0.692 |
| 33 | 10 | 99966729 | 7078393 | 7237 | AGTTTGCAAGRTAATATGTTC | 0.133 | 0.130 | 0.250 | 0.572 | 0.947 |
| 33 | 10 | 99982196 | 11189521 | 7238 | GTATAGCTGAWACTTATATAG | 0.033 | 0.035 | 0.395 | 0.907 | 0.630 |
| 33 | 10 | 99989333 | 10748721 | 7239 | ATGCTAAGTCYTCCATGTTTT | 1.250 | 1.355 | 0.901 | 0.739 | 0.648 |
| 33 | 10 | 99995272 | 10786405 | 7240 | GTGCCCATGAYGATGATGAAT | 0.450 | 0.454 | 1.392 | 0.805 | 0.664 |
| 33 | 10 | 100006303 | 1983866 | 7241 | ATTTCTATTCWTCTTTCCTGC | 1.542 | 1.632 | 1.485 | 0.964 | 0.718 |
| 33 | 10 | 100013847 | 11189527 | 7242 | AGCTTGGATASCCTGTGATAG | 1.530 | 1.590 | 1.175 | 1.144 | 0.659 |
| 33 | 10 | 100021384 | 10786408 | 7243 | GGAACGTAGAYTGTAATAACA | 0.029 | 0.030 | 1.286 | 1.242 | 0.895 |
| 33 | 10 | 100026199 | 7915743 | 7244 | TCTGAATTGCYGTCACTGTGG | 0.296 | 0.299 | 0.806 | 1.002 | 0.973 |
| 33 | 10 | 100037491 | 10883059 | 7245 | CATGTTTGAGYGAATGGCCTG | 0.553 | 0.612 | 0.225 | 1.051 | 1.027 |
| 33 | 10 | 100047807 | 7903057 | 7246 | CTTTTTATTCYGCATGAGTCT | 0.569 | 0.569 | 0.346 | 0.870 | 1.067 |
| 33 | 10 | 100060547 | 17453254 | 7247 | CTTAAAAATCMCGGAGCTAGA | 0.277 | 0.289 | 0.408 | 0.379 | 0.752 |
| 33 | 10 | 100071747 | 2862297 | 7248 | ATGATAGTAAMCCAGGTGCAT | 0.341 | 0.350 | 0.631 | 0.390 | 0.770 |
| 33 | 10 | 100086156 | 4919215 | 7249 | TTCAACATTTYTGTCCCTGAA | 0.000 | 0.000 | 0.501 | 0.300 | 0.341 |
| 33 | 10 | 100092393 | 11189558 | 7250 | TCTGTGTGGCRATTGTTGAAA | 1.094 | 1.015 | 0.415 | 0.210 | 0.194 |
| 33 | 10 | 100105017 | 4919221 | 7251 | GAGATCCCATYAGCTCTCCTC | 0.321 | 0.329 | 0.269 | 0.166 | 0.328 |
| 33 | 10 | 100116376 | 17109506 | 7252 | TCACGTAGCCYTCACAACACA | 0.115 | 0.115 | 0.221 | 0.142 | 0.280 |
| 33 | 10 | 100125512 | 17109560 | 7253 | TTTCACTCATYATGTCTAGTG | 0.007 | 0.007 | 0.043 | 0.288 | 0.238 |
| 33 | 10 | 100132112 | 17109594 | 7254 | GGTGCCAGGTYAAAAAGTATA | 0.262 | 0.256 | 0.017 | 0.355 | 0.263 |
| 33 | 10 | 100138532 | 2274248 | 7255 | AGCTCCCAAAYGCAAATGTCT | 0.000 | 0.000 | 0.186 | 0.120 | 0.442 |
| 33 | 10 | 100149203 | 11812682 | 7256 | AGGGCCCTTAYGGAACTCAGT | 0.170 | 0.169 | 0.461 | 0.125 | 0.380 |
| 33 | 10 | 100157386 | 12763326 | 7257 | GGTAGGACGCRCGGGAGAACT | 0.879 | 0.834 | 0.378 | 0.239 | 0.343 |
| 33 | 10 | 100165072 | 2274245 | 7258 | GCTGGGCCGTYGGGAGTGTTG | 0.655 | 0.613 | 0.357 | 0.583 | 0.170 |
| 33 | 10 | 100172275 | 2296435 | 7259 | AGGTCTGAGTYAAGGTGCTTA | 0.035 | 0.035 | 0.543 | 0.525 | 0.122 |
| 33 | 10 | 100181485 | 11189602 | 7260 | GAGATGGGGASAGAGTTTGCA | 0.426 | 0.423 | 0.707 | 0.459 | 0.133 |
| 33 | 10 | 100190787 | 7071947 | 7261 | TGAGAACACGRGTGATGTTGA | 0.680 | 0.684 | 0.428 | 0.443 | 0.265 |
| 33 | 10 | 100195227 | 17109873 | 7262 | TTGAGAAAGGRCAAGCTGGAG | 1.183 | 1.122 | 0.526 | 0.199 | 0.367 |
| 33 | 10 | 100205957 | 7093411 | 7263 | CATGACCACCRGAGGCTAAGT | 0.011 | 0.010 | 0.399 | 0.120 | 0.328 |
| 33 | 10 | 100216639 | 17109945 | 7264 | CTGATCTTAGRACATTGTCTG | 0.251 | 0.258 | 0.159 | 0.287 | 0.387 |
| 33 | 10 | 100230295 | 17458353 | 7265 | AGCTCCAAACRGCAGGGGAAT | 0.196 | 0.162 | 0.009 | 0.399 | 0.414 |
| 33 | 10 | 100241958 | 2017304 | 7266 | ACATTTGGAARAAAGAGATAT | 0.002 | 0.002 | 0.121 | 0.294 | 0.392 |
| 33 | 10 | 100256082 | 1932796 | 7267 | TTTTATTTTTRGGAGTTTGCT | 0.191 | 0.181 | 0.286 | 0.135 | 0.549 |
| 33 | 10 | 100266875 | 17537531 | 7268 | AGATCCTAAGRCCCAGAGCAG | 0.847 | 0.823 | 0.356 | 0.362 | 0.567 |
| 33 | 10 | 100275239 | 12412681 | 7269 | GCTGGGAAGAYGGGCCTAAGG | 0.776 | 0.763 | 0.500 | 0.433 | 0.419 |
| 33 | 10 | 100282154 | 7096013 | 7270 | TTCTGCCTCTSCTTCGTGATC | 0.289 | 0.278 | 0.868 | 0.575 | 0.265 |
| 33 | 10 | 100283172 | 665142 | 7271 | TGTTTCGTAAYGTTAATCACA | 0.410 | 0.430 | 0.698 | 0.754 | 0.353 |
| 33 | 10 | 100297705 | 11189671 | 7272 | GCAAGAGGTCWCTTCTTCTAC | 1.007 | 0.989 | 0.669 | 0.718 | 0.459 |
| 33 | 10 | 100305542 | 10509724 | 7273 | TTTGACAACAYGAAAATAACG | 0.519 | 0.505 | 0.791 | 0.569 | 0.443 |
| 33 | 10 | 100316583 | 544176 | 7274 | TAGTTCCTGTYACTCCAGATG | 0.649 | 0.696 | 0.599 | 0.478 | 1.423 |
| 33 | 10 | 100332431 | 11189687 | 7275 | CTTTTATGGCRTAACTGTCTC | 0.506 | 0.489 | 0.338 | 0.639 | 1.655 |
| 33 | 10 | 100340328 | 10883146 | 7276 | AGCCATGATGYGCTTATCTGT | 0.022 | 0.022 | 0.332 | 0.531 | 1.715 |
| 33 | 10 | 100351260 | 560749 | 7277 | ACTACCAACCSTGATTATCTC | 0.395 | 0.404 | 0.362 | 1.517 | 1.732 |
| 33 | 10 | 100359992 | 526465 | 7278 | TCCACACCATRGCTTGGCAGT | 0.506 | 0.505 | 0.216 | 1.803 | 1.916 |
| 33 | 10 | 100370950 | 10883151 | 7279 | ACTAGTCCAGKTATATTGTAA | 0.735 | 0.773 | 2.104 | 2.036 | 1.730 |
| 33 | 10 | 100379797 | 11189719 | 7280 | GCTAACTGCTWTATTTAACTT | 0.101 | 0.103 | 2.161 | 2.037 | 1.461 |
| 33 | 10 | 100389254 | 17110455 | 7281 | CATCTCTCAGKGGCTCTACTG | 3.465 | 3.488 | 2.680 | 2.241 | 1.644 |
| 33 | 10 | 100396734 | 563060 | 7282 | TAAACCTGTAYTCCAGATCCT | 0.926 | 0.932 | 2.753 | 1.974 | 1.465 |
| 33 | 10 | 100402147 | 528556 | 7283 | TTCAACAACCRGTCCCACATA | 1.021 | 1.037 | 2.855 | 1.733 | 1.608 |
| 33 | 10 | 100409703 | 475945 | 7284 | ACTTCACTGARTACTTGTGAG | 0.980 | 0.973 | 0.884 | 1.823 | 1.781 |
| 33 | 10 | 100424345 | 3021452 | 7285 | TCTCAAGATTRTGTATAAAAG | 0.464 | 0.451 | 0.632 | 1.708 | 1.772 |
| 33 | 10 | 100425944 | 965934 | 7286 | ATGAGTGGCCRGTGTTATTAA | 0.017 | 0.017 | 0.702 | 0.946 | 1.829 |
| 33 | 10 | 100445675 | 10748750 | 7287 | ACCAGCTCTTRAATGAATAGA | 0.394 | 0.395 | 0.362 | 0.893 | 2.177 |
| 33 | 10 | 100455887 | 17110699 | 7288 | CTCAAATTCAYGTAGTTAGTG | 1.229 | 1.221 | 0.524 | 0.708 | 2.207 |
| 33 | 10 | 100463182 | 17110721 | 7289 | ATCCTCCAAAYTGTAATTCTT | 0.011 | 0.011 | 0.880 | 0.582 | 1.212 |
| 33 | 10 | 100471417 | 17110744 | 7290 | TCTAGGAGGGYGATGACATTC | 0.942 | 0.945 | 0.873 | 1.133 | 0.991 |
| 33 | 10 | 100483316 | 17110762 | 7291 | TGGTACTTACKGCTGCCTTTA | 0.712 | 0.657 | 0.521 | 1.330 | 0.843 |
| 33 | 10 | 100491881 | 11189793 | 7292 | GGAATACGAARAACTTCAGGC | 0.408 | 0.396 | 1.559 | 1.225 | 0.715 |
| 33 | 10 | 100500931 | 10786467 | 7293 | TTGACAGAGASGATTAACATT | 0.549 | 0.542 | 1.289 | 0.816 | 0.962 |
| 33 | 10 | 100524479 | 17110835 | 7294 | TAAGTAACCGRTACTGGCAGC | 2.011 | 1.902 | 0.991 | 0.925 | 1.202 |
| 33 | 10 | 100530404 | 17110853 | 7295 | AGGCTTTTGAYTGCTTGGCTA | 0.494 | 0.488 | 0.900 | 0.746 | 1.189 |
| 33 | 10 | 100541536 | 1414971 | 7296 | TGCCTGACATWCCACAGCTAG | 0.203 | 0.203 | 0.797 | 0.997 | 0.853 |
| 33 | 10 | 100542446 | 10883202 | 7297 | GGGGTCAGAGYGGTGGTTGTT | 0.109 | 0.110 | 0.162 | 1.194 | 0.876 |
| 33 | 10 | 100566461 | 10883210 | 7298 | AACTGCCTCCRTAAACAACTT | 0.383 | 0.376 | 0.480 | 1.058 | 0.761 |
| 33 | 10 | 100574864 | 10786475 | 7299 | TGTAATACTTRTAACAAAAGA | 0.389 | 0.393 | 0.703 | 0.394 | 0.736 |
| 33 | 10 | 100581061 | 17110919 | 7300 | AGTGTGCTTCYTCCAAGGCAA | 1.391 | 1.409 | 0.857 | 0.325 | 0.742 |
| 33 | 10 | 100587657 | 7084345 | 7301 | ATATCTGTGCRGTTTTGCTTA | 0.648 | 0.669 | 0.677 | 0.422 | 0.779 |
| 33 | 10 | 100593685 | 2862447 | 7302 | TATTGCTTCARTTCTAATTCT | 0.407 | 0.400 | 0.580 | 0.555 | 0.393 |
| 33 | 10 | 100607163 | 7091295 | 7303 | ATTGTGAGTTSGAATAGAAAC | 0.045 | 0.047 | 0.307 | 0.552 | 0.354 |
| 33 | 10 | 100610499 | 10883221 | 7304 | TAAGGCCTAAYTAAAATGCCA | 0.169 | 0.171 | 0.281 | 0.644 | 0.451 |
| 33 | 10 | 100631865 | 10786481 | 7305 | CCTTTCTCCAYTAGATAAGCA | 0.550 | 0.549 | 0.231 | 0.335 | 0.537 |
| 33 | 10 | 100638398 | 4919262 | 7306 | CTCAATTACCRTCTCCTTTCT | 0.606 | 0.599 | 0.438 | 0.238 | 0.510 |
| 33 | 10 | 100650291 | 978851 | 7307 | TAGTTATGCAYGAACATTATA | 0.290 | 0.337 | 0.494 | 0.292 | 0.506 |
| 33 | 10 | 100656085 | — | 7308 | CATGGAGTTTSATTGTGAAGA | 0.404 | 0.680 | 0.348 | 0.407 | 0.430 |
| 33 | 10 | 100662056 | 17110998 | 7309 | CTTCCAGCAAYGTCATTTGGT | 0.324 | 0.293 | 0.391 | 0.424 | 0.407 |
| 33 | 10 | 100684372 | 11492738 | 7310 | TCTGGCTTGCRGAGTTTCTGC | 0.273 | 0.275 | 0.475 | 0.360 | 0.470 |
| 33 | 10 | 100695326 | 17111002 | 7311 | CAGAAAATACYTGCTATATAA | 0.654 | 0.618 | 0.278 | 0.507 | 0.784 |
| 33 | 10 | 100702951 | 4444007 | 7312 | TAAGATGTTCMATAAAAGGCT | 0.482 | 0.472 | 0.303 | 0.583 | 0.787 |
| 33 | 10 | 100709362 | 11189907 | 7313 | TAAACTCCAGYAAAATCTCCC | 0.256 | 0.250 | 0.627 | 0.594 | 0.680 |
| 33 | 10 | 100724399 | 2902256 | 7314 | CGTTCCTACAWAAAGATCGTG | 0.358 | 0.364 | 0.568 | 0.942 | 0.654 |
| 33 | 10 | 100729760 | 17111026 | 7315 | TCAGATGAACRCTGCAGGCCA | 1.026 | 1.008 | 0.694 | 0.895 | 0.638 |
| 33 | 10 | 100749687 | 10509727 | 7316 | TGCAGTATGAYAGATGAATTA | 0.546 | 0.543 | 1.258 | 0.698 | 0.721 |
| 33 | 10 | 100759845 | 12249519 | 7317 | CCAATAAACCRATAATCTAAA | 0.735 | 0.726 | 1.126 | 0.727 | 1.418 |
| 33 | 10 | 100768211 | 10509728 | 7318 | TGTTGGACAAMCTTTGGCTAA | 1.323 | 1.295 | 0.666 | 0.723 | 1.468 |
| 33 | 10 | 100789378 | 2487890 | 7319 | TTTGCAGATASAGAGTAAGTC | 0.178 | 0.182 | 0.665 | 1.022 | 1.420 |
| 33 | 10 | 100797780 | 2862507 | 7320 | GCAATTAATAWGCTGTGGACT | 0.130 | 0.128 | 0.428 | 1.820 | 1.405 |
| 33 | 10 | 100814705 | 11189954 | 7321 | CCTCCTCTACYATTATTCTCA | 0.000 | 0.000 | 0.269 | 1.689 | 1.793 |
| 33 | 10 | 100819181 | 1342576 | 7322 | AATTACTGTAYAGATTTTGGA | 0.239 | 0.234 | 1.751 | 1.641 | 1.716 |
| 33 | 10 | 100831915 | 4462267 | 7323 | AGGGTAGGGGYCTGCTACATG | 1.001 | 0.992 | 1.758 | 1.142 | 1.539 |
| 33 | 10 | 100841378 | 10883258 | 7324 | AAATATGCTCSATTTGGCATT | 2.627 | 2.974 | 1.758 | 1.614 | 1.373 |
| 33 | 10 | 100848616 | 10509729 | 7325 | TAAAGTGCTASGGTTCTCATA | 0.602 | 0.614 | 1.676 | 1.412 | 1.131 |
| 33 | 10 | 100859904 | 7089572 | 7326 | TAAAAGAAAARGACATGCTCT | 0.000 | 0.000 | 1.922 | 1.415 | 0.877 |
| 33 | 10 | 100871811 | 1857184 | 7327 | ATTATGTATAYGTATGTGCTT | 0.261 | 0.320 | 0.719 | 1.365 | 1.879 |
| 33 | 10 | 100890445 | 11189991 | 7328 | GACAACTGAAYTCGAACCCAT | 1.539 | 1.525 | 0.886 | 1.087 | 1.712 |
| 33 | 10 | 100895445 | 1935665 | 7329 | TTGACACCAAYGATTTTGGAA | 0.070 | 0.068 | 0.717 | 0.501 | 1.611 |
| 33 | 10 | 100939639 | 3905193 | 7330 | TACCAAGTTGWTGCTGTTCTT | 0.998 | 1.011 | 0.609 | 1.691 | 1.589 |
| 33 | 10 | 100968381 | 10786524 | 7331 | AAAACCCCAARTGAAGACATT | 0.171 | 0.171 | 0.158 | 1.431 | 1.486 |
| 33 | 10 | 100973931 | 10748766 | 7332 | CACTGTCTTTYACCATATCAA | 0.008 | 0.008 | 2.037 | 1.287 | 0.892 |
| 33 | 10 | 100979909 | 12573571 | 7333 | GTCTGGAAGGMCTGACTTTAA | 0.176 | 0.177 | 1.619 | 0.930 | 0.902 |
| 33 | 10 | 100989074 | 17094130 | 7334 | GTAAGAAAACRTGAAGATTAA | 4.480 | 4.422 | 1.642 | 1.105 | 0.823 |
| 33 | 10 | 100996728 | 10786525 | 7335 | TTCTCAAAAAMAAAAATAATC | 0.114 | 0.108 | 1.757 | 0.780 | 0.828 |
| 33 | 10 | 101031490 | 12570965 | 7336 | AAGATTGTTARGCAAGGAACA | 0.044 | 0.043 | 2.086 | 0.893 | 0.729 |
| 33 | 10 | 101041410 | 17111428 | 7337 | ATCCTATCTCRTTTTTTCTTT | 0.077 | 0.069 | 0.010 | 0.998 | 0.779 |
| 33 | 10 | 101060139 | — | 7338 | ATTGATTAGTKTTTCCTGTGT | 0.334 | 0.330 | 0.035 | 1.107 | 0.665 |
| 33 | 10 | 101071375 | 10509733 | 7339 | GAACCATTGCYCTATAAAGAA | 0.058 | 0.056 | 0.056 | 0.099 | 0.652 |
| 33 | 10 | 101083674 | 11190059 | 7340 | GTATTTAGGTRGAGCACTAAA | 0.440 | 0.456 | 0.100 | 0.102 | 0.865 |
| 33 | 10 | 101090322 | 4919300 | 7341 | TAGTACTGTCWTAAAACGAGT | 0.187 | 0.186 | 0.324 | 0.152 | 0.946 |
| 33 | 10 | 101096097 | 12570708 | 7342 | ACTTCATTACRTGTGAACACT | 0.337 | 0.333 | 0.382 | 0.158 | 0.212 |
| 33 | 10 | 101108239 | 10509734 | 7343 | TCGTTTCAGAMTTTGGTCCTT | 1.034 | 1.033 | 0.360 | 0.245 | 0.220 |
| 33 | 10 | 101115591 | 1892509 | 7344 | AATTATCAGARGGTCCCAGAG | 0.208 | 0.207 | 0.320 | 0.374 | 0.502 |
| 33 | 10 | 101123989 | 4919305 | 7345 | GTTCTCTACAKTACCATCACT | 0.393 | 0.388 | 0.495 | 0.558 | 0.792 |
| 33 | 10 | 101134457 | 17111633 | 7346 | TGCTTAAAAARAGGGTTAGAG | 0.086 | 0.088 | 0.290 | 0.537 | 0.775 |
| 33 | 10 | 101140337 | 3793932 | 7347 | GTTTTGGGATMTGTCCCATTC | 0.768 | 0.767 | 0.645 | 0.909 | 0.985 |
| 33 | 10 | 101147807 | 3750897 | 7348 | TTAGTTCTTCSCTAACCTGGA | 0.497 | 0.500 | 0.522 | 1.015 | 0.870 |
| 33 | 10 | 101160190 | 2862611 | 7349 | CTCAACTTTTMACTCCACCCT | 1.079 | 1.043 | 1.099 | 1.055 | 1.036 |
| 33 | 10 | 101168146 | 11594790 | 7350 | AAACTCCCCARCATGGAATCT | 0.129 | 0.130 | 1.477 | 1.129 | 1.111 |
| 33 | 10 | 101178468 | 4919310 | 7351 | GTATACATCCSGCTGCAAAGA | 1.621 | 1.669 | 1.433 | 1.106 | 0.973 |
| 33 | 10 | 101188327 | 2494654 | 7352 | AGTCACATCTRTTATATAGTC | 1.355 | 1.325 | 1.361 | 1.200 | 1.001 |
| 33 | 10 | 101203270 | 2494657 | 7353 | ATCCTGGTTAYGAATAGTCAG | 0.157 | 0.155 | 1.367 | 1.404 | 0.907 |
| 33 | 10 | 101210464 | 17111730 | 7354 | AGGCCCTGACRTAATTTCAAC | 0.741 | 0.759 | 0.927 | 1.182 | 0.968 |
| 33 | 10 | 101217569 | 10883350 | 7355 | AGATAAACCCYTGGGCAGCAA | 0.192 | 0.194 | 0.658 | 1.253 | 0.854 |
| 33 | 10 | 101219517 | 2862596 | 7356 | ACTTGAAAATYTCTATACGTC | 0.952 | 0.978 | 0.753 | 0.664 | 0.835 |
| 34 | 11 | 11697651 | 1471014 | 7357 | AATACAATGCYAAGTTTTAGA | 0.887 | 0.848 | 0.157 | 0.371 | 0.281 |
| 34 | 11 | 11704216 | 2233743 | 7358 | GTCTCCTAACYACTCAGTCTC | 0.180 | 0.172 | 0.310 | 0.128 | 0.289 |
| 34 | 11 | 11710726 | 1455252 | 7359 | ATGAATCACARTATACCAATA | 0.410 | 0.388 | 0.484 | 0.124 | 0.710 |
| 34 | 11 | 11717646 | 17446021 | 7360 | AGGTGGGAGGYGTGAAATCAG | 0.582 | 0.542 | 0.188 | 0.111 | 0.628 |
| 34 | 11 | 11723285 | 11022014 | 7361 | ACCAGTGGGAYGTAGCTAAAA | 0.482 | 0.492 | 0.160 | 0.198 | 0.488 |
| 34 | 11 | 11730217 | 897362 | 7362 | ACAAGATAAAYGGATTTGGAA | 0.014 | 0.014 | 0.092 | 0.775 | 0.568 |
| 34 | 11 | 11737183 | 16924665 | 7363 | AAAAAGCATAYGTAATCCTCT | 0.177 | 0.172 | 0.082 | 0.798 | 1.089 |
| 34 | 11 | 11746757 | 16910054 | 7364 | AATCAGTTTTRTGGAGTGCAT | 0.101 | 0.093 | 1.028 | 0.885 | 1.111 |
| 34 | 11 | 11756544 | 1455264 | 7365 | TCTTCATAAAYGTTTCTGACT | 0.518 | 0.493 | 1.110 | 0.877 | 1.113 |
| 34 | 11 | 11763136 | 16910116 | 7366 | AAGCTTGTCTRCATGGGGGCT | 2.970 | 2.740 | 1.363 | 1.474 | 1.812 |
| 34 | 11 | 11770132 | 7940987 | 7367 | ATTGTTTTCTWCAATCATAGC | 0.122 | 0.122 | 1.701 | 1.470 | 1.762 |
| 34 | 11 | 11781525 | 2054115 | 7368 | TTAACACCTCRAGAGATACAG | 0.676 | 0.642 | 2.480 | 1.918 | 2.190 |
| 34 | 11 | 11787807 | 7120182 | 7369 | ATATATGGAAWGAAAGCCTTT | 0.459 | 0.467 | 0.888 | 2.936 | 2.151 |
| 34 | 11 | 11793828 | 12575179 | 7370 | TCTGTGATTAMCATGACTTAA | 1.882 | 1.898 | 1.447 | 2.886 | 2.321 |
| 34 | 11 | 11801092 | 1542379 | 7371 | TAGATGTTAARTTCATACTTG | 0.132 | 0.136 | 2.043 | 2.055 | 2.936 |
| 34 | 11 | 11807368 | 7944875 | 7372 | GATGATAATTRGGTTTAAAAG | 1.003 | 0.975 | 1.889 | 2.195 | 2.740 |
| 34 | 11 | 11821720 | 7926410 | 7373 | TGTGTATTTCRTTTTAGAGCT | 2.262 | 2.012 | 1.645 | 1.987 | 2.787 |
| 34 | 11 | 11824326 | 17378517 | 7374 | TCTCTTTTAAYAGCATCCCAA | 0.314 | 0.314 | 1.863 | 2.412 | 2.772 |
| 34 | 11 | 11850597 | 7935751 | 7375 | GGAAGCAAGTYAAAGAATTTG | 1.995 | 1.952 | 1.754 | 1.724 | 3.062 |
| 34 | 11 | 11873223 | 7111921 | 7376 | ATTAATATTGYTGATATTATT | 0.000 | 0.000 | 2.182 | 1.870 | 2.767 |
| 34 | 11 | 11879369 | 4243945 | 7377 | CAAAAGAAAARAAAAAGTCTT | 0.002 | 0.002 | 1.976 | 2.905 | 2.481 |
| 34 | 11 | 11887874 | 4910429 | 7378 | TAATTTCATAYAGTGCCTTTG | 2.977 | 3.180 | 1.258 | 3.233 | 2.264 |
| 34 | 11 | 11911794 | 6485303 | 7379 | TGAGACATAAYTGGTGTCAAT | 0.051 | 0.052 | 3.108 | 2.932 | 2.320 |
| 34 | 11 | 11930555 | 16910238 | 7380 | ATAGGAGCCARTAGAGAAACA | 0.453 | 0.464 | 3.687 | 2.533 | 2.556 |
| 34 | 11 | 11936250 | 1979687 | 7381 | ACTTGCTATCRCACAAAAGAG | 3.982 | 3.375 | 2.819 | 2.533 | 2.456 |
| 34 | 11 | 11944883 | 7480000 | 7382 | AGCATCAACASGGGAAAAAAA | 2.609 | 2.458 | 2.689 | 2.547 | 2.418 |
| 34 | 11 | 11951408 | 1552796 | 7383 | GGACTGGAGCYGACAGACACT | 0.708 | 0.708 | 2.653 | 2.178 | 2.153 |
| 34 | 11 | 11957612 | 4757519 | 7384 | CCCAGGAGATRAGTGCCAGAG | 0.486 | 0.478 | 1.354 | 2.378 | 2.049 |
| 34 | 11 | 11964354 | 7113678 | 7385 | ATTATGAGACYATGGAAAATT | 0.000 | 0.000 | 0.478 | 2.270 | 2.125 |
| 34 | 11 | 11971244 | 987663 | 7386 | TCTAGCATTTRCACTGAAAGT | 0.087 | 0.090 | 0.209 | 0.798 | 1.523 |
| 34 | 11 | 11977280 | 17380453 | 7387 | TTACAAGTCCRGGTGTCTAGT | 0.688 | 0.680 | 0.118 | 0.169 | 1.662 |
| 34 | 11 | 11983640 | 6485369 | 7388 | TGGTAGCATAYAGAATAGTAA | 0.108 | 0.105 | 0.058 | 0.112 | 1.631 |
| 34 | 11 | 11998072 | 4500466 | 7389 | TTCCTCTATCRTTGTCATGCT | 0.147 | 0.143 | 0.138 | 0.116 | 0.749 |
| 34 | 11 | 12008425 | 4757082 | 7390 | CCCATGGAAGRGCAAAAGGCA | 0.058 | 0.054 | 0.083 | 0.196 | 0.227 |
| 34 | 11 | 12020875 | 16910400 | 7391 | TTAGTAAATAYGCTGACTTCC | 0.405 | 0.375 | 0.151 | 0.189 | 0.138 |
| 34 | 11 | 12029564 | 1994328 | 7392 | CTCTCTGAGGRTGAAATGAGA | 0.442 | 0.444 | 0.329 | 0.212 | 0.089 |
| 34 | 11 | 12040379 | 11022142 | 7393 | GAATCTCTAAYGGACTGAGGA | 0.527 | 0.480 | 0.348 | 0.220 | 0.068 |
| 34 | 11 | 12050034 | 2018347 | 7394 | TACCATGTGCRGTTACTAATG | 0.742 | 0.757 | 0.536 | 0.210 | 0.150 |
| 34 | 11 | 12056845 | 10831721 | 7395 | TTTCTCCCCTYATTGGCCTCG | 0.074 | 0.072 | 0.432 | 0.200 | 0.081 |
| 34 | 11 | 12064047 | 9665967 | 7396 | CTTAAGAAGARCCTAGAGCAA | 0.850 | 0.819 | 0.304 | 0.161 | 0.103 |
| 34 | 11 | 12070720 | 11022169 | 7397 | TCAGAGCTCCRTGCAGGCCCA | 0.179 | 0.185 | 0.080 | 0.238 | 0.123 |
| 34 | 11 | 12078670 | 7111481 | 7398 | CTAGCGAGGAYGCGAAACTTC | 0.083 | 0.087 | 0.094 | 0.166 | 0.177 |
| 34 | 11 | 12094784 | 7947696 | 7399 | TTCAGAGCCCRAGGGAGTGAT | 0.018 | 0.018 | 0.091 | 0.089 | 0.336 |
| 34 | 11 | 12107131 | 7940840 | 7400 | TGCCTTCTTARTCTCTGAGGT | 0.173 | 0.177 | 0.075 | 0.136 | 0.336 |
| 34 | 11 | 12112990 | 16910593 | 7401 | TGGAAGGTTTYGAGGAGGCTC | 0.843 | 0.828 | 0.137 | 0.073 | 0.513 |
| 34 | 11 | 12119025 | 1009087 | 7402 | AGACTGAGGARGAAGGACAGG | 0.081 | 0.081 | 0.245 | 0.290 | 0.519 |
| 34 | 11 | 12126901 | 10831742 | 7403 | GTGCAAAACCRTCATACAAAC | 0.328 | 0.334 | 0.351 | 0.399 | 0.669 |
| 34 | 11 | 12132301 | 4756783 | 7404 | TGGGGGACTTRGCCCTGACCT | 0.398 | 0.389 | 0.516 | 0.808 | 0.495 |
| 34 | 11 | 12139612 | 7131034 | 7405 | AAGTTTTGAGMAGAGACTGTT | 0.462 | 0.470 | 0.688 | 0.970 | 0.555 |
| 34 | 11 | 12149786 | 10831746 | 7406 | CTGCAGGTAAYTGAGATGCTG | 1.288 | 1.234 | 1.163 | 0.920 | 0.702 |
| 34 | 11 | 12159487 | 7926135 | 7407 | AGAAATTCTCRATTAAAGTCC | 0.473 | 0.464 | 1.340 | 0.981 | 0.836 |
| 34 | 11 | 12172973 | 10437601 | 7408 | GAGGCTATAARAAGAAAATAT | 1.281 | 1.328 | 1.362 | 1.018 | 0.906 |
| 34 | 11 | 12179611 | 10831761 | 7409 | GTGGGTGCGCRTTCCCTTGCC | 0.797 | 0.801 | 0.878 | 1.093 | 1.235 |
| 34 | 11 | 12186231 | 2279390 | 7410 | TCGTGAAGGTKCTAGAGCCTC | 0.612 | 0.650 | 0.874 | 1.134 | 1.306 |
| 34 | 11 | 12191983 | 11022250 | 7411 | TCCCGGGTGAKTTTGTGCAAT | 0.115 | 0.117 | 0.588 | 0.880 | 1.380 |
| 34 | 11 | 12198606 | 4237704 | 7412 | CGGAGCCCCCRTGTTTCTCTG | 0.433 | 0.431 | 0.478 | 1.475 | 1.293 |
| 34 | 11 | 12212122 | 2010576 | 7413 | ATTTGGGTATRTGTGTTGCTA | 0.742 | 0.682 | 0.404 | 0.974 | 1.468 |
| 34 | 11 | 12218140 | 2706631 | 7414 | ATACAGTTTGMAGGAGCTTTG | 0.554 | 0.567 | 1.390 | 0.895 | 1.430 |
| 34 | 11 | 12224116 | 11608031 | 7415 | TCCAGCTGACKGGGCCCTTCA | 0.000 | 0.000 | 1.247 | 0.657 | 1.222 |
| 34 | 11 | 12231441 | 1826608 | 7416 | GTCTCCAAGCYGACCTTGCCT | 1.847 | 1.770 | 1.183 | 1.069 | 0.902 |
| 35 | 11 | 19443295 | 12792754 | 7417 | ACTTTCCACTYTCCTTAGGTA | 0.250 | 0.245 | 0.293 | 0.520 | 0.203 |
| 35 | 11 | 19452545 | 2632034 | 7418 | GATGTGTACAYTATGATACAA | 0.207 | 0.201 | 0.533 | 0.520 | 0.323 |
| 35 | 11 | 19464393 | 10833124 | 7419 | ATAGTCTCTTYCTGGGACCCT | 0.337 | 0.328 | 0.708 | 0.473 | 0.246 |
| 35 | 11 | 19467603 | 11025154 | 7420 | ACAGGCAGATYTGAGTAACTT | 1.491 | 1.473 | 0.658 | 0.308 | 0.236 |
| 35 | 11 | 19475674 | 2403494 | 7421 | CCCAGGCTCTYTTCCTATTTT | 0.862 | 0.866 | 0.604 | 0.419 | 0.350 |
| 35 | 11 | 19486762 | 16936838 | 7422 | CTAAGTTCCCYGTCCTGTACT | 0.037 | 0.036 | 0.513 | 0.351 | 0.380 |
| 35 | 11 | 19496685 | 2702735 | 7423 | TTAGAACAAARTACCCTGCCT | 0.030 | 0.030 | 0.233 | 0.349 | 0.338 |
| 35 | 11 | 19504649 | 7127676 | 7424 | TTTTTCACCCRTTGTTTACTC | 0.127 | 0.128 | 0.033 | 0.465 | 0.290 |
| 35 | 11 | 19518021 | 16936939 | 7425 | AGATAGGTCGYGGAGGGGGAC | 0.759 | 0.827 | 0.065 | 0.172 | 0.249 |
| 35 | 11 | 19523724 | 11025179 | 7426 | TAGTGCATTTYATTTCCTAGA | 0.002 | 0.002 | 0.257 | 0.129 | 0.279 |
| 35 | 11 | 19531121 | 11025181 | 7427 | TCTGCAATTGYGGAGTGAAAA | 0.236 | 0.234 | 0.382 | 0.141 | 0.361 |
| 35 | 11 | 19543750 | 4757007 | 7428 | TTGATTTTCCWATGGTGATAA | 0.726 | 0.742 | 0.315 | 0.149 | 0.217 |
| 35 | 11 | 19550426 | 1487199 | 7429 | TAAAGCCCTCMGTCCCTTCTT | 0.000 | 0.000 | 0.356 | 0.215 | 0.137 |
| 35 | 11 | 19556547 | 10741780 | 7430 | CCTGATGTCAYTGAGCCTCTA | 0.599 | 0.612 | 0.273 | 0.199 | 0.889 |
| 35 | 11 | 19569906 | 4757821 | 7431 | TTTATCTTGARGTCCTGAAAT | 0.114 | 0.116 | 0.154 | 0.379 | 1.099 |
| 35 | 11 | 19576520 | 1471903 | 7432 | TAGCTTCAGGKAATTCTTTTT | 0.029 | 0.030 | 0.252 | 0.415 | 1.024 |
| 35 | 11 | 19584103 | 10833134 | 7433 | CATACCGTTTYAGACGGAGGC | 0.387 | 0.391 | 0.300 | 1.356 | 1.118 |
| 35 | 11 | 19592029 | 17599506 | 7434 | TAAAACCTAARTTGCCTCATC | 0.646 | 0.652 | 0.392 | 1.434 | 1.991 |
| 35 | 11 | 19607973 | 7116289 | 7435 | TGGAATGGCCRCATCAACCCT | 0.773 | 0.753 | 1.995 | 1.196 | 2.735 |
| 35 | 11 | 19614433 | 16937060 | 7436 | TACAAAGCGGMTCTTGGTCTG | 0.355 | 0.365 | 2.448 | 1.618 | 3.108 |
| 35 | 11 | 19630248 | 1559667 | 7437 | CCAATTAAATRAAGCCTATTA | 3.341 | 2.951 | 1.808 | 2.759 | 3.108 |
| 35 | 11 | 19638525 | 16937087 | 7438 | CTGGACATTAKGGTTCATACG | 0.625 | 0.626 | 2.029 | 3.375 | 3.488 |
| 35 | 11 | 19647977 | 10833153 | 7439 | TCCTTCCTCCYTTGTCCTGGG | 0.075 | 0.074 | 3.105 | 3.474 | 3.665 |
| 35 | 11 | 19653940 | 2216997 | 7440 | TACAGCAATTKGTAATTCACG | 1.141 | 1.204 | 3.271 | 3.604 | 3.687 |
| 35 | 11 | 19659944 | 7113050 | 7441 | AGACCTGTGGRCACATCTGAA | 2.724 | 2.885 | 3.322 | 4.036 | 3.710 |
| 35 | 11 | 19663584 | 752459 | 7442 | AGGTATGGCCRGGCTGAGGAG | 3.029 | 3.156 | 3.676 | 3.633 | 3.488 |
| 35 | 11 | 19687211 | 890136 | 7443 | CTTATAGGCCRTTTTTATAAT | 2.155 | 2.231 | 3.748 | 3.467 | 3.386 |
| 35 | 11 | 19696994 | — | 7444 | CACAAATATAYACACATGGAA | 0.000 | 0.000 | 3.091 | 3.551 | 3.559 |
| 35 | 11 | 19707031 | 1559665 | 7445 | CAAGGAACGTRTGCAGAGAAA | 0.631 | 0.663 | 1.379 | 2.883 | 2.492 |
| 35 | 11 | 19724079 | 12223569 | 7446 | GATCAGGGCTKACCGTATTTA | 0.426 | 0.396 | 0.547 | 2.000 | 2.291 |
| 35 | 11 | 19731568 | 16937173 | 7447 | CATATTTGTGKTAGTAAGTCA | 0.190 | 0.189 | 0.384 | 0.981 | 2.440 |
| 35 | 11 | 19738767 | 7118473 | 7448 | GCAAACGGCAYCTTTTCAAAA | 0.889 | 0.862 | 0.419 | 0.289 | 2.540 |
| 35 | 11 | 19744864 | 12797612 | 7449 | CCACTTGGGAWTGGCAACTAG | 0.095 | 0.097 | 0.338 | 0.205 | 1.622 |
| 35 | 11 | 19751009 | 1425237 | 7450 | AACTGAAATAYGTTATCTGGG | 0.687 | 0.677 | 0.319 | 0.207 | 0.769 |
| 35 | 11 | 19764639 | 10766594 | 7451 | AGGTCATTGAKATTGCATACA | 0.177 | 0.181 | 0.073 | 0.380 | 0.384 |
| 35 | 11 | 19769834 | 10833171 | 7452 | ATCCAGAGAGYGGGCACTCAG | 0.126 | 0.127 | 0.202 | 0.362 | 0.408 |
| 35 | 11 | 19781820 | 10833174 | 7453 | GATTCCCCCARTGGTAGAGGA | 0.107 | 0.103 | 0.369 | 0.261 | 0.399 |
| 35 | 11 | 19790982 | 10833178 | 7454 | TAAGAGGAGASCAGAATTCAG | 0.602 | 0.609 | 0.337 | 0.393 | 0.327 |
| 35 | 11 | 19795239 | 1425235 | 7455 | ATAATCACCAYGAGTGCACAC | 1.180 | 1.113 | 0.472 | 0.360 | 0.368 |
| 35 | 11 | 19812716 | 1816814 | 7456 | ATGGAAATACMACTTGCATCT | 0.144 | 0.142 | 0.713 | 0.474 | 0.210 |
| 35 | 11 | 19820738 | 16937196 | 7457 | ACGATGCCCCWTCACTCCAAG | 0.479 | 0.477 | 0.680 | 0.455 | 0.274 |
| 35 | 11 | 19827846 | 12287043 | 7458 | ACATGTTGCARAACCAAGAAG | 0.642 | 0.618 | 0.452 | 0.553 | 0.195 |
| 35 | 11 | 19842939 | 2014079 | 7459 | CTGGGGAGGTRCATCCTGGTC | 0.589 | 0.567 | 0.405 | 0.374 | 0.189 |
| 35 | 11 | 19848438 | 1838053 | 7460 | ACATGATTTCSTCCTGGTAGA | 0.604 | 0.612 | 0.380 | 0.208 | 0.172 |
| 35 | 11 | 19854870 | 12803334 | 7461 | ACAGTGGATGWCCCCTGATCC | 0.064 | 0.065 | 0.176 | 0.216 | 0.189 |
| 35 | 11 | 19861136 | 2625301 | 7462 | TTACATCAGTSGCTCGGTCTC | 0.380 | 0.393 | 0.154 | 0.166 | 0.161 |
| 35 | 11 | 19866977 | 12418955 | 7463 | GGTCTTTTACRCACTACCTTT | 0.045 | 0.043 | 0.065 | 0.080 | 0.094 |
| 35 | 11 | 19872824 | 7950256 | 7464 | GGAAAGACTTYAGTGTCAGAA | 0.489 | 0.485 | 0.096 | 0.037 | 0.099 |
| 35 | 11 | 19884920 | 2028608 | 7465 | AGCTGTTAAARTAGAACTCCG | 0.161 | 0.157 | 0.034 | 0.021 | 0.098 |
| 35 | 11 | 19894431 | 10833192 | 7466 | ATGTTCAGCARTGCAGCCCAA | 0.180 | 0.171 | 0.062 | 0.074 | 0.050 |
| 35 | 11 | 19906067 | 12223116 | 7467 | ACAAGGCCTGRTCATGTTTCC | 0.027 | 0.027 | 0.036 | 0.057 | 0.022 |
| 35 | 11 | 19912076 | 1372989 | 7468 | CAGGAATGAARAGCATGCCCG | 0.206 | 0.209 | 0.114 | 0.105 | 0.019 |
| 35 | 11 | 19918239 | 10833202 | 7469 | CTTCAGATAARGTTGCTTTTC | 0.362 | 0.345 | 0.111 | 0.041 | 0.023 |
| 35 | 11 | 19929891 | 11025337 | 7470 | ACCTTTGCTTRAAAGCACCGA | 0.618 | 0.597 | 0.223 | 0.028 | 0.015 |
| 35 | 11 | 19944988 | 2403547 | 7471 | ACTCTCTCACRTTTCCAACTT | 0.173 | 0.174 | 0.171 | 0.055 | 0.023 |
| 35 | 11 | 19953560 | 10833211 | 7472 | AATTAAAATGYTCCTGGACTT | 0.420 | 0.434 | 0.090 | 0.066 | 0.009 |
| 35 | 11 | 19959591 | 10833212 | 7473 | ATTACCCAACYGTGTGTGTTG | 0.002 | 0.002 | 0.071 | 0.051 | 0.012 |
| 35 | 11 | 19966633 | 1442715 | 7474 | TCCACCTTTGWGCCAGGAAAC | 0.055 | 0.056 | 0.066 | 0.044 | 0.018 |
| 35 | 11 | 19973135 | 7111951 | 7475 | GAAGGCACACRTTATTTATTT | 0.449 | 0.467 | 0.015 | 0.013 | 0.072 |
| 35 | 11 | 19980715 | 16937344 | 7476 | CCGGTTTGGTRGAAAGGAAGA | 0.139 | 0.136 | 0.046 | 0.024 | 0.075 |
| 35 | 11 | 19988441 | 11605275 | 7477 | TTTAGAGACTYATTTACAAGA | 0.075 | 0.074 | 0.052 | 0.022 | 0.074 |
| 35 | 11 | 19995854 | 10500867 | 7478 | CTATAATTCTYGTTGAAAATA | 0.260 | 0.257 | 0.029 | 0.124 | 0.066 |
| 35 | 11 | 20006435 | 4757880 | 7479 | CTGAAACTGGRTCTCCTGGTT | 0.072 | 0.069 | 0.067 | 0.154 | 0.074 |
| 35 | 11 | 20012239 | 12276043 | 7480 | AGTAAAGAGGKTAGTTGGTTC | 0.305 | 0.289 | 0.332 | 0.119 | 0.052 |
| 35 | 11 | 20022249 | 3802799 | 7481 | TGTCTGACGAKTCCGACAAAA | 0.430 | 0.419 | 0.338 | 0.185 | 0.061 |
| 35 | 11 | 20035072 | 11025365 | 7482 | TAACACAGCCRTAAAGCTCTA | 1.041 | 1.020 | 0.435 | 0.220 | 0.136 |
| 35 | 11 | 20048972 | 11025369 | 7483 | AACCCTTTTGYTTAGCAGAAA | 0.269 | 0.251 | 0.538 | 0.213 | 0.142 |
| 35 | 11 | 20056025 | 12146551 | 7484 | ACTTCATTCCYGCTCCTCCTG | 0.336 | 0.332 | 0.436 | 0.217 | 0.540 |
| 35 | 11 | 20062960 | 10833240 | 7485 | TTTAAACTTTYTGTATAGCAA | 0.544 | 0.513 | 0.143 | 0.377 | 0.538 |
| 35 | 11 | 20069068 | 1837971 | 7486 | TGAAGCTGACRGATATCCGCT | 0.200 | 0.200 | 0.114 | 0.414 | 0.470 |
| 35 | 11 | 20076082 | 2289561 | 7487 | GCTGCAATTAYCTAACAAAAG | 0.238 | 0.226 | 0.288 | 0.778 | 0.600 |
| 35 | 11 | 20089989 | 4757893 | 7488 | ACTCAGTTGARGACCAGAGAT | 0.107 | 0.109 | 0.305 | 0.698 | 0.637 |
| 35 | 11 | 20098415 | 2246192 | 7489 | CCCTGCTTTARTCTCAGCAAA | 0.900 | 0.963 | 1.169 | 0.596 | 0.726 |
| 35 | 11 | 20116159 | 1520905 | 7490 | CCATCTACCAYAAAGCAGCTC | 0.576 | 0.551 | 1.120 | 0.612 | 1.067 |
| 35 | 11 | 20122076 | 1442717 | 7491 | ATCCTTTCACKCAGGGCTGAG | 2.092 | 2.041 | 1.093 | 0.709 | 0.974 |
| 35 | 11 | 20139355 | 10833258 | 7492 | AAAAGTAAAASGAGTCTCCTT | 0.086 | 0.086 | 0.892 | 0.939 | 0.999 |
| 35 | 11 | 20153249 | 16905792 | 7493 | AGAAAGCAAGRGCCAGTCAGG | 0.030 | 0.032 | 0.823 | 1.843 | 1.066 |
| 35 | 11 | 20159301 | 10833260 | 7494 | TAGGTGTCCTYGTAGGTATTA | 0.572 | 0.561 | 0.236 | 1.403 | 1.067 |
| 35 | 11 | 20168040 | 17232465 | 7495 | AGAAACACATRGTTCAACCAA | 0.416 | 0.415 | 1.155 | 1.297 | 1.291 |
| 35 | 11 | 20178333 | — | 7496 | GTGTATTTGGYGTAAGAAGTT | 0.743 | 0.751 | 1.227 | 0.701 | 1.238 |
| 35 | 11 | 20187177 | 17298222 | 7497 | TTCAGGAGCAYTGCAACACAA | 2.141 | 2.195 | 1.118 | 0.759 | 0.981 |
| 35 | 11 | 20193972 | 11025445 | 7498 | TCATGCCAGARCTTTAGAGCC | 0.086 | 0.084 | 1.302 | 1.025 | 1.004 |
| 35 | 11 | 20199867 | 1356981 | 7499 | TGTAATAATARGTCTAATCAA | 0.413 | 0.388 | 0.977 | 0.808 | 0.521 |
| 35 | 11 | 20205827 | 1520907 | 7500 | CACTGACTTAYATGCCCTTAA | 0.616 | 0.603 | 0.248 | 0.790 | 1.444 |
| 35 | 11 | 20219977 | 1402377 | 7501 | TTTTATTAAGWTATGCCTTGG | 0.193 | 0.202 | 0.250 | 0.752 | 1.455 |
| 35 | 11 | 20225966 | 1520896 | 7502 | TTGTAAATCCRATGACTATTT | 0.621 | 0.620 | 0.255 | 0.215 | 1.342 |
| 35 | 11 | 20233015 | 10833271 | 7503 | CTGATATGAARCAATTCATCA | 0.058 | 0.054 | 0.303 | 1.186 | 1.332 |
| 35 | 11 | 20245613 | 4757917 | 7504 | GCCCTACCACRTGTGCAGGTT | 0.369 | 0.363 | 0.324 | 1.099 | 1.336 |
| 35 | 11 | 20256439 | 2403577 | 7505 | CTGTTATTGCYTTTCACTGTA | 0.680 | 0.698 | 1.463 | 0.962 | 0.784 |
| 35 | 11 | 20263795 | 17232549 | 7506 | GATTCCATCCYGTTGACTTTG | 0.340 | 0.336 | 1.492 | 1.020 | 0.813 |
| 35 | 11 | 20269195 | 12804805 | 7507 | ACCTGAGCCCSAGATTTTGGT | 3.032 | 2.714 | 1.370 | 1.097 | 1.304 |
| 35 | 11 | 20275658 | 10833282 | 7508 | TTTGGCTGATRATTTTAGGCA | 0.249 | 0.250 | 1.307 | 1.121 | 1.262 |
| 35 | 11 | 20285058 | 7106374 | 7509 | AGCTTCCTCARTAGGAAAGGT | 0.427 | 0.441 | 1.671 | 1.057 | 1.782 |
| 35 | 11 | 20290488 | 16906035 | 7510 | TAACAATAGCYAATATTCGTA | 0.211 | 0.208 | 0.309 | 1.775 | 1.754 |
| 35 | 11 | 20296884 | 11025491 | 7511 | TTCCTAGGGAYTTGCTAATGT | 1.042 | 1.058 | 0.252 | 1.975 | 1.891 |
| 35 | 11 | 20308077 | — | 7512 | GCTTATGTGTSTGTGAGTACC | 0.075 | 0.074 | 1.158 | 1.317 | 1.996 |
| 35 | 11 | 20315278 | 7929060 | 7513 | AAGGGTGACTRTTGTTCTATC | 0.000 | 0.000 | 1.376 | 1.538 | 1.856 |
| 35 | 11 | 20335244 | 10833310 | 7514 | AAGATCCACTRCTTGCACAAG | 2.180 | 2.261 | 1.539 | 1.539 | 2.275 |
| 36 | 11 | 95101359 | 1944076 | 7515 | GCAGAAAAGGSTAGAATACAG | 0.026 | 0.025 | 0.063 | 0.131 | 0.214 |
| 36 | 11 | 95109994 | 12287206 | 7516 | TTCTGAGGCTYTTAGCTCATT | 0.164 | 0.161 | 0.113 | 0.152 | 0.153 |
| 36 | 11 | 95124142 | 1255149 | 7517 | CCAAATGATTRCCTTGTTGTT | 0.067 | 0.066 | 0.091 | 0.096 | 0.256 |
| 36 | 11 | 95129000 | 1569057 | 7518 | CTGGAAGTTGRAGCTTAGAAC | 1.042 | 1.012 | 0.165 | 0.135 | 0.266 |
| 36 | 11 | 95139861 | 1255167 | 7519 | ATGTATTGTTYAAATTGAGCG | 0.056 | 0.055 | 0.181 | 0.138 | 0.303 |
| 36 | 11 | 95150156 | 12418346 | 7520 | GAGGAACACTRACAAAAGCAG | 0.259 | 0.285 | 0.533 | 0.373 | 0.492 |
| 36 | 11 | 95153145 | 1255169 | 7521 | TCTTCTTTTGSAGTAACTCAA | 0.164 | 0.169 | 0.215 | 0.450 | 0.402 |
| 36 | 11 | 95174966 | 16922554 | 7522 | AGAGGAAAAAYGAAATAATAG | 1.055 | 1.091 | 0.576 | 0.576 | 0.489 |
| 36 | 11 | 95188216 | 1255171 | 7523 | CCTTCTATCTYTTTGAACGCT | 0.145 | 0.133 | 0.646 | 0.731 | 0.546 |
| 36 | 11 | 95195830 | 12421552 | 7524 | GCAGTCATACRTACACTTGAA | 0.995 | 1.000 | 0.848 | 0.819 | 0.621 |
| 36 | 11 | 95201389 | 564480 | 7525 | CACCTGACATYACATTCATTT | 0.445 | 0.443 | 1.069 | 0.930 | 0.616 |
| 36 | 11 | 95206876 | 16922618 | 7526 | GGAAAAAAAARAAATGGCAAC | 0.000 | 0.000 | 1.230 | 1.026 | 0.397 |
| 36 | 11 | 95213832 | 17229289 | 7527 | TCACAATAAASCAGGTGTTTT | 1.577 | 1.561 | 0.967 | 0.787 | 0.630 |
| 36 | 11 | 95221172 | 12418620 | 7528 | CATATCTGAGRAATAAACTCT | 0.228 | 0.240 | 0.853 | 0.740 | 0.780 |
| 36 | 11 | 95228404 | 515546 | 7529 | TTTCTTTTAASACTATTAAGT | 0.000 | 0.000 | 0.853 | 0.372 | 0.763 |
| 36 | 11 | 95238277 | 687559 | 7530 | TAAGATGCTGRGAAGACTGCA | 0.275 | 0.282 | 0.056 | 0.601 | 0.461 |
| 36 | 11 | 95254194 | 643862 | 7531 | GCTAAAATTTKGCCAAGTTCT | 0.000 | 0.000 | 0.033 | 0.715 | 0.413 |
| 36 | 11 | 95259984 | 17840711 | 7532 | GATATAAGTAWCCTCAACTTA | 0.022 | 0.021 | 0.231 | 0.198 | 0.315 |
| 36 | 11 | 95265412 | 12422059 | 7533 | CTAGGCCTATRTACTTCATCT | 0.121 | 0.123 | 0.458 | 0.143 | 0.243 |
| 36 | 11 | 95273880 | 561635 | 7534 | TTATTTCTTCYAGTTGTCCCC | 1.030 | 1.000 | 0.298 | 0.089 | 0.490 |
| 36 | 11 | 95292570 | 12417555 | 7535 | AGAAGGAATCYTTTTTAATCC | 0.808 | 0.814 | 0.293 | 0.145 | 0.179 |
| 36 | 11 | 95295504 | 16922701 | 7536 | CTTTAAGCCAMCAATTATAGT | 0.042 | 0.043 | 0.273 | 0.103 | 0.168 |
| 36 | 11 | 95327557 | 11021358 | 7537 | TTTCACATTCWTGGTATTTTC | 0.052 | 0.049 | 0.156 | 0.435 | 0.128 |
| 36 | 11 | 95334361 | 1940208 | 7538 | GGTCAGTTAARTTTGGAGATC | 0.002 | 0.002 | 0.025 | 0.420 | 0.127 |
| 36 | 11 | 95344073 | 16922748 | 7539 | CATATCTTTAYAGCGTTACTG | 0.590 | 0.582 | 0.406 | 0.217 | 0.164 |
| 36 | 11 | 95354964 | 16922792 | 7540 | TCAGAAGACAYGGGAAACGCA | 0.070 | 0.064 | 0.404 | 0.100 | 0.217 |
| 36 | 11 | 95362324 | 7113517 | 7541 | TGAAAATCAAYCTCTGTGTGT | 1.550 | 1.574 | 0.459 | 0.129 | 0.224 |
| 36 | 11 | 95370249 | 7110427 | 7542 | CTGCCAGACCRATGAAAACAT | 0.067 | 0.070 | 0.289 | 0.242 | 0.130 |
| 36 | 11 | 95381606 | 11021381 | 7543 | CTAAACTAACRGAGTCAACTA | 0.136 | 0.136 | 0.366 | 0.326 | 0.069 |
| 36 | 11 | 95386077 | 11021388 | 7544 | AACCCTAAGCRTTCTTTGTAT | 0.024 | 0.024 | 0.112 | 0.225 | 0.068 |
| 36 | 11 | 95410392 | 10831467 | 7545 | AGATTGATACYATGACTTCTG | 0.248 | 0.253 | 0.154 | 0.280 | 0.059 |
| 36 | 11 | 95417356 | 17233750 | 7546 | CCCTAGGAGAMACCTTAATCT | 0.709 | 0.755 | 0.135 | 0.043 | 0.100 |
| 36 | 11 | 95423237 | 7125575 | 7547 | AAGAATGAATSCTTCACAGGG | 0.337 | 0.332 | 0.220 | 0.034 | 0.063 |
| 36 | 11 | 95429607 | 1940153 | 7548 | GTATGTGTAGRCTACCATTCA | 0.139 | 0.137 | 0.186 | 0.024 | 0.085 |
| 36 | 11 | 95435937 | 10831474 | 7549 | ACATTCCTGCYGTCTCACTTC | 0.261 | 0.284 | 0.040 | 0.067 | 0.011 |
| 36 | 11 | 95448039 | 1939485 | 7550 | ATTATTGATAYTGTGCTATCC | 0.128 | 0.130 | 0.010 | 0.057 | 0.011 |
| 36 | 11 | 95453741 | 11021425 | 7551 | CATAATGCATRGGTTTGCCAG | 0.018 | 0.018 | 0.042 | 0.020 | 0.041 |
| 36 | 11 | 95459675 | 10831478 | 7552 | TGACTAAAGAWCCCTCCCTAC | 0.022 | 0.022 | 0.025 | 0.017 | 0.049 |
| 36 | 11 | 95467387 | 6483478 | 7553 | TCATTCACAAMCTAGCAATCA | 0.482 | 0.489 | 0.044 | 0.017 | 0.043 |
| 36 | 11 | 95474499 | 6483479 | 7554 | AGCAGAGCTCYATCACCGGCA | 0.153 | 0.158 | 0.081 | 0.068 | 0.523 |
| 36 | 11 | 95483812 | 4753725 | 7555 | TGCCTATCATRTATTATCAAG | 0.233 | 0.237 | 0.098 | 0.061 | 0.468 |
| 36 | 11 | 95493742 | 10765791 | 7556 | GCCTCCAAATYGCTCAAGGGA | 0.217 | 0.225 | 0.213 | 0.069 | 0.481 |
| 36 | 11 | 95500304 | 7951852 | 7557 | TTCCATCAGCRCCAAATAATT | 0.162 | 0.168 | 0.187 | 1.162 | 0.467 |
| 36 | 11 | 95511342 | 17236265 | 7558 | AATGTTGAACYCCTAATGGCT | 0.897 | 0.899 | 0.156 | 1.025 | 0.474 |
| 36 | 11 | 95520632 | 1939472 | 7559 | GGGTATTGTTYGGAGCAAAGT | 0.055 | 0.055 | 1.544 | 1.016 | 0.753 |
| 36 | 11 | 95539369 | 12575359 | 7560 | GTTTCCTAACYTGCTGCCACC | 0.088 | 0.094 | 1.759 | 1.008 | 1.018 |
| 36 | 11 | 95541663 | 2155001 | 7561 | GTGCTGGCTGSTGTGGGGATT | 4.036 | 3.386 | 1.588 | 0.988 | 0.986 |
| 36 | 11 | 95554246 | 7117004 | 7562 | TTAAAATCTCYGCCTTTCTTT | 0.086 | 0.065 | 1.511 | 1.361 | 1.273 |
| 36 | 11 | 95566406 | 4753743 | 7563 | TGTGATTCAARAAGACAAATT | 0.192 | 0.183 | 1.613 | 1.426 | 1.201 |
| 36 | 11 | 95572963 | 553652 | 7564 | ACCTTAGTCCRAACAGATGAA | 0.246 | 0.248 | 0.266 | 1.468 | 1.139 |
| 36 | 11 | 95579484 | 470141 | 7565 | TTTGTGCTTTYCAGACCTAAA | 0.183 | 0.185 | 0.635 | 1.863 | 1.296 |
| 36 | 11 | 95587058 | 10831497 | 7566 | GGTCTTTTGARGCCATGCCTA | 1.211 | 1.194 | 0.727 | 0.593 | 1.117 |
| 36 | 11 | 95597365 | 12577742 | 7567 | TAACTTTCTTYTCCTTGTGCC | 0.993 | 0.965 | 1.190 | 0.582 | 1.134 |
| 36 | 11 | 95605131 | 7109768 | 7568 | GAGAAATTGTYTGGCATAAAC | 0.400 | 0.404 | 1.254 | 0.696 | 1.170 |
| 36 | 11 | 95611450 | 10501848 | 7569 | ACTTCCTTTAYTGATATGATA | 1.222 | 1.375 | 0.636 | 0.639 | 0.334 |
| 36 | 11 | 95617867 | 485642 | 7570 | AAAAAAGCCARTGCAACTGAT | 0.146 | 0.154 | 0.431 | 0.618 | 0.392 |
| 36 | 11 | 95624336 | 4278478 | 7571 | CTGCCTGTATYGTTATTAGTA | 0.013 | 0.013 | 0.300 | 0.277 | 0.386 |
| 36 | 11 | 95630786 | 10831503 | 7572 | AGATTTGCTTMCTTGATCCTA | 0.591 | 0.563 | 0.031 | 0.248 | 0.770 |
| 36 | 11 | 95639748 | 7115578 | 7573 | ACGTTATTGARAAGTAAATCT | 0.046 | 0.048 | 0.028 | 0.227 | 0.795 |
| 36 | 11 | 95648764 | 557137 | 7574 | CATTCCTTCAKCAAGAGGGTT | 0.127 | 0.125 | 0.218 | 0.056 | 0.482 |
| 36 | 11 | 95655702 | 537756 | 7575 | CCTTAATGTAYACACTTGCAA | 0.144 | 0.135 | 0.141 | 0.390 | 0.286 |
| 36 | 11 | 95662862 | 485842 | 7576 | CTTTGTTAGCYGTTGGCAGAG | 0.882 | 0.861 | 0.157 | 0.475 | 0.263 |
| 36 | 11 | 95674082 | 11021527 | 7577 | TGCATTTTAGYCCAGTTTTTC | 0.302 | 0.296 | 0.892 | 0.310 | 0.131 |
| 36 | 11 | 95682189 | 477556 | 7578 | CAATTATGAGYAATTCATTCT | 0.211 | 0.180 | 0.939 | 0.326 | 0.104 |
| 36 | 11 | 95688991 | 494901 | 7579 | GCTGTTCCTTYATACCCTATC | 1.778 | 1.928 | 0.538 | 0.372 | 0.160 |
| 36 | 11 | 95696359 | 542284 | 7580 | AAGGAACTTAYCTGTCTTCAA | 0.288 | 0.281 | 0.477 | 0.437 | 0.098 |
| 36 | 11 | 95697893 | 4753195 | 7581 | GTCTGACATCYTCATTCCATT | 0.052 | 0.048 | 0.504 | 0.196 | 0.270 |
| 36 | 11 | 95711821 | 10501852 | 7582 | CGTGCTGAGTRACAACGGGCC | 0.135 | 0.137 | 0.047 | 0.231 | 0.278 |
| 36 | 11 | 95717420 | 12791333 | 7583 | AATACTGCAAYAGTCAGGACC | 0.221 | 0.222 | 0.009 | 0.195 | 0.731 |
| 36 | 11 | 95727253 | 10831513 | 7584 | ACTGGTTAAARAATTGAACAA | 0.339 | 0.339 | 0.028 | 0.090 | 0.522 |
| 36 | 11 | 95734731 | 4753748 | 7585 | TCACAAAGCARATAAAGAAGA | 0.032 | 0.005 | 0.024 | 0.072 | 0.613 |
| 36 | 11 | 95747709 | 6483501 | 7586 | TGTAATTTATYTACATTGCCA | 0.000 | 0.000 | 0.333 | 0.597 | 0.692 |
| 36 | 11 | 95759253 | 12273522 | 7587 | AAATTATAGCRTGTAGGATGA | 0.093 | 0.091 | 0.249 | 0.558 | 0.355 |
| 36 | 11 | 95767033 | 10765805 | 7588 | GGTTCTGTATYTGCCCCCAAA | 1.219 | 1.174 | 1.152 | 0.708 | 0.350 |
| 36 | 11 | 95777788 | — | 7589 | AATCTACTTTKTCACTAATAG | 0.133 | 0.133 | 0.914 | 0.749 | 0.358 |
| 36 | 11 | 95798914 | 10501853 | 7590 | TCTGACTGACRTAATGGATCA | 2.091 | 1.972 | 1.124 | 0.766 | 0.505 |
| 36 | 11 | 95810995 | 1451333 | 7591 | GAAATTTACCRAAAGTACAGA | 0.111 | 0.108 | 0.899 | 0.666 | 0.593 |
| 36 | 11 | 95816568 | 7935312 | 7592 | GATTTTTAGASCTCTCTTTGT | 0.724 | 0.717 | 0.886 | 0.664 | 0.565 |
| 36 | 11 | 95823847 | 7928913 | 7593 | GCACTGATAAWATTTCCTGCA | 0.491 | 0.508 | 0.281 | 0.635 | 0.607 |
| 36 | 11 | 95837900 | 7935320 | 7594 | GATTGTGACGWAAAGTCCTTG | 0.217 | 0.212 | 0.269 | 0.766 | 0.578 |
| 36 | 11 | 95842433 | 7114658 | 7595 | CCTTGGGAATKATTTCGCTTG | 0.218 | 0.212 | 0.331 | 0.315 | 0.585 |
| 36 | 11 | 95854566 | 16923596 | 7596 | CTCCTTGAGCRCTCCCTGATT | 0.061 | 0.059 | 0.363 | 0.366 | 0.510 |
| 36 | 11 | 95868655 | 618929 | 7597 | GTTTCTCAGARTGTGTCTCCA | 0.960 | 0.942 | 0.347 | 0.272 | 0.602 |
| 36 | 11 | 95882778 | 564259 | 7598 | AAAACCCTGCRGGGAAAAGAA | 0.703 | 0.687 | 0.412 | 0.165 | 0.257 |
| 36 | 11 | 95899268 | 10831534 | 7599 | CCTGTACTTGYGAAACACTTG | 0.191 | 0.188 | 0.518 | 0.281 | 0.352 |
| 36 | 11 | 95908847 | 1451329 | 7600 | AATATACAGGSAATTATAGTA | 0.322 | 0.322 | 0.187 | 0.391 | 0.285 |
| 37 | 12 | 56066088 | 4108243 | 7601 | TTACAAAAATRAAAAAAATGC | 0.117 | 0.117 | 0.367 | 0.342 | 0.640 |
| 37 | 12 | 56096521 | 537482 | 7602 | GGCTGCCCAAYAGAAACTTGC | 0.948 | 0.966 | 0.334 | 0.429 | 0.598 |
| 37 | 12 | 56102189 | 1798710 | 7603 | ATCTATCCCTSTGCACTTGCA | 0.129 | 0.136 | 0.211 | 0.605 | 0.742 |
| 37 | 12 | 56112400 | 481196 | 7604 | TCAACCCTCTRGAGAACAACA | 0.001 | 0.001 | 0.580 | 0.670 | 1.176 |
| 37 | 12 | 56145698 | 7305145 | 7605 | AGTGCCGGGARGAACCCTTGG | 0.363 | 0.352 | 0.691 | 0.504 | 1.195 |
| 37 | 12 | 56152088 | 2228226 | 7606 | TGGGGAAACASAATTCCTCAA | 1.157 | 1.228 | 0.807 | 0.772 | 1.458 |
| 37 | 12 | 56163423 | 511752 | 7607 | CTGGATGATAYAATTTCCTAA | 1.294 | 1.274 | 0.794 | 1.437 | 1.752 |
| 37 | 12 | 56177450 | 17119735 | 7608 | CAGTGACTGTRGGCTAAGAAT | 0.328 | 0.325 | 1.101 | 1.710 | 1.901 |
| 37 | 12 | 56197735 | 703835 | 7609 | AAATTTTTGGRAAAGGGTAGG | 0.057 | 0.040 | 1.861 | 1.944 | 1.901 |
| 37 | 12 | 56224348 | 775238 | 7610 | CCTACCTACAYCCTCCTGTAT | 0.984 | 0.994 | 1.792 | 2.104 | 2.040 |
| 37 | 12 | 56232777 | 11172247 | 7611 | ACCAGGTCGGSAGCTGGCTTA | 2.851 | 2.568 | 1.960 | 2.032 | 2.065 |
| 37 | 12 | 56244580 | 775322 | 7612 | GTCCCAGTGGRTGAGGGTGTG | 1.036 | 1.041 | 2.227 | 1.869 | 2.377 |
| 37 | 12 | 56254982 | 1678542 | 7613 | TGAAATGCCGSTGATAGAGAG | 2.026 | 1.950 | 2.025 | 2.100 | 2.467 |
| 37 | 12 | 56262914 | 2888334 | 7614 | GTGATAAGGTSTGGACGAAAA | 1.210 | 1.247 | 1.541 | 2.181 | 2.735 |
| 37 | 12 | 56265007 | 775251 | 7615 | GAACCCAGAGYTGATTTAAAA | 1.336 | 1.355 | 1.934 | 2.362 | 2.687 |
| 37 | 12 | 56288866 | 2306390 | 7616 | CAACCCCTCGYTCACGGAGCC | 0.657 | 0.669 | 1.711 | 2.214 | 2.713 |
| 37 | 12 | 56299442 | 2277324 | 7617 | TCCAAGCCGCRGCTCTCGCCA | 1.580 | 1.592 | 2.470 | 2.845 | 2.778 |
| 37 | 12 | 56307200 | 10083154 | 7618 | ATATACTTGTRCTTTGAAAAT | 1.432 | 1.412 | 2.789 | 2.813 | 2.687 |
| 37 | 12 | 56351715 | 2640629 | 7619 | GTGTAATAAAYAAAAGGCAAC | 3.294 | 3.322 | 4.665 | 3.153 | 2.443 |
| 37 | 12 | 56376989 | 7309600 | 7620 | GCATCCCTGCRAACAGCTTCT | 0.774 | 0.732 | 3.474 | 3.332 | 2.433 |
| 37 | 12 | 56393103 | 1689590 | 7621 | AGGGCAATATRTAGGTTTGTT | 2.832 | 2.761 | 3.687 | 3.534 | 2.381 |
| 37 | 12 | 56404515 | 2269720 | 7622 | CTGCAGCTCAYGGAGGCAGCA | 1.263 | 1.282 | 2.474 | 2.801 | 2.355 |
| 37 | 12 | 56415927 | 238527 | 7623 | CATTCCACAGKAGAGAAACTG | 0.546 | 0.528 | 2.012 | 2.408 | 2.345 |
| 37 | 12 | 56444371 | 8176346 | 7624 | ATCCACTAGTYGCTTCCCCAG | 0.251 | 0.244 | 0.687 | 1.638 | 2.258 |
| 37 | 12 | 56451352 | 10877013 | 7625 | TTGGTCACACYATTGCAGAAG | 0.128 | 0.120 | 0.366 | 1.364 | 1.941 |
| 37 | 12 | 56459196 | 10877019 | 7626 | GCTGCCAAGAYTTTGTCCTCT | 0.761 | 0.785 | 0.365 | 0.548 | 1.685 |
| 37 | 12 | 56466683 | 724834 | 7627 | TTTTAGAGGASGTTTGGGGGC | 0.503 | 0.524 | 0.287 | 0.357 | 1.129 |
| 37 | 12 | 56474411 | 7976556 | 7628 | CTACCCCTTTYTACCTTTTGG | 0.518 | 0.523 | 0.455 | 0.381 | 1.079 |
| 37 | 12 | 56483069 | 1875124 | 7629 | GATTTTTCCARAGCAAGGTGG | 0.007 | 0.007 | 0.393 | 0.361 | 0.510 |
| 37 | 12 | 56488686 | 2277326 | 7630 | TATGAAGCCAMATGATATAAG | 0.557 | 0.540 | 0.411 | 0.462 | 0.308 |
| 37 | 12 | 56494431 | 1021469 | 7631 | CAGCCACAGGRTTAACGTGGC | 0.613 | 0.642 | 0.276 | 0.360 | 0.330 |
| 37 | 12 | 56508939 | 4760332 | 7632 | AAATGCCTTGMATGAGTATGG | 0.568 | 0.579 | 0.460 | 0.308 | 0.525 |
| 37 | 12 | 56514855 | 7489290 | 7633 | AGGCCCACAGSGATTTCCTTC | 0.098 | 0.100 | 0.439 | 0.253 | 0.617 |
| 37 | 12 | 56521865 | 4760334 | 7634 | TATGTAAAGARGGAGGACATT | 0.517 | 0.500 | 0.321 | 0.446 | 1.029 |
| 37 | 12 | 56548790 | 7312623 | 7635 | GAGAGAAGGGKTCAGGGGCCC | 0.000 | 0.000 | 0.195 | 0.648 | 0.934 |
| 37 | 12 | 56566859 | 11172369 | 7636 | ACTGAGGGTTYTCAAGGCCAC | 0.329 | 0.340 | 0.408 | 0.588 | 0.924 |
| 37 | 12 | 56573897 | 7971877 | 7637 | TGGGAGGGAAKAATGTCCCTG | 0.362 | 0.327 | 0.717 | 1.313 | 1.260 |
| 37 | 12 | 56588525 | 4630335 | 7638 | AGTAATTGAARGCCTTAGGTT | 0.647 | 0.633 | 0.717 | 1.339 | 1.216 |
| 37 | 12 | 56589754 | — | 7639 | AATTTCCTTTRTAAAGAAGAC | 1.188 | 1.117 | 1.843 | 1.242 | 1.123 |
| 37 | 12 | 56612866 | 17120198 | 7640 | ATAATGCTTAYTCTTGATGTT | 0.000 | 0.000 | 1.700 | 1.490 | 1.047 |
| 37 | 12 | 56621010 | 4760346 | 7641 | AGTAGGGTAARCGAATGGGTA | 2.339 | 2.146 | 1.625 | 1.512 | 1.176 |
| 37 | 12 | 56627592 | 7132343 | 7642 | TAGGATTGGARGGAAATGTAA | 0.042 | 0.043 | 1.690 | 1.435 | 1.184 |
| 37 | 12 | 56635863 | 17120058 | 7643 | ATGTTAGTGARTATCTCCAGC | 0.585 | 0.568 | 1.482 | 1.288 | 1.181 |
| 38 | 12 | 81345981 | 1874058 | 7644 | GCTCCTTGATKACCATTTTTT | 0.000 | 0.000 | 1.164 | 0.588 | 0.322 |
| 38 | 12 | 81358422 | 2731295 | 7645 | TGTACCAGGCRATGCTTCCAT | 1.505 | 1.445 | 1.014 | 0.588 | 0.473 |
| 38 | 12 | 81366314 | 1494024 | 7646 | CCATCAAAGASAATAATCACT | 0.131 | 0.129 | 0.412 | 0.528 | 0.488 |
| 38 | 12 | 81372465 | 17009623 | 7647 | AGAAGAAACTRCCTTAAGTAT | 0.186 | 0.186 | 0.412 | 0.534 | 0.798 |
| 38 | 12 | 81377879 | 7133956 | 7648 | TTAAATGTGGRATGCAAGCAT | 0.047 | 0.048 | 0.006 | 0.527 | 0.811 |
| 38 | 12 | 81382578 | 7967097 | 7649 | AATTGCAGTAYTACTTTTGTC | 0.000 | 0.000 | 0.054 | 0.460 | 1.001 |
| 38 | 12 | 81413513 | 17776375 | 7650 | CTTGTTGGTCYCATTGCACTG | 0.026 | 0.025 | 0.411 | 0.374 | 1.029 |
| 38 | 12 | 81423611 | 1565801 | 7651 | CATTATCTGAYAACCAGTAGA | 0.516 | 0.489 | 0.502 | 0.520 | 0.742 |
| 38 | 12 | 81429920 | 10506875 | 7652 | TGAACATAGTRTCTAGATCTA | 1.272 | 1.189 | 0.746 | 0.732 | 0.683 |
| 38 | 12 | 81434488 | 4882510 | 7653 | CACATTGGTCYCAAATTTCAA | 0.241 | 0.254 | 0.936 | 0.861 | 0.441 |
| 38 | 12 | 81456620 | 12580555 | 7654 | GGAATACAGTRTGCCCTTTCA | 1.192 | 1.118 | 1.125 | 0.766 | 0.481 |
| 38 | 12 | 81462973 | 11834171 | 7655 | ACCCAAGAGTKAGGACTAGTA | 0.615 | 0.609 | 0.967 | 0.833 | 0.562 |
| 38 | 12 | 81469479 | 17720596 | 7656 | ACTGTTGTTCMTCATAGTATC | 0.992 | 0.930 | 0.885 | 0.828 | 0.712 |
| 38 | 12 | 81474730 | 12582370 | 7657 | AAAGCAAATTKGTTTTTTCCA | 0.480 | 0.537 | 0.532 | 0.604 | 0.661 |
| 38 | 12 | 81489232 | 17777291 | 7658 | ATAAGGACCAKAAAGGAATGA | 0.204 | 0.200 | 0.449 | 0.687 | 0.663 |
| 38 | 12 | 81496639 | 17009739 | 7659 | TGAATACATCYGAAGTAAAGA | 0.267 | 0.269 | 0.238 | 0.585 | 0.622 |
| 38 | 12 | 81502516 | 11115314 | 7660 | ATTCCAGAACKTTTGTCCTTA | 0.425 | 0.419 | 0.266 | 0.499 | 0.580 |
| 38 | 12 | 81508836 | 12821789 | 7661 | AGAGATTTGAYATACATTCAA | 0.316 | 0.320 | 0.483 | 0.275 | 0.683 |
| 38 | 12 | 81521180 | 17009794 | 7662 | GAGTAGCTCTWCATTTGCCAA | 0.593 | 0.604 | 0.493 | 0.209 | 0.579 |
| 38 | 12 | 81548422 | 10506877 | 7663 | GATAAAAGTTMCTACTGAGGA | 0.795 | 0.816 | 0.341 | 0.372 | 0.504 |
| 38 | 12 | 81561761 | 17722367 | 7664 | ATCTGACTTCYAGCATTCAGT | 0.360 | 0.315 | 0.278 | 0.494 | 0.330 |
| 38 | 12 | 81570312 | 7316112 | 7665 | GTATTCCACARAAGAATAAAG | 0.001 | 0.001 | 0.414 | 0.561 | 0.245 |
| 38 | 12 | 81579199 | 11115342 | 7666 | AGATGTGGATYTTTAGTTAAT | 0.190 | 0.190 | 0.390 | 0.535 | 0.263 |
| 38 | 12 | 81592425 | 10862496 | 7667 | TCAAATGATGMAGAAGCTTAA | 0.976 | 0.954 | 0.536 | 0.398 | 0.341 |
| 38 | 12 | 81602869 | 11115353 | 7668 | AGGATTTGTAKTGCCAGTGGT | 0.761 | 0.797 | 0.640 | 0.204 | 0.342 |
| 38 | 12 | 81610863 | 4620789 | 7669 | AGGATAATGTKCTAGATAGCT | 0.677 | 0.683 | 0.607 | 0.204 | 0.284 |
| 38 | 12 | 81617342 | 17009899 | 7670 | TTACATTTAAYGACAGGTTTT | 0.000 | 0.000 | 0.249 | 0.387 | 0.348 |
| 38 | 12 | 81627538 | 10506879 | 7671 | CAAATGTTTCYGCGTAGGTTG | 0.127 | 0.120 | 0.125 | 0.460 | 0.232 |
| 38 | 12 | 81642625 | 7972064 | 7672 | TTGGCACTGTSCATGTTTTTG | 0.069 | 0.069 | 0.141 | 0.211 | 0.255 |
| 38 | 12 | 81659668 | 10506880 | 7673 | TGCTATCCAGRACTGTCCACT | 0.311 | 0.313 | 0.174 | 0.250 | 0.304 |
| 38 | 12 | 81668323 | 7312288 | 7674 | GCACCATGGCRCTTAACTGTA | 0.736 | 0.719 | 0.154 | 0.151 | 0.325 |
| 38 | 12 | 81678985 | 6539689 | 7675 | ATTTTCTACCYTTTCTAGACT | 0.000 | 0.000 | 0.499 | 0.204 | 0.170 |
| 38 | 12 | 81685472 | 12368738 | 7676 | GTGAATTGCASGTGTAGGAGG | 0.052 | 0.052 | 0.435 | 0.236 | 0.111 |
| 38 | 12 | 81691248 | 7309393 | 7677 | GTGAATCGCTKGAATCCGAAG | 0.900 | 0.880 | 0.340 | 0.289 | 0.107 |
| 38 | 12 | 81692856 | 17009995 | 7678 | TTAGGGGAAARGTATATATAT | 0.192 | 0.194 | 0.269 | 0.223 | 0.082 |
| 38 | 12 | 81710613 | 1858059 | 7679 | CAAAGCTCCAWGGGAGAATAC | 0.414 | 0.416 | 0.326 | 0.143 | 0.080 |
| 38 | 12 | 81719954 | 17041817 | 7680 | TTATTTTTACRGAAAAACCCC | 0.291 | 0.279 | 0.081 | 0.180 | 0.111 |
| 38 | 12 | 81729819 | 17010029 | 7681 | TCACAAAATGYGTAGTATATT | 0.338 | 0.328 | 0.118 | 0.156 | 0.125 |
| 38 | 12 | 81741749 | 9651971 | 7682 | AAGCCTTACARTATCCCTTCT | 0.063 | 0.063 | 0.158 | 0.041 | 0.081 |
| 38 | 12 | 81752531 | 12300038 | 7683 | TCTATAGAGGRTAGTAAGTCC | 0.326 | 0.328 | 0.098 | 0.058 | 0.063 |
| 38 | 12 | 81766686 | 17010069 | 7684 | TACTGTTTGAMATAGTTTATC | 0.572 | 0.541 | 0.050 | 0.058 | 0.061 |
| 38 | 12 | 81776529 | 1703109 | 7685 | TAAATAAAGCSTCTAGTACCT | 0.005 | 0.005 | 0.095 | 0.066 | 0.038 |
| 38 | 12 | 81792738 | 17010106 | 7686 | AGAGCCCTTTMTGTCAAAGTC | 0.151 | 0.145 | 0.128 | 0.047 | 0.130 |
| 38 | 12 | 81801101 | 17726837 | 7687 | GGCACCATTGRTCTCTGTTAC | 0.357 | 0.359 | 0.086 | 0.047 | 0.146 |
| 38 | 12 | 81808589 | 9308329 | 7688 | GTCGTTTAATRTTTGGGGCTC | 0.429 | 0.424 | 0.119 | 0.091 | 0.305 |
| 38 | 12 | 81819344 | 17010128 | 7689 | ATGTCTGCCCYGGGCCACACT | 0.369 | 0.348 | 0.109 | 0.213 | 0.418 |
| 38 | 12 | 81829259 | 10778916 | 7690 | AATTCCTAGCRAAAAATCTGT | 0.150 | 0.155 | 0.192 | 0.350 | 0.498 |
| 38 | 12 | 81840419 | — | 7691 | TGGTGTCATARTTATGTAAAT | 0.214 | 0.089 | 0.495 | 0.681 | 0.528 |
| 38 | 12 | 81849545 | 12297736 | 7692 | GCTAGTGCATRTTAGTTACTT | 0.672 | 0.657 | 0.597 | 0.846 | 0.450 |
| 38 | 12 | 81857607 | 17010268 | 7693 | GCCCAAATTTWTCCAGAACTT | 1.150 | 1.142 | 1.034 | 0.811 | 0.529 |
| 38 | 12 | 81869499 | 2403024 | 7694 | CCATATAACTRGATTAGTCAT | 0.535 | 0.534 | 1.318 | 0.864 | 0.736 |
| 38 | 12 | 81877247 | 10778922 | 7695 | TTTCTTTGTCKCTAGATTGTA | 1.114 | 1.101 | 1.154 | 0.893 | 0.678 |
| 38 | 12 | 81887096 | 10778923 | 7696 | TAATCCCTTCMTTTGGTCAAC | 0.859 | 0.823 | 0.942 | 0.950 | 0.774 |
| 38 | 12 | 81901994 | 1655593 | 7697 | CTCCCAGGCCRCTAGCAAAGC | 0.329 | 0.347 | 0.782 | 1.052 | 0.721 |
| 38 | 12 | 81912723 | 1682605 | 7698 | GTAACAAGAGYTCTTTTAAGT | 0.000 | 0.000 | 0.374 | 0.715 | 0.728 |
| 38 | 12 | 81919181 | 10862550 | 7699 | ATTGAAATGAYTTTTGGCTAC | 0.240 | 0.243 | 0.416 | 0.807 | 0.962 |
| 38 | 12 | 81925847 | 11115552 | 7700 | TTGTCTTTACMATGGTCTGTG | 0.324 | 0.332 | 0.357 | 0.508 | 0.825 |
| 38 | 12 | 81931444 | 12301199 | 7701 | TTAATTTATAYTTGCAGCAAT | 0.901 | 0.962 | 0.539 | 0.297 | 0.735 |
| 38 | 12 | 81937271 | 12315833 | 7702 | AAGAAGGGAASACTGGCCTTT | 0.193 | 0.198 | 0.502 | 0.578 | 1.112 |
| 38 | 12 | 81946596 | 12814295 | 7703 | TTGAGGTACAKTTGAAAGAGT | 0.853 | 0.853 | 0.434 | 0.427 | 0.829 |
| 38 | 12 | 81953431 | 12833644 | 7704 | ATATAATCTTYCTAGATATGG | 0.182 | 0.181 | 0.565 | 0.542 | 2.029 |
| 38 | 12 | 81961580 | 10778937 | 7705 | ATTTTATATAYGAAGAATTCC | 0.132 | 0.137 | 0.472 | 1.074 | 2.019 |
| 38 | 12 | 81987033 | 10862580 | 7706 | ATCACTCTCCYGAATTAAGTT | 1.268 | 1.278 | 0.374 | 0.767 | 1.909 |
| 38 | 12 | 81996914 | 10506890 | 7707 | TCTGATCAACRTAAAATTAGG | 0.005 | 0.005 | 1.281 | 2.771 | 1.958 |
| 38 | 12 | 82007514 | 11115596 | 7708 | CCCATTTAATKTTTAAACTAG | 0.658 | 0.636 | 1.276 | 2.679 | 1.950 |
| 38 | 12 | 82019533 | 1543171 | 7709 | TGTCATCTGTKTCTGATTTGT | 1.822 | 1.835 | 3.156 | 2.661 | 2.563 |
| 38 | 12 | 82029933 | 2292827 | 7710 | CTATAAATTARGTAGAGAACA | 0.087 | 0.086 | 3.869 | 3.088 | 3.099 |
| 38 | 12 | 82038186 | 12146710 | 7711 | TTAGGGGTTTMAATTTCTTCT | 4.300 | 2.067 | 3.117 | 2.572 | 3.337 |
| 38 | 12 | 82046326 | 11115618 | 7712 | AAAAATAACAWGTTGAAGTAA | 0.562 | 0.562 | 2.139 | 3.481 | 3.130 |
| 38 | 12 | 82054366 | 17010700 | 7713 | GCCACCTCACRCAGAATTGTG | 0.160 | 0.168 | 2.283 | 3.298 | 2.824 |
| 38 | 12 | 82062071 | 17010710 | 7714 | CCTGCTTACCMAAAACTGCAC | 0.301 | 0.296 | 1.297 | 3.229 | 2.362 |
| 38 | 12 | 82075135 | 12301625 | 7715 | ACAATGTGCCYGTTCAGATAT | 0.364 | 0.388 | 1.417 | 2.955 | 2.519 |
| 38 | 12 | 82101670 | 7296128 | 7716 | TGCTGTGAATRTTCTATGAGC | 2.323 | 2.256 | 1.880 | 1.132 | 2.370 |
| 38 | 12 | 82106660 | 2037258 | 7717 | CTGTGCCAGGMAGTTTGGTAA | 0.710 | 0.690 | 1.842 | 0.854 | 1.918 |
| 38 | 12 | 82110836 | 2037257 | 7718 | AGTTTCCTTAYATATAGCAAA | 0.881 | 0.851 | 1.396 | 1.046 | 1.813 |
| 38 | 12 | 82132886 | 6539713 | 7719 | ATTAAATTTGYTATTACTGCT | 0.480 | 0.484 | 0.437 | 1.070 | 0.712 |
| 38 | 12 | 82145316 | 7311826 | 7720 | TTTGGAAAATKTGCAGGCCTA | 0.209 | 0.211 | 0.459 | 1.130 | 0.595 |
| 38 | 12 | 82157291 | 7296363 | 7721 | AAGTTGGTAAMAAAAAAACAA | 0.044 | 0.042 | 0.299 | 0.488 | 0.652 |
| 38 | 12 | 82166950 | 6539716 | 7722 | TTTTGTCTTTKTATGGTTTCT | 0.773 | 0.770 | 0.422 | 0.326 | 0.618 |
| 38 | 12 | 82180501 | 6539722 | 7723 | AAAAGATACCYAAAAGTGCAG | 0.397 | 0.393 | 0.330 | 0.164 | 0.591 |
| 38 | 12 | 82195147 | 4882445 | 7724 | GCCTTCAGAGKCATGAATGAG | 0.869 | 0.854 | 0.329 | 0.157 | 0.201 |
| 38 | 12 | 82206913 | 6419410 | 7725 | TTATTCAGTCWTTGACAGTGT | 0.006 | 0.006 | 0.122 | 0.134 | 0.211 |
| 38 | 12 | 82224121 | 7485518 | 7726 | GAACAAGAACMCTTCAATAAA | 0.067 | 0.068 | 0.141 | 0.159 | 0.113 |
| 38 | 12 | 82233165 | 4882378 | 7727 | TTAATTTCTTKAGGAGAAGCA | 0.051 | 0.054 | 0.016 | 0.064 | 0.249 |
| 38 | 12 | 82249263 | 6539740 | 7728 | CAGAATTAATKTCCTTGTGCC | 0.471 | 0.460 | 0.043 | 0.105 | 0.754 |
| 38 | 12 | 82263926 | 4471519 | 7729 | CAGAAAATTARACTCATTGGA | 0.181 | 0.179 | 0.053 | 0.024 | 0.909 |
| 38 | 12 | 82268637 | 4346039 | 7730 | ATTTATGTTCRGAAATAACAT | 0.251 | 0.242 | 0.228 | 0.272 | 0.749 |
| 39 | 14 | 49608345 | 2103889 | 7731 | TGCTGCTGTAYACTTTTTCAT | 0.722 | 0.757 | 0.500 | 0.542 | 0.657 |
| 39 | 14 | 49617560 | 17122058 | 7732 | ACTTAACCTTRGCATAGTAAT | 0.193 | 0.187 | 0.372 | 1.211 | 0.636 |
| 39 | 14 | 49630695 | 7141809 | 7733 | GCTGCCTTTARGATCAACCTA | 0.034 | 0.034 | 0.140 | 0.730 | 0.692 |
| 39 | 14 | 49638176 | 9944008 | 7734 | AGCTTCGTATRAAAAAAAACA | 0.217 | 0.193 | 0.618 | 0.598 | 0.584 |
| 39 | 14 | 49645558 | 10844 | 7735 | ATCACATAGAYATGTATGGTG | 0.000 | 0.000 | 0.572 | 0.319 | 0.711 |
| 39 | 14 | 49654998 | 2227276 | 7736 | AGCATCGACGYGGTACCCTTG | 1.894 | 1.887 | 0.613 | 0.253 | 0.436 |
| 39 | 14 | 49666612 | 3759597 | 7737 | AAAAATTAACYCAGAACCTTC | 0.055 | 0.057 | 0.565 | 0.309 | 0.465 |
| 39 | 14 | 49673621 | 12896468 | 7738 | AACATTCATTYAGCATAAACA | 0.095 | 0.096 | 0.541 | 0.479 | 0.314 |
| 39 | 14 | 49686628 | 8192699 | 7739 | GGCTTACTCCRTTTGCCTGAG | 0.081 | 0.081 | 0.039 | 0.473 | 0.322 |
| 39 | 14 | 49692566 | 13379306 | 7740 | CAACAGTAATMAAGGAAACTT | 0.452 | 0.444 | 0.217 | 0.516 | 0.462 |
| 39 | 14 | 49703571 | 17122240 | 7741 | ATTTCTTTACRTGCTTTTTTA | 0.000 | 0.000 | 0.272 | 0.115 | 0.500 |
| 39 | 14 | 49720888 | 6572646 | 7742 | CTAAGAATATYCTGAGTGATA | 0.618 | 0.621 | 0.432 | 0.267 | 0.520 |
| 39 | 14 | 49728687 | 7160215 | 7743 | AGTAATACTAMCATGAAAGAG | 0.108 | 0.105 | 0.307 | 0.478 | 0.709 |
| 39 | 14 | 49736977 | 12896404 | 7744 | TGGCCTACTAYATAGGAATTA | 0.643 | 0.630 | 0.412 | 0.524 | 0.604 |
| 39 | 14 | 49740883 | 12888783 | 7745 | TGAACCTTTARAAAAAAGTTA | 0.082 | 0.083 | 0.549 | 0.463 | 0.854 |
| 39 | 14 | 49752478 | 1569898 | 7746 | CTTCATTGTGYTGCCAAGATT | 0.783 | 0.760 | 0.633 | 0.742 | 1.038 |
| 39 | 14 | 49764449 | 2144575 | 7747 | TTAATTTCTAYTGACTATTTT | 1.055 | 1.009 | 0.477 | 0.987 | 1.275 |
| 39 | 14 | 49769618 | 1955926 | 7748 | AACTACTGTGMTGTCAAACTA | 0.315 | 0.296 | 1.134 | 1.410 | 1.315 |
| 39 | 14 | 49784735 | 743075 | 7749 | TGTGAAAAATYCTATCTTATA | 0.263 | 0.258 | 1.315 | 1.520 | 2.306 |
| 39 | 14 | 49802697 | 2355885 | 7750 | TCTATAAAGCYTGCCAACATC | 1.502 | 1.517 | 1.285 | 1.613 | 2.411 |
| 39 | 14 | 49806475 | 2153553 | 7751 | TGAGCAATTAYCGTGTTACTC | 1.374 | 1.429 | 1.522 | 1.568 | 2.714 |
| 39 | 14 | 49820327 | 12433038 | 7752 | AGAAAAGACARGGATGGCTTA | 1.418 | 1.387 | 1.873 | 2.456 | 2.579 |
| 39 | 14 | 49826881 | 9888567 | 7753 | ATTTGATTAAMTTTCCTAAAT | 0.906 | 0.912 | 1.796 | 2.630 | 2.556 |
| 39 | 14 | 49839467 | 2297995 | 7754 | CGCCACCAACRATGACTATAT | 1.073 | 1.073 | 3.496 | 3.191 | 2.693 |
| 39 | 14 | 49843620 | 7143204 | 7755 | ACAAAAGCTTKTGGGGAGGTA | 0.000 | 0.000 | 3.551 | 3.284 | 2.548 |
| 39 | 14 | 49857963 | 2275592 | 7756 | CAAATGATGCYGTTTGGAAAA | 4.633 | 5.267 | 3.518 | 3.026 | 2.548 |
| 39 | 14 | 49868493 | 4901016 | 7757 | CATGCAGGCTRGAAACCCTGG | 2.056 | 2.080 | 3.924 | 2.920 | 2.777 |
| 39 | 14 | 49880775 | 1465160 | 7758 | CTGCAACTGAYATACTGCAGC | 0.954 | 0.980 | 3.187 | 2.791 | 2.642 |
| 39 | 14 | 49889119 | 2153552 | 7759 | GAAGAATAGARTTGAGGGGAA | 0.086 | 0.085 | 1.486 | 2.756 | 2.661 |
| 39 | 14 | 49894589 | 11157737 | 7760 | TCTTCTTCCARTGCACACAAA | 0.338 | 0.338 | 1.176 | 2.652 | 2.358 |
| 39 | 14 | 49904329 | 9635166 | 7761 | GACTCAGATTKACTTTCTCTT | 1.348 | 1.414 | 0.824 | 1.196 | 2.294 |
| 39 | 14 | 49914981 | 7151046 | 7762 | AGGACACCTGMAGACAGTTCT | 1.413 | 1.538 | 0.994 | 0.736 | 2.317 |
| 39 | 14 | 49930907 | 11157741 | 7763 | CCCACCCATTYCAATTTATCC | 0.034 | 0.035 | 0.843 | 0.518 | 2.280 |
| 39 | 14 | 49939783 | 17717642 | 7764 | GAAAAGCCCTRCAAAGTGTAC | 0.398 | 0.364 | 0.457 | 0.558 | 1.851 |
| 39 | 14 | 49950187 | 1265880 | 7765 | CCAGCTACTTYTGCCTCCTTC | 0.074 | 0.075 | 0.082 | 0.606 | 1.257 |
| 39 | 14 | 49964206 | 12887920 | 7766 | GAGCATGCAARCAATAATAAA | 0.470 | 0.514 | 0.106 | 0.283 | 1.004 |
| 39 | 14 | 49976878 | 17718015 | 7767 | GTGTGTAAATRCCATCTTCAG | 0.270 | 0.260 | 0.088 | 0.888 | 1.281 |
| 39 | 14 | 49986853 | 17122546 | 7768 | ACCGTAAGTCKGTGATTCTTA | 0.191 | 0.131 | 0.205 | 0.931 | 2.073 |
| 39 | 14 | 49999380 | — | 7769 | ACAAATAAACYGTGTTAGTAA | 0.000 | 0.000 | 1.744 | 0.836 | 1.555 |
| 39 | 14 | 50009649 | 17791470 | 7770 | ATGTAGTTTTYTAATTGGTCT | 0.386 | 0.400 | 1.598 | 1.147 | 1.192 |
| 39 | 14 | 50011797 | 12717408 | 7771 | AAAAAATTTAYTGGCACTTTA | 3.021 | 2.690 | 1.429 | 1.720 | 1.213 |
| 39 | 14 | 50028605 | 12323534 | 7772 | AATTATTAACRTGATGCTTCG | 0.201 | 0.193 | 1.469 | 1.694 | 1.158 |
| 39 | 14 | 50035195 | 17791680 | 7773 | TAAGTTTACARCTGGAATTTC | 0.080 | 0.081 | 2.173 | 1.734 | 1.093 |
| 39 | 14 | 50046648 | 2180494 | 7774 | TTCTCGGTTAMCAATTATTAA | 0.760 | 0.755 | 0.972 | 1.591 | 1.016 |
| 39 | 14 | 50062686 | 7160618 | 7775 | TCATCCCCAAYAAAGGCAGAG | 1.918 | 2.006 | 1.162 | 1.737 | 1.013 |
| 39 | 14 | 50074963 | 17718908 | 7776 | TTGTCTGCAARTTCAATAGCT | 0.516 | 0.533 | 1.214 | 0.590 | 0.963 |
| 39 | 14 | 50093893 | 987315 | 7777 | CATATCCTTTYCTTTTTCCAG | 0.554 | 0.546 | 1.052 | 0.581 | 0.923 |
| 39 | 14 | 50139753 | 3015452 | 7778 | TTTTCACCTAYAGCATGTTTA | 0.356 | 0.343 | 0.252 | 0.650 | 0.929 |
| 39 | 14 | 50153985 | 17122693 | 7779 | CAATCACTTAYCAGAATCAGG | 0.299 | 0.303 | 0.136 | 0.468 | 0.391 |
| 39 | 14 | 50164151 | 17122701 | 7780 | TTTGGATATAYGTAGTTTTCT | 0.044 | 0.046 | 0.078 | 0.161 | 0.419 |
| 39 | 14 | 50174491 | 17122714 | 7781 | ATCAAGAGTAYGATTATGGGT | 0.153 | 0.147 | 0.052 | 0.152 | 0.439 |
| 40 | 14 | 80247029 | 17111027 | 7782 | AAAAATTATCRTCTGAAATCA | 0.012 | 0.012 | 0.303 | 0.298 | 0.268 |
| 40 | 14 | 80254648 | 17111035 | 7783 | CAGTGAGAATYTGGAACACAG | 0.140 | 0.142 | 0.286 | 0.567 | 0.230 |
| 40 | 14 | 80273661 | 327456 | 7784 | TTGAACTTCTRAACAAGCTGG | 0.302 | 0.300 | 0.128 | 0.441 | 0.327 |
| 40 | 14 | 80288710 | 327446 | 7785 | GGGCCTAATAYTTCTCACACA | 0.095 | 0.094 | 0.491 | 0.468 | 0.326 |
| 40 | 14 | 80294079 | 2590480 | 7786 | CACAGTATTTYCTTCCTCTTC | 0.861 | 0.854 | 0.521 | 0.195 | 0.346 |
| 40 | 14 | 80299870 | 17541411 | 7787 | GATTTAAACAYTTTTTGAAGA | 1.062 | 1.103 | 0.495 | 0.341 | 0.308 |
| 40 | 14 | 80307745 | 327473 | 7788 | ATAGCCTTAGMTGTCTCATAA | 0.175 | 0.177 | 0.555 | 0.386 | 0.400 |
| 40 | 14 | 80316672 | 17613911 | 7789 | CAGAAGATCCRCAGAATGCTT | 0.229 | 0.225 | 0.443 | 0.330 | 0.238 |
| 40 | 14 | 80325147 | 17614081 | 7790 | TGATATTTCTRTGGAAGTTTT | 0.270 | 0.263 | 0.163 | 0.415 | 0.352 |
| 40 | 14 | 80331771 | 327428 | 7791 | AAGGGCCATTRTGACAAAAAG | 0.583 | 0.545 | 0.141 | 0.371 | 0.455 |
| 40 | 14 | 80353610 | 2371417 | 7792 | ATCTAATAGCRATATCAGTAA | 0.350 | 0.320 | 0.208 | 0.215 | 0.633 |
| 40 | 14 | 80365281 | 17111151 | 7793 | GAAAATCAGAMGTGTCACTAA | 0.130 | 0.133 | 0.366 | 0.314 | 0.629 |
| 40 | 14 | 80376971 | 7142753 | 7794 | TGGATATGAGKTACACAAAAT | 0.425 | 0.422 | 0.312 | 0.439 | 0.474 |
| 40 | 14 | 80381905 | 11159475 | 7795 | TTACTATGCAYTCAGTAGTTG | 0.715 | 0.708 | 0.438 | 0.756 | 0.290 |
| 40 | 14 | 80393265 | — | 7796 | TAAATTTTTAYCTAGGATTTT | 0.463 | 0.449 | 0.718 | 0.578 | 0.279 |
| 40 | 14 | 80415919 | 2556611 | 7797 | CCAGATCTACRAAGCTCAAAT | 0.646 | 0.637 | 1.089 | 0.509 | 0.265 |
| 40 | 14 | 80431484 | 8010968 | 7798 | TAAAAACTACMGAAAAATCAG | 0.713 | 0.716 | 0.757 | 0.504 | 0.234 |
| 40 | 14 | 80444575 | 6574608 | 7799 | TCTATTCATTMAAGGTCAGTT | 1.274 | 1.204 | 0.601 | 0.433 | 0.185 |
| 40 | 14 | 80452982 | 4899780 | 7800 | CTCACTTAATMCTACCAACAA | 0.055 | 0.054 | 0.384 | 0.287 | 0.205 |
| 40 | 14 | 80455324 | — | 7801 | GAAGACAACTYCACCAGATAT | 0.095 | 0.095 | 0.200 | 0.215 | 0.248 |
| 40 | 14 | 80460544 | 2059719 | 7802 | AATGAAAGATSAAAGTAAATA | 0.140 | 0.138 | 0.010 | 0.127 | 0.202 |
| 40 | 14 | 80470519 | 9323695 | 7803 | GCACATAGCTRGAAATCAGAA | 0.213 | 0.211 | 0.011 | 0.087 | 0.206 |
| 40 | 14 | 80478424 | 17111256 | 7804 | AAGTAGATGTRAGGCTGTCAG | 0.179 | 0.173 | 0.021 | 0.019 | 0.206 |
| 40 | 14 | 80484907 | 2217177 | 7805 | ATTTGCCCCAYTTTAAAAGTT | 0.081 | 0.084 | 0.052 | 0.019 | 0.167 |
| 40 | 14 | 80492010 | 2239610 | 7806 | GAGGTGGCCCSAAGTGCACAA | 0.197 | 0.205 | 0.102 | 0.071 | 0.155 |
| 40 | 14 | 80499216 | 179245 | 7807 | GATATCCCAASTAGGTCAACA | 0.384 | 0.395 | 0.093 | 0.113 | 0.063 |
| 40 | 14 | 80511106 | 179259 | 7808 | AATCTTAGCARGGCACATAAT | 0.448 | 0.462 | 0.264 | 0.149 | 0.077 |
| 40 | 14 | 80519443 | 3783945 | 7809 | AGAGCTTTTTSATTTGCCATC | 0.037 | 0.038 | 0.323 | 0.231 | 0.152 |
| 40 | 14 | 80527693 | 724170 | 7810 | ATTCAACATTRAAGGAGACAT | 0.758 | 0.750 | 0.315 | 0.297 | 0.193 |
| 40 | 14 | 80540892 | 17545310 | 7811 | ACTGGAAGTCMTATTCATGGT | 0.394 | 0.390 | 0.366 | 0.287 | 0.181 |
| 40 | 14 | 80547190 | 4903965 | 7812 | AGGAACTAACRTGACTGAGTT | 0.358 | 0.371 | 0.500 | 0.409 | 0.173 |
| 40 | 14 | 80554902 | 4903967 | 7813 | TGAAAAGTTGRTCACCCTATG | 0.597 | 0.626 | 0.304 | 0.386 | 0.252 |
| 40 | 14 | 80566095 | 10143800 | 7814 | AGTTCTGCACRAAGGCCTCTT | 0.396 | 0.391 | 0.481 | 0.402 | 0.291 |
| 40 | 14 | 80570637 | 726627 | 7815 | AATTTAAGCAKAAAAAGGGTC | 0.230 | 0.231 | 0.500 | 0.237 | 0.366 |
| 40 | 14 | 80585638 | 722540 | 7816 | TCCTCAAAGCYCAGATGGTTC | 0.835 | 0.860 | 0.288 | 0.293 | 0.568 |
| 40 | 14 | 80598165 | 17111401 | 7817 | GCTTTTTAATWATGTGTTTTT | 0.390 | 0.392 | 0.192 | 0.324 | 0.648 |
| 40 | 14 | 80610085 | 7145101 | 7818 | ATATAAACCCYATTGATCTTA | 0.113 | 0.105 | 0.322 | 0.362 | 0.599 |
| 40 | 14 | 80623539 | 2284735 | 7819 | GACAAAATAARCCCAAGTGAA | 0.125 | 0.125 | 0.202 | 0.692 | 1.181 |
| 40 | 14 | 80631310 | 10143087 | 7820 | TAGCCCAGAGSTCCCAAGGCT | 0.612 | 0.622 | 0.346 | 0.718 | 1.200 |
| 40 | 14 | 80639431 | 1017141 | 7821 | TAGCAATTTGRTAATTTCTCC | 0.496 | 0.486 | 0.879 | 0.605 | 2.021 |
| 40 | 14 | 80648058 | 2888049 | 7822 | GAAGTGGTCARTTAAACTACC | 0.770 | 0.750 | 1.011 | 1.348 | 2.611 |
| 40 | 14 | 80661507 | 7158881 | 7823 | GTAAAGATGGYCCCTGTGGAA | 1.389 | 1.411 | 0.963 | 1.429 | 3.031 |
| 40 | 14 | 80668665 | 17111530 | 7824 | GTTACTTTCAYTAGACACTTA | 0.353 | 0.355 | 2.032 | 2.738 | 2.838 |
| 40 | 14 | 80677583 | 2300541 | 7825 | TGCCTGTATGKTAGTGTCCAT | 0.539 | 0.550 | 1.779 | 3.195 | 2.656 |
| 40 | 14 | 80690636 | 28441485 | 7826 | CTGTTAGGGGKAAGTTTAATG | 2.450 | 2.546 | 2.650 | 3.422 | 2.735 |
| 40 | 14 | 80699947 | 12372876 | 7827 | AATCAAAACAYGGCAAAGGGA | 0.379 | 0.363 | 3.057 | 3.127 | 2.781 |
| 40 | 14 | 80709737 | 1957546 | 7828 | AGTCACTTCAYCAAGACTGTA | 2.971 | 2.672 | 3.153 | 2.652 | 2.710 |
| 40 | 14 | 80713553 | 4899786 | 7829 | TGGCCACCAAKCAAGAGTTTG | 2.630 | 2.619 | 2.621 | 2.682 | 2.725 |
| 40 | 14 | 80727089 | 7149672 | 7830 | ATGTTACTTCRAGAAGCACTG | 2.331 | 2.193 | 2.525 | 2.682 | 2.770 |
| 40 | 14 | 80733206 | 759939 | 7831 | TACTCACTTGSCATGTTAAAT | 1.012 | 1.005 | 2.372 | 2.400 | 2.602 |
| 40 | 14 | 80741859 | 1951614 | 7832 | CTCTGCTAATYCCAGGCGAAA | 1.315 | 1.256 | 2.070 | 2.430 | 2.621 |
| 40 | 14 | 80747849 | 7148100 | 7833 | TTACACTTCTRGGTTCCCAAG | 2.122 | 1.957 | 1.781 | 2.403 | 2.705 |
| 40 | 14 | 80783439 | 7160569 | 7834 | TGGTTGTGTCYACTACAGGCA | 1.268 | 1.315 | 1.922 | 2.152 | 2.532 |
| 40 | 14 | 80789110 | 8015423 | 7835 | GAGGATGATGYTTATTGTTCC | 1.485 | 1.419 | 2.287 | 1.977 | 2.648 |
| 40 | 14 | 80797947 | 17111619 | 7836 | ATCTTCACCAMCCTCTTTGAT | 1.045 | 1.082 | 1.944 | 2.342 | 2.481 |
| 40 | 14 | 80807873 | 7161073 | 7837 | TTGTCATTCAYCTGCCATACA | 2.430 | 2.410 | 1.989 | 2.335 | 2.226 |
| 40 | 14 | 80817987 | 8010611 | 7838 | CATTAAAAAAYATCAAAAGAC | 0.178 | 0.177 | 2.453 | 2.291 | 2.059 |
| 40 | 14 | 80826232 | 2081988 | 7839 | TATTCCATTGYATGGGCACAG | 0.779 | 0.768 | 2.010 | 2.120 | 2.090 |
| 40 | 14 | 80833708 | 1885604 | 7840 | GCATGCTATAYGATTTAAATT | 1.724 | 1.753 | 1.141 | 1.795 | 2.360 |
| 40 | 14 | 80834880 | 17111691 | 7841 | TGTTGCTCTCRGAGATTTAAG | 0.131 | 0.106 | 1.305 | 1.453 | 1.923 |
| 40 | 14 | 80848016 | 4903980 | 7842 | GTGAGCCTTAYGGTTTGGCTG | 1.240 | 1.252 | 1.100 | 0.700 | 1.627 |
| 40 | 14 | 80859232 | 8013992 | 7843 | GACTAGGCCARGAACAGAGGC | 0.876 | 0.857 | 0.412 | 1.042 | 1.211 |
| 40 | 14 | 80871291 | 7140168 | 7844 | GAGTTGGCACYAAAAATGATG | 0.010 | 0.010 | 0.419 | 0.806 | 0.923 |
| 40 | 14 | 80905656 | 3853417 | 7845 | TGTTTCAACCSTGATGGCCAC | 0.052 | 0.052 | 0.384 | 0.370 | 0.483 |
| 40 | 14 | 80915606 | — | 7846 | TATAAATTTASTTCAGTGTCA | 0.163 | 0.163 | 0.176 | 0.404 | 0.615 |
| 40 | 14 | 80923160 | 1569012 | 7847 | GGCTAAAGGAYTCAACGTGAA | 1.167 | 1.164 | 0.238 | 0.170 | 0.705 |
| 40 | 14 | 80930316 | 3844532 | 7848 | ATCTGATGTTYAAATATGAAA | 0.158 | 0.155 | 0.290 | 0.075 | 0.509 |
| 41 | 16 | 46450036 | 3903067 | 7849 | CCATTTTCACRTGCCTCTACT | 0.233 | 0.239 | 0.060 | 0.358 | 0.222 |
| 41 | 16 | 46461498 | 10492847 | 7850 | CATGCTCTTAYTTTTGCAGGT | 0.032 | 0.033 | 0.034 | 0.348 | 0.274 |
| 41 | 16 | 46467047 | 3852743 | 7851 | TGGAGTCTTCRGCTATCAGAT | 0.045 | 0.046 | 0.564 | 0.319 | 0.216 |
| 41 | 16 | 46473394 | 16945694 | 7852 | AAATTACTGCRCACTGCTGAT | 0.355 | 0.363 | 0.582 | 0.317 | 0.224 |
| 41 | 16 | 46479558 | — | 7853 | GTGGGGTAAARAATGGAATCA | 1.954 | 1.886 | 0.571 | 0.443 | 0.222 |
| 41 | 16 | 46498606 | 888339 | 7854 | CCGGTGAGCGYGGTGCTGAGA | 0.354 | 0.326 | 0.800 | 0.386 | 0.199 |
| 41 | 16 | 46515180 | — | 7855 | GGGAAACGCTSATGTGTATGG | 0.022 | 0.022 | 0.978 | 0.462 | 0.148 |
| 41 | 16 | 46517669 | 8054264 | 7856 | TGAGCTGCAARTGTGGAGACC | 0.581 | 0.575 | 0.161 | 0.549 | 0.151 |
| 41 | 16 | 46532044 | 9933191 | 7857 | CTGGGAAPAGSTGGGAGACCA | 0.565 | 0.626 | 0.166 | 0.447 | 0.198 |
| 41 | 16 | 46539255 | 7195967 | 7858 | GAAAATGATGRCTGTTTTCAT | 0.065 | 0.065 | 0.277 | 0.063 | 0.246 |
| 41 | 16 | 46563842 | — | 7859 | AGTAGATGACRATGATGACGA | 0.334 | 0.339 | 0.105 | 0.051 | 0.236 |
| 41 | 16 | 46575693 | — | 7860 | CAGGGTCTGTSTTGATGGAGA | 0.325 | 0.332 | 0.038 | 0.114 | 0.187 |
| 41 | 16 | 46589830 | 12149765 | 7861 | TTCCAGACCCRGGGTCCTACC | 0.005 | 0.005 | 0.051 | 0.094 | 0.023 |
| 41 | 16 | 46626615 | 494116 | 7862 | GGACATCAAGYTCCAAACCCT | 0.223 | 0.223 | 0.082 | 0.034 | 0.044 |
| 41 | 16 | 46636635 | 520151 | 7863 | GAATGTGGATYATTTGTTCCC | 0.156 | 0.159 | 0.104 | 0.030 | 0.776 |
| 41 | 16 | 46654645 | — | 7864 | CTGGGAATAAYCTAGTTCCTC | 0.572 | 0.586 | 0.106 | 0.020 | 0.913 |
| 41 | 16 | 46668184 | 8048367 | 7865 | CAGCTCTGGGRTAAAAGTCCA | 0.400 | 0.396 | 0.068 | 0.035 | 0.879 |
| 41 | 16 | 46679401 | 16945787 | 7866 | TCTGAGGTCTKCCAAGCTGAG | 0.017 | 0.017 | 0.076 | 1.240 | 1.010 |
| 41 | 16 | 46697131 | — | 7867 | AGGAGTAACCYTCAGGCAACC | 0.033 | 0.034 | 0.087 | 1.605 | 1.159 |
| 41 | 16 | 46709635 | 16945828 | 7868 | GAGGAACCTAKGAACGTCCGT | 0.200 | 0.200 | 1.544 | 1.725 | 1.233 |
| 41 | 16 | 46716800 | 1345425 | 7869 | TGTGAAGGTCYTTATGGAGGT | 0.572 | 0.552 | 2.389 | 1.638 | 1.766 |
| 41 | 16 | 46722278 | 12149826 | 7870 | AAAACTTCATYACATTAAACA | 4.291 | 3.568 | 2.798 | 1.601 | 1.661 |
| 41 | 16 | 46729214 | 16945857 | 7871 | CAAGGAGTGTYGAGTCAGTGG | 1.133 | 1.095 | 3.723 | 1.782 | 1.729 |
| 41 | 16 | 46736483 | 16945892 | 7872 | CACATTGCCTYTCCACAAAGC | 0.466 | 0.477 | 3.275 | 2.496 | 1.577 |
| 41 | 16 | 46748746 | 8058886 | 7873 | CAAGTTTATGRAGGAAGAATG | 0.503 | 0.511 | 0.895 | 2.636 | 1.510 |
| 41 | 16 | 46754604 | 8050306 | 7874 | GTTTCTCTTAYGATATTGTCC | 0.793 | 0.798 | 1.225 | 2.772 | 1.793 |
| 41 | 16 | 46760004 | 17821664 | 7875 | CTACGTAGGAKAAGGTTTGCC | 0.471 | 0.474 | 1.016 | 1.066 | 1.872 |
| 41 | 16 | 46768033 | 10163462 | 7876 | AGGTATCCAARGCCCAGTACC | 1.875 | 1.814 | 1.057 | 0.736 | 2.189 |
| 41 | 16 | 46775302 | 16945919 | 7877 | TCAAACCCCCMGGCTAAGGTC | 0.119 | 0.122 | 0.808 | 0.833 | 2.391 |
| 41 | 16 | 46779770 | 17822052 | 7878 | ATCACCCCCASTAGGGCATTC | 0.000 | 0.000 | 0.683 | 0.759 | 1.068 |
| 41 | 16 | 46793078 | 8050120 | 7879 | GCCTGGGTTASAGGTGTCGTC | 0.219 | 0.207 | 0.219 | 0.790 | 1.371 |
| 41 | 16 | 46799880 | 17822471 | 7880 | ACCACTCCCCRTGTTGCCGCA | 0.214 | 0.210 | 0.297 | 1.029 | 1.282 |
| 41 | 16 | 46806419 | 8047091 | 7881 | TCTCCAATAGYTTCCTTTCCT | 0.849 | 0.788 | 0.474 | 0.491 | 1.273 |
| 41 | 16 | 46815699 | 17822931 | 7882 | CTTACTGGCCYGAGTACACTG | 0.322 | 0.325 | 0.892 | 1.169 | 1.134 |
| 41 | 16 | 46822561 | 11863414 | 7883 | CGTGTGATTGYCAAGGTCCAA | 0.887 | 0.888 | 0.834 | 1.079 | 1.338 |
| 41 | 16 | 46829887 | 16946014 | 7884 | AATGGACTTTYAACTCCTTCT | 1.325 | 1.311 | 1.628 | 1.243 | 1.011 |
| 41 | 16 | 46840944 | 17750580 | 7885 | GTCTCACCAGSTACTCTGTTT | 0.042 | 0.043 | 1.488 | 1.202 | 1.061 |
| 41 | 16 | 46852072 | 16946039 | 7886 | TGCTCCAGTARTGGTTGTTTA | 2.537 | 2.384 | 1.443 | 1.427 | 0.996 |
| 41 | 16 | 46865588 | 11076561 | 7887 | TCCTCCATTARTGTAAGTGCA | 0.626 | 0.619 | 1.094 | 1.293 | 1.100 |
| 41 | 16 | 46867110 | 9931294 | 7888 | TTGATTGTGGWTGAAGCAAGA | 1.002 | 0.990 | 1.502 | 1.212 | 1.065 |
| 41 | 16 | 46891036 | — | 7889 | TATGGGAGCCRTGTAAATAAT | 0.045 | 0.047 | 0.891 | 1.028 | 1.059 |
| 41 | 16 | 46893998 | 9302757 | 7890 | CACACATAGCRTCTTTTTCAC | 2.050 | 1.950 | 0.942 | 1.156 | 1.065 |
| 41 | 16 | 46909639 | 9933211 | 7891 | TCAATTTAAARTGCATCAAAA | 0.185 | 0.175 | 0.769 | 0.815 | 0.999 |
| 41 | 16 | 46918683 | — | 7892 | AGAGCTGGGAKATACCTCTGC | 0.864 | 0.832 | 0.995 | 0.807 | 0.907 |
| 41 | 16 | 46925991 | 13338978 | 7893 | ACATCATCTTSTTGCAGTTGT | 0.389 | 0.382 | 0.566 | 0.766 | 0.944 |
| 41 | 16 | 46935615 | 8055028 | 7894 | TGTACTTCATMATTTCTGAGG | 1.282 | 1.241 | 0.603 | 0.773 | 0.689 |
| 41 | 16 | 46981974 | 17825174 | 7895 | CTCATTCATCRTGTCTTACAG | 0.034 | 0.034 | 0.598 | 0.435 | 0.687 |
| 41 | 16 | 46985312 | — | 7896 | CTGGTCATCARAGCAGTTTAA | 0.276 | 0.272 | 0.479 | 0.436 | 0.874 |
| 42 | 16 | 73578487 | 9925422 | 7897 | TGCCTGGACCRTTTCATGTTT | 0.557 | 0.559 | 0.496 | 0.801 | 1.481 |
| 42 | 16 | 73585421 | 9925758 | 7898 | TGGGCTGTTCYCTTTGCCTGG | 0.706 | 0.706 | 0.214 | 0.559 | 1.511 |
| 42 | 16 | 73603685 | 16952761 | 7899 | GTTGTAGTGTRAAAGGATCAT | 0.361 | 0.363 | 0.515 | 0.599 | 0.935 |
| 42 | 16 | 73608361 | 9925180 | 7900 | AATAAACACARTGAAGTACAG | 0.019 | 0.020 | 0.584 | 0.394 | 0.742 |
| 42 | 16 | 73626020 | 4888334 | 7901 | TCCGTTCTTTYGATTTTAACT | 0.880 | 0.856 | 0.531 | 0.584 | 0.491 |
| 42 | 16 | 73638451 | 16953733 | 7902 | ATAATCTGTCYCTTGCCATTA | 0.718 | 0.727 | 0.418 | 0.563 | 0.747 |
| 42 | 16 | 73644376 | 17684886 | 7903 | GCCACTGGGGWCATGATGTGA | 0.622 | 0.578 | 0.740 | 0.417 | 1.272 |
| 42 | 16 | 73648772 | 7196872 | 7904 | GAGTTTTTTTWAATATATTGA | 0.106 | 0.105 | 0.569 | 0.433 | 1.357 |
| 42 | 16 | 73665578 | 11149795 | 7905 | CTGTCCGTGASCGTTGCTAGA | 0.760 | 0.753 | 0.330 | 0.973 | 1.492 |
| 42 | 16 | 73696428 | 2287989 | 7906 | GGCAGAGGCCRTCAGACAGGT | 0.000 | 0.000 | 0.292 | 1.647 | 1.300 |
| 42 | 16 | 73701798 | 1043503 | 7907 | GGCCTAGCACRCTTTGATGAG | 0.237 | 0.232 | 0.953 | 1.487 | 1.646 |
| 42 | 16 | 73722875 | 7206259 | 7908 | AGAAGCATCAYGTTGCTAACA | 0.447 | 0.447 | 1.846 | 1.535 | 4.488 |
| 42 | 16 | 73761944 | 12935567 | 7909 | ATATATCCAGYTGTAAATAGC | 1.466 | 1.440 | 1.769 | 1.777 | 4.488 |
| 42 | 16 | 73762714 | 17673793 | 7910 | CAGAGACTTTRGAGGAAAAAT | 2.322 | 2.561 | 2.007 | 1.920 | 3.604 |
| 42 | 16 | 73787731 | 1559362 | 7911 | TGGTTTTGCCYGTGTGACCAA | 0.345 | 0.354 | 1.928 | 4.267 | 3.687 |
| 42 | 16 | 73789787 | 10514392 | 7912 | TCTTGCGACTRCTCCAGACGT | 0.797 | 0.804 | 1.616 | 4.488 | 4.187 |
| 42 | 16 | 73812718 | 8051363 | 7913 | TTCTGCTTCCRATGTGCCATT | 0.137 | 0.138 | 2.619 | 4.364 | 4.488 |
| 42 | 16 | 73823220 | 8062565 | 7914 | TCTGAAAACAMGGCGATCCCA | 0.865 | 0.862 | 3.503 | 4.187 | 4.488 |
| 42 | 16 | 73837879 | 28439846 | 7915 | GGTCAGAGACRGCCTCCCCAA | 4.037 | 3.761 | 3.447 | 2.832 | 4.364 |
| 42 | 16 | 73851712 | 4261573 | 7916 | TTTGATTCGAYTGATGGCTAC | 0.737 | 0.735 | 3.623 | 3.275 | 3.886 |
| 42 | 16 | 73865731 | 4888370 | 7917 | TGTGTGTTTCYCAGCCCCAGG | 0.687 | 0.706 | 3.852 | 3.091 | 2.855 |
| 42 | 16 | 73878532 | 4243112 | 7918 | CTGAGCAACCYTTCAAAGGTG | 1.299 | 1.294 | 1.176 | 3.114 | 2.189 |
| 42 | 16 | 73884883 | 17605723 | 7919 | AACAAGCTGCRAAGGGGCCTG | 0.047 | 0.047 | 0.994 | 2.639 | 1.941 |
| 42 | 16 | 73890482 | 11149814 | 7920 | CACCAAGAAAYCTGTGTAATG | 0.934 | 0.924 | 0.830 | 1.284 | 2.107 |
| 42 | 16 | 73897232 | 17674257 | 7921 | GTGAGTTGGGYCCTGTTTTTT | 0.530 | 0.526 | 0.870 | 1.135 | 2.101 |
| 42 | 16 | 73903741 | 9923574 | 7922 | ATTTTTAAACSTTTTGTGGCT | 0.374 | 0.382 | 1.099 | 0.865 | 2.082 |
| 42 | 16 | 73908476 | 2865532 | 7923 | ATCTTCAGCARAGTCCTAGAT | 1.474 | 1.435 | 0.942 | 0.870 | 1.233 |
| 42 | 16 | 73917597 | 8046109 | 7924 | TTGTGTGCCARATGAGTTTTT | 0.708 | 0.724 | 0.699 | 0.849 | 1.166 |
| 42 | 16 | 73927374 | 8052405 | 7925 | GACTGACTTCMAAATGACAGA | 0.508 | 0.495 | 1.018 | 0.943 | 1.013 |
| 42 | 16 | 73935915 | 9972714 | 7926 | TATTTTATAGYAGGCGTGTAT | 0.010 | 0.009 | 0.489 | 1.015 | 0.990 |
| 42 | 16 | 73945935 | 8050769 | 7927 | CCTCATGATGYATAAAAACAT | 1.194 | 1.151 | 0.670 | 1.103 | 0.998 |
| 42 | 16 | 73955589 | — | 7928 | TCTGCCAGAARGAAAATAAGG | 0.024 | 0.024 | 0.855 | 0.756 | 1.154 |
| 42 | 16 | 73962475 | 8057203 | 7929 | CACATGTTCAYGTGGACTTCA | 1.233 | 1.192 | 1.206 | 0.854 | 1.093 |
| 42 | 16 | 73969226 | 8046184 | 7930 | CCCAAACTGCYTTAGCAATAA | 0.850 | 0.862 | 0.710 | 0.802 | 1.146 |
| 42 | 16 | 73980404 | 10514396 | 7931 | TTAAGTTATAYTGCTTTAGGT | 0.820 | 0.805 | 1.078 | 1.334 | 0.905 |
| 42 | 16 | 74008671 | 7188604 | 7932 | TATATAATAGKTTATTCACTC | 0.074 | 0.075 | 0.724 | 1.069 | 0.944 |
| 42 | 16 | 74033952 | 4888426 | 7933 | ACAGTCTTGGRGTCTTCTGTC | 1.005 | 0.982 | 1.013 | 1.208 | 0.989 |
| 42 | 16 | 74040633 | 12928036 | 7934 | AGGTATGATCRCTATTCTCAA | 0.325 | 0.324 | 0.925 | 0.892 | 1.312 |
| 42 | 16 | 74047910 | 247451 | 7935 | AAAAAAGTCASCCTTAGTCAA | 1.571 | 1.579 | 1.302 | 0.870 | 1.117 |
| 42 | 16 | 74052777 | 11641430 | 7936 | GATGTCTACCYAACCCTCCGT | 0.491 | 0.488 | 0.731 | 0.813 | 1.260 |
| 42 | 16 | 74063566 | 12051137 | 7937 | CTAGGTGAAASTTTTTGAAAT | 0.603 | 0.570 | 0.954 | 1.253 | 1.024 |
| 42 | 16 | 74074404 | — | 7938 | CCAATGGGGCRCCGAAAGAGA | 0.035 | 0.036 | 0.385 | 0.979 | 0.857 |
| 42 | 16 | 74088978 | 2550907 | 7939 | ATATGACTTAYCTATGGCTTC | 0.640 | 0.635 | 0.634 | 1.054 | 0.973 |
| 43 | 16 | 76445659 | 7198177 | 7940 | TTGAAATTCTYGGCACCTGTG | 0.405 | 0.397 | 1.027 | 0.653 | 1.335 |
| 43 | 16 | 76452281 | 12599959 | 7941 | TAGGAAGTTTMAAGCCTGCTT | 0.089 | 0.090 | 0.806 | 1.115 | 1.641 |
| 43 | 16 | 76465091 | 1125690 | 7942 | CATTAAAGCAYAAAGGAAACT | 1.939 | 1.798 | 0.634 | 1.536 | 2.082 |
| 43 | 16 | 76470467 | 3751767 | 7943 | TTTCAAGATTYCTCCAGTTCC | 0.000 | 0.000 | 1.297 | 1.887 | 1.900 |
| 43 | 16 | 76476485 | 12924014 | 7944 | TCGGTGTGGTYACAAGAGCAT | 0.327 | 0.344 | 2.016 | 2.058 | 2.032 |
| 43 | 16 | 76484142 | 382587 | 7945 | CCAGCACAAAYGGTTTCTAGT | 1.834 | 1.960 | 1.535 | 2.308 | 1.872 |
| 43 | 16 | 76491397 | 16946778 | 7946 | AAGCTACACCRTATGCAAGGC | 1.167 | 1.173 | 2.131 | 2.460 | 1.683 |
| 43 | 16 | 76499090 | 17704468 | 7947 | ATGTTCAGTTYTATATCCCCA | 1.164 | 1.248 | 2.441 | 1.834 | 1.838 |
| 43 | 16 | 76508672 | 1429066 | 7948 | TGGAAGCAACRAAAAAGGAAG | 1.021 | 0.990 | 1.412 | 1.851 | 1.714 |
| 43 | 16 | 76517193 | 372627 | 7949 | GAGAAATCTAYCAAACAACAT | 0.610 | 0.608 | 1.336 | 1.722 | 2.607 |
| 43 | 16 | 76523423 | 9937770 | 7950 | CCTGAGCATTKAGTTCATGGG | 0.367 | 0.373 | 0.738 | 1.306 | 1.976 |
| 43 | 16 | 76529180 | 7195268 | 7951 | AGGCGAGTTGRATCCCTTGAA | 0.916 | 1.008 | 0.323 | 0.952 | 2.484 |
| 43 | 16 | 76538629 | 10454707 | 7952 | AAGACCATCTSCTTCTAGTGC | 0.073 | 0.073 | 0.568 | 1.480 | 2.635 |
| 43 | 16 | 76546435 | — | 7953 | CATATTGTGTYCTGTTCATGA | 0.035 | 0.035 | 0.504 | 1.289 | 2.103 |
| 43 | 16 | 76555316 | 16946919 | 7954 | AAGACCTTCARAACAAAACCG | 1.193 | 1.212 | 1.157 | 1.570 | 1.901 |
| 43 | 16 | 76566465 | 373929 | 7955 | TTTTAGGGTTRGCACCTGACA | 0.223 | 0.226 | 1.448 | 1.646 | 2.012 |
| 43 | 16 | 76574323 | 402904 | 7956 | GCCATTTGGGRTATAGGAAAC | 2.522 | 3.060 | 2.149 | 1.480 | 2.170 |
| 43 | 16 | 76581622 | — | 7957 | CAAAAAAATAYAGCCAACATA | 0.591 | 0.568 | 2.057 | 1.585 | 2.071 |
| 43 | 16 | 76587405 | 2252113 | 7958 | CTGACTTGCCYGGACACGTCT | 1.416 | 1.478 | 2.450 | 2.219 | 2.038 |
| 43 | 16 | 76594303 | 8058458 | 7959 | CAATCCTATCKGTGAATTTCT | 0.863 | 0.854 | 1.058 | 2.397 | 2.139 |
| 43 | 16 | 76601272 | 11863422 | 7960 | GCTCTGCGAGYGTTTCCTGTC | 0.545 | 0.541 | 1.638 | 2.261 | 2.955 |
| 43 | 16 | 76607822 | 12597064 | 7961 | GTAAGCCCAARAAGCCCCATA | 0.066 | 0.066 | 1.821 | 1.770 | 3.026 |
| 43 | 16 | 76612446 | 11643023 | 7962 | CCACTGCCCTYCATTTGCACC | 1.697 | 1.622 | 1.542 | 2.085 | 3.342 |
| 43 | 16 | 76634316 | 4888726 | 7963 | ATTGGGGCCAYCCTGTGCATT | 1.726 | 1.784 | 1.530 | 2.924 | 3.503 |
| 43 | 16 | 76647688 | 8045975 | 7964 | TCACTTGCCASCTTGGCCAGG | 0.932 | 0.921 | 2.098 | 2.779 | 3.225 |
| 43 | 16 | 76660674 | 6564507 | 7965 | CTTGTCATTCRATCTTGTCTA | 1.063 | 1.076 | 3.221 | 3.210 | 3.233 |
| 43 | 16 | 76673175 | 16947096 | 7966 | TCAGGAACGAYGATTTATAAC | 1.284 | 1.194 | 3.163 | 3.585 | 3.153 |
| 43 | 16 | 76680185 | — | 7967 | GGGCCTATGCRTAGAGTCAGT | 3.976 | 4.568 | 4.665 | 3.988 | 3.386 |
| 43 | 16 | 76685815 | 1073111 | 7968 | CTCCTTGCTARTAATCAATGT | 0.167 | 0.170 | 3.275 | 3.245 | 3.082 |
| 43 | 16 | 76698607 | 8045088 | 7969 | CCCTTCGAATRCCTCTTGTAG | 2.072 | 2.079 | 3.924 | 2.949 | 3.071 |
| 43 | 16 | 76710658 | 11645006 | 7970 | CACGGTGAACRTTACATGCAA | 0.665 | 0.686 | 0.930 | 2.815 | 2.809 |
| 43 | 16 | 76718209 | 9319518 | 7971 | TTAAACTTGTSTGGCTTTGCA | 0.275 | 0.289 | 0.943 | 2.189 | 2.232 |
| 43 | 16 | 76725829 | 28607706 | 7972 | TTGAGCCCCTYTTCTCTTAGT | 0.284 | 0.287 | 0.432 | 0.597 | 1.841 |
| 43 | 16 | 76738796 | 17650073 | 7973 | GGAACTCTGGSCGTTGATGTA | 0.175 | 0.178 | 0.260 | 0.642 | 1.675 |
| 43 | 16 | 76746301 | 12716853 | 7974 | ATGTTTCCTGRATAATGTGCA | 0.879 | 0.911 | 0.146 | 0.135 | 1.363 |
| 43 | 16 | 76762452 | 7206823 | 7975 | CCTCATTGATWAGCATCGGAA | 0.121 | 0.126 | 0.155 | 0.054 | 0.360 |
| 43 | 16 | 76769919 | 7194833 | 7976 | GAATACATGTSAGTGCTAGAC | 0.022 | 0.023 | 0.123 | 0.088 | 0.334 |
| 43 | 16 | 76775517 | 17573298 | 7977 | CCTTCCACCAYATCAGAAGGT | 0.336 | 0.333 | 0.004 | 0.106 | 0.092 |
| 43 | 16 | 76782865 | 6564516 | 7978 | TATGCCGCCAMAATATATCAA | 0.041 | 0.040 | 0.055 | 0.142 | 0.067 |
| 43 | 16 | 76790899 | 7192037 | 7979 | CTGCGGATCCRGCATCATGAC | 0.020 | 0.020 | 0.143 | 0.037 | 0.056 |
| 43 | 16 | 76797626 | 9938637 | 7980 | AGTTATTGGTRGTGGAATATC | 0.684 | 0.704 | 0.154 | 0.047 | 0.082 |
| 43 | 16 | 76803679 | 2194292 | 7981 | AGGCTGATCARTCTAGGCTGG | 0.429 | 0.429 | 0.171 | 0.082 | 0.111 |
| 43 | 16 | 76811751 | 2067714 | 7982 | TTATTTTTCCRAGCAAGTTTT | 0.370 | 0.374 | 0.231 | 0.062 | 0.041 |
| 43 | 16 | 76822238 | 12931696 | 7983 | CACACCAATGRTATATATTTT | 0.032 | 0.032 | 0.124 | 0.152 | 0.125 |
| 43 | 16 | 76827833 | 7204887 | 7984 | TGACAGACACMTTAAGAGCTT | 0.253 | 0.260 | 0.081 | 0.258 | 0.304 |
| 43 | 16 | 76830780 | 11649150 | 7985 | TCATTCATGCYGAGACCCTGA | 0.404 | 0.388 | 0.136 | 0.118 | 0.250 |
| 43 | 16 | 76868733 | 4380066 | 7986 | AAAATGATGTMAGGATCCTTT | 0.241 | 0.242 | 0.291 | 0.262 | 0.387 |
| 43 | 16 | 76876919 | 4887950 | 7987 | ATGAAGCCCCRTAGGATGGCT | 0.621 | 0.625 | 0.236 | 0.518 | 0.496 |
| 43 | 16 | 76894438 | 8051705 | 7988 | ATAGATGCTCYTATTGGAACA | 0.515 | 0.518 | 0.546 | 0.520 | 0.403 |
| 43 | 16 | 76904717 | 4887952 | 7989 | TAGAACGTCTRAACAGTGCTG | 0.062 | 0.064 | 1.024 | 0.687 | 0.590 |
| 43 | 16 | 76920881 | 8048594 | 7990 | CTTGAGGCTTYGTGGCAAATG | 1.143 | 1.130 | 0.705 | 0.717 | 0.580 |
| 43 | 16 | 76933108 | 7498411 | 7991 | AGCATCGAGTRTGGAAACCTC | 1.213 | 1.178 | 0.809 | 0.701 | 1.001 |
| 43 | 16 | 76945965 | 4587988 | 7992 | ATATGCTTAGRAATATCCAGC | 0.029 | 0.029 | 1.038 | 0.927 | 1.123 |
| 43 | 16 | 76959950 | 4459554 | 7993 | ATATCCTCAAMCCAAGGAGAA | 0.772 | 0.763 | 0.591 | 0.855 | 1.104 |
| 43 | 16 | 76971907 | 8058540 | 7994 | CCATTCAGCCSTATCAGTGAA | 0.467 | 0.448 | 0.632 | 1.409 | 1.083 |
| 43 | 16 | 76984378 | 8058511 | 7995 | CAGCGGTCGTYGGCCAGTGTG | 0.286 | 0.291 | 0.767 | 1.238 | 0.966 |
| 43 | 16 | 76997097 | 8051395 | 7996 | CAGGAAATATYCTCTTTTAGG | 1.263 | 1.292 | 1.174 | 0.948 | 0.956 |
| 43 | 16 | 77011368 | 6564541 | 7997 | ATGAGCATAARATCTAAATAG | 0.000 | 0.000 | 1.303 | 0.996 | 0.987 |
| 43 | 16 | 77024259 | 3764342 | 7998 | TCTCAGTAATMACATTGTCCA | 1.555 | 1.575 | 1.386 | 0.845 | 0.766 |
| 43 | 16 | 77031763 | 4297688 | 7999 | CTAGAATACTSCTCCTCCACT | 0.974 | 0.972 | 0.908 | 0.877 | 0.628 |
| 43 | 16 | 77050888 | 2738646 | 8000 | CATGCGGTATSTGCCATTTTG | 0.240 | 0.236 | 0.807 | 0.823 | 0.634 |
| 43 | 16 | 77056971 | 2738664 | 8001 | TTTCATTAGTRACTCACATGG | 0.380 | 0.383 | 0.419 | 0.524 | 0.831 |
| 43 | 16 | 77063859 | 16947630 | 8002 | TTCTCTTGCTKTTCTCTAAAG | 0.184 | 0.176 | 0.115 | 0.592 | 0.791 |
| 43 | 16 | 77070054 | 2667556 | 8003 | CGTTGAGTTASTGGTTCACTG | 0.000 | 0.000 | 0.109 | 0.212 | 0.893 |
| 43 | 16 | 77076412 | 2738696 | 8004 | TTATAGATGARGTTCCCTTAG | 0.113 | 0.115 | 0.151 | 0.413 | 0.665 |
| 43 | 16 | 77082641 | 12444091 | 8005 | CCCTCTCAGTYAGCTGCTACA | 0.211 | 0.231 | 0.113 | 0.397 | 0.769 |
| 43 | 16 | 77088538 | 2667590 | 8006 | TTAGGTGTATSTCTGCTCATG | 0.561 | 0.569 | 0.596 | 0.510 | 0.599 |
| 43 | 16 | 77095567 | 13331582 | 8007 | TAATAAATAASTGAAATACCA | 0.106 | 0.104 | 0.652 | 0.492 | 0.870 |
| 43 | 16 | 77102849 | 1465099 | 8008 | CGTTGCAGGCRCGTTGAATGT | 1.715 | 1.653 | 0.926 | 0.593 | 1.110 |
| 43 | 16 | 77109437 | 11641340 | 8009 | TATGTCTTTGRGCTTGGTAAT | 0.266 | 0.260 | 0.725 | 0.856 | 1.201 |
| 43 | 16 | 77115457 | 16947928 | 8010 | GGTGATTCCARTGTGAGTGGT | 0.811 | 0.780 | 1.108 | 1.703 | 1.520 |
| 43 | 16 | 77121333 | 11645676 | 8011 | TGTTGGTTTCYGTGTTGATGA | 0.177 | 0.169 | 0.577 | 1.893 | 1.742 |
| 43 | 16 | 77127745 | 16948025 | 8012 | AAGGGTGTGAYCAGTTCCATG | 0.779 | 0.718 | 1.591 | 2.106 | 2.399 |
| 43 | 16 | 77135652 | 16948047 | 8013 | GTAAAACAGTRGATGTCTTTC | 0.751 | 0.736 | 1.613 | 1.804 | 2.454 |
| 43 | 16 | 77145092 | 2667505 | 8014 | TGATAGAGAASCTTTCCCTAG | 1.949 | 1.979 | 1.867 | 2.366 | 2.073 |
| 43 | 16 | 77154108 | 2859627 | 8015 | ACAATCTGATYGCTCCCCTGA | 1.011 | 0.979 | 2.064 | 2.628 | 2.599 |
| 43 | 16 | 77156356 | 9928690 | 8016 | TTTTAACAAGRCAAGTAGAAA | 0.731 | 0.730 | 2.423 | 2.560 | 2.912 |
| 43 | 16 | 77171105 | 16948109 | 8017 | AGAACTATGTKTGTTTTCACT | 1.115 | 1.104 | 1.902 | 2.016 | 2.977 |
| 43 | 16 | 77180388 | 11862167 | 8018 | TTGCTGGGAAYGTGGCCATCA | 1.201 | 1.210 | 1.587 | 2.189 | 2.720 |
| 43 | 16 | 77188320 | 17640520 | 8019 | ACTCTCTTGAYGCTATCCTCA | 1.391 | 1.384 | 1.157 | 1.968 | 2.653 |
| 43 | 16 | 77206499 | 12599563 | 8020 | AAATTCTATGKGTAAAATAAT | 0.071 | 0.071 | 1.117 | 1.805 | 2.184 |
| 43 | 16 | 77213355 | 2738566 | 8021 | TTGAAATTGTMCTGGTTTTTC | 0.160 | 0.158 | 1.448 | 1.775 | 2.108 |
| 43 | 16 | 77219165 | 2550608 | 8022 | GAAAAGTTGASTAGACAAAAG | 1.018 | 0.984 | 0.882 | 1.479 | 1.667 |
| 43 | 16 | 77230099 | 2550620 | 8023 | TCAGATTCCAMTCGAATACAT | 1.920 | 1.920 | 1.254 | 1.001 | 1.628 |
| 43 | 16 | 77238229 | 2548841 | 8024 | TTCCTTTTATYTCCCATCAGC | 0.274 | 0.260 | 1.394 | 0.712 | 1.444 |
| 43 | 16 | 77245970 | — | 8025 | GATTCTGATTKCTCCGTGATA | 0.478 | 0.485 | 0.866 | 1.063 | 1.192 |
| 43 | 16 | 77256370 | 17795127 | 8026 | AATGAACTTGKGAAGGTTTGC | 0.541 | 0.536 | 0.278 | 1.279 | 0.846 |
| 43 | 16 | 77262902 | 17722185 | 8027 | CCAGTATAGAYAACTTGTGAT | 0.017 | 0.017 | 0.486 | 0.909 | 0.534 |
| 43 | 16 | 77268743 | 6564575 | 8028 | ATGTTGAGATYACATACATCC | 0.656 | 0.654 | 0.509 | 0.317 | 0.527 |
| 43 | 16 | 77276578 | 2738630 | 8029 | AGGACTGGGASAGATCTGTGA | 0.769 | 0.785 | 0.393 | 0.283 | 0.598 |
| 43 | 16 | 77284472 | 7195153 | 8030 | CTTGCCAGCARCCTTTTAGAT | 0.564 | 0.527 | 0.502 | 0.240 | 0.763 |
| 43 | 16 | 77289752 | — | 8031 | TTTTTGGGGTWTCTTCCAGCC | 0.253 | 0.266 | 0.278 | 0.137 | 0.476 |
| 43 | 16 | 77310766 | 2042433 | 8032 | TAAATCTTCTRTCAGGTGATG | 0.281 | 0.282 | 0.146 | 0.218 | 0.566 |
| 43 | 16 | 77322980 | 8052934 | 8033 | TTTATTTGGGYTTTTTCGGTT | 0.112 | 0.114 | 0.045 | 0.485 | 0.499 |
| 43 | 16 | 77330775 | 16948419 | 8034 | CAACAATTTTKGAGGCACCCA | 0.291 | 0.297 | 0.062 | 0.501 | 0.424 |
| 43 | 16 | 77337515 | — | 8035 | GTGATTTGTCSAAGGACATCG | 0.046 | 0.044 | 0.499 | 0.529 | 0.460 |
| 43 | 16 | 77344287 | 12599398 | 8036 | TCCTGGTCCCRTCTTGGCTGG | 0.396 | 0.412 | 0.860 | 0.515 | 0.334 |
| 43 | 16 | 77353386 | 10514443 | 8037 | GTGCAGTGAGRATGAATCAAC | 1.645 | 1.755 | 1.113 | 0.482 | 0.270 |
| 43 | 16 | 77360990 | 7201295 | 8038 | TTTTTACCATRTCTGTTACTC | 0.819 | 0.829 | 1.210 | 0.507 | 0.261 |
| 43 | 16 | 77368476 | 4887985 | 8039 | GAGGAAAATTRGGAATGAAGT | 0.621 | 0.631 | 0.994 | 0.429 | 0.351 |
| 43 | 16 | 77375785 | 7191931 | 8040 | AATCAGAAATYTGTGACTCCA | 0.228 | 0.231 | 0.329 | 0.577 | 0.406 |
| 43 | 16 | 77382825 | 2550595 | 8041 | CTCCFGAAACRTAATTTGGAG | 0.175 | 0.177 | 0.091 | 0.615 | 0.407 |
| 43 | 16 | 77401769 | 1124597 | 8042 | ATGTGGACACRTGCAGCCACA | 0.189 | 0.191 | 0.032 | 0.309 | 0.597 |
| 43 | 16 | 77439717 | 7501409 | 8043 | TTCAAGTCATRTTTGCCCCCA | 0.039 | 0.040 | 0.077 | 0.233 | 0.826 |
| 43 | 16 | 77453496 | 8063104 | 8044 | GGGTGTGTCTRTATCTATACA | 0.000 | 0.000 | 0.249 | 0.118 | 0.833 |
| 43 | 16 | 77461185 | 16948659 | 8045 | CTTAGCAGAGYCAAAAGCCAG | 0.518 | 0.486 | 0.414 | 0.282 | 0.476 |
| 43 | 16 | 77470888 | 2656620 | 8046 | CCCTGGTCTTMAAGTCCACTC | 0.732 | 0.745 | 0.448 | 0.489 | 0.366 |
| 43 | 16 | 77478402 | 4887990 | 8047 | TTGAGTTTTCRTATTGTCAGT | 0.534 | 0.559 | 0.669 | 0.595 | 0.293 |
| 43 | 16 | 77484117 | 11647676 | 8048 | ATTGTGATACWATAGGAGCCG | 0.087 | 0.091 | 0.810 | 0.741 | 0.267 |
| 43 | 16 | 77491900 | 8064053 | 8049 | TCAAGAAACCSACAGAGGTCC | 0.969 | 0.960 | 0.678 | 0.691 | 0.254 |
| 43 | 16 | 77497905 | 16948804 | 8050 | CACTTGTGCTSTGCAAAATCA | 0.799 | 0.818 | 0.632 | 0.615 | 0.236 |
| 43 | 16 | 77503965 | 8060900 | 8051 | AACCAGCAGGRTTATATCCCC | 0.494 | 0.482 | 0.768 | 0.409 | 0.234 |
| 43 | 16 | 77511358 | 7192071 | 8052 | TACCAAACACRTAAGCTTATT | 0.461 | 0.456 | 0.443 | 0.278 | 0.288 |
| 43 | 16 | 77528453 | 16948943 | 8053 | ATTAAGTGGARATATAGGTTT | 0.358 | 0.355 | 0.184 | 0.260 | 0.487 |
| 43 | 16 | 77535072 | 13331318 | 8054 | AGTGTAGGACRCTGGAAAAGT | 0.287 | 0.277 | 0.093 | 0.096 | 0.370 |
| 43 | 16 | 77541656 | 1995548 | 8055 | GCTCAAATGCRTGACATGATG | 0.153 | 0.152 | 0.028 | 0.086 | 0.442 |
| 43 | 16 | 77549079 | 9319530 | 8056 | AAGGGATTTTSAAGCAGTTGT | 0.112 | 0.106 | 0.008 | 0.270 | 0.432 |
| 43 | 16 | 77557050 | 8052893 | 8057 | TAGCATCTCTRGCATAAACTA | 0.004 | 0.004 | 0.050 | 0.212 | 0.814 |
| 43 | 16 | 77563991 | 4888896 | 8058 | GTTCCATTTAMATTGAATGGC | 0.089 | 0.086 | 0.443 | 0.331 | 1.032 |
| 43 | 16 | 77570962 | 8063569 | 8059 | GCTCCTGTGASGGTTTCTACA | 0.712 | 0.734 | 0.482 | 0.270 | 0.897 |
| 43 | 16 | 77576754 | 16949152 | 8060 | GTTGTCTCCARTGTGCCTTGT | 1.472 | 1.505 | 0.909 | 1.028 | 0.849 |
| 43 | 16 | 77583096 | 10492907 | 8061 | CTTTCCTATAYAACGCAAGCC | 0.206 | 0.201 | 0.908 | 1.856 | 0.861 |
| 43 | 16 | 77593245 | 10492905 | 8062 | CTGCAGTGGTRTCGCTTTAGA | 0.850 | 0.835 | 1.943 | 1.790 | 0.967 |
| 43 | 16 | 77601455 | 1469135 | 8063 | AAGCTGCTATSCTTGCAAAGG | 0.019 | 0.020 | 1.800 | 1.888 | 1.053 |
| 43 | 16 | 77609347 | 12932339 | 8064 | AAAAGCAGGCRAAATAGAATA | 2.388 | 2.454 | 1.643 | 1.743 | 1.421 |
| 43 | 16 | 77614961 | 16949262 | 8065 | ACCATCCACCRCAGGCAAACA | 1.561 | 1.536 | 1.436 | 1.248 | 1.501 |
| 43 | 16 | 77621304 | 2656645 | 8066 | CATAAACGCAYATGGTCACTT | 0.160 | 0.156 | 1.623 | 1.336 | 1.433 |
| 43 | 16 | 77627954 | 16949326 | 8067 | CCTGAATTATYGGAGCTCTTG | 0.234 | 0.230 | 0.713 | 1.460 | 1.203 |
| 43 | 16 | 77634311 | 2194344 | 8068 | TAAGTGATGCRTCAGAATTTC | 0.371 | 0.391 | 0.213 | 1.512 | 0.967 |
| 43 | 16 | 77641440 | 16949415 | 8069 | GGAATGGGAGSAGTTTAAACA | 0.605 | 0.604 | 0.508 | 0.509 | 1.009 |
| 43 | 16 | 77648924 | 9928080 | 8070 | GAGCTGAGCCRCACTTGGAGA | 0.406 | 0.418 | 0.477 | 0.115 | 0.942 |
| 43 | 16 | 77661543 | 17726900 | 8071 | AGCTATTTCCSTAATACCAAG | 0.883 | 0.847 | 0.306 | 0.298 | 1.112 |
| 43 | 16 | 77667343 | 11150133 | 8072 | TCTGCTCTAAYGTTGGATCAT | 0.170 | 0.168 | 0.141 | 0.349 | 0.472 |
| 43 | 16 | 77674005 | 6564644 | 8073 | CCAGAAAGTCSCGAGTGTTTT | 0.061 | 0.041 | 0.326 | 0.366 | 0.336 |
| 43 | 16 | 77681077 | 17727687 | 8074 | CTTCGAATTGKTGCACTAGAG | 0.112 | 0.108 | 0.175 | 0.331 | 0.918 |
| 43 | 16 | 77687044 | 8052725 | 8075 | AGTAGGCTCTMACCTGGCAGG | 0.920 | 0.915 | 0.256 | 0.293 | 0.977 |
| 43 | 16 | 77690771 | 17727813 | 8076 | GTAAGGTCCCRTGACAATTAG | 0.415 | 0.408 | 0.447 | 0.325 | 0.873 |
| 43 | 16 | 77706366 | 7185485 | 8077 | AGTTAGACAAYTAGCTCGCCC | 0.475 | 0.467 | 0.504 | 1.078 | 0.690 |
| 43 | 16 | 77713723 | 2005036 | 8078 | GTTCAGGCGGYATTAACCCCC | 0.510 | 0.486 | 0.548 | 1.260 | 0.770 |
| 43 | 16 | 77720121 | 12923469 | 8079 | ATTTGCCAAGKTTTGAAAAGT | 0.243 | 0.251 | 1.521 | 1.252 | 0.644 |
| 43 | 16 | 77726730 | 4611476 | 8080 | TCCTTTTCCCRTAATTTTATG | 0.985 | 1.004 | 1.511 | 0.853 | 0.703 |
| 43 | 16 | 77729566 | 1424113 | 8081 | GTCCTTGATCRTTTTTCTTGG | 2.263 | 2.155 | 1.238 | 0.965 | 0.798 |
| 43 | 16 | 77742894 | 7201082 | 8082 | GTAACCAATAYCGCTCCTTCT | 0.391 | 0.396 | 1.038 | 0.692 | 0.793 |
| 43 | 16 | 77751639 | 6564651 | 8083 | TTTTGATGTAYAGACATCCCT | 0.108 | 0.107 | 0.926 | 0.842 | 0.914 |
| 43 | 16 | 77757915 | 11150140 | 8084 | CATACGGGCARTAGTCCGCAT | 0.084 | 0.085 | 0.311 | 0.872 | 1.064 |
| 43 | 16 | 77764739 | 6564653 | 8085 | TGTATGTTTGSGGTACAACTC | 0.811 | 0.795 | 0.284 | 0.628 | 0.929 |
| 43 | 16 | 77770740 | 12716871 | 8086 | GAGAGGTACTSTTAGCAAATC | 0.374 | 0.387 | 0.317 | 0.396 | 1.054 |
| 43 | 16 | 77777161 | 17730134 | 8087 | AGAAATGAGARTGAGGATAAA | 0.336 | 0.343 | 0.332 | 0.575 | 0.986 |
| 43 | 16 | 77783493 | 386497 | 8088 | CATAGGGTATYTCCAGATAAT | 0.321 | 0.313 | 0.527 | 0.565 | 0.846 |
| 43 | 16 | 77789947 | 383673 | 8089 | GGAGCAACCTMACTAGAGACA | 0.163 | 0.166 | 0.837 | 0.835 | 0.411 |
| 43 | 16 | 77797274 | 449842 | 8090 | CGCACCTACAYGCGTGGGAAC | 1.332 | 1.396 | 0.710 | 0.619 | 0.596 |
| 43 | 16 | 77804563 | 395050 | 8091 | GCAAGACGGARAAAATGCTTC | 1.114 | 1.153 | 0.990 | 0.644 | 0.599 |
| 43 | 16 | 77810494 | 270425 | 8092 | TGCCCTGCTGMATCTTAGGCG | 0.055 | 0.057 | 0.992 | 0.576 | 1.027 |
| 43 | 16 | 77829050 | 9924583 | 8093 | TTCTTAAACTMTGATCTATCC | 1.096 | 1.105 | 0.606 | 0.897 | 0.952 |
| 43 | 16 | 77841837 | 16950049 | 8094 | TTTTTGGCACKTGGCTCTTTA | 0.001 | 0.001 | 0.173 | 0.917 | 1.094 |
| 43 | 16 | 77849307 | 437620 | 8095 | ATTTTGCCCARATGTTATCAG | 0.470 | 0.483 | 0.745 | 1.195 | 1.162 |
| 43 | 16 | 77856543 | 270433 | 8096 | TGCATAAATGRAAGTCATTAT | 0.056 | 0.054 | 0.291 | 0.903 | 1.285 |
| 43 | 16 | 77863078 | 17796919 | 8097 | TCCATCTCTAYTGCTAAGGAA | 1.399 | 1.393 | 1.302 | 1.262 | 1.563 |
| 43 | 16 | 77869153 | 4888944 | 8098 | AATTTGAGACMACTTTTCTGT | 0.102 | 0.096 | 1.230 | 1.066 | 1.195 |
| 43 | 16 | 77875406 | — | 8099 | TAGTAGTGATKGATGGCAGAA | 1.910 | 1.878 | 1.862 | 1.400 | 1.094 |
| 43 | 16 | 77881728 | 17724291 | 8100 | TTTCCCATAARTCATACGGGC | 0.411 | 0.401 | 1.278 | 1.488 | 1.226 |
| 43 | 16 | 77895943 | 9924169 | 8101 | AGAACTAGCCYTTTTGATTCC | 0.694 | 0.856 | 1.571 | 1.480 | 0.981 |
| 43 | 16 | 77902014 | 12600246 | 8102 | CCGCCTCCGCSACATTTTGCA | 0.628 | 0.638 | 0.704 | 1.178 | 1.189 |
| 43 | 16 | 77908301 | 12596374 | 8103 | TGGACACCAAMAAAGTAGGAG | 0.617 | 0.543 | 0.642 | 1.308 | 1.016 |
| 43 | 16 | 77914236 | 16944185 | 8104 | CCTGCCAAAGRGTTCTAGTTT | 0.482 | 0.484 | 0.633 | 0.665 | 1.033 |
| 43 | 16 | 77921315 | 7191820 | 8105 | CATACAGCATRAAGAACAGAC | 0.336 | 0.308 | 0.497 | 0.740 | 0.725 |
| 43 | 16 | 77927430 | 6564662 | 8106 | CACAGGGCTGSGCTCAGGGCA | 0.799 | 0.808 | 0.477 | 0.471 | 0.750 |
| 43 | 16 | 77933390 | 16950304 | 8107 | TATGAACAACRACAAAATTTA | 0.321 | 0.341 | 0.531 | 0.321 | 0.689 |
| 43 | 16 | 77939410 | 7198888 | 8108 | GTCCTTTCAAKGATGTCTCTA | 0.511 | 0.492 | 0.422 | 0.293 | 0.687 |
| 43 | 16 | 77946548 | 9936888 | 8109 | CTATCTTGCASGATCCTAGTG | 0.633 | 0.629 | 0.183 | 0.231 | 0.493 |
| 43 | 16 | 77960029 | 4243168 | 8110 | ACCAGTAGGASCCCTGGTGCT | 0.033 | 0.034 | 0.206 | 0.601 | 0.493 |
| 43 | 16 | 77970762 | 12325433 | 8111 | TGACAGTCTASTTTGCAGTTG | 0.110 | 0.111 | 0.118 | 0.474 | 0.381 |
| 43 | 16 | 77999427 | 4530155 | 8112 | AGAGGCGGGCSCCATAAGAGA | 0.412 | 0.429 | 0.475 | 0.388 | 0.423 |
| 43 | 16 | 78006279 | 16950383 | 8113 | TTCATGTGTTKTCTTAGCATT | 0.175 | 0.182 | 0.636 | 0.432 | 0.550 |
| 43 | 16 | 78012972 | 8051128 | 8114 | CGGAAGGGAARATGATAGACA | 1.680 | 1.645 | 0.620 | 0.277 | 0.403 |
| 43 | 16 | 78023063 | 4888977 | 8115 | GAATGCTAACYTGTGTTTTCC | 0.395 | 0.392 | 0.733 | 0.469 | 0.336 |
| 43 | 16 | 78030355 | 7190849 | 8116 | GAGACATCCTMAGATTAACAA | 0.098 | 0.096 | 0.668 | 0.710 | 0.317 |
| 43 | 16 | 78037195 | 11150162 | 8117 | TTTATTATTAYAATTGCTCCT | 0.617 | 0.634 | 0.247 | 0.630 | 0.219 |
| 43 | 16 | 78049764 | 1862720 | 8118 | CTATTACCAAMAGAAGACTAC | 0.113 | 0.109 | 0.420 | 0.575 | 0.214 |
| 44 | 18 | 22503963 | 17607947 | 8119 | GGATGAATTCRGTTCTCTGTG | 0.195 | 0.193 | 0.223 | 0.085 | 0.019 |
| 44 | 18 | 22517853 | 17608457 | 8120 | TATCTGATGCKAATGGTATAT | 0.886 | 0.862 | 0.201 | 0.042 | 0.021 |
| 44 | 18 | 22524486 | — | 8121 | GATATGTCACWGAGTAGGATA | 0.561 | 0.579 | 0.256 | 0.030 | 0.037 |
| 44 | 18 | 22530423 | 16942566 | 8122 | GCAGAGTTATRGGAGACTTCT | 0.097 | 0.091 | 0.198 | 0.028 | 0.025 |
| 44 | 18 | 22535819 | 16960655 | 8123 | ATATTTTTTAYGGGAAAAAGC | 0.117 | 0.119 | 0.028 | 0.051 | 0.016 |
| 44 | 18 | 22543855 | 470306 | 8124 | CCTTCTCCAAYGGCTTAATAA | 0.018 | 0.018 | 0.001 | 0.091 | 0.011 |
| 44 | 18 | 22549985 | 470677 | 8125 | CACTTCTCTCKTGTTGGAGCT | 0.067 | 0.067 | 0.005 | 0.031 | 0.015 |
| 44 | 18 | 22555942 | 470455 | 8126 | TGTTTATGCTRATGAAGTGAC | 0.094 | 0.091 | 0.035 | 0.010 | 0.018 |
| 44 | 18 | 22563606 | 7234618 | 8127 | TGGGTAGAATYGAGAGAAAGA | 0.160 | 0.312 | 0.076 | 0.009 | 0.020 |
| 44 | 18 | 22569929 | 4800265 | 8128 | AGGTTTTCACRTGATGCTGTG | 0.479 | 0.474 | 0.111 | 0.013 | 0.091 |
| 44 | 18 | 22579380 | — | 8129 | ACAAGGAAGCRGGCACTGGGC | 0.314 | 0.310 | 0.101 | 0.013 | 0.071 |
| 44 | 18 | 22595324 | — | 8130 | TGTGAGCAGCSCTCAGTAAAG | 0.195 | 0.210 | 0.089 | 0.021 | 0.095 |
| 44 | 18 | 22608012 | 1562701 | 8131 | CTCCCTTGCTRTAATAAGTGC | 0.070 | 0.070 | 0.026 | 0.313 | 0.185 |
| 44 | 18 | 22613927 | 573998 | 8132 | CCTAACACGTMATTTGGTGTT | 0.281 | 0.249 | 0.014 | 0.333 | 0.516 |
| 44 | 18 | 22621971 | 487455 | 8133 | TCTTGAAAAGYGGTGAAAATG | 0.040 | 0.039 | 0.477 | 0.303 | 0.596 |
| 44 | 18 | 22626379 | 621765 | 8134 | AGCCCCAAACRTTAACTTCTT | 0.173 | 0.171 | 0.620 | 0.483 | 0.865 |
| 44 | 18 | 22640533 | 16942713 | 8135 | GCCTGAAGAAKCCTGAGAATG | 2.015 | 2.137 | 0.669 | 1.042 | 0.766 |
| 44 | 18 | 22647211 | 16942751 | 8136 | GCTGCCTAACMAACATTCCCT | 0.391 | 0.383 | 1.170 | 1.180 | 1.204 |
| 44 | 18 | 22654052 | 17690930 | 8137 | TTATTTTACCRTCCTGAAAGT | 0.343 | 0.342 | 2.014 | 1.487 | 1.131 |
| 44 | 18 | 22660468 | 11659932 | 8138 | TGAGAGTGGGYGGACATGTAG | 0.924 | 0.948 | 1.160 | 1.490 | 1.155 |
| 44 | 18 | 22667416 | 16942801 | 8139 | GTGCAGACCGWTAAAGACACA | 1.717 | 1.688 | 1.571 | 2.367 | 1.487 |
| 44 | 18 | 22673906 | 16942835 | 8140 | TTTGGGGAGAWCACATTCCAG | 0.383 | 0.389 | 1.377 | 1.399 | 1.479 |
| 44 | 18 | 22684849 | 12455617 | 8141 | CTTAATGTTGMCTTAAACCCA | 0.937 | 0.921 | 1.872 | 1.379 | 1.708 |
| 44 | 18 | 22692538 | 11661256 | 8142 | TGAGCCTTTAWCTTCTCTATG | 0.091 | 0.094 | 0.836 | 1.619 | 1.836 |
| 44 | 18 | 22703018 | 11662318 | 8143 | CTGTGCCCCAYGCCCCACAGA | 1.734 | 1.632 | 0.781 | 1.290 | 2.118 |
| 44 | 18 | 22710424 | 589598 | 8144 | TATGTTGACAYCATACTAGGA | 0.105 | 0.108 | 0.844 | 0.898 | 2.090 |
| 44 | 18 | 22715430 | 3974646 | 8145 | TGATGAGGAAKGACACTGTTT | 0.255 | 0.262 | 0.870 | 1.011 | 1.894 |
| 44 | 18 | 22733560 | 630285 | 8146 | CCAGGTTTGCRTGCCTACCTA | 1.106 | 1.075 | 0.518 | 1.584 | 1.681 |
| 44 | 18 | 22743410 | 162632 | 8147 | TTAATTCTGAYACAGGTCGTC | 0.174 | 0.165 | 0.770 | 1.587 | 1.370 |
| 44 | 18 | 22749587 | 1143734 | 8148 | AAGAAGGTTGSTTTTGTTGCT | 0.885 | 0.851 | 1.752 | 1.077 | 1.455 |
| 44 | 18 | 22756491 | 16942955 | 8149 | AAAGACATGTRACTACAGATT | 0.797 | 0.749 | 1.414 | 1.125 | 1.388 |
| 44 | 18 | 22763991 | 163221 | 8150 | CTGGATTAAGYATCTACTGGT | 2.722 | 2.809 | 1.313 | 1.324 | 1.350 |
| 44 | 18 | 22770692 | 11663286 | 8151 | GCAGAGAAGGWTATGATTTGA | 0.221 | 0.218 | 1.172 | 1.224 | 0.945 |
| 44 | 18 | 22777715 | 163048 | 8152 | AAACAGTTCTRTAGAAGGACA | 0.130 | 0.127 | 1.213 | 1.361 | 1.048 |
| 44 | 18 | 22784157 | 16943030 | 8153 | AACTGCTGTGYCCTGGGCCTA | 0.393 | 0.399 | 0.448 | 1.217 | 1.009 |
| 44 | 18 | 22790787 | 444673 | 8154 | ATGTTTGAAAWCTCTGGTTGG | 1.104 | 1.042 | 0.576 | 0.960 | 0.807 |
| 44 | 18 | 22798300 | 1154215 | 8155 | ATTCTCAACCKCCCACCTGTT | 0.563 | 0.579 | 0.687 | 0.324 | 0.834 |
| 44 | 18 | 22803905 | 1657316 | 8156 | GTTATCATTAYATTTCTTGGT | 0.524 | 0.513 | 0.496 | 0.308 | 0.729 |
| 44 | 18 | 22804050 | 4093026 | 8157 | GGTTGGGTGCYTAAAATTGCC | 0.337 | 0.324 | 0.270 | 0.314 | 0.591 |
| 44 | 18 | 22811160 | 1785548 | 8158 | TAATTTGTACYGATGCTTAAA | 0.005 | 0.006 | 0.131 | 0.300 | 0.193 |
| 44 | 18 | 22826887 | 16943138 | 8159 | GTATTCATTTRCAGGCTCTTT | 0.535 | 0.538 | 0.072 | 0.137 | 0.225 |
| 44 | 18 | 22833854 | 1154208 | 8160 | GGTACTTAGAYGTTAAGTGGG | 0.108 | 0.096 | 0.082 | 0.073 | 1.465 |
| 44 | 18 | 22841488 | 16960687 | 8161 | AGAGCAGATAYAATCACTGTA | 0.255 | 0.239 | 0.154 | 0.083 | 1.311 |
| 44 | 18 | 22851934 | 1436906 | 8162 | GTTTCCTTAGMTTAAGCCTCA | 0.359 | 0.360 | 0.073 | 0.099 | 1.042 |
| 44 | 18 | 22867639 | 6508464 | 8163 | CTTTTCTGGGYAATCTCATTC | 0.345 | 0.322 | 0.186 | 1.844 | 0.917 |
| 44 | 18 | 22874298 | 12604227 | 8164 | ATCACGTCTARGAAAATTTAA | 0.173 | 0.169 | 0.252 | 1.449 | 1.277 |
| 44 | 18 | 22881674 | 7505854 | 8165 | TATCACAGGARTAGTGGGTTG | 0.588 | 0.588 | 2.626 | 1.426 | 1.364 |
| 44 | 18 | 22892113 | 1485807 | 8166 | AAATAGGAATRCTAGTCTTAA | 0.453 | 0.440 | 1.938 | 1.447 | 1.353 |
| 44 | 18 | 22898135 | 6508467 | 8167 | AAACCCTGGGMAAGTGATAAT | 4.907 | 4.422 | 1.977 | 1.870 | 1.211 |
| 44 | 18 | 22905657 | 9957079 | 8168 | CATAAATACAKTGTTGAGAAA | 0.098 | 0.095 | 2.126 | 1.886 | 1.292 |
| 44 | 18 | 22921346 | 12954928 | 8169 | ACTAGCAAAAYCACCTTTCTA | 0.062 | 0.064 | 2.779 | 1.776 | 1.518 |
| 44 | 18 | 22928009 | 8088410 | 8170 | TATCTGCAAARGGGTTATTTT | 0.099 | 0.099 | 0.520 | 1.937 | 1.463 |
| 44 | 18 | 22943704 | 919140 | 8171 | GGGGCTCCTGSTGAATTATAA | 1.810 | 1.771 | 0.523 | 1.938 | 1.515 |
| 44 | 18 | 22952382 | — | 8172 | TTACTTCTCCYTACATTATGT | 0.000 | 0.000 | 0.494 | 0.455 | 1.874 |
| 44 | 18 | 22959715 | 12969203 | 8173 | CCTGAGAAGAYAGCCGTCAAT | 0.065 | 0.066 | 0.694 | 0.454 | 2.057 |
| 44 | 18 | 22966551 | 9964571 | 8174 | GAACAAGGCARTACCTTGGGG | 0.091 | 0.112 | 0.364 | 0.670 | 2.011 |
| 44 | 18 | 22972845 | 4800790 | 8175 | GTAACAACTAYGAAAAAAAAA | 0.492 | 0.484 | 0.230 | 1.285 | 0.533 |
| 44 | 18 | 22981800 | 4800792 | 8176 | ATTCTGTTCTRTTGATTCAAT | 1.154 | 1.118 | 0.465 | 0.725 | 0.775 |
| 44 | 18 | 22991320 | 8096346 | 8177 | TGAAATTAATRTGATTTGTTT | 0.061 | 0.095 | 1.286 | 0.595 | 1.009 |
| 44 | 18 | 23005211 | 9304504 | 8178 | CAATCAAAAARTGGCTTATGA | 0.708 | 0.702 | 1.266 | 0.633 | 1.008 |
| 44 | 18 | 23011541 | 2195032 | 8179 | CTTATTTGGTKTTCCCATTTT | 1.599 | 1.521 | 0.678 | 0.941 | 0.712 |
| 44 | 18 | 23016400 | 8088724 | 8180 | TTCAAGTACAYATCAATTATT | 0.434 | 0.402 | 0.729 | 1.073 | 0.587 |
| 44 | 18 | 23027139 | 4438389 | 8181 | ATTAAATACARCAAAATGGCA | 0.187 | 0.184 | 0.889 | 0.685 | 0.703 |
| 44 | 18 | 23036910 | — | 8182 | TCACTGGTAARCCATGGCTGC | 0.152 | 0.146 | 0.545 | 0.916 | 0.888 |
| 44 | 18 | 23039432 | — | 8183 | ACAGAGACTGRTAAGTATTTC | 0.989 | 0.974 | 0.396 | 0.707 | 0.847 |
| 44 | 18 | 23060734 | 17712675 | 8184 | AAAGATCTTASGCAAACAGGA | 0.832 | 0.866 | 0.615 | 0.338 | 0.766 |
| 44 | 18 | 23070175 | 16943382 | 8185 | GCAGAAAAGASACTGTCTAGG | 0.086 | 0.083 | 0.574 | 0.485 | 0.790 |
| 44 | 18 | 23075655 | 11664424 | 8186 | ACGTACTTTGRTTGTTTAAAA | 0.757 | 0.714 | 0.362 | 0.546 | 0.886 |
| 44 | 18 | 23081711 | 16943386 | 8187 | CAAGTGTTATYTCCCAGGGGT | 0.046 | 0.047 | 0.375 | 0.765 | 0.509 |
| 44 | 18 | 23087741 | 16943406 | 8188 | AGCTCTTACARGAATTGAGAA | 0.000 | 0.000 | 0.516 | 0.518 | 0.698 |
| 44 | 18 | 23102007 | 1426868 | 8189 | AGAAATTATCRAAGTTCAAGT | 0.883 | 0.881 | 0.588 | 0.563 | 0.816 |
| 44 | 18 | 23112652 | 9954770 | 8190 | AACATTAGCAYATTTTTAACA | 0.412 | 0.405 | 0.628 | 0.579 | 0.878 |
| 44 | 18 | 23126621 | 11661123 | 8191 | GTTTCCACTGYGTTGTTTTAT | 0.857 | 0.870 | 0.865 | 0.745 | 0.694 |
| 44 | 18 | 23133906 | 1714636 | 8192 | AATCTTCCAAMTCTTACAGTA | 0.122 | 0.124 | 0.502 | 0.998 | 0.533 |
| 44 | 18 | 23154769 | 17714238 | 8193 | ATCCTTTGATMCTGATGCTAG | 1.009 | 1.024 | 0.915 | 0.924 | 0.607 |
| 44 | 18 | 23166163 | 7236330 | 8194 | ACTACAATTTWCTTGGATTAT | 0.112 | 0.109 | 0.754 | 0.684 | 0.461 |
| 44 | 18 | 23172924 | 1474135 | 8195 | ATAAAGAAATRAAACTGGACA | 1.171 | 1.180 | 0.942 | 0.641 | 0.484 |
| 44 | 18 | 23179814 | 4800802 | 8196 | AAAGAGGGTCRATGGCTTTTA | 0.602 | 0.596 | 0.500 | 0.451 | 0.454 |
| 44 | 18 | 23189662 | 10502490 | 8197 | GACAATCCTGWTGGTGCCACT | 0.449 | 0.417 | 0.561 | 0.462 | 0.471 |
| 44 | 18 | 23202749 | 10502491 | 8198 | CATGAAAAAGWGCAAAAAATT | 0.232 | 0.231 | 0.243 | 0.207 | 0.508 |
| 44 | 18 | 23210271 | 1519143 | 8199 | CCTTACCTGARAGCCTGAATG | 0.256 | 0.256 | 0.113 | 0.269 | 0.366 |
| 44 | 18 | 23215939 | 10502492 | 8200 | TTAGAGAAAASTTAAGATGAG | 0.343 | 0.326 | 0.059 | 0.225 | 0.363 |
| 44 | 18 | 23231527 | 1401466 | 8201 | TTATTCCTGCKGCCAGAGCTG | 0.136 | 0.142 | 0.069 | 0.213 | 0.356 |
| 44 | 18 | 23245216 | 1401462 | 8202 | TAATTCCAGGYGGCATACTAA | 0.146 | 0.140 | 0.276 | 0.186 | 0.434 |
| 44 | 18 | 23253013 | 6508486 | 8203 | CTGGAGAGCCRCTTGAGAGTA | 0.311 | 0.315 | 0.344 | 0.151 | 0.212 |
| 44 | 18 | 23258373 | 9956638 | 8204 | CATTCTAGCCYACCCCATGAA | 0.989 | 0.990 | 0.373 | 0.315 | 0.167 |
| 45 | 18 | 61324317 | 17777796 | 8205 | TCTTTTAGATKTGTGGGTATA | 0.424 | 0.397 | 1.755 | 1.246 | 0.910 |
| 45 | 18 | 61336000 | 7233342 | 8206 | ATTTAATATGRCTTTTTTGCT | 0.042 | 0.039 | 2.018 | 1.331 | 1.239 |
| 45 | 18 | 61348906 | 17700174 | 8207 | GGTGAAAATAYGCAACATTCT | 4.001 | 3.392 | 2.394 | 1.260 | 1.374 |
| 45 | 18 | 61359787 | 17074963 | 8208 | ACTAACATTAYTGCTACTTAA | 0.000 | 0.000 | 2.434 | 1.608 | 1.289 |
| 45 | 18 | 61364918 | 9636017 | 8209 | CTTCTTTTCAYCTTACTTACT | 0.482 | 0.504 | 2.536 | 2.156 | 1.442 |
| 45 | 18 | 61385547 | 10503100 | 8210 | CATGAATTGAYACACATATTT | 0.075 | 0.079 | 0.432 | 1.951 | 1.562 |
| 45 | 18 | 61394512 | 17778833 | 8211 | CTAAAAACTGYAACTCAAGTT | 0.147 | 0.152 | 0.813 | 1.853 | 1.649 |
| 45 | 18 | 61412020 | 17779022 | 8212 | CTAAATTGCTRTCTCAACTTG | 1.084 | 1.076 | 0.811 | 0.767 | 1.476 |
| 45 | 18 | 61422482 | 13380899 | 8213 | AGTGACTTGCYAACTTTATTG | 1.336 | 1.378 | 0.938 | 0.790 | 1.361 |
| 45 | 18 | 61430893 | 17701273 | 8214 | GTTTGTATTTYGATTGTGGAT | 0.576 | 0.595 | 1.101 | 0.834 | 1.360 |
| 45 | 18 | 61441000 | — | 8215 | TGAAATAAATSTTGCCACGTT | 0.502 | 0.503 | 0.963 | 0.806 | 0.501 |
| 45 | 18 | 61451163 | 17075033 | 8216 | CTTCTCCACCYTATCATTTTT | 0.000 | 0.000 | 0.654 | 0.793 | 0.626 |
| 45 | 18 | 61460357 | 12604790 | 8217 | AATTTTGTCTSTTCAACCTTA | 0.559 | 0.555 | 0.395 | 0.552 | 0.559 |
| 45 | 18 | 61469322 | 10871590 | 8218 | TCACATGGTARATTTCCGTTA | 0.700 | 0.743 | 0.249 | 0.278 | 0.556 |
| 45 | 18 | 61475252 | 1942822 | 8219 | TAGATGCAAAWAGTTCATTAG | 0.004 | 0.004 | 0.200 | 0.381 | 0.540 |
| 45 | 18 | 61479028 | 1942273 | 8220 | TAAAGGACATRTATGGATTGC | 0.162 | 0.162 | 0.127 | 0.304 | 0.423 |
| 45 | 18 | 61496107 | — | 8221 | TTCTCAGAAAYAGTATCTTTT | 0.213 | 0.217 | 0.210 | 0.246 | 0.221 |
| 45 | 18 | 61504971 | 17708381 | 8222 | CATGATTATCMATTTACTAAC | 0.244 | 0.259 | 0.289 | 0.160 | 0.152 |
| 45 | 18 | 61515106 | 17075147 | 8223 | TCATGTTTGAWTGCAGAGAAA | 1.082 | 1.059 | 0.296 | 0.096 | 0.195 |
| 45 | 18 | 61522755 | 10515997 | 8224 | TATTCATGTCKATTAAGGAGT | 0.189 | 0.198 | 0.254 | 0.114 | 0.226 |
| 45 | 18 | 61543876 | 17781554 | 8225 | TTGTAAGAGGMCACTGACCTA | 0.103 | 0.104 | 0.288 | 0.101 | 0.323 |
| 45 | 18 | 61549981 | 9962601 | 8226 | GGAGTGTCTGSTTGCCTCTCC | 0.054 | 0.055 | 0.014 | 0.237 | 0.451 |
| 45 | 18 | 61556288 | 7226378 | 8227 | AAGCCCTTAARGAAATATAGA | 0.000 | 0.000 | 0.007 | 0.296 | 0.480 |
| 45 | 18 | 61565394 | 10084067 | 8228 | CTTTGTTGTAYTCCCACATGT | 0.017 | 0.017 | 0.170 | 0.344 | 0.668 |
| 45 | 18 | 61582244 | 12961301 | 8229 | GTATTTTTACRCTTCACTCTG | 0.151 | 0.153 | 0.355 | 0.634 | 0.876 |
| 45 | 18 | 61590121 | 8092259 | 8230 | TTTGTCTTTTKTAAGATAAAT | 0.836 | 0.845 | 0.603 | 0.683 | 1.381 |
| 45 | 18 | 61595696 | 1484725 | 8231 | CTCCAAACGCRAAGCAAATTT | 0.559 | 0.557 | 0.987 | 0.973 | 1.576 |
| 45 | 18 | 61601643 | 990388 | 8232 | ATGCACATATRCAACATAGGA | 1.242 | 1.200 | 1.089 | 1.167 | 2.017 |
| 45 | 18 | 61607583 | 17783081 | 8233 | CTGTTTAGGCRTCTGTAATTG | 1.621 | 1.613 | 1.363 | 1.683 | 2.112 |
| 45 | 18 | 61613910 | 8097065 | 8234 | ATAAATGCACYTGTCCTGAAG | 0.195 | 0.198 | 1.782 | 2.159 | 2.335 |
| 45 | 18 | 61621115 | 4334398 | 8235 | TCGGTGAACAYGAAGCTCTAA | 1.218 | 1.162 | 2.446 | 2.730 | 2.366 |
| 45 | 18 | 61627292 | 11659738 | 8236 | TTGAAGTCCCRTGCATGTATT | 1.382 | 1.349 | 2.981 | 2.988 | 2.505 |
| 45 | 18 | 61634277 | 4144764 | 8237 | CCTATGGAGAYAAAGCCATAC | 2.719 | 2.775 | 3.835 | 3.149 | 2.740 |
| 45 | 18 | 61635487 | 6566179 | 8238 | TAAGAGGTATYGTCATAACAA | 2.465 | 2.467 | 3.723 | 3.111 | 2.819 |
| 45 | 18 | 61672858 | 1484711 | 8239 | AGTTCAAGGCYTTTTAGCTTT | 2.709 | 2.640 | 3.723 | 3.124 | 2.905 |
| 45 | 18 | 61678763 | 12967018 | 8240 | ATTTTGAATCRTATGTTCGAA | 0.775 | 0.770 | 2.852 | 3.254 | 2.942 |
| 45 | 18 | 61686997 | 2587410 | 8241 | GGAAACTTTTYTTCTATATTA | 1.996 | 1.843 | 2.131 | 3.173 | 2.840 |
| 45 | 18 | 61697973 | 2628210 | 8242 | TTATCTTTGASAGTTGCTGAA | 0.706 | 0.685 | 1.762 | 2.516 | 2.957 |
| 45 | 18 | 61706203 | 7229176 | 8243 | AGTAAAAGAGSCTTAAAAATG | 1.541 | 1.516 | 1.515 | 1.738 | 2.934 |
| 45 | 18 | 61717877 | — | 8244 | TACTTCCCATYACTACATCTC | 1.234 | 1.224 | 0.962 | 1.245 | 2.911 |
| 45 | 18 | 61725718 | 17075520 | 8245 | TAATGGATTGYAAATGGAAAG | 0.072 | 0.072 | 0.789 | 1.472 | 2.206 |
| 45 | 18 | 61738544 | 183260 | 8246 | AAGAGCTACAWATTAATCACA | 0.174 | 0.214 | 0.410 | 1.243 | 1.677 |
| 45 | 18 | 61742429 | 2628245 | 8247 | CTATAAATAASCATGCCCTAA | 0.262 | 0.262 | 0.684 | 1.301 | 1.134 |
| 45 | 18 | 61758901 | 9949357 | 8248 | TTTCTAAAACRTATTTGAGCT | 0.525 | 0.495 | 1.098 | 0.880 | 0.985 |
| 45 | 18 | 61764669 | 6566183 | 8249 | ATAAAGTCCAYGGTGGATTCT | 1.949 | 1.818 | 1.225 | 0.480 | 0.739 |
| 45 | 18 | 61771354 | 17075606 | 8250 | TGGCCCCTTTYGCCAACGCCA | 0.807 | 0.792 | 1.158 | 0.466 | 0.660 |
| 45 | 18 | 61776985 | 6566186 | 8251 | ATAAAATCGTRGGATTAGAGA | 0.463 | 0.455 | 0.879 | 0.422 | 0.403 |
| 45 | 18 | 61783512 | 2541870 | 8252 | ATGTGCCAGTWTGCTTTTATT | 0.142 | 0.143 | 0.117 | 0.510 | 0.431 |
| 45 | 18 | 61790957 | 9945649 | 8253 | TCCTGACTACSAGGGCAAGGA | 0.009 | 0.009 | 0.010 | 0.439 | 0.473 |
| 45 | 18 | 61792527 | 2541874 | 8254 | AAAGGTCACCRTCATCTAGCA | 0.041 | 0.040 | 0.028 | 0.090 | 0.528 |
| 45 | 18 | 61804445 | 9962706 | 8255 | AACTATGCTAYGACACCATTA | 0.034 | 0.033 | 0.044 | 0.187 | 0.498 |
| 45 | 18 | 61816573 | 9949391 | 8256 | ATAATTGTTAYGCATTTTTGA | 0.631 | 0.613 | 0.083 | 0.162 | 0.626 |
| 45 | 18 | 61829609 | 2541743 | 8257 | TATATAGGTCRATGAAACAGA | 0.250 | 0.250 | 0.504 | 0.219 | 0.301 |
| 45 | 18 | 61836360 | 2715320 | 8258 | GCAGCAAAATRCCTTGGTCAC | 0.259 | 0.247 | 0.628 | 0.237 | 0.186 |
| 45 | 18 | 61842726 | 2706582 | 8259 | ACTGCAAACCYCAATCTTATG | 1.417 | 1.390 | 0.580 | 0.524 | 0.258 |
| 45 | 18 | 61852405 | 10513920 | 8260 | TAGGCGAGTCRAGATAGAAAA | 0.271 | 0.273 | 0.511 | 0.610 | 0.253 |
| 45 | 18 | 61859712 | 2541778 | 8261 | AAAAACATTCWTCAAATTAAT | 0.000 | 0.000 | 0.897 | 0.459 | 0.280 |
| 45 | 18 | 61867908 | 4891639 | 8262 | AATGAGATTCYTTGGAAGATG | 0.123 | 0.119 | 0.404 | 0.629 | 0.285 |
| 45 | 18 | 61874530 | 2715297 | 8263 | AAACATAATAMAATCATTTTC | 1.134 | 1.128 | 0.294 | 0.554 | 0.528 |
| 45 | 18 | 61881775 | 995160 | 8264 | TACTGAAATTYTAAAGTAGAA | 0.294 | 0.286 | 0.496 | 0.246 | 0.492 |
| 45 | 18 | 61888583 | 2706614 | 8265 | AGTACCTATTRAGATGATGAC | 0.017 | 0.017 | 0.456 | 0.193 | 0.628 |
| 45 | 18 | 61897220 | 2541809 | 8266 | CCTTCTTTCAYAGGCACAGAG | 0.882 | 0.889 | 0.140 | 0.431 | 0.609 |
| 45 | 18 | 61905727 | 12966332 | 8267 | GAATGGACTCYGCATTAACCC | 0.002 | 0.001 | 0.075 | 0.506 | 0.434 |
| 45 | 18 | 61916445 | 17279167 | 8268 | GGTTGCTTTCYTTACTTTAAT | 0.205 | 0.196 | 0.519 | 0.516 | 0.392 |
| 45 | 18 | 61924877 | 2058842 | 8269 | ATTGAAATACRAAAGAATACT | 0.008 | 0.008 | 0.376 | 0.476 | 0.429 |
| 45 | 18 | 61932124 | 12607652 | 8270 | GTAAAGCAAASGACTATAGTA | 1.520 | 1.455 | 0.766 | 0.513 | 0.559 |
| 45 | 18 | 61945465 | 4439860 | 8271 | GTGGTAGCCAKAATAATGGTC | 0.422 | 0.393 | 0.727 | 0.361 | 0.510 |
| 46 | 22 | 16451100 | 1296819 | 8272 | GCAATAGACTMCCACTAGAAG | 0.035 | 0.036 | 0.014 | 0.000 | 0.006 |
| 46 | 22 | 16457814 | 5747252 | 8273 | TCTACAGTTCYTTCATTTAGG | 0.215 | 0.218 | 0.008 | 0.053 | 0.045 |
| 46 | 22 | 16469866 | 5747268 | 8274 | TCTGGTCTCAYTGGTCCCTGT | 0.301 | 0.317 | 0.007 | 0.077 | 0.061 |
| 46 | 22 | 16482520 | — | 8275 | ATACCCACTCRTCTTAGTGCA | 0.036 | 0.036 | 0.332 | 0.114 | 0.064 |
| 46 | 22 | 16492758 | 5747302 | 8276 | AAAGTCAAATRATTTCTATAA | 0.039 | 0.039 | 0.393 | 0.317 | 0.092 |
| 46 | 22 | 16506100 | 713701 | 8277 | ATCAGGTTTTRTAAGAAAATT | 1.523 | 1.474 | 0.394 | 0.380 | 0.129 |
| 46 | 22 | 16518718 | 8140916 | 8278 | GCCAACATTTYATTTTTTAAG | 0.381 | 0.386 | 0.824 | 0.339 | 0.327 |
| 46 | 22 | 16534258 | 5992786 | 8279 | TAACATTTTCRAGTTTTTATG | 0.287 | 0.287 | 0.919 | 0.367 | 0.521 |
| 46 | 22 | 16546790 | 2587076 | 8280 | TTCCTCTAGTSGTGACATGAA | 1.042 | 1.007 | 0.283 | 0.472 | 0.845 |
| 46 | 22 | 16558565 | 2587082 | 8281 | ATAGCTCTTARTTTTTAAAAG | 0.239 | 0.241 | 0.298 | 0.898 | 1.017 |
| 46 | 22 | 16568261 | 5992801 | 8282 | CAATATATTAYGCCAAAGTTG | 0.013 | 0.013 | 0.353 | 0.731 | 0.932 |
| 46 | 22 | 16574940 | 3788279 | 8283 | CTCTTTGAAGRTAGAGATTGT | 0.405 | 0.405 | 0.509 | 1.031 | 1.075 |
| 46 | 22 | 16581805 | 1008378 | 8284 | AGAACATCCTYGATGCTTACC | 0.428 | 0.430 | 0.826 | 1.252 | 1.197 |
| 46 | 22 | 16587611 | 8919 | 8285 | TCTAGATGAARAAATGCAACT | 1.436 | 1.374 | 1.471 | 0.982 | 0.960 |
| 46 | 22 | 16593018 | 181382 | 8286 | TGCAAAAACAYGTTCTCCAGA | 0.935 | 0.936 | 1.785 | 1.130 | 0.887 |
| 46 | 22 | 16598709 | 181396 | 8287 | CTCTGCTTAARTGACAAGTCA | 1.429 | 1.438 | 1.623 | 1.403 | 0.988 |
| 46 | 22 | 16603741 | 5747339 | 8288 | GAGGAAAAACYGTATGCAAAA | 0.987 | 0.961 | 1.290 | 1.573 | 0.736 |
| 46 | 22 | 16625446 | 2268786 | 8289 | CGGAGCAGCCRCCAGTGTGTC | 0.042 | 0.059 | 1.065 | 1.341 | 2.107 |
| 46 | 22 | 16639385 | 5992838 | 8290 | GCCCTCCCAGRGTCTGGCTGT | 0.000 | 0.000 | 0.514 | 0.989 | 2.082 |
| 46 | 22 | 16652682 | 426276 | 8291 | TGCCACCTCCWGGGACTGGTG | 0.000 | 0.000 | 0.020 | 0.591 | 2.101 |
| 46 | 22 | 16665930 | 454799 | 8292 | CTGAGTTTCAYTCTATGGGAA | 0.000 | 0.000 | 0.092 | 2.055 | 1.928 |
| 46 | 22 | 16678946 | 2305006 | 8293 | TCGCTGAGTCKGCTCCCAGTT | 0.093 | 0.092 | 0.061 | 1.445 | 1.490 |
| 46 | 22 | 16690645 | 450796 | 8294 | AGTGAGAGGCYGGGGGAAATC | 0.000 | 0.000 | 2.881 | 1.547 | 1.137 |
| 46 | 22 | 16703965 | 2111546 | 8295 | GCTGGATTGCMAAGCCGAAGT | 0.161 | 0.163 | 1.776 | 1.337 | 0.809 |
| 46 | 22 | 16729337 | 5992128 | 8296 | TCCTTCTTCAKGGAGCCCTGC | 4.215 | 3.869 | 1.952 | 1.095 | 0.640 |
| 46 | 22 | 16743102 | 2289718 | 8297 | CGAACGCTGGRGTCTGTGACA | 0.136 | 0.136 | 1.688 | 0.882 | 0.710 |
| 46 | 22 | 16756240 | 5992895 | 8298 | AAACTGTATCSGCAGTGACAC | 0.228 | 0.229 | 1.753 | 0.993 | 0.758 |
| 46 | 22 | 16769795 | 2083882 | 8299 | ACCCATAAGCRTGAATTTGTT | 0.126 | 0.121 | 0.006 | 0.929 | 0.710 |
| 46 | 22 | 16782233 | 2401413 | 8300 | AAGCTTCCATSCCTGCTGGCA | 0.086 | 0.088 | 0.028 | 1.006 | 0.589 |
| 46 | 22 | 16788529 | 4484121 | 8301 | CCCTGCTGGGYACACACAGAT | 0.016 | 0.017 | 0.049 | 0.073 | 0.745 |
| 46 | 22 | 16808838 | 8135939 | 8302 | TCGCCAAAGGRAAAACTCAGG | 0.407 | 0.404 | 0.087 | 0.088 | 1.067 |
| 46 | 22 | 16821385 | 445583 | 8303 | GGCCTTCCCCRAAGGCAGACA | 0.365 | 0.363 | 0.272 | 0.062 | 1.170 |
| 46 | 22 | 16833681 | 365219 | 8304 | AGCACTGCCCSATTTTCTTGG | 0.394 | 0.365 | 0.352 | 0.131 | 0.245 |
| 46 | 22 | 16860571 | 424765 | 8305 | TTGGTAAAGAYGAATCCTGTC | 0.710 | 0.700 | 0.207 | 0.522 | 0.603 |
| 46 | 22 | 16873861 | 7284666 | 8306 | TTGGCAATCASTCTTCTATTT | 0.285 | 0.273 | 0.328 | 0.649 | 1.020 |
| 46 | 22 | 16886836 | 107321 | 8307 | AACATGATTAYTGACTTTATG | 0.019 | 0.020 | 0.924 | 0.709 | 1.086 |
| 46 | 22 | 16897768 | 465101 | 8308 | ATCTCAGCCTYTTTTGCAAGT | 0.724 | 0.691 | 0.731 | 1.445 | 2.176 |
| 46 | 22 | 16901343 | 462904 | 8309 | TGACCGCTCGKGATGTTAAGC | 1.575 | 1.681 | 0.882 | 2.104 | 2.144 |
| 46 | 22 | 16920365 | 5992986 | 8310 | CACATATGTTKGTCTTCAGAG | 0.386 | 0.379 | 2.175 | 1.789 | 1.828 |
| 46 | 22 | 16927573 | 1005195 | 8311 | TGTGTAGCTAYGCATGCTCAT | 0.578 | 0.572 | 2.404 | 3.065 | 2.166 |
| 46 | 22 | 16937442 | 464541 | 8312 | CCCTCCAGATYGGATTCTTTC | 1.752 | 1.733 | 1.418 | 2.755 | 1.906 |
| 46 | 22 | 16944707 | 361818 | 8313 | CGAGGTTTCCRTCACATAGCT | 1.558 | 1.605 | 2.457 | 2.144 | 2.079 |
| 46 | 22 | 16951892 | 361594 | 8314 | GAAAACCGATYTGTATGGTCC | 0.166 | 0.161 | 2.034 | 1.862 | 2.117 |
| 46 | 22 | 16962268 | 361809 | 8315 | ATGGGTGAATRTATGTAAGGT | 2.159 | 2.143 | 1.292 | 1.631 | 2.287 |
| 46 | 22 | 16971003 | 362043 | 8316 | GCTCTGTGGAKTTGATAGGTG | 0.045 | 0.044 | 1.046 | 1.916 | 2.051 |
| 46 | 22 | 16979683 | 466456 | 8317 | GACTGGGCACRAAGTATATGC | 0.363 | 0.356 | 1.095 | 1.488 | 1.503 |
| 46 | 22 | 16989428 | 2540620 | 8318 | CTGACCTTATMTCCAATCCTC | 1.105 | 1.100 | 0.724 | 1.113 | 1.519 |
| 46 | 22 | 17003269 | 361534 | 8319 | TTTCTTGTACYGAATATTTAC | 0.313 | 0.302 | 0.966 | 1.170 | 1.523 |
| 47 | X | 80030757 | 5959057 | 8320 | TTTTTCTCCAWGTTTATTTAA | 0.890 | 0.934 | 0.612 | 1.319 | 1.147 |
| 47 | X | 80036134 | 5959059 | 8321 | TCAAAGCAGAYGTTTAGCATC | 0.497 | 0.503 | 1.550 | 1.234 | 1.251 |
| 47 | X | 80050301 | 1166617 | 8322 | CAAAAGCCTTYCGGCGTGGGC | 0.721 | 0.727 | 1.468 | 1.269 | 1.194 |
| 47 | X | 80058048 | 1166623 | 8323 | CCAACAACCAKGACAGGCAAA | 2.394 | 2.471 | 1.487 | 1.445 | 1.178 |
| 47 | X | 80067200 | 1166634 | 8324 | AGACACTCAGRTTTCAAAGAC | 1.165 | 1.183 | 1.607 | 1.415 | 1.031 |
| 47 | X | 80103135 | 1166676 | 8325 | TTGCACATATYTATGAGGACA | 1.075 | 1.081 | 1.728 | 1.304 | 1.058 |
| 47 | X | 80134248 | 5913394 | 8326 | ACCCCCTGACSCTTCCTCAAT | 0.522 | 0.520 | 1.074 | 1.375 | 1.215 |
| 47 | X | 80171239 | — | 8327 | ACTTCTGAACMGGAACATGTA | 0.577 | 0.611 | 0.601 | 1.364 | 1.128 |
| 47 | X | 80191739 | 5959816 | 8328 | GGAAGATTTAYACCAGGAACT | 0.471 | 0.462 | 0.222 | 0.685 | 1.005 |
| 47 | X | 80225545 | 5959831 | 8329 | ATTTATTGTAYAGGCCTTCAA | 0.088 | 0.085 | 0.155 | 0.586 | 1.097 |
| 47 | X | 80235899 | 17333035 | 8330 | TCCTTTTTATYTAATTTACAG | 0.164 | 0.081 | 0.140 | 0.255 | 1.074 |
| 47 | X | 80253754 | 5913411 | 8331 | GTGATGCCCARTGTTCTGCTT | 0.333 | 0.319 | 0.260 | 0.146 | 1.552 |
| 47 | X | 80277451 | 12014025 | 8332 | ATTTCACTAGRCAGAAGTGTG | 0.547 | 0.538 | 0.252 | 0.153 | 1.587 |
| 47 | X | 80297073 | 2027279 | 8333 | GTTGAGTATCRGAAAAGTGAA | 0.831 | 0.869 | 0.213 | 0.204 | 1.337 |
| 47 | X | 80305924 | 17328569 | 8334 | ATTTGGGACTRTGTTCATGCA | 0.071 | 0.069 | 0.353 | 1.612 | 1.229 |
| 47 | X | 80320875 | 5912483 | 8335 | CTGCCTGGAGRATCTGTCTGA | 0.078 | 0.075 | 0.409 | 1.851 | 2.437 |
| 47 | X | 80325649 | 5959088 | 8336 | CTGTGTGCATRCTGCCTGTGT | 0.627 | 0.648 | 1.946 | 1.817 | 2.156 |
| 47 | X | 80337509 | 2039717 | 8337 | CGAGCAACTTRGAAAGACAAA | 0.613 | 0.611 | 2.115 | 1.592 | 2.354 |
| 47 | X | 80348471 | 4826212 | 8338 | CTGTTTGATTRGATGACTCAT | 3.799 | 3.542 | 2.237 | 2.736 | 2.840 |
| 47 | X | 80359374 | 1044828 | 8339 | TTGTAATTTCYTATCGTAATT | 0.960 | 0.961 | 2.029 | 2.483 | 2.840 |
| 47 | X | 80387275 | 5959099 | 8340 | TTTTAATCTARCTCTTTATTC | 0.167 | 0.173 | 3.004 | 2.576 | 3.024 |
| 47 | X | 80400947 | 1117471 | 8341 | GTCTTAATTTWTCCTACATTT | 0.423 | 0.433 | 1.899 | 2.858 | 3.133 |
| 47 | X | 80411297 | 5912496 | 8342 | AAGGATGGATRTAACGGAGAG | 4.215 | 4.422 | 2.227 | 2.807 | 3.102 |
| 47 | X | 80417482 | 5913445 | 8343 | TGTGGGGAATRGAAATTGAGA | 0.478 | 0.444 | 2.848 | 2.723 | 3.511 |
| 47 | X | 80426557 | 5913447 | 8344 | ACGAGCATTARCTGTTTTATA | 1.753 | 1.742 | 3.159 | 3.397 | 3.415 |
| 47 | X | 80435314 | 6616745 | 8345 | TTGAAGGACAYAGATGGATAC | 3.205 | 3.604 | 2.633 | 3.225 | 3.454 |
| 47 | X | 80452285 | — | 8346 | GGAATATGCTRTTGTCCCTGC | 0.907 | 0.904 | 3.474 | 3.735 | 3.130 |
| 47 | X | 80459676 | 5959880 | 8347 | ATTGGAATTGRTCTTTGAAGA | 2.992 | 2.874 | 3.447 | 3.214 | 3.392 |
| 47 | X | 80466557 | — | 8348 | GCTGTTATTTWTTTCCCTAGC | 1.576 | 1.504 | 3.835 | 3.380 | 3.308 |
| 47 | X | 80478736 | 2806640 | 8349 | TATTTGCAGAYATTTTTTTTT | 2.412 | 2.255 | 3.441 | 3.348 | 3.237 |
| 47 | X | 80492353 | 2602598 | 8350 | GTAGTGTGCTRGATAACAGAG | 4.015 | 4.091 | 3.280 | 3.237 | 2.899 |
| 47 | X | 80506071 | 2444578 | 8351 | CAGAACCAAARGGCTGACTAC | 1.070 | 1.058 | 2.677 | 2.903 | 2.903 |
| 47 | X | 80511331 | 2806658 | 8352 | GATATACAAAKTCATCTTTAA | 1.383 | 1.417 | 2.574 | 2.668 | 2.860 |
| 47 | X | 80554116 | 10521395 | 8353 | GTACCCTTAAYGGCCAGCTAA | 1.279 | 1.299 | 1.633 | 2.426 | 2.630 |
| 47 | X | 80583233 | 5912517 | 8354 | AGTACCAAATRTAAAGACATC | 2.093 | 2.071 | 1.907 | 2.222 | 2.579 |
| 47 | X | 80597043 | 4529587 | 8355 | ATGGGGAAGAYAGTCTCTATA | 0.908 | 0.889 | 1.934 | 1.829 | 2.362 |
| 47 | X | 80606131 | 5913519 | 8356 | GATCGTTCACYTTTTGTGTGT | 2.126 | 2.054 | 1.955 | 1.928 | 2.183 |

TABLE 3

| SNP markers found to be associated with Longevity in Fine Mapping studies in the QFP, Individual SNP markers genotyped in the genome wide | | | | | | | | | | | | | |
|---|---|---|---|---|---|---|---|---|---|---|---|---|---|
| scan are presented in each row of the table. The corresponding region ID and chromosome is presented as identified in Table 1 (columns 1 and | | | | | | | | | | | | | |
| 2). The coordinate of the SNP according to the NCBI genome assembly build 35 is indicated in column 3. The RS# column corresponds to | | | | | | | | | | | | | |
| the NCBI dbSNP identifier for the SNP (column 4). The Seq ID is the unique numerical identifier for this SNP in the sequence listing for this | | | | | | | | | | | | | |
| patent, and is indicated in column 5. Column 6, labeled Flanking Sequence, corresponds to 21 bp of nucleotide sequence centered at the | | | | | | | | | | | | | |
| SNP, which is coded using the standard degenerate naming system. The remainder of the table lists −log10 p values for association of the | | | | | | | | | | | | | |
| indicated haplotype centered at the corresponding SNP with the disease as described in the text, using LDSTATS V4 and Single Type. Values | | | | | | | | | | | | | |
| for the association of single markers, as well as 3, 5, 7, 9, 11 marker haplotype windows are shown for LDSTATS V4 analysis (see text for | | | | | | | | | | | | | |
| explanation of statistical calculations). The last two columns represent the −log10 P values for single marker genotype and allele | | | | | | | | | | | | | |
| association using Single Type analysis (see EXAMPLE section for description of analysis). | | | | | | | | | | | | | |
| | | | | | | | | | | | | Single Type | |
| | | | | | | LDSTATS v4 | | | | | | Single Genotype | Single Allele |
| Region ID | Chr | B35 Position | RS# | Seq ID | Flanking Sequence | Single Marker | W03 | W05 | W07 | W09 | W11 | Likelihood Ratio | Likelihood Ratio |
| 1 | 1 | 173369115 | 10753133 | 8357 | AATTAAGCAGRTTAATGCAGT | 0.097 | — | — | — | — | — | 0.054 | 0.090 |
| 1 | 1 | 173391904 | 726252 | 4850 | CTGTCTCTCAYGCCTTCCTTG | 0.299 | 0.007 | — | — | — | — | 0.161 | 0.323 |
| 1 | 1 | 173424493 | 1995651 | 4853 | CCCAAAAAAAWTTCTATCATT | 0.199 | 0.261 | 0.555 | — | — | — | 0.092 | 0.225 |
| 1 | 1 | 173455634 | 1886766 | 8358 | AGATTTGACCRTAAGCTCTGG | 0.963 | 0.615 | 0.680 | 0.351 | — | — | 0.561 | 0.939 |
| 1 | 1 | 173475519 | 1325599 | 4858 | TTATTTCCCCRCATGAAAATG | 1.615 | 1.183 | 0.530 | — | — | — | 1.660 | 1.658 |
| 1 | 1 | 173491681 | 10913254 | 4860 | TTTAAGCAGAMAGGCAAAAAC | — | — | — | — | — | — | — | — |
| 1 | 1 | 173522159 | 10732997 | 4863 | ATTATTTGAARTAGATTTGAA | 0.000 | 0.993 | — | — | — | — | 0.006 | 0.004 |
| 1 | 1 | 173539000 | 16850237 | 4865 | AGATTAGAAGYGACCCTTGTT | — | — | — | — | — | — | — | — |
| 1 | 1 | 173564270 | 6425398 | 8359 | CTCCAAGTCTYCTCTTGAATG | 0.185 | — | — | — | — | — | 0.064 | 0.196 |
| 2 | 1 | 225626459 | — | 4909 | CACGCCTTTCYAGCCTCACAC | — | — | — | — | — | — | — | — |
| 2 | 1 | 225645683 | 342785 | 4911 | AGGAGAAGAGMCTTCAAACTG | — | — | — | — | — | — | — | — |
| 2 | 1 | 225660552 | — | 4912 | CACATCTACCRACCATCTGAC | — | — | — | — | — | — | — | — |
| 2 | 1 | 225667166 | — | 4913 | AGTGGAGGTCRTTAGGAGAGG | — | — | — | — | — | — | — | — |
| 2 | 1 | 225673850 | 342818 | 4914 | ACATTTAAATYATCCAGTCTG | 0.221 | — | — | — | — | — | 0.137 | 0.228 |
| 2 | 1 | 225680359 | 7526949 | 4915 | CCCATTGTTCRTTTTTGGAAT | — | — | — | — | — | — | — | — |
| 2 | 1 | 225692972 | 16849638 | 4917 | TCATCTCTTAWGCAACTGAAC | 1.515 | 0.568 | — | — | — | — | 1.066 | 1.523 |
| 2 | 1 | 225703254 | — | 4918 | GCACATTTCAYCAAGCTGATA | — | — | — | — | — | — | — | — |
| 2 | 1 | 225722322 | — | 4919 | TGAATATAATYATAAACTGAG | — | — | — | — | — | — | — | — |
| 2 | 1 | 225741733 | 237778 | 8360 | TGAAAGCCCCRTCCTTATCAG | 0.452 | 1.629 | — | — | — | — | 0.193 | 0.463 |
| 2 | 1 | 225759122 | 237819 | 8361 | TCTATTGTTCYATACTGTCTC | 0.194 | — | — | — | — | — | 0.084 | 0.203 |
| 3 | 1 | 227250818 | 1202518 | 8362 | GTCCTTGGGCRTGCGTTTTTA | 0.214 | — | — | — | — | — | 0.108 | 0.223 |
| 3 | 1 | 227258633 | 1202525 | 4971 | TGAGGCTGCASGGAGGCCAGA | 0.179 | 0.010 | — | — | — | — | 0.033 | 0.148 |
| 3 | 1 | 227265670 | 1202534 | 4972 | GTTTTCCCCCRAAAAGGTTGG | 0.143 | 0.188 | 0.896 | — | — | — | 0.137 | 0.174 |
| 3 | 1 | 227270465 | — | 4973 | ATGGCCCCGTRAGGTTAGCGG | 0.554 | 1.653 | 0.953 | 0.754 | — | — | 0.347 | 0.571 |
| 3 | 1 | 227281064 | 6673201 | 4974 | AGGTGTCGCARAGATTAAGGC | — | — | — | — | — | — | — | — |
| 3 | 1 | 227291324 | 16852841 | 4975 | TGCTCAGCTCYAAAAACTCCA | 3.105 | 2.010 | 1.278 | 1.076 | 0.274 | — | 3.684 | 3.192 |
| 3 | 1 | 227301328 | 1999903 | 4976 | CTCTGAGGAAYGAAGACTTAG | — | — | — | — | — | — | — | — |
| 3 | 1 | 227307747 | 16852927 | 4977 | ACCGGCTCCTYTCCTTTTGCT | 0.910 | 2.235 | 1.429 | 0.465 | — | — | 0.549 | 0.929 |
| 3 | 1 | 227315639 | 1202589 | 8363 | TGCTTTAACCRAGTCAAACTG | 0.085 | 0.660 | 1.550 | — | — | — | 0.079 | 0.103 |
| 3 | 1 | 227320088 | 1202594 | 4978 | TTTTTCCAATKGTAGAGAGAG | 0.051 | 0.527 | — | — | — | — | 0.046 | 0.035 |
| 3 | 1 | 227327915 | 1202603 | 8364 | TTTCCTACCTKTTTCCTCTGT | — | — | — | — | — | — | — | — |
| 3 | 1 | 227334767 | 6704527 | 4980 | TTACTTCCTGKTAAGAGGTCT | 1.087 | — | — | — | — | — | 0.690 | 1.089 |
| 4 | 1 | 236300211 | 1110615 | 5016 | TCTGAAAATCRCCATCTGTAA | 0.604 | — | — | — | — | — | 0.314 | 0.647 |
| 4 | 1 | 236311513 | 6429161 | 5017 | TCTGCATAGAWATCTAATTCA | — | — | — | — | — | — | — | — |
| 4 | 1 | 236324113 | 477507 | 5018 | CACCAACTAGRTTGAAAATTG | — | — | — | — | — | — | — | — |
| 4 | 1 | 236339319 | 613228 | 5019 | TCCTTTTAATWTAAATATGTT | — | — | — | — | — | — | — | — |
| 4 | 1 | 236356440 | 682355 | 8365 | CCAGACAGCCRTCTTCTTTAG | 0.473 | 0.489 | — | — | — | — | 0.205 | 0.473 |
| 4 | 1 | 236365881 | 17598757 | 5020 | ACTCTCTCTAYGTCTCTATAT | 0.519 | 0.270 | 0.224 | — | — | — | 0.376 | 0.533 |
| 4 | 1 | 236375371 | 672548 | 8366 | TCTGTTAAAAYATTTAATACC | 0.520 | 0.423 | 0.444 | 0.318 | — | — | 1.087 | 0.556 |
| 4 | 1 | 236381514 | 10495448 | 5022 | TTTTAATCCCRTAGAGCCAGA | 0.049 | 0.078 | 0.514 | 0.295 | — | — | 0.044 | 0.041 |
| 4 | 1 | 236391685 | 10926012 | 5023 | TCGTCTCAAARTAGTCAAGTA | 0.067 | 0.149 | 0.012 | — | — | — | 0.304 | 0.066 |
| 4 | 1 | 236403350 | 4659554 | 5024 | AGGGGCTCACRTCTCAGTTGC | 0.189 | 0.004 | — | — | — | — | 0.094 | 0.187 |
| 4 | 1 | 236410617 | 1953666 | 8367 | CTAATCTCAASTGTTAGGAGG | 0.165 | — | — | — | — | — | 0.302 | 0.140 |
| 5 | 2 | 21157019 | 3791981 | 5075 | TGATCTCTCCRGAGCTATTGT | 0.293 | — | — | — | — | — | 0.264 | 0.280 |
| 5 | 2 | 21162692 | 570877 | 5076 | CAAAATGTCTKGATTTCATTG | 0.319 | 0.013 | — | — | — | — | 0.449 | 0.309 |
| 5 | 2 | 21168039 | 1864423 | 8368 | CATCTTCTTAKTACCTGGAAG | — | — | — | — | — | — | — | — |
| 5 | 2 | 21171264 | 520354 | 8369 | TTGTGCAGAARAGAACAGAAG | 0.175 | 0.068 | 0.068 | — | — | — | 0.071 | 0.203 |
| 5 | 2 | 21175552 | 1367117 | 8370 | CTCTTTCAGGRTGCACTGGCT | 0.181 | 0.172 | 0.134 | 0.028 | — | — | 0.133 | 0.187 |
| 5 | 2 | 21179434 | 512535 | 8371 | CGTTTCCTTCYCTTCTAGGCA | 0.410 | 0.239 | 0.051 | 0.072 | 0.035 | — | 0.230 | 0.440 |
| 5 | 2 | 21185142 | 7575840 | 8372 | AGCCAGGAATKGTCAGTACTG | 0.011 | 0.086 | 0.080 | 0.028 | — | — | 0.005 | 0.020 |
| 5 | 2 | 21189574 | 6548010 | 8373 | ACACATATTCRTAAGTTAAAC | 0.056 | 0.001 | 0.021 | — | — | — | 0.014 | 0.036 |
| 5 | 2 | 21194554 | 7590135 | 8374 | CTCCAAGCCCRGCTGCTAAAA | 0.049 | 0.035 | — | — | — | — | 0.014 | 0.036 |
| 5 | 2 | 21199203 | — | 5080 | GCCGTCCATCYATCCGTTACT | — | — | — | — | — | — | — | — |
| 5 | 2 | 21204658 | 594677 | 5081 | ACTGAGTAATYGTCTAATGAA | 0.248 | — | — | — | — | — | 0.222 | 0.263 |
| 6 | 2 | 49991254 | 10495984 | 5116 | AATGATTTATSTGTTCCTATG | — | — | — | — | — | — | — | — |
| 6 | 2 | 50004404 | 17490406 | 5118 | GTTTATGTGAYTGTGACATTC | 2.251 | — | — | — | — | — | 1.910 | 2.269 |
| 6 | 2 | 50010410 | 1981797 | 5119 | AATTTTTCTCYTTAATATATC | 0.754 | 1.531 | — | — | — | — | 1.024 | 0.720 |
| 6 | 2 | 50029185 | 12998574 | 8375 | AGTTAACAAARGGGTTTATGT | 2.157 | 1.822 | 1.063 | — | — | — | 2.915 | 2.113 |
| 6 | 2 | 50037491 | 1156742 | 5120 | AATGGTATAARAATATTAGGG | 2.751 | 1.768 | 1.604 | 1.406 | — | — | 2.900 | 2.666 |
| 6 | 2 | 50048374 | 17039425 | 5121 | CTATTTGCCTRTGATTTTTAA | — | — | — | — | — | — | — | — |
| 6 | 2 | 50055972 | 12465974 | 5122 | ATCAAAGATTYCAATTCTTGG | 2.415 | 2.041 | 1.806 | 1.257 | 1.048 | — | 1.820 | 2.414 |
| 6 | 2 | 50064931 | 10495987 | 5123 | TTGGAAGCTAMTGATTATTCT | 3.062 | 2.226 | 2.193 | 1.645 | 0.992 | — | 2.424 | 3.061 |
| 6 | 2 | 50077180 | 6758043 | 5124 | ATCATTGCTTRTGTAATCTGA | 0.891 | 2.615 | 1.518 | 1.155 | — | — | 1.181 | 0.893 |
| 6 | 2 | 50087864 | 10166360 | 8376 | AATAAAGGCTSTAAAACTTAA | 0.060 | 0.770 | 1.283 | — | — | — | 1.485 | 0.048 |
| 6 | 2 | 50095750 | 6713560 | 5127 | AGCTTTTAACRGTTCTCAAAG | 1.394 | 0.601 | — | — | — | — | 1.237 | 1.392 |
| 6 | 2 | 50101389 | 17039577 | 8377 | TGACCTTTCAYATTTCCCATG | 1.391 | — | — | — | — | — | 1.438 | 1.378 |
| 7 | 2 | 51025393 | 10490172 | 5237 | TTGCTGCTTASAAACAAATTC | 0.100 | — | — | — | — | — | 0.118 | 0.105 |
| 7 | 2 | 51032119 | 17041091 | 5238 | GGACAGACAAKTATTTTGTAG | — | — | — | — | — | — | — | — |
| 7 | 2 | 51039440 | 17041095 | 5239 | TAGGGCTCTTMAATAGTAGGA | 1.289 | 1.369 | — | — | — | — | 0.865 | 1.314 |
| 7 | 2 | 51046992 | 1160595 | 5240 | TGTTTCATGTYTTAAAGTGGG | 1.748 | 0.763 | 0.579 | — | — | — | 1.595 | 1.789 |
| 7 | 2 | 51052993 | 1003017 | 5241 | TGGACATACAMTAATGTATCT | 1.419 | 1.044 | 0.219 | 0.880 | — | — | 1.404 | 1.462 |
| 7 | 2 | 51058686 | 741421 | 5242 | CTGTCATTCAKTCTAACTTGC | — | — | — | — | — | — | — | — |
| 7 | 2 | 51076203 | 1541602 | 5244 | CTATCAGTAGYATGGGAATGA | 0.990 | 0.593 | 0.634 | 0.307 | 0.654 | — | 0.746 | 1.047 |
| 7 | 2 | 51083805 | 7579976 | 5245 | CATTCTAACAYCTACAAAGAG | 0.741 | 0.654 | 0.450 | 0.554 | — | — | 0.834 | 0.786 |
| 7 | 2 | 51096961 | 10205578 | 5247 | TGGAAAGATTKTAATCAGAAA | 0.979 | 0.530 | 0.319 | — | — | — | 0.817 | 1.020 |
| 7 | 2 | 51107252 | 10174398 | 5249 | TCTGTACCCAYGCTCTCTCCA | 0.723 | 0.577 | — | — | — | — | 0.577 | 0.764 |
| 7 | 2 | 51126792 | 17041161 | 5251 | AGAAAATCCAYAAGTCTAAAT | — | — | — | — | — | — | — | — |
| 7 | 2 | 51140357 | 10195460 | 8378 | TTAAGCATACRTTTTTCCACC | 0.999 | — | — | — | — | — | 1.018 | 1.048 |
| 8 | 2 | 121763582 | 2580344 | 8379 | TATTTCTCCCYCAAGTTCCAG | 1.115 | — | — | — | — | — | 0.740 | 1.142 |
| 8 | 2 | 121795575 | 2713226 | 8380 | ACGAGCAGGTKGTCACCCACC | 0.843 | 0.519 | — | — | — | — | 0.495 | 0.821 |
| 8 | 2 | 121809417 | 2713250 | 8381 | GGAGCACTGCYGGACCAAATG | 0.597 | 0.556 | 0.452 | — | — | — | 0.328 | 0.596 |
| 8 | 2 | 121833968 | 12479320 | 5309 | TGGTGCCAATRTCTCTAAAAG | 1.026 | 0.669 | 0.408 | 0.176 | — | — | 0.622 | 1.064 |
| 8 | 2 | 121870433 | 10496566 | 5312 | ATATAGAATAWGTTTCAGCCC | 0.994 | 0.681 | 0.499 | 0.416 | 0.129 | — | 0.646 | 1.101 |
| 8 | 2 | 121886006 | 10191223 | 5313 | ACCACAGAAAKGGAGAAAAAT | 0.162 | 0.691 | 1.152 | 0.591 | 0.336 | 0.122 | 0.136 | 0.186 |
| 8 | 2 | 121905688 | 13032411 | 8382 | AATATTTTATKTGAAAAGTCA | 0.187 | 1.531 | 0.876 | 0.821 | 0.634 | — | 0.136 | 0.186 |
| 8 | 2 | 121923235 | 1975305 | 8383 | CATCTAAGACYATACCTAGAA | 1.780 | 0.871 | 0.792 | 0.830 | — | — | 1.309 | 1.866 |
| 8 | 2 | 121940587 | 7587659 | 8384 | CATGTTGCTTKTAAGAACAAA | 0.652 | 0.928 | 0.846 | — | — | — | 1.196 | 0.662 |
| 8 | 2 | 121982154 | 6704587 | 8385 | GAGCAACTGCRAATAATTCCC | 0.493 | 0.429 | — | — | — | — | 0.214 | 0.480 |
| 8 | 2 | 121995577 | 10221922 | 8386 | CACACTGGCTKTAGGGAAATG | — | — | — | — | — | — | — | — |
| 8 | 2 | 122017375 | 2164797 | 5325 | AGCCCCCAGCSCGCCAACAGG | 0.423 | — | — | — | — | — | 0.212 | 0.409 |
| 9 | 2 | 127668493 | 13006847 | 5367 | GCTGAACAGGYCAAACTATTT | 0.844 | — | — | — | — | — | 0.444 | 0.818 |
| 9 | 2 | 127692604 | 6710496 | 5368 | AAGCCCCCATMCCAGAAATAA | 1.163 | 0.474 | — | — | — | — | 0.887 | 1.149 |
| 9 | 2 | 127723916 | 6430936 | 5369 | CCCGAACAGGMTTTTGTTCAC | 1.174 | 0.407 | 0.234 | — | — | — | 0.873 | 1.188 |
| 9 | 2 | 127729734 | 4662717 | 5370 | GTTCCTGGGGYTTGCACTGAT | 1.263 | 1.012 | 0.831 | 0.313 | — | — | 0.825 | 1.298 |
| 9 | 2 | 127749557 | 4150474 | 5371 | ACAAACCCACMAAGAAAACAG | 1.562 | 1.586 | 1.193 | 0.684 | — | — | 1.194 | 1.572 |
| 9 | 2 | 127754774 | 4150454 | 5372 | CCATCACTTTYAGACCTGTCC | 2.194 | 1.619 | 1.471 | — | — | — | 1.661 | 2.272 |
| 9 | 2 | 127776393 | 4233584 | 5373 | CCTGGATTTCYTACTCACTGT | — | — | — | — | — | — | — | — |
| 9 | 2 | 127802584 | 12613413 | 5374 | TTTTGATGGTYCACATGCCAA | 0.122 | 2.011 | — | — | — | — | 0.150 | 0.133 |
| 9 | 2 | 127828431 | 6714840 | 5376 | GCAAAGGATCWGTTTCCAAGT | — | — | — | — | — | — | — | — |
| 9 | 2 | 127853791 | 4662724 | 8387 | GCCTAGAACAYAGAAAATTAC | 0.112 | — | — | — | — | — | 0.150 | 0.133 |
| 10 | 2 | 162628815 | 1913807 | 8388 | GAAAAAATAAYCCATGGAGAA | 0.084 | — | — | — | — | — | 0.050 | 0.118 |
| 10 | 2 | 162644128 | 4500960 | 5442 | TCCAGCAGCAYGTTACTGTCT | 1.285 | 1.337 | — | — | — | — | 0.878 | 1.321 |
| 10 | 2 | 162653508 | 4664442 | 5443 | CTTTTAATGGRTCCTATGTAA | 1.592 | 2.139 | 1.964 | — | — | — | 1.104 | 1.601 |
| 10 | 2 | 162657263 | 4295021 | 5444 | CCTGTTGATTKTTTAGCTGAA | 2.402 | 2.135 | 1.590 | 2.753 | — | — | 1.935 | 2.486 |
| 10 | 2 | 162671072 | 1861979 | 5445 | TTAAAGCCTGYAAGCACCAAA | 2.620 | 1.464 | 2.590 | 3.182 | 2.397 | — | 2.079 | 2.610 |
| 10 | 2 | 162680415 | 2287509 | 5446 | CCTCCTTGTTKCTCTCCAAAT | 2.467 | 2.729 | 3.236 | 2.786 | 1.484 | — | 2.171 | 2.527 |
| 10 | 2 | 162694710 | 1014445 | 5448 | TCTGTAAAGCRCTCTCATTTC | 2.677 | 4.279 | 3.467 | 1.629 | — | — | 2.160 | 2.676 |
| 10 | 2 | 162709469 | 2300755 | 8389 | CCCCTGTCCTRTATCAGTGGT | 3.325 | 2.591 | 2.307 | — | — | — | 2.922 | 3.347 |
| 10 | 2 | 162720273 | 10930040 | 8390 | TAACTATTTTRAAAGCTTATA | 2.463 | 1.679 | — | — | — | — | 2.034 | 2.509 |
| 10 | 2 | 162749424 | 12469968 | 5453 | CTCTACCTCARTTATACATCC | 0.898 | — | — | — | — | — | 0.568 | 0.914 |
| 10 | 2 | 162762494 | 7593348 | 8391 | TCTCACTGGGKTTTGCCAGAG | — | — | — | — | — | — | — | — |
| 12 | 3 | 7122158 | 17046783 | 5601 | TCATGAATTTYGGCATTTTTT | — | — | — | — | — | — | — | — |
| 12 | 3 | 7128652 | 6778030 | 5602 | TTGACTATCTRTGAAAACTGT | 0.125 | — | — | — | — | — | 0.057 | 0.143 |
| 12 | 3 | 7136316 | 17234935 | 5603 | TCATAATCTASGACTGGATAT | 0.774 | 2.621 | — | — | — | — | 0.421 | 0.782 |
| 12 | 3 | 7148002 | 1878164 | 5605 | ATGACACTTCRTCTACTTGAA | 0.757 | 1.727 | 2.848 | — | — | — | 0.447 | 0.792 |
| 12 | 3 | 7155162 | 6804466 | 5606 | ACTTTATAGGYATACTGGTAG | 0.765 | 1.857 | 1.801 | 2.675 | — | — | 0.511 | 0.811 |
| 12 | 3 | 7162872 | 17234969 | 5607 | ACAACCATGAYCCTGACCTTG | 2.545 | 1.710 | 1.752 | 1.496 | 2.027 | — | 1.960 | 2.598 |
| 12 | 3 | 7168821 | 7623514 | 5608 | TCCTCAAGAAMGACTTGCATT | 0.188 | 1.610 | 1.593 | 1.407 | 1.277 | — | 0.106 | 0.204 |
| 12 | 3 | 7174495 | 6443093 | 5609 | AATGTAGAAGYGGCAGAAGAC | 0.417 | 0.298 | 1.135 | 1.219 | — | — | 0.287 | 0.422 |
| 12 | 3 | 7187512 | 17235018 | 5610 | AAACCTACATSATTCTGTATG | — | — | — | — | — | — | — | — |
| 12 | 3 | 7193175 | 1400166 | 5611 | TCATCCTTTCRTCTTTATTCA | 0.291 | 0.206 | 0.184 | — | — | — | 0.116 | 0.335 |
| 12 | 3 | 7198739 | 13082571 | 5612 | GGCTAAAGAAYAGTACAAACC | 0.000 | 0.356 | — | — | — | — | 0.035 | 0.000 |
| 12 | 3 | 7204619 | 11708019 | 5613 | CAGTTGTCTCRATGCCTAGTA | 0.000 | — | — | — | — | — | 0.035 | 0.000 |
| 13 | 3 | 33009602 | 4075736 | 5725 | TTTCATAAAGRAGAGAAATAA | 0.437 | — | — | — | — | — | 0.401 | 0.442 |
| 13 | 3 | 33046631 | 6762132 | 5728 | CAGGAGGTATRAACAGTGCTG | 1.158 | 0.828 | — | — | — | — | 0.765 | 1.173 |
| 13 | 3 | 33062204 | 6780220 | 5729 | CTGCCTTAATMGGGGCTATAG | 1.079 | 2.419 | 1.095 | — | — | — | 0.916 | 1.093 |
| 13 | 3 | 33074192 | 4438612 | 5730 | GTGTCCTGCCRAGGTGGGAGG | 2.594 | 1.997 | 1.144 | 1.432 | — | — | 2.137 | 2.651 |
| 13 | 3 | 33104989 | 9858362 | 8392 | TTCTCTATACMCTAAAAATGA | 1.953 | 1.070 | 1.537 | 1.316 | 1.836 | — | 1.419 | 1.923 |
| 13 | 3 | 33121193 | 4578976 | 5732 | TCCAGAGATAYGAGTTGGGAC | 0.535 | 0.770 | 0.365 | 1.623 | 1.983 | 0.880 | 0.279 | 0.582 |
| 13 | 3 | 33133916 | 4678686 | 5733 | TGCAGCCTCARGTGCATCATA | 1.299 | 0.612 | 1.108 | 1.210 | 1.924 | — | 0.930 | 1.308 |
| 13 | 3 | 33151828 | 7652193 | 5734 | ACTGTGGTTTRCAAAGTATAG | 0.859 | 1.157 | 1.526 | 1.003 | — | — | 0.583 | 0.891 |
| 13 | 3 | 33179004 | 4678490 | 5735 | TTCTTTGAACWGACGAGTAAG | 0.049 | 1.195 | 0.992 | — | — | — | 0.101 | 0.051 |
| 13 | 3 | 33191738 | 4465894 | 5736 | CTGGCAGAATRCCTGGAATAG | 0.576 | 0.168 | — | — | — | — | 0.481 | 0.601 |
| 13 | 3 | 33217346 | 4678763 | 8393 | TTATGGAAGGYAGAACTTGCA | 0.123 | — | — | — | — | — | 0.198 | 0.150 |
| 14 | 3 | 40246701 | 1317217 | 5803 | ATGATTAATAKCTGGAGAAAG | 2.772 | — | — | — | — | — | 2.185 | 2.837 |
| 14 | 3 | 40284229 | 9861194 | 8394 | CTGATTCAATRTGTAAAGGGC | 3.148 | 1.703 | — | — | — | — | 2.337 | 3.157 |
| 14 | 3 | 40314657 | 4974047 | 8395 | TCGAATGGTAKGCTTAACCTC | 3.104 | 1.467 | 1.179 | — | — | — | 3.310 | 3.035 |
| 14 | 3 | 40349555 | 4974067 | 5811 | AAGTCTAACAYGCAGCTCTGA | 3.097 | 2.030 | 1.870 | 1.540 | — | — | 2.697 | 3.130 |
| 14 | 3 | 40379774 | 10510708 | 5815 | TGAATCAAGTYGGTCTACAAT | 2.631 | 2.530 | 2.299 | 1.508 | 1.147 | — | 2.493 | 2.661 |
| 14 | 3 | 40398626 | 9854493 | 5816 | CTCTAGTCTAYAGTTAGCTAT | 3.587 | 3.052 | 1.764 | 1.819 | — | — | 3.110 | 3.624 |
| 14 | 3 | 40404187 | 2305521 | 5817 | ATGTTCTGAARAAAAGCCCCG | 2.481 | 2.471 | 2.174 | — | — | — | 2.255 | 2.496 |
| 14 | 3 | 40417584 | — | 5818 | CTGGAGAGGTSCTGAGATGTT | — | — | — | — | — | — | — | — |
| 14 | 3 | 40424355 | 6783755 | 5819 | TCTAAGAAGTYAGACAGACAT | — | — | — | — | — | — | — | — |
| 14 | 3 | 40431030 | 7645864 | 5820 | GCAAAAGGGAYTGTGGTGTAC | — | — | — | — | — | — | — | — |
| 14 | 3 | 40468222 | 6801859 | 8396 | AAAAGATCTAKAACTTCCCCA | 2.353 | 2.675 | — | — | — | — | 1.964 | 2.381 |
| 14 | 3 | 40496977 | 4571217 | 8397 | AATCTTTACARTGATGACTGC | 3.418 | — | — | — | — | — | 3.016 | 3.499 |
| 15 | 4 | 77256496 | 10031733 | 8398 | TATGACCTTAYGAGGCATTCT | 0.078 | — | — | — | — | — | 0.071 | 0.073 |
| 15 | 4 | 77291919 | 867562 | 5870 | CTGTGTATTTRAGTTGTTTCC | 1.084 | 0.594 | — | — | — | — | 0.648 | 1.038 |
| 15 | 4 | 77320175 | 7684461 | 8399 | GAGAGGCAGAKAGATAACTGT | 0.130 | 0.914 | 1.015 | — | — | — | 0.098 | 0.155 |
| 15 | 4 | 77352642 | 4304003 | 5874 | GACTCCTGACRAGGTACCTGA | 0.091 | 1.438 | 1.131 | 0.923 | — | — | 0.098 | 0.102 |
| 15 | 4 | 77384429 | 10028141 | 5878 | AAATATTATTRACACTTCAGA | — | — | — | — | — | — | — | — |
| 15 | 4 | 77402183 | 11733489 | 5880 | TATATCTACGRTGATGCCTCT | 1.838 | 1.256 | 1.270 | 1.441 | — | — | 1.441 | 1.949 |
| 15 | 4 | 77430723 | 6824251 | 5882 | CACATTCCAAMATAACAGAAC | 1.919 | 0.907 | 1.838 | — | — | — | 1.443 | 1.932 |
| 15 | 4 | 77456563 | 17001573 | 5885 | TTATTTGGGCRTGTAGCTATG | 0.016 | 1.718 | — | — | — | — | 0.006 | 0.033 |
| 15 | 4 | 77488248 | 17001659 | 5889 | GCCCTGACTGYGGCCAGTTCT | 1.662 | — | — | — | — | — | 1.130 | 1.605 |
| 15 | 4 | 77516879 | 1441922 | 8400 | TCAAGAAGTARGCAGGTAAAG | — | — | — | — | — | — | — | — |
| 15 | 4 | 77550724 | 1441911 | 5893 | AGATTTAAGTKCCTAAGTTGG | — | — | — | — | — | — | — | — |
| 16 | 4 | 101082500 | 10031644 | 5916 | AGTAGGGAATKTATTTGCACA | 0.147 | — | — | — | — | — | 0.619 | 0.124 |
| 16 | 4 | 101095575 | 2282588 | 5917 | GAAAACAAGTWGGTTGAGAAA | 2.159 | 0.939 | — | — | — | — | 1.688 | 2.164 |
| 16 | 4 | 101103675 | 10031708 | 5918 | CAGAGCTTCTYGCATCATTTC | 0.000 | 1.703 | 1.067 | — | — | — | 0.103 | 0.029 |
| 16 | 4 | 101110330 | 2162386 | 5919 | AACAGGTTATMTTTCAAGGCC | — | — | — | — | — | — | — | — |
| 16 | 4 | 101123160 | 4699387 | 5921 | TTTGACGACASCTACCGCTAT | 0.550 | 0.270 | 1.681 | 1.127 | — | — | 0.263 | 0.563 |
| 16 | 4 | 101129781 | 4699767 | 5922 | GCACCTTATCYGGGCCCAAGT | 0.551 | 0.359 | 0.371 | 1.363 | 1.263 | — | 0.263 | 0.563 |
| 16 | 4 | 101130928 | 11935615 | 5923 | CAGCTTGTTCRGGTCATGTTC | 0.445 | 0.575 | 0.662 | 1.549 | 1.591 | 1.034 | 0.234 | 0.443 |
| 16 | 4 | 101149661 | 6829912 | 5924 | GCTGAGCCTAYGGTCTGCTCT | 0.515 | 0.743 | 1.170 | 0.967 | 1.402 | 1.660 | 0.328 | 0.567 |
| 16 | 4 | 101158451 | 11723286 | 5925 | TTTATTTACARAGGCTATTTT | 0.842 | 1.002 | 1.180 | 0.783 | 1.190 | — | 0.510 | 0.831 |
| 16 | 4 | 101183482 | 17029641 | 5928 | TCTTACACATRAAGTATATGG | 1.318 | 1.174 | 0.826 | 1.559 | — | — | 1.385 | 1.299 |
| 16 | 4 | 101209057 | 17613664 | 5930 | AGTGTGTTCTYCAAAAAGATT | 0.064 | 0.986 | 1.268 | — | — | — | 0.391 | 0.067 |
| 16 | 4 | 101233826 | 11736218 | 8401 | GCTAAGAAGAYTAAACAGGGA | 0.658 | 1.841 | — | — | — | — | 0.359 | 0.661 |
| 10 | 4 | 101258022 | 7689566 | 5933 | AGAGCTATCARTTTATAGAGC | 2.484 | — | — | — | — | — | 1.955 | 2.505 |
| 17 | 4 | 126670525 | 1509292 | 8402 | GTTCCCACACMAAAACTAGGA | — | — | — | — | — | — | — | — |
| 17 | 4 | 126681071 | 12501179 | 8403 | TATTTTCATGRGTCTGAATTG | 1.184 | — | — | — | — | — | 0.960 | 1.200 |
| 17 | 4 | 126691002 | 4623022 | 8404 | TGGCCAAAGTYACTTTTTAGA | 0.380 | 0.459 | — | — | — | — | 0.523 | 0.388 |
| 17 | 4 | 126705065 | 6842220 | 5973 | TAATGAAAATYGCTTGAAAAC | 0.364 | 0.347 | 0.737 | — | — | — | 0.472 | 0.365 |
| 17 | 4 | 126717061 | 1395241 | 8405 | TTTCTAGTGCRTGTTAAAGAT | 0.985 | 0.833 | 0.815 | 0.894 | — | — | 0.861 | 1.012 |
| 17 | 4 | 126726483 | 13108706 | 5976 | CCTTATGGCARCTTTTCTGCA | — | — | — | — | — | — | — | — |
| 17 | 4 | 126738202 | 17009708 | 5978 | GAAAGTCTGCRGATACCATGG | — | — | — | — | — | — | — | — |
| 17 | 4 | 126752525 | 12506486 | 5980 | GGACATGGGAKCAAGAGGTGA | 1.623 | 0.944 | 1.353 | 0.549 | 0.213 | — | 1.218 | 1.693 |
| 17 | 4 | 126766922 | 7686537 | 8406 | TGAAAGTGTAYGAAAGGTTAA | 0.461 | 1.111 | 0.697 | 0.435 | — | — | 0.460 | 0.465 |
| 17 | 4 | 126781219 | 1395228 | 8407 | TTTTCCATTAMTACCTAACAC | 1.639 | 0.832 | 0.746 | — | — | — | 1.113 | 1.642 |
| 17 | 4 | 126796200 | 10034622 | 8408 | TCATACAACARGTGTGTGTTT | 0.814 | 1.120 | — | — | — | — | 0.569 | 0.785 |
| 17 | 4 | 126804720 | 17009923 | 5988 | TGGGGAAAAGRGATTAAAAAT | 0.372 | — | — | — | — | — | 0.143 | 0.391 |
| 18 | 4 | 143639478 | 1497397 | 6062 | ATAATAGTCAMGATGATGGTT | 0.283 | — | — | — | — | — | 0.194 | 0.307 |
| 18 | 4 | 143657608 | 6828156 | 8409 | GAGGTCCCACKACCCTTGTTG | 0.736 | 0.184 | — | — | — | — | 0.443 | 0.790 |
| 18 | 4 | 143679095 | 1497401 | 8410 | ATTTAAACTAYCTTAAAACAC | 0.059 | 0.063 | 0.149 | — | — | — | 0.253 | 0.055 |
| 18 | 4 | 143700188 | 3775711 | 8411 | TCTAGCACAGYCCCAGAGGCA | 0.425 | 0.640 | 0.786 | 0.617 | — | — | 0.203 | 0.485 |
| 18 | 4 | 143718806 | 931637 | 6070 | CTGTCAGAACRTAAATTTGAT | 2.137 | 1.465 | 1.318 | 0.924 | 0.654 | — | 1.832 | 2.178 |
| 18 | 4 | 143739539 | 17016163 | 6071 | GATGCCCTTTSCAACACATAT | 2.923 | 2.092 | 1.419 | 1.495 | — | — | 2.319 | 2.946 |
| 18 | 4 | 143764438 | 3844178 | 6073 | TTAAGAAATARGGAACTGAAC | 3.342 | 2.535 | 1.754 | — | — | — | 2.797 | 3.350 |
| 18 | 4 | 143785479 | 2322795 | 8412 | GAGCTAGAAASATGGGGAGAT | 3.352 | 2.057 | — | — | — | — | 2.875 | 3.369 |
| 18 | 4 | 143808180 | 975136 | 8413 | GCAGATAAGAYAATTCAGGTA | 0.194 | — | — | — | — | — | 0.232 | 0.200 |
| 19 | 6 | 27117491 | 7775041 | 6096 | TTGACTATATWCATGCATTCT | 0.400 | — | — | — | — | — | 0.179 | 0.416 |
| 19 | 6 | 27131673 | 10946899 | 8414 | GGAGTAAAATWACTTTCCTAA | 0.809 | 0.603 | — | — | — | — | 0.760 | 0.865 |
| 19 | 6 | 27138903 | 3922717 | 8415 | CTTTATATCTRTGCAAGAACA | 1.251 | 0.931 | 1.457 | — | — | — | 1.325 | 1.311 |
| 19 | 6 | 27150237 | 6916301 | 8416 | AATCCTTCTAYTTTCTAGTCC | 0.015 | 1.108 | 1.332 | 1.013 | — | — | 0.142 | 0.041 |
| 19 | 6 | 27155692 | 994691 | 8417 | GTATAAAGAAWGCCTTGAGAA | 1.927 | 1.469 | 1.051 | 1.086 | 0.969 | — | 1.416 | 1.965 |
| 19 | 6 | 27162476 | 2142685 | 6098 | TTTATGTTCTYTTGAAGATGA | 0.875 | 1.410 | 1.048 | 0.977 | 0.924 | 0.929 | 0.510 | 0.902 |
| 19 | 6 | 27172468 | — | 6099 | GTATTCACTCRAGATGTTAGT | — | — | — | — | — | — | — | — |
| 19 | 6 | 27183462 | 9348752 | 6100 | AGAATGTTCAYAGATATTTCT | 0.594 | 0.764 | 1.718 | 1.106 | 0.762 | — | 0.330 | 0.629 |
| 19 | 6 | 27193204 | 12209456 | 8418 | CTAAGTCATGYCCAGACTCCT | 0.963 | 1.028 | 1.272 | 1.222 | — | — | 0.603 | 1.016 |
| 19 | 6 | 27201800 | 6456768 | 6101 | TGGAGGATGGSATAGTAAAGA | 1.332 | 0.815 | 0.662 | — | — | — | 0.890 | 1.372 |
| 19 | 6 | 27211559 | 2022272 | 6102 | ACAATTAAATRTACAGTGGTT | 1.161 | 0.668 | — | — | — | — | 0.793 | 1.241 |
| 19 | 6 | 27222031 | 9393790 | 6103 | TACTCAGTGTKATAAGATCAT | 1.039 | — | — | — | — | — | 0.649 | 1.058 |
| 20 | 6 | 152767168 | 6905339 | 6172 | AACAATGTGAYACAAACTGTA | 0.984 | — | — | — | — | — | 0.963 | 1.023 |
| 20 | 6 | 152789820 | 214955 | 6175 | GAAAAGGTGAYGCAAAAATTT | 1.050 | 1.247 | — | — | — | — | 0.662 | 1.093 |
| 20 | 6 | 152810619 | 549981 | 6176 | TCCTCAGGCCYTTTCTTTTCC | 2.519 | 1.758 | 1.509 | — | — | — | 1.935 | 2.545 |
| 20 | 6 | 152838247 | 6909684 | 6179 | TATATTAAAAYGAAATGGACT | 2.079 | 2.393 | 0.958 | 0.811 | — | — | 1.750 | 2.121 |
| 20 | 6 | 152861412 | 17082700 | 6182 | GTATCCCATAYAGCAAGAAGT | 0.217 | 1.413 | 1.564 | 0.969 | 1.005 | — | 0.131 | 0.207 |
| 20 | 6 | 152868292 | 214970 | 6183 | GTGACACAGTRTCTATACTAT | 1.682 | 1.192 | 1.408 | 1.506 | 0.629 | 0.721 | 1.188 | 1.732 |
| 20 | 6 | 152875047 | 579464 | 6184 | CTTAACTTCCRGATTCCACAG | 1.683 | 1.719 | 1.232 | 0.782 | 0.964 | 0.559 | 1.188 | 1.732 |
| 20 | 6 | 152887970 | 7755437 | 6185 | ATTCATAATTMCTTATATTGA | 1.696 | 1.534 | 0.964 | 0.668 | 0.906 | — | 1.188 | 1.732 |
| 20 | 6 | 152898003 | 9397512 | 6186 | TGTTGCCATAYCACTGTGTAG | 1.600 | 1.007 | 0.842 | 1.625 | — | — | 1.092 | 1.634 |
| 20 | 6 | 152913124 | 9479327 | 6187 | AATTTATTTTYTGGATGATTA | — | — | — | — | — | — | — | — |
| 20 | 6 | 152925152 | 11155857 | 6188 | CCAACAAAATRGACTTACATG | 0.498 | 0.856 | 1.639 | — | — | — | 0.511 | 0.532 |
| 20 | 6 | 152934088 | 17699371 | 6189 | CTGTTAGACAYGACACAGTCT | 0.051 | 0.435 | — | — | — | — | 0.476 | 0.072 |
| 20 | 6 | 152940828 | 11155858 | 6190 | AGCCATATACRGTCATTAAAA | 0.797 | — | — | — | — | — | 0.479 | 0.845 |
| 21 | 7 | 30540960 | 255160 | 6249 | ATGAAAGCTGYCTTGCCTAAG | — | — | — | — | — | — | — | — |
| 21 | 7 | 30565088 | 4723010 | 6251 | CTACAGCTTCRATGGCAGCCC | — | — | — | — | — | — | — | — |
| 21 | 7 | 30579153 | 3901848 | 6252 | TGTCCTTCCARTGTAAAGTCC | 0.985 | — | — | — | — | — | 0.591 | 0.977 |
| 21 | 7 | 30602279 | 11768076 | 6254 | TGTGGCCTTTRAGTACCTTGG | 0.000 | 1.691 | — | — | — | — | 0.492 | 0.007 |
| 21 | 7 | 30610787 | 7803974 | 6255 | AGCAGGGCTAYGTTCTGAGAA | 1.896 | 2.000 | 1.618 | — | — | — | 1.478 | 1.861 |
| 21 | 7 | 30618224 | 1990011 | 6256 | TGGATATGTCSAGTGGAGCTT | 0.000 | 2.493 | 1.570 | 0.754 | — | — | 0.612 | 0.009 |
| 21 | 7 | 30629046 | 10237363 | 6257 | CCCGGGTCTCRTATGCCAAAT | 2.753 | 2.182 | 1.118 | 1.180 | 2.561 | — | 2.281 | 2.819 |
| 21 | 7 | 30641902 | 17159487 | 6258 | GTAAGTTAACKAAGGTCTCCA | 1.232 | 1.492 | 1.742 | 2.383 | 2.564 | — | 0.814 | 1.222 |
| 21 | 7 | 30649882 | 10229281 | 6259 | TGGGAATAGARCTGCTTCATC | 0.450 | 1.687 | 2.864 | 3.310 | — | — | 0.399 | 0.463 |
| 21 | 7 | 30671937 | 17159526 | 6260 | TCAGGTTGTTSCAATGTCCCA | 3.299 | 3.169 | 2.385 | — | — | — | 2.786 | 3.305 |
| 21 | 7 | 30682866 | 17159567 | 6261 | CAAAGTTATAMATCTCTTAAA | — | — | — | — | — | — | — | — |
| 21 | 7 | 30688503 | 10216063 | 6262 | GCATTACAACRTGTGCCAGGT | 3.574 | 3.298 | — | — | — | — | 2.875 | 3.586 |
| 21 | 7 | 30710418 | 1000597 | 6264 | AGGACAGTTTYGTAATCAGGA | 0.322 | — | — | — | — | — | 0.127 | 0.345 |
| 22 | 7 | 33466478 | 7811071 | 6364 | CAGCATTTGTRAGGCCAGGTG | 0.368 | — | — | — | — | — | 0.269 | 0.376 |
| 22 | 7 | 33474415 | 2034513 | 8419 | CCATGATTAAYGTACAACATA | 0.206 | 0.483 | — | — | — | — | 0.140 | 0.218 |
| 22 | 7 | 33478828 | 7796551 | 8420 | TTTGAAATATYTAATTGATGA | — | — | — | — | — | — | — | — |
| 22 | 7 | 33484293 | 4723309 | 6366 | TATCAGTTTTRTAAGTAAGCA | 0.000 | 0.243 | 0.364 | — | — | — | 0.091 | 0.014 |
| 22 | 7 | 33491746 | 6966497 | 6367 | CTTGTGGTGAYCAGCACTACT | 0.000 | 0.670 | 0.275 | 0.345 | — | — | 0.082 | 0.009 |
| 22 | 7 | 33501439 | 1545449 | 8421 | TTTTTCTTCGYAAGTTCTTAA | 0.285 | 0.638 | 0.639 | 0.175 | 0.082 | — | 0.369 | 0.299 |
| 22 | 7 | 33505602 | 1376350 | 6369 | AACTGAGAGCRATTGTGGCAA | — | — | — | — | — | — | — | — |
| 22 | 7 | 33511585 | 921413 | 8422 | TCTGACAGAARAATGTGGGGT | 0.468 | 0.548 | 0.423 | 0.294 | 0.055 | — | 0.305 | 0.503 |
| 22 | 7 | 33516650 | 7796839 | 8423 | CTAGTGCAATYTCATTTTGAC | 0.509 | 0.181 | 0.401 | 0.168 | — | — | 0.341 | 0.494 |
| 22 | 7 | 33524601 | 17810887 | 8424 | CTGCAAAGCTRGGAACCAGGG | 0.365 | 0.380 | 0.216 | — | — | — | 0.225 | 0.384 |
| 22 | 7 | 33530235 | 6943676 | 8425 | GTTGCTGAGGSACTTTACTCC | 0.790 | 0.439 | — | — | — | — | 0.880 | 0.812 |
| 22 | 7 | 33537029 | 3779238 | 8426 | GCCATTGCTAYGATTTCTCCC | 1.052 | — | — | — | — | — | 0.803 | 1.074 |
| 23 | 7 | 127442525 | 2060736 | 6407 | TAACCGCGCCSTTCATTCTGT | 0.393 | — | — | — | — | — | 0.446 | 0.386 |
| 23 | 7 | 127446016 | 11981584 | 8427 | GAAGTTGCCARCCCCACATCA | 0.261 | 0.039 | — | — | — | — | 0.116 | 0.303 |
| 23 | 7 | 127451842 | 2167289 | 8428 | GTGGTATCCTKACATGCTGTA | 0.608 | 0.878 | 0.619 | — | — | — | 0.365 | 0.641 |
| 23 | 7 | 127456753 | 791595 | 8429 | GGGCAGCTGTRGCCACAGAAT | 1.522 | 1.537 | 0.728 | 0.868 | — | — | 1.143 | 1.594 |
| 23 | 7 | 127459767 | 791600 | 8430 | ATGCCAACTCRGGCCACATGC | — | — | — | — | — | — | — | — |
| 23 | 7 | 127464579 | 1376349 | 6409 | TGGTTTAAGCYTTTGAGCTCT | 2.033 | 1.803 | 1.812 | 0.415 | 0.688 | — | 1.709 | 2.125 |
| 23 | 7 | 127469340 | 4731424 | 8431 | CCCAGGGGCTKGCATTCTCGG | 1.638 | 1.273 | 1.175 | 1.213 | 0.752 | — | 1.411 | 1.725 |
| 23 | 7 | 127475802 | 2278815 | 8432 | AATGAGAGGGRCTGTGTAAGG | 0.147 | 0.538 | 0.470 | 1.698 | — | — | 0.034 | 0.155 |
| 23 | 7 | 127478340 | 4731427 | 8433 | GAGATCAGATYTTTCTGATGA | — | — | — | — | — | — | — | — |
| 23 | 7 | 127484013 | 11763517 | 6411 | GTGGCCATTAYTTGAGAGTGA | 0.683 | 0.487 | 0.325 | — | — | — | 0.392 | 0.692 |
| 23 | 7 | 127488256 | 3828942 | 8434 | TCACCTGGGTRCAGGATACAA | 0.084 | 0.501 | — | — | — | — | 0.018 | 0.106 |
| 23 | 7 | 127491020 | 11761556 | 8435 | GACAGGAGGGMAAGGGCCATG | 0.388 | — | — | — | — | — | 0.196 | 0.389 |
| 24 | 7 | 147429773 | 9648523 | 8436 | AGAAATCACAMTTTTTGCAAA | 0.033 | — | — | — | — | — | 0.023 | 0.019 |
| 24 | 7 | 147433108 | 13244714 | 8437 | AGGGTTGAAARTGCTTCTAGG | 0.421 | 1.613 | — | — | — | — | 0.740 | 0.419 |
| 24 | 7 | 147437045 | 4726947 | 6676 | TTTAGATGTASATTAAGACCC | 1.295 | 1.015 | 1.009 | — | — | — | 0.946 | 1.311 |
| 24 | 7 | 147440758 | 2373341 | 8438 | AAGAATGAACRGGAATCACAT | — | — | — | — | — | — | — | — |
| 24 | 7 | 147450906 | 11514853 | 8439 | AATCTACATARAGCAACTGGG | — | — | — | — | — | — | — | — |
| 24 | 7 | 147453963 | 4726950 | 8440 | CTGTAATTAARTACTTTTCCC | 0.614 | 0.580 | 0.953 | 0.926 | — | — | 0.564 | 0.614 |
| 24 | 7 | 147458148 | 1918298 | 8441 | CGTATTTTGTKCATGATTCTA | 0.091 | 0.603 | 0.410 | 1.651 | 1.669 | — | 0.365 | 0.107 |
| 24 | 7 | 147461850 | 1918296 | 8442 | CAGATTACACRAAGGAGTGAA | 0.180 | 0.686 | 2.503 | 0.985 | 1.230 | 1.922 | 0.049 | 0.196 |
| 24 | 7 | 147468476 | 7779793 | 8443 | AGATTCACTGYAGTCAGAAGA | 0.425 | 1.819 | 2.190 | 1.887 | 0.986 | 0.934 | 0.266 | 0.489 |
| 24 | 7 | 147473270 | 10281587 | 6678 | CTATCTCTTAYATTGCCCAGT | — | — | — | — | — | — | — | — |
| 24 | 7 | 147478836 | 11767934 | 6679 | TTGTCAGATGSTCTTCACACA | 2.329 | 1.847 | 1.343 | 1.667 | 1.114 | 0.935 | 1.776 | 2.367 |
| 24 | 7 | 147485200 | 2037869 | 6680 | TGAGGTCATGYGTAGTAAACA | 0.740 | 1.733 | 1.341 | 0.842 | 1.698 | — | 2.078 | 0.762 |
| 24 | 7 | 147491445 | — | 6681 | TTTTAGAAGTRTGCTCATTTA | — | — | — | — | — | — | — | — |
| 24 | 7 | 147497490 | 1177942 | 8444 | AAACAGTCTAYGCTTTGGCAA | 0.845 | 0.725 | 1.064 | 1.361 | — | — | 2.150 | 0.867 |
| 24 | 7 | 147502534 | 1637864 | 6682 | ACATGTCACCRAGAGAAAATG | 0.000 | 0.665 | 0.736 | — | — | — | 1.080 | 0.012 |
| 24 | 7 | 147508498 | 1730397 | 8445 | GGCTATTACCYCAATCTGAAA | 0.000 | 0.000 | — | — | — | — | 1.080 | 0.012 |
| 24 | 7 | 147514126 | 1637854 | 8446 | AAAAGAAGAARTCTCCTTTGA | 0.000 | — | — | — | — | — | 1.080 | 0.012 |
| 25 | 7 | 149524163 | 4725887 | 8447 | TGGCAGCGTGRTGTGTGGACA | 2.923 | — | — | — | — | — | 2.807 | 2.975 |
| 25 | 7 | 149556724 | 2888635 | 6721 | TGCATCGATCKGGTGAGACAC | 1.117 | 1.686 | — | — | — | — | 1.374 | 1.163 |
| 25 | 7 | 149591461 | 7810209 | 6723 | TTATAGTGGGYGATGTGTAAA | 0.498 | 0.540 | 1.212 | — | — | — | 0.214 | 0.463 |
| 25 | 7 | 149624893 | 2222524 | 6725 | ACAATGGGTGRCTTTATTTAT | — | — | — | — | — | — | — | — |
| 25 | 7 | 149649666 | 7810752 | 6726 | TGAAAATTCARCTTGTTCAAG | — | — | — | — | — | — | — | — |
| 25 | 7 | 149690467 | 4725919 | 8448 | GGATCCCACTYGTTCTTCCCC | 0.228 | 0.978 | 0.568 | 0.724 | — | — | 0.082 | 0.265 |
| 25 | 7 | 149706735 | 13242186 | 6728 | ATCTCTGAGTSCAGCAGTAAC | 1.949 | 1.195 | 0.652 | 0.507 | 0.526 | — | 2.052 | 1.980 |
| 25 | 7 | 149738096 | 4367453 | 6730 | TTAAAAAGGTYATTCCTACCC | — | — | — | — | — | — | — | — |
| 25 | 7 | 149749542 | — | 6731 | TCTGTTTTTCYCCAGCAGAAG | 0.000 | 1.125 | 0.897 | 0.791 | — | — | 0.848 | 0.006 |
| 25 | 7 | 149756449 | 10253121 | 6732 | ATGTGACAGTYTCTAGTTCCC | 0.713 | 0.457 | 1.178 | — | — | — | 1.000 | 0.732 |
| 25 | 7 | 149763839 | 10272462 | 6733 | AGGAATTTGARTGAATGGGCA | 0.734 | 1.318 | — | — | — | — | 1.000 | 0.732 |
| 25 | 7 | 149768593 | 6946579 | 6734 | TTGCCTAAGTRTTTAGAAAGT | 0.683 | — | — | — | — | — | 0.400 | 0.699 |
| 26 | 7 | 150246812 | 6951528 | 6762 | CCTGGGCTGAMCCAATGAGCA | 1.798 | — | — | — | — | — | 3.617 | 1.856 |
| 26 | 7 | 150260307 | 6464131 | 6763 | GGTGCCCGCTSCTTCCCGTTC | — | — | — | — | — | — | — | — |
| 26 | 7 | 150269456 | 6979622 | 6764 | TGTGCCCTAAYGCAGCCCTCG | — | — | — | — | — | — | — | — |
| 26 | 7 | 150286812 | 6464132 | 6765 | GCTTCGTGAARGTAGGTATTC | 1.388 | 0.812 | — | — | — | — | 0.883 | 1.380 |
| 26 | 7 | 150295919 | 4725395 | 6766 | CTTCTTTCCARTTAAAATATT | 0.817 | 0.764 | 0.577 | — | — | — | 0.534 | 0.820 |
| 26 | 7 | 150312660 | 4726005 | 6767 | ACACAGAAGTYATCACTCACA | 2.171 | 0.995 | 0.638 | 0.657 | — | — | 1.705 | 2.196 |
| 26 | 7 | 150320869 | 2257069 | 6768 | GCAATTTCCCRATGCGGGCCA | — | — | — | — | — | — | — | — |
| 26 | 7 | 150339257 | 310583 | 8449 | GTGAGCTTGARATCCTGCAGC | — | — | — | — | — | — | — | — |
| 26 | 7 | 150348102 | 2608288 | 6769 | AGTAAAGGGASAAAGTTCTTC | 0.305 | 0.847 | 0.942 | — | — | — | 0.116 | 0.319 |
| 26 | 7 | 150355235 | 7784344 | 6770 | GGCTATATTAWAAACTAATAC | 0.292 | 0.090 | — | — | — | — | 1.019 | 0.294 |
| 26 | 7 | 150373700 | 1870238 | 6772 | AATGACCACASGGCTGCTGTC | 0.419 | — | — | — | — | — | 0.198 | 0.412 |
| 28 | 9 | 26960384 | 7870787 | 8450 | ATGACTTTGGWCTGTTCCAAA | 0.378 | — | — | — | — | — | 0.166 | 0.413 |
| 28 | 9 | 26969027 | 7849248 | 8451 | CAGAGTTTTTYGTTTTCTGTA | 0.377 | 0.421 | — | — | — | — | 0.166 | 0.413 |
| 28 | 9 | 26986170 | 7018585 | 8452 | GTTTGGAAGASCAATATTTTG | 0.093 | 0.628 | 0.507 | — | — | — | 0.040 | 0.090 |
| 28 | 9 | 26996575 | 10967657 | 8453 | AGTCTGGGTGRCAAGTGGTAC | 0.381 | 0.382 | 0.483 | 1.087 | — | — | 0.173 | 0.417 |
| 28 | 9 | 27003594 | 7040505 | 8454 | GTTTTAGCTAKTTTGATAGGT | 0.011 | 0.595 | 0.939 | 1.176 | — | — | 0.075 | 0.033 |
| 28 | 9 | 27008020 | 12337896 | 6914 | AATCATTTCARAAAGGTATTA | 0.019 | 1.648 | 1.221 | — | — | — | 0.061 | 0.017 |
| 28 | 9 | 27018947 | 7390085 | 6915 | TGGAAAAGATRTCTAACCTCC | 2.317 | 1.548 | — | — | — | — | 1.828 | 2.352 |
| 28 | 9 | 27026804 | 10967677 | 8455 | GAAAAGTGGCRTGTGATTTAC | — | — | — | — | — | — | — | — |
| 28 | 9 | 27031315 | 7045747 | 6916 | ACATTCCTGTYAGAGCACTTA | 0.017 | — | — | — | — | — | 0.001 | 0.024 |
| 28 | 9 | 27037246 | 10812520 | 8456 | TCAGCAGTAAYCTCTCTTATG | — | — | — | — | — | — | — | — |
| 29 | 9 | 70416653 | 10435958 | 8457 | AAATTCCTTAWGTTCAAATGT | 0.424 | — | — | — | — | — | 0.349 | 0.449 |
| 29 | 9 | 70433985 | 7865858 | 8458 | AGCACATTTARTCTCTGAGGA | 0.762 | 0.072 | — | — | — | — | 1.065 | 0.810 |
| 29 | 9 | 70450716 | 7862783 | 8459 | GAGGCCCAATRAATGCTGGCT | — | — | — | — | — | — | — | — |
| 29 | 9 | 70470740 | 7024154 | 8460 | CTGAGTGCATMGTGAATTCCA | 0.030 | 0.207 | 0.358 | — | — | — | 0.009 | 0.036 |
| 29 | 9 | 70487522 | 4297092 | 8461 | TACTTGGAGTWAATTTATTAG | 0.061 | 1.364 | 0.713 | 0.264 | — | — | 0.037 | 0.080 |
| 29 | 9 | 70497790 | 11142532 | 6979 | ATGGAGAGAAYAGAGGAATGT | 2.303 | 1.558 | 0.588 | 0.351 | — | — | 1.695 | 2.337 |
| 29 | 9 | 70509554 | 11142536 | 6980 | TGGCTGACAGYGCCTCAGAAA | 0.790 | 1.049 | 0.668 | — | — | — | 0.431 | 0.799 |
| 29 | 9 | 70529809 | 10868873 | 8462 | ATTCCTCTCTMTGTTTCACTA | — | — | — | — | — | — | — | — |
| 29 | 9 | 70545326 | 11142556 | 8463 | AATGTTAAACRTGCTAAATAT | 0.738 | 0.170 | — | — | — | — | 0.451 | 0.765 |
| 29 | 9 | 70587221 | 11142561 | 8464 | GTAACAGTTGYCCTGCCTACC | 0.813 | — | — | — | — | — | 0.506 | 0.867 |
| 30 | 9 | 93389779 | 10119086 | 8465 | CTAAACACTAWCTCTGTTATA | 1.784 | — | — | — | — | — | 1.435 | 1.783 |
| 30 | 9 | 93410054 | 6479494 | 8466 | CCAACTTAGCRTCATTTGATG | 0.071 | 1.213 | — | — | — | — | 0.151 | 0.070 |
| 30 | 9 | 93432674 | 2150752 | 8467 | TGTGGTGGTGKTTTCTGACTC | 2.566 | 0.990 | 0.939 | — | — | — | 1.984 | 2.574 |
| 30 | 9 | 93459352 | 12551314 | 7054 | TCCCAAGAGGMAATTGTGGGG | 0.000 | 2.013 | 0.720 | 0.435 | — | — | 0.000 | 0.016 |
| 30 | 9 | 93475886 | 1806458 | 7055 | GGTGTTCCTCRCAGGTGGTGA | — | — | — | — | — | — | — | — |
| 30 | 9 | 93485419 | 6479499 | 7056 | AGCCCTGTAGWTCCTTGAAGT | 3.561 | 2.215 | 1.193 | 0.443 | 0.288 | — | 2.916 | 3.619 |
| 30 | 9 | 93491981 | — | 7057 | ACCAACACGGYACACTCACAC | — | — | — | — | — | — | — | — |
| 30 | 9 | 93498640 | 10992831 | 7058 | CTTCCGATTGRACTGTCCCTT | 2.673 | 2.610 | 1.249 | 1.060 | — | — | 2.490 | 2.723 |
| 30 | 9 | 93527276 | 7024542 | 7059 | TACCTTCCAGYGCCATCAGGA | 0.827 | 2.222 | 1.902 | — | — | — | 0.469 | 0.854 |
| 30 | 9 | 93548630 | 4744272 | 8468 | TGTCATCTGTRTTCTATGATC | 0.060 | 1.674 | — | — | — | — | 0.683 | 0.073 |
| 30 | 9 | 93563775 | 2398871 | 7061 | CTACACGAGAYAACTGACATA | 1.860 | — | — | — | — | — | 1.439 | 1.853 |
| 31 | 9 | 110502598 | 4132110 | 8469 | AAACACATATYCCCCAACTTT | — | — | — | — | — | — | — | — |
| 31 | 9 | 110521910 | 3001140 | 8470 | CTAGTAACTAYTTCAGAGAAA | 0.000 | — | — | — | — | — | 0.161 | 0.002 |
| 31 | 9 | 110542563 | 4524871 | 8471 | TCAATGAAATSTGGTGCTGGA | 0.228 | 0.246 | — | — | — | — | 0.115 | 0.199 |
| 31 | 9 | 110565516 | 4336672 | 8472 | TCCCCAAAACMCAGGCAAAAA | 1.064 | 1.026 | 0.657 | — | — | — | 0.687 | 1.098 |
| 31 | 9 | 110586553 | 4144418 | 7103 | ACAGCTAACTYAGAAAGACAG | 0.950 | 1.793 | 0.854 | 0.790 | — | — | 1.457 | 0.988 |
| 31 | 9 | 110612005 | 10980564 | 7106 | TACGAATTTCRCAGGTTTTCA | 0.970 | 1.939 | 1.094 | 0.969 | — | — | 1.181 | 0.966 |
| 31 | 9 | 110631784 | 2254097 | 8473 | CATGAGGTTGRGTAAGACACC | 1.463 | 0.682 | 0.982 | — | — | — | 3.044 | 1.520 |
| 31 | 9 | 110648651 | 1409686 | 7108 | TGCTCTGGTTMGTATTGGTAG | 1.991 | 0.943 | — | — | — | — | 1.726 | 2.021 |
| 31 | 9 | 110675982 | 4481678 | 8474 | TATAATTTCTYAAGCAGATAC | 0.080 | — | — | — | — | — | 0.101 | 0.063 |
| 31 | 9 | 110688444 | 512483 | 8475 | CCTCCTCTCASAGAAAAAGAG | — | — | — | — | — | — | — | — |
| 32 | 10 | 20313589 | 1111367 | 7179 | GGACCTCAGAYAGTATAAGTT | — | — | — | — | — | — | — | — |
| 32 | 10 | 20324955 | 7079519 | 8476 | AAGAGGATGGRGTGTCTTATA | 0.515 | — | — | — | — | — | 0.441 | 0.569 |
| 32 | 10 | 20334358 | 7913119 | 8477 | CACTAGTTGCRGAAACAAAAA | 0.838 | 0.263 | — | — | — | — | 0.470 | 0.831 |
| 32 | 10 | 20347228 | 2884508 | 8478 | TACCTGTTTTSCCCATACTAT | 0.119 | 0.335 | 0.061 | — | — | — | 0.122 | 0.132 |
| 32 | 10 | 20359198 | 7907793 | 8479 | TATACAAATGRCCATGAATTC | 0.945 | 0.112 | 0.411 | 0.269 | — | — | 1.367 | 0.966 |
| 32 | 10 | 20370658 | 7070397 | 8480 | AACAGAAATAYTTTTTCTCCC | 0.512 | 0.488 | 0.109 | 1.053 | 0.289 | — | 1.095 | 0.531 |
| 32 | 10 | 20382322 | 7923873 | 8481 | AATTGGTATGRGTTCCTACCA | 0.022 | 0.222 | 0.710 | 0.283 | — | — | 0.202 | 0.025 |
| 32 | 10 | 20395173 | 6482080 | 8482 | CCCTTTGAAGWTCTATTTGTC | 0.476 | 0.181 | 0.212 | — | — | — | 0.312 | 0.505 |
| 32 | 10 | 20406431 | 12250505 | 7189 | ATGGGGTTACRATGGGGTTAG | — | — | — | — | — | — | — | — |
| 32 | 10 | 20418225 | 10827961 | 8483 | GTATGAGTCAYGAATGTATTT | 0.231 | 0.303 | — | — | — | — | 0.046 | 0.192 |
| 32 | 10 | 20430199 | 7090580 | 8484 | AGCTCAGCCAKTATCAGAAAG | 0.282 | — | — | — | — | — | 0.643 | 0.260 |
| 33 | 10 | 100843202 | 2902259 | 8485 | ACTGTTTTGCRCTCCCATGAC | 0.568 | — | — | — | — | — | 0.352 | 0.596 |
| 33 | 10 | 100856514 | 6584235 | 8486 | TTATAGCTAAKAAAGTTGGGG | — | — | — | — | — | — | — | — |
| 33 | 10 | 100873537 | 1954295 | 8487 | AGCAGTCCTARTCACAGGCAA | 0.884 | 0.384 | — | — | — | — | 0.943 | 0.887 |
| 33 | 10 | 100889285 | 10786510 | 8488 | AATTACACTAYAAATCCCATC | 0.056 | 1.031 | 0.527 | — | — | — | 0.304 | 0.061 |
| 33 | 10 | 100898963 | 1010357 | 8489 | ACTTTTTTAASAACAGAAGCT | 0.675 | 0.544 | 0.531 | 0.430 | — | — | 0.367 | 0.690 |
| 33 | 10 | 100912517 | 10883285 | 8490 | TCCACTTTGGYTTCAAAATGT | — | — | — | — | — | — | — | — |
| 33 | 10 | 100932439 | 2796759 | 8491 | GATTAACCATYCTATCTTGGA | 0.424 | 0.348 | 0.633 | 0.438 | 0.593 | — | 0.200 | 0.416 |
| 33 | 10 | 100947920 | 4456193 | 8492 | GCAAAGGCCCRGTTTCAAATC | 0.352 | 0.156 | 0.281 | 0.712 | — | — | 0.175 | 0.349 |
| 33 | 10 | 100965767 | 10786522 | 8493 | TCTGATAATGYTGCTGATATT | 0.341 | 0.233 | 0.397 | — | — | — | 0.198 | 0.374 |
| 33 | 10 | 100978209 | 2902263 | 8494 | AAAAACATGCWTACAAATAAA | 0.389 | 0.631 | — | — | — | — | 0.224 | 0.400 |
| 33 | 10 | 100989074 | 17094130 | 7334 | GTAAGAAAACRTGAAGATTAA | 0.483 | — | — | — | — | — | 0.309 | 0.481 |
| 34 | 11 | 11861860 | 4597067 | 8495 | TCATCCACCARCTAGAGTATA | 4.597 | — | — | — | — | — | 3.888 | 4.627 |
| 34 | 11 | 11875274 | 4360694 | 8496 | GGTAACTGGTYCTGTATAGTC | — | — | — | — | — | — | — | — |
| 34 | 11 | 11887874 | 4910429 | 7378 | TAATTTCATAYAGTGCCTTTG | 4.599 | 4.472 | — | — | — | — | 3.952 | 4.644 |
| 34 | 11 | 11896387 | 12225231 | 8497 | AAGTGGCCTCYGTTCTTCAAA | — | — | — | — | — | — | — | — |
| 34 | 11 | 11911794 | 6485303 | 7379 | TGAGACATAAYTGGTGTCAAT | 0.101 | 4.496 | 3.775 | — | — | — | 0.155 | 0.116 |
| 34 | 11 | 11930555 | 16910238 | 7380 | ATAGGAGCCARTAGAGAAACA | — | — | — | — | — | — | — | — |
| 34 | 11 | 11936250 | 1979687 | 7381 | ACTTGCTATCRCACAAAAGAG | 4.444 | 4.422 | 2.992 | 2.498 | — | — | 3.771 | 4.470 |
| 34 | 11 | 11944883 | 7480000 | 7382 | AGCATCAACASGGGAAAAAAA | 0.961 | 3.361 | 2.452 | 2.456 | 1.793 | — | 0.871 | 0.954 |
| 34 | 11 | 11959842 | 7479744 | 8498 | AAAGGCCTGTYTCATATCCCT | 0.405 | 0.810 | 3.168 | 1.918 | — | — | 0.410 | 0.395 |
| 34 | 11 | 11973956 | 11601753 | 8499 | CATCAGCCGAYGTGCTCAGGT | 0.113 | 0.178 | 0.172 | — | — | — | 0.160 | 0.117 |
| 34 | 11 | 11990200 | 4757949 | 8500 | CTTTTTTCTTRTATCTGTTCT | 0.000 | 0.004 | — | — | — | — | 0.017 | 0.016 |
| 34 | 11 | 11998072 | 4500466 | 7389 | TTCCTCTATCRTTGTCATGCT | 0.141 | — | — | — | — | — | 0.143 | 0.160 |
| 35 | 11 | 19614433 | 16937060 | 7436 | TACAAAGCGGMTCTTGGTCTG | — | — | — | — | — | — | — | — |
| 35 | 11 | 19630248 | 1559667 | 7437 | CCAATTAAATRAAGCCTATTA | 1.521 | — | — | — | — | — | 1.113 | 1.570 |
| 35 | 11 | 19638525 | 16937087 | 7438 | CTGGACATTAKGGTTCATACG | — | — | — | — | — | — | — | — |
| 35 | 11 | 19647977 | 10833153 | 7439 | TCCTTCCTCCYTTGTCCTGGG | 0.627 | 0.954 | — | — | — | — | 1.009 | 0.628 |
| 35 | 11 | 19653940 | 2216997 | 7440 | TACAGCAATTKGTAATTCACG | 1.664 | 0.936 | 1.279 | — | — | — | 1.042 | 1.549 |
| 35 | 11 | 19659944 | 7113050 | 7441 | AGACCTGTGGRCACATCTGAA | 1.201 | 1.729 | 1.375 | 0.961 | — | — | 0.789 | 1.243 |
| 35 | 11 | 19663584 | 752459 | 7442 | AGGTATGGCCRGGCTGAGGAG | 3.303 | 1.588 | 1.083 | — | — | — | 2.631 | 3.323 |
| 35 | 11 | 19679410 | 1364790 | 8501 | GCAAGGAAAGYGCTCAAATGG | 2.817 | 1.779 | — | — | — | — | 2.233 | 2.878 |
| 35 | 11 | 19687211 | 890136 | 7443 | CTTATAGGCCRTTTTTATAAT | 2.678 | — | — | — | — | — | 2.452 | 2.617 |
| 35 | 11 | 19696994 | — | 7444 | CACAAATATAYACACATGGAA | — | — | — | — | — | — | — | — |
| 35 | 11 | 19707031 | 1559665 | 7445 | CAAGGAACGTRTGCAGAGAAA | — | — | — | — | — | — | — | — |
| 35 | 11 | 19721589 | 1346028 | 8502 | TCCTGGTGCTYTCTCCCTCCT | — | — | — | — | — | — | — | — |
| 35 | 11 | 19731509 | 1834323 | 8503 | CATACATTTTYTTATATTTTG | — | — | — | — | — | — | — | — |
| 36 | 11 | 95500304 | 7951852 | 7557 | TTCCATCAGCRCCAAATAATT | 0.197 | — | — | — | — | — | 0.346 | 0.223 |
| 36 | 11 | 95507337 | 7951538 | 8504 | ATATTTGAAGSCAGTCAAACT | 0.793 | 0.219 | — | — | — | — | 0.472 | 0.798 |
| 36 | 11 | 95516314 | 544552 | 8505 | AGGGATTTCCRATTTCCATAA | 0.122 | 0.615 | 0.629 | — | — | — | 0.974 | 0.130 |
| 36 | 11 | 95524215 | 515200 | 8506 | TCTTGACAGCWAGTAATCCGA | 0.653 | 1.180 | 0.666 | 0.539 | — | — | 0.949 | 0.721 |
| 36 | 11 | 95532144 | 1262181 | 8507 | TTTCCAGGCGRATTTGTTGTC | 0.631 | 1.248 | 0.751 | 0.455 | 0.230 | — | 0.364 | 0.663 |
| 36 | 11 | 95541663 | 2155001 | 7561 | GTGCTGGCTGSTGTGGGGATT | 0.188 | 0.415 | 1.077 | 0.333 | 0.203 | 0.056 | 0.434 | 0.198 |
| 36 | 11 | 95550186 | 7111187 | 8508 | GGCATGTCACMGGGAAAGAAG | 0.686 | 0.075 | 0.098 | 0.419 | 0.151 | — | 0.405 | 0.727 |
| 36 | 11 | 95558601 | 495494 | 8509 | CCTCTTTTGGKCCCTCCAGTC | 0.357 | 0.080 | 0.005 | 0.006 | — | — | 0.147 | 0.390 |
| 36 | 11 | 95567591 | 573424 | 8510 | GGAAGAAAAGRCACCACCGAA | 0.354 | 0.196 | 0.021 | — | — | — | 0.572 | 0.342 |
| 36 | 11 | 95576367 | 505879 | 8511 | GGAGCAAGCCWTTACAAAAAA | 0.509 | 0.055 | — | — | — | — | 0.623 | 0.510 |
| 36 | 11 | 95585236 | 575232 | 8512 | GGATCCAGCARAGAAGGAGCA | 0.588 | — | — | — | — | — | 0.302 | 0.602 |
| 37 | 12 | 56202309 | 1148557 | 8513 | AGATGGTCTCYCCTGGCCTAA | 0.561 | — | — | — | — | — | 0.312 | 0.603 |
| 37 | 12 | 56226338 | 1669297 | 8514 | TGACAGCGGARACAATTGGGA | 0.576 | 1.709 | — | — | — | — | 0.312 | 0.603 |
| 37 | 12 | 56254982 | 1678542 | 7613 | TGAAATGCCGSTGATAGAGAG | 1.975 | 1.178 | 0.584 | — | — | — | 1.576 | 2.014 |
| 37 | 12 | 56271471 | 11537654 | 8515 | TCCGGGCGGCYGACCCGCTGG | 0.844 | 0.725 | 0.089 | 0.408 | — | — | 0.519 | 0.889 |
| 37 | 12 | 56299442 | 2277324 | 7617 | TCCAAGCCGCRGCTCTCGCCA | 0.894 | 0.150 | 0.564 | 0.310 | 0.238 | — | 0.523 | 0.922 |
| 37 | 12 | 56307200 | 10083154 | 7618 | ATATACTTGTRCTTTGAAAAT | 0.993 | 0.299 | 0.167 | 0.555 | 0.381 | 0.414 | 0.595 | 0.994 |
| 37 | 12 | 56335586 | 1678520 | 8516 | CCTTCCTCCCSCTATTTTTAA | 1.191 | 0.551 | 0.423 | 0.164 | 0.788 | — | 0.784 | 1.237 |
| 37 | 12 | 56351715 | 2640629 | 7619 | GTGTAATAAAYAAAAGGCAAC | 1.216 | 0.716 | 0.344 | 0.182 | — | — | 0.819 | 1.276 |
| 37 | 12 | 56376989 | 7309600 | 7620 | GCATCCCTGCRAACAGCTTCT | 0.193 | 0.546 | 0.381 | — | — | — | 0.133 | 0.211 |
| 37 | 12 | 56393103 | 701006 | 7621 | AGGGCAATATRTAGGTTTGTT | 1.414 | 0.646 | — | — | — | — | 1.027 | 1.453 |
| 37 | 12 | 56430932 | 2069502 | 8517 | CACTCTCCTAYTCCCAACCAG | 0.940 | — | — | — | — | — | 0.683 | 0.987 |
| 39 | 14 | 49806475 | 2153553 | 7751 | TGAGCAATTAYCGTGTTACTC | 1.031 | — | — | — | — | — | 0.629 | 1.020 |
| 39 | 14 | 49822992 | 11849603 | 8518 | GGAAAAAAAASAAGTGACCCC | 1.140 | 0.898 | — | — | — | — | 0.747 | 1.167 |
| 39 | 14 | 49839467 | 2297995 | 7754 | CGCCACCAACRATGACTATAT | 1.169 | 0.881 | 0.261 | — | — | — | 0.777 | 1.206 |
| 39 | 14 | 49857963 | 2275592 | 7756 | CAAATGATGCYGTTTGGAAAA | 1.059 | 0.478 | 0.323 | 0.199 | — | — | 0.683 | 1.088 |
| 39 | 14 | 49868493 | 4901016 | 7757 | CATGCAGGCTRGAAACCCTGG | — | — | — | — | — | — | — | — |
| 39 | 14 | 49880775 | 1465160 | 7758 | CTGCAACTGAYATACTGCAGC | 0.817 | 0.222 | 0.303 | 0.462 | 0.263 | — | 0.446 | 0.837 |
| 39 | 14 | 49894783 | 11570816 | 8519 | CCGGATTGCTYCCAGTGAAAT | 0.215 | 0.089 | 0.350 | 0.306 | 0.397 | — | 1.043 | 0.235 |
| 39 | 14 | 49904329 | 9635166 | 7761 | GACTCAGATTKACTTTCTCTT | 0.709 | 0.982 | 0.135 | 0.463 | — | — | 0.575 | 0.717 |
| 39 | 14 | 49917611 | 6572667 | 8520 | GACCCAGGACRAGAGGGAACT | 0.650 | 0.458 | 0.498 | — | — | — | 0.773 | 0.604 |
| 39 | 14 | 49927723 | 1538904 | 8521 | ACCTGAGTTAYGGAAAGGAGT | 0.240 | 0.407 | — | — | — | — | 0.098 | 0.236 |
| 39 | 14 | 49937222 | 10149335 | 8522 | TGTGTAGGACRTTGAGAGCTG | 0.112 | — | — | — | — | — | 0.372 | 0.110 |
| 40 | 14 | 80648058 | 2888049 | 7822 | GAAGTGGTCARTTAAACTACC | 0.410 | — | — | — | — | — | 1.212 | 0.438 |
| 40 | 14 | 80661507 | 7158881 | 7823 | GTAAAGATGGYCCCTGTGGAA | 0.490 | 1.018 | — | — | — | — | 0.712 | 0.508 |
| 40 | 14 | 80668665 | 17111530 | 7824 | GTTACTTTCAYTAGACACTTA | 0.955 | 0.436 | 2.438 | — | — | — | 0.729 | 0.949 |
| 40 | 14 | 80677583 | 2300541 | 7825 | TGCCTGTATGKTAGTGTCCAT | 0.018 | 0.953 | 0.653 | 2.815 | — | — | 0.229 | 0.032 |
| 40 | 14 | 80690636 | 28441485 | 7826 | CTGTTAGGGGKAAGTTTAATG | 1.473 | 0.538 | 1.185 | 1.265 | 2.952 | — | 0.982 | 1.484 |
| 40 | 14 | 80699947 | 12372876 | 7827 | AATCAAAACAYGGCAAAGGGA | 1.456 | 1.777 | 0.818 | 0.832 | 1.696 | 2.860 | 0.981 | 1.485 |
| 40 | 14 | 80709737 | 1957546 | 7828 | AGTCACTTCAYCAAGACTGTA | 2.667 | 1.873 | 1.327 | 1.028 | 1.593 | 1.970 | 2.046 | 2.718 |
| 40 | 14 | 80713553 | 4899786 | 7829 | TGGCCACCAAKCAAGAGTTTG | 2.847 | 2.260 | 1.879 | 1.924 | 1.539 | 1.998 | 2.180 | 2.865 |
| 40 | 14 | 80727089 | 7149672 | 7830 | ATGTTACTTCRAGAAGCACTG | 2.147 | 1.951 | 2.136 | 2.643 | 2.096 | — | 1.520 | 2.161 |
| 40 | 14 | 80751275 | 6574632 | 8523 | GGAATATCAAWCAATCAAATT | 0.830 | 1.916 | 1.956 | 1.617 | — | — | 0.634 | 0.868 |
| 40 | 14 | 80774435 | 8021385 | 8524 | AAACTTCAAARGATTTAAATT | 1.236 | 1.617 | 1.196 | — | — | — | 0.790 | 1.242 |
| 40 | 14 | 80797377 | 7149917 | 8525 | GCTTCAGTCAYGGTGTGGGGC | — | — | — | — | — | — | — | — |
| 40 | 14 | 80819977 | 7148483 | 8526 | AAGTCTGTCARCACCATCTTT | 1.699 | 1.546 | — | — | — | — | 1.565 | 1.713 |
| 40 | 14 | 80833708 | 1885604 | 7840 | GCATGCTATAYGATTTAAATT | 3.552 | — | — | — | — | — | 3.054 | 3.432 |
| 42 | 16 | 73722875 | 7206259 | 7908 | AGAAGCATCAYGTTGCTAACA | 0.032 | — | — | — | — | — | 0.011 | 0.032 |
| 42 | 16 | 73735820 | 7198880 | 8527 | CATATCACCASAATTTATTTT | — | — | — | — | — | — | — | — |
| 42 | 16 | 73761944 | 12935567 | 7909 | ATATATCCAGYTGTAAATAGC | 0.633 | 0.484 | — | — | — | — | 0.277 | 0.594 |
| 42 | 16 | 73762714 | 17673793 | 7910 | CAGAGACTTTRGAGGAAAAAT | 0.270 | 1.356 | 0.374 | — | — | — | 0.183 | 0.245 |
| 42 | 16 | 73787731 | 1559362 | 7911 | TGGTTTTGCCYGTGTGACCAA | 0.370 | 0.174 | 0.881 | 0.616 | — | — | 0.695 | 0.406 |
| 42 | 16 | 73789787 | 10514392 | 7912 | TCTTGCGACTRCTCCAGACGT | 0.108 | 0.744 | 0.980 | 1.705 | 0.943 | — | 0.089 | 0.141 |
| 42 | 16 | 73812718 | 8051363 | 7913 | TTCTGCTTCCRATGTGCCATT | 0.759 | 0.490 | 1.465 | 1.170 | — | — | 0.409 | 0.743 |
| 42 | 16 | 73823220 | 8062565 | 7914 | TCTGAAAACAMGGCGATCCCA | — | — | — | — | — | — | — | — |
| 42 | 16 | 73837879 | 28439846 | 7915 | GGTCAGAGACRGCCTCCCCAA | 2.033 | 1.989 | 0.829 | — | — | — | 1.306 | 1.941 |
| 42 | 16 | 73851712 | 4261573 | 7916 | TTTGATTCGAYTGATGGCTAC | 0.029 | 0.835 | — | — | — | — | 0.882 | 0.045 |
| 42 | 16 | 73878532 | 4243112 | 7918 | CTGAGCAACCYTTCAAAGGTG | 0.613 | — | — | — | — | — | 0.331 | 0.638 |
| 42 | 16 | 73890482 | 11149814 | 7920 | CACCAAGAAAYCTGTGTAATG | — | — | — | — | — | — | — | — |
| 43 | 16 | 76574323 | 402904 | 7956 | GCCATTTGGGRTATAGGAAAC | 1.514 | — | — | — | — | — | 1.289 | 1.542 |
| 43 | 16 | 76594303 | 8058458 | 7959 | CAATCCTATCKGTGAATTTCT | 1.035 | 0.815 | — | — | — | — | 0.689 | 1.037 |
| 43 | 16 | 76612446 | 11643023 | 7962 | CCACTGCCCTYCATTTGCACC | 0.410 | 0.690 | 1.089 | — | — | — | 0.248 | 0.398 |
| 43 | 16 | 76634316 | 4888726 | 7963 | ATTGGGGCCAYCCTGTGCATT | 0.646 | 0.695 | 1.265 | 0.525 | — | — | 1.037 | 0.635 |
| 43 | 16 | 76660674 | 6564507 | 7965 | CTTGTCATTCRATCTTGTCTA | 1.256 | 0.875 | 0.894 | 0.646 | — | — | 0.904 | 1.278 |
| 43 | 16 | 76673175 | 16947096 | 7966 | TCAGGAACGAYGATTTATAAC | 0.523 | 0.251 | 0.124 | — | — | — | 0.347 | 0.537 |
| 43 | 16 | 76680185 | — | 7967 | GGGCCTATGCRTAGAGTCAGT | — | — | — | — | — | — | — | — |
| 43 | 16 | 76685815 | 1073111 | 7968 | CTCCTTGCTARTAATCAATGT | 0.386 | 0.038 | — | — | — | — | 0.368 | 0.414 |
| 43 | 16 | 76698607 | 8045088 | 7969 | CCCTTCGAATRCCTCTTGTAG | — | — | — | — | — | — | — | — |
| 43 | 16 | 76717963 | 8057015 | 8528 | CATGTGCTATMATTTAATTTT | 0.111 | — | — | — | — | — | 0.146 | 0.142 |
| 44 | 18 | 22743410 | 162632 | 8147 | TTAATTCTGAYACAGGTCGTC | 0.887 | — | — | — | — | — | 0.684 | 0.902 |
| 44 | 18 | 22768586 | 163057 | 8529 | AACCCGAAGAKCCTGGAGAGA | 2.039 | 0.584 | — | — | — | — | 1.828 | 2.089 |
| 44 | 18 | 22793630 | 12326470 | 8530 | AAATGGTTGCRCTGAACTTAA | 0.255 | 0.835 | 0.233 | — | — | — | 0.087 | 0.274 |
| 44 | 18 | 22821237 | 1175739 | 8531 | CTCTTTGCACRTGTCTGCTTC | 0.000 | 0.130 | 0.655 | 1.250 | — | — | 0.462 | 0.013 |
| 44 | 18 | 22845245 | 1185795 | 8532 | TCTTGGTGAAKGCAGGAATTA | 0.039 | 0.075 | 2.500 | 1.443 | 1.174 | — | 0.336 | 0.042 |
| 44 | 18 | 22868217 | 1941114 | 8533 | TCTCTGTTTTYGTATCCTTCC | 0.092 | 3.554 | 1.977 | 1.771 | 1.436 | 1.068 | 0.367 | 0.107 |
| 44 | 18 | 22898135 | 6508467 | 8167 | AAACCCTGGGMAAGTGATAAT | 4.804 | 3.408 | 2.199 | 1.858 | 1.305 | — | 4.259 | 4.807 |
| 44 | 18 | 22917032 | 1385753 | 8534 | TGTGAAGAGAYAGCCGTAAGG | 0.332 | 3.064 | 2.727 | 1.660 | — | — | 0.343 | 0.387 |
| 44 | 18 | 22940785 | 4800789 | 8535 | TAATCTACCTRCTTACTACCC | 0.087 | 0.238 | 2.271 | — | — | — | 0.185 | 0.103 |
| 44 | 18 | 22964271 | 2114471 | 8536 | TGACCTAGTARTTATTTTAAT | 0.187 | 0.095 | — | — | — | — | 0.195 | 0.222 |
| 44 | 18 | 22981745 | 4800791 | 8537 | TCCTCTGTAARCCCCTACAGT | 0.430 | — | — | — | — | — | 0.216 | 0.470 |
| 45 | 18 | 61556288 | 7226378 | 8227 | AAGCCCTTAARGAAATATAGA | 0.454 | — | — | — | — | — | 2.031 | 0.478 |
| 45 | 18 | 61577193 | 12963820 | 8538 | AATGAGTTGCWCAATTATCAA | 0.770 | 0.814 | — | — | — | — | 2.550 | 0.772 |
| 45 | 18 | 61595696 | 1484725 | 8231 | CTCCAAACGCRAAGCAAATTT | 1.106 | 1.803 | 0.806 | — | — | — | 2.741 | 1.114 |
| 45 | 18 | 61621115 | 4334398 | 8235 | TCGGTGAACAYGAAGCTCTAA | 0.867 | 1.883 | 1.139 | 0.598 | — | — | 0.548 | 0.875 |
| 45 | 18 | 61627292 | 11659738 | 8236 | TTGAAGTCCCRTGCATGTATT | 0.895 | 1.364 | 0.641 | 0.858 | 0.972 | — | 0.538 | 0.911 |
| 45 | 18 | 61634277 | 4144764 | 8237 | CCTATGGAGAYAAAGCCATAC | — | — | — | — | — | — | — | — |
| 45 | 18 | 61635487 | 6566179 | 8238 | TAAGAGGTATYGTCATAACAA | — | — | — | — | — | — | — | — |
| 45 | 18 | 61655933 | 9963814 | 8539 | AAACATAAGGYCTTCTTGGTC | 1.401 | 1.271 | 1.106 | 0.898 | — | — | 0.889 | 1.418 |
| 45 | 18 | 61672858 | 1484711 | 8239 | AGTTCAAGGCYTTTTAGCTTT | 2.119 | 1.231 | 0.841 | — | — | — | 1.603 | 2.175 |
| 45 | 18 | 61686997 | 2587410 | 8241 | GGAAACTTTTYTTCTATATTA | 2.107 | 1.930 | — | — | — | — | 1.603 | 2.175 |
| 45 | 18 | 61704351 | 1843184 | 8540 | TTATAGCTTCRTGATTAAAAT | 0.684 | — | — | — | — | — | 0.443 | 0.659 |
| 45 | 18 | 61717080 | 7407658 | 8541 | ACAAGGAAAAKATCTTTAAAC | — | — | — | — | — | — | — | — |
| 47 | X | 80276252 | 1538351 | 8542 | GTGACAGAGASAGAACATGAA | 0.129 | — | — | — | — | — | — | — |
| 47 | X | 80303261 | 12848561 | 8543 | CTGTCACTCARTGAAGCTCAT | 0.087 | 1.088 | — | — | — | — | — | — |
| 47 | X | 80325649 | 5959088 | 8336 | CTGTGTGCATRCTGCCTGTGT | 0.302 | 0.624 | 0.986 | — | — | — | — | — |
| 47 | X | 80348471 | 4826212 | 8338 | CTGTTTGATTRGATGACTCAT | 1.139 | 0.582 | 0.425 | 0.578 | — | — | — | — |
| 47 | X | 80387275 | 5959099 | 8340 | TTTTAATCTARCTCTTTATTC | 1.115 | 0.602 | 0.115 | 0.707 | 0.977 | — | — | — |
| 47 | X | 80411297 | 5912496 | 8342 | AAGGATGGATRTAACGGAGAG | 0.879 | 0.455 | 0.602 | 0.582 | 0.674 | — | — | — |
| 47 | X | 80435314 | 6616745 | 8345 | TTGAAGGACAYAGATGGATAC | 0.989 | 0.670 | 0.644 | 0.636 | — | — | — | — |
| 47 | X | 80466657 | — | 8348 | GCTGTTATTTWTTTCCCTAGC | — | — | — | — | — | — | — | — |
| 47 | X | 80492353 | 2602598 | 8350 | GTAGTGTGCTRGATAACAGAG | 1.787 | 1.441 | 0.709 | — | — | — | — | — |
| 47 | X | 80525324 | 1597965 | 8544 | CAAGAGTGATRTTAGCTATGT | 1.787 | 1.437 | — | — | — | — | — | — |
| 47 | X | 80552137 | 5913497 | 8545 | CACACTTATTRTCAGTCTCAC | 1.713 | — | — | — | — | — | — | — |

TABLE 4
List of longevity candidate genes from the regions identified from the genome wide and fine mapping
association analysis. The first column corresponds to the region identifier provided in Table 1.
The second and third columns correspond to the chromosome and cytogenetic band, respectively.
The fourth and fifth columns corresponds to the chromosomal start coordinates of the NCBI genome
assembly derived from build 35 (B35) and the end coordinates (the start and end position relate to
the + orientation of the NCBI assembly and don't necessarily correspond to the orientation of the gene).
The sixth and seventh columns correspond to the official gene symbol and gene name, respectively, and were
obtained from the NCBI Entre2 Gene database. The eighth column corresponds to the NCBI
Entrez Gene Identifier (Gene ID). The ninth and tenth columns correspond to the
Sequence IDs from nucleotide (cDNA) and protein entries in the Sequence Listing.

| | | | Start | End | | | | | |
|---|---|---|---|---|---|---|---|---|---|
| | | | Position | position | | | Entrez | | |
| Region ID | Chromosome | Cytogenetic Band | B35 | B35 | Gene Symbol | Gene Name | Gene ID | Nucleotide Seq ID | Protein Seq ID |
| 1 | 1 | 1q25.2 | 172931977 | 172932623 | LOC391140 | similar to ribosomal protein L13 | 391140 | — | — |
| 1 | 1 | 1q23-q25 | 173163964 | 173543629 | PAPPA2 | pappalysin 2 | 60676 | 1, 3 | 2, 4 |
| 1 | 1 | 1q25.2 | 173561861 | 173865681 | ASTN | astrotactin | 460 | 5, 7 | 6, 8 |
| 2 | 1 | 1q42-q43 | 225713614 | 225747253 | RAB4A | RAB4A, member RAS oncogene | 5867 | 9 | 10 |
| | | | | | | family | | | |
| 2 | 1 | 1q42.11-q42.3 | 225747016 | 225747983 | SPHAR | S-phase response (cyclin- | 10638 | 11 | 12 |
| | | | | | | related) | | | |
| 2 | 1 | 1q42.13 | 225766950 | 225784999 | C1orf96 | chromosome 1 open rending | 126731 | 13 | 14 |
| | | | | | | frame 96 | | | |
| 2 | 1 | 1q42.13-q42.2 | 225873730 | 225876578 | ACTA1 | actin alpha 1, skeletal muscle | 58 | 15 | 16 |
| 2 | 1 | 1q42.13 | 225883779 | 225950823 | NUP133 | nucleoporin 133 kDa | 55746 | 17 | 18 |
| 2 | 1 | 1q42 | 225959065 | 226001177 | ABCB10 | ATP-binding cassette, sub-family | 23456 | 19 | 20 |
| | | | | | | B (MDR/TAP), member 10 | | | |
| 3 | 1 | 1q42.2 | 227084993 | 227136463 | COG2 | component of oligomeric golgi | 22796 | 21 | 22 |
| | | | | | | complex 2 | | | |
| 3 | 1 | 1q42-q43 | 227145020 | 227156602 | AGT | angiotensinogen (serpin | 183 | 23 | 24 |
| | | | | | | peptidase inhibitor, clade A, | | | |
| | | | | | | member 8) | | | |
| 3 | 1 | 1q42.11-q42.3 | 227189865 | 227244243 | CAPN9 | calpain 9 | 10753 | 25, 27 | 26, 28 |
| 3 | 1 | 1q42.13-q43 | 227279601 | 227311012 | C1orf198 | chromosome 1 open reading | 84886 | 29 | 30 |
| | | | | | | frame 198 | | | |
| 3 | 1 | 1q42.2 | 227348725 | 227421319 | TTC13 | tetratricopeptide repeat domain | 79573 | 31 | 32 |
| | | | | | | 13 | | | |
| 3 | 1 | 1q42.2 | 227421558 | 227443214 | ARV1 | ARV1 homolog (yeast) | 64801 | 33 | 34 |
| 3 | 1 | 1q42.2 | 227461670 | 227482720 | FAM89A | family with sequence similarity | 375061 | 35 | 36 |
| | | | | | | 89, member A | | | |
| 3 | 1 | 1q42.2 | 227483511 | 227605268 | LOC441924 | similar to peptidylprolyl | 441924 | — | — |
| | | | | | | isomerase A isoform 1 | | | |
| 4 | 1 | 1q41-q44 | 236396793 | 236398565 | CHRM3 | cholinergic receptor, muscarinic 3 | 1131 | 37 | 38 |
| 4 | 1 | 1q43 | 236460221 | 236463588 | LOC128136 | similar to Hydroxymethylglutaryl- | 128136 | — | — |
| | | | | | | CoA synthase, cytoplasmic | | | |
| | | | | | | (HMG-CoA synthase) (3-hydroxy- | | | |
| | | | | | | 3-methylglutaryl coenzyme A | | | |
| | | | | | | synthase) | | | |
| 4 | 1 | 1q43 | 236502010 | 236964518 | FMN2 | formin 2 | 56776 | 39 | 40 |
| 4 | 1 | 1q43 | 236631871 | 236634716 | LOC266783 | proteasome 26S non-ATPase | 266783 | — | — |
| | | | | | | subunit 2 pseudogene | | | |
| 5 | 2 | 2p24.1 | 20806446 | 20922853 | FLJ21820 | hypothetical protein FLJ21820 | 60526 | 41 | 42 |
| 5 | 2 | 2p24-p23 | 21135953 | 21178597 | APOB | apolipoprotein B (including Ag(x) | 338 | 43 | 44 |
| | | | | | | antigen) | | | |
| 6 | 2 | 2p16.3 | 50017421 | 50018157 | LOC130728 | similar to 60S ribosomal protein | 130728 | — | — |
| | | | | | | L7 | | | |
| 6 | 2 | 2p16.3 | 50059139 | 51167254 | NRXN1 | neurexin 1 | 9378 | 45, 47 | 46, 48 |
| 7 | 2 | 2p16.3 | 50059139 | 51167254 | NRXN1 | neurexin 1 | 9378 | 45, 47 | 46, 48 |
| 8 | 2 | 2q14 | 121694764 | 121759005 | TFCP2L1 | transcription factor CP2-like 1 | 29842 | 49 | 50 |
| 8 | 2 | 2q14.2-q14.3 | 121811585 | 122123282 | CLASP1 | cytoplasmic linker associated | 23332 | 51 | 52 |
| | | | | | | protein 1 | | | |
| 8 | 2 | 2q14.3 | 122182315 | 122186434 | LOC440902 | similar to Nucleophosmin (NPM) | 440902 | 53 | 54 |
| | | | | | | (Nucleolar phosphoprotein B23) | | | |
| | | | | | | (Numatrin) (Nucleolar protein | | | |
| | | | | | | NO38) | | | |
| 8 | 2 | 2q14.3 | 122200784 | 122210698 | MKI67IP | MKI67 (FHA domain) interacting | 84365 | 55 | 56 |
| | | | | | | nucleolar phosphoprotein | | | |
| 8 | 2 | 2q21.1 | 122229351 | 122241659 | TSN | translin | 7247 | 57 | 58 |
| 9 | 2 | 2q14 | 127521837 | 127581094 | BIN1 | bridging integrator 1 | 274 | 59, 61, 63, 65, 67, 69, 71, 73, | 60, 62, 64, 66, 68, 70, |
| | | | | | | | | 75, 77 | 72, 74, 76, 78 |
| 9 | 2 | 2q14.3 | 127657638 | 127700162 | FLJ16008 | FLJ16008 protein | 339761 | 79 | 80 |
| 9 | 2 | 2q21 | 127731096 | 127767982 | ERCC3 | excision repair cross- | 2071 | 81 | 82 |
| | | | | | | complementing rodent repair | | | |
| | | | | | | deficiency, complementation | | | |
| | | | | | | group 3 (xeroderma | | | |
| | | | | | | pigmentosum group B | | | |
| | | | | | | complementing) | | | |
| 9 | 2 | 2q14.3 | 127780008 | 127817035 | MAP3K2 | mitogen-activated protein kinase | 10746 | 83 | 84 |
| | | | | | | kinase kinase 2 | | | |
| 9 | 2 | 2q13-q14 | 127892247 | 127903048 | PROC | protein C (inactivator of | 5624 | 85 | 86 |
| | | | | | | coagulation factors Va and VIIIa) | | | |
| 9 | 2 | 2q14.3 | 127954620 | 128000274 | IWS1 | hypothetical protein LOC55677 | 55677 | 87 | 88 |
| 10 | 2 | 2q24.2 | 161990447 | 162093433 | PSMD14 | proteasome (prosome, | 10213 | 89 | 90 |
| | | | | | | macropain) 26S subunit, non- | | | |
| | | | | | | ATPase, 14 | | | |
| 10 | 2 | 2q24 | 162098127 | 162107080 | TBR1 | T-box, brain, 1 | 10716 | 91 | 92 |
| 10 | 2 | 2q24.2 | 162182642 | 162189817 | AHCTF1P | AT hook containing transcription | 285118 | — | — |
| | | | | | | factor 1 pseudogene | | | |
| 10 | 2 | 2q24.2 | 162262089 | 162263367 | LOC391458 | similar to keratin complex 1, | 391458 | — | — |
| | | | | | | acidic, gene 18 | | | |
| 10 | 2 | 2q23-q24 | 162306453 | 162665750 | SLC4A10 | solute carrier family 4, sodium | 57282 | 93 | 94 |
| | | | | | | bicarbonate transporter-like, | | | |
| | | | | | | member 10 | | | |
| 10 | 2 | 2q24.3 | 162674264 | 162756559 | DPP4 | dipeptidyl-peptidase 4 (CD26, | 1803 | 95 | 96 |
| | | | | | | adenosine deaminase | | | |
| | | | | | | complexing protein 2) | | | |
| 10 | 2 | 2q24.2 | 162759374 | 162759688 | DDPP | deafness dystonia pseudogene | 399520 | — | — |
| 10 | 2 | 2q36-q37 | 162824895 | 162834264 | GCG | glucagon | 2641 | 97 | 98 |
| 10 | 2 | 2q23 | 162852709 | 162925552 | FAP | fibroblast activation protein, | 2191 | 99 | 100 |
| | | | | | | alpha | | | |
| 10 | 2 | 2p24.3-q24.3 | 162949097 | 163000546 | IFIH1 | interferon induced with helicase | 64135 | 101 | 102 |
| | | | | | | C domain 1 | | | |
| 11 | 2 | 2q33 | 198773985 | 198838554 | PLCL1 | phospholipase C-like 1 | 5334 | 103 | 104 |
| 12 | 3 | 3p25.3 | 6789724 | 6790033 | MRPS36P1 | mitochondrial ribosomal protein | 347705 | — | — |
| | | | | | | S36 pseudogene 1 | | | |
| 12 | 3 | 3p26.1-p25.1 | 6877927 | 7758217 | GRM7 | glutamate receptor, metabotropic 7 | 2917 | 105, 107, 109 | 106, 108, 110 |
| 13 | 3 | 3p22.3 | 32701702 | 32790358 | CNOT10 | CCR4-NOT transcription | 25904 | 111 | 112 |
| | | | | | | complex, subunit 10 | | | |
| 13 | 3 | 3p22.3 | 32799068 | 32806379 | LOC389101 | similar to 60S ribosomal protein | 389101 | — | — |
| | | | | | | L23a | | | |
| 13 | 3 | 3p22.3 | 32832845 | 32833862 | UNQ6490 | similar to YPLR6490 | 389102 | 113 | — |
| 13 | 3 | 3p22.3 | 32834892 | 32908307 | LIN41 | abnormal cell LINeage LIN-41 | 131405 | 114 | 115 |
| 13 | 3 | 3p24 | 32968056 | 32971404 | CCR4 | chemokine (C-C motif) receptor 4 | 1233 | 116 | 117 |
| 13 | 3 | 3p21.33 | 33013236 | 33113635 | GLB1 | galactosidase, beta 1 | 2720 | 118 | 119 |
| 13 | 3 | 3p22.3 | 33130571 | 33160004 | CRTAP | cartilage associated protein | 10491 | 120 | 121 |
| 13 | 3 | 3p22.3 | 33166541 | 33246551 | SUSD5 | sushi domain containing 5 | 26032 | 122 | 123 |
| 13 | 3 | 3p22.3 | 33293938 | 33403129 | FBXL2 | F-box and leucine-rich repeat | 25827 | 124 | 125 |
| | | | | | | protein 2 | | | |
| 14 | 3 | 3p22.1 | 39826307 | 40276816 | MYRIP | myosin VIIA and Rab interacting | 25924 | 126 | 127 |
| | | | | | | protein | | | |
| 14 | 3 | 3p22.1 | 40326194 | 40328902 | EIF1B | eukaryotic translation initiation | 10289 | 128 | 129 |
| | | | | | | factor 1B | | | |
| 14 | 3 | 3p21.3 | 40403694 | 40445114 | ENTPD3 | ectonucleoside triphosphate | 956 | 130 | 131 |
| | | | | | | diphosphohydrolase 3 | | | |
| 14 | 3 | 3p22-p21.2 | 40473819 | 40478863 | RPL14 | ribosomal protein L14 | 9045 | 132, 134 | 133, 135 |
| 14 | 3 | 3p22.1 | 40493641 | 40504881 | ZNF619 | zinc finger protein 619 | 285267 | 136 | 137 |
| 14 | 3 | 3p22.1 | 40522487 | 40534204 | ZNF620 | zinc finger protein 620 | 253639 | 138 | 139 |
| 14 | 3 | 3p22.1 | 40541373 | 40550438 | ZNF621 | zinc finger protein 621 | 285268 | 140 | 141 |
| 14 | 3 | 3p22.1 | 40612702 | 40632425 | LOC442079 | similar to Elongation factor 1- | 442079 | — | — |
| | | | | | | gamma (EF-1-gamma) (eEF-1B | | | |
| | | | | | | gamma) | | | |
| 15 | 4 | 4q21.1 | 77007008 | 77092543 | VDP | vesicle docking protein p115 | 8615 | 142 | 143 |
| 15 | 4 | 4q21.1 | 77138207 | 77180860 | PPEF2 | protein phosphatase, EF-hand | 5470 | 144, 146, 148 | 145, 147, 149 |
| | | | | | | calcium binding domain 2 | | | |
| 15 | 4 | 4q21.1 | 77195804 | 77219333 | ASAHL | N-acylsphingosine | 27163 | 150 | 151 |
| | | | | | | amidohydrolase (acid | | | |
| | | | | | | ceramidase)-like | | | |
| 15 | 4 | 4q21.1 | 77228248 | 77260314 | SDAD1 | SDA1 domain containing 1 | 55153 | 152 | 153 |
| 15 | 4 | 4q21 | 77279802 | 77285820 | CXCL9 | chemokine (C—X—C motif) ligand 9 | 4283 | 154 | 155 |
| 15 | 4 | 4q21 | 77299452 | 77301829 | CXCL10 | chemokine (C—X—C motif) ligand | 3627 | 156 | 157 |
| | | | | | | 10 | | | |
| 15 | 4 | 4q21.2 | 77312021 | 77314412 | CXCL11 | chemokine (C—X—C motif) ligand | 6373 | 158 | 159 |
| | | | | | | 11 | | | |
| 15 | 4 | 4p15.1-p14\|4p15.1-p14\|4p15.1-p14 | 77353042 | 77391120 | ART3 | ADP-ribosyltransferase 3 | 419 | 160 | 161 |
| 15 | 4 | 4q21.1 | 77392997 | 77426834 | NUP54 | nucleoporin 54 kDa | 53371 | 162 | 163 |
| 15 | 4 | 4q21.1 | 77437073 | 77492214 | SCARB2 | scavenger receptor class B, | 950 | 164 | 165 |
| | | | | | | member 2 | | | |
| 16 | 4 | 4q24 | 100853159 | 100901804 | MTTP | microsomal triglyceride transfer | 4547 | 166 | 167 |
| | | | | | | protein | | | |
| 16 | 4 | 4q23 | 100914872 | 100933921 | LOC285556 | hypothetical protein LOC285556 | 285556 | 168 | 169 |
| 16 | 4 | 4q25-q27 | 101095168 | 101148489 | DAPP1 | dual adaptor of phosphotyrosine | 27071 | 170 | 171 |
| | | | | | | and 3-phosphoinositides | | | |
| 16 | 4 | 4q23 | 101159543 | 101172881 | MAP2K1IP1 | mitogen-activated protein kinase | 8649 | 172 | 173 |
| | | | | | | kinase 1 interacting protein 1 | | | |
| 16 | 4 | 4q23 | 101177747 | 101205426 | DNAJB14 | DnaJ (Hsp40) homolog, | 79982 | 174, 176 | 175, 177 |
| | | | | | | subfamily B, member 14 | | | |
| 16 | 4 | 4q24 | 101226421 | 101228611 | H2AFZ | H2A histone family, member Z | 3015 | 178 | 179 |
| 17 | 4 | 4q28.1 | 126595172 | 126600361 | LOC339951 | similar to Cadherin-related tumor | 339951 | 180 | 181 |
| | | | | | | suppressor precursor (Fat | | | |
| | | | | | | protein) | | | |
| 17 | 4 | 4q28.1 | 126672696 | 126770528 | FAT4 | FAT tumor suppressor homolog | 79633 | 182 | 183 |
| | | | | | | 4 (Drosophila) | | | |
| 18 | 4 | 4q31.21 | 143307499 | 143710137 | INPP4B | inositol polyphosphate-4- | 8821 | 184 | 185 |
| | | | | | | phosphatase, type II, 105 kDa | | | |
| 19 | 6 | 6p22.1 | 27208074 | 27208554 | HIST1H2BJ | histone 1, H2bj | 8970 | 186 | 187 |
| 19 | 6 | 6p22.1 | 27208800 | 27211050 | HIST1H2AG | histone 1, H2ag | 8969 | 188 | 189 |
| 19 | 6 | 6p21.33 | 27214052 | 27222598 | HIST1H2BK | histone 1, H2bk | 85236 | 190 | 191 |
| 19 | 6 | 6p21.33 | 27215067 | 27215436 | HIST1H4I | histone 1, H4i | 8294 | 192 | 193 |
| 19 | 6 | 6p21.33 | 27222887 | 27223373 | HIST1H2AH | histone 1, H2ah | 85235 | 194 | 195 |
| 19 | 6 | 6p22.1 | 27287002 | 27287670 | LOC442171 | similar to ribosomal protein L10 | 442171 | — | — |
| 19 | 6 | 6p21 | 27323487 | 27332229 | PRSS16 | protease, serine, 16 (thymus) | 10279 | 196 | 197 |
| 19 | 6 | 6p22.1 | 27343934 | 27344990 | LOC442172 | similar to cell division cycle | 442172 | — | — |
| | | | | | | associated 7 | | | |
| 19 | 6 | 6p22.1 | 27361661 | 27388776 | LOC441135 | similar to Nuclear envelope pore | 441135 | 198 | 199 |
| | | | | | | membrane protein POM 121 | | | |
| | | | | | | (Pore membrane protein of 121 kDa) | | | |
| | | | | | | (P145) | | | |
| 19 | 6 | 6p22.1 | 27400557 | 27401721 | FKSG83 | FKSG83 | 83954 | 200 | 201 |
| 19 | 6 | 6p21.3 | 27433582 | 27447283 | ZNF204 | zinc finger protein 204 | 7754 | 202 | — |
| 20 | 6 | 6q25.1 | 152220800 | 152516520 | ESR1 | estrogen receptor 1 | 2099 | 203 | 204 |
| 20 | 6 | 6q25 | 152534937 | 153050648 | SYNE1 | spectrin repeat containing, | 23345 | 205, 207, 209, 211 | 206, 208, 210, 212 |
| | | | | | | nuclear envelope 1 | | | |
| 20 | 6 | 6q25 | 152959863 | 152960263 | NANOGP11 | NANOG homeobox pseudogene | 414135 | — | — |
| | | | | | | 11 | | | |
| 20 | 6 | 6q25.2 | 153111152 | 153136877 | MYCT1 | myc target 1 | 80177 | 213 | 214 |
| 20 | 6 | 6q25 | 153164047 | 153173014 | VIP | vasoactive intestinal peptide | 7432 | 215, 217 | 216, 218 |
| 21 | 7 | 7p15.1 | 30370952 | 30385944 | LOC401320 | hypothetical LOC401320 | 401320 | 219 | 220 |
| 21 | 7 | 7p15 | 30407421 | 30446884 | GARS | glycyl-tRNA synthetase | 2617 | 221 | 222 |
| 21 | 7 | 7p15.1 | 30465440 | 30495136 | CRHR2 | corticotropin releasing hormone | 1395 | 223 | 224 |
| | | | | | | receptor 2 | | | |
| 21 | 7 | 7p15.3-p15.2 | 30564991 | 30570462 | INMT | indolethylamino N- | 11185 | 225 | 226 |
| | | | | | | methyltransferase | | | |
| 21 | 7 | 7p15.1 | 30584280 | 30705242 | FLJ22374 | hypothetical protein FLJ22374 | 84182 | 227 | 228 |
| 21 | 7 | 7p14 | 30724708 | 30738371 | AQP1 | aquaporin 1 (Colton blood group) | 358 | 229 | 230 |
| 21 | 7 | 7p14 | 30776876 | 30792383 | GHRHR | growth hormone releasing | 2692 | 231, 233 | 232, 234 |
| | | | | | | hormone receptor | | | |
| 21 | 7 | 7p14 | 30865382 | 30919551 | ADCYAP1R1 | adenylate cyclase activating | 117 | 235 | 236 |
| | | | | | | polypeptide 1 (pituitary) receptor | | | |
| | | | | | | type I | | | |
| 22 | 7 | 7p14.3 | 32681024 | 32704612 | KBTBD2 | Kelch repeat and BTB (POZ) | 25948 | 237 | 238 |
| | | | | | | domain containing 2 | | | |
| 22 | 7 | 7p14.3 | 32730196 | 32755873 | LOC441212 | PNAS-13 | 441212 | 239 | 240 |
| 22 | 7 | 7p11.1 | 32770292 | 32819782 | FKBP9 | FK506 binding protein 9, 63 kDa | 11328 | 241 | 242 |
| 22 | 7 | 7p14.3 | 32826991 | 32853758 | NT5C3 | 5-nucleotidase, cytosolic III | 51251 | 243, 245, 247 | 244, 246, 248 |
| 22 | 7 | 7p14.3 | 32907652 | 32922242 | RP9 | retinitis pigmentosa 9 (autosomal | 6100 | 249 | 250 |
| | | | | | | dominant) | | | |
| 22 | 7 | 7p14 | 32942414 | 33418920 | PTHB1 | parathyroid hormone-responsive | 27241 | 251, 253, 255, 257 | 252, 254, 256, 258 |
| | | | | | | B1 | | | |
| 23 | 7 | 7q31.3 | 126886185 | 127326610 | SND1 | staphylococcal nuclease domain | 27044 | 259 | 260 |
| | | | | | | containing 1 | | | |
| 23 | 7 | 7q31.3 | 127261077 | 127264953 | LRRC4 | leucine rich repeat containing 4 | 64101 | 261 | 262 |
| 23 | 7 | 7q31.3 | 127485995 | 127491632 | LEP | leptin (obesity homolog, mouse) | 3952 | 263 | 264 |
| 23 | 7 | 7q32.1 | 127544388 | 127577913 | RBM28 | RNA binding motif protein 28 | 55131 | 265 | 266 |
| 23 | 7 | 7q32.1 | 127584861 | 127595686 | LOC401399 | hypothetical gene supported by | 401399 | 267, 269 | 268, 270 |
| | | | | | | BC063892 | | | |
| 23 | 7 | 7q31.3-q32 | 127626283 | 127644257 | IMPDH1 | IMP (inosine monophosphate) | 3614 | 271, 273 | 272, 274 |
| | | | | | | dehydrogenase 1 | | | |
| 23 | 7 | 7q32.1 | 127689896 | 127692421 | HIG2 | hypoxia-inducible protein 2 | 29923 | 275 | 276 |
| 23 | 7 | 7q32.1 | 127710769 | 127736536 | METTL2B | methyltransferase like 2B | 55798 | 277 | 278 |
| 24 | 7 | 7q35-q36 | 145251477 | 147555734 | CNTNAP2 | contactin associated protein-like 2 | 26047 | 279 | 280 |
| 24 | 7 | 7q36.1 | 147569287 | 147580921 | LOC392145 | similar to Mtr3 (mRNA transport | 392145 | 281 | 282 |
| | | | | | | regulator 3)-homolog | | | |
| 24 | 7 | 7q36.1 | 147725305 | 147750600 | C7orf33 | chromosome 7 open reading | 202865 | 283 | 284 |
| | | | | | | frame 33 | | | |
| 25 | 7 | 7q31-q35 | 149458253 | 149472887 | LRRC61 | leucine rich repeat containing 61 | 65999 | 285 | 286 |
| 25 | 7 | 7q36.1 | 149465049 | 149467458 | C7orf29 | chromosome 7 open reading | 113763 | 287 | 288 |
| | | | | | | frame 29 | | | |
| 25 | 7 | 7q36.1 | 149473067 | 149476354 | RARRES2 | retinoic acid receptor responder | 5919 | 289 | 290 |
| | | | | | | (tazarotene induced) 2 | | | |
| 25 | 7 | 7q36.1 | 149505509 | 149508776 | REPIN1 | replication initiator 1 | 29803 | 291, 293 | 292, 294 |
| 25 | 7 | 7q36.1 | 149514098 | 149533366 | MGC33584 | hypothetical protein MGC33584 | 285971 | 295 | 296 |
| 25 | 7 | 7q36.1 | 149585772 | 149614129 | GIMAP8 | GTPase, IMAP family member 8 | 155038 | 297 | 298 |
| 25 | 7 | 7q36.1 | 149649611 | 149655809 | GIMAP7 | GTPase, IMAP family member 7 | 168537 | 209 | 300 |
| 25 | 7 | 7q36 | 149676368 | 149676891 | ATQL3 | antiquitin-like 3 | 543 | — | — |
| 25 | 7 | 7q36.1 | 149702106 | 149708689 | GIMAP4 | GTPase, IMAP family member 4 | 55303 | 301 | 302 |
| 25 | 7 | 7q36.1 | 149820442 | 149828373 | GIMAP2 | GTPase, IMAP family member 2 | 26157 | 303 | 304 |
| 25 | 7 | 7q36.1 | 149851346 | 149855901 | GIMAP1 | GTPase, IMAP family member 1 | 170575 | 305 | 306 |
| 25 | 7 | 7q36.1 | 149872148 | 149878384 | GIMAP5 | GTPase, IMAP family member 5 | 55340 | 307 | 308 |
| 25 | 7 | 7q36.1 | 149926038 | 149936011 | LR8 | LR8 protein | 28959 | 309 | 310 |
| 25 | 7 | 7q36.1 | 149935502 | 149939856 | HCA112 | hepatocellular carcinoma- | 55365 | 311 | 312 |
| | | | | | | associated antigen 112 | | | |
| 26 | 7 | 7q35-q36 | 150079698 | 150112662 | KCNH2 | potassium voltage-gated | 3757 | 313, 315, 317 | 314, 316, 318 |
| | | | | | | channel, subfamily H (eag- | | | |
| | | | | | | related), member 2 | | | |
| 26 | 7 | 7q36 | 150125796 | 150149324 | NOS3 | nitric oxide synthase 3 | 4846 | 319 | 320 |
| | | | | | | (endothelial cell) | | | |
| 26 | 7 | 7q36 | 150163185 | 150180300 | ABCB8 | ATP-binding cassette, sub-family | 11194 | 321 | 322 |
| | | | | | | B (MDR/TAP), member 8 | | | |
| 26 | 7 | 7q35 | 150183600 | 150187489 | ACCN3 | amiloride-sensitive cation | 9311 | 323, 325, 327 | 324, 326, 328 |
| | | | | | | channel 3 | | | |
| 26 | 7 | 7q36 | 150188547 | 150192644 | CDK5 | cyclin-dependent kinase 5 | 1020 | 329 | 330 |
| 26 | 7 | 7q35-q36 | 150194387 | 150211258 | SLC4A2 | solute carrier family 4, anion | 6522 | 331 | 332 |
| | | | | | | exchanger, member 2 | | | |
| | | | | | | (erythrocyte membrane protein | | | |
| | | | | | | band 3-like 1) | | | |
| 26 | 7 | 7q35 | 150211356 | 150215599 | FASTK | Fas-activated serine/threonine | 10922 | 333, 335 | 334, 336 |
| | | | | | | kinase | | | |
| 26 | 7 | 7q36.1 | 150215821 | 150217736 | C7orf21 | chromosome 7 open reading | 83590 | 337 | 338 |
| | | | | | | frame 21 | | | |
| 26 | 7 | 7q36.1 | 150221474 | 150279171 | CENTG3 | centaurin, gamma 3 | 116988 | 339 | 340 |
| 26 | 7 | 7q36.1 | 150310433 | 150322126 | ASB10 | ankyrin repeat and SOCS box- | 136371 | 341 | 342 |
| | | | | | | containing 10 | | | |
| 26 | 7 | 7q36.1 | 150325611 | 150340230 | LOC346545 | similar to IQ motif containing with | 346545 | 343 | 344 |
| | | | | | | AAA domain | | | |
| 26 | 7 | 7q36 | 150342571 | 150361965 | ABCF2 | ATP-binding cassette, sub-family | 10061 | 345, 347 | 346, 348 |
| | | | | | | F (GCN20), member 2 | | | |
| 26 | 7 | 7q36.1 | 150367223 | 150373553 | CSGlcA-T | chondroitin sulfate | 54480 | 349 | 350 |
| | | | | | | glucuronyltransferase | | | |
| 26 | 7 | 7q35-q36 | 150373707 | 150409988 | SMARCD3 | SWI/SNF related, matrix | 6604 | 351, 353, 355 | 352, 354, 356 |
| | | | | | | associated, actin dependent | | | |
| | | | | | | regulator of chromatin, subfamily | | | |
| | | | | | | d, member 3 | | | |
| 26 | 7 | 7q36 | 150476506 | 150513183 | NYREN18 | NEDD8 ultimate buster-1 | 51667 | 357 | 358 |
| 26 | 7 | 7q36.1 | 150515862 | 150545388 | LOC349136 | hypothetical protein LOC349136 | 349136 | 359 | 360 |
| 27 | 7 | 7q36.3 | 156629186 | 156709609 | DNAJB6 | DnaJ (Hsp40) homolog, | 10049 | 361, 363 | 362, 364 |
| | | | | | | subfamily B, member 6 | | | |
| 27 | 7 | 7q36 | 156831231 | 157879894 | PTPRN2 | protein tyrosine phosphatase, | 5799 | 365, 367, 369 | 366, 368, 370 |
| | | | | | | receptor type, N polypeptide 2 | | | |
| 27 | 7 | 7q36.3 | 157912773 | 157915710 | LOC285872 | THAP5 pseudogene | 285872 | — | — |
| 27 | 7 | 7q36.3 | 157936457 | 157996965 | LUZP5 | leucine zipper protein 5 | 54892 | 371 | 372 |
| 27 | 7 | 7q36.3 | 158023165 | 158121795 | FAM62B | family with sequence similarity 62 | 57488 | 373 | 374 |
| | | | | | | (C2 domain containing) member B | | | |
| 28 | 9 | 9p21.2 | 26831252 | 26882800 | C9orf82 | chromosome 9 open reading | 79886 | 375 | 376 |
| | | | | | | frame 82 | | | |
| 28 | 9 | 9p21 | 26894518 | 26925207 | PLAA | phospholipase A2-activating | 9373 | 377, 379 | 378, 380 |
| | | | | | | protein | | | |
| 28 | 9 | 9p21.2 | 26946410 | 27052802 | IFT74 | intraflagellar transport 74 | 80173 | 381 | 382 |
| | | | | | | homolog (Chlamydomonas) | | | |
| 28 | 9 | 9p21.2 | 26983588 | 26995670 | LRRC19 | leucine rich repeat containing 19 | 64922 | 383 | 384 |
| 28 | 9 | 9p21 | 27099441 | 27220165 | TEK | TEK tyrosine kinase, endothelial | 7010 | 385 | 386 |
| | | | | | | (venous malformations, multiple | | | |
| | | | | | | cutaneous and mucosal) | | | |
| 28 | 9 | 9p21 | 27235682 | 27272791 | C9orf14 | chromosome 9 open reading | 158035 | 387 | 388 |
| | | | | | | frame 14 | | | |
| 28 | 9 | 9p21 | 27274667 | 27287137 | C9orf11 | chromosome 9 open reading | 54586 | 389 | 390 |
| | | | | | | frame 11 | | | |
| 29 | 9 | 9q21.11 | 70103452 | 70196890 | SMC5L1 | SMC5 structural maintenance of | 23137 | 391 | 392 |
| | | | | | | chromosomes 5-like 1 (yeast) | | | |
| 29 | 9 | 9q13 | 70229379 | 70259094 | KLF9 | Kruppel-like factor 9 | 687 | 393 | 394 |
| 29 | 9 | 9q21.11-q21.12 | 70380423 | 70713500 | TRPM3 | transient receptor potential cation | 80036 | 395, 397, 399, 401, 403, 405, | 396, 398, 400, 402, 404, |
| | | | | | | channel, subfamily M, member 3 | | 407, 409, 411 | 406, 408, 410, 412 |
| 30 | 9 | 9q22.31 | 93288338 | 93295429 | C9orf10OS | chromosome 9 open reading | 158293 | 413 | 414 |
| | | | | | | frame 10 opposite strand | | | |
| 30 | 9 | 9q22.31 | 93293728 | 93407949 | C9orf10 | chromosome 9 open reading | 23196 | 415 | 416 |
| | | | | | | frame 10 | | | |
| 30 | 9 | 9q22.31 | 93418585 | 93521421 | PHF2 | PHD finger protein 2 | 5253 | 417, 419 | 418, 420 |
| 31 | 9 | 9q31.3-q32 | 110510694 | 110642833 | MUSK | muscle, skeletal, receptor | 4593 | 421 | 422 |
| | | | | | | tyrosine kinase | | | |
| 31 | 9 | 9q31.3 | 110715611 | 110879920 | EDG2 | endothelial differentiation, | 1902 | 423, 425 | 424, 426 |
| | | | | | | lysophosphatidic acid G-protein- | | | |
| | | | | | | coupled receptor, 2 | | | |
| 32 | 10 | 10p12.33-p12.32 | 19432550 | 20145269 | C10orf112 | chromosome 10 open reading | 340895 | 427 | 428 |
| | | | | | | frame 112 | | | |
| 32 | 10 | 10p12.32-p12.31 | 20145378 | 20609121 | PLXDC2 | plexin domain containing 2 | 84898 | 429 | 430 |
| 33 | 10 | 10q24.2 | 99905840 | 99994644 | C10orf28 | chromosome 10 open reading | 27291 | 431 | 432 |
| | | | | | | frame 28 | | | |
| 33 | 10 | 10q24 | 99997440 | 100017997 | LOXL4 | lysyl oxidase-like 4 | 84171 | 433 | 434 |
| 33 | 10 | 10q24.2 | 100133314 | 100164931 | C10orf33 | chromosome 10 open reading | 84795 | 435 | 436 |
| | | | | | | frame 33 | | | |
| 33 | 10 | 10q23.1-q23.3 | 100165646 | 100196694 | HPS1 | Hermansky-Pudlak syndrome 1 | 3257 | 437, 439, 441, 443 | 438, 440, 442, 444 |
| 33 | 10 | 10q23-q24 | 100208865 | 100985609 | HPSE2 | heparanase-2 | 60495 | 445 | 446 |
| 33 | 10 | 10q24.2 | 101080023 | 101144077 | CNNM1 | cyclin M1 | 26507 | 447 | 448 |
| 33 | 10 | 10q24.1-q25.1 | 101146618 | 101180336 | GOT1 | glutamic-oxaloacetic | 2805 | 449 | 450 |
| | | | | | | transaminase 1, soluble | | | |
| | | | | | | (aspartate aminotransferase 1) | | | |
| 34 | 11 | 11p15.3 | 11820141 | 11934691 | USP47 | ubiquitin specific peptidase 47 | 55031 | 451 | 452 |
| 34 | 11 | 11p15.2 | 11941229 | 11987493 | DKK3 | dickkopf homolog 3 (Xenopus | 27122 | 453, 455, 457 | 454, 456, 458 |
| | | | | | | laevis) | | | |
| 34 | 11 | 11p15.3 | 12088714 | 12241908 | MICAL2 | microtubule associated | 9645 | 459 | 460 |
| | | | | | | monoxygenase, calponin and | | | |
| | | | | | | LIM domain containing 2 | | | |
| 35 | 11 | 11p15.1 | 19691488 | 20009720 | NAV2 | neuron navigator 2 | 89797 | 461, 463 | 462, 464 |
| 35 | 11 | 11p15.1 | 20134336 | 20138446 | DBX1 | developing brain homeobox 1 | 120237 | 465 | 466 |
| 36 | 11 | 11q21 | 95141766 | 95162429 | FAM76B | family with sequence similarity | 143684 | 467 | 468 |
| | | | | | | 76, member B | | | |
| 36 | 11 | 11q21 | 95163290 | 95204359 | CEP57 | centrosomal protein 57 kDa | 9702 | 469 | 470 |
| 36 | 11 | 11q22 | 95205694 | 95296920 | MTMR2 | myotubularin related protein 2 | 8898 | 471, 473, 475 | 472, 474, 476 |
| 36 | 11 | 11q21 | 95351088 | 95715992 | MAML2 | mastermind-like 2 (Drosophila) | 84441 | 477 | 478 |
| 36 | 11 | 11q21 | 95725590 | 95762709 | CCDC82 | hypothetical protein FLJ23518 | 79780 | 479 | 480 |
| 36 | 11 | 11q21 | 95763462 | 95766375 | JRKL | jerky homolog-like (mouse) | 8690 | 481 | 482 |
| 37 | 12 | 12q13.1 | 56114810 | 56130876 | INHBC | inhibin, beta C | 3626 | 483 | 484 |
| 37 | 12 | 12q13.3 | 56135363 | 56138058 | INHBE | inhibin, beta E | 83729 | 485 | 486 |
| 37 | 12 | 12q13.2-q13.3 | 56140201 | 56152312 | GLI1 | glioma-associated oncogene | 2735 | 487 | 488 |
| | | | | | | homolog 1 (zinc finger protein) | | | |
| 37 | 12 | 12q14 | 56152314 | 56168864 | ARHGAP9 | Rho GTPase activating protein 9 | 64333 | 489 | 490 |
| 37 | 12 | 12q13.2 | 56168118 | 56196700 | MARS | methionine-tRNA synthetase | 4141 | 491 | 492 |
| 37 | 12 | 12q13.1-q13.2 | 56196643 | 56200567 | DDIT3 | DNA-damage-inducible transcript 3 | 1649 | 493 | 464 |
| 37 | 12 | 12q13.1-q13.2 | 56202926 | 56210198 | MBD6 | methyl-CpG binding domain | 114785 | 495 | 496 |
| | | | | | | protein 6 | | | |
| 37 | 12 | 12q13.2-q13.3 | 56210361 | 56227245 | DCTN2 | dynactin 2 (p50) | 10540 | 497 | 498 |
| 37 | 12 | 12q13.13 | 56230114 | 56264821 | KIF5A | kinesin family member 5A | 3798 | 499 | 500 |
| 37 | 12 | 12q13.3 | 56271324 | 56283298 | PIP5K2C | phosphatidylinositol-4-phosphate | 79837 | 501 | 502 |
| | | | | | | 5-kinase, type II, gamma | | | |
| 37 | 12 | 12q13.3 | 56284871 | 56289850 | DTX3 | deltex 3 homolog (Drosophila) | 196403 | 503 | 504 |
| 37 | 12 | 12q13.3 | 56291485 | 56297293 | GEFT | RAC/CDC42 exchange factor | 115557 | 505, 507 | 506, 508 |
| 37 | 12 | 12q13 | 56301135 | 56306201 | SLC26A10 | solute carrier family 26, member | 65012 | 509, 511 | 510, 512 |
| | | | | | | 10 | | | |
| 37 | 12 | 12q13.3 | 56305945 | 56313251 | B4GALNT1 | beta-1,4-N-acetyl-galactosaminyl | 2583 | 513 | 514 |
| | | | | | | transferase 1 | | | |
| 37 | 12 | 12q14.1 | 56312918 | 56355300 | LOC441641 | similar to ribosomal protein L13A | 441641 | — | — |
| 37 | 12 | 12q13 | 56374187 | 56401606 | OS9 | amplified in osteosarcoma | 10956 | 515, 517, 519, 521 | 516, 518, 520, 522 |
| 37 | 12 | 12q14.1 | 56405261 | 56422207 | CENTG1 | centaurin, gamma 1 | 116986 | 523 | 524 |
| 37 | 12 | 12q13.3 | 56425051 | 56428293 | TSPAN31 | tetraspanin 31 | 6302 | 525 | 526 |
| 37 | 12 | 12q14 | 56428270 | 56432431 | CDK4 | cyclin-dependent kinase 4 | 1019 | 527 | 528 |
| 37 | 12 | 12q14.1 | 56435167 | 56439466 | MARCH9 | membrane-associated ring finger | 92979 | 529 | 530 |
| | | | | | | (C3HC4) 9 | | | |
| 37 | 12 | 12q13.1-q13.3 | 56442386 | 56447151 | CYP27B1 | cytochrome P450, family 27, | 1594 | 531 | 532 |
| | | | | | | subfamily B, polypeptide 1 | | | |
| 37 | 12 | 12q13 | 56448523 | 56452522 | METTL1 | methyltransferase like 1 | 4234 | 533, 535, 537 | 534, 536, 538 |
| 37 | 12 | 12q14.1 | 56452650 | 56462591 | DKFZP586D0919 | hepatocellularcarcinoma- | 25895 | 539, 541 | 540, 542 |
| | | | | | | associated antigen HCA557a | | | |
| 37 | 12 | 12q13-q14 | 56462826 | 56476784 | TSFM | Ts translation elongation factor, | 10102 | 543 | 544 |
| | | | | | | mitochondrial | | | |
| 37 | 12 | 12q14.1 | 56477710 | 56496119 | AVIL | advillin | 10677 | 545 | 546 |
| 37 | 12 | 12q13-q15 | 56499977 | 56526789 | CTDSP2 | CTD (carboxy-terminal domain, | 10106 | 547 | 548 |
| | | | | | | RNA polymerase II, polypeptide | | | |
| | | | | | | A) small phosphatase 2 | | | |
| 37 | 12 | 12q14.1 | 56621711 | 56637319 | XRCC6BP1 | XRCC6 binding protein 1 | 91419 | 549 | 550 |
| 38 | 12 | 12q21.31 | 81254792 | 81375413 | C12orf26 | chromosome 12 open reading | 84190 | 551 | 552 |
| | | | | | | frame 26 | | | |
| 38 | 12 | 12q21.31 | 81583402 | 82030533 | TMTC2 | transmembrane and | 160335 | 553 | 554 |
| | | | | | | tetratricopeptide repeat | | | |
| | | | | | | containing 2 | | | |
| 38 | 12 | 12q21.31 | 82047578 | 82048437 | LOC401725 | similar to 60S ribosomal protein | 401725 | — | — |
| | | | | | | L6 (TAX-responsive enhancer | | | |
| | | | | | | element binding protein 107) | | | |
| | | | | | | (TAXREB107) (Neoplasm-related | | | |
| | | | | | | protein C140) | | | |
| 39 | 14 | 14q22.1 | 49620119 | 49629111 | LOC196913 | hypothetical protein LOC196913 | 196913 | 555 | 556 |
| 39 | 14 | 14q22.1 | 49645106 | 49653047 | C14orf138 | chromosome 14 open reading | 79609 | 557 | 558 |
| | | | | | | frame 138 | | | |
| 39 | 14 | 14q21 | 49654812 | 49767751 | SOS2 | son of sevenless homolog 2 | 6655 | 559 | 560 |
| | | | | | | (Drosophila) | | | |
| 39 | 14 | 14q22.1 | 49782933 | 49848697 | L2HGDH | L-2-hydroxyglutarate | 79944 | 561 | 562 |
| | | | | | | dehydrogenase | | | |
| 39 | 14 | 14q22.1 | 49848852 | 49859363 | ATP5S | ATP synthase, H+ transporting, | 27109 | 563, 565, 567 | 564, 566, 568 |
| | | | | | | mitochondrial F0 complex, | | | |
| | | | | | | subunit s (factor B) | | | |
| 39 | 14 | 14q22.1 | 49866470 | 49932367 | CDKL1 | cyclin-dependent kinase-like 1 | 8814 | 569 | 570 |
| | | | | | | (CDC2-related kinase) | | | |
| 39 | 14 | 14q11.2-q21 | 49954993 | 50069126 | MAP4K5 | mitogen-activated protein kinase | 11183 | 571, 573 | 572, 574 |
| | | | | | | kinase kinase kinane 5 | | | |
| 39 | 14 | 14q22.1 | 50096514 | 50169536 | SPG3A | spastic paraplegia 3A (autosomal | 51062 | 575, 577 | 576, 578 |
| | | | | | | dominant) | | | |
| 39 | 14 | 14q22.1 | 50108247 | 50108634 | SNRPGP | small nuclear ribonucleoprotein | 326272 | — | — |
| | | | | | | polypeptide G pseudogene | | | |
| 39 | 14 | 14q13-q23 | 50170110 | 50204773 | SAV1 | salvador homolog 1 (Drosophila) | 60485 | 579 | 580 |
| 40 | 14 | 14q31.1 | 80358603 | 80359699 | HMGN2P2 | high-mobility group nucleosomal | 317726 | — | — |
| | | | | | | binding domain 2 pseudogene 2 | | | |
| 40 | 14 | 14q31 | 80491679 | 80680525 | TSHR | thyroid stimulating hormone | 7253 | 581, 583 | 582, 584 |
| | | | | | | receptor | | | |
| 40 | 14 | 14q31.1 | 80537231 | 80537914 | RPL17P3 | ribosomal protein L17 | 326286 | — | — |
| | | | | | | pseudogene 3 | | | |
| 40 | 14 | 14q31.1 | 80568571 | 80569637 | NMNATP | nicotinamide nucleotide | 326607 | — | — |
| | | | | | | adenylyltransferase pseudogene | | | |
| 40 | 14 | 14q31.1 | 80716147 | 80757328 | GTF2A1 | general transcription factor IIA, 1, | 2957 | 585, 587 | 586, 588 |
| | | | | | | 19/37 kDa | | | |
| 40 | 14 | 14q31.1 | 80782113 | 80782751 | LOC246720 | dynein, cytoplasmic, light | 246720 | — | — |
| | | | | | | polypeptide pseudogene | | | |
| 40 | 14 | 14q31.1 | 80794017 | 80796268 | UNGP3 | uracil-DNA glycosylase | 319122 | — | — |
| | | | | | | pseudogene 3 | | | |
| 40 | 14 | 14q31.1 | 80806662 | 80934680 | STON2 | stonin 2 | 85439 | 589 | 590 |
| 40 | 14 | 14q31.1 | 80868934 | 80869490 | RPS24P3 | ribosomal protein S24 | 326322 | — | — |
| | | | | | | pseudogene 3 | | | |
| 41 | 16 | 16q12.1 | 46674385 | 46738182 | ABCC12 | ATP-binding cassette, sub-family | 94160 | 591 | 592 |
| | | | | | | C (CFTR/MRP), member 12 | | | |
| 41 | 16 | 16q12.1 | 46758323 | 46826589 | ABCC11 | ATP-binding cassette, sub-family | 85320 | 593, 595, 597 | 594, 596, 598 |
| | | | | | | C (CFTR/MRP), member 11 | | | |
| 41 | 16 | 16q12.1 | 46835712 | 46944908 | LONPL | peroxisomal LON protease like | 83752 | 599 | 600 |
| 41 | 16 | 16q12 | 46951950 | 46954901 | SIAH1 | seven in absentia homolog 1 | 6477 | 601, 603 | 602, 604 |
| | | | | | | (Drosophila) | | | |
| 42 | 16 | 16q23.1 | 73590416 | 73702393 | ZNRF1 | zinc and ring finger 1 | 84937 | 605 | 606 |
| 42 | 16 | 16q23.1 | 73703260 | 73708166 | LDHD | lactate dehydrogenase D | 197257 | 607, 609 | 608, 610 |
| 42 | 16 | 16q23.1 | 73739926 | 73763486 | ZFP1 | zinc finger protein 1 homolog | 162239 | 611 | 612 |
| | | | | | | (mouse) | | | |
| 42 | 16 | 16q23.1 | 73783375 | 73784646 | LOC441774 | similar to 40S ribosomal protein | 441774 | — | — |
| | | | | | | S4, Y isoform 1 | | | |
| 42 | 16 | 16q23.1 | 73795499 | 73798582 | CTRB2 | chymotrypsinogen B2 | 440387 | 613 | 614 |
| 42 | 16 | 16q23-q24.1 | 73810399 | 73816322 | CTRB1 | chymotrypsinogen B1 | 1504 | 615 | 616 |
| 42 | 16 | 16q22-q23 | 73820430 | 73843004 | BCAR1 | breast cancer anti-estrogen | 9564 | 617 | 618 |
| | | | | | | resistance 1 | | | |
| 42 | 16 | 16q22.2-q22.3 | 73885116 | 74024860 | CFDP1 | craniofacial development protein 1 | 10428 | 619 | 620 |
| 42 | 16 | 16q23.1 | 74038426 | 74056085 | LOC124491 | LOC124491 | 124491 | 621 | 622 |
| 42 | 16 | 16q22 | 74064526 | 74086428 | CHST6 | carbohydrate (N- | 4166 | 623 | 624 |
| | | | | | | acetylglucosamine 6-O) | | | |
| | | | | | | sulfotransferase 6 | | | |
| 43 | 16 | 16q23.1 | 76379984 | 76571505 | KIAA1576 | KIAA1576 protein | 57687 | 625 | 626 |
| 43 | 16 | 16q23 | 76613946 | 76622239 | CLEC3A | C-type lectin domain family 3, | 10143 | 627 | 628 |
| | | | | | | member A | | | |
| 43 | 16 | 16q23.1 | 76639896 | 76649857 | LOC342419 | similar to Keratin, type II | 342419 | — | — |
| | | | | | | cytoskeletal 8 (Cytokeratin-8) | | | |
| | | | | | | (CK-8) (Keraton-8) (K8) | | | |
| | | | | | | (Cytokeratin endo A) | | | |
| 43 | 16 | 16q23.3-q24.1 | 76691052 | 77804065 | WWOX | WW domain containing | 51741 | 629, 631, 633 | 630, 632, 634 |
| | | | | | | oxidoreductase | | | |
| 44 | 18 | 18q11.2 | 22665430 | 22672683 | LOC440489 | ubiquitin fusion degradation 1- | 440489 | — | — |
| | | | | | | like pseudogene | | | |
| 44 | 18 | 18q11.2-q12.1 | 22686008 | 22699699 | AQP4 | aquaporin 4 | 361 | 635, 637 | 636, 638 |
| 44 | 18 | 18q11.2 | 22699270 | 22769908 | C18orf16 | chromosome 18 open reading | 147429 | 639 | 640 |
| | | | | | | frame 16 | | | |
| 44 | 18 | 18q11.2 | 22749595 | 23019177 | CHST9 | carbohydrate (N- | 83539 | 641 | 642 |
| | | | | | | acetylgalactosamine 4-0) | | | |
| | | | | | | sulfotransferase 9 | | | |
| 44 | 18 | 18q11.2-q12.1 | 23170341 | 23429126 | FLJ45994 | hypothetical gene supported by | 400645 | 643 | 644 |
| | | | | | | AK127888 | | | |
| 45 | 18 | 18q22-q23 | 61568468 | 61699155 | CDH7 | cadherin 7, type 2 | 1005 | 645, 647 | 646, 648 |
| 46 | 22 | 22pter-q11.2\|22q11.1 | 16449479 | 16486089 | ATP6V1E1 | ATPase, H+ transporting, | 529 | 649, 651, 653 | 650, 652, 654 |
| | | | | | | lysosomal 31 kDa, V1 subunit E1 | | | |
| 46 | 22 | 22q11 | 16496039 | 16586545 | BCL2L13 | BCL2-like 13 (apoptosis | 23786 | 655 | 656 |
| | | | | | | facilitator) | | | |
| 46 | 22 | 22q11.1 | 16591460 | 16631812 | BID | BH3 interacting domain death | 637 | 657, 659, 661 | 658, 660, 662 |
| | | | | | | agonist | | | |
| 46 | 22 | 22q11.21 | 16697271 | 16764155 | MICAL3 | microtubule associated | 57553 | 663, 665, 667, 669, 671, 673 | 664, 666, 668, 670, 672, |
| | | | | | | monoxygenase, calponin and | | | 674 |
| | | | | | | LIM domain containing 3 | | | |
| 46 | 22 | 22q11.21 | 16935243 | 16948790 | PEX26 | peroxisome biogenesis factor 26 | 55670 | 675 | 676 |
| 46 | 22 | 22q11.1 | 16968113 | 16989052 | TUBA8 | tubulin, alpha 8 | 51807 | 677 | 678 |
| 47 | X | Xq13.3 | 80175345 | 80183261 | NSBP1 | nucleosomal binding protein 1 | 79366 | 679 | 680 |
| 47 | X | Xq13.3 | 80263767 | 80360191 | SH3BGRL | SH3 domain binding glutamic | 6451 | 681 | 682 |
| | | | | | | acid-rich protein like | | | |

TABLE 5
List of additional longevity candidate genes from the genome wide and fine mapping association analyses
derived from B36. In order to identify genes not placed in the regions from Table 1 according to Build 35,
the region coordinates were converted to Build 36 using the UCSC (University of California Santa Cruz) online
program LiftOver. Only new genes that were mapped to this version of the genome asembly are included in this table.
The first column corresponds to the region identifier provided in Table 1. The second and third columns correspond
to the chromosome and cytogenetic band, respectively. The fourth and fifth columns correspond to the chromosomal
start and end coordinates of the NCBI genome assembly derived from build 36 (the start and end position relate
to the + orientation of the NCBI assembly and do not necessarily correspond to the orientation of the gene).
The sixth and seventh columns correspond to the official gene symbol and gene name, respectively, and were obtained
from the NCBI Entrez Gene database. The eighth colums corresponds to the NCBI Entrez Gene Identifier (Gene ID).
The ninth and tenth columns correspond to the Sequence IDs from nucleotide (cDNA) and protein entries in the
Sequence Listing.

| | | | Start | End | | | | | |
|---|---|---|---|---|---|---|---|---|---|
| | | Cytogenetic | Position | position | Gene | | Entrez | | |
| Region ID | Chromosome | Band | B36 | B36 | Symbol | Gene Name | Gene ID | Nucleotide Seq ID | Protein Seq ID |
| 2 | 1 | 1q42 | 227473294 | 227473969 | HRES1 | HTLV-1 related endogenous sequence | 3272 | 683 | 684 |
| 3 | 1 | 1q42.2 | 229223834 | 229226580 | LOC644006 | similar to RING finger protein 4 | 644006 | 685 | 686 |
| 4 | 1 | 1q43 | 238218704 | 238243181 | LOC645884 | similar to 40S ribosomal protein S7 (S8) | 645884 | — | — |
| 8 | 2 | 2q14.3 | 122156781 | 122160491 | LOC646151 | hypothetical protein LOC646151 | 646151 | — | — |
| 8 | 2 | 2q14.3 | 122264517 | 122270396 | LOC646179 | hypothetical protein LOC646179 | 646179 | 687, 689 | 688, 690 |
| 9 | 2 | 2q21.1 | 128033768 | 128111767 | MYO7B | myosin VIIB | 4648 | 691 | 692 |
| 12 | 3 | 3p26.1 | 7969498 | 8032988 | LOC643291 | hypothetical protein LOC643291 | 643291 | 693, 695 | 694, 696 |
| 13 | 3 | 3p22.3 | 33106918 | 33113296 | FLJ45032 | similar to F40B5.2b | 643853 | 697 | 698 |
| 14 | 3 | 3p22.1 | 40603030 | 40605031 | LOC645807 | similar to ribosomal protein L5 | 645807 | — | — |
| 15 | 4 | 4q21.1 | 77176927 | 77177241 | LOC643205 | similar to ribosomal protein L36 | 643205 | 699 | 700 |
| 15 | 4 | 4q21.1 | 77189641 | 77210116 | LOC643214 | hypothetical protein LOC643214 | 643214 | — | — |
| 16 | 4 | 4q23 | 101130917 | 101131660 | LOC644721 | similar to ribosomal protein L7-like 1 | 644721 | — | — |
| 17 | 4 | 4q28.1 | 126863872 | 126869392 | LOC645841 | hypothetical protein LOC645841 | 645841 | — | — |
| 19 | 6 | 6p22.1 | 27121856 | 27122077 | LOC645845 | hypothetical protein LOC645845 | 645845 | 701 | 702 |
| 19 | 6 | 6p22.1 | 27358487 | 27374104 | LOC645898 | similar to SET domain and mariner | 645898 | — | — |
| | | | | | | transposase fusion gene | | | |
| 22 | 7 | 7p14.3 | 33732124 | 33734587 | FLJ20712 | hypothetical protein FLJ20712 | 55025 | 703 | 704 |
| 23 | 7 | 7q32.1 | 127592525 | 127595886 | LOC646893 | hypothetical protein LOC646893 | 646893 | 705, 707 | 706, 708 |
| 23 | 7 | 7q32.1 | 127731406 | 127735094 | MGC27345 | hypothetical protein MGC27345 | 157247 | 709 | — |
| 24 | 7 | 7q36.1 | 147908426 | 147908824 | LOC402716 | similar to 60S ribosomal protein L32 | 402716 | 710 | 711 |
| 24 | 7 | 7q36.1 | 147965225 | 147965617 | tcag7.1239 | Rho guanine nucleotide exchange factor | 643438 | 712, 714 | 713, 715 |
| | | | | | | (GEF) 5 | | | |
| 25 | 7 | 7q36.1 | 149575240 | 149651741 | LOC653722 | similar to actin-related protein 3-beta | 653722 | 716, 718 | 717, 719 |
| 25 | 7 | 7q36.1 | 149941107 | 149942798 | LOC643852 | similar to transient receptor protein 6 | 643852 | — | — |
| 25 | 7 | 7q36.1 | 149953396 | 149960374 | GIMAP6 | GTPase, IMAP family member 6 | 474344 | 720, 722 | 721, 723 |
| 25 | 7 | 7q36.1 | 150074898 | 150075786 | GIMAP3P | GTPase, IMAP family member 3 | 474345 | — | — |
| | | | | | | pseudogene | | | |
| 26 | 7 | 7q36.1 | 150340233 | 150352519 | ATG9B | ATG9 autophagy related 9 homolog B | 285973 | 724 | 725 |
| | | | | | | (S. cerevisiae) | | | |
| 26 | 7 | 7q36.1 | 150476609 | 150495800 | LOC442747 | hypothetical LOC442747 | 442747 | — | — |
| 26 | 7 | 7q36.1 | 150518899 | 150523589 | LOC392843 | similar to IQ motif containing with AAA | 392843 | 726, 728 | 727, 729 |
| | | | | | | domain | | | |
| 27 | 7 | 7q36.3 | 156926773 | 156956238 | LOC393078 | similar to polycystic kidney disease 1 like 3 | 393078 | 730 | 731 |
| 27 | 7 | 7q36.3 | 157346084 | 157347702 | LOC642620 | hypothetical protein LOC642620 | 642620 | 732, 734 | 733, 735 |
| 27 | 7 | 7q36.3 | 158205200 | 158205622 | LOC645373 | similar 60S ribosomal protein L21 | 645373 | 736, 738 | 737, 739 |
| 31 | 9 | 9q32 | 112168283 | 112381975 | SVEP1 | sushi, von Willebrand factor type A, EGF | 79987 | 740, 742, 744, 746, 748, 750 | 741, 743, 745, 747, 749, 751 |
| | | | | | | and pentraxin domain containing 1 | | | |
| 31 | 9 | 9q31.3 | 112774287 | 112840804 | LOC644923 | hypothetical protein LOC644923 | 644923 | 752, 754 | 753, 755 |
| 34 | 11 | 11p15.1 | 11938953 | 11939310 | RIG | regulated in glioma | 10530 | 756 | 757 |
| 34 | 11 | 11p15.3 | 11939324 | 11939651 | LOC644887 | hypothetical protein LOC644887 | 644887 | 758 | 759 |
| 36 | 11 | 11q21 | 95311939 | 95336379 | LOC643259 | similar to Periphilin 1 (Gastric cancer | 643259 | — | — |
| | | | | | | antigen Ga50) | | | |
| 36 | 11 | 11q21 | 95627227 | 95630536 | LOC645238 | hypothetical protein LOC645238 | 645238 | 760, 762 | 761, 763 |
| 40 | 14 | 14q31.1 | 80032577 | 80475637 | C14orf145 | chromosome 14 open reading frame 145 | 145508 | 764 | 765 |
| 42 | 16 | 16q23.1 | 74086403 | 74105239 | LOC645799 | similar to carbohydrate (N- | 645799 | 766, 768 | 767, 769 |
| | | | | | | acetylglucosamine 6-O) sulfotransferase 5 | | | |
| 43 | 16 | 16q23.1 | 76946927 | 76947232 | LOC645947 | similar to LSM3 homolog, U6 small | 645947 | 770 | 771 |
| | | | | | | nuclear RNA associated | | | |
| 43 | 16 | 16q23.1 | 77416205 | 77417404 | LOC645957 | similar to 40S ribosomal protein S3 | 645957 | — | — |
| 45 | 18 | 18q22.1 | 61490076 | 61491640 | LOC643448 | hypothetical protein LOC643448 | 643448 | 772, 774 | 773, 775 |
| 46 | 22 | 22q11.21 | 16697107 | 16864261 | LOC642566 | similar to Protein MICAL-3 | 642566 | — | — |

TABLE 6
List of candidate genes based on EST clustering from the regions identified from the various Fine Mapping
analyses. The first column corresponds to the region identifier provided in Table 1. The second
column corresponds to the chromosome number. The third and fourth columns correspond to the chromosomal
start and end coordinates of the NCBI genome assemblies derived from build 35 (B35). The fifth
column corresponds to the ECGene Identifier, corresponding to the ECGene track of UCSC. These
ECGene entries were determined by their overlap with the regions from Table 1, based on the start
and end coordinates of both Region and ECGene identifiers. The sixth and seventh columns correspond
to the Sequence IDs from nucleotide and protein entries in the Sequence Listing.

| Region ID | Chromosome | Start Position Build35 | End Position Build35 | Name | Nucleotide Seq ID | Protein Seq ID |
|---|---|---|---|---|---|---|
| 1 | 1 | 172908440 | 172930123 | H1C20934.1 | 776 | 777 |
| 1 | 1 | 173163963 | 173256767 | H1C20945.1 | 778 | 779 |
| 1 | 1 | 173163963 | 173391998 | H1C20945.2 | 780 | 781 |
| 1 | 1 | 173163963 | 173543625 | H1C20945.3 | 782 | 783 |
| 1 | 1 | 173254289 | 173258062 | H1C20945.4 | 784 | 785 |
| 1 | 1 | 173544405 | 173546396 | H1C21012.1 | 786 | 787 |
| 1 | 1 | 173558095 | 173865681 | H1C21015.1 | 788 | 789 |
| 1 | 1 | 173561725 | 173882650 | H1C21015.2 | 790 | 791 |
| 1 | 1 | 173561856 | 173865681 | H1C21015.3 | 792 | 793 |
| 1 | 1 | 173561856 | 173882650 | H1C21015.4 | 794 | 795 |
| 1 | 1 | 173569636 | 173865681 | H1C21015.5 | 796 | 797 |
| 1 | 1 | 173676847 | 173733572 | H1C21015.6 | 798 | 799 |
| 2 | 1 | 225465254 | 225480756 | H1C26521.1 | 800 | 801 |
| 2 | 1 | 225535152 | 225562963 | H1C26524.1 | 802 | 803 |
| 2 | 1 | 225544148 | 225686077 | H1C26525.1 | 804 | 805 |
| 2 | 1 | 225665942 | 225670044 | H1C26533.1 | 806 | 807 |
| 2 | 1 | 225711293 | 225713506 | H1C26538.1 | 808 | 809 |
| 2 | 1 | 225713543 | 225746488 | H1C26539.1 | 810 | 811 |
| 2 | 1 | 225713543 | 225746889 | H1C26539.2 | 812 | 813 |
| 2 | 1 | 225713543 | 225747252 | H1C26539.3 | 814 | 815 |
| 2 | 1 | 225713543 | 225747986 | H1C26539.4 | 816 | 817 |
| 2 | 1 | 225713556 | 225731364 | H1C26539.5 | 818 | 819 |
| 2 | 1 | 225713613 | 225746889 | H1C26539.6 | 820 | 821 |
| 2 | 1 | 225713613 | 225747986 | H1C26539.7 | 822 | 823 |
| 2 | 1 | 225713791 | 225746488 | H1C26539.8 | 824 | 825 |
| 2 | 1 | 225714835 | 225716387 | H1C26540.1 | 826 | 827 |
| 2 | 1 | 225746082 | 225766672 | H1C26553.1 | 828 | 829 |
| 2 | 1 | 225747015 | 225747983 | H1C26554.1 | 830 | 831 |
| 2 | 1 | 225761884 | 225765554 | H1C26553.2 | 832 | 833 |
| 2 | 1 | 225763487 | 225765652 | H1C26557.1 | 834 | 835 |
| 2 | 1 | 225763487 | 225783115 | H1C26558.1 | 836 | 837 |
| 2 | 1 | 225763487 | 225785035 | H1C26558.2 | 838 | 839 |
| 2 | 1 | 225766021 | 225785776 | H1C26558.3 | 840 | 841 |
| 2 | 1 | 225766949 | 225785776 | H1C26558.4 | 842 | 843 |
| 2 | 1 | 225873726 | 225874322 | H1C26573.1 | 844 | 845 |
| 2 | 1 | 225873726 | 225874662 | H1C26574.1 | 846 | 847 |
| 2 | 1 | 225873726 | 225875353 | H1C26574.2 | 848 | 849 |
| 2 | 1 | 225873726 | 225875353 | H1C26574.3 | 850 | 851 |
| 2 | 1 | 225873726 | 225875364 | H1C26574.4 | 852 | 853 |
| 2 | 1 | 225873726 | 225876576 | H1C26574.5 | 854 | 855 |
| 2 | 1 | 225873726 | 225876576 | H1C26574.6 | 856 | 857 |
| 2 | 1 | 225873726 | 225876580 | H1C26574.7 | 858 | 859 |
| 2 | 1 | 225874360 | 225874800 | H1C26574.8 | 860 | 861 |
| 2 | 1 | 225874473 | 225874813 | H1C26574.9 | 862 | 863 |
| 2 | 1 | 225874473 | 225875364 | H1C26574.10 | 864 | 865 |
| 2 | 1 | 225874825 | 225876579 | H1C26574.11 | 866 | 867 |
| 2 | 1 | 225882231 | 225883497 | H1C26578.1 | 868 | 869 |
| 2 | 1 | 225882231 | 225893233 | H1C26579.1 | 870 | 871 |
| 2 | 1 | 225882231 | 225903212 | H1C26579.2 | 872 | 873 |
| 2 | 1 | 225882231 | 225950843 | H1C26579.3 | 874 | 875 |
| 2 | 1 | 225882231 | 225950843 | H1C26579.4 | 876 | 877 |
| 2 | 1 | 225883770 | 225893233 | H1C26579.5 | 878 | 879 |
| 2 | 1 | 225883770 | 225903212 | H1C26579.6 | 880 | 881 |
| 2 | 1 | 225883770 | 225950843 | H1C26579.7 | 882 | 883 |
| 2 | 1 | 225884183 | 225893233 | H1C26579.8 | 884 | 885 |
| 2 | 1 | 225884183 | 225903212 | H1C26579.9 | 886 | 887 |
| 2 | 1 | 225884222 | 225893233 | H1C26579.10 | 888 | 889 |
| 2 | 1 | 225884222 | 225903212 | H1C26579.11 | 890 | 891 |
| 2 | 1 | 225884222 | 225950843 | H1C26579.12 | 892 | 893 |
| 2 | 1 | 225891416 | 225893552 | H1C26579.13 | 894 | 895 |
| 2 | 1 | 225941635 | 225943988 | H1C26579.14 | 896 | 897 |
| 2 | 1 | 225950873 | 225956752 | H1C26595.1 | 898 | 899 |
| 2 | 1 | 225950965 | 225956746 | H1C26595.2 | 900 | 901 |
| 2 | 1 | 225958993 | 225961481 | H1C26596.1 | 902 | 903 |
| 2 | 1 | 225958993 | 226001177 | H1C26596.2 | 904 | 905 |
| 2 | 1 | 225959064 | 225961481 | H1C26596.3 | 906 | 907 |
| 2 | 1 | 225959064 | 226001177 | H1C26596.4 | 908 | 909 |
| 2 | 1 | 225959325 | 226001172 | H1C26596.5 | 910 | 911 |
| 2 | 1 | 225974765 | 225976334 | H1C26607.1 | 912 | — |
| 3 | 1 | 227084961 | 227103354 | H1C26754.1 | 913 | 914 |
| 3 | 1 | 227084961 | 227125890 | H1C26754.2 | 915 | 916 |
| 3 | 1 | 227084961 | 227136466 | H1C26754.3 | 917 | 918 |
| 3 | 1 | 227130468 | 227132744 | H1C26754.4 | 919 | 920 |
| 3 | 1 | 227132458 | 227134196 | H1C26754.5 | 921 | 922 |
| 3 | 1 | 227144623 | 227156778 | H1C26767.1 | 923 | 924 |
| 3 | 1 | 227145007 | 227153336 | H1C26768.1 | 925 | 926 |
| 3 | 1 | 227145008 | 227156778 | H1C26767.2 | 927 | 928 |
| 3 | 1 | 227145210 | 227145757 | H1C26768.2 | 929 | 930 |
| 3 | 1 | 227145210 | 227153336 | H1C26768.3 | 931 | 932 |
| 3 | 1 | 227145210 | 227156778 | H1C26767.3 | 933 | 934 |
| 3 | 1 | 227189864 | 227244253 | H1C26778.1 | 935 | 936 |
| 3 | 1 | 227189874 | 227244590 | H1C26778.2 | 937 | 938 |
| 3 | 1 | 227189912 | 227244253 | H1C26778.3 | 939 | 940 |
| 3 | 1 | 227218611 | 227237974 | H1C26767.4 | 941 | 942 |
| 3 | 1 | 227266124 | 227267188 | H1C26784.1 | 943 | 944 |
| 3 | 1 | 227279599 | 227280863 | H1C26787.1 | 945 | 946 |
| 3 | 1 | 227279599 | 227311207 | H1C26789.1 | 947 | 948 |
| 3 | 1 | 227279599 | 227312066 | H1C26789.2 | 949 | 950 |
| 3 | 1 | 227310663 | 227312051 | H1C26789.3 | 951 | 952 |
| 3 | 1 | 227311632 | 227317273 | H1C26794.1 | 953 | 954 |
| 3 | 1 | 227317326 | 227321496 | H1C26796.1 | 955 | 956 |
| 3 | 1 | 227348723 | 227421319 | H1C26803.1 | 957 | 958 |
| 3 | 1 | 227348723 | 227421341 | H1C26803.2 | 959 | 960 |
| 3 | 1 | 227350117 | 227351274 | H1C26804.1 | 961 | 962 |
| 3 | 1 | 227420689 | 227432711 | H1C26819.1 | 963 | 964 |
| 3 | 1 | 227420689 | 227432729 | H1C26819.2 | 965 | 966 |
| 3 | 1 | 227420689 | 227443077 | H1C26819.3 | 967 | 968 |
| 3 | 1 | 227420689 | 227443078 | H1C26819.4 | 969 | 970 |
| 3 | 1 | 227420689 | 227443078 | H1C26819.5 | 971 | 972 |
| 3 | 1 | 227420689 | 227443215 | H1C26819.6 | 973 | 974 |
| 3 | 1 | 227420689 | 227443215 | H1C26819.7 | 975 | 976 |
| 3 | 1 | 227420689 | 227443215 | H1C26819.8 | 977 | 978 |
| 3 | 1 | 227421583 | 227443077 | H1C26819.9 | 979 | 980 |
| 3 | 1 | 227421583 | 227443215 | H1C26819.10 | 981 | 982 |
| 3 | 1 | 227438231 | 227443077 | H1C26819.11 | 983 | 984 |
| 3 | 1 | 227438231 | 227443215 | H1C26819.12 | 985 | 986 |
| 3 | 1 | 227439288 | 227443077 | H1C26819.13 | 987 | 988 |
| 3 | 1 | 227439288 | 227443215 | H1C26819.14 | 989 | 990 |
| 3 | 1 | 227442387 | 227482431 | H1C26823.1 | 991 | 992 |
| 3 | 1 | 227461339 | 227471213 | H1C26823.2 | 993 | 994 |
| 3 | 1 | 227461339 | 227483029 | H1C26823.3 | 995 | 996 |
| 3 | 1 | 227461339 | 227483029 | H1C26823.4 | 997 | 998 |
| 3 | 1 | 227461339 | 227483938 | H1C26823.5 | 999 | 1000 |
| 3 | 1 | 227461438 | 227462728 | H1C26826.1 | 1001 | 1002 |
| 4 | 1 | 235875905 | 236375937 | H1C27733.1 | 1003 | 1004 |
| 4 | 1 | 236118413 | 236397936 | H1C27733.3 | 1005 | 1006 |
| 4 | 1 | 236167524 | 236193000 | H1C27733.4 | 1007 | 1008 |
| 4 | 1 | 236193226 | 236208407 | H1C27763.1 | 1009 | 1010 |
| 4 | 1 | 236195661 | 236197405 | H1C27763.2 | 1011 | 1012 |
| 4 | 1 | 236208887 | 236397870 | H1C27733.5 | 1013 | 1014 |
| 4 | 1 | 236387356 | 236389213 | H1C27790.1 | 1015 | 1016 |
| 4 | 1 | 236396635 | 236398955 | H1C27791.1 | 1017 | 1018 |
| 4 | 1 | 236404784 | 236406296 | H1C27794.1 | 1019 | 1020 |
| 4 | 1 | 236496864 | 236502601 | H1C27796.1 | 1021 | 1022 |
| 4 | 1 | 236498503 | 236502601 | H1C27797.1 | 1023 | 1024 |
| 4 | 1 | 236503688 | 236697267 | H1C27798.1 | 1025 | 1026 |
| 4 | 1 | 236581021 | 236964526 | H1C27798.2 | 1027 | 1028 |
| 5 | 2 | 20805416 | 20944487 | H2C1836.1 | 1029 | 1030 |
| 5 | 2 | 20806441 | 20944502 | H2C1836.2 | 1031 | 1032 |
| 5 | 2 | 20806614 | 20944502 | H2C1836.3 | 1033 | 1034 |
| 5 | 2 | 20910286 | 20944498 | H2C1836.4 | 1035 | 1036 |
| 5 | 2 | 20981158 | 20983048 | H2C1854.1 | 1037 | 1038 |
| 5 | 2 | 21135828 | 21178598 | H2C1857.1 | 1039 | 1040 |
| 5 | 2 | 21135948 | 21178598 | H2C1857.2 | 1041 | 1042 |
| 5 | 2 | 21139121 | 21141075 | H2C1859.1 | 1043 | 1044 |
| 5 | 2 | 21158697 | 21178598 | H2C1857.3 | 1045 | 1046 |
| 5 | 2 | 21258135 | 21277796 | H2C1876.1 | 1047 | 1048 |
| 5 | 2 | 21355698 | 22105483 | H2C1881.1 | 1049 | 1050 |
| 5 | 2 | 21355708 | 21398609 | H2C1881.2 | 1051 | 1052 |
| 6, 7 | 2 | 50057294 | 51167770 | H2C5527.1 | 1053 | 1054 |
| 6, 7 | 2 | 50057651 | 50112955 | H2C5527.2 | 1055 | 1056 |
| 6, 7 | 2 | 50057651 | 50155334 | H2C5527.3 | 1057 | 1058 |
| 6, 7 | 2 | 50057651 | 50158064 | H2C5527.4 | 1059 | 1060 |
| 6, 7 | 2 | 50057651 | 50486581 | H2C5527.5 | 1061 | 1062 |
| 6, 7 | 2 | 50057651 | 51167770 | H2C5527.6 | 1063 | 1064 |
| 7 | 2 | 50057651 | 51167770 | H2C5527.6 | 1063 | 1064 |
| 7 | 2 | 50120411 | 50122147 | H2C5534.1 | 1065 | 1066 |
| 7 | 2 | 50337930 | 50795203 | H2C5527.7 | 1067 | 1068 |
| 7 | 2 | 50564517 | 50567361 | H2C5567.1 | 1069 | 1070 |
| 7 | 2 | 50755052 | 50758973 | H2C5527.8 | 1071 | 1072 |
| 7 | 2 | 50757594 | 50776353 | H2C5527.9 | 1073 | 1074 |
| 7 | 2 | 50770063 | 50771786 | H2C5588.1 | 1075 | 1076 |
| 7 | 2 | 51055611 | 51171325 | H2C5527.10 | 1077 | 1078 |
| 7 | 2 | 51058251 | 51061479 | H2C5527.11 | 1079 | 1080 |
| 7 | 2 | 51061310 | 51166570 | H2C5527.12 | 1081 | 1082 |
| 7 | 2 | 51061443 | 51166800 | H2C5527.13 | 1083 | 1084 |
| 7 | 2 | 51171389 | 52546706 | H2C5643.1 | 1085 | 1086 |
| 7 | 2 | 51340732 | 51360553 | H2C5646.1 | 1087 | 1088 |
| 8 | 2 | 121690392 | 121759005 | H2C12975.1 | 1089 | 1090 |
| 8 | 2 | 121692109 | 121759005 | H2C12975.2 | 1091 | 1092 |
| 8 | 2 | 121694762 | 121759008 | H2C12975.3 | 1093 | 1094 |
| 8 | 2 | 121694762 | 121759008 | H2C12975.4 | 1095 | 1096 |
| 8 | 2 | 121811582 | 121813739 | H2C12995.1 | 1097 | 1098 |
| 8 | 2 | 121811582 | 121852446 | H2C12996.1 | 1099 | 1100 |
| 8 | 2 | 121811582 | 121903910 | H2C12996.2 | 1101 | 1102 |
| 8 | 2 | 121811582 | 122123393 | H2C12996.3 | 1103 | 1104 |
| 8 | 2 | 121811582 | 122123393 | H2C12996.4 | 1105 | 1106 |
| 8 | 2 | 121814491 | 121839091 | H2C12996.5 | 1107 | 1108 |
| 8 | 2 | 121837937 | 121861882 | H2C12996.6 | 1109 | 1110 |
| 8 | 2 | 121933223 | 121935001 | H2C12996.7 | 1111 | 1112 |
| 8 | 2 | 121968853 | 121969718 | H2C13035.1 | 1113 | 1114 |
| 8 | 2 | 122064690 | 122071682 | H2C13053.1 | 1115 | 1116 |
| 8 | 2 | 122123455 | 122124968 | H2C13061.1 | 1117 | 1118 |
| 8 | 2 | 122123455 | 122125344 | H2C13061.2 | 1119 | 1120 |
| 8 | 2 | 122123475 | 122124968 | H2C13061.3 | 1121 | 1122 |
| 8 | 2 | 122123475 | 122125344 | H2C13061.4 | 1123 | 1124 |
| 8 | 2 | 122123475 | 122202680 | H2C13061.5 | 1125 | 1126 |
| 8 | 2 | 122123603 | 122124968 | H2C13061.6 | 1127 | 1128 |
| 8 | 2 | 122123603 | 122125344 | H2C13061.7 | 1129 | 1130 |
| 8 | 2 | 122123794 | 122124968 | H2C13061.8 | 1131 | 1132 |
| 8 | 2 | 122123794 | 122125344 | H2C13061.9 | 1133 | 1134 |
| 8 | 2 | 122200739 | 122202680 | H2C13071.1 | 1135 | 1136 |
| 8 | 2 | 122200739 | 122202680 | H2C13071.2 | 1137 | 1138 |
| 8 | 2 | 122200739 | 122209718 | H2C13071.3 | 1139 | 1140 |
| 8 | 2 | 122200739 | 122210720 | H2C13071.4 | 1141 | 1142 |
| 8 | 2 | 122200782 | 122202680 | H2C13071.5 | 1143 | 1144 |
| 8 | 2 | 122200782 | 122202680 | H2C13071.6 | 1145 | 1146 |
| 8 | 2 | 122200782 | 122209718 | H2C13071.7 | 1147 | 1148 |
| 8 | 2 | 122200782 | 122210720 | H2C13071.8 | 1149 | 1150 |
| 8 | 2 | 122200850 | 122202680 | H2C13071.10 | 1151 | 1152 |
| 8 | 2 | 122200850 | 122202680 | H2C13071.9 | 1153 | 1154 |
| 8 | 2 | 122200850 | 122209718 | H2C13071.11 | 1155 | 1156 |
| 8 | 2 | 122200850 | 122210720 | H2C13071.12 | 1157 | 1158 |
| 8 | 2 | 122201477 | 122202680 | H2C13071.13 | 1159 | 1160 |
| 8 | 2 | 122201477 | 122202680 | H2C13071.14 | 1161 | 1162 |
| 8 | 2 | 122201477 | 122204995 | H2C13071.15 | 1163 | 1164 |
| 8 | 2 | 122201477 | 122209718 | H2C13071.16 | 1165 | 1166 |
| 8 | 2 | 122201477 | 122210720 | H2C13071.17 | 1167 | 1168 |
| 8 | 2 | 122229338 | 122239472 | H2C13076.1 | 1169 | 1170 |
| 8 | 2 | 122229338 | 122239629 | H2C13076.2 | 1171 | 1172 |
| 8 | 2 | 122229338 | 122241097 | H2C13076.3 | 1173 | 1174 |
| 8 | 2 | 122229338 | 122241659 | H2C13076.4 | 1175 | 1176 |
| 8 | 2 | 122229350 | 122239472 | H2C13076.5 | 1177 | 1178 |
| 8 | 2 | 122229350 | 122239629 | H2C13076.6 | 1179 | 1180 |
| 8 | 2 | 122229350 | 122241097 | H2C13076.7 | 1181 | 1182 |
| 8 | 2 | 122229350 | 122241656 | H2C13076.8 | 1183 | 1184 |
| 8 | 2 | 122229453 | 122239472 | H2C13076.9 | 1185 | 1186 |
| 8 | 2 | 122229453 | 122239629 | H2C13076.10 | 1187 | 1188 |
| 8 | 2 | 122229453 | 122241097 | H2C13076.11 | 1189 | 1190 |
| 8 | 2 | 122229453 | 122241656 | H2C13076.12 | 1191 | 1192 |
| 8 | 2 | 122229465 | 122239472 | H2C13076.13 | 1193 | 1194 |
| 8 | 2 | 122229465 | 122239472 | H2C13076.14 | 1195 | 1196 |
| 8 | 2 | 122229465 | 122239629 | H2C13076.15 | 1197 | 1198 |
| 8 | 2 | 122229465 | 122239629 | H2C13076.16 | 1199 | 1200 |
| 8 | 2 | 122229465 | 122241097 | H2C13076.17 | 1201 | 1202 |
| 8 | 2 | 122229465 | 122241097 | H2C13076.18 | 1203 | 1204 |
| 8 | 2 | 122229465 | 122241097 | H2C13076.19 | 1205 | 1206 |
| 8 | 2 | 122229465 | 122241656 | H2C13076.20 | 1207 | 1208 |
| 8 | 2 | 122229465 | 122241656 | H2C13076.21 | 1209 | 1210 |
| 8 | 2 | 122229465 | 122241656 | H2C13076.22 | 1211 | 1212 |
| 8 | 2 | 122239625 | 122241097 | H2C13079.1 | 1213 | 1214 |
| 8 | 2 | 122239625 | 122241656 | H2C13079.2 | 1215 | 1216 |
| 8 | 2 | 122264249 | 122270508 | H2C13082.1 | 1217 | 1218 |
| 8 | 2 | 122264268 | 122268846 | H2C13082.2 | 1219 | 1220 |
| 8 | 2 | 122264274 | 122270162 | H2C13082.3 | 1221 | 1222 |
| 8 | 2 | 122266993 | 122268846 | H2C13082.4 | 1223 | 1224 |
| 8 | 2 | 122266995 | 122274600 | H2C13082.5 | 1225 | 1226 |
| 8 | 2 | 122348249 | 122681062 | H2C13084.1 | 1227 | 1228 |
| 9 | 2 | 127499621 | 127507679 | H2C13211.1 | 1229 | 1230 |
| 9 | 2 | 127521828 | 127530297 | H2C13215.1 | 1231 | 1232 |
| 9 | 2 | 127521828 | 127580758 | H2C13215.2 | 1233 | 1234 |
| 9 | 2 | 127521828 | 127580808 | H2C13215.3 | 1235 | 1236 |
| 9 | 2 | 127521828 | 127581149 | H2C13215.4 | 1237 | 1238 |
| 9 | 2 | 127521828 | 127581154 | H2C13215.10 | 1239 | 1240 |
| 9 | 2 | 127521828 | 127581154 | H2C13215.11 | 1241 | 1242 |
| 9 | 2 | 127521828 | 127581154 | H2C13215.12 | 1243 | 1244 |
| 9 | 2 | 127521828 | 127581154 | H2C13215.13 | 1245 | 1246 |
| 9 | 2 | 127521828 | 127581154 | H2C13215.14 | 1247 | 1248 |
| 9 | 2 | 127521828 | 127581154 | H2C13215.15 | 1249 | 1250 |
| 9 | 2 | 127521828 | 127581154 | H2C13215.5 | 1251 | 1252 |
| 9 | 2 | 127521828 | 127581154 | H2C13215.6 | 1253 | 1254 |
| 9 | 2 | 127521828 | 127581154 | H2C13215.7 | 1255 | 1256 |
| 9 | 2 | 127521828 | 127581154 | H2C13215.8 | 1257 | 1258 |
| 9 | 2 | 127521828 | 127581154 | H2C13215.9 | 1259 | 1260 |
| 9 | 2 | 127581502 | 127583078 | H2C13224.1 | 1261 | 1262 |
| 9 | 2 | 127616699 | 127620765 | H2C13226.1 | 1263 | 1264 |
| 9 | 2 | 127657641 | 127679573 | H2C13227.1 | 1265 | 1266 |
| 9 | 2 | 127731095 | 127737249 | H2C13231.1 | 1267 | 1268 |
| 9 | 2 | 127731095 | 127763633 | H2C13231.2 | 1269 | 1270 |
| 9 | 2 | 127731095 | 127766533 | H2C13231.3 | 1271 | 1272 |
| 9 | 2 | 127731095 | 127767887 | H2C13231.4 | 1273 | 1274 |
| 9 | 2 | 127731095 | 127767900 | H2C13231.5 | 1275 | 1276 |
| 9 | 2 | 127731095 | 127767982 | H2C13231.6 | 1277 | 1278 |
| 9 | 2 | 127731096 | 127763859 | H2C13232.1 | 1279 | 1280 |
| 9 | 2 | 127763141 | 127767808 | H2C13231.7 | 1281 | 1282 |
| 9 | 2 | 127763195 | 127764831 | H2C13231.8 | 1283 | 1284 |
| 9 | 2 | 127763341 | 127767951 | H2C13231.9 | 1285 | 1286 |
| 9 | 2 | 127764222 | 127765594 | H2C13243.1 | 1287 | 1288 |
| 9 | 2 | 127766274 | 127767973 | H2C13231.10 | 1289 | 1290 |
| 9 | 2 | 127772473 | 127817279 | H2C13245.1 | 1291 | 1292 |
| 9 | 2 | 127774196 | 127817279 | H2C13245.2 | 1293 | 1294 |
| 9 | 2 | 127778143 | 127817279 | H2C13245.3 | 1295 | 1296 |
| 9 | 2 | 127780467 | 127817279 | H2C13245.4 | 1297 | 1298 |
| 9 | 2 | 127803724 | 127804531 | H2C13245.5 | 1299 | 1300 |
| 9 | 2 | 127861270 | 127863217 | H2C13269.1 | 1301 | 1302 |
| 9 | 2 | 127862066 | 127863217 | H2C13269.2 | 1303 | 1304 |
| 9 | 2 | 127862090 | 127863211 | H2C13269.3 | 1305 | 1306 |
| 9 | 2 | 127862939 | 127874385 | H2C13273.1 | 1307 | 1308 |
| 9 | 2 | 127884892 | 127886096 | H2C13277.1 | 1309 | 1310 |
| 9 | 2 | 127892232 | 127903051 | H2C13280.1 | 1311 | 1312 |
| 9 | 2 | 127895087 | 127897033 | H2C13280.2 | 1313 | 1314 |
| 9 | 2 | 127897094 | 127903051 | H2C13280.3 | 1315 | 1316 |
| 9 | 2 | 127911723 | 127912795 | H2C13286.1 | 1317 | 1318 |
| 9 | 2 | 127943407 | 127944094 | H2C13285.1 | 1319 | 1320 |
| 9 | 2 | 127954607 | 127959773 | H2C13285.2 | 1321 | 1322 |
| 9 | 2 | 127954607 | 127963536 | H2C13285.3 | 1323 | 1324 |
| 9 | 2 | 127954607 | 128000248 | H2C13285.4 | 1325 | 1326 |
| 9 | 2 | 127954607 | 128000293 | H2C13285.5 | 1327 | 1328 |
| 9 | 2 | 127954607 | 128000295 | H2C13285.6 | 1329 | 1330 |
| 9 | 2 | 127976560 | 127979513 | H2C13285.7 | 1331 | 1332 |
| 9 | 2 | 127978489 | 127979336 | H2C13296.1 | 1333 | 1334 |
| 9 | 2 | 127978532 | 128000265 | H2C13285.8 | 1335 | 1336 |
| 9 | 2 | 127978598 | 128000274 | H2C13285.9 | 1337 | 1338 |
| 9 | 2 | 127978598 | 128000295 | H2C13285.10 | 1339 | 1340 |
| 9 | 2 | 127978598 | 128000596 | H2C13285.11 | 1341 | 1342 |
| 9 | 2 | 128009607 | 128088452 | H2C13305.1 | 1343 | 1344 |
| 9 | 2 | 128033849 | 128044767 | H2C13308.1 | 1345 | 1346 |
| 10 | 2 | 161990055 | 162093736 | H2C16344.1 | 1347 | 1348 |
| 10 | 2 | 162079113 | 162093735 | H2C16344.3 | 1349 | 1350 |
| 10 | 2 | 162089545 | 162093735 | H2C16344.4 | 1351 | 1352 |
| 10 | 2 | 162098126 | 162107183 | H2C16365.1 | 1353 | 1354 |
| 10 | 2 | 162104676 | 162105153 | H2C16368.1 | 1355 | 1356 |
| 10 | 2 | 162104676 | 162105595 | H2C16368.2 | 1357 | 1358 |
| 10 | 2 | 162306353 | 162667292 | H2C16379.1 | 1359 | 1360 |
| 10 | 2 | 162674257 | 162675316 | H2C16392.1 | 1361 | 1362 |
| 10 | 2 | 162674257 | 162675402 | H2C16392.2 | 1363 | 1364 |
| 10 | 2 | 162674257 | 162756559 | H2C16393.1 | 1365 | 1366 |
| 10 | 2 | 162755272 | 162757352 | H2C16404.1 | 1367 | 1368 |
| 10 | 2 | 162775445 | 162776881 | H2C16406.1 | 1369 | 1370 |
| 10 | 2 | 162796457 | 162854748 | H2C16409.1 | 1371 | 1372 |
| 10 | 2 | 162824885 | 162826597 | H2C16410.1 | 1373 | 1374 |
| 10 | 2 | 162824891 | 162826733 | H2C16410.2 | 1375 | 1376 |
| 10 | 2 | 162824891 | 162831611 | H2C16410.3 | 1377 | 1378 |
| 10 | 2 | 162824891 | 162834217 | H2C16410.4 | 1379 | 1380 |
| 10 | 2 | 162824891 | 162834233 | H2C16410.5 | 1381 | 1382 |
| 10 | 2 | 162824891 | 162834254 | H2C16410.6 | 1383 | 1384 |
| 10 | 2 | 162824891 | 162834421 | H2C16410.7 | 1385 | 1386 |
| 10 | 2 | 162825167 | 162831611 | H2C16410.8 | 1387 | 1388 |
| 10 | 2 | 162825167 | 162834217 | H2C16410.9 | 1389 | 1390 |
| 10 | 2 | 162825167 | 162834233 | H2C16410.10 | 1391 | 1392 |
| 10 | 2 | 162825167 | 162834421 | H2C16410.11 | 1393 | 1394 |
| 10 | 2 | 162825187 | 162826155 | H2C16410.12 | 1395 | — |
| 10 | 2 | 162825187 | 162826733 | H2C16410.13 | 1396 | 1397 |
| 10 | 2 | 162825187 | 162834254 | H2C16410.14 | 1398 | 1399 |
| 10 | 2 | 162826042 | 162829410 | H2C16410.15 | 1400 | 1401 |
| 10 | 2 | 162826799 | 162834254 | H2C16410.16 | 1402 | 1403 |
| 10 | 2 | 162827636 | 162831206 | H2C16410.17 | 1404 | 1405 |
| 10 | 2 | 162852700 | 162855078 | H2C16415.1 | 1406 | 1407 |
| 10 | 2 | 162852700 | 162858686 | H2C16415.2 | 1408 | 1409 |
| 10 | 2 | 162852700 | 162925475 | H2C16415.3 | 1410 | 1411 |
| 10 | 2 | 162852700 | 162925552 | H2C16415.4 | 1412 | 1413 |
| 10 | 2 | 162871199 | 162874055 | H2C16415.5 | 1414 | 1415 |
| 10 | 2 | 162949090 | 163000927 | H2C16427.1 | 1416 | 1417 |
| 10 | 2 | 162949096 | 162950154 | H2C16427.2 | 1418 | 1419 |
| 10 | 2 | 162963470 | 163000927 | H2C16427.3 | 1420 | 1421 |
| 10 | 2 | 162992165 | 163000927 | H2C16427.4 | 1422 | 1423 |
| 10 | 2 | 163000855 | 163038851 | H2C16433.1 | 1424 | 1425 |
| 10 | 2 | 163000898 | 163038825 | H2C16433.2 | 1426 | 1427 |
| 10 | 2 | 163001050 | 163043145 | H2C16433.3 | 1428 | 1429 |
| 10 | 2 | 163001050 | 163043439 | H2C16433.4 | 1430 | 1431 |
| 11 | 2 | 198494931 | 198838635 | H2C19961.1 | 1432 | 1433 |
| 11 | 2 | 198656803 | 198838635 | H2C19961.2 | 1434 | 1435 |
| 11 | 2 | 198836837 | 198837684 | H2C19961.3 | 1436 | 1437 |
| 11 | 2 | 198878033 | 198881753 | H2C20006.1 | 1438 | 1439 |
| 11 | 2 | 198881193 | 198881753 | H2C20007.1 | 1440 | — |
| 11 | 2 | 198881506 | 198884102 | H2C20008.1 | 1441 | 1442 |
| 11 | 2 | 198989592 | 199064779 | H2C20010.1 | 1443 | 1444 |
| 11 | 2 | 199037047 | 199262811 | H2C20012.1 | 1445 | 1446 |
| 11 | 2 | 199064704 | 199065327 | H2C20013.1 | 1447 | 1448 |
| 12 | 3 | 6507165 | 6753421 | H3C450.1 | 1449 | 1450 |
| 12 | 3 | 6648540 | 6661580 | H3C463.1 | 1451 | 1452 |
| 12 | 3 | 6648541 | 6681593 | H3C463.2 | 1453 | 1454 |
| 12 | 3 | 6648541 | 6691303 | H3C463.3 | 1455 | 1456 |
| 12 | 3 | 6649052 | 6681593 | H3C463.4 | 1457 | 1458 |
| 12 | 3 | 6649052 | 6807825 | H3C463.5 | 1459 | 1460 |
| 12 | 3 | 6697780 | 6741233 | H3C450.2 | 1461 | 1462 |
| 12 | 3 | 6711409 | 6714557 | H3C450.3 | 1463 | 1464 |
| 12 | 3 | 6738001 | 6807792 | H3C463.6 | 1465 | 1466 |
| 12 | 3 | 6747859 | 6822125 | H3C463.7 | 1467 | 1468 |
| 12 | 3 | 6749026 | 6756153 | H3C463.8 | 1469 | 1470 |
| 12 | 3 | 6756224 | 6822114 | H3C463.9 | 1471 | 1472 |
| 12 | 3 | 6757054 | 6759374 | H3C476.1 | 1473 | 1474 |
| 12 | 3 | 6805622 | 6807830 | H3C463.10 | 1475 | 1476 |
| 12 | 3 | 6877837 | 7758219 | H3C482.1 | 1477 | 1478 |
| 12 | 3 | 6877926 | 7711148 | H3C482.2 | 1479 | 1480 |
| 12 | 3 | 6877926 | 7758219 | H3C482.3 | 1481 | 1482 |
| 12 | 3 | 6879566 | 7323340 | H3C482.4 | 1483 | 1484 |
| 12 | 3 | 6909323 | 6910709 | H3C487.1 | 1485 | 1486 |
| 12 | 3 | 7468467 | 7653128 | H3C482.5 | 1487 | 1488 |
| 12 | 3 | 7707466 | 7711148 | H3C482.6 | 1489 | 1490 |
| 12 | 3 | 7709832 | 7711152 | H3C482.7 | 1491 | 1492 |
| 12 | 3 | 7751364 | 7751971 | H3C511.1 | 1493 | 1494 |
| 12 | 3 | 7969491 | 8032994 | H3C524.1 | 1495 | 1496 |
| 13 | 3 | 32701683 | 32790208 | H3C3250.1 | 1497 | 1498 |
| 13 | 3 | 32701683 | 32790208 | H3C3250.2 | 1499 | 1500 |
| 13 | 3 | 32701683 | 32790371 | H3C3250.3 | 1501 | 1502 |
| 13 | 3 | 32769496 | 32790208 | H3C3250.5 | 1503 | 1504 |
| 13 | 3 | 32769496 | 32790371 | H3C3250.6 | 1505 | 1506 |
| 13 | 3 | 32769635 | 32777990 | H3C3257.1 | 1507 | 1508 |
| 13 | 3 | 32780716 | 32790208 | H3C3250.7 | 1509 | 1510 |
| 13 | 3 | 32780716 | 32790371 | H3C3250.8 | 1511 | 1512 |
| 13 | 3 | 32780808 | 32790370 | H3C3263.1 | 1513 | 1514 |
| 13 | 3 | 32781038 | 32790208 | H3C3250.9 | 1515 | 1516 |
| 13 | 3 | 32781038 | 32790371 | H3C3250.10 | 1517 | 1518 |
| 13 | 3 | 32783184 | 32783942 | H3C3265.1 | 1519 | 1520 |
| 13 | 3 | 32786036 | 32790208 | H3C3250.11 | 1521 | 1522 |
| 13 | 3 | 32786036 | 32790370 | H3C3250.12 | 1523 | 1524 |
| 13 | 3 | 32788297 | 32790056 | H3C3269.1 | 1525 | 1526 |
| 13 | 3 | 32797820 | 32802664 | H3C3273.1 | 1527 | 1528 |
| 13 | 3 | 32832844 | 32833862 | H3C3276.1 | 1529 | 1530 |
| 13 | 3 | 32858710 | 32859454 | H3C3278.1 | 1531 | 1532 |
| 13 | 3 | 32902381 | 32908307 | H3C3284.1 | 1533 | 1534 |
| 13 | 3 | 32968043 | 32971404 | H3C3289.1 | 1535 | 1536 |
| 13 | 3 | 32977606 | 32991184 | H3C3292.1 | 1537 | 1538 |
| 13 | 3 | 33013109 | 33113685 | H3C3295.1 | 1539 | 1540 |
| 13 | 3 | 33013109 | 33113725 | H3C3295.2 | 1541 | 1542 |
| 13 | 3 | 33013222 | 33113685 | H3C3295.3 | 1543 | 1544 |
| 13 | 3 | 33013222 | 33113725 | H3C3295.4 | 1545 | 1546 |
| 13 | 3 | 33047194 | 33051082 | H3C3295.5 | 1547 | 1548 |
| 13 | 3 | 33061808 | 33074768 | H3C3295.6 | 1549 | 1550 |
| 13 | 3 | 33068471 | 33113725 | H3C3295.7 | 1551 | 1552 |
| 13 | 3 | 33106912 | 33108547 | H3C3314.1 | 1553 | 1554 |
| 13 | 3 | 33106912 | 33113297 | H3C3295.8 | 1555 | 1556 |
| 13 | 3 | 33106912 | 33113319 | H3C3295.9 | 1557 | 1558 |
| 13 | 3 | 33123250 | 33125865 | H3C3315.1 | 1559 | 1560 |
| 13 | 3 | 33130452 | 33137102 | H3C3316.1 | 1561 | 1562 |
| 13 | 3 | 33130452 | 33159686 | H3C3316.2 | 1563 | 1564 |
| 13 | 3 | 33130452 | 33159686 | H3C3316.3 | 1565 | 1566 |
| 13 | 3 | 33130452 | 33159686 | H3C3316.4 | 1567 | 1568 |
| 13 | 3 | 33130452 | 33160003 | H3C3316.5 | 1569 | 1570 |
| 13 | 3 | 33130452 | 33160003 | H3C3316.6 | 1571 | 1572 |
| 13 | 3 | 33130452 | 33160003 | H3C3316.7 | 1573 | 1574 |
| 13 | 3 | 33130452 | 33160475 | H3C3316.10 | 1575 | 1576 |
| 13 | 3 | 33130452 | 33160475 | H3C3316.8 | 1577 | 1578 |
| 13 | 3 | 33130452 | 33160475 | H3C3316.9 | 1579 | 1580 |
| 13 | 3 | 33130517 | 33161533 | H3C3317.1 | 1581 | 1582 |
| 13 | 3 | 33151243 | 33161533 | H3C3322.1 | 1583 | 1584 |
| 13 | 3 | 33158888 | 33159662 | H3C3324.1 | 1585 | 1586 |
| 13 | 3 | 33158888 | 33159662 | H3C3325.1 | 1587 | 1588 |
| 13 | 3 | 33158888 | 33160475 | H3C3323.1 | 1589 | 1590 |
| 13 | 3 | 33158888 | 33160475 | H3C3324.2 | 1591 | 1592 |
| 13 | 3 | 33158888 | 33161533 | H3C3326.1 | 1593 | 1594 |
| 13 | 3 | 33158888 | 33164269 | H3C3326.2 | 1595 | 1596 |
| 13 | 3 | 33160599 | 33164266 | H3C3328.1 | 1597 | 1598 |
| 13 | 3 | 33166537 | 33236511 | H3C3331.1 | 1599 | 1600 |
| 13 | 3 | 33293934 | 33403131 | H3C3334.1 | 1601 | 1602 |
| 13 | 3 | 33293934 | 33403760 | H3C3334.2 | 1603 | 1604 |
| 13 | 3 | 33294587 | 33295381 | H3C3335.1 | 1605 | 1606 |
| 13 | 3 | 33328570 | 33348128 | H3C3336.1 | 1607 | 1608 |
| 14 | 3 | 39826154 | 40276813 | H3C4013.1 | 1609 | 1610 |
| 14 | 3 | 39826154 | 40276813 | H3C4013.2 | 1611 | 1612 |
| 14 | 3 | 39924391 | 39928519 | H3C4017.1 | 1613 | 1614 |
| 14 | 3 | 40087615 | 40276813 | H3C4013.3 | 1615 | 1616 |
| 14 | 3 | 40121870 | 40316587 | H3C4035.1 | 1617 | 1618 |
| 14 | 3 | 40183419 | 40208292 | H3C4013.4 | 1619 | 1620 |
| 14 | 3 | 40189636 | 40326422 | H3C4038.1 | 1621 | 1622 |
| 14 | 3 | 40242099 | 40325986 | H3C4038.2 | 1623 | 1624 |
| 14 | 3 | 40260923 | 40325973 | H3C4038.3 | 1625 | 1626 |
| 14 | 3 | 40305621 | 40326422 | H3C4038.4 | 1627 | 1628 |
| 14 | 3 | 40326178 | 40328894 | H3C4055.1 | 1629 | 1630 |
| 14 | 3 | 40326178 | 40328919 | H3C4055.2 | 1631 | 1632 |
| 14 | 3 | 40326185 | 40328894 | H3C4055.3 | 1633 | 1634 |
| 14 | 3 | 40327092 | 40328155 | H3C4057.1 | 1635 | 1636 |
| 14 | 3 | 40403676 | 40445121 | H3C4063.1 | 1637 | 1638 |
| 14 | 3 | 40407445 | 40469800 | H3C4065.1 | 1639 | 1640 |
| 14 | 3 | 40408205 | 40469675 | H3C4065.2 | 1641 | 1642 |
| 14 | 3 | 40462026 | 40469824 | H3C4065.3 | 1643 | 1644 |
| 14 | 3 | 40473818 | 40478867 | H3C4077.1 | 1645 | 1646 |
| 14 | 3 | 40476386 | 40477767 | H3C4080.1 | 1647 | 1648 |
| 14 | 3 | 40477864 | 40478778 | H3C4077.2 | 1649 | 1650 |
| 14 | 3 | 40477974 | 40478778 | H3C4077.3 | 1651 | 1652 |
| 14 | 3 | 40477974 | 40478867 | H3C4077.4 | 1653 | 1654 |
| 14 | 3 | 40478101 | 40478778 | H3C4077.5 | 1655 | 1656 |
| 14 | 3 | 40478101 | 40478867 | H3C4077.6 | 1657 | 1658 |
| 14 | 3 | 40478444 | 40478778 | H3C4082.1 | 1659 | 1660 |
| 14 | 3 | 40478444 | 40478863 | H3C4082.2 | 1661 | 1662 |
| 14 | 3 | 40478870 | 40483649 | H3C4083.1 | 1663 | 1664 |
| 14 | 3 | 40493640 | 40504949 | H3C4086.1 | 1665 | 1666 |
| 14 | 3 | 40498393 | 40523951 | H3C4087.1 | 1667 | 1668 |
| 14 | 3 | 40498397 | 40503589 | H3C4086.2 | 1669 | 1670 |
| 14 | 3 | 40505070 | 40506732 | H3C4088.1 | 1671 | 1672 |
| 14 | 3 | 40507326 | 40508017 | H3C4089.1 | 1673 | 1674 |
| 14 | 3 | 40522486 | 40534051 | H3C4087.2 | 1675 | 1676 |
| 14 | 3 | 40522534 | 40534201 | H3C4087.3 | 1677 | 1678 |
| 14 | 3 | 40541372 | 40550438 | H3C4094.1 | 1679 | 1680 |
| 14 | 3 | 40541392 | 40549344 | H3C4094.2 | 1681 | 1682 |
| 14 | 3 | 40541392 | 40549344 | H3C4094.3 | 1683 | 1684 |
| 14 | 3 | 40541392 | 40556021 | H3C4094.4 | 1685 | 1686 |
| 14 | 3 | 40541392 | 40591182 | H3C4094.5 | 1687 | 1688 |
| 14 | 3 | 40541500 | 40549344 | H3C4094.6 | 1689 | 1690 |
| 14 | 3 | 40601956 | 40632304 | H3C4106.1 | 1691 | 1692 |
| 14 | 3 | 40619627 | 40621922 | H3C4107.1 | 1693 | 1694 |
| 15 | 4 | 77006937 | 77079451 | H4C6331.1 | 1695 | 1696 |
| 15 | 4 | 77006937 | 77092543 | H4C6331.2 | 1697 | 1698 |
| 15 | 4 | 77006937 | 77092620 | H4C6331.3 | 1699 | 1700 |
| 15 | 4 | 77006937 | 77092620 | H4C6331.4 | 1701 | 1702 |
| 15 | 4 | 77101353 | 77103878 | H4C6353.1 | 1703 | 1704 |
| 15 | 4 | 77102701 | 77103878 | H4C6353.2 | 1705 | 1706 |
| 15 | 4 | 77137568 | 77138968 | H4C6355.1 | 1707 | 1708 |
| 15 | 4 | 77138195 | 77148180 | H4C6356.1 | 1709 | 1710 |
| 15 | 4 | 77138197 | 77144325 | H4C6357.1 | 1711 | 1712 |
| 15 | 4 | 77138197 | 77180903 | H4C6358.1 | 1713 | 1714 |
| 15 | 4 | 77138197 | 77180903 | H4C6358.2 | 1715 | 1716 |
| 15 | 4 | 77138197 | 77180903 | H4C6358.3 | 1717 | 1718 |
| 15 | 4 | 77161280 | 77161849 | H4C6358.4 | 1719 | 1720 |
| 15 | 4 | 77166632 | 77168374 | H4C6358.5 | 1721 | 1722 |
| 15 | 4 | 77189594 | 77199073 | H4C6366.1 | 1723 | 1724 |
| 15 | 4 | 77195814 | 77219345 | H4C6365.1 | 1725 | 1726 |
| 15 | 4 | 77228243 | 77269292 | H4C6374.1 | 1727 | 1728 |
| 15 | 4 | 77251767 | 77252730 | H4C6383.1 | 1729 | 1730 |
| 15 | 4 | 77259121 | 77284271 | H4C6387.1 | 1731 | 1732 |
| 15 | 4 | 77279674 | 77285841 | H4C6391.1 | 1733 | 1734 |
| 15 | 4 | 77279674 | 77289473 | H4C6391.2 | 1735 | 1736 |
| 15 | 4 | 77279801 | 77285841 | H4C6391.3 | 1737 | 1738 |
| 15 | 4 | 77279801 | 77289473 | H4C6391.4 | 1739 | 1740 |
| 15 | 4 | 77289531 | 77391124 | H4C6393.1 | 1741 | 1742 |
| 15 | 4 | 77299447 | 77301868 | H4C6395.1 | 1743 | 1744 |
| 15 | 4 | 77312020 | 77314529 | H4C6397.1 | 1745 | 1746 |
| 15 | 4 | 77312020 | 77319747 | H4C6397.2 | 1747 | 1748 |
| 15 | 4 | 77312129 | 77319747 | H4C6397.3 | 1749 | 1750 |
| 15 | 4 | 77353024 | 77391071 | H4C6393.2 | 1751 | 1752 |
| 15 | 4 | 77353024 | 77391124 | H4C6393.3 | 1753 | 1754 |
| 15 | 4 | 77353041 | 77357441 | H4C6393.4 | 1755 | 1756 |
| 15 | 4 | 77353079 | 77391124 | H4C6393.5 | 1757 | 1758 |
| 15 | 4 | 77385547 | 77391124 | H4C6393.6 | 1759 | 1760 |
| 15 | 4 | 77392865 | 77396107 | H4C6409.1 | 1761 | 1762 |
| 15 | 4 | 77392865 | 77396774 | H4C6409.2 | 1763 | 1764 |
| 15 | 4 | 77392865 | 77426834 | H4C6409.3 | 1765 | 1766 |
| 15 | 4 | 77392992 | 77396774 | H4C6409.4 | 1767 | 1768 |
| 15 | 4 | 77392992 | 77409744 | H4C6409.5 | 1769 | 1770 |
| 15 | 4 | 77392992 | 77426778 | H4C6409.6 | 1771 | 1772 |
| 15 | 4 | 77392992 | 77426834 | H4C6409.7 | 1773 | 1774 |
| 15 | 4 | 77393159 | 77426834 | H4C6409.8 | 1775 | 1776 |
| 15 | 4 | 77393200 | 77396107 | H4C6409.9 | 1777 | 1778 |
| 15 | 4 | 77393200 | 77396774 | H4C6409.10 | 1779 | 1780 |
| 15 | 4 | 77437059 | 77439737 | H4C6422.1 | 1781 | 1782 |
| 15 | 4 | 77437059 | 77492258 | H4C6423.1 | 1783 | 1784 |
| 15 | 4 | 77439785 | 77492258 | H4C6423.2 | 1785 | 1786 |
| 15 | 4 | 77440597 | 77441508 | H4C6425.1 | 1787 | 1788 |
| 15 | 4 | 77457228 | 77462054 | H4C6437.1 | 1789 | 1790 |
| 15 | 4 | 77457699 | 77492258 | H4C6423.3 | 1791 | 1792 |
| 15 | 4 | 77457920 | 77492258 | H4C6423.4 | 1793 | 1794 |
| 15 | 4 | 77461862 | 77462675 | H4C6439.1 | 1795 | 1796 |
| 15 | 4 | 77492371 | 77562112 | H4C6443.1 | 1797 | 1798 |
| 15 | 4 | 77530052 | 77589462 | H4C6443.2 | 1799 | 1800 |
| 15 | 4 | 77546991 | 77550268 | H4C6443.3 | 1801 | 1802 |
| 15 | 4 | 77557517 | 77562106 | H4C6443.4 | 1803 | 1804 |
| 16 | 4 | 100853158 | 100862526 | H4C8545.1 | 1805 | 1806 |
| 16 | 4 | 100853158 | 100902332 | H4C8545.2 | 1807 | 1808 |
| 16 | 4 | 100914864 | 100933921 | H4C8552.1 | 1809 | 1810 |
| 16 | 4 | 101095161 | 101139960 | H4C8556.1 | 1811 | 1812 |
| 16 | 4 | 101095161 | 101147036 | H4C8556.2 | 1813 | 1814 |
| 16 | 4 | 101095161 | 101147945 | H4C8556.3 | 1815 | 1816 |
| 16 | 4 | 101095161 | 101148522 | H4C8556.4 | 1817 | 1818 |
| 16 | 4 | 101095161 | 101148522 | H4C8556.5 | 1819 | 1820 |
| 16 | 4 | 101142598 | 101148522 | H4C8556.6 | 1821 | 1822 |
| 16 | 4 | 101156672 | 101172881 | H4C8566.1 | 1823 | 1824 |
| 16 | 4 | 101156672 | 101172881 | H4C8566.2 | 1825 | 1826 |
| 16 | 4 | 101156724 | 101172881 | H4C8566.3 | 1827 | 1828 |
| 16 | 4 | 101156724 | 101172881 | H4C8566.4 | 1829 | 1830 |
| 16 | 4 | 101159540 | 101172881 | H4C8566.5 | 1831 | 1832 |
| 16 | 4 | 101159540 | 101172881 | H4C8566.6 | 1833 | 1834 |
| 16 | 4 | 101174582 | 101177015 | H4C8571.1 | 1835 | 1836 |
| 16 | 4 | 101174582 | 101184927 | H4C8572.1 | 1837 | 1838 |
| 16 | 4 | 101174582 | 101205426 | H4C8572.2 | 1839 | 1840 |
| 16 | 4 | 101174582 | 101224923 | H4C8572.3 | 1841 | 1842 |
| 16 | 4 | 101174582 | 101224968 | H4C8572.4 | 1843 | 1844 |
| 16 | 4 | 101177881 | 101184927 | H4C8572.5 | 1845 | 1846 |
| 16 | 4 | 101178857 | 101224968 | H4C8572.6 | 1847 | 1848 |
| 16 | 4 | 101200817 | 101224968 | H4C8572.7 | 1849 | 1850 |
| 16 | 4 | 101201588 | 101224968 | H4C8572.8 | 1851 | 1852 |
| 16 | 4 | 101202408 | 101224921 | H4C8572.9 | 1853 | 1854 |
| 16 | 4 | 101226393 | 101228723 | H4C8588.1 | 1855 | 1856 |
| 16 | 4 | 101226408 | 101228094 | H4C8588.2 | 1857 | 1858 |
| 16 | 4 | 101226408 | 101228592 | H4C8588.3 | 1859 | 1860 |
| 16 | 4 | 101226408 | 101228634 | H4C8588.4 | 1861 | 1862 |
| 16 | 4 | 101226408 | 101228634 | H4C8588.5 | 1863 | 1864 |
| 16 | 4 | 101226408 | 101228690 | H4C8588.6 | 1865 | 1866 |
| 16 | 4 | 101226408 | 101228716 | H4C8588.7 | 1867 | 1868 |
| 16 | 4 | 101226419 | 101228690 | H4C8588.8 | 1869 | 1870 |
| 16 | 4 | 101227201 | 101228690 | H4C8588.9 | 1871 | 1872 |
| 16 | 4 | 101228340 | 101244660 | H4C8590.1 | 1873 | 1874 |
| 16 | 4 | 101228828 | 101316148 | H4C8593.1 | 1875 | 1876 |
| 17 | 4 | 126595171 | 126601376 | H4C10553.1 | 1877 | 1878 |
| 17 | 4 | 126731474 | 126771691 | H4C10567.1 | 1879 | 1880 |
| 17 | 4 | 126768932 | 126771686 | H4C10570.1 | 1881 | 1882 |
| 17 | 4 | 126955477 | 127031553 | H4C10572.1 | 1883 | 1884 |
| 18 | 4 | 143305522 | 143752172 | H4C11432.1 | 1885 | 1886 |
| 18 | 4 | 143305522 | 143753027 | H4C11432.2 | 1887 | 1888 |
| 18 | 4 | 143305522 | 143753166 | H4C11432.3 | 1889 | 1890 |
| 18 | 4 | 143305522 | 143793029 | H4C11432.4 | 1891 | 1892 |
| 18 | 4 | 143305522 | 143839425 | H4C11432.5 | 1893 | 1894 |
| 18 | 4 | 143305522 | 144004658 | H4C11432.6 | 1895 | 1896 |
| 18 | 4 | 143307483 | 143752172 | H4C11432.7 | 1897 | 1898 |
| 18 | 4 | 143307483 | 143753027 | H4C11432.8 | 1899 | 1900 |
| 18 | 4 | 143307483 | 143753166 | H4C11432.9 | 1901 | 1902 |
| 18 | 4 | 143307483 | 143793029 | H4C11432.10 | 1903 | 1904 |
| 18 | 4 | 143307483 | 143839425 | H4C11432.11 | 1905 | 1906 |
| 18 | 4 | 143307483 | 144004658 | H4C11432.12 | 1907 | 1908 |
| 18 | 4 | 143471856 | 144004661 | H4C11432.13 | 1909 | 1910 |
| 18 | 4 | 143676169 | 143684210 | H4C11432.14 | 1911 | 1912 |
| 18 | 4 | 143705240 | 143710242 | H4C11432.15 | 1913 | 1914 |
| 18 | 4 | 143705240 | 143753166 | H4C11432.16 | 1915 | 1916 |
| 18 | 4 | 143793203 | 143797745 | H4C11496.1 | 1917 | 1918 |
| 18 | 4 | 143844774 | 143939708 | H4C11503.1 | 1919 | 1920 |
| 18 | 4 | 143933269 | 144045577 | H4C11432.17 | 1921 | 1922 |
| 19 | 6 | 27032749 | 27050124 | H6C3386.1 | 1923 | 1924 |
| 19 | 6 | 27095691 | 27099155 | H6C3392.1 | 1925 | 1926 |
| 19 | 6 | 27096039 | 27099682 | H6C3392.2 | 1927 | 1928 |
| 19 | 6 | 27167207 | 27202211 | H6C3396.1 | 1929 | 1930 |
| 19 | 6 | 27199620 | 27208551 | H6C3401.1 | 1931 | 1932 |
| 19 | 6 | 27201837 | 27208519 | H6C3401.2 | 1933 | 1934 |
| 19 | 6 | 27201837 | 27208519 | H6C3401.3 | 1935 | 1936 |
| 19 | 6 | 27201837 | 27208520 | H6C3401.4 | 1937 | 1938 |
| 19 | 6 | 27201837 | 27208534 | H6C3401.5 | 1939 | 1940 |
| 19 | 6 | 27203224 | 27208520 | H6C3401.6 | 1941 | 1942 |
| 19 | 6 | 27207746 | 27208554 | H6C3406.1 | 1943 | 1944 |
| 19 | 6 | 27208799 | 27211049 | H6C3407.1 | 1945 | 1946 |
| 19 | 6 | 27213342 | 27222611 | H6C3409.1 | 1947 | 1948 |
| 19 | 6 | 27214051 | 27222611 | H6C3409.2 | 1949 | 1950 |
| 19 | 6 | 27215039 | 27216264 | H6C3411.1 | 1951 | 1952 |
| 19 | 6 | 27217851 | 27221754 | H6C3413.1 | 1953 | 1954 |
| 19 | 6 | 27222863 | 27223325 | H6C3415.1 | 1955 | 1956 |
| 19 | 6 | 27323458 | 27332228 | H6C3422.1 | 1957 | 1958 |
| 19 | 6 | 27323458 | 27332377 | H6C3422.2 | 1959 | 1960 |
| 19 | 6 | 27323486 | 27332228 | H6C3422.3 | 1961 | 1962 |
| 19 | 6 | 27323486 | 27332377 | H6C3422.4 | 1963 | 1964 |
| 19 | 6 | 27326828 | 27332228 | H6C3422.5 | 1965 | 1966 |
| 19 | 6 | 27326828 | 27332377 | H6C3422.6 | 1967 | 1968 |
| 19 | 6 | 27327079 | 27332228 | H6C3422.7 | 1969 | 1970 |
| 19 | 6 | 27327079 | 27332377 | H6C3422.8 | 1971 | 1972 |
| 19 | 6 | 27327389 | 27331298 | H6C3422.9 | 1973 | 1974 |
| 19 | 6 | 27327389 | 27332228 | H6C3422.10 | 1975 | 1976 |
| 19 | 6 | 27327389 | 27332377 | H6C3422.11 | 1977 | 1978 |
| 19 | 6 | 27328640 | 27332228 | H6C3422.12 | 1979 | 1980 |
| 19 | 6 | 27328640 | 27332382 | H6C3422.13 | 1981 | 1982 |
| 19 | 6 | 27361660 | 27387070 | H6C3426.1 | 1983 | 1984 |
| 19 | 6 | 27400518 | 27401721 | H6C3429.1 | 1985 | 1986 |
| 19 | 6 | 27433577 | 27439398 | H6C3430.1 | 1987 | 1988 |
| 19 | 6 | 27433577 | 27447283 | H6C3430.2 | 1989 | 1990 |
| 19 | 6 | 27433581 | 27435982 | H6C3431.1 | 1991 | 1992 |
| 19 | 6 | 27438562 | 27446616 | H6C3430.3 | 1993 | 1994 |
| 19 | 6 | 27450392 | 27477326 | H6C3436.1 | 1995 | 1996 |
| 20 | 6 | 152220799 | 152517103 | H6C15161.1 | 1997 | 1998 |
| 20 | 6 | 152220927 | 152512543 | H6C15161.3 | 1999 | 2000 |
| 20 | 6 | 152220927 | 152512543 | H6C15161.4 | 2001 | 2002 |
| 20 | 6 | 152220927 | 152512543 | H6C15161.5 | 2003 | 2004 |
| 20 | 6 | 152222355 | 152542850 | H6C15161.7 | 2005 | 2006 |
| 20 | 6 | 152534932 | 152545465 | H6C15198.1 | 2007 | 2008 |
| 20 | 6 | 152534932 | 152561012 | H6C15199.1 | 2009 | 2010 |
| 20 | 6 | 152534932 | 152581536 | H6C15199.2 | 2011 | 2012 |
| 20 | 6 | 152534932 | 152592715 | H6C15199.3 | 2013 | 2014 |
| 20 | 6 | 152534932 | 152724416 | H6C15199.4 | 2015 | 2016 |
| 20 | 6 | 152534932 | 152731593 | H6C15199.5 | 2017 | 2018 |
| 20 | 6 | 152534932 | 152731628 | H6C15199.6 | 2019 | 2020 |
| 20 | 6 | 152534932 | 153050100 | H6C15199.7 | 2021 | 2022 |
| 20 | 6 | 152534932 | 153050648 | H6C15199.8 | 2023 | 2024 |
| 20 | 6 | 152535006 | 152581536 | H6C15199.9 | 2025 | 2026 |
| 20 | 6 | 152535006 | 152592715 | H6C15199.10 | 2027 | 2028 |
| 20 | 6 | 152535006 | 152637892 | H6C15199.11 | 2029 | 2030 |
| 20 | 6 | 152535006 | 152724416 | H6C15199.12 | 2031 | 2032 |
| 20 | 6 | 152535006 | 152731593 | H6C15199.13 | 2033 | 2034 |
| 20 | 6 | 152535006 | 153050648 | H6C15199.14 | 2035 | 2036 |
| 20 | 6 | 152691351 | 152695777 | H6C15199.15 | 2037 | 2038 |
| 20 | 6 | 152728470 | 152747437 | H6C15199.16 | 2039 | 2040 |
| 20 | 6 | 152748527 | 152794613 | H6C15199.17 | 2041 | 2042 |
| 20 | 6 | 152780241 | 152794613 | H6C15199.18 | 2043 | 2044 |
| 20 | 6 | 152793778 | 152794959 | H6C15254.1 | 2045 | 2046 |
| 20 | 6 | 152815646 | 152818211 | H6C15256.1 | 2047 | 2048 |
| 20 | 6 | 152959180 | 152960210 | H6C15265.1 | 2049 | 2050 |
| 20 | 6 | 153096548 | 153102408 | H6C15273.1 | 2051 | 2052 |
| 20 | 6 | 153111144 | 153137827 | H6C15274.1 | 2053 | 2054 |
| 20 | 6 | 153111144 | 153137967 | H6C15274.2 | 2055 | 2056 |
| 20 | 6 | 153111149 | 153137827 | H6C15274.3 | 2057 | 2058 |
| 20 | 6 | 153111194 | 153137827 | H6C15274.4 | 2059 | 2060 |
| 20 | 6 | 153111194 | 153137967 | H6C15274.5 | 2061 | 2062 |
| 20 | 6 | 153126913 | 153135896 | H6C15274.6 | 2063 | 2064 |
| 20 | 6 | 153164045 | 153173012 | H6C15280.1 | 2065 | 2066 |
| 20 | 6 | 153207744 | 153245162 | H6C15281.1 | 2067 | 2068 |
| 20 | 6 | 153218001 | 153218372 | H6C15281.2 | 2069 | 2070 |
| 20 | 6 | 153276832 | 153281697 | H6C15285.1 | 2071 | 2072 |
| 21 | 7 | 30327977 | 30339064 | H7C3483.1 | 2073 | 2074 |
| 21 | 7 | 30329167 | 30375681 | H7C3483.2 | 2075 | 2076 |
| 21 | 7 | 30338586 | 30346469 | H7C3490.1 | 2077 | 2078 |
| 21 | 7 | 30362655 | 30364587 | H7C3501.1 | 2079 | 2080 |
| 21 | 7 | 30363175 | 30365076 | H7C3483.3 | 2081 | 2082 |
| 21 | 7 | 30363175 | 30390615 | H7C3483.4 | 2083 | 2084 |
| 21 | 7 | 30370951 | 30385944 | H7C3483.5 | 2085 | 2086 |
| 21 | 7 | 30372848 | 30377751 | H7C3483.6 | 2087 | 2088 |
| 21 | 7 | 30374264 | 30376806 | H7C3507.1 | 2089 | 2090 |
| 21 | 7 | 30379259 | 30398671 | H7C3483.7 | 2091 | 2092 |
| 21 | 7 | 30381343 | 30387531 | H7C3483.8 | 2093 | 2094 |
| 21 | 7 | 30387163 | 30398671 | H7C3483.9 | 2095 | 2096 |
| 21 | 7 | 30387504 | 30390635 | H7C3483.10 | 2097 | 2098 |
| 21 | 7 | 30387559 | 30407664 | H7C3483.11 | 2099 | 2100 |
| 21 | 7 | 30390378 | 30398828 | H7C3483.12 | 2101 | 2102 |
| 21 | 7 | 30407420 | 30446889 | H7C3515.1 | 2103 | 2104 |
| 21 | 7 | 30407703 | 30446889 | H7C3515.2 | 2105 | 2106 |
| 21 | 7 | 30427111 | 30434534 | H7C3515.3 | 2107 | 2108 |
| 21 | 7 | 30443369 | 30446889 | H7C3515.4 | 2109 | 2110 |
| 21 | 7 | 30444307 | 30446889 | H7C3515.5 | 2111 | 2112 |
| 21 | 7 | 30465439 | 30495298 | H7C3529.1 | 2113 | 2114 |
| 21 | 7 | 30466102 | 30512959 | H7C3529.2 | 2115 | 2116 |
| 21 | 7 | 30495075 | 30512901 | H7C3529.3 | 2117 | 2118 |
| 21 | 7 | 30510913 | 30558570 | H7C3543.1 | 2119 | 2120 |
| 21 | 7 | 30564990 | 30570458 | H7C3546.1 | 2121 | 2122 |
| 21 | 7 | 30584272 | 30652169 | H7C3546.2 | 2123 | 2124 |
| 21 | 7 | 30584276 | 30705241 | H7C3546.3 | 2125 | 2126 |
| 21 | 7 | 30592389 | 30599511 | H7C3546.4 | 2127 | 2128 |
| 21 | 7 | 30609546 | 30616266 | H7C3552.1 | 2129 | 2130 |
| 21 | 7 | 30665897 | 30685633 | H7C3546.5 | 2131 | 2132 |
| 21 | 7 | 30669774 | 30705241 | H7C3546.6 | 2133 | 2134 |
| 21 | 7 | 30669774 | 30705647 | H7C3546.7 | 2135 | 2136 |
| 21 | 7 | 30724707 | 30738371 | H7C3564.1 | 2137 | 2138 |
| 21 | 7 | 30724707 | 30738373 | H7C3564.2 | 2139 | 2140 |
| 21 | 7 | 30724707 | 30738373 | H7C3564.3 | 2141 | 2142 |
| 21 | 7 | 30776875 | 30792381 | H7C3568.1 | 2143 | 2144 |
| 21 | 7 | 30782387 | 30792374 | H7C3568.2 | 2145 | 2146 |
| 21 | 7 | 30782387 | 30792374 | H7C3568.3 | 2147 | 2148 |
| 21 | 7 | 30782387 | 30792374 | H7C3568.4 | 2149 | 2150 |
| 21 | 7 | 30782387 | 30792374 | H7C3568.5 | 2151 | 2152 |
| 21 | 7 | 30784823 | 30798071 | H7C3568.6 | 2153 | 2154 |
| 21 | 7 | 30784883 | 30788813 | H7C3568.7 | 2155 | 2156 |
| 21 | 7 | 30865381 | 30920152 | H7C3574.1 | 2157 | 2158 |
| 21 | 7 | 30921868 | 30924333 | H7C3574.2 | 2159 | 2160 |
| 21 | 7 | 30921868 | 30924569 | H7C3574.3 | 2161 | 2162 |
| 22 | 7 | 32308387 | 32852274 | H7C3646.3 | 2163 | 2164 |
| 22 | 7 | 32680443 | 32704646 | H7C3724.2 | 2165 | 2166 |
| 22 | 7 | 32681014 | 32704646 | H7C3724.4 | 2167 | 2168 |
| 22 | 7 | 32681851 | 32704646 | H7C3724.6 | 2169 | 2170 |
| 22 | 7 | 32694934 | 32699868 | H7C3730.1 | 2171 | 2172 |
| 22 | 7 | 32698777 | 32701069 | H7C3733.1 | 2173 | 2174 |
| 22 | 7 | 32725706 | 32726984 | H7C3737.1 | 2175 | 2176 |
| 22 | 7 | 32728468 | 32735044 | H7C3739.1 | 2177 | 2178 |
| 22 | 7 | 32728468 | 32755815 | H7C3739.2 | 2179 | 2180 |
| 22 | 7 | 32728468 | 32755858 | H7C3739.3 | 2181 | 2182 |
| 22 | 7 | 32728468 | 32755910 | H7C3739.4 | 2183 | 2184 |
| 22 | 7 | 32728468 | 32756016 | H7C3739.5 | 2185 | 2186 |
| 22 | 7 | 32728468 | 32756020 | H7C3739.6 | 2187 | 2188 |
| 22 | 7 | 32728468 | 32756028 | H7C3739.7 | 2189 | 2190 |
| 22 | 7 | 32728468 | 32756036 | H7C3739.8 | 2191 | 2192 |
| 22 | 7 | 32728468 | 32756289 | H7C3739.9 | 2193 | 2194 |
| 22 | 7 | 32729662 | 32735044 | H7C3739.10 | 2195 | 2196 |
| 22 | 7 | 32729662 | 32755815 | H7C3739.11 | 2197 | 2198 |
| 22 | 7 | 32729662 | 32755910 | H7C3739.12 | 2199 | 2200 |
| 22 | 7 | 32729662 | 32756016 | H7C3739.13 | 2201 | 2202 |
| 22 | 7 | 32729662 | 32756020 | H7C3739.14 | 2203 | 2204 |
| 22 | 7 | 32729662 | 32756028 | H7C3739.15 | 2205 | 2206 |
| 22 | 7 | 32729662 | 32756036 | H7C3739.16 | 2207 | 2208 |
| 22 | 7 | 32729662 | 32756289 | H7C3739.17 | 2209 | 2210 |
| 22 | 7 | 32729666 | 32755858 | H7C3739.18 | 2211 | 2212 |
| 22 | 7 | 32734189 | 32756036 | H7C3739.19 | 2213 | 2214 |
| 22 | 7 | 32770264 | 32819783 | H7C3747.1 | 2215 | 2216 |
| 22 | 7 | 32791314 | 32792420 | H7C3748.1 | 2217 | 2218 |
| 22 | 7 | 32818036 | 32819779 | H7C3762.1 | 2219 | 2220 |
| 22 | 7 | 32818081 | 32819780 | H7C3763.1 | 2221 | — |
| 22 | 7 | 32826965 | 32830487 | H7C3766.1 | 2222 | 2223 |
| 22 | 7 | 32826965 | 32853758 | H7C3766.2 | 2224 | 2225 |
| 22 | 7 | 32826965 | 32875646 | H7C3766.3 | 2226 | 2227 |
| 22 | 7 | 32826965 | 32875646 | H7C3766.4 | 2228 | 2229 |
| 22 | 7 | 32830290 | 32834064 | H7C3770.1 | 2230 | 2231 |
| 22 | 7 | 32876051 | 32908369 | H7C3788.1 | 2232 | 2233 |
| 22 | 7 | 32907648 | 32926257 | H7C3791.1 | 2234 | 2235 |
| 22 | 7 | 32907650 | 32910458 | H7C3791.2 | 2236 | 2237 |
| 22 | 7 | 32907650 | 32912832 | H7C3791.3 | 2238 | 2239 |
| 22 | 7 | 32907650 | 32913738 | H7C3791.4 | 2240 | 2241 |
| 22 | 7 | 32911922 | 32922150 | H7C3791.5 | 2242 | 2243 |
| 22 | 7 | 32942144 | 32965602 | H7C3796.1 | 2244 | 2245 |
| 22 | 7 | 32942144 | 33347222 | H7C3796.2 | 2246 | 2247 |
| 22 | 7 | 32942144 | 33418482 | H7C3796.3 | 2248 | 2249 |
| 22 | 7 | 32942144 | 33418920 | H7C3796.4 | 2250 | 2251 |
| 22 | 7 | 32942144 | 33418920 | H7C3796.5 | 2252 | 2253 |
| 22 | 7 | 33163254 | 33418482 | H7C3796.6 | 2254 | 2255 |
| 22 | 7 | 33163254 | 33418920 | H7C3796.7 | 2256 | 2257 |
| 22 | 7 | 33318460 | 33418482 | H7C3796.8 | 2258 | 2259 |
| 22 | 7 | 33318460 | 33418920 | H7C3796.9 | 2260 | 2261 |
| 22 | 7 | 33346538 | 33418482 | H7C3796.10 | 2262 | 2263 |
| 22 | 7 | 33346538 | 33418920 | H7C3796.11 | 2264 | 2265 |
| 22 | 7 | 33367750 | 33418482 | H7C3796.12 | 2266 | 2267 |
| 22 | 7 | 33367750 | 33418920 | H7C3796.13 | 2268 | 2269 |
| 22 | 7 | 33477459 | 33481782 | H7C3834.1 | 2270 | 2271 |
| 22 | 7 | 33538832 | 33541308 | H7C3842.1 | 2272 | 2273 |
| 22 | 7 | 33606019 | 33615982 | H7C3853.1 | 2274 | 2275 |
| 22 | 7 | 33607914 | 33616008 | H7C3853.2 | 2276 | 2277 |
| 23 | 7 | 126886152 | 127326611 | H7C13659.1 | 2278 | 2279 |
| 23 | 7 | 126886152 | 127326777 | H7C13659.2 | 2280 | 2281 |
| 23 | 7 | 126932896 | 127326611 | H7C13668.1 | 2282 | 2283 |
| 23 | 7 | 126932896 | 127326777 | H7C13668.2 | 2284 | 2285 |
| 23 | 7 | 127163186 | 127326609 | H7C13715.1 | 2286 | 2287 |
| 23 | 7 | 127163186 | 127326777 | H7C13715.2 | 2288 | 2289 |
| 23 | 7 | 127260857 | 127264201 | H7C13745.1 | 2290 | 2291 |
| 23 | 7 | 127260857 | 127264953 | H7C13746.1 | 2292 | 2293 |
| 23 | 7 | 127261076 | 127264953 | H7C13746.2 | 2294 | 2295 |
| 23 | 7 | 127262507 | 127264953 | H7C13746.3 | 2296 | 2297 |
| 23 | 7 | 127320473 | 127326611 | H7C13659.6 | 2298 | 2299 |
| 23 | 7 | 127321014 | 127326611 | H7C13668.3 | 2300 | 2301 |
| 23 | 7 | 127322881 | 127326611 | H7C13659.7 | 2302 | 2303 |
| 23 | 7 | 127322881 | 127326777 | H7C13659.8 | 2304 | 2305 |
| 23 | 7 | 127325406 | 127326611 | H7C13659.9 | 2306 | 2307 |
| 23 | 7 | 127325406 | 127326777 | H7C13659.10 | 2308 | 2309 |
| 23 | 7 | 127485992 | 127491633 | H7C13787.1 | 2310 | 2311 |
| 23 | 7 | 127538118 | 127541883 | H7C13795.1 | 2312 | 2313 |
| 23 | 7 | 127538177 | 127541883 | H7C13795.2 | 2314 | 2315 |
| 23 | 7 | 127544372 | 127577913 | H7C13798.1 | 2316 | 2317 |
| 23 | 7 | 127544529 | 127577913 | H7C13798.2 | 2318 | 2319 |
| 23 | 7 | 127584329 | 127595603 | H7C13808.1 | 2320 | 2321 |
| 23 | 7 | 127584329 | 127595686 | H7C13808.2 | 2322 | 2323 |
| 23 | 7 | 127584329 | 127595690 | H7C13808.3 | 2324 | 2325 |
| 23 | 7 | 127584329 | 127595690 | H7C13808.4 | 2326 | 2327 |
| 23 | 7 | 127620651 | 127626350 | H7C13810.1 | 2328 | 2329 |
| 23 | 7 | 127620651 | 127626877 | H7C13810.2 | 2330 | 2331 |
| 23 | 7 | 127620686 | 127626350 | H7C13810.3 | 2332 | 2333 |
| 23 | 7 | 127620686 | 127626877 | H7C13810.4 | 2334 | 2335 |
| 23 | 7 | 127626281 | 127639947 | H7C13812.1 | 2336 | 2337 |
| 23 | 7 | 127626281 | 127643491 | H7C13812.2 | 2338 | 2339 |
| 23 | 7 | 127626281 | 127643491 | H7C13812.3 | 2340 | 2341 |
| 23 | 7 | 127626281 | 127643988 | H7C13812.4 | 2342 | 2343 |
| 23 | 7 | 127626281 | 127643992 | H7C13812.5 | 2344 | 2345 |
| 23 | 7 | 127626281 | 127644257 | H7C13812.6 | 2346 | 2347 |
| 23 | 7 | 127667352 | 127668156 | H7C13821.1 | 2348 | 2349 |
| 23 | 7 | 127689834 | 127691914 | H7C13826.1 | 2350 | 2351 |
| 23 | 7 | 127689834 | 127692422 | H7C13826.2 | 2352 | 2353 |
| 23 | 7 | 127689834 | 127693132 | H7C13826.3 | 2354 | 2355 |
| 23 | 7 | 127689853 | 127691914 | H7C13826.4 | 2356 | 2357 |
| 23 | 7 | 127689853 | 127692422 | H7C13826.5 | 2358 | 2359 |
| 23 | 7 | 127689853 | 127693132 | H7C13826.6 | 2360 | 2361 |
| 23 | 7 | 127689895 | 127692422 | H7C13827.1 | 2362 | 2363 |
| 23 | 7 | 127689895 | 127693132 | H7C13827.2 | 2364 | 2365 |
| 23 | 7 | 127689907 | 127692422 | H7C13828.1 | 2366 | 2367 |
| 23 | 7 | 127689907 | 127693132 | H7C13828.2 | 2368 | 2369 |
| 23 | 7 | 127689941 | 127703132 | H7C13826.7 | 2370 | 2371 |
| 23 | 7 | 127691193 | 127693132 | H7C13830.1 | 2372 | 2373 |
| 23 | 7 | 127703719 | 127704481 | H7C13834.1 | 2374 | 2375 |
| 23 | 7 | 127704707 | 127707474 | H7C13835.1 | 2376 | 2377 |
| 23 | 7 | 127710752 | 127722307 | H7C13838.1 | 2378 | 2379 |
| 23 | 7 | 127710752 | 127736928 | H7C13838.2 | 2380 | 2381 |
| 23 | 7 | 127710758 | 127738459 | H7C13838.3 | 2382 | 2383 |
| 23 | 7 | 127713178 | 127739320 | H7C13839.1 | 2384 | 2385 |
| 24 | 7 | 145251098 | 147552823 | H7C16453.1 | 2386 | 2387 |
| 24 | 7 | 145251100 | 147555735 | H7C16453.2 | 2388 | 2389 |
| 24 | 7 | 146215675 | 146232349 | H7C16520.1 | 2390 | 2391 |
| 24 | 7 | 146774013 | 147112922 | H7C16453.3 | 2392 | 2393 |
| 24 | 7 | 146806418 | 146807884 | H7C16536.1 | 2394 | 2395 |
| 24 | 7 | 146806450 | 146807883 | H7C16536.2 | 2396 | 2397 |
| 24 | 7 | 147179335 | 147307218 | H7C16453.4 | 2398 | 2399 |
| 24 | 7 | 147474201 | 147552823 | H7C16453.5 | 2400 | 2401 |
| 24 | 7 | 147549489 | 147552823 | H7C16453.6 | 2402 | 2403 |
| 24 | 7 | 147553109 | 147555738 | H7C16558.1 | 2404 | 2405 |
| 24 | 7 | 147569286 | 147580921 | H7C16560.1 | 2406 | 2407 |
| 24 | 7 | 147575739 | 147632097 | H7C16562.1 | 2408 | 2409 |
| 24 | 7 | 147678271 | 147679225 | H7C16566.1 | 2410 | — |
| 24 | 7 | 147715140 | 147715539 | H7C16568.1 | 2411 | 2412 |
| 24 | 7 | 147722422 | 147723840 | H7C16569.1 | 2413 | 2414 |
| 24 | 7 | 147725304 | 147750599 | H7C16571.1 | 2415 | 2416 |
| 24 | 7 | 147771939 | 147772332 | H7C16573.1 | 2417 | 2418 |
| 25 | 7 | 149378653 | 149458310 | H7C16887.1 | 2419 | 2420 |
| 25 | 7 | 149444277 | 149472893 | H7C16905.1 | 2421 | 2422 |
| 25 | 7 | 149457946 | 149463973 | H7C16905.2 | 2423 | 2424 |
| 25 | 7 | 149457947 | 149472893 | H7C16905.3 | 2425 | 2426 |
| 25 | 7 | 149458035 | 149472893 | H7C16905.4 | 2427 | 2428 |
| 25 | 7 | 149458275 | 149472893 | H7C16905.5 | 2429 | 2430 |
| 25 | 7 | 149464523 | 149467459 | H7C16912.1 | 2431 | 2432 |
| 25 | 7 | 149466114 | 149466825 | H7C16913.1 | 2433 | 2434 |
| 25 | 7 | 149471462 | 149472892 | H7C16916.1 | 2435 | 2436 |
| 25 | 7 | 149471462 | 149472892 | H7C16917.1 | 2437 | 2438 |
| 25 | 7 | 149471462 | 149472893 | H7C16918.1 | 2439 | 2440 |
| 25 | 7 | 149471466 | 149472893 | H7C16919.1 | 2441 | 2442 |
| 25 | 7 | 149471529 | 149472892 | H7C16920.1 | 2443 | 2444 |
| 25 | 7 | 149471920 | 149472893 | H7C16916.2 | 2445 | 2446 |
| 25 | 7 | 149471920 | 149472893 | H7C16921.1 | 2447 | 2448 |
| 25 | 7 | 149473054 | 149476384 | H7C16922.1 | 2449 | 2450 |
| 25 | 7 | 149473054 | 149476397 | H7C16922.2 | 2451 | 2452 |
| 25 | 7 | 149473054 | 149476421 | H7C16922.3 | 2453 | 2454 |
| 25 | 7 | 149473054 | 149476425 | H7C16922.4 | 2455 | 2456 |
| 25 | 7 | 149473059 | 149473848 | H7C16922.5 | 2457 | 2458 |
| 25 | 7 | 149503532 | 149508782 | H7C16930.1 | 2459 | 2460 |
| 25 | 7 | 149503542 | 149508782 | H7C16930.2 | 2461 | 2462 |
| 25 | 7 | 149503543 | 149508782 | H7C16930.3 | 2463 | 2464 |
| 25 | 7 | 149503546 | 149508782 | H7C16930.4 | 2465 | 2466 |
| 25 | 7 | 149503553 | 149508782 | H7C16930.5 | 2467 | 2468 |
| 25 | 7 | 149503554 | 149508782 | H7C16930.6 | 2469 | 2470 |
| 25 | 7 | 149503562 | 149508782 | H7C16930.7 | 2471 | 2472 |
| 25 | 7 | 149503569 | 149508782 | H7C16930.8 | 2473 | 2474 |
| 25 | 7 | 149503590 | 149508782 | H7C16930.9 | 2475 | 2476 |
| 25 | 7 | 149503597 | 149508782 | H7C16930.10 | 2477 | 2478 |
| 25 | 7 | 149503614 | 149508782 | H7C16930.11 | 2479 | 2480 |
| 25 | 7 | 149503628 | 149508782 | H7C16930.12 | 2481 | 2482 |
| 25 | 7 | 149503831 | 149508782 | H7C16930.13 | 2483 | 2484 |
| 25 | 7 | 149504447 | 149508782 | H7C16932.1 | 2485 | 2486 |
| 25 | 7 | 149504857 | 149508782 | H7C16934.1 | 2487 | 2488 |
| 25 | 7 | 149505080 | 149508782 | H7C16935.1 | 2489 | 2490 |
| 25 | 7 | 149505257 | 149508782 | H7C16936.1 | 2491 | 2492 |
| 25 | 7 | 149505771 | 149508782 | H7C16937.1 | 2493 | 2494 |
| 25 | 7 | 149505905 | 149508779 | H7C16938.1 | 2495 | 2496 |
| 25 | 7 | 149506907 | 149508218 | H7C16939.1 | 2497 | 2498 |
| 25 | 7 | 149507354 | 149508780 | H7C16940.1 | 2499 | 2500 |
| 25 | 7 | 149507737 | 149508780 | H7C16941.1 | 2501 | 2502 |
| 25 | 7 | 149514053 | 149533369 | H7C16943.1 | 2503 | 2504 |
| 25 | 7 | 149514097 | 149533369 | H7C16943.2 | 2505 | 2506 |
| 25 | 7 | 149514581 | 149518621 | H7C16944.1 | 2507 | 2508 |
| 25 | 7 | 149531245 | 149533367 | H7C16948.1 | 2509 | 2510 |
| 25 | 7 | 149535437 | 149545696 | H7C16950.1 | 2511 | 2512 |
| 25 | 7 | 149535437 | 149547206 | H7C16950.2 | 2513 | 2514 |
| 25 | 7 | 149539881 | 149542656 | H7C16950.3 | 2515 | 2516 |
| 25 | 7 | 149540176 | 149545696 | H7C16950.4 | 2517 | 2518 |
| 25 | 7 | 149540176 | 149547206 | H7C16950.5 | 2519 | 2520 |
| 25 | 7 | 149540472 | 149542963 | H7C16950.6 | 2521 | 2522 |
| 25 | 7 | 149541339 | 149547205 | H7C16954.1 | 2523 | 2524 |
| 25 | 7 | 149542108 | 149542656 | H7C16950.7 | 2525 | 2526 |
| 25 | 7 | 149542157 | 149545696 | H7C16950.8 | 2527 | 2528 |
| 25 | 7 | 149542157 | 149547206 | H7C16950.9 | 2529 | 2530 |
| 25 | 7 | 149542732 | 149545696 | H7C16950.10 | 2531 | 2532 |
| 25 | 7 | 149542732 | 149547206 | H7C16950.11 | 2533 | 2534 |
| 25 | 7 | 149542772 | 149545696 | H7C16950.12 | 2535 | 2536 |
| 25 | 7 | 149542772 | 149547206 | H7C16950.13 | 2537 | 2538 |
| 25 | 7 | 149568389 | 149582525 | H7C16960.1 | 2539 | 2540 |
| 25 | 7 | 149568389 | 149582876 | H7C16960.2 | 2541 | 2542 |
| 25 | 7 | 149585376 | 149614130 | H7C16962.1 | 2543 | 2544 |
| 25 | 7 | 149647294 | 149648498 | H7C16970.1 | 2545 | 2546 |
| 25 | 7 | 149649565 | 149655808 | H7C16971.1 | 2547 | 2548 |
| 25 | 7 | 149702099 | 149708691 | H7C16974.1 | 2549 | 2550 |
| 25 | 7 | 149702105 | 149708691 | H7C16974.2 | 2551 | 2552 |
| 25 | 7 | 149702143 | 149708691 | H7C16974.3 | 2553 | 2554 |
| 25 | 7 | 149760110 | 149767030 | H7C16976.1 | 2555 | 2556 |
| 25 | 7 | 149760110 | 149767044 | H7C16976.2 | 2557 | 2558 |
| 25 | 7 | 149760110 | 149767055 | H7C16976.3 | 2559 | 2560 |
| 25 | 7 | 149760110 | 149767091 | H7C16976.4 | 2561 | 2562 |
| 25 | 7 | 149820435 | 149828267 | H7C16979.1 | 2563 | 2564 |
| 25 | 7 | 149820435 | 149828380 | H7C16979.2 | 2565 | 2566 |
| 25 | 7 | 149820459 | 149825259 | H7C16979.3 | 2567 | 2568 |
| 25 | 7 | 149820462 | 149824438 | H7C16979.4 | 2569 | 2570 |
| 25 | 7 | 149820476 | 149855899 | H7C16979.5 | 2571 | 2572 |
| 25 | 7 | 149820476 | 149856480 | H7C16979.6 | 2573 | 2574 |
| 25 | 7 | 149851337 | 149855899 | H7C16979.7 | 2575 | 2576 |
| 25 | 7 | 149851337 | 149856529 | H7C16979.8 | 2577 | 2578 |
| 25 | 7 | 149851346 | 149855899 | H7C16979.9 | 2579 | 2580 |
| 25 | 7 | 149851346 | 149856480 | H7C16979.10 | 2581 | 2582 |
| 25 | 7 | 149851368 | 149877831 | H7C16979.11 | 2583 | 2584 |
| 25 | 7 | 149851368 | 149878317 | H7C16979.12 | 2585 | 2586 |
| 25 | 7 | 149851368 | 149878385 | H7C16979.13 | 2587 | 2588 |
| 25 | 7 | 149851368 | 149878799 | H7C16979.14 | 2589 | 2590 |
| 25 | 7 | 149872083 | 149877807 | H7C16979.15 | 2591 | 2592 |
| 25 | 7 | 149872083 | 149878317 | H7C16979.16 | 2593 | 2594 |
| 25 | 7 | 149872083 | 149878385 | H7C16979.17 | 2595 | 2596 |
| 25 | 7 | 149872083 | 149878799 | H7C16979.18 | 2597 | 2598 |
| 25 | 7 | 149872170 | 149878385 | H7C16979.19 | 2599 | 2600 |
| 25 | 7 | 149877063 | 149878799 | H7C16988.1 | 2601 | 2602 |
| 25 | 7 | 149877085 | 149878317 | H7C16989.1 | 2603 | 2604 |
| 25 | 7 | 149882118 | 149884651 | H7C16990.1 | 2605 | 2606 |
| 25 | 7 | 149884471 | 149925485 | H7C16991.1 | 2607 | 2608 |
| 25 | 7 | 149895884 | 149913823 | H7C16993.1 | 2609 | 2610 |
| 25 | 7 | 149900460 | 149916797 | H7C16993.2 | 2611 | 2612 |
| 25 | 7 | 149911943 | 149915849 | H7C16993.3 | 2613 | 2614 |
| 25 | 7 | 149925936 | 149928002 | H7C16999.1 | 2615 | 2616 |
| 25 | 7 | 149926022 | 149933345 | H7C16999.2 | 2617 | 2618 |
| 25 | 7 | 149926022 | 149935105 | H7C16999.3 | 2619 | 2620 |
| 25 | 7 | 149926022 | 149935269 | H7C16999.4 | 2621 | 2622 |
| 25 | 7 | 149926022 | 149936098 | H7C16999.5 | 2623 | 2624 |
| 25 | 7 | 149926022 | 149936971 | H7C16999.6 | 2625 | 2626 |
| 25 | 7 | 149926025 | 149928002 | H7C16999.7 | 2627 | 2628 |
| 25 | 7 | 149926027 | 149926333 | H7C17001.1 | 2629 | 2630 |
| 25 | 7 | 149926551 | 149935269 | H7C16999.8 | 2631 | 2632 |
| 25 | 7 | 149928689 | 149935983 | H7C16999.9 | 2633 | 2634 |
| 25 | 7 | 149928692 | 149934424 | H7C16999.10 | 2635 | 2636 |
| 25 | 7 | 149928692 | 149935408 | H7C16999.11 | 2637 | 2638 |
| 25 | 7 | 149935488 | 149939856 | H7C17005.1 | 2639 | 2640 |
| 25 | 7 | 149935506 | 149939855 | H7C17005.2 | 2641 | 2642 |
| 25 | 7 | 149935523 | 149937062 | H7C17005.3 | 2643 | 2644 |
| 25 | 7 | 149935525 | 149939856 | H7C17005.4 | 2645 | 2646 |
| 25 | 7 | 149935533 | 149936898 | H7C17005.5 | 2647 | 2648 |
| 25 | 7 | 149936264 | 149939856 | H7C17005.6 | 2649 | 2650 |
| 25 | 7 | 149936264 | 149939856 | H7C17005.7 | 2651 | 2652 |
| 25 | 7 | 149936791 | 149939854 | H7C17005.8 | 2653 | 2654 |
| 25 | 7 | 149936872 | 149939856 | H7C17005.9 | 2655 | 2656 |
| 25 | 7 | 149937995 | 149939856 | H7C17005.10 | 2657 | 2658 |
| 25 | 7 | 149938059 | 149939854 | H7C17005.11 | 2659 | 2660 |
| 25 | 7 | 149939196 | 149939854 | H7C17005.12 | 2661 | 2662 |
| 26 | 7 | 150079691 | 150090565 | H7C17017.1 | 2663 | 2664 |
| 26 | 7 | 150079691 | 150111060 | H7C17017.2 | 2665 | 2666 |
| 26 | 7 | 150079691 | 150113051 | H7C17017.3 | 2667 | 2668 |
| 26 | 7 | 150079696 | 150098803 | H7C17018.1 | 2669 | 2670 |
| 26 | 7 | 150084145 | 150090565 | H7C17017.4 | 2671 | 2672 |
| 26 | 7 | 150084145 | 150109582 | H7C17017.5 | 2673 | 2674 |
| 26 | 7 | 150084145 | 150113051 | H7C17017.6 | 2675 | 2676 |
| 26 | 7 | 150084169 | 150109582 | H7C17017.7 | 2677 | 2678 |
| 26 | 7 | 150125752 | 150149334 | H7C17023.1 | 2679 | 2680 |
| 26 | 7 | 150136694 | 150138670 | H7C17023.2 | 2681 | 2682 |
| 26 | 7 | 150145268 | 150149334 | H7C17023.3 | 2683 | 2684 |
| 26 | 7 | 150145268 | 150149363 | H7C17023.4 | 2685 | 2686 |
| 26 | 7 | 150146971 | 150147858 | H7C17031.1 | 2687 | 2688 |
| 26 | 7 | 150148589 | 150150362 | H7C17033.1 | 2689 | 2690 |
| 26 | 7 | 150149362 | 150159234 | H7C17033.2 | 2691 | 2692 |
| 26 | 7 | 150149606 | 150150732 | H7C17033.3 | 2693 | 2694 |
| 26 | 7 | 150155652 | 150158244 | H7C17033.4 | 2695 | 2696 |
| 26 | 7 | 150163157 | 150187488 | H7C17036.1 | 2697 | 2698 |
| 26 | 7 | 150163176 | 150180302 | H7C17036.2 | 2699 | 2700 |
| 26 | 7 | 150163177 | 150169163 | H7C17036.3 | 2701 | 2702 |
| 26 | 7 | 150163184 | 150180302 | H7C17036.4 | 2703 | 2704 |
| 26 | 7 | 150163184 | 150180302 | H7C17036.5 | 2705 | 2706 |
| 26 | 7 | 150163197 | 150169065 | H7C17036.6 | 2707 | 2708 |
| 26 | 7 | 150169236 | 150172323 | H7C17036.7 | 2709 | 2710 |
| 26 | 7 | 150172422 | 150180302 | H7C17036.8 | 2711 | 2712 |
| 26 | 7 | 150178806 | 150180302 | H7C17036.9 | 2713 | 2714 |
| 26 | 7 | 150183252 | 150187488 | H7C17036.10 | 2715 | 2716 |
| 26 | 7 | 150183252 | 150187488 | H7C17036.11 | 2717 | 2718 |
| 26 | 7 | 150183252 | 150187491 | H7C17036.12 | 2719 | 2720 |
| 26 | 7 | 150183252 | 150187491 | H7C17036.13 | 2721 | 2722 |
| 26 | 7 | 150185654 | 150187489 | H7C17036.14 | 2723 | 2724 |
| 26 | 7 | 150185947 | 150187491 | H7C17036.15 | 2725 | 2726 |
| 26 | 7 | 150185968 | 150187464 | H7C17036.16 | 2727 | 2728 |
| 26 | 7 | 150188546 | 150192648 | H7C17048.1 | 2729 | 2730 |
| 26 | 7 | 150194337 | 150211262 | H7C17050.1 | 2731 | 2732 |
| 26 | 7 | 150194401 | 150211262 | H7C17050.2 | 2733 | 2734 |
| 26 | 7 | 150195985 | 150211262 | H7C17050.3 | 2735 | 2736 |
| 26 | 7 | 150197375 | 150211262 | H7C17050.4 | 2737 | 2738 |
| 26 | 7 | 150203464 | 150204337 | H7C17053.1 | 2739 | 2740 |
| 26 | 7 | 150208341 | 150209859 | H7C17055.1 | 2741 | 2742 |
| 26 | 7 | 150209020 | 150211262 | H7C17050.5 | 2743 | 2744 |
| 26 | 7 | 150211327 | 150215599 | H7C17059.1 | 2745 | 2746 |
| 26 | 7 | 150211354 | 150212701 | H7C17059.2 | 2747 | 2748 |
| 26 | 7 | 150211354 | 150213844 | H7C17059.3 | 2749 | 2750 |
| 26 | 7 | 150211354 | 150215569 | H7C17059.4 | 2751 | 2752 |
| 26 | 7 | 150211354 | 150215591 | H7C17059.5 | 2753 | 2754 |
| 26 | 7 | 150211354 | 150215591 | H7C17059.6 | 2755 | 2756 |
| 26 | 7 | 150211354 | 150215599 | H7C17059.7 | 2757 | 2758 |
| 26 | 7 | 150211354 | 150215599 | H7C17059.8 | 2759 | 2760 |
| 26 | 7 | 150215814 | 150217713 | H7C17063.1 | 2761 | 2762 |
| 26 | 7 | 150215814 | 150217799 | H7C17063.2 | 2763 | 2764 |
| 26 | 7 | 150215814 | 150217941 | H7C17063.3 | 2765 | 2766 |
| 26 | 7 | 150215814 | 150218196 | H7C17063.4 | 2767 | 2768 |
| 26 | 7 | 150215814 | 150218268 | H7C17063.5 | 2769 | 2770 |
| 26 | 7 | 150215820 | 150217710 | H7C17064.1 | 2771 | 2772 |
| 26 | 7 | 150217009 | 150218208 | H7C17063.6 | 2773 | 2774 |
| 26 | 7 | 150220606 | 150279172 | H7C17065.1 | 2775 | 2776 |
| 26 | 7 | 150221473 | 150279172 | H7C17065.2 | 2777 | 2778 |
| 26 | 7 | 150221636 | 150252824 | H7C17065.3 | 2779 | 2780 |
| 26 | 7 | 150249412 | 150258373 | H7C17065.4 | 2781 | 2782 |
| 26 | 7 | 150252842 | 150279172 | H7C17079.1 | 2783 | 2784 |
| 26 | 7 | 150253207 | 150258373 | H7C17065.5 | 2785 | 2786 |
| 26 | 7 | 150253207 | 150258601 | H7C17065.6 | 2787 | 2788 |
| 26 | 7 | 150263330 | 150266045 | H7C17065.7 | 2789 | 2790 |
| 26 | 7 | 150274302 | 150279172 | H7C17065.8 | 2791 | 2792 |
| 26 | 7 | 150278740 | 150279172 | H7C17096.1 | 2793 | 2794 |
| 26 | 7 | 150283323 | 150309221 | H7C17102.1 | 2795 | 2796 |
| 26 | 7 | 150283323 | 150310080 | H7C17102.2 | 2797 | 2798 |
| 26 | 7 | 150310432 | 150321878 | H7C17108.1 | 2799 | 2800 |
| 26 | 7 | 150310432 | 150322126 | H7C17108.2 | 2801 | 2802 |
| 26 | 7 | 150310432 | 150322567 | H7C17108.3 | 2803 | 2804 |
| 26 | 7 | 150325610 | 150327128 | H7C17111.1 | 2805 | 2806 |
| 26 | 7 | 150325610 | 150330304 | H7C17111.2 | 2807 | 2808 |
| 26 | 7 | 150330320 | 150340230 | H7C17112.1 | 2809 | 2810 |
| 26 | 7 | 150342570 | 150345754 | H7C17113.1 | 2811 | 2812 |
| 26 | 7 | 150342570 | 150362314 | H7C17113.2 | 2813 | 2814 |
| 26 | 7 | 150346217 | 150362314 | H7C17113.3 | 2815 | 2816 |
| 26 | 7 | 150348117 | 150362314 | H7C17113.4 | 2817 | 2818 |
| 26 | 7 | 150348235 | 150362314 | H7C17113.5 | 2819 | 2820 |
| 26 | 7 | 150367199 | 150373561 | H7C17119.1 | 2821 | 2822 |
| 26 | 7 | 150367217 | 150373561 | H7C17119.2 | 2823 | 2824 |
| 26 | 7 | 150368130 | 150373553 | H7C17119.3 | 2825 | 2826 |
| 26 | 7 | 150368130 | 150373554 | H7C17119.4 | 2827 | 2828 |
| 26 | 7 | 150371522 | 150373561 | H7C17122.1 | 2829 | 2830 |
| 26 | 7 | 150373099 | 150376159 | H7C17123.1 | 2831 | 2832 |
| 26 | 7 | 150373099 | 150409988 | H7C17123.2 | 2833 | 2834 |
| 26 | 7 | 150373099 | 150410667 | H7C17123.3 | 2835 | 2836 |
| 26 | 7 | 150373099 | 150412417 | H7C17123.4 | 2837 | 2838 |
| 26 | 7 | 150373707 | 150376159 | H7C17123.5 | 2839 | 2840 |
| 26 | 7 | 150373707 | 150383707 | H7C17123.6 | 2841 | 2842 |
| 26 | 7 | 150373707 | 150409988 | H7C17123.7 | 2843 | 2844 |
| 26 | 7 | 150373707 | 150410667 | H7C17123.8 | 2845 | 2846 |
| 26 | 7 | 150373707 | 150412417 | H7C17123.9 | 2847 | 2848 |
| 26 | 7 | 150373708 | 150374387 | H7C17124.1 | 2849 | 2850 |
| 26 | 7 | 150384058 | 150389124 | H7C17128.1 | 2851 | 2852 |
| 26 | 7 | 150476505 | 150512780 | H7C17137.1 | 2853 | 2854 |
| 26 | 7 | 150476505 | 150513193 | H7C17137.2 | 2855 | 2856 |
| 26 | 7 | 150476505 | 150513193 | H7C17137.3 | 2857 | 2858 |
| 26 | 7 | 150486157 | 150498187 | H7C17137.4 | 2859 | 2860 |
| 26 | 7 | 150497443 | 150500589 | H7C17141.1 | 2861 | 2862 |
| 26 | 7 | 150511793 | 150513307 | H7C17148.1 | 2863 | 2864 |
| 26 | 7 | 150511793 | 150513446 | H7C17149.1 | 2865 | 2866 |
| 26 | 7 | 150512569 | 150515152 | H7C17150.1 | 2867 | 2868 |
| 26 | 7 | 150515854 | 150545130 | H7C17151.1 | 2869 | 2870 |
| 26 | 7 | 150515854 | 150545388 | H7C17151.2 | 2871 | 2872 |
| 26 | 7 | 150541138 | 150543613 | H7C17151.3 | 2873 | 2874 |
| 26 | 7 | 150541138 | 150543613 | H7C17163.1 | 2875 | 2876 |
| 26 | 7 | 150541138 | 150545130 | H7C17151.4 | 2877 | 2878 |
| 26 | 7 | 150543293 | 150545435 | H7C17151.5 | 2879 | 2880 |
| 26 | 7 | 150543894 | 150548451 | H7C17166.1 | 2881 | 2882 |
| 26 | 7 | 150543969 | 150549822 | H7C17166.2 | 2883 | 2884 |
| 26 | 7 | 150544018 | 150547778 | H7C17166.3 | 2885 | 2886 |
| 26 | 7 | 150544776 | 150546741 | H7C17166.4 | 2887 | 2888 |
| 27 | 7 | 156629195 | 156709609 | H7C17932.1 | 2889 | 2890 |
| 27 | 7 | 156650752 | 156709609 | H7C17931.1 | 2891 | 2892 |
| 27 | 7 | 156670109 | 156678494 | H7C17931.2 | 2893 | 2894 |
| 27 | 7 | 156715403 | 156716871 | H7C17962.1 | 2895 | 2896 |
| 27 | 7 | 156733487 | 156762953 | H7C17963.1 | 2897 | 2898 |
| 27 | 7 | 156758398 | 156791886 | H7C17964.1 | 2899 | 2900 |
| 27 | 7 | 156793491 | 156795758 | H7C17966.1 | 2901 | 2902 |
| 27 | 7 | 156805463 | 156809011 | H7C17967.1 | 2903 | 2904 |
| 27 | 7 | 156808735 | 156810286 | H7C17969.1 | 2905 | 2906 |
| 27 | 7 | 156817952 | 156819495 | H7C17971.1 | 2907 | 2908 |
| 27 | 7 | 156831222 | 156832923 | H7C17972.1 | 2909 | 2910 |
| 27 | 7 | 156831222 | 156861202 | H7C17973.1 | 2911 | 2912 |
| 27 | 7 | 156831222 | 156861380 | H7C17973.2 | 2913 | 2914 |
| 27 | 7 | 156831222 | 157833944 | H7C17973.3 | 2915 | 2916 |
| 27 | 7 | 156831222 | 157879894 | H7C17973.4 | 2917 | 2918 |
| 27 | 7 | 156831222 | 157879894 | H7C17973.5 | 2919 | 2920 |
| 27 | 7 | 156831222 | 157879941 | H7C17973.6 | 2921 | 2922 |
| 27 | 7 | 156831226 | 156832720 | H7C17974.1 | 2923 | 2924 |
| 27 | 7 | 156832683 | 157879894 | H7C17973.7 | 2925 | 2926 |
| 27 | 7 | 156887274 | 156896226 | H7C17973.8 | 2927 | 2928 |
| 27 | 7 | 156894679 | 156906074 | H7C17973.9 | 2929 | 2930 |
| 27 | 7 | 156906190 | 156910933 | H7C17991.1 | 2931 | 2932 |
| 27 | 7 | 157023976 | 157024625 | H7C18011.1 | 2933 | 2934 |
| 27 | 7 | 157146696 | 157149976 | H7C18029.1 | 2935 | 2936 |
| 27 | 7 | 157146752 | 157158256 | H7C18029.2 | 2937 | 2938 |
| 27 | 7 | 157150208 | 157151566 | H7C18030.1 | 2939 | 2940 |
| 27 | 7 | 157319540 | 157323296 | H7C18058.1 | 2941 | 2942 |
| 27 | 7 | 157392592 | 157403414 | H7C17973.10 | 2943 | 2944 |
| 27 | 7 | 157480076 | 157480760 | H7C18070.1 | 2945 | 2946 |
| 27 | 7 | 157609075 | 157879938 | H7C17973.11 | 2947 | 2948 |
| 27 | 7 | 157697780 | 157698578 | H7C18094.1 | 2949 | 2950 |
| 27 | 7 | 157740773 | 157879929 | H7C17973.12 | 2951 | 2952 |
| 27 | 7 | 157912777 | 157917108 | H7C18126.1 | 2953 | 2954 |
| 27 | 7 | 157923197 | 157939349 | H7C18128.1 | 2955 | 2956 |
| 27 | 7 | 157923197 | 157967756 | H7C18128.2 | 2957 | 2958 |
| 27 | 7 | 157923197 | 157996933 | H7C18128.3 | 2959 | 2960 |
| 27 | 7 | 157923477 | 157939349 | H7C18128.4 | 2961 | 2962 |
| 27 | 7 | 157923477 | 157967756 | H7C18128.5 | 2963 | 2964 |
| 27 | 7 | 157923477 | 157995871 | H7C18128.6 | 2965 | 2966 |
| 27 | 7 | 157923477 | 157996933 | H7C18128.7 | 2967 | 2968 |
| 27 | 7 | 157923477 | 157996977 | H7C18128.8 | 2969 | 2970 |
| 27 | 7 | 157931963 | 157996977 | H7C18128.9 | 2971 | 2972 |
| 27 | 7 | 157985579 | 157988818 | H7C18128.10 | 2973 | 2974 |
| 27 | 7 | 158011914 | 158012337 | H7C18134.1 | 2975 | 2976 |
| 27 | 7 | 158023161 | 158025088 | H7C18137.1 | 2977 | 2978 |
| 27 | 7 | 158023161 | 158035230 | H7C18138.1 | 2979 | 2980 |
| 27 | 7 | 158023161 | 158037211 | H7C18138.2 | 2981 | 2982 |
| 27 | 7 | 158023161 | 158039825 | H7C18136.1 | 2983 | 2984 |
| 27 | 7 | 158023161 | 158110917 | H7C18138.3 | 2985 | 2986 |
| 27 | 7 | 158023161 | 158121664 | H7C18138.4 | 2987 | 2988 |
| 27 | 7 | 158023161 | 158121795 | H7C18138.5 | 2989 | 2990 |
| 27 | 7 | 158025610 | 158035230 | H7C18138.6 | 2991 | 2992 |
| 27 | 7 | 158025610 | 158037211 | H7C18138.7 | 2993 | 2994 |
| 27 | 7 | 158025610 | 158110917 | H7C18138.8 | 2995 | 2996 |
| 27 | 7 | 158025768 | 158037211 | H7C18138.9 | 2997 | 2998 |
| 27 | 7 | 158025768 | 158110917 | H7C18138.10 | 2999 | 3000 |
| 27 | 7 | 158074659 | 158075421 | H7C18159.1 | 3001 | 3002 |
| 27 | 7 | 158079928 | 158080580 | H7C18138.11 | 3003 | 3004 |
| 28 | 9 | 26791730 | 26795860 | H9C2222.1 | 3005 | 3006 |
| 28 | 9 | 26830575 | 26882801 | H9C2224.1 | 3007 | 3008 |
| 28 | 9 | 26830575 | 26882801 | H9C2224.2 | 3009 | 3010 |
| 28 | 9 | 26830684 | 26882801 | H9C2224.3 | 3011 | 3012 |
| 28 | 9 | 26830684 | 26882801 | H9C2224.4 | 3013 | 3014 |
| 28 | 9 | 26831257 | 26882801 | H9C2224.5 | 3015 | 3016 |
| 28 | 9 | 26831257 | 26882801 | H9C2224.6 | 3017 | 3018 |
| 28 | 9 | 26831257 | 26883155 | H9C2224.7 | 3019 | 3020 |
| 28 | 9 | 26893368 | 26937463 | H9C2240.1 | 3021 | 3022 |
| 28 | 9 | 26895340 | 26937463 | H9C2240.2 | 3023 | 3024 |
| 28 | 9 | 26897562 | 26937463 | H9C2240.3 | 3025 | 3026 |
| 28 | 9 | 26945777 | 26946305 | H9C2254.1 | 3027 | 3028 |
| 28 | 9 | 26946401 | 27045756 | H9C2255.1 | 3029 | 3030 |
| 28 | 9 | 26946401 | 27052930 | H9C2255.2 | 3031 | 3032 |
| 28 | 9 | 26983587 | 26995691 | H9C2265.1 | 3033 | 3034 |
| 28 | 9 | 26985538 | 26987767 | H9C2265.2 | 3035 | 3036 |
| 28 | 9 | 26985541 | 26995691 | H9C2265.3 | 3037 | 3038 |
| 28 | 9 | 27050298 | 27052930 | H9C2255.3 | 3039 | 3040 |
| 28 | 9 | 27092627 | 27094722 | H9C2277.1 | 3041 | 3042 |
| 28 | 9 | 27099235 | 27220171 | H9C2279.1 | 3043 | 3044 |
| 28 | 9 | 27099235 | 27220175 | H9C2279.2 | 3045 | 3046 |
| 28 | 9 | 27235681 | 27272791 | H9C2288.1 | 3047 | 3048 |
| 28 | 9 | 27274655 | 27287137 | H9C2294.1 | 3049 | 3050 |
| 28 | 9 | 27282064 | 27287134 | H9C2294.2 | 3051 | 3052 |
| 28 | 9 | 27282140 | 27287134 | H9C2294.3 | 3053 | 3054 |
| 28 | 9 | 27282395 | 27286998 | H9C2294.4 | 3055 | 3056 |
| 29 | 9 | 70103442 | 70192428 | H9C5133.1 | 3057 | 3058 |
| 29 | 9 | 70103442 | 70196892 | H9C5133.2 | 3059 | 3060 |
| 29 | 9 | 70103442 | 70199357 | H9C5133.3 | 3061 | 3062 |
| 29 | 9 | 70166944 | 70199343 | H9C5148.1 | 3063 | 3064 |
| 29 | 9 | 70178484 | 70185326 | H9C5151.1 | 3065 | 3066 |
| 29 | 9 | 70179578 | 70199357 | H9C5152.1 | 3067 | 3068 |
| 29 | 9 | 70194395 | 70202217 | H9C5155.1 | 3069 | 3070 |
| 29 | 9 | 70229036 | 70259094 | H9C5162.1 | 3071 | 3072 |
| 29 | 9 | 70229068 | 70259094 | H9C5162.2 | 3073 | 3074 |
| 29 | 9 | 70379521 | 70713554 | H9C5181.1 | 3075 | 3076 |
| 29 | 9 | 70379521 | 70713554 | H9C5181.2 | 3077 | 3078 |
| 29 | 9 | 70379521 | 70713554 | H9C5181.3 | 3079 | 3080 |
| 29 | 9 | 70379521 | 70713554 | H9C5181.4 | 3081 | 3082 |
| 29 | 9 | 70379521 | 70713554 | H9C5181.5 | 3083 | 3084 |
| 29 | 9 | 70379521 | 70713554 | H9C5181.6 | 3085 | 3086 |
| 29 | 9 | 70379521 | 70966068 | H9C5181.7 | 3087 | 3088 |
| 29 | 9 | 70435395 | 70447950 | H9C5181.8 | 3089 | 3090 |
| 29 | 9 | 70446309 | 70480062 | H9C5195.1 | 3091 | 3092 |
| 29 | 9 | 70552516 | 70557343 | H9C5208.1 | 3093 | 3094 |
| 29 | 9 | 70570509 | 70575336 | H9C5210.1 | 3095 | 3096 |
| 29 | 9 | 70628330 | 70713554 | H9C5181.9 | 3097 | 3098 |
| 29 | 9 | 70636116 | 70713554 | H9C5181.10 | 3099 | 3100 |
| 29 | 9 | 70668915 | 71291374 | H9C5181.11 | 3101 | 3102 |
| 30 | 9 | 93160509 | 93188243 | H9C7236.1 | 3103 | 3104 |
| 30 | 9 | 93272178 | 93273136 | H9C7246.1 | 3105 | 3106 |
| 30 | 9 | 93277114 | 93278959 | H9C7248.1 | 3107 | 3108 |
| 30 | 9 | 93277894 | 93280662 | H9C7249.1 | 3109 | 3110 |
| 30 | 9 | 93278435 | 93280662 | H9C7249.2 | 3111 | 3112 |
| 30 | 9 | 93280537 | 93293448 | H9C7252.1 | 3113 | 3114 |
| 30 | 9 | 93286681 | 93292386 | H9C7252.2 | 3115 | 3116 |
| 30 | 9 | 93286681 | 93292820 | H9C7252.3 | 3117 | 3118 |
| 30 | 9 | 93286681 | 93293388 | H9C7252.4 | 3119 | 3120 |
| 30 | 9 | 93286681 | 93293448 | H9C7252.5 | 3121 | 3122 |
| 30 | 9 | 93286681 | 93293448 | H9C7252.6 | 3123 | 3124 |
| 30 | 9 | 93286681 | 93293448 | H9C7252.7 | 3125 | 3126 |
| 30 | 9 | 93286681 | 93293448 | H9C7252.8 | 3127 | 3128 |
| 30 | 9 | 93286681 | 93295429 | H9C7252.9 | 3129 | 3130 |
| 30 | 9 | 93288333 | 93292386 | H9C7252.10 | 3131 | 3132 |
| 30 | 9 | 93288333 | 93292820 | H9C7252.11 | 3133 | 3134 |
| 30 | 9 | 93288333 | 93293388 | H9C7252.12 | 3135 | 3136 |
| 30 | 9 | 93288333 | 93293448 | H9C7252.13 | 3137 | 3138 |
| 30 | 9 | 93288333 | 93293448 | H9C7252.14 | 3139 | 3140 |
| 30 | 9 | 93288333 | 93293448 | H9C7252.15 | 3141 | 3142 |
| 30 | 9 | 93288333 | 93293448 | H9C7252.16 | 3143 | 3144 |
| 30 | 9 | 93288333 | 93295429 | H9C7252.17 | 3145 | 3146 |
| 30 | 9 | 93292317 | 93293448 | H9C7252.18 | 3147 | 3148 |
| 30 | 9 | 93292352 | 93293448 | H9C7252.19 | 3149 | 3150 |
| 30 | 9 | 93292361 | 93292804 | H9C7252.20 | 3151 | 3152 |
| 30 | 9 | 93293494 | 93373243 | H9C7257.1 | 3153 | 3154 |
| 30 | 9 | 93293494 | 93407953 | H9C7257.2 | 3155 | 3156 |
| 30 | 9 | 93293494 | 93408238 | H9C7257.3 | 3157 | 3158 |
| 30 | 9 | 93313060 | 93313409 | H9C7262.1 | 3159 | 3160 |
| 30 | 9 | 93380769 | 93402750 | H9C7279.1 | 3161 | 3162 |
| 30 | 9 | 93418463 | 93521424 | H9C7288.1 | 3163 | 3164 |
| 30 | 9 | 93418583 | 93521424 | H9C7288.2 | 3165 | 3166 |
| 30 | 9 | 93418586 | 93521424 | H9C7288.3 | 3167 | 3168 |
| 30 | 9 | 93512980 | 93514127 | H9C7308.1 | 3169 | 3170 |
| 30 | 9 | 93513309 | 93514127 | H9C7308.2 | 3171 | 3172 |
| 30 | 9 | 93515641 | 93518527 | H9C7288.4 | 3173 | 3174 |
| 30 | 9 | 93517412 | 93521336 | H9C7288.5 | 3175 | 3176 |
| 30 | 9 | 93517412 | 93521424 | H9C7288.6 | 3177 | 3178 |
| 30 | 9 | 93547999 | 93574191 | H9C7314.1 | 3179 | 3180 |
| 30 | 9 | 93698860 | 93700170 | H9C7315.1 | 3181 | 3182 |
| 31 | 9 | 110268483 | 110292576 | H9C9036.1 | 3183 | 3184 |
| 31 | 9 | 110273772 | 110276284 | H9C9039.1 | 3185 | 3186 |
| 31 | 9 | 110276191 | 110285457 | H9C9040.1 | 3187 | 3188 |
| 31 | 9 | 110313114 | 110314056 | H9C9043.1 | 3189 | 3190 |
| 31 | 9 | 110317716 | 110355946 | H9C9043.2 | 3191 | 3192 |
| 31 | 9 | 110317716 | 110421715 | H9C9043.3 | 3193 | 3194 |
| 31 | 9 | 110421067 | 110423214 | H9C9065.1 | 3195 | 3196 |
| 31 | 9 | 110441307 | 110447046 | H9C9066.1 | 3197 | 3198 |
| 31 | 9 | 110510605 | 110642833 | H9C9069.1 | 3199 | 3200 |
| 31 | 9 | 110617621 | 110629936 | H9C9069.2 | 3201 | 3202 |
| 31 | 9 | 110715088 | 110879891 | H9C9083.1 | 3203 | 3204 |
| 31 | 9 | 110715088 | 110879920 | H9C9083.2 | 3205 | 3206 |
| 31 | 9 | 110715610 | 110841301 | H9C9083.3 | 3207 | 3208 |
| 31 | 9 | 110715610 | 110879920 | H9C9083.4 | 3209 | 3210 |
| 31 | 9 | 110715610 | 110879920 | H9C9083.5 | 3211 | 3212 |
| 32 | 10 | 19432531 | 19936917 | H10C2456.1 | 3213 | 3214 |
| 32 | 10 | 19963498 | 20063413 | H10C2475.1 | 3215 | 3216 |
| 32 | 10 | 20021244 | 20119336 | H10C2475.2 | 3217 | 3218 |
| 32 | 10 | 20021413 | 20063413 | H10C2475.3 | 3219 | 3220 |
| 32 | 10 | 20039267 | 20057485 | H10C2479.1 | 3221 | 3222 |
| 32 | 10 | 20050522 | 20057457 | H10C2479.2 | 3223 | 3224 |
| 32 | 10 | 20050522 | 20057485 | H10C2479.3 | 3225 | 3226 |
| 32 | 10 | 20062708 | 20064004 | H10C2480.1 | 3227 | 3228 |
| 32 | 10 | 20145352 | 20609127 | H10C2485.1 | 3229 | 3230 |
| 32 | 10 | 20145352 | 20609127 | H10C2485.2 | 3231 | 3232 |
| 32 | 10 | 20145352 | 20609288 | H10C2485.3 | 3233 | 3234 |
| 32 | 10 | 20145352 | 20610607 | H10C2485.4 | 3235 | 3236 |
| 32 | 10 | 20399743 | 20420719 | H10C2541.1 | 3237 | 3238 |
| 33 | 10 | 99884417 | 99994644 | H10C11128.5 | 3239 | 3240 |
| 33 | 10 | 99912628 | 99994644 | H10C11128.8 | 3241 | 3242 |
| 33 | 10 | 99958511 | 99994644 | H10C11128.9 | 3243 | 3244 |
| 33 | 10 | 99997432 | 100017997 | H10C11145.1 | 3245 | 3246 |
| 33 | 10 | 100001769 | 100006319 | H10C11148.1 | 3247 | 3248 |
| 33 | 10 | 100127210 | 100133612 | H10C11158.1 | 3249 | 3250 |
| 33 | 10 | 100133311 | 100141817 | H10C11159.1 | 3251 | 3252 |
| 33 | 10 | 100133312 | 100161750 | H10C11159.2 | 3253 | 3254 |
| 33 | 10 | 100133312 | 100165332 | H10C11159.3 | 3255 | 3256 |
| 33 | 10 | 100163696 | 100164805 | H10C11159.4 | 3257 | 3258 |
| 33 | 10 | 100163696 | 100165566 | H10C11164.1 | 3259 | 3260 |
| 33 | 10 | 100164902 | 100167470 | H10C11166.1 | 3261 | 3262 |
| 33 | 10 | 100164902 | 100168185 | H10C11166.2 | 3263 | 3264 |
| 33 | 10 | 100164902 | 100175409 | H10C11166.3 | 3265 | 3266 |
| 33 | 10 | 100164902 | 100196694 | H10C11166.4 | 3267 | 3268 |
| 33 | 10 | 100164902 | 100196694 | H10C11166.5 | 3269 | 3270 |
| 33 | 10 | 100164902 | 100196694 | H10C11166.6 | 3271 | 3272 |
| 33 | 10 | 100165945 | 100168185 | H10C11166.7 | 3273 | 3274 |
| 33 | 10 | 100165945 | 100175409 | H10C11166.8 | 3275 | 3276 |
| 33 | 10 | 100165945 | 100196694 | H10C11166.10 | 3277 | 3278 |
| 33 | 10 | 100165945 | 100196694 | H10C11166.11 | 3279 | 3280 |
| 33 | 10 | 100165945 | 100196694 | H10C11166.9 | 3281 | 3282 |
| 33 | 10 | 100166763 | 100168185 | H10C11166.12 | 3283 | 3284 |
| 33 | 10 | 100166763 | 100196694 | H10C11166.13 | 3285 | 3286 |
| 33 | 10 | 100178462 | 100196694 | H10C11166.14 | 3287 | 3288 |
| 33 | 10 | 100178894 | 100181265 | H10C11166.15 | 3289 | 3290 |
| 33 | 10 | 100178894 | 100196694 | H10C11166.16 | 3291 | 3292 |
| 33 | 10 | 100179005 | 100196694 | H10C11166.17 | 3293 | 3294 |
| 33 | 10 | 100184961 | 100196673 | H10C11166.18 | 3295 | 3296 |
| 33 | 10 | 100191701 | 100196673 | H10C11166.19 | 3297 | 3298 |
| 33 | 10 | 100191701 | 100196674 | H10C11166.20 | 3299 | 3300 |
| 33 | 10 | 100192677 | 100196673 | H10C11166.21 | 3301 | 3302 |
| 33 | 10 | 100194505 | 100196684 | H10C11166.22 | 3303 | 3304 |
| 33 | 10 | 100196103 | 100203461 | H10C11174.1 | 3305 | 3306 |
| 33 | 10 | 100196103 | 100203550 | H10C11174.2 | 3307 | 3308 |
| 33 | 10 | 100196103 | 100203550 | H10C11174.3 | 3309 | 3310 |
| 33 | 10 | 100208335 | 100216989 | H10C11177.1 | 3311 | 3312 |
| 33 | 10 | 100208335 | 100985549 | H10C11177.2 | 3313 | 3314 |
| 33 | 10 | 100208335 | 100985609 | H10C11177.3 | 3315 | 3316 |
| 33 | 10 | 100208335 | 100985609 | H10C11177.4 | 3317 | 3318 |
| 33 | 10 | 100208335 | 100985609 | H10C11177.5 | 3319 | 3320 |
| 33 | 10 | 101080022 | 101144075 | H10C11198.1 | 3321 | 3322 |
| 33 | 10 | 101107293 | 101144075 | H10C11198.2 | 3323 | 3324 |
| 33 | 10 | 101118077 | 101127275 | H10C11198.3 | 3325 | 3326 |
| 33 | 10 | 101146614 | 101153791 | H10C11206.1 | 3327 | 3328 |
| 33 | 10 | 101146614 | 101181214 | H10C11206.2 | 3329 | 3330 |
| 33 | 10 | 101146859 | 101153791 | H10C11206.3 | 3331 | 3332 |
| 33 | 10 | 101147028 | 101153791 | H10C11206.4 | 3333 | 3334 |
| 33 | 10 | 101147028 | 101181214 | H10C11206.5 | 3335 | 3336 |
| 33 | 10 | 101153176 | 101153775 | H10C11206.6 | 3337 | 3338 |
| 33 | 10 | 101170013 | 101180395 | H10C11206.7 | 3339 | 3340 |
| 33 | 10 | 101180937 | 101185527 | H10C11218.1 | 3341 | 3342 |
| 34 | 11 | 11819545 | 11934579 | H11C1959.1 | 3343 | 3344 |
| 34 | 11 | 11819545 | 11934695 | H11C1959.2 | 3345 | 3346 |
| 34 | 11 | 11819545 | 11935072 | H11C1959.3 | 3347 | 3348 |
| 34 | 11 | 11819545 | 11935647 | H11C1959.4 | 3349 | 3350 |
| 34 | 11 | 11819545 | 11937276 | H11C1959.5 | 3351 | 3352 |
| 34 | 11 | 11819545 | 11937449 | H11C1959.6 | 3353 | 3354 |
| 34 | 11 | 11858308 | 11862825 | H11C1959.7 | 3355 | 3356 |
| 34 | 11 | 11916452 | 11921997 | H11C1959.8 | 3357 | 3358 |
| 34 | 11 | 11928595 | 11935072 | H11C1959.9 | 3359 | 3360 |
| 34 | 11 | 11928595 | 11935647 | H11C1959.10 | 3361 | 3362 |
| 34 | 11 | 11928595 | 11937276 | H11C1959.11 | 3363 | 3364 |
| 34 | 11 | 11928595 | 11937449 | H11C1959.12 | 3365 | 3366 |
| 34 | 11 | 11929819 | 11934579 | H11C1959.13 | 3367 | 3368 |
| 34 | 11 | 11929819 | 11934695 | H11C1959.14 | 3369 | 3370 |
| 34 | 11 | 11929819 | 11935072 | H11C1959.15 | 3371 | 3372 |
| 34 | 11 | 11929819 | 11935647 | H11C1959.16 | 3373 | 3374 |
| 34 | 11 | 11929819 | 11937449 | H11C1959.17 | 3375 | 3376 |
| 34 | 11 | 11940610 | 11986753 | H11C1983.1 | 3377 | 3378 |
| 34 | 11 | 11940610 | 11987205 | H11C1983.2 | 3379 | 3380 |
| 34 | 11 | 11940610 | 11987657 | H11C1983.3 | 3381 | 3382 |
| 34 | 11 | 11941224 | 11986753 | H11C1983.4 | 3383 | 3384 |
| 34 | 11 | 11941224 | 11987205 | H11C1983.5 | 3385 | 3386 |
| 34 | 11 | 11941224 | 11987657 | H11C1983.6 | 3387 | 3388 |
| 34 | 11 | 11956980 | 11987848 | H11C1983.7 | 3389 | 3390 |
| 34 | 11 | 11978983 | 11987436 | H11C1983.8 | 3391 | 3392 |
| 34 | 11 | 11978983 | 11987861 | H11C1983.9 | 3393 | 3394 |
| 34 | 11 | 12008997 | 12039908 | H11C1993.1 | 3395 | 3396 |
| 34 | 11 | 12045051 | 12051476 | H11C1994.1 | 3397 | 3398 |
| 34 | 11 | 12065013 | 12067563 | H11C1995.1 | 3399 | 3400 |
| 34 | 11 | 12072250 | 12074344 | H11C1996.1 | 3401 | 3402 |
| 34 | 11 | 12088708 | 12186491 | H11C1996.2 | 3403 | 3404 |
| 34 | 11 | 12088708 | 12241912 | H11C1996.3 | 3405 | 3406 |
| 34 | 11 | 12185847 | 12241912 | H11C1996.4 | 3407 | 3408 |
| 34 | 11 | 12226324 | 12229700 | H11C2036.1 | 3409 | 3410 |
| 34 | 11 | 12230654 | 12241912 | H11C1996.5 | 3411 | 3412 |
| 34 | 11 | 12231356 | 12241912 | H11C1996.6 | 3413 | 3414 |
| 35 | 11 | 19328846 | 20099723 | H11C2915.1 | 3415 | 3416 |
| 35 | 11 | 19480787 | 19485354 | H11C2930.1 | 3417 | 3418 |
| 35 | 11 | 19489012 | 19502201 | H11C2932.1 | 3419 | 3420 |
| 35 | 11 | 19691487 | 20099723 | H11C2915.2 | 3421 | 3422 |
| 35 | 11 | 19691487 | 20099723 | H11C2915.3 | 3423 | 3424 |
| 35 | 11 | 19691718 | 20096692 | H11C2915.4 | 3425 | 3426 |
| 35 | 11 | 19691741 | 20096692 | H11C2915.5 | 3427 | 3428 |
| 35 | 11 | 19764042 | 19765157 | H11C2960.1 | 3429 | 3430 |
| 35 | 11 | 19956793 | 19959459 | H11C2994.1 | 3431 | 3432 |
| 35 | 11 | 19977965 | 19987177 | H11C2996.1 | 3433 | 3434 |
| 35 | 11 | 19986971 | 20002676 | H11C2997.1 | 3435 | 3436 |
| 35 | 11 | 20000677 | 20096692 | H11C2915.6 | 3437 | 3438 |
| 35 | 11 | 20000677 | 20099723 | H11C2915.7 | 3439 | 3440 |
| 35 | 11 | 20021896 | 20027425 | H11C3004.1 | 3441 | 3442 |
| 35 | 11 | 20026872 | 20099723 | H11C2915.8 | 3443 | 3444 |
| 35 | 11 | 20082332 | 20096692 | H11C2915.9 | 3445 | 3446 |
| 35 | 11 | 20082332 | 20099723 | H11C2915.10 | 3447 | 3448 |
| 35 | 11 | 20097202 | 20098754 | H11C3036.1 | 3449 | 3450 |
| 35 | 11 | 20134335 | 20140938 | H11C3041.1 | 3451 | 3452 |
| 36 | 11 | 95141753 | 95152031 | H11C11109.1 | 3453 | 3454 |
| 36 | 11 | 95141753 | 95162603 | H11C11109.2 | 3455 | 3456 |
| 36 | 11 | 95141753 | 95162603 | H11C11109.3 | 3457 | 3458 |
| 36 | 11 | 95141766 | 95142457 | H11C11110.1 | 3459 | 3460 |
| 36 | 11 | 95141766 | 95162603 | H11C11109.4 | 3461 | 3462 |
| 36 | 11 | 95163154 | 95166360 | H11C11120.1 | 3463 | 3464 |
| 36 | 11 | 95163283 | 95195308 | H11C11120.2 | 3465 | 3466 |
| 36 | 11 | 95163283 | 95203885 | H11C11120.3 | 3467 | 3468 |
| 36 | 11 | 95163283 | 95204358 | H11C11120.4 | 3469 | 3470 |
| 36 | 11 | 95163283 | 95204541 | H11C11120.5 | 3471 | 3472 |
| 36 | 11 | 95163283 | 95205040 | H11C11120.6 | 3473 | 3474 |
| 36 | 11 | 95163283 | 95205498 | H11C11120.7 | 3475 | 3476 |
| 36 | 11 | 95163283 | 95205505 | H11C11120.8 | 3477 | 3478 |
| 36 | 11 | 95163283 | 95205505 | H11C11120.9 | 3479 | 3480 |
| 36 | 11 | 95197724 | 95204541 | H11C11120.10 | 3481 | 3482 |
| 36 | 11 | 95197724 | 95205040 | H11C11120.11 | 3483 | 3484 |
| 36 | 11 | 95197724 | 95205505 | H11C11120.12 | 3485 | 3486 |
| 36 | 11 | 95205693 | 95296920 | H11C11135.1 | 3487 | 3488 |
| 36 | 11 | 95205693 | 95296920 | H11C11135.2 | 3489 | 3490 |
| 36 | 11 | 95205693 | 95297107 | H11C11135.3 | 3491 | 3492 |
| 36 | 11 | 95206889 | 95296905 | H11C11135.4 | 3493 | 3494 |
| 36 | 11 | 95206889 | 95296910 | H11C11135.5 | 3495 | 3496 |
| 36 | 11 | 95206889 | 95296912 | H11C11135.6 | 3497 | 3498 |
| 36 | 11 | 95206889 | 95296919 | H11C11135.7 | 3499 | 3500 |
| 36 | 11 | 95207801 | 95296919 | H11C11135.8 | 3501 | 3502 |
| 36 | 11 | 95349404 | 95716125 | H11C11160.1 | 3503 | 3504 |
| 36 | 11 | 95566562 | 95567514 | H11C11231.1 | 3505 | 3506 |
| 36 | 11 | 95574567 | 95575435 | H11C11235.1 | 3507 | 3508 |
| 36 | 11 | 95725578 | 95744546 | H11C11299.1 | 3509 | 3510 |
| 36 | 11 | 95725578 | 95762694 | H11C11299.2 | 3511 | 3512 |
| 36 | 11 | 95725578 | 95762724 | H11C11299.3 | 3513 | 3514 |
| 36 | 11 | 95725578 | 95762724 | H11C11299.4 | 3515 | 3516 |
| 36 | 11 | 95726254 | 95762724 | H11C11299.5 | 3517 | 3518 |
| 36 | 11 | 95726262 | 95744546 | H11C11299.6 | 3519 | 3520 |
| 36 | 11 | 95726262 | 95762694 | H11C11299.7 | 3521 | 3522 |
| 36 | 11 | 95726267 | 95732094 | H11C11299.8 | 3523 | 3524 |
| 36 | 11 | 95762800 | 95880386 | H11C11316.1 | 3525 | 3526 |
| 36 | 11 | 95763461 | 95766375 | H11C11318.1 | 3527 | 3528 |
| 36 | 11 | 95819873 | 95879690 | H11C11321.1 | 3529 | 3530 |
| 36 | 11 | 95881236 | 95887549 | H11C11326.1 | 3531 | 3532 |
| 36 | 11 | 95881268 | 95944906 | H11C11326.2 | 3533 | 3534 |
| 37 | 12 | 55933811 | 56111055 | H12C7337.2 | 3535 | 3536 |
| 37 | 12 | 56106766 | 56108007 | H12C7383.1 | 3537 | 3538 |
| 37 | 12 | 56114765 | 56131455 | H12C7385.1 | 3539 | 3540 |
| 37 | 12 | 56114765 | 56132108 | H12C7385.2 | 3541 | 3542 |
| 37 | 12 | 56134752 | 56138061 | H12C7389.1 | 3543 | 3544 |
| 37 | 12 | 56135352 | 56138061 | H12C7389.2 | 3545 | 3546 |
| 37 | 12 | 56137537 | 56139852 | H12C7390.1 | 3547 | 3548 |
| 37 | 12 | 56139157 | 56140002 | H12C7390.2 | 3549 | 3550 |
| 37 | 12 | 56140200 | 56152312 | H12C7392.1 | 3551 | 3552 |
| 37 | 12 | 56140200 | 56152739 | H12C7392.2 | 3553 | 3554 |
| 37 | 12 | 56140562 | 56144993 | H12C7392.3 | 3555 | 3556 |
| 37 | 12 | 56150365 | 56152739 | H12C7394.1 | 3557 | 3558 |
| 37 | 12 | 56152214 | 56158116 | H12C7395.1 | 3559 | 3560 |
| 37 | 12 | 56152214 | 56158116 | H12C7395.2 | 3561 | 3562 |
| 37 | 12 | 56152214 | 56159682 | H12C7395.3 | 3563 | 3564 |
| 37 | 12 | 56152305 | 56158116 | H12C7395.4 | 3565 | 3566 |
| 37 | 12 | 56152305 | 56158116 | H12C7395.5 | 3567 | 3568 |
| 37 | 12 | 56152305 | 56159900 | H12C7395.6 | 3569 | 3570 |
| 37 | 12 | 56152305 | 56168864 | H12C7395.7 | 3571 | 3572 |
| 37 | 12 | 56152308 | 56159682 | H12C7395.8 | 3573 | 3574 |
| 37 | 12 | 56156207 | 56156387 | H12C7399.1 | 3575 | 3576 |
| 37 | 12 | 56156412 | 56158116 | H12C7395.9 | 3577 | 3578 |
| 37 | 12 | 56156701 | 56157907 | H12C7395.10 | 3579 | 3580 |
| 37 | 12 | 56165977 | 56167009 | H12C7404.1 | 3581 | 3582 |
| 37 | 12 | 56167343 | 56198244 | H12C7405.1 | 3583 | 3584 |
| 37 | 12 | 56168025 | 56170627 | H12C7405.2 | 3585 | 3586 |
| 37 | 12 | 56168025 | 56196703 | H12C7405.3 | 3587 | 3588 |
| 37 | 12 | 56168025 | 56197182 | H12C7405.4 | 3589 | 3590 |
| 37 | 12 | 56168091 | 56170059 | H12C7405.5 | 3591 | 3592 |
| 37 | 12 | 56168120 | 56196703 | H12C7405.6 | 3593 | 3594 |
| 37 | 12 | 56168120 | 56197182 | H12C7405.7 | 3595 | 3596 |
| 37 | 12 | 56176506 | 56198244 | H12C7409.1 | 3597 | 3598 |
| 37 | 12 | 56192811 | 56196703 | H12C7405.8 | 3599 | 3600 |
| 37 | 12 | 56195038 | 56196703 | H12C7405.9 | 3601 | 3602 |
| 37 | 12 | 56195038 | 56197182 | H12C7405.10 | 3603 | 3604 |
| 37 | 12 | 56195267 | 56198244 | H12C7405.11 | 3605 | 3606 |
| 37 | 12 | 56195268 | 56197182 | H12C7405.12 | 3607 | 3608 |
| 37 | 12 | 56195398 | 56196703 | H12C7405.13 | 3609 | 3610 |
| 37 | 12 | 56195398 | 56197182 | H12C7405.14 | 3611 | 3612 |
| 37 | 12 | 56196330 | 56200561 | H12C7412.1 | 3613 | 3614 |
| 37 | 12 | 56196330 | 56200561 | H12C7412.2 | 3615 | 3616 |
| 37 | 12 | 56196330 | 56200561 | H12C7412.3 | 3617 | 3618 |
| 37 | 12 | 56196330 | 56200561 | H12C7412.4 | 3619 | 3620 |
| 37 | 12 | 56196330 | 56200573 | H12C7412.5 | 3621 | 3622 |
| 37 | 12 | 56196639 | 56200561 | H12C7412.6 | 3623 | 3624 |
| 37 | 12 | 56196639 | 56200561 | H12C7412.7 | 3625 | 3626 |
| 37 | 12 | 56196639 | 56200561 | H12C7412.8 | 3627 | 3628 |
| 37 | 12 | 56196639 | 56200561 | H12C7412.9 | 3629 | 3630 |
| 37 | 12 | 56196639 | 56200573 | H12C7412.10 | 3631 | 3632 |
| 37 | 12 | 56202849 | 56203573 | H12C7417.1 | 3633 | 3634 |
| 37 | 12 | 56202885 | 56210198 | H12C7418.1 | 3635 | 3636 |
| 37 | 12 | 56202885 | 56210199 | H12C7418.2 | 3637 | 3638 |
| 37 | 12 | 56207862 | 56210199 | H12C7418.3 | 3639 | 3640 |
| 37 | 12 | 56209583 | 56227203 | H12C7423.1 | 3641 | 3642 |
| 37 | 12 | 56209583 | 56227204 | H12C7423.2 | 3643 | 3644 |
| 37 | 12 | 56209583 | 56227298 | H12C7423.3 | 3645 | 3646 |
| 37 | 12 | 56209588 | 56210198 | H12C7418.4 | 3647 | 3648 |
| 37 | 12 | 56210195 | 56227203 | H12C7423.4 | 3649 | 3650 |
| 37 | 12 | 56210195 | 56227204 | H12C7423.5 | 3651 | 3652 |
| 37 | 12 | 56210195 | 56227298 | H12C7423.6 | 3653 | 3654 |
| 37 | 12 | 56210201 | 56222039 | H12C7422.1 | 3655 | 3656 |
| 37 | 12 | 56210360 | 56212437 | H12C7423.7 | 3657 | 3658 |
| 37 | 12 | 56210360 | 56227203 | H12C7423.8 | 3659 | 3660 |
| 37 | 12 | 56210360 | 56227298 | H12C7423.9 | 3661 | 3662 |
| 37 | 12 | 56212572 | 56213195 | H12C7423.10 | 3663 | 3664 |
| 37 | 12 | 56212686 | 56227256 | H12C7423.11 | 3665 | 3666 |
| 37 | 12 | 56230078 | 56266682 | H12C7432.1 | 3667 | 3668 |
| 37 | 12 | 56271208 | 56283296 | H12C7439.1 | 3669 | 3670 |
| 37 | 12 | 56271208 | 56283477 | H12C7439.2 | 3671 | 3672 |
| 37 | 12 | 56271208 | 56283477 | H12C7439.3 | 3673 | 3674 |
| 37 | 12 | 56284680 | 56289854 | H12C7447.1 | 3675 | 3676 |
| 37 | 12 | 56284814 | 56288769 | H12C7447.2 | 3677 | 3678 |
| 37 | 12 | 56284814 | 56289854 | H12C7447.3 | 3679 | 3680 |
| 37 | 12 | 56290367 | 56306869 | H12C7453.1 | 3681 | 3682 |
| 37 | 12 | 56291476 | 56297295 | H12C7453.2 | 3683 | 3684 |
| 37 | 12 | 56291962 | 56297295 | H12C7453.3 | 3685 | 3686 |
| 37 | 12 | 56293627 | 56298095 | H12C7454.1 | 3687 | 3688 |
| 37 | 12 | 56294043 | 56295638 | H12C7453.4 | 3689 | 3690 |
| 37 | 12 | 56295660 | 56297295 | H12C7456.1 | 3691 | 3692 |
| 37 | 12 | 56298455 | 56301960 | H12C7457.1 | 3693 | 3694 |
| 37 | 12 | 56299613 | 56300468 | H12C7458.1 | 3695 | 3696 |
| 37 | 12 | 56299959 | 56306869 | H12C7453.5 | 3697 | 3698 |
| 37 | 12 | 56300402 | 56306200 | H12C7453.6 | 3699 | 3700 |
| 37 | 12 | 56300402 | 56306869 | H12C7453.7 | 3701 | 3702 |
| 37 | 12 | 56301094 | 56306200 | H12C7453.8 | 3703 | 3704 |
| 37 | 12 | 56303735 | 56306200 | H12C7453.9 | 3705 | 3706 |
| 37 | 12 | 56303736 | 56305345 | H12C7453.10 | 3707 | 3708 |
| 37 | 12 | 56428271 | 56432508 | H12C7487.13 | 3823 | 3824 |
| 37 | 12 | 56428311 | 56429845 | H12C7487.14 | 3825 | 3826 |
| 37 | 12 | 56428311 | 56431680 | H12C7487.15 | 3827 | 3828 |
| 37 | 12 | 56428311 | 56432403 | H12C7487.16 | 3829 | 3830 |
| 37 | 12 | 56428311 | 56432403 | H12C7487.17 | 3831 | 3832 |
| 37 | 12 | 56428311 | 56432444 | H12C7487.18 | 3833 | 3834 |
| 37 | 12 | 56428311 | 56432508 | H12C7487.19 | 3835 | 3836 |
| 37 | 12 | 56429241 | 56432497 | H12C7487.20 | 3837 | 3838 |
| 37 | 12 | 56431761 | 56432165 | H12C7487.21 | 3839 | 3840 |
| 37 | 12 | 56435147 | 56439465 | H12C7491.1 | 3841 | 3842 |
| 37 | 12 | 56435394 | 56440460 | H12C7491.2 | 3843 | 3844 |
| 37 | 12 | 56437727 | 56439465 | H12C7491.3 | 3845 | 3846 |
| 37 | 12 | 56437727 | 56440460 | H12C7491.4 | 3847 | 3848 |
| 37 | 12 | 56442383 | 56447631 | H12C7496.1 | 3849 | 3850 |
| 37 | 12 | 56442383 | 56447631 | H12C7496.2 | 3851 | 3852 |
| 37 | 12 | 56445488 | 56446449 | H12C7496.3 | 3853 | 3854 |
| 37 | 12 | 56448522 | 56452181 | H12C7501.1 | 3855 | 3856 |
| 37 | 12 | 56448522 | 56452522 | H12C7501.2 | 3857 | 3858 |
| 37 | 12 | 56448522 | 56452602 | H12C7501.3 | 3859 | 3860 |
| 37 | 12 | 56448536 | 56452151 | H12C7501.4 | 3861 | 3862 |
| 37 | 12 | 56448632 | 56452151 | H12C7501.5 | 3863 | 3864 |
| 37 | 12 | 56448632 | 56452522 | H12C7501.6 | 3865 | 3866 |
| 37 | 12 | 56448632 | 56452602 | H12C7501.7 | 3867 | 3868 |
| 37 | 12 | 56448683 | 56452151 | H12C7501.8 | 3869 | 3870 |
| 37 | 12 | 56448683 | 56452522 | H12C7501.9 | 3871 | 3872 |
| 37 | 12 | 56448683 | 56452602 | H12C7501.10 | 3873 | 3874 |
| 37 | 12 | 56450733 | 56452522 | H12C7501.11 | 3875 | 3876 |
| 37 | 12 | 56450806 | 56452144 | H12C7501.12 | 3877 | 3878 |
| 37 | 12 | 56451213 | 56453434 | H12C7503.1 | 3879 | 3880 |
| 37 | 12 | 56452305 | 56462591 | H12C7503.2 | 3881 | 3882 |
| 37 | 12 | 56452649 | 56462451 | H12C7503.3 | 3883 | 3884 |
| 37 | 12 | 56452649 | 56462591 | H12C7503.4 | 3885 | 3886 |
| 37 | 12 | 56452649 | 56462591 | H12C7503.5 | 3887 | 3888 |
| 37 | 12 | 56452705 | 56462591 | H12C7503.6 | 3889 | 3890 |
| 37 | 12 | 56452746 | 56456162 | H12C7503.7 | 3891 | 3892 |
| 37 | 12 | 56462800 | 56476786 | H12C7509.1 | 3893 | 3894 |
| 37 | 12 | 56462800 | 56476786 | H12C7509.2 | 3895 | 3896 |
| 37 | 12 | 56462800 | 56478028 | H12C7509.3 | 3897 | 3898 |
| 37 | 12 | 56462800 | 56478028 | H12C7509.4 | 3899 | 3900 |
| 37 | 12 | 56462800 | 56482747 | H12C7509.5 | 3901 | 3902 |
| 37 | 12 | 56462800 | 56488121 | H12C7509.6 | 3903 | 3904 |
| 37 | 12 | 56462847 | 56478028 | H12C7509.7 | 3905 | 3906 |
| 37 | 12 | 56477110 | 56481467 | H12C7511.1 | 3907 | 3908 |
| 37 | 12 | 56477110 | 56496119 | H12C7511.2 | 3909 | 3910 |
| 37 | 12 | 56477428 | 56481467 | H12C7511.3 | 3911 | 3912 |
| 37 | 12 | 56477428 | 56489229 | H12C7511.4 | 3913 | 3914 |
| 37 | 12 | 56477428 | 56496119 | H12C7511.5 | 3915 | 3916 |
| 37 | 12 | 56485905 | 56489229 | H12C7511.6 | 3917 | 3918 |
| 37 | 12 | 56486183 | 56488255 | H12C7511.7 | 3919 | 3920 |
| 37 | 12 | 56499972 | 56503637 | H12C7524.1 | 3921 | 3922 |
| 37 | 12 | 56499972 | 56504026 | H12C7525.1 | 3923 | 3924 |
| 37 | 12 | 56499972 | 56504593 | H12C7525.2 | 3925 | 3926 |
| 37 | 12 | 56499972 | 56526992 | H12C7525.3 | 3927 | 3928 |
| 37 | 12 | 56499972 | 56526992 | H12C7525.4 | 3929 | 3930 |
| 37 | 12 | 56502848 | 56503637 | H12C7524.2 | 3931 | 3932 |
| 37 | 12 | 56502848 | 56504593 | H12C7525.5 | 3933 | 3934 |
| 37 | 12 | 56502848 | 56526992 | H12C7525.6 | 3935 | 3936 |
| 37 | 12 | 56517141 | 56523811 | H12C7538.1 | 3937 | 3938 |
| 37 | 12 | 56523126 | 56523811 | H12C7545.1 | 3939 | 3940 |
| 37 | 12 | 56549885 | 56576532 | H12C7547.1 | 3941 | 3942 |
| 37 | 12 | 56566410 | 56574002 | H12C7547.2 | 3943 | 3944 |
| 37 | 12 | 56574288 | 56576072 | H12C7550.1 | 3945 | 3946 |
| 37 | 12 | 56611498 | 56616237 | H12C7552.1 | 3947 | 3948 |
| 37 | 12 | 56611573 | 56616129 | H12C7552.2 | 3949 | 3950 |
| 37 | 12 | 56611575 | 56616223 | H12C7552.3 | 3951 | 3952 |
| 37 | 12 | 56611618 | 56616213 | H12C7552.4 | 3953 | 3954 |
| 37 | 12 | 56615096 | 56616113 | H12C7552.5 | 3955 | 3956 |
| 37 | 12 | 56615296 | 56616037 | H12C7552.6 | 3957 | 3958 |
| 37 | 12 | 56621553 | 56637190 | H12C7555.1 | 3959 | 3960 |
| 37 | 12 | 56621553 | 56637320 | H12C7555.2 | 3961 | 3962 |
| 37 | 12 | 56621613 | 56637190 | H12C7555.3 | 3963 | 3964 |
| 37 | 12 | 56621613 | 56637320 | H12C7555.4 | 3965 | 3966 |
| 37 | 12 | 56621716 | 56637190 | H12C7555.5 | 3967 | 3968 |
| 37 | 12 | 56621716 | 56637320 | H12C7555.6 | 3969 | 3970 |
| 37 | 12 | 56629794 | 56637190 | H12C7555.7 | 3971 | 3972 |
| 37 | 12 | 56629794 | 56637320 | H12C7555.8 | 3973 | 3974 |
| 38 | 12 | 81254775 | 81375414 | H12C9730.2 | 3975 | 3976 |
| 38 | 12 | 81330941 | 81375484 | H12C9730.6 | 3977 | 3978 |
| 38 | 12 | 81334757 | 81375414 | H12C9730.7 | 3979 | 3980 |
| 38 | 12 | 81334757 | 81375484 | H12C9730.8 | 3981 | 3982 |
| 38 | 12 | 81334978 | 81375414 | H12C9730.9 | 3983 | 3984 |
| 38 | 12 | 81372113 | 81375413 | H12C9730.10 | 3985 | 3986 |
| 38 | 12 | 81377371 | 81393807 | H12C9742.1 | 3987 | 3988 |
| 38 | 12 | 81401458 | 81402432 | H12C9746.1 | 3989 | 3990 |
| 38 | 12 | 81401458 | 81402435 | H12C9745.1 | 3991 | 3992 |
| 38 | 12 | 81583127 | 82031114 | H12C9755.1 | 3993 | 3994 |
| 38 | 12 | 81792819 | 81862218 | H12C9755.2 | 3995 | 3996 |
| 38 | 12 | 81863219 | 81882608 | H12C9755.3 | 3997 | 3998 |
| 38 | 12 | 82028574 | 82031114 | H12C9819.1 | 3999 | 4000 |
| 38 | 12 | 82047577 | 82048437 | H12C9822.1 | 4001 | 4002 |
| 38 | 12 | 82067836 | 82068992 | H12C9823.1 | 4003 | 4004 |
| 39 | 14 | 49578110 | 49625643 | H14C2841.1 | 4005 | 4006 |
| 39 | 14 | 49620118 | 49629111 | H14C2841.2 | 4007 | 4008 |
| 39 | 14 | 49645091 | 49653382 | H14C2849.1 | 4009 | 4010 |
| 39 | 14 | 49645096 | 49649351 | H14C2849.2 | 4011 | 4012 |
| 39 | 14 | 49645096 | 49653382 | H14C2849.3 | 4013 | 4014 |
| 39 | 14 | 49645096 | 49653382 | H14C2849.4 | 4015 | 4016 |
| 39 | 14 | 49645096 | 49653382 | H14C2849.5 | 4017 | 4018 |
| 39 | 14 | 49650643 | 49652325 | H14C2853.1 | 4019 | 4020 |
| 39 | 14 | 49652434 | 49768351 | H14C2855.1 | 4021 | 4022 |
| 39 | 14 | 49653590 | 49768351 | H14C2855.2 | 4023 | 4024 |
| 39 | 14 | 49692359 | 49695972 | H14C2855.3 | 4025 | 4026 |
| 39 | 14 | 49737505 | 49767830 | H14C2855.4 | 4027 | 4028 |
| 39 | 14 | 49740803 | 49767542 | H14C2855.5 | 4029 | 4030 |
| 39 | 14 | 49748429 | 49751811 | H14C2880.1 | 4031 | 4032 |
| 39 | 14 | 49772371 | 49773664 | H14C2885.1 | 4033 | 4034 |
| 39 | 14 | 49774036 | 49848697 | H14C2887.1 | 4035 | 4036 |
| 39 | 14 | 49781645 | 49783545 | H14C2893.1 | 4037 | 4038 |
| 39 | 14 | 49781645 | 49783650 | H14C2893.2 | 4039 | 4040 |
| 39 | 14 | 49781645 | 49824571 | H14C2892.1 | 4041 | 4042 |
| 39 | 14 | 49782931 | 49848697 | H14C2887.2 | 4043 | 4044 |
| 39 | 14 | 49820398 | 49848640 | H14C2887.3 | 4045 | 4046 |
| 39 | 14 | 49843392 | 49844482 | H14C2898.1 | 4047 | 4048 |
| 39 | 14 | 49848791 | 49861174 | H14C2899.1 | 4049 | 4050 |
| 39 | 14 | 49848795 | 49859362 | H14C2899.2 | 4051 | 4052 |
| 39 | 14 | 49848795 | 49862192 | H14C2899.3 | 4053 | 4054 |
| 39 | 14 | 49848795 | 49862204 | H14C2899.4 | 4055 | 4056 |
| 39 | 14 | 49848795 | 49863718 | H14C2899.5 | 4057 | 4058 |
| 39 | 14 | 49848795 | 49863718 | H14C2899.6 | 4059 | 4060 |
| 39 | 14 | 49848796 | 49863718 | H14C2899.7 | 4061 | 4062 |
| 39 | 14 | 49848810 | 49862192 | H14C2899.8 | 4063 | 4064 |
| 39 | 14 | 49848810 | 49863718 | H14C2899.9 | 4065 | 4066 |
| 39 | 14 | 49855701 | 49872026 | H14C2899.10 | 4067 | 4068 |
| 39 | 14 | 49857786 | 49862192 | H14C2899.11 | 4069 | 4070 |
| 39 | 14 | 49857786 | 49863718 | H14C2899.12 | 4071 | 4072 |
| 39 | 14 | 49862703 | 49864424 | H14C2907.1 | 4073 | 4074 |
| 39 | 14 | 49862703 | 49867356 | H14C2907.2 | 4075 | 4076 |
| 39 | 14 | 49862918 | 49867356 | H14C2908.1 | 4077 | 4078 |
| 39 | 14 | 49865972 | 49932367 | H14C2911.1 | 4079 | 4080 |
| 39 | 14 | 49872460 | 49947118 | H14C2911.2 | 4081 | 4082 |
| 39 | 14 | 49933480 | 49934813 | H14C2927.1 | 4083 | 4084 |
| 39 | 14 | 49954448 | 49987064 | H14C2931.1 | 4085 | 4086 |
| 39 | 14 | 49954448 | 50069126 | H14C2931.2 | 4087 | 4088 |
| 39 | 14 | 49954990 | 50069012 | H14C2931.3 | 4089 | 4090 |
| 39 | 14 | 49954990 | 50069126 | H14C2931.4 | 4091 | 4092 |
| 39 | 14 | 49954990 | 50069126 | H14C2931.5 | 4093 | 4094 |
| 39 | 14 | 49955298 | 50069126 | H14C2931.6 | 4095 | 4096 |
| 39 | 14 | 49956233 | 50069126 | H14C2931.7 | 4097 | 4098 |
| 39 | 14 | 49976440 | 49980505 | H14C2931.8 | 4099 | 4100 |
| 39 | 14 | 49985274 | 49993209 | H14C2941.1 | 4101 | 4102 |
| 39 | 14 | 50022396 | 50041596 | H14C2931.9 | 4103 | 4104 |
| 39 | 14 | 50068969 | 50169532 | H14C2964.1 | 4105 | 4106 |
| 39 | 14 | 50069766 | 50168790 | H14C2964.2 | 4107 | 4108 |
| 39 | 14 | 50069766 | 50169532 | H14C2964.3 | 4109 | 4110 |
| 39 | 14 | 50096493 | 50169532 | H14C2964.4 | 4111 | 4112 |
| 39 | 14 | 50170102 | 50181277 | H14C2979.1 | 4113 | 4114 |
| 39 | 14 | 50170102 | 50202343 | H14C2982.1 | 4115 | 4116 |
| 39 | 14 | 50170102 | 50204806 | H14C2979.2 | 4117 | 4118 |
| 39 | 14 | 50170102 | 50204807 | H14C2979.3 | 4119 | 4120 |
| 39 | 14 | 50170102 | 50205321 | H14C2979.4 | 4121 | 4122 |
| 40 | 14 | 80032573 | 80321596 | H14C7194.2 | 4123 | 4124 |
| 40 | 14 | 80366259 | 80477788 | H14C7194.4 | 4125 | 4126 |
| 40 | 14 | 80477587 | 80478127 | H14C7226.1 | 4127 | 4128 |
| 40 | 14 | 80481652 | 80495614 | H14C7194.5 | 4129 | 4130 |
| 40 | 14 | 80491263 | 80680948 | H14C7228.1 | 4131 | 4132 |
| 40 | 14 | 80491527 | 80645039 | H14C7228.2 | 4133 | 4134 |
| 40 | 14 | 80643129 | 80706511 | H14C7246.1 | 4135 | 4136 |
| 40 | 14 | 80711548 | 80716375 | H14C7258.1 | 4137 | 4138 |
| 40 | 14 | 80712245 | 80716375 | H14C7258.2 | 4139 | 4140 |
| 40 | 14 | 80716102 | 80757047 | H14C7259.1 | 4141 | 4142 |
| 40 | 14 | 80716102 | 80757328 | H14C7259.2 | 4143 | 4144 |
| 40 | 14 | 80716282 | 80757049 | H14C7259.3 | 4145 | 4146 |
| 40 | 14 | 80733323 | 80757474 | H14C7259.4 | 4147 | 4148 |
| 40 | 14 | 80757314 | 80758555 | H14C7268.1 | 4149 | 4150 |
| 40 | 14 | 80757534 | 80759476 | H14C7268.2 | 4151 | 4152 |
| 40 | 14 | 80796751 | 80814020 | H14C7274.1 | 4153 | 4154 |
| 40 | 14 | 80796839 | 80814020 | H14C7274.2 | 4155 | 4156 |
| 40 | 14 | 80804144 | 80813032 | H14C7274.3 | 4157 | 4158 |
| 40 | 14 | 80806535 | 80814915 | H14C7274.4 | 4159 | 4160 |
| 40 | 14 | 80806661 | 80934680 | H14C7274.5 | 4161 | 4162 |
| 40 | 14 | 80860885 | 80862407 | H14C7281.1 | 4163 | 4164 |
| 41 | 16 | 46440725 | 46478543 | H16C6398.1 | 4165 | 4166 |
| 41 | 16 | 46449990 | 46499843 | H16C6399.1 | 4167 | 4168 |
| 41 | 16 | 46674384 | 46738182 | H16C6402.1 | 4169 | 4170 |
| 41 | 16 | 46674384 | 46738182 | H16C6402.2 | 4171 | 4172 |
| 41 | 16 | 46674384 | 46738182 | H16C6402.3 | 4173 | 4174 |
| 41 | 16 | 46674747 | 46738062 | H16C6402.4 | 4175 | 4176 |
| 41 | 16 | 46674747 | 46747430 | H16C6402.5 | 4177 | 4178 |
| 41 | 16 | 46702859 | 46703325 | H16C6402.6 | 4179 | 4180 |
| 41 | 16 | 46711733 | 46719912 | H16C6402.7 | 4181 | 4182 |
| 41 | 16 | 46712651 | 46747405 | H16C6402.8 | 4183 | 4184 |
| 41 | 16 | 46756363 | 46758650 | H16C6404.1 | 4185 | 4186 |
| 41 | 16 | 46758320 | 46778802 | H16C6405.1 | 4187 | 4188 |
| 41 | 16 | 46758320 | 46823683 | H16C6405.2 | 4189 | 4190 |
| 41 | 16 | 46758320 | 46826590 | H16C6405.3 | 4191 | 4192 |
| 41 | 16 | 46758320 | 46826590 | H16C6405.4 | 4193 | 4194 |
| 41 | 16 | 46758320 | 46838806 | H16C6405.5 | 4195 | 4196 |
| 41 | 16 | 46800276 | 46836000 | H16C6405.6 | 4197 | 4198 |
| 41 | 16 | 46806643 | 46815072 | H16C6405.7 | 4199 | 4200 |
| 41 | 16 | 46835711 | 46943412 | H16C6411.1 | 4201 | 4202 |
| 41 | 16 | 46835711 | 46945391 | H16C6411.2 | 4203 | 4204 |
| 41 | 16 | 46835713 | 46945391 | H16C6411.3 | 4205 | 4206 |
| 41 | 16 | 46864694 | 46866659 | H16C6418.1 | 4207 | 4208 |
| 41 | 16 | 46868747 | 46887578 | H16C6421.1 | 4209 | 4210 |
| 41 | 16 | 46938342 | 46945391 | H16C6441.1 | 4211 | 4212 |
| 41 | 16 | 46938898 | 46943412 | H16C6411.4 | 4213 | 4214 |
| 41 | 16 | 46938898 | 46945391 | H16C6411.5 | 4215 | 4216 |
| 41 | 16 | 46944394 | 46947870 | H16C6445.1 | 4217 | 4218 |
| 41 | 16 | 46944394 | 46948443 | H16C6445.2 | 4219 | 4220 |
| 41 | 16 | 46945909 | 46953794 | H16C6447.1 | 4221 | 4222 |
| 41 | 16 | 46946630 | 46954414 | H16C6411.6 | 4223 | 4224 |
| 41 | 16 | 46947204 | 46954414 | H16C6411.7 | 4225 | 4226 |
| 41 | 16 | 46951942 | 46957297 | H16C6454.1 | 4227 | 4228 |
| 41 | 16 | 46951942 | 46957299 | H16C6453.1 | 4229 | 4230 |
| 41 | 16 | 46951942 | 46976231 | H16C6453.2 | 4231 | 4232 |
| 41 | 16 | 46951942 | 46976864 | H16C6453.3 | 4233 | 4234 |
| 41 | 16 | 46951949 | 46955294 | H16C6452.1 | 4235 | 4236 |
| 41 | 16 | 46952465 | 46957299 | H16C6453.4 | 4237 | 4238 |
| 41 | 16 | 46952465 | 46976231 | H16C6453.5 | 4239 | 4240 |
| 41 | 16 | 46952465 | 46976864 | H16C6453.6 | 4241 | 4242 |
| 41 | 16 | 46956191 | 46957297 | H16C6453.7 | 4243 | 4244 |
| 42 | 16 | 73590412 | 73699438 | H16C9637.1 | 4245 | 4246 |
| 42 | 16 | 73590412 | 73699438 | H16C9637.2 | 4247 | 4248 |
| 42 | 16 | 73590412 | 73700110 | H16C9637.3 | 4249 | 4250 |
| 42 | 16 | 73590412 | 73702111 | H16C9637.4 | 4251 | 4252 |
| 42 | 16 | 73590412 | 73702393 | H16C9637.5 | 4253 | 4254 |
| 42 | 16 | 73590435 | 73700110 | H16C9637.6 | 4255 | 4256 |
| 42 | 16 | 73591464 | 73699438 | H16C9637.7 | 4257 | 4258 |
| 42 | 16 | 73591640 | 73699438 | H16C9637.8 | 4259 | 4260 |
| 42 | 16 | 73591640 | 73700110 | H16C9637.9 | 4261 | 4262 |
| 42 | 16 | 73591640 | 73702111 | H16C9637.10 | 4263 | 4264 |
| 42 | 16 | 73591640 | 73702389 | H16C9637.11 | 4265 | 4266 |
| 42 | 16 | 73641125 | 73643359 | H16C9650.1 | 4267 | 4268 |
| 42 | 16 | 73643129 | 73644129 | H16C9652.1 | 4269 | 4270 |
| 42 | 16 | 73691828 | 73693291 | H16C9665.1 | 4271 | 4272 |
| 42 | 16 | 73696196 | 73699438 | H16C9637.12 | 4273 | 4274 |
| 42 | 16 | 73696196 | 73700110 | H16C9637.13 | 4275 | 4276 |
| 42 | 16 | 73696196 | 73702111 | H16C9637.14 | 4277 | 4278 |
| 42 | 16 | 73696196 | 73702389 | H16C9637.15 | 4279 | 4280 |
| 42 | 16 | 73699129 | 73702389 | H16C9667.1 | 4281 | 4282 |
| 42 | 16 | 73703258 | 73708167 | H16C9668.1 | 4283 | 4284 |
| 42 | 16 | 73703258 | 73708169 | H16C9668.2 | 4285 | 4286 |
| 42 | 16 | 73703504 | 73708167 | H16C9668.3 | 4287 | 4288 |
| 42 | 16 | 73705484 | 73708152 | H16C9668.4 | 4289 | 4290 |
| 42 | 16 | 73705557 | 73708150 | H16C9668.5 | 4291 | 4292 |
| 42 | 16 | 73705902 | 73706991 | H16C9668.6 | 4293 | 4294 |
| 42 | 16 | 73739908 | 73740407 | H16C9670.1 | 4295 | 4296 |
| 42 | 16 | 73739925 | 73763480 | H16C9671.1 | 4297 | 4298 |
| 42 | 16 | 73739925 | 73763633 | H16C9671.2 | 4299 | 4300 |
| 42 | 16 | 73795492 | 73798584 | H16C9677.1 | 4301 | 4302 |
| 42 | 16 | 73795494 | 73796882 | H16C9677.2 | 4303 | 4304 |
| 42 | 16 | 73795494 | 73796910 | H16C9677.3 | 4305 | 4306 |
| 42 | 16 | 73810403 | 73816326 | H16C9679.1 | 4307 | 4308 |
| 42 | 16 | 73810403 | 73816796 | H16C9679.2 | 4309 | 4310 |
| 42 | 16 | 73814134 | 73816323 | H16C9679.3 | 4311 | 4312 |
| 42 | 16 | 73814134 | 73816796 | H16C9679.4 | 4313 | 4314 |
| 42 | 16 | 73814165 | 73814448 | H16C9679.5 | 4315 | 4316 |
| 42 | 16 | 73814165 | 73815028 | H16C9679.6 | 4317 | 4318 |
| 42 | 16 | 73816215 | 73817488 | H16C9683.1 | 4319 | 4320 |
| 42 | 16 | 73817781 | 73819602 | H16C9684.1 | 4321 | 4322 |
| 42 | 16 | 73817914 | 73819602 | H16C9684.2 | 4323 | 4324 |
| 42 | 16 | 73818187 | 73819596 | H16C9684.3 | 4325 | 4326 |
| 42 | 16 | 73820402 | 73827902 | H16C9685.1 | 4327 | 4328 |
| 42 | 16 | 73820402 | 73830059 | H16C9685.2 | 4329 | 4330 |
| 42 | 16 | 73820402 | 73843005 | H16C9685.3 | 4331 | 4332 |
| 42 | 16 | 73820402 | 73856614 | H16C9685.4 | 4333 | 4334 |
| 42 | 16 | 73820402 | 73857406 | H16C9685.5 | 4335 | 4336 |
| 42 | 16 | 73820402 | 73859449 | H16C9685.6 | 4337 | 4338 |
| 42 | 16 | 73820429 | 73825677 | H16C9687.1 | 4339 | 4340 |
| 42 | 16 | 73820491 | 73843005 | H16C9685.7 | 4341 | 4342 |
| 42 | 16 | 73820491 | 73857406 | H16C9685.8 | 4343 | 4344 |
| 42 | 16 | 73863452 | 73863989 | H16C9700.1 | 4345 | 4346 |
| 42 | 16 | 73884622 | 73896681 | H16C9703.1 | 4347 | 4348 |
| 42 | 16 | 73884622 | 73897056 | H16C9703.2 | 4349 | 4350 |
| 42 | 16 | 73884622 | 73897944 | H16C9703.3 | 4351 | 4352 |
| 42 | 16 | 73884622 | 73954670 | H16C9703.4 | 4353 | 4354 |
| 42 | 16 | 73884622 | 73968127 | H16C9703.5 | 4355 | 4356 |
| 42 | 16 | 73884622 | 74024928 | H16C9703.6 | 4357 | 4358 |
| 42 | 16 | 73885109 | 73896681 | H16C9703.7 | 4359 | 4360 |
| 42 | 16 | 73885109 | 73897056 | H16C9703.8 | 4361 | 4362 |
| 42 | 16 | 73885109 | 73897887 | H16C9703.9 | 4363 | 4364 |
| 42 | 16 | 73885109 | 73954670 | H16C9703.10 | 4365 | 4366 |
| 42 | 16 | 73885109 | 73968127 | H16C9703.11 | 4367 | 4368 |
| 42 | 16 | 73885109 | 74003341 | H16C9703.12 | 4369 | 4370 |
| 42 | 16 | 73885109 | 74024928 | H16C9703.13 | 4371 | 4372 |
| 42 | 16 | 73913288 | 73916447 | H16C9713.1 | 4373 | 4374 |
| 42 | 16 | 73963603 | 74024928 | H16C9703.14 | 4375 | 4376 |
| 42 | 16 | 73972223 | 73986486 | H16C9726.1 | 4377 | 4378 |
| 42 | 16 | 73986080 | 74024928 | H16C9703.15 | 4379 | 4380 |
| 42 | 16 | 74025234 | 74027791 | H16C9738.1 | 4381 | 4382 |
| 42 | 16 | 74034455 | 74038907 | H16C9740.1 | 4383 | 4384 |
| 42 | 16 | 74034455 | 74044098 | H16C9741.1 | 4385 | 4386 |
| 42 | 16 | 74034455 | 74056088 | H16C9741.2 | 4387 | 4388 |
| 42 | 16 | 74034455 | 74056092 | H16C9741.3 | 4389 | 4390 |
| 42 | 16 | 74034455 | 74056172 | H16C9741.4 | 4391 | 4392 |
| 42 | 16 | 74034637 | 74038907 | H16C9740.2 | 4393 | 4394 |
| 42 | 16 | 74034637 | 74044098 | H16C9741.5 | 4395 | 4396 |
| 42 | 16 | 74034637 | 74056088 | H16C9741.6 | 4397 | 4398 |
| 42 | 16 | 74034637 | 74056088 | H16C9741.7 | 4399 | 4400 |
| 42 | 16 | 74034637 | 74056092 | H16C9741.8 | 4401 | 4402 |
| 42 | 16 | 74034637 | 74056136 | H16C9741.9 | 4403 | 4404 |
| 42 | 16 | 74034637 | 74056172 | H16C9741.10 | 4405 | 4406 |
| 42 | 16 | 74038410 | 74044098 | H16C9741.11 | 4407 | 4408 |
| 42 | 16 | 74038410 | 74056092 | H16C9741.12 | 4409 | 4410 |
| 42 | 16 | 74038410 | 74056136 | H16C9741.13 | 4411 | 4412 |
| 42 | 16 | 74038410 | 74056172 | H16C9741.14 | 4413 | 4414 |
| 42 | 16 | 74042221 | 74056087 | H16C9741.15 | 4415 | 4416 |
| 42 | 16 | 74042628 | 74056087 | H16C9741.16 | 4417 | 4418 |
| 42 | 16 | 74049650 | 74051416 | H16C9746.1 | 4419 | 4420 |
| 42 | 16 | 74064523 | 74086806 | H16C9750.1 | 4421 | 4422 |
| 42 | 16 | 74064525 | 74086427 | H16C9751.1 | 4423 | 4424 |
| 42 | 16 | 74069620 | 74086783 | H16C9751.2 | 4425 | 4426 |
| 43 | 16 | 76379978 | 76571505 | H16C9924.1 | 4427 | 4428 |
| 43 | 16 | 76432276 | 76454021 | H16C9930.1 | 4429 | 4430 |
| 43 | 16 | 76569570 | 76571505 | H16C9940.1 | 4431 | 4432 |
| 43 | 16 | 76606080 | 76650852 | H16C9942.1 | 4433 | 4434 |
| 43 | 16 | 76613945 | 76623501 | H16C9943.1 | 4435 | 4436 |
| 43 | 16 | 76620486 | 76623501 | H16C9943.2 | 4437 | 4438 |
| 43 | 16 | 76690512 | 76691599 | H16C9949.1 | 4439 | 4440 |
| 43 | 16 | 76691051 | 76870096 | H16C9950.1 | 4441 | 4442 |
| 43 | 16 | 76691051 | 76870117 | H16C9950.2 | 4443 | 4444 |
| 43 | 16 | 76691051 | 77371845 | H16C9950.3 | 4445 | 4446 |
| 43 | 16 | 76691051 | 77804074 | H16C9950.4 | 4447 | 4448 |
| 43 | 16 | 76691061 | 76872441 | H16C9950.5 | 4449 | 4450 |
| 43 | 16 | 76691183 | 76870100 | H16C9950.6 | 4451 | 4452 |
| 43 | 16 | 76826060 | 76829508 | H16C9969.1 | 4453 | 4454 |
| 43 | 16 | 76828761 | 76829589 | H16C9969.2 | 4455 | 4456 |
| 43 | 16 | 76847579 | 76849089 | H16C9975.1 | 4457 | 4458 |
| 43 | 16 | 77087323 | 77097966 | H16C9998.1 | 4459 | 4460 |
| 43 | 16 | 77125771 | 77127046 | H16C10016.1 | 4461 | 4462 |
| 43 | 16 | 77158417 | 77158973 | H16C10035.1 | 4463 | 4464 |
| 43 | 16 | 77290533 | 77301013 | H16C10076.1 | 4465 | 4466 |
| 43 | 16 | 77416675 | 77548920 | H16C10120.1 | 4467 | 4468 |
| 43 | 16 | 77587653 | 77596122 | H16C10163.1 | 4469 | 4470 |
| 43 | 16 | 77668773 | 77669626 | H16C10178.1 | 4471 | 4472 |
| 43 | 16 | 77681447 | 77693117 | H16C10180.1 | 4473 | 4474 |
| 43 | 16 | 77787762 | 77804074 | H16C9950.7 | 4475 | 4476 |
| 43 | 16 | 77794020 | 77796551 | H16C10193.1 | 4477 | 4478 |
| 43 | 16 | 77802813 | 77804064 | H16C10197.1 | 4479 | 4480 |
| 43 | 16 | 77802813 | 77804074 | H16C10198.1 | 4481 | 4482 |
| 43 | 16 | 77803000 | 77804064 | H16C10199.1 | 4483 | 4484 |
| 43 | 16 | 77804110 | 77820851 | H16C10200.1 | 4485 | 4486 |
| 44 | 18 | 22521582 | 22537594 | H18C2315.11 | 4487 | 4488 |
| 44 | 18 | 22656776 | 22658070 | H18C2360.1 | 4489 | 4490 |
| 44 | 18 | 22686000 | 22687520 | H18C2365.1 | 4491 | 4492 |
| 44 | 18 | 22686000 | 22696135 | H18C2366.1 | 4493 | 4494 |
| 44 | 18 | 22686000 | 22696810 | H18C2366.2 | 4495 | 4496 |
| 44 | 18 | 22686000 | 22696810 | H18C2366.3 | 4497 | 4498 |
| 44 | 18 | 22686000 | 22699747 | H18C2366.4 | 4499 | 4500 |
| 44 | 18 | 22686000 | 22699747 | H18C2366.5 | 4501 | 4502 |
| 44 | 18 | 22687947 | 22696135 | H18C2366.6 | 4503 | 4504 |
| 44 | 18 | 22687947 | 22696810 | H18C2366.7 | 4505 | 4506 |
| 44 | 18 | 22687947 | 22699747 | H18C2366.8 | 4507 | 4508 |
| 44 | 18 | 22687947 | 22699747 | H18C2366.9 | 4509 | 4510 |
| 44 | 18 | 22699266 | 23024648 | H18C2369.1 | 4511 | 4512 |
| 44 | 18 | 22699269 | 22769908 | H18C2369.2 | 4513 | 4514 |
| 44 | 18 | 22749592 | 22976969 | H18C2374.1 | 4515 | 4516 |
| 44 | 18 | 22749592 | 23019305 | H18C2374.2 | 4517 | 4518 |
| 44 | 18 | 22749592 | 23019305 | H18C2374.3 | 4519 | 4520 |
| 44 | 18 | 22749736 | 22976969 | H18C2374.4 | 4521 | 4522 |
| 44 | 18 | 22749736 | 23019305 | H18C2374.5 | 4523 | 4524 |
| 44 | 18 | 22749736 | 23019305 | H18C2374.6 | 4525 | 4526 |
| 44 | 18 | 22750122 | 23019305 | H18C2374.7 | 4527 | 4528 |
| 44 | 18 | 22750122 | 23019305 | H18C2374.8 | 4529 | 4530 |
| 44 | 18 | 23170340 | 23429126 | H18C2403.1 | 4531 | 4532 |
| 44 | 18 | 23170340 | 23429126 | H18C2403.2 | 4533 | 4534 |
| 44 | 18 | 23170701 | 23226829 | H18C2403.3 | 4535 | 4536 |
| 44 | 18 | 23231913 | 23235865 | H18C2406.1 | 4537 | 4538 |
| 45 | 18 | 61568467 | 61699155 | H18C5401.1 | 4539 | 4540 |
| 45 | 18 | 61568867 | 61682340 | H18C5401.2 | 4541 | 4542 |
| 45 | 18 | 61568867 | 61699154 | H18C5401.3 | 4543 | 4544 |
| 45 | 18 | 61735535 | 61740532 | H18C5415.1 | 4545 | 4546 |
| 46 | 22 | 16449458 | 16486067 | H22C214.1 | 4547 | 4548 |
| 46 | 22 | 16449458 | 16486127 | H22C214.2 | 4549 | 4550 |
| 46 | 22 | 16449458 | 16486142 | H22C214.3 | 4551 | 4552 |
| 46 | 22 | 16449478 | 16452050 | H22C214.4 | 4553 | 4554 |
| 46 | 22 | 16449478 | 16486142 | H22C214.5 | 4555 | 4556 |
| 46 | 22 | 16449479 | 16486067 | H22C214.6 | 4557 | 4558 |
| 46 | 22 | 16449479 | 16486127 | H22C214.7 | 4559 | 4560 |
| 46 | 22 | 16449479 | 16486142 | H22C214.8 | 4561 | 4562 |
| 46 | 22 | 16449479 | 16486142 | H22C214.9 | 4563 | 4564 |
| 46 | 22 | 16449785 | 16486067 | H22C214.10 | 4565 | 4566 |
| 46 | 22 | 16449785 | 16486127 | H22C214.11 | 4567 | 4568 |
| 46 | 22 | 16449785 | 16486142 | H22C214.12 | 4569 | 4570 |
| 46 | 22 | 16451878 | 16486127 | H22C214.13 | 4571 | 4572 |
| 46 | 22 | 16458128 | 16486127 | H22C214.14 | 4573 | 4574 |
| 46 | 22 | 16486235 | 16559740 | H22C222.1 | 4575 | 4576 |
| 46 | 22 | 16495909 | 16561098 | H22C222.2 | 4577 | 4578 |
| 46 | 22 | 16495909 | 16561098 | H22C222.3 | 4579 | 4580 |
| 46 | 22 | 16495909 | 16586456 | H22C222.4 | 4581 | 4582 |
| 46 | 22 | 16495909 | 16586456 | H22C222.5 | 4583 | 4584 |
| 46 | 22 | 16495909 | 16586456 | H22C222.6 | 4585 | 4586 |
| 46 | 22 | 16495909 | 16586456 | H22C222.7 | 4587 | 4588 |
| 46 | 22 | 16495909 | 16586546 | H22C222.10 | 4589 | 4590 |
| 46 | 22 | 16495909 | 16586546 | H22C222.11 | 4591 | 4592 |
| 46 | 22 | 16495909 | 16586546 | H22C222.8 | 4593 | 4594 |
| 46 | 22 | 16495909 | 16586546 | H22C222.9 | 4595 | 4596 |
| 46 | 22 | 16495909 | 16587940 | H22C222.12 | 4597 | 4598 |
| 46 | 22 | 16495909 | 16587940 | H22C222.13 | 4599 | 4600 |
| 46 | 22 | 16495909 | 16587940 | H22C222.14 | 4601 | 4602 |
| 46 | 22 | 16495909 | 16587940 | H22C222.15 | 4603 | 4604 |
| 46 | 22 | 16495909 | 16588231 | H22C222.16 | 4605 | 4606 |
| 46 | 22 | 16495909 | 16588231 | H22C222.17 | 4607 | 4608 |
| 46 | 22 | 16495909 | 16588231 | H22C222.18 | 4609 | 4610 |
| 46 | 22 | 16495909 | 16588231 | H22C222.19 | 4611 | 4612 |
| 46 | 22 | 16496095 | 16586456 | H22C222.20 | 4613 | 4614 |
| 46 | 22 | 16496095 | 16586546 | H22C222.21 | 4615 | 4616 |
| 46 | 22 | 16496095 | 16587940 | H22C222.22 | 4617 | 4618 |
| 46 | 22 | 16496095 | 16588231 | H22C222.23 | 4619 | 4620 |
| 46 | 22 | 16564029 | 16586456 | H22C222.24 | 4621 | 4622 |
| 46 | 22 | 16564029 | 16586546 | H22C222.25 | 4623 | 4624 |
| 46 | 22 | 16564029 | 16587940 | H22C222.26 | 4625 | 4626 |
| 46 | 22 | 16564029 | 16588231 | H22C222.27 | 4627 | 4628 |
| 46 | 22 | 16570932 | 16574491 | H22C238.1 | 4629 | 4630 |
| 46 | 22 | 16583995 | 16588231 | H22C242.1 | 4631 | 4632 |
| 46 | 22 | 16591336 | 16592839 | H22C246.1 | 4633 | 4634 |
| 46 | 22 | 16591405 | 16595471 | H22C247.1 | 4635 | 4636 |
| 46 | 22 | 16591405 | 16631303 | H22C247.2 | 4637 | 4638 |
| 46 | 22 | 16591405 | 16631787 | H22C247.3 | 4639 | 4640 |
| 46 | 22 | 16591405 | 16631806 | H22C247.4 | 4641 | 4642 |
| 46 | 22 | 16591405 | 16631815 | H22C247.5 | 4643 | 4644 |
| 46 | 22 | 16591405 | 16631815 | H22C247.6 | 4645 | 4646 |
| 46 | 22 | 16591405 | 16631815 | H22C247.7 | 4647 | 4648 |
| 46 | 22 | 16591458 | 16595471 | H22C247.8 | 4649 | 4650 |
| 46 | 22 | 16591458 | 16631333 | H22C247.9 | 4651 | 4652 |
| 46 | 22 | 16591458 | 16631787 | H22C247.10 | 4653 | 4654 |
| 46 | 22 | 16591458 | 16631806 | H22C247.11 | 4655 | 4656 |
| 46 | 22 | 16591458 | 16631815 | H22C247.12 | 4657 | 4658 |
| 46 | 22 | 16591458 | 16631815 | H22C247.13 | 4659 | 4660 |
| 46 | 22 | 16591458 | 16631815 | H22C247.14 | 4661 | 4662 |
| 46 | 22 | 16591460 | 16607495 | H22C247.15 | 4663 | 4664 |
| 46 | 22 | 16591460 | 16631815 | H22C247.16 | 4665 | 4666 |
| 46 | 22 | 16592531 | 16598514 | H22C247.17 | 4667 | 4668 |
| 46 | 22 | 16592531 | 16631303 | H22C247.18 | 4669 | 4670 |
| 46 | 22 | 16592531 | 16631815 | H22C247.19 | 4671 | 4672 |
| 46 | 22 | 16592531 | 16631815 | H22C247.20 | 4673 | 4674 |
| 46 | 22 | 16592590 | 16631815 | H22C247.21 | 4675 | 4676 |
| 46 | 22 | 16592693 | 16631303 | H22C247.22 | 4677 | 4678 |
| 46 | 22 | 16592693 | 16631787 | H22C247.23 | 4679 | 4680 |
| 46 | 22 | 16592693 | 16631815 | H22C247.24 | 4681 | 4682 |
| 46 | 22 | 16592693 | 16631815 | H22C247.25 | 4683 | 4684 |
| 46 | 22 | 16592696 | 16601297 | H22C247.26 | 4685 | 4686 |
| 46 | 22 | 16592696 | 16631815 | H22C247.27 | 4687 | 4688 |
| 46 | 22 | 16634681 | 16636800 | H22C261.1 | 4689 | 4690 |
| 46 | 22 | 16637180 | 16637883 | H22C262.1 | 4691 | 4692 |
| 46 | 22 | 16644967 | 16669095 | H22C263.1 | 4693 | 4694 |
| 46 | 22 | 16644967 | 16685103 | H22C263.2 | 4695 | 4696 |
| 46 | 22 | 16644968 | 16646266 | H22C264.1 | 4697 | 4698 |
| 46 | 22 | 16644968 | 16647610 | H22C266.1 | 4699 | 4700 |
| 46 | 22 | 16648351 | 16675316 | H22C263.3 | 4701 | 4702 |
| 46 | 22 | 16655993 | 16657308 | H22C272.1 | 4703 | 4704 |
| 46 | 22 | 16656011 | 16657390 | H22C273.1 | 4705 | 4706 |
| 46 | 22 | 16676183 | 16689247 | H22C263.4 | 4707 | 4708 |
| 46 | 22 | 16678762 | 16679688 | H22C263.5 | 4709 | 4710 |
| 46 | 22 | 16691654 | 16764155 | H22C292.1 | 4711 | 4712 |
| 46 | 22 | 16691657 | 16764155 | H22C292.2 | 4713 | 4714 |
| 46 | 22 | 16696299 | 16858821 | H22C292.3 | 4715 | 4716 |
| 46 | 22 | 16709476 | 16720104 | H22C298.1 | 4717 | 4718 |
| 46 | 22 | 16752560 | 16754105 | H22C292.4 | 4719 | 4720 |
| 46 | 22 | 16756401 | 16763982 | H22C292.5 | 4721 | 4722 |
| 46 | 22 | 16861604 | 16864628 | H22C349.1 | 4723 | 4724 |
| 46 | 22 | 16886704 | 16895288 | H22C352.1 | 4725 | 4726 |
| 46 | 22 | 16933846 | 16935007 | H22C354.1 | 4727 | 4728 |
| 46 | 22 | 16933846 | 16935117 | H22C353.1 | 4729 | 4730 |
| 46 | 22 | 16935239 | 16948350 | H22C356.1 | 4731 | 4732 |
| 46 | 22 | 16935242 | 16948790 | H22C356.2 | 4733 | 4734 |
| 46 | 22 | 16935258 | 16945781 | H22C356.3 | 4735 | 4736 |
| 46 | 22 | 16935313 | 16945779 | H22C356.4 | 4737 | 4738 |
| 46 | 22 | 16940952 | 16948350 | H22C357.1 | 4739 | 4740 |
| 46 | 22 | 16940952 | 16948759 | H22C357.2 | 4741 | 4742 |
| 46 | 22 | 16942483 | 16945936 | H22C356.5 | 4743 | 4744 |
| 46 | 22 | 16945214 | 16948350 | H22C359.1 | 4745 | 4746 |
| 46 | 22 | 16945214 | 16948759 | H22C359.2 | 4747 | 4748 |
| 46 | 22 | 16945533 | 16950882 | H22C360.1 | 4749 | 4750 |
| 46 | 22 | 16946289 | 16950882 | H22C361.1 | 4751 | 4752 |
| 46 | 22 | 16946470 | 16948759 | H22C362.1 | 4753 | 4754 |
| 46 | 22 | 16947053 | 16948759 | H22C357.3 | 4755 | 4756 |
| 46 | 22 | 16947053 | 16948759 | H22C364.1 | 4757 | 4758 |
| 46 | 22 | 16947109 | 16948350 | H22C357.4 | 4759 | 4760 |
| 46 | 22 | 16967795 | 16988476 | H22C371.1 | 4761 | 4762 |
| 46 | 22 | 16967795 | 16989052 | H22C371.2 | 4763 | 4764 |
| 46 | 22 | 16978427 | 16988428 | H22C371.3 | 4765 | 4766 |
| 47 | X | 80175344 | 80263530 | HXC4994.1 | 4767 | 4768 |
| 47 | X | 80175344 | 80263557 | HXC4994.2 | 4769 | 4770 |
| 47 | X | 80175344 | 80263586 | HXC4994.3 | 4771 | 4772 |
| 47 | X | 80175647 | 80180122 | HXC4994.4 | 4773 | 4774 |
| 47 | X | 80175709 | 80180122 | HXC4994.5 | 4775 | 4776 |
| 47 | X | 80175709 | 80263586 | HXC4994.6 | 4777 | 4778 |
| 47 | X | 80263587 | 80360191 | HXC4997.1 | 4779 | 4780 |
| 47 | X | 80263621 | 80359238 | HXC4997.2 | 4781 | 4782 |
| 47 | X | 80263621 | 80360191 | HXC4997.3 | 4783 | 4784 |
| 47 | X | 80263661 | 80360191 | HXC4997.4 | 4785 | 4786 |
| 47 | X | 80263715 | 80359238 | HXC4997.5 | 4787 | 4788 |
| 47 | X | 80263862 | 80359238 | HXC4997.6 | 4789 | 4790 |
| 47 | X | 80263862 | 80360191 | HXC4997.7 | 4791 | 4792 |
| 47 | X | 80264244 | 80359238 | HXC4997.8 | 4793 | 4794 |
| 47 | X | 80264244 | 80360191 | HXC4997.9 | 4795 | 4796 |
| 47 | X | 80273145 | 80359238 | HXC4997.10 | 4797 | 4798 |
| 47 | X | 80273145 | 80360191 | HXC4997.11 | 4799 | 4800 |
| 47 | X | 80317137 | 80360191 | HXC4997.12 | 4801 | 4802 |
| 47 | X | 80356945 | 80358119 | HXC5008.1 | 4803 | 4804 |

TABLE 7

| List of significantly associated haplotypes based on the longevity fine mapping results using the Quebec Founder Population (QFP). Individual | | | | | | | | | | | | | | | | | | | |
|---|---|---|---|---|---|---|---|---|---|---|---|---|---|---|---|---|---|---|---|
| haplotypes with associated relative risks are presented in each row of the table; these values were extracted from the associated marker | | | | | | | | | | | | | | | | | | | |
| haplotype window with the most significant p value for each SNP in Table 3. The first column lists the region ID as presented in Table 1. The | | | | | | | | | | | | | | | | | | | |
| Haplotype column lists the specific nucleotides for the individual SNP alleles contributing to the haplotype reported. The Case and Control | | | | | | | | | | | | | | | | | | | |
| columns correspond to the numbers of cases and controls, respectively, containing the haplotype variant noted in the Haplotype column. The | | | | | | | | | | | | | | | | | | | |
| Total Case and Total Control columns list the total numbers of cases and controls for which genotype data was available for the haplotype | | | | | | | | | | | | | | | | | | | |
| in question, The RR column gives the relative risk for each particular haplotype. The remainder of the columns lists the SeqIDs for the SNPs | | | | | | | | | | | | | | | | | | | |
| contributing to the haplotype and their relative location with respect to the central marker. The Central marker (0) column lists the SeqID for | | | | | | | | | | | | | | | | | | | |
| the central marker on which the haplotype is based. Flanking markers are identified by minus (−) or plus (+) signs to indicate location of | | | | | | | | | | | | | | | | | | | |
| flanking SNPs. | | | | | | | | | | | | | | | | | | | |
| Re- | | | | | Total | | % | | Central | Central | Central | Central | Central | Central | Central | Central | Central | Central | Central |
| gion | | | Con- | Total | Con- | % | Con- | | marker | marker | marker | marker | marker | marker | marker | marker | marker | marker | marker |
| ID | Haplotype | Case | trol | Case | trol | Case | trol | RR | (−5) | (−4) | (−3) | (−2) | (−1) | (0) | (+1) | (+2) | (+3) | (+4) | (+5) |
| 1 | CTTG | 51 | 81 | 1258 | 1262 | 0.04 | 0.06 | 0.62 | | | | 8357 | 4850 | 4853 | 8358 | 4858 | | | |
| 1 | A | 820 | 767 | 1258 | 1262 | 0.65 | 0.61 | 1.21 | | | | | | 4858 | | | | | |
| 1 | G | 438 | 495 | 1258 | 1262 | 0.35 | 0.39 | 0.83 | | | | | | 4858 | | | | | |
| 1 | GAT | 125 | 166 | 1258 | 1262 | 0.10 | 0.13 | 0.73 | | | | | 4858 | 4863 | 8359 | | | | |
| 2 | A | 855 | 799 | 1272 | 1266 | 0.67 | 0.63 | 1.20 | | | | | | 4917 | | | | | |
| 2 | T | 417 | 467 | 1272 | 1266 | 0.33 | 0.37 | 0.83 | | | | | | 4917 | | | | | |
| 2 | TCG | 2 | 11 | 1272 | 1266 | 0.00 | 0.01 | 0.18 | | | | | 4917 | 8360 | 8361 | | | | |
| 3 | ACCGG | 27 | 11 | 1270 | 1266 | 0.02 | 0.01 | 2.48 | | | | 8362 | 4971 | 4972 | 4973 | 4975 | | | |
| 3 | CGG | 30 | 11 | 1270 | 1266 | 0.02 | 0.01 | 2.76 | | | | | 4972 | 4973 | 4975 | | | | |
| 3 | A | 1178 | 1214 | 1270 | 1266 | 0.93 | 0.96 | 0.55 | | | | | | 4975 | | | | | |
| 3 | G | 92 | 52 | 1270 | 1266 | 0.07 | 0.04 | 1.82 | | | | | | 4975 | | | | | |
| 3 | GGG | 91 | 52 | 1270 | 1266 | 0.07 | 0.04 | 1.80 | | | | | 4975 | 4977 | 8363 | | | | |
| 3 | AAGTT | 107 | 137 | 1270 | 1266 | 0.08 | 0.11 | 0.76 | | | | 4975 | 4977 | 8363 | 4978 | 4980 | | | |
| 3 | GGGTG | 89 | 51 | 1270 | 1266 | 0.07 | 0.04 | 1.80 | | | | 4975 | 4977 | 8363 | 4978 | 4980 | | | |
| 6 | T | 871 | 930 | 1266 | 1260 | 0.69 | 0.74 | 0.78 | | | | | | 5118 | | | | | |
| 6 | C | 395 | 330 | 1266 | 1260 | 0.31 | 0.26 | 1.28 | | | | | | 5118 | | | | | |
| 6 | CAG | 382 | 315 | 1266 | 1260 | 0.30 | 0.25 | 1.30 | | | | | 5118 | 5119 | 8375 | | | | |
| 6 | A | 553 | 617 | 1266 | 1260 | 0.44 | 0.49 | 0.81 | | | | | | 8375 | | | | | |
| 6 | G | 713 | 643 | 1266 | 1260 | 0.56 | 0.51 | 1.24 | | | | | | 8375 | | | | | |
| 6 | T | 609 | 683 | 1266 | 1260 | 0.48 | 0.54 | 0.78 | | | | | | 5120 | | | | | |
| 6 | C | 657 | 577 | 1266 | 1260 | 0.52 | 0.46 | 1.28 | | | | | | 5120 | | | | | |
| 6 | C | 403 | 470 | 1266 | 1260 | 0.32 | 0.37 | 0.78 | | | | | | 5122 | | | | | |
| 6 | T | 863 | 790 | 1266 | 1260 | 0.68 | 0.63 | 1.27 | | | | | | 5122 | | | | | |
| 6 | C | 385 | 462 | 1266 | 1260 | 0.30 | 0.37 | 0.75 | | | | | | 5123 | | | | | |
| 6 | A | 881 | 798 | 1266 | 1260 | 0.70 | 0.63 | 1.32 | | | | | | 5123 | | | | | |
| 6 | AAG | 612 | 544 | 1266 | 1260 | 0.48 | 0.43 | 1.23 | | | | | 5123 | 5124 | 8376 | | | | |
| 6 | CAG | 200 | 247 | 1266 | 1260 | 0.16 | 0.20 | 0.77 | | | | | 5123 | 5124 | 8376 | | | | |
| 6 | AAGCT | 490 | 429 | 1266 | 1260 | 0.39 | 0.34 | 1.22 | | | | 5123 | 5124 | 8376 | 5127 | 8377 | | | |
| 6 | CAGTC | 123 | 162 | 1266 | 1260 | 0.10 | 0.13 | 0.73 | | | | 5123 | 5124 | 8376 | 5127 | 8377 | | | |
| 6 | T | 419 | 466 | 1266 | 1260 | 0.33 | 0.37 | 0.84 | | | | | | 5127 | | | | | |
| 6 | C | 847 | 794 | 1266 | 1260 | 0.67 | 0.63 | 1.19 | | | | | | 5127 | | | | | |
| 6 | C | 435 | 482 | 1266 | 1260 | 0.34 | 0.38 | 0.84 | | | | | | 8377 | | | | | |
| 6 | T | 831 | 778 | 1266 | 1260 | 0.66 | 0.62 | 1.18 | | | | | | 8377 | | | | | |
| 7 | T | 1112 | 1146 | 1268 | 1264 | 0.88 | 0.91 | 0.73 | | | | | | 5240 | | | | | |
| 7 | C | 156 | 118 | 1268 | 1264 | 0.12 | 0.09 | 1.36 | | | | | | 5240 | | | | | |
| 7 | A | 1099 | 1130 | 1268 | 1264 | 0.87 | 0.89 | 0.77 | | | | | | 5241 | | | | | |
| 7 | C | 169 | 134 | 1268 | 1264 | 0.13 | 0.11 | 1.30 | | | | | | 5241 | | | | | |
| 8 | CTAGA | 257 | 308 | 1262 | 1260 | 0.20 | 0.24 | 0.79 | | | | 5309 | 5312 | 5313 | 8382 | 8383 | | | |
| 8 | AGG | 863 | 803 | 1262 | 1260 | 0.68 | 0.64 | 1.23 | | | | | 5313 | 8382 | 8383 | | | | |
| 8 | AGA | 257 | 308 | 1262 | 1260 | 0.20 | 0.24 | 0.79 | | | | | 5313 | 8382 | 8383 | | | | |
| 8 | G | 863 | 803 | 1262 | 1260 | 0.68 | 0.64 | 1.23 | | | | | | 8383 | | | | | |
| 8 | A | 399 | 457 | 1262 | 1260 | 0.32 | 0.36 | 0.81 | | | | | | 8383 | | | | | |
| 8 | AAC | 221 | 265 | 1262 | 1260 | 0.18 | 0.21 | 0.80 | | | | | 8383 | 8384 | 8385 | | | | |
| 9 | GGA | 336 | 287 | 1270 | 1262 | 0.26 | 0.23 | 1.22 | | | | | 5370 | 5371 | 5372 | | | | |
| 9 | ATG | 407 | 470 | 1270 | 1262 | 0.32 | 0.37 | 0.79 | | | | | 5370 | 5371 | 5372 | | | | |
| 9 | A | 861 | 789 | 1270 | 1262 | 0.68 | 0.63 | 1.26 | | | | | | 5372 | | | | | |
| 9 | G | 409 | 473 | 1270 | 1262 | 0.32 | 0.37 | 0.79 | | | | | | 5372 | | | | | |
| 9 | ATA | 489 | 426 | 1270 | 1262 | 0.39 | 0.34 | 1.23 | | | | | 5372 | 5374 | 8387 | | | | |
| 9 | GTA | 408 | 473 | 1270 | 1262 | 0.32 | 0.37 | 0.79 | | | | | 5372 | 5374 | 8387 | | | | |
| 10 | CGC | 368 | 421 | 1266 | 1254 | 0.29 | 0.34 | 0.81 | | | | | 8388 | 5442 | 5443 | | | | |
| 10 | CAT | 538 | 478 | 1266 | 1254 | 0.42 | 0.38 | 1.20 | | | | | 8388 | 5442 | 5443 | | | | |
| 10 | CGC | 714 | 756 | 1266 | 1254 | 0.56 | 0.60 | 0.85 | | | | | 5442 | 5443 | 5444 | | | | |
| 10 | ATT | 511 | 435 | 1266 | 1254 | 0.40 | 0.35 | 1.27 | | | | | 5442 | 5443 | 5444 | | | | |
| 10 | ATG | 27 | 43 | 1266 | 1254 | 0.02 | 0.03 | 0.61 | | | | | 5442 | 5443 | 5444 | | | | |
| 10 | CGCGGAC | 365 | 419 | 1266 | 1254 | 0.29 | 0.33 | 0.81 | | | 8388 | 5442 | 5443 | 5444 | 5445 | 5446 | 5448 | | |
| 10 | CATTACT | 472 | 387 | 1266 | 1254 | 0.37 | 0.31 | 1.33 | | | 8388 | 5442 | 5443 | 5444 | 5445 | 5446 | 5448 | | |
| 10 | CATGGAC | 27 | 43 | 1266 | 1254 | 0.02 | 0.03 | 0.61 | | | 8388 | 5442 | 5443 | 5444 | 5445 | 5446 | 5448 | | |
| 10 | GCGGACT | 390 | 455 | 1266 | 1254 | 0.31 | 0.36 | 0.78 | | | 5442 | 5443 | 5444 | 5445 | 5446 | 5448 | 8389 | | |
| 10 | ATTACTC | 472 | 387 | 1266 | 1254 | 0.37 | 0.31 | 1.33 | | | 5442 | 5443 | 5444 | 5445 | 5446 | 5448 | 8389 | | |
| 10 | ATGGACT | 26 | 43 | 1266 | 1254 | 0.02 | 0.03 | 0.59 | | | 5442 | 5443 | 5444 | 5445 | 5446 | 5448 | 8389 | | |
| 10 | GGACT | 416 | 498 | 1266 | 1254 | 0.33 | 0.40 | 0.74 | | | | 5444 | 5445 | 5446 | 5448 | 8389 | | | |
| 10 | TACTC | 472 | 387 | 1266 | 1254 | 0.37 | 0.31 | 1.33 | | | | 5444 | 5445 | 5446 | 5448 | 8389 | | | |
| 10 | ACT | 441 | 522 | 1266 | 1254 | 0.35 | 0.42 | 0.75 | | | | | 5446 | 5448 | 8389 | | | | |
| 10 | CTC | 477 | 389 | 1266 | 1254 | 0.38 | 0.31 | 1.34 | | | | | 5446 | 5448 | 8389 | | | | |
| 10 | ATC | 7 | 17 | 1266 | 1254 | 0.01 | 0.01 | 0.40 | | | | | 5446 | 5448 | 8389 | | | | |
| 10 | C | 825 | 732 | 1266 | 1254 | 0.65 | 0.58 | 1.33 | | | | | | 8389 | | | | | |
| 10 | T | 441 | 522 | 1266 | 1254 | 0.35 | 0.42 | 0.75 | | | | | | 8389 | | | | | |
| 10 | T | 879 | 801 | 1266 | 1254 | 0.69 | 0.64 | 1.28 | | | | | | 8390 | | | | | |
| 10 | C | 387 | 453 | 1266 | 1254 | 0.31 | 0.36 | 0.78 | | | | | | 8390 | | | | | |
| 12 | GGG | 31 | 61 | 1264 | 1264 | 0.02 | 0.05 | 0.50 | | | | | 5602 | 5603 | 5605 | | | | |
| 12 | GCATT | 294 | 245 | 1264 | 1264 | 0.23 | 0.19 | 1.26 | | | | 5602 | 5603 | 5605 | 5606 | 5607 | | | |
| 12 | GGGCC | 28 | 52 | 1264 | 1264 | 0.02 | 0.04 | 0.53 | | | | 5602 | 5603 | 5605 | 5606 | 5607 | | | |
| 12 | GCATTAG | 294 | 245 | 1264 | 1264 | 0.23 | 0.19 | 1.26 | | | 5602 | 5603 | 5605 | 5606 | 5607 | 5608 | 5609 | | |
| 12 | GGGCCAG | 23 | 47 | 1264 | 1264 | 0.02 | 0.04 | 0.48 | | | 5602 | 5603 | 5605 | 5606 | 5607 | 5608 | 5609 | | |
| 12 | T | 422 | 352 | 1264 | 1264 | 0.33 | 0.28 | 1.30 | | | | | | 5607 | | | | | |
| 12 | C | 842 | 912 | 1264 | 1264 | 0.67 | 0.72 | 0.77 | | | | | | 5607 | | | | | |
| 12 | TAG | 419 | 348 | 1264 | 1264 | 0.33 | 0.28 | 1.31 | | | | | 5607 | 5608 | 5609 | | | | |
| 12 | CAG | 581 | 638 | 1264 | 1264 | 0.45 | 0.50 | 0.83 | | | | | 5607 | 5608 | 5609 | | | | |
| 12 | TTAGTCG | 208 | 155 | 1264 | 1264 | 0.16 | 0.12 | 1.41 | | | 5606 | 5607 | 5608 | 5609 | 5611 | 5612 | 5613 | | |
| 12 | TCAGTCG | 8 | 20 | 1264 | 1264 | 0.01 | 0.02 | 0.40 | | | 5606 | 5607 | 5608 | 5609 | 5611 | 5612 | 5613 | | |
| 13 | TAA | 842 | 766 | 1258 | 1236 | 0.67 | 0.62 | 1.24 | | | | | 5728 | 5729 | 5730 | | | | |
| 13 | CCG | 162 | 195 | 1258 | 1236 | 0.13 | 0.16 | 0.79 | | | | | 5728 | 5729 | 5730 | | | | |
| 13 | A | 860 | 773 | 1258 | 1236 | 0.68 | 0.63 | 1.29 | | | | | | 5730 | | | | | |
| 13 | G | 398 | 463 | 1258 | 1236 | 0.32 | 0.37 | 0.77 | | | | | | 5730 | | | | | |
| 13 | C | 940 | 868 | 1258 | 1236 | 0.75 | 0.70 | 1.25 | | | | | | 8392 | | | | | |
| 13 | A | 318 | 368 | 1258 | 1236 | 0.25 | 0.30 | 0.80 | | | | | | 8392 | | | | | |
| 13 | TAACCTCTT | 28 | 10 | 1258 | 1236 | 0.02 | 0.01 | 2.79 | | 5728 | 5729 | 5730 | 8392 | 5732 | 5733 | 5734 | 5735 | 5736 | |
| 13 | AACCTCTTC | 27 | 10 | 1258 | 1236 | 0.02 | 0.01 | 2.69 | | 5729 | 5730 | 8392 | 5732 | 5733 | 5734 | 5735 | 5736 | 8393 | |
| 13 | CTCTT | 30 | 12 | 1258 | 1236 | 0.02 | 0.01 | 2.49 | | | | 5732 | 5733 | 5734 | 5735 | 5736 | | | |
| 13 | TTCAT | 82 | 58 | 1258 | 1236 | 0.07 | 0.05 | 1.42 | | | | 5732 | 5733 | 5734 | 5735 | 5736 | | | |
| 13 | CTT | 36 | 16 | 1258 | 1236 | 0.03 | 0.01 | 2.25 | | | | | 5734 | 5735 | 5736 | | | | |
| 14 | T | 804 | 869 | 1270 | 1254 | 0.63 | 0.69 | 0.76 | | | | | | 5803 | | | | | |
| 14 | G | 466 | 385 | 1270 | 1254 | 0.37 | 0.31 | 1.31 | | | | | | 5803 | | | | | |
| 14 | C | 833 | 901 | 1270 | 1254 | 0.66 | 0.72 | 0.75 | | | | | | 8394 | | | | | |
| 14 | T | 437 | 353 | 1270 | 1254 | 0.34 | 0.28 | 1.34 | | | | | | 8394 | | | | | |
| 14 | C | 804 | 872 | 1270 | 1254 | 0.63 | 0.70 | 0.76 | | | | | | 8395 | | | | | |
| 14 | A | 466 | 382 | 1270 | 1254 | 0.37 | 0.30 | 1.32 | | | | | | 8395 | | | | | |
| 14 | C | 884 | 948 | 1270 | 1254 | 0.70 | 0.76 | 0.74 | | | | | | 5811 | | | | | |
| 14 | T | 386 | 306 | 1270 | 1254 | 0.30 | 0.24 | 1.35 | | | | | | 5811 | | | | | |
| 14 | T | 874 | 932 | 1270 | 1254 | 0.69 | 0.74 | 0.76 | | | | | | 5815 | | | | | |
| 14 | C | 396 | 322 | 1270 | 1254 | 0.31 | 0.26 | 1.31 | | | | | | 5815 | | | | | |
| 14 | A | 901 | 970 | 1270 | 1254 | 0.71 | 0.77 | 0.71 | | | | | | 5816 | | | | | |
| 14 | G | 369 | 284 | 1270 | 1254 | 0.29 | 0.23 | 1.40 | | | | | | 5816 | | | | | |
| 14 | A | 881 | 936 | 1270 | 1254 | 0.69 | 0.75 | 0.77 | | | | | | 5817 | | | | | |
| 14 | G | 389 | 318 | 1270 | 1254 | 0.31 | 0.25 | 1.30 | | | | | | 5817 | | | | | |
| 14 | AAT | 876 | 930 | 1270 | 1254 | 0.69 | 0.74 | 0.77 | | | | | 5817 | 8396 | 8397 | | | | |
| 14 | GCC | 364 | 281 | 1270 | 1254 | 0.29 | 0.22 | 1.39 | | | | | 5817 | 8396 | 8397 | | | | |
| 14 | T | 906 | 973 | 1270 | 1254 | 0.71 | 0.78 | 0.72 | | | | | | 8397 | | | | | |
| 14 | C | 364 | 281 | 1270 | 1254 | 0.29 | 0.22 | 1.39 | | | | | | 8397 | | | | | |
| 15 | CTCTA | 157 | 116 | 1272 | 1256 | 0.12 | 0.09 | 1.38 | | | | 8398 | 5870 | 8399 | 5874 | 5880 | | | |
| 15 | CTA | 191 | 149 | 1272 | 1256 | 0.15 | 0.12 | 1.31 | | | | | 8399 | 5874 | 5880 | | | | |
| 15 | G | 1076 | 1106 | 1272 | 1256 | 0.85 | 0.88 | 0.74 | | | | | | 5880 | | | | | |
| 15 | A | 196 | 150 | 1272 | 1256 | 0.15 | 0.12 | 1.34 | | | | | | 5880 | | | | | |
| 15 | A | 1074 | 1104 | 1272 | 1256 | 0.84 | 0.88 | 0.75 | | | | | | 5882 | | | | | |
| 15 | C | 198 | 152 | 1272 | 1256 | 0.16 | 0.12 | 1.34 | | | | | | 5882 | | | | | |
| 15 | CTA | 185 | 144 | 1272 | 1256 | 0.15 | 0.11 | 1.31 | | | | | 5882 | 5885 | 5889 | | | | |
| 15 | ATG | 48 | 73 | 1272 | 1256 | 0.04 | 0.06 | 0.64 | | | | | 5882 | 5885 | 5889 | | | | |
| 15 | A | 1188 | 1143 | 1272 | 1256 | 0.93 | 0.91 | 1.40 | | | | | | 5889 | | | | | |
| 15 | G | 84 | 113 | 1272 | 1256 | 0.07 | 0.09 | 0.72 | | | | | | 5889 | | | | | |
| 16 | T | 654 | 587 | 1264 | 1266 | 0.52 | 0.46 | 1.24 | | | | | | 5917 | | | | | |
| 16 | A | 610 | 679 | 1264 | 1266 | 0.48 | 0.54 | 0.81 | | | | | | 5917 | | | | | |
| 16 | TAC | 642 | 579 | 1264 | 1266 | 0.51 | 0.46 | 1.22 | | | | | 5917 | 5918 | 5921 | | | | |
| 16 | AAC | 446 | 525 | 1264 | 1266 | 0.35 | 0.41 | 0.77 | | | | | 5917 | 5918 | 5921 | | | | |
| 16 | TACTT | 636 | 575 | 1264 | 1266 | 0.50 | 0.45 | 1.22 | | | | 5917 | 5918 | 5921 | 5922 | 5923 | | | |
| 16 | AACTT | 163 | 220 | 1264 | 1266 | 0.13 | 0.17 | 0.70 | | | | 5917 | 5918 | 5921 | 5922 | 5923 | | | |
| 16 | TACTTGA | 635 | 573 | 1264 | 1266 | 0.50 | 0.45 | 1.22 | | | 5917 | 5918 | 5921 | 5922 | 5923 | 5924 | 5925 | | |
| 16 | AACTTGA | 163 | 218 | 1264 | 1266 | 0.13 | 0.17 | 0.71 | | | 5917 | 5918 | 5921 | 5922 | 5923 | 5924 | 5925 | | |
| 16 | TACTTGATG | 565 | 509 | 1264 | 1266 | 0.45 | 0.40 | 1.20 | | 5917 | 5918 | 5921 | 5922 | 5923 | 5924 | 5925 | 5928 | 5930 | |
| 16 | AACTTGACG | 15 | 38 | 1264 | 1266 | 0.01 | 0.03 | 0.39 | | 5917 | 5918 | 5921 | 5922 | 5923 | 5924 | 5925 | 5928 | 5930 | |
| 16 | TACTTGATGTC | 537 | 486 | 1264 | 1266 | 0.42 | 0.38 | 1.19 | 5917 | 5918 | 5921 | 5922 | 5923 | 5924 | 5925 | 5928 | 5930 | 8401 | 5933 |
| 16 | AACTTGATGTT | 94 | 126 | 1264 | 1266 | 0.07 | 0.10 | 0.73 | 5917 | 5918 | 5921 | 5922 | 5923 | 5924 | 5925 | 5928 | 5930 | 8401 | 5933 |
| 16 | AACTTGACGTT | 15 | 36 | 1264 | 1266 | 0.01 | 0.03 | 0.41 | 5917 | 5918 | 5921 | 5922 | 5923 | 5924 | 5925 | 5928 | 5930 | 8401 | 5933 |
| 16 | CTTGATGTC | 589 | 534 | 1264 | 1266 | 0.47 | 0.42 | 1.20 | | 5921 | 5922 | 5923 | 5924 | 5925 | 5928 | 5930 | 8401 | 5933 | |
| 16 | TGATGTC | 701 | 630 | 1264 | 1266 | 0.55 | 0.50 | 1.26 | | | 5923 | 5924 | 5925 | 5928 | 5930 | 8401 | 5933 | | |
| 16 | ATGTC | 706 | 632 | 1264 | 1266 | 0.56 | 0.50 | 1.27 | | | | 5925 | 5928 | 5930 | 8401 | 5933 | | | |
| 16 | GTC | 706 | 634 | 1264 | 1266 | 0.56 | 0.50 | 1.26 | | | | | 5930 | 8401 | 5933 | | | | |
| 16 | GTT | 192 | 241 | 1264 | 1266 | 0.15 | 0.19 | 0.76 | | | | | 5930 | 8401 | 5933 | | | | |
| 16 | C | 779 | 707 | 1264 | 1266 | 0.62 | 0.56 | 1.27 | | | | | | 5933 | | | | | |
| 16 | T | 485 | 559 | 1264 | 1266 | 0.38 | 0.44 | 0.79 | | | | | | 5933 | | | | | |
| 17 | GGTCT | 259 | 205 | 1270 | 1264 | 0.20 | 0.16 | 1.32 | | | | 8403 | 8404 | 5973 | 8405 | 5980 | | | |
| 17 | G | 962 | 1006 | 1270 | 1264 | 0.76 | 0.80 | 0.80 | | | | | | 5980 | | | | | |
| 17 | T | 308 | 258 | 1270 | 1264 | 0.24 | 0.20 | 1.25 | | | | | | 5980 | | | | | |
| 17 | TGC | 240 | 188 | 1270 | 1264 | 0.19 | 0.15 | 1.33 | | | | | 5980 | 8406 | 8407 | | | | |
| 17 | A | 930 | 975 | 1270 | 1264 | 0.73 | 0.77 | 0.81 | | | | | | 8407 | | | | | |
| 17 | C | 340 | 289 | 1270 | 1264 | 0.27 | 0.23 | 1.23 | | | | | | 8407 | | | | | |
| 18 | ACGGA | 49 | 71 | 1270 | 1262 | 0.04 | 0.06 | 0.67 | | | | 6062 | 8409 | 8410 | 8411 | 6070 | | | |
| 18 | CGGAG | 45 | 70 | 1270 | 1262 | 0.04 | 0.06 | 0.63 | | | | 8409 | 8410 | 8411 | 6070 | 6071 | | | |
| 18 | G | 1200 | 1158 | 1270 | 1262 | 0.94 | 0.92 | 1.54 | | | | | | 6070 | | | | | |
| 18 | A | 70 | 104 | 1270 | 1262 | 0.06 | 0.08 | 0.65 | | | | | | 6070 | | | | | |
| 18 | C | 1111 | 1046 | 1270 | 1262 | 0.87 | 0.83 | 1.44 | | | | | | 6071 | | | | | |
| 18 | G | 159 | 216 | 1270 | 1262 | 0.13 | 0.17 | 0.69 | | | | | | 6071 | | | | | |
| 18 | A | 1079 | 1005 | 1270 | 1262 | 0.85 | 0.80 | 1.44 | | | | | | 6073 | | | | | |
| 18 | G | 191 | 257 | 1270 | 1262 | 0.15 | 0.20 | 0.69 | | | | | | 6073 | | | | | |
| 18 | G | 1081 | 1007 | 1270 | 1262 | 0.85 | 0.80 | 1.45 | | | | | | 8412 | | | | | |
| 18 | C | 189 | 255 | 1270 | 1262 | 0.15 | 0.20 | 0.69 | | | | | | 8412 | | | | | |
| 19 | AAACA | 622 | 677 | 1264 | 1264 | 0.49 | 0.54 | 0.84 | | | | 6096 | 8414 | 8415 | 8416 | 8417 | | | |
| 19 | TAACA | 2 | 10 | 1264 | 1264 | 0.00 | 0.01 | 0.20 | | | | 6096 | 8414 | 8415 | 8416 | 8417 | | | |
| 19 | AACAC | 622 | 680 | 1264 | 1264 | 0.49 | 0.54 | 0.83 | | | | 8414 | 8415 | 8416 | 8417 | 6098 | | | |
| 19 | TGCTT | 244 | 201 | 1264 | 1264 | 0.19 | 0.16 | 1.27 | | | | 8414 | 8415 | 8416 | 8417 | 6098 | | | |
| 19 | A | 624 | 688 | 1264 | 1264 | 0.49 | 0.54 | 0.82 | | | | | | 8417 | | | | | |
| 19 | T | 640 | 576 | 1264 | 1264 | 0.51 | 0.46 | 1.23 | | | | | | 8417 | | | | | |
| 19 | ACA | 622 | 681 | 1264 | 1264 | 0.49 | 0.54 | 0.83 | | | | | 8417 | 6098 | 6100 | | | | |
| 19 | ACACC | 618 | 670 | 1264 | 1264 | 0.49 | 0.53 | 0.85 | | | | 8417 | 6098 | 6100 | 8418 | 6101 | | | |
| 19 | CACCA | 619 | 672 | 1264 | 1264 | 0.49 | 0.53 | 0.85 | | | | 6098 | 6100 | 8418 | 6101 | 6102 | | | |
| 19 | C | 621 | 672 | 1264 | 1264 | 0.49 | 0.53 | 0.85 | | | | | | 6101 | | | | | |
| 19 | G | 643 | 592 | 1264 | 1264 | 0.51 | 0.47 | 1.18 | | | | | | 6101 | | | | | |
| 20 | CGG | 521 | 452 | 1270 | 1262 | 0.41 | 0.36 | 1.25 | | | | | 6172 | 6175 | 6176 | | | | |
| 20 | G | 855 | 778 | 1270 | 1262 | 0.67 | 0.62 | 1.28 | | | | | | 6176 | | | | | |
| 20 | A | 415 | 484 | 1270 | 1262 | 0.33 | 0.38 | 0.78 | | | | | | 6176 | | | | | |
| 20 | GAT | 809 | 740 | 1270 | 1262 | 0.64 | 0.59 | 1.24 | | | | | 6176 | 6179 | 6182 | | | | |
| 20 | AGT | 124 | 167 | 1270 | 1262 | 0.10 | 0.13 | 0.71 | | | | | 6176 | 6179 | 6182 | | | | |
| 20 | AAC | 13 | 27 | 1270 | 1262 | 0.01 | 0.02 | 0.47 | | | | | 6176 | 6179 | 6182 | | | | |
| 20 | GATTC | 739 | 668 | 1270 | 1262 | 0.58 | 0.53 | 1.24 | | | | 6176 | 6179 | 6182 | 6183 | 6184 | | | |
| 20 | AGTCT | 106 | 144 | 1270 | 1262 | 0.08 | 0.11 | 0.71 | | | | 6176 | 6179 | 6182 | 6183 | 6184 | | | |
| 20 | AACCT | 13 | 27 | 1270 | 1262 | 0.01 | 0.02 | 0.47 | | | | 6176 | 6179 | 6182 | 6183 | 6184 | | | |
| 20 | T | 778 | 715 | 1270 | 1262 | 0.61 | 0.57 | 1.21 | | | | | | 6183 | | | | | |
| 20 | C | 492 | 547 | 1270 | 1262 | 0.39 | 0.43 | 0.83 | | | | | | 6183 | | | | | |
| 20 | TCT | 778 | 715 | 1270 | 1262 | 0.61 | 0.57 | 1.21 | | | | | 6183 | 6184 | 6185 | | | | |
| 20 | CTG | 492 | 547 | 1270 | 1262 | 0.39 | 0.43 | 0.83 | | | | | 6183 | 6184 | 6185 | | | | |
| 20 | T | 778 | 715 | 1270 | 1262 | 0.61 | 0.57 | 1.21 | | | | | | 6185 | | | | | |
| 20 | G | 492 | 547 | 1270 | 1262 | 0.39 | 0.43 | 0.83 | | | | | | 6185 | | | | | |
| 20 | TCTGCCG | 523 | 440 | 1270 | 1262 | 0.41 | 0.35 | 1.31 | | | 6183 | 6184 | 6185 | 6186 | 6188 | 6189 | 6190 | | |
| 20 | TGCCG | 523 | 440 | 1270 | 1262 | 0.41 | 0.35 | 1.31 | | | | 6185 | 6186 | 6188 | 6189 | 6190 | | | |
| 21 | TCG | 111 | 163 | 1268 | 1266 | 0.09 | 0.13 | 0.65 | | | | | 6252 | 6254 | 6255 | | | | |
| 21 | CAC | 686 | 624 | 1268 | 1266 | 0.54 | 0.49 | 1.21 | | | | | 6254 | 6255 | 6256 | | | | |
| 21 | CGC | 217 | 278 | 1268 | 1266 | 0.17 | 0.22 | 0.73 | | | | | 6254 | 6255 | 6256 | | | | |
| 21 | ACT | 629 | 564 | 1268 | 1266 | 0.50 | 0.45 | 1.23 | | | | | 6255 | 6256 | 6257 | | | | |
| 21 | GCC | 216 | 278 | 1268 | 1266 | 0.17 | 0.22 | 0.73 | | | | | 6255 | 6256 | 6257 | | | | |
| 21 | T | 994 | 924 | 1268 | 1266 | 0.78 | 0.73 | 1.34 | | | | | | 6257 | | | | | |
| 21 | C | 274 | 342 | 1268 | 1266 | 0.22 | 0.27 | 0.74 | | | | | | 6257 | | | | | |
| 21 | CACTTGGAT | 558 | 497 | 1268 | 1266 | 0.44 | 0.39 | 1.22 | | 6254 | 6255 | 6256 | 6257 | 6258 | 6259 | 6260 | 6262 | 6264 | |
| 21 | CGCCTACGT | 43 | 64 | 1268 | 1266 | 0.03 | 0.05 | 0.66 | | 6254 | 6255 | 6256 | 6257 | 6258 | 6259 | 6260 | 6262 | 6264 | |
| 21 | CACTTGGGC | 14 | 34 | 1268 | 1266 | 0.01 | 0.03 | 0.40 | | 6254 | 6255 | 6256 | 6257 | 6258 | 6259 | 6260 | 6262 | 6264 | |
| 21 | CACTTGGAC | 8 | 1 | 1268 | 1266 | 0.01 | 0.00 | 8.03 | | 6254 | 6255 | 6256 | 6257 | 6258 | 6259 | 6260 | 6262 | 6264 | |
| 21 | CTTGGAT | 560 | 497 | 1268 | 1266 | 0.44 | 0.39 | 1.22 | | | 6256 | 6257 | 6258 | 6259 | 6260 | 6262 | 6264 | | |
| 21 | CCGGCGT | 33 | 52 | 1268 | 1266 | 0.03 | 0.04 | 0.62 | | | 6256 | 6257 | 6258 | 6259 | 6260 | 6262 | 6264 | | |
| 21 | CCTACGT | 43 | 65 | 1268 | 1266 | 0.03 | 0.05 | 0.65 | | | 6256 | 6257 | 6258 | 6259 | 6260 | 6262 | 6264 | | |
| 21 | CTTGGGC | 14 | 34 | 1268 | 1266 | 0.01 | 0.03 | 0.40 | | | 6256 | 6257 | 6258 | 6259 | 6260 | 6262 | 6264 | | |
| 21 | CTTGGAC | 8 | 1 | 1268 | 1266 | 0.01 | 0.00 | 8.03 | | | 6256 | 6257 | 6258 | 6259 | 6260 | 6262 | 6264 | | |
| 21 | G | 1154 | 1097 | 1268 | 1266 | 0.91 | 0.87 | 1.56 | | | | | | 6260 | | | | | |
| 21 | C | 114 | 169 | 1268 | 1266 | 0.09 | 0.13 | 0.64 | | | | | | 6260 | | | | | |
| 21 | A | 1085 | 1014 | 1268 | 1266 | 0.86 | 0.80 | 1.47 | | | | | | 6262 | | | | | |
| 21 | G | 183 | 252 | 1268 | 1266 | 0.14 | 0.20 | 0.68 | | | | | | 6262 | | | | | |
| 23 | GCG | 93 | 132 | 1270 | 1262 | 0.07 | 0.10 | 0.68 | | | | | 8428 | 8429 | 6409 | | | | |
| 23 | GTA | 191 | 152 | 1270 | 1262 | 0.15 | 0.12 | 1.29 | | | | | 8428 | 8429 | 6409 | | | | |
| 23 | A | 1167 | 1120 | 1270 | 1262 | 0.92 | 0.89 | 1.44 | | | | | | 6409 | | | | | |
| 23 | G | 103 | 142 | 1270 | 1262 | 0.08 | 0.11 | 0.70 | | | | | | 6409 | | | | | |
| 23 | C | 1158 | 1115 | 1270 | 1262 | 0.91 | 0.88 | 1.36 | | | | | | 8431 | | | | | |
| 23 | A | 112 | 147 | 1270 | 1262 | 0.09 | 0.12 | 0.73 | | | | | | 8431 | | | | | |
| 23 | CGAGACC | 96 | 135 | 1270 | 1262 | 0.08 | 0.11 | 0.68 | | | 8429 | 6409 | 8431 | 8432 | 6411 | 8434 | 8435 | | |
| 23 | TACGGCC | 178 | 134 | 1270 | 1262 | 0.14 | 0.11 | 1.37 | | | 8429 | 6409 | 8431 | 8432 | 6411 | 8434 | 8435 | | |
| 23 | ACC | 111 | 149 | 1270 | 1262 | 0.09 | 0.12 | 0.72 | | | | | 6411 | 8434 | 8435 | | | | |
| 24 | CAG | 416 | 477 | 1266 | 1264 | 0.33 | 0.38 | 0.81 | | | | | 8436 | 8437 | 6676 | | | | |
| 24 | CAC | 367 | 317 | 1266 | 1264 | 0.29 | 0.25 | 1.22 | | | | | 8436 | 8437 | 6676 | | | | |
| 24 | G | 833 | 878 | 1266 | 1264 | 0.66 | 0.69 | 0.85 | | | | | | 6676 | | | | | |
| 24 | C | 433 | 386 | 1266 | 1264 | 0.34 | 0.31 | 1.18 | | | | | | 6676 | | | | | |
| 24 | CAGTTTTGA | 27 | 47 | 1266 | 1264 | 0.02 | 0.04 | 0.56 | | 8436 | 8437 | 6676 | 8440 | 8441 | 8442 | 8443 | 6679 | 6680 | |
| 24 | CAGCGTTCA | 13 | 2 | 1266 | 1264 | 0.01 | 0.00 | 6.55 | | 8436 | 8437 | 6676 | 8440 | 8441 | 8442 | 8443 | 6679 | 6680 | |
| 24 | AAGCGTCCA | 26 | 9 | 1266 | 1264 | 0.02 | 0.01 | 2.92 | | 8436 | 8437 | 6676 | 8440 | 8441 | 8442 | 8443 | 6679 | 6680 | |
| 24 | CGTCG | 280 | 332 | 1266 | 1264 | 0.22 | 0.26 | 0.80 | | | | 8440 | 8441 | 8442 | 8443 | 6679 | | | |
| 24 | CGTTC | 17 | 2 | 1266 | 1264 | 0.01 | 0.00 | 8.59 | | | | 8440 | 8441 | 8442 | 8443 | 6679 | | | |
| 24 | CGTCC | 58 | 33 | 1266 | 1264 | 0.05 | 0.03 | 1.79 | | | | 8440 | 8441 | 8442 | 8443 | 6679 | | | |
| 24 | GTCGG | 92 | 122 | 1266 | 1264 | 0.07 | 0.10 | 0.73 | | | | 8441 | 8442 | 8443 | 6679 | 6680 | | | |
| 24 | GTTCA | 17 | 2 | 1266 | 1264 | 0.01 | 0.00 | 8.59 | | | | 8441 | 8442 | 8443 | 6679 | 6680 | | | |
| 24 | GTCCA | 56 | 29 | 1266 | 1264 | 0.04 | 0.02 | 1.97 | | | | 8441 | 8442 | 8443 | 6679 | 6680 | | | |
| 24 | G | 957 | 1015 | 1266 | 1264 | 0.76 | 0.80 | 0.76 | | | | | | 6679 | | | | | |
| 24 | C | 309 | 249 | 1266 | 1264 | 0.24 | 0.20 | 1.32 | | | | | | 6679 | | | | | |
| 24 | CAT | 281 | 227 | 1266 | 1264 | 0.22 | 0.18 | 1.30 | | | | | 6679 | 6680 | 8444 | | | | |
| 24 | CCATCAG | 57 | 29 | 1266 | 1264 | 0.05 | 0.02 | 2.01 | | | 8443 | 6679 | 6680 | 8444 | 6682 | 8445 | 8446 | | |
| 25 | C | 739 | 653 | 1260 | 1252 | 0.59 | 0.52 | 1.30 | | | | | | 8447 | | | | | |
| 25 | T | 521 | 599 | 1260 | 1252 | 0.41 | 0.48 | 0.77 | | | | | | 8447 | | | | | |
| 25 | CAA | 416 | 337 | 1260 | 1252 | 0.33 | 0.27 | 1.34 | | | | | 8447 | 6721 | 6723 | | | | |
| 25 | CAACC | 201 | 157 | 1260 | 1252 | 0.16 | 0.13 | 1.32 | | | | 8447 | 6721 | 6723 | 8448 | 6728 | | | |
| 25 | TAACG | 66 | 104 | 1260 | 1252 | 0.05 | 0.08 | 0.61 | | | | 8447 | 6721 | 6723 | 8448 | 6728 | | | |
| 25 | ACG | 139 | 174 | 1260 | 1252 | 0.11 | 0.14 | 0.77 | | | | | 6723 | 8448 | 6728 | | | | |
| 25 | C | 1056 | 1000 | 1260 | 1252 | 0.84 | 0.80 | 1.30 | | | | | | 6728 | | | | | |
| 25 | G | 204 | 252 | 1260 | 1252 | 0.16 | 0.20 | 0.77 | | | | | | 6728 | | | | | |
| 25 | GTG | 204 | 252 | 1260 | 1252 | 0.16 | 0.20 | 0.77 | | | | | 6728 | 6731 | 6732 | | | | |
| 25 | GTGTT | 166 | 223 | 1260 | 1252 | 0.13 | 0.18 | 0.70 | | | | 6728 | 6731 | 6732 | 6733 | 6734 | | | |
| 25 | GTT | 424 | 481 | 1260 | 1252 | 0.34 | 0.38 | 0.81 | | | | | 6732 | 6733 | 6734 | | | | |
| 26 | T | 865 | 916 | 1272 | 1264 | 0.68 | 0.72 | 0.81 | | | | | | 6762 | | | | | |
| 26 | G | 407 | 348 | 1272 | 1264 | 0.32 | 0.28 | 1.24 | | | | | | 6762 | | | | | |
| 26 | T | 857 | 803 | 1272 | 1264 | 0.67 | 0.64 | 1.19 | | | | | | 6765 | | | | | |
| 26 | C | 415 | 461 | 1272 | 1264 | 0.33 | 0.36 | 0.84 | | | | | | 6765 | | | | | |
| 26 | C | 911 | 842 | 1272 | 1264 | 0.72 | 0.67 | 1.26 | | | | | | 6767 | | | | | |
| 26 | T | 361 | 422 | 1272 | 1264 | 0.28 | 0.33 | 0.79 | | | | | | 6767 | | | | | |
| 26 | TTGTG | 13 | 26 | 1272 | 1264 | 0.01 | 0.02 | 0.49 | | | | 6766 | 6767 | 6769 | 6770 | 6772 | | | |
| 26 | CCCAC | 28 | 14 | 1272 | 1264 | 0.02 | 0.01 | 2.01 | | | | 6766 | 6767 | 6769 | 6770 | 6772 | | | |
| 28 | TGCTATG | 96 | 136 | 1266 | 1262 | 0.08 | 0.11 | 0.68 | | | 8450 | 8451 | 8452 | 8453 | 8454 | 6914 | 6915 | | |
| 28 | GCTATGG | 96 | 136 | 1266 | 1262 | 0.08 | 0.11 | 0.68 | | | 8451 | 8452 | 8453 | 8454 | 6914 | 6915 | 6916 | | |
| 28 | ATG | 96 | 137 | 1266 | 1262 | 0.08 | 0.11 | 0.67 | | | | | 8454 | 6914 | 6915 | | | | |
| 28 | A | 1170 | 1125 | 1266 | 1262 | 0.92 | 0.89 | 1.48 | | | | | | 6915 | | | | | |
| 28 | G | 96 | 137 | 1266 | 1262 | 0.08 | 0.11 | 0.67 | | | | | | 6915 | | | | | |
| 29 | TCGTG | 120 | 152 | 1264 | 1266 | 0.09 | 0.12 | 0.77 | | | | 8457 | 8458 | 8460 | 8461 | 6979 | | | |
| 29 | GTA | 854 | 794 | 1264 | 1266 | 0.68 | 0.63 | 1.24 | | | | | 8460 | 8461 | 6979 | | | | |
| 29 | GTG | 230 | 285 | 1264 | 1266 | 0.18 | 0.23 | 0.77 | | | | | 8460 | 8461 | 6979 | | | | |
| 29 | A | 1033 | 977 | 1264 | 1266 | 0.82 | 0.77 | 1.32 | | | | | | 6979 | | | | | |
| 29 | G | 231 | 289 | 1264 | 1266 | 0.18 | 0.23 | 0.76 | | | | | | 6979 | | | | | |
| 29 | GGC | 228 | 288 | 1264 | 1266 | 0.18 | 0.23 | 0.75 | | | | | 6979 | 6980 | 8463 | | | | |
| 30 | A | 1113 | 1078 | 1254 | 1260 | 0.89 | 0.86 | 1.33 | | | | | | 8465 | | | | | |
| 30 | T | 141 | 182 | 1254 | 1260 | 0.11 | 0.14 | 0.75 | | | | | | 8465 | | | | | |
| 30 | AAA | 811 | 747 | 1254 | 1260 | 0.65 | 0.59 | 1.26 | | | | | 8465 | 8466 | 8467 | | | | |
| 30 | TAC | 106 | 143 | 1254 | 1260 | 0.08 | 0.11 | 0.72 | | | | | 8465 | 8466 | 8467 | | | | |
| 30 | A | 1006 | 948 | 1254 | 1260 | 0.80 | 0.75 | 1.34 | | | | | | 8467 | | | | | |
| 30 | C | 248 | 312 | 1254 | 1260 | 0.20 | 0.25 | 0.75 | | | | | | 8467 | | | | | |
| 30 | ACT | 653 | 570 | 1254 | 1260 | 0.52 | 0.45 | 1.32 | | | | | 8467 | 7054 | 7056 | | | | |
| 30 | CCA | 197 | 262 | 1254 | 1260 | 0.16 | 0.21 | 0.71 | | | | | 8467 | 7054 | 7056 | | | | |
| 30 | T | 837 | 752 | 1254 | 1260 | 0.67 | 0.60 | 1.36 | | | | | | 7056 | | | | | |
| 30 | A | 417 | 508 | 1254 | 1260 | 0.33 | 0.40 | 0.74 | | | | | | 7056 | | | | | |
| 30 | C | 810 | 887 | 1254 | 1260 | 0.65 | 0.70 | 0.77 | | | | | | 7058 | | | | | |
| 30 | T | 444 | 373 | 1254 | 1260 | 0.35 | 0.30 | 1.30 | | | | | | 7058 | | | | | |
| 30 | CAC | 473 | 544 | 1254 | 1260 | 0.38 | 0.43 | 0.80 | | | | | 7058 | 7059 | 8468 | | | | |
| 30 | TAC | 442 | 371 | 1254 | 1260 | 0.35 | 0.29 | 1.30 | | | | | 7058 | 7059 | 8468 | | | | |
| 30 | ACA | 364 | 422 | 1254 | 1260 | 0.29 | 0.33 | 0.81 | | | | | 7059 | 8468 | 7061 | | | | |
| 30 | ACG | 551 | 493 | 1254 | 1260 | 0.44 | 0.39 | 1.22 | | | | | 7059 | 8468 | 7061 | | | | |
| 30 | G | 890 | 837 | 1254 | 1260 | 0.71 | 0.66 | 1.24 | | | | | | 7061 | | | | | |
| 30 | A | 364 | 423 | 1254 | 1260 | 0.29 | 0.34 | 0.81 | | | | | | 7061 | | | | | |
| 31 | GTC | 285 | 349 | 1270 | 1260 | 0.22 | 0.28 | 0.76 | | | | | 8472 | 7103 | 7106 | | | | |
| 31 | CTC | 532 | 475 | 1270 | 1260 | 0.42 | 0.38 | 1.19 | | | | | 7103 | 7106 | 8473 | | | | |
| 31 | TCT | 195 | 240 | 1270 | 1260 | 0.15 | 0.19 | 0.77 | | | | | 7103 | 7106 | 8473 | | | | |
| 31 | CCC | 13 | 28 | 1270 | 1260 | 0.01 | 0.02 | 0.46 | | | | | 7103 | 7106 | 8473 | | | | |
| 31 | C | 1048 | 997 | 1270 | 1260 | 0.83 | 0.79 | 1.25 | | | | | | 8473 | | | | | |
| 31 | T | 222 | 263 | 1270 | 1260 | 0.17 | 0.21 | 0.80 | | | | | | 8473 | | | | | |
| 31 | A | 882 | 814 | 1270 | 1260 | 0.69 | 0.65 | 1.25 | | | | | | 7108 | | | | | |
| 31 | C | 388 | 446 | 1270 | 1260 | 0.31 | 0.35 | 0.80 | | | | | | 7108 | | | | | |
| 32 | GGATATA | 39 | 19 | 1272 | 1264 | 0.03 | 0.02 | 2.07 | | | 8477 | 8478 | 8479 | 8480 | 8481 | 8482 | 8483 | | |
| 32 | ATATA | 40 | 22 | 1272 | 1264 | 0.03 | 0.02 | 1.83 | | | | 8479 | 8480 | 8481 | 8482 | 8483 | | | |
| 33 | CGCTT | 11 | 3 | 1270 | 1258 | 0.01 | 0.00 | 3.66 | | | | 8488 | 8489 | 8491 | 8492 | 8493 | | | |
| 33 | CGCTTTC | 11 | 3 | 1270 | 1258 | 0.01 | 0.00 | 3.66 | | | 8488 | 8489 | 8491 | 8492 | 8493 | 8494 | 7334 | | |
| 34 | C | 340 | 435 | 1272 | 1262 | 0.27 | 0.34 | 0.69 | | | | | | 8495 | | | | | |
| 34 | T | 932 | 827 | 1272 | 1262 | 0.73 | 0.66 | 1.44 | | | | | | 8495 | | | | | |
| 34 | A | 370 | 467 | 1272 | 1262 | 0.29 | 0.37 | 0.70 | | | | | | 7378 | | | | | |
| 34 | G | 902 | 795 | 1272 | 1262 | 0.71 | 0.63 | 1.43 | | | | | | 7378 | | | | | |
| 34 | AAC | 365 | 464 | 1272 | 1262 | 0.29 | 0.37 | 0.69 | | | | | 7378 | 7379 | 7381 | | | | |
| 34 | GAT | 461 | 350 | 1272 | 1262 | 0.36 | 0.28 | 1.48 | | | | | 7378 | 7379 | 7381 | | | | |
| 34 | C | 494 | 593 | 1272 | 1262 | 0.39 | 0.47 | 0.72 | | | | | | 7381 | | | | | |
| 34 | T | 778 | 669 | 1272 | 1262 | 0.61 | 0.53 | 1.40 | | | | | | 7381 | | | | | |
| 34 | CCG | 361 | 431 | 1272 | 1262 | 0.28 | 0.34 | 0.76 | | | | | 7381 | 7382 | 8498 | | | | |
| 34 | CCA | 129 | 161 | 1272 | 1262 | 0.10 | 0.13 | 0.77 | | | | | 7381 | 7382 | 8498 | | | | |
| 34 | TCG | 167 | 116 | 1272 | 1262 | 0.13 | 0.09 | 1.49 | | | | | 7381 | 7382 | 8498 | | | | |
| 34 | CCAAT | 88 | 118 | 1272 | 1262 | 0.07 | 0.09 | 0.72 | | | | 7381 | 7382 | 8498 | 8499 | 8500 | | | |
| 34 | TCGAT | 119 | 72 | 1272 | 1262 | 0.09 | 0.06 | 1.71 | | | | 7381 | 7382 | 8498 | 8499 | 8500 | | | |
| 34 | CCGGC | 43 | 64 | 1272 | 1262 | 0.03 | 0.05 | 0.65 | | | | 7381 | 7382 | 8498 | 8499 | 8500 | | | |
| 34 | TCGGC | 20 | 9 | 1272 | 1262 | 0.02 | 0.01 | 2.22 | | | | 7381 | 7382 | 8498 | 8499 | 8500 | | | |
| 35 | A | 1176 | 1144 | 1262 | 1260 | 0.93 | 0.91 | 1.39 | | | | | | 7437 | | | | | |
| 35 | G | 86 | 116 | 1262 | 1260 | 0.07 | 0.09 | 0.72 | | | | | | 7437 | | | | | |
| 35 | ATT | 1174 | 1142 | 1262 | 1260 | 0.93 | 0.91 | 1.38 | | | | | 7437 | 7439 | 7440 | | | | |
| 35 | GTG | 7 | 19 | 1262 | 1260 | 0.01 | 0.02 | 0.36 | | | | | 7437 | 7439 | 7440 | | | | |
| 35 | T | 1181 | 1150 | 1262 | 1260 | 0.94 | 0.91 | 1.39 | | | | | | 7440 | | | | | |
| 35 | G | 81 | 110 | 1262 | 1260 | 0.06 | 0.09 | 0.72 | | | | | | 7440 | | | | | |
| 35 | TTT | 1066 | 999 | 1262 | 1260 | 0.84 | 0.79 | 1.42 | | | | | 7440 | 7441 | 7442 | | | | |
| 35 | TTC | 111 | 146 | 1262 | 1260 | 0.09 | 0.12 | 0.74 | | | | | 7440 | 7441 | 7442 | | | | |
| 35 | T | 1069 | 1000 | 1262 | 1260 | 0.85 | 0.79 | 1.44 | | | | | | 7442 | | | | | |
| 35 | C | 193 | 260 | 1262 | 1260 | 0.15 | 0.21 | 0.69 | | | | | | 7442 | | | | | |
| 35 | C | 1071 | 1008 | 1262 | 1260 | 0.85 | 0.80 | 1.40 | | | | | | 8501 | | | | | |
| 35 | T | 191 | 252 | 1262 | 1260 | 0.15 | 0.20 | 0.71 | | | | | | 8501 | | | | | |
| 35 | T | 1056 | 995 | 1262 | 1260 | 0.84 | 0.79 | 1.37 | | | | | | 7443 | | | | | |
| 35 | C | 206 | 265 | 1262 | 1260 | 0.16 | 0.21 | 0.73 | | | | | | 7443 | | | | | |
| 36 | AGCAC | 121 | 90 | 1268 | 1262 | 0.10 | 0.07 | 1.37 | | | | 7557 | 8504 | 8505 | 8506 | 8507 | | | |
| 36 | AGCTC | 154 | 190 | 1268 | 1262 | 0.12 | 0.15 | 0.78 | | | | 7557 | 8504 | 8505 | 8506 | 8507 | | | |
| 36 | CAC | 491 | 428 | 1268 | 1262 | 0.39 | 0.34 | 1.23 | | | | | 8505 | 8506 | 8507 | | | | |
| 36 | CTC | 159 | 194 | 1268 | 1262 | 0.13 | 0.15 | 0.79 | | | | | 8505 | 8506 | 8507 | | | | |
| 36 | ACG | 490 | 425 | 1268 | 1262 | 0.39 | 0.34 | 1.24 | | | | | 8506 | 8507 | 7561 | | | | |
| 36 | TCG | 185 | 222 | 1268 | 1262 | 0.15 | 0.18 | 0.80 | | | | | 8506 | 8507 | 7561 | | | | |
| 36 | ACGCT | 294 | 238 | 1268 | 1262 | 0.23 | 0.19 | 1.30 | | | | 8506 | 8507 | 7561 | 8508 | 8509 | | | |
| 36 | TCGCT | 179 | 219 | 1268 | 1262 | 0.14 | 0.17 | 0.78 | | | | 8506 | 8507 | 7561 | 8508 | 8509 | | | |
| 37 | GTC | 248 | 295 | 1264 | 1264 | 0.20 | 0.23 | 0.80 | | | | | 8513 | 8514 | 7613 | | | | |
| 37 | GTG | 851 | 784 | 1264 | 1264 | 0.67 | 0.62 | 1.26 | | | | | 8513 | 8514 | 7613 | | | | |
| 37 | C | 410 | 472 | 1264 | 1264 | 0.32 | 0.37 | 0.81 | | | | | | 7613 | | | | | |
| 37 | G | 854 | 792 | 1264 | 1264 | 0.68 | 0.63 | 1.24 | | | | | | 7613 | | | | | |
| 37 | TCG | 824 | 772 | 1264 | 1264 | 0.65 | 0.61 | 1.19 | | | | | 7619 | 7620 | 7621 | | | | |
| 37 | A | 437 | 488 | 1264 | 1264 | 0.35 | 0.39 | 0.84 | | | | | | 7621 | | | | | |
| 37 | G | 827 | 776 | 1264 | 1264 | 0.65 | 0.61 | 1.19 | | | | | | 7621 | | | | | |
| 40 | GGA | 138 | 105 | 1266 | 1256 | 0.11 | 0.08 | 1.34 | | | | | 7822 | 7823 | 7824 | | | | |
| 40 | GAACC | 257 | 301 | 1266 | 1256 | 0.20 | 0.24 | 0.81 | | | | 7822 | 7823 | 7824 | 7825 | 7826 | | | |
| 40 | AGAAC | 58 | 84 | 1266 | 1256 | 0.05 | 0.07 | 0.67 | | | | 7822 | 7823 | 7824 | 7825 | 7826 | | | |
| 40 | GAAAC | 16 | 2 | 1266 | 1256 | 0.01 | 0.00 | 8.03 | | | | 7822 | 7823 | 7824 | 7825 | 7826 | | | |
| 40 | GGAACCA | 36 | 17 | 1266 | 1256 | 0.03 | 0.01 | 2.13 | | | 7822 | 7823 | 7824 | 7825 | 7826 | 7827 | 7828 | | |
| 40 | GAACCCG | 123 | 166 | 1266 | 1256 | 0.10 | 0.13 | 0.71 | | | 7822 | 7823 | 7824 | 7825 | 7826 | 7827 | 7828 | | |
| 40 | GGACATA | 17 | 6 | 1266 | 1256 | 0.01 | 0.00 | 2.84 | | | 7822 | 7823 | 7824 | 7825 | 7826 | 7827 | 7828 | | |
| 40 | GGAACCACC | 34 | 16 | 1266 | 1256 | 0.03 | 0.01 | 2.14 | | 7822 | 7823 | 7824 | 7825 | 7826 | 7827 | 7828 | 7829 | 7830 | |
| 40 | GAACCCGAT | 123 | 165 | 1266 | 1256 | 0.10 | 0.13 | 0.71 | | 7822 | 7823 | 7824 | 7825 | 7826 | 7827 | 7828 | 7829 | 7830 | |
| 40 | GGACATACC | 17 | 6 | 1266 | 1256 | 0.01 | 0.00 | 2.84 | | 7822 | 7823 | 7824 | 7825 | 7826 | 7827 | 7828 | 7829 | 7830 | |
| 40 | AGAACCACC | 5 | 17 | 1266 | 1256 | 0.00 | 0.01 | 0.29 | | 7822 | 7823 | 7824 | 7825 | 7826 | 7827 | 7828 | 7829 | 7830 | |
| 40 | GAACCCGATTC | 123 | 165 | 1266 | 1256 | 0.10 | 0.13 | 0.71 | 7822 | 7823 | 7824 | 7825 | 7826 | 7827 | 7828 | 7829 | 7830 | 8523 | 8524 |
| 40 | GGACATACCTT | 15 | 3 | 1266 | 1256 | 0.01 | 0.00 | 5.01 | 7822 | 7823 | 7824 | 7825 | 7826 | 7827 | 7828 | 7829 | 7830 | 8523 | 8524 |
| 40 | A | 967 | 891 | 1266 | 1256 | 0.76 | 0.71 | 1.32 | | | | | | 7828 | | | | | |
| 40 | G | 299 | 365 | 1266 | 1256 | 0.24 | 0.29 | 0.75 | | | | | | 7828 | | | | | |
| 40 | C | 971 | 893 | 1266 | 1256 | 0.77 | 0.71 | 1.34 | | | | | | 7829 | | | | | |
| 40 | A | 295 | 363 | 1266 | 1256 | 0.23 | 0.29 | 0.75 | | | | | | 7829 | | | | | |
| 40 | CGATTCC | 163 | 228 | 1266 | 1256 | 0.13 | 0.18 | 0.67 | | | 7827 | 7828 | 7829 | 7830 | 8523 | 8524 | 8526 | | |
| 40 | ATTCC | 167 | 229 | 1266 | 1256 | 0.13 | 0.18 | 0.68 | | | | 7829 | 7830 | 8523 | 8524 | 8526 | | | |
| 40 | TCC | 267 | 333 | 1266 | 1256 | 0.21 | 0.27 | 0.74 | | | | | 8523 | 8524 | 8526 | | | | |
| 40 | T | 873 | 811 | 1266 | 1256 | 0.69 | 0.65 | 1.22 | | | | | | 8526 | | | | | |
| 40 | C | 393 | 445 | 1266 | 1256 | 0.31 | 0.35 | 0.82 | | | | | | 8526 | | | | | |
| 40 | G | 1044 | 964 | 1266 | 1256 | 0.82 | 0.77 | 1.42 | | | | | | 7840 | | | | | |
| 40 | A | 222 | 292 | 1266 | 1256 | 0.18 | 0.23 | 0.70 | | | | | | 7840 | | | | | |
| 42 | CTA | 574 | 517 | 1262 | 1252 | 0.45 | 0.41 | 1.19 | | | | | 7909 | 7910 | 7911 | | | | |
| 42 | TTA | 71 | 102 | 1262 | 1252 | 0.06 | 0.08 | 0.67 | | | | | 7909 | 7910 | 7911 | | | | |
| 42 | CTACA | 125 | 83 | 1262 | 1252 | 0.10 | 0.07 | 1.55 | | | | 7909 | 7910 | 7911 | 7912 | 7913 | | | |
| 42 | TTACG | 61 | 93 | 1262 | 1252 | 0.05 | 0.07 | 0.63 | | | | 7909 | 7910 | 7911 | 7912 | 7913 | | | |
| 42 | CTACAAC | 106 | 78 | 1262 | 1252 | 0.08 | 0.06 | 1.38 | | | 7909 | 7910 | 7911 | 7912 | 7913 | 7915 | 7916 | | |
| 42 | CTACAGC | 13 | 3 | 1262 | 1252 | 0.01 | 0.00 | 4.33 | | | 7909 | 7910 | 7911 | 7912 | 7913 | 7915 | 7916 | | |
| 42 | TTACGGC | 26 | 59 | 1262 | 1252 | 0.02 | 0.05 | 0.43 | | | 7909 | 7910 | 7911 | 7912 | 7913 | 7915 | 7916 | | |
| 42 | CTGCGGT | 9 | 1 | 1262 | 1252 | 0.01 | 0.00 | 8.99 | | | 7909 | 7910 | 7911 | 7912 | 7913 | 7915 | 7916 | | |
| 42 | ACGGC | 155 | 192 | 1262 | 1252 | 0.12 | 0.15 | 0.77 | | | | 7911 | 7912 | 7913 | 7915 | 7916 | | | |
| 42 | ACAAC | 116 | 82 | 1262 | 1252 | 0.09 | 0.07 | 1.44 | | | | 7911 | 7912 | 7913 | 7915 | 7916 | | | |
| 42 | ACAGC | 13 | 4 | 1262 | 1252 | 0.01 | 0.00 | 3.25 | | | | 7911 | 7912 | 7913 | 7915 | 7916 | | | |
| 42 | GCGGT | 11 | 3 | 1262 | 1252 | 0.01 | 0.00 | 3.66 | | | | 7911 | 7912 | 7913 | 7915 | 7916 | | | |
| 42 | G | 1117 | 1146 | 1262 | 1252 | 0.89 | 0.92 | 0.71 | | | | | | 7915 | | | | | |
| 42 | A | 145 | 106 | 1262 | 1252 | 0.11 | 0.08 | 1.40 | | | | | | 7915 | | | | | |
| 42 | ACT | 127 | 92 | 1262 | 1252 | 0.10 | 0.07 | 1.41 | | | | | 7915 | 7916 | 7918 | | | | |
| 43 | T | 553 | 498 | 1262 | 1260 | 0.44 | 0.40 | 1.19 | | | | | | 7956 | | | | | |
| 43 | C | 709 | 762 | 1262 | 1260 | 0.56 | 0.60 | 0.84 | | | | | | 7956 | | | | | |
| 43 | CTCAT | 80 | 113 | 1262 | 1260 | 0.06 | 0.09 | 0.69 | | | | 7956 | 7959 | 7962 | 7963 | 7965 | | | |
| 43 | TCACC | 143 | 180 | 1262 | 1260 | 0.11 | 0.14 | 0.77 | | | | 7959 | 7962 | 7963 | 7965 | 7966 | | | |
| 43 | TCATC | 41 | 70 | 1262 | 1260 | 0.03 | 0.06 | 0.57 | | | | 7959 | 7962 | 7963 | 7965 | 7966 | | | |
| 44 | A | 510 | 575 | 1266 | 1264 | 0.40 | 0.45 | 0.81 | | | | | | 8529 | | | | | |
| 44 | C | 756 | 689 | 1266 | 1264 | 0.60 | 0.55 | 1.24 | | | | | | 8529 | | | | | |
| 44 | TATCCCG | 105 | 139 | 1266 | 1264 | 0.08 | 0.11 | 0.73 | | | 8147 | 8529 | 8530 | 8531 | 8532 | 8533 | 8167 | | |
| 44 | CATTATG | 16 | 45 | 1266 | 1264 | 0.01 | 0.04 | 0.35 | | | 8147 | 8529 | 8530 | 8531 | 8532 | 8533 | 8167 | | |
| 44 | TCCCG | 181 | 227 | 1266 | 1264 | 0.14 | 0.18 | 0.76 | | | | 8530 | 8531 | 8532 | 8533 | 8167 | | | |
| 44 | TTATG | 17 | 45 | 1266 | 1264 | 0.01 | 0.04 | 0.37 | | | | 8530 | 8531 | 8532 | 8533 | 8167 | | | |
| 44 | CCG | 204 | 256 | 1266 | 1264 | 0.16 | 0.20 | 0.76 | | | | | 8532 | 8533 | 8167 | | | | |
| 44 | CCT | 449 | 400 | 1266 | 1264 | 0.35 | 0.32 | 1.19 | | | | | 8532 | 8533 | 8167 | | | | |
| 44 | ATG | 17 | 45 | 1266 | 1264 | 0.01 | 0.04 | 0.37 | | | | | 8532 | 8533 | 8167 | | | | |
| 44 | G | 237 | 327 | 1266 | 1264 | 0.19 | 0.26 | 0.66 | | | | | | 8167 | | | | | |
| 44 | T | 1029 | 937 | 1266 | 1264 | 0.81 | 0.74 | 1.52 | | | | | | 8167 | | | | | |
| 44 | GCT | 121 | 180 | 1266 | 1264 | 0.10 | 0.14 | 0.64 | | | | | 8167 | 8534 | 8535 | | | | |
| 44 | GCTGC | 121 | 179 | 1266 | 1264 | 0.10 | 0.14 | 0.64 | | | | 8167 | 8534 | 8535 | 8536 | 8537 | | | |
| 45 | ACA | 311 | 369 | 1272 | 1264 | 0.24 | 0.29 | 0.78 | | | | | 8538 | 8231 | 8235 | | | | |
| 45 | CAT | 313 | 373 | 1272 | 1264 | 0.25 | 0.30 | 0.78 | | | | | 8231 | 8235 | 8236 | | | | |
| 45 | TAT | 94 | 67 | 1272 | 1264 | 0.07 | 0.05 | 1.43 | | | | | 8231 | 8235 | 8236 | | | | |
| 45 | ATC | 315 | 371 | 1272 | 1264 | 0.25 | 0.29 | 0.79 | | | | | 8235 | 8236 | 8539 | | | | |
| 45 | C | 378 | 424 | 1272 | 1264 | 0.30 | 0.34 | 0.84 | | | | | | 8539 | | | | | |
| 45 | T | 894 | 840 | 1272 | 1264 | 0.70 | 0.66 | 1.19 | | | | | | 8539 | | | | | |
| 45 | A | 286 | 343 | 1272 | 1264 | 0.22 | 0.27 | 0.78 | | | | | | 8239 | | | | | |
| 45 | G | 986 | 921 | 1272 | 1264 | 0.78 | 0.73 | 1.28 | | | | | | 8239 | | | | | |
| 45 | G | 286 | 343 | 1272 | 1264 | 0.22 | 0.27 | 0.78 | | | | | | 8241 | | | | | |
| 45 | A | 986 | 921 | 1272 | 1264 | 0.78 | 0.73 | 1.28 | | | | | | 8241 | | | | | |
| 47 | CAG | 31 | 16 | 1124 | 1130 | 0.03 | 0.01 | 1.97 | | | | | 8542 | 8543 | 8336 | | | | |
| 47 | CAGTG | 17 | 5 | 1124 | 1130 | 0.02 | 0.00 | 3.46 | | | | 8542 | 8543 | 8336 | 8338 | 8340 | | | |
| 47 | C | 332 | 386 | 1124 | 1130 | 0.30 | 0.34 | 0.81 | | | | | | 8350 | | | | | |
| 47 | T | 792 | 744 | 1124 | 1130 | 0.70 | 0.66 | 1.24 | | | | | | 8350 | | | | | |
| 47 | C | 330 | 385 | 1124 | 1130 | 0.29 | 0.34 | 0.80 | | | | | | 8544 | | | | | |
| 47 | T | 794 | 745 | 1124 | 1130 | 0.71 | 0.66 | 1.24 | | | | | | 8544 | | | | | |
| 47 | A | 330 | 383 | 1124 | 1130 | 0.29 | 0.34 | 0.81 | | | | | | 8545 | | | | | |
| 47 | G | 794 | 747 | 1124 | 1130 | 0.71 | 0.66 | 1.23 | | | | | | 8545 | | | | | |

1. A method of constructing a longevity trait GeneMap in a human population, comprising screening for the expression level of or presence or absence of at least one allele of (i) at least one gene from Tables 4, 5 and 6 or (ii) at least one single nucleotide polymorphism (SNP) from Tables 2, 3 and 7 in at least one sample.

2. A method of claim 1, wherein said population is a general population.

3. A method of claim 1, wherein said population is a founder population.

4. A method of claim 3, wherein said founder population is the population of Quebec.

5-21. (canceled)

22. A set of genetic markers comprising at least two SNPs of Tables 2, 3 and 7.

23. A set of nucleic acid probes that specifically detect said SNPs of claim 22.

24. A solid support or collection of solid supports comprising the nucleic acid probes of claim 23.

25. A solid support of claim 24, wherein the support is selected from the group consisting of at least one microarray and a set of beads.

26. A method for predicting the efficacy of a drug for treating an age-associated disorder in a human patient, comprising: a) obtaining a sample of cells from the patient; b) obtaining (i) a gene expression profile or (ii) a set of genotype from the sample in the absence and presence of in vitro modulation of the cells with specific mediators; the gene expression profile comprising one or more genes from Tables 4, 5 and 6; the set of genotypes comprising one or more polymorphic loci from Tables 2, 3 and 7 and c) comparing the gene expression profile or the set of genotypes of the sample with a reference gene expression profile or a reference set of genotypes associated with efficacy of the drug, wherein similarity between the sample expression profile and the reference expression profile or between the set of genotypes and the reference set of genotypes predicts the efficacy of the drug for treating age-associated disorder in the patient.

27. The method of claim 26, further comprising exposing the sample to the drug for treating an age-associated disorder prior to obtaining the gene expression profile of the sample.

28. The method of claim 26, wherein the sample of cells is derived from a tissue selected from the group consisting of: any parts of the body such as the scalp, blood, dermis, epidermis and other skin cells, cutaneous surfaces, intertrigious areas, genitalia, vessels and endothelium.

29. The method of claim 28, wherein the cells are selected from the group consisting of: red blood cells, muscle cells, heart cells, nerve cells, insulin-producing cells, pancreatic cells, brain cells, germ cells, keratinocytes, monocytes, neutrophils, Langerhans cells, CD4+ and CD8+ T cells, B and T lymphocytes, leukocytes, hormonal cells, bone marrow cells, skin cells, buccal cells, spinal cord cells, bone cells, adipose cells, cartilage cells, dendritic cells, intestinal cells, hepatic cells, mucous cells, olfactory cells, retinal cells, somatic cells and arterial cells.

30. The method of claim 26, wherein the sample is obtained via biopsy.

31. The method of claim 26, wherein the gene expression profile comprises expression values for at least two of the genes listed in Tables 4, 5 and 6.

32. The method of claim 31, wherein the gene expression profile of the sample is obtained by detecting the protein products of said genes.

33. The method of claim 26, wherein the gene expression profile of the sample is obtained using a hybridization assay to oligonucleotides contained in a microarray.

34. The method of claim 26, wherein the oligonucleotides comprises nucleic acid molecules at least 95% identical to SEQ ID from Tables 2, 3, 4, 5 or 7.

35. The method of claim 26, wherein the reference expression profile is that of cells derived from patients that have the longevity trait.

36. The method of claim 26, wherein the drug is selected from the group consisting of symptom relievers and drugs for an age-associated condition.

37. A method for inducing a longevity-like state in a resident tissue or cell, comprising contacting the tissue or cell with at least one gene from Tables 4, 5 and 6 that induces a longevity-like state.

38. The method of claim 37, wherein the resident tissue cell is selected from the group consisting of red blood cells, muscle cells, heart cells, nerve cells, insulin-producing cells, pancreatic cells, brain cells, germ cells, keratinocytes, monocytes, neutrophils, Langerhans cells, CD4+ and CD8+ T cells, B and T lymphocytes, leukocytes, hormonal cells, bone marrow cells, skin cells, buccal cells, spinal cord cells, bone cells, adipose cells, cartilage cells, dendritic cells, intestinal cells, hepatic cells, mucous cells, olfactory cells, retinal cells, somatic cells and arterial cells.

39. A method for screening drug candidates for treating age-associated disorders, comprising: a) contacting a resident cell induced by the method of claim 37 with a drug candidate for treating age-associated disorders; and b) assaying for a longevity-like state, such that an absence of the longevity-like state is indicative of the drug candidate being effective in treating age-associate disorders.

40-43. (canceled)

44. A drug screening assay comprising: a) administering a test compound to an animal having an age-associated disorder, or related phenotype, or a cell composition isolated therefrom; and b) comparing the level of gene expression of at least one gene from Tables 4, 5 and 6 in the presence of the test compound with one or both of the level of said gene expression in the absence of the test compound or in normal cells; wherein test compounds which cause the level of expression of one or more genes from Tables 4, 5 and 6 to approach normal are candidates for drugs to treat age-associated disorders.

45-46. (canceled)

47. A method for identifying a gene that regulates drug response in an age-associated disorder, comprising: a) obtaining a gene expression profile for at least one gene from Tables 4, 5 and 6 in a resident tissue cell induced for a longevity-like state in the presence of the candidate drug; and b) comparing the expression profile of said gene to a reference expression profile for said gene in a cell induced for the longevity-like state in the absence of the candidate drug, wherein genes whose expression relative to the reference expression profile is altered by the drug may identifies the gene as a gene that regulates drug response in the longevity trait.

48. An expression profile indicative of the presence of longevity trait in a patient, comprising the level of expression of at least one gene of Tables 4, 5 and 6.

49. A microarray comprising probes that hybridize to one or more genes of Tables 4, 5 and 6.

50-51. (canceled)

52. A method of diagnosing susceptibility to an age-associated disorder in an individual, comprising screening for an at-risk haplotype of at least one gene from Tables 4, 5 and 6, or comprising at least one SNP from Tables 2, 3 and 7, that is more frequently present in an individual susceptible to an age-associated disorder, compared to the frequency of its presence in a control individual, wherein the presence of the at-risk haplotype is indicative of a susceptibility to an age-associated disorder.

53. The method of claim 52, wherein the at-risk haplotype is characterized by the presence of at least one single nucleotide polymorphism from Tables 2, 3 and 7.

54. The method of claim 52, wherein screening for the presence of an at-risk haplotype in at least one gene from Tables 4, 5 and 6, or comprising at least one SNP from Tables 2, 3 and 7, comprises enzymatic amplification of nucleic acid from said individual or amplification using universal oligos on elongation/ligation products.

55. The method of claim 54, wherein the nucleic acid is DNA.

56. The method of claim 55, wherein the DNA is human DNA.

57. The method of claim 52, wherein screening for the presence of an at-risk haplotype in at least one gene from Tables 4, 5 and 6 or comprising at least one SNP from Tables 2, 3 and 7 comprises: a) obtaining material containing nucleic acid from the individual; (b) amplifying said nucleic acid as for claim 54; and c) determining the presence or absence of an at-risk haplotype in said amplified nucleic acid.

58. The method of claim 57, wherein determining the presence of an at-risk haplotype is performed by electrophoretic analysis, restriction length polymorphism analysis, sequence analysis or hybridization analysis.

59-95. (canceled)

96. A method for determining the phenotype of a cell comprising detecting the differential expression, relative to a normal cell, of at least one gene from Tables 4, 5 and 6.

97. The method of claim 96, wherein said difference in the level of expression of said gene, is of at least a factor of about two.

98. The method of claim 96, including the further step of cloning said genes which are up- or down-regulated.

99. The method of claim 96, including the further step of generating nucleic acid probes for detecting the level of expression of said genes which are up- or down-regulated.

100. A kit for assessing a patient's risk of having or developing an age-associated disorder, comprising: a) detection means for detecting the differential expression, relative to a normal cell, of at least one gene shown in Tables 4, 5 and 6 or the gene product thereof; and b) instructions for correlating the differential expression of said gene or gene product with a patient's risk of having or developing an age-associated disorder.

101. The kit of claim 100, wherein the detection means includes nucleic acid probes for detecting the level of mRNA of said genes.

102. A kit for assessing a patient's risk of having or developing an age-associated disorder, comprising: (a) at least one means for amplifying or detecting a sequence of at least one gene in Tables 4, 5 and 6, or at least one sequence comprising a SNP in Tables 2, 3 and 7, wherein the detection means includes nucleic acid probes or primers for detecting the presence or absence of an associated allele, a particular allele of a polymorphic locus, or the like or changes to at least one sequence of Tables 4, 5 and 6 or Tables 2, 3 and 7, and (b) instructions for correlating the presence or absence of at least one sequence of Tables 4, 5 and 6 or Tables 2, 3 and 7 with a patient's risk of having age-associated disorder.

103. The kit of claim 102, wherein the detection means includes an immunoassay for detecting the level of at least one gene product from Tables 4, 5 and 6.

104. A method of assessing a patient's risk of having or developing an age-associated disorder, comprising: a) determining the level of expression of at least one gene from Tables 4, 5 and 6 or gene products thereof, and comparing the level of expression to a normal cell; and b) assessing a patient's risk of having or developing an age-associated disorder, if any, by determining the correlation between the differential expression of said genes or gene products with known changes in expression of said genes measured in at least one parent suffering from an age-associated disorder.

105. A nucleic acid array comprising a solid support comprising nucleic acid probes which selectively hybridize to at least 5 different genes from Tables 4, 5 and 6 or at least 5 different SNPs of Tables 2, 3 and 7.

106. The array of claim 105, wherein the solid support is selected from the group consisting of paper, membranes, filters, chips, pins, and glass.

107. A method of diagnosing the longevity trait in a patient, comprising detecting a nucleic acid molecule encoding at least one protein from Tables 4, 5 and 6 in a fluid or tissue sample from the patient.

108. A method of claim 107, wherein the detecting comprises detecting at least one associated allele, particular allele of a polymorphic locus, or the like in the nucleic acid molecule encoding said protein.

109. A method of claim 107, wherein said method comprises hybridizing a probe to said patient's sample of DNA or RNA under stringent conditions which allow hybridization of said probe to nucleic acid comprising said associated allele, a particular allele of a polymorphic locus, or the like, wherein the presence of a hybridization signal indicates the presence of said associated allele, particular allele of a polymorphic locus, or the like, in at least one gene from Tables 4, 5 and 6.

110. A method of claim 109, wherein the patient's DNA or RNA has been amplified and said amplified DNA or RNA is hybridized.

111. A method of claim 109, wherein said method comprises using a single-stranded conformation polymorphism technique to assay for said associated allele, particular allele of a polymorphic locus, or the like.

112. (canceled)

113. A method of claim 109, wherein said patient's sample of DNA has been amplified or cloned.

114. A method of claim 109, wherein said method comprises sequencing at least one gene from Tables 4, 5 and 6 in a sample of RNA or DNA from a patient.

115. A method of claim 109, wherein said method comprises determining the sequence of at least one gene from Tables 4, 5 and 6 by preparing cDNA from RNA taken from said patient and sequencing said cDNA to determine the presence or absence of an associated allele, a particular allele of a polymorphic locus, or the like.

116. A method of claim 109, wherein said method comprises performing an RNAse assay.

117. A method of claim 109, wherein said probe is attached to a microarray or a bead.

118. A method of claim 109, wherein said probes are oligonucleotides.

119. A method of claim 109, wherein said sample is selected from the group consisting of blood, normal tissue and tumor tissue.

120. A method of claim 109, wherein the associated allele, particular allele of a polymorphic locus, or the like is selected from the group consisting of at least one of the SNPs from Tables 2, 3 and 7, alone or in combination.

121-123. (canceled)

124. A method for diagnosing or prognosticating longevity comprising comparing the level of expression or activity of a polypeptide encoded by a gene of Tables 4, 5 and 6 in a test sample from a patient with the level of expression or activity of the same polypeptide in a control sample wherein a difference in the level of expression or activity between the test sample and control sample is indicative of the longevity trait.

125-131. (canceled)

132. The method of claim 26, wherein the set of genotypes from the sample comprises genotypes of at least two of the polymorphic loci listed in Tables 2, 3 and 7.

133. The method of claim 26, wherein the set of genotypes from the sample is obtained by hybridization to allele-specific oligonucleotides complementary to the polymorphic loci from Tables 2, 3 and 7, wherein said allele-specific oligonucleotides are contained on a microarray.

134. The method of claim 133, wherein the oligonucleotides comprise nucleic acid molecules at least 95% identical to SEQ ID from Tables 1, 2 or 3.

135. The method of claim 26, wherein the set of genotypes from the sample is obtained by sequencing said polymorphic loci in said sample.

136. The method of claim 26, wherein the drug is selected from the group consisting of symptom relievers and drugs for an age-associated condition.

137-145. (canceled)

146. A kit for assessing a patient's risk of having or developing an age-associated disorder, comprising: a) detection means for detecting the genotype of at least one polymorphic locus shown in Tables 2, 3 and 7; and b) instructions for correlating the genotype of said at least one polymorphic locus with a patient's risk of having or developing an age-associated disorder.

147. The kit of claim 146, wherein the detection means includes nucleic acid probes for detecting the genotype of said at least one polymorphic locus.

148. A method of assessing a patient's risk of having or developing an age-associated disorder, comprising: a) selecting at least one polymorphic locus from Tables 2, 3 and 7; b) determining a genotype for said at least one polymorphic locus from Table 1 in a patient; c) comparing said genotype of b) to a genotype for said at least one polymorphic locus from Tables 2, 3 and 7 that is associated with the age-associated disorder; and d) assessing the patient's risk of having or developing the age-associated disorder, wherein said patient has a higher risk of having or developing the age-associated disorder if the genotype for said at least one polymorphic locus from Tables 2, 3 and 7 in said patient is the same as said genotype for said at least one polymorphic locus from Tables 2, 3 and 7 that is associated with the age-associated disorder.

The application's sequence listing, which the Patent Office published only in electronic form, follows.

SEQUENCE LISTING (8545 sequences)

SEQ ID NO: 1 - DNA, 6940 bp, Homosapiens
ggggatgactctctctcttgagtaggcacacactcccttttctcgggtgtgtactttttgctttgtgatacatctctgcactttcagtattttccaactcatccttaaattccttctcacaacagtgtcaagagcctggacgccagccagaattgaggtcctacgggtgtttggggacctccccaagcccacgagtatcaatggcagtatcaattgtctgtgacagtgattaaggagcaaaacacttggaacccacaagactcccagaaggtgaagttaagagctcccagactcataaggttattagaacagcaaactggcaccccaaagaactttacggagacttgcaacctatcaacaagttggatgagggattaaaagccttcaacaaccaacaaccccaagcatcaaactgaaggaaacattctaaccttcacagacagactggaggctggatggggacctggctgaagacatctggagaatgaaagttaagtaccagcttgcatttttgtgcccctagattatttttgcattttaaaataagaagcatcaaattgcgtgtctctgtgtaaaagttctagcaatttgttttaaggtgaacttattttggcttagggactacaaaaagagaaggtaattcctagggaaggaagaagagaaagaaatgaaaattagagaataagattattttgaatgacttcaggtagcgaggagtgtgtgtttgtgagtgtgtatttgagagacttggctcatgcctgtgggtcttctcttctagtatcagtgaggggagggattactgaagaagaaggggggaaaaaaaaagaaagaaatctgagctttctgggaggaaattcaaaggaaccaagagaaattaacttcgttctgcaaggactaaagtacagcaagaggagagaggtcaagcgagaagcgtgcgggaagcacatgccctggggaggcatagaagccacactggcagagcggccagcacaggtagccagcagaggcattcttggggctatttgaaaaagtttggtctgtgaacaaaacagtttccctggtgactgcaaatccattgctagctgcctctttctcgtctgcccatcactctggtgtggtacccagaagttgacttctggttctgtagaaagagctaggggaggtatgatgtgcttaaagatcctaagaataagcctggcgattttggctgggtgggcactctgttctgccaactctgagctgggctggacacgcaagaaatccttggttgagagggaacacctgaatcaggtgctgttggaaggagaacgttgttggctgggggccaaggttcgaagacccagagcttctccacagcatcacctctttggagtctaccccagcagggctgggaactacctaaggccctaccccgtgggggagcaagaaatccatcatacaggacgcagcaaaccagacactgaaggaaatgctgtgagccttgttcccccagacctgactgaaaatccagcaggactgaggggtgcagttgaagagccggctgccccatgggtaggggatagtcctattgggcaatctgagctgctgggagatgatgacgcttatctcggcaatcaaagatccaaggagtctctaggtgaggccgggattcagaaaggctcagccatggctgccactactaccaccgccattttcacaaccctgaacgaacccaaaccagagacccaaaggaggggctgggccaagtccaggcagcgtcgccaagtgtggaagaggcgggcggaagatgggcagggagactccggtatctcttcacatttccaaccttggcccaagcattcccttaaacacagggtcaaaaagagtccaccggaggaaagcaaccaaaatggtggagagggctcctaccgagaagcagagacctttaactcccaagtaggactgcccatcttatacttctctgggaggcgggagcggctgctgctgcgtccagaagtgctggctgagattccccgggaggcgttcacagtggaagcctgggttaaaccggagggaggacagaacaacccagccatcatcgcaggtgtgtttgataactgctcccacactgtcagtgacaaaggctgggccctggggatccgctcagggaaggacaagggaaagcgggatgctcgcttcttcttctccctctgcaccgaccgcgtgaagaaagccaccatcttgattagccacagtcgctaccaaccaggcacatggacccatgtggcagccacttacgatggacggcacatggccctgtatgtggatggcactcaggtggctagcagtctagaccagtctggtcccctgaacagccccttcatggcatcttgccgctctttgctcctggggggagacagctctgaggatgggcactatttccgtggacacctgggcacactggttttctggtcgaccgccctgccacaaagccattttcagcacagttctcagcattcaagtgaggaggaggaagcgactgacttggtcctgacagcgagctttgagcctgtgaacacagagtgggttccctttagagatgagaagtacccacgacttgaggttctccagggctttgagccagagcctgagattctgtcgcctttgcagcccccactctgtgggcaaacagtctgtgacaatgtggaattgatctcccagtacaatggatactggccccttcggggagagaaggtgatacgctaccaggtggtgaacatctgtgatgatgagggcctaaaccccattgtgagtgaggagcagattcgtctgcagcacgaggcactgaatgaggccttcagccgctacaacatcagctggcagctgagcgtccaccaggtccacaattccaccctgcgacaccgggttgtgcttgtgaactgtgagcccagcaagattggcaatgaccattgtgaccccgagtgtgagcacccactcacaggctatgatgggggtgactgccgcctgcagggccgctgctactcctggaaccgcagggatgggctctgtcacgtggagtgtaacaacatgctgaacgactttgacgacggagactgctgcgacccccaggtggctgatgtgcgcaagacctgctttgaccctgactcacccaagagggcatacatgagtgtgaaggagctgaaggaggccctgcagctgaacagtactcacttcctcaacatctactttgccagctcagtgcgggaagaccttgcaggtgctgccacctggccttgggacaaggacgctgtcactcacctgggtggcattgtcctcagcccagcatattatgggatgcctggccacaccgacaccatgatccatgaagtgggacatgttctgggactctaccatgtctttaaaggagtcagtgaaagagaatcctgcaatgacccctgcaaggagacagtgccatccatggaaacgggagacctctgtgccgacaccgcccccactcccaagagtgagctgtgccgggaaccagagcccactagtgacacctgtggcttcactcgcttcccaggggctccgttcaccaactacatgagctacacggatgataactgcactgacaacttcactcctaaccaagtggcccgaatgcattgctatttggacctagtctatcagcagtggactgaaagcagaaagcccacccccacccccattccacctatggtcatcggacagaccaacaagtccctcactatccactggctgcctcctattagtggagttgtatatgacagggcctcaggcagcttgtgtggcgcttgcactgaagatgggacctttcgtcagtatgtgcacacagcttcctcccggcgggtgtgtgactcctcaggttattggaccccagaggaggctgtggggcctcctgatgtggatcagccctgcgagccaagcttacaggcctggagccctgaggtccacctgtaccacatgaacatgacggtcccctgccccacagaaggctgtagcttggagctgctcttccaacacccggtccaagccgacaccctcaccctgtgggtcacttccttcttcatggagtcctcgcaggtcctctttgacacagagatcttgctggaaaacaaggagtcagtgcacctgggccccttagacactttctgtgacatcccactcaccatcaaactgcacgtggatgggaaggtgtcgggggtgaaagtctacacctttgatgagaggatagagattgatgcagcactcctgacttctcagccccacagtcccttgtgctctggctgcaggcctgtgaggtaccaggttctccgcgatcccccatttgccagtggtttgcccgtggtggtgacacattctcacaggaagttcacggacgtggaggtcacacctggacagatgtatcagtaccaagttctagctgaagctggaggagaactgggagaagcttcgcctcctctgaaccacattcatggagctccttattgtggagatgggaaggtgtcagagagactgggagaagagtgtgatgatggagaccttgtgagcggagatggctgctccaaggtgtgtgagctggaggaaggtttcaactgtgtaggagagccaagcctttgctacatgtatgagggagatggcatatgtgaaccttttgagagaaaaaccagcattgtagactgtggcatctacactcccaaaggatacttggatcaatgggctacccgggcttactcctctcatgaagacaagaagaagtgtcctgtttccttggtaactggagaacctcattccctaatttgcacatcataccatccagatttacccaaccaccgtcccctaactggctggtttccctgtgttgccagtgaaaatgaaactcaggatgacaggagtgaacagccagaaggtagcctgaagaaagaggatgaggtttggctcaaagtgtgtttcaatagaccaggagaggccagagcaatttttatttttttgacaactgatggcctagttcccggagagcatcagcagccgacagtgactctctacctgaccgatgtccgtggaagcaaccactctcttggaacctatggactgtcatgccagcataatccactgattatcaatgtgacccatcaccagaatgtccttttccaccataccacctcagtgctgccgaatttctcatccccacgggtcggcatctcagctgtggctctaaggacatcctcccgcattggtctttcggctcccagtaactgcatctcagaggacgaggggcagaatcatcagggacagagctgtatccatcggccctgtgggaagcaggacagctgtccgtcattgctgcttgatcatgctgatgtggtgaactgtacctctataggcccaggtctcatgaagtgtgctatcacttgtcaaaggggatttgcccttcaggccagcagtgggcagtacatcaggcccatgcagaaggaaattctgctcacatgttcttctgggcactgggaccagaatgtgagctgccttcccgtggactgcggtgttcccgacccgtctttggtgaactatgcaaacttctcctgctcagagggaaccaaatttctgaaacgctgctcaatctcttgtgtcccaccagccaagctgcaaggactgagcccatggctgacatgtcttgaagatggtctctggtctctccctgaagtctactgcaagttggagtgtgatgctccccctattattctgaatgccaacttgctcctgcctcactgcctccaggacaaccacgacgtgggcaccatctgcaaatatgaatgcaaaccagggtactatgtggcagaaagtgcagagggtaaagtcaggaacaagctcctgaagatacaatgcctggaaggtggaatctgggagcaaggcagctgcattcctgtggtgtgtgagccaccccctcctgtgtttgaaggcatgtatgaatgtaccaatggcttcagcctggacagccagtgtgtgctcaactgtaaccaggaacgtgaaaagcttcccatcctctgcactaaagagggcctgtggacccaggagtttaagttgtgtgagaatctgcaaggagaatgcccaccacccccctcagagctgaattctgtggagtacaaatgtgaacaaggatatgggattggtgcagtgtgttccccattgtgtgtaatcccccccagtgaccccgtgatgctacctgagaatatcactgctgacactctggagcactggatggaacctgtcaaagtccagagcattgtgtgcactggccggcgtcaatggcacccagaccccgtcttagtccactgcatccagtcatgtgagcccttccaagcagatggttggtgtgacactatcaacaaccgagcctactgccactatgacgggggagactgctgctcttccacactctcctccaagaaggtcattccatttgctgctgactgtgacctggatgagtgcacctgccgggaccccaaggcagaagaaaatcagtaactgtgggaacaagcccctccctccactgcctcagaggcagtaagaaagagaggccgacccaggaggaaacaaagggtgaatgaagaagaacaatcatgaaatggaagaaggaggaagagcatgaaggatcttataagaaatgcaagaggatattgataggtgtgaactagttcatcaagtagcccaagtaggagagaatcataggcaaaagtttctttaaagtggcagttgattaacatggaaggggaaatatgatagatatataaggaccctcctccctcacttatattctattaaatcctatcctcaactcttgccctgctctccgctccaccccctgccaactactcagtcccacccaacttgtaaaccaataccaaaaaaaaaaaaaaaaaaaaaa

SEQ ID NO: 2 - protein, 1790 aa, Homosapiens
MCLKILRISLAILAGWALCSANSELGWTRKKSLVEREHLNQVLLEGERCWLGAKVRRPRASPQHHLFGVYPSRAGNYLRPYPVGEQEIHHTGRSKPDTEGNAVSLVPPDLTENPAGLRGAVEEPAAPWVGDSPIGQSELLGDDDAYLGNQRSKESLGEAGIQKGSAMAATTTTAIFTTLNEPKPETQRRGWAKSRQRRQVWKRRAEDGQGDSGISSHFQPWPKHSLKHRVKKSPPEESNQNGGEGSYREAETFNSQVGLPILYFSGRRERLLLRPEVLAEIPREAFTVEAWVKPEGGQNNPAIIAGVFDNCSHTVSDKGWALGIRSGKDKGKRDARFFFSLCTDRVKKATILISHSRYQPGTWTHVAATYDGRHMALYVDGTQVASSLDQSGPLNSPFMASCRSLLLGGDSSEDGHYFRGHLGTLVFWSTALPQSHFQHSSQHSSEEEEATDLVLTASFEPVNTEWVPFRDEKYPRLEVLQGFEPEPEILSPLQPPLCGQTVCDNVELISQYNGYWPLRGEKVIRYQVVNICDDEGLNPIVSEEQIRLQHEALNEAFSRYNISWQLSVHQVHNSTLRHRVVLVNCEPSKIGNDHCDPECEHPLTGYDGGDCRLQGRCYSWNRRDGLCHVECNNMLNDFDDGDCCDPQVADVRKTCFDPDSPKRAYMSVKELKEALQLNSTHFLNIYFASSVREDLAGAATWPWDKDAVTHLGGIVLSPAYYGMPGHTDTMIHEVGHVLGLYHVFKGVSERESCNDPCKETVPSMETGDLCADTAPTPKSELCREPEPTSDTCGFTRFPGAPFTNYMSYTDDNCTDNFTPNQVARMHCYLDLVYQQWTESRKPTPTPIPPMVIGQTNKSLTIHWLPPISGVVYDRASGSLCGACTEDGTFRQYVHTASSRRVCDSSGYWTPEEAVGPPDVDQPCEPSLQAWSPEVHLYHMNMTVPCPTEGCSLELLFQHPVQADTLTLWVTSFFMESSQVLFDTEILLENKESVHLGPLDTFCDIPLTIKLHVDGKVSGVKVYTFDERIEIDAALLTSQPHSPLCSGCRPVRYQVLRDPPFASGLPVVVTHSHRKFTDVEVTPGQMYQYQVLAEAGGELGEASPPLNHIHGAPYCGDGKVSERLGEECDDGDLVSGDGCSKVCELEEGFNCVGEPSLCYMYEGDGICEPFERKTSIVDCGIYTPKGYLDQWATRAYSSHEDKKKCPVSLVTGEPHSLICTSYHPDLPNHRPLTGWFPCVASENETQDDRSEQPEGSLKKEDEVWLKVCFNRPGEARAIFIFLTTDGLVPGEHQQPTVTLYLTDVRGSNHSLGTYGLSCQHNPLIINVTHHQNVLFHHTTSVLPNFSSPRVGISAVALRTSSRIGLSAPSNCISEDEGQNHQGQSCIHRPCGKQDSCPSLLLDHADVVNCTSIGPGLMKCAITCQRGFALQASSGQYIRPMQKEILLTCSSGHWDQNVSCLPVDCGVPDPSLVNYANFSCSEGTKFLKRCSISCVPPAKLQGLSPWLTCLEDGLWSLPEVYCKLECDAPPIILNANLLLPHCLQDNHDVGTICKYECKPGYYVAESAEGKVRNKLLKIQCLEGGIWEQGSCIPVVCEPPPPVFEGMYECTNGFSLDSQCVLNCNQEREKLPILCTKEGLWTQEFKLCENLQGECPPPPSELNSVEYKCEQGYGIGAVCSPLCVIPPSDPVMLPENITADTLEHWMEPVKVQSIVCTGRRQWHPDPVLVHCIQSCEPFQADGWCDTINNRAYCHYDGGDCCSSTLSSKKVIPFAADCDLDECTCRDPKAEENQ

SEQ ID NO: 3 - DNA, 4076 bp, Homosapiens
ggggatgactctctctcttgagtaggcacacactcccttttctcgggtgtgtactttttgctttgtgatacatctctgcactttcagtattttccaactcatccttaaattccttctcacaacagtgtcaagagcctggacgccagccagaattgaggtcctacgggtgtttggggacctccccaagcccacgagtatcaatggcagtatcaattgtctgtgacagtgattaaggagcaaaacacttggaacccacaagactcccagaaggtgaagttaagagctcccagactcataaggttattagaacagcaaactggcaccccaaagaactttacggagacttgcaacctatcaacaagttggatgagggattaaaagccttcaacaaccaacaaccccaagcatcaaactgaaggaaacattctaaccttcacagacagactggaggctggatggggacctggctgaagacatctggagaatgaaagttaagtaccagcttgcatttttgtgcccctagattatttttgcattttaaaataagaagcatcaaattgcgtgtctctgtgtaaaagttctagcaatttgttttaaggtgaacttattttggcttagggactacaaaaagagaaggtaattcctagggaaggaagaagagaaagaaatgaaaattagagaataagattattttgaatgacttcaggtagcgaggagtgtgtgtttgtgagtgtgtatttgagagacttggctcatgcctgtgggtcttctcttctagtatcagtgaggggagggattactgaagaagaaggggggaaaaaaaaagaaagaaatctgagctttctgggaggaaattcaaaggaaccaagagaaattaacttcgttctgcaaggactaaagtacagcaagaggagagaggtcaagcgagaagcgtgcgggaagcacatgccctggggaggcatagaagccacactggcagagcggccagcacaggtagccagcagaggcattcttggggctatttgaaaaagtttggtctgtgaacaaaacagtttccctggtgactgcaaatccattgctagctgcctctttctcgtctgcccatcactctggtgtggtacccagaagttgacttctggttctgtagaaagagctaggggaggtatgatgtgcttaaagatcctaagaataagcctggcgattttggctgggtgggcactctgttctgccaactctgagctgggctggacacgcaagaaatccttggttgagagggaacacctgaatcaggtgctgttggaaggagaacgttgttggctgggggccaaggttcgaagacccagagcttctccacagcatcacctctttggagtctaccccagcagggctgggaactacctaaggccctaccccgtgggggagcaagaaatccatcatacaggacgcagcaaaccagacactgaaggaaatgctgtgagccttgttcccccagacctgactgaaaatccagcaggactgaggggtgcagttgaagagccggctgccccatgggtaggggatagtcctattgggcaatctgagctgctgggagatgatgacgcttatctcggcaatcaaagatccaaggagtctctaggtgaggccgggattcagaaaggctcagccatggctgccactactaccaccgccattttcacaaccctgaacgaacccaaaccagagacccaaaggaggggctgggccaagtccaggcagcgtcgccaagtgtggaagaggcgggcggaagatgggcagggagactccggtatctcttcacatttccaaccttggcccaagcattcccttaaacacagggtcaaaaagagtccaccggaggaaagcaaccaaaatggtggagagggctcctaccgagaagcagagacctttaactcccaagtaggactgcccatcttatacttctctgggaggcgggagcggctgctgctgcgtccagaagtgctggctgagattccccgggaggcgttcacagtggaagcctgggttaaaccggagggaggacagaacaacccagccatcatcgcaggtgtgtttgataactgctcccacactgtcagtgacaaaggctgggccctggggatccgctcagggaaggacaagggaaagcgggatgctcgcttcttcttctccctctgcaccgaccgcgtgaagaaagccaccatcttgattagccacagtcgctaccaaccaggcacatggacccatgtggcagccacttacgatggacggcacatggccctgtatgtggatggcactcaggtggctagcagtctagaccagtctggtcccctgaacagccccttcatggcatcttgccgctctttgctcctggggggagacagctctgaggatgggcactatttccgtggacacctgggcacactggttttctggtcgaccgccctgccacaaagccattttcagcacagttctcagcattcaagtggggaggaggaagcgactgacttggtcctgacagcgagctttgagcctgtgaacacagagtgggttccctttagagatgagaagtacccacgacttgaggttctccagggctttgagccagagcctgagattctgtcgcctttgcagcccccactctgtgggcaaacagtctgtgacaatgtggaattgatctcccagtacaatggatactggccccttcggggagagaaggtgatacgctaccaggtggtgaacatctgtgatgatgagggcctaaaccccattgtgagtgaggagcagattcgtctgcagcacgaggcactgaatgaggccttcagccgctacaacatcagctggcagctgaacgtccaccaggtccacaattccaccctgcgacaccgggttgtgcttgtgaactgcgagcccagcaagattggcaatgaccattgtgaccccgagtgtgagcacccactcacaggctatgatgggggtgactgccgcctgcagggccgctgctactcctggaaccgcagggatgggctctgtcacgtggagtgtaacaacatgctgaacgactttgacgacggagactgctgcgacccccaggtggctgatgtgcgcaagacctgctttgaccctgactcacccaagagggcatacatgagtgtgaaggagctgaaggaggccctgcagctgaacagtactcacttcctcaacatctactttgccagctcagtgcgggaagaccttgcaggtgctgccacctggccttgggacaaggacgctgtcactcacctgggtggcattgtcctcagcccagcatattatgggatgcctggccacaccgacaccatgatccatgaagtgggacatgttctgggactctaccatgtctttaaaggagtcagtgaaagagaatcctgcaatgacccctgcaaggagacagtgccatccatggaaacgggagacctctgtgccgacaccgcccctactcccaagagtgagctgtgccgggaaccagagcccactagtgacacctgtggcttcactcgcttcccaggggctccgttcaccaactacatgagctacacgggtatcaccactgtcttgttttgttttctgttaagaatacatgggggcctttgagagctgggagggtggaggtgtgggagctgatgggagaatgattaagtggtcatttgtgtcggagagttgaagtgtatttattataaggtattattattttttcatgtctttgaagaacttgaagaaatactgacatattaaggtactttgttcactgaattctctcctacagatattttaaaatatacttctatcctcgatagtaaaaaaggcacagagccaaaagccctcttgtgatccccttgacttctagaatgtggttattcttatttttggccgcattcttagacatttactctgagagagtccatggaataaaggaaagagttatgggccaggggccatgtactgttttgaagtggcaacaaggggctggtaattaggccacatgtttactgatgtacgaaaaaaaaaaaaaaaaaaaaaaa

SEQ ID NO: 4 - protein, 826 aa, Homosapiens
MCLKILRISLAILAGWALCSANSELGWTRKKSLVEREHLNQVLLEGERCWLGAKVRRPRASPQHHLFGVYPSRAGNYLRPYPVGEQEIHHTGRSKPDTEGNAVSLVPPDLTENPAGLRGAVEEPAAPWVGDSPIGQSELLGDDDAYLGNQRSKESLGEAGIQKGSAMAATTTTAIFTTLNEPKPETQRRGWAKSRQRRQVWKRRAEDGQGDSGISSHFQPWPKHSLKHRVKKSPPEESNQNGGEGSYREAETFNSQVGLPILYFSGRRERLLLRPEVLAEIPREAFTVEAWVKPEGGQNNPAIIAGVFDNCSHTVSDKGWALGIRSGKDKGKRDARFFFSLCTDRVKKATILISHSRYQPGTWTHVAATYDGRHMALYVDGTQVASSLDQSGPLNSPFMASCRSLLLGGDSSEDGHYFRGHLGTLVFWSTALPQSHFQHSSQHSSGEEEATDLVLTASFEPVNTEWVPFRDEKYPRLEVLQGFEPEPEILSPLQPPLCGQTVCDNVELISQYNGYWPLRGEKVIRYQVVNICDDEGLNPIVSEEQIRLQHEALNEAFSRYNISWQLNVHQVHNSTLRHRVVLVNCEPSKIGNDHCDPECEHPLTGYDGGDCRLQGRCYSWNRRDGLCHVECNNMLNDFDDGDCCDPQVADVRKTCFDPDSPKRAYMSVKELKEALQLNSTHFLNIYFASSVREDLAGAATWPWDKDAVTHLGGIVLSPAYYGMPGHTDTMIHEVGHVLGLYHVFKGVSERESCNDPCKETVPSMETGDLCADTAPTPKSELCREPEPTSDTCGFTRFPGAPFTNYMSYTGITTVLFCFLLRIHGGL

SEQ ID NO: 5 - DNA, 7331 bp, Homosapiens
gctccgggaaacaaagaatccggggctctccagacatcagagcttaaacccaggactctgcaagcggcatctcattccggggtccagggctctcccggctctccatcccctccctaacctcccccgcctcccgcgctcgctccctcgctccctccccgctcgcttcctcccccaccatcgcagcgctaggaggaaggcggccggggctcaagatggctttagccgggctctgcgccctgctcgcctgctgctgggggccggcggcggtgctggccacggccgccggcgacgtggatccatccaaggagctggagtgcaagctcaaaagcatcacggtgtcggcactgcccttcctgcgcgagaacgacctgagcatcatgcacagcccctcggcctcggagcccaagctcctcttctcggtgcgcaacgacttcccgggagaaatggtcgtggtggacgacctggagaacacggagctgccctacttcgtgctggagatctcagggaacacagaggatatccctttggtgcgctggaggcagcagtggctggagaatggcactttgctttttcacattcatcaccaagatggtgccccaagccttcctggacaagaccccactgaagaaccccaacatgagtcggcagaagaggagctgaggatcctccacatctcagtcatgggtggcatgatcgctctgctgctgtccatcttgtgcctggtgatgatcctgtatactcgccggcgctggtgcaaacgccgccgggtcccgcagccccagaagagtgccagtgctgaggcagccaatgagattcactacattccttctgtgctgatcggcgggcacggacgggagagcctgcgcaatgcccgcgtgcagggccacaactccagtggcaccctgagcatccgggagacacctatcctggacggctatgagtatgacatcactgatctgcgccaccatctgcagagggagtgcatgaacggaggggaggactttgccagccaggtcacgcgcaccctcgactccctgcagggctgcaatgaaaagtcggggatggacctcacaccaggaagtgacaatgccaagctgtcactgatgaacaagtataaagataatattatagccactagccctgtggactccaaccaccagcaagccacccttctctctcacacctccagcagccagagaaagcggatcaacaacaaagcaagagctggttccgccttcttgaaccctgaaggggattctggcacagaggcagaaaacgacccccagctgaccttttacacggatccttcaaggagcaggaggcgtagtagagtgggttctccccgaagtcctgtgaataagaccaccttgaccctgatcagcatcaccagctgtgtgattggcctcgtgtgctcctctcacgtcaactgccctctcgttgtcaagatcaccctgcatgtccctgagcacctgattgctgatgggagccgcttcatcttgctggaggggagccagctggatgccagtgactggctgaaccctgcccaagtggttctcttctctcagcagaactccagcggaccctgggccatggacctctgtgcccggcggctcctggacccctgtgaacaccaatgtgaccccgaaactggggaatgcctctgctatgaaggctacatgaaggatccagtacataagcacctttgcattcggaacgaatgggggacaaaccaggggccatggccttacacaatatttcagcgaggctttgacctggttttgggagagcagccctctgataaaatatttagattcacctacactcttggggagggcatgtggttgcccctcagcaagagctttgtgattccaccagccgaactggccatcaatccatcagcaaagtgcaagacggacatgactgtgatggaggatgctgtggaggtcagagaggagctgatgacttcatcctccttcgacagcctggaggttctcttagattcctttgggccggtgcgcgactgcagcaaagataacgggggctgcagtaagaatttccgctgtatttcagatcgcaagctggactccactggttgcgtgtgcccatctggactcagtcccatgaaggacagctctggctgctatgaccgccacatcggggtggactgttccgacggcttcaacggcggctgtgagcagctgtgcctccagcagatggcgcccttcccggacgaccccaccttgtataacatcctcatgttctgtgggtgcatcgaggactacaagcttggtgtggatggacgctcttgccaactcatcacggagacctgtccagagggaagtgactgtggggaaagcagggagcttcccatgaaccagaccctctttggggagatgttctttggttacaacaaccattccaaggaagtggctgccggacaggtgctgaaaggaacattcaggcaaaacaactttgctcgtggtttagaccagcaactgccagatggtcttgtggtggccactgtgcccctggagaatcaatgcctagaggagatctcggagcccacccctgaccctgacttcctgactgggatggtgaacttcagtgaagtgtctgggtaccctgtgctgcagcactggaaggtccggtctgtgatgtaccacatcaaactcaaccaagtggccatctctcaggccctcagcaatgctctccactcgctggatggggctacatctcgtgcagattttgtggcgctgttggaccagttcggcaaccattacatccaggaagctatctacggctttgaggagtcctgttctatctggtacccaaacaagcaggtccagcggcgactctggctggagtatgaagacatcagtaaaggcaactccccatcagatgagtctgaggagcgggaaagagaccccaaggtgctgacattcccagaatacatcaccagcttgtcagactccggcaccaagcacatggcggctggagtccgcatggagtgccacagcaagggacgatgcccctcgtcctgccccctgtgtcatgtgacatccagccctgacacccctgctgagccggttctgctggaggtgaccaaagcagcccccatctatgaactagtgaccaacaaccagacccagaggctcttgcaggaggctaccatgagctctctctggtgctcagggactggagatgtcatcgaggactggtgtcgatgtgactccactgcttttggagctgatggactccccacctgtgcgcctctcccacagcctgtgctgagactctccacggttcacgagcccagcagcactcttgtggtcctggagtgggaacactcagagccaccaatcggggtgcagattgtagattacctcctccgtcaagagaaagtcactgacaggatggaccactccaaagtggagacagaaacagtgctgagctttgtggacgacatcatctctggagcaaagtctccttgtgcaatgccatctcaggtgccggacaagcagctcaccaccatctctctgatcatacgatgcctggaacctgacaccatttacatgttcacgctgtggggagtggacaacacaggacggcgctccaggccaagcgacgtgatcgtgaagaccccatgccccgtggtggatgatgtcaaggctcaagaaatagcagacaagatctacaatctcttcaatggctacactagtgggaaggagcagcagaccgcctacaacaccctcctggatctgggttcccccaccttacaccgggtcctctaccactataaccagcactatgagagttttggggaattcacctggcgatgtgaggatgagttaggtcccaggaaagctggtctcatcctttcccagcttggggacctcagcagttggtgcaatggactccttcaggaacccaagataagcttgcggcgcagctcactcaagtacctggggtgccgctacagcgagatcaaaccctacggacttgactgggcggagctcagccgggacctcaggaagacgtgtgaggagcagaccctgagtatcccctacaacgactatggggacagcaaagagatctagcaccataaggccagggagctgctgccagaatgaagtaggaaagaggagggatccatctgggttggtctgtggatttttaatattttttaatggaacatgaaaacctccacagcaacatcgaaaccagggagaaagtgatccttgctccctgcagaacttcttcagtatgatgttctccatctgcatgattgggaaatctgccagccagtggcttcatgcagtgccatatttctttagaggattactttggggtttgctttgccattaatttgttccattcatttttttttccctgagaagtttaccaaaatgctcaagagctctgccgtgctccccatgaaaagtctattaagtaggcaccctgtgctcactcagttcctaaatccattgcaactgggagcagaggtgaggccagaaagttgttaggcctgccgcaggccccaccctcaagcattcctcaggaagcgtctcactctgggagccttggccctgctcacagagagagacaatagaaaattgaggaaggtggcccttgtctgtgtctcctggttttcttcctaggccttgctatcactatttccatacccgaaaggtgaaaccagctttcattataggccccagtgggccacttgggttttgagatccttccttattttaagccaggactgggattaaatctccctctgtcagatctctgtcccttcctctgaacaacatgatctttgagagggaacaagatgccatctgtcaactgcaccttcagaaaagtctacctgggagactagttagcagtccacattcaagagaagacttggagtttattgttttttaaaaaaaccatgcttcctttggatagacttctccagcctaccaatatatatccatgtgcctggattatctttaacccccacacctcttaccttggacaggtaaggcttggccgatgtctgattgggaccaggaggggtcaacactttcatatcagtgttacagtgaactaaagctattattgatcacaaaaaacttctgttcatccccaccttgctaaatttgcttgtgttgctagttttgcaaatcgtttctctgatgaccataagcaggaggattccaccatggtcactgcccatccagtcacagggattctgtgtagggaagcaccactgattgcagttaacatctagagtgttgtttccatcccactgcccaagcattggcatggtcatgaatggtggcccagccaacaggaagcccagcctttcagaaagagcctggcaaggccctgttgactagcaatggccttagctgtcccacacaactcagtggcctgaacacacaccttcagccaccatgcctttgaccagggctcctcatctggaaacatatgagaaaggtcagcaaacagatgcaagacctataaggctagtcattgagctatattggttttttttctaaatagtagtagtgacagataacatttattgagtgcttgctgtatgccaggcgctgatgtaagcactttaggtatcattgaattctcacagcaactcctgaggaaagtgctattcttgtctccattttagtgttgaggaaaacgaggcaaagagaggttatacaacttgcctcaaatcccttgtgcactgtaactcacactgagtttcagtgtgatttcaggctgttggtctccagggcacaggatcttagctactctgggatacccagttctgttttcagtatcatctggcacacaactgtccaagctctcagccccacagggaacctgcccagagagctttacctttcccaagcatctgtggcatggacatgtcctctgtgcagtggaaggaggaggggcgaaagtacgcccttagcctttggagctagagcacccttgggacccctagttccactgcacatggccctcctccccaccctcatgactgggaaggaagcctgtgatgaggctgagataaagcacagggtggtttcactctcctctctccttctttccaaacactgaaggatttatttcaaactctctaatgcacctgcctcagagattcccctactttcaaagcaaagatcagcagaaaaattggctgtcccacctgtggcaaatgctggagcctcagttaaagtgcctcaaggggcaaatatttcaccattgccagagaagatgtgacaggccaatcagacagggcccagagcatctctttgctgctactgttttgccatccttctattcatatctgtgcagaacacggtgttttaagcttgagtgaaaggagggtgaggctgccgatgccttcctgcccagaagtggatgatgtgggagttgacaggccagggagagggtgaagcaggtatcagagtcactcctctgtaccctctccttctgtttttattttaggcacactatcttcctctctcctatctttccctcaatctcccaagttcctctaccttctttatctttgtcttttacttcttctttctgtgaccctccttttttggcctcctctttccccaagactttcttcctcctgtttctcgttgagttctccccactgaatgtgtgtatgtatgtacacacacacacacgtgtgcacacacaatgcacacaactcctatgactggctcctacttacattcaagttaaaaaggctgatatgaacagggcaggggaaaatcttaggatggttgtacaattgactggaggattttttccccttggaagacactattgatctcaacctgctgacttttcctaatgcttacctgaaggaacccatcctggctagaaagggtgatggtactggaccggtattcaaccttgagttttcaagctgccaaacaggtcttaagggaggtgcttatatcccaccaacactctcccagctcccatgtccccaagacctctggagtttcctcttgaatgtacatgaaccactgtaatagcattagacttttaattgagtgtgcaatcgttttccatggagtttggtccgttcattattttttagttaactacacttcttgatattcaaatgttctattaaaaaaactgagtatgaagaaaaacactttactactgcagaaggaagaaagaatataatatgaccatcttcaggtataacagtgttgtttaaaagagaattattgtatgattataaaagatgaaataattaactgaataataaaacaaagctattagtaagcaaaaaaaaaaaaaaaaaa

SEQ ID NO: 6 - protein, 1294 aa, Homosapiens
MALAGLCALLACCWGPAAVLATAAGDVDPSKELECKLKSITVSALPFLRENDLSIMHSPSASEPKLLFSVRNDFPGEMVVVDDLENTELPYFVLEISGNTEDIPLVRWRQQWLENGTLLFHIHHQDGAPSLPGQDPTEEPQHESAEEELRILHISVMGGMIALLLSILCLVMILYTRRRWCKRRRVPQPQKSASAEAANEIHYIPSVLIGGHGRESLRNARVQGHNSSGTLSIRETPILDGYEYDITDLRHHLQRECMNGGEDFASQVTRTLDSLQGCNEKSGMDLTPGSDNAKLSLMNKYKDNIIATSPVDSNHQQATLLSHTSSSQRKRINNKARAGSAFLNPEGDSGTEAENDPQLTFYTDPSRSRRRSRVGSPRSPVNKTTLTLISITSCVIGLVCSSHVNCPLVVKITLHVPEHLIADGSRFILLEGSQLDASDWLNPAQVVLFSQQNSSGPWAMDLCARRLLDPCEHQCDPETGECLCYEGYMKDPVHKHLCIRNEWGTNQGPWPYTIFQRGFDLVLGEQPSDKIFRFTYTLGEGMWLPLSKSFVIPPAELAINPSAKCKTDMTVMEDAVEVREELMTSSSFDSLEVLLDSFGPVRDCSKDNGGCSKNFRCISDRKLDSTGCVCPSGLSPMKDSSGCYDRHIGVDCSDGFNGGCEQLCLQQMAPFPDDPTLYNILMFCGCIEDYKLGVDGRSCQLITETCPEGSDCGESRELPMNQTLFGEMFFGYNNHSKEVAAGQVLKGTFRQNNFARGLDQQLPDGLVVATVPLENQCLEEISEPTPDPDFLTGMVNFSEVSGYPVLQHWKVRSVMYHIKLNQVAISQALSNALHSLDGATSRADFVALLDQFGNHYIQEAIYGFEESCSIWYPNKQVQRRLWLEYEDISKGNSPSDESEERERDPKVLTFPEYITSLSDSGTKHMAAGVRMECHSKGRCPSSCPLCHVTSSPDTPAEPVLLEVTKAAPIYELVTNNQTQRLLQEATMSSLWCSGTGDVIEDWCRCDSTAFGADGLPTCAPLPQPVLRLSTVHEPSSTLVVLEWEHSEPPIGVQIVDYLLRQEKVTDRMDHSKVETETVLSFVDDIISGAKSPCAMPSQVPDKQLTTISLIIRCLEPDTIYMFTLWGVDNTGRRSRPSDVIVKTPCPVVDDVKAQEIADKIYNLFNGYTSGKEQQTAYNTLLDLGSPTLHRVLYHYNQHYESFGEFTWRCEDELGPRKAGLILSQLGDLSSWCNGLLQEPKISLRRSSLKYLGCRYSEIKPYGLDWAELSRDLRKTCEEQTLSIPYNDYGDSKEI

SEQ ID NO: 7 - DNA, 3914 bp, Homosapiens
gctccgggaaacaaagaatccggggctctccagacatcagagcttaaacccaggactctgcaagcggcatctcattccggggtccagggctctcccggctctccatcccctccctaacctcccccgcctcccgcgctcgctccctcgctccctccccgctcgcttcctcccccaccatcgcagcgctaggaggaaggcggccggggctcaagatggctttagccgggctctgcgccctgctcgcctgctgctgggggccggcggcggtgctggccacggccgccggcgacgtggatccatccaaggagctggagtgcaagctcaaaagcatcacggtgtcggcactgcccttcctgcgcgagaacgacctgagcatcatgcacagcccctcggcctcggagcccaagctcctcttctcggtgcgcaacgacttcccgggagaaatggtcgtggtggacgacctggagaacacggagctgccctacttcgtgctggagatctcagggaacacagaggatatccctttggtgcgctggaggcagcagtggctggagaatggcactttgctttttcacattcatcaccaagatggtgccccaagccttcctggacaagaccccactgaagaaccccaacatgagtcggcagaagaggagctgaggatcctccacatctcagtcatgggtggcatgatcgctctgctgctgtccatcttgtgcctggtgatgatcctgtatactcgccggcgctggtgcaaacgccgccgggtcccgcagccccagaagagtgccagtgctgaggcagccaatgagattcactacattccttctgtgctgatcggcgggcacggacgggagagcctgcgcaatgcccgcgtgcagggccacaactccagtggcaccctgagcatccgggagacacctatcctggacggctatgagtatgacatcactgatctgcgccaccatctgcagagggagtgcatgaacggaggggaggactttgccagccaggtcacgcgcaccctcgactccctgcagggctgcaatgaaaagtcggggatggacctcacaccaggaagtgacaatgccaagctgtcactgatgaacaagtataaagataatattatagccactagccctgtggactccaaccaccagcaagccacccttctctctcacacctccagcagccagagaaagcggatcaacaacaaagcaagagctggttccgccttcttgaaccctgaaggggattctggcacagaggcagaaaacgacccccagctgaccttttacacggatccttcaaggagcaggaggcgtagtagagtgggttctccccgaagtcctgtgaataagaccaccttgaccctgatcagcatcaccagctgtgtgattggcctcgtgtgctcctctcacgtcaactgccctctcgttgtcaagatcaccctgcatgtccctgagcacctgattgctgatgggagccgcttcatcttgctggaggggagccagctggatgccagtgactggctgaaccctgcccaagtggttctcttctctcagcagaactccagcggaccctgggccatggacctctgtgcccggcggctcctggacccctgtgaacaccaatgtgaccccgaaactggggaatgcctctgctatgaaggctacatgaaggatccagtacataagcacctttgcattcggaacgaatgggggacaaaccaggggccatggccttacacaatatttcagcgaggctttgacctggttttgggagagcagccctctgataaaatatttagattcacctacactcttggggagggcatgtggttgcccctcagcaagagctttgtgattccaccagccgaactggccatcaatccatcagcaaagtgcaagacggacatgactgtgatggaggatgctgtggaggtcagagaggagctgatgacttcatcctccttcgacagcctggaggttctcttagattcctttgggccggtgcgcgactgcagcaaagataacgggggctgcagtaagaatttccgctgtatttcagatcgcaagctggactccactggttgcgtgtgcccatctggactcagtcccatgaaggacagctctggctgctatgaccgccacatcggggtggactgttccgacggcttcaacggcggctgtgagcagctgtgcctccagcagatggcgcccttcccggacgaccccaccttgtataacatcctcatgttctgtgggtgcatcgaggactacaagcttggtgtggatggacgctcttgccaactcatcacggagacctgtccagagggaagtgactgtggggaaagcagggagcttcccatgaaccagaccctctttggggagatgttctttggttacaacaaccattccaaggaagtggctgccggacaggtgctgaaaggaacattcaggcaaaacaactttgctcgtggtttagaccagcaactgccagatggtcttgtggtggccactgtgcccctggagaatcaatgcctagaggagatctcggagcccacccctgaccctgacttcctgactgggatggtgaacttcagtgaagtgtctgggtaccctgtgctgcagcactggaaggtccggtctgtgatgtaccacatcaaactcaaccaagtggccatctctcaggccctcagcaatgctctccactcgctggatggggctacatctcgtgcagattttgtggcgctgttggaccagttcggcaaccattacatccaggaagctatctacggctttgaggagtcctgttctatctggtacccaaacaagcaggtccagcggcgactctggctggagtatgaagacatcagtaaaggcaactccccatcagatgagtctgaggagcgggaaagagaccccaaggtgctgacattcccagaatacatcaccagcttgtcagactccggcaccaagcacatggcggctggagtccgcatggagtgccacagcaagggacgatgcccctcgtcctgccccctgtgtcatgtgacatccagccctgacacccctgctgagccggttctgctggaggtgaccaaagcagcccccatctatgaactagtgaccaacaaccagacccagaggctcttgcaggaggctaccatgagctctctctggtgctcagggactggagatgtcatcgaggactggtgtcgatgtgactccactgcttttggagctgatggactccccacctgtgcgcctctcccacagcctgtgctgagactctccacggttcacgagcccagcagcactcttgtggtcctggagtgggaacactcagagccaccaatcggggtgcagattgtagattacctcctccgtcaagagaaagtcactgacaggatggaccactccaaagtggagacagaaacagtgctgagctttgtggacgacatcatctctggagcaaagtctccttgtgcaatgccatctcaggtgccggacaagcagctcaccaccatctctctgatcatacgatgcctggaacctgacaccatttacatgttcacgctgtggggagtggacaacacaggacggcgctccaggccaagcgacgtgatcgtgaagaccccatgccccgtggtggatgatgtcaaggctcaagaaatagcagacaagatctacaatctcttcaatggctacactagtgggaaggagcagcagaccgcctacaacaccctcctggatctgggttcccccaccttacaccgggtcctctaccactataaccagcactatgagagttttggggaattcacctggcgatgtgaggatgagttaggtcccaggtaatcaataaactaagtcaacccttaaaaaaaaaaaaaaaaaaaaaaaaaaaaa

SEQ ID NO: 8 - protein, 1216 aa, Homosapiens
MALAGLCALLACCWGPAAVLATAAGDVDPSKELECKLKSITVSALPFLRENDLSIMHSPSASEPKLLFSVRNDFPGEMVVVDDLENTELPYFVLEISGNTEDIPLVRWRQQWLENGTLLFHIHHQDGAPSLPGQDPTEEPQHESAEEELRILHISVMGGMIALLLSILCLVMILYTRRRWCKRRRVPQPQKSASAEAANEIHYIPSVLIGGHGRESLRNARVQGHNSSGTLSIRETPILDGYEYDITDLRHHLQRECMNGGEDFASQVTRTLDSLQGCNEKSGMDLTPGSDNAKLSLMNKYKDNIIATSPVDSNHQQATLLSHTSSSQRKRINNKARAGSAFLNPEGDSGTEAENDPQLTFYTDPSRSRRRSRVGSPRSPVNKTTLTLISITSCVIGLVCSSHVNCPLVVKITLHVPEHLIADGSRFILLEGSQLDASDWLNPAQVVLFSQQNSSGPWAMDLCARRLLDPCEHQCDPETGECLCYEGYMKDPVHKHLCIRNEWGTNQGPWPYTIFQRGFDLVLGEQPSDKIFRFTYTLGEGMWLPLSKSFVIPPAELAINPSAKCKTDMTVMEDAVEVREELMTSSSFDSLEVLLDSFGPVRDCSKDNGGCSKNFRCISDRKLDSTGCVCPSGLSPMKDSSGCYDRHIGVDCSDGFNGGCEQLCLQQMAPFPDDPTLYNILMFCGCIEDYKLGVDGRSCQLITETCPEGSDCGESRELPMNQTLFGEMFFGYNNHSKEVAAGQVLKGTFRQNNFARGLDQQLPDGLVVATVPLENQCLEEISEPTPDPDFLTGMVNFSEVSGYPVLQHWKVRSVMYHIKLNQVAISQALSNALHSLDGATSRADFVALLDQFGNHYIQEAIYGFEESCSIWYPNKQVQRRLWLEYEDISKGNSPSDESEERERDPKVLTFPEYITSLSDSGTKHMAAGVRMECHSKGRCPSSCPLCHVTSSPDTPAEPVLLEVTKAAPIYELVTNNQTQRLLQEATMSSLWCSGTGDVIEDWCRCDSTAFGADGLPTCAPLPQPVLRLSTVHEPSSTLVVLEWEHSEPPIGVQIVDYLLRQEKVTDRMDHSKVETETVLSFVDDIISGAKSPCAMPSQVPDKQLTTISLIIRCLEPDTIYMFTLWGVDNTGRRSRPSDVIVKTPCPVVDDVKAQEIADKIYNLFNGYTSGKEQQTAYNTLLDLGSPTLHRVLYHYNQHYESFGEFTWRCEDELGPR

SEQ ID NO: 9 - DNA, 1861 bp, Homosapiens
gccggacggagggtggagggccctgcgcctgcgcggagctggagtccggctgggccgcagccgctgggagaccggcggttgccgtggggaccggtcgggcccctccctcctccggtcccccgccccaggcccttccccaccgagacgcgccggcggaccgcgggcgagtgcagccggtgacccggcgagaggcggcgccgctcccaagatgtcgcagacggccatgtccgaaacctacgattttttgtttaagttcttggttattggaaatgcaggaactggcaaatcttgcttacttcatcagtttattgaaaaaaaattcaaagatgactcaaatcatacaataggagtggaatttggttcaaagataataaatgttggtggtaaatatgtaaagttacaaatatgggatacagcaggacaagaacgattcaggtccgtgacgagaagttattaccgaggcgcggccggggctctcctcgtctatgatatcaccagccgagaaacctacaatgcgcttactaattggttaacagatgcccgaatgctagcgagccagaacattgtgatcatcctttgtggaaacaagaaggacctggatgcagatcgtgaagttaccttcttagaagcctccagatttgctcaagaaaatgagctgatgtttttggaaacaagtgcgctcacaggggagaatgtagaagaggcttttgtacagtgtgcaagaaaaatacttaacaaaatcgaatcaggtgagctggacccagaaagaatgggctcaggtattcagtacggagatgctgccttgagacagctgaggtcaccgcggcgcgcacaggccccgaacgctcaggagtgtggttgttaggagagcacacaggtgttcatacagtggcatttgggacacaatcgttggaacctgaagaatctgaagttttttttaccaccatctttttctactctgtatggaagtagatctttatggggaaaagagaatttggggtgttctgcaagccagtcaaagtggcacagcaaatcatataaatcgaattaaatggacaacaccgttagatgtgtatgtaaaaattttctgtttcatatttttcctttcactttcggtttaaaacatgctatatgtactgtatgtcctgtagcccagtgcggctccacagcatggaatctgatgtatgatatgatagaatgtggcactaaatgcagtttcagattttattttttttaatcatatgaactaaaattgtcaattgtgaggtgtgcttttctcatcatgttggttatattgcacaattggttatatttatgacctgatattcaaagactctggcattgatagccagtgtgttttcttatttaactccgtttactacattctacatggtgtttacgtgatccacacttgaaatactagatcagtagacattcactaatataccaaaataaaatgaaaaattgagtttttccgtgaactttatactgtccagctctgttgattttaaagcctcttcatccaggtcagttcaggaagtatatctggagtacctgctctgtttttggctgtgagactagcactaaggattctggtacctttacccaaacctactgggctactaatacttctctcagcagttgatcaaatacaatagaccatgtaagctggggccgctcatccacttccagtttgctggtctccctgctagaaaacacattgtactgtgctttttctggaattcagtataatggcatcactgcctgtttttcacatcttttgtttcctgttcattttaaggaaacctactaaatccagttaatattaaatggacaccactcaaaaaaaaaaaaaaaaaaa

SEQ ID NO: 10 - protein, 218 aa, Homosapiens
MSQTAMSETYDFLFKFLVIGNAGTGKSCLLHQFIEKKFKDDSNHTIGVEFGSKIINVGGKYVKLQIWDTAGQERFRSVTRSYYRGAAGALLVYDITSRETYNALTNWLTDARMLASQNIVIILCGNKKDLDADREVTFLEASRFAQENELMFLETSALTGENVEEAFVQCARKILNKIESGELDPERMGSGIQYGDAALRQLRSPRRAQAPNAQECGC

SEQ ID NO: 11 - DNA, 968 bp, Homosapiens
ccaaacctactgggctactaatacttctctcagcagttgatcaaatacaatagaccatgtaagctggggccgctcatccacttccagtttgctggtctccctgctagaaaacacattgtactgtgctttttctggaattcagtataatggcatcactgcctgtttttcacatcttttgtttcctgttcattttaaggaaacctactaaatccagttaatattaaatggacaccactcattaagaaatttctttatggcttctgctgaatacttaaatgccttactacagttatccagttgacatgtttttaattcatataaggtatattgggtatattgaagtatatattgtattacaaagacttgttcttgtattttaaaatgtcagtgcaaaaaatatatggtggaacctttctttaaagttgaaatgcagtattatttaaatctgaaaggttaaaaagctttcttcaccttatatatgttcttccactgtgactttttagttgaagactagtaaattaacttttagttagaagatgcctactgcttttgttgtttattttaatcagcagagcacagagacacataaaaactctgggaaatgactaggataaaaatatcagtatgtatctgttttagatattttgagttttgctttttttatgccttgaatattttatttcaaaaagtatctgaagcaaattctcagactgaactacttcttagacctcactgtaagaatattttattcaatgtctcatttatgatagatttgcaagctgctcatttttgaacagctttttgcatgggataggagcatgtctattctaacacatcagcttattcaaaagcaagaattttaaaaataagataaatgtaaagttgttttataaacgatcctgttaattaaaccacagacaccatatatccttctgcatcctttggccaataaaagttgctggagaacc

SEQ ID NO: 12 - protein, 63 aa, Homosapiens
MTRIKISVCICFRYFEFCFFYALNILFQKVSEANSQTELLLRPHCKNILFNVSFMIDLQAAHF

SEQ ID NO: 13 - DNA, 5174 bp, Homosapiens
gagtgcgctttagctgctgcgccacgcgcgcctcgggcctgggcgcagaggatcggccgggcgcggcgggaaggaggctgcgggcagcgaggagcggctggcgctcgaggcggcggacggcaccatgtccccggggagcggggtgaagagcgagtacatgaagcgctaccaggagccgcgctgggaggagtacgggccgtgctacggcgagctgctgcactaccgcctaggccgccggctgctggagcaggcgcacgcgccctggctctgggacgactggggcccggccggctcctcggaggactcggcgtcgtcagagtcgtcgggcgccgggggccccgcaccccggtgcgccccgccctcgcccccgccgcccgtagagccggcgacccaggaggaggcggaacggcgggcgcgcggggccccggaggagcaggacgcggaggccggggacgcggaggccgaggacgcggaggacgcggctctgccagcactgccagtgaaagatgtagaagataaacctgaacaacaaaccagaacaagagagactgacaaatcacccaccagtactgagcctcgacagcaaccaagtgccttatttgctagaggaaacaggaaagcggtcaaaagtccccaaagatcatcgagtaaaataaaagaaaacaagcatccatttgctctttatggctggggagaaaaacagaccgatacaggaagccagaagactcacaacgtctgtgcgtccgctcctgtgcatgagattcatgaatcagcattacgagccaagaacagaagacaggtggaaaaaaggaaactggttgctcaaaggcagcgagctcactctgtggatgtggagaagaacagaaagatgaaggcttcctcctcagagaacccgtggatgacagaatacatgaggtgctattcggcaagagcttaaagaaacacttgcgtggacagcctcttttaaaaagtgtaaatgactgaaaggaaaaacaaaacaaaaaccatcaaaagaaacggacacaggtttaagaaaccaactgattatgcaaggttttttttagggaatttgtaaaagattgttttattttgatgaatattggtcacctacctcggcagtagggcagacagttgaagccatagacatttggttatttatgaagataattccctaaatctttgatattcttataaggtttttgttttaaagcatcttaatcttttaagatactgacaccaaatgcctttaaatggcaacagatgcttacagttcagtattcttttcataagcttaggtagagcctattatcatcttgttctaaataactttccagattccatagctataagatcattccatcctacagcataagactcgttttccttatatgccgttttgtttgtgaaagaatatcaagtcaaaaatgagtgtcagcactactactgattccatgtataatgaaagtagaactttgctagttcctgaaaatttttaacttatttgtatttcagttcagcagcatctttatgtagattgtgatatttaagaattatctgggctgggcgagggtctctttttctctttcagtgatcatctaggcagttattatttaatagtttaatagctcaagtacattccaatagacgaagtgcacacaacacaatatgtgtgtacagtagtagtaaagtttcttttgagtagtcaaagactcactttttttattgcctttttttttttttttaaagaatacatactgtggattcagtcccttgtcacacttgaccttttggcatacacccactgtggacttttgcctcttctgtaatggctggcaatgacatttcaaacttacaatctggaattgcacttggtacattggcattgcttgttccactgggatggggaccagtgtgaagatgcctgttagatagactgcccacccctactttctctttttctttatagcacttaacaataacaaagtcttgatgatgtacagtattcaaactttaggttgaaatacgttactctttgattcctagccagtagatcttatctacactttaatgggagagaatggtggtgtgtgagtaggcacaaatttatgtaaatagtgctccttctctttagtatgtttgctttgggggtagaaaaatggttttaacaaacactggtttccatcaaatgaatgatgtcttctccatcctgtggagacaagaatctgctagaaggatatgtgctaagttccttataagagataatggtgctctgcctatgccagcttggcacccgaagatgtgtgagtggacgtgaggctgagtattaccttagtatttttctctgggtctttgggaaaccatagtcaatttttagaacatattgctttcattccccataaactcttcacacatgataactgtttaagctttgaaaacacatactgaagtattgtgagcttaaaaaaactttttaaatatttgcatagttttgaggtgaatttgtttccttacagatctctcctaatcattgagatgtatatttcaaaagaggaaattttacatgttgtccaaaacagccttgctagtaactggtgaattttggtattaactattattaaagtctttaaacgacacaggtacctaaagatcaccttaatgtggcaatttgtgatggtgtagctagctgattgtgaaaactgttcctttaaagtcgcttcttgcatgttcggtgttagtcatccagctcaggcttgtgttgcagctgacaatctaggaaagacggccttagagagtggtgcaggccccacactgacggactgccttagaaacccgacttcctctagactttgaaccgccagacttttctcttgtttagaaaacaaacttatatttaatgtacttactacttaaaactccagacagagatataatgtagaaggcaaatattggccaattttttcctctttttaagtggaagacaaatgaacgggatttttaaagtgcttttaaagtgcatgaatggttaataaatcagtatgaattgtaagccttcatcttacatccaagtccttagttggttagggtttcttttctttcttttttaaagagtgtcaattaccttttgaacctgtgaaaatttgatagttgttaacagtctgatggtcctaattctttcttttcattctagaaatgaatgtggttgtaatcatgttcctaattcttgggacaacctgcaagacagtgagacagtttaaaaattacctttcatgttgaaaaagtctgaaacagagaacccaatgatatttaaaataaatgctacataaaactctttttaaaattttgattttaacttaattaaaacaatgtcataaatatgctttttgattttgttactgcttttaatattaaagtaatagaatattgaagcaatattgtctagcactctgctggacattaagtccgcgggaggagaagtgaacaggaatcgattctttgtcttttaactgcccttagttaggagatgttaaaatacttggcacctctggttatatgtatgttatgtgtgttctcccccctaaaatttctaagcacatttattcacttttaaaatgaatctttaaaagattatagttagtagttatagttaatattctatttacttggaaaaatgtgaataaatggatcttcaaaagattcattttaaaaatgaataaatgtataataggctataggtgatcttacttgcgtattaggtaggaggcacatatttataccatttcatatgtaatatctttgtcattgtgtttcatcgaagatcaattgctagcaacttgaagggtatttatacttgggtcacttgaactcagctgactaaattgtaagaacgagagcaagcaagatggctgttattggaagccataacttccagaagataattctgcacaattcgtaagttaaaaaaaatctgtagggtcttccactatcctttttcaggttgataatgctgttctgggcacacactttgtaaatggaatgttatggtacagtcgcctctcagtatccatggggcattggttccaggcctcccttaggatgccaaactccatggatactcaaaccccttctataaaatggtgtagtatttgcatatatcctagacacatcctcctgtatgctttaaatcatctctagattacttaaaatacctaatacaatgtaaatgctctgtaaatagttgttatactatattgtttagggaataatgacaaggaaaaaaaagcctgtacatgttcagcacaagtgaaaccatcctttttgcccccaaatattttcaatttgtatttggttgaatccatggatgcagaactcacggatacagagggccgactgtactttctttaaagtgttcaaaagtattactagcaaagaggaggaggagcaaagcatatatcagaagtaaaacaatttttcttgttgactgctttggtaaaaaacagtttgatggatagttttacatttcactggactagataaaaaatggtgctaatatttatgtagcttgatgctatagttgctttggtatcaaacttaatacctaacccatataagatccttattatataattttgtgatcagtaaaatgatattttaaagagtgatcttaaaaatatgacctggtcattgcacaacgtttgcatttgaaatgaatttttgtactatagggtggatatggagttattcagtgcaagtgtgtgcttaatatcaaaccctatgcaaggagctatgtctagatttttggtccaaatttgcctccttcaagcctactagtgtgagatggaaaaaaatcgattgctcttttaatattatttccattttgaaattctcgacacttgaatgaaggcagtagaggcctctttttggatttctcttctaataacaaaactttatttagggaaggtttccctgtgctatcgtaagtttgttttgagcactgcattcactttaaaattctggaggaacaaaggctgggcacataatcacaaagcccaggccacacaataattcggggttgtattttctaagaactatgtattgtttttagcttatagttaatattgtatttacttggaaaaatgtgaataaagttaattaacattacaaaaaaaaaaaaaaaa

SEQ ID NO: 14 - protein, 270 aa, Homosapiens
MSPGSGVKSEYMKRYQEPRWEEYGPCYGELLHYRLGRRLLEQAHAPWLWDDWGPAGSSEDSASSESSGAGGPAPRCAPPSPPPPVEPATQEEAERRARGAPEEQDAEAGDAEAEDAEDAALPALPVKDVEDKPEQQTRTRETDKSPTSTEPRQQPSALFARGNRKAVKSPQRSSSKIKENKHPFALYGWGEKQTDTGSQKTHNVCASAPVHEIHESALRAKNRRQVEKRKLVAQRQRAHSVDVEKNRKMKASSSENPWMTEYMRCYSARA

SEQ ID NO: 15 - DNA, 1509 bp, Homosapiens
ccaccgcagcggacagcgccaagtgaagcctcgcttcccctccgcggcgaccagggcccgagccgagagtagcagttgtagctacccgcccagaaactagacacaatgtgcgacgaagacgagaccaccgccctcgtgtgcgacaatggctccggcctggtgaaagccggcttcgccggggatgacgcccctagggccgtgttcccgtccatcgtgggccgcccccgacaccagggcgtcatggtcggtatgggtcagaaagattcctacgtgggcgacgaggctcagagcaagagaggtatcctgaccctgaagtaccctatcgagcacggcatcatcaccaactgggatgacatggagaagatctggcaccacaccttctacaacgagcttcgcgtggctcccgaggagcaccccaccctgctcaccgaggcccccctcaatcccaaggccaaccgcgagaagatgacccagatcatgtttgagaccttcaacgtgcccgccatgtacgtggccatccaggccgtgctgtccctctacgcctccggcaggaccaccggcatcgtgctggactccggcgacggcgtcacccacaacgtgcccatttatgagggctacgcgctgccgcacgccatcatgcgcctggacctggcgggccgcgatctcaccgactacctgatgaagatcctcactgagcgtggctactccttcgtgaccacagctgagcgcgagatcgtgcgcgacatcaaggagaagctgtgctacgtggccctggacttcgagaacgagatggcgacggccgcctcctcctcctccctggaaaagagctacgagctgccagacgggcaggtcatcaccatcggcaacgagcgcttccgctgcccggagacgctcttccagccctccttcatcggtatggagtcggcgggcattcacgagaccacctacaacagcatcatgaagtgtgacatcgacatcaggaaggacctgtatgccaacaacgtcatgtcggggggcaccacgatgtaccctgggatcgctgaccgcatgcagaaagagatcaccgcgctggcacccagcaccatgaagatcaagatcatcgccccgccggagcgcaaatactcggtgtggatcggcggctccatcctggcctcgctgtccaccttccagcagatgtggatcaccaagcaggagtacgacgaggccggcccttccatcgtccaccgcaaatgcttctagacacactccacctccagcacgcgacttctcaggacgacgaatcttctcaatgggggggcggctgagctccagccaccccgcagtcactttctttgtaacaacttccgttgctgccatcgtaaactgacacagtgtttataacgtgtacatacattaacttattacctcattttgttatttttcgaaacaaagccctgtggaagaaaatggaaaacttgaagaagcattaaagtcattctgttaagctgcgtaaaaaaaaaaaaaaaaaaa

SEQ ID NO: 16 - protein, 377 aa, Homosapiens
MCDEDETTALVCDNGSGLVKAGFAGDDAPRAVFPSIVGRPRHQGVMVGMGQKDSYVGDEAQSKRGILTLKYPIEHGIITNWDDMEKIWHHTFYNELRVAPEEHPTLLTEAPLNPKANREKMTQIMFETFNVPAMYVAIQAVLSLYASGRTTGIVLDSGDGVTHNVPIYEGYALPHAIMRLDLAGRDLTDYLMKILTERGYSFVTTAEREIVRDIKEKLCYVALDFENEMATAASSSSLEKSYELPDGQVITIGNERFRCPETLFQPSFIGMESAGIHETTYNSIMKCDIDIRKDLYANNVMSGGTTMYPGIADRMQKEITALAPSTMKIKIIAPPERKYSVWIGGSILASLSTFQQMWITKQEYDEAGPSIVHRKCF

SEQ ID NO: 17 - DNA, 4170 bp, Homosapiens
ctcttcccttaggtgtttaagttccgcgcgcaggccaggctgcaacctgacggccagatccctcgctgtcctagtcgctgctccttggagtcatgttcccagccgccccttctccgcggaccccgggtaccgggtcccgaaggggcccgctggccggactcgggcccggctccacgccccggacggctagcaggaagggtctgcccctggggtctgcagtcagctccccagtgctcttctcgccggtcggccggcgtagctcgctaagctcgcggggaacaccaacacgaatgttcccacaccactccataactgagtctgtgaactatgatgtgaaaacgtttggatcttctcttcctgttaaagtcatggaagccctaacattggctgaagtcgatgaccagctgaccattaacatagatgaaggtggatgggcttgtctggtgtgcaaagagaagctcattatttggaagattgctctgtcacctattactaagttatccgtttgcaaagaacttcagctgccacctagtgatttccactggagtgccgacttagtggctctttcttactcttctccctcaggtgaagcacattctactcaggctgttgctgtcatggttgccaccagagaaggatctatccgctattggccaagccttgctggtgaagatacctacacagaggcttttgtagattcgggaggtgataagacttacagtttcctaacagcagtgcagggaggaagttttattttgtcttcatcaggaagccaactaattcggttgatacctgagagctcaggaaagattcatcagcatatcctgcctcaggggcaaggcatgctttcaggaattggtcgaaaagtttcttctctttttggaattttatctcctagtagtgatctcacactttcaagtgttctctgggatagagagagatcaagcttttatagcctgacgagttcaaacatcagtaaatgggaattagatgattcttcagaaaagcatgcatacagttgggatataaatagagccctgaaggaaaacattaccgatgctatttggggatctgaaagtaactatgaagctattaaagaaggagtcaacattcgatatttggacttgaagcaaaactgtgatgggctggtgattttggcagcagcatggcactcagcagacaatccatgtctcatctattactctctgataacaatagaagataatggttgccaaatgtcagatgcagttactgtagaagtcactcaatataatccaccttttcagtctgaagacctgattttgtgtcagttgacggtcccaaacttttcaaaccagactgcctatctgtataacgaaagtgctgtctatgtgtgctccacaggaactgggaaattttctcttccccaggagaaaattgtctttaatgcacaaggagatagtgttttaggtgctggtgcctgtggtggtgttcctatcattttttctagaaacagtggactggtgtctattacttcaagggaaaatgtgtctatattggcagaagacttggaagggtctttagcatcttcagttgctggaccaaacagtgagagtatgatttttgagaccactacaaagaatgaaactatagcccaggaagataaaatcaagttgctgaaagctgcctttctgcaatactgcagaaaagatttaggtcatgctcaaatggtggttgatgagctcttttcctctcactctgatttggattctgattctgaactagacagggcagttacccaaatcagtgtagacctgatggatgactacccagcatctgacccacggtgggctgagtctgtccctgaggaagcacctgggttcagcaatacgtcactgattatccttcaccagctagaagacaagatgaaagctcactcttttcttatggactttattcatcaagttggcttatttggacgtctaggcagttttccagttagagggacaccgatggccactcgactgttgctctgtgagcatgccgaaaagctgtcagccgccattgttctcaagaaccaccactcccggctttctgaccttgtcaacacagccatattgattgctttgaacaagagggagtatgaaatcccatccaacctgactcctgcagatgtctttttcagggaggtatcccaagtagataccatctgtgagtgcttactggagcatgaggagcaagtcttgagggatgcacctatggattccattgaatgggctgaagtggtgatcaatgtgaacaatattctcaaggatatgctgcaggctgctagtcattatcgccaaaatagaaactctttgtatagaagagaagaatcactagaaaaagaacctgaatatgttccatggacggcaacaagtggtcctggtggcatccgaacggtaataatacgccagcatgagattgtcctgaaggtggcttatccacaggcagacagcaacctccgaaacatcgtgaccgagcagctggtagccctgatcgattgcttcctggatggttatgtttctcagcttaagtctgtggataaatccagtaatcgggaaagatatgacaatctggagatggaatacctacagaaaagatcagatctcttatctcctcttctttcactaggccagtacctgtgggctgcttctctagcagagaaatactgtgactttgatatattggtacaaatgtgtgagcagactgacaaccagagccgactccagcgctacatgacccagtttgctgatcagaatttttcagactttctcttccgttggtatctggagaaaggaaagcgaggcaaattattatctcagcccatttctcagcatggacagttggcaaattttttgcaagctcatgaacatctcagctggttacatgaaattaatagccaagaattagaaaaggctcatgcaacacttctgggtttggcaaatatggaaactcgttactttgcaaagaagaaaacccttcttggcttgagtaaattggctgcattagcttcagacttttcagaggatatgctacaagaaaaaattgaagaaatggctgagcaggagcgctttctactgcatcaggagaccctacctgaacagctgctggcggagaaacagctaaatctcagtgcgatgccagtattgactgcaccacaactcattggtctatatatctgtgaagaaaatagaagagctaatgaatatgatttcaagaaagctttggacttgttggaatatattgatgaggaagaagatataaatataaatgatctaaaactggaaatcctttgcaaagctcttcagagagataactggtccagttctgatggcaaagatgatccaattgaagtatctaaagacagtatatttgtgaagatcttacagaaacttttaaaagatggcattcagctcagtgagtacttaccggaggtgaaagacctgctacaagcggatcagcttggaagcttaaagtccaatccttacttcgagtttgttttgaaagcaaattatgaatattatgttcagggacaaatataactttttctaaaaatggccattgtttatgaaatctgtataagtgtgtccttatacaaattttaggccataaacaagtgtaagtttgtacaatttcataacatgtatagctgagtttttatactttatatgtaggaagctaatataaaatagttatgtaactgtgattttggttttcagttatgtgacttgttttttccacctgaaatgtgtcagttgttgttcctgtactcggtgccctttctttttactctcacgtggtcccaggttctggagttcttgtcctggttctagctgctcacatgtacaaatcacttctaggcctcagtttctgcgactatgaaaattactagattgcactagcttgtctctaaaattgctgtgactccagatactttgcactgaagagaatctagggtgtttgatatctgtttcagttagggctaatgggaaatgtctagtaagataaatgtcaacttttgctgacttattatgagatgaaaaaccaaaggagagtgggcctaactcatgtgagcttgataactgatgaactcattgggagcattttaaacttttctacataaataataaatgagcactaatgaaagta

SEQ ID NO: 18 - protein, 1156 aa, Homosapiens
MFPAAPSPRTPGTGSRRGPLAGLGPGSTPRTASRKGLPLGSAVSSPVLFSPVGRRSSLSSRGTPTRMFPHHSITESVNYDVKTFGSSLPVKVMEALTLAEVDDQLTINIDEGGWACLVCKEKLIIWKIALSPITKLSVCKELQLPPSDFHWSADLVALSYSSPSGEAHSTQAVAVMVATREGSIRYWPSLAGEDTYTEAFVDSGGDKTYSFLTAVQGGSFILSSSGSQLIRLIPESSGKIHQHILPQGQGMLSGIGRKVSSLFGILSPSSDLTLSSVLWDRERSSFYSLTSSNISKWELDDSSEKHAYSWDINRALKENITDAIWGSESNYEAIKEGVNIRYLDLKQNCDGLVILAAAWHSADNPCLIYYSLITIEDNGCQMSDAVTVEVTQYNPPFQSEDLILCQLTVPNFSNQTAYLYNESAVYVCSTGTGKFSLPQEKIVFNAQGDSVLGAGACGGVPIIFSRNSGLVSITSRENVSILAEDLEGSLASSVAGPNSESMIFETTTKNETIAQEDKIKLLKAAFLQYCRKDLGHAQMVVDELFSSHSDLDSDSELDRAVTQISVDLMDDYPASDPRWAESVPEEAPGFSNTSLIILHQLEDKMKAHSFLMDFIHQVGLFGRLGSFPVRGTPMATRLLLCEHAEKLSAAIVLKNHHSRLSDLVNTAILIALNKREYEIPSNLTPADVFFREVSQVDTICECLLEHEEQVLRDAPMDSIEWAEVVINVNNILKDMLQAASHYRQNRNSLYRREESLEKEPEYVPWTATSGPGGIRTVIIRQHEIVLKVAYPQADSNLRNIVTEQLVALIDCFLDGYVSQLKSVDKSSNRERYDNLEMEYLQKRSDLLSPLLSLGQYLWAASLAEKYCDFDILVQMCEQTDNQSRLQRYMTQFADQNFSDFLFRWYLEKGKRGKLLSQPISQHGQLANFLQAHEHLSWLHEINSQELEKAHATLLGLANMETRYFAKKKTLLGLSKLAALASDFSEDMLQEKIEEMAEQERFLLHQETLPEQLLAEKQLNLSAMPVLTAPQLIGLYICEENRRANEYDFKKALDLLEYIDEEEDININDLKLEILCKALQRDNWSSSDGKDDPIEVSKDSIFVKILQKLLKDGIQLSEYLPEVKDLLQADQLGSLKSNPYFEFVLKANYEYYVQGQI

SEQ ID NO: 19 - DNA, 3857 bp, Homosapiens
cgcctggccggcgggctgaggcgtacgggtcgcacgcagcgccatgcgaggcccccctgcctggccgctgcggctgctcgagccaccgagccctgccgagccaggtcggctcctgccggtagcctgcgtgtgggccgcggccagccgcgttcccgggtccctatcgccgttcactggcctgaggccggcgcggctatggggcgcggggcccgcgctgctctggggcgttggagccgcgcgccgctggaggagcggctgccggggcgggggtccgggcgcctcgcggggcgtcctgggcctcgcgcggctcctggggctgtgggctcgcggccccggcagctgcaggtgcggggcttttgccgggccaggcgctcctcggctcccgcgcgcccggttcccgggcggtcccgcagccgctgcctgggcaggggacgaggcctggcggcgcgggccggcggcgcctcccggggacaaggggcggctgcgccccgcagcggccggactcccggaggcccggaagctcctggggctggcgtaccctgagcgccggaggctggcagctgcggttggatttctcacgatgtccagtgttatctccatgtctgcccctttcttcctggggaagatcattgatgtcatctataccaaccccactgtggactacagcgacaacctgacccgcctctgcctagggctcagtgccgtgtttctgtgtggtgctgccgccaatgccattcgtgtctacctcatgcaaacttcaggtcagcgcattgtgaataggctgagaacttcattattctcctccattctgaggcaggaggttgctttctttgacaagactcgcacaggagaattgattaaccgcctctcatcagacactgcactcctggggcgctcagtgactgaaaacctctcagatgggctcagggccggggcccaggcttctgtaggcatcagtatgatgttttttgtctcacctaatctggccacctttgttttgagcgtggtgcctccagtgtcaatcattgctgtaatttatgggcgatatctacggaaactgaccaaagtcactcaggattccctggcacaagccactcagctagctgaggaacgtattggaaatgtaagaactgttcgagcttttgggaaagaaatgactgaaatcgagaaatatgccagcaaagtggaccatgtaatgcagttagcaaggaaagaggcagtcgcccgggctggtttctttggagcaactgggctctccggaaacctgatcgtgctttctgtcctgtacaaaggagggctgctgatgggcagtgcccacatgaccgtgggtgaactctcttccttcctaatgtatgctttctgggttggaataagcattggaggtctgagctctttctactcggagctgatgaaaggactgggtgcaggggggcgcctctgggagctcctggagagagagcccaagctgccttttaacgagggggtcatcttaaatgagaaaagcttccagggtgctttggagtttaagaacgtgcattttgcctatccagctcgcccagaggtgcccatatttcaggatttcagcctttccattccgtcaggatctgtcacggcactggttggcccaagtggttctggcaaatcaacagtgctttcactcctgctgaggttgtacaaccctgcttctggaactattagtcttgatggccatgacatccgtcagctaaacccagtgtggctgagatccaaaattgggacagtgagtcaggaacccattttgttttcttgctctattgctgagaacattgcttatggtgctgatgacccttcctctgtgaccgctgaggaaatccagagagtggctgaagtggccaatgcagtggccttcatccggaatttcccccaagggttcaacactgtggttggagaaaagggtgttctcctctcaggtgggcagaaacagcggattgcgattgcccgtgctctgctaaagaatcccaaaattcttctcctagatgaagcaaccagtgcgctggatgccgaaaatgagtaccttgttcaagaagctctagatcgactgatggatggaagaacggtgttagttattgcccatcgtctgtccaccattaagaatgctaatatggttgctgttcttgaccaaggaaaaattactgaatatggaaaacatgaagagctgctttcaaaaccaaatgggatatacagaaaactaatgaacaaacaaagttttatttcagcataaggaagcaattactggtaaacaatatgagactttaatgcaaaacagtgttgcagaaaaaaaactcagagactatgaaatacataaaccatatatcaagttatttgaaaaatacctatttttttccaaagtgtgtaaaagattgttttgaaacgtacctgttatcaagatctttttattcagagttttaataattgtaactttttaaatgtctatagcactgaagttattttcaggttttgtattttcttttcttgtggaatattttaattaatatagcatggcacctcattttcttttgcctgctgttaaagattgaagctattgtcaaatgacaactttaaaaaggcaattataaataaaaagcctgattattttaggccagtttaccaatcactgtgtaattcttctggtagtattctacctacttttaagtctaattttacagatagaataatggaaattgaaaatttaaccctttattccgataatctcatgaagcaaacctaactatttaacatcagctggaaagaagggaacatttatattgcccatctcctgtgtcttcaaaggtgttgagagctgaggaatatgtgttcctatgggaactatgtttgaatatgtgcagttttcaacattttggcacatgaaagcctgacaagtttttaaaagggcagaagctttattttttgaacaggaaaacatgttttttaaattcacatgtttgtatgagtacttttgcgaagcaaggcatgaactgctaggtattattaagaatgaatgatttttgcatttaagttgtttgaaggcatgtattttgaaaaatatctgttacaaatttataatttcaagacaaattgaatcttattttataatacttttggaatttcattaataaggctaaaatttgaggaatataactaattttcagccttaagacatttaagtttggaagtccttgctattcaacagaataacaagaaaacttcagaatgtatcactctcctgaaaagaagatattaataagcccttttatttatggttatagttttatttatagtctcaaaattcctaaagcaatgctacaaccattgaatttgccatattttgtatcagtgctgttaatttgctgttgcctcaagaaaaagtgctttttctccatggatgaggctagaccctaagaagtaattaagtcaatgtaaatcaaatggaagttttcccatgaactaagaatttattagttccctgattagactggaagaagaaaccactatttcatgaaaagcatggaatattatattttattgttcataattaatgaataaaattgatatgaatgaatgtagtgttctttgaattagtaaacagtacatctgtgacaatcatttttaacaagctctacttgtgttctttataaagtgtgattttcagaaagcaaacaacacaattacaaggttgaatctgaggaaaataatccttgtgccatagaagtatttacgaaattgcatttcattgttatgttttattttctgatacatgatgttcaattttatctttaggtaatattttatatcatagattaaaatttatagtgaacttt

SEQ ID NO: 20 - protein, 738 aa, Homosapiens
MRGPPAWPLRLLEPPSPAEPGRLLPVACVWAAASRVPGSLSPFTGLRPARLWGAGPALLWGVGAARRWRSGCRGGGPGASRGVLGLARLLGLWARGPGSCRCGAFAGPGAPRLPRARFPGGPAAAAWAGDEAWRRGPAAPPGDKGRLRPAAAGLPEARKLLGLAYPERRRLAAAVGFLTMSSVISMSAPFFLGKIIDVIYTNPTVDYSDNLTRLCLGLSAVFLCGAAANAIRVYLMQTSGQRIVNRLRTSLFSSILRQEVAFFDKTRTGELINRLSSDTALLGRSVTENLSDGLRAGAQASVGISMMFFVSPNLATFVLSVVPPVSIIAVIYGRYLRKLTKVTQDSLAQATQLAEERIGNVRTVRAFGKEMTEIEKYASKVDHVMQLARKEAVARAGFFGATGLSGNLIVLSVLYKGGLLMGSAHMTVGELSSFLMYAFWVGISIGGLSSFYSELMKGLGAGGRLWELLEREPKLPFNEGVILNEKSFQGALEFKNVHFAYPARPEVPIFQDFSLSIPSGSVTALVGPSGSGKSTVLSLLLRLYNPASGTISLDGHDIRQLNPVWLRSKIGTVSQEPILFSCSIAENIAYGADDPSSVTAEEIQRVAEVANAVAFIRNFPQGFNTVVGEKGVLLSGGQKQRIAIARALLKNPKILLLDEATSALDAENEYLVQEALDRLMDGRTVLVIAHRLSTIKNANMVAVLDQGKITEYGKHEELLSKPNGIYRKLMNKQSFISA

SEQ ID NO: 21 - DNA, 2904 bp, Homosapiens
ggaaactggcggtggccgcggccgccgagtcggtctgcgcatcctcctgcgttttctcgcttggatcttggcactgagaggcggtggccggcgggatggagaaaagtaggatgaacctgcccaaggggccggacacgctctgcttcgacaaggacgagttcatgaaggaagatttcgatgtcgatcattttgtgtctgactgtaggaagcgggtccagctggaagaactgagagatgacctggagctctactataaacttcttaaaacagccatggtcgaactcatcaacaaggattatgcagattttgtcaatctttcaacaaacttggttggcatggacaaagccctcaaccagctttctgtgcctttgggacaattacgagaagaggttctgagccttagatcgtctgtcagtgaaggaattcgggcagttgatgaacgaatgtctaaacaagaggacattaggaaaaaaaagatgtgtgtattgaggcttatacaagttattcggtcagttgagaaaattgaaaaaatcttaaactctcaaagttctaaagaaacctctgcactagaagcaagcagcccccttttgactggacaaattttggagagaattgccacagaatttaatcagttacagtttcatgctgttcaaagcaaaggcatgcctcttttggacaaagtaagaccgcgtatagctggcattacagccatgttacagcagtcactggaaggtctcctattagaaggccttcagacgtctgacgtcgatataatacggcactgcttgcggacttacgccacgattgacaagacacgggacgcggaggccttagttggccaagtactagtgaaaccatacatagacgaggtgattatagagcagtttgttgaatctcatcccaatggccttcaggtcatgtataataaactcctggagtttgttcctcaccattgccgccttcttcgagaagtcacaggaggtgccatctccagtgaaaaaggcaatactgttcctggatatgactttttggtgaattctgtttggccacaaatagtacaaggattagaagaaaagttaccctcgctttttaatcctgggaatcccgatgcatttcatgagaaatataccataagtatggattttgtcagaagattggaacggcagtgtggatcacaggctagtgtaaagagattaagagcccatcctgcctatcacagcttcaataagaagtggaacttgcctgtttattttcaaataagatttagagaaatagcgggatccttagaagcagcacttacagatgtcctggaagatgccccagctgaaagtccgtattgccttttggcttctcatagaacttggagcagccttaggaggtgttggtcagatgagatgttcttgccattactggtgcatcgcctgtggagactcactctgcagattttggcacgatactctgtgtttgtcaatgagctttcactcaggcccatttctaatgaaagtcccaaggagatcaagaaacctttggtaactggtagcaaagaaccttccatcacccaaggaaacactgaagaccaaggaagtggtccttcggaaacaaagcctgtggtttccatttcccgcactcagctcgtgtatgtggttgcagacctggacaagcttcaggagcagcttccagaactcttggaaataatcaagccaaaacttgaaatgattggctttaagaatttttcttctatctcagcagccctggaggactcccagagctctttttcagcctgtgtgccctccttgagtagcaagatcatccaggatttaagtgactcttgcttcggtttcctaaaaagcgccctggaggttcccaggctttaccgaagaaccaataaggaggtcccaaccacagcttcctcctatgtggacagtgctctgaagcccttattccagcttcagagcggacacaaggataagctcaaacaagcaataattcagcagtggctagaaggcactctcagtgaaagcactcataagtactatgaaaccgtgtcagatgtattaaactctgtgaagaagatggaagagagcctgaaaaggctgaaacaagccagaaaaaccactcccgccaaccccgtcggtcccagtggtggcatgagcgacgacgacaaaatcaggctgcagttggccctagatgttgagtacttgggagagcagatacaaaagttgggactacaagcaagtgacataaaaagcttctcagctctcgcagagcttgttgctgctgccaaggaccaggcaacagcagagcagccttaagcatcttggaagatcccgaggttagattcttaagcaagagaagagttggacttccaggctgaaggggagaaagtgactctgttctcttagcaaccgtctgtagcaaagaagtgcttccagcatcactccagcaacacgcccatgcgtcttctctcagcgtatttgggtcttctttgcccaaaagaacacaaaagcctttttccattgtatggaagatagtttttaagacatttgaaactttctactatagtttacagaacaaattattttatttttattgtaaatcttagtgtggaagagctgatttctaaaatatgattaaagtaaatatatacctatgaatatcaagagtcgtctccctgagcctgtagttggaagtgacgactgtaatggaatgatgtcttgtatagaaatgcccttctctgaaataaagagaactcctgggctttctaaagaggctgcgggaagccatcctccactcccactgtgtgtgagagcagtgcttctgatcctgctgtcaccccgacctctggcaggagccggcgccagtaggaaagacctccttcctaaataaaagaagtgtctcccaaaa

SEQ ID NO: 22 - protein, 738 aa, Homosapiens
MEKSRMNLPKGPDTLCFDKDEFMKEDFDVDHFVSDCRKRVQLEELRDDLELYYKLLKTAMVELINKDYADFVNLSTNLVGMDKALNQLSVPLGQLREEVLSLRSSVSEGIRAVDERMSKQEDIRKKKMCVLRLIQVIRSVEKIEKILNSQSSKETSALEASSPLLTGQILERIATEFNQLQFHAVQSKGMPLLDKVRPRIAGITAMLQQSLEGLLLEGLQTSDVDIIRHCLRTYATIDKTRDAEALVGQVLVKPYIDEVIIEQFVESHPNGLQVMYNKLLEFVPHHCRLLREVTGGAISSEKGNTVPGYDFLVNSVWPQIVQGLEEKLPSLFNPGNPDAFHEKYTISMDFVRRLERQCGSQASVKRLRAHPAYHSFNKKWNLPVYFQIRFREIAGSLEAALTDVLEDAPAESPYCLLASHRTWSSLRRCWSDEMFLPLLVHRLWRLTLQILARYSVFVNELSLRPISNESPKEIKKPLVTGSKEPSITQGNTEDQGSGPSETKPVVSISRTQLVYVVADLDKLQEQLPELLEIIKPKLEMIGFKNFSSISAALEDSQSSFSACVPSLSSKIIQDLSDSCFGFLKSALEVPRLYRRTNKEVPTTASSYVDSALKPLFQLQSGHKDKLKQAIIQQWLEGTLSESTHKYYETVSDVLNSVKKMEESLKRLKQARKTTPANPVGPSGGMSDDDKIRLQLALDVEYLGEQIQKLGLQASDIKSFSALAELVAAAKDQATAEQP

SEQ ID NO: 23 - DNA, 2192 bp, Homosapiens
gtgcacaggcagcctgggaacagctccatccccacccctcagctataaatagggcatcgtgacccggccgggggaagaagctgccgttgttctgggtactacagcagaagggtatgcggaagcgagcaccccagtctgagatggctcctgccggtgtgagcctgagggccaccatcctctgcctcctggcctgggctggcctggctgcaggtgaccgggtgtacatacaccccttccacctcgtcatccacaatgagagtacctgtgagcagctggcaaaggccaatgccgggaagcccaaagaccccaccttcatacctgctccaattcaggccaagacatcccctgtggatgaaaaggccctacaggaccagctggtgctagtcgctgcaaaacttgacaccgaagacaagttgagggccgcaatggtcgggatgctggccaacttcttgggcttccgtatatatggcatgcacagtgagctatggggcgtggtccatggggccaccgtcctctccccaacggctgtctttggcaccctggcctctctctatctgggagccttggaccacacagctgacaggctacaggcaatcctgggtgttccttggaaggacaagaactgcacctcccggctggatgcgcacaaggtcctgtctgccctgcaggctgtacagggcctgctagtggcccagggcagggctgatagccaggcccagctgctgctgtccacggtggtgggcgtgttcacagccccaggcctgcacctgaagcagccgtttgtgcagggcctggctctctatacccctgtggtcctcccacgctctctggacttcacagaactggatgttgctgctgagaagattgacaggttcatgcaggctgtgacaggatggaagactggctgctccctgatgggagccagtgtggacagcaccctggctttcaacacctacgtccacttccaagggaagatgaagggcttctccctgctggccgagccccaggagttctgggtggacaacagcacctcagtgtctgttcccatgctctctggcatgggcaccttccagcactggagtgacatccaggacaacttctcggtgactcaagtgcccttcactgagagcgcctgcctgctgctgatccagcctcactatgcctctgacctggacaaggtggagggtctcactttccagcaaaactccctcaactggatgaagaaactatctccccggaccatccacctgaccatgccccaactggtgctgcaaggatcttatgacctgcaggacctgctcgcccaggctgagctgcccgccattctgcacaccgagctgaacctgcaaaaattgagcaatgaccgcatcagggtgggggaggtgctgaacagcattttttttgagcttgaagcggatgagagagagcccacagagtctacccaacagcttaacaagcctgaggtcttggaggtgaccctgaaccgcccattcctgtttgctgtgtatgatcaaagcgccactgccctgcacttcctgggccgcgtggccaacccgctgagcacagcatgaggccagggccccagaacacagtgcctggcaaggcctctgcccctggcctttgaggcaaaggccagcagcagataacaaccccggacaaatcagcgatgtgtcacccccagtctcccaccttttcttctaatgagtcgactttgagctggaaagcagccgtttctccttggtctaagtgtgctgcatggagtgagcagtagaagcctgcagcggcacaaatgcacctcccagtttgctgggtttattttagagaatgggggtggggaggcaagaaccagtgtttagcgcgggactactgttccaaaaagaattccaaccgaccagcttgtttgtgaaacaaaaaagtgttcccttttcaagttgagaacaaaaattgggttttaaaattaaagtatacatttttgcattgccttcggtttgtatttagtgtcttgaatgtaagaacatgacctccgtgtagtgtctgtaataccttagttttttccacagatgcttgtgatttttgaacaatacgtgaaagatgcaagcacctgaatttctgtttgaatgcggaaccatagctggttatttctcccttgtgttagtaataaacgtcttgccacaataagcctccaaaaaaaa

SEQ ID NO: 24 - protein, 485 aa, Homosapiens
MRKRAPQSEMAPAGVSLRATILCLLAWAGLAAGDRVYIHPFHLVIHNESTCEQLAKANAGKPKDPTFIPAPIQAKTSPVDEKALQDQLVLVAAKLDTEDKLRAAMVGMLANFLGFRIYGMHSELWGVVHGATVLSPTAVFGTLASLYLGALDHTADRLQAILGVPWKDKNCTSRLDAHKVLSALQAVQGLLVAQGRADSQAQLLLSTVVGVFTAPGLHLKQPFVQGLALYTPVVLPRSLDFTELDVAAEKIDRFMQAVTGWKTGCSLMGASVDSTLAFNTYVHFQGKMKGFSLLAEPQEFWVDNSTSVSVPMLSGMGTFQHWSDIQDNFSVTQVPFTESACLLLIQPHYASDLDKVEGLTFQQNSLNWMKKLSPRTIHLTMPQLVLQGSYDLQDLLAQAELPAILHTELNLQKLSNDRIRVGEVLNSIFFELEADEREPTESTQQLNKPEVLEVTLNRPFLFAVYDQSATALHFLGRVANPLSTA

SEQ ID NO: 25 - DNA, 2362 bp, Homosapiens
actcagcccagtggccctctgagctgttccttcttgaccggcacacacagctcgcttcttcactttcttttccatccactgccggacccaagccagccttccagggagcagccatgccttacctctaccgggccccagggcctcaggcacacccggttcccaaggacgcccggatcacccactcctcaggccagagctttgagcaaatgaggcaggagtgcctgcagagaggcaccctgtttgaggatgcagacttcccagccagcaattcctccctgttctacagtgagaggccgcagatcccctttgtgtggaaacgaccaggggaaatcgtgaaaaacccagaattcattcttggaggggccaccaggactgatatctgccagggagagctgggagactgctggctattagccgccatcgcctcccttacgcttaatcaaaaagcactggccagagtcatcccccaggaccaaagctttggccctggttatgccgggatattccatttccagttctggcagcacagtgagtggctggacgtggtgatcgatgaccgcctgcccaccttcagggaccgcttggttttcctccactctgccgaccacaacgagttctggagcgccttgctggaaaaagcctacgccaagctaaatgggagctatgaagctctgaagggaggcagcgccatcgaggccatggaagacttcactgggggtgtggcagagaccttccaaactaaagaggcccccgagaacttctatgagattctagagaaggctttgaagagaggctccctgctgggctgcttcattgataccagaagtgctgcagaatctgaggcccggacgccgtttggtcttattaagggtcatgcctacagtgtaacgggaattgaccaggtaagcttccgaggccagagaatcgagctcatccgaatccggaacccttggggccaggttgagtggaacgggtcgtggagcgacagttctccggagtggcgttctgttggtccagctgagcagaagcgtctgtgtcacactgctctggatgatggggaattctggatggcatttaaggacttcaaggcccactttgataaagtggagatctgcaacctcactcccgatgccctggaggaagacgcgatccacaaatgggaggtgacggtccatcagggaagctgggttcgcggctccacggctgggggctgccgcaatttcctggataccttttggaccaatccacaaataaaattgtctctgactgagaaagatgaggggcaggaggagtgtagtttccttgtagccctgatgcagaaagatagaaggaaactcaagagatttggtgccaatgtgctgacaatcggctatgccatttatgagtgccctgacaaagacgaacacctgaacaaagacttcttcagataccacgcttctcgggccagaagcaagacgttcatcaacctgagagaagtctccgaccggttcaagctgccccctggggagtacatcctgattcccagcacttttgagccccaccaggaagctgatttctgtctgagaatcttttcagagaaaaaagccattacccgggatatggatggaaatgtagacattgaccttcctgagcctccaaagccaactccacctgaccaggagacagaggaggagcagcggtttcgggctctgtttgaacaagtcgctggtgaggacatggaggtgacagcagaggaacttgagtatgttttaaatgctgtgctgcaaaagaaaaaggacatcaaattcaagaagctaagcctgatctcctgtaaaaacatcatttccctgatggacaccagcggcaatgggaagctggagtttgatgaattcaaagtgttctgggacaagctgaagcagtggattaaccttttccttcggtttgatgctgacaagtccggcaccatgtctacctatgaactacggactgcactgaaagctgcaggctttcagctgagcagccacctcctgcagctgattgtgctcaggtatgcggatgaggagctccagctggacttcgatgacttcctcaactgcctggtccggctggagaatgcgagccgggtgttccaggctctcagtacaaagaacaaggagttcattcatctcaatataaatgagttcatccatttgacaatgaacatctgaggctgccttgtagagatgcagcctgcccagctgaatcttggcttctggaccttgaccttcagaacttctcttggtgtggaaccattacgcccagggttcactcccctctcatcgtccggccttctcccttcatcttgatctgggaagaatgaaatgaactcagctacactctctga

SEQ ID NO: 26 - protein, 690 aa, Homosapiens
MPYLYRAPGPQAHPVPKDARITHSSGQSFEQMRQECLQRGTLFEDADFPASNSSLFYSERPQIPFVWKRPGEIVKNPEFILGGATRTDICQGELGDCWLLAAIASLTLNQKALARVIPQDQSFGPGYAGIFHFQFWQHSEWLDVVIDDRLPTFRDRLVFLHSADHNEFWSALLEKAYAKLNGSYEALKGGSAIEAMEDFTGGVAETFQTKEAPENFYEILEKALKRGSLLGCFIDTRSAAESEARTPFGLIKGHAYSVTGIDQVSFRGQRIELIRIRNPWGQVEWNGSWSDSSPEWRSVGPAEQKRLCHTALDDGEFWMAFKDFKAHFDKVEICNLTPDALEEDAIHKWEVTVHQGSWVRGSTAGGCRNFLDTFWTNPQIKLSLTEKDEGQEECSFLVALMQKDRRKLKRFGANVLTIGYAIYECPDKDEHLNKDFFRYHASRARSKTFINLREVSDRFKLPPGEYILIPSTFEPHQEADFCLRIFSEKKAITRDMDGNVDIDLPEPPKPTPPDQETEEEQRFRALFEQVAGEDMEVTAEELEYVLNAVLQKKKDIKFKKLSLISCKNIISLMDTSGNGKLEFDEFKVFWDKLKQWINLFLRFDADKSGTMSTYELRTALKAAGFQLSSHLLQLIVLRYADEELQLDFDDFLNCLVRLENASRVFQALSTKNKEFIHLNINEFIHLTMNI

SEQ ID NO: 27 - DNA, 2484 bp, Homosapiens
tcttgaccggcacacacagctcgcttcttcactttcttttccatccactgccggacccaagccagccttccagggagcagccatgccttacctctaccgggccccagggcctcaggcacacccggttcccaaggacgcccggatcacccactcctcaggccagagctttgagcaaatgaggcaggagtgcctgcagagaggcaccctgtttgaggatgcagacttcccagccagcaattcctccctgttctacagtgagaggccgcagatcccctttgtgtggaaacgaccaggggaaatcgtgaaaaacccagaattcattcttggaggggccaccaggactgatatctgccagggagagctgggagactgctggctattagccgccatcgcctcccttacgcttaatcaaaaagcactggccagagtcatcccccaggaccaaagctttggccctggttatgccgggatattccatttccagttctggcagcacagtgagtggctggacgtggtgatcgatgaccgcctgcccaccttcagggaccgcttggttttcctccactctgccgaccacaacgagttctggagcgccttgctggaaaaagcctacgccaagctaaatgggagctatgaagctctgaagggaggcagcgccatcgaggccatggaagacttcactgggggtgtggcagagaccttccaaactaaagaggcccccgagaacttctatgagattctagagaaggctttgaagagaggctccctgctgggctgcttcattgataccagaagtgctgcagaatctgaggcccggacgccgtttggtcttattaagggtcatgcctacagtgtaacgggaattgaccaggtaagcttccgaggccagagaatcgagctcatccgaatccggaacccttggggccaggttgagtggaacgggtcgtggagcgacaggatggcatttaaggacttcaaggcccactttgataaagtggagatctgcaacctcactcccgatgccctggaggaagacgcgatccacaaatgggaggtgacggtccatcagggaagctgggttcgcggctccacggctgggggctgccgcaatttcctggataccttttggaccaatccacaaataaaattgtctctgactgagaaagatgaggggcaggaggagtgtagtttccttgtagccctgatgcagaaagatagaaggaaactcaagagatttggtgccaatgtgctgacaatcggctatgccatttatgagtgccctgacaaagacgaacacctgaacaaagacttcttcagataccacgcttctcgggccagaagcaagacgttcatcaacctgagagaagtctccgaccggttcaagctgccccctggggagtacatcctgattcccagcacttttgagccccaccaggaagctgatttctgtctgagaatcttttcagagaaaaaagccattacccgggatatggatggaaatgtagacattgaccttcctgagcctccaaagccaactccacctgaccaggagacagaggaggagcagcggtttcgggctctgtttgaacaagtcgctggtgaggacatggaggtgacagcagaggaacttgagtatgttttaaatgctgtgctgcaaaagaaaaaggacatcaaattcaagaagctaagcctgatctcctgtaaaaacatcatttccctgatggacaccagcggcaatgggaagctggagtttgatgaattcaaagtgttctgggacaagctgaagcagtggattaaccttttccttcggtttgatgctgacaagtccggcaccatgtctacctatgaactacggactgcactgaaagctgcaggctttcagctgagcagccacctcctgcagctgattgtgctcaggtatgcggatgaggagctccagctggacttcgatgacttcctcaactgcctggtccggctggagaatgcgagccgggtgttccaggctctcagtacaaagaacaaggagttcattcatctcaatataaatgagttcatccatttgacaatgaacatctgaggctgccttgtagagatgcagcctgcccagctgaatcttggcttctggaccttgaccttcagaacttctcttggtgtggaaccattacgcccagggttcactcccctctcatcgtccggccttctcccttcatcttgatctgggaagaatgaaatgaactcagctacactctctgattttgtgctactcctttgtaaagtcactgccttaagggggctgatggcgccacctgtgccttacatccaggttcaggcatcactagctttcccacactctactttccttatttccttccattaagaattactcagagttctaacgcacagaatcctgacttccatgtagctccagtcattgtgatcagacatcctttataaaacatgtttttataaatgtgtatgtggaat

SEQ ID NO: 28 - protein, 664 aa, Homosapiens
MPYLYRAPGPQAHPVPKDARITHSSGQSFEQMRQECLQRGTLFEDADFPASNSSLFYSERPQIPFVWKRPGEIVKNPEFILGGATRTDICQGELGDCWLLAAIASLTLNQKALARVIPQDQSFGPGYAGIFHFQFWQHSEWLDVVIDDRLPTFRDRLVFLHSADHNEFWSALLEKAYAKLNGSYEALKGGSAIEAMEDFTGGVAETFQTKEAPENFYEILEKALKRGSLLGCFIDTRSAAESEARTPFGLIKGHAYSVTGIDQVSFRGQRIELIRIRNPWGQVEWNGSWSDRMAFKDFKAHFDKVEICNLTPDALEEDAIHKWEVTVHQGSWVRGSTAGGCRNFLDTFWTNPQIKLSLTEKDEGQEECSFLVALMQKDRRKLKRFGANVLTIGYAIYECPDKDEHLNKDFFRYHASRARSKTFINLREVSDRFKLPPGEYILIPSTFEPHQEADFCLRIFSEKKAITRDMDGNVDIDLPEPPKPTPPDQETEEEQRFRALFEQVAGEDMEVTAEELEYVLNAVLQKKKDIKFKKLSLISCKNIISLMDTSGNGKLEFDEFKVFWDKLKQWINLFLRFDADKSGTMSTYELRTALKAAGFQLSSHLLQLIVLRYADEELQLDFDDFLNCLVRLENASRVFQALSTKNKEFIHLNINEFIHLTMNI

SEQ ID NO: 29 - DNA, 3733 bp, Homosapiens
agcggcgggcaggccgggcatggcgtccatggcggcggcgatcgcggcttcgcgctcggcggtcatgagcgggaaccggcctctggacgaccgggagcgaaagcgcttcacttacttctcgtcgctgagccccatggccaggaagatcatgcaggacaaggagaagatccgcgagaagtacgggcccgagtgggcgcggctgccgcccgcgcagcaggacgagatcatcgaccggtgcctggtggggccgcgcgccccggcgccccgagaccccggggactcggaggagctcacgcgcttccccggcttgcgcgggcccacgggccagaaggtggtgcgcttcggggacgaggatctaacttggcaagatgagcactctgcccctttctcctgggaaacaaagagtcagatggagttcagtatctccgccctatccatccaggagccgagcaacggcaccgccgccagcgagcccagaccactgtccaaagcttcccagggctcccaggccctcaagtcctcccaaggcagcaggtcctccagcctggacgccctgggccccaccaggaaggaggaggaagcgtcattctggaagatcaatgctgagcggtcccgaggggaggggcctgaggccgagttccagtcgctgacccctagccagatcaagtccatggagaagggggaaaaggtcttgcctccctgctaccggcaggaacctgccccgaaggacagggaggccaaggtggaaaggcccagcaccctccgtcaggagcagcgtcctcttcccaacgtgagcaccgaacgtgagagaccccagcctgtccaggccttcagcagtgcactgcacgaggctgccccctcccagctcgaggggaagctgccatctcctgatgtcaggcaggacgatggggaagacaccctgttctcggaacccaagtttgcacaggtcagctcaagtaatgtcgtcttgaagacgggatttgattttctggacaattggtaaaatgtattagaaaaatacaatgaagaaccctaaaatgttttccaaagtggtgtggtggaggaggataaaaagggccaccttttcctatgtattttactggtttcttgacactcttttcttaatcatctggaaactggtcaatattgccagatttttttcttttttggtagaaccagatatatatgctattttcagtgatttgataacagaagttttccatttggaatttttaaggtctgttaataattcaggagatcttgtaaataaaacttctgttcccagctccacccaactttccccctcctcaaaggatgtgtttcaaccatgtcacaaaaatcatataagtgatttccatctccttctccattattccccctcccccctccgctttttaccgtatgggttccttttggtgggtgattgagggtgatgttatcagccatgacatcagcatgctggctgtgaccccggaaagactggcccccagcgacgttctcagccagcgctcgcagctgtccggggcttctctggcagaagccatgtctctcacatcatgtgccagcctccaccctcacgccatttccagggaacagactgcgggtatgtagcagtgtagtctttaacctgctctgatacatattcagagtatggattgttgtttaaaaagagttgcatgtttaaagagttttgtactagcttttcattattttgtatctagattatcaacaatggggctaccactttccttggttttatatccatttcctcttggaagttcttgttgcttatgtgacctgttggttgttccccggactgggcacctacaggagtcagggcagacggcagatgtggctggaggtcagggctcttctgcttagttgtgttagagtcttccagcatgggactgatgggagcagtgggcattctttatcccaagggctagccaggttgcgtcatgacggaccttccccagccctgaccaccaccagaagtggaagagtggagtttgcggtcaactcagcagtgcccatggagacctgcgtggtgtcagagcagcagtatctcttggagctggtgcagacaccaaggctgcccagtggtacaacgtggtccacctcccctagggaagctgctgcactcagaggctgtcctgcccagtggcccctgagccgtgtgagcctgcaggaggcgtctgagcagagcctcaagcccggtatggcgccatctccatgttgccatcactgcgttctcacctgaagccttaatctttgcgacacctgccagtgagcgctcggtttcaataccaaagtgtgtcttcttcttttttttttttttaaatgcctgtttcataggaccttctgaaatgatttccagaatattttatctggctccaaaataaagcacatagcaactcacctcaacccctcatcatctccaggaaagtttctgccaaagctgtggcatagccaacttttgatttggttcttgccaattgttttatgtccctaaacctcatttggatccttggggtatagttttatctttctgcttcagtgatttactgtaacttttcaaatattggttctttctgtaccatttaagtatagttgatatatgtgaggcaaaaaaaggtttcagcatggtggtgagggaaaaaggagcttagaaatcccagttggcacagcctgggcaagcgccagctcccctcagggctaacggcactgttcacacagggatcctcagaatcagcggccacctgcctccaccttctgcctggagggcatggggctgttgtagaacctatggtagcaaatgtatatgtatgagtttgtattctgtagtgttggtgtagcacagaagaaagacctgtgtcctagagagtaggccaaggtgatctgcctcttctattgggagaaattctaatttctttcccactttctcaacaagcccaatattccctccaagttcttcttggtgctgagggctgtaggaattattgaaagcttctgcctcacttagtatcgtctggggcccagcacccagcaataactctaataatgtttcttaatggtatagcctcctgagattaaatgtaaaatcaaaaattaggaaatcttggagggagtcctcaagttgtattgctttgctgtgcttttggaagaagggacgacctggaggacacaggctcctgtgtgggtcttcatcctgcctgaccggcagatcttcctctacaccttgggcaaagtctatgcgaagatggtttcttagctctccatttgccatgattttcctcccattcatcatgagggagtttctcaaaccaggagtttatatttattttttagaaaatacacacttttcaggagaaacctgagcatgattttggattctccacctccccccagtctctgcacctgggattcagctcaaggattcagtgtcttcatttttacaaaagttcccccaagaaatcagcaaccagcctctgtttcatctgggagcccctcccttggccccctgggtttgggggtgctgccctactgggaacagcgggggtctgtcacccgtctgagccgcacccccctgtgtggatttcaggaagagcctccctttctttgcgtctccctttctttaattaacattttcaaaagtaataaattcttactgacgacttgtaacttagtcatattttatacttgtagcctttaataaagccatttaaaaaatgct

SEQ ID NO: 30 - protein, 327 aa, Homosapiens
MASMAAAIAASRSAVMSGNRPLDDRERKRFTYFSSLSPMARKIMQDKEKIREKYGPEWARLPPAQQDEIIDRCLVGPRAPAPRDPGDSEELTRFPGLRGPTGQKVVRFGDEDLTWQDEHSAPFSWETKSQMEFSISALSIQEPSNGTAASEPRPLSKASQGSQALKSSQGSRSSSLDALGPTRKEEEASFWKINAERSRGEGPEAEFQSLTPSQIKSMEKGEKVLPPCYRQEPAPKDREAKVERPSTLRQEQRPLPNVSTERERPQPVQAFSSALHEAAPSQLEGKLPSPDVRQDDGEDTLFSEPKFAQVSSSNVVLKTGFDFLDNW

SEQ ID NO: 31 - DNA, 3253 bp, Homosapiens
gagggaagatggcacctgccggctgctgctgctgctgctgcttctggggcggcgctgtggccgccgcgggcgccgcccggcgtgtcctgctgctgctgctgctgggggtcctgtccgctgggctgcggccaggcgccctggccaccgagcactactcgccgctctccctgctcaagcaggagctgcagcaccggcagcagcaggaggccccggcgggcggcggcggctgcagcccgcagtccggggactggggggaccagtactctgccgagtgcggcgagtcatcctttttgaacttccatgactcagactgcgaacccaagggatcatcaccctgtgactccttgctttccctcaacactgagaagattctgagccaggccaagtctattgcagaacagaagagattcccgtttgccactgataatgacagcacaaatgaagagttagctattgcttatgtcttgattggcagtggtctgtatgatgaagcaatacggcatttttcaacaatgcttcaggaggagcctgatctggttagtgcaatttatggccgagggatagcctatggaaagaagggactacatgacattaagaatgctgagcttgctctgttcgaactgagccgagtaattaccttggaaccagatcgtccagaggtatttgagcagcgagcagaaattctgtcccctctgggacgaattaatgaagcagtgaatgacctcactaaagctatccaactgcagccctcagcacggctgtacagacatcggggaaccctgtacttcatatcagaggactatgcaacagcccatgaagactttcagcagtccttagaactgaacaaaaaccagcctatagctatgctatacaaaggtttaactttctttcacagaggacttctgaaggaagctattgaatccttcaaagaagctttgaagcagaaagttgactttattgatgcatataaaagtctagggcaggcatatagagaactgggcaattttgaagcagccactgagagctttcaaaaggcactgttgctcaaccaaaatcatgtgcaaaccctccagctccggggaatgatgctctaccaccacggcagcttacaggaagcccttaagaactttaagcggtgtctgcagctagagccatataatgaagtgtgccagtatatgaaagggctcagccatgttgccatgggacagttttatgaagggataaaagcacaaacaaaagttatgctgaatgatcctctcccaggccagaaggctagccctgagtatcttaaagtaaagtatctccgagagtactctcgacatcttcatgcacaccttgataccccccttacggaatataacattgatgtggatctgcctggaagctttaaggaccactgggctaaaaatttgcctttcctcatagaagactacgaagagcagccagggttgcaaccccacataaaagatgtgttacatcagaattttgagagttataagcctgaagtacaggagctgatttgtgtggctgatcgtttgggatccctgatgcaatatgaaacacctggtttcctgccaaacaagagaatacacagagctatgggtttggccgcattggaggtcatgcaagccgtgcagcgtacatggaccaactcgaaagttcgaatgaatgggaagacacggttgatgcagtggagagacatgtttgacattgcagttaaatggagaaggattgctgacccagaccagcccgtgctgtggttagatcaaatgccagcacgaagtcttagcagaggttttaacaaccacattaatttaatcaggggtcaggtgatcaacatgagatacctagaatattttgagaaaatacttcattttattaaagacagaattcttgtttatcatggagctaataatcctaaaggattgctggaagttcgggaagccctggaaaaggtacacaaagtagaagaccttcttccgattatgaagcagtttaatactaaaacgaaggatgggttcaccgtgaacacaaaagttcccagccttaaagaccaagggaaggaatatgatggattcacaatcacgattacaggagacaaagttggcaatatattattttctgtggaaactcaaaccacggaagaaaggacacaattatatcatgctgaaatagatgcactttataaagatttgacagcaaaaggaaaagtattgattctttcatcagaatttggggaggctgatgctgtctgcaacttaatcttatccttagtttattacttttataatttaatgccactctctcgaggatccagtgtaattgcttactcggtcatcgtgggagcactgatggcaagtggaaaagaagtagcaggaaaaattcccaaagggaagttagtcgactttgaagctatgacagcccctggttcagaggcctttagcaaagtcgccaaaagctggatgaacttgaaaagtatttcaccttcttataagactcttccatcagtttcagaaacgtttccaacgttaagatcgatgattgaggtgctaaacacagactcttctccacgttgtcttaagaaactctagttctgctgctgtatttatacaagtaaagggccggacctcttgcttcttaagttattttttaaaacatggaattataaagaaattaggtcctctattacttttgataccaatttttataggaattgaatacttgaaatcattttctttacttttctgaaccataatgaaaatcatgaaagaggctttcggggggaaaaagctacttgacttggagggaaagcgtatgtattagccggcagcctgttggttcccacttataaagtcatataactccttccttacagtaaaaaaaattttcctcaacaactaaaatataatactgaagatgaacaaaaacaaaaccaaataggagtgtttgtattcctttagagatctggatatttttcaaagacttgctttttacgcacattgtgatagagcatcttttgttgactcacgtaacctccatgtgtgggtcctttgttttattagaaccatggaagaaggttcctgggccatcagtatgtgttgcagagctcacagccaggaacacttattttgaacaatgcagacagtacttgccagagtcccaaatgctgaattattgaaccatgttttttttttcctttgttgaaaaaaataaaccagggtgatttctataaatcaccagtttttggcattgg

SEQ ID NO: 32 - protein, 860 aa, Homosapiens
MAPAGCCCCCCFWGGAVAAAGAARRVLLLLLLGVLSAGLRPGALATEHYSPLSLLKQELQHRQQQEAPAGGGGCSPQSGDWGDQYSAECGESSFLNFHDSDCEPKGSSPCDSLLSLNTEKILSQAKSIAEQKRFPFATDNDSTNEELAIAYVLIGSGLYDEAIRHFSTMLQEEPDLVSAIYGRGIAYGKKGLHDIKNAELALFELSRVITLEPDRPEVFEQRAEILSPLGRINEAVNDLTKAIQLQPSARLYRHRGTLYFISEDYATAHEDFQQSLELNKNQPIAMLYKGLTFFHRGLLKEAIESFKEALKQKVDFIDAYKSLGQAYRELGNFEAATESFQKALLLNQNHVQTLQLRGMMLYHHGSLQEALKNFKRCLQLEPYNEVCQYMKGLSHVAMGQFYEGIKAQTKVMLNDPLPGQKASPEYLKVKYLREYSRHLHAHLDTPLTEYNIDVDLPGSFKDHWAKNLPFLIEDYEEQPGLQPHIKDVLHQNFESYKPEVQELICVADRLGSLMQYETPGFLPNKRIHRAMGLAALEVMQAVQRTWTNSKVRMNGKTRLMQWRDMFDIAVKWRRIADPDQPVLWLDQMPARSLSRGFNNHINLIRGQVINMRYLEYFEKILHFIKDRILVYHGANNPKGLLEVREALEKVHKVEDLLPIMKQFNTKTKDGFTVNTKVPSLKDQGKEYDGFTITITGDKVGNILFSVETQTTEERTQLYHAEIDALYKDLTAKGKVLILSSEFGEADAVCNLILSLVYYFYNLMPLSRGSSVIAYSVIVGALMASGKEVAGKIPKGKLVDFEAMTAPGSEAFSKVAKSWMNLKSISPSYKTLPSVSETFPTLRSMIEVLNTDSSPRCLKKL

SEQ ID NO: 33 - DNA, 1450 bp, Homosapiens
cggaagttctggactgcagttgagtggaaatgggcaacggcgggcggagcggcctgcagcaggggaaggggaacgtggatggggtggcagcgactcctactgctgcctcggcctcctgccagtacaggtgcatcgaatgcaaccaggaggccaaagagttgtaccgagactataaccacggtgtgctgaagataaccatctgtaaatcctgccagaaacctgtagacaaatatatcgagtatgatcctgttatcatcttgattaatgctatattgtgcaaagctcaggcctacagacatattcttttcaatactcaaataaatatccatggaaaactctgcatattttgtttgctttgtgaagcatacctgaggtggtggcagcttcaagattccaaccagaatactgcccctgatgacttgatcagatatgctaaggaatgggatttctatagaatgtttgcgattgctgctttagaacaaactgcctattttattggcatttttaccttcctgtgggtagaacggcccatgacggcaaaaaaaaagcccaacttcattttgctgctgaaagcattattattatctagctacggaaaactcttgctgattccagctgtcatttgggaacatgactacacatctgtgtgcctcaaactcattaaagtatttgttcttacatcaaattttcaggcaattagagtgaccctaaacatcaaccgtaagctctccttcttggccgtgttgagtggcttactgctggaaagcatcatggtctacttcttccagagtatggaatgggatgttggaagtgattatgccatctttaaatctcaggacttctgaagagttttattcttcttcactatctgtggcatgaccagctgtatctgaaagagaaaagacatgaaatataaaccaacctcctcatttctgttgagtaaaatgaagcaaagattggaaacactttctgaaaaagaaagcaatgataatagcggtggatacccacccccacaaatgcacccaagagacaagccatttacatacagatattcacagtcacacatagaaacacccacatggacacaaggaatgttgctgcagagactgaatgacatgcaacaggtgaaggtttatacgttatacacaaggccaggtaagcgctcataattcacacataataaaacatctaggtttcattcctttgacatgtttatatctttttaatttaaatgttgttactggcttaaaatattttgtgttcttacaatagaaacgcttttaataaagtctttcagaataaaccaagtttttgtaaattttcaattcaataattaaggtaatctttaaaattggatgatccaaaaataagtgataatgaaaaccactgagttatatactttgcaagggtaaattacatctgaataaagctgtaattaaaaacaaaaaaa

SEQ ID NO: 34 - protein, 271 aa, Homosapiens
MGNGGRSGLQQGKGNVDGVAATPTAASASCQYRCIECNQEAKELYRDYNHGVLKITICKSCQKPVDKYIEYDPVIILINAILCKAQAYRHILFNTQINIHGKLCIFCLLCEAYLRWWQLQDSNQNTAPDDLIRYAKEWDFYRMFAIAALEQTAYFIGIFTFLWVERPMTAKKKPNFILLLKALLLSSYGKLLLIPAVIWEHDYTSVCLKLIKVFVLTSNFQAIRVTLNINRKLSFLAVLSGLLLESIMVYFFQSMEWDVGSDYAIFKSQDF

SEQ ID NO: 35 - DNA, 1276 bp, Homosapiens
ggcaggcgcgtggccgggccgcggcgcgatgagtggggcccgggcggcgcccggggccgcgggcaacggcgcggtccgggggctgcgggtggacgggctgcccccgctgccaaagagcttgagcgggctgctgcactcggcgtcgggcggcggcgcgtctgggggctggcggcacctggagcggctgtacgcgcagaagtcgcgcatccaggacgagctgagccgcgggggcccgggcggcggcggggcccgggcggcagcgctgcccgccaagcctcccaacctggacgccgctctggcgctgctccgcaaagagatggttggtctccgccagctggacatgtccttgctctgccaactgtacagcctctacgagtcgattcaggagtacaagggggcatgccaggcagcctccagcccagactgcacttacgctctggagaacggcttcttcgatgaagaggaggaatatttccaggagcagaactccctgcacgacaggagggaccgaggccctcctcgggacttgtcactgcctgtctcctccctctccagcagcgactggattctggagtccatctagagggtcttgggagggatgtgactgttgggaagcccttcctactggacacgctgtcatcatttgctgcttctcttgcaagaaagcacctccgttgtggacggtcctcgggcacaggggatgagcgctaccagtttcatttgtaggcagggagttctccgcggatgcatggtggcagtctgctttgatggcagcagttatctgcttaggtgacctagaggtcctcagcagtatcctccacacctatttattgaggtgcacctgctggggattcataatgagaatataacaagaggatctcggtgaaaggccttagtgggtgttttgtgtgaggtggcttgtagctagctacttccttacagatggtagagtattccaatcctctttgtgttagggttcttgcttccagtttgggatgtattaaaaccaccatttcactgcttcccttcctcaatatgctctgcagcttttcttgctgtttaaacctctcgcctcagctttatttatttgtaagctgcattactaactgcccagtgattcggtgaaagctttttactgaaaaagttaacatttctagtcatcccaatcaactggcttttttcaaccaaaattttatatcattctttgtctatcagatacgagaggaaggaagataatacgaagacatgttgaatagtgaaaaaaaaaaaaaaaaaa

SEQ ID NO: 36 - protein, 184 aa, Homosapiens
MSGARAAPGAAGNGAVRGLRVDGLPPLPKSLSGLLHSASGGGASGGWRHLERLYAQKSRIQDELSRGGPGGGGARAAALPAKPPNLDAALALLRKEMVGLRQLDMSLLCQLYSLYESIQEYKGACQAASSPDCTYALENGFFDEEEEYFQEQNSLHDRRDRGPPRDLSLPVSSLSSSDWILESI

SEQ ID NO: 37 - DNA, 2757 bp, Homosapiens
gggcaatggcgggcgcccctcccccagcctcgttgccgccttgcagtttgatctcagactgctgtgctagcaatcagcgagactccgtgggcgtaggaccctccgagccaggtgtgggatatagtctcgtggtgcgccgtttcttaagctggtctgaaaagcgcaatattcgggtgggagtgacccgattttccaggtgcttccgtcacccctttctttgactcggaaagggaactccctgaccccttgcgcttcccaggtgaggcaatgcctcgccctgcttcggctcgcgcacggtgcgcgcacacactggcctgcgcccactgtctagcactccctagtgagatgaacccggtacctcagatggaaatgcagaaatcacccgtcttctgcgtcgctcacgctgggagctgtagaccggagctgttcctattcggccatcttggctcctagtatttttaattaagcacttgtgttctgattagtggccaaataaatgacagtcagaacttcagctaaggtacaataaggttttgctgtggcgtggcacctggtctctttctagaaggaaagttcaacatacagcacaattctggacacattgtattggtttgatgctcctacctggaacaggtggagctggtctcttgggcagcctgacatctggtccactcctctgtcctatgccgggatcatcatgaccgtagagattatgtcactgttttgcatccttgttacataactcagttcctggtagattactatgtcagagagtcacaatgaccttgcacaataacagtacaacctcgcctttgtttccaaacatcagctcctcctggatacacagcccctccgatgcagggctgcccccgggaaccgtcactcatttcggcagctacaatgtttctcgagcagctggcaatttctcctctccagacggtaccaccgatgaccctctgggaggtcataccgtctggcaagtggtcttcatcgctttcttaacgggcatcctggccttggtgaccatcatcggcaacatcctggtaattgtgtcatttaaggtcaacaagcagctgaagacggtcaacaactacttcctcttaagcctggcctgtgccgatctgattatcggggtcatttcaatgaatctgtttacgacctacatcatcatgaatcgatgggccttagggaacttggcctgtgacctctggcttgccattgactacgtagccagcaatgcctctgttatgaatcttctggtcatcagctttgacagatacttttccatcacgaggccgctcacgtaccgagccaaacgaacaacaaagagagccggtgtgatgatcggtctggcttgggtcatctcctttgtcctttgggctcctgccatcttgttctggcaatactttgttggaaagagaactgtgcctccgggagagtgcttcattcagttcctcagtgagcccaccattacttttggcacagccatcgctgctttttatatgcctgtcaccattatgactattttatactggaggatctataaggaaactgaaaagcgtaccaaagagcttgctggcctgcaagcctctgggacagaggcagagacagaaaactttgtccaccccacgggcagttctcgaagctgcagcagttacgaacttcaacagcaaagcatgaaacgctccaacaggaggaagtatggccgctgccacttctggttcacaaccaagagctggaaacccagctccgagcagatggaccaagaccacagcagcagtgacagttggaacaacaatgatgctgctgcctccctggagaactccgcctcctccgacgaggaggacattggctccgagacgagagccatctactccatcgtgctcaagcttccgggtcacagcaccatcctcaactccaccaagttaccctcatcggacaacctgcaggtgcctgaggaggagctggggatggtggacttggagaggaaagccgacaagctgcaggcccagaagagcgtggacgatggaggcagttttccaaaaagcttctccaagcttcccatccagctagagtcagccgtggacacagctaagacttctgacgtcaactcctcagtgggtaagagcacggccactctacctctgtccttcaaggaagccactctggccaagaggtttgctctgaagaccagaagtcagatcactaagcggaaaaggatgtccctggtcaaggagaagaaagcggcccagaccctcagtgcgatcttgcttgccttcatcatcacttggaccccatacaacatcatggttctggtgaacaccttttgtgacagctgcatacccaaaaccttttggaatctgggctactggctgtgctacatcaacagcaccgtgaaccccgtgtgctatgctctgtgcaacaaaacattcagaaccactttcaagatgctgctgctgtgccagtgtgacaaaaaaaagaggcgcaagcagcagtaccagcagagacagtcggtcatttttcacaagcgcgcacccgagcaggccttgtagaatgaggttgtatcaatagcagtgacaaaacgcacacatcaacccacagaccttaggaggaggaaggcgagggcggggtgacttctggtgatgataaaaatggttttatcacccagatgtgaaagaagctgcctgtttactgatccattgaataaacccattttaatagaaaaagtcaataccaattcagcaaaaaaaaaaaaaa

SEQ ID NO: 38 - protein, 590 aa, Homosapiens
MTLHNNSTTSPLFPNISSSWIHSPSDAGLPPGTVTHFGSYNVSRAAGNFSSPDGTTDDPLGGHTVWQVVFIAFLTGILALVTIIGNILVIVSFKVNKQLKTVNNYFLLSLACADLIIGVISMNLFTTYIIMNRWALGNLACDLWLAIDYVASNASVMNLLVISFDRYFSITRPLTYRAKRTTKRAGVMIGLAWVISFVLWAPAILFWQYFVGKRTVPPGECFIQFLSEPTITFGTAIAAFYMPVTIMTILYWRIYKETEKRTKELAGLQASGTEAETENFVHPTGSSRSCSSYELQQQSMKRSNRRKYGRCHFWFTTKSWKPSSEQMDQDHSSSDSWNNNDAAASLENSASSDEEDIGSETRAIYSIVLKLPGHSTILNSTKLPSSDNLQVPEEELGMVDLERKADKLQAQKSVDDGGSFPKSFSKLPIQLESAVDTAKTSDVNSSVGKSTATLPLSFKEATLAKRFALKTRSQITKRKRMSLVKEKKAAQTLSAILLAFIITWTPYNIMVLVNTFCDSCIPKTFWNLGYWLCYINSTVNPVCYALCNKTFRTTFKMLLLCQCDKKKRRKQQYQQRQSVIFHKRAPEQAL

SEQ ID NO: 39 - DNA, 6644 bp, Homosapiens
atgcattcgattcgcacggtggagattaaagtccccgagatagaggaaacgtttttcgcgcccaggttcagcgaggagccgcgcgggggcagagggggcggcggcggcgggcggggagccaggcccgagctgcgttctgcgcagccattggtgggcgccgcgctctgcactgagcatgttcgcgccccgccggcccctagccgcagccgcagccgcagcgacggcagccacgggagccgccgcgcattatgcaaagcggcggcagatgcgagcggggccagccgggcgcgcgtcggcctcccctcccagcggctccccccgccgccgcctgactctcccgggagactccctaggcccggacctggggccgaggagggccgggatggcctgagtgcccgcggcgcggcggcgcagcagcgggattgcaccatggggaaccaggatgggaagctgaagaggagcgcaggtgatgctttgcacgaaggcggcggtggcgccgaggatgcgctggggcccagggatgtggaagccacaaagaaggggagcgggggcaagaaggcgctaggcaagcacggcaaggggggagggggcggcggcggcggcggggagtcgggcaagaagaagagcaagtccgactccagagcctcggtgttttccaacctgcggatcaggaagaatctgtccaaggggaaaggcgccggcggctcccgcgaagatgtactggattcccaggccctgcagaccggggagctggacagcgctcactccctgctcaccaagactccagacctcagcctctcggcggacgaggccggcctgtcggataccgagtgtgcggacccttttgaggtgaccggtccagggggtcctgggcctgccgaggctagggtcgggggccggccgatcgccgaggatgtggaaactgcagcaggggcgcaggatggacaaaggaccagctcgggctcggacacggacatctatagcttccattcggctacggagcaagaggatttgctttcagacatccagcaggcgatccgcctgcagcagcagcagcagcagcagctccagctccagctccagcaacagcagcagcagcagcagctccagggcgccgaggagcctgcagcgccccccactgccgtctcccctcagcccggggccttcctgggcctggaccggttcctgctggggccgagcggcggggctggggaggccccgggcagtccggacaccgagcaggcgctgtccgcgctctccgacctgcccgagagcctggccgccgagccccgggagccccagcaaccgccgtcccccggcggcctcccggtctccgaggcgcccagtctcccggcagcgcaacccgcggccaaagactcgccctcctccacggctttcccatttcccgaggccgggccgggggaggaagcggccggagcccccgtgcgaggggctggggacacggatgaggagggtgaggaggatgcttttgaggatgcgccccggggctctccgggggaggagtgggccccggaggtgggagaggacgccccgcagaggctgggggaagagccggaggaggaggcgcaaggacctgacgcccccgcggccgcttccctgcccggcagccccgcgcctagccagcgctgtttcaagccctacccgctcatcaccccctgctacatcaagaccaccacccggcagctcagctcgcccaatcactccccgtctcagtcccctaatcagagccccaggatcaagaggcggccggaaccctccctgagccgagggtccagaactgccctggcctccgtagccgccccggccaagaagcaccgggccgacggcggccttgcggccggcctgagccgctcggctgactggacggaggagctaggcgcccgcacgccccgggtgggaggctccgcgcacctgctggagcgcggggtggcgagtgacagcggcggtggggtgtccccagcactggccgccaaggcgtctggggcccccgcggctgcggatggcttccagaacgtgttcacagggcgaacgctgttggagaagctgttcagccagcaggagaacgggcctccagaagaagcagagaagttttgctcccggatcattgccatgggtcttctccttccttttagtgattgcttcagggaaccgtgtaatcagaatgcccagacgaatgcagcttcgtttgatcaagatcaactttatacctgggctgcagttagtcaacccacacactcattggactattcagaagggcagtttcctaggcgagttccatccatggggccaccatccaaacctcccgatgaggaacacaggctcgaggatgctgaaacagaatctcaatctgctgtttcagaaactccccaaaaacgctcagatgctgtccagaaggaagttgttgacatgaagtctgagggacaggccactgtaattcagcagctggaacagactattgaggatctgagaaccaaaatagctgaactagagaggcagtatcctgccctggacacagaggtggccagtggtcatcaagggcttgagaatggagtgacagcctcaggcgatgtctgtctcgaagctctcaggttagaagaaaaggaagtacggcatcataggattttagaggcgaaatcgatacagacttcccccacggaagagggcggggtgctgacactgcctcctgtggatgggctgccagggcgtcctccatgcccccctggggctgaaagtggacctcagacaaagttctgttcagagatttctttgattgtgtctccaaggcgaatatcagtccagctcgacagccatcagcccacacagagcatctcacagcctccaccacctccatcccttctgtggtctgctgggcaaggacagcctgggtcacagccgccccattctatttctaccgagtttcaaaccagccacgaacactctgtttcctctgcctttaaaaacagctgtaacatcccatctccaccacctctgccttgcacagagtcctccagctccatgcctggcctgggcatggtgcctcccccacctccccctctccctggcatgacagtgcctactctgcccagtacagccattccccaacctcctcctctgcagggtacagaaatgctgccaccccctccccctcctcttcccggagcgggcatacctcctccgccgcctctacccggagcaggcatactccctctgccccctctacccggagcgggaatacctcctccgccccctctacccggagcggcaataccccctccgccccctcttcccggggcaggcataccccttcctccccctcttcccggagcaggaatacctcctccaccccctctacccggagcgggcataccccctcctcccccacttcccggagcgggcataccccctccgcccccacttcccggagcgggcataccccctcctccccctcttcccggagcgggcatacctcctccaccccctctacccggagcgggcataccccctccgcccccacttcccggagcgggcataccccctccgcccccacttcccggagcgggcataccccctcctccccctcttcccggagcgggcatacctcctccaccccctctacccggagcgggcataccccctccgcccccacttcccggagcgggcatacccccacctccccctctacccggagcgggcataccccctccgccccctctacccggagtgggcatacctcctccgccccctctacccggagcgggcataccccctcctccccctctacccggagcgggcataccccctcctccccctcttcccggagcgggcatacctcctccaccccctctacccagagtgggcataccccctccgcccccacttcccggagcgggcatacccccacctccccctctacccggagcgggcataccccctccgccccctctacctggagtgggaatacctcctccgccccctctacctggagtgggaatacctcctccgccccctctacctggtgctgggattcccccacctcctcccttgccaggtatggggattccacctgctccagctcccccactccctccacctgggacaggaatcccaccgccccctctgcttcctgtatcaggccctccactcctcccacaagttgggagtagcactttaccaaccccacaggtgtgtggatttcttcctcctccattgccaagtggcttgtttggattagggatgaatcaggacaaagggagtaggaagcagcccatagagccttgtcgaccaatgaagcctctttactggaccaggattcaactacatagtaaaagagactccagtacttcacttatttgggaaaaaattgaagagccatccatagattgtcatgaatttgaggaattattttctaaaactgctgtaaaggagagaaagaaacctatctctgatactatctcaaagacgaaggctaaacaagttgtcaagttattaagcaacaaaagatcacaagcagttggaatactaatgtctagccttcatttagatatgaaagacatacaacatgctgttgtgaacttggataattctgtggttgacctggagacccttcaagctctctatgagaatagagcacagtcagacgaactcgaaaaaatagaaaagcatggccgatcttccaaagacaaggaaaatgccaagtctctggacaaacctgaacagttcctttatgaactgtcactaatccccaacttttcagagcgagtcttttgcatcctgttccagtccacattttcagaaagcatttgctcaattcgtcgcaaactggaattactacagaaattgtgtgagacattaaaaaatggcccaggggttatgcaggttctaggtttggttcttgcctttggcaactacatgaatggaggaaataagactcgaggacaggcagatggctttggattagacattcttccaaaactgaaagatgtcaagagcagtgacaatagcagaagccttttgtcatatattgtttcgtattatctccgaaattttgatgaggatgctggaaaagaacagtgcctctttccactgccagaaccccaggacctttttcaggcctcacagatgaagtttgaagattttcaaaaagatctcagaaaactgaagaaagacttgaaagcctgtgaagttgaagcagggaaagtataccaggtctcctcaaaagagcatatgcagcctttcaaggaaaacatggaacaatttattattcaagccaaaattgaccaagaggcagaggaaaattcactgacagagactcataaatgctttttggagaccacggcatatttcttcatgaaaccaaaacttggagagaaggaggtgtccccaaatgctttcttcagtatctggcatgaattcagctctgactttaaagacttctggaagaaagagaacaaacttcttctacaagagagagtaaaagaagccgaagaggtgtgtagacagaagaaaggaaaatcactttataaaataaaaccaagacatgactctggaattaaagcaaagataagcatgaaaacttgaacaatgaaaagcagaatgaaaatgagtcattgcaacgactttcacaaaattcagctgacctgagagtgggagggaaactaccgtcattctgctcatgtttcttcttgacctcttgcataatctttttgttttctagacagttcactaattgttgaattttactgtatattcatataaaaatgcaaacgtactagaccagtggagaatttgacaccttttctttttgtaaaagtttatggtattataccgatagaccaaaacagcatgtgtaagaggcagtatctgcactaattctcaacatgctaaacattaactacaattcactgttgtgagaatattcctcgtcacagcaaaaacactttcctttctactgacaaccagtcctccacatcacagcatttagacatatgggtaaaatgttatttctagtgaattgtttgtatcagtttcatgtctaagtataaattttctattttaaaatttaagaaccgtttataatcagtgctttcccaactcttgggttgctctccataactatgtatttgtgaaagaaaatggtcattttttttactgaagtcatataatgacttgggtcagctcgtaatgcattgtgatggttttgtatgagctgggtgtttttttccattacttttaatgatcttcgttgcaagttatagttgtggataaaggggagaatttattgctcttgcaaaccaattatggaaagcaacttaagaaaaccaatgttctaaatcataattgtttgtatttatgtaaagtatggtctcttactttttagtttgtagtttaagtgcaaagaaacagtagtggttttttttctattgttttgtagtcttcctgtccccttcagtccctccagtgtgtatattaccattctccaatgaaataatagggcatttaacaaagatcgctatgtgcaatactgtatttagtgtttctatttcaatttttctaggatgttaatttatatgaaaataaaatgaataataaaagaataaagatacttgcaaaagaaaaaaaaaaaa

SEQ ID NO: 40 - protein, 1865 aa, Homosapiens
MHSIRTVEIKVPEIEETFFAPRFSEEPRGGRGGGGGGRGARPELRSAQPLVGAALCTEHVRAPPAPSRSRSRSDGSHGSRRALCKAAADASGASRARVGLPSQRLPPPPPDSPGRLPRPGPGAEEGRDGLSARGAAAQQRDCTMGNQDGKLKRSAGDALHEGGGGAEDALGPRDVEATKKGSGGKKALGKHGKGGGGGGGGGESGKKKSKSDSRASVFSNLRIRKNLSKGKGAGGSREDVLDSQALQTGELDSAHSLLTKTPDLSLSADEAGLSDTECADPFEVTGPGGPGPAEARVGGRPIAEDVETAAGAQDGQRTSSGSDTDIYSFHSATEQEDLLSDIQQAIRLQQQQQQQLQLQLQQQQQQQQLQGAEEPAAPPTAVSPQPGAFLGLDRFLLGPSGGAGEAPGSPDTEQALSALSDLPESLAAEPREPQQPPSPGGLPVSEAPSLPAAQPAAKDSPSSTAFPFPEAGPGEEAAGAPVRGAGDTDEEGEEDAFEDAPRGSPGEEWAPEVGEDAPQRLGEEPEEEAQGPDAPAAASLPGSPAPSQRCFKPYPLITPCYIKTTTRQLSSPNHSPSQSPNQSPRIKRRPEPSLSRGSRTALASVAAPAKKHRADGGLAAGLSRSADWTEELGARTPRVGGSAHLLERGVASDSGGGVSPALAAKASGAPAAADGFQNVFTGRTLLEKLFSQQENGPPEEAEKFCSRIIAMGLLLPFSDCFREPCNQNAQTNAASFDQDQLYTWAAVSQPTHSLDYSEGQFPRRVPSMGPPSKPPDEEHRLEDAETESQSAVSETPQKRSDAVQKEVVDMKSEGQATVIQQLEQTIEDLRTKIAELERQYPALDTEVASGHQGLENGVTASGDVCLEALRLEEKEVRHHRILEAKSIQTSPTEEGGVLTLPPVDGLPGRPPCPPGAESGPQTKFCSEISLIVSPRRISVQLDSHQPTQSISQPPPPPSLLWSAGQGQPGSQPPHSISTEFQTSHEHSVSSAFKNSCNIPSPPPLPCTESSSSMPGLGMVPPPPPPLPGMTVPTLPSTAIPQPPPLQGTEMLPPPPPPLPGAGIPPPPPLPGAGILPLPPLPGAGIPPPPPLPGAAIPPPPPLPGAGIPLPPPLPGAGIPPPPPLPGAGIPPPPPLPGAGIPPPPPLPGAGIPPPPPLPGAGIPPPPPLPGAGIPPPPPLPGAGIPPPPPLPGAGIPPPPPLPGAGIPPPPPLPGAGIPPPPPLPGAGIPPPPPLPGAGIPPPPPLPGVGIPPPPPLPGAGIPPPPPLPGAGIPPPPPLPGAGIPPPPPLPRVGIPPPPPLPGAGIPPPPPLPGAGIPPPPPLPGVGIPPPPPLPGVGIPPPPPLPGAGIPPPPPLPGMGIPPAPAPPLPPPGTGIPPPPLLPVSGPPLLPQVGSSTLPTPQVCGFLPPPLPSGLFGLGMNQDKGSRKQPIEPCRPMKPLYWTRIQLHSKRDSSTSLIWEKIEEPSIDCHEFEELFSKTAVKERKKPISDTISKTKAKQVVKLLSNKRSQAVGILMSSLHLDMKDIQHAVVNLDNSVVDLETLQALYENRAQSDELEKIEKHGRSSKDKENAKSLDKPEQFLYELSLIPNFSERVFCILFQSTFSESICSIRRKLELLQKLCETLKNGPGVMQVLGLVLAFGNYMNGGNKTRGQADGFGLDILPKLKDVKSSDNSRSLLSYIVSYYLRNFDEDAGKEQCLFPLPEPQDLFQASQMKFEDFQKDLRKLKKDLKACEVEAGKVYQVSSKEHMQPFKENMEQFIIQAKIDQEAEENSLTETHKCFLETTAYFFMKPKLGEKEVSPNAFFSIWHEFSSDFKDFWKKENKLLLQERVKEAEEVCRQKKGKSLYKIKPRHDSGIKAKISMKT

SEQ ID NO: 41 - DNA, 2877 bp, Homosapiens
aagggagagcgggcagccttccaggtggacagaaatggactcagaactcaaggaagaaattcctgtgcatgaggaattcattttgtgtggtggagccgaaacccaggttctaaaatgtgggccctggacagacctctttcatgatcaaagtgtcaaaaggcctaagctgcttattttcattattcctggtaacccaggtttttctgccttttatgtgccatttgcaaaggctttatactctttgacaaacagacgctttccagtttggactatcagtcatgctgggcatgcgttggctcccaaagacaagaagattcttacaacatcagaggattcaaacgctcaagaaattaaggacatttatggactaaatggacaaatagagcacaaactagctttcctgagaactcatgtgccaaaggacatgaaacttgtgctcattggccattcaataggcagctatttcacacttcagatgctgaagcgagtccctgagctcccggtaattcgtgcctttctgctctttccaacaattgaacgaatgtctgagtcacccaatggcagaattgccactccacttttgtgctggtttcgatatgttctctatgttactggctacttattattgaaaccgtgtcctgagacaatcaagtccttgctaatcagaaggggccttcaagtaatgaacctagagaatgaattttcaccattgaatatattagaaccattctgccttgctaatgctgcctaccttgggggccaagaaatgatggaggtggtgaagagagatgacgaaaccataaaggagcatttatgtaagcttacattttattatggtactatagatccttggtgtccaaaagagtactatgaagacattaagaaggattttccagaaggagacattcgactctgtgagaaaaacatacctcatgctttcatcacccattttaaccaggaaatggcagacatgattgctgactccctaaaggatgacttgtccaaaatgtaaattggcctgaggaacgagcccccactgccagtacatggaggcagtcagtgtactagacttagtaggtaaatgtttaattttgaagactgatattagaaatgaagaaagtgagaacctttgtcttacaaaccaactctccgctcgccatgttataggctgaagtaaacacagttgatgaatcattccataggtttaaccatacattttccaagactcagggaacacagtgatctacacagagtcttgtgtttgcacaagatgcccagtggcaccatatggtttattttggtaggcaggatctttgcagatgaaaaaaaaatctacatgtacttgattttaattgagttacattgtagaataggctcctctggaggaaattatgaaatacctactagaaaatgtaaaataaatcagtgaatgttaagagtatagttagatatgtgaagtgtatgagattatgacaaggatacactcatgttccaggagcaggaagtgaacctgggtctcctgtaagacagaagatgaagatgagcccaggctaacttagcacagatcttggctgagatcatcaatgtgacgtctaatgtacctgcactagacagagaataaagttcaccagacattactctggtcagctaaccagataaagaattgttgaaggaccccaactgtgcctcctgccacaggacaaccagcaagttctatgctgagccttagcctcccaggttataagctccctgcaggctcctcctctccagagccaggatggagaggcactgggctgtcccaaagcaggcttggatgtgccaacgtacagttgctccttctgtaattcttgcactaaaactccattaaagaccatcaatgagccaaatagtgtgctagccattgaggatggagttcttagctacttaatgattcttttcttctggaaatcttctagtgaataatttttaaaagcttcttttaaactgctcagtaaaacattgccatacattaactctccatttctgcattaacttcatttgctggaaagaaattattttgttaatgaaccaaacccagccattaagttatgtgaattcaccttctatagacacattgaggtatggcagagaagacacatattccctggcctagagtgggctgacaatattgctgcctcccctaaattgactcaatcttgagaaccacatactgcagtgacagttgatcatggatcagaaatattcctttttctcctagaggaaatccctcatggcattatcattccctaaggacaatgagatgtccctccgctcaaatcctaaagccccctgatgaaagatttggctctgatttgctgccaacttattggtaagtgctgaatgagttactgtgctttggcatagcttctacatcacagcaagtgacttctcagaggggaaaagccaagctccagacaaggagtgctgttagcccaaggggaagagctaatagatacataggccgtaagcacagggctgtacacagatcctttattggcatctgcatgagaggcctagaaatcggatgttagaagctaggaatcatggctctgagcgccttgcatacaggagatactcactgatactaaatcaaggcatgtaaacaatactgggtaaatcatacctaccagaataaagagtaacattcagagcttttcttttatctgttattttaaatgttactccatatttcaaaagtctgcacgtatgaaattgtgtcttatttctggtttttagagcctaagaaagatactcattcttaattcctatttatcatctgaaaaccaaatgaacttttgaaataaatgttttaccagcaaaaaaaaaaaaaaaaaaaaa

SEQ ID NO: 42 - protein, 325 aa, Homosapiens
MDSELKEEIPVHEEFILCGGAETQVLKCGPWTDLFHDQSVKRPKLLIFIIPGNPGFSAFYVPFAKALYSLTNRRFPVWTISHAGHALAPKDKKILTTSEDSNAQEIKDIYGLNGQIEHKLAFLRTHVPKDMKLVLIGHSIGSYFTLQMLKRVPELPVIRAFLLFPTIERMSESPNGRIATPLLCWFRYVLYVTGYLLLKPCPETIKSLLIRRGLQVMNLENEFSPLNILEPFCLANAAYLGGQEMMEVVKRDDETIKEHLCKLTFYYGTIDPWCPKEYYEDIKKDFPEGDIRLCEKNIPHAFITHFNQEMADMIADSLKDDLSKM

SEQ ID NO: 43 - DNA, 8192 bp, Homosapiens
attcccaccgggacctgcggggctgagtgcccttctcggttgctgccgctgaggagcccgcccagccagccagggccgcgaggccgaggccaggccgcagcccaggagccgccccaccgcagctggcgatggacccgccgaggcccgcgctgctggcgctgctggcgctgcctgcgctgctgctgctgctgctggcgggcgccagggccgaagaggaaatgctggaaaatgtcagcctggtctgtccaaaagatgcgacccgattcaagcacctccggaagtacacatacaactatgaggctgagagttccagtggagtccctgggactgctgattcaagaagtgccaccaggatcaactgcaaggttgagctggaggttccccagctctgcagcttcatcctgaagaccagccagtgcaccctgaaagaggtgtatggcttcaaccctgagggcaaagccttgctgaagaaaaccaagaactctgaggagtttgctgcagccatgtccaggtatgagctcaagctggccattccagaagggaagcaggttttcctttacccggagaaagatgaacctacttacatcctgaacatcaagaggggcatcatttctgccctcctggttcccccagagacagaagaagccaagcaagtgttgtttctggataccgtgtatggaaactgctccactcactttaccgtcaagacgaggaagggcaatgtggcaacagaaatatccactgaaagagacctggggcagtgtgatcgcttcaagcccatccgcacaggcatcagcccacttgctctcatcaaaggcatgacccgccccttgtcaactctgatcagcagcagccagtcctgtcagtacacactggacgctaagaggaagcatgtggcagaagccatctgcaaggagcaacacctcttcctgcctttctcctacaacaataagtatgggatggtagcacaagtgacacagactttgaaacttgaagacacaccaaagatcaacagccgcttctttggtgaaggtactaagaagatgggcctcgcatttgagagcaccaaatccacatcacctccaaagcaggccgaagctgttttgaagactctccaggaactgaaaaaactaaccatctctgagcaaaatatccagagagctaatctcttcaataagctggttactgagctgagaggcctcagtgatgaagcagtcacatctctcttgccacagctgattgaggtgtccagccccatcactttacaagccttggttcagtgtggacagcctcagtgctccactcacatcctccagtggctgaaacgtgtgcatgccaacccccttctgatagatgtggtcacctacctggtggccctgatccccgagccctcagcacagcagctgcgagagatcttcaacatggcgagggatcagcgcagccgagccaccttgtatgcgctgagccacgcggtcaacaactatcataagacaaaccctacagggacccaggagctgctggacattgctaattacctgatggaacagattcaagatgactgcactggggatgaagattacacctatttgattctgcgggtcattggaaatatgggccaaaccatggagcagttaactccagaactcaagtcttcaatcctcaaatgtgtccaaagtacaaagccatcactgatgatccagaaagctgccatccaggctctgcggaaaatggagcctaaagacaaggaccaggaggttcttcttcagactttccttgatgatgcttctccgggagataagcgactggctgcctatcttatgttgatgaggagtccttcacaggcagatattaacaaaattgtccaaattctaccatgggaacagaatgagcaagtgaagaactttgtggcttcccatattgccaatatcttgaactcagaagaattggatatccaagatctgaaaaagttagtgaaagaagctctgaaagaatctcaacttccaactgtcatggacttcagaaaattctctcggaactatcaactctacaaatctgtttctcttccatcacttgacccagcctcagccaaaatagaagggaatcttatatttgatccaaataactaccttcctaaagaaagcatgctgaaaactaccctcactgcctttggatttgcttcagctgacctcatcgagattggcttggaaggaaaaggctttgagccaacattggaagctctttttgggaagcaaggatttttcccagacagtgtcaacaaagctttgtactgggttaatggtcaagttcctgatggtgtctctaaggtcttagtggaccactttggctataccaaagatgataaacatgagcaggatatggtaaatggaataatgctcagtgttgagaagctgattaaagatttgaaatccaaagaagtcccggaagccagagcctacctccgcatcttgggagaggagcttggttttgccagtctccatgacctccagctcctgggaaagctgcttctgatgggtgcccgcactctgcaggggatcccccagatgattggagaggtcatcaggaagggctcaaagaatgacttttttcttcactacatcttcatggagaatgcctttgaactccccactggagctggattacagttgcaaatatcttcatctggagtcattgctcccggagccaaggctggagtaaaactggaagtagccaacatgcaggctgaactggtggcaaaaccctccgtgtctgtggagtttgtgacaaatatgggcatcatcattccggacttcgctaggagtggggtccagatgaacaccaacttcttccacgagtcgggtctggaggctcatgttgccctaaaagctgggaagctgaagtttatcattccttccccaaagagaccagtcaagctgctcagtggaggcaacacattacatttggtctctaccaccaaaacggaggtgatcccacctctcattgagaacaggcagtcctggtcagtttgcaagcaagtctttcctggcctgaattactgcacctcaggcgcttactccaacgccagctccacagactccgcctcctactatccgctgaccggggacaccagattagagctggaactgaggcctacaggagagattgagcagtattctgtcagcgcaacctatgagctccagagagaggacagagccttggtggataccctgaagtttgtaactcaagcagaaggtgcgaagcagactgaggctaccatgacattcaaatataatcggcagagtatgaccttgtccagtgaagtccaaattccggattttgatgttgacctcggaacaatcctcagagttaatgatgaatctactgagggcaaaacgtcttacagactcaccctggacattcagaacaagaaaattactgaggtcgccctcatgggccacctaagttgtgacacaaaggaagaaagaaaaatcaagggtgttatttccataccccgtttgcaagcagaagccagaagtgagatcctcgcccactggtcgcctgccaaactgcttctccaaatggactcatctgctacagcttatggctccacagtttccaagagggtggcatggcattatgatgaagagaagattgaatttgaatggaacacaggcaccaatgtagataccaaaaaaatgacttccaatttccctgtggatctctccgattatcctaagagcttgcatatgtatgctaatagactcctggatcacagagtccctgaaacagacatgactttccggcacgtgggttccaaattaatagttgcaatgagctcatggcttcagaaggcatctgggagtcttccttatacccagactttgcaagaccacctcaatagcctgaaggagttcaacctccagaacatgggattgccagacttccacatcccagaaaacctcttcttaaaaagcgatggccgggtcaaatataccttgaacaagaacagtttgaaaattgagattcctttgccttttggtggcaaatcctccagagatctaaagatgttagagactgttaggacaccagccctccacttcaagtctgtgggattccatctgccatctcgagagttccaagtccctacttttaccattcccaagttgtatcaactgcaagtgcctctcctgggtgttctagacctctccacgaatgtctacagcaacttgtacaactggtccgcctcctacagtggtggcaacaccagcacagaccatttcagccttcgggctcgttaccacatgaaggctgactctgtggttgacctgctttcctacaatgtgcaaggatctggagaaacaacatatgaccacaagaatacgttcacactatcatgtgatgggtctctacgccacaaatttctagattcgaatatcaaattcagtcatgtagaaaaacttggaaacaacccagtctcaaaaggtttactaatattcgatgcatctagttcctggggaccacagatgtctgcttcagttcatttggactccaaaaagaaacagcatttgtttgtcaaagaagtcaagattgatgggcagttcagagtctcttcgttctatgctaaaggcacatatggcctgtcttgtcagagggatcctaacactggccggctcaatggagagtccaacctgaggtttaactcctcctacctccaaggcaccaaccagataacaggaagatatgaagatggaaccctctccctcacctccacctctgatctgcaaagtggcatcattaaaaatactgcttccctaaagtatgagaactacgagctgactttaaaatctgacaccaatgggaagtataagaactttgccacttctaacaagatggatatgaccttctctaagcaaaatgcactgctgcgttctgaatatcaggctgattacgagtcattgaggttcttcagcctgctttctggatcactaaattcccatggtcttgagttaaatgctgacatcttaggcactgacaaaattaatagtggtgctcacaaggcgacactaaggattggccaagatggaatatctaccagtgcaacgaccaacttgaagtgtagtctcctggtgctggagaatgagctgaatgcagagcttggcctctctggggcatctatgaaattaacaacaaatggccgcttcagggaacacaatgcaaaattcagtctggatgggaaagccgccctcacagagctatcactgggaagtgcttatcaggccatgattctgggtgtcgacagcaaaaacattttcaacttcaaggtcagtcaagaaggacttaagctctcaaatgacatgatgggctcatatgctgaaatgaaatttgaccacacaaacagtctgaacattgcaggcttatcactggacttctcttcaaaacttgacaacatttacagctctgacaagttttataagcaaactgttaatttacagctacagccctattctctggtaactactttaaacagtgacctgaaatacaatgctctggatctcaccaacaatgggaaactacggctagaacccctgaagctgcatgtggctggtaacctaaaaggagcctaccaaaataatgaaataaaacacatctatgccatctcttctgctgccttatcagcaagctataaagcagacactgttgctaaggttcagggtgtggagtttagccatcggctcaacacagacatcgctgggctggcttcagccattgacatgagcacaaactataattcagactcactgcatttcagcaatgtcttccgttctgtaatggccccgtttaccatgaccatcgatgcacatacaaatggcaatgggaaactcgctctctggggagaacatactgggcagctgtatagcaaattcctgttgaaagcagaacctctggcatttactttctctcatgattacaaaggctccacaagtcatcatctcgtgtctaggaaaagcatcagtgcagctcttgaacacaaagtcagtgccctgcttactccagctgagcagacaggcacctggaaactcaagacccaatttaacaacaatgaatacagccaggacttggatgcttacaacactaaagataaaattggcgtggagcttactggacgaactctggctgacctaactctactagactccccaattaaagtgccacttttactcagtgagcccatcaatatcattgatgctttagagatgagagatgccgttgagaagccccaagaatttacaattgttgcttttgtaaagtatgataaaaaccaagatgttcactccattaacctcccattttttgagaccttgcaagaatattttgagaggaatcgacaaaccattatagttgtagtggaaaacgtacagagaaacctgaagcacatcaatattgatcaatttgtaagaaaatacagagcagccctgggaaaactcccacagcaagctaatgattatctgaattcattcaattgggagagacaagtttcacatgccaaggagaaactgactgctctcacaaaaaagtatagaattacagaaaatgatatacaaattgcattagatgatgccaaaatcaactttaatgaaaaactatctcaactgcagacatatatgatacaatttgatcagtatattaaagatagttatgatttacatgatttgaaaatagctattgctaatattattgatgaaatcattgaaaaattaaaaagtcttgatgagcactatcatatccgtgtaaatttagtaaaaacaatccatgatctacatttgtttattgaaaatattgattttaacaaaagtggaagtagtactgcatcctggattcaaaatgtggatactaagtaccaaatcagaatccagatacaagaaaaactgcagcagcttaagagacacatacagaatatagacatccagcacctagctggaaagttaaaacaacacattgaggctattgatgttagagtgcttttagatcaattgggaactacaatttcatttgaaagaataaatgatgttcttgagcatgtcaaacactttgttataaatcttattggggattttgaagtagctgagaaaatcaatgccttcagagccaaagtccatgagttaatcgagaggtatgaagtagaccaacaaatccaggttttaatggataaattagtagagttgacccaccaatacaagttgaaggagactattcagaagctaagcaatgtcctacaacaagttaagataaaagattactttgagaaattggttggatttattgatgatgctgtgaagaagcttaatgaattatcttttaaaacattcattgaagatgttaacaaattccttgacatgttgataaagaaattaaagtcatttgattaccaccagtttgtagatgaaaccaatgacaaaatccgtgaggtgactcagagactcaatggtgaaattcaggctctggaactaccacaaaaagctgaagcattaaaactgtttttagaggaaaccaaggccacagttgcagtgtatctggaaagcctacaggacaccaaaataaccttaatcatcaattggttacaggaggctttaagttcagcatctttggctcacatgaaggccaaattccgagagactctagaagatacacgagaccgaatgtatcaaatggacattcagcaggaacttcaacgatacctgtctctggtaggccaggtttatagcacacttgtcacctacatttctgattggtggactcttgctgctaagaaccttactgactttgcagagcaatattctatccaagattgggctaaacgtatgaaagcattggtagagcaagggttcactgttcctgaaatcaagaccatccttgggaccatgcctgcctttgaagtcagtcttcaggctcttcagaaagctaccttccagacacctgattttatagtccccctaacagatttgaggattccatcagttcagataaacttcaaagacttaaaaaatataaaaatcccatccaggttttccacaccagaatttaccatccttaacaccttccacattccttcctttacaattgactttgtcgaaatgaaagtaaagatcatcagaaccattgaccagatgcagaacagtgagctgcagtggcccgtt

SEQ ID NO: 44 - protein, 4563 aa, Homosapiens
MDPPRPALLALLALPALLLLLLAGARAEEEMLENVSLVCPKDATRFKHLRKYTYNYEAESSSGVPGTADSRSATRINCKVELEVPQLCSFILKTSQCTLKEVYGFNPEGKALLKKTKNSEEFAAAMSRYELKLAIPEGKQVFLYPEKDEPTYILNIKRGIISALLVPPETEEAKQVLFLDTVYGNCSTHFTVKTRKGNVATEISTERDLGQCDRFKPIRTGISPLALIKGMTRPLSTLISSSQSCQYTLDAKRKHVAEAICKEQHLFLPFSYNNKYGMVAQVTQTLKLEDTPKINSRFFGEGTKKMGLAFESTKSTSPPKQAEAVLKTLQELKKLTISEQNIQRANLFNKLVTELRGLSDEAVTSLLPQLIEVSSPITLQALVQCGQPQCSTHILQWLKRVHANPLLIDVVTYLVALIPEPSAQQLREIFNMARDQRSRATLYALSHAVNNYHKTNPTGTQELLDIANYLMEQIQDDCTGDEDYTYLILRVIGNMGQTMEQLTPELKSSILKCVQSTKPSLMIQKAAIQALRKMEPKDKDQEVLLQTFLDDASPGDKRLAAYLMLMRSPSQADINKIVQILPWEQNEQVKNFVASHIANILNSEELDIQDLKKLVKEALKESQLPTVMDFRKFSRNYQLYKSVSLPSLDPASAKIEGNLIFDPNNYLPKESMLKTTLTAFGFASADLIEIGLEGKGFEPTLEALFGKQGFFPDSVNKALYWVNGQVPDGVSKVLVDHFGYTKDDKHEQDMVNGIMLSVEKLIKDLKSKEVPEARAYLRILGEELGFASLHDLQLLGKLLLMGARTLQGIPQMIGEVIRKGSKNDFFLHYIFMENAFELPTGAGLQLQISSSGVIAPGAKAGVKLEVANMQAELVAKPSVSVEFVTNMGIIIPDFARSGVQMNTNFFHESGLEAHVALKAGKLKFIIPSPKRPVKLLSGGNTLHLVSTTKTEVIPPLIENRQSWSVCKQVFPGLNYCTSGAYSNASSTDSASYYPLTGDTRLELELRPTGEIEQYSVSATYELQREDRALVDTLKFVTQAEGAKQTEATMTFKYNRQSMTLSSEVQIPDFDVDLGTILRVNDESTEGKTSYRLTLDIQNKKITEVALMGHLSCDTKEERKIKGVISIPRLQAEARSEILAHWSPAKLLLQMDSSATAYGSTVSKRVAWHYDEEKIEFEWNTGTNVDTKKMTSNFPVDLSDYPKSLHMYANRLLDHRVPETDMTFRHVGSKLIVAMSSWLQKASGSLPYTQTLQDHLNSLKEFNLQNMGLPDFHIPENLFLKSDGRVKYTLNKNSLKIEIPLPFGGKSSRDLKMLETVRTPALHFKSVGFHLPSREFQVPTFTIPKLYQLQVPLLGVLDLSTNVYSNLYNWSASYSGGNTSTDHFSLRARYHMKADSVVDLLSYNVQGSGETTYDHKNTFTLSCDGSLRHKFLDSNIKFSHVEKLGNNPVSKGLLIFDASSSWGPQMSASVHLDSKKKQHLFVKEVKIDGQFRVSSFYAKGTYGLSCQRDPNTGRLNGESNLRFNSSYLQGTNQITGRYEDGTLSLTSTSDLQSGIIKNTASLKYENYELTLKSDTNGKYKNFATSNKMDMTFSKQNALLRSEYQADYESLRFFSLLSGSLNSHGLELNADILGTDKINSGAHKATLRIGQDGISTSATTNLKCSLLVLENELNAELGLSGASMKLTTNGRFREHNAKFSLDGKAALTELSLGSAYQAMILGVDSKNIFNFKVSQEGLKLSNDMMGSYAEMKFDHTNSLNIAGLSLDFSSKLDNIYSSDKFYKQTVNLQLQPYSLVTTLNSDLKYNALDLTNNGKLRLEPLKLHVAGNLKGAYQNNEIKHIYAISSAALSASYKADTVAKVQGVEFSHRLNTDIAGLASAIDMSTNYNSDSLHFSNVFRSVMAPFTMTIDAHTNGNGKLALWGEHTGQLYSKFLLKAEPLAFTFSHDYKGSTSHHLVSRKSISAALEHKVSALLTPAEQTGTWKLKTQFNNNEYSQDLDAYNTKDKIGVELTGRTLADLTLLDSPIKVPLLLSEPINIIDALEMRDAVEKPQEFTIVAFVKYDKNQDVHSINLPFFETLQEYFERNRQTIIVVVENVQRNLKHINIDQFVRKYRAALGKLPQQANDYLNSFNWERQVSHAKEKLTALTKKYRITENDIQIALDDAKINFNEKLSQLQTYMIQFDQYIKDSYDLHDLKIAIANIIDEIIEKLKSLDEHYHIRVNLVKTIHDLHLFIENIDFNKSGSSTASWIQNVDTKYQIRIQIQEKLQQLKRHIQNIDIQHLAGKLKQHIEAIDVRVLLDQLGTTISFERINDVLEHVKHFVINLIGDFEVAEKINAFRAKVHELIERYEVDQQIQVLMDKLVELTHQYKLKETIQKLSNVLQQVKIKDYFEKLVGFIDDAVKKLNELSFKTFIEDVNKFLDMLIKKLKSFDYHQFVDETNDKIREVTQRLNGEIQALELPQKAEALKLFLEETKATVAVYLESLQDTKITLIINWLQEALSSASLAHMKAKFRETLEDTRDRMYQMDIQQELQRYLSLVGQVYSTLVTYISDWWTLAAKNLTDFAEQYSIQDWAKRMKALVEQGFTVPEIKTILGTMPAFEVSLQALQKATFQTPDFIVPLTDLRIPSVQINFKDLKNIKIPSRFSTPEFTILNTFHIPSFTIDFVEMKVKIIRTIDQMQNSELQWPVPDIYLRDLKVEDIPLARITLPDFRLPEIAIPEFIIPTLNLNDFQVPDLHIPEFQLPHISHTIEVPTFGKLYSILKIQSPLFTLDANADIGNGTTSANEAGIAASITAKGESKLEVLNFDFQANAQLSNPKINPLALKESVKFSSKYLRTEHGSEMLFFGNAIEGKSNTVASLHTEKNTLELSNGVIVKINNQLTLDSNTKYFHKLNIPKLDFSSQADLRNEIKTLLKAGHIAWTSSGKGSWKWACPRFSDEGTHESQISFTIEGPLTSFGLSNKINSKHLRVNQNLVYESGSLNFSKLEIQSQVDSQHVGHSVLTAKGMALFGEGKAEFTGRHDAHLNGKVIGTLKNSLFFSAQPFEITASTNNEGNLKVRFPLRLTGKIDFLNNYALFLSPSAQQASWQVSARFNQYKYNQNFSAGNNENIMEAHVGINGEANLDFLNIPLTIPEMRLPYTIITTPPLKDFSLWEKTGLKEFLKTTKQSFDLSVKAQYKKNKHRHSITNPLAVLCEFISQSIKSFDRHFEKNRNNALDFVTKSYNETKIKFDKYKAEKSHDELPRTFQIPGYTVPVVNVEVSPFTIEMSAFGYVFPKAVSMPSFSILGSDVRVPSYTLILPSLELPVLHVPRNLKLSLPHFKELCTISHIFIPAMGNITYDFSFKSSVITLNTNAELFNQSDIVAHLLSSSSSVIDALQYKLEGTTRLTRKRGLKLATALSLSNKFVEGSHNSTVSLTTKNMEVSVAKTTKAEIPILRMNFKQELNGNTKSKPTVSSSMEFKYDFNSSMLYSTAKGAVDHKLSLESLTSYFSIESSTKGDVKGSVLSREYSGTIASEANTYLNSKSTRSSVKLQGTSKIDDIWNLEVKENFAGEATLQRIYSLWEHSTKNHLQLEGLFFTNGEHTSKATLELSPWQMSALVQVHASQPSSFHDFPDLGQEVALNANTKNQKIRWKNEVRIHSGSFQSQVELSNDQEKAHLDIAGSLEGHLRFLKNIILPVYDKSLWDFLKLDVTTSIGRRQHLRVSTAFVYTKNPNGYSFSIPVKVLADKFITPGLKLNDLNSVLVMPTFHVPFTDLQVPSCKLDFREIQIYKKLRTSSFALNLPTLPEVKFPEVDVLTKYSQPEDSLIPFFEITVPESQLTVSQFTLPKSVSDGIAALDLNAVANKIADFELPTIIVPEQTIEIPSIKFSVPAGIVIPSFQALTARFEVDSPVYNATWSASLKNKADYVETVLDSTCSSTVQFLEYELNVLGTHKIEDGTLASKTKGTLAHRDFSAEYEEDGKFEGLQEWEGKAHLNIKSPAFTDLHLRYQKDKKGISTSAASPAVGTVGMDMDEDDDFSKWNFYYSPQSSPDKKLTIFKTELRVRESDEETQIKVNWEEEAASGLLTSLKDNVPKATGVLYDYVNKYHWEHTGLTLREVSSKLRRNLQNNAEWVYQGAIRQIDDIDVRFQKAASGTTGTYQEWKDKAQNLYQELLTQEGQASFQGLKDNVFDGLVRVTQKFHMKVKHLIDSLIDFLNFPRFQFPGKPGIYTREELCTMFIREVGTVLSQVYSKVHNGSEILFSYFQDLVITLPFELRKHKLIDVISMYRELLKDLSKEAQEVFKAIQSLKTTEVLRNLQDLLQFIFQLIEDNIKQLKEMKFTYLINYIQDEINTIFNDYIPYVFKLLKENLCLNLHKFNEFIQNELQEASQELQQIHQYIMALREEYFDPSIVGWTVKYYELEEKIVSLIKNLLVALKDFHSEYIVSASNFTSQLSSQVEQFLHRNIQEYLSILTDPDGKGKEKIAELSATAQEIIKSQAIATKKIISDYHQQFRYKLQDFSDQLSDYYEKFIAESKRLIDLSIQNYHTFLIYITELLKKLQSTTVMNPYMKLAPGELTIIL

SEQ ID NO: 45 - DNA, 6202 bp, Homosapiens
agggagagagggcggggttattggaagaagaaaaagaaaaaaagaactagataaaggagggcacatccctctcactcccgcctttccccttacctttctgtctctcgggacccttatttcttcgtcacggtgtccaggaccattttgaccctgtcggccccggcacccccccgccgcaccccagccccgagcatggggacggcgctgctccagcgcgggggctgttttcttctgtgcctctcgctgctgctcctgggctgctgggcggagctgggcagcgggctggagtttccgggcgccgagggccaatggacgcgcttccccaagtggaacgcctgctgcgagagcgagatgagcttccagctcaagactcgcagcgcccgcggcctcgtgctctacttcgacgacgagggcttctgcgacttcctggagctgattctgacgcgcggcggccgcctgcagctcagcttctccatcttctgcgctgagcctgcgacgctcctggccgacacgccggttaacgacggcgcctggcacagcgtgcgcatccgccgccagttccgcaacaccacgctcttcatcgaccaggtggaggccaagtgggtggaggtcaagtccaagcgcagggacatgacggtgttcagcggccttttcgtcggggggctgcccccggaactgcgcgccgcggcgctcaagctcaccctggcctcggtgagggagcgggagcccttcaaggggtggattcgtgacgtgagggtcaactcctcgcaggtcctgcccgtggacagcggcgaggtgaagctggacgatgagccgcccaacagcggcgggggaagcccgtgcgaggcgggcgaggagggcgagggcggggtgtgcctcaacggaggtgtgtgctccgtggtggacgaccaggccgtgtgcgactgctcgcgaaccggcttccgcggcaaggactgcagccaagaagacaacaatgtggaaggtctggcgcacctgatgatgggcgaccaaggtaaaagtaaaggaaaagaagaatatattgccacgttcaaaggatctgaatacttctgctacgacttgtctcaaaaccccattcaaagcagcagtgatgaaataactctgtcatttaaaacccttcagaggaatggactgatgcttcacactgggaaatcggctgattatgtcaatcttgccctgaaaaatggagctgtctctctggtcattaatttgggatcaggggcctttgaagcactagtggagcctgtgaatggaaagtttaatgataatgcctggcatgatgtgaaagtcaccaggaatctgcgtcagcactcaggcattggacacgctatggtgacaatatcagtggatgggattcttaccacaacgggctacacgcaagaagattataccatgctggggtctgatgactttttctatgttggaggcagtcccagcacagccgaccttccagggtcaccagtcagtaacaactttatgggctgtctcaaagaggttgtatataaaaataatgatgtgaggctggaattatctcgacttgccaagcaaggagatcctaagatgaagatccatggagtggtggcatttaaatgtgagaatgttgcaactttagacccaatcacctttgaaaccccagagtctttcatctctttgcctaaatggaatgcaaagaaaactggctccatatcatttgatttccgtacaacagagccaaatggcctcatcttatttagccatggcaagccaagacatcagaaagatgccaagcacccacagatgataaaggtggacttctttgctattgagatgctagatggccacctctacctcctcctggacatggggtcaggtactataaaaataaaagccctgttgaagaaagtgaatgatggagaatggtatcatgtggacttccagagagacggacggtcaggtaccatttctgtcaacacgttgcgtactccctacactgctcctggtgagagtgagattctggacctggatgatgagttgtacctgggggggctgccagaaaataaagctggccttgtcttccccaccgaggtgtggactgctctgctcaactatggctacgtgggctgcatcagggatttgttcatcgatggccaaagcaaagatatccggcaaatggctgaagttcaaagtactgctggagtgaagccttcctgctcaaaggaaacagcaaaaccgtgccttagcaacccttgcaaaaacaatggcatgtgcagggatgggtggaacagatatgtctgtgattgttccggaacaggctatcttggcaggtcctgtgagagagaggcaacggttttgagctatgatgggagcatgtttatgaaaattcagctccccgtagtcatgcatacggaggctgaggatgtttccttacggttccgatcccagcgtgcatatggcattctgatggcaaccacttctagagactctgctgacaccctccgcctggagctagacgcaggacgtgtgaaactgacggtcaatctagattgtatcaggattaactgtaattccagcaaaggtcccgagactctttttgctggctataacctcaatgataacgagtggcacacagtgcgtgtagttcggcgtggaaaaagtttaaagttaacagtggatgaccaacaggccatgacaggtcaaatggcaggtgatcatactaggctggagttccataacatagagactggcatcatcacagaacgacggtatctttcttctgtcccctccaacttcattggacacctgcagagcttgacatttaatggaatggcatacattgacctgtgtaaaaatggcgacatagattactgtgagcttaatgccagatttggcttcaggaacatcatagcagatcctgtcaccttcaagaccaaatcgagctatgttgccttagctaccttgcaagcctacacttctatgcatctttttttccagttcaagacaacatccctagatggattaattctatataacagtggggatggaaatgactttattgtggttgaattagttaaagggtacttacattacgtgtttgatttgggaaatggtgctaacctcatcaaaggaagctcaaataaacctctcaatgacaatcagtggcacaacgtgatgatatcaagggacaccagcaacctccacactgtaaagattgacacaaaaatcacaacgcaaatcaccgccggagccaggaacttagacctcaagagtgacttatatataggaggagtagctaaagaaacatacaaatccttaccaaaacttgtacatgccaaagaaggctttcaaggctgcctggcatcagttgatttaaatggacggcttccggacctcatctccgatgctcttttctgcaacggacagatcgagagaggatgtgaagggcccagcacaacctgccaagaggactcatgttccaatcaaggtgtgtgcttgcaacaatgggatggcttcagctgtgactgtagtatgacttccttcagtggaccactctgcaatgaccctgggacgacatatatctttagcaaaggtggtggacaaatcacgtataagtggcctcctaatgaccgacccagtacgcgagcagacagactggccataggttttagcactgttcagaaagaagctgtattggtgcgagtggacagttcttcaggcttgggtgactacctagaactgcatatacaccagggaaaaattggagttaagtttaatgttgggacagatgacatcgccattgaagaatccaatgcaatcattaatgatgggaaataccatgtagttcgtttcacgaggagtggtggcaatgccacgttgcaggtggacagctggccagtgatcgagcgctaccctgcagggcgtcagctcacaatcttcaatagccaagcaaccataataattggcgggaaagagcagggccagcccttccagggccagctctctgggctgtactacaatggcttgaaagttctgaatatggcagccgaaaacgatgccaacatcgccatagtgggaaatgtgagactggttggtgaagtgccttcctctatgacaactgagtcaacagccactgccatgcaatcagagatgtccacatcaattatggagactaccacgaccctggctactagcacagccagaagaggaaagcccccgacaaaagaacccattagccagaccacagatgacatccttgtggcctcagcagagtgtcccagcgatgatgaggacattgacccctgtgagccgagctcaggtgggttagccaacccaacccgagcaggcggcagagagccgtatccaggctcagcagaagtgatccgggagtccagcagcaccacgggtatggtcgttgggatagtagccgctgccgccctgtgcatccttatcctcctctatgccatgtacaagtacagaaaccgggatgaaggctcataccatgtggacgagagtcgaaactacatcagtaactcagcacagtccaatggggctgttgtaaaggagaaacaacccagcagtgcgaaaagctccaacaaaaataagaaaaacaaggataaagagtattatgtctgatcccaagatcttaaatggacacttgtatagaaatagtcttcattttatctgagacataatataaacttatttactttcctttttatgaagcacatacaaaagaagacagagaatgcaatcaggaaggaaagactttttaaaaaataaaaacaagtatctcatgctcttgtttctcaaaaaagaaaaacaaaaaacaaaaaacaggggccaataaattccctaacatccacagtgttttcatttactctgcttgtctttatgttgctggaacatttctaaaagacagtgatgaccgcacgcattcataaagcaaaggagtactacagcatcaaggcacaacacaaaaaccaacacaaaacataacacaaaaaagaagctacctatgatcctggatttagccaaagtgctagcgctttcctgagaagtcagtccaattgccagagaagactgtccttttgagtgactcaacctgcaaacctttaagagtttgccgcctggtgcaactggagcagtggttggaacttgcatttgaaacaaagtgctggcttttttgaagacttgtgtaggaacacattcaaaaagcccctttctggttgtgagagaggaaaaaaaagtatggaggccttattttcaaaaatgtgaaatataaggcacgttttcacacaaaatttcaaaacaaaaacaagagggcatagatgcaatcattgggaaattttcatgcacgcttattatgttattacatatgtttatataaaatccatctctgtgtgctttctggactgtgataagtgacgttttatagcctgttgtatagaaaatgcaaaatatatctctgctcttcagccatttttggtaaattcaatgttataagtgttgctaagtatagggagttttatgacatcagagcaacaattatttcagttgggtttttctttttttttgccaccattataaattgccacaattacttttattttttaaagaaattacagtgtagtgtttattctaaggaagatatgtatgaatgtatatacaaagactcagctacttcttttcttatatgtacagccttcattctgttgcaattaagttttagtacttgtatgaaaggtgtgaattagaaagtcacatatatacatatgtatcttataatcttttctccctgaaatactcacattcccacatacattcactattttcacacacacacacacacacacacacacacgaatccacagcaatccatcagatatgctggaagatccaaacgtgcatacagtagcaaatatttattgacaaattgaaaagcaggaaggaagagggttgtgccaaggtattgatgacaaatggggtgatttgcttcattgagatcttgctcccaggtaaccttaagaagattttagtccctaaagaaatgaacctttccttatcaaatagaatatcactgatatactgctgcatgaataagaaccattatgtgggcaggttatggaagcaaaattggttaatctacaccttaactctggctgctgcaattgaaaactttctttctaataaaataatatatatatctctg

SEQ ID NO: 46 - protein, 1477 aa, Homosapiens
MGTALLQRGGCFLLCLSLLLLGCWAELGSGLEFPGAEGQWTRFPKWNACCESEMSFQLKTRSARGLVLYFDDEGFCDFLELILTRGGRLQLSFSIFCAEPATLLADTPVNDGAWHSVRIRRQFRNTTLFIDQVEAKWVEVKSKRRDMTVFSGLFVGGLPPELRAAALKLTLASVREREPFKGWIRDVRVNSSQVLPVDSGEVKLDDEPPNSGGGSPCEAGEEGEGGVCLNGGVCSVVDDQAVCDCSRTGFRGKDCSQEDNNVEGLAHLMMGDQGKSKGKEEYIATFKGSEYFCYDLSQNPIQSSSDEITLSFKTLQRNGLMLHTGKSADYVNLALKNGAVSLVINLGSGAFEALVEPVNGKFNDNAWHDVKVTRNLRQHSGIGHAMVTISVDGILTTTGYTQEDYTMLGSDDFFYVGGSPSTADLPGSPVSNNFMGCLKEVVYKNNDVRLELSRLAKQGDPKMKIHGVVAFKCENVATLDPITFETPESFISLPKWNAKKTGSISFDFRTTEPNGLILFSHGKPRHQKDAKHPQMIKVDFFAIEMLDGHLYLLLDMGSGTIKIKALLKKVNDGEWYHVDFQRDGRSGTISVNTLRTPYTAPGESEILDLDDELYLGGLPENKAGLVFPTEVWTALLNYGYVGCIRDLFIDGQSKDIRQMAEVQSTAGVKPSCSKETAKPCLSNPCKNNGMCRDGWNRYVCDCSGTGYLGRSCEREATVLSYDGSMFMKIQLPVVMHTEAEDVSLRFRSQRAYGILMATTSRDSADTLRLELDAGRVKLTVNLDCIRINCNSSKGPETLFAGYNLNDNEWHTVRVVRRGKSLKLTVDDQQAMTGQMAGDHTRLEFHNIETGIITERRYLSSVPSNFIGHLQSLTFNGMAYIDLCKNGDIDYCELNARFGFRNIIADPVTFKTKSSYVALATLQAYTSMHLFFQFKTTSLDGLILYNSGDGNDFIVVELVKGYLHYVFDLGNGANLIKGSSNKPLNDNQWHNVMISRDTSNLHTVKIDTKITTQITAGARNLDLKSDLYIGGVAKETYKSLPKLVHAKEGFQGCLASVDLNGRLPDLISDALFCNGQIERGCEGPSTTCQEDSCSNQGVCLQQWDGFSCDCSMTSFSGPLCNDPGTTYIFSKGGGQITYKWPPNDRPSTRADRLAIGFSTVQKEAVLVRVDSSSGLGDYLELHIHQGKIGVKFNVGTDDIAIEESNAIINDGKYHVVRFTRSGGNATLQVDSWPVIERYPAGRQLTIFNSQATIIIGGKEQGQPFQGQLSGLYYNGLKVLNMAAENDANIAIVGNVRLVGEVPSSMTTESTATAMQSEMSTSIMETTTTLATSTARRGKPPTKEPISQTTDDILVASAECPSDDEDIDPCEPSSGGLANPTRAGGREPYPGSAEVIRESSSTTGMVVGIVAAAALCILILLYAMYKYRNRDEGSYHVDESRNYISNSAQSNGAVVKEKQPSSAKSSNKNKKNKDKEYYV

SEQ ID NO: 47 - DNA, 3712 bp, Homosapiens
ctttttttctttttctttttctttttctgtttctctcccttactccttcgtctgcatcttcttctcagctgcctttccgccgttcgattcccacttccttcagaagggcgcactcttccctctgaacccctcgccgggcgtaagtgtcaggaggcggcggacgcggagattgcctcgggagcaggcgatgcgcgccgctgctccgcgcgctgcccgggggaggctggcgctagcgggcgagccggccggggctgaatggagggaaggggcgcctggattccatggggtctgcttctgtcttgaaaggaggttgggccggcgaagtggcctccctagtccccgcacacaaagctaaatggatttacctagtggattcgcggtggatgtctgtcatgtagaagtgaggaccttccaggaggagctttaaacaatttctcggccccccacccgccggcacgcactctcgcccgaaactctttgggagtatctctcgagaacctggagccctggaaatctgggagcagccacccgctccgcgcttgctgttcccggggctgcctttccggacaagcccctctccagctgcattcgcctcggctatgtttcggattgtttggggtgctaggcacggcggactccaggaccccgagaagactgtccgaaggagggagaggatgggtgccctggcgcggtgaggcggccggcccctcagcccactccgcgccgcccgctcccctgcgccctctcctctccccgcgccccaaactttgcctcccgcggcggctgcccctcggcgggcgccccgccatgtaccagaggatgctccggtgcggcgccgagctgggctcgcccgggggcggcggcggcggcggcggcggcggcggcgcaggggggcgcctggccctgctttggatagtcccgctcaccctcagcggcctcctaggagtggcgtggggggcatccagtttgggagcgcaccacatccaccatttccatggcagcagcaagcatcattcagtgcctattgcaatctacaggtcaccggcatccttgcgaggcggacacgctgggacgacatatatctttagcaaaggtggtggacaaatcacgtataagtggcctcctaatgaccgacccagtacacgagcagacagactggccataggttttagcactgttcagaaagaagccgtattggtgcgagtggacagttcttcaggcttgggtgactacctagaactgcatatacaccagggaaaaattggagttaagtttaatgttgggacagatgacatcgccattgaagaatccaatgcaatcattaatgatgggaaataccatgtagttcgtttcacgaggagtggtggcaatgccacgttgcaggtggacagctggccagtgatcgagcgctaccctgcagggcgtcagctcacaatcttcaatagccaagcaaccataataattggcgggaaagagcagggccagcccttccagggccagctctctgggctgtactacaatggcttgaaagttctgaatatggcagccgaaaacgatgccaacatcgccatagtgggaaatgtgagactggttggtgaagtgccttcctctatgacaactgagtcaacagccactgccatgcaatcagagatgtccacatcaattatggagactaccacgaccctggctactagcacagccagaagaggaaagcccccgacaaaagaacccattagccagaccacagatgacatccttgtggcctcagcagagtgtcccagcgatgatgaggacattgacccctgtgagccgagctcaggtgggttagccaacccaacccgagcaggcggcagagagccgtatccaggctcagcagaagtgatccgggagtccagcagcaccacgggtatggtcgttgggatagtagccgctgccgccctgtgcatccttatcctcctctatgccatgtacaagtacagaaaccgggatgaaggctcataccatgtggacgagagtcgaaactacatcagtaactcagcacagtccaatggggctgttgtaaaggagaaacaacccagcagtgcgaaaagctccaacaaaaataagaaaaacaaggataaagagtattatgtctgatcccaagatcttaaatggacacttgtatagaaatagtcttcattttatctgagacataatataaacttatttactttcctttttatgaagcacatacaaaagaagacagggaatgcaatcaggaaggaaagactttttaaaaaataaaaacaagtatctcatgctcttgtttctcaaaaaagaaaaacaaaaaacaaaaaacaggggccaataaattccctaacatccacagtgttttcatttactctgcttgtctttatgttgctggaacatttctaaaagacagtgatgaccgcacgcattcataaagcaaaggagtactacagcatcaaggcacaacacaaaaaccaacacaaaacataacacaaaaaagaagctacctatgatcctggatttagccaaagtgctagcgctttcctgagaagtcagtccaattgccagagaagactgtccttttgagtgactcaacctgcaaacctttaagagtttgccgcctggtgcaactggagcagtggttggaacttgcatttgaaacaaagtgctggcttttttgaagacttgtgtaggaacacattcaaaaagcccctttctggttgtgagagaggaaaaaaaagtatggaggccttattttcaaaaatgtgaaatataaggcacgttttcacacaaaatttcaaaacaaaaacaagagggcatagatgcaatcattgggaaattttcatgcacgcttattatgttattacatatgtttatataaaatccatctctgtgtgctttctggactgtgataagtgacgttttatagcctgttgtatagaaaatgcaaaatatatctctgctcttcagccatttttggtaaattcaatgttataagtgttgctaagtatagggagttttatgacatcagagcaacaattatttcagttgggtttttctttttttttgccaccattataaattgccacaattacttttattttttaaagaaattacagtgtagtgtttattctaaggaagatatgtatgaatgtatatacaaagactcagctacttcttttcttatatgtacagccttcattctgttgcaattaagttttagtacttgtatgaaaggtgtgaattagaaagtcacatatatacatatgtatcttataatcttttctccctgaaatactcacattcccacatacattcactattttcacacacacacacacacacacacacacacgaatccacagcaatccatcagatatgctggaagatccaaacgtgcatacagtagcaaatatttattgacaaattgaaaagcaggaaggaagagggttgtgccaaggtattgatgacaaatggggtgatttgcttcattgagatcttgctcccaggtaaccttaagaagattttagtccctaaagaaatgaacctttccttatcaaatagaatatcactgatatactgctgcatgaataagaaccattatgtgggcaggttatggaagcaaaattggttaatctacaccttaactctggctgctgcaattgaaaactttctttctaataaaataatatatatatctctg

SEQ ID NO: 48 - protein, 442 aa, Homosapiens
MYQRMLRCGAELGSPGGGGGGGGGGGAGGRLALLWIVPLTLSGLLGVAWGASSLGAHHIHHFHGSSKHHSVPIAIYRSPASLRGGHAGTTYIFSKGGGQITYKWPPNDRPSTRADRLAIGFSTVQKEAVLVRVDSSSGLGDYLELHIHQGKIGVKFNVGTDDIAIEESNAIINDGKYHVVRFTRSGGNATLQVDSWPVIERYPAGRQLTIFNSQATIIIGGKEQGQPFQGQLSGLYYNGLKVLNMAAENDANIAIVGNVRLVGEVPSSMTTESTATAMQSEMSTSIMETTTTLATSTARRGKPPTKEPISQTTDDILVASAECPSDDEDIDPCEPSSGGLANPTRAGGREPYPGSAEVIRESSSTTGMVVGIVAAAALCILILLYAMYKYRNRDEGSYHVDESRNYISNSAQSNGAVVKEKQPSSAKSSNKNKKNKDKEYYV

SEQ ID NO: 49 - DNA, 4909 bp, Homosapiens
ttcggagcgcgaagccgccgctgggacctcggcgcgccccgcgtctgcgcttgctgccgcgccccggtcggcgcgctgggagttccagccatgctcttctggcacacgcagcccgagcactacaaccagcacaactccggcagctacctgcgtgatgtgctcgctctgcccatcttcaagcaggaggaaccccagctgtcccccgagaacgaggcccgcctgccacccctgcaatatgtgttgtgtgctgccacgtccccagccgtgaagctgcatgaagagacgctgacctacctcaaccaaggtcagtcttatgaaatccgactactggagaatcggaagctgggagactttcaagatctgaacacaaaatatgtcaagagcatcatccgtgtggtcttccatgaccgccggctgcagtatacggagcaccagcagctggagggctggcggtggagtcggccaggggaccggatcctggacatcgatattccactgtctgttggtatcttggaccccagggccagcccgacccagctgaatgcagtcgagtttttgtgggaccctgcgaagagagcttctgcattcattcaggtacactgcatcagcacagaattcacccccaggaagcacgggggcgagaagggagtgccctttcgagtccagattgacacgtttaagcagaacgagaatggggagtacacggagcacctgcactcagccagctgccagatcaaggtgttcaagccgaagggagccgatcggaaacagaagactgaccgggagaagatggagaaaagaactgcccaagagaaggagaaataccagccgtcctatgaaaccaccatcctcacagagtgctctccatggcccgacgtggcctaccaggtgaacagcgccccgtccccaagctacaatggttctccaaacagctttggcctcggcgaaggcaacgcctctccgacccacccggtggaggccctgcccgtgggcagtgaccacctgctcccatcagcttcgatccaggatgcccagcagtggcttcaccgcaacaggttctcgcagttctgccggctctttgccagcttctcaggtgctgacttgctgaagatgtcccgagatgatttggtccagatctgtggtcccgcagatgggatccggctcttcaacgccatcaaaggccggaatgtgaggccaaagatgaccatttatgtctgtcaggagctggagcagaatcgagtgcccctgcagcagaagcgggacggcagtggagacagcaacctgtctgtgtaccacgccatcttcctggaagagctgaccaccttggagctgattgagaagattgccaacctgtacagcatctccccccagcacatccaccgagtctaccggcagggccccacgggcatccatgtggtggtgagcaacgagatggtgcagaacttccaagatgaatcctgttttgtcctcagcacaattaaagctgagagcaatgatggctaccacatcatcctgaaatgtggactctgagcagcagtggacctcatacctgtctccagctcccagccctgtggatccccgtggatgtagacattgccccactgtaagctgtggcctcaccaggcaagctgaggccaggagggaccctgcccagtctgtgaaagctacagagcaccaaccagcagaagcctgtggacaccaagtacggtgtacagaaagccagtggctcctttctcccttcctcttggcctccagattttgaatggttccttgttcttttctattggtccaaccctgacgttctaaaagggcaaacagtggagacgtctgctctgaaatccctcatcccttagttggaagctgattgggtatcttggtgctgcctgtattggtcccttctgaccactctcctgcctccagagaaagctctgcttcaccctgaaagctggtacctttacctcctcctctgggagttggctgcatggccagcactgccgacttgatgggagcagtttgccctcattctcctgtttcaggtttgcttcccttctcagtgaccctggtgagcatccgcctttcctgttcttggatgaattgatgggagtggggctattctgtgccttctacctctttcttctctacgttgtttctaaggatctgctgctgcggaacccaaagatgtgctcctgtctctgcactggcgcattggcatggtagatgccacaatgtatgtgcacggcctttctcagagacattagttctgaggccctttgtggggaggttagggggatggtaatagaaaaagactattttatttcctggcaatcacgggtaaggaggattaggaatgagtattccattcctaggtgtcatcagatgaccttgaccaccacaataccaggccctcttggatggacttatagaaagttagagaagaccttgttgaaccgctgctaaacttgccacaggagcgatgtgttttctctgagtgcccctcacttacatgtttatctttgtttgtagaggctatgtttaggatattttgcctgcatcagaatgggtgcatcatctttcttaatggcctatcgggaaatttgagtgtcagtaactgtggtagactcagaaattcgtctttgtcttgcctctggttcctgggatccagtgatctctactggcccagggcttcagctcttggttaatttaggttcatggggaaccctctgaccacctgaatgggatgtcatagcttctaaatggagcttctgtggaatgaagtgctagactgaaggactaccagaataaaacagggtctacaatggggagaacttgttttatagatgaggaaaccaaggctcagaggggcaaagtcacctgcatggtagcacatagtgatagggtagcgatataaatttatcatataaaccaggacatctcggaataaaaggggctctgttagtcattatgttgggtaatagccatggcattcctacagaacagagtgaggacaggctcctgattcctcttccttctttagagagaagcggggagtgggttaactaacagctttattgagatgtcattcacatgccattcagtttacccattgctagtgtccaattgtattcacagaaccaccatcaattcacagaattacagtcaacgttggtacattttcatcacccccagtaaaaccccgtacccttggtctgtcactcctgctttcctaactcctgcagtccaaggcagccatgaatctactttctatgtaagattaacctactctggacatttcatatatctggaatcatgtgatatctcttttgtgactggcttcttccactgaatgttttctagggccgtccaagttgaggatgtatcagtacttcattcttttgtattgctgaataatacttcattgtatagatagaccacatttgtttattgattcatcagttgatggacatttgtgtgtttttactttttggctactctgaatgatgctgctatgaacatatttctacaagattttgtgtggacatatgttttcatttcttttagcaatatacataggagtggaattgctaggtcttacagtaactccgtgttttaactttttgagaaactgccagactgttttctatagcagctgtaccattttacattcccaccagcaatgtatccaggtttcaatttgtctacatcctcatcaacacttgctattatctgtctttttgcttttagcatcctaatgagtatgaaatgctatcttgtggttttgatttgcattcccctgatggcaactgatgctgagtgtcttttcctgtgcttacgggccatgcgtatttctttggagaaaggtctatccaggtcctttgcctatttttaattgagttgtcttttttttttaagttttctgttttcctaaccactagactaccagggatgagccttctttttattattgagttgggtgagctatttgtatattctagacgccagtcttttatcaggtatatgactggtaaaaatgttctccccttctgtggattgttttcagtttcttgttggtgtcctttgagacacaaaactttttaactttgatgatttccaagatacgtattttttttctattgtcacttgtgcttttggtgccatatctagaaaaccattgcctaatccaaggtcaagaagattaatgcctgtgttttcttctaagaacttgtatagttttagttctcacaatggtctttgatccatttcgagtatatttttatatatgatgtgatgtaggggtccagcttcattcttttgcttgtggatctccacttgtcccactgctgattattgagaaaaatatcctttctccacggaattgtcttggcatccttgctaaaggcctctgcttcttactggatcttctttcctgggacatggtgtcgttgggaagcttacctttttttttttttacttagtctgtgtttggttccaccagttttatgctgcctttctactctgttcttgctgtctccctctttacctgagtcaacggtactgagtcctatctctctctgatgttccccagtcttccttggtgcatgttctagctccacacactagtccttggaggaaggttgagaccaatgatttcctgttatgagtcatgaggaaactgaatcacctagaagtggaataatgtgctcagggtcaccatagcccattagtggaaggaccaggactagacctttagtcttctgaggtccagccccttaggctgtctgtcatcactgtacccaagtgatgtcactaccaaggccaaatgatggtgggctaaattttaattctcaaaagtgtaggaggctaatattgtcttctaagttccaaaagaagatgtaataaaagtctgttacct

SEQ ID NO: 50 - protein, 479 aa, Homosapiens
MLFWHTQPEHYNQHNSGSYLRDVLALPIFKQEEPQLSPENEARLPPLQYVLCAATSPAVKLHEETLTYLNQGQSYEIRLLENRKLGDFQDLNTKYVKSIIRVVFHDRRLQYTEHQQLEGWRWSRPGDRILDIDIPLSVGILDPRASPTQLNAVEFLWDPAKRASAFIQVHCISTEFTPRKHGGEKGVPFRVQIDTFKQNENGEYTEHLHSASCQIKVFKPKGADRKQKTDREKMEKRTAQEKEKYQPSYETTILTECSPWPDVAYQVNSAPSPSYNGSPNSFGLGEGNASPTHPVEALPVGSDHLLPSASIQDAQQWLHRNRFSQFCRLFASFSGADLLKMSRDDLVQICGPADGIRLFNAIKGRNVRPKMTIYVCQELEQNRVPLQQKRDGSGDSNLSVYHAIFLEELTTLELIEKIANLYSISPQHIHRVYRQGPTGIHVVVSNEMVQNFQDESCFVLSTIKAESNDGYHIILKCGL

SEQ ID NO: 51 - DNA, 8089 bp, Homosapiens
tttttttttttttaatccccgcaccaagcgcttaacctcattggggtggaggagaaggcggcggctctctggtccgcagcggcaacagtaacgaaaaacagggctaatggactgctgaattatgaagtatttcagacccagtagtagaacatcactctgccactcactcctttatctcctactagttatttaaattggacttttaatatcctaccagctgctcttcagacacacatggtgcattgttgccattccccagattgcatctttgaaacacaggctcttagtaaccttcagcgaacaaagaggcaacctcccagatacgtctgctgggagggagtcatcgtgactgccctctagcttttgctggatctggatttgaattccactatggagcctcgcatggagtcctgcctggcgcaggtgttgcagaaggatgtggggaaacgattgcaggttggccaagaactgatagactatttctcagacaaacagaagtctgctgaccttgagcatgaccagaccatgttagataaacttgtggatggacttgctacctcttgggtgaactctagcaattacaaggtggttctgctgggcatggacatcctgtccgccctggtgacccggctgcaggatcggttcaaggcgcagatcggcacagtgctgccaagtctaatagacagactaggagatgctaaagactctgtgagggagcaggaccaaactctgctgctaaagatcatggatcaagctgctaatccccagtacgtatgggacagaatgcttggaggcttcaaacacaagaatttccgtactcgagaaggcatctgtctctgccttatagcaacactcaatgcctctggagcacagactttaacactaagcaagattgtgccacatatatgcaacttacttggagatccaaacagccaggttcgagatgcagcaataaacagcttagtggaaatttacagacatgtaggagaacgtgtgagggcagatctcagtaaaaaaggattgccacagtcccggttgaatgtaatttttacaaaatttgatgaagtccagaaatctggaaacatgatacaatctgcaaatgataaaaatttcgacgatgaagattctgtggatggtaacagaccttcctctgctagttctacatcatccaaggctccaccaagttctcggagaaacgttggaatgggaaccacccgccggcttggttcatccacccttggatccaagtcttcagctgcaaaagaaggagctggtgctgttgatgaagaggattttattaaagcatttgatgatgtacctgtagtacagatttattccagccgagaccttgaggaatccataaacaaaattagggaaatattatctgatgacaagcatgattgggagcagagagtaaatgctctaaaaaagattagatctttacttttggctggtgctgctgagtatgataacttctttcaacatttgcgtcttttggatggagcctttaaactctctgctaaggacctgcggtctcaggtagtgcgggaggcttgtatcacgttggggcatctgtcatcagttctggggaataagtttgaccatggagctgaagccattatgccaactatctttaatttaattccaaacagtgccaaaattatggccacatctggtgttgtagctgttaggttaattattcggcacacacacatccctaggttaatacctgtcataacaagcaactgtacctctaagtctgtcgcagttagaaggcgctgttttgaatttttagatttgcttttacaagaatggcagacacattcactagaacgacacatatcagtattagctgaaacaataaagaagggaatacatgatgctgattccgaagcaagaatagaagccagaaaatgttactggggtttccacagtcacttcagcagagaagcagagcacttgtaccacaccttggagtcctcctaccagaaagccctgcagtcccacctgaagaactcagacagcatagtgtctctgcctcagtcagaccgctcatcttccagctctcaagagagtctaaatcgtccgctgtctgccaaaagaagtcctactggaagtaccacatctagagcttctacagttagtaccaaatctgtgtcaacgactgggtccctccagcgatctcgaagtgatattgatgtgaacgcagcagccagtgccaaatccaaagtctcctcatcttcgggcacgacgcctttcagctctgcagcagctttgcctccagggtcatacgcatccttaggtcggatccgcacaagacggcaaagctctgggagtgccaccaacgtcgcctctacacctgataaccggggccgcagtcgcgctaaagtggtttcacagtcccagcgatccagatctgctaatcctgctggtgctggcagccggtcaagttccccaggaaaattgttgggaagtggttatggtggacttactgggggctcctcacgaggcccacctgtgacaccgtcttcagaaaagcgaagcaagattcccaggagccagggatgtagccgggaaacaagtccaaaccgaataggattagcacggagcagccgtatccctcgacccagcatgagtcaggggtgcagccgcgataccagccgtgagagcagccgagatacaagccctgctcggggctttcctccacttgatcggtttgggcttggccagccaggaagaatacctggttctgtgaatgccatgagagttctgagcacaagtacagatcttgaagctgctgttgctgatgctttgaagaagcctgtgaggaggagatatgagccgtatgggatgtattctgacgatgatgccaacagtgatgcctcaagtgtttgctctgagcgctcatatggctccaggaatggtggcattccccattatctgcggcagactgaggatgtagcagaagttctcaaccactgtgctagttcaaactggtcagaaaggaaagaagggcttctgggcctgcagaacttactgaagagccaaagaacactgagtcgagttgaactgaaaaggttgtgtgagatcttcactcggatgtttgctgaccctcatagcaagagagttttcagtatgtttttggagactcttgtggattttataataattcataaggatgatttacaagactggctttttgttcttctcacacaattacttaagaaaatgggagcagatttacttggatctgtgcaagcaaaagttcaaaaggctctagatgtcacaagggactcctttccatttgatcaacaatttaacattttgatgagatttattgtggatcaaactcaaactccaaacctcaaggtcaaagttgcaatcctgaaatacattgagtctctggccagacagatggatccaacagattttgtaaactctagtgagacaaggcttgctgtttctagaatcataacctggacaacagaaccaaagagttcagacgtgagaaaggcagcacagattgtgctaatctctctgtttgaattgaatactcctgaatttaccatgttacttggtgccttgccaaaaacattccaggatggtgccaccaaactcctgcacaaccacctcaagaattccagtaacaccagtgtgggctctccaagcaatacgattggccggacgccctcccgacacaccagcagcaggaccagccccctgacctcacccaccaactgttcccatgggggtctgtctccaagtcggttatggggttggagtgccgacgggttagcgaagcacccacctcccttttctcagcctaactccatccccaccgctccctcccacaaggctctcaggcgctcttactctcccagcatgctggactatgatacagagaacctgaactctgaagaaatctatagttctctacgtggagttacagaagccattgaaaagtttagttttcgaagccaagaagatctgaatgagccaattaaacgagatggcaaaaaggagtgtgatattgtgtcccgcgatgggggcgctgcctcccctgccactgagggccgggggggtagtgaagtagaaggaggccggacagctctggataacaagacctcactactcaacacccagcctccgcgcgccttcccggggccgcgggcgcgagactacaacccgtacccctactcagatgccatcaacacctacgacaagaccgccctgaaagaggctgtgttcgatgacgacatggagcagcttcgagacgtgcccatcgaccattctgacctggtggctgaccttctgaaagagctgtccaaccacaatgagcgagtggaggaacggaagggagccctgctggagctgctcaagatcacgcgggaagacagccttggtgtctgggaggagcacttcaagaccattctgctcctgctgctggagacccttggagacaaagaccattcaattcgagcactggcgttaagagttttgagggaaattctgagaaatcaaccagcaagatttaaaaactacgccgagctgacgattatgaagactctggaagcccacaaagactcccataaggaggtggtgagagcggctgaggaggctgcgtccacactggccagttccatccacccggagcagtgcatcaaggtgctctgccccatcatccagacggccgactaccccatcaaccttgctgccatcaagatgcagaccaaagtcgtcgagaggatcgcaaaggagtcattgctgcagctccttgtcgacatcatcccaggcttgctgcagggttatgacaacaccgaaagtagtgtgcgtaaggccagcgtgttttgcttagtggcaatttattccgtaatcggagaagacctgaaacctcaccttgcacagctcacagggagcaagatgaagctactaaacttatacataaagagggcccagaccaccaacagcaacagcagctcctcctccgatgtctccacgcacagctaatggcagtacctgtctcttgtgtagacctagaagcaatcggtggtgcctctcagagacctttccccacccccttcatcggctgcccagtcagtacaaggaggcccacaaatatttattacaatcagtattttggtcccttccagcttttctgtagaatcttactggtattgaatgtaaaggaagcaaggcctgtattgcagtcttcatacaaaacaaaaggaataagaacagaaaagagccatactgaaacatgtcttgtacagcctgctgagatggcgaaaccctgtgtgtggggtgcagtttttaaaaatcagagcgctctagccactacttggtagaaagtagcattttttttttcagttaataacatatttgggggtggggtggggtgttactttgtgttcttcctccttagcctattttcttgtgcgtatggtctgtgtggggcccctttcacagctgacaccacgaaaggtgatatatctttaagttgtgttctgagacctactaaaaatgggaatcaagtcttggcaagaacagtctgaagatggccttttaacaaacgctgggaattttgcttgtcatatccagactggaggccgactgccctggctttcagcgtagaattgggagtgcaccctgacagtctccttccagctctccctaatcgactccaccgacaaggtccctaccccagagcttccatgcaaaggaattcttcaagtttaaatctggacacaaaaataagataaatgtatggcatcatttagggatgcctgagatggcagttcatgaagcacagaagataaagaagaagtctttcatctttactgctgagatccttgggaacactgttgtcatgggggctctgccaagaccctcatctctgggctacacggtgattcagattgagcaccaacttgtttcctcccctcaaagttctgcctaagccgttcagttctaacatggtctcagttaatctggtaaatggcatctttaccatcttagttctgacttctcagtttaatgtgggattaagagccaagaaaagcctagagagactggatatcacaattttttttaattttataaactgaagtagttccttgaatgtctgttgatgaaatagtcactgtttaaggaaaaaagtaattatgaggtgtagcagattgcagaaaaacaggattagaaacacacttaaaaagaacacacatttagagtctctcttcctcctcagcgaaccactaggcccccttttttaaaaacacctttagagcctaattactccaataaaagtaactagaggtttggagtctggttaaataaattctgagtaaaattcttaagccaaatggaaattcttaatgcaatcatgaggacttctattgtctcttactgttgtattagatcctataaattgaactgatttttccataaggaaaatgcttcttttgagattaattctaataacgtatttgctattgcagtgcagagcccactgcaactgctaggactgaaagcagaggctgggtgccagagcacgtgattcttaacatcatttccacagacccctctgccctgaccctctgcattggatgcaggaagctgggaaagactgatgttgatttggaaacatgggctgaaaatgaaggccccatagtgcataggaacagtaaagccagggtgctgacgtgtgtgtgtgtgtgtgtgtgtgtgtgtgtgtgtgtgtggtgttgtgtgtgtttgtgcgtgcaccctacacatgtgtggtacctcactgctgctgtttagggaacttgagggacgcgtttcaaggggttgggtattactgacgagctttggctcaaaatatagcaggaccaggtcttttgttgataagtactgtttgtttattaatatgtcattaatggtatttcttttttacactctacaagtgaattagggagtctcttgttgacccctttgttgcaggaatgtgcgtcgggctaggttatccatgagtttctttattcctaatgcagttagaaagacctttctccttgagctctttgactcccagaaggtaccccagtccccagtgtacttagaaaggatctcgaacattgctggacgtcctcatagtactcacaaagggctagccttgaatgtcactcgcccagtcttcagtctcctgacttagagatacaatcacgtcacaggtctcttggcctcaatctgaaaactgctgccgccgcgccgaggagactcgcatgccgccaccacctcactgggagggcgccgagcccaccgtcgccccctagaccctgacagctgcagctgccttgccttgccgccgcctccctgcagggcccctgttccaatgaaaaacagaacacaaaagagcagagcacctaagcctgtctctgcctccctgtctaccggactggccagggcccaagacccccgctgctccactgcggggctgggcgggctgactccctgcttcctccaagctgctgcctcccctgcagccagggtctgggcagggtgcagccggtcctcggggcacgcagcttccttcaagtacactgtgtgtgcttcccggacctgcggcgatgccacgggcctgccttttctatgcgcctcactagcttaccaccctgtgcaggtaatgcaactgactttgtctcatcagtctttttctttccctgccaccctttatttatcaagcgtaatgttacactttaaaggacagcaaataagaactttgtagaatcccaccaggactttgctaacaataatgtttggaaataaagaagtgctctgaaaaaatatcagccaccaaaatagttatgttggcactgtgttcacacgcatggtccccacacccccaggttgggtgggtttttttgttttttgggtttttttggggggggggctttttcatgttacatccatatctgtatttatatcttatttgtttcactttcaagtgtatcatggcaaatgtacagatttttttgttaataatgtgctaggatttgctaaaaaagaaaaaaaaaaaacccttttgagtttgccctagaataaatgagacttaatt

SEQ ID NO: 52 - protein, 1538 aa, Homosapiens
MEPRMESCLAQVLQKDVGKRLQVGQELIDYFSDKQKSADLEHDQTMLDKLVDGLATSWVNSSNYKVVLLGMDILSALVTRLQDRFKAQIGTVLPSLIDRLGDAKDSVREQDQTLLLKIMDQAANPQYVWDRMLGGFKHKNFRTREGICLCLIATLNASGAQTLTLSKIVPHICNLLGDPNSQVRDAAINSLVEIYRHVGERVRADLSKKGLPQSRLNVIFTKFDEVQKSGNMIQSANDKNFDDEDSVDGNRPSSASSTSSKAPPSSRRNVGMGTTRRLGSSTLGSKSSAAKEGAGAVDEEDFIKAFDDVPVVQIYSSRDLEESINKIREILSDDKHDWEQRVNALKKIRSLLLAGAAEYDNFFQHLRLLDGAFKLSAKDLRSQVVREACITLGHLSSVLGNKFDHGAEAIMPTIFNLIPNSAKIMATSGVVAVRLIIRHTHIPRLIPVITSNCTSKSVAVRRRCFEFLDLLLQEWQTHSLERHISVLAETIKKGIHDADSEARIEARKCYWGFHSHFSREAEHLYHTLESSYQKALQSHLKNSDSIVSLPQSDRSSSSSQESLNRPLSAKRSPTGSTTSRASTVSTKSVSTTGSLQRSRSDIDVNAAASAKSKVSSSSGTTPFSSAAALPPGSYASLGRIRTRRQSSGSATNVASTPDNRGRSRAKVVSQSQRSRSANPAGAGSRSSSPGKLLGSGYGGLTGGSSRGPPVTPSSEKRSKIPRSQGCSRETSPNRIGLARSSRIPRPSMSQGCSRDTSRESSRDTSPARGFPPLDRFGLGQPGRIPGSVNAMRVLSTSTDLEAAVADALKKPVRRRYEPYGMYSDDDANSDASSVCSERSYGSRNGGIPHYLRQTEDVAEVLNHCASSNWSERKEGLLGLQNLLKSQRTLSRVELKRLCEIFTRMFADPHSKRVFSMFLETLVDFIIIHKDDLQDWLFVLLTQLLKKMGADLLGSVQAKVQKALDVTRDSFPFDQQFNILMRFIVDQTQTPNLKVKVAILKYIESLARQMDPTDFVNSSETRLAVSRIITWTTEPKSSDVRKAAQIVLISLFELNTPEFTMLLGALPKTFQDGATKLLHNHLKNSSNTSVGSPSNTIGRTPSRHTSSRTSPLTSPTNCSHGGLSPSRLWGWSADGLAKHPPPFSQPNSIPTAPSHKALRRSYSPSMLDYDTENLNSEEIYSSLRGVTEAIEKFSFRSQEDLNEPIKRDGKKECDIVSRDGGAASPATEGRGGSEVEGGRTALDNKTSLLNTQPPRAFPGPRARDYNPYPYSDAINTYDKTALKEAVFDDDMEQLRDVPIDHSDLVADLLKELSNHNERVEERKGALLELLKITREDSLGVWEEHFKTILLLLLETLGDKDHSIRALALRVLREILRNQPARFKNYAELTIMKTLEAHKDSHKEVVRAAEEAASTLASSIHPEQCIKVLCPIIQTADYPINLAAIKMQTKVVERIAKESLLQLLVDIIPGLLQGYDNTESSVRKASVFCLVAIYSVIGEDLKPHLAQLTGSKMKLLNLYIKRAQTTNSNSSSSSDVSTHS

SEQ ID NO: 53 - DNA, 1140 bp, Homosapiens
atgggcaggaaccagcagacgacaccgaaaagcagaaatagcaaggtgaggaaaaagccagtgcgctgtgtcccggaagtcgggggagaaagtgatcagctgggccccatgttgctagacatgttaagatgcagtccgaaaatggacaattggattgagcaatctggggctggtacaaaggatgaattgcacattgttgaagtagaggcaatgaattacaaaggcagtccaattaaagtaacactggcaactttgaaaatgtctgtacagccaaaggattcccttggaggctttgaaatcacaccaccagtggtcttacggttgaagtgtggttcagggccagtgcatattagtggacagcacttagtagctgtggaggaagatgcagagtcagaagatgaagaggaggaggatgtgaaactcttaagtgtatctggaaagcggtcggcccgtggaggtggtagcaagattccacagaaaaaagtgtttggaagccttcaaacagtttccaaaagtctcagcaagctgagagcaggggctctcagaagcccacgggggatgtttggcacctgttttgctgcctctcttttcctggttaaacgttacccacagctgcctgctaaatggaaaaatgaccaacacatcaccaggcagatgctactgtgtcaggaagtgagggctttctctgatgatataatgaccttcattcagccaccagatcctttaagcagtttgatgctgacttttggatgctgccagctttgtagaagccttttgctgtgggaggcacttgccaagccttgctgcgacagaggagtatcctttgtcatgctgacattggtgcctctcaccttccctcaggcctgcctctctcccctagtgagcctcggcctagactgcccacttccactggagatgttcatcatcaagtcatttacagatcaaaaccacagttcttacctgcagtgccggaaggagggtaagaaacagaatctgggtgtgccctccccagctctgtcatccctaggaatattctcccaggttgtgacagagcccggaaaaaagccatttgcgatgacctcactgtacccgacttctaccagagtccctggcctttttctggcccttggtgatccctga

SEQ ID NO: 54 - protein, 379 aa, Homosapiens
MGRNQQTTPKSRNSKVRKKPVRCVPEVGGESDQLGPMLLDMLRCSPKMDNWIEQSGAGTKDELHIVEVEAMNYKGSPIKVTLATLKMSVQPKDSLGGFEITPPVVLRLKCGSGPVHISGQHLVAVEEDAESEDEEEEDVKLLSVSGKRSARGGGSKIPQKKVFGSLQTVSKSLSKLRAGALRSPRGMFGTCFAASLFLVKRYPQLPAKWKNDQHITRQMLLCQEVRAFSDDIMTFIQPPDPLSSLMLTFGCCQLCRSLLLWEALAKPCCDRGVSFVMLTLVPLTFPQACLSPLVSLGLDCPLPLEMFIIKSFTDQNHSSYLQCRKEGKKQNLGVPSPALSSLGIFSQVVTEPGKKPFAMTSLYPTSTRVPGLFLALGDP

SEQ ID NO: 55 - DNA, 1686 bp, Homosapiens
gtttgcgggagcgccgcgtggttagcgtcggcggcttttggcatggcgactttttctggcccggctgggccaatcctgtcgcttaatccgcaggaagatgtcgagtttcaaaaggaggtggcgcaggttcgcaagcgcataacccagcgaaaaaaacaagaacaacttactcctggagtagtctatgtgcgccacctacctaacctacttgacgaaacccagatcttttcatatttctcccagtttggcactgtgacacggttcaggctgtccagaagtaaaaggactggaaatagcaaaggctatgcatttgtggagtttgagtctgaggatgttgccaaaatagttgctgaaacaatgaacaactacctgtttggtgaaagactcttggagtgtcattttatgccacctgaaaaagtacataaagaactctttaaagactggaatattccatttaagcagccatcatatcaatcagtgaaacggtataatcggaatcggacactaacacaaaagctacggatggaggagcgatttaaaaagaaagaaagattactcaggaagaaattagctaaaaaaggaattgactatgattttccttctttgattttacagaaaacggaaagtatttcaaaaactaatcgtcagacgtctacaaaaggccaggttttacgtaagaagaagaaaaaagtttcaggtactcttgacactcctgagaagactgtggatagccagggccccacaccagtttgtacaccaacatttttggagaggcgaaaatctcaagtggctgaactgaatgatgatgataaagatgatgaaatagttttcaaacagcccatatcctgtgtaaaagaagaaatacaagagactcaaacacctacacattcacggaaaaaaagacgaagaagcagcaatcagtgattttcaatgtattatatttcttttgaaaaatataatatttttatgagagtggactttgtatttcactaggtacaatggaatacaacctttgacaagattttcagaggaaaaatacactgtttggtcaagttaaggaaagcagtgtgtaattttggattgcctgcccttggctgaaatacaggggtgcataccatcttgcagtggcttggctgacattgcctctttgtcctggcctctagttttcttttgatatttcatagctctccttagtttactctgcctggatagaaagttgaccactaactgcaggtttaagtactaaactgcagccttttctgtcgccagcaattaaagaccaccaatcttgtttgtccatctacatggtttgtcggggacatttaactcatggaggtgctttagatttcaacatcagatggttgaagctggaagtttaattatatgtagagtgagaaggcagttccagttttagcacagatttgtttatgtgttcagattttaatagagattcaaaaatgactcatttttaccaataatgttaaattagttttggttgtgctagcatgaattaataaccaccattttataccagtatcatcagtgaagaattgtatttcaagattcaaacaataaccagcaattaaacttttttctacaatgtatttgtttgcgagtaggacttgggagtcattggaaaaaaaaaataataaattttccccttcattaacaaaaaaaaaaaaaaaa

SEQ ID NO: 56 - protein, 293 aa, Homosapiens
MATFSGPAGPILSLNPQEDVEFQKEVAQVRKRITQRKKQEQLTPGVVYVRHLPNLLDETQIFSYFSQFGTVTRFRLSRSKRTGNSKGYAFVEFESEDVAKIVAETMNNYLFGERLLECHFMPPEKVHKELFKDWNIPFKQPSYQSVKRYNRNRTLTQKLRMEERFKKKERLLRKKLAKKGIDYDFPSLILQKTESISKTNRQTSTKGQVLRKKKKKVSGTLDTPEKTVDSQGPTPVCTPTFLERRKSQVAELNDDDKDDEIVFKQPISCVKEEIQETQTPTHSRKKRRRSSNQ

SEQ ID NO: 57 - DNA, 3408 bp, Homosapiens
cctttggacgcgcgcctcggttccgaacgcagcggacggcgcctcaggcagcgcggcggacagcccgtcctccggcgcgccgcgagcctcggaggaccctagcgacggtcgtggcgtaagaccggggggacgcggcggtagcggcggccgttgcgattgattgcgctggttgcctgcggcgtccacttccttggccgcccttgctacactggctgattgttgtgcagccggcgccatgtctgtgagcgagatcttcgtggagctgcagggctttttggctgccgagcaggacatccgagaggaaatcagaaaagttgtacagagtttagaacaaacagctcgagagattttaactctactgcaaggggtccatcagggtgctgggtttcaggacattccaaagaggtgtttgaaagctcgagaacattttggtacagtaaaaacacatctaacatctttgaagaccaaatttcctgctgaacagtattacagatttcatgagcactggaggtttgtgttgcagcgcttggtcttcttggcagcatttgttgtgtatttggaaacagaaacactagtgactcgagaagcagttacagaaattcttggcattgagccagatcgggagaaaggatttcatctggatgtagaagattatctctcaggagttctaattcttgccagtgaactgtcgaggctgtctgtcaacagcgtgactgctggagactactcccgacccctccacatctccaccttcatcaatgagctggattccggttttcgccttctcaacctgaaaaatgactccctgaggaagcgctacgacggattgaaatatgacgtgaagaaagtagaggaagtggtctatgatctctccatccggggctttaataaggagacggcagcagcttgtgttgaaaaataggaggctctccttgctcctggccttgctgacctcagcggttgccaggaaggggtgagcacagagtgcctcttacggtagttaggatgctcagttgctaaacactgcgctttattttcttaaccagttgtggtgtgagtatcagaattgaaacacttttttgggggtaaaaaatatagcctttacatggacagaattttttttgttgtttcagtgaatatgcctgtaattcagtgtatttcagttccgtcagaaagtgtaaatgttagtttcttggtaaagtccttttcttgcttaccttgactgttgatgtactgattgagaagttcattgtctcgtttgtgattcttccagatgtgatgcttgatattttctatatgcgagttagccatccacacccaggcatagcctggatacagtataaaaatagataattaaaaagatggttgccaagcaaggaaaacttattttatattttcccttccttattttaagcattgtgagtaaatcagatgttgaattcttttgccaagggaattatagctgcaggttctctctcactgccatcaaactgtaaaagattaaactgcgaagtcaagctcaacagattattttggaaagtttttgtattaagggatttagtaacatcattttgttttccaccaggcagggagtagggcttagtgttttaaaacacctctgctttctgatgttgccttaatattctgctattgcagcaattaaaaattgtcttcatgtacatttggaactaacacgtgatgtgatatattcctaaactatgaaacctttttcctagtagtcagctagatcatttgttctgggagtataaagccacccacgtaagttaataagcaaaatcctgactattatgttgttagagaaaaatgctttgctttgtctggaagaaagataaaatagtgaattataaataagtcaggccgggcgtggtggctcacacctgtaatcccagcacactgggaggccgaggcagggggactgcttgagctcaggagttcgagaccagcctgggcaacaaagtgagactccatctctatataaaaacaaaaaccacgaaagcacacacaaaataaatcagtgggatttggtaatgtgttttagagtaagaaatttcaggttgttggtgactatcccaacagtcatgttttaaatgtacagtttggggcaagtcatgtaaatactgttggtggtcttccccacacgccccaattttcaggtagtactaagagtatgtgccaggaaactcttgctattgaattgagatgattaaaatggtgacttaatccgtagttattttgcacccactgaaaggaaagtgctttccagaataatatgaagtatctaaaagtgtcaccttttcttgcctgatcaacaatttgggcttcctgtttgtacaaggggccatttggcatacctttcacagcttttatcaggccaagttaaaggctgactacattttttcatcatgaggaaagcagttgaaatgaggcatgagttactgtgcattgggattttagaacaattttcttgtgacagctctttttgtgaagttaggttcttaaaagtgcccatgatggtcacttaaaatgtgcagtaatagcactgccaggatcaagcatgaaaggcttttaaattagatcatcccacagacaatacgtttgataatagttttttcttttaacctctttaagtattgattctgcttgagaatattgaagtacttgccagaagttgtggatttcagttttaacaaatgctattaaagtggagaagcacactctggtcttggaattccatttgaggatttagaagtgtcatgtttataactattcagttgtgtttgttgctggcttgttgtaaagcaataaaatttttttggtctttttgtaagtgagtgtgctgctgtaagaaatctcccatgtgcataacaaattctgaatattttttgaggctaaagaagaccggggtgacaagcagatactgctgtgtaatggttacactaaccaaaagacaccagccactcagagttctatactgtaaagcgcagataacatttgtgtgttataccttgattggggaattaaaagtcatttaactgaagatgttgagaaacctgggctctggttttagtataccggaattacttttttccaattttagaaaatcaagcaggttagagaaaatagagatgaattaggggacactgtcttatggattcatttataagaagagaaccagccatatacacttggggagatttgccacatcttaaacttgaataatagtatgagtaatgcttaagggagtttaatagagaaggaaagctttggcagtgttttgagaacttaagtggctaaagagatgagacaaacatgcaggtcgctactggcatagtttcataattgtgtactcggaaattaaagtttgcttgtttcttggtctggattaaa

SEQ ID NO: 58 - protein, 228 aa, Homosapiens
MSVSEIFVELQGFLAAEQDIREEIRKVVQSLEQTAREILTLLQGVHQGAGFQDIPKRCLKAREHFGTVKTHLTSLKTKFPAEQYYRFHEHWRFVLQRLVFLAAFVVYLETETLVTREAVTEILGIEPDREKGFHLDVEDYLSGVLILASELSRLSVNSVTAGDYSRPLHISTFINELDSGFRLLNLKNDSLRKRYDGLKYDVKKVEEVVYDLSIRGFNKETAAACVEK

SEQ ID NO: 59 - DNA, 2210 bp, Homosapiens
cgcgcccctccctcctcgcggacctggcggtgccggcgcccggagtggccctttaaaaggcagcttattgtccggagggggcgggcggggggcgccgaccgcggcctgaggcccggcccctcccctctccctccctctgtccccgcgtcgctcgctggctagctcgctggctcgctcgcccgtccggcgcacgctccgcctccgtcagttggctccgctgtcgggtgcgcggcgtggagcggcagccggtctggacgcgcggccggggctgggggctgggagcgcggcgcgcaagatctccccgcgcgagagcggcccctgccaccgggcgaggcctgcgccgcgatggcagagatgggcagtaaaggggtgacggcgggaaagatcgccagcaacgtgcagaagaagctcacccgcgcgcaggagaaggttctccagaagctggggaaggcagatgagaccaaggatgagcagtttgagcagtgcgtccagaatttcaacaagcagctgacggagggcacccggctgcagaaggatctccggacctacctggcctccgtcaaagccatgcacgaggcttccaagaagctgaatgagtgtctgcaggaggtgtatgagcccgattggcccggcagggatgaggcaaacaagatcgcagagaacaacgacctgctgtggatggattaccaccagaagctggtggaccaggcgctgctgaccatggacacgtacctgggccagttccccgacatcaagtcacgcattgccaagcgggggcgcaagctggtggactacgacagtgcccggcaccactacgagtcccttcaaactgccaaaaagaaggatgaagccaaaattgccaaggccgaggaggagctcatcaaagcccagaaggtgtttgaggagatgaatgtggatctgcaggaggagctgccgtccctgtggaacagccgcgtaggtttctacgtcaacacgttccagagcatcgcgggcctggaggaaaacttccacaaggagatgagcaagctcaaccagaacctcaatgatgtgctggtcggcctggagaagcaacacgggagcaacaccttcacggtcaaggcccagcccagaaagaaaagtaaactgttttcgcggctgcgcagaaagaagaacagtgacaacgcgcctgcaaaagggaacaagagcccttcgcctccagatggctcccctgccgccacccccgagatcagagtcaaccacgagccagagccggccggcggggccacgcccggggccaccctccccaagtccccatctcagccagcagaggcctcggaggtggcgggtgggacccaacctgcggctggagcccaggagccaggggagacggcggcaagtgaagcagcctccagctctcttcctgctgtcgtggtggagaccttcccagcaactgtgaatggcaccgtggagggcggcagtggggccgggcgcttggacctgcccccaggtttcatgttcaaggtacaggcccagcacgactacacggccactgacacagacgagctgcagctcaaggctggtgatgtggtgctggtgatccccttccagaaccctgaagagcaggatgaaggctggctcatgggcgtgaaggagagcgactggaaccagcacaaggagctggagaagtgccgtggcgtcttccccgagaacttcactgagagggtcccatgacggcggggcccaggcagcctccgggcgtgtgaagaacacctcctcccgaaaaatgtgtggttcttttttttgttttgttttcgtttttcatcttttgaagagcaaagggaaatcaagaggagacccccaggcagaggggcgttctcccaaagattaggtcgttttccaaagagccgcgtcccggcaagtccggcggaattcaccagtgttcctgaagctgctgtgtcctctagttgagtttctggcgcccctgcctgtgcccgcatgtgtgcctggccgcagggcggggctgggggctgccgagccaccatgcttgcctgaagcttcggccgcgccacccgggcaagggtcctcttttcctggcagctgctgtgggtggggcccagacaccagcctagcctggctctgccccgcagacggtctgtgtgctgtttgaaaataaatcttagtgttcaaaacaaaatgaaacaaaaaaaaaatgataaaaactctcaaaaaaa

SEQ ID NO: 60 - protein, 454 aa, Homosapiens
MAEMGSKGVTAGKIASNVQKKLTRAQEKVLQKLGKADETKDEQFEQCVQNFNKQLTEGTRLQKDLRTYLASVKAMHEASKKLNECLQEVYEPDWPGRDEANKIAENNDLLWMDYHQKLVDQALLTMDTYLGQFPDIKSRIAKRGRKLVDYDSARHHYESLQTAKKKDEAKIAKAEEELIKAQKVFEEMNVDLQEELPSLWNSRVGFYVNTFQSIAGLEENFHKEMSKLNQNLNDVLVGLEKQHGSNTFTVKAQPRKKSKLFSRLRRKKNSDNAPAKGNKSPSPPDGSPAATPEIRVNHEPEPAGGATPGATLPKSPSQPAEASEVAGGTQPAAGAQEPGETAASEAASSSLPAVVVETFPATVNGTVEGGSGAGRLDLPPGFMFKVQAQHDYTATDTDELQLKAGDVVLVIPFQNPEEQDEGWLMGVKESDWNQHKELEKCRGVFPENFTERVP

SEQ ID NO: 61 - DNA, 2637 bp, Homosapiens
cgcgcccctccctcctcgcggacctggcggtgccggcgcccggagtggccctttaaaaggcagcttattgtccggagggggcgggcggggggcgccgaccgcggcctgaggcccggcccctcccctctccctccctctgtccccgcgtcgctcgctggctagctcgctggctcgctcgcccgtccggcgcacgctccgcctccgtcagttggctccgctgtcgggtgcgcggcgtggagcggcagccggtctggacgcgcggccggggctgggggctgggagcgcggcgcgcaagatctccccgcgcgagagcggcccctgccaccgggcgaggcctgcgccgcgatggcagagatgggcagtaaaggggtgacggcgggaaagatcgccagcaacgtgcagaagaagctcacccgcgcgcaggagaaggttctccagaagctggggaaggcagatgagaccaaggatgagcagtttgagcagtgcgtccagaatttcaacaagcagctgacggagggcacccggctgcagaaggatctccggacctacctggcctccgtcaaagccatgcacgaggcttccaagaagctgaatgagtgtctgcaggaggtgtatgagcccgattggcccggcagggatgaggcaaacaagatcgcagagaacaacgacctgctgtggatggattaccaccagaagctggtggaccaggcgctgctgaccatggacacgtacctgggccagttccccgacatcaagtcacgcattgccaagcgggggcgcaagctggtggactacgacagtgcccggcaccactacgagtcccttcaaactgccaaaaagaaggatgaagccaaaattgccaagcctgtctcgctgcttgagaaagccgccccccagtggtgccaaggcaaactgcaggctcatctcgtagctcaaactaacctgctccgaaatcaggccgaggaggagctcatcaaagcccagaaggtgtttgaggagatgaatgtggatctgcaggaggagctgccgtccctgtggaacagccgcgtaggtttctacgtcaacacgttccagagcatcgcgggcctggaggaaaacttccacaaggagatgagcaagctcaaccagaacctcaatgatgtgctggtcggcctggagaagcaacacgggagcaacaccttcacggtcaaggcccagcccagtgacaacgcgcctgcaaaagggaacaagagcccttcgcctccagatggctcccctgccgccacccccgagatcagagtcaaccacgagccagagccggccggcggggccacgcccggggccaccctccccaagtccccatctcagctccggaaaggcccaccagtccctccgcctcccaaacacaccccgtccaaggaagtcaagcaggagcagatcctcagcctgtttgaggacacgtttgtccctgagatcagcgtgaccaccccctcccagtttgaggccccggggcctttctcggagcaggccagtctgctggacctggactttgaccccctcccgcccgtgacgagccctgtgaaggcacccacgccctctggtcagtcaattccatgggacctctgggagcccacagagagtccagccggcagcctgccttccggggagcccagcgctgccgagggcacctttgctgtgtcctggcccagccagacggccgagccggggcctgcccaaccagcagaggcctcggaggtggcgggtgggacccaacctgcggctggagcccaggagccaggggagacggcggcaagtgaagcagcctccagctctcttcctgctgtcgtggtggagaccttcccagcaactgtgaatggcaccgtggagggcggcagtggggccgggcgcttggacctgcccccaggtttcatgttcaaggtacaggcccagcacgactacacggccactgacacagacgagctgcagctcaaggctggtgatgtggtgctggtgatccccttccagaaccctgaagagcaggatgaaggctggctcatgggcgtgaaggagagcgactggaaccagcacaaggagctggagaagtgccgtggcgtcttccccgagaacttcactgagagggtcccatgacggcggggcccaggcagcctccgggcgtgtgaagaacacctcctcccgaaaaatgtgtggttcttttttttgttttgttttcgtttttcatcttttgaagagcaaagggaaatcaagaggagacccccaggcagaggggcgttctcccaaagattaggtcgttttccaaagagccgcgtcccggcaagtccggcggaattcaccagtgttcctgaagctgctgtgtcctctagttgagtttctggcgcccctgcctgtgcccgcatgtgtgcctggccgcagggcggggctgggggctgccgagccaccatgcttgcctgaagcttcggccgcgccacccgggcaagggtcctcttttcctggcagctgctgtgggtggggcccagacaccagcctagcctggctctgccccgcagacggtctgtgtgctgtttgaaaataaatcttagtgttcaaaacaaaatgaaacaaaaaaaaaatgataaaaactctcaaaaaaaaaaaaaaaaa

SEQ ID NO: 62 - protein, 593 aa, Homosapiens
MAEMGSKGVTAGKIASNVQKKLTRAQEKVLQKLGKADETKDEQFEQCVQNFNKQLTEGTRLQKDLRTYLASVKAMHEASKKLNECLQEVYEPDWPGRDEANKIAENNDLLWMDYHQKLVDQALLTMDTYLGQFPDIKSRIAKRGRKLVDYDSARHHYESLQTAKKKDEAKIAKPVSLLEKAAPQWCQGKLQAHLVAQTNLLRNQAEEELIKAQKVFEEMNVDLQEELPSLWNSRVGFYVNTFQSIAGLEENFHKEMSKLNQNLNDVLVGLEKQHGSNTFTVKAQPSDNAPAKGNKSPSPPDGSPAATPEIRVNHEPEPAGGATPGATLPKSPSQLRKGPPVPPPPKHTPSKEVKQEQILSLFEDTFVPEISVTTPSQFEAPGPFSEQASLLDLDFDPLPPVTSPVKAPTPSGQSIPWDLWEPTESPAGSLPSGEPSAAEGTFAVSWPSQTAEPGPAQPAEASEVAGGTQPAAGAQEPGETAASEAASSSLPAVVVETFPATVNGTVEGGSGAGRLDLPPGFMFKVQAQHDYTATDTDELQLKAGDVVLVIPFQNPEEQDEGWLMGVKESDWNQHKELEKCRGVFPENFTERVP

SEQ ID NO: 63 - DNA, 2508 bp, Homosapiens
cgcgcccctccctcctcgcggacctggcggtgccggcgcccggagtggccctttaaaaggcagcttattgtccggagggggcgggcggggggcgccgaccgcggcctgaggcccggcccctcccctctccctccctctgtccccgcgtcgctcgctggctagctcgctggctcgctcgcccgtccggcgcacgctccgcctccgtcagttggctccgctgtcgggtgcgcggcgtggagcggcagccggtctggacgcgcggccggggctgggggctgggagcgcggcgcgcaagatctccccgcgcgagagcggcccctgccaccgggcgaggcctgcgccgcgatggcagagatgggcagtaaaggggtgacggcgggaaagatcgccagcaacgtgcagaagaagctcacccgcgcgcaggagaaggttctccagaagctggggaaggcagatgagaccaaggatgagcagtttgagcagtgcgtccagaatttcaacaagcagctgacggagggcacccggctgcagaaggatctccggacctacctggcctccgtcaaagccatgcacgaggcttccaagaagctgaatgagtgtctgcaggaggtgtatgagcccgattggcccggcagggatgaggcaaacaagatcgcagagaacaacgacctgctgtggatggattaccaccagaagctggtggaccaggcgctgctgaccatggacacgtacctgggccagttccccgacatcaagtcacgcattgccaagcgggggcgcaagctggtggactacgacagtgcccggcaccactacgagtcccttcaaactgccaaaaagaaggatgaagccaaaattgccaagcctgtctcgctgcttgagaaagccgccccccagtggtgccaaggcaaactgcaggctcatctcgtagctcaaactaacctgctccgaaatcaggccgaggaggagctcatcaaagcccagaaggtgtttgaggagatgaatgtggatctgcaggaggagctgccgtccctgtggaacagccgcgtaggtttctacgtcaacacgttccagagcatcgcgggcctggaggaaaacttccacaaggagatgagcaagctcaaccagaacctcaatgatgtgctggtcggcctggagaagcaacacgggagcaacaccttcacggtcaaggcccagcccagtgacaacgcgcctgcaaaagggaacaagagcccttcgcctccagatggctcccctgccgccacccccgagatcagagtcaaccacgagccagagccggccggcggggccacgcccggggccaccctccccaagtccccatctcagtttgaggccccggggcctttctcggagcaggccagtctgctggacctggactttgaccccctcccgcccgtgacgagccctgtgaaggcacccacgccctctggtcagtcaattccatgggacctctgggagcccacagagagtccagccggcagcctgccttccggggagcccagcgctgccgagggcacctttgctgtgtcctggcccagccagacggccgagccggggcctgcccaaccagcagaggcctcggaggtggcgggtgggacccaacctgcggctggagcccaggagccaggggagacggcggcaagtgaagcagcctccagctctcttcctgctgtcgtggtggagaccttcccagcaactgtgaatggcaccgtggagggcggcagtggggccgggcgcttggacctgcccccaggtttcatgttcaaggtacaggcccagcacgactacacggccactgacacagacgagctgcagctcaaggctggtgatgtggtgctggtgatccccttccagaaccctgaagagcaggatgaaggctggctcatgggcgtgaaggagagcgactggaaccagcacaaggagctggagaagtgccgtggcgtcttccccgagaacttcactgagagggtcccatgacggcggggcccaggcagcctccgggcgtgtgaagaacacctcctcccgaaaaatgtgtggttcttttttttgttttgttttcgtttttcatcttttgaagagcaaagggaaatcaagaggagacccccaggcagaggggcgttctcccaaagattaggtcgttttccaaagagccgcgtcccggcaagtccggcggaattcaccagtgttcctgaagctgctgtgtcctctagttgagtttctggcgcccctgcctgtgcccgcatgtgtgcctggccgcagggcggggctgggggctgccgagccaccatgcttgcctgaagcttcggccgcgccacccgggcaagggtcctcttttcctggcagctgctgtgggtggggcccagacaccagcctagcctggctctgccccgcagacggtctgtgtgctgtttgaaaataaatcttagtgttcaaaacaaaatgaaacaaaaaaaaaatgataaaaactctcaaaaaaaaaaaaaaaaa

SEQ ID NO: 64 - protein, 550 aa, Homosapiens
MAEMGSKGVTAGKIASNVQKKLTRAQEKVLQKLGKADETKDEQFEQCVQNFNKQLTEGTRLQKDLRTYLASVKAMHEASKKLNECLQEVYEPDWPGRDEANKIAENNDLLWMDYHQKLVDQALLTMDTYLGQFPDIKSRIAKRGRKLVDYDSARHHYESLQTAKKKDEAKIAKPVSLLEKAAPQWCQGKLQAHLVAQTNLLRNQAEEELIKAQKVFEEMNVDLQEELPSLWNSRVGFYVNTFQSIAGLEENFHKEMSKLNQNLNDVLVGLEKQHGSNTFTVKAQPSDNAPAKGNKSPSPPDGSPAATPEIRVNHEPEPAGGATPGATLPKSPSQFEAPGPFSEQASLLDLDFDPLPPVTSPVKAPTPSGQSIPWDLWEPTESPAGSLPSGEPSAAEGTFAVSWPSQTAEPGPAQPAEASEVAGGTQPAAGAQEPGETAASEAASSSLPAVVVETFPATVNGTVEGGSGAGRLDLPPGFMFKVQAQHDYTATDTDELQLKAGDVVLVIPFQNPEEQDEGWLMGVKESDWNQHKELEKCRGVFPENFTERVP

SEQ ID NO: 65 - DNA, 2376 bp, Homosapiens
cgcgcccctccctcctcgcggacctggcggtgccggcgcccggagtggccctttaaaaggcagcttattgtccggagggggcgggcggggggcgccgaccgcggcctgaggcccggcccctcccctctccctccctctgtccccgcgtcgctcgctggctagctcgctggctcgctcgcccgtccggcgcacgctccgcctccgtcagttggctccgctgtcgggtgcgcggcgtggagcggcagccggtctggacgcgcggccggggctgggggctgggagcgcggcgcgcaagatctccccgcgcgagagcggcccctgccaccgggcgaggcctgcgccgcgatggcagagatgggcagtaaaggggtgacggcgggaaagatcgccagcaacgtgcagaagaagctcacccgcgcgcaggagaaggttctccagaagctggggaaggcagatgagaccaaggatgagcagtttgagcagtgcgtccagaatttcaacaagcagctgacggagggcacccggctgcagaaggatctccggacctacctggcctccgtcaaagccatgcacgaggcttccaagaagctgaatgagtgtctgcaggaggtgtatgagcccgattggcccggcagggatgaggcaaacaagatcgcagagaacaacgacctgctgtggatggattaccaccagaagctggtggaccaggcgctgctgaccatggacacgtacctgggccagttccccgacatcaagtcacgcattgccaagcgggggcgcaagctggtggactacgacagtgcccggcaccactacgagtcccttcaaactgccaaaaagaaggatgaagccaaaattgccaagcctgtctcgctgcttgagaaagccgccccccagtggtgccaaggcaaactgcaggctcatctcgtagctcaaactaacctgctccgaaatcaggccgaggaggagctcatcaaagcccagaaggtgtttgaggagatgaatgtggatctgcaggaggagctgccgtccctgtggaacagccgcgtaggtttctacgtcaacacgttccagagcatcgcgggcctggaggaaaacttccacaaggagatgagcaagctcaaccagaacctcaatgatgtgctggtcggcctggagaagcaacacgggagcaacaccttcacggtcaaggcccagcccagtgacaacgcgcctgcaaaagggaacaagagcccttcgcctccagatggctcccctgccgccacccccgagatcagagtcaaccacgagccagagccggccggcggggccacgcccggggccaccctccccaagtccccatctcagcccacagagagtccagccggcagcctgccttccggggagcccagcgctgccgagggcacctttgctgtgtcctggcccagccagacggccgagccggggcctgcccaaccagcagaggcctcggaggtggcgggtgggacccaacctgcggctggagcccaggagccaggggagacggcggcaagtgaagcagcctccagctctcttcctgctgtcgtggtggagaccttcccagcaactgtgaatggcaccgtggagggcggcagtggggccgggcgcttggacctgcccccaggtttcatgttcaaggtacaggcccagcacgactacacggccactgacacagacgagctgcagctcaaggctggtgatgtggtgctggtgatccccttccagaaccctgaagagcaggatgaaggctggctcatgggcgtgaaggagagcgactggaaccagcacaaggagctggagaagtgccgtggcgtcttccccgagaacttcactgagagggtcccatgacggcggggcccaggcagcctccgggcgtgtgaagaacacctcctcccgaaaaatgtgtggttcttttttttgttttgttttcgtttttcatcttttgaagagcaaagggaaatcaagaggagacccccaggcagaggggcgttctcccaaagattaggtcgttttccaaagagccgcgtcccggcaagtccggcggaattcaccagtgttcctgaagctgctgtgtcctctagttgagtttctggcgcccctgcctgtgcccgcatgtgtgcctggccgcagggcggggctgggggctgccgagccaccatgcttgcctgaagcttcggccgcgccacccgggcaagggtcctcttttcctggcagctgctgtgggtggggcccagacaccagcctagcctggctctgccccgcagacggtctgtgtgctgtttgaaaataaatcttagtgttcaaaacaaaatgaaacaaaaaaaaaatgataaaaactctcaaaaaaaaaaaaaaaaa

SEQ ID NO: 66 - protein, 506 aa, Homosapiens
MAEMGSKGVTAGKIASNVQKKLTRAQEKVLQKLGKADETKDEQFEQCVQNFNKQLTEGTRLQKDLRTYLASVKAMHEASKKLNECLQEVYEPDWPGRDEANKIAENNDLLWMDYHQKLVDQALLTMDTYLGQFPDIKSRIAKRGRKLVDYDSARHHYESLQTAKKKDEAKIAKPVSLLEKAAPQWCQGKLQAHLVAQTNLLRNQAEEELIKAQKVFEEMNVDLQEELPSLWNSRVGFYVNTFQSIAGLEENFHKEMSKLNQNLNDVLVGLEKQHGSNTFTVKAQPSDNAPAKGNKSPSPPDGSPAATPEIRVNHEPEPAGGATPGATLPKSPSQPTESPAGSLPSGEPSAAEGTFAVSWPSQTAEPGPAQPAEASEVAGGTQPAAGAQEPGETAASEAASSSLPAVVVETFPATVNGTVEGGSGAGRLDLPPGFMFKVQAQHDYTATDTDELQLKAGDVVLVIPFQNPEEQDEGWLMGVKESDWNQHKELEKCRGVFPENFTERVP

SEQ ID NO: 67 - DNA, 2333 bp, Homosapiens
cgcgcccctccctcctcgcggacctggcggtgccggcgcccggagtggccctttaaaaggcagcttattgtccggagggggcgggcggggggcgccgaccgcggcctgaggcccggcccctcccctctccctccctctgtccccgcgtcgctcgctggctagctcgctggctcgctcgcccgtccggcgcacgctccgcctccgtcagttggctccgctgtcgggtgcgcggcgtggagcggcagccggtctggacgcgcggccggggctgggggctgggagcgcggcgcgcaagatctccccgcgcgagagcggcccctgccaccgggcgaggcctgcgccgcgatggcagagatgggcagtaaaggggtgacggcgggaaagatcgccagcaacgtgcagaagaagctcacccgcgcgcaggagaaggttctccagaagctggggaaggcagatgagaccaaggatgagcagtttgagcagtgcgtccagaatttcaacaagcagctgacggagggcacccggctgcagaaggatctccggacctacctggcctccgtcaaagccatgcacgaggcttccaagaagctgaatgagtgtctgcaggaggtgtatgagcccgattggcccggcagggatgaggcaaacaagatcgcagagaacaacgacctgctgtggatggattaccaccagaagctggtggaccaggcgctgctgaccatggacacgtacctgggccagttccccgacatcaagtcacgcattgccaagcgggggcgcaagctggtggactacgacagtgcccggcaccactacgagtcccttcaaactgccaaaaagaaggatgaagccaaaattgccaaggccgaggaggagctcatcaaagcccagaaggtgtttgaggagatgaatgtggatctgcaggaggagctgccgtccctgtggaacagccgcgtaggtttctacgtcaacacgttccagagcatcgcgggcctggaggaaaacttccacaaggagatgagcaagctcaaccagaacctcaatgatgtgctggtcggcctggagaagcaacacgggagcaacaccttcacggtcaaggcccagcccagaaagaaaagtaaactgttttcgcggctgcgcagaaagaagaacagtgacaacgcgcctgcaaaagggaacaagagcccttcgcctccagatggctcccctgccgccacccccgagatcagagtcaaccacgagccagagccggccggcggggccacgcccggggccaccctccccaagtccccatctcagctccggaaaggcccaccagtccctccgcctcccaaacacaccccgtccaaggaagtcaagcaggagcagatcctcagcctgtttgaggacacgtttgtccctgagatcagcgtgaccaccccctcccagccagcagaggcctcggaggtggcgggtgggacccaacctgcggctggagcccaggagccaggggagacggcggcaagtgaagcagcctccagctctcttcctgctgtcgtggtggagaccttcccagcaactgtgaatggcaccgtggagggcggcagtggggccgggcgcttggacctgcccccaggtttcatgttcaaggtacaggcccagcacgactacacggccactgacacagacgagctgcagctcaaggctggtgatgtggtgctggtgatccccttccagaaccctgaagagcaggatgaaggctggctcatgggcgtgaaggagagcgactggaaccagcacaaggagctggagaagtgccgtggcgtcttccccgagaacttcactgagagggtcccatgacggcggggcccaggcagcctccgggcgtgtgaagaacacctcctcccgaaaaatgtgtggttcttttttttgttttgttttcgtttttcatcttttgaagagcaaagggaaatcaagaggagacccccaggcagaggggcgttctcccaaagattaggtcgttttccaaagagccgcgtcccggcaagtccggcggaattcaccagtgttcctgaagctgctgtgtcctctagttgagtttctggcgcccctgcctgtgcccgcatgtgtgcctggccgcagggcggggctgggggctgccgagccaccatgcttgcctgaagcttcggccgcgccacccgggcaagggtcctcttttcctggcagctgctgtgggtggggcccagacaccagcctagcctggctctgccccgcagacggtctgtgtgctgtttgaaaataaatcttagtgttcaaaacaaaatgaaacaaaaaaaaaatgataaaaactctca

SEQ ID NO: 68 - protein, 497 aa, Homosapiens
MAEMGSKGVTAGKIASNVQKKLTRAQEKVLQKLGKADETKDEQFEQCVQNFNKQLTEGTRLQKDLRTYLASVKAMHEASKKLNECLQEVYEPDWPGRDEANKIAENNDLLWMDYHQKLVDQALLTMDTYLGQFPDIKSRIAKRGRKLVDYDSARHHYESLQTAKKKDEAKIAKAEEELIKAQKVFEEMNVDLQEELPSLWNSRVGFYVNTFQSIAGLEENFHKEMSKLNQNLNDVLVGLEKQHGSNTFTVKAQPRKKSKLFSRLRRKKNSDNAPAKGNKSPSPPDGSPAATPEIRVNHEPEPAGGATPGATLPKSPSQLRKGPPVPPPPKHTPSKEVKQEQILSLFEDTFVPEISVTTPSQPAEASEVAGGTQPAAGAQEPGETAASEAASSSLPAVVVETFPATVNGTVEGGSGAGRLDLPPGFMFKVQAQHDYTATDTDELQLKAGDVVLVIPFQNPEEQDEGWLMGVKESDWNQHKELEKCRGVFPENFTERVP

SEQ ID NO: 69 - DNA, 2412 bp, Homosapiens
cgcgcccctccctcctcgcggacctggcggtgccggcgcccggagtggccctttaaaaggcagcttattgtccggagggggcgggcggggggcgccgaccgcggcctgaggcccggcccctcccctctccctccctctgtccccgcgtcgctcgctggctagctcgctggctcgctcgcccgtccggcgcacgctccgcctccgtcagttggctccgctgtcgggtgcgcggcgtggagcggcagccggtctggacgcgcggccggggctgggggctgggagcgcggcgcgcaagatctccccgcgcgagagcggcccctgccaccgggcgaggcctgcgccgcgatggcagagatgggcagtaaaggggtgacggcgggaaagatcgccagcaacgtgcagaagaagctcacccgcgcgcaggagaaggttctccagaagctggggaaggcagatgagaccaaggatgagcagtttgagcagtgcgtccagaatttcaacaagcagctgacggagggcacccggctgcagaaggatctccggacctacctggcctccgtcaaagccatgcacgaggcttccaagaagctgaatgagtgtctgcaggaggtgtatgagcccgattggcccggcagggatgaggcaaacaagatcgcagagaacaacgacctgctgtggatggattaccaccagaagctggtggaccaggcgctgctgaccatggacacgtacctgggccagttccccgacatcaagtcacgcattgccaagcgggggcgcaagctggtggactacgacagtgcccggcaccactacgagtcccttcaaactgccaaaaagaaggatgaagccaaaattgccaaggccgaggaggagctcatcaaagcccagaaggtgtttgaggagatgaatgtggatctgcaggaggagctgccgtccctgtggaacagccgcgtaggtttctacgtcaacacgttccagagcatcgcgggcctggaggaaaacttccacaaggagatgagcaagctcaaccagaacctcaatgatgtgctggtcggcctggagaagcaacacgggagcaacaccttcacggtcaaggcccagcccagtgacaacgcgcctgcaaaagggaacaagagcccttcgcctccagatggctcccctgccgccacccccgagatcagagtcaaccacgagccagagccggccggcggggccacgcccggggccaccctccccaagtccccatctcagctccggaaaggcccaccagtccctccgcctcccaaacacaccccgtccaaggaagtcaagcaggagcagatcctcagcctgtttgaggacacgtttgtccctgagatcagcgtgaccaccccctcccagcccacagagagtccagccggcagcctgccttccggggagcccagcgctgccgagggcacctttgctgtgtcctggcccagccagacggccgagccggggcctgcccaaccagcagaggcctcggaggtggcgggtgggacccaacctgcggctggagcccaggagccaggggagacggcggcaagtgaagcagcctccagctctcttcctgctgtcgtggtggagaccttcccagcaactgtgaatggcaccgtggagggcggcagtggggccgggcgcttggacctgcccccaggtttcatgttcaaggtacaggcccagcacgactacacggccactgacacagacgagctgcagctcaaggctggtgatgtggtgctggtgatccccttccagaaccctgaagagcaggatgaaggctggctcatgggcgtgaaggagagcgactggaaccagcacaaggagctggagaagtgccgtggcgtcttccccgagaacttcactgagagggtcccatgacggcggggcccaggcagcctccgggcgtgtgaagaacacctcctcccgaaaaatgtgtggttcttttttttgttttgttttcgtttttcatcttttgaagagcaaagggaaatcaagaggagacccccaggcagaggggcgttctcccaaagattaggtcgttttccaaagagccgcgtcccggcaagtccggcggaattcaccagtgttcctgaagctgctgtgtcctctagttgagtttctggcgcccctgcctgtgcccgcatgtgtgcctggccgcagggcggggctgggggctgccgagccaccatgcttgcctgaagcttcggccgcgccacccgggcaagggtcctcttttcctggcagctgctgtgggtggggcccagacaccagcctagcctggctctgccccgcagacggtctgtgtgctgtttgaaaataaatcttagtgttcaaaacaaaatgaaacaaaaaaaaaatgataaaaactctcaaaaaaaaaaaaaaaaa

SEQ ID NO: 70 - protein, 518 aa, Homosapiens
MAEMGSKGVTAGKIASNVQKKLTRAQEKVLQKLGKADETKDEQFEQCVQNFNKQLTEGTRLQKDLRTYLASVKAMHEASKKLNECLQEVYEPDWPGRDEANKIAENNDLLWMDYHQKLVDQALLTMDTYLGQFPDIKSRIAKRGRKLVDYDSARHHYESLQTAKKKDEAKIAKAEEELIKAQKVFEEMNVDLQEELPSLWNSRVGFYVNTFQSIAGLEENFHKEMSKLNQNLNDVLVGLEKQHGSNTFTVKAQPSDNAPAKGNKSPSPPDGSPAATPEIRVNHEPEPAGGATPGATLPKSPSQLRKGPPVPPPPKHTPSKEVKQEQILSLFEDTFVPEISVTTPSQPTESPAGSLPSGEPSAAEGTFAVSWPSQTAEPGPAQPAEASEVAGGTQPAAGAQEPGETAASEAASSSLPAVVVETFPATVNGTVEGGSGAGRLDLPPGFMFKVQAQHDYTATDTDELQLKAGDVVLVIPFQNPEEQDEGWLMGVKESDWNQHKELEKCRGVFPENFTERVP

SEQ ID NO: 71 - DNA, 2289 bp, Homosapiens
cgcgcccctccctcctcgcggacctggcggtgccggcgcccggagtggccctttaaaaggcagcttattgtccggagggggcgggcggggggcgccgaccgcggcctgaggcccggcccctcccctctccctccctctgtccccgcgtcgctcgctggctagctcgctggctcgctcgcccgtccggcgcacgctccgcctccgtcagttggctccgctgtcgggtgcgcggcgtggagcggcagccggtctggacgcgcggccggggctgggggctgggagcgcggcgcgcaagatctccccgcgcgagagcggcccctgccaccgggcgaggcctgcgccgcgatggcagagatgggcagtaaaggggtgacggcgggaaagatcgccagcaacgtgcagaagaagctcacccgcgcgcaggagaaggttctccagaagctggggaaggcagatgagaccaaggatgagcagtttgagcagtgcgtccagaatttcaacaagcagctgacggagggcacccggctgcagaaggatctccggacctacctggcctccgtcaaagccatgcacgaggcttccaagaagctgaatgagtgtctgcaggaggtgtatgagcccgattggcccggcagggatgaggcaaacaagatcgcagagaacaacgacctgctgtggatggattaccaccagaagctggtggaccaggcgctgctgaccatggacacgtacctgggccagttccccgacatcaagtcacgcattgccaagcgggggcgcaagctggtggactacgacagtgcccggcaccactacgagtcccttcaaactgccaaaaagaaggatgaagccaaaattgccaaggccgaggaggagctcatcaaagcccagaaggtgtttgaggagatgaatgtggatctgcaggaggagctgccgtccctgtggaacagccgcgtaggtttctacgtcaacacgttccagagcatcgcgggcctggaggaaaacttccacaaggagatgagcaagctcaaccagaacctcaatgatgtgctggtcggcctggagaagcaacacgggagcaacaccttcacggtcaaggcccagcccagtgacaacgcgcctgcaaaagggaacaagagcccttcgcctccagatggctcccctgccgccacccccgagatcagagtcaaccacgagccagagccggccggcggggccacgcccggggccaccctccccaagtccccatctcagctccggaaaggcccaccagtccctccgcctcccaaacacaccccgtccaaggaagtcaagcaggagcagatcctcagcctgtttgaggacacgtttgtccctgagatcagcgtgaccaccccctcccagccagcagaggcctcggaggtggcgggtgggacccaacctgcggctggagcccaggagccaggggagacggcggcaagtgaagcagcctccagctctcttcctgctgtcgtggtggagaccttcccagcaactgtgaatggcaccgtggagggcggcagtggggccgggcgcttggacctgcccccaggtttcatgttcaaggtacaggcccagcacgactacacggccactgacacagacgagctgcagctcaaggctggtgatgtggtgctggtgatccccttccagaaccctgaagagcaggatgaaggctggctcatgggcgtgaaggagagcgactggaaccagcacaaggagctggagaagtgccgtggcgtcttccccgagaacttcactgagagggtcccatgacggcggggcccaggcagcctccgggcgtgtgaagaacacctcctcccgaaaaatgtgtggttcttttttttgttttgttttcgtttttcatcttttgaagagcaaagggaaatcaagaggagacccccaggcagaggggcgttctcccaaagattaggtcgttttccaaagagccgcgtcccggcaagtccggcggaattcaccagtgttcctgaagctgctgtgtcctctagttgagtttctggcgcccctgcctgtgcccgcatgtgtgcctggccgcagggcggggctgggggctgccgagccaccatgcttgcctgaagcttcggccgcgccacccgggcaagggtcctcttttcctggcagctgctgtgggtggggcccagacaccagcctagcctggctctgccccgcagacggtctgtgtgctgtttgaaaataaatcttagtgttcaaaacaaaatgaaacaaaaaaaaaatgataaaaactctcag

SEQ ID NO: 72 - protein, 482 aa, Homosapiens
MAEMGSKGVTAGKIASNVQKKLTRAQEKVLQKLGKADETKDEQFEQCVQNFNKQLTEGTRLQKDLRTYLASVKAMHEASKKLNECLQEVYEPDWPGRDEANKIAENNDLLWMDYHQKLVDQALLTMDTYLGQFPDIKSRIAKRGRKLVDYDSARHHYESLQTAKKKDEAKIAKAEEELIKAQKVFEEMNVDLQEELPSLWNSRVGFYVNTFQSIAGLEENFHKEMSKLNQNLNDVLVGLEKQHGSNTFTVKAQPSDNAPAKGNKSPSPPDGSPAATPEIRVNHEPEPAGGATPGATLPKSPSQLRKGPPVPPPPKHTPSKEVKQEQILSLFEDTFVPEISVTTPSQPAEASEVAGGTQPAAGAQEPGETAASEAASSSLPAVVVETFPATVNGTVEGGSGAGRLDLPPGFMFKVQAQHDYTATDTDELQLKAGDVVLVIPFQNPEEQDEGWLMGVKESDWNQHKELEKCRGVFPENFTERVP

SEQ ID NO: 73 - DNA, 2283 bp, Homosapiens
cgcgcccctccctcctcgcggacctggcggtgccggcgcccggagtggccctttaaaaggcagcttattgtccggagggggcgggcggggggcgccgaccgcggcctgaggcccggcccctcccctctccctccctctgtccccgcgtcgctcgctggctagctcgctggctcgctcgcccgtccggcgcacgctccgcctccgtcagttggctccgctgtcgggtgcgcggcgtggagcggcagccggtctggacgcgcggccggggctgggggctgggagcgcggcgcgcaagatctccccgcgcgagagcggcccctgccaccgggcgaggcctgcgccgcgatggcagagatgggcagtaaaggggtgacggcgggaaagatcgccagcaacgtgcagaagaagctcacccgcgcgcaggagaaggttctccagaagctggggaaggcagatgagaccaaggatgagcagtttgagcagtgcgtccagaatttcaacaagcagctgacggagggcacccggctgcagaaggatctccggacctacctggcctccgtcaaagccatgcacgaggcttccaagaagctgaatgagtgtctgcaggaggtgtatgagcccgattggcccggcagggatgaggcaaacaagatcgcagagaacaacgacctgctgtggatggattaccaccagaagctggtggaccaggcgctgctgaccatggacacgtacctgggccagttccccgacatcaagtcacgcattgccaagcgggggcgcaagctggtggactacgacagtgcccggcaccactacgagtcccttcaaactgccaaaaagaaggatgaagccaaaattgccaaggccgaggaggagctcatcaaagcccagaaggtgtttgaggagatgaatgtggatctgcaggaggagctgccgtccctgtggaacagccgcgtaggtttctacgtcaacacgttccagagcatcgcgggcctggaggaaaacttccacaaggagatgagcaagctcaaccagaacctcaatgatgtgctggtcggcctggagaagcaacacgggagcaacaccttcacggtcaaggcccagcccagtgacaacgcgcctgcaaaagggaacaagagcccttcgcctccagatggctcccctgccgccacccccgagatcagagtcaaccacgagccagagccggccggcggggccacgcccggggccaccctccccaagtccccatctcagcccacagagagtccagccggcagcctgccttccggggagcccagcgctgccgagggcacctttgctgtgtcctggcccagccagacggccgagccggggcctgcccaaccagcagaggcctcggaggtggcgggtgggacccaacctgcggctggagcccaggagccaggggagacggcggcaagtgaagcagcctccagctctcttcctgctgtcgtggtggagaccttcccagcaactgtgaatggcaccgtggagggcggcagtggggccgggcgcttggacctgcccccaggtttcatgttcaaggtacaggcccagcacgactacacggccactgacacagacgagctgcagctcaaggctggtgatgtggtgctggtgatccccttccagaaccctgaagagcaggatgaaggctggctcatgggcgtgaaggagagcgactggaaccagcacaaggagctggagaagtgccgtggcgtcttccccgagaacttcactgagagggtcccatgacggcggggcccaggcagcctccgggcgtgtgaagaacacctcctcccgaaaaatgtgtggttcttttttttgttttgttttcgtttttcatcttttgaagagcaaagggaaatcaagaggagacccccaggcagaggggcgttctcccaaagattaggtcgttttccaaagagccgcgtcccggcaagtccggcggaattcaccagtgttcctgaagctgctgtgtcctctagttgagtttctggcgcccctgcctgtgcccgcatgtgtgcctggccgcagggcggggctgggggctgccgagccaccatgcttgcctgaagcttcggccgcgccacccgggcaagggtcctcttttcctggcagctgctgtgggtggggcccagacaccagcctagcctggctctgccccgcagacggtctgtgtgctgtttgaaaataaatcttagtgttcaaaacaaaatgaaacaaaaaaaaaatgataaaaactctcaaaaaaaaaaaaaaaaa

SEQ ID NO: 74 - protein, 475 aa, Homosapiens
MAEMGSKGVTAGKIASNVQKKLTRAQEKVLQKLGKADETKDEQFEQCVQNFNKQLTEGTRLQKDLRTYLASVKAMHEASKKLNECLQEVYEPDWPGRDEANKIAENNDLLWMDYHQKLVDQALLTMDTYLGQFPDIKSRIAKRGRKLVDYDSARHHYESLQTAKKKDEAKIAKAEEELIKAQKVFEEMNVDLQEELPSLWNSRVGFYVNTFQSIAGLEENFHKEMSKLNQNLNDVLVGLEKQHGSNTFTVKAQPSDNAPAKGNKSPSPPDGSPAATPEIRVNHEPEPAGGATPGATLPKSPSQPTESPAGSLPSGEPSAAEGTFAVSWPSQTAEPGPAQPAEASEVAGGTQPAAGAQEPGETAASEAASSSLPAVVVETFPATVNGTVEGGSGAGRLDLPPGFMFKVQAQHDYTATDTDELQLKAGDVVLVIPFQNPEEQDEGWLMGVKESDWNQHKELEKCRGVFPENFTERVP

SEQ ID NO: 75 - DNA, 2165 bp, Homosapiens
cgcgcccctccctcctcgcggacctggcggtgccggcgcccggagtggccctttaaaaggcagcttattgtccggagggggcgggcggggggcgccgaccgcggcctgaggcccggcccctcccctctccctccctctgtccccgcgtcgctcgctggctagctcgctggctcgctcgcccgtccggcgcacgctccgcctccgtcagttggctccgctgtcgggtgcgcggcgtggagcggcagccggtctggacgcgcggccggggctgggggctgggagcgcggcgcgcaagatctccccgcgcgagagcggcccctgccaccgggcgaggcctgcgccgcgatggcagagatgggcagtaaaggggtgacggcgggaaagatcgccagcaacgtgcagaagaagctcacccgcgcgcaggagaaggttctccagaagctggggaaggcagatgagaccaaggatgagcagtttgagcagtgcgtccagaatttcaacaagcagctgacggagggcacccggctgcagaaggatctccggacctacctggcctccgtcaaagccatgcacgaggcttccaagaagctgaatgagtgtctgcaggaggtgtatgagcccgattggcccggcagggatgaggcaaacaagatcgcagagaacaacgacctgctgtggatggattaccaccagaagctggtggaccaggcgctgctgaccatggacacgtacctgggccagttccccgacatcaagtcacgcattgccaagcgggggcgcaagctggtggactacgacagtgcccggcaccactacgagtcccttcaaactgccaaaaagaaggatgaagccaaaattgccaaggccgaggaggagctcatcaaagcccagaaggtgtttgaggagatgaatgtggatctgcaggaggagctgccgtccctgtggaacagccgcgtaggtttctacgtcaacacgttccagagcatcgcgggcctggaggaaaacttccacaaggagatgagcaagctcaaccagaacctcaatgatgtgctggtcggcctggagaagcaacacgggagcaacaccttcacggtcaaggcccagcccagtgacaacgcgcctgcaaaagggaacaagagcccttcgcctccagatggctcccctgccgccacccccgagatcagagtcaaccacgagccagagccggccggcggggccacgcccggggccaccctccccaagtccccatctcagccagcagaggcctcggaggtggcgggtgggacccaacctgcggctggagcccaggagccaggggagacggcggcaagtgaagcagcctccagctctcttcctgctgtcgtggtggagaccttcccagcaactgtgaatggcaccgtggagggcggcagtggggccgggcgcttggacctgcccccaggtttcatgttcaaggtacaggcccagcacgactacacggccactgacacagacgagctgcagctcaaggctggtgatgtggtgctggtgatccccttccagaaccctgaagagcaggatgaaggctggctcatgggcgtgaaggagagcgactggaaccagcacaaggagctggagaagtgccgtggcgtcttccccgagaacttcactgagagggtcccatgacggcggggcccaggcagcctccgggcgtgtgaagaacacctcctcccgaaaaatgtgtggttcttttttttgttttgttttcgtttttcatcttttgaagagcaaagggaaatcaagaggagacccccaggcagaggggcgttctcccaaagattaggtcgttttccaaagagccgcgtcccggcaagtccggcggaattcaccagtgttcctgaagctgctgtgtcctctagttgagtttctggcgcccctgcctgtgcccgcatgtgtgcctggccgcagggcggggctgggggctgccgagccaccatgcttgcctgaagcttcggccgcgccacccgggcaagggtcctcttttcctggcagctgctgtgggtggggcccagacaccagcctagcctggctctgccccgcagacggtctgtgtgctgtttgaaaataaatcttagtgttcaaaacaaaatgaaacaaaaaaaaaatgataaaaactctcaaaaaaa

SEQ ID NO: 76 - protein, 439 aa, Homosapiens
MAEMGSKGVTAGKIASNVQKKLTRAQEKVLQKLGKADETKDEQFEQCVQNFNKQLTEGTRLQKDLRTYLASVKAMHEASKKLNECLQEVYEPDWPGRDEANKIAENNDLLWMDYHQKLVDQALLTMDTYLGQFPDIKSRIAKRGRKLVDYDSARHHYESLQTAKKKDEAKIAKAEEELIKAQKVFEEMNVDLQEELPSLWNSRVGFYVNTFQSIAGLEENFHKEMSKLNQNLNDVLVGLEKQHGSNTFTVKAQPSDNAPAKGNKSPSPPDGSPAATPEIRVNHEPEPAGGATPGATLPKSPSQPAEASEVAGGTQPAAGAQEPGETAASEAASSSLPAVVVETFPATVNGTVEGGSGAGRLDLPPGFMFKVQAQHDYTATDTDELQLKAGDVVLVIPFQNPEEQDEGWLMGVKESDWNQHKELEKCRGVFPENFTERVP

SEQ ID NO: 77 - DNA, 2075 bp, Homosapiens
cgcgcccctccctcctcgcggacctggcggtgccggcgcccggagtggccctttaaaaggcagcttattgtccggagggggcgggcggggggcgccgaccgcggcctgaggcccggcccctcccctctccctccctctgtccccgcgtcgctcgctggctagctcgctggctcgctcgcccgtccggcgcacgctccgcctccgtcagttggctccgctgtcgggtgcgcggcgtggagcggcagccggtctggacgcgcggccggggctgggggctgggagcgcggcgcgcaagatctccccgcgcgagagcggcccctgccaccgggcgaggcctgcgccgcgatggcagagatgggcagtaaaggggtgacggcgggaaagatcgccagcaacgtgcagaagaagctcacccgcgcgcaggagaaggttctccagaagctggggaaggcagatgagaccaaggatgagcagtttgagcagtgcgtccagaatttcaacaagcagctgacggagggcacccggctgcagaaggatctccggacctacctggcctccgtcaaagccatgcacgaggcttccaagaagctgaatgagtgtctgcaggaggtgtatgagcccgattggcccggcagggatgaggcaaacaagatcgcagagaacaacgacctgctgtggatggattaccaccagaagctggtggaccaggcgctgctgaccatggacacgtacctgggccagttccccgacatcaagtcacgcattgccaagcgggggcgcaagctggtggactacgacagtgcccggcaccactacgagtcccttcaaactgccaaaaagaaggatgaagccaaaattgccaaggccgaggaggagctcatcaaagcccagaaggtgtttgaggagatgaatgtggatctgcaggaggagctgccgtccctgtggaacagccgcgtaggtttctacgtcaacacgttccagagcatcgcgggcctggaggaaaacttccacaaggagatgagcaagctcaaccagaacctcaatgatgtgctggtcggcctggagaagcaacacgggagcaacaccttcacggtcaaggcccagcccagtgacaacgcgcctgcaaaagggaacaagagcccttcgcctccagatggctcccctgccgccacccccgagatcagagtcaaccacgagccagagccggccggcggggccacgcccggggccaccctccccaagtccccatctcagagctctcttcctgctgtcgtggtggagaccttcccagcaactgtgaatggcaccgtggagggcggcagtggggccgggcgcttggacctgcccccaggtttcatgttcaaggtacaggcccagcacgactacacggccactgacacagacgagctgcagctcaaggctggtgatgtggtgctggtgatccccttccagaaccctgaagagcaggatgaaggctggctcatgggcgtgaaggagagcgactggaaccagcacaaggagctggagaagtgccgtggcgtcttccccgagaacttcactgagagggtcccatgacggcggggcccaggcagcctccgggcgtgtgaagaacacctcctcccgaaaaatgtgtggttcttttttttgttttgttttcgtttttcatcttttgaagagcaaagggaaatcaagaggagacccccaggcagaggggcgttctcccaaagattaggtcgttttccaaagagccgcgtcccggcaagtccggcggaattcaccagtgttcctgaagctgctgtgtcctctagttgagtttctggcgcccctgcctgtgcccgcatgtgtgcctggccgcagggcggggctgggggctgccgagccaccatgcttgcctgaagcttcggccgcgccacccgggcaagggtcctcttttcctggcagctgctgtgggtggggcccagacaccagcctagcctggctctgccccgcagacggtctgtgtgctgtttgaaaataaatcttagtgttcaaaacaaaatgaaacaaaaaaaaaatgataaaaactctcaaaaaaa

SEQ ID NO: 78 - protein, 409 aa, Homosapiens
MAEMGSKGVTAGKIASNVQKKLTRAQEKVLQKLGKADETKDEQFEQCVQNFNKQLTEGTRLQKDLRTYLASVKAMHEASKKLNECLQEVYEPDWPGRDEANKIAENNDLLWMDYHQKLVDQALLTMDTYLGQFPDIKSRIAKRGRKLVDYDSARHHYESLQTAKKKDEAKIAKAEEELIKAQKVFEEMNVDLQEELPSLWNSRVGFYVNTFQSIAGLEENFHKEMSKLNQNLNDVLVGLEKQHGSNTFTVKAQPSDNAPAKGNKSPSPPDGSPAATPEIRVNHEPEPAGGATPGATLPKSPSQSSLPAVVVETFPATVNGTVEGGSGAGRLDLPPGFMFKVQAQHDYTATDTDELQLKAGDVVLVIPFQNPEEQDEGWLMGVKESDWNQHKELEKCRGVFPENFTERVP

SEQ ID NO: 79 - DNA, 4725 bp, Homosapiens
agtctccttgtgcgatctcccagacatgagagccctgctgggctttctggctcctcctccgtgcagagttgtcccgtcaggagccaggaggggcgacgctggctccgtgggagggtgaacagtggctcaagatgagaagcgtattgagacaaagaattctgaaaccgaaagatgtggccatttattctggagaagtcaaccaagttattgctgacttaattaaaagaatctacctcctcaggagccaggcagaagatggagaaaccgtgaccaatgtcaatgatcttttcttcaaatattcaatggaaggagtggccaccatcctttatgagagtcgtttgggctgcctggaaaacagcatcccacagctgactgtggaatacatcgaggccctggagctcatgtttagcatgttcaagacctccatgtatgcaggcgccatccccagatggcttcgccccttcatcccaaagccctggcgggaattctgcaggtcctgggatggactcttcaaattcagccaaattcatgttgacaacaagttgagggacatacagtaccaaatggaccgaggccggagggtgagcgggggacttctcacatacctcttccttagccaggctctgacgctgcaggagatctacgccaacgtgactgagatgctgctggccggcgtcgacacgacgtccttcaccttgtcttggactgtgtacatcctggcaaggcacccagaagtgcagcagacggtgtaccgggagattgtgaagaatttaggggaaaggcatgttccaactgcagctgatgtccccaaggtcccgctggtcagagctctccttaaggaaaccctgaggctgtttccagtgctgccagggaacggccgggtcacccaggaagacctggttattggcgggtatctgattccgaaaggcacccagctggccctttgccactatgccacatcgtaccaggatgagaacttccctcgggccaaggagttccggcctgagcgctggctgcggaaaggagacttagatagagttgacaattttggatccatcccctttggtcatggggttcgcagctgcatagggcggagaattgcagaactggagattcacctcgtcgtgatccagttgcttcaacattttgagatcaaaacatcttctcagaccaatgctgttcatgcaaaaacccacgggctcctgacgccaggggggcccatccacgtgcgatttgttaacagaaagtaagcctagattttaaacctgggctgatgtagcagaccagctcgccgacacacagtgggtatttgtgttcgctgatcaccgtggagaaggaaagcgatgtcgctaaaggctgtcttgttatagactggcctcccaggtcctgggacacttgtaaatctttatgcaaagtaatgtaaaaaggttgctattttactggtgcataccagaagttgccctttctttgggggaaacagctgtttaaaaaccagtggcagtgaatttttatgcttcatacattgtgctagactcaatatttaatgactggcagtatcctgtgcatttacttgtacagggaaatggtggtttacttacaaattcagttcttcaatatatgttctctaatactggcatctgggctcaaattgccatcaacagtaagttgaaggcaatttcaacttactgtttctaatttgaagagggaacattaagaatgcctctgtaatactgtaattatgggaagaaagcaccagaggcaacattttatcctgagcaccagatttagatcctgttaaagggctcaaacttaaaagggctggccgggtgcggtggctcacgcctgtaatcccagcactttgggaggtcaaggtgggaggattgcttgagccagaagttcgagaccagcctgagcaacatggtgaaaccctgtctctaccaaaaatacaaaaattagccgggcgtggtggtgtacacctatggtcctagttactcggaagactgaggcaggaggatcgtttgagctcaggaggttgggtctgcagtgagctatctatgatggcaccactgcacttcagcctgggtgacagagtgagaccctttctcaaaaataaaataaaataaaataaaataaaataaaataaaataaaataaaatggctgtataagaatacttttctctccacaacgagtgcttaattttctagtcataatgcctaatgaagttgactattagtttttatttggaagaaataaataataaataaataataaataaataaaaaagaaagctcctggtgaaatcaagaataatcagattttctaaccaaatctaaatacagagtagagcagacgtataagaactggaaatatgatgacgtaaaattttgttgcctaagttgtgagaagtaataaaacaggcagcatggaaaacaatgtaactttagaacatttttatttcaagggaaaataaatacataaatagagatgctatagatacaacaatatttttatcttgatggtgttgttttaaatatccacacaagaaccctcacccagttgtgtgcctgtgccaggctctctgggaagccgtggctccgggagtgctgggtcctgaggagttctgttgcctttcctgctgctcaccggttgctaagaggaaacaccgtgatttcctgatgctcttgccttgtcatcatgcctgaaacagcttattcccaattctgtaattccttttacataatccttctccaaaaattactttcttactaatatagaccatacagttttttttccatttagtaagtcactctgcaaaataacccttaagtaaatagacataatatccatttcacataccatttttgttaaagtatataataaagttgaaatctctgtgtggtagcagaataactctagtatgaatgctgtaaatgtacaggtaaatgtgaaattaggtcatattaactggccaagtgttggattgattactttgaggtagcagtatacgtatattaagttttataaactagatgaaattgcattctgtttgagactgaaatttaaaaatattgagaataactaagcgacttgaagtgacctcttattccctgggtatacatacagtgtgaccctctcgtgaagtgtggctctgcctggggatcagcacagggtgaatagcaaagtgcgggctgggggtagcacctgtgcccgctgctgagtctcactgaacaggaagggaagcagccagacacgggggcctcctggtgtgatgtagcaggaagtgcagggcgccacccaggaagcatccacgccaaagaaatggagattcagctggacaagtttctaggttcgctactggtttataggaaatatgtggtatacagggagatgtcaaaactccatgggggctgggcgtggtggctcacacctgtaatttcagcactctggggaggttgaggcaggaggattgcttgaggccaggagtttgagacaagcttgggcaacacagtgagatcctgtctactaaaaatcaaaaaacttagctgagtgtggtggtgcatgcctgtagtcctagctatttgggaggctgaggctggaggattgcttaagtctgggaggttgaggctgcagtgagctgtgatccgccattacactccagcctgggtgacagagcaagacttcataacaaacaaacacacaaacaaactccatggggatgcagtcagcaaaatccagaatagagtgaggtctataggaccaatgtctcgggtttccaacaaaacaaatacgtgacaggcaaaaaacaagaggaggggccaggcgaggtggctcatgcctgtaatcccagcactttgggaggccaaggcgggcggataacctgaggtcaggggttccagaccagcctggccaacatggtgaaaccccatctctactaaaaatacagaaattatccaggcatggtggcgggcttctgtaattccagctacttgggaggctgaggcaggagaattgcttgaacctgggaggcagtttgcagtgagctgagatcacgccactgcactccacctgggcaacaagaacgaaactccgtatctaaaaaaaacaaaaaccaaaaagcaaaaaaaaaaccaaggggagaggagaactgttacagatgaagcaatataggagacatattaaccaagtacaatgctggacttcgtttgaatcagattcaaataaaccacttgtaaaaagacatttaagagataatttttaaaaataaaataaaagccaaaaatattaattcttccaatgcatgaaaaaaagagagcaactcggggaaatttgaatgctgactgtgtgtatttgatgatatttgggaattactgttaatttttttgttgtgataatggtagttatgttttaaaaaaagagactttatctcttggagatagctcttaaagatataaatgtttatggctgaaatgttatggcatcttggatttgctttaaaataacccagcttgctgcaggaggtgggtattgtgtgtgtgggaaggtggggaggctgcgggaggaagagatgacccaagattaggcagatgttgttaactgtggaagcagggtggtgagtgggggctcatgacattatgctctctactttgtgtacgtgtgaacatttccgtaataaaagatgccttcagaaacaaaaaaaaaaaaaaaaaagaaaaaaaaaaaaaaaa

SEQ ID NO: 80 - protein, 372 aa, Homosapiens
MRSVLRQRILKPKDVAIYSGEVNQVIADLIKRIYLLRSQAEDGETVTNVNDLFFKYSMEGVATILYESRLGCLENSIPQLTVEYIEALELMFSMFKTSMYAGAIPRWLRPFIPKPWREFCRSWDGLFKFSQIHVDNKLRDIQYQMDRGRRVSGGLLTYLFLSQALTLQEIYANVTEMLLAGVDTTSFTLSWTVYILARHPEVQQTVYREIVKNLGERHVPTAADVPKVPLVRALLKETLRLFPVLPGNGRVTQEDLVIGGYLIPKGTQLALCHYATSYQDENFPRAKEFRPERWLRKGDLDRVDNFGSIPFGHGVRSCIGRRIAELEIHLVVIQLLQHFEIKTSSQTNAVHAKTHGLLTPGGPIHVRFVNRK

SEQ ID NO: 81 - DNA, 2751 bp, Homosapiens
gggagcttccggattgagccggaagtccccccagagcggatgccgcggcgggcctgtgggagcggggtcatcttctctctgctgctgtagctgccatgggcaaaagagaccgagcggaccgcgacaagaagaaatccaggaagcggcactatgaggatgaagaggatgatgaagaggacgccccggggaacgaccctcaggaagcggttccctcggcggcggggaagcaggtggatgagtcaggcaccaaagtggatgaatatggagccaaggactacaggctgcaaatgccgctgaaggacgaccacacctccaggcccctctgggtggctcccgatggccatatcttcttggaagccttctctccagtttacaaatatgcccaagacttcttggtggctattgcagagccagtgtgccgaccaacccatgtgcatgagtacaaactaactgcctactccttgtatgcagctgtcagcgttgggctgcaaaccagtgacatcaccgagtacctcaggaagctcagcaagactggagtccctgatggaattatgcagtttattaagttgtgtactgtcagctatggaaaagtcaagctggtcttgaagcacaacagatacttcgttgaaagttgccaccctgatgtaatccagcatcttctccaggaccccgtgatccgagaatgccgcttaagaaactctgaaggggaggccactgagctcatcacagagactttcacaagcaaatctgccatttctaagactgctgaaagcagtggtgggccctccacttcccgagtgacagatccacagggtaaatctgacatccccatggacctgtttgacttctatgagcaaatggacaaggatgaagaagaagaagaagagacacagacagtgtcttttgaagtcaagcaggaaatgattgaggaactccagaaacgttgcatccacctggagtaccctctgttggcagaatatgacttccggaatgattctgtcaaccctgatatcaacattgacctaaagcccacagctgtcctcagaccctatcaggagaagagcttgcgaaagatgtttggaaacgggcgtgcacgttcgggggtcattgttcttccctgcggtgctggaaagtccctggttggtgtgactgctgcatgcactgtcagaaaacgctgtctggtgctgggcaactcagctgtttctgtggagcagtggaaagcccagttcaagatgtggtccaccattgacgacagccagatctgccggttcacctccgatgccaaggacaagcccatcggctgctccgttgccattagcacctactccatgctgggccacaccaccaaaaggtcctgggaggccgagcgagtcatggagtggctcaagacccaggagtggggcctcatgatcctggatgaagtgcacaccataccagccaagatgttccgaagggtgctcaccatcgtgcaggcccactgtaagctgggtttgactgcgaccctcgtccgcgaagatgacaaaattgtggatttaaattttctgattgggcctaagctctacgaagccaactggatggagctgcagaataatggctacatcgccaaagtccagtgtgctgaggtctggtgccctatgtctcctgaattttaccgggaatatgtggcaatcaaaaccaagaaacgaatcttgctgtacaccatgaaccccaacaaatttagagcttgccagtttctgatcaagtttcatgaaaggaggaatgacaagattattgtctttgctgacaatgtgtttgccctaaaggaatatgccattcgactgaacaaaccctatatctacggacctacgtctcagggggaaaggatgcaaattctccagaatttcaagcacaaccccaaaattaacaccatcttcatatccaaggtaggtgacacttcgtttgatctgccggaagcaaatgtcctcattcagatctcatcccatggtggctccaggcgtcaggaagcccaaaggctagggcgggtgcttcgagctaaaaaagggatggttgcagaagagtacaatgcctttttctactcactggtatcccaggacacacaggaaatggcttactcaaccaagcggcagagattcttggtagatcaaggttatagcttcaaggtgatcacgaaactcgctggcatggaggaggaagacttggcgttttcgacaaaagaagagcaacagcagctcttacagaaagtcctggcagccactgacctggatgccgaggaggaggtggtggctggggaatttggctccagatccagccaggcatctcggcgctttggcaccatgagttctatgtctggggccgacgacactgtgtacatggagtaccactcatcgcggagcaaggcgcccagcaaacatgtacacccgctcttcaagcgctttaggaaatgatgcttaggcagggtacttcgttcaagaccggcgcttggcacccttgttggaaagggattttcagcataacattttccttccacctctttgaccttccctccagcgttggccaaattgtgctgaggaagatgcatcaagggcttggctgtgccttcataggtcatctagggttttataaaggaggaggagacaatattttttcaaactttttggggagtggggtcatttctgtatataaaaaatgttaatatttaaggtgtatttatgttaccgttctgaataaacagaatggaccattgaaccagta

SEQ ID NO: 82 - protein, 782 aa, Homosapiens
MGKRDRADRDKKKSRKRHYEDEEDDEEDAPGNDPQEAVPSAAGKQVDESGTKVDEYGAKDYRLQMPLKDDHTSRPLWVAPDGHIFLEAFSPVYKYAQDFLVAIAEPVCRPTHVHEYKLTAYSLYAAVSVGLQTSDITEYLRKLSKTGVPDGIMQFIKLCTVSYGKVKLVLKHNRYFVESCHPDVIQHLLQDPVIRECRLRNSEGEATELITETFTSKSAISKTAESSGGPSTSRVTDPQGKSDIPMDLFDFYEQMDKDEEEEEETQTVSFEVKQEMIEELQKRCIHLEYPLLAEYDFRNDSVNPDINIDLKPTAVLRPYQEKSLRKMFGNGRARSGVIVLPCGAGKSLVGVTAACTVRKRCLVLGNSAVSVEQWKAQFKMWSTIDDSQICRFTSDAKDKPIGCSVAISTYSMLGHTTKRSWEAERVMEWLKTQEWGLMILDEVHTIPAKMFRRVLTIVQAHCKLGLTATLVREDDKIVDLNFLIGPKLYEANWMELQNNGYIAKVQCAEVWCPMSPEFYREYVAIKTKKRILLYTMNPNKFRACQFLIKFHERRNDKIIVFADNVFALKEYAIRLNKPYIYGPTSQGERMQILQNFKHNPKINTIFISKVGDTSFDLPEANVLIQISSHGGSRRQEAQRLGRVLRAKKGMVAEEYNAFFYSLVSQDTQEMAYSTKRQRFLVDQGYSFKVITKLAGMEEEDLAFSTKEEQQQLLQKVLAATDLDAEEEVVAGEFGSRSSQASRRFGTMSSMSGADDTVYMEYHSSRSKAPSKHVHPLFKRFRK

SEQ ID NO: 83 - DNA, 4941 bp, Homosapiens
gccataaagaatgctgatgggagaaccattttcctaattttcaaattgttgagctgtttgccataatggatgatcagcaagctttgaactcaatcatgcaagatttggctgtccttcataaggccagtcgaccagcattatccttgcaggaaaccagaaaagcaaaatcttcatcaccaaaaaaacagaatgatgtccgagtcaaatttgaacatagaggagaaaaaagaatccttcagttccccagaccagttaaactggaagatctgagatctaaagctaaaattgcctttggacagtctatggatctacattataccaataacgagttggtaattccattaactactcaagatgacttggacaaagctgtggaactgctggatcgtagtattcatatgaagagcctcaagatattacttgtaataaatggaagtacacaggctactaatttagaaccattgccatcactagaagatttggataatacagtatttggagcagagaggaaaaaacggctatctataataggtcctactagtagagatagaagttctcctcccccaggttacattccagatgaattacaccaggttgcccggaatgggtcattcactagtatcaacagtgaaggagagttcattccagagagcatggaccaaatgctggatccattatctttaagcagccctgaaaattctggctcaggaagttgtccatcacttgatagtcctttggatggagagagctatccaaaatcacgaatgcctagggctcagagctacccagataatcatcaggaattttcagactatgataaccctatctttgagaaatttggaaaaggaggaacatatccaagaaggtatcatgtttcatatcatcatcaagagtataatgatggtcgtaaaacttttccaagagctagaaggacccaggggaccagcttacggtctcctgtgagtttcagtcctactgatcattccttaagcactagtagtggaagcagtatctttaccccagagtatgatgatagtcgaataagaagaaggggaagtgacatagacaatcctactttgaccgtaatggacatcagcccacccagccgttcacctcgagctccgaccaactggagattgggcaaactgcttggccaaggagcctttggaagggtctacctctgttatgatgttgatacaggaagagaattggctgttaagcaagttcaatttgaccccgatagtcctgagaccagcaaggaagtaaatgcacttgagtgtgaaattcagttgctgaaaaacttgctacatgagcgaattgttcagtattatggctgtttgagggatccccaggaaaaaacactttccatatttatggaatatatgccagggggttcaattaaggaccaattaaaagcatatggcgctcttactgagaatgtgactaggaaatacacccgtcagattctggagggtgtccattatttgcacagtaatatgattgtccatagagatatcaaaggcgcaaatatcctgcgagattcaacaggcaacgtcaaactaggagattttggggccagcaaacggcttcagaccatctgtctctcagggacaggaatgaagtctgtcacgggcacaccatactggatgagccctgaagtcatcagtggagaaggctatggaagaaaagcagacatctggagtgttgcatgtactgtggtagaaatgctaactgaaaagccgccttgggctgaatttgaagcaatggctgccatctttaaaatcgccactcagccaacaaacccaaagctgccacctcatgtctcagactatactcgagatttcctcaaacggatttttgtagaggccaaactgagaccttcagctgatgaactcttaaggcacatgtttgtgcattatcactagcagccagtaacctctcctgtgcctctacctagctcccatctattcattcaccttctctctgactgcacttttcttttttataaaaaaagagagatgggggagaaaaaagacaagagggaaagtatttctcttgattcttggttaaatttgtttaataataataatatcctaaattttttatatttaatctttttttcccttacaagaacttgaagtttttttttttaatttttataatgtactgatgtggttcagagagataaagcactttagtacatagtcactctttttagtacaaacaaatcatttggaatacctaaagattgtagagtcattccctctatcactgacacatcagtgacgatgggaagacatggaaaacaaggagaagaaaatgatgtataatttgtagtttttagtgatagtatttaaaatatatcctcatttgtggggttgagccctaaactttagtttagggtaggtactcaacttaaagaatataggtttcttcttatatctgtattctttagatcctaacctctgtctaccaacctttttgctcagtaggagtcttgatagaagatatgaatctctgagaggtatgtttatttgttaatcctaaccagtataataagcaaatacactataatagatccacgttactggaatctgtaaaccttgagggatagctttctgcttaaaaacacacacacacacacacacacacacacggaaaacctttattttaaagtcaagttgtgagcaaatagaaataaaagacaaaaggacatcactcttatcaaatgtgtgagcagtagaagagaccacatttacagtcaatagaaataatgaaaaaaaattaggtgtttagtgtattttaaacagttttgttttgttttacttgagggggacgtcccaaaattaaaggaatggagaaataatcaaaatcatgtataccatcttctatttccagctcctgattccccataggtaacatcccttaggagcgaagagttcaattagtaatgtttatgtgttatgtcaggagatgaaacccttgttcttaggatcacagaatactaaagcacctcaaaaaaacaggtatcatgtgaaacagtggttgccaaaagtggagcgaggatgatttcactaggcatttggcaattcttagagacatttccggttgtcacaattggagggatactagtaacatgaattgggtagaggccagggatgttgctaaatagattataatacacaaggaaagcagcctcaaagaattacccctcccaaaatgtcagaagtgctgaggctgagaaaccctgatgtaaagatcagtcccagttataaactgaaaacagctatttacaaagcagtaaatgcaagaaagaaaaggaagtcgcaaagagaaagtgatgtaatgcaaattgaggattttacaagatcagatactgctgctttaagtcaagggtgaataatctcaacaaacagcaaatagcaatcactttaccagctgcatattgcacccacataggtaactcttcattttaggaacaaactgaatttgaacactgagccttttgaactcagccatctctatatattctttccttaaaattcatgattttgggcaaaaaaaaaaaaaaaagcatatcaaaacaaaattttaactactaatgggaaggttaaaaagctgccacgtatttctagtacaatgtatccaataagagcaaggacattgttaaatggaacaagacagctgggaaaggccccactatctctaatagaattgtgctactataaaacatgaagatatcagcaatttggccacttgcagtttttttcagcatgttaaagcaagtgctaagtactttattagtactttatttagtactttattttaaaggtctagaaaacaacagtcttcctggaggccccagaatccctttcatgggattcataagggactcaggtattcttattttctgccaaaaggtgtgcttatttagggactcttttacgatactttgtttctgaagttaggtagatcttggtttactgtgccaaggtcctacctagcattccctgtaggaatatttgaaattccactagctagtctaagaagtcaaagcacaaaattaattgtcaacgcttctctcatattcttaaaattgaagcagtttgcagggaagaacaagaatgaggtgtccctgccttggtaaagcaactgccaaattttgttctagaaagaatccccaagtgtgtggatctattataatttctttatcttttatgaatgagggcatcttttctacttgagcaagatcatggtccttgaccagtgggcttttccttcatatctgtcttgtgtagttgtgcttttcctttggctcgtttttggtctgtcagggtaaccagcagtgcacaatatgagacaaatgctctttagagagaaatctggtgagactgtagaacccagagcaaaactgtttttttttcagtctctgttttcttttctaaatgctatagaaaataaaggcacctgaaaagaaactactactttaacactgctgtggaaggcctttgctttataagaaaaatattattagctatgggaaagtaatgttctttatgtaaagacttaaaaatagactaatagtttacagagttattatataaaatacgatgtgaatttatttcaaacaagttgtgaaggtaccaaaaaccacaataaaagttaatatatataaaaactactagaacaaaaaagcttgaaggtgtgggggtggagggtatggaagaccaaaagtaaatttaaaaaagaaatttttgaaaggaaacagctttatcaggggaagttaaatataacactccgtttttttcttctttctaataatgatatggatcaacaaatgcaatttgaactttttaagataactctaaatgtgttttgtttcttaaatgcacaattgattcttctatactgtaatgcttctttgctgacgctggaaaatgg

SEQ ID NO: 84 - protein, 619 aa, Homosapiens
MDDQQALNSIMQDLAVLHKASRPALSLQETRKAKSSSPKKQNDVRVKFEHRGEKRILQFPRPVKLEDLRSKAKIAFGQSMDLHYTNNELVIPLTTQDDLDKAVELLDRSIHMKSLKILLVINGSTQATNLEPLPSLEDLDNTVFGAERKKRLSIIGPTSRDRSSPPPGYIPDELHQVARNGSFTSINSEGEFIPESMDQMLDPLSLSSPENSGSGSCPSLDSPLDGESYPKSRMPRAQSYPDNHQEFSDYDNPIFEKFGKGGTYPRRYHVSYHHQEYNDGRKTFPRARRTQGTSLRSPVSFSPTDHSLSTSSGSSIFTPEYDDSRIRRRGSDIDNPTLTVMDISPPSRSPRAPTNWRLGKLLGQGAFGRVYLCYDVDTGRELAVKQVQFDPDSPETSKEVNALECEIQLLKNLLHERIVQYYGCLRDPQEKTLSIFMEYMPGGSIKDQLKAYGALTENVTRKYTRQILEGVHYLHSNMIVHRDIKGANILRDSTGNVKLGDFGASKRLQTICLSGTGMKSVTGTPYWMSPEVISGEGYGRKADIWSVACTVVEMLTEKPPWAEFEAMAAIFKIATQPTNPKLPPHVSDYTRDFLKRIFVEAKLRPSADELLRHMFVHYH

SEQ ID NO: 85 - DNA, 1843 bp, Homosapiens
ctgcaggggggggggggggggggggctgtcatggcggcaggacggcgaacttgcagtatctccacgacccgcccctacaggtgccagtgcctccagaatgtggcagctcacaagcctcctgctgttcgtggccacctggggaatttccggcacaccagctcctcttgactcagtgttctccagcagcgagcgtgcccaccaggtgctgcggatccgcaaacgtgccaactccttcctggaggagctccgtcacagcagcctggagcgggagtgcatagaggagatctgtgacttcgaggaggccaaggaaattttccaaaatgtggatgacacactggccttctggtccaagcacgtcgacggtgaccagtgcttggtcttgcccttggagcacccgtgcgccagcctgtgctgcgggcacggcacgtgcatcgacggcatcggcagcttcagctgcgactgccgcagcggctgggagggccgcttctgccagcgcgaggtgagcttcctcaattgctcgctggacaacggcggctgcacgcattactgcctagaggaggtgggctggcggcgctgtagctgtgcgcctggctacaagctgggggacgacctcctgcagtgtcaccccgcagtgaagttcccttgtgggaggccctggaagcggatggagaagaagcgcagtcacctgaaacgagacacagaagaccaagaagaccaagtagatccgcggctcattgatgggaagatgaccaggcggggagacagcccctggcaggtggtcctgctggactcaaagaagaagctggcctgcggggcagtgctcatccacccctcctgggtgctgacagcggcccactgcatggatgagtccaagaagctccttgtcaggcttggagagtatgacctgcggcgctgggagaagtgggagctggacctggacatcaaggaggtcttcgtccaccccaactacagcaagagcaccaccgacaatgacatcgcactgctgcacctggcccagcccgccaccctctcgcagaccatagtgcccatctgcctcccggacagcggccttgcagagcgcgagctcaatcaggccggccaggagaccctcgtgacgggctggggctaccacagcagccgagagaaggaggccaagagaaaccgcaccttcgtcctcaacttcatcaagattcccgtggtcccgcacaatgagtgcagcgaggtcatgagcaacatggtgtctgagaacatgctgtgtgcgggcatcctcggggaccggcaggatgcctgcgagggcgacagtggggggcccatggtcgcctccttccacggcacctggttcctggtgggcctggtgagctggggtgagggctgtgggctccttcacaactacggcgtttacaccaaagtcagccgctacctcgactggatccatgggcacatcagagacaaggaagccccccagaagagctgggcaccttagcgaccctccctgcagggctgggcttttgcatggcaatggatgggacattaaagggacatgtaacaagcacaccggcctgctgttctgtccttccatccctcttttgggctcttctggagggaagtaacatttactgagcacctgttgtatgtcacatgccttatgaatagaatcttaactcctagagcaactctgtggggtggggaggagcagatccaagttttgcggggtctaaagctgtgtgtgttgagggggatactctgtttatgaaaaagaataaaaaacacaaccacgaaaaaaaaaaaaaaaaaaaaaaaaaaaaaaaaaaaaaaaacccccccccgccccccccccctgcag

SEQ ID NO: 86 - protein, 461 aa, Homosapiens
MWQLTSLLLFVATWGISGTPAPLDSVFSSSERAHQVLRIRKRANSFLEELRHSSLERECIEEICDFEEAKEIFQNVDDTLAFWSKHVDGDQCLVLPLEHPCASLCCGHGTCIDGIGSFSCDCRSGWEGRFCQREVSFLNCSLDNGGCTHYCLEEVGWRRCSCAPGYKLGDDLLQCHPAVKFPCGRPWKRMEKKRSHLKRDTEDQEDQVDPRLIDGKMTRRGDSPWQVVLLDSKKKLACGAVLIHPSWVLTAAHCMDESKKLLVRLGEYDLRRWEKWELDLDIKEVFVHPNYSKSTTDNDIALLHLAQPATLSQTIVPICLPDSGLAERELNQAGQETLVTGWGYHSSREKEAKRNRTFVLNFIKIPVVPHNECSEVMSNMVSENMLCAGILGDRQDACEGDSGGPMVASFHGTWFLVGLVSWGEGCGLLHNYGVYTKVSRYLDWIHGHIRDKEAPQKSWAP

SEQ ID NO: 87 - DNA, 2950 bp, Homosapiens
ggtgcttctaggaagtagaacgccggctcgcatgcctgcccgcccgccagcctgccgggtacggccttttccgccggggcttccaggtcaaagaattcgcctttgccgctaccgctttcttaccctccgcacccgttaagttctccggtcgggcggcagtctctgaacacttagccgcgccatccggggtcacaccgcctggaaggaggtgacgggggcggcgcggggcgcggacactccccgctgagagtccgcctgccatggactcggaatattacagcggcgaccagtcagatgatggtggtgctaccccagtacaggatgaacgggattcagggtcagacggtgaggatgatgtaaatgagcaacactccggatcagacactggaagtgtagaacgtcattcagagaatgaaactagtgatcgagaagatggcctccccaaaggacatcatgtgacagactctgagaacgatgagcccttaaatcttaatgctagtgactctgaaagtgaggagcttcacaggcaaaaggacagcgactctgaatctgaggaacgtgcagagcctcctgcaagcgattctgaaaatgaggatgtcaatcagcatgggagcgactctgagagtgaagagaccaggaaattacctggtagtgactctgaaaatgaggaacttcttaatgggcatgcaagtgactcagaaaacgaagatgttgggaagcatcccgccagtgattctgagattgaggagctccagaagagtcctgctagtgactctgaaacagaagatgctctaaaacctcaaatcagtgactctgagagtgaggaacccccaaggcaccaagccagtgactccgaaaatgaggagcctcccaaacctcgaatgagtgattctgaaagtgaggagcttcctaaacctcaggtcagtgattcagaaagtgaggaacccccaaggcaccaggccagtgactctgaaaatgaggagcttcccagacctcgtatcagtgactcagaaagtgaggaccctccgaggcaccaggccagtgactcagaaaatgaagagcttcccaaaccccgaatcagtgattcggaaagtgaggatcccccaaggaaccaggccagtgattcggaaaatgaggagctacccaaaccccgagtcagtgactctgagagtgaggggcctcagaaggggcctgccagtgactcagaaactgaggatgcgtccagacacaaacagaagccagagtcagatgatgacagcgacagggagaataagggagaggatacagaaatgcagaatgactccttccattcagacagccatatggacagaaaaaagtttcacagttctgatagtgaggaggaagaacacaaaaagcaaaaaatggacagtgatgaagatgaaaaagagggtgaggaggagaaagtagcgaagagaaaagctgctgtgctttctgatagtgaagatgaagagaaagcatcagcaaagaagagtcgtgttgtctctgatgcagatgactctgacagtgatgctgtatcagacaagtcaggcaaaagagagaagaccatagcatctgacagtgaggaagaagctgggaaagaattgtctgataagaaaaatgaagagaaggatctgtttgggagtgacagtgagtcaggcaatgaagaagaaaatcttattgcagacatatttggagaatctggtgatgaagaggaagaagaatttacaggttttaaccaagaagatctggaagaagaaaaaggtgaaacacaggtaaaagaagcagaagattcagattctgatgataacataaagagaggaaaacatatggactttctgtcagattttgagatgatgttgcagcgaaaaaagagcatgagtggcaagcgcagacggaaccgcgatggtggcacctttattagtgatgcagacgacgacgtgagtgccatgatcgtcaagatgaatgaagctgctgaggaagacagacagttgaacaatcaaaaaaagccagcactgaaaaaattaactttactgcctgctgtagttatgcaccttaagaagcaggaccttaaagaaacattcattgacagtggtgtgatgtctgccatcaaagaatggctctcacctctaccagataggagtttgcctgcactcaagatccgggaggagctgctgaagatcctgcaagagctgcctagtgtgagccaggagaccctgaagcatagtgggattggacgagcagtgatgtatctctataaacaccccaaggagtcaaggtctaacaaggacatggcagggaaattaatcaatgagtggtctaggcctatatttggtcttacctcaaactacaaaggaatgacaagagaagaaagggagcagagagatctagaacagatgcctcaacgacgaagaatgaacagcactggtggtcagacacccagaagagacctggaaaaggtgctgacaggagaggagaaggctcttagacctggagatcctggattctgtgcccgtgcaagggtcccaatgccttcaaacaaggactatgttgtcaggcccaaatggaatgtggaaatggagtcatccaggtttcaggcgacctccaagaagggtatcggtcgactggataaacagatgagaaagttcacagatataaggaaaaaaagcagatctgcacacgcagtgaaaatcagcattgagggcaacaaaatgccattgtgaccttgcctggaatgtgtccccatctctactctaagaaatgcgcaatggactctttggagaaagaagatattttaaaacatttttagtgtgtctgtaaatggttcagcgtgtatcagatgttgtcataggactcacatttctctcagttatatttaaaaccgttgtgtactttgtacaaaggaatactagtcatacttctataaactttacacaataaaatttcattctgg

SEQ ID NO: 88 - protein, 819 aa, Homosapiens
MDSEYYSGDQSDDGGATPVQDERDSGSDGEDDVNEQHSGSDTGSVERHSENETSDREDGLPKGHHVTDSENDEPLNLNASDSESEELHRQKDSDSESEERAEPPASDSENEDVNQHGSDSESEETRKLPGSDSENEELLNGHASDSENEDVGKHPASDSEIEELQKSPASDSETEDALKPQISDSESEEPPRHQASDSENEEPPKPRMSDSESEELPKPQVSDSESEEPPRHQASDSENEELPRPRISDSESEDPPRHQASDSENEELPKPRISDSESEDPPRNQASDSENEELPKPRVSDSESEGPQKGPASDSETEDASRHKQKPESDDDSDRENKGEDTEMQNDSFHSDSHMDRKKFHSSDSEEEEHKKQKMDSDEDEKEGEEEKVAKRKAAVLSDSEDEEKASAKKSRVVSDADDSDSDAVSDKSGKREKTIASDSEEEAGKELSDKKNEEKDLFGSDSESGNEEENLIADIFGESGDEEEEEFTGFNQEDLEEEKGETQVKEAEDSDSDDNIKRGKHMDFLSDFEMMLQRKKSMSGKRRRNRDGGTFISDADDDVSAMIVKMNEAAEEDRQLNNQKKPALKKLTLLPAVVMHLKKQDLKETFIDSGVMSAIKEWLSPLPDRSLPALKIREELLKILQELPSVSQETLKHSGIGRAVMYLYKHPKESRSNKDMAGKLINEWSRPIFGLTSNYKGMTREEREQRDLEQMPQRRRMNSTGGQTPRRDLEKVLTGEEKALRPGDPGFCARARVPMPSNKDYVVRPKWNVEMESSRFQATSKKGIGRLDKQMRKFTDIRKKSRSAHAVKISIEGNKMPL

SEQ ID NO: 89 - DNA, 1278 bp, Homosapiens
gcttcgcggcggaggcccgggcaactcttttgaatggaatcgggctgattcatcgccggtttgcagacagagccgcgtcgggtgtgcgccgctgctgctgttgcctctgtcttcgcgtcaccacagaggcaagacaagggtccatatcgcggcatccggctcccgcccgtcttcaggagagaaagaaaaaataaaatatacttggggaagttgtacctgccagaattagcaagagctttctttaagaagacatttgtcaaactcaacaaattgaaggttaacaccttaagagttgtagttactgaccagaaatatggacagacttcttagacttggaggaggtatgcctggactgggccaggggccacctacagatgctcctgcagtggacacagcagaacaagtctatatctcttccctggcactgttaaaaatgttaaaacatggccgtgctggagttccaatggaagttatgggtttgatgcttggagaatttgttgatgattataccgtcagagtgattgatgtgtttgctatgccacagtcaggaacaggtgtcagtgtggaggcagttgatccagtgttccaagctaaaatgttggatatgttgaagcagacaggaaggccggagatggttgttggttggtatcacagtcaccctggctttggttgttggctttctggtgtggatatcaacactcagcagagctttgaagccttgtcggagagagctgtggcagtggttgtggatcccattcagagtgtaaaaggaaaggttgttattgatgccttcagattgatcaatgctaatatgatggtcttaggacatgaaccaagacaaacaacttcgaatctgggtcacttaaacaagccatctatccaggcattaattcatggactaaacagacattattactccattactattaactatcggaaaaatgaactggaacagaagatgttgctaaatttgcataagaagagttggatggaaggtttgacacttcaggactacagtgaacattgtaaacacaatgaatcagtggtaaaggagatgttggaattagccaagaattacaataaggctgtagaagaagaagataagatgacacctgaacagctggcaataaagaatgttggcaagcaggaccccaaacgtcatttggaggaacatgtggatgtacttatgacctcaaatattgtccagtgtttagcagctatgttggatactgtcgtatttaaataaagcaacgaaaaacgccaaaaaaaaaaaaaaaa

SEQ ID NO: 90 - protein, 310 aa, Homosapiens
MDRLLRLGGGMPGLGQGPPTDAPAVDTAEQVYISSLALLKMLKHGRAGVPMEVMGLMLGEFVDDYTVRVIDVFAMPQSGTGVSVEAVDPVFQAKMLDMLKQTGRPEMVVGWYHSHPGFGCWLSGVDINTQQSFEALSERAVAVVVDPIQSVKGKVVIDAFRLINANMMVLGHEPRQTTSNLGHLNKPSIQALIHGLNRHYYSITINYRKNELEQKMLLNLHKKSWMEGLTLQDYSEHCKHNESVVKEMLELAKNYNKAVEEEDKMTPEQLAIKNVGKQDPKRHLEEHVDVLMTSNIVQCLAAMLDTVVFK

SEQ ID NO: 91 - DNA, 3186 bp, Homosapiens
caggtgattatcctaattaatgtctatctaattaaattactgtcagcagctaaccaatggcaggagccgtttcatcggctgcacaagcagcaagatcaaaagtgagccttttctgattgctgcatagtgtcaattggccaatctcttctcccagggaaaaaaaaaagtaaatcaaacctttgagaagcatttgctggttgaagtgctttctgtctagtgagggggtctgtggatttctagtttatgataaataggactttaaaaaccagggacgggagggcgagtgttcaggttctagagctatgcagctggagcactgcctttctccttctatcatgctctccaagaaatttctcaatgtgagcagcagctacccacattcaggcggatccgagcttgtcttgcacgatcatcccattatctcgaccactgacaacctggagagaagttcacctttgaaaaaaattaccagggggatgacgaatcagtcagatacagacaattttcctgactccaaggactcaccaggggacgtccagagaagtaaactctctcctgtcttggacggggtctctgagcttcgtcacagtttcgatggctctgctgcagatcgctacctcctctctcagtccagccagccacagtctgcggccactgctcccagtgccatgttcccgtaccccggccagcacggaccggcgcaccccgccttctccatcggcagccctagccgctacatggcccaccacccggtcatcaccaacggagcctacaacagcctcctgtccaactcctcgccgcagggataccccacggccggctacccctacccacagcagtacggccactcctaccaaggagctccgttctaccagttctcctccacccagccggggctggtgcccggcaaagcacaggtgtacctgtgcaacaggcccctttggctgaaatttcaccggcaccaaacggagatgatcatcaccaaacagggaaggcgcatgtttccttttttaagttttaacatttctggtctcgatcccacggctcattacaatatttttgtggatgtgattttggcggatcccaatcactggaggtttcaaggaggcaaatgggttccttgcggcaaagcggacaccaatgtgcaaggaaatcgggtctatatgcatccggattcccccaacactggggctcactggatgcgccaagaaatctcttttggaaaattaaaacttacgaacaacaaaggagcttcaaataacaatgggcagatggtggttttacagtccttgcacaagtaccagccccgcctgcatgtggtggaagtgaacgaggacggcacggaggacactagccagcccggccgcgtgcagacgttcactttccctgagactcagttcatcgccgtcaccgcctaccagaacacggatattacacaactgaaaatagatcacaacccttttgcaaaaggatttcgggataattatgacacgatctacaccggctgtgacatggaccgcctgaccccctcgcccaacgactcgccgcgctcgcagatcgtgcccggggcccgctacgccatggccggctctttcctgcaggaccagttcgtgagcaactacgccaaggcccgcttccacccgggcgcgggcgcgggccccgggccgggtacggaccgcagcgtgccgcacaccaacgggctgctgtcgccgcagcaggccgaggacccgggcgcgccctcgccgcaacgctggtttgtgacgccggccaacaaccggctggacttcgcggcctcggcctatgacacggccacggacttcgcgggcaacgcggccacgctgctctcttacgcggcggcgggcgtgaaggcgctgccgctgcaggctgcaggctgcactggccgcccgctcggctactacgccgacccgtcgggctggggcgcccgcagtcccccgcagtactgcggcaccaagtcgggctcggtgctgccctgctggcccaacagcgccgcggccgccgcgcgcatggccggcgccaatccctacctgggcgaggaggccgagggcctggccgccgagcgctcgccgctgccgcccggcgccgccgaggacgccaagcccaaggacctgtccgattccagctggatcgagacgccctcctcgatcaagtccatcgactccagcgactcggggatttacgagcaggccaagcggaggcggatctcgccggccgacacgcccgtgtccgagagttcgtccccgctcaagagcgaggtgctggcccagcgggactgcgagaagaactgcgccaaggacattagcggctactatggcttctactcgcacagctaggccgcccctgcccgcccggccccgccgcggcccggacccccagccagcccctcacagctcttccccagctccgcctccccacactcctccttgcgcacccactcattttatttgaccctcgatggccgtctgcagcgaataagtgcaggtctccgagcgtgattttaaccttttttgcacagcagtctctgcaattagctcaccgaccttcaactttgctgtaaaccttttggttttcctacttactcttcttctgtggagttatcctcctacaattcccctccccctcgtctttctcttacctcctacttctctttcttgtaatgaaactcttcacctttaggagacctgggcagtcctgtcaggcagcagcgattccgacccgccaagtctcggcctccacattaaccataggatgttgactctagaacctggacccacccagcgcgtcctttcttatccccgagtggatggatggatggatggatggtagggatgttaataattttagtggaacaaagcctgtgaaatgattgtacatagtgttaatttattgtaacgaatggctagtttttattctcgtcaaggcacaaaaccagttcatgcttaacctttttttcctttcctttctttgcttttctttctctcctctcatactttctcttctctctcttttaattttcttgtgagataatattctaagaggctctagaaacatgaaatactcagtagtgatgggtttcccacttctcctcaatccgttgcatgaaataattactatgtgccctaatgcacacaaatagctaaggagaatccacccaaacacctttaaagg

SEQ ID NO: 92 - protein, 682 aa, Homosapiens
MQLEHCLSPSIMLSKKFLNVSSSYPHSGGSELVLHDHPIISTTDNLERSSPLKKITRGMTNQSDTDNFPDSKDSPGDVQRSKLSPVLDGVSELRHSFDGSAADRYLLSQSSQPQSAATAPSAMFPYPGQHGPAHPAFSIGSPSRYMAHHPVITNGAYNSLLSNSSPQGYPTAGYPYPQQYGHSYQGAPFYQFSSTQPGLVPGKAQVYLCNRPLWLKFHRHQTEMIITKQGRRMFPFLSFNISGLDPTAHYNIFVDVILADPNHWRFQGGKWVPCGKADTNVQGNRVYMHPDSPNTGAHWMRQEISFGKLKLTNNKGASNNNGQMVVLQSLHKYQPRLHVVEVNEDGTEDTSQPGRVQTFTFPETQFIAVTAYQNTDITQLKIDHNPFAKGFRDNYDTIYTGCDMDRLTPSPNDSPRSQIVPGARYAMAGSFLQDQFVSNYAKARFHPGAGAGPGPGTDRSVPHTNGLLSPQQAEDPGAPSPQRWFVTPANNRLDFAASAYDTATDFAGNAATLLSYAAAGVKALPLQAAGCTGRPLGYYADPSGWGARSPPQYCGTKSGSVLPCWPNSAAAAARMAGANPYLGEEAEGLAAERSPLPPGAAEDAKPKDLSDSSWIETPSSIKSIDSSDSGIYEQAKRRRISPADTPVSESSSPLKSEVLAQRDCEKNCAKDISGYYGFYSHS

SEQ ID NO: 93 - DNA, 3929 bp, Homosapiens
ctaagcagagcgagtgccgggctgagtgtaagacactgaagacactgcagagcaaggtgcttattccagaggcgttacaaaacatggagattaaagaccagggagcccaaatggagccgctgctgcctacgagaaatgatgaagaagcagttgtggatagaggtggaactcgttctattctcaaaacacactttgagaaagaagatttagaaggtcatcgaacactatttattggagtacatgtgcccttgggaggaagaaaaagccatcgacgtcacaggcatcgtggtcataaacacagaaagagagacagagaaagagattcaggattagaggatggaagggagtcaccttcttttgacaccccatcacagagggtacagtttattcttggaaccgaggatgatgacgaggaacacattcctcatgaccttttcacagaactggatgagatttgttggcgtgaaggtgaggacgctgagtggcgagaaacagccaggtggttgaagtttgaagaagatgtggaagatggaggagaaaggtggagcaagccttatgtggctactctttcattgcacagcttgtttgaattgagaagttgtattctgaatggaactgtgttgctggacatgcatgccaacactttagaagaaattgcagatatggttcttgaccaacaagtgagctcaggtcagctgaatgaagatgtacgccatagggtccatgaggcattgatgaaacagcatcatcatcagaatcagaaaaaactcaccaacaggattcccattgttcgttcctttgctgatattggcaagaaacagtcagaaccaaattccatggacaaaaatgcaggtcaggttgtttctcctcagtctgctccagcctgtgttgaaaataaaaatgatgttagcagagaaaacagcactgttgactttagcaaggttgatctgcattttatgaaaaagattcctccaggtgctgaagcatcgaacatcttactgggagaactggagttcttggatcgaacagtagttgcgtttgtcaggttgtctccagctgtattgcttcaaggactggctgaagtcccaatcccaaccagatttttgttcattcttctgggacccctgggaaagggtcaacagtaccatgagattggcagatcaattgcaaccctaatgacagatgaggtatttcatgatgttgcctataaagctaaagatcgtaatgacttggtatcaggaattgatgagtttctggatcaggttactgttctccctcctggagaatgggatccaagcattcgaatagagcctcccaaaaatgttccttcccaggagaagaggaagattcctgctgtaccaaatggaacagcagctcatggggaagcagagccccacggaggacatagtggacctgaactccagcgaactggaaggatttttgggggacttattttagatatcaaaagaaaagctccatacttctggagtgacttcagagatgctttcagcctgcagtgcttagcatcttttctatttctctactgcgcgtgtatgtctcctgtcatcacgtttggaggactgctgggagaagcaactgaagggcgtataagtgcaattgaatctctctttggagcatccatgaccgggatagcctattctctctttggtggacagcctcttaccatattaggcagtacaggaccagttttggtgtttgaaaagattttgtttaaattttgcaaagaatatgggctgtcatacctatctttaagagctagcattggactttggactgcaactctatgtatcatacttgtggccacagatgctagttcccttgtctgctacatcactcggtttactgaagaagcttttgcttccctgatttgcatcattttcatttatgaggccctggagaagttgtttgaactcagtgaagcatatccaatcaacatgcataatgatctggaactgctgacacaatactcgtgtaactgtgtggaaccgcataatcccagcaatggcacattgaaggaatggagggaatccaatatttctgcctctgacataatttgggagaacctaactgtgtcagaatgcaaatcattgcatggagagtatgttggacgggcctgtggccatgatcacccatatgttccagatgttctattttggtctgtgatcctgttcttttccacagttactctgtcagccaccctgaagcagttcaagactagcagatattttccaaccaaggttcgatccatagtgagtgactttgctgtctttcttacaattctgtgtatggttttaattgactatgccattgggatcccatctccaaaactacaagtaccaagtgttttcaagcccactagagatgatcgtggctggtttgttacgcctttaggtccaaacccatggtggacagtaatagctgctataattccagctctgctttgtactattctaattttcatggaccaacagattacagctgtcatcatcaacaggaaagagcataagctaaagaaaggttgtgggtaccatctggacctattaatggtggctgtcatgctcggtgtatgctccatcatgggcctgccatggtttgtggctgccacagtcctctccatcactcatgtcaatagcctaaaactggaatcagaatgctcagctccaggagaacaacccaaatttctcggcattcgggagcaaagggttactgggcttatgatttttattcttatgggttcatcagtctttatgaccagtattctgaagtttattcccatgccagtgctatatggagtgtttctttatatgggtgcttcatctctaaagggaattcagttctttgataggataaagctcttctggatgccggcaaaacatcaaccagattttatatacctaaggcacgtaccgcttcgaaaagtgcatctcttcacaattattcagatgagttgccttggccttttgtggataataaaagtttcaagagctgctattgtctctcccatgatggtgttatccctggtttttgtaagaaagttgatggacttgttgttcacgaaacgggaactctgctggttggatgatttgatgcctgagagtaagaaaaagaaactggaatatgctgaaaaagaagaagaacaatgtgtgctacctatggaagatgagggcacagtacaactcccattggaagggcactatagagatgatccatctgtgatcaatatatctgatgaaatgtcaaagactgccttgtggaggaaccttctgattactgccgataactcaaaagataaggagtcaagctttccttccaaaagctccccttcctaatcactctagaagctgattccccaaagcattgaaagccgaaaagagaagaaagctgactcagggatagttgttgacagggagacttgtctatgactcgatcttcaatttattttttacatatatatgagaagagtgtcacaattattaataaaactgcttggatcatgtatggtaaattctgtccctcaacccaaatccactttcatacggtaagtagggcaaaacttgtttcatttcggtgttaaaatttcggagcaggagacatccctgtgagcagaaacaatagccaatgcagaatctgtgtgttccttgctgaacgtaagacatttgtaaactggattctgattgtcagttttatgagagcaatagcttccttaaagagataagtcatatacacctagtttgtattctcatactttagagacctgaagacgcctgataatttcattcaggagaatttttgaaaggtagtcaaacttctttttagtttttatagcttagcattagtgacttatttcaaaagacccaaatcaaaaagttagtttgaaagcattttttaataattgtatttatgcattt

SEQ ID NO: 94 - protein, 1088 aa, Homosapiens
MEIKDQGAQMEPLLPTRNDEEAVVDRGGTRSILKTHFEKEDLEGHRTLFIGVHVPLGGRKSHRRHRHRGHKHRKRDRERDSGLEDGRESPSFDTPSQRVQFILGTEDDDEEHIPHDLFTELDEICWREGEDAEWRETARWLKFEEDVEDGGERWSKPYVATLSLHSLFELRSCILNGTVLLDMHANTLEEIADMVLDQQVSSGQLNEDVRHRVHEALMKQHHHQNQKKLTNRIPIVRSFADIGKKQSEPNSMDKNAGQVVSPQSAPACVENKNDVSRENSTVDFSKVDLHFMKKIPPGAEASNILLGELEFLDRTVVAFVRLSPAVLLQGLAEVPIPTRFLFILLGPLGKGQQYHEIGRSIATLMTDEVFHDVAYKAKDRNDLVSGIDEFLDQVTVLPPGEWDPSIRIEPPKNVPSQEKRKIPAVPNGTAAHGEAEPHGGHSGPELQRTGRIFGGLILDIKRKAPYFWSDFRDAFSLQCLASFLFLYCACMSPVITFGGLLGEATEGRISAIESLFGASMTGIAYSLFGGQPLTILGSTGPVLVFEKILFKFCKEYGLSYLSLRASIGLWTATLCIILVATDASSLVCYITRFTEEAFASLICIIFIYEALEKLFELSEAYPINMHNDLELLTQYSCNCVEPHNPSNGTLKEWRESNISASDIIWENLTVSECKSLHGEYVGRACGHDHPYVPDVLFWSVILFFSTVTLSATLKQFKTSRYFPTKVRSIVSDFAVFLTILCMVLIDYAIGIPSPKLQVPSVFKPTRDDRGWFVTPLGPNPWWTVIAAIIPALLCTILIFMDQQITAVIINRKEHKLKKGCGYHLDLLMVAVMLGVCSIMGLPWFVAATVLSITHVNSLKLESECSAPGEQPKFLGIREQRVTGLMIFILMGSSVFMTSILKFIPMPVLYGVFLYMGASSLKGIQFFDRIKLFWMPAKHQPDFIYLRHVPLRKVHLFTIIQMSCLGLLWIIKVSRAAIVSPMMVLSLVFVRKLMDLLFTKRELCWLDDLMPESKKKKLEYAEKEEEQCVLPMEDEGTVQLPLEGHYRDDPSVINISDEMSKTALWRNLLITADNSKDKESSFPSKSSPS

SEQ ID NO: 95 - DNA, 3913 bp, Homosapiens
ctttcactggcaagagacggagtcctgggtttcagttccagttgcctgcggtgggctgtgtgagtttgccaaagtcccctgccctctctgggtctcggttccctcgcctgtccacgtgaggttggaggagctgaacgccgacgtcatttttagctaagagggagcagggtccccgagtcgccggcccagggtctgcgcatccgaggccgcgcgccctttcccctcccccacggctcctccgggccccgcactctgcgccccggctgccgcccagcgccctacaccgccctcagggggccctcgcgggctccccccggccgggatgccagtgccccgcgccacgcgcgcctgctcccgcgccgcctgccctgcagcctgcccgcggcgcctttatacccagcgggctcggcgctcactaatgtttaactcggggccgaaacttgccagcggcgagtgactccaccgcccggagcagcggtgcaggacgcgcgtctccgccgcccgcggtgacttctgcctgcgctccttctctgaacgctcacttccgaggagacgccgacgatgaagacaccgtggaaggttcttctgggactgctgggtgctgctgcgcttgtcaccatcatcaccgtgcccgtggttctgctgaacaaaggcacagatgatgctacagctgacagtcgcaaaacttacactctaactgattacttaaaaaatacttatagactgaagttatactccttaagatggatttcagatcatgaatatctctacaaacaagaaaataatatcttggtattcaatgctgaatatggaaacagctcagttttcttggagaacagtacatttgatgagtttggacattctatcaatgattattcaatatctcctgatgggcagtttattctcttagaatacaactacgtgaagcaatggaggcattcctacacagcttcatatgacatttatgatttaaataaaaggcagctgattacagaagagaggattccaaacaacacacagtgggtcacatggtcaccagtgggtcataaattggcatatgtttggaacaatgacatttatgttaaaattgaaccaaatttaccaagttacagaatcacatggacggggaaagaagatataatatataatggaataactgactgggtttatgaagaggaagtcttcagtgcctactctgctctgtggtggtctccaaacggcacttttttagcatatgcccaatttaacgacacagaagtcccacttattgaatactccttctactctgatgagtcactgcagtacccaaagactgtacgggttccatatccaaaggcaggagctgtgaatccaactgtaaagttctttgttgtaaatacagactctctcagctcagtcaccaatgcaacttccatacaaatcactgctcctgcttctatgttgataggggatcactacttgtgtgatgtgacatgggcaacacaagaaagaatttctttgcagtggctcaggaggattcagaactattcggtcatggatatttgtgactatgatgaatccagtggaagatggaactgcttagtggcacggcaacacattgaaatgagtactactggctgggttggaagatttaggccttcagaacctcattttacccttgatggtaatagcttctacaagatcatcagcaatgaagaaggttacagacacatttgctatttccaaatagataaaaaagactgcacatttattacaaaaggcacctgggaagtcatcgggatagaagctctaaccagtgattatctatactacattagtaatgaatataaaggaatgccaggaggaaggaatctttataaaatccaacttagtgactatacaaaagtgacatgcctcagttgtgagctgaatccggaaaggtgtcagtactattctgtgtcattcagtaaagaggcgaagtattatcagctgagatgttccggtcctggtctgcccctctatactctacacagcagcgtgaatgataaagggctgagagtcctggaagacaattcagctttggataaaatgctgcagaatgtccagatgccctccaaaaaactggacttcattattttgaatgaaacaaaattttggtatcagatgatcttgcctcctcattttgataaatccaagaaatatcctctactattagatgtgtatgcaggcccatgtagtcaaaaagcagacactgtcttcagactgaactgggccacttaccttgcaagcacagaaaacattatagtagctagctttgatggcagaggaagtggttaccaaggagataagatcatgcatgcaatcaacagaagactgggaacatttgaagttgaagatcaaattgaagcagccagacaattttcaaaaatgggatttgtggacaacaaacgaattgcaatttggggctggtcatatggagggtacgtaacctcaatggtcctgggatcgggaagtggcgtgttcaagtgtggaatagccgtggcgcctgtatcccggtgggagtactatgactcagtgtacacagaacgttacatgggtctcccaactccagaagacaaccttgaccattacagaaattcaacagtcatgagcagagctgaaaattttaaacaagttgagtacctccttattcatggaacagcagatgataacgttcactttcagcagtcagctcagatctccaaagccctggtcgatgttggagtggatttccaggcaatgtggtatactgatgaagaccatggaatagctagcagcacagcacaccaacatatatatacccacatgagccacttcataaaacaatgtttctctttaccttagcacctcaaaataccatgccatttaaagcttattaaaactcatttttgttttcattatctcaaaactgcactgtcaagatgatgatgatctttaaaatacacactcaaatcaagaaacttaaggttacctttgttcccaaatttcatacctatcatcttaagtagggacttctgtcttcacaacagattattaccttacagaagtttgaattatccggtcgggttttattgtttaaaatcatttctgcatcagctgctgaaacaacaaataggaattgtttttatggaggctttgcatagattccctgagcaggattttaatctttttctaactggactggttcaaatgttgttctcttctttaaagggatggcaagatgtgggcagtgatgtcactagggcagggacaggataagagggattagggagagaagatagcagggcatggctgggaacccaagtccaagcataccaacacgagcaggctactgtcagctcccctcggagaagagctgttcacagccagactggcacagttttctgagaaagactattcaaacagtctcaggaaatcaaatatgcaaagcactgacttctaagtaaaaccacagcagttgaaaagactccaaagaaatgtaagggaaactgccagcaacgcaggcccccaggtgccagttatggctataggtgctacaaaaacacagcaagggtgatgggaaagcattgtaaatgtgcttttaaaaaaaaatactgatgttcctagtgaaagaggcagcttgaaactgagatgtgaacacatcagcttgccctgttaaaagatgaaaatatttgtatcacaaatcttaacttgaaggagtccttgcatcaatttttcttatttcatttctttgagtgtcttaattaaaagaatattttaacttccttggactcattttaaaaaatggaacataaaatacaatgttatgtattattattcccattctacatactatggaatttctcccagtcatttaataaatgtgccttcattttttcagaaaaaaaaaaaaaaa

SEQ ID NO: 96 - protein, 766 aa, Homosapiens
MKTPWKVLLGLLGAAALVTIITVPVVLLNKGTDDATADSRKTYTLTDYLKNTYRLKLYSLRWISDHEYLYKQENNILVFNAEYGNSSVFLENSTFDEFGHSINDYSISPDGQFILLEYNYVKQWRHSYTASYDIYDLNKRQLITEERIPNNTQWVTWSPVGHKLAYVWNNDIYVKIEPNLPSYRITWTGKEDIIYNGITDWVYEEEVFSAYSALWWSPNGTFLAYAQFNDTEVPLIEYSFYSDESLQYPKTVRVPYPKAGAVNPTVKFFVVNTDSLSSVTNATSIQITAPASMLIGDHYLCDVTWATQERISLQWLRRIQNYSVMDICDYDESSGRWNCLVARQHIEMSTTGWVGRFRPSEPHFTLDGNSFYKIISNEEGYRHICYFQIDKKDCTFITKGTWEVIGIEALTSDYLYYISNEYKGMPGGRNLYKIQLSDYTKVTCLSCELNPERCQYYSVSFSKEAKYYQLRCSGPGLPLYTLHSSVNDKGLRVLEDNSALDKMLQNVQMPSKKLDFIILNETKFWYQMILPPHFDKSKKYPLLLDVYAGPCSQKADTVFRLNWATYLASTENIIVASFDGRGSGYQGDKIMHAINRRLGTFEVEDQIEAARQFSKMGFVDNKRIAIWGWSYGGYVTSMVLGSGSGVFKCGIAVAPVSRWEYYDSVYTERYMGLPTPEDNLDHYRNSTVMSRAENFKQVEYLLIHGTADDNVHFQQSAQISKALVDVGVDFQAMWYTDEDHGIASSTAHQHIYTHMSHFIKQCFSLP

SEQ ID NO: 97 - DNA, 1128 bp, Homosapiens
acagagcttaggacacagagcacatcaaaagttcccaaagagggcttgctctctcttcacctgctctgttctacagcacactaccagaagacagcagaaatgaaaagcatttactttgtggctggattatttgtaatgctggtacaaggcagctggcaacgttcccttcaagacacagaggagaaatccagatcattctcagcttcccaggcagacccactcagtgatcctgatcagatgaacgaggacaagcgccattcacagggcacattcaccagtgactacagcaagtatctggactccaggcgtgcccaagattttgtgcagtggttgatgaataccaagaggaacaggaataacattgccaaacgtcacgatgaatttgagagacatgctgaagggacctttaccagtgatgtaagttcttatttggaaggccaagctgccaaggaattcattgcttggctggtgaaaggccgaggaaggcgagatttcccagaagaggtcgccattgttgaagaacttggccgcagacatgctgatggttctttctctgatgagatgaacaccattcttgataatcttgccgccagggactttataaactggttgattcagaccaaaatcactgacaggaaataactatatcactattcaagatcatcttcacaacatcacctgctagccacgtgggatgtttgaaatgttaagtcctgtaaatttaagaggtgtattctgaggccacattgctttgcatgccaataaataaattttcttttagtgttgtgtagccaaaaattacaaatggaataaagttttatcaaaatattgctaaaatatcagctttaaaatatgaaagtgctagattctgttattttcttcttattttggatgaagtaccccaacctgtttacatttagcgataaaattatttttctatgatataatttgtaaatgtaaattattccgatctgacatatctgcattataataataggagaatagaagaactggtagccacagtggtgaaattggaaagagaactttcttcctgaaacctttgtcttaaaaatactcagctttcaatgtatcaaagatacaattaaataaaattttcaagcttcttta

SEQ ID NO: 98 - protein, 180 aa, Homosapiens
MKSIYFVAGLFVMLVQGSWQRSLQDTEEKSRSFSASQADPLSDPDQMNEDKRHSQGTFTSDYSKYLDSRRAQDFVQWLMNTKRNRNNIAKRHDEFERHAEGTFTSDVSSYLEGQAAKEFIAWLVKGRGRRDFPEEVAIVEELGRRHADGSFSDEMNTILDNLAARDFINWLIQTKITDRK

SEQ ID NO: 99 - DNA, 2788 bp, Homosapiens
aagaacgcccccaaaatctgtttctaattttacagaaatcttttgaaacttggcacggtattcaaaagtccgtggaaagaaaaaaaccttgtcctggcttcagcttccaactacaaagacagacttggtccttttcaacggttttcacagatccagtgacccacgctctgaagacagaattagctaactttcaaaaacatctggaaaaatgaagacttgggtaaaaatcgtatttggagttgccacctctgctgtgcttgccttattggtgatgtgcattgtcttacgcccttcaagagttcataactctgaagaaaatacaatgagagcactcacactgaaggatattttaaatggaacattttcttataaaacattttttccaaactggatttcaggacaagaatatcttcatcaatctgcagataacaatatagtactttataatattgaaacaggacaatcatataccattttgagtaatagaaccatgaaaagtgtgaatgcttcaaattacggcttatcacctgatcggcaatttgtatatctagaaagtgattattcaaagctttggagatactcttacacagcaacatattacatctatgaccttagcaatggagaatttgtaagaggaaatgagcttcctcgtccaattcagtatttatgctggtcgcctgttgggagtaaattagcatatgtctatcaaaacaatatctatttgaaacaaagaccaggagatccaccttttcaaataacatttaatggaagagaaaataaaatatttaatggaatcccagactgggtttatgaagaggaaatgcttgctacaaaatatgctctctggtggtctcctaatggaaaatttttggcatatgcggaatttaatgatacggatataccagttattgcctattcctattatggcgatgaacaatatcctagaacaataaatattccatacccaaaggctggagctaagaatcccgttgttcggatatttattatcgataccacttaccctgcgtatgtaggtccccaggaagtgcctgttccagcaatgatagcctcaagtgattattatttcagttggctcacgtgggttactgatgaacgagtatgtttgcagtggctaaaaagagtccagaatgtttcggtcctgtctatatgtgacttcagggaagactggcagacatgggattgtccaaagacccaggagcatatagaagaaagcagaactggatgggctggtggattctttgtttcaacaccagttttcagctatgatgccatttcgtactacaaaatatttagtgacaaggatggctacaaacatattcactatatcaaagacactgtggaaaatgctattcaaattacaagtggcaagtgggaggccataaatatattcagagtaacacaggattcactgttttattctagcaatgaatttgaagaataccctggaagaagaaacatctacagaattagcattggaagctatcctccaagcaagaagtgtgttacttgccatctaaggaaagaaaggtgccaatattacacagcaagtttcagcgactacgccaagtactatgcacttgtctgctacggcccaggcatccccatttccacccttcatgatggacgcactgatcaagaaattaaaatcctggaagaaaacaaggaattggaaaatgctttgaaaaatatccagctgcctaaagaggaaattaagaaacttgaagtagatgaaattactttatggtacaagatgattcttcctcctcaatttgacagatcaaagaagtatcccttgctaattcaagtgtatggtggtccctgcagtcagagtgtaaggtctgtatttgctgttaattggatatcttatcttgcaagtaaggaagggatggtcattgccttggtggatggtcgaggaacagctttccaaggtgacaaactcctctatgcagtgtatcgaaagctgggtgtttatgaagttgaagaccagattacagctgtcagaaaattcatagaaatgggtttcattgatgaaaaaagaatagccatatggggctggtcctatggaggatacgtttcatcactggcccttgcatctggaactggtcttttcaaatgtggtatagcagtggctccagtctccagctgggaatattacgcgtctgtctacacagagagattcatgggtctcccaacaaaggatgataatcttgagcactataagaattcaactgtgatggcaagagcagaatatttcagaaatgtagactatcttctcatccacggaacagcagatgataatgtgcactttcaaaactcagcacagattgctaaagctctggttaatgcacaagtggatttccaggcaatgtggtactctgaccagaaccacggcttatccggcctgtccacgaaccacttatacacccacatgacccacttcctaaagcagtgtttctctttgtcagactaaaaacgatgcagatgcaagcctgtatcagaatctgaaaaccttatataaacccctcagacagtttgcttattttattttttatgttgtaaaatgctagtataaacaaacaaattaatgttgttctaaaggctgttaaaaaaaagatgaggactcagaagttcaagctaaatattgtttacattttctggtactctgtgaaagaagagaaaagggagtcatgcattttgctttggacacagtgttttatcacctgttcatttgaagaaaaataataaagtcagaagttcaaaaaaaaaa

SEQ ID NO: 100 - protein, 760 aa, Homosapiens
MKTWVKIVFGVATSAVLALLVMCIVLRPSRVHNSEENTMRALTLKDILNGTFSYKTFFPNWISGQEYLHQSADNNIVLYNIETGQSYTILSNRTMKSVNASNYGLSPDRQFVYLESDYSKLWRYSYTATYYIYDLSNGEFVRGNELPRPIQYLCWSPVGSKLAYVYQNNIYLKQRPGDPPFQITFNGRENKIFNGIPDWVYEEEMLATKYALWWSPNGKFLAYAEFNDTDIPVIAYSYYGDEQYPRTINIPYPKAGAKNPVVRIFIIDTTYPAYVGPQEVPVPAMIASSDYYFSWLTWVTDERVCLQWLKRVQNVSVLSICDFREDWQTWDCPKTQEHIEESRTGWAGGFFVSTPVFSYDAISYYKIFSDKDGYKHIHYIKDTVENAIQITSGKWEAINIFRVTQDSLFYSSNEFEEYPGRRNIYRISIGSYPPSKKCVTCHLRKERCQYYTASFSDYAKYYALVCYGPGIPISTLHDGRTDQEIKILEENKELENALKNIQLPKEEIKKLEVDEITLWYKMILPPQFDRSKKYPLLIQVYGGPCSQSVRSVFAVNWISYLASKEGMVIALVDGRGTAFQGDKLLYAVYRKLGVYEVEDQITAVRKFIEMGFIDEKRIAIWGWSYGGYVSSLALASGTGLFKCGIAVAPVSSWEYYASVYTERFMGLPTKDDNLEHYKNSTVMARAEYFRNVDYLLIHGTADDNVHFQNSAQIAKALVNAQVDFQAMWYSDQNHGLSGLSTNHLYTHMTHFLKQCFSLSD

SEQ ID NO: 101 - DNA, 3434 bp, Homosapiens
gccccgctgcccacctgcccgcctgcccacctgcccaggtgcgagtgcagccccgcgcgccggcctgagagccctgtggacaacctcgtcattgtcaggcacagagcggtagaccctgcttctctaagtgggcagcggacagcggcacgcacatttcacctgtcccgcagacaacagcaccatctgcttgggagaaccctctcccttctctgagaaagaaagatgtcgaatgggtattccacagacgagaatttccgctatctcatctcgtgcttcagggccagggtgaaaatgtacatccaggtggagcctgtgctggactacctgacctttctgcctgcagaggtgaaggagcagattcagaggacagtcgccacctccgggaacatgcaggcagttgaactgctgctgagcaccttggagaagggagtctggcaccttggttggactcgggaattcgtggaggccctccggagaaccggcagccctctggccgcccgctacatgaaccctgagctcacggacttgccctctccatcgtttgagaacgctcatgatgaatatctccaactgctgaacctccttcagcccactctggtggacaagcttctagttagagacgtcttggataagtgcatggaggaggaactgttgacaattgaagacagaaaccggattgctgctgcagaaaacaatggaaatgaatcaggtgtaagagagctactaaaaaggattgtgcagaaagaaaactggttctctgcatttctgaatgttcttcgtcaaacaggaaacaatgaacttgtccaagagttaacaggctctgattgctcagaaagcaatgcagagattgagaatttatcacaagttgatggtcctcaagtggaagagcaacttctttcaaccacagttcagccaaatctggagaaggaggtctggggcatggagaataactcatcagaatcatcttttgcagattcttctgtagtttcagaatcagacacaagtttggcagaaggaagtgtcagctgcttagatgaaagtcttggacataacagcaacatgggcagtgattcaggcaccatgggaagtgattcagatgaagagaatgtggcagcaagagcatccccggagccagaactccagctcaggccttaccaaatggaagttgcccagccagccttggaagggaagaatatcatcatctgcctccctacagggagtggaaaaaccagagtggctgtttacattgccaaggatcacttagacaagaagaaaaaagcatctgagcctggaaaagttatagttcttgtcaataaggtactgctagttgaacagctcttccgcaaggagttccaaccatttttgaagaaatggtatcgtgttattggattaagtggtgatacccaactgaaaatatcatttccagaagttgtcaagtcctgtgatattattatcagtacagctcaaatccttgaaaactccctcttaaacttggaaaatggagaagatgctggtgttcaattgtcagacttttccctcattatcattgatgaatgtcatcacaccaacaaagaagcagtgtataataacatcatgaggcattatttgatgcagaagttgaaaaacaatagactcaagaaagaaaacaaaccagtgattccccttcctcagatactgggactaacagcttcacctggtgttggaggggccacgaagcaagccaaagctgaagaacacattttaaaactatgtgccaatcttgatgcatttactattaaaactgttaaagaaaaccttgatcaactgaaaaaccaaatacaggagccatgcaagaagtttgccattgcagatgcaaccagagaagatccatttaaagagaaacttctagaaataatgacaaggattcaaacttattgtcaaatgagtccaatgtcagattttggaactcaaccctatgaacaatgggccattcaaatggaaaaaaaagctgcaaaagaaggaaatcgcaaagaacgtgtttgtgcagaacatttgaggaagtacaatgaggccctacaaattaatgacacaattcgaatgatagatgcgtatactcatcttgaaactttctataatgaagagaaagataagaagtttgcagtcatagaagatgatagtgatgagggtggtgatgatgagtattgtgatggtgatgaagatgaggatgatttaaagaaacctttgaaactggatgaaacagatagatttctcatgactttattttttgaaaacaataaaatgttgaaaaggctggctgaaaacccagaatatgaaaatgaaaagctgaccaaattaagaaataccataatggagcaatatactaggactgaggaatcagcacgaggaataatctttacaaaaacacgacagagtgcatatgcgctttcccagtggattactgaaaatgaaaaatttgctgaagtaggagtcaaagcccaccatctgattggagctggacacagcagtgagttcaaacccatgacacagaatgaacaaaaagaagtcattagtaaatttcgcactggaaaaataaatctgcttatcgctaccacagtggcagaagaaggtctggatattaaagaatgtaacattgttatccgttatggtctcgtcaccaatgaaatagccatggtccaggcccgtggtcgagccagagctgatgagagcacctacgtcctggttgctcacagtggttcaggagttatcgaacatgagacagttaatgatttccgagagaagatgatgtataaagctatacattgtgttcaaaatatgaaaccagaggagtatgctcataagattttggaattacagatgcaaagtataatggaaaagaaaatgaaaaccaagagaaatattgccaagcattacaagaataacccatcactaataactttcctttgcaaaaactgcagtgtgctagcctgttctggggaagatatccatgtaattgagaaaatgcatcacgtcaatatgaccccagaattcaaggaactttacattgtaagagaaaacaaagcactgcaaaagaagtgtgccgactatcaaataaatggtgaaatcatctgcaaatgtggccaggcttggggaacaatgatggtgcacaaaggcttagatttgccttgtctcaaaataaggaattttgtagtggttttcaaaaataattcaacaaagaaacaatacaaaaagtgggtagaattacctatcacatttcccaatcttgactattcagaatgctgtttatttagtgatgaggattagcacttgattgaagattcttttaaaatactatcagttaaacatttaatatgattatgattaatgtattcattatgctacagaactgacataagaatcaataaaatgattgttttactctgcaaaaaaaaaaaaaa

SEQ ID NO: 102 - protein, 1025 aa, Homosapiens
MSNGYSTDENFRYLISCFRARVKMYIQVEPVLDYLTFLPAEVKEQIQRTVATSGNMQAVELLLSTLEKGVWHLGWTREFVEALRRTGSPLAARYMNPELTDLPSPSFENAHDEYLQLLNLLQPTLVDKLLVRDVLDKCMEEELLTIEDRNRIAAAENNGNESGVRELLKRIVQKENWFSAFLNVLRQTGNNELVQELTGSDCSESNAEIENLSQVDGPQVEEQLLSTTVQPNLEKEVWGMENNSSESSFADSSVVSESDTSLAEGSVSCLDESLGHNSNMGSDSGTMGSDSDEENVAARASPEPELQLRPYQMEVAQPALEGKNIIICLPTGSGKTRVAVYIAKDHLDKKKKASEPGKVIVLVNKVLLVEQLFRKEFQPFLKKWYRVIGLSGDTQLKISFPEVVKSCDIIISTAQILENSLLNLENGEDAGVQLSDFSLIIIDECHHTNKEAVYNNIMRHYLMQKLKNNRLKKENKPVIPLPQILGLTASPGVGGATKQAKAEEHILKLCANLDAFTIKTVKENLDQLKNQIQEPCKKFAIADATREDPFKEKLLEIMTRIQTYCQMSPMSDFGTQPYEQWAIQMEKKAAKEGNRKERVCAEHLRKYNEALQINDTIRMIDAYTHLETFYNEEKDKKFAVIEDDSDEGGDDEYCDGDEDEDDLKKPLKLDETDRFLMTLFFENNKMLKRLAENPEYENEKLTKLRNTIMEQYTRTEESARGIIFTKTRQSAYALSQWITENEKFAEVGVKAHHLIGAGHSSEFKPMTQNEQKEVISKFRTGKINLLIATTVAEEGLDIKECNIVIRYGLVTNEIAMVQARGRARADESTYVLVAHSGSGVIEHETVNDFREKMMYKAIHCVQNMKPEEYAHKILELQMQSIMEKKMKTKRNIAKHYKNNPSLITFLCKNCSVLACSGEDIHVIEKMHHVNMTPEFKELYIVRENKALQKKCADYQINGEIICKCGQAWGTMMVHKGLDLPCLKIRNFVVVFKNNSTKKQYKKWVELPITFPNLDYSECCLFSDED

SEQ ID NO: 103 - DNA, 4565 bp, Homosapiens
gaattccgggcagcatcatcaaggcacatagattctctctttgaacaatgcagctgctgcaggggatggggaagggatggcactggcaattcaagactgcctttcctacttcttcagtgcctctttcaccaatatgaagttaaaaccaggatccttcaaaccaaaaatgtggtggaagaaagaaaaccgtgtctttcagcagcatgccatcggaaaagaaaattagcagtgcaaatgactgcatcagcttcatgcaagctggctgtgagttgaagaaagtccggccaaattctcgcatttacaaccgttttttcactctggacacagaccttcaagctcttcgctgggaaccttcaaagaaagacctcgagaaagccaagcttgatatttctgccataaaagagatcagactggggaaaaacacggaaacatttacaaacaatggccttgctgaccagatctgtgaggactgtgccttttccatactccacggggaaaactatgagtctctggacctagttgccaattcagcagatgtggcaaacatctgggtgtctgggttacggtacctggtttctcgaagtaagcagcctcttgattttatggagggcaaccagaacacaccacggttcatgtggttgaaaacagtgtttgaagcagcagatgttgatgggaatgggattatgttggaagacacctctgtagagttaataaaacaactcaaccctactctgaaggaagccaagatcaggttaaagtttaaagaaatccagaagagcaaggaaaaactaaccacccgcgtgaccgaagaggaattttgtgaagctttttgtgaactttgcaccaggccagaagtgtatttcttacttgtacagatatctaaaaacaaagaatatttggatgccaatgatctcatgctctttttagaagctgagcaaggagtcacccatatcaccgaggatatatgcttagacatcataaggagatacgaactttctgaagagggacgtcaaaaagggtttcttgcaattgatggctttacccagtatttattgtcatcagaatgtgacatttttgatcctgagcaaaagaaggttgcccaagatatgacccagccattatctcactactatatcaatgcctctcataacacctatctaatagaagaccagttcagggggccagctgacatcaatgggtacattagagctttgaaaatgggctgtcgaagcgttgaactcgatgtaagtgatggttcagataatgaaccaatcctttgtaatcgaaataacatgacaacccatgtttcctttcgaagtgtcatagaggtaataaataaatttgcctttgttgcttctgaatacccactcattctttgcttgggaaatcactgctccttgccgcagcagaaggtaatggctcaacagatgaaaaaggtctttggcaataaactctatactgaagcacctttgccctcagaatcctacctcccatcaccagaaaaattaaaaagaatgatcattgtgaaaggaaagaagttgccttctgatccagatgtgttagaaggagaagtaacagatgaagatgaagaagctcaaatgtctcgaaggatgtcggtagattacaatggtgagcagaagcaaatccgactctgtagggagctctctgatttggtgtctatttgtaaatctgttcaatacagggattttgaactatctatgaaaagccaaaactattgggaaatgtgttcatttagtgaaacagaggccagccgcattgcaaatgagtacccagaggattttgttaattataataagaagttcttatcaagaatctatccaagtgccatgaggatcgattccagtaacttgaatccacaggacttttggaattgtggctgtcagattgtagcaatgaattttcagactccgggtccaatgatggaccttcacacgggctggtttcttcaaaacgggggatgtggttatgttctaaggccgtctataatgcgagatgaagtttcttacttcagcgcaaatacaaagggcattctacctggggtgtctcctctagctcttcatatcaagatcatcagtggtcagaatttcccaaagcccaagggagcttgtgccaaaggggatgtcatagatccctatgtttgtatagagatacacggaattccagcggattgttcggaacaaagaactaaaactgtacagcaaaacagtgataatcctatttttgatgaaacttttgagttccaagtaaacctacctgagctggccatgatccgttttgttgttctggatgatgactacattggggatgagtttatagggcaatatacgataccatttgaatgtttgcagcctggatatcggcatgttcccctgcgttcttttgtgggtgacatcatggagcacgtaaccctttttgtccacatagcaataactaatcgaagtggaggaggaaaggcacagaagcgcagtctttcagtgagaatggggaagaaagttcgggaatataccatgctcaggaatatcggtcttaaaaccattgatgacatctttaaaatagcggttcatccattacgagaagccatagatatgagagaaaatatgcagaatgcaatcgtgtctattaaggaactatgtggactccctccaattgccagtctgaagcagtgcctgttaactctgtcatctcggctcatcaccagtgacaatactccttcagtctcacttgtgatgaaagacagctttccttacctggagcctctgggtgcaattccagatgtgcagaaaaagatgctgactgcttatgatctgatgattcaagagagccggtttctcatagaaatggcggacacagtccaggaaaagattgtacagtgtcagaaagcagggatggagttccatgaagaacttcataatttgggggcaaaagaaggcttgaagggaagaaaactcaacaaagcaactgagagctttgcttggaacattacagtattgaagggccaaggagatctgttgaagaatgccaagaatgaagctatagaaaacatgaagcagatccagctggcatgcctgtcctgtggactgagtaaagcccccagcagcagtgctgaggccaagagcaagcgcagcctggaagccatagaggagaaggaaagtagtgaggagaatgggaagctgtgactctgggcattatcgacacgttcacccatcttatcaaggactctggtttctcattcttgttttctttctttaaatgttttataagttcacaaaatggtgccctatatggggtattggacatagatattttcacaatgtcagtatttcagtgtagttaatttatctaaattaaagcctttagtatcagtgttttaaattctgagacatgtgtcaacacccctgtgtggatgcctgtggaagagtgtgtgtgtgtgtgtgtgtgtgtgtgtgtgtgtgtgtggcagagagagagaaagagagagagagaaattctgttaaaatctattctgtgttgcattattcatttagtgagttattccttgatcattttgggacaattgttttaatctgaaattctaaagagcacttactgtaacctgttgctgtgtttaatttgacttctctgcctttgacatttaatttagtgatcttagcatagcttattattgaaggaagccaaatttatcaaagcatacatgttttggtagattaaatatagattagaaaaattcctaagaatcagagtagaaataaaagtgaatgaaagattaaacagatgatgagaatttctaaaaagattagcaaggtcatttcttcagtcagaaaactttaaaaaatatttattaaataaaatcaatttttaggaagttttctgtagtcatttactaaacatatgatttcactagaaaagctgatcataagtgaatttatacctacctgtgtggctactctgaaacacactgaaagctctgttgcaattaggatttgatgtgacataatattgttgtataatttcgagatttgtaggaaggtctcattcttccaagctgagagtctagcactcattttctataacagatatggcagcttagaggtgttggctttgtttggatgtaattttaggggtactaaaatttaaaatttaaagataattgttcaacaatatcatatcatcacattgagctgatataaattctgtgggtccgataatatctttgtgataatttaagagctaaccagttaccacacatctatgatataaccctaacacacacagaaagcatacatgcaaaaagaaatgactaattagggtacatttataattgcatctaggtaatttttaccctaatgtcttcataaagtacttgagtgtaatgtttgttacctccaacagaactaaatgttctatggttatgaaagaatatatttatttaaagcattgcttttattttgaaaagcttcttaattaatttgattaacaaatatgctaatttggggaaacctagagaagataattgttgaaattttgcaaatataaacatctcctat

SEQ ID NO: 104 - protein, 997 aa, Homosapiens
MPSEKKISSANDCISFMQAGCELKKVRPNSRIYNRFFTLDTDLQALRWEPSKKDLEKAKLDISAIKEIRLGKNTETFTNNGLADQICEDCAFSILHGENYESLDLVANSADVANIWVSGLRYLVSRSKQPLDFMEGNQNTPRFMWLKTVFEAADVDGNGIMLEDTSVELIKQLNPTLKEAKIRLKFKEIQKSKEKLTTRVTEEEFCEAFCELCTRPEVYFLLVQISKNKEYLDANDLMLFLEAEQGVTHITEDICLDIIRRYELSEEGRQKGFLAIDGFTQYLLSSECDIFDPEQKKVAQDMTQPLSHYYINASHNTYLIEDQFRGPADINGYIRALKMGCRSVELDVSDGSDNEPILCNRNNMTTHVSFRSVIEVINKFAFVASEYPLILCLGNHCSLPQQKVMAQQMKKVFGNKLYTEAPLPSESYLPSPEKLKRMIIVKGKKLPSDPDVLEGEVTDEDEEAQMSRRMSVDYNGEQKQIRLCRELSDLVSICKSVQYRDFELSMKSQNYWEMCSFSETEASRIANEYPEDFVNYNKKFLSRIYPSAMRIDSSNLNPQDFWNCGCQIVAMNFQTPGPMMDLHTGWFLQNGGCGYVLRPSIMRDEVSYFSANTKGILPGVSPLALHIKIISGQNFPKPKGACAKGDVIDPYVCIEIHGIPADCSEQRTKTVQQNSDNPIFDETFEFQVNLPELAMIRFVVLDDDYIGDEFIGQYTIPFECLQPGYRHVPLRSFVGDIMEHVTLFVHIAITNRSGGGKAQKRSLSVRMGKKVREYTMLRNIGLKTIDDIFKIAVHPLREAIDMRENMQNAIVSIKELCGLPPIASLKQCLLTLSSRLITSDNTPSVSLVMKDSFPYLEPLGAIPDVQKKMLTAYDLMIQESRFLIEMADTVQEKIVQCQKAGMEFHEELHNLGAKEGLKGRKLNKATESFAWNITVLKGQGDLLKNAKNEAIENMKQIQLACLSCGLSKAPSSSAEAKSKRSLEAIEEKESSEENGKL

SEQ ID NO: 105 - DNA, 4021 bp, Homosapiens
ggtcgcccctccccggattcccccaccctccgtgcctgcaggagcccctgggctttcccggaggagctcgccctgaagggcccggacctcggcgagcccaccaccgttccctccagcgccgccgccgccaccgcagcagccggagcagcatggtccagctgaggaagctgctccgcgtcctgactttgatgaagttcccctgctgcgtgctggaggtgctcctgtgcgcgctggcggcggcggcgcgcggccaggagatgtacgccccgcactcaatccggatcgagggggacgtcaccctcggggggctgttccccgtgcacgccaagggtcccagcggagtgccctgcggcgacatcaagagggaaaacgggatccacaggctggaagcgatgctctacgccctggaccagatcaacagtgatcccaacctactgcccaacgtgacgctgggcgcgcggatcctggacacttgttccagggacacttacgcgctcgaacagtcgcttactttcgtccaggcgctcatccagaaggacacctccgacgtgcgctgcaccaacggcgaaccgccggttttcgtcaagccggagaaagtagttggagtgattggggcttcggggagttcggtctccatcatggtagccaacatcctgaggctcttccagatcccccagattagttatgcatcaacggcacccgagctaagtgatgaccggcgctatgacttcttctctcgcgtggtgccacccgattccttccaagcccaggccatggtagacattgtaaaggccctaggctggaattatgtgtctaccctcgcatcggaaggaagttatggagagaaaggtgtggagtccttcacgcagatttccaaagaggcaggtggactctgcattgcccagtccgtgagaatcccccaggaacgcaaagacaggaccattgactttgatagaattatcaaacagctcctggacacccccaactccagggccgtcgtgatttttgccaacgatgaggatataaagcagatccttgcagcagccaaaagagctgaccaagttggccattttctttgggtgggatcagacagctggggatccaaaataaacccactgcaccagcatgaagatatcgcagaaggggccatcaccattcagcccaagcgagccacggtggaagggtttgatgcctactttacgtcccgtacacttgaaaacaacagaagaaatgtatggtttgccgaatactgggaggaaaacttcaactgcaagttgacgattagtgggtcaaaaaaagaagacacagatcgcaaatgcacaggacaggagagaattggaaaagattccaactatgagcaggagggtaaagtccagttcgtgattgacgcagtctatgctatggctcacgcccttcaccacatgaacaaggatctctgtgctgactaccggggtgtctgcccagagatggagcaagctggaggcaagaagttgctgaagtatatacgcaatgttaatttcaatggtagtgctggcactccagtgatgtttaacaagaacggggatgcacctgggcgttatgacatctttcagtaccagaccacaaacaccagcaacccgggttaccgtctgatcgggcagtggacagacgaacttcagctcaatatagaagacatgcagtggggtaaaggagtccgagagatacccgcctcagtgtgcacactaccatgtaagccaggacagagaaagaagacacagaaaggaactccttgctgttggacctgtgagccttgcgatggttaccagtaccagtttgatgagatgacatgccagcattgcccctatgaccagaggcccaatgaaaatcgaaccggatgccaggatattcccatcatcaaactggagtggcactccccctgggctgtgattcctgtcttcctggcaatgttggggatcattgccaccatctttgtcatggccactttcatccgctacaatgacacgcccattgtccgggcatctgggcgggaactcagctatgttcttttgacgggcatctttctttgctacatcatcactttcctgatgattgccaaaccagatgtggcagtgtgttctttccggcgagttttcttgggcttgggtatgtgcatcagttatgcagccctcttgacgaaaacaaatcggatttatcgcatatttgagcagggcaagaaatcagtaacagctcccagactcataagcccaacatcacaactggcaatcacttccagtttaatatcagttcagcttctaggggtgttcatttggtttggtgttgatccacccaacatcatcatagactatgatgaacacaagacaatgaaccctgagcaagccagaggggttctcaagtgtgacattacagatctccaaatcatttgctccttgggatatagcattcttctcatggtcacatgtactgtgtatgccatcaagactcggggtgtacccgagaattttaacgaagccaagcccattggattcactatgtacacgacatgtatagtatggcttgccttcattccaattttttttggcaccgctcaatcagcggaaaagctctacatacaaactaccacgcttacaatctccatgaacctaagtgcatcagtggcgctggggatgctatacatgccgaaagtgtacatcatcattttccaccctgaactcaatgtccagaaacggaagcgaagcttcaaggcggtagtcacagcagccaccatgtcatcgaggctgtcacacaaacccagtgacagacccaacggtgaggcaaagaccgagctctgtgaaaacgtagacccaaacagccctgctgcaaaaaagaagtatgtcagttataataacctggttatctaacctgttccattccatggaaccatggaggaggaagaccctcagttattttgtcacccaacctggcataggactctttggtcctacccgcttcccatcaccggaggagcttccccggccgggagaccagtgttagaggatccaagcgacctaaacagctgctttatgaaatatccttactttatctgggcttaataagtcactgacatcagcactgccaactcggctgcaattgtggaccttccctaccaaagggagtgttgaaactcaagtcccgccctggctctttagaatggaccactgagagccacaggaccgttttggggctgacctgtcttattacgtatgtacttctaggttgcaaggttttgaaattttctgtacagtttgtgaggacctttgcactttgccatctgatgtcgtacctcggttcactgtttgttttcgaatgccttgttttcatagagccctattctctcagacggtggaatatttggaaaaattttaaaacaattaaaattttaaagcaatcttggcagactaaaacaagtacatctgtacatgactgtataattacgattatagtaccactgcacatcatgtttttttttttaagacaaaaaagatgtttaaagaccaaaaactgtgctgagaaagtatgccccacctatctttggtatatgataggttacataaaaggaaggtattggctgaactgaatagaggtcttgatctttggaatgcatgccagtaatgtattttacagtacatgtttattatgttcaatatttgtatttgtgttctcttttgttatttttaattagggtatatgaatattttgcaataattttaataattattaagctgtttgaaggaaagaatatggatttttcatgtcttgaggttttgttcatgccccctttgactgatcagtgtgataaggactttaggaaaaaaagcatgtatgttttttactgtttgtaataagtactttcgttaatcttgctgcttatgtgccaatttagtggaaaaaaacaacccttgctgaaaaattccctctttccattctctttcaattctgtgatattgtccaagaatgtatcaataaaatactttggttaactttt

SEQ ID NO: 106 - protein, 915 aa, Homosapiens
MVQLRKLLRVLTLMKFPCCVLEVLLCALAAAARGQEMYAPHSIRIEGDVTLGGLFPVHAKGPSGVPCGDIKRENGIHRLEAMLYALDQINSDPNLLPNVTLGARILDTCSRDTYALEQSLTFVQALIQKDTSDVRCTNGEPPVFVKPEKVVGVIGASGSSVSIMVANILRLFQIPQISYASTAPELSDDRRYDFFSRVVPPDSFQAQAMVDIVKALGWNYVSTLASEGSYGEKGVESFTQISKEAGGLCIAQSVRIPQERKDRTIDFDRIIKQLLDTPNSRAVVIFANDEDIKQILAAAKRADQVGHFLWVGSDSWGSKINPLHQHEDIAEGAITIQPKRATVEGFDAYFTSRTLENNRRNVWFAEYWEENFNCKLTISGSKKEDTDRKCTGQERIGKDSNYEQEGKVQFVIDAVYAMAHALHHMNKDLCADYRGVCPEMEQAGGKKLLKYIRNVNFNGSAGTPVMFNKNGDAPGRYDIFQYQTTNTSNPGYRLIGQWTDELQLNIEDMQWGKGVREIPASVCTLPCKPGQRKKTQKGTPCCWTCEPCDGYQYQFDEMTCQHCPYDQRPNENRTGCQDIPIIKLEWHSPWAVIPVFLAMLGIIATIFVMATFIRYNDTPIVRASGRELSYVLLTGIFLCYIITFLMIAKPDVAVCSFRRVFLGLGMCISYAALLTKTNRIYRIFEQGKKSVTAPRLISPTSQLAITSSLISVQLLGVFIWFGVDPPNIIIDYDEHKTMNPEQARGVLKCDITDLQIICSLGYSILLMVTCTVYAIKTRGVPENFNEAKPIGFTMYTTCIVWLAFIPIFFGTAQSAEKLYIQTTTLTISMNLSASVALGMLYMPKVYIIIFHPELNVQKRKRSFKAVVTAATMSSRLSHKPSDRPNGEAKTELCENVDPNSPAAKKKYVSYNNLVI

SEQ ID NO: 107 - DNA, 4113 bp, Homosapiens
ggtcgcccctccccggattcccccaccctccgtgcctgcaggagcccctgggctttcccggaggagctcgccctgaagggcccggacctcggcgagcccaccaccgttccctccagcgccgccgccgccaccgcagcagccggagcagcatggtccagctgaggaagctgctccgcgtcctgactttgatgaagttcccctgctgcgtgctggaggtgctcctgtgcgcgctggcggcggcggcgcgcggccaggagatgtacgccccgcactcaatccggatcgagggggacgtcaccctcggggggctgttccccgtgcacgccaagggtcccagcggagtgccctgcggcgacatcaagagggaaaacgggatccacaggctggaagcgatgctctacgccctggaccagatcaacagtgatcccaacctactgcccaacgtgacgctgggcgcgcggatcctggacacttgttccagggacacttacgcgctcgaacagtcgcttactttcgtccaggcgctcatccagaaggacacctccgacgtgcgctgcaccaacggcgaaccgccggttttcgtcaagccggagaaagtagttggagtgattggggcttcggggagttcggtctccatcatggtagccaacatcctgaggctcttccagatcccccagattagttatgcatcaacggcacccgagctaagtgatgaccggcgctatgacttcttctctcgcgtggtgccacccgattccttccaagcccaggccatggtagacattgtaaaggccctaggctggaattatgtgtctaccctcgcatcggaaggaagttatggagagaaaggtgtggagtccttcacgcagatttccaaagaggcaggtggactctgcattgcccagtccgtgagaatcccccaggaacgcaaagacaggaccattgactttgatagaattatcaaacagctcctggacacccccaactccagggccgtcgtgatttttgccaacgatgaggatataaagcagatccttgcagcagccaaaagagctgaccaagttggccattttctttgggtgggatcagacagctggggatccaaaataaacccactgcaccagcatgaagatatcgcagaaggggccatcaccattcagcccaagcgagccacggtggaagggtttgatgcctactttacgtcccgtacacttgaaaacaacagaagaaatgtatggtttgccgaatactgggaggaaaacttcaactgcaagttgacgattagtgggtcaaaaaaagaagacacagatcgcaaatgcacaggacaggagagaattggaaaagattccaactatgagcaggagggtaaagtccagttcgtgattgacgcagtctatgctatggctcacgcccttcaccacatgaacaaggatctctgtgctgactaccggggtgtctgcccagagatggagcaagctggaggcaagaagttgctgaagtatatacgcaatgttaatttcaatggtagtgctggcactccagtgatgtttaacaagaacggggatgcacctgggcgttatgacatctttcagtaccagaccacaaacaccagcaacccgggttaccgtctgatcgggcagtggacagacgaacttcagctcaatatagaagacatgcagtggggtaaaggagtccgagagatacccgcctcagtgtgcacactaccatgtaagccaggacagagaaagaagacacagaaaggaactccttgctgttggacctgtgagccttgcgatggttaccagtaccagtttgatgagatgacatgccagcattgcccctatgaccagaggcccaatgaaaatcgaaccggatgccaggatattcccatcatcaaactggagtggcactccccctgggctgtgattcctgtcttcctggcaatgttggggatcattgccaccatctttgtcatggccactttcatccgctacaatgacacgcccattgtccgggcatctgggcgggaactcagctatgttcttttgacgggcatctttctttgctacatcatcactttcctgatgattgccaaaccagatgtggcagtgtgttctttccggcgagttttcttgggcttgggtatgtgcatcagttatgcagccctcttgacgaaaacaaatcggatttatcgcatatttgagcagggcaagaaatcagtaacagctcccagactcataagcccaacatcacaactggcaatcacttccagtttaatatcagttcagcttctaggggtgttcatttggtttggtgttgatccacccaacatcatcatagactatgatgaacacaagacaatgaaccctgagcaagccagaggggttctcaagtgtgacattacagatctccaaatcatttgctccttgggatatagcattcttctcatggtcacatgtactgtgtatgccatcaagactcggggtgtacccgagaattttaacgaagccaagcccattggattcactatgtacacgacatgtatagtatggcttgccttcattccaattttttttggcaccgctcaatcagcggaaaagctctacatacaaactaccacgcttacaatctccatgaacctaagtgcatcagtggcgctggggatgctatacatgccgaaagtgtacatcatcattttccaccctgaactcaatgtccagaaacggaagcgaagcttcaaggcggtagtcacagcagccaccatgtcatcgaggctgtcacacaaacccagtgacagacccaacggtgaggcaaagaccgagctctgtgaaaacgtagacccaaacaactgtataccaccagtaagaaagagtgtacaaaagtctgttacttggtacactatcccaccaacagtatagcttttgactgctttcccaaaggccctgctgcaaaaaagaagtatgtcagttataataacctggttatctaacctgttccattccatggaaccatggaggaggaagaccctcagttattttgtcacccaacctggcataggactctttggtcctacccgcttcccatcaccggaggagcttccccggccgggagaccagtgttagaggatccaagcgacctaaacagctgctttatgaaatatccttactttatctgggcttaataagtcactgacatcagcactgccaactcggctgcaattgtggaccttccctaccaaagggagtgttgaaactcaagtcccgccctggctctttagaatggaccactgagagccacaggaccgttttggggctgacctgtcttattacgtatgtacttctaggttgcaaggttttgaaattttctgtacagtttgtgaggacctttgcactttgccatctgatgtcgtacctcggttcactgtttgttttcgaatgccttgttttcatagagccctattctctcagacggtggaatatttggaaaaattttaaaacaattaaaattttaaagcaatcttggcagactaaaacaagtacatctgtacatgactgtataattacgattatagtaccactgcacatcatgtttttttttttaagacaaaaaagatgtttaaagaccaaaaactgtgctgagaaagtatgccccacctatctttggtatatgataggttacataaaaggaaggtattggctgaactgaatagaggtcttgatctttggaatgcatgccagtaatgtattttacagtacatgtttattatgttcaatatttgtatttgtgttctcttttgttatttttaattagggtatatgaatattttgcaataattttaataattattaagctgtttgaaggaaagaatatggatttttcatgtcttgaggttttgttcatgccccctttgactgatcagtgtgataaggactttaggaaaaaaagcatgtatgttttttactgtttgtaataagtactttcgttaatcttgctgcttatgtgccaatttagtggaaaaaaacaacccttgctgaaaaattccctctttccattctctttcaattctgtgatattgtccaagaatgtatcaataaaatactttggttaactttt

SEQ ID NO: 108 - protein, 922 aa, Homosapiens
MVQLRKLLRVLTLMKFPCCVLEVLLCALAAAARGQEMYAPHSIRIEGDVTLGGLFPVHAKGPSGVPCGDIKRENGIHRLEAMLYALDQINSDPNLLPNVTLGARILDTCSRDTYALEQSLTFVQALIQKDTSDVRCTNGEPPVFVKPEKVVGVIGASGSSVSIMVANILRLFQIPQISYASTAPELSDDRRYDFFSRVVPPDSFQAQAMVDIVKALGWNYVSTLASEGSYGEKGVESFTQISKEAGGLCIAQSVRIPQERKDRTIDFDRIIKQLLDTPNSRAVVIFANDEDIKQILAAAKRADQVGHFLWVGSDSWGSKINPLHQHEDIAEGAITIQPKRATVEGFDAYFTSRTLENNRRNVWFAEYWEENFNCKLTISGSKKEDTDRKCTGQERIGKDSNYEQEGKVQFVIDAVYAMAHALHHMNKDLCADYRGVCPEMEQAGGKKLLKYIRNVNFNGSAGTPVMFNKNGDAPGRYDIFQYQTTNTSNPGYRLIGQWTDELQLNIEDMQWGKGVREIPASVCTLPCKPGQRKKTQKGTPCCWTCEPCDGYQYQFDEMTCQHCPYDQRPNENRTGCQDIPIIKLEWHSPWAVIPVFLAMLGIIATIFVMATFIRYNDTPIVRASGRELSYVLLTGIFLCYIITFLMIAKPDVAVCSFRRVFLGLGMCISYAALLTKTNRIYRIFEQGKKSVTAPRLISPTSQLAITSSLISVQLLGVFIWFGVDPPNIIIDYDEHKTMNPEQARGVLKCDITDLQIICSLGYSILLMVTCTVYAIKTRGVPENFNEAKPIGFTMYTTCIVWLAFIPIFFGTAQSAEKLYIQTTTLTISMNLSASVALGMLYMPKVYIIIFHPELNVQKRKRSFKAVVTAATMSSRLSHKPSDRPNGEAKTELCENVDPNNCIPPVRKSVQKSVTWYTIPPTV

SEQ ID NO: 109 - DNA, 3185 bp, Homosapiens
ggtcgcccctccccggattcccccaccctccgtgcctgcaggagcccctgggctttcccggaggagctcgccctgaagggcccggacctcggcgagcccaccaccgttccctccagcgccgccgccgccaccgcagcagccggagcagcatggtccagctgaggaagctgctccgcgtcctgactttgatgaagttcccctgctgcgtgctggaggtgctcctgtgcgcgctggcggcggcggcgcgcggccaggagatgtacgccccgcactcaatccggatcgagggggacgtcaccctcggggggctgttccccgtgcacgccaagggtcccagcggagtgccctgcggcgacatcaagagggaaaacgggatccacaggctggaagcgatgctctacgccctggaccagatcaacagtgatcccaacctactgcccaacgtgacgctgggcgcgcggatcctggacacttgttccagggacacttacgcgctcgaacagtcgcttactttcgtccaggcgctcatccagaaggacacctccgacgtgcgctgcaccaacggcgaaccgccggttttcgtcaagccggagaaagtagttggagtgattggggcttcggggagttcggtctccatcatggtagccaacatcctgaggctcttccagatcccccagattagttatgcatcaacggcacccgagctaagtgatgaccggcgctatgacttcttctctcgcgtggtgccacccgattccttccaagcccaggccatggtagacattgtaaaggccctaggctggaattatgtgtctaccctcgcatcggaaggaagttatggagagaaaggtgtggagtccttcacgcagatttccaaagaggcaggtggactctgcattgcccagtccgtgagaatcccccaggaacgcaaagacaggaccattgactttgatagaattatcaaacagctcctggacacccccaactccagggccgtcgtgatttttgccaacgatgaggatataaagcagatccttgcagcagccaaaagagctgaccaagttggccattttctttgggtgggatcagacagctggggatccaaaataaacccactgcaccagcatgaagatatcgcagaaggggccatcaccattcagcccaagcgagccacggtggaagggtttgatgcctactttacgtcccgtacacttgaaaacaacagaagaaatgtatggtttgccgaatactgggaggaaaacttcaactgcaagttgacgattagtgggtcaaaaaaagaagacacagatcgcaaatgcacaggacaggagagaattggaaaagattccaactatgagcaggagggtaaagtccagttcgtgattgacgcagtctatgctatggctcacgcccttcaccacatgaacaaggatctctgtgctgactaccggggtgtctgcccagagatggagcaagctggaggcaagaagttgctgaagtatatacgcaatgttaatttcaatggtagtgctggcactccagtgatgtttaacaagaacggggatgcacctgggcgttatgacatctttcagtaccagaccacaaacaccagcaacccgggttaccgtctgatcgggcagtggacagacgaacttcagctcaatatagaagacatgcagtggggtaaaggagtccgagagatacccgcctcagtgtgcacactaccatgtaagccaggacagagaaagaagacacagaaaggaactccttgctgttggacctgtgagccttgcgatggttaccagtaccagtttgatgagatgacatgccagcattgcccctatgaccagaggcccaatgaaaatcgaaccggatgccaggatattcccatcatcaaactggagtggcactccccctgggctgtgattcctgtcttcctggcaatgttggggatcattgccaccatctttgtcatggccactttcatccgctacaatgacacgcccattgtccgggcatctgggcgggaactcagctatgttcttttgacgggcatctttctttgctacatcatcactttcctgatgattgccaaaccagatgtggcagtgtgttctttccggcgagttttcttgggcttgggtatgtgcatcagttatgcagccctcttgacgaaaacaaatcggatttatcgcatatttgagcagggcaagaaatcagtaacagctcccagactcataagcccaacatcacaactggcaatcacttccagtttaatatcagttcagcttctaggggtgttcatttggtttggtgttgatccacccaacatcatcatagactatgatgaacacaagacaatgaaccctgagcaagccagaggggttctcaagtgtgacattacagatctccaaatcatttgctccttgggatatagcattcttctcatggtcacatgtactgtgtatgccatcaagactcggggtgtacccgagaattttaacgaagccaagcccattggattcactatgtacacgacatgtatagtatggcttgccttcattccaattttttttggcaccgctcaatcagcggaaaagctctacatacaaactaccacgcttacaatctccatgaacctaagtgcatcagtggcgctggggatgctatacatgccgaaagtgtacatcatcattttccaccctgaactcaatgtccagaaacggaagcgaagcttcaaggcggtagtcacagcagccaccatgtcatcgaggctgtcacacaaacccagtgacagacccaacggtgaggcaaagaccgagctctgtgaaaacgtagacccaaacaatttttttttttggctgtacagtggaacttggattacactttaaattaactttctctaggaatcaaagtaacctctgaggacctcagcttgcacaaagaggattgagataacatttccaaagcttgttcttcttgagctgacccaacacttaggaaaacatgacatggatcagcaactccattttctgtgagaagtgcaactgctactgaccatctgcactggcatctagtcaagcgattgtctgaggaaaggattttggagattcccatctgatattcttctatttggtctcttgtacccattgtcatcctgtaccacacataataaagtttaagaa

SEQ ID NO: 110 - protein, 913 aa, Homosapiens
MVQLRKLLRVLTLMKFPCCVLEVLLCALAAAARGQEMYAPHSIRIEGDVTLGGLFPVHAKGPSGVPCGDIKRENGIHRLEAMLYALDQINSDPNLLPNVTLGARILDTCSRDTYALEQSLTFVQALIQKDTSDVRCTNGEPPVFVKPEKVVGVIGASGSSVSIMVANILRLFQIPQISYASTAPELSDDRRYDFFSRVVPPDSFQAQAMVDIVKALGWNYVSTLASEGSYGEKGVESFTQISKEAGGLCIAQSVRIPQERKDRTIDFDRIIKQLLDTPNSRAVVIFANDEDIKQILAAAKRADQVGHFLWVGSDSWGSKINPLHQHEDIAEGAITIQPKRATVEGFDAYFTSRTLENNRRNVWFAEYWEENFNCKLTISGSKKEDTDRKCTGQERIGKDSNYEQEGKVQFVIDAVYAMAHALHHMNKDLCADYRGVCPEMEQAGGKKLLKYIRNVNFNGSAGTPVMFNKNGDAPGRYDIFQYQTTNTSNPGYRLIGQWTDELQLNIEDMQWGKGVREIPASVCTLPCKPGQRKKTQKGTPCCWTCEPCDGYQYQFDEMTCQHCPYDQRPNENRTGCQDIPIIKLEWHSPWAVIPVFLAMLGIIATIFVMATFIRYNDTPIVRASGRELSYVLLTGIFLCYIITFLMIAKPDVAVCSFRRVFLGLGMCISYAALLTKTNRIYRIFEQGKKSVTAPRLISPTSQLAITSSLISVQLLGVFIWFGVDPPNIIIDYDEHKTMNPEQARGVLKCDITDLQIICSLGYSILLMVTCTVYAIKTRGVPENFNEAKPIGFTMYTTCIVWLAFIPIFFGTAQSAEKLYIQTTTLTISMNLSASVALGMLYMPKVYIIIFHPELNVQKRKRSFKAVVTAATMSSRLSHKPSDRPNGEAKTELCENVDPNNFFFWLYSGTWITL

SEQ ID NO: 111 - DNA, 2741 bp, Homosapiens
gtgaggcggaagctgtgtatggcgggaggctgtggcggtcccttggtggggaagctgttgctgttgctagacgacgggaactagctctcgtcacttcctcagcccgccgtctgcccactcctctagccggaacctgggggcccggagccggggtaggcacagagttgtcctcggaggtccaggacagcggccagcccggcggcgggagtcagggccacgccacctgcagggaagaacccgagtcgaagcgggaagatggctgcagacaagcctgcagatcagggagcagagaaacatgaaggcacaggtcagtcctctgggatcactgatcaagagaaggagttatccaccaatgctttccaagctttcacatctggaaattatgatgcctgtctacaacaccttgcctgtctacaagatataaacaaagatgattataaaataattttgaatacagcagtagctgagttttttaaaagtaaccaaacaacaacagataatttgagacaaacacttaaccagctgaagaatcaggtccactcagctgttgaagaaatggatggattagatgatgttgaaaacagcatgttgtactataatcaagcagtcattctttatcatctgcggcagtatacagaagccatatcagttggtgaaaaactttatcagttcatagagccttttgaagaaaaatttgcccaagcagtgtgttttttgcttgtagacctgtatatattaacctaccaagctgagaaagctttgcatcttcttgctgtcctagaaaaaatgatttcacagggtaacaataacaaaaatggaaagaatgagactggtaataacaacaacaaagatggatctaatcataaagctgaaagtggagctctaatagaagctgcaaaatcaaagatacatcagtacaaagtacgagcttatatccaaatgaagtctctgaaagcatgtaaaagggaaatcaagtcagtcatgaatacagctggaaattccgcaccctctctctttcttaaaagcaattttgagtacttaagaggtaattatcgaaaagccgtgaagctattaaatagttcaaacattgctgagcatccaggattcatgaaaacaggtgaatgcttgagatgcatgttctggaataaccttggttgcatccattttgccatgagcaagcacaatttgggaatattctactttaaaaaggctctgcaagagaatgacaatgtctgtgcacagctcagtgcaggtagcactgatccaggcaaaaaattttcaggaagacccatgtgtacgttactaaccaataagagatatgagttgctgtataactgtggaattcagcttcttcacattggaaggcctcttgctgccttcgaatgtctgattgaagctgttcaggtttatcatgcaaatcctcgcctctggctacggctggctgaatgctgcattgctgccaataaggggacttctgaacaagaaactaaaggccttcccagcaaaaaaggaattgtacagtctattgttggtcaaggctatcatcgtaaaatagttttggcatcacagtctatacagaatactgtttataatgatgggcagtcttcggccattcctgtagccagtatggagtttgcagccatatgtctcagaaatgccttgttgctgctacctgaagaacagcaagatccaaagcaggaaaatggggctaaaaatagtaatcaattaggtgggaacacagagagcagcgaaagcagtgaaacttgcagcagtaaaagccatgatggagataaattcattccagctccaccttcttctccattgagaaaacaggaattagaaaacttaaagtgctccatacttgcttgcagtgcctacgtggctctggctttgggtgataacctcatggctttgaatcatgcagataaacttcttcagcagcccaagctgtcaggatctcttaagtttttgggacatttatatgctgcagaagccctcatctctctcgacagaatatctgatgccattactcacttgaacccggagaatgtcactgatgtctccttagggatctcttcaaatgagcaggaccaaggatcagacaaaggtgaaaatgaagcaatggaatcctctggtaagcgggcccctcagtgctaccccagttccgtcaactctgccaggactgtgatgctgttcaaccttggcagcgcttactgcctgaggagcgaatatgacaaagcccgaaagtgtctccaccaggcggcttcaatgatccatcctaaagaggtgccccctgaggccatcttgctggcagtctaccttgaactgcagaatggtaatactcagctggccttacagatcatcaaaaggaatcagctgctccctgcagtgaaaacacactctgaagtgagaaagaagccagtgtttcagcctgtccacccgatccagcccatccaaatgccggctttcaccactgtgcagagaaagtgatacttcacttttggaaaactgttacctgagacccaggggagaatttactggccattttagttgtatcacagcagaatgaataaaagatggtgaaggctgttaattttgagtcaattctacccctgacttttggccaaaagcttacttaaaattaaggatttactaagtcatcatcagctgtttttcttaatttcagccagactattaattttgagccattatgtaatatatgccataggcaattaaaacat

SEQ ID NO: 112 - protein, 744 aa, Homosapiens
MAADKPADQGAEKHEGTGQSSGITDQEKELSTNAFQAFTSGNYDACLQHLACLQDINKDDYKIILNTAVAEFFKSNQTTTDNLRQTLNQLKNQVHSAVEEMDGLDDVENSMLYYNQAVILYHLRQYTEAISVGEKLYQFIEPFEEKFAQAVCFLLVDLYILTYQAEKALHLLAVLEKMISQGNNNKNGKNETGNNNNKDGSNHKAESGALIEAAKSKIHQYKVRAYIQMKSLKACKREIKSVMNTAGNSAPSLFLKSNFEYLRGNYRKAVKLLNSSNIAEHPGFMKTGECLRCMFWNNLGCIHFAMSKHNLGIFYFKKALQENDNVCAQLSAGSTDPGKKFSGRPMCTLLTNKRYELLYNCGIQLLHIGRPLAAFECLIEAVQVYHANPRLWLRLAECCIAANKGTSEQETKGLPSKKGIVQSIVGQGYHRKIVLASQSIQNTVYNDGQSSAIPVASMEFAAICLRNALLLLPEEQQDPKQENGAKNSNQLGGNTESSESSETCSSKSHDGDKFIPAPPSSPLRKQELENLKCSILACSAYVALALGDNLMALNHADKLLQQPKLSGSLKFLGHLYAAEALISLDRISDAITHLNPENVTDVSLGISSNEQDQGSDKGENEAMESSGKRAPQCYPSSVNSARTVMLFNLGSAYCLRSEYDKARKCLHQAASMIHPKEVPPEAILLAVYLELQNGNTQLALQIIKRNQLLPAVKTHSEVRKKPVFQPVHPIQPIQMPAFTTVQRK

SEQ ID NO: 113 - DNA, 1006 bp, Homosapiens
gcagtacgcacgcgcgtcccacgcgcctcgagtcttccgcgcgcctgcccagccgggccgcggctgcccgcgcttaacacgcacgcgcgccccacgcggcccggagccctcgtgcccccgcctcgcctggcctgggcgcctcacgcacgctccttccccttcggcttagcgcgcggggccgcaggtccccgcgggccgccctgaattattcatcggcaggaagatattagatgtacccgctccgcgcgggccgtcgtgcaatgctatccgagctccgcgcgcgccctgcgcccctcctcctcctcacgtccgtcctctctgaaaccttggcagagaagggggatcacatttcctttgtcatcgggccatttcgccctcgccttggtcccccctccgatcccgagcctcggggatggaggctcctctcgggcgcgctggaatcagtggaaccggcaacagccccgcgcggcgagctcgggagccgcgtggccaacgccgccggctcgcgcccgcgtcatcttctttctgaaaggagtcgccgatccggacgcgggtggcctcggccgcgctgcgcctaccgagctttgctcccgccgtgccccggcctcctggggctttgcacaactcccccagttcgggttgcgtgcgcgcgcgcgcgccccctctttctctgctttgccgcctctgcctcctcctcctcctcctcttctcttcagtacgccggttattgggactgatcggaattcggaatccttttaatctccaaaggagcaaactcacttccgcccgagtgctgggagggggctgggggaggggaggcaggggagggggctccaggcaaacaggaaacattagccctctcagcacggcccgcttttgtgtgctccctccctccgccctccaacctcctcccttctcccggccgctggggagatgaacgcccccgggcttcagtgtgacgacctttgaaaccttctgagcgaggagcagagaacgactcttccgt

SEQ ID NO: 114 - DNA, 3138 bp, Homosapiens
gctctctcctcctcctcctcctcttcctctctggtctcctccctcctccgggctgggttgcaaatggcttcgttccccgagaccgatttccagatctgcttgctgtgcaaggagatgtgcggctcgccggcgccgctctcctccaactcgtccgcgtcgtcgtcctcctcgcagacgtccacgtcgtcggggggcggcggcgggggccctggggcggcggcgcgccgcctacacgtcctgccctgcctgcacgccttctgccgcccctgcctcgaggcgcaccggctgccggcggcgggcggcggcgcggcgggagagccgctcaagctgcgctgccccgtgtgcgaccagaaagtagtgctagccgaggcggcgggtatggacgcgctgccttcgtccgccttcctgcttagcaacctgctcgacgcggtggtggccactgccgacgagccgccgcccaagaacgggcgcgccggcgctccggcgggagcgggcggccacagcaaccaccggcaccacgctcaccacgcgcacccgcgcgcgtccgcctccgcgccgccactcccgcaggcgccgcagccgcccgcgccttcccgctcggcacccggcggccctgccgcttccccgtcggcgctgctgctccgccgtcctcacggctgcagctcgtgcgatgagggcaacgcagcttcttcgcgctgcctcgactgccaggagcacctgtgcgacaactgcgtccgagcgcaccagcgcgtgcgcctcaccaaggaccactacatcgagcgcggcccgccgggtcccggtgccgcagcagcggcgcagcagctcgggctcgggccgccctttcccggcccgcccttctccatcctctcagtgtttcccgagcgcctcggcttctgccagcaccacgacgacgaggtgctgcacctgtactgtgacacttgctctgtacccatctgtcgtgagtgcacaatgggccggcatgggggccacagcttcatctacctccaggaggcactgcaggactcacgggcactcaccatccagctgctggcagatgcccagcagggacgacaggcaatccagctgagcatcgagcaggcccagacggtggcggaacaggtggagatgaaggcgaaggttgtgcagtcggaggtcaaagccgtgacggcgaggcataagaaagccctggaggaacgcgagtgtgagctgctgtggaaggtagaaaagatccgccaggtgaaagccaagtctctgtacctgcaggtggagaagctgcggcaaaacctcaacaagcttgagagcaccatcagtgccgtgcagcaggtcctggaggagggtagagcgctagacatcctactggcccgagaccggatgctggcccaggtgcaggagctgaagaccgtgcggagcctcctgcagccccaggaagacgaccgagtcatgttcacaccccccgatcaggcactgtaccttgccatcaagtcttttggctttgttagcagcggggcctttgccccactcaccaaggccacaggcgatggcctcaagcgtgccctccagggtaaggtggcctccttcacagtcattggttatgaccacgatggtgagccccgcctctcaggaggcgacctgatgtcggctgtggtcctgggccctgatggcaacctgtttggtgcagaggtgagtgatcagcagaatgggacatacgtggtgagttaccgaccccagctggagggtgagcacctggtatctgtgacactgtgcaaccagcacattgagaacagccctttcaaggtggtggtcaagtcaggccgcagctacgtgggcattgggctcccgggcctgagcttcggcagtgagggtgacagcgatggcaagctctgccgcccttggggtgtgagtgtagacaaggagggctacatcattgtcgccgaccgcagcaacaaccgcatccaggtgttcaagccctgcggcgccttccaccacaaattcggcaccctgggctcccggcctgggcagttcgaccgaccagccggcgtggcctgtgacgcctcacgcaggatcgtggtggctgacaaggacaatcatcgcatccagatcttcacgttcgagggccagttcctcctcaagtttggtgagaaaggaaccaagaatgggcagttcaactacccttgggatgtggcggtgaattctgagggcaagatcctggtctcagacacgaggaaccaccggatccagctgtttgggcctgatggtgtcttcctaaacaagtatggcttcgagggggctctctggaagcactttgactccccacggggtgtggccttcaaccatgagggccacttggtggtcactgacttcaacaaccaccggctcctggttattcaccccgactgccagtcggcacgctttctgggctcggagggcacaggcaatgggcagttcctgcgcccacaaggggtagctgtggaccaggaagggcgcatcattgtggcggattccaggaaccatcgggtacagatgtttgaatccaacggcagcttcctgtgcaagtttggtgctcaaggcagcggctttgggcagatggaccgcccttccggcatcgccatcacccccgacggaatgatcgttgtggtggactttggcaacaatcgaatcctcgtcttctaattgcatttcctaggtttctgtgtttggggtgtgtgtgcgtgtctctctctctctctctctctttctctttctctctctttttgaatttcaaagaagaaacagtctcagggaaatttcttttttcttttttttttttaaagagaacaagaaaagtacaacattgcttaagtcctacctcatctttatttttttacagatgaatgtacttatcttttctgcagggattgagcctgtgaagtgataatttctatctacctcataaatctttacatttccttctgcaacaggccctcttcccctcctcagtggagtttgcatttccctcttcccctgcgtggggcatgatatgcacaagcctggcatctgtatggctgggagggcactggatgtgtgtggtggggtgtattctgtagattgagccaaggaaacacaaaaaaaaactactaagtaaaaaaacaaaaaactata

SEQ ID NO: 115 - protein, 868 aa, Homosapiens
MASFPETDFQICLLCKEMCGSPAPLSSNSSASSSSSQTSTSSGGGGGGPGAAARRLHVLPCLHAFCRPCLEAHRLPAAGGGAAGEPLKLRCPVCDQKVVLAEAAGMDALPSSAFLLSNLLDAVVATADEPPPKNGRAGAPAGAGGHSNHRHHAHHAHPRASASAPPLPQAPQPPAPSRSAPGGPAASPSALLLRRPHGCSSCDEGNAASSRCLDCQEHLCDNCVRAHQRVRLTKDHYIERGPPGPGAAAAAQQLGLGPPFPGPPFSILSVFPERLGFCQHHDDEVLHLYCDTCSVPICRECTMGRHGGHSFIYLQEALQDSRALTIQLLADAQQGRQAIQLSIEQAQTVAEQVEMKAKVVQSEVKAVTARHKKALEERECELLWKVEKIRQVKAKSLYLQVEKLRQNLNKLESTISAVQQVLEEGRALDILLARDRMLAQVQELKTVRSLLQPQEDDRVMFTPPDQALYLAIKSFGFVSSGAFAPLTKATGDGLKRALQGKVASFTVIGYDHDGEPRLSGGDLMSAVVLGPDGNLFGAEVSDQQNGTYVVSYRPQLEGEHLVSVTLCNQHIENSPFKVVVKSGRSYVGIGLPGLSFGSEGDSDGKLCRPWGVSVDKEGYIIVADRSNNRIQVFKPCGAFHHKFGTLGSRPGQFDRPAGVACDASRRIVVADKDNHRIQIFTFEGQFLLKFGEKGTKNGQFNYPWDVAVNSEGKILVSDTRNHRIQLFGPDGVFLNKYGFEGALWKHFDSPRGVAFNHEGHLVVTDFNNHRLLVIHPDCQSARFLGSEGTGNGQFLRPQGVAVDQEGRIIVADSRNHRVQMFESNGSFLCKFGAQGSGFGQMDRPSGIAITPDGMIVVVDFGNNRILVF

SEQ ID NO: 116 - DNA, 1657 bp, Homosapiens
gctcacaggaagccacgcacccttgaaaggcaccgggtccttcttagcatcgtgcttcctgagcaagcctggcattgcctcacagaccttcctcagagccgctttcagaaaagcaagctgcttctggttgggcccagacctgccttgaggagcctgtagagttaaaaaatgaaccccacggatatagcagacaccaccctcgatgaaagcatatacagcaattactatctgtatgaaagtatccccaagccttgcaccaaagaaggcatcaaggcatttggggagctcttcctgcccccactgtattccttggtttttgtatttggtctgcttggaaattctgtggtggttctggtcctgttcaaatacaagcggctcaggtccatgactgatgtgtacctgctcaaccttgccatctcggatctgctcttcgtgttttccctccctttttggggctactatgcagcagaccagtgggtttttgggctaggtctgtgcaagatgatttcctggatgtacttggtgggcttttacagtggcatattctttgtcatgctcatgagcattgatagatacctggcaattgtgcacgcggtgttttccttgagggcaaggaccttgacttatggggtcatcaccagtttggctacatggtcagtggctgtgttcgcctcccttcctggctttctgttcagcacttgttatactgagcgcaaccatacctactgcaaaaccaagtactctctcaactccacgacgtggaaggttctcagctccctggaaatcaacattctcggattggtgatccccttagggatcatgctgttttgctactccatgatcatcaggaccttgcagcattgtaaaaatgagaagaagaacaaggcggtgaagatgatctttgccgtggtggtcctcttccttgggttctggacaccttacaacatagtgctcttcctagagaccctggtggagctagaagtccttcaggactgcacctttgaaagatacttggactatgccatccaggccacagaaactctggcttttgttcactgctgccttaatcccatcatctacttttttctgggggagaaatttcgcaagtacatcctacagctcttcaaaacctgcaggggcctttttgtgctctgccaatactgtgggctcctccaaatttactctgctgacacccccagctcatcttacacgcagtccaccatggatcatgatctccatgatgctctgtagaaaaatgaaatggtgaaatgcagagtcaatgaactttccacattcagagcttacttaaaattgtattttagtaagagattcctgagccagtgtcaggaggaaggcttacacccacagtggaaagacagcttctcatcctgcaggcagctttttctctcccactagacaagtccagcctggcaagggttcacctgggctgaggcatccttcctcacaccaggcttgcctgcaggcatgagtcagtctgatgagaactctgagcagtgcttgaatgaagttgtaggtaatattgcaaggcaaagactattcccttctaacctgaactgatgggtttctccagagggaattgcagagtactggctgatggagtaaatcgctaccttttgctgtggcaaatgggccctct

SEQ ID NO: 117 - protein, 360 aa, Homosapiens
MNPTDIADTTLDESIYSNYYLYESIPKPCTKEGIKAFGELFLPPLYSLVFVFGLLGNSVVVLVLFKYKRLRSMTDVYLLNLAISDLLFVFSLPFWGYYAADQWVFGLGLCKMISWMYLVGFYSGIFFVMLMSIDRYLAIVHAVFSLRARTLTYGVITSLATWSVAVFASLPGFLFSTCYTERNHTYCKTKYSLNSTTWKVLSSLEINILGLVIPLGIMLFCYSMIIRTLQHCKNEKKNKAVKMIFAVVVLFLGFWTPYNIVLFLETLVELEVLQDCTFERYLDYAIQATETLAFVHCCLNPIIYFFLGEKFRKYILQLFKTCRGLFVLCQYCGLLQIYSADTPSSSYTQSTMDHDLHDAL

SEQ ID NO: 118 - DNA, 2409 bp, Homosapiens
gaattcgggcgcgaagcggccggcctgggcgccgactgcagagccgggaggctggtggtcatgccggggttcctggttcgcatcctccttctgctgctggttctgctgcttctgggccctacgcgcggcttgcgcaatgccacccagaggatgtttgaaattgactatagccgggactccttcctcaaggatggccagccatttcgctacatctcaggaagcattcactactcccgtgtgccccgcttctactggaaggaccggctgctgaagatgaagatggctgggctgaacgccatccagacgtatgtgccctggaactttcatgagccctggccaggacagtaccagttttctgaggaccatgatgtggaatattttcttcggctggctcatgagctgggactgctggttatcctgaggcccgggccctacatctgtgcagagtgggaaatgggaggattacctgcttggctgctagagaaagagtctattcttctccgctcctccgacccagattacctggcagctgtggacaagtggttgggagtccttctgcccaagatgaagcctctcctctatcagaatggagggccagttataacagtgcaggttgaaaatgaatatggcagctactttgcctgtgattttgactacctgcgcttcctgcagaagcgctttcgccaccatctgggggatgatgtggttctgtttaccactgatggagcacataaaacattcctgaaatgtggggccctgcagggcctctacaccacggtggactttggaacaggcagcaacatcacagatgctttcctaagccagaggaagtgtgagcccaaaggacccttgatcaattctgaattctatactggctggctagatcactggggccaacctcactccacaatcaagaccgaagcagtggcttcctccctctatgatatacttgcccgtggggcgagtgtgaacttgtacatgtttataggtgggaccaattttgcctattggaatggggccaactcaccctatgcagcacagcccaccagctacgactatgatgccccactgagtgaggctggggacctcactgagaagtattttgctctgcgaaacatcatccagaagtttgaaaaagtaccagaaggtcctatccctccatctacaccaaagtttgcatatggaaaggtcactttggaaaagttaaagacagtgggagcagctctggacattctgtgtccctctgggcccatcaaaagcctttatcccttgacatttatccaggtgaaacagcattatgggtttgtgctgtaccggacaacacttcctcaagattgcagcaacccagcacctctctcttcacccctcaatggagtccacgatcgagcatatgttgctgtggatgggatcccccagggagtccttgagcgaaacaatgtgatcactctgaacataacagggaaagctggagccactctggaccttctggtagagaacatgggacgtgtgaactatggtgcatatatcaacgattttaagggtttggtttctaacctgactctcagttccaatatcctcacggactggacgatctttccactggacactgaggatgcagtgcgcagccacctggggggctggggacaccgtgacagtggccaccatgatgaagcctgggcccacaactcatccaactacacgctcccggccttttatatggggaacttctccattcccagtgggatcccagacttgccccaggacacctttatccagtttcctggatggaccaagggccaggtctggattaatggctttaaccttggccgctattggccagcccggggccctcagttgaccttgtttgtgccccagcacatcctgatgacctcggccccaaacaccatcaccgtgctggaactggagtgggcaccctgcagcagtgatgatccagaactatgtgctgtgacgttcgtggacaggccagttattggctcatctgtgacctacgatcatccctccaaacctgttgaaaaaagactcatgcccccacccccgcaaaaaaacaaagattcatggctggaccatgtatgatgatgaaagcctgtgtctttgagggattctaccctgaacatacctcacagatcctccctgtcatgccacatttcactgattggaatgtggaaatggaaaaggaatttaggatgtgcattttcacctgaggtttccctgcatccctgcagtgccaaagccccaccttcagggaccacctggaatgtgtgaggggctgacagcacagtaacgtgcatacatatctgcagggctggaatggaagctttaaaggtggtagtgatttttattttggaagaatcatgttacctttttgttaaataaaatttgcccgaattc

SEQ ID NO: 119 - protein, 677 aa, Homosapiens
MPGFLVRILLLLLVLLLLGPTRGLRNATQRMFEIDYSRDSFLKDGQPFRYISGSIHYSRVPRFYWKDRLLKMKMAGLNAIQTYVPWNFHEPWPGQYQFSEDHDVEYFLRLAHELGLLVILRPGPYICAEWEMGGLPAWLLEKESILLRSSDPDYLAAVDKWLGVLLPKMKPLLYQNGGPVITVQVENEYGSYFACDFDYLRFLQKRFRHHLGDDVVLFTTDGAHKTFLKCGALQGLYTTVDFGTGSNITDAFLSQRKCEPKGPLINSEFYTGWLDHWGQPHSTIKTEAVASSLYDILARGASVNLYMFIGGTNFAYWNGANSPYAAQPTSYDYDAPLSEAGDLTEKYFALRNIIQKFEKVPEGPIPPSTPKFAYGKVTLEKLKTVGAALDILCPSGPIKSLYPLTFIQVKQHYGFVLYRTTLPQDCSNPAPLSSPLNGVHDRAYVAVDGIPQGVLERNNVITLNITGKAGATLDLLVENMGRVNYGAYINDFKGLVSNLTLSSNILTDWTIFPLDTEDAVRSHLGGWGHRDSGHHDEAWAHNSSNYTLPAFYMGNFSIPSGIPDLPQDTFIQFPGWTKGQVWINGFNLGRYWPARGPQLTLFVPQHILMTSAPNTITVLELEWAPCSSDDPELCAVTFVDRPVIGSSVTYDHPSKPVEKRLMPPPPQKNKDSWLDHV

SEQ ID NO: 120 - DNA, 6622 bp, Homosapiens
ggcccgccgcgtcgcaccgtcctctttcctttccttctccctccccttttcccttccttcgtcccttccttccttcctttcgccgggcgcgatggagccggggcgccggggggccgcggcgctgctagcgctgctgtgcgtggcctgcgcgctgcgcgccgggcgcgcccaatacgaacgctacagcttccgcagcttcccacgggacgagctgatgccgctcgagtcggcctaccggcacgcgctggacaagtacagcggcgagcactgggccgagagcgtgggctacctggagatcagcctgcggctgcaccgcttgctgcgcgacagcgaggccttctgccaccgcaactgcagcgccgcgccgcagcccgagcccgccgccggcctcgccagctatcccgagctgcgcctcttcgggggcctgctgcgccgcgcgcactgcctcaagcgctgcaagcagggcctgccagccttccgccagtcccagcccagccgcgaggtgctggcggacttccagcgccgcgagccctacaagttcctgcagttcgcttacttcaaggcaaataatctccccaaagccatcgccgctgctcacacctttctactgaagcatcctgatgacgaaatgatgaagaggaacatggcatattataagagcctgcctggtgccgaggactacattaaagacctggaaaccaagtcatatgaaagcctgttcatccgagcagtgcgggcatacaacggtgagaactggagaacatccatcacagacatggagctggcccttcccgacttcttcaaagccttttacgagtgtctcgcagcctgcgagggttccagggagatcaaggacttcaaggatttctacctttccatagcagatcattatgtagaagttctggaatgcaaaatacagtgtgaagagaacctcaccccagttataggaggctatccggttgagaaatttgtggctaccatgtatcattacttgcagtttgcctattataagttgaacgacctgaagaatgcagccccctgtgcagtcagctatctgctctttgatcagaatgacaaggtcatgcagcagaacctggtgtattaccagtaccacagggacacttggggcctctcggatgagcacttccagcccagacctgaagcagttcagttctttaatgtgaccacactccagaaggagctgtatgactttgctaaggaaaatataatggatgatgatgagggagaagttgtggaatatgtggatgacctcttggaactggaggagaccagctagcccacagcaaccaaagagacttcctcttggcgttcaggaaacacagattctttgtccttttcccaacagcccaggctgttgatacctcagagccttctctttactctccaaagtgaaagggaagcccccgtctctctaactgcatgtcatcaggggtgagcctgcctttcctatcttcacacctgccacctcatgttcacacctatctttctcaccttttttttgagatggagtctcgctctcttgcccaggctggagtgcaatggcacgttctcagctcactgcaacctccgcctcttgggttcaagcaattctgctgcatcagcctcccgagtacctgggattacaggcatgtgccaccacgcccggctaattttgtatttttagtagagacggggttttgccatgttggccaggctggtctcgaactcttgacttcagatgatccatctgccttggcctcccacagtgctgggattacaggcgtgagccaccatgcccggcctctttctcacctttacacctgtcttcttatcctcacatctgttttcacaccttcatccctgtcttcctcatgttcacacttgtcttccccatgttcatagctgcctttcttaccattttggtttgaagggcagtcttctctggcttgtttttttgtttttcccagaaaatcagtattattttttaaataagaaaaacattcctagaagatgataattgtgaaaacctcctttggcttatttgcttttccagattttagtctcctttctccccatccgggaaagatggtggaagacataggctaaatttctccagcctcacaatggtcttcacttggtctgacttgtaccaattctagcacccactgaaaaacaagttgagtagagagtgtagagtgcagaaatgtggcttttgccccactttgcatctccaaaattacaacggttggccgatcccatttgaggacaatgcttagttataagtctccgagttggaaaaggaagaaagccagagctgtctagtttcattcattctttcagtaaatatttattgagtacctactgtgtgctaggcattgacctgggaactagagatacttcacagaataacagggaaagttccctgtgctcatggagcttacattctacagggagaaagagatagccaatacataggaataaatatatacaaggtatcatgtagtgataattgctgtggagaaaaataaagcaggggagggagtaagaaatcctggagatgaggctgcagttttaaatggggcctcactgggaatgtgacgttgagcagagacgttagggaagtggatcctggacaaggcattccaggcagaggaacaggatgtgcactgccccaaagtgagaacttgctctacgtggtcaggaaagagcagggagaccaagcagagtcgtgggcaggggtagaatggaaggagaggcggctggggaggacaggtggtggagggccttggcttctgctaagtgagatgggaaccactggagggtttgaacagaggagtgccttgattgatttatattttgcaagggtcattctagctgccatattgtgaaaaactttagtggacaagggcagaaggaagagggaagacctgttaggaagctactgcaaggttccaggcttgggcctgggccacagcaacagcagtggtcaaatatctagatttattttgaaaagagccaataggatttgctgagagtttgaatgtggagtgtaagagaaggaagagttaatgatgacattaaggtttttggcctgaatagcaggaaagatggagttaccagttactgaaatagggaaggatgggctgggtaagtaaggaatttggtgcaaagcaggctgtctgtggttggaatgggaggttctggctgcaaatcaaagtggagagttctctcaggtcaggtctgcagcagagctcgagacagggatctgaatgcacttggtttattgttgggggtgctctcagaaggaacctgtgaaagcctttatcagtcatttattggctgtgagaagttctctgggagtgtgggtacatttgaaggcaagtgacttcagttgagggcaagtctctggaaaagaggctgtaggcatctggcagctaccatgcatggtagtgtgttgggggtgggggtcctgggcactggctgtgtgaagggatctggcagggcaccacagcgccccctactgaaccatcagcatgtcagtggcatttaaagccatgcagctggaggggccactgagattgtctctgagtattactgagaagcaacagaaaagagccatggatggagcccttgggctctctgggaaatgggaaatcagccaaaggactgagaaggagttaccttaaggtcagagaaaaccaagagagtgtggtgttctggaagctgagctttctttattcaacctcattcccttctccaaataagccacttgtgtagttgggcccctccagggttgaaggcaagaggagaaaggcacagcgtttgggaaacaagacttttcctgcaatagcctgggaaggaataaaaggatagagtgtttgggtttttgtgtaatggtggttaattggggtggaacactcacacgttgtgctttttctgggcttcccttatcccccagaacactctaccaacctcggggaactcgggcacatccttctgtttctccttcagctctatcctgctttcctcatcccttctgacaccacgtcctcactcacctgcacaagaatccctgcatcaggttctcctttgagggtacccacccaggacagtcccctaccacttctgtcttgggctgaagttgcccacgtccacaaaatctgtactcccagcgggggtgtttggcccgaggagtcagtgttattactggtggatgcaccgtgtccacagcagcccccaatcccagcgatgcgtcagatcttacgtggcttcctgctgggggagatggccttcacccacgggatgccgggttctcctttctttcctcaccccaacctttactccaccagagaaacttccttttgaactcagtggggaagagggtgatgagacaggactagaaagtagtgggggacccagcgagtggacgccctgctccgggattcctgagtctgtaaatagtgtgcccagcagctgtgaactccccttatagcctcaggctgcagtgtccttcccagctgtgtgagaaaatgaaagccgacgtccacagggacccaggcagggttgggtgttgtgactcactccacctctgtgccctgcagaggtactgttgggtccttgtcttgtgagcctggggtgagctctctgtacatgttgttgttccacgtatgggttgacttggcatgctggggggtcctcgttcactctctgaagttggcctcctttcactggggattgaaaagcacctccacccctaccctagtgatgtcccctgaggacccaggtgatagtacagtcaatattgtcagtactttgctttgattgaaggctgtagagctgagttaccaaaatttctatttcaaaggaaaccaaaccttaaaaaaaaaaaacaaaaactgggctgggtcttccaaacctaccatgaaaccctggtgtgcaggctgcactcaatgacctcaacccaacacctccctgagtgtgcttcttggaagagcctagaagattcctggatggagaccccattggttcagcctcaagtctggcccgtcttcgaaaaaacaaacacatttgtaagctttgtgggagcttccaggcctgctctaagatgccttgcttgtcctttgacccatcagcatggagctcagtggttgctgtttggttctgcaggctggtggggaggccgcccatcgtggtggggcatctgtccagccccattgccactcagggcatccaaacaggaggcacccgctgggaagggtctaaagatactccttgtggccactgctactgttcacacttgacttgtggagaagcgaagggctgaggggaggtttgtgtacacccatgtatttaaaagtgactgactgactgaaatgagcacataccgacatatgcaacatactaataccttcctgattttcgagactttctaattactacaactaacctgttgtgctcacctctggaattcagaaagagagccactgcgagcactgaccacaagggctgccttaggaaggaaatgtgtgctttcaggagttcttattaggggaattttaagagcacaaaaattttattgaacccaccttagtgacaaacagaaaatgatttgttagattgtcagttggaaggggtttattatgactgctggtgaaataaacagtgaccagtttctgccaacatttatggaaataacgtttctaggttttaaatgtgagccgtaaactgaagctacttcagttaaaaaaaaaaaaatcaatacttaaactgtagggaaaaggtggattggtgccagagaaaacattatttaatagtgtcagaacatggaactgcaacacagtttgtagcaaggcactgagaaaaacccacaactaatccttcatcgcagctgtctgaactcttgatcatctgccatcccccaaacagtgacttctttttttctggtgactccaggcctgaatgacctagtgtggagagtttaaactatgtacaagggaggaaagaaaaaaaggaaaggaaccttaagtaagcctcagccaaaggttttatgcattggacttcctgtgcctgcccccaggggcaagactgatccccatgcctgtgcccatgacatctccctgaaagaggacaccatgacagcccggctttgccttgactgacccactgctaccccagaaataagaatcaagagcagctattgttatccttagagtgttttccgtctagggccggctcgtgaacagccacatatccttgcacctgacactgtccccacacaaatagctggctttcgttgcttgttgaatgaatgagtgagttggctctatatccccttggagctggccggtaagatattagtgcctcattttacaagaagagaataggaaggaattaagcaatttggccaacagatacaagatagattccagagttttatctcccactttagggtggcagccagtaggccaaactccaaagaccgttgctgatgtctttttctgcctcccctctttgggttagtgtggtatgtacaagctcactcttgttgaaaattagaaaatagttgaaaacaaaaggtttttgtttttctttttaaatcacattaaatgttttacattgctta

SEQ ID NO: 121 - protein, 401 aa, Homosapiens
MEPGRRGAAALLALLCVACALRAGRAQYERYSFRSFPRDELMPLESAYRHALDKYSGEHWAESVGYLEISLRLHRLLRDSEAFCHRNCSAAPQPEPAAGLASYPELRLFGGLLRRAHCLKRCKQGLPAFRQSQPSREVLADFQRREPYKFLQFAYFKANNLPKAIAAAHTFLLKHPDDEMMKRNMAYYKSLPGAEDYIKDLETKSYESLFIRAVRAYNGENWRTSITDMELALPDFFKAFYECLAACEGSREIKDFKDFYLSIADHYVEVLECKIQCEENLTPVIGGYPVEKFVATMYHYLQFAYYKLNDLKNAAPCAVSYLLFDQNDKVMQQNLVYYQYHRDTWGLSDEHFQPRPEAVQFFNVTTLQKELYDFAKENIMDDDEGEVVEYVDDLLELEETS

SEQ ID NO: 122 - DNA, 5179 bp, Homosapiens
atgcatggagaaaaaggaatctggcagcacttccagcgggagggggaagctctcctggatttcaagtcccgtgaaagggcccactgccaacgaaacagcctcatcaaagcggcctctttcatggccacagctgttgctggtttggggctccgcctgtcagactgcgtcaccctctcgccaagggtcccccagacgggcgggggctccttgcggccggctagctactctccccgcctccctgcgccctcgccctccgccccgctgtacccgcagagcgcgcggcccagcgcagccccttttggcaccgaggtttccaggtgcccagcgcgaaggcggagccgggttacagccgcctcctcggcgccacagagaagacccccgggagttcggcggcccaggcgctccggctctgcgtcccgagcctcccccggctctccgcgctcctccctctcggcgcgcccggcgcgaagcctgcgattcgtgagccgagcgcagagcgcagagccgagtggcgcacgctgggcagtggcctgggcaaccccaaacgcagccagagccctcacccgagtccgctggcccgcgcactcccggaccatgactgccgagggacccagcccgcctgcccgttggcacagacgcctccccgggctctgggcggcggcgctgctcctgctcggtctgccgcgcctttcggtgcgggcggatggaaagttctttgtgctggagtctcagaatggctctcagggcctacaactggaggctgctcggctttcctgcaagagcaggggcgctcacctggcatctgcagacgagctgcggagagtggtacaggattgctcctttgcggtgtgcaccactggctggctagcagatggtactcttggaacaactgtgtgtagcaaaggaagtggagaacagcaaatcatgagagctgtcgatgtgagaattgagagcaacccagttcctggtggcacatacagtgccctttgtattaaggatgaagagaagccgtgtggagacccgccttcgttcccacacaccatcctgcagggccgcaccggcttggaaatgggggatgaactgctgtacgtgtgtgccccaggccacatcatgggccaccgggagaccgccttcaccttgctatgtaacagctgtggggagtggtacggcctggtgcaggcctgtgggaaagatgaggctgaggcacacattgactatgaagataacttccctgatgacagatctgtgtcattcagagagctcatggaggattcccggacagaggcagatgaggacaggggtcagggagactcctctgaggaggctccaaaacaggaccgtctggtctccatttctgtggggagagaaaacatagcccgggataaagtctttgtgccaaccacaggcttgcctggtgctgggagcagtgtccccgcagattcaccaggatcacggctgctccagaagcacttgttctggtttcctgctgaggctttccacaagcctgggttggaaaaggaggtggatgatgacaccaaaaagcagttttctgctggagacaaccacagtggtgtaaaattggtcccaggtgaacctgaaaccaaggtgatctacggcaacactgatggtccctcggggccatttgtgggcaagaatgacagcaaggcaggagatccagtggtgagcagcagtgatgagtcctggttagatggctaccctgtgacagagggggcttggaggaagacagaggcagaagaggaagaagatggggacagaggggatgggtcagtagggctggatgaaaacgtcctagttactcctgatcagcccattcttgtggaagttaagaagcccaagagtagcaccctcacaccaagcgagggcatgacccatagttcagttcttccatctcaaatgctagatgtggaagctttggcgctcagacccgtgaatgcttccgagactgagggcattggggatggtgacttgacgaagtaccagtcaactctaccctggagattcatcacagaggaatctcccatggccaccctgtcctatgagctcaccagctccaccctggagatattaacagtgaacactgtcaagcagacacctaaccacatcccctcaacgatcatggcaaccacccagcctccagtagaaaccactgttcctgagatccaggatagcttcccatacctgctgtctgaagacttctttggacaggaaggccccgggccaggtgcaagtgaggagcttcatcccaccttggagtcgtgtgtgggggacggatgtcctggcctcagcagaggccctgtgatcgccaccattgtcaccgtcctgtgcctactgctgctcctggcaggtgtggggatggtgtggggctaccgcaagtgccagcacaagagctctgtgtacaagctgaatgttggccagcggcaggctcggcactaccaccagcagatcgagatggagaaggtctaggcacctttggagtgggttctcccaaagccacttgggaggaaaataactgtgacacatcacacgataattcactagagcatgacgcaggtggactgaggctcatcattttttcctcagccctttgttttataggctgagaagtgtctctggagcacctgggagggcagggaggctttggtgacatcatcactcatgtcaatgtctcctccaccatctgccctggaattgactacactaatcccagacctgtgcttgggccctgtttccagtgtgaggtcaaaaatcgcctcttccttcatcacagtattatctttttttttttgagacagagtctcatgctgttgcccaggctggagtgcagtgtcccgatctgagctcactgcaacctctgcctcccaagttcaagcaattctcctgcctcagcctcccaagtaggtgggattacaggcatgcaccaccatgcccagctaatttttttatatttttagtagagatggagtttcaccatgttggccaggctggtcaagaactcctgacctcaagtgatctgccctccttagcctcccaaagtgctaggattccaggtgtgagccacatcacagtattacctttttgaagaaagaaaatcaccagcttcatgccctgaaattttataaatagtcatgataaaccaagtgtatgagagcagtattatctaggacatggatattgaattattgggagaggaatatggaagaataatgggttgtttccttttaatgttgtgatgttgctgagggcagatgaaccaagagccaggacacagtctagaagctttgaggtttcttttttcattgtttcttgaaattagaatttaagactgacattttgttgggggagttgaggagtgaagaaacacacatccccctctgttccctccattctgtgggacagtctgtcatttattttattttattttcaatatttcatggttaaggatttgccattattttttaaaaacaaagttagctttgtaccagtaagtaccatttcctctcagaagcagtggcctagttgtccttgaccagtctgtgcctaggaatgtcttggaatttttgccaggactaacaaaactcagtccttggtttcctctctcaggattaaccatttctctgaactccagtaagagagaatgacacgggagaaaaaaaaaagaaatgttttcagagggccgaacaccaggttatcaagtatgggcacatacttgatggagaagcagaagaatctgtgaaagaatatgaaatgatctgtgctgatctgttctctagtgtggaaactgggagctctgtggaaacagaatccatcctgtctgttgggtaacccatttcgtagcatctaaatcatcttagggtggctcagcgaggatggtttatggcagtggttctcaaagtgtggtcctcagaccagtagcatcagcgtcacctgggaatttgttggagatgcaaattctctagtcccaccctggactcaggaaacaggaaccctgggagtagggcccagttctgtttttaacaagccctccaggtgattttgatatgcactcaagtttgagagcctgttggtttataataatctcaaatgtgaacttcgaggccagctgaagccctaaaggcacagatgagtatgtggtgtgtgttgtgtggaagtcaggcatggctgtgtgcagctgaggtggcatttgaagctgcctaaatgccacctgcaatagtctcctgtatgttggcacagaaatgaaacatgttatatttttctaatatgaatcaccttcttagaaatagttatcagtggtaaaaagtgatgaatgcaacacatttattttgagacaccatagcagtctaagtgtttttgtgtggtagagggaaatcctgatcttttttatgattgaaaaattgttggtggtgttttacctaaggaaaaaaaacattcgcaacatgttttctaccctgccacctcttttcagcaagctttggaaaagtaataggcgaagtagctgtaaagagaggcagcataatcaaagatcttattccccatagttgggtaaaataaagcctgaaggtaccaactagaatacctgtgcatcagacgaagtcaagaacaataggaataaaatgctttctgcatgtagccaaagcaaaacataatagaataaaagccagagactgtatatatttataaattagatcctaatctactgcaagataacttttctatttttaactatataaaataacctctgtctcagcattgggactgtgttagcaactattattgtggaataacccagaacattggatttataccaacaaataggcaatattaatacagtgtattaataaatttattacaaattattaatacagtgtattaataaatttattacaaattattaatacaggtaaatgttttatttgtagacatggactgtgaaataaacccaacacatcagtttttaagttcttattggtgtggtatcctctaaattaatgttatagaatctaaaaattcatgttgaaagggaatgattaaaacaatgtaaatctaaattgtatgtcatgcatgttttgagaatggtgaatgtttaatgctcatgaaaattgggggagggggttctattaacacaaagcttctgagatatttaaaataaataattattgcc

SEQ ID NO: 123 - protein, 827 aa, Homosapiens
MHGEKGIWQHFQREGEALLDFKSRERAHCQRNSLIKAASFMATAVAGLGLRLSDCVTLSPRVPQTGGGSLRPASYSPRLPAPSPSAPLYPQSARPSAAPFGTEVSRCPARRRSRVTAASSAPQRRPPGVRRPRRSGSASRASPGSPRSSLSARPARSLRFVSRAQSAEPSGARWAVAWATPNAARALTRVRWPAHSRTMTAEGPSPPARWHRRLPGLWAAALLLLGLPRLSVRADGKFFVLESQNGSQGLQLEAARLSCKSRGAHLASADELRRVVQDCSFAVCTTGWLADGTLGTTVCSKGSGEQQIMRAVDVRIESNPVPGGTYSALCIKDEEKPCGDPPSFPHTILQGRTGLEMGDELLYVCAPGHIMGHRETAFTLLCNSCGEWYGLVQACGKDEAEAHIDYEDNFPDDRSVSFRELMEDSRTEADEDRGQGDSSEEAPKQDRLVSISVGRENIARDKVFVPTTGLPGAGSSVPADSPGSRLLQKHLFWFPAEAFHKPGLEKEVDDDTKKQFSAGDNHSGVKLVPGEPETKVIYGNTDGPSGPFVGKNDSKAGDPVVSSSDESWLDGYPVTEGAWRKTEAEEEEDGDRGDGSVGLDENVLVTPDQPILVEVKKPKSSTLTPSEGMTHSSVLPSQMLDVEALALRPVNASETEGIGDGDLTKYQSTLPWRFITEESPMATLSYELTSSTLEILTVNTVKQTPNHIPSTIMATTQPPVETTVPEIQDSFPYLLSEDFFGQEGPGPGASEELHPTLESCVGDGCPGLSRGPVIATIVTVLCLLLLLAGVGMVWGYRKCQHKSSVYKLNVGQRQARHYHQQIEMEKV

SEQ ID NO: 124 - DNA, 2378 bp, Homosapiens
gtcaccaggacaacgggcgtcgccggcgccgtgtgacttcgggctgtgggctcgctcgcggctcttcggccatggttttctcaaacaatgatgaaggccttattaacaaaaagttacccaaagaacttctgttaagaatattttccttcttggatatagtaactttgtgccgatgtgcacagatttccaaggcttggaacatcttagccctggatggaagcaactggcaaagaatagatctttttaactttcaaatagatgtagagggtcgagtggtggaaaatatctcgaagcgatgcggtggattcctgaggaagctcagcttgcgaggctgcattggtgttggggattcctccttgaagacctttgcacagaactgccgaaacattgaacatttgaacctcaatggatgcacaaaaatcactgacagcacgtgttatagccttagcagattctgttccaagctgaaacatctggatctgacctcctgtgtgtctattacaaacagctccttgaaggggatcagtgagggctgccgaaacctggagtacctgaacctctcttggtgtgatcagatcacgaaggatggcatcgaggcactggtgcgaggttgtcgaggcctgaaagccctgctcctgaggggctgcacacagttagaagatgaagctctgaaacacattcagaattactgccatgagcttgtgagcctcaacttgcagtcctgctcacgtatcacggatgaaggtgtggtgcagatatgcaggggctgtcaccggctacaggctctctgcctttcgggttgcagcaacctcacagatgcctctcttacagccctgggtttgaactgtccgcgactgcaaattttggaggctgcccgatgctcccatttgactgacgcaggttttacacttttagctcggaattgccacgaattggagaagatggatcttgaagaatgcatcctgataaccgacagcacactcatccagctctccattcactgtcctaaactgcaagccctgagcctgtcccactgtgaactcatcacagatgatgggatcctgcacctgagcaacagtacctgtggccatgagaggctgcgggtactggagttggacaactgcctcctcatcactgatgtggccctggaacacctagagaactgccgaggcctggagcgcctcgagctgtacgactgccagcaggttacccgtgcaggcatcaagcggatgcgggctcagctccctcatgtcaaagtccacgcctactttgctcccgtcaccccaccgacagcagtggcaggaagtggacagcgactgtgcaggtgctgtgtcattctctgacagcagctgcctgggcccaaggggtgatgaggcatcctttcctctagaagacctgagtcttcctgaccgactccaccatcacccaatctgttgattctccattgggaaaggcatttacaggtaaaagacttctgtatggattgcagttactctggtgatagttttcacctttattctgctgtgaaacaatcaaatcaaagccttgtgtcagttaacacatgacaagtggtctcaatgcagctaggaccatgccagaaacctggatctcttaagagattggtacctacctaggtacgaaagttctacccttggcatactcagcattcctcaaaaagaccatcagtgttagcacaaactgagcagaaaaaataagctgttgattttctacctgatacttaagccagtggcctactttaattcacaattccattttgattagcaggacttttccactttgaagataaatagcaactttatcaaagtgactgtactgcaaattaattcataatgcctgatagttttatatatagagacttatgtggaaggcatgttaataggtttccatgagacaccaaagaaaagaggactctatactgggtggagcagggtcttcacctttttgtttctgtcaacttgtcatatacacctccagggaccaaaaacaaaagcagctcggagtctgtgttgcctgattggaaagtagaagctctggtgtatgctacagcacataacacatttttactaaaggaaaaaagctaattatgtccatgcctctcgtaaaactggggggaaccttaaagagaaagaactaaggcttaagttatctgtagtataatcaattagaagtaatgaatggatgcatgtaaaatggatgtgattttttttcaagcttattttgaaatcttaaaaatcaggttacaccatagctactcaaaagttttacacacttaaaactcagatcagtaagtgttggtaccttttagactcataaaattgaataaaccattgcaatgctttaaaaaaaaaaaaaaaaaa

SEQ ID NO: 125 - protein, 423 aa, Homosapiens
MVFSNNDEGLINKKLPKELLLRIFSFLDIVTLCRCAQISKAWNILALDGSNWQRIDLFNFQIDVEGRVVENISKRCGGFLRKLSLRGCIGVGDSSLKTFAQNCRNIEHLNLNGCTKITDSTCYSLSRFCSKLKHLDLTSCVSITNSSLKGISEGCRNLEYLNLSWCDQITKDGIEALVRGCRGLKALLLRGCTQLEDEALKHIQNYCHELVSLNLQSCSRITDEGVVQICRGCHRLQALCLSGCSNLTDASLTALGLNCPRLQILEAARCSHLTDAGFTLLARNCHELEKMDLEECILITDSTLIQLSIHCPKLQALSLSHCELITDDGILHLSNSTCGHERLRVLELDNCLLITDVALEHLENCRGLERLELYDCQQVTRAGIKRMRAQLPHVKVHAYFAPVTPPTAVAGSGQRLCRCCVIL

SEQ ID NO: 126 - DNA, 4884 bp, Homosapiens
cggcgcgttgcggcaggtgccctgggcgtactgaggcgcggtggcctgagcccggccgccatcgatgaccccggtcgcggacttgcttcaggctggccaccccccgtcttgtttcatcatctgtgttgagtaaccatggggaggaagctggacctgtctggtttgactgatgatgaaacagagcatgttcttcaggtggttcaaagagacttcaatcttcgcaaaaaagaagaagaacgactaagtgagctgaagcagaagctggatgaggaaggcagcaagtgcagcatcctctcgaagcaccagcagtttgtggagcactgctgcatgcgctgctgctcgcccttcaccttcctcgtcaacaccaagcgccagtgtggagattgcaaattcaatgtctgcaagagctgctgctcctaccagaagcacgaaaaggcctgggtctgctgcgtctgccagcaagcgaggcttctgagggcccaatctctggaatggttctacaataatgtgaagagccgcttcaagcgctttggcagtgccaaggttctgaagaacctgtacaggaagcaccggctggagagtggcgcgtgcttcgacattctaggaggaagcctttttgagtcaaacctggagaatgaaggaagcatttctggcagtgattcaacattttataggcagtcagaaggacatagtgtgatggacaccttggctgtggccctacgggtggctgaagaggccattgaggaagcaatttccaaagcagaggcatatggggacagcctggacaagcaaaatgaggccagttacctgcgggaccacaaggaggagctaactgaggaactggccacgacaatcctgcagaagattatacgaaaacagaagagcaaaagtgagcagcaagtggaagaagagccaggatggccacatccccagagttgcagcacaaaggtggcagatgaggggacctcagcatcccctggaggctaccgtgctcccgctgccctctggaggtcccagtctgccttctcaatcactggagaagaagccctgaagacccctccagtggaggctccatcgaggcagccaagggaccaaggccaacacccgagagcagagtctgctctgcccagctggaagagtgtggacaggctggatgaaacaaacctggccccagttttgcagagccccgacgggaactgggtggccctgaaggatggcgctccaccccccacccgactactggccaaacctaagagcgggacgtttcaggccctggaggtggcctccagtgtggcatctgcctacgatgagatgggctccgatagcgaggaagactttgactggagtgaggccttgagcaagctgtgtcccaggtcccgggccctgcccaggaacccccagcctcagcccacacaggcccagagctctgaccaaggccccatagctgcctccccatcctctgcactctcccccaaccctgaggccatgtgctctgactcggagacctcctccgcaggctcttcccgagaagttgggcaccaggccagactgtcctggttgcagaggaaggcccccaggaaccctgcagctgagaagatgcgcttgcatggagagctggacgtgaacttcaacccccagttggccagcagggagacctcggacagcagcgagccggaggaggccccccacaccacagaccggcgggccaggaggtggagaagagcccgactgggctcagaagagccaagcaaagaaccatcttcccccagcgcccagctccgggatctagacacacatcaggtgtcggatgatttatcagagacagacatcagcaatgaggctcgggatccccagactctcacagacaccacagaggagaaacggagaaacaggctgtacgagttagcaatgaaaatgagtgaaaaggagacttcttcaggggaggatcaggagtctgagcccaagacagaatctgagaaccagaaggaaagtctgtcctctgaagacaacagccagagtgtccaggaagagctgaagaagaagttttctgctgtttctctctgcaacatctccacagaagtcctgaaagtcatcaatgccacagaggagttgatagcaggatctacagggccctgggagtccccacaagtccctcctgacagacagaaggggatgtttcctcgtgggacagaccaagtgagactggatgagcagctgacttccctggaagaaaatgtatacctggcagcaggcactgtgtatggactggagacccagctgactgagctagaagatgccgcccgctgcatccacagtggcactgatgagacccatctggcggatctggaggaccaggtggccacggctgcagcccaagtccaccatgctgaactccagatttcagatattgagagccggatttcagccctgaccattgcaggattaaacatagcaccatgtgtgcgcttcacaagaagacgggatcagaagcaaaggacccaggtacaaaccatagatacatcaaggcagcaaaggaggaaactgcctgctccaccggtgaaagctgaaaaaattgagacatcttcagtgactaccattaaaacatttaaccacaacttcattctccaaggctcctcaacaaacaggactaaggaaaggaaaggcaccaccaaggatttgatggagcctgctctggagtcagctgtgatgtactgacaccatggaattccactgccagtgacccactgcctccggccgtacacgacagtgccttgacccaacagccatcgagtactgtatgtatttccacctgaggagaaggcctggggaggccacagtgcaccattgcacagggctgtcctgatacctcatccagaaagccgtctcagacttcagcactgcggtcttgcccactctctgccttaggctcccaggggaatccaagacagaaaatgaagacactggcttccaacagcagcgctccatgtttaagatacatattttccctgtttgctttgctactgtatgttgactttaagatctttttttaaatacatttgattcagctagtattccatgtcaacaatttgtccaaaggaaaactgctggagggaggtggagggaggaaggtgggaattattatttaatacatcattaatgcttattaatctctcacaagcatctttgtcttgcaaatcctaagggaaaagcaagtccctgcagtgagcactagggacagtctaatttggggattgctcaaccatcaagactgcaggtctcccttcagccacctccttcctgctaaaagcttagcctaccacactaccagtcattcccatcgctttgcaatcacaagccacaggatgagaagttctgactcactcatgccatgcccagggctatctgaaacaatgtctcattaagaatttagggttcttccatgggcttactgacagttgcccagatctgaaggggaaagggtcttgagaaagaccatcactggctcaactttagggcactgtccagagtcaacatgatgtggtttagcagtgatcacatctaaacaaagtttaggtaaatgaattatcgcagagaaaaaccacatgagaaaatttttgtactccaaatttacttcccaataaatattcagcaaagtagtaaaatgaccttaaagataaaaatgattagggaatagccttagaaaatttataggtataaaaaattcaaggacaaactgtgcatttaatggacacaagaattgactctaactccatgtctgtggtttctttgaacccatatcaaatgtatgactatttagagtgtttataagagataatggaactgaactttcactcaattaattgggcattaacaaccttcttttatgtttgttcctgatatagtctgaatcttaggaagaaggtaaaagaaaggaggcaagagaatagttatgatgaatatgtgttaagtgcctgctctgaaggaggcaatgttcttctcatttgaatccttatggcaaccttattcaataggttttcccatatttcagatttaataactgaaggccagagagattaatttgccaaagccacacctttatgctaattatgattggaatgcatcacaaaagcctaactctgttgttttcaacctctacgttattttgctgctatgtgcatttccagatctgattttctgctaacttgtgtgctatgatccactcctgatgggggtctacattaatcttccagtactccttgctgatgctgtgttatgtgtcatctaacagaaatgactcctttgaaataagtaaatctttggctttttgttctgttggtgtgattcaaagcaaaacaaacaaacaaaaacaaattttaagaacacaacaaaaaagatttgacttccgaatagaatgttttctttaagaggcatgaaaagcaactattgttgtgttacagtgttaaaaatattcagttttctttgacaaaaatgtgtactgtgtaagccttgcaaacaaaaaacaacaaaaaagaagcagcagcagcagcctgctgtgtggcatctgaacttttataaaggtttccttgtgccaaataagtgcaaagatttaatttactattaaaaaccataagcatatgttatagttccagaagaattattttgtcatcaagtgattttgatctttagtgtcaatatttatatttagattaatttttataaatgaaaatattttaatggtttaagaaaatgaggacaacaggataatatctttgatgacttctgaaagttatgcttcccttcatgttatatgcacattgccaagaattactgtcaagagaaatgataagtaaaagtcatttatgaaaataaaaaaaaaaaaaaaaa

SEQ ID NO: 127 - protein, 859 aa, Homosapiens
MGRKLDLSGLTDDETEHVLQVVQRDFNLRKKEEERLSELKQKLDEEGSKCSILSKHQQFVEHCCMRCCSPFTFLVNTKRQCGDCKFNVCKSCCSYQKHEKAWVCCVCQQARLLRAQSLEWFYNNVKSRFKRFGSAKVLKNLYRKHRLESGACFDILGGSLFESNLENEGSISGSDSTFYRQSEGHSVMDTLAVALRVAEEAIEEAISKAEAYGDSLDKQNEASYLRDHKEELTEELATTILQKIIRKQKSKSEQQVEEEPGWPHPQSCSTKVADEGTSASPGGYRAPAALWRSQSAFSITGEEALKTPPVEAPSRQPRDQGQHPRAESALPSWKSVDRLDETNLAPVLQSPDGNWVALKDGAPPPTRLLAKPKSGTFQALEVASSVASAYDEMGSDSEEDFDWSEALSKLCPRSRALPRNPQPQPTQAQSSDQGPIAASPSSALSPNPEAMCSDSETSSAGSSREVGHQARLSWLQRKAPRNPAAEKMRLHGELDVNFNPQLASRETSDSSEPEEAPHTTDRRARRWRRARLGSEEPSKEPSSPSAQLRDLDTHQVSDDLSETDISNEARDPQTLTDTTEEKRRNRLYELAMKMSEKETSSGEDQESEPKTESENQKESLSSEDNSQSVQEELKKKFSAVSLCNISTEVLKVINATEELIAGSTGPWESPQVPPDRQKGMFPRGTDQVRLDEQLTSLEENVYLAAGTVYGLETQLTELEDAARCIHSGTDETHLADLEDQVATAAAQVHHAELQISDIESRISALTIAGLNIAPCVRFTRRRDQKQRTQVQTIDTSRQQRRKLPAPPVKAEKIETSSVTTIKTFNHNFILQGSSTNRTKERKGTTKDLMEPALESAVMY

SEQ ID NO: 128 - DNA, 1014 bp, Homosapiens
atagtctccatcggccattttgtgcgagaagccgcagcgccgcctcttctctcgcgccctcgcctcttcctccgcctcctccttcgcctcttcctgcctcctcccggcttccgccgccgccactccagcctaatcccaaccccagggcgaagcgttttcttatttatttccgttttctcgccactacagcctcctgacaaggtgatccgggcgggccccgcaggaattttatcccctcaccggcctcacactagtatcgcatgtccactatccagaacctccaatctttcgacccctttgctgatgcaactaagggtgacgacttactcccggcagggactgaggattacattcatataagaatccagcaacggaacggcagaaagacactgactactgttcagggcattgcagatgattatgacaaaaagaaacttgtgaaagctttcaaaaagaaatttgcctgtaatggtactgtgattgaacatcctgaatacggagaggttattcagcttcaaggtgaccaaagaaaaaacatctgccagtttctcttggaggttggcattgtaaaggaggaacagcttaaggttcatggattctaaaatgaacctaaatacgtggagaatttcttgaatagttttgttctctaaacccggtttggctgccttgtgaaatgattccctgcagtaaacggacttttcatttatttaatcattcaaacttccattcacatctgcatgattacagaaaacatggggtatgtagactagtaacacataagaaaattgcagtaagatggtaacaaaacctcatattgtctttacatgtttccaatggaaaatgttttgagtgtttattgttcagtttattacgtttcacttgattaaatttttttgttgttgtattaaaccatgtacgttgcagcttaacaataaaaaaaaatctatgaatctttgtgagcaattatgctcccaaatctaagcaagtaaaatacacattttgtctttcttaaaa

SEQ ID NO: 129 - protein, 113 aa, Homosapiens
MSTIQNLQSFDPFADATKGDDLLPAGTEDYIHIRIQQRNGRKTLTTVQGIADDYDKKKLVKAFKKKFACNGTVIEHPEYGEVIQLQGDQRKNICQFLLEVGIVKEEQLKVHGF

SEQ ID NO: 130 - DNA, 2797 bp, Homosapiens
acccacgcgtctggccgcgggccgcctctgcggcagcgctagtcgccttctccgaatcggctccgcacagctaggagaaaagatgttcactgtgctgacccgccaaccatgtgagcaagcaggcctcaaggccctctaccgaactccaaccatcattgccttggtggtcttgcttgtgagtattgtggtacttgtgagtatcactgtcatccagatccacaagcaagaggtcctccctccaggactgaagtatggtattgtgctggatgccgggtcttcaagaaccacagtctacgtgtatcaatggccagcagaaaaagagaataataccggagtggtcagtcaaaccttcaaatgtagtgtgaaaggctctggaatctccagctatggaaataacccccaagatgtccccagagcctttgaggagtgtatgcaaaaagtcaaggggcaggttccatcccacctccacggatccacccccattcacctgggagccacggctgggatgcgcttgctgaggttgcaaaatgaaacagcagctaatgaagtccttgaaagcatccaaagctacttcaagtcccagccctttgactttaggggtgctcaaatcatttctgggcaagaagaaggggtatatggatggattacagccaactatttaatgggaaatttcctggagaagaacctgtggcacatgtgggtgcacccgcatggagtggaaaccacgggtgccctggacttaggtggtgcctccacccaaatatccttcgtggcaggagagaagatggatctgaacaccagcgacatcatgcaggtgtccctgtatggctacgtatacacgctctacacacacagcttccagtgctatggccggaatgaggctgagaagaagtttctggcaatgctcctgcagaattctcctaccaaaaaccatctcaccaatccctgttaccctcgggattatagcatcagcttcaccatgggccatgtatttgatagcctgtgcactgtggaccagaggccagaaagttataaccccaatgatgtcatcacttttgaaggaactggggacccatctctgtgtaaggagaaggtggcttccatatttgacttcaaagcttgccatgatcaagaaacctgttcttttgatggggtttatcagccaaagattaaagggccatttgtggcttttgcaggattctactacacagccagtgctttaaatctttcaggtagcttttccctggacaccttcaactccagcacctggaatttctgctcacagaattggagtcagctcccactgctgctccccaaatttgatgaggtatatgcccgctcttactgcttctcagccaactacatctaccacttgtttgtgaacggttacaaattcacagaggagacttggccccaaatacactttgaaaaagaagtggggaatagcagcatagcctggtctcttggctacatgctcagcctgaccaaccagatcccagctgaaagccctctgatccgtctgcccatagaaccacctgtctttgtgggcaccctcgctttcttcacagtggcagccttgctgtgtctggcatttcttgcatacctgtgttcagcaaccagaagaaagaggcactccgagcatgcctttgaccatgcagtggattctgactgagccttcaaagcagctcctggagtccaatggctgcttagagtcagcctgggtggcaccaggcaatgcaggtgaagtggctgccttcaggaaatacaactaactaaaatcaaacacctaggtcacgtgcctctcaaatactgatttctgccacagcacctcttgaggcatcccttggctattctgtgcatattgttcttcagagacctcactacccacatgctgatctattggggaacagagaagagacaggccactaaggtcaggctctttatattaagttccccagaggaagagtaagttgagaaggtatcagtttaatgttgaagaattgacctcagggctcagtttccatttccctccctcagtattcttcctggcaagatacccattaagcatttcgccaatcagaatctcattttatagtttttcccattggtctttaactaagactttcttgtagcaatctcgtaagcagtgaaccccctcagatcagtagaatatagtatctgggggagaagacttacttccttcagggcagcagccacagccaggcttctgtcatacaggtagatcccgaagcacagagacataaaaaaggtctcccagaaaactatagaccattctccaagtggaattcccacttagggctctggtcactagattgcaacctgtgtgtttgtcatcatcctcatctcaccattgtattgctatgccctcccataaaaacacattgatccctagcaagattattgcattccagattttactgcctttgctaggcttttgcttagcaaagggctgactttccattgttatcatggtgtatatatttttgtcaccattcccacaagtatacttgatgttgtcatagaacgaacatcctactctatgatttactaaccaattactttcccagatcatagacctctctgcatagtagtcataggtcttgactttggggaaagaaaaggaagctgcaggaatatttatctccaaagtcgaatgagaaagaactccagcaaatccaatggctacaaactaaaaatcagcattatttcatattgctgtttcttagctgaatatggaataaagaactattattttattttgaaaaaaaaaaaaaaa

SEQ ID NO: 131 - protein, 529 aa, Homosapiens
MFTVLTRQPCEQAGLKALYRTPTIIALVVLLVSIVVLVSITVIQIHKQEVLPPGLKYGIVLDAGSSRTTVYVYQWPAEKENNTGVVSQTFKCSVKGSGISSYGNNPQDVPRAFEECMQKVKGQVPSHLHGSTPIHLGATAGMRLLRLQNETAANEVLESIQSYFKSQPFDFRGAQIISGQEEGVYGWITANYLMGNFLEKNLWHMWVHPHGVETTGALDLGGASTQISFVAGEKMDLNTSDIMQVSLYGYVYTLYTHSFQCYGRNEAEKKFLAMLLQNSPTKNHLTNPCYPRDYSISFTMGHVFDSLCTVDQRPESYNPNDVITFEGTGDPSLCKEKVASIFDFKACHDQETCSFDGVYQPKIKGPFVAFAGFYYTASALNLSGSFSLDTFNSSTWNFCSQNWSQLPLLLPKFDEVYARSYCFSANYIYHLFVNGYKFTEETWPQIHFEKEVGNSSIAWSLGYMLSLTNQIPAESPLIRLPIEPPVFVGTLAFFTVAALLCLAFLAYLCSATRRKRHSEHAFDHAVDSD

SEQ ID NO: 132 - DNA, 936 bp, Homosapiens
cttctcgcctaacgccgccaacatggtgagtcttactgttgcgggctccggggccgtcgaccatgccgctcgacctccacctccgctgggaagctgaggcgccgaacggctcccagagggtcccgggaagcgcatggtgttcaggcgcttcgtggaggttggccgggtggcctatgtctcctttggacctcatgccggaaaattggtcgcgattgtagatgttattgatcagaacagggctttggtcgatggaccttgcactcaagtgaggagacaggccatgcctttcaagtgcatgcagctcactgatttcatcctcaagtttccgcacagtgcccaccagaagtatgtccgacaagcctggcagaaggcagacatcaatacaaaatgggcagccacacgatgggccaagaagattgaagccagagaaaggaaagccaagatgacagattttgatcgttttaaagttatgaaggcaaagaaaatgaggaacagaataatcaagaatgaagttaagaagcttcaaaaggcagctctcctgaaagcttctcccaaaaaagcacctggtactaagggtactgctgctgctgctgctgctgctgctgctgctaaagttccagcaaaaaagatcaccgccgcgagtaaaaaggctccagcccagaaggttcctgcccagaaagccacaggccagaaagcagcgcctgctccaaaagctcagaagggtcaaaaagctccagcccagaaagcacctgctccaaaggcatctggcaagaaagcataagtggcaatcataaaaagtaataaaggttctttttgacctgttgacaaatgtatttaagcctttggatttaaagcctgttgaggctggagttaggaggcagattgatagtaggattataataaacattaaataatcaaaaaaaaaaaaaaaaaaaa

SEQ ID NO: 133 - protein, 215 aa, Homosapiens [sequence omitted]

SEQ ID NO: 134 - DNA, 854 bp, Homosapiens
acatgcgcagggttgggcgggtcttcttccttctcgcctaacgccgccaacatggtgttcaggcgcttcgtggaggttggccgggtggcctatgtctcctttggacctcatgccggaaaattggtcgcgattgtagatgttattgatcagaacagggctttggtcgatggaccttgcactcaagtgaggagacaggccatgcctttcaagtgcatgcagctcactgatttcatcctcaagtttccgcacagtgcccaccagaagtatgtccgacaagcctggcagaaggcagacatcaatacaaaatgggcagccacacgatgggccaagaagattgaagccagagaaaggaaagccaagatgacagattttgatcgttttaaagttatgaaggcaaagaaaatgaggaacagaataatcaagaatgaagttaagaagcttcaaaaggcagctctcctgaaagcttctcccaaaaaagcacctggtactaagggtactgctgctgctgctgctgctgctgctgctgctaaagttccagcaaaaaagatcaccgccgcgagtaaaaaggctccagcccagaaggttcctgcccagaaagccacaggccagaaagcagcgcctgctccaaaagctcagaagggtcaaaaagctccagcccagaaagcacctgctccaaaggcatctggcaagaaagcataagtggcaatcataaaaagtaataaaggttctttttgacctgttgacaaatgtatttaagcctttggatttaaagcctgttgaggctggagttaggaggcagattgatagtaggattataataaacattaaataatcaaaaaaaaaaaaaaaaaaaa

SEQ ID NO: 135 - protein, 215 aa, Homosapiens [sequence omitted]

SEQ ID NO: 136 - DNA, 2200 bp, Homosapiens
aatgcttccgtcttggccaccttgcgagcgctcgggttgagtttcccgggcttccctgactcggctacctgttctggaggtcaggctttgggcccttgcagaggtcgccgaggggcccgcgccgccgccagagcctgggcccagtccccagtcttcagagacgccctcgaccttcctgctccgaggagctggcctgatgtcctcgggtcgcgctccgcaggttcttacttttccaaacctagagggcagtgcatgaagccaggggtcatcagccatgctccagacagtgtggttccagggcttgggcaggaacctgttgtttcaggagccagtaacctttgaggatgtggctgtgtacttcacccagaatgaatgggccagcctgcaccctacgcagagggccctatacagggaggtgatgctggagaattatgcaaatgtgacttccttgtcagcatttccattccccaaaccagatctgatattccagctggagcaaggagaagcagcatggggcccagatccctggacacttgctgggggagaggccctgagaggcatgtgcacaggctggagtgcaatggcgtgatcttcactcaccgcaacctctgccttccaggtggtaaaaccaagactgagaatgaggaaaaaactgcacagctaaacatttctaaagaatcagagtcccacagactgatagtggagggactgctgatggacgttccccagcaccctgacttcaaggacaggttagagaagtcacagctacatgatacagggaataaaacaaagataggggattgcacagatttgacagtccaggatcatgaatcttccaccactgaaagggaggagatagccaggaaattggaagaaagtagtgtcagcacacatctcattacaaagcagggttttgccaaagaacaggtgttttataaatgtggtgagtgtggcagttactacaacccacattcagactttcacctgcatcagagagttcacactaatgagaagccctacacatgcaaagaatgtgggaaaaccttcagatataactcaaaactgtcacggcatcagaaaatccacactggagagaaaccatactcatgtgaggaatgtggacaagccttcagtcaaaattcccaccttcttcagcatcagaagctccatggtggacagaggccctatgaatgtactgactgtggtaaaaccttcagttataattcaaaactgattcggcatcagagaatccatactggggagaagccctttaaatgtaaggaatgtgggaaagccttcagttgtagctatgactgcatcatccatgaacgaattcacaatggggagaagccctatgaatgtaaggagtgtgggaagagtttgagttctaattcagttctgattcagcatcagagaatccacactggggagaaaccttatgaatgtaaagagtgtggcaaggccttccaccgcagttcggtatttcttcagcaccagaggttccacactggggaacaactctacaaatgtaatgaatgttggaaaactttcagctgtagctcccgcttcatagtgcatcagagaatccacaatggggagaaaccctatgaatgccaggaatgtgggaagacattcagtcaaaagatcactctggttcagcatcagcgagttcacactggggagaaaccttatgagtgtaaggagtgcgggaaagccttcagatggaatgcaagtttcatccagcatcagaagtggcatactaggaagaaactcatcaatggaacagggctatccgcagttaagccctactgtccctgcgccatcctctctcctctgcctccccaacatacctgctctgccctagccccaccagggcctcccttatcttcttcacatgcagtggtacttcctccctctgtgcctttcttcctgctgcttccctcatctgaaaaggccaacccttcacctgtccaaatagcacatttttttcaggatctcgcttttcctgggaagtcatcccttcagagcccgaatcctttgtctcactccctgtaagccccgtcacgttctcaaaatcctttgcacctcaagttagggattccactggtctcctgattgtgtctattgatattcctctggtcttgtcttgtataagttgttactgttttcctaacttcattttaaattctcacgcttaagg

SEQ ID NO: 137 - protein, 560 aa, Homosapiens
MGQPAPYAEGPIQGGDAGELCKCDFLVSISIPQTRSDIPAGARRSSMGPRSLDTCWGRGPERHVHRLECNGVIFTHRNLCLPGGKTKTENEEKTAQLNISKESESHRLIVEGLLMDVPQHPDFKDRLEKSQLHDTGNKTKIGDCTDLTVQDHESSTTEREEIARKLEESSVSTHLITKQGFAKEQVFYKCGECGSYYNPHSDFHLHQRVHTNEKPYTCKECGKTFRYNSKLSRHQKIHTGEKPYSCEECGQAFSQNSHLLQHQKLHGGQRPYECTDCGKTFSYNSKLIRHQRIHTGEKPFKCKECGKAFSCSYDCIIHERIHNGEKPYECKECGKSLSSNSVLIQHQRIHTGEKPYECKECGKAFHRSSVFLQHQRFHTGEQLYKCNECWKTFSCSSRFIVHQRIHNGEKPYECQECGKTFSQKITLVQHQRVHTGEKPYECKECGKAFRWNASFIQHQKWHTRKKLINGTGLSAVKPYCPCAILSPLPPQHTCSALAPPGPPLSSSHAVVLPPSVPFFLLLPSSEKANPSPVQIAHFFQDLAFPGKSSLQSPNPLSHSL

SEQ ID NO: 138 - DNA, 2102 bp, Homosapiens
aagctttccccggtgtcggcggcaggtggaatttccacgctttatctgcgcctgcgccgcgcgggattcgcggtccgagctgaagaggttcgcggtccggtttcacttctccgaaccctgaggcagtgtgtgaagctgggacgccagccatgttccagaccgcttggcgccaggaaccagtgacctttgaggatgtggctgtgtacttcacccagaatgaatgggccagcctggactctgtgcagagggccctgtacagggaagtgatgctggagaattatgcaaatgtggcttccctggcattcccattcaccacgcctgttctggtctcccagctggagcaaggggaactgccatggggcctcgatccctgggaacctatgggcagggaggctctcagaggtatctgtccaggggatgaggccagaactgagaaggaaggattaactccaaaggatcatgtgtccaaagaaacagagtccttcagactgatggtggggggcctgccagggaatgtttcccagcaccttgactttgggagcagcctagagcagccacaaggtcattggataattaagacaaagtcaaagaggagacatttcacagatacctcagccaggcaccatgaggcctatgaggtcaagaatggagagaagtttgagaaattaggaaaaaatattagcgtcagcacacaactcactacaaatcagacaaatcctagtggtcagatatcttatgaatgtggacaatgtggcagatatttcattcaaatggcagacttccaccgacatgagaaatgtcacactggtgaaaagtcttttgaatgcaaagaatgtggaaaatacttcagatataactcattacttattcggcatcagataattcacactggaaagaaaccatttaaatgtaaagaatgtggaaaaggtttaagttcagacacagccttgattcagcatcagagaatccacactggagaaaagccctatgaatgtaaggagtgcggcaaggccttcagtagcagctctgtcttcctccagcaccagaggttccacactggggagaagctctatgaatgtaacgaatgttggaaaactttcagttgcagctcaagtttcactgtccatcagcgaatgcacactggggagaaaccttatgaatgtaaagagtgtggaaaacgattaagctccaacacagccttgactcagcatcagcgaattcacactggggagaagccctttgaatgtaaggagtgtgggaaggcattcaatcagaaaataaccctgattcagcaccagcgagttcacactggcgagaaaccttatgagtgtaaagtgtgtggtaaaaccttcagctggtgtggaagattcattctgcatcagaaactacacactcagaagacacctgtccaagcatagggctatccatagttaggcccactgtgcctctccttttttctctttattttcatgctttttatcagtgtcctcgctgtccttcctggttagacacttggctttcatcatgaactcttctttaagttttttgaacctgtttccccaacatgaagtctctttatggttagagaagaccaaaaaacaaacaaacaaacttagaaacaaaaaggaaatgtaagtttccagatttaaaggacatgctgggtgcccagcaggatggattcaagggaaacctacattaaggaaaattgctgtgaattatgaaaacaccaagtttgaataagaggatcatggagaaaaaatgagaccctaaaaagtttctagagagagaaaacaaaagatcagaaatgaaagcggggccaggcgcggtggctcgtgcctgtaatcccagcactttgggaggctgaggcgggtggatcatgaggtcaggagttcgagaccagcccgcccaatatggtgaaaccccgtctctcctgaaaaaaaaaaaacacaaaaattagccaggcatggtggcgcatgcctgtaatcccagctactagagaggctgaggcaggagaatcacttgaatccctgaggcagaggttgcagtgagctgagatcgcaccactgcactccagcctgggcgacagagtgagactttgtctc

SEQ ID NO: 139 - protein, 422 aa, Homosapiens
MFQTAWRQEPVTFEDVAVYFTQNEWASLDSVQRALYREVMLENYANVASLAFPFTTPVLVSQLEQGELPWGLDPWEPMGREALRGICPGDEARTEKEGLTPKDHVSKETESFRLMVGGLPGNVSQHLDFGSSLEQPQGHWIIKTKSKRRHFTDTSARHHEAYEVKNGEKFEKLGKNISVSTQLTTNQTNPSGQISYECGQCGRYFIQMADFHRHEKCHTGEKSFECKECGKYFRYNSLLIRHQIIHTGKKPFKCKECGKGLSSDTALIQHQRIHTGEKPYECKECGKAFSSSSVFLQHQRFHTGEKLYECNECWKTFSCSSSFTVHQRMHTGEKPYECKECGKRLSSNTALTQHQRIHTGEKPFECKECGKAFNQKITLIQHQRVHTGEKPYECKVCGKTFSWCGRFILHQKLHTQKTPVQA

SEQ ID NO: 140 - DNA, 8158 bp, Homosapiens
gggtttcagcgagttctacgtgccaggtccgcccggtgccggcttcctcgctgcccctggcggctcgtcagcccccactacccctgaacttggtcccaatggcggcccgcccctccttcacccggaccgtgggcatctgggcctcgccgaagccgtcaaggtggctgctcgggcttctagagcccgtgtccagccctttgccaccgaggcctgatcctcttttctgccctaaagaacttgccctgacagcctctggctcccgctcttgaggatcttgcttgtccaaacccagaagacagtgcatgaagccaggggacatccgccatgctccaaacaacttggcctcaggagtcagtgacctttgaggatgtggctgtttacttcacccagaatcaatgggccagcctcgaccctgcgcagagggccctgtacggggaggtgatgctggagaattatgcaaatgtggcttctctggtagcgtttccattccccaaacctgctctgatctcccacctggagagaggggaagcaccatggggcccagatccctgggacaccgagattctgagaggcatcagtcaaggtggtgagtcctggatcaaaaatgaagggctagttataaagcaggaggcctctgaagaaacagagttgcacagaatgccagtaggaggacttctcaggaacgtttctcagcactttgattttaaaaggaaggcactgaagcagactttcaatctaaatccaaatctgatacttcgaggtggaatgaagttctatgaatgtaaagaatgtgggaaaatcttccgatataactcaaagcttattcggcatcagatgagtcatactggggaaaagccctttaagtgtaaggagtgtggcaaagctttcaagtccagctatgattgtattgtacatgagaaaaaccacattggagaagggccctatgaatgtaaggagtgtggcaaaggtttgagttccaacacagccttgactcaacatcagaggatccacactggagagaaaccctatgaatgtaaagagtgtggaaaggctttccgtaggagtgcggcatacctgcagcatcagagattacacacgggagagaaactctataaatgtaaggaatgttggaaagctttcggttgtaggtcactttttattgtccatcagagaattcatactggggagaaaccttatcaatgtaaggagtgtggcaaagccttcacccagaaaatagcctccattcagcatcagagagttcacactggggagaagccttatgaatgtaaggtgtgtgggaaagccttcaaatggtatggaagttttgttcagcatcagaaattgcaccctgtggagaagaagccagtcaaggtccttgggccatccctggtcagtccccagtgctcctctccagccatacctcctgttcttctccagggatcctgttctgcttcagccgtagctgtgccttcactgacctttccacatgctgtgctcattcctacctctgggaattttttcatgctgctgcctacatctggaataccttcttcatctgcccaaatagtgcgtgtcttccagggtcttactcccactgtgaaaccttccccagttattctcaccccttcttctcactcctcatgagctttatcttggcagtcttacggctcttatgcctagcaaacctccagcctaattttatatatttttttgagaaagggtcttgctctgtcacccaggctagagtgcggtggtgtgatcttggctcactgcaacctccccctcctgggttcaagcgattctcctccttcagactctcgaatagctgggattacaggcacgcctcaccacgcccagctaatttctgtatttttagaagagatggggtttcgccatcttggccaggctggtctcaaacacctgacctcaagtgatccgcctgccttggccccccaaagtgctgggattacaggagtgagccactgtgcccagcctccaacctaatttgagtttcatttgtatttttttcatcaccttacatgtgttaacagctgtttcaacataaactccattataatctatatacatttaaagaccgtgtttacataatctcttctgggtagaaaatggaaatacttaacctttgcattggtccctttcaggcttgaacaacagtggctgtatctgcatcgtggggttgctggtggtagaacactttggtgttaggaaagtttggaaaagaggatatccctgtattaggccattatgattagagataagcagcctgggagaaacatacaagacctgtggctactggtagagaattggaataagcttccaacaatggactgtagagattaatggagattgtttagtgggcccatggctaggtggggtattaatacagttgaagttatgttgcccttggcacagatctttgagaatctcatacatctgtgaaaaagataatgtgaaataaacagtaaaaaaaaaaagtatgttgatggcagtgagagtaatcatgtctttaaacgtgaagtttttttttctttagttttgctcttgatagctagatgtttcttttaacttttattacgtaagtaaatatacacaaaggcattcatctttgttgaatctgttgtgcagatttttcttgatgagcattctgtttttttttctttgtgagcactggcttctatattttatttcatatttatgaattataaatatgaatttaattactaaagaaataaaaataatggtgtaaagccaactcgaggggaatctgaataagcttccaaaatttttttttttaagaaataaagggagctgtgtagtgggtcagtggctaggtaggttagtgaagtggaatttggggttgctcttggaagtggccttgatgaggatcctttacaactattcagaggactgtgtgaagtagttactggaaaaagaacttgaattatgcatttattggcattaatgtaaacagtaagtcctaagctttgatggaagggtccatacatttttttttttttttgctgatgttgctatctagatgtttctctatagcaattaatagcaaaacctttacattcttggtttttaaactttaccatgtgtctgaattacatagtgtgcttgtaaaaagaagagttttctctcttgcacaaattctgattttggctatctgtggtgatggccagatctttagcatggaccatactttgagagatatgcttcaaacagaaaatgcccacccctcctcctttacccagcataaactctatggttaattcttaaaataatgccttacagtctccattaactcccttgcccttctcttgctttgtcatgctcgcttggcaaaacctcatctctgactaaatgcagttctttgccttctctgttcctgcaccaaaaatgatcaggagaaagcatattaccaggctgaactgtcactttaaattcatgaccagtaacttcatggaggcccttaacgtttcctgatggtcatactacaatttttggagtccacttaactcccctgctttcctaggccactactttatactttctctcttctgtaacttccaaagcatccctctcagttctcatgctcagctgatggttatgtttctgccttcggcgagagaacagcaagctccagaaagtggctgcgccttcagccccgtgctagaatgagaacatatggagccaacttgagttcggaagggctgtggccacctcgtttcgcccatctacttttcaccttgccgtatctgattcttcaccaccgtattctcagtcacttccactaaacagtgccagtgttttaaggttctgtcacactcagtaacccacttctggttcctcattccgtgtcagtgatcagcagtagactgaagaatctaccttagatttgctccatactattaattagcttacaaaatgtctaagaggagctaagctgggatgccacataggcagaagccaggaaaaatgaccaaccacagaaccaagtggttccagtggaaactcagcagctgctggtgcctgctactggactgccaccccccattgaagagactggaccaccaggaaggtcgtttcacattctgtagtaaaaatacccctacaatcattttggtagggtcttctgtcttcagccagggtgtacctgctcggtgggagttggttatatatgtatgtccaagttgcaggggcttctgggaaatacaggttttggattctgcctgggaagagagtcatagtatgaagaagtctgaaaatggggaagggattttcagaatatgttgagcagctgtaaaatatcagatacccattataggcattgaaggttacctaaatgacagaaggatgcactatattcatgggtaggaaagattagtttcatcaagatttcaatttttatcaattcataaattaaaaacaatataaaaattccagaggggtgtgtgtatagagaggcaaaggacacagagtagctaacctagttttgaagaacaagatggggggttttatgctaccagatattatatacaatgatcatcaaacacagaacaaagcaaaaaacaaactccccaaacccaagttgaaacaaaaaaacccccagactgtaatagtattattattattttttaagatggaatcttgctctgttgctcaggctggagtgcagtggtgcaatcttggctcactgcaacctacacctcccgggttcaggtgattctcttgcctcagcctcctgagtagtgtgtgccaccacgcccagctgattttttaatttttagtagagacagggtttcaccatgttggccaggctggtcttgaactcctggcagcctcaggtgatccacccacctcggtctcccaaagtgttgggattacaggcgtgagccactgcacctggcctgtaacatgatttgctgaaatttttaaaaatcttaaataatgtactgtttagaaatatacatattttatacaaaattataaagaaagcatagagaggtaagcattagtggcacagctgagaaaatataaaaggtagttctgtctctatcctgtctcctttattctgctactgctctcattctgtctcatcccaggaatccagtcccaagtgctgcctgccaatcgtccagcaccctccacctttgccacctatttcttgttgtaaaacagatgtttgtttctaaaatataatgaattaatgattatcaaagtacaggcatacctcattttattgcagtttgttttattgtgtcttgcggatattgcattttttacaaactgaaggtttgtggcaggcctgtgttgagcaagactatcagtgccattttttttcaacagcatgtgctcatttcatttttctgtgtcttacacagaaacttaaaatatttcaaacttttcattatatgtgttttggtgattagtgacttttatgtttctattgtaattgttttggggtgccacagactgcatccatctaagacagtgagcttagttgatgtgtgtgtgtgtgttctgattactccactaactgatggttccccatctctctccctctcctcagacctcactattctctcagacacaacagtattgaaattagaccaattgataaccttacaaacacctttaagtgtttaagtgaaaaagtcacatgcctctcactttaaatcaaaagctagaaatgattaagcttagtgaggaaggctaatgtcaacagctgagataggccaaaagctagactgcttctgccaaacagtcaagttgtgaatgcaaaagaaaagttcttgaaggaaatgaaaagtacttctccagggaacacatgaacgataataaagtggccaggtgcagtggctgacacctagaatcccagcacttcggggagccaaagcgggaggatcccctgaagccaggagtccgagaccagcttgggccacaaagtgagacccctgtctctacggggaattgaaaatttagctgggtgtggttgtgcatgcctgtagtccgatctacttgggaggctgaagtgagaggatccctttagccagggagttcgagactgcagtgagctatgattgtgccactgcactctagcctgtgtgacagaatgaaaccaaaaaaagtgaaacagcattattactgatatggagaaagttttaggggtctggatcaaaccaaccacaaattcccttaagccaaaacctaatccagagcaaggccataactgccattgtatgaaggctgagagaagtgaggaagctgcaggaaagtttgaagctagcagaggttggttcatgaggtttaagaagtcatcttatcataaaagtgcaaggtgaagcagcaagtgctggtgtagaagctgtagcaatttatccagatctagctaagttaattggtgaagttgctacaccacgagattttcagtgtattccaaacagtcttcttttggaagaagaaaccatctaggactttcatggagaagagaagttaatccctggcttaaaagcatcaaaggacagctcgtctctcttgttaggggttcatgcagctggtaactttaagttgaagccaatgctcatttaccattcagaaaatcctagggcccataagaattatgctaaatccactctgcctgtgctctagaaatggaagatcaaagcctggatgacagcacatctgtttacagcatggattactgaatattttaagcccactgttgagacctactaaatattaggaaaaaagaattctgtcaggtgtggtggctcacacttgtaatcccaacactttgggaggccaaggcaggtggatcagttgaggtcaggagtttgagaccagcctgaccaacatggagaaaccctatctctactaaaaatacaaaaattagctggatgtggtggtgtgtgcctgtaatcccagctacttgggaggctgaggcaggagaattgcttgaatccagaggcagaggttgcagtgagctgaggttgcaccactgtgcttcagcctgggtaacagagtgaggctgtctcaaaaaaaaaaaaaaatttagttccaaatattactgctcgttgataatgtgtctggtcacccaagagttctgatggagatgtacaaagagattaatgtttttatgtctgctaaacaacatccattctgcaggatccattactccatgggtcaaggagtaattttgactttcaagtattatttaaggaatacattttgtaaggctgtggctgccatagtggttgttctgtacaaagtaacttgaaaaccttctggaaaggattcatcattctagataccattaaggacatttgtgattcatgggagaaggtcaaaatatcaacattaacaggagttcagaagacattgacctcaaccctgatggatgatcttgaggggttcaagacttcagtggacgaagtaactgcagatgtggtggaaatagcaagataactagacttagaagtggaacctgcatatgtgactgaattgctgcaatctcatgataaaacgtgaacaaatgaggagttgcttctaatataagagccacaaaagtggtttcttgagatggaaactactcctggtgaagatcctgtgaccattgttgaaatgacaacaaaggacttagaatattacataaacttagttgataaaacagcagcagagtttgagaggattgacttcaattttgaagaatgttccactgtgggtaaaaggctatccaacagcaacacatgctacagataaatccttcggaaaggaagagtcagttgatgttgcagccttccttgttgtctcatttaaagaaatctctagagccacactaaccttcagcaaccaccacaccgatcattcagcagccatcaacagtgaggcaagactgtcttccagcaacaaagactcactgaagacttagattatcgttagcatcttttagcaataaaatatttttaaattaaagtatgtacattgtcagatataatgctattgcaaacttaatagactataatatagattaaacataactgttataggtactggaaaataaaaataattgtgtgactcccaaaaaaaaaaaaaaaaaaaaaaaaaaaaaaaaaaaaaaaaaaaaaaaaaaaaa

SEQ ID NO: 141 - protein, 439 aa, Homosapiens
MLQTTWPQESVTFEDVAVYFTQNQWASLDPAQRALYGEVMLENYANVASLVAFPFPKPALISHLERGEAPWGPDPWDTEILRGISQGGESWIKNEGLVIKQEASEETELHRMPVGGLLRNVSQHFDFKRKALKQTFNLNPNLILRGGMKFYECKECGKIFRYNSKLIRHQMSHTGEKPFKCKECGKAFKSSYDCIVHEKNHIGEGPYECKECGKGLSSNTALTQHQRIHTGEKPYECKECGKAFRRSAAYLQHQRLHTGEKLYKCKECWKAFGCRSLFIVHQRIHTGEKPYQCKECGKAFTQKIASIQHQRVHTGEKPYECKVCGKAFKWYGSFVQHQKLHPVEKKPVKVLGPSLVSPQCSSPAIPPVLLQGSCSASAVAVPSLTFPHAVLIPTSGNFFMLLPTSGIPSSSAQIVRVFQGLTPTVKPSPVILTPSSHSS

SEQ ID NO: 142 - DNA, 3980 bp, Homosapiens
gctggcggctgtttccgggcttagagggctggagtggccgccgagttggaggcggtggtggcagcagtaggagtgtgtagagtgcgggattgggggccaggccctgcggagggcgggggaagttgtcttcttttttttccggaggggccggtaaacctggtggctgaacggcaagatgaatttcctccgcggggtaatggggggtcagagtgccggaccccagcacacagaagccgagacgattcaaaagctttgtgacagagtagcttcatctactttattggatgatcgaagaaatgctgttcgtgctctcaaatcattatctaagaaataccgcttggaagtgggtatacaagctatggaacatcttattcatgttttacaaacagatcgttcagattctgaaataataggttatgctttggacatactatataatataatatctaatgaagaagaagaagaagtagaagaaaattccacaagacagagtgaagatttgggaagccaatttacagaaattttcattaagcagcaggaaaatgtcactcttctgttatctttattggaggagtttgatttccatgtccgctggcctggtgtgaagcttcttacttctcttttaaaacaactagggcctcaggtgcaacaaattattttagtcagtcctatgggtgtttcaagattgatggacttactagcggattccagggaagttatacgtaatgatggcgtcttactactgcaggcactaacaagaagcaatggtgcaatccagaaaattgttgcttttgaaaatgctttcgagagactactggacattatttcagaggaggggaacagtgatggaggtatagtagttgaagattgtttgattttgctccaaaacttattaaaaaacaacaactccaatcaaaatttttttaaagaaggctcatatattcaacgtatgaaaccttggtttgaagttggagatgaaaattctggctggtctgcacagaaagtgaccaatctacatctaatgctacagcttgttcgtgtattggtatctcccaccaaccctcctggtgctaccagtagctgccagaaggctatgttccagtgtgggttattgcagcagctttgtactatcctaatggctactggggttcctgctgatatcctgactgagaccataaatactgtatcagaagttattcgaggctgccaagtaaaccaagactactttgcatctgtaaatgcaccttcaaacccaccaagaccggcaattgtagtacttctcatgtccatggttaatgaaaggcagccatttgttttgcgctgtgctgttctctattgtttccagtgtttcttgtataaaaaccaaaaaggacaaggagaaatcgtgtcaacacttttaccttctaccattgatgcaacaggtaattcagtttcagctggccagttattatgtggaggtttgttttctactgattcactttcaaactggtgtgctgctgtggcccttgcccatgcgttgcaagaaaatgccacccagaaagaacagttgctcagggttcaacttgctacaagtattggcaaccctccagtttctttacttcaacagtgcaccaatattctttcacagggaagcaaaatacaaacaagagttggattattaatgttgctttgtacctggctaagcaattgtcccattgcagtaacgcattttcttcacaattcagccaatgttccattccttacaggacaaattgcagaaaatcttggagaagaagagcagttggtccaaggcttatgtgcccttttgttgggcatttcgatttatttcaatgataactcacttgagagctacatgaaagagaagctaaaacaactgattgagaagaggattggcaaagagaatttcatagagaaactaggatttattagcaaacatgagttgtattccagagcatctcagaaaccccagccaaactttcccagtccagaatacatgatatttgatcatgagtttacgaagctggtaaaagaacttgaaggtgttataactaaggctatttataagtccagtgaagaagataaaaaagaagaagaggtgaaaaaaacattagaacagcatgacaatattgtgactcactacaaaaatatgattcgagagcaagatctccaacttgaggaattaaggcagcaggtttctacattaaaatgtcaaaatgaacagctccagacggcagtcacacagcaagtatcacagatccagcagcacaaagaccagtataatcttcttaaaatacagctaggaaaagacaatcagcatcaaggttcttacagtgagggggctcagatgaatggcattcagccagaagaaattggtagattgcgagaagagatagaagaattaaaacgtaatcaggaacttttacaaagccagctgactgaaaaggactctatgattgaaaatatgaaatcttcccaaacatctggcacaaatgaacagtcttcagcaatagtttcagctagagattctgaacaagttgcagaattaaaacaggaactggcaactttaaagtctcagttaaactcacaatctgtggagatcaccaaactacagacagaaaagcaggaactgttacagaaaacagaagcgtttgcaaaatcagttgaggtacaaggagagaccgagactataatagccaccaaaactactgatgtagaaggaagactgtcagcattattacaagagaccaaagagttaaagaatgaaattaaagctctgtctgaggaaagaactgccattaaagagcagctggattcatctaatagtaccattgccattttacaaactgagaaagacaaactagagttggaaattacagattctaaaaaagaacaagatgatctcttggtgctcttggccgatcaagatcagaaaatactgtcattgaagaataaactcaaggatcttggtcatccagttgaagaagaggatgaacttgaatctggagaccaagaggatgaggatgatgaaagtgaagatcctggcaaggatctagatcatatctagttttcaaatctctaggaacaatagagattatatcataactctgaagatggactctaaactttggtttacctccatggaaaataaagatttagaaaccaggtggaaaacattcactattaagactattgatatatttttgtaatgttgccacccatgttgaaaaccttaaaactgaatttatgtagaacacacatcttttatttaaatccatctgaactgtcccaaaatgtaatttgcaaagagcttcaaacaccaaaaatataccattttaaggcatgtggtgacaatgctatttgccttagttcattcgttgtttactttgcaaaatttgtgacttttaagtactaacacatttgattgaatgtgtattgaattggaattattatttctaaattcagcatttgagtccttagttgatgattttcttttaaagaaattagtttatttaaaagcaagatagcctgggttgggagttagtgcatatcatcagccctccatctaatgtgattgctaagatgtgcaggataggacagcttagaatgagtgccttgacacctacatatggctgcattccatacctcagtgaagaagccgaaggatgctgacacacagtgatgtggagggcattccggagaaacttttgcaacagtgtattaatgtgattggttttctttttgttttaagctaaacatctaaaacaaatttcaagttaacagttcatacaactcagatttagtattattgtttatcataaaacatattatgttcctagttttaaaaagacccaaagtatgattaatataatttattggcatttttgctgaataggtttaagtcagataatagattttaaaaaagcaaatgaggcaatgtgtccaaatttaatgtttcataataaaaatagatacgttgactt

SEQ ID NO: 143 - protein, 962 aa, Homosapiens
MNFLRGVMGGQSAGPQHTEAETIQKLCDRVASSTLLDDRRNAVRALKSLSKKYRLEVGIQAMEHLIHVLQTDRSDSEIIGYALDILYNIISNEEEEEVEENSTRQSEDLGSQFTEIFIKQQENVTLLLSLLEEFDFHVRWPGVKLLTSLLKQLGPQVQQIILVSPMGVSRLMDLLADSREVIRNDGVLLLQALTRSNGAIQKIVAFENAFERLLDIISEEGNSDGGIVVEDCLILLQNLLKNNNSNQNFFKEGSYIQRMKPWFEVGDENSGWSAQKVTNLHLMLQLVRVLVSPTNPPGATSSCQKAMFQCGLLQQLCTILMATGVPADILTETINTVSEVIRGCQVNQDYFASVNAPSNPPRPAIVVLLMSMVNERQPFVLRCAVLYCFQCFLYKNQKGQGEIVSTLLPSTIDATGNSVSAGQLLCGGLFSTDSLSNWCAAVALAHALQENATQKEQLLRVQLATSIGNPPVSLLQQCTNILSQGSKIQTRVGLLMLLCTWLSNCPIAVTHFLHNSANVPFLTGQIAENLGEEEQLVQGLCALLLGISIYFNDNSLESYMKEKLKQLIEKRIGKENFIEKLGFISKHELYSRASQKPQPNFPSPEYMIFDHEFTKLVKELEGVITKAIYKSSEEDKKEEEVKKTLEQHDNIVTHYKNMIREQDLQLEELRQQVSTLKCQNEQLQTAVTQQVSQIQQHKDQYNLLKIQLGKDNQHQGSYSEGAQMNGIQPEEIGRLREEIEELKRNQELLQSQLTEKDSMIENMKSSQTSGTNEQSSAIVSARDSEQVAELKQELATLKSQLNSQSVEITKLQTEKQELLQKTEAFAKSVEVQGETETIIATKTTDVEGRLSALLQETKELKNEIKALSEERTAIKEQLDSSNSTIAILQTEKDKLELEITDSKKEQDDLLVLLADQDQKILSLKNKLKDLGHPVEEEDELESGDQEDEDDESEDPGKDLDHI

SEQ ID NO: 144 - DNA, 3430 bp, Homosapiens
gggggcctgatctgactgacgtcagggggtgcctactccttcgaggcaagaagcctgaactttccttcctgtcactgtgaatacttggccagggctgtgaatgtcaccattgcttttcaggaagaagacatggcagactagggctgcaccttctttatgggctctgtaggtctgaaagaaatcagatcagcctgggatccctcagccaactctgaagacaggatggggatcacgcctgcatgttaaagagatttctgccttgttgtgtctcatggtaaataaaaaacccagcaaagaagcaaacagctcactgtcctctggatctgctgcgtcctgcaggagcattgcgcttaaactatgggaagcggcacctccacccaacatcattttgctttccagaatgcagagagagccttcaaggcagcagccctgatccagagatggtaccggcgctacgtggcccgcctggagatgaggcggcgttgcacctggagcatcttccagtctatagaatatgctgggcagcaagaccaagtcaagctccatgacttcttcagctatctcatggatcacttcatccccagcagccacaacgacagggacttcctgacccgcatattcactgaggacagattcgcccaggactccgagatgaagaaatgcagtgactatgaatccatagaggtacccgacagttacacggggccacgcctctccttcccactcctgcctgaccatgcaactgccctggtagaagcattcagactgaaacaacagctccatgctcgctacgtcttgaaccttttgtatgaaaccaagaaacatctggtacagctgccaaacatcaaccgggtctcaacctgttacagtgaggagatcacagtgtgtggagacttacatggccaattggatgacttaatctttatattttataagaatggcctcccgtcgccagaacggtcatatgtgttcaacggtgactttgtggatcgaggcaaggattcagtagagatcctgatgattctttttgccttcatgctggtttaccccaaagagttccatcttaacagaggaaaccatgaggaccatatggtgaacttacgatatggcttcaccaaggaagtgatgaataaatacaaggtacacgggaaggaaatactaagaaccctgcaagatgttttctgttggcttccactggccactctgatagatgagaaagttctaattcttcatggtggggtgtcagacataactgatctggagcttttggacaaaatagagaggagcaagatagtttccaccatgaggtgcaaaacgagacagaagagtgagaagcagatggaggagaagagaagagccaaccagaagagctctgcacagggacccatcccatggtttctccccgaaagccgctctcttccctcttcgccccttcggcttggctcctacaaggcccagaaaaccagcaggtcctccagcatcccctgcagcggttccctggacgggcgggagctctcccggcaggtgcggagctccgtggaactggagctagagcggtgccggcagcaagcaggcctcctggtgaccggagagaaagaggagccctcccgctcagcctcagaagcagactctgaagccggagagctgcggaagcccactcaggaggagtggaggcaggttgtagatatcctgtggagtgatcccatggctcaagagggctgcaaggccaacactattcgaggaggaggctgttattttgggcctgatgtgacacaacagttgctacaaaaatacaacatgcaattcctgatccgttcacatgaatgcaaacctgaaggctatgaattctgtcacaaccgcaaggtattaacaatcttttctgcctccaactactatgaagttggcagcaacagaggggcctatgtcaaactggggccagccctgaccccacatattgtgcagtatcaagctaacaaggtgacccacacactcaccatgaggcaaaggattagcagagtggaggagtcggctctgagagctctgagggagaagctgtttgctcattcttcagatcttctcagtgaatttaagaagcatgatgcagataaagtcggtttaatcaccttgagtgactgggcagcagcggtggagtctgtgttgcacctaggactgccatggcggatgctgaggccacagctggtgaacagctcagcagacaacatgctggagtacaagtcttggctgaagaacttggccaaggaacaactgagtcgcgagaacatacaatcaagtttgctggaaacattgtatcgaaaccgatccaacctagagaccatttttaggatcatagacagtgatcattcagggttcatctcactggacgagttcaggcagacctggaagctgttcagctctcacatgaatatcgacattacagatgactgcatctgtgaccttgctcggagcattgatttcaacaaagatggccacattgatatcaatgagttcctggaggccttccgccttgtggagaaatcctgcccagagggcgatgcctcagaatgcccacaagctacaaatgctaaagacagtggctgcagcagtccaggtgcacactaagaacagcctggtcttcatcacccaaagtgcctcataggcaatgctcagcttctcactagactatctcccttattctccatgtgaaactttatgctgaaaatttacctatccatatgcatcagaatcacctgtgtatttcagtgtggaggggtgggttggggtgttgtgtatgtatgtgttttaagtatatgagtgccccaaccccacctcacaatcttcacaaagtagaacttaggtatagtgttttcaaattctaaagtccacttcagttaagaaccactgacaatgtaactctctcattgttttcattttatacgtttttttgagatggagtttctctcttgttgcccaggctggagtgcattggcgcgatctcggctcaccgcaaagtccgcctcccaggcgattctcctgcctcagcctcctgagtagctgggattacaggcatgcaccaccacaccaggctaattttgtatttttagtagacacagggtttctccatgttggtcaggctggtcttgaactcccaacctcaggtgatccaccctcctcagcctcccaaagtgctgggattacaggcatgagccaccgcacccagcctattttatactttttatttattgtctttaacaatgtctattggtaaaggaaagttatttttaaaaattgtattgtaattccatgacccaagcatatggattttcttcattatttactttttcttacttgttactgtagtgtttatataattttatgttctacttttaaaaaaataaattaatatctaattgtaaaaaaaaaaaaaaaaaaa

SEQ ID NO: 145 - protein, 753 aa, Homosapiens
MGSGTSTQHHFAFQNAERAFKAAALIQRWYRRYVARLEMRRRCTWSIFQSIEYAGQQDQVKLHDFFSYLMDHFIPSSHNDRDFLTRIFTEDRFAQDSEMKKCSDYESIEVPDSYTGPRLSFPLLPDHATALVEAFRLKQQLHARYVLNLLYETKKHLVQLPNINRVSTCYSEEITVCGDLHGQLDDLIFIFYKNGLPSPERSYVFNGDFVDRGKDSVEILMILFAFMLVYPKEFHLNRGNHEDHMVNLRYGFTKEVMNKYKVHGKEILRTLQDVFCWLPLATLIDEKVLILHGGVSDITDLELLDKIERSKIVSTMRCKTRQKSEKQMEEKRRANQKSSAQGPIPWFLPESRSLPSSPLRLGSYKAQKTSRSSSIPCSGSLDGRELSRQVRSSVELELERCRQQAGLLVTGEKEEPSRSASEADSEAGELRKPTQEEWRQVVDILWSDPMAQEGCKANTIRGGGCYFGPDVTQQLLQKYNMQFLIRSHECKPEGYEFCHNRKVLTIFSASNYYEVGSNRGAYVKLGPALTPHIVQYQANKVTHTLTMRQRISRVEESALRALREKLFAHSSDLLSEFKKHDADKVGLITLSDWAAAVESVLHLGLPWRMLRPQLVNSSADNMLEYKSWLKNLAKEQLSRENIQSSLLETLYRNRSNLETIFRIIDSDHSGFISLDEFRQTWKLFSSHMNIDITDDCICDLARSIDFNKDGHIDINEFLEAFRLVEKSCPEGDASECPQATNAKDSGCSSPGAH

SEQ ID NO: 146 - DNA, 3597 bp, Homosapiens
gggggcctgatctgactgacgtcagggggtgcctactccttcgaggcaagaagcctgaactttccttcctgtcactgtgaatacttggccagggctgtgaatgtcaccattgcttttcaggaagaagacatggcagactagggctgcaccttctttatgggctctgtaggtctgaaagaaatcagatcagcctgggatccctcagccaactctgaagacaggatggggatcacgcctgcatgttaaagagatttctgccttgttgtgtctcatggtaaataaaaaacccagcaaagaagcaaacagctcactgtcctctggatctgctgcgtcctgcaggagcattgcgcttaaactatgggaagcggcacctccacccaacatcattttgctttccagaatgcagagagagccttcaaggcagcagccctgatccagagatggtaccggcgctacgtggcccgcctggagatgaggcggcgttgcacctggagcatcttccagtctatagaatatgctgggcagcaagaccaagtcaagctccatgacttcttcagctatctcatggatcacttcatccccagcagccacaacgacagggacttcctgacccgcatattcactgaggacagattcgcccaggactccgagatgaagaaatgcagtgactatgaatccatagaggtacccgacagttacacggggccacgcctctccttcccactcctgcctgaccatgcaactgccctggtagaagcattcagactgaaacaacagctccatgctcgctacgtcttgaaccttttgtatgaaaccaagaaacatctggtacagctgccaaacatcaaccgggtctcaacctgttacagtgaggagatcacagtgtgtggagacttacatggccaattggatgacttaatctttatattttataagaatggcctcccgtcgccagaacggtcatatgtgttcaacggtgactttgtggatcgaggcaaggattcagtagagatcctgatgattctttttgccttcatgctggtttaccccaaagagttccatcttaacagaggaaaccatgaggaccatatggtgaacttacgatatggcttcaccaaggaagtgatgaataaatacaaggtacacgggaaggaaatactaagaaccctgcaagatgttttctgttggcttccactggccactctgatagatgagaaagttctaattcttcatggtggggtgtcagacataactgatctggagcttttggacaaaatagagaggagcaagatagtttccaccatgaggtgcaaaacgagacagaagagtgagaagcagatggaggagaagagaagagccaaccagaagagctctgcacagggacccatcccatggtttctccccgaaagccgctctcttccctcttcgccccttcggcttggctcctacaaggcccagaaaaccagcaggtcctccagcatcccctgcagcggttccctggacgggcgggagctctcccggcaggtgcggagctccgtggaactggagctagagcggtgccggcagcaagcaggcctcctggtgaccggagagaaagaggagccctcccgctcagcctcagaagcagactctgaagccggagagctgcggaagcccactcaggaggagtggaggcaggttgtagatatcctgtggagtgatcccatggctcaagagggctgcaaggccaacactattcgaggaggaggctgttattttgggcctgatgtgacacaacagttgctacaaaaatacaacatgcaattcctgatccgttcacatgaatgcaaacctgaaggctatgaattctgtcacaaccgcaaggtattaacaatcttttctgcctccaactactatgaagttggcagcaacagaggggcctatgtcaaactggggccagccctgaccccacatattgtgcagtatcaagctaacaaggtgacccacacactcaccatgaggcaaaggattagcagagtggaggagtcggctctgagagctctgagggagaagctgtttgctcattcttcagatcttctcagtgaatttaagaagcatgatgcagataaagtcggcctagcttccagccaactctgctactatcaacaaaaatagtgacagtgcccattatttctattacctgcagatagtaagaaggatgtcaggataaaaatatacacaccattgggcaggaaactagacttctaggtgacaaggcaacaggttagctctcacctgtaggtttaatcaccttgagtgactgggcagcagcggtggagtctgtgttgcacctaggactgccatggcggatgctgaggccacagctggtgaacagctcagcagacaacatgctggagtacaagtcttggctgaagaacttggccaaggaacaactgagtcgcgagaacatacaatcaagtttgctggaaacattgtatcgaaaccgatccaacctagagaccatttttaggatcatagacagtgatcattcagggttcatctcactggacgagttcaggcagacctggaagctgttcagctctcacatgaatatcgacattacagatgactgcatctgtgaccttgctcggagcattgatttcaacaaagatggccacattgatatcaatgagttcctggaggccttccgccttgtggagaaatcctgcccagagggcgatgcctcagaatgcccacaagctacaaatgctaaagacagtggctgcagcagtccaggtgcacactaagaacagcctggtcttcatcacccaaagtgcctcataggcaatgctcagcttctcactagactatctcccttattctccatgtgaaactttatgctgaaaatttacctatccatatgcatcagaatcacctgtgtatttcagtgtggaggggtgggttggggtgttgtgtatgtatgtgttttaagtatatgagtgccccaaccccacctcacaatcttcacaaagtagaacttaggtatagtgttttcaaattctaaagtccacttcagttaagaaccactgacaatgtaactctctcattgttttcattttatacgtttttttgagatggagtttctctcttgttgcccaggctggagtgcattggcgcgatctcggctcaccgcaaagtccgcctcccaggcgattctcctgcctcagcctcctgagtagctgggattacaggcatgcaccaccacaccaggctaattttgtatttttagtagacacagggtttctccatgttggtcaggctggtcttgaactcccaacctcaggtgatccaccctcctcagcctcccaaagtgctgggattacaggcatgagccaccgcacccagcctattttatactttttatttattgtctttaacaatgtctattggtaaaggaaagttatttttaaaaattgtattgtaattccatgacccaagcatatggattttcttcattatttactttttcttacttgttactgtagtgtttatataattttatgttctacttttaaaaaaataaattaatatctaattgtaaaaaaaaaaaaaaaaaaa

SEQ ID NO: 147 - protein, 598 aa, Homosapiens
MGSGTSTQHHFAFQNAERAFKAAALIQRWYRRYVARLEMRRRCTWSIFQSIEYAGQQDQVKLHDFFSYLMDHFIPSSHNDRDFLTRIFTEDRFAQDSEMKKCSDYESIEVPDSYTGPRLSFPLLPDHATALVEAFRLKQQLHARYVLNLLYETKKHLVQLPNINRVSTCYSEEITVCGDLHGQLDDLIFIFYKNGLPSPERSYVFNGDFVDRGKDSVEILMILFAFMLVYPKEFHLNRGNHEDHMVNLRYGFTKEVMNKYKVHGKEILRTLQDVFCWLPLATLIDEKVLILHGGVSDITDLELLDKIERSKIVSTMRCKTRQKSEKQMEEKRRANQKSSAQGPIPWFLPESRSLPSSPLRLGSYKAQKTSRSSSIPCSGSLDGRELSRQVRSSVELELERCRQQAGLLVTGEKEEPSRSASEADSEAGELRKPTQEEWRQVVDILWSDPMAQEGCKANTIRGGGCYFGPDVTQQLLQKYNMQFLIRSHECKPEGYEFCHNRKVLTIFSASNYYEVGSNRGAYVKLGPALTPHIVQYQANKVTHTLTMRQRISRVEESALRALREKLFAHSSDLLSEFKKHDADKVGLASSQLCYYQQK

SEQ ID NO: 148 - DNA, 3433 bp, Homosapiens
gggggcctgatctgactgacgtcagggggtgcctactccttcgaggcaagaagcctgaactttccttcctgtcactgtgaatacttggccagggctgtgaatgtcaccattgcttttcaggaagaagacatggcagactagggctgcaccttctttatgggctctgtaggtctgaaagaaatcagatcagcctgggatccctcagccaactctgaagacaggatggggatcacgcctgcatgttaaagagatttctgccttgttgtgtctcatggtaaataaaaaacccagcaaagaagcaaacagctcactgtcctctggatctgctgcgtcctgcaggagcattgcgcttaaactatgggaagcggcacctccacccaacatcattttgctttccagaatgcagagagagccttcaaggcagcagccctgatccagagatggtaccggcgctacgtggcccgcctggagatgaggcggcgttgcacctggagcatcttccagtctatagaatatgctgggcagcaagaccaagtcaagctccatgacttcttcagctatctcatggatcacttcatccccagcagccacaacgacagggacttcctgacccgcatattcactgaggacagattcgcccaggactccgagatgaagaaatgcagtgactatgaatccatagaggtacccgacagttacacggggccacgcctctccttcccactcctgcctgaccatgcaactgccctggtagaagcattcagactgaaacaatagcagctccatgctcgctacgtcttgaaccttttgtatgaaaccaagaaacatctggtacagctgccaaacatcaaccgggtctcaacctgttacagtgaggagatcacagtgtgtggagacttacatggccaattggatgacttaatctttatattttataagaatggcctcccgtcgccagaacggtcatatgtgttcaacggtgactttgtggatcgaggcaaggattcagtagagatcctgatgattctttttgccttcatgctggtttaccccaaagagttccatcttaacagaggaaaccatgaggaccatatggtgaacttacgatatggcttcaccaaggaagtgatgaataaatacaaggtacacgggaaggaaatactaagaaccctgcaagatgttttctgttggcttccactggccactctgatagatgagaaagttctaattcttcatggtggggtgtcagacataactgatctggagcttttggacaaaatagagaggagcaagatagtttccaccatgaggtgcaaaacgagacagaagagtgagaagcagatggaggagaagagaagagccaaccagaagagctctgcacagggacccatcccatggtttctccccgaaagccgctctcttccctcttcgccccttcggcttggctcctacaaggcccagaaaaccagcaggtcctccagcatcccctgcagcggttccctggacgggcgggagctctcccggcaggtgcggagctccgtggaactggagctagagcggtgccggcagcaagcaggcctcctggtgaccggagagaaagaggagccctcccgctcagcctcagaagcagactctgaagccggagagctgcggaagcccactcaggaggagtggaggcaggttgtagatatcctgtggagtgatcccatggctcaagagggctgcaaggccaacactattcgaggaggaggctgttattttgggcctgatgtgacacaacagttgctacaaaaatacaacatgcaattcctgatccgttcacatgaatgcaaacctgaaggctatgaattctgtcacaaccgcaaggtattaacaatcttttctgcctccaactactatgaagttggcagcaacagaggggcctatgtcaaactggggccagccctgaccccacatattgtgcagtatcaagctaacaaggtgacccacacactcaccatgaggcaaaggattagcagagtggaggagtcggctctgagagctctgagggagaagctgtttgctcattcttcagatcttctcagtgaatttaagaagcatgatgcagataaagtcggtttaatcaccttgagtgactgggcagcagcggtggagtctgtgttgcacctaggactgccatggcggatgctgaggccacagctggtgaacagctcagcagacaacatgctggagtacaagtcttggctgaagaacttggccaaggaacaactgagtcgcgagaacatacaatcaagtttgctggaaacattgtatcgaaaccgatccaacctagagaccatttttaggatcatagacagtgatcattcagggttcatctcactggacgagttcaggcagacctggaagctgttcagctctcacatgaatatcgacattacagatgactgcatctgtgaccttgctcggagcattgatttcaacaaagatggccacattgatatcaatgagttcctggaggccttccgccttgtggagaaatcctgcccagagggcgatgcctcagaatgcccacaagctacaaatgctaaagacagtggctgcagcagtccaggtgcacactaagaacagcctggtcttcatcacccaaagtgcctcataggcaatgctcagcttctcactagactatctcccttattctccatgtgaaactttatgctgaaaatttacctatccatatgcatcagaatcacctgtgtatttcagtgtggaggggtgggttggggtgttgtgtatgtatgtgttttaagtatatgagtgccccaaccccacctcacaatcttcacaaagtagaacttaggtatagtgttttcaaattctaaagtccacttcagttaagaaccactgacaatgtaactctctcattgttttcattttatacgtttttttgagatggagtttctctcttgttgcccaggctggagtgcattggcgcgatctcggctcaccgcaaagtccgcctcccaggcgattctcctgcctcagcctcctgagtagctgggattacaggcatgcaccaccacaccaggctaattttgtatttttagtagacacagggtttctccatgttggtcaggctggtcttgaactcccaacctcaggtgatccaccctcctcagcctcccaaagtgctgggattacaggcatgagccaccgcacccagcctattttatactttttatttattgtctttaacaatgtctattggtaaaggaaagttatttttaaaaattgtattgtaattccatgacccaagcatatggattttcttcattatttactttttcttacttgttactgtagtgtttatataattttatgttctacttttaaaaaaataaattaatatctaattgtaaaaaaaaaaaaaaaaaaa

SEQ ID NO: 149 - protein, 139 aa, Homosapiens
MGSGTSTQHHFAFQNAERAFKAAALIQRWYRRYVARLEMRRRCTWSIFQSIEYAGQQDQVKLHDFFSYLMDHFIPSSHNDRDFLTRIFTEDRFAQDSEMKKCSDYESIEVPDSYTGPRLSFPLLPDHATALVEAFRLKQ

SEQ ID NO: 150 - DNA, 1264 bp, Homosapiens
cagcggctgcaggtctccaagttgcggccgctggagcccgagccatgcggaccgcggaccgggaggcgcgcccggggcttccgtccctgctgctgctgctgctggccggggccgggctgtcagccgcctcgcccccagcagcgccgcgcttcaacgtgagcctggactcggtccccgagctgcgctggctgcccgtgctgcggcactacgacttggacttggtgcgcgccgcgatggcgcaagtcatcggggacagagtccccaagtgggtgcacgtgttaatcggaaaagtggtcctggagctggagcgcttcctgccccagcccttcaccggcgagatccgcggcatgtgtgacttcatgaacctcagcctggcggactgccttctggtcaacctggcctacgagtcctccgtgttctgcaccagtattgtggctcaagactccagaggccacatttaccatggtcggaatttggattatccttttgggaatgtcttacgcaagctgacagtggatgtgcaattcttaaagaatgggcagattgcattcacaggaactacttttattggctatgtaggattatggactggccagagcccacacaagtttacagtttctggtgatgaacgagaccctgagtgagtcggaaaacttcgaagcagctgttggcaagttggccaagactccccttattgctgatgtttattacattgttggtggcacgtccccccgggagggggtggtcatcacgaggaacagagatggcccagcagacatttggcctctagatcctttgaatggagcgtggttccgagttgagacaaattacgaccactggaagccagcacccaaggaagatgaccggagaacatctgccatcaaggcccttaatgctacaggacaagcaaacctcagcctggaggcacttttccagtgaaagcaggccaggtgcggtggctcacgcctgtaatcccagccctttgggaggccaaggcgggtggaacacttgaggtcaggagttcaagaccagcctggccaacatggtgaaacctcgtctctactaaaaatacaaaaatcaaccaggcatgacggtgcacgcctgttatcacagctacttgggaggcagcggctggagaattgcttgaacctgggaagtcgaggctgcaagtgagctgagatcatgccatggcagtctagcctgggcaacagagcgagactctgtttcaaaaaaaaaaaaaaaaaaaaaaaaaaaaaaaaaaaaa

SEQ ID NO: 151 - protein, 199 aa, Homosapiens
MRTADREARPGLPSLLLLLLAGAGLSAASPPAAPRFNVSLDSVPELRWLPVLRHYDLDLVRAAMAQVIGDRVPKWVHVLIGKVVLELERFLPQPFTGEIRGMCDFMNLSLADCLLVNLAYESSVFCTSIVAQDSRGHIYHGRNLDYPFGNVLRKLTVDVQFLKNGQIAFTGTTFIGYVGLWTGQSPHKFTVSGDERDPE

SEQ ID NO: 152 - DNA, 2755 bp, Homosapiens
caaataaacccagcaaaggaactagcagagctggtgatgtttatggcacagattagtcactgctacccagagtacctaagtaattttcctcaagaggtgaaagatcttctctcctgcaatcataccgtattggatccagatctgcgaatgacattttgcaaagctttgatcttgctgagaaataagaatctcatcaatccatcaagcctgctagaactcttctttgaactttttcgttgccatgataaacttctgcgaaagactttatacacacatattgtgactgatatcaagaatataaatgcaaaacacaagaacaataaagtgaatgtagtattgcaaaatttcatgtacaccatgttaagagatagcaatgcaaccgcagccaagatgtctttagatgtaatgattgaactctacagaaggaacatctggaatgatgcaaaaactgtcaatgttatcacaactgcatgtttctctaaggtcaccaagatattagttgccgctttgacattctttcttgggaaagatgaagatgaaaaacaggacagtgactccgaatctgaggatgatggaccaacagcaagagacctgctagtacaatatgctacagggaagaaaagttccaaaaacaagaaaaagttggaaaaggcaatgaaagtgctcaagaaacaaaaaaagaagaaaaaaccagaggtgtttaacttttcagccattctcttgattcatgatccccaagattttgcggaaaaactactaaagcagcttgagtgctgtaaggagaggtttgaagtgaagatgatgctcatgaaccttatctccagattggtgggaattcatgagcttttcctcttcaatttctatccctttttgcaaaggtttctgcagccccaccaaagagaagtaaccaagatccttctgtttgctgcacaagcatctcatcacctagtacccccagagattattcaatcattgcttatgactgtggcaaacaattttgttaccgacaagaactctggagaagtcatgacagtaggaatcaatgctataaaggagataacagctcgatgtcctctggccatgactgaagaacttctccaagacctggctcagtataaaacacacaaggataagaatgtaatgatgtctgctagaactttgattcacctcttccgaacactgaatcctcagatgctgcagaagaaattccggggtaagcctacagaggcctccatagaagcaagagtacaagaatatggagaattagatgctaaagattacattccaggagcagaagttctggaagttgagaaagaagagaatgctgaaaatgatgaagatggatgggaaagtaccagtctcagtgaggaggaggatgctgatggtgaatggattgatgtgcaacactcttccgatgaagaacagcaagaaatctccaagaagctgaacagcatgcccatggaggagcggaaggccaaagctgcagccatcagcactagccgagttttaactcaggaagacttccagaaaatccgcatggcccaaatgagaaaagaacttgatgctgcccccgggaaatgccagaagaggaaatacattgaaatagacagtgatgaagagcccaggggtgaattactttctcttcgggacattgaacgccttcataaaaagccaaagtctgacaaagagacaagactagcaactgcaatggctggaaagacagaccgaaaagaatttgtgaggaagaaaaccaaaacaaatccattttccagttcgacaaataaagagaagaaaaaacagaagaactttatgatgatgcggtatagccagaatgtccggtcaaaaaataagcgttccttccgagaaaaacagttggcactacgagatgcacttttgaaaaagagaaaaagaatgaagtaacttcctggcaagttttccattcctagaagaatgctaagtttgtgtccttgctctgaaaattggtaaatcaagcatgtttgtttacattaaaaagtccagacacactgtattgtgaaaactgctgaacatgtggcagcaattttgtgtttttattttggagacggctaatggtaggaatgttaatgtaaatagtggtggtaatgtaaaatcatttcatttatcattcatgcaaaaaaaagtatgtattgagtgcctattcattgtcactgtagatgcaaaacgaatgagctgtaaccccttcactcaaggcattgacagcttagctgtgagggtggacacacatatgtgtatttacagtgcagtgtaaatagttctgtagtagaggttaactccatatttctgtgaggtcactgaggccttatggactaactctgtgaggataggagttatatattcttataagacaaaacaaaacaggacaatgttacaagagtaagaggttcttacttgtacataggctttcctgctgaaaacaggcccctgctgtacagattttgggtacataatttagctcttttagtcagtccaagagatttaagtgaccccccccccccccgtgttttttttgtttttgtttttgttttgaatgccatgtaaaggctttttggttaagacctcacttttaaaactgccttaagtataaatagtacctttggaatatatttagttcatcatttgagctgccttcatactggtttcctcagccttccttcagcctgtaatattttcagcccactgtttaccttgtctcaataaaaggtttctaatgccaaat

SEQ ID NO: 153 - protein, 627 aa, Homosapiens
MFMAQISHCYPEYLSNFPQEVKDLLSCNHTVLDPDLRMTFCKALILLRNKNLINPSSLLELFFELFRCHDKLLRKTLYTHIVTDIKNINAKHKNNKVNVVLQNFMYTMLRDSNATAAKMSLDVMIELYRRNIWNDAKTVNVITTACFSKVTKILVAALTFFLGKDEDEKQDSDSESEDDGPTARDLLVQYATGKKSSKNKKKLEKAMKVLKKQKKKKKPEVFNFSAILLIHDPQDFAEKLLKQLECCKERFEVKMMLMNLISRLVGIHELFLFNFYPFLQRFLQPHQREVTKILLFAAQASHHLVPPEIIQSLLMTVANNFVTDKNSGEVMTVGINAIKEITARCPLAMTEELLQDLAQYKTHKDKNVMMSARTLIHLFRTLNPQMLQKKFRGKPTEASIEARVQEYGELDAKDYIPGAEVLEVEKEENAENDEDGWESTSLSEEEDADGEWIDVQHSSDEEQQEISKKLNSMPMEERKAKAAAISTSRVLTQEDFQKIRMAQMRKELDAAPGKCQKRKYIEIDSDEEPRGELLSLRDIERLHKKPKSDKETRLATAMAGKTDRKEFVRKKTKTNPFSSSTNKEKKKQKNFMMMRYSQNVRSKNKRSFREKQLALRDALLKKRKRMK

SEQ ID NO: 154 - DNA, 2545 bp, Homosapiens
atccaatacaggagtgacttggaactccattctatcactatgaagaaaagtggtgttcttttcctcttgggcatcatcttgctggttctgattggagtgcaaggaaccccagtagtgagaaagggtcgctgttcctgcatcagcaccaaccaagggactatccacctacaatccttgaaagaccttaaacaatttgccccaagcccttcctgcgagaaaattgaaatcattgctacactgaagaatggagttcaaacatgtctaaacccagattcagcagatgtgaaggaactgattaaaaagtgggagaaacaggtcagccaaaagaaaaagcaaaagaatgggaaaaaacatcaaaaaaagaaagttctgaaagttcgaaaatctcaacgttctcgtcaaaagaagactacataagagaccacttcaccaataagtattctgtgttaaaaatgttctattttaattataccgctatcattccaaaggaggatggcatataatacaaaggcttattaatttgactagaaaatttaaaacattactctgaaattgtaactaaagttagaaagttgattttaagaatccaaacgttaagaattgttaaaggctatgattgtctttgttcttctaccacccaccagttgaatttcatcatgcttaaggccatgattttagcaatacccatgtctacacagatgttcacccaaccacatcccactcacaacagctgcctggaagagcagccctaggcttccacgtactgcagcctccagagagtatctgaggcacatgtcagcaagtcctaagcctgttagcatgctggtgagccaagcagtttgaaattgagctggacctcaccaagctgctgtggccatcaacctctgtatttgaatcagcctacaggcctcacacacaatgtgtctgagagattcatgctgattgttattgggtatcaccactggagatcaccagtgtgtggctttcagagcctcctttctggctttggaagccatgtgattccatcttgcccgctcaggctgaccactttatttctttttgttcccctttgcttcattcaagtcagctcttctccatcctaccacaatgcagtgcctttcttctctccagtgcacctgtcatatgctctgatttatctgagtcaactcctttctcatcttgtccccaacaccccacagaagtgctttcttctcccaattcatcctcactcagtccagcttagttcaagtcctgcctcttaaataaacctttttggacacacaaattatcttaaaactcctgtttcacttggttcagtaccacatgggtgaacactcaatggttaactaattcttgggtgtttatcctatctctccaaccagattgtcagctccttgagggcaagagccacagtatatttccctgtttcttccacagtgcctaataatactgtggaactaggttttaataattttttaattgatgttgttatgggcaggatggcaaccagaccattgtctcagagcaggtgctggctctttcctggctactccatgttggctagcctctggtaacctcttacttattatcttcaggacactcactacagggaccagggatgatgcaacatccttgtctttttatgacaggatgtttgctcagcttctccaacaataagaagcacgtggtaaaacacttgcggatattctggactgtttttaaaaaatatacagtttaccgaaaatcatataatcttacaatgaaaaggactttatagatcagccagtgaccaaccttttcccaaccatacaaaaattccttttcccgaaggaaaagggctttctcaataagcctcagctttctaagatctaacaagatagccaccgagatccttatcgaaactcattttaggcaaatatgagttttattgtccgtttacttgtttcagagtttgtattgtgattatcaattaccacaccatctcccatgaagaaagggaacggtgaagtactaagcgctagaggaagcagccaagtcggttagtggaagcatgattggtgcccagttagcctctgcaggatgtggaaacctccttccaggggaggttcagtgaattgtgtaggagaggttgtctgtggccagaatttaaacctatactcactttcccaaattgaatcactgctcacactgctgatgatttagagtgctgtccggtggagatcccacccgaacgtcttatctaatcatgaaactccctagttccttcatgtaacttccctgaaaaatctaagtgtttcataaatttgagagtctgtgacccacttaccttgcatctcacaggtagacagtatataactaacaaccaaagactacatattgtcactgacacacacgttataatcatttatcatatatatacatacatgcatacactctcaaagcaaataatttttcacttcaaaacagtattgacttgtataccttgtaatttgaaatattttctttgttaaaatagaatggtatcaataaatagaccattaatcag

SEQ ID NO: 155 - protein, 125 aa, Homosapiens
MKKSGVLFLLGIILLVLIGVQGTPVVRKGRCSCISTNQGTIHLQSLKDLKQFAPSPSCEKIEIIATLKNGVQTCLNPDSADVKELIKKWEKQVSQKKKQKNGKKHQKKKVLKVRKSQRSRQKKTT

SEQ ID NO: 156 - DNA, 1172 bp, Homosapiens
gagacattcctcaattgcttagacatattctgagcctacagcagaggaacctccagtctcagcaccatgaatcaaactgcgattctgatttgctgccttatctttctgactctaagtggcattcaaggagtacctctctctagaaccgtacgctgtacctgcatcagcattagtaatcaacctgttaatccaaggtctttagaaaaacttgaaattattcctgcaagccaattttgtccacgtgttgagatcattgctacaatgaaaaagaagggtgagaagagatgtctgaatccagaatcgaaggccatcaagaatttactgaaagcagttagcaaggaaatgtctaaaagatctccttaaaaccagaggggagcaaaatcgatgcagtgcttccaaggatggaccacacagaggctgcctctcccatcacttccctacatggagtatatgtcaagccataattgttcttagtttgcagttacactaaaaggtgaccaatgatggtcaccaaatcagctgctactactcctgtaggaaggttaatgttcatcatcctaagctattcagtaataactctaccctggcactataatgtaagctctactgaggtgctatgttcttagtggatgttctgaccctgcttcaaatatttccctcacctttcccatcttccaagggtactaaggaatctttctgctttggggtttatcagaattctcagaatctcaaataactaaaaggtatgcaatcaaatctgctttttaaagaatgctctttacttcatggacttccactgccatcctcccaaggggcccaaattctttcagtggctacctacatacaattccaaacacatacaggaaggtagaaatatctgaaaatgtatgtgtaagtattcttatttaatgaaagactgtacaaagtataagtcttagatgtatatatttcctatattgttttcagtgtacatggaataacatgtaattaagtactatgtatcaatgagtaacaggaaaattttaaaaatacagatagatatatgctctgcatgttacataagataaatgtgctgaatggttttcaaataaaaatgaggtactctcctggaaatattaagaaagactatctaaatgttgaaagatcaaaaggttaataaagtaattataact

SEQ ID NO: 157 - protein, 98 aa, Homosapiens
MNQTAILICCLIFLTLSGIQGVPLSRTVRCTCISISNQPVNPRSLEKLEIIPASQFCPRVEIIATMKKKGEKRCLNPESKAIKNLLKAVSKEMSKRSP

SEQ ID NO: 158 - DNA, 1493 bp, Homosapiens
ttcctttcatgttcagcatttctactccttccaagaagagcagcaaagctgaagtagcagcaacagcaccagcagcaacagcaaaaaacaaacatgagtgtgaagggcatggctatagccttggctgtgatattgtgtgctacagttgttcaaggcttccccatgttcaaaagaggacgctgtctttgcataggccctggggtaaaagcagtgaaagtggcagatattgagaaagcctccataatgtacccaagtaacaactgtgacaaaatagaagtgattattaccctgaaagaaaataaaggacaacgatgcctaaatcccaaatcgaagcaagcaaggcttataatcaaaaaagttgaaagaaagaatttttaaaaatatcaaaacatatgaagtcctggaaaagggcatctgaaaaacctagaacaagtttaactgtgactactgaaatgacaagaattctacagtaggaaactgagacttttctatggttttgtgactttcaacttttgtacagttatgtgaaggatgaaaggtgggtgaaaggaccaaaaacagaaatacagtcttcctgaatgaatgacaatcagaattccactgcccaaaggagtccagcaattaaatggatttctaggaaaagctaccttaagaaaggctggttaccatcggagtttacaaagtgctttcacgttcttacttgttgtattatacattcatgcatttctaggctagagaaccttctagatttgatgcttacaactattctgttgtgactatgagaacatttctgtctctagaagttatctgtctgtattgatctttatgctatattactatctgtggttacagtggagacattgacattattactggagtcaagcccttataagtcaaaagcatctatgtgtcgtaaagcattcctcaaacattttttcatgcaaatacacacttctttccccaaatatcatgtagcacatcaatatgtagggaaacattcttatgcatcatttggtttgttttataaccaattcattaaatgtaattcataaaatgtactatgaaaaaaattatacgctatgggatactggcaacagtgcacatatttcataaccaaattagcagcaccggtcttaatttgatgtttttcaacttttattcattgagatgttttgaagcaattaggatatgtgtgtttactgtactttttgttttgatccgtttgtataaatgatagcaatatcttggacacatttgaaatacaaaatgtttttgtctaccaaagaaaaatgttgaaaaataagcaaatgtatacctagcaatcacttttactttttgtaattctgtctcttagaaaaatacataatctaatcaatttctttgttcatgcctatatactgtaaaatttaggtatactcaagactagtttaaagaatcaaagtcatttttttctctaataaactaccacaacctttcttttttaaaaaaaaaaa

SEQ ID NO: 159 - protein, 94 aa, Homosapiens
MSVKGMAIALAVILCATVVQGFPMFKRGRCLCIGPGVKAVKVADIEKASIMYPSNNCDKIEVIITLKENKGQRCLNPKSKQARLIIKKVERKNF

SEQ ID NO: 160 - DNA, 1556 bp, Homosapiens
gactcactgtcaacaacatcccatcctgaagacttgcttaccacaactgagagtggggagtcagtttgaggcctagcatcacttaaacttcctccaaaggcacaaaagccagaagagaaaaatgaagacgggacattttgaaatagtcaccatgctgctggcaaccatgattctagtggacattttccaggtgaaggctgaagtgttagacatggcagataatgcatttgatgatgaatacctgaaatgtacggacaggatggaaattaaatacgttccccaactgctaaaggaggaaaaagcaagccaccagcaattagatactgtgtgggaaaatgcaaaagccaaatgggcagcccgaaagactcaaatctttctccctatgaattttaaggataaccatggaatagccctgatggcatatatttccgaagctcaagagcaaactcccttttaccatctgttcagtgaagctgtgaagatggctggccaatctcgagaagattatatctatggcttccagttcaaagctttccacttttacctcacaagagccctgcagttgctgagaaaaccttgtgaggccagttccaaaactgtggtatatagaacaagccagggcacttcatttacatttggagggctaaaccaagccaggtttggccattttaccttggcatattcagccaaacctcaggctgctaatgaccagctcactgtgttatccatctacacatgccttggagttgacattgaaaattttcttgataaagaaagtgaaagaattactttaatacctctgaatgaggtttttcaagtgtcacaggagggggctggcaataaccttatccttcaaagcataaacaagacctgcagccattatgagtgtgcatttctaggtggactaaaaaccgaaaactgtattgagaacctagaatattttcaacccatctatgtctacaaccctggtgagaaaaaccagaagcttgaagaccatagtgagaaaaactggaagcttgaagaccatggtgagaaaaaccagaagcttgaagaccatggtgtgaaaatccttgaacccacccaaatacctgaagataaaagtcaaggaaatatcaacaatcctactccaggtccagttcctgttccaggtcccaaaagccatccttctgcatcctcgggcaaactgctgcttccacagtttgggatggtcatcattttaatcagtgtttctgctataaatctctttgttgctctgtagtttgatgcattgtttatctttcttattctttacttgaaataactatagggatccacaggagatcaaaaggaatgatgtattttttacgtgttggccaaagtcactggataaaatgagaattgtatatttgttattcattttgcaaattcagaaagttggtccagatatatgtcacagaacttttcacttgtatactactcttacaatggaaaaaaatcccgaaaactgtatacttctgattaaattcaataaaagattttgattaggtaaaaaaaaaaaaaaaaaaaaaaaaaaaaaa

SEQ ID NO: 161 - protein, 378 aa, Homosapiens
MKTGHFEIVTMLLATMILVDIFQVKAEVLDMADNAFDDEYLKCTDRMEIKYVPQLLKEEKASHQQLDTVWENAKAKWAARKTQIFLPMNFKDNHGIALMAYISEAQEQTPFYHLFSEAVKMAGQSREDYIYGFQFKAFHFYLTRALQLLRKPCEASSKTVVYRTSQGTSFTFGGLNQARFGHFTLAYSAKPQAANDQLTVLSIYTCLGVDIENFLDKESERITLIPLNEVFQVSQEGAGNNLILQSINKTCSHYECAFLGGLKTENCIENLEYFQPIYVYNPGEKNQKLEDHSEKNWKLEDHGEKNQKLEDHGVKILEPTQIPEDKSQGNINNPTPGPVPVPGPKSHPSASSGKLLLPQFGMVIILISVSAINLFVAL

SEQ ID NO: 162 - DNA, 2358 bp, Homosapiens
ggcctcttaggctaggtcagaaaggaggcggaactcggtgatctgactggcggtttcccggccggactgagaaggggagcgcgctgcgcgtcgcaggagtaacctacttggtctcctgctttcgcgacatggccttcaattttggggctccctcgggcacctccggtaccgctgcagccaccgcggcccccgcgggtgggtttggaggatttgggacaacatctacaactgcaggttctgcattcagcttttctgccccaactaacacaggcactactggactctttggtggtactcagaacaaaggttttggatttggtactggttttggcacaacaacgggaactagtactggtttaggtactggtttgggaactggactgggatttggaggatttaatacacagcagcagcagcaaactacattaggtggtctcttcagtcagcctacacaagctcctacccagtccaaccagctgataaatactgcgagtgctctttctgctccaacgctgttgggagatgagagagatgctattttggcaaaatggaatcaactgcaggccttttggggaacaggaaaagggtatttcaacaataatattccgccagtggaattcacacaagaaaatcccttttgccgatttaaggcagtaggttatagttgcatgcccagtaataaagatgaagatgggctagtggttttagttttcaacaaaaaagaaacagagattcgaagccaacaacaacagttggtagaatcattgcataaagttttgggaggaaaccagacccttactgtaaatgtagagggcactaaaacattgccagatgatcagacagaagttgttatttatgttgttgagcgttcgccaaatggtacttcaagaagagttccagctacaacgctatatgcccattttgaacaagccaatataaaaacacaattgcagcaacttggtgtaaccctttctatgactagaacagaactttctcctgcacagatcaaacagcttttacagaatcctcctgctggtgttgatcctattatctgggaacaggccaaggtagataaccctgattctgaaaagttaattcctgtaccaatggtgggttttaaggaacttctccgaagactgaaggttcaagatcagatgactaagcagcatcaaaccagattagatatcatatctgaagatattagtgagctacaaaagaatcaaactacatctgtagccaaaattgcacaatacaagaggaaactcatggatctttcccatagaactttacaggtcctaatcaaacaggaaattcaaaggaagagtggttatgccattcaggctgatgaagagcagttgcgagttcagctggatacgattcagggtgaactaaatgcacctactcagttcaagggccgactaaatgaattgatgtctcaaatcaggatgcagaatcattttggagcagtcagatctgaagaaaggtattacatagatgcagatctgttacgagaaatcaagcagcatttgaaacaacaacaggaaggccttagccatttgattagcatcattaaagacgatctagaagatataaagctggtcgaacatggattgaatgaaaccatccacatcagaggtggtgtctttagttgacagttcacaaacttgtgtaaaggtttgtgaaatgcatcttcttactgcatcagaccttccttaagaatgaaaccgaccacatggagggaaaaagaaaacaattctttcttggattggttttttgagaagtttactgacaaattactgttcatcaaatctgaaatagtcacctcacagctcttcaaagaaaacctttgaaagatttatatctaaaagctgtatttactttaaaagaagtgcataattaccaaaattgtatgtactattgtacatttttacaacagcattttcttaaacataatctgtgtttaatgattattgtccattgagcctgtactctgctttccataccaagtaaatatgaaataatctactttgcacataacagaacaaactataattacttggctgttggagatttgtacttgagtataaatgtacaccagtttttgtatttgtgaactcatctgtgggaggagtaaagaaaatccaaaagcatttaatgttttgtttttgttctataaagatatgaaaatgtatttttatattattttacttatttggaatttacagagcacacctaagcaattaggatataacaaaactacttaaccatttttgcaaccattttgttttttaagcctttttatttctaaaaagatgaaaacttataaataaattcttaatttgtaattacttttaaaaa

SEQ ID NO: 163 - protein, 507 aa, Homosapiens
MAFNFGAPSGTSGTAAATAAPAGGFGGFGTTSTTAGSAFSFSAPTNTGTTGLFGGTQNKGFGFGTGFGTTTGTSTGLGTGLGTGLGFGGFNTQQQQQTTLGGLFSQPTQAPTQSNQLINTASALSAPTLLGDERDAILAKWNQLQAFWGTGKGYFNNNIPPVEFTQENPFCRFKAVGYSCMPSNKDEDGLVVLVFNKKETEIRSQQQQLVESLHKVLGGNQTLTVNVEGTKTLPDDQTEVVIYVVERSPNGTSRRVPATTLYAHFEQANIKTQLQQLGVTLSMTRTELSPAQIKQLLQNPPAGVDPIIWEQAKVDNPDSEKLIPVPMVGFKELLRRLKVQDQMTKQHQTRLDIISEDISELQKNQTTSVAKIAQYKRKLMDLSHRTLQVLIKQEIQRKSGYAIQADEEQLRVQLDTIQGELNAPTQFKGRLNELMSQIRMQNHFGAVRSEERYYIDADLLREIKQHLKQQQEGLSHLISIIKDDLEDIKLVEHGLNETIHIRGGVFS

SEQ ID NO: 164 - DNA, 4748 bp, Homosapiens
cctcgcggggttgcggcgagcccggcccgcgaacgtcacgtccctgcgcgctccctgcactctcccgagctgcgctaggcgggcgccacggctgcccggcgaaggaaaccgaaaccgagtccgggcccgtccctccgcggccccatccgcccggtgcacccggggccgcgctcgccaggccgcggagcccagagctgcgcgcacgaaccgtgcgccgggagggcgtgggcgtggcgccgaagggtcccgggtcttcgacgcctctgcggcggctcctccctccttgcagttggatccctggcgggtgcggcccggcccggcccgtgagcggcgcacagaatgggccgatgctgcttctacacggcggggacgttgtccctgctcctgctggtgaccagcgtcacgctgctggtggcccgggtcttccagaaggctgtagaccagagtatcgagaagaaaattgtgttaaggaatggtactgaggcatttgactcctgggagaagccccctctgcctgtgtatactcagttctatttcttcaatgtcaccaatccagaggagatcctcagaggggagacccctcgggtggaagaagtggggccatacacctacagggaactcagaaacaaagcaaatattcaatttggagataatggaacaacaatatctgctgttagcaacaaggcctatgtttttgaacgagaccaatctgttggagaccctaaaattgacttaattagaacattaaatattcctgtattgactgtcatagagtggtcccaggtgcacttcctcagggagatcatcgaggccatgttgaaagcctatcagcagaagctctttgtgactcacacagttgacgaattgctctggggctacaaagatgaaatcttgtcccttatccatgttttcaggcccgatatctctccctattttggcctattctatgagaaaaatgggactaatgatggagactatgtttttctaactggagaagacagttaccttaactttacaaaaattgtggaatggaatgggaaaacgtcacttgactggtggataacagacaagtgcaatatgattaatggaacagatggagattcttttcacccactaataaccaaagatgaggtcctttatgtcttcccatctgacttttgcaggtcagtgtatattactttcagtgactatgagagtgtacagggactgcctgcctttcggtataaagttcctgcagaaatattagccaatacgtcagacaatgccggcttctgtatacctgagggaaactgcctgggctcaggagttctgaatgtcagcatctgcaagaatggtgcacccatcattatgtctttcccacacttttaccaagcagatgagaggtttgtttctgccatagaaggcatgcacccaaatcaggaagaccatgagacatttgtggacattaatcctttgactggaataatcctaaaagcagccaagaggttccaaatcaacatttatgtcaaaaaattagatgactttgttgaaacgggagacattagaaccatggttttcccagtgatgtacctcaatgagagtgttcacattgataaagagacggcgagtcgactgaagtctatgattaacactactttgatcatcaccaacataccctacatcatcatggcgctgggtgtgttctttggtttggtttttacctggcttgcatgcaaaggacagggatccatggatgagggaacagcggatgaaagagcacccctcattcgaacctaaacattgcctttgcttggtgaagaaactgtgtgagctgtcctgacctggacgatgacgtggggaaaccctccacctccttgcaggcttgttgcctgttgaaagaaggaaaaagacacggcgctggcaagtgataggaacattctggccagaggttaaagagcaggctgacatggctggccattaagctttataaaatcatgtgggctctgaaattgttcttttatgtgtctagcaagtatttaataaacccttgtatagtaattttgttgttgttgggtgctggtagctccagaattttgtgaccactattgtgggtaaaatgtctctgcatcacttgttaatgctactggtctaacttcattcagtatgcttcattcaccgaactttgtgctcaaaatgcgtatataccattttatgttgtattcctccatttcacttgcaaaacagaagtaaataagagttcgggacccagggtaaaatggtagcttcatccaatatatcattcaaatgcatctgatttctaaaacatattacattttatgctgatcttcagttcataattcttccaggaaaactcagtcttccaactgcaataaaatactgggtagaatcaaatgggaaaggggttgggtggggcaatacccatgagttgatagtgataagctcctaaggatttttaacttgtacttttgtgaacgaagagaatgcataaataatgttggtgaggataaagtacagatatttcatgtagaattaattgctagttatgatgcttgtggatagttaactgttttttttttagtcaaaatgatcatgctacgaaaagatgcttctgagagaatgtaatgagtaactgatttttcttcctgagtcgcccttgccaaatatgttactgtattaattaatctaatattgagtgattatttgtaaaattatgaatatgggaaatccatctatctacagcctaagttacacataagtttcagaaagtctgattagactaaagagatatttcttctgggacagccgccttcttggtaattttgaagttctttttacaagttccttcctcagtttcagttctttccagtgttttgtagctcactgtcactcactgaatagagaaacgtgtgccctatacttcctgtgacaatcattttgctgacagaatgatggatgtttaaaatattgcacaaagtactttaaagaaaggtctgttaggaccagaagcagagacaccacttttcaaaggacttcttggtttcagcataacctaagacagggaattgggagccatcatatgtcacagtgttcagaattcaagcatatttaagggcattttctttgattctcaaagttcagcattcattttgaattgagaagcctatacatttagctgacaaagtgcttatagaatttcttaacaactgaaccattcaaaaggattttttttgtttaaaactggatttcaatgtaagcaaatgaagaaaaaaatatagatttcatttccatagcttcttatccctgtattgaggtaataaattgttttactgacaatttttcctttttctacactaaaacaatatgtgatatatttcccctcttgaagaggcaattcattaaactctcaaattttctatagaatcaagatagaacctttagatactccaactcaccaaaatgtaaaaaaactaacaaaaatatttggtcttcaataatgctaaatatctacatttttagaatttatcaacatttaactagataattgggcatgtcttaattatgcatgtacttatccatactaataaaattgacaatgctagtgcatacttattggtttagtcctattatcaggatataatcatctgtgaggaggatattttaaatactgtaaatgataacagttaatgatatacacatttagactgagttgcacactggcagggagaccaaaaacattacttccatacttgtgtcatgattcttttttttttgagagagtctcactctgtcgccaggctggagtacagtggcatgatctcggctcactgcaacctctgcctcccgggttcaagcaattctcctgcctcagccacccaagtagctgggactacaggtgcgtgccaccacgcccagctaaattttgtatttttagtggagacggggtttcaccatgttggccaggatggtctcaatctcctgaccctgcgatctgcccacctcagcctcccaaagtgctgggattacaggcgtaagccaccgggcctggcctgttttatgattcttaatagttacttggtttaaatcacatttgatactatccttctgaaaagtctgagacagatctacaaactacagtcaaaattatagattaagaggaatgaatgcacctatttggctttaagttgaagatgaattatttctcatgctcattttcttgcggcagttatcttagaaagacccccaaaggctttgtgattgtaagcactgtcatgatcacagaatgcaagcttctggtaccatgatcctcaacttagagaggaagaaaccaagacagagagcttaactcacttctctcagggaaaattaggagttgagcacaggacaggaaatgggctttgccacttttagctccaggcttttctaaccagacttgatttcctcatgttctagaaagatcactaatggtcaagtggaacaagcactacacgactaacccctattggggtttttaacttaagggaggctaatttttaatttaaactgctcgagatatgagttctgcaaaaggtggtccgcatccttggccctctggacattatcactaaattgcttgtgcctgttaacaagaatactgaccagaatgctcttcatgtagcttatacagttggttcacttcatgcggttcttgacatgtttatttctacccttaatgcaatgaaatgtttcattaataaaaaaccactttatat

SEQ ID NO: 165 - protein, 478 aa, Homosapiens
MGRCCFYTAGTLSLLLLVTSVTLLVARVFQKAVDQSIEKKIVLRNGTEAFDSWEKPPLPVYTQFYFFNVTNPEEILRGETPRVEEVGPYTYRELRNKANIQFGDNGTTISAVSNKAYVFERDQSVGDPKIDLIRTLNIPVLTVIEWSQVHFLREIIEAMLKAYQQKLFVTHTVDELLWGYKDEILSLIHVFRPDISPYFGLFYEKNGTNDGDYVFLTGEDSYLNFTKIVEWNGKTSLDWWITDKCNMINGTDGDSFHPLITKDEVLYVFPSDFCRSVYITFSDYESVQGLPAFRYKVPAEILANTSDNAGFCIPEGNCLGSGVLNVSICKNGAPIIMSFPHFYQADERFVSAIEGMHPNQEDHETFVDINPLTGIILKAAKRFQINIYVKKLDDFVETGDIRTMVFPVMYLNESVHIDKETASRLKSMINTTLIITNIPYIIMALGVFFGLVFTWLACKGQGSMDEGTADERAPLIRT

SEQ ID NO: 166 - DNA, 3392 bp, Homosapiens
actccctcactggctgccattgaaagagtccacttctcagtgactcctagctgggcactggatgcagttgaggattgctggtcaatatgattcttcttgctgtgctttttctctgcttcatttcctcatattcagcttctgttaaaggtcacacaactggtctctcattaaataatgaccggctgtacaagctcacgtactccactgaagttcttcttgatcggggcaaaggaaaactgcaagacagcgtgggctaccgcatttcctccaacgtggatgtggccttactatggaggaatcctgatggtgatgatgaccagttgatccaaataacgatgaaggatgtaaatgttgaaaatgtgaatcagcagagaggagagaagagcatcttcaaaggaaaaagcccatctaaaataatgggaaaggaaaacttggaagctctgcaaagacctacgctccttcatctaatccatggaaaggtcaaagagttctactcatatcaaaatgaggcagtggccatagaaaatatcaagagaggtctggctagcctatttcagacacagttaagctctggaaccaccaatgaggtagatatctctggaaattgtaaagtgacctaccaggctcatcaagacaaagtgatcaaaattaaggccttggattcatgcaaaatagcgaggtctggatttacgaccccaaatcaggtcttgggtgtcagttcaaaagctacatctgtcaccacctataagatagaagacagctttgttatagctgtgcttgctgaagaaacacacaattttggactgaatttcctacaaaccattaaggggaaaatagtatcgaagcagaaattagagctgaagacaaccgaagcaggcccaagattgatgtctggaaagcaggctgcagccataatcaaagcagttgattcaaagtacacggccattcccattgtggggcaggtcttccagagccactgtaaaggatgtccttctctctcggagctctggcggtccaccaggaaatacctgcagcctgacaacctttccaaggctgaggctgtcagaaacttcctggccttcattcagcacctcaggactgcgaagaaagaagagatccttcaaatactaaagatggaaaataaggaagtattacctcagctggtggatgctgtcacctctgctcagacctcagactcattagaagccattttggactttttggatttcaaaagtgacagcagcattatcctccaggagaggtttctctatgcctgtggatttgcttctcatcccaatgaagaactcctgagagccctcattagtaagttcaaaggttctattggtagcagtgacatcagagaaactgttatgatcatcactgggacacttgtcagaaagttgtgtcagaatgaaggctgcaaactcaaagcagtagtggaagctaagaagttaatcctgggaggacttgaaaaagcagagaaaaaagaggacaccaggatgtatctgctggctttgaagaatgccctgcttccagaaggcatcccaagtcttctgaagtatgcagaagcaggagaagggcccatcagccacctggctaccactgctctccagagatatgatctccctttcataactgatgaggtgaagaagaccttaaacagaatataccaccaaaaccgtaaagttcatgaaaagactgtgcgcactgctgcagctgctatcattttaaataacaatccatcctacatggacgtcaagaacatcctgctgtctattggggagcttccccaagaaatgaataaatacatgctcgccattgttcaagacatcctacgtttggaaatgcctgcaagcaaaattgtccgtcgagttctgaaggaaatggtcgctcacaattatgaccgtttctccaggagtggatcttcttctgcctacactggctacatagaacgtagtccccgttcggcatctacttacagcctagacattctctactcgggttctggcattctaaggagaagtaacctgaacatctttcagtacattgggaaggctggtcttcacggtagccaggtggttattgaagcccaaggactggaagccttaatcgcagccacccctgacgagggggaggagaaccttgactcctatgctggtatgtcagccatcctctttgatgttcagctcagacctgtcacctttttcaacggatacagtgatttgatgtccaaaatgctgtcagcatctggcgaccctatcagtgtggtgaaaggacttattctgctaatagatcattctcaggaacttcagttacaatctggactaaaagccaatatagaggtccagggtggtctagctattgatatttcaggtgcaatggagtttagcttgtggtatcgtgagtctaaaacccgagtgaaaaatagggtgactgtggtaataaccactgacatcacagtggactcctcttttgtgaaagctggcctggaaaccagtacagaaacagaagcaggcttggagtttatctccacagtgcagttttctcagtacccattcttagtttgcatgcagatggacaaggatgaagctccattcaggcaatttgagaaaaagtacgaaaggctgtccacaggcagaggttatgtctctcagaaaagaaaagaaagcgtattagcaggatgtgaattcccgctccatcaagagaactcagagatgtgcaaagtggtgtttgcccctcagccggatagtacttccagcggatggttttgaaactgacctgtgatattttacttgaatttgtctccccgaaagggacacaatgtggcatgactaagtacttgctctctgagagcacagcgtttacatatttacctgtatttaagatttttgtaaaaagctacaaaaaactgcagtttgatcaaatttgggtatatgcagtatgctacccacagcgtcattttgaatcatcatgtgacgctttcaacaacgttcttagtttacttatacctctctcaaatctcatttggtacagtcagaatagttattctctaagaggaaactagtgtttgttaaaaacaaaaataaaaacaaaaccacacaaggagaacccaattttgtttcaacaatttttgatcaatgtatatgaagctcttgataggacttccttaagcatgacgggaaaaccaaacacgttccctaatcaggaaaaaaaaaaaaaaaaaaaagtaagacacaaacaaaccatttttttctctttttttggagttgggggcccagggagaagggacaaggcttttaaaagacttgttagccaacttcaagaattaatatttatgtctctgttattgttagttttaagccttaaggtagaaggcacatagaaataacatc

SEQ ID NO: 167 - protein, 894 aa, Homosapiens
MILLAVLFLCFISSYSASVKGHTTGLSLNNDRLYKLTYSTEVLLDRGKGKLQDSVGYRISSNVDVALLWRNPDGDDDQLIQITMKDVNVENVNQQRGEKSIFKGKSPSKIMGKENLEALQRPTLLHLIHGKVKEFYSYQNEAVAIENIKRGLASLFQTQLSSGTTNEVDISGNCKVTYQAHQDKVIKIKALDSCKIARSGFTTPNQVLGVSSKATSVTTYKIEDSFVIAVLAEETHNFGLNFLQTIKGKIVSKQKLELKTTEAGPRLMSGKQAAAIIKAVDSKYTAIPIVGQVFQSHCKGCPSLSELWRSTRKYLQPDNLSKAEAVRNFLAFIQHLRTAKKEEILQILKMENKEVLPQLVDAVTSAQTSDSLEAILDFLDFKSDSSIILQERFLYACGFASHPNEELLRALISKFKGSIGSSDIRETVMIITGTLVRKLCQNEGCKLKAVVEAKKLILGGLEKAEKKEDTRMYLLALKNALLPEGIPSLLKYAEAGEGPISHLATTALQRYDLPFITDEVKKTLNRIYHQNRKVHEKTVRTAAAAIILNNNPSYMDVKNILLSIGELPQEMNKYMLAIVQDILRLEMPASKIVRRVLKEMVAHNYDRFSRSGSSSAYTGYIERSPRSASTYSLDILYSGSGILRRSNLNIFQYIGKAGLHGSQVVIEAQGLEALIAATPDEGEENLDSYAGMSAILFDVQLRPVTFFNGYSDLMSKMLSASGDPISVVKGLILLIDHSQELQLQSGLKANIEVQGGLAIDISGAMEFSLWYRESKTRVKNRVTVVITTDITVDSSFVKAGLETSTETEAGLEFISTVQFSQYPFLVCMQMDKDEAPFRQFEKKYERLSTGRGYVSQKRKESVLAGCEFPLHQENSEMCKVVFAPQPDSTSSGWF

SEQ ID NO: 168 - DNA, 8192 bp, Homosapiens
atggggcatgccagtgggtcacatttcctctctgaatctccctccaagccgcactgtactcttgaagggaaagggacaaggcttcacaagaaacagcacatgctttcctttcatttctggaagtcccggggtcaacctacagatgctgcttcttccgtggccgatggcattcagactcctcgctgctgccgacggtgccaggcaaacaactggacaggacagctcagctacagaacactggccacagtctcggccggagcagcagccccccagccacagaccacctccaccgcctcatccaggagccttcccacctccctcaggcttgctgcggccccgccacaggggctgaagaactgggaggtggtggcagcagtggcagcagtgcctacagccttggggccagtccagatacgtgggaccctgcttcgggcaactctgcagcccctccggggccagagacggacccaagacttccccagcgatcaccattgtctcttcctgtcgctgaaacctgggcaagggctcataatggaagctgcccctcctgagctgaattcgaaagcaagacaggcggaggtgggggacggggtgagcagtgctcaagacagccaggagctcaagcagcagctgtggccacttcccaagccttcagcctcctcccagcgagaagcgaaatatgtggacatgtgtgcttcagctgaagtccagagggagagtccccagaccatgaaacttaccctggggcactgccctgggggtcagagggcctctaggagcccaaaggagaaagcccaagatgaacccagcagcaagactccaagcccccagaacaatcctgcctcctcccaactctctagatcccagcactctgcctctgaagagggtggcaatttctcatcttcctcatcctcctccccgatgaacaaagcagaagaggatggcctttccaaaatggaggactccaccacatccacaggggctctggccacctcctcttcatccttaggcttcgagagtgagagtggtgaaagtgaaggttgccaggccggcagcagggacccccccaaagtcgaagaggctcactacatcaccacccatgagatccagctgagtgaggtggaacaggacatggatttcgacgtgggactggcctcccgctgggatttcgaggacaacaacgtgatctactcgttcgtggattatgcttcctttggtggcagcgacgagaccccaggggacatcaccagtctgaccgaagaggacgacgacaacagctgctacctcagcaccactcccagcaccaacaccacccggacgcccagccctacaagcagcgacctggcccgccccaatgcaggccgcagtggccgcgacaccagcagcaccgaagcagcttcaggggcagcagccgccgccgcaagcagctgtgggagtgcagcaagccagatcctcctatcaatcaaaccggcttcccgggctataaatgagcctagcaacgtgcgtgcaaagcaaaacattatttatgctgccaagcatgaaggcgacatgagcctccgcgtctctacagctgctgaacacaattcaagttcgctgaagcaaaacccggctgcagcagtggctcaggaccatgcaaagaaattcattgctgtacctgctcgcctgcaaaccaggtgcggggccatccgggcgaaggagctggtggactactccagcggagcctccagtgccgtgagcgaactggacgatgcggacaaagaggtgcgtaacctgacctcccgggccttccggagcctggcttacccctactttgaggctctgaacatcagctcccgggagtcctccaccacgctctccgaagtgggctttgggcgctggtcaactttcctggacttaaaatgtgggggtgttggggccagggtggagcagagcctcctcaggagcagcgcggcctctgtggctgcaggtctgaggaagggcagtggggcccgggccactgccgaccagctctacatccagtccaagaagtctcagaccaaggccttggagttcgtggtcagcaaagtcgagggggaaatcaaacatgtggagacgcccctgtgtttccagaagcaggtccagacgggctcccgcgtcgtcacccttttggagcccctgaatgtacgcagtgagagcaaagccagctcggcccctgggcccggcagggccaccaaaggccccggcaagggtcccgggtcggcatacacggacgacggctccgagacctccgagggcagcaagcccacctcccgcgccgatggcccccagaagtccaagttcgcctccagtctgctcaaaaatgtcatttccaagaagatgcagcgggaacacgagttcaaaatggagaggggagaagtcatggatacatcccaccacctctcaggcacctccaaggagacggagggcgcccgcgggagcgagaggcagcgagagaggggcctgcagaggcagagctctcgtcactccgaggccggctccgagtacacagtggtcagcatgtccgacgcgggcggggaggggtccgtggcgggctccaaatctccagtcttcaaagccagtactcctcgcgagcgcaacgcaggccctggccggaatttcaccgatggacacacagaagtgtgtgaaattaaaaagagtgcctcagagaccgtcaagggcatcttcctccgtagtcagaacagtgcgttccggtcatggaaggagaaagaggccgagaagagggaggaacaagcccctatagggaagctgaagctgcccaaaggaggcgactggcgggctgatctcggggagatttctgccagcaagaacaccatcatgtctcgcctctttgtccccaacatccagcagacacccaaggacaagcagccgaggaagcaggccaccaagtaccctgctgctcaggccacctccacagcggtgatcagacccaaggctcccgaaatcaagatccggctggggagtgtgcagcagccgagctcagacttcaacattgccaagttgctcacgcccaagctggccggtggcagcgcctctaacctgttcaagaccatcgaggacaacagcagggcacagcagaaactcttccgcggggacaacctagaaaaagtgccccatttccaggtgagagacatcagagacaagtccaaggctcaaggccccctccaccaggtgagagatgtcaggaaactaattaaagggtcaggggatagtagtgacaagggcagtgttaccccagagcaggggctgactggacccaaacccaggcagctgtctgcagcagctggcggatctggatccctgtcccccatggtgattacatgccaggctgtagtgaaccagagggaagacagcatggaccgagagcccagggaaagcatgggcaaagggggcggcagcagagtcttgaattcttcctccccagaagggacagtcttggttcacagggcatctggcaggctgcctgtggctaccattgcccccaataagcccgagcagggctcatacctgcctgtgctcaagattgtctccaaggcttccacccagaagaccccagagaagctcaaggaggaggaggtcaaggaggaagggaaagccacgaagccagcccggaatgccctggagaagctgactgcagccgtgaggtccatggaagagctgtacagcttcaacaggaacgagtggaagcgcaaaagcgaccccttgcctatgatgatggacagccacgtgctgtcgctcattgccagtgaggagagggaaggggtagtggttgctgatggagaccacgacaagctgtccaaacggctgggtgaggtggaagagcggggcacaggaaacaaagctggtgtggtcctgcgaggggcccccatagaacgtctgcagcggagaaactccaaccccagcgctgagagtgtgtctgccagggcagcggcctttgagaacctggccagggaaagaccccgatctctctatattcccccagtccacaaggatgtagagagaacccaacccctgcagcccctcccaccactccccagcaaccggaacgtgttcacagtgagtgccagcagcatccagaaaactgggggtgtcgctggcaagttcccacaagggccttctccggagagtccttcagcagctaagggcatcaagtcgcagggactccggtccctcaagatctctccagccacccgggcacctcctgatgaggtgaccaacaggaaaagtggcagcaatttggagaagagcaacagtgactgtgagaattacctgaccatccctcttaaaggaagctctgctgcaggggagcttcttagcaggcctggggcttccagggaggggccccccaactcctcagctgccactctctgtagtttacccccgctgagtgcccgcagtcaggtccccagtagctccaaaggctctcaggttagtggaaccagccgaccagcttggcgtaccaaacctgacaacccccgggagacagtagctgcccccccagggccacagagccccgagcatccccccaccaccatctaccaccagccgccgctgcccttcaccctacagggggcccagcctcaggtcctctgcttctccccacccagcatgcctgccccagcacctgcagcctcagctcccgtccccacagaccccttccagcaggcacagcctcaacagacccagcgtaagatgctcctggatgtgacaacaggccagtactatctggtggacacaccagtacagcccatgacccggagactgtttgaccctgagacagggcagtatgtggatgtgcccatgacctcccagcagcaggctgtggctcccatgtccatctctgtgcctcccttggccctgagtcctggggcttatggacccacctacatgatttaccctgggtttctgcctaccgtgctgcccaccaatgctctgcagcccacaccaattgctcgcgctccaagaggaagtgagctctccccaatggtggcagaaccttccagcaaagaggcagctgcaacgttcaccgaggccccatacttcatggcttctggtcagtctccggcctcctcaacctcctcagccccagcagccacatcccagctcctaggggccaaggcctttgcccagctgcatggcaagcctgtcatcagcattacttcgcagcccctggggccacggatcattgctcccccttcctttgatggcaccaccatgagctttgtggtagaacacagatgatgagcagccaccaggaagcggaatgaaaaactgctggagcaagacaaaaagatggactattcttctttaatctggaatttgcattgtaatagcactaagaattatttcatctgaaaaacttcttccacatgtgttattcttaatttttgcttcttataagctaagtgtgtaagtttctatatttttctgaacaatcctcttaaggcagtttttattttaattttattaagttgattgaatggttgcattttttccctttatgactatttctttttatacttcaacacaggatataagctttctattcacctccttcccccctgtacttgtgactagacaaacaattcctttgttcccattgttcagtcaaaacataccacagaatgggattgattctgttgtaaaccaagctagtaaatgagtaatttggatcacgaatctccttatagtttcttggaatatatcaagactagctggctgagttgtaatacgtatttaagttttcactatgatggtctgctctttgaatcatatatcagccaaacctacccattctcttggttatgctctatatgttcttttattaggtttggcatgatttcaaatgtgattgtgaaaaatggtggttgtaatgtttgtgctttattttatttttcccatttgtacaatgccacgacactatttgttgccttaaaatagaatggcttgaaatactggaaagccaatgattgcatctaaaattaagtacttagtctcagaaaggtataaaatatctattttcctttaagaatccaattatttttgtgggtgcataacatttttcttttcttcaataattccctccatagttgcatactcgtgtctctcatggattgtttagagtctaaagagtgacccatttggggcagtagagtagaatatggcactaattcagtggctctgattcactccagccctagcctcgctatcccaataacagtaacctagagttacagcacttgctccttatgaggatgaggcaggtttgaagagatgtcaagaatccaaatcacagaatcttttattgacatttagtactgtctcagttgtaacccaattctgaaggctatttgagtgagtgttcacagggagtcttgaagactggaagacttgattgaacagataaatatttagcttgtcataataagtgtatcgatatatacttggcaaatgttacattgaaatattacttaattactttttaaaggaataatttgaaggttttcccaggatttttttttaagaatctccttttatttaccaatttgtttaaagataaagcattctggtaattttttaaacaccctaatattattttaaacctcagcaatatttgatttctgcttaaattttcttcataagccacagaattttatgctactcatgacaaaaagtgtgagtaaaaaactaggagactgagttttgtatgatttatataatctttttactttgtagttatgcttcccatctcagactcttaaaaaagacttaatttcactttcagggccttcctttaagggatcttactctgaaaaaaagttctcttgggtatagggaaaggtttgaggcgggaatagtcagctctgatcacgattcaattgcttgttgtgctgatgagctatgaaatgaagctatagactttatgagacatgaaatatgaaacatagtctctgtgtataaaaaagatgcccttgtgccaaattcaagaaaaagatatttctttatcatagaggtcttcttacccaggcacatcaatcaattccccccagaacttaaagtaagttttatccactggggaacaaatcttatggcatcagagcttcctcgttttcaggagagattggctgggtataaggtaacttaatattgacccaagaaagtagaatccctttcagaaatcttacacttattttactgaaagcagcaccaagaaacctccagtatttgaatacacctggtgaaacctatataggatttgggtggatagtaccaaaattgttaagactggtttaaagccaaatgcgactttcaggaaaaaccagtggccatgttgagtagtgactgctcaccaactcttccaaaagagagacaactccttctctagaaaatgtggtagagttgagggcttgggacccctaatctatgtatcagtgtttctcaccagcagatttgagttttaaattctcacactgaggtaaattaggacacaaactaaggaaagaaagaaaaagcttttcatttgtttgttctatacaagaggcttcaccttttaggaagttgccaaggacacagtgatgtccaagtggctaaaaacgcaacttttaaataatgttctattaatatcatgtcatctatcgataattttatggttctctatttcaccaaatcatacaaagctgctaggccattcactacctccagtgatagggaaaaaatattttcacgggcatgaggtaaatctcaatcttgatttttattgttttgtcatttcttgaggttgcatgaatatttgaatgaagtgatatacccttccttttatagctcaaggggaatcaaacaagagcctatgaagccttctgacccataaaactattaccctaataatgtccctttagttactgaacttcccttttattttttattactataaaaccattagtaaaacatttcctaaatagtgccttgaacttgaatctaatcagaattgcagagtctggcttttataatatcctcttagggttatatgtgtggcttagttttccagaagatccactttttacttgttgataaaatggtcatatttgaaatatgtcccatttcaatcatttctggaaaactgaacacatgtgtaaccgtataaaaatttaattcgccag

SEQ ID NO: 169 - protein, 1758 aa, Homosapiens
MGHASGSHFLSESPSKPHCTLEGKGTRLHKKQHMLSFHFWKSRGQPTDAASSVADGIQTPRCCRRCQANNWTGQLSYRTLATVSAGAAAPQPQTTSTASSRSLPTSLRLAAAPPQGLKNWEVVAAVAAVPTALGPVQIRGTLLRATLQPLRGQRRTQDFPSDHHCLFLSLKPGQGLIMEAAPPELNSKARQAEVGDGVSSAQDSQELKQQLWPLPKPSASSQREAKYVDMCASAEVQRESPQTMKLTLGHCPGGQRASRSPKEKAQDEPSSKTPSPQNNPASSQLSRSQHSASEEGGNFSSSSSSSPMNKAEEDGLSKMEDSTTSTGALATSSSSLGFESESGESEGCQAGSRDPPKVEEAHYITTHEIQLSEVEQDMDFDVGLASRWDFEDNNVIYSFVDYASFGGSDETPGDITSLTEEDDDNSCYLSTTPSTNTTRTPSPTSSDLARPNAGRSGRDTSSTEAASGAAAAAASSCGSAASQILLSIKPASRAINEPSNVRAKQNIIYAAKHEGDMSLRVSTAAEHNSSSLKQNPAAAVAQDHAKKFIAVPARLQTRCGAIRAKELVDYSSGASSAVSELDDADKEVRNLTSRAFRSLAYPYFEALNISSRESSTTLSEVGFGRWSTFLDLKCGGVGARVEQSLLRSSAASVAAGLRKGSGARATADQLYIQSKKSQTKALEFVVSKVEGEIKHVETPLCFQKQVQTGSRVVTLLEPLNVRSESKASSAPGPGRATKGPGKGPGSAYTDDGSETSEGSKPTSRADGPQKSKFASSLLKNVISKKMQREHEFKMERGEVMDTSHHLSGTSKETEGARGSERQRERGLQRQSSRHSEAGSEYTVVSMSDAGGEGSVAGSKSPVFKASTPRERNAGPGRNFTDGHTEVCEIKKSASETVKGIFLRSQNSAFRSWKEKEAEKREEQAPIGKLKLPKGGDWRADLGEISASKNTIMSRLFVPNIQQTPKDKQPRKQATKYPAAQATSTAVIRPKAPEIKIRLGSVQQPSSDFNIAKLLTPKLAGGSASNLFKTIEDNSRAQQKLFRGDNLEKVPHFQVRDIRDKSKAQGPLHQVRDVRKLIKGSGDSSDKGSVTPEQGLTGPKPRQLSAAAGGSGSLSPMVITCQAVVNQREDSMDREPRESMGKGGGSRVLNSSSPEGTVLVHRASGRLPVATIAPNKPEQGSYLPVLKIVSKASTQKTPEKLKEEEVKEEGKATKPARNALEKLTAAVRSMEELYSFNRNEWKRKSDPLPMMMDSHVLSLIASEEREGVVVADGDHDKLSKRLGEVEERGTGNKAGVVLRGAPIERLQRRNSNPSAESVSARAAAFENLARERPRSLYIPPVHKDVERTQPLQPLPPLPSNRNVFTVSASSIQKTGGVAGKFPQGPSPESPSAAKGIKSQGLRSLKISPATRAPPDEVTNRKSGSNLEKSNSDCENYLTIPLKGSSAAGELLSRPGASREGPPNSSAATLCSLPPLSARSQVPSSSKGSQVSGTSRPAWRTKPDNPRETVAAPPGPQSPEHPPTTIYHQPPLPFTLQGAQPQVLCFSPPSMPAPAPAASAPVPTDPFQQAQPQQTQRKMLLDVTTGQYYLVDTPVQPMTRRLFDPETGQYVDVPMTSQQQAVAPMSISVPPLALSPGAYGPTYMIYPGFLPTVLPTNALQPTPIARAPRGSELSPMVAEPSSKEAAATFTEAPYFMASGQSPASSTSSAPAATSQLLGAKAFAQLHGKPVISITSQPLGPRIIAPPSFDGTTMSFVVEHR

SEQ ID NO: 170 - DNA, 2950 bp, Homosapiens
gcaggctgctgtctcacagagcgagaaggtgtcaggagcagcccagttgtgtctctctctctacctctgtgaagggcgcgaatgggcagagcagaacttctagaagggaagatgagcacccaggatccctcagatctgtggagcagatccgatggagaggctgagctgctccaggacttggggtggtatcacggcaacctcacacgccatgctgctgaagctcttctcctctcaaatggatgtgacggcagctaccttctgagggacagcaatgagaccaccgggctgtactctctctctgtgagggccaaagattctgttaaacactttcatgttgaatatactggatattcatttaaatttggctttaatgaattctcatctttgaaggattttgtcaagcattttgcaaatcagcctttgattggaagcgagacaggcactctgatggttctaaaacatccctacccaagaaaagtggaagaaccctccatttatgaatctgtccgggttcacacagcaatgcagacaggaagaacagaagatgaccttgtgcccacagcaccttctctgggcaccaaagaaggttacctcaccaaacagggaggcctggtcaagacctggaaaacaagatggtttactctgcacaggaatgaactgaaatacttcaaagaccagatgtcaccagaaccaattcggatcctagacctaacagaatgttcagctgtacaattcgattattcacaagaaagggtaaactgtttttgtttggtatttccattcaggacattttatctctgtgcaaagaccggagtagaagctgatgagtggatcaagatattacgctggaaattggtcaaggacaaaagctgtattttgtctgctctctgtatatctcccgaggagaagactgatcacaaataagaaaacagctcaaccaaggggaaggcacgatccgatctcggtcgttcatctttaaatagatctttcttgccaaggaatgctctggcccaggagcaaggtggaatgtttccctgacgctgtgatctgcagcaggcttcaaatgaaaaccgactaaggattttctttcaaaaacaaatcagaagcagatgctgattgggacccatataccacgttgctgactcacgttgctgcccttccatgatgttgccatctccttgagaacactgaagcaatcaccattctgatagaaagtgcttaaaccaccactcttaggtctgctcactcttagaacacacaatggaagaggaagggtttttgttttcactcattgtggtccccaagcctattgacactagttgcctagagtcccactgtgagtcatggtcagcctgtctgacatccaggttgtgctattaaccaagaaggaaacagatacttggaggcttagatgacttctgcaggatttatattcagatagaaaacatcaaatattttcaggggagaggtttttttttttaatttttccccctttatacaaaaaaaaagaacatttccaaaactaaaatagaaaatgcttgtggcatttattttctctttttaaaaggttcagaaatttggcaggtcctttgcttctaatgacaaaactgtgagagctagatgtcctatgggcaattaggtagtataataaaggtaaatgaaggtacaatttttaaaccattattttcaccctgttggggtaaatgttttaaagagtgagaaaacataaattgagaaagggtgataaagtaatagataacttttagtttaataataattattgttattatactactaataatagagcacttgtaagcactaagttatctttatccaacatttctccaaatggactgaaagaaacttttcaaggacagtgtattataacaatccctttcccagaattagttgtatagggttggcccaagagatgtaagaaaaatctcgcattgctccctaagcaccctgggccttattaaagagcaacttctatttccagtcgggggagtaacactaaagctacaagaaatatgtaataatgataggtaataatgtgttccaaagctttttcaaactagaataaggaggcaaatagaagaatgagatactgatgtccacagttcattggcagaatctaaccccttctgttatcttttttaatactatttttgtttagatagaagtttcaaagaagataaaaatgcttgaagagcctgagagtaaaaagattatgctgcaaagctatgatataaactgctcttgcagtccaaagggatacctgattaaagaagtttcttatttaaacatctcagacgcaaaaattacattaaatttttgtatatttcaacaacattttaaatgtattttgttatgtttgtattatataggataaagcaaatgtcaagttaaaatgtattgtgttgtttgtaaagtaagaagttactggccaggagcggcggctcatgcctgtaatcccaggactttggtaggccaagacaagcagatcacttgaggtcaggagttcaacatcagcctggccaacatgatgaaaccttgtctttactaaaaatacaaaaattagctgggcatggtggcaggcgcctgtaatcccagctactcaggaggctgaggcaggagaattgcttgaacccgggaggtggaggttgcagtgaaccaagatcgcggcgctgcactctagcctgggtgacagagtcagactccgtcccaaaaaaacaaacaaacaaaacaaaacaaaaaaaacagaagttacaaatgaatactcacggatatgtatagttttatgtttgttttcttagaaacaaatgtgtttctttgggtgggtaatattgtgttttactatgtttaccttttataaaacataacctgtttatttatattctttggctttgtttattaaaaagcatgattttgctgtgcatgtaccattttg

SEQ ID NO: 171 - protein, 280 aa, Homosapiens
MGRAELLEGKMSTQDPSDLWSRSDGEAELLQDLGWYHGNLTRHAAEALLLSNGCDGSYLLRDSNETTGLYSLSVRAKDSVKHFHVEYTGYSFKFGFNEFSSLKDFVKHFANQPLIGSETGTLMVLKHPYPRKVEEPSIYESVRVHTAMQTGRTEDDLVPTAPSLGTKEGYLTKQGGLVKTWKTRWFTLHRNELKYFKDQMSPEPIRILDLTECSAVQFDYSQERVNCFCLVFPFRTFYLCAKTGVEADEWIKILRWKLVKDKSCILSALCISPEEKTDHK

SEQ ID NO: 172 - DNA, 1416 bp, Homosapiens
ggaggggaggggcgcggccgccggacgcgccctcgcagcttccgccgggcccctccggaaatcccgtatcgtagggcgacggcggcttagaaagtgcttcctggagcgcagacgaggtcatgaatcatgtgacggtggcttgaggaggaacctgtctttaaagctgtccctgaagtgacagcggagagaaccaggcagcccagaaaccccaggcgtggagattgatcctgcgagagaagggggttcatcatggcggatgacctaaagcgattcttgtataaaaagttaccaagtgttgaagggctccatgccattgttgtgtcagatagagatggagtacctgttattaaagtggcaaatgacaatgctccagagcatgctttgcgacctggtttcttatccacttttgcccttgcaacagaccaaggaagcaaacttggactttccaaaaataaaagtatcatctgttactataacacctaccaggtggttcaatttaatcgtttacctttggtggtgagtttcatagccagcagcagtgccaatacaggactaattgtcagcctagaaaaggaacttgctccattgtttgaagaactgagacaagttgtggaagtttcttaatctgacagtggtttcagtgtgtaccttatcttcattataacaacacaatatcaatccagcaatctttagactacaataatacttttatccatgtgctcaagaaagggcccctttttccaacttatactaaagagctagcatatagatgtaatttatagatagatcagttgctatattttctggtgtagggtctttcttatttagtgagatctagggataccacagaaatggttcagtctatcacagctcccatggagttagtctggtcaccagatatggatgagagattctattcagtggatcagaatcaaactggtacattgatccacttgagccgttaagtgctgccaattgtacaatatgcccaggcttgcagaataaagccaactttttattgtgaataataataaggacatatttttcttcagattatgttttatttctttgcattgagtgaggaacataaaatggcttggtaaaagtaataaaatcagtacaatcactaactttcctttgtacatattattttgcagtatagatgaatattactaatcagtttgattattctcagagggtgctgctctttaatgaaaatgaaaattatagctaatgttttttcctcaaactctgctttctgtaaccaatcagtgttttaatgtttgtgtgttcttcataaaatttaaatacaattcgttattctgtttccaatgttagtatgtatgtaaacatgatagtacagccatttttttcatatgtgagtaaaaataaaatagtatttttaaaaataaaaaa

SEQ ID NO: 173 - protein, 124 aa, Homosapiens
MADDLKRFLYKKLPSVEGLHAIVVSDRDGVPVIKVANDNAPEHALRPGFLSTFALATDQGSKLGLSKNKSIICYYNTYQVVQFNRLPLVVSFIASSSANTGLIVSLEKELAPLFEELRQVVEVS

SEQ ID NO: 174 - DNA, 1698 bp, Homosapiens
aggaaacggaagaaggagcaagctatggaggggaacagggatgaggctgagaaatgtgtcgagatcgcccgggaggccctgaacgccggcaaccgcgagaaggcccagcgcttcctgcagaaggccgagaagctctacccactgccctcggcccgcgcactattggaaataattatgaaaaatggaagcacggctggaaatagccctcattgccgaaaaccatcaggtagtggcgatcaaagcaagcctaattgcacaaaggacagcacatctggtagtggtgaaggtggaaaaggctataccaaagaccaagtagatggagttctcagcataaacaaatgtaaaaattactatgaagtacttggagttacgaaagatgctggtgatgaagatttgaaaaaagcttatagaaagcttgctttgaagtttcatccagacaaaaaccatgcacctggagcaacagatgcttttaaaaagattggaaatgcttatgctgttttaagtaatccagaaaagcgaaaacagtatgacctcacgggcaatgaagaacaagcatgtaaccaccaaaacaatggcagatttaatttccatagaggttgtgaagctgatataactccagaagacttgtttaatatattttttgggggtggatttccttcaggtagtgtacattctttttcaaatggaagagctggttatagccaacaacatcagcatcgacatagtggacatgaaagagaagaggaaagaggagatggaggtttttctgtgtttatccagctgatgcccataattgtattgatcctcgtgtcattattaagccagttgatggtctctaatcctccttattccttatatcccagatctggaactgggcaaactattaaaatgcaaacagaaaacttgggtgttgtttattatgtcaacaaggacttcaaaaatgaatataaaggaatgttattacaaaaggtagaaaagagtgtggaggaagattatgtgactaatattcgaaataactgctggaaagaaagacaacaaaaaacagatatgcagtatgcagcaaaagtataccgtgatgatcgactccgaaggaaggcagatgccttgagcatggacaactgtaaagaattagagcggcttaccagtctttataaaggaggatgaactggaatttttatttataccttttagcgtactctttattttttctgtaagtaagtttggtttcatcatgagggatgaaggaaaagatttgatactgaaaactaaactgaatagttggttcctgaaatcttggactgtttatgacctactggctcctttaaatagtaactgaaaactaaaatggaatattttagttaacgcttctacaagtattttcattttaaaagcttacatgattcctaactaaagtgtcatgagaaaggattatcacacctgtagcaatttccagttttagtgattctccattttttcccttgtcatgtaaatatttatggaatgatcattttgtgtacatacaggttactgcttttttatttaaattcttttagtgtttagctccatgagacacttcagtttaaattgatggaataaatgttatatgacacatttacattttccttatcaaggtgtcaaatatgtggactttaaacaatgaaacttttccaaaaaaaaaaaaaaaaaaaaaaaaaaaaa

SEQ ID NO: 175 - protein, 379 aa, Homosapiens
MEGNRDEAEKCVEIAREALNAGNREKAQRFLQKAEKLYPLPSARALLEIIMKNGSTAGNSPHCRKPSGSGDQSKPNCTKDSTSGSGEGGKGYTKDQVDGVLSINKCKNYYEVLGVTKDAGDEDLKKAYRKLALKFHPDKNHAPGATDAFKKIGNAYAVLSNPEKRKQYDLTGNEEQACNHQNNGRFNFHRGCEADITPEDLFNIFFGGGFPSGSVHSFSNGRAGYSQQHQHRHSGHEREEERGDGGFSVFIQLMPIIVLILVSLLSQLMVSNPPYSLYPRSGTGQTIKMQTENLGVVYYVNKDFKNEYKGMLLQKVEKSVEEDYVTNIRNNCWKERQQKTDMQYAAKVYRDDRLRRKADALSMDNCKELERLTSLYKGG

SEQ ID NO: 176 - DNA, 4802 bp, Homosapiens
gagaaggttttactcttttagaaagcagcagattgtaaaaagtgtgacaaacacatgtagctgatgaaaaggagcatgatgaacaacagtatgaatgaaaataattatatgaatgataatttctcattcaggtgtgaaaacttaggtgaatgggtatatttggagcattacttcaaatacatagtcttcaggctgtccattggtgatgatgactgtaacttctggcttctcaagaatttcttctctaatatatgatgaaaaatttagtgcagaggagatatggtggagctggatacagctaagagttagtgaaataactgtttttcatgtctggcccccccttttttttttgtttgtctgtggcaattcttagctttatgaccctatctagagcactgcaaattttcacctactttgtctacagtatccagctgtctttttaagttgaccaggcttttgtgctcagtaattataaacaagacaatttagaggcttaatctggaacataattaaacatcctacacactcaaaccaagtagtaatggctttaggattgttcagtgtttaatttaccttttattttttgcattcaggtagtgtctgccatattcgtacctctccaccttgtctcacagtctgtttcacttctattaactgcttctcttctattccaaatgatttttagtactaactacattttcatgacagcattcatcacatttgatctgaacgtgactttttagatcctcaccatttctgctctcaaattgaaagtcatttgtccatccatccaacatatatggtgaacaaaacataatccctgccttcaaagaatctgtgatctagaagtgttatcagacaagtaaagaggcaactgtagtacacttcggtaattgttgggataaggctaagttcagaggatgtggggaggatataagaggggcagcaaacctagtcctgaggaatttggattcttaggaaaaggaagagctaagtcagggtccggagaagttgtagaaactagctaaccaagaagagaggcagagaaggtgtgctcagcaccaaaagcaattgcaaagatctaggaggtaagagagtcagcttcaatactgatggtaagaaagaaataggaagatgataggtcactttgaagtctgaagggtatccttttttctgtattccagttctgagacagcaagattttcaagtcagataaacagatttgaattcttaactgtgaggccttcctttattacttatttgaaatagaaggcctgcccttcctttctctgtttctattagcttctttatttttctccagatatttatcaccatatgatgtacattatattttacttatatatttgtttattgcttgtttttctcccaattgtaaatttaatgtgattttgactgttttattcaccactgtagcatctgaaattgtgcctaacagaaagtaaatggttagtaaatttttgttgaagaaataagtccttattctcatctgttacttggttatgtgaatttaggcaatttacttaaccattcaaagattggtttccttattggttaaataggaataatatctaccaaatgaggagtaaatgagataatttgtgtaaaataatcagtataataaaattctacaattctttatgtgaaatctttgtgaccaaatgcaatttggaattcagaattcttcatattttagaaaggtactaatatagtcggctctccacatctatgggttctgcatctgtggatttaaccaactttgaattgaaagtatttggtgaaaaataacaatacaacaataaaaaataatacaaattaaacaaccaatatagtgtaacaaccatttacgtagcatttacattgtcttaggtactatttataacctagagattatttaaagtacatgggaagatgtgtaaaggttgtatgtaaatactgtaccattttatatcagggatttgagcatctgtagattttggtattcaaggagggaggatcctggaactaatcccctgtggataccaagggatgacagtgtattttatattatacatcttagagtctagggcagcagtccataacaaatagtaacatttctacagcaaaacatacaggtattcacaattaaatgggataaatgaagattctgtagtagcttcacatcttttcggtcagatttttgcctagaggcaaaatctacagttgaattcagttttttatgcagtcaaattagttatagaataactttgatttttcagagctttatggatattggaacattgatatgggatggtggacctgtacctaacacacacataaacaaatgtaaaaattactatgaagtacttggagttacgaaagatgctggtgatgaagatttgaaaaaagcttatagaaagcttgctttgaagtttcatccagacaaaaaccatgcacctggagcaacagatgcttttaaaaagattggaaatgcttatgctgttttaagtaatccagaaaagcgaaaacagtatgacctcacgggcaatgaagaacaagcatgtaaccaccaaaacaatggcagatttaatttccatagaggttgtgaagctgatataactccagaagacttgtttaatatattttttgggggtggatttccttcaggtagtgtacattctttttcaaatggaagagctggttatagccaacaacatcagcatcgacatagtggacatgaaagagaagaggaaagaggagatggaggtttttctgtgtttatccagctgatgcccataattgtattgatcctcgtgtcattattaagccagttgatggtctctaatcctccttattccttatatcccagatctggaactgggcaaactattaaaatgcaaacagaaaacttgggtgttgtttattatgtcaacaaggacttcaaaaatgaatataaaggaatgttattacaaaaggtagaaaagagtgtggaggaagattatgtgactaatattcgaaataactgctggaaagaaagacaacaaaaaacagatatgcagtatgcagcaaaagtataccgtgatgatcgactccgaaggaaggcagatgccttgagcatggacaactgtaaagaattagagcggcttaccagtctttataaaggaggatgaactggaatttttatttataccttttagcgtactctttattttttctgtaagtaagtttggtttcatcatgagggatgaaggaaaagatttgatactgaaaactaaactgaatagttggttcctgaaatcttggactgtttatgacctactggctcctttaaatagtaactgaaaactaaaatggaatattttagttaacgcttctacaagtattttcattttaaaagcttacatgattcctaactaaagtgtcatgagaaaggattatcacacctgtagcaatttccagttttagtgattctccattttttcccttgtcatgtaaatatttatggaatgatcattttgtgtacatacaggttactgcttttttatttaaattcttttagtgtttagctccatgagacacttcagtttaaattgatggaataaatgttatatgacacatttacattttccttatcaaggtgtcaaatatgtggactttaaacaatgaaactttttcaaaaagaaaaaacaaaaactttaactttgtgtaaaatcttatagtattatcagcttagagggaattgatatttttaatattgccgttatattccaaaatatatattgagataaatgaactggtgtagaatatcagtttgctatttagttttatgaattactatacatatacatgcatagaaatgaaatgctatactgataaattttaaagaaaatatgaggaagtggctataaatattaaactaaaagggtcttcaacagtaaagtgcagttatgtcatttaaaattccaatactttaaaggccaccaaattttgatgtatatgtccttgaagggctgctaaaatttatgaagaggactcacattttcccccatagaaatttgcagtttcttggtgatcatttaagcaggatccaaagaagttcctttacaaataagtaataagaaaaatgagtactaaaatacagctttgtgccttttaaccctatgccaactcctaaacatataagtagattacagtatacttatctgatcagagcatgatctgtttggccacatgcaagtgtgagcagaaatagagcagcacgtagaatagtaacttaaagcaagtcatcctttaaaaattctgagctaaaatctatttaccattgagtaattgaattaatcccataggaataagctccttgtaagtaaatccatgatatgaattagaaaaaaaaacagctggaaattgaagtttttgatgcctgtatactgggtatgaaactatttgatttctagtcttctgtgtttagcagttgtaatattttaatgattttgcttcatactcggttaatggaacataaacatatctttgatacttctttgtgagtgagagaatgctagatagggtggctttgttctttgtttaagttttttttcctgaatgtagttaatttatggcatctgttgaataaaactgctaaaatgacctcttaaaaatgttctgttgtatccccttttccaggtgaatcaatagaaatgcctgattgaattagtaggttaaactaaacaacatactgtcataggaaaactggagagcttaaccaacttgctcttagaaatgttaccttaaaaaaaaaaaaaaaaaaa

SEQ ID NO: 177 - protein, 294 aa, Homosapiens
MDIGTLIWDGGPVPNTHINKCKNYYEVLGVTKDAGDEDLKKAYRKLALKFHPDKNHAPGATDAFKKIGNAYAVLSNPEKRKQYDLTGNEEQACNHQNNGRFNFHRGCEADITPEDLFNIFFGGGFPSGSVHSFSNGRAGYSQQHQHRHSGHEREEERGDGGFSVFIQLMPIIVLILVSLLSQLMVSNPPYSLYPRSGTGQTIKMQTENLGVVYYVNKDFKNEYKGMLLQKVEKSVEEDYVTNIRNNCWKERQQKTDMQYAAKVYRDDRLRRKADALSMDNCKELERLTSLYKGG

SEQ ID NO: 178 - DNA, 951 bp, Homosapiens
attggtgggatgagcaatccgagttcccggatgagggaacattctgcagtataaagggagcagggaaggcgggagacagcgcagtttgaatcgcggtgcgacgaaggagtaggtggtgggatctcaccgtgggtccgattagccttttctctgccttgcttgcttgagcttcagcggaattcgaaatggctggcggtaaggctggaaaggactccggaaaggccaagacaaaggcggtttcccgctcgcagagagccggcttgcagttcccagtgggccgtattcatcgacacctaaaatctaggacgaccagtcatggacgtgtgggcgcgactgccgctgtgtacagcgcagccatcctggagtacctcaccgcagaggtacttgaactggcaggaaatgcatcaaaagacttaaaggtaaagcgtattacccctcgtcacttgcaacttgctattcgtggagatgaagaattggattctctcatcaaggctacaattgctggtggtggtgtcattccacacatccacaaatctctgattgggaagaaaggacaacagaagactgtctaaaggatgcctggattccttgttatctcaggactctaaatactctaacagctgtccagtgttggtgattccagtggactgtatctctgtgaaaaacacaattttgcctttttgtaattctatttgagcaagttggaagtttaattagctttccaaccaaccaaatttctgcattcgagtcttaaccatatttaagtgttactgtggcttcaaagaagctattgattctgaagtagtgggttttgattgagttgactgtttttaaaaaactgtttggattttaattgtgatgcagaagttatagtaacaaacatttggttttgtacagacattatttccactctggtggataagttcaataaaggtcatatcccaaacaaaa

SEQ ID NO: 179 - protein, 128 aa, Homosapiens
MAGGKAGKDSGKAKTKAVSRSQRAGLQFPVGRIHRHLKSRTTSHGRVGATAAVYSAAILEYLTAEVLELAGNASKDLKVKRITPRHLQLAIRGDEELDSLIKATIAGGGVIPHIHKSLIGKKGQQKTV

SEQ ID NO: 180 - DNA, 5190 bp, Homosapiens
atggacttagcaccagacagggctactggccgcccgtggctcccgttgcacactctatcagtatctcagctccttcgagtgttttggctactgtcattgcttccggggcaggcctgggtccacggggccgagccgcgccaggtgttccaagtgctggaagagcaacctccaggcactctggtaggcaccatccagacgcgccccggcttcacctacaggctcagcgaaagccacgccctgtttgccataaacagtagcaccggagccctgtacaccacctccaccatcgaccgcgagagcctgcccagcgacgtgatcaacctggtggtcctttccagcgcgcccacctaccccaccgaagtgcgagtgctggtgcgggacctcaatgacaacgcccccgttttcccggacccctctatcgtggtcactttcaaggaagacagtagcagcggacgccaagtcatcttagacaccgccaccgactcggacatcggctcaaacggtgtggaccaccgctcctaccgcatcatccgcggcaatgaggcggggcgcttccgtctggacatcaccctgaacccgagcggcgagggagcgttcctgcatctggtgtccaagggcggactggaccgtgaggtcactccgcagtaccagctcctggttgaggtggaggacaagggtgagcctaagcggcggggctaccttcaggtaaacgtgactgtgcaagacattaatgacaaccccccggtttttggcagttctcactaccaggcgggggtgcctgaggacgcggttgtgggttccagcgtcctccaggtggcggcggcggacgcggacgagggcaccaacgcggacatccgctatcgcctgcaggacgaggggacccccttccaaatggaccctgagacgggacttatcacggtgcgggagcccctggacttcgaagctcggcgccaatactcgcttacggtgcaggcgatggacagaggcgtgccttccctcactgggcgcgccgaggcgctgattcagctgctggacgtgaatgacaatgacccggtagtgaagttccgctacttcccggccacctcgcgctacgcctcggtagatgagaatgctcaagtgggcaccgtggtggctctgctcaccgtgacggacgcagattctcccgcggccaacgggaacatctccgtgcaaattctcgggggcaatgagcagcgccactttgaagtgcaaagcagcaaagtgccgaacctgagcctaatcaaggtggccagcgccttggaccgcgagcgcatcccttcctacaacctcacagtttccgtctctgataactacggggcgccccctggcgcagcagtccaggcgcgctcttctgtggcaagcctggtgatttttgttaatgacatcaatgaccatcctcctgtcttttcacagcaagtgtacagagtgaacctgagcgaggaggcgcctccgggaagctatgtgagtgggatatctgccactgatggcgactctggtctcaatgctaatctgcgttacagcattgtctctggcaatggactgggatggttccatatcagtgaacatagcggcctcgtgaccactgggtcctctgggggcctggaccgtgaacttgcttcccagattgttctgaatataagtgcccgggaccagggagttcaccccaaggtgtcctatgcccagcttgtagtaactctcctagatgtgaatgatgaaaagccagtatttagccagccagaagggtatgatgtgtctgtggttgagaatgccccaacagggacagaactgttgatgctcagggcaactgacggggacctgggtgacaacggaacagtgcgcttctccttacaagaggcagagactgaccggaggtccttccgtctggatcctgtgtctgggaggttgagtactatttcctccttggacagagaagagcaagccttctactccctgttggttctggccacagatctgggctcccctccccagtcatcaatggctcgcataaatgtgagtcttctggatataaatgataacagccctgtcttctacccggtccaatactttgctcacattaaggagaatgagcctggaggtagctacatcaccactgtgtctgccactgacccagacttgggtaccaatggtactgtcaaatatagcatatctgctggggacaggtctcggtttcaggtcaatgctcagagtggggttatttctacaagaatggccctagacagagaagaaaaaacagcttatcagttgcaaatagtagctactgatggtggcaatttacaatctcccaaccaggcaatagtaaccatcactgtattggacactcaagacaacccacctgtattcagtcaggttgcctacagctttgtggtttttgagaacgtggcgctgggatatcatgtgggtagtgtgtctgcatccaccatggatctcaattccaacatcagttatctcattactactggggatcagaaaggtatgtttgctatcaaccaggtcactgggcagcttaccacagcaaatgtgattgatagagaagagcaatccttttatcagctgaaggtagtggccagtgggggcacagtgactggagacactatggttaacataacagttaaggatttgaatgacaactctccccatttccttcaggcaatagagagtgtaaatgtggtggagaattggcaggcaggtcacagcattttccaggccaaagctgtggaccctgatgaaggtgtcaatggcatggtactctatagtctgaagcaaaaccccaagaacctgtttgctatcaatgaaaagaatggcactattagtctgcttgggcccctggatgttcatgctggctcctaccaaatagagatcttggcatctgacatgggtgtcccacagctctcctctagtgtcatcttaacagtttatgtccatgatgtaaatgacaattcaccagtgtttgaccaactctcttatgaagtcaccctttctgagtcagaacctgtgaattctcgattctttaaagtacaagcttctgataaggattcaggagcaaatggtgaaattgcatacaccattgctgaaggaaatacaggggatgcttttggcatattcccagatggtcaattgtatataaaaagtgaactggaccgtgaacttcaagacagatatgttttaatggttgttgcttctgacagagcagtggaaccccttagtgctactgtgaatgttactgtaattttagaagatgtaaatgataacagacctctttttaacagtaccaattacacattttacttcgaagaagagcagagggctgggtcgtttgtgggcaaagtaagtgctgtagataaagactttgggccaaatggagaagtaaggtattcttttgaaatggtgcagccagattttgagttgcatgccatcagtggggaaattacaaatactcatcagtttgacagggagtctcttatgaggcggagagggactgctgtgtttagctttacagtcatagcaacagatcaggggatccctcagcctctcaaggatcaggccactgtacatgtttacatgaaggatataaatgataatgctcccaaatttttaaaagacttttaccaagctacaatatcagaatcagcagccaatctgacacaagtgttaagagtatctgcctcagatgttgatgaaggtaataatggacttattcactattctataataaaaggaaatgaagaaagacagtttgctatagacagtacctctggtcaggtaacactaattggcaaattagactatgaagcaacacctgcctattcccttgtaattcaagcagtggattcagggacaatccccctcaattcaacgtgtactttaaatattgatattttagatgaaaatgacaataccccttctttccctaaatcaacactctttgttgatgttttggaaaacatgagaattggtgaactcgtgtcctctgttactgcaactgattccgattcaggtgacaatgctgatttatattacagtattactgggactaacaaccacggaacttttagcattagcccaaacactgggagtatttttcttgccaaaaaactggactttgaaacacagtctttgtataaattaaatataacagcaaaagaccaaggaagacctcctcgttcatctacaatgtcagtggttattcacgtgagggactttaatgacaatcctcctagctttcctcctggagatattttcaagtctattgttgagaacattcccatcggtacatctgtcatttcagtgactgcacatgaccctgatgcagacattaatggtcaactatcctacacaatcattcaacagatgccaagaggcaaccactttaccatagatgaagtcaaagggactatatatactaatgctgaaatagatcgggaatttgctaatctctttgagttgactgtaaaagccaatgatcaagctgtgccaatagaaactagacggtatgctttgaagaacgtgaccattttggttacagacctcaatgacaatgtcccaatgtttatatcacaaaacgcccttgctgcagacccatcagctgtgattggttccgttctgacaacaattatggctgctgacccagatgaaggtgctaatggagaaatagagtatgagatcatcaatggggacacagacaccttcattgttgatcgttatagtggagacctgagagtggcttcagcgttggtgccttcacagttgatctacaatctcatagtttcagcaacagaccttgggcctgaaaggaggaaatcgaccactgaattgaccatcattcttcagggccttgatggacctgtttttactcaacccaaatatataactattttgaaggaaggagaacccattggcacaaacgtgatatcaatagaagcagctagccccagaggatctgaggccccagtggagtattatattgtttcagttcgttgtgaagaaaaaactgttggacgcctctttactattggacgacatactggtataattcagaccgcagccattctggaccgggagcaaggagcatgtctttacctggtggatgtttatgccatagaaaaatcaactgcttttcccagaacacagagagcagaggtaatgattttgtag

SEQ ID NO: 181 - protein, 1729 aa, Homosapiens [sequence omitted]

SEQ ID NO: 182 - DNA, 8192 bp, Homosapiens
atggtaacaacggtagtggcagtgggtgataccttagctcaaccattagctgcagctgaagtgtttattgtagaaataacacttcaggatatcaatgacaatccaccagtatttccaacggacatgctggatctcacggtagaggagaacattggagatggctctaagattatgcagctgacagccatggatgctgatgagggtgcaaatgctctcgtcacatacactatcattagtggagctgatgatagttttcgcatcgacccagaatccggagatctgatagcaaccaggcggttggacagggaacgccgctccaaatattcactgctagttcgtgctgatgatggtcttcagtcctcggatatgagaattaatatcactgtcagtgatgtgaatgaccatacacccaaattttccagacccgtgtactcttttgacattcctgaggacacaatccctggttctttggtagcagccattttagccacggatgatgactctggtgtgaatggagaaattacatatattgtgaatgaagatgatgaagatggcatctttttcctgaatcctattactggggtctttaatttgactcgattattagattatgaagtacagcaatattatatcctcactgttcgagcagaagatggtgggggacaatttactaccatcagagtttatttcaatattctagatgtaaatgataatccacctattttcagcttgaattcatacagcacatctttaatggagaatctacctgtgggatctactgttcttgtgtttaatgttactgatgcagatgatggcatcaactctcaattgacttatagcattgcttcaggtgatagccttgggcagtttactgttgacaagaatggtgtactcaaagtcctaaaagctttggatcgggaaagtcagtccttctacaacttggttgttcaagtgcatgacctgccacagattccagcctccagattcacaagcactgctcaagtctccattattttgttggatgtaaatgataacccaccgacatttctttcccctaaattgacatacattccagaaaatacacctattgatactgttgttttcaaagctcaagcaactgacccagatagtggcccaaacagctatattgagtacactctgctgaaccctttgggaaacaagttcagtattgggaccattgatggtgaagtgaggctcactggagaactggacagagaagaagtttctaattatactctaacagtggtggctacagacaaaggtcaaccatctctctcttcatctacagaggttgtagttatggtacttgacatcaatgataacaaccccatctttgcacaagctttgtataaagtggagattaatgaaaacacacttactggaacagatataatacaagtgttcgcagcagatggagatgaaggcacaaatggacaggttcgctatggcattgttaatggtaataccaatcaggaatttcggatagactctgtcacaggtgccatcactgtcgctaaacctttggatagagaaaagacccctacctaccatttaactgttcaggcaacagatcgaggcagcacacccagaactgatacctccacggtcagcattgttctactggatattaatgactttgttcctgtatttgagctatctccatattctgtaaatgtccctgagaatttagggacactacccagaacaattcttcaggtggtggcaagagatgatgatcgaggatctaacagcaaactctcatatgttctgtttggtggtaatgaagacaatgcttttactctctcagccagtggagaacttggagtaacacagagtctggatcgggaaacaaaagagcgctttgtcttaatgattacagctacagattcaggatcccctgccttgactggaactggaacaatcaacgtcatagtagatgatgtcaatgacaatgtccccacatttgccagtaaagcgtatttcacaacaattcctgaggatgcaccaactggaacagatgttttattggtaaatgcctcagatgctgatgcttcaaagaatgcagttataaggatcatcggtggaaactctcagttcacgatcaacccatcgacaggacaaatcatcaccagcgcattgttagatagggaaacaaaagataattatactttggtagtggtctgcagtgatgcgggatccccagagcctctttccagttccaccagtgtgcttgtcactgtgactgatgtcaatgacaatccaccaagatttcagcatcacccatatgtcactcacatcccatctcctactcttccaggttcctttgtctttgcggttacagtcacagatgctgatattggaccaaattctgaactgcattattctctttcgggtagaaattctgaaaaatttcacattgacccactgaggggagccattatggccgccggaccactaaacggagcttcagaagtgacattttctgtgcatgtaaaagatggtggctcatttccaaagacagattctacaacagtgactgttagattcgtgaataaggccgatttccctaaagtgagagccaaagaacaaacgttcatgtttcctgaaaaccaaccagtcagctctcttgtcaccaccatcacaggatcctctttaagaggagaacctatgtcatattatatcgcaagtgggaatcttggcaatactttccagattgatcagttaacagggcaggtgtctattagtcaacctctggattttgaaaagatacaaaaatatgttgtatggatagaggccagagacggtggtttccctcctttctcctcttacgagaaacttgatataacagtattagatgtcaatgataatgccccaatttttaaggaagacccatttatatctgaaatattggaaaacctttcccctcgaaaaatacttactgtttcggcaatggacaaggacagtggacccaatggacagttagattatgaaattgttaatggcaacatggaaaatagtttcagtatcaatcatgctactggtgaaattagaagcgttagacctttggacagggaaaaagtatctcattatgtcctaaccataaaatcatcagacaaagggtccccgtctcagagtacttcagtaaaagtcatgattaacattttagatgaaaatgataatgcccctaggttttctcagatatttagtgcccatgttcctgaaaattcccccttaggatacacagttacccgtgtcacaacttctgatgaagacattgggatcaatgcaattagtagatattctataatggatgcaagtcttccatttacaattaatcccagcacaggggatattgtcataagcagacctttaaatagggaagatacagaccgttacagaattcgagtttccgcacatgattctgggtggactgtaagtacagatgtcacaatatttgtgacagacatcaatgacaatgctccaagatttagcagaacttcctattatttagattgccctgaacttactgagattggctccaaagtaactcaggtatttgcaacagatcctgatgagggatcaaatggacaagtgttttatttcataaaatcccaatcagaatatttcaggattaatgccaccactggagagattttcaataaacagatcttaaaataccaaaatgtcactggcttcagtaatgtgaatatcaacaggcatagttttatagtgacatcttcagatcgaggtaaaccttccttaattagtgagacaacagttaccatcaatatagtggacagtaatgacaatgcacctcaatttcttaaaagtaaatatttcactccagtcaccaaaaatgttaaggttggtacgaagttaatcagagttacagcaatagatgacaaagattttggactgaattcagaagtggagtatttcatttctaatgataaccatttaggaaaatttaagttggacaatgatacggggtggatttcagtagcatcctccctgatttctgacttgaaccaaaacttttttatcacagtcactgcaaaggataagggaaaccctccactttcttcccaagcaactgttcacataactgtcactgaggaaaactaccatacacctgaattctctcaaagccacatgagtgcaaccatccctgagagccatagcattgggtccattgtcagaactgtttctgcaagagatagagatgcagcgatgaatggcttgattaagtacagcatttcttcaggaaatgaagaaggcatttttgcaatcaattcttctacaggtatattaacactagccaaagctcttgattatgagctatgccagaaacacgaaatgacgattagtgctatagatggaggatgggttgcaagaactggttactgcagtgtgaccgtaaatgtgattgatgtgaatgataattctccagtattcctctctgatgactatttccctactgttttggaaaatgccccaagtggaacaacagttatccacctaaatgcaacagatgctgactctggaacaaatgctgtgattgcgtatactgtacagtcatctgacagtgacctctttgtcattgaccctaacacaggagtcataaccactcaaggcttcttggattttgaaaccaagcagagctaccatcttactgtgaaagccttcaatgtccccgatgaggaaaggtgtagctttgccactgttaatatacaattaaaagggacaaatgaatatgtgccccgttttgtttccaaactttactattttgaaatctcagaagcagctcctaaaggtactattgttggagaagtgtttgctagcgaccgtgatttgggcactgatggggaggtacactatttgatttttggtaatagtcgaaagaagggtttccagatcaataagaagactggacagatttatgtttctggaattcttgatcgagaaaaagaagaaagggtgtctttgaaggtattggccaagaactttggcagcattagaggtgcagatatagatgaggtcactgtaaatgtcaccgtgcttgatgcaaatgacccacccatttttactctaaacatctacagtgtgcagatcagtgaaggggtcccaataggaactcatgtgacctttgtcagtgcctttgactcagactccatccccagctggagcaggttttcttacttcatcggatcagggaatgaaaatggtgccttttctattaatccgcagacaggacagatcaccgttactgcagaattagatcgagaaacccttcccatctataatctctcagttttggctgttgattcagggaccccctcagctacaggtagtgcctctttattagtcaccctggaagatataaatgataacgggcccatgctgactgtcagtgaaggagaagtcatggaaaacaaacggccaggcactttggtgatgacccttcagtccactgaccctgatctccctccaaatcaaggtccctttacttattacttgctgagcacaggtcctgccaccagttatttcagtctgagcactgctggagttctgagcacaaccagagagattgacagagagcagattgcagacttctatctgtctgtggttaccaaggattctggtgttcctcaaatgtcttccacaggaactgtgcatatcacagttatagaccaaaatgacaatccttcacagtctcggacggtggagatatttgttaattattatggtaacttgtttcccggtgggattttaggctctgtgaagccacaggatccagatgtgttagacagcttccactgctcccttacttcaggagttaccagcctcttcagtattccagggggtacttgtgatctgaattcccagccaaggtccacagatggcacgtttgatctgactgtccttagcaatgatggagttcacagcacagtcacgagcaacatccgagttttctttgctggattttccaatgccacagtggataacagcatcttacttcgtctcggcgtaccaacagtaaaggacttcttgaccaaccactatcttcattttttacgcattgccagctcacagctgacaggcttagggactgctgtgcaactgtacagtgcatatgaagagaacaatagaacgtttcttttggcagctgtgaagcgaaatcataatcagtatgtgaatcccagtggcgtagccaccttctttgaaagcatcaaagagatccttctccggcagagtggagtaaaggtggaatctgtggatcatgactcctgtgtgcatggcccatgtcagaatggagggagctgtctacgaagattggctgtgagctccgtattaaaaagccgtgagagtcttccagtcatcatcgtggcaaatgaacctctgcagcctttcttatgcaagtgtctgccaggatatgcgggtagctggtgtgaaatagatatagatgaatgtcttccatcaccttgccacagtggtggaacctgtcacaatttagtgggaggattttcatgcagctgcccagatggcttcactggtagggcgtgtgagagagatatcaatgagtgcctgcagagtccttgcaagaatggtgccatctgccagaattttccaggaagcttcaactgtgtttgcaaaactggatacacaggtgtctttggaaaacactgcgagttgaacagttatggatttgaggagttatcatacatggaatttccaagcttggaccccaataacaactatatttatgtcaaatttgccacgattaaaagtcatgccttattgctttacaactatgacaaccagacaggcgaccgggctgagtttttggcccttgaaattgccgaagaaagactaagattctcttataatttaggcagtggtacatataagctcaccaccatgaagaaggtgtcagatggacattttcacactgtgattgccaggagagcaggaatggcagcctccttaactgtggactcctgttctgagaaccaagagccaggatattgtactgtcagtaatgtggcagtttcagatgactggactcttgatgttcagccaaatagagttacagttggaggtatcagatctctagaaccaatccttcagagaagaggacacgtggaaagccatgattttgttgggtgtataatggagtttgcagtcaatggaaggcctctggaacccagccaagctttggcagcacaaggcatcctagatcagtatggcgattttatttcttactgttttaaagaaaaaaaatgcaaaaaagtatgcttcactgttactcctgacactgccttatcattagaaggcaaagggcgcttggactaccacatgagtcagaatgagaagcgggaatatttgttaaggcaaagcttacgaggtgccatgttggagccttttggtgtgaacagtctggaagtaaaatttaggaccagaagcgagaatggcgttttaatccatatccaagaaagcagcaattacactactgtgaagattaagaatggcaaagtatattttacatccgatgcaggaattgctgggaaagtggagagaaatattcctgaagtatatgttgcagacggccactggcacacttttctaattgggaaaaatggaacagcaacagtattgtctgttgacagaatatataacagagatattatccaccctactcaggacttcggtggccttgatgtgcttactatatcacttggaggaattccacccaatcaagcacatcgagatgcccaaacagcaggttttgatggctgcattgcttctatgtggtatggtggagaaagtcttcctttcagcgggaagcatagcttggcctccatctcaaaaacagatccctcagtgaagattggctgccgtggcccgaacatttgtgccagcaacccctgctggggtgatttgctgtgcattaatcagtggtatgcctacaggtgtgtccctcctggggactgtgcctcccacccgtgccagaatggtggcagctgtgagccaggcctgcactccggcttcacctgtagctgcccagactcgcacacgggaaggacctgtgagatggtggtggcctgtcttggcgtcctctgtcctcaggggaaggtgtgcaaagctggaagtcctgcggggcatgtctgtgt

SEQ ID NO: 183 - protein, 3222 aa, Homosapiens
MVTTVVAVGDTLAQPLAAAEVFIVEITLQDINDNPPVFPTDMLDLTVEENIGDGSKIMQLTAMDADEGANALVTYTIISGADDSFRIDPESGDLIATRRLDRERRSKYSLLVRADDGLQSSDMRINITVSDVNDHTPKFSRPVYSFDIPEDTIPGSLVAAILATDDDSGVNGEITYIVNEDDEDGIFFLNPITGVFNLTRLLDYEVQQYYILTVRAEDGGGQFTTIRVYFNILDVNDNPPIFSLNSYSTSLMENLPVGSTVLVFNVTDADDGINSQLTYSIASGDSLGQFTVDKNGVLKVLKALDRESQSFYNLVVQVHDLPQIPASRFTSTAQVSIILLDVNDNPPTFLSPKLTYIPENTPIDTVVFKAQATDPDSGPNSYIEYTLLNPLGNKFSIGTIDGEVRLTGELDREEVSNYTLTVVATDKGQPSLSSSTEVVVMVLDINDNNPIFAQALYKVEINENTLTGTDIIQVFAADGDEGTNGQVRYGIVNGNTNQEFRIDSVTGAITVAKPLDREKTPTYHLTVQATDRGSTPRTDTSTVSIVLLDINDFVPVFELSPYSVNVPENLGTLPRTILQVVARDDDRGSNSKLSYVLFGGNEDNAFTLSASGELGVTQSLDRETKERFVLMITATDSGSPALTGTGTINVIVDDVNDNVPTFASKAYFTTIPEDAPTGTDVLLVNASDADASKNAVIRIIGGNSQFTINPSTGQIITSALLDRETKDNYTLVVVCSDAGSPEPLSSSTSVLVTVTDVNDNPPRFQHHPYVTHIPSPTLPGSFVFAVTVTDADIGPNSELHYSLSGRNSEKFHIDPLRGAIMAAGPLNGASEVTFSVHVKDGGSFPKTDSTTVTVRFVNKADFPKVRAKEQTFMFPENQPVSSLVTTITGSSLRGEPMSYYIASGNLGNTFQIDQLTGQVSISQPLDFEKIQKYVVWIEARDGGFPPFSSYEKLDITVLDVNDNAPIFKEDPFISEILENLSPRKILTVSAMDKDSGPNGQLDYEIVNGNMENSFSINHATGEIRSVRPLDREKVSHYVLTIKSSDKGSPSQSTSVKVMINILDENDNAPRFSQIFSAHVPENSPLGYTVTRVTTSDEDIGINAISRYSIMDASLPFTINPSTGDIVISRPLNREDTDRYRIRVSAHDSGWTVSTDVTIFVTDINDNAPRFSRTSYYLDCPELTEIGSKVTQVFATDPDEGSNGQVFYFIKSQSEYFRINATTGEIFNKQILKYQNVTGFSNVNINRHSFIVTSSDRGKPSLISETTVTINIVDSNDNAPQFLKSKYFTPVTKNVKVGTKLIRVTAIDDKDFGLNSEVEYFISNDNHLGKFKLDNDTGWISVASSLISDLNQNFFITVTAKDKGNPPLSSQATVHITVTEENYHTPEFSQSHMSATIPESHSIGSIVRTVSARDRDAAMNGLIKYSISSGNEEGIFAINSSTGILTLAKALDYELCQKHEMTISAIDGGWVARTGYCSVTVNVIDVNDNSPVFLSDDYFPTVLENAPSGTTVIHLNATDADSGTNAVIAYTVQSSDSDLFVIDPNTGVITTQGFLDFETKQSYHLTVKAFNVPDEERCSFATVNIQLKGTNEYVPRFVSKLYYFEISEAAPKGTIVGEVFASDRDLGTDGEVHYLIFGNSRKKGFQINKKTGQIYVSGILDREKEERVSLKVLAKNFGSIRGADIDEVTVNVTVLDANDPPIFTLNIYSVQISEGVPIGTHVTFVSAFDSDSIPSWSRFSYFIGSGNENGAFSINPQTGQITVTAELDRETLPIYNLSVLAVDSGTPSATGSASLLVTLEDINDNGPMLTVSEGEVMENKRPGTLVMTLQSTDPDLPPNQGPFTYYLLSTGPATSYFSLSTAGVLSTTREIDREQIADFYLSVVTKDSGVPQMSSTGTVHITVIDQNDNPSQSRTVEIFVNYYGNLFPGGILGSVKPQDPDVLDSFHCSLTSGVTSLFSIPGGTCDLNSQPRSTDGTFDLTVLSNDGVHSTVTSNIRVFFAGFSNATVDNSILLRLGVPTVKDFLTNHYLHFLRIASSQLTGLGTAVQLYSAYEENNRTFLLAAVKRNHNQYVNPSGVATFFESIKEILLRQSGVKVESVDHDSCVHGPCQNGGSCLRRLAVSSVLKSRESLPVIIVANEPLQPFLCKCLPGYAGSWCEIDIDECLPSPCHSGGTCHNLVGGFSCSCPDGFTGRACERDINECLQSPCKNGAICQNFPGSFNCVCKTGYTGVFGKHCELNSYGFEELSYMEFPSLDPNNNYIYVKFATIKSHALLLYNYDNQTGDRAEFLALEIAEERLRFSYNLGSGTYKLTTMKKVSDGHFHTVIARRAGMAASLTVDSCSENQEPGYCTVSNVAVSDDWTLDVQPNRVTVGGIRSLEPILQRRGHVESHDFVGCIMEFAVNGRPLEPSQALAAQGILDQYGDFISYCFKEKKCKKVCFTVTPDTALSLEGKGRLDYHMSQNEKREYLLRQSLRGAMLEPFGVNSLEVKFRTRSENGVLIHIQESSNYTTVKIKNGKVYFTSDAGIAGKVERNIPEVYVADGHWHTFLIGKNGTATVLSVDRIYNRDIIHPTQDFGGLDVLTISLGGIPPNQAHRDAQTAGFDGCIASMWYGGESLPFSGKHSLASISKTDPSVKIGCRGPNICASNPCWGDLLCINQWYAYRCVPPGDCASHPCQNGGSCEPGLHSGFTCSCPDSHTGRTCEMVVACLGVLCPQGKVCKAGSPAGHVCVLSQGPEEISLPLWAVPAIVGSCATVLALLVLSLILCNQCRGKKAKNPKEEKKPKEKKKKGSENVAFDDPDNIPPYGDDMTVRKQPEGNPKPDIIERENPYLIYDETDIPHNSETIPSAPLASPEQEIEHYDIDNASSIAPSDADIIQHYKQFRSHTPKFSIQRHSPLGFARQSPMPLGASSLTYQPSYGQGLRTSSLSHSACPTPNPLSRHSPAPFSKSSTFYRNSPARELHLPIRDGNTLEMHGDTCQPGIFNYATRLGRRSKSPQAMASHGSRPGSRLKQPIGQIPLESSPPVGLSIEEVERLNTPRPRNPSICSADHGRSSSEEDCRRPLSRTRNPADGIPAPESSSDSDSHESFTCSEMEYDREKPMVYTSRMPKLSQVNESDADDEDNYGARLKPRRYHGRRAEGGPVGTQAAAPGTADNTLPMKLGQQAGTFNWDNLLNWGPGFGHYVDVFKDLASLPEKAAANEEGKAGTTKPVPKDGEAEQYV

SEQ ID NO: 184 - DNA, 2937 bp, Homosapiens
caatttcagagtgggatatcagatctttagtgtgaagatacatctacattaaaccaggaatcactagaactgacatttggacaagaaaatttggaaaattttaaaactgtgaaggttgatcatggaaattaaagaggaaggggcatcagaagaagggcagcactttcttcctacagcccaggccaatgatcccggggactgtcagttcacaagtatccagaagactccaaatgaaccgcagttggaattcatccttgcatgcaaggatctcgtggctcctgtccgtgatcgtaaactgaatacactggtgcagatctccgtaatccaccccgtggagcagagtctgacaagatactccagcaccgaaattgtggagggaacaagggacccactgtttttgactggtgtcacattcccatctgagtatcccatctatgaggagaccaaaataaaactaacagtctatgatgtcaaggataagtctcatgacaccgttcgaaccagtgtcctaccagaacataaggatcccccgccagaagttggccgaagtttcttgggctatgccagttttaaagtgggagagctgctgaagtcaaaggagcaattgctggtcctgagcctgagaacttcagatggtggcaaagtggttggcaccatagaagtcagtgtcgtgaagatgggggagattgaggatggggaagccgaccacatcaccacagatgtacagggacaaaagtgtgccctggtatgtgaatgtacagccccggaaagtgtgagcggaaaagataacttaccttttttgaattcagtgttaaagaacccagtatgtaaattatatagatttcccacatctgacaataagtggatgcgaattcgagagcagatgtcagagagcattctttcctttcatattcctaaggaattgatttcccttcacattaaagaagatttgtgcagaaaccaggagataaaagaacttggtgagctttctccacattgggacaatctgcgaaaaaatgtccttacgcactgtgatcaaatggtgaatatgttccaagacattctgacagaacttgccaaggaaacagggtcctctttcaaatcaagcagcagcaaaggagagaaaacattagaatttgttccaataaatctacatctgcaaagaatgcaggtacacagccctcacttgaaagatgctctctacgatgtcatcactgtgggagccccagctgcccattttcagggatttaagaatggtggtcttcggaagctactccatagatttgaaacagaaagaagaaataccggataccagtttatttactattcacctgaaaacacagccaaagcaaaggaagttctcagcaacatcaatcaactacaacctcttatagcaacccatgcagacctactgcttaattctgcaagccagcattctccagacagcttgaagaattctttaaagatgctttcagaaaaaacagagctttttgtacatgccttcaaggatcaacttgtcaggagtgctcttttagcactctacactgcaaggccaggaggcattcttaagaagccaccctctcctaagagcagcacagaggagagcagtccccaagaccaacccccagtgatgagagggcaggactccataccacatcattcagactatgatgaggaagagtgggacagggtgtgggccaatgtggggaagagcctgaactgcattattgctatggtggacaaactgattgaaagagatggtggcagtgaaggcagtggtggcaacaatgatggagaaaaggaaccttcattaacagatgccattccctctcacccaagagaggactggtatgaacagttgtatcccctcatccttaccctgaaggactgcatgggagaagtggtgaaccgagccaagcagtccctgacatttgtgctccttcaggaacttgcgtacagcttgccccagtgtctgatgctgacgctaagaagagacatcgtcttcagccaagcacttgctggattggtttgtggttttatcatcaaattacagacaagtctgtatgacccaggcttcctacagcagcttcacacagtggggttgatagtacaatatgaaggattgttaagtacatacagcgatgaaattggaatgttagaggacatgcccgttggcatttccgatttaaagaaagttgcatttaaaataattgaagccaaatccaatgatgtattgccagttataacaggaagacgagaacattacgtggtagaggtcaagcttccagccagaatgtttgagtcactacctctacagattaaagaaggacagttgcttcatgtgtatccagtactttttaatgttggaatcaatgaacagcaaactctggctgaaaggtttggagatgtctctttgcaagaaagtattaatcaggaaaacttcgaacttctacaagaatattacaagatatttatggaaaagatgcctcctgattatatttcacattttcaggaacaaaatgatttaaaagcattgctagaaaatctccttcaaaatatccaatccaaaaaaagaaagaatgtagaaattatgtggctggctgcaacgatttgccgcaaactgaatggtattcgtttcacctgttgtaaaagtgccaaagacaggacatcgatgtcagtgacacttgaacaatgctcaatcttgagagatgagcaccagttacacaaggacttctttatccgagcgctggattgcatgagaagagaaggatgccgcatagagaatgtactgaagaatatcaaatgcagaaagtatgctttcaacatgctacagctgatggctttccccaagtactacagacctccagaggggacttatggaaaagctgacacctaagtttaccaacatgttaataaacaggaacacaaatacatttc

SEQ ID NO: 185 - protein, 924 aa, Homosapiens
MEIKEEGASEEGQHFLPTAQANDPGDCQFTSIQKTPNEPQLEFILACKDLVAPVRDRKLNTLVQISVIHPVEQSLTRYSSTEIVEGTRDPLFLTGVTFPSEYPIYEETKIKLTVYDVKDKSHDTVRTSVLPEHKDPPPEVGRSFLGYASFKVGELLKSKEQLLVLSLRTSDGGKVVGTIEVSVVKMGEIEDGEADHITTDVQGQKCALVCECTAPESVSGKDNLPFLNSVLKNPVCKLYRFPTSDNKWMRIREQMSESILSFHIPKELISLHIKEDLCRNQEIKELGELSPHWDNLRKNVLTHCDQMVNMFQDILTELAKETGSSFKSSSSKGEKTLEFVPINLHLQRMQVHSPHLKDALYDVITVGAPAAHFQGFKNGGLRKLLHRFETERRNTGYQFIYYSPENTAKAKEVLSNINQLQPLIATHADLLLNSASQHSPDSLKNSLKMLSEKTELFVHAFKDQLVRSALLALYTARPGGILKKPPSPKSSTEESSPQDQPPVMRGQDSIPHHSDYDEEEWDRVWANVGKSLNCIIAMVDKLIERDGGSEGSGGNNDGEKEPSLTDAIPSHPREDWYEQLYPLILTLKDCMGEVVNRAKQSLTFVLLQELAYSLPQCLMLTLRRDIVFSQALAGLVCGFIIKLQTSLYDPGFLQQLHTVGLIVQYEGLLSTYSDEIGMLEDMPVGISDLKKVAFKIIEAKSNDVLPVITGRREHYVVEVKLPARMFESLPLQIKEGQLLHVYPVLFNVGINEQQTLAERFGDVSLQESINQENFELLQEYYKIFMEKMPPDYISHFQEQNDLKALLENLLQNIQSKKRKNVEIMWLAATICRKLNGIRFTCCKSAKDRTSMSVTLEQCSILRDEHQLHKDFFIRALDCMRREGCRIENVLKNIKCRKYAFNMLQLMAFPKYYRPPEGTYGKADT

SEQ ID NO: 186 - DNA, 481 bp, Homosapiens
cacgctgtttttccttttcgttggcgctttatagctacacagtgctatgccagagccagcgaagtctgctcccgccccgaaaaagggctccaagaaggcggtgactaaggcgcagaagaaagacggcaagaagcgcaagcgcagccgcaaggagagctattccatctatgtgtacaaggttctgaagcaggtccaccctgacaccggcatttcgtccaaggccatgggcatcatgaattcgtttgtgaacgacattttcgagcgcatcgcaggtgaggcttcccgcctggcgcattacaacaagcgctcgaccatcacctccagggagatccagacggccgtgcgcctgctgctgcctggggagttggccaagcacgccgtgtccgagggtactaaggccgtcaccaagtacaccagcgctaagtaaacagtgagttggttgcaaactctcaaccctaacggctcttttaagagccaccca

SEQ ID NO: 187 - protein, 126 aa, Homosapiens [sequence omitted]

SEQ ID NO: 188 - DNA, 2267 bp, Homosapiens
tgtggttgctcgtagtgagttgcgctcgctatgtctggacgtggcaagcagggaggcaaagcccgcgctaaggccaagactcgctcttctagggccggtctccagttccccgtgggccgagtgcaccgcctgctccgcaaaggcaactatgccgagcgggtcggggccggcgcgccggtgtatctggcagcggtgctggagtacctgaccgccgagatcctggaactggcgggcaacgcggcccgcgacaacaagaagacccgcatcatcccgcgtcatctccaactggccatccgcaacgacgaggagctcaacaagctgctgggcaaagtcaccatcgcacagggcggtgtcctgcccaacattcaggccgtgctactgcccaaaaagactgagagccaccacaaggcgaagggcaagtaactatctgtactagtttgtggcagctcaagtaaaatcgagtccaaaccaacggctcttttcagggccacccacgtcttctctaaaagaacttaacatttattccatgtgaaagaaagtgagacatggacaagactctagtcataaattacccatctttttgaaaacagtgtagcgaacaccgcagatttaaaagaaaaactagagggaaggtggtccagattttaccacgcttaaaagttaagatgtgaacaaatctcttaggccattacttaattttaaacttaatcagtgtgtgtccacagagcaccagtggcttcgtgagttcttgaagcactttggcccaaaagagttatcgcccgggctagaatttagcagacagctgttccacgcgggccagggcggcatgaagaagtcccgccgctacgtgcccggcacagtggccctgcgcgacgttcggcgctaccagaactccgagctgctgatcagcaagctgccgctcctgcgagagctcggcggtgacgccgctgcacgagagcgaggctgaagaactttgtgacacaatagtccacctccctgcaaaggctctgtcagagactcacatctttcctgatggatagctgtgaagcattctcttacccaccctactgcatgttgcaaagtattcctttaaaatgaagtgagtaaaatactgggatgacgttatctggagcccaagaaagatggctcatttggaaaggcctaatatcccaagttgcttacctagaagaacttgacaggatagttaataataaaccttaaaacccatgaagaaatctgaggtaaagtgttagcacacagactgttaaaatgtctgcctcacagataggagggaaaatatatagaggattataatatggttcaacaaatgttgatgagtattagaaatgtacattagaaatattagaaatgtttatgactattagaaaagtacagggtattgggcgttcctgacacaaactgaggcctcctagcaagactggcagttttctgtaaaggagggttatttactacggtagtgcaaataacttttggtgttgtagctaaataaggaatactcatgccaagattgcacaattgtgcctcctccctctgttcactgaactctgatgtaattttttttttttttttgagacggagtctcgctctgtcgcccaggctggagtgcagtggcgctatctcggctcactgcaagctccgcctcccgggttcacgccattctcctgcctcagcctcctgagtagctggggctacaggcgtctgccaccatgcccagctacttttttgtatttttagtagatacggggtttcaccgtgttagccaggatggtcttgatgtcctgacctcgtgatccaccggcctcggcctcccaaagtgctgggattaccggcgtaagccaccacgcccggcccactctgaagtaatcttaagaagacgttaactcatttttcttgtgtattgtagacacttttggctgtctggtaacatggaaaatctcagaatgatgttttaagtatataaaatgccaaacaaagttaaattacagttatcaaagtatttttaaaacttcatagtgataaatgagactatatagttatattgttaatatagttaacacattacatgatttggtgagcctaattgctgttactaattagaggagtaaaaatgtttcacgataactcagcaattgtaatgagaaatgaaacatctaatgtcttttgggttacaaagtaacaggtactgagatttgtggcctaaattcataataaagtgaaatgttcaagttcaaaaaaaaaaaaaaaaa

SEQ ID NO: 189 - protein, 130 aa, Homosapiens
MSGRGKQGGKARAKAKTRSSRAGLQFPVGRVHRLLRKGNYAERVGAGAPVYLAAVLEYLTAEILELAGNAARDNKKTRIIPRHLQLAIRNDEELNKLLGKVTIAQGGVLPNIQAVLLPKKTESHHKAKGK

SEQ ID NO: 190 - DNA, 820 bp, Homosapiens
ctcgatctgctgctcgtctcaggctcgtagttcgccttcaacatgccggaaccagcgaagtccgctcccgcgcccaagaagggctcgaagaaagccgtgactaaggcgcagaagaaggacggcaagaagcgcaagcgcagccgcaaggagagctactccgtatacgtgtacaaggtgctgaagcaggtccaccccgacaccggcatctcctctaaggccatgggaatcatgaactccttcgtcaacgacatcttcgaacgcatcgcgggtgaggcttcccgcctggcgcattacaacaagcgctcgaccatcacctccagggagatccagacggccgtgcgcctgctgctgcccggggagttggccaagcacgccgtgtccgagggcaccaaggccgtcaccaagtacaccagcgctaagtaaacttgccaaggagggactttctctggaatttcctgatatgaccaagaaagcttcttatcaaaagaagcacaattgccttcggttacctcattatctactgcagaaaagaagacgagaatgcaaccatacctagatggacttttccacaagctaaagctggcctcttgatctcattcagattccaaagagaatcatttacaagttaatttctgtctccttggtccattccttctctctaataatcatttactgttcctcaaagaattgtctacattacccatctcctcttttgcctctgagaaagagtatataagcttctgtaccccactggggggttggggtaatattctgtggtcctcagccctgtaccttaataaatttgtatgccttttctctt

SEQ ID NO: 191 - protein, 126 aa, Homosapiens
MPEPAKSAPAPKKGSKKAVTKAQKKDGKKRKRSRKESYSVYVYKVLKQVHPDTGISSKAMGIMNSFVNDIFERIAGEASRLAHYNKRSTITSREIQTAVRLLLPGELAKHAVSEGTKAVTKYTSAK

SEQ ID NO: 192 - DNA, 370 bp, Homosapiens
atgtcaggacgcggcaaaggaggtaagggcctggggaaagggggtgccaagcgccaccgcaaggtgctgcgcgacaacatccagggtatcaccaagccagccattcggcgccttgctcgccgcggcggcgtgaagcgcatttctggcctcatctatgaggagacccgcggagtgttgaaggtgttcctggagaacgtgatccgggacgccgtgacctacacggagcacgccaagcgcaagacggtcaccgccatggacgtggtctacgcgctcaagcgccagggccgcaccctctatggcttcggcggctaaatggcattttgaagcccagtcattctctaaaaaggccctttttagggcccctaagctt

SEQ ID NO: 193 - protein, 103 aa, Homosapiens [sequence omitted]

SEQ ID NO: 194 - DNA, 439 bp, Homosapiens
atgtctggacgtggcaagcaaggcggtaaagctcgcgccaaggccaagacccgctcttctcgggctgggcttcagttccccgtgggccgagtgcaccgcctgctccgcaagggtaattatgccgagcgggttggagccggcgcgccagtgtacctggctgcggtgctggagtacctgaccgctgagatcctggagctggctggcaatgcggcccgcgacaacaagaagacccgtatcatcccgcgtcacctccaactggccatccgcaacgacgaggagctcaacaagctgctgggcaaagtcaccatcgcgcagggtggtgtcttgcccaatatccaggccgtgctgctgcctaagaagactgagagccaccataaggccaaataaggagcgaggttgtgaaaactggaaaacaaaggctcttttcagagccattcta

SEQ ID NO: 195 - protein, 128 aa, Homosapiens
MSGRGKQGGKARAKAKTRSSRAGLQFPVGRVHRLLRKGNYAERVGAGAPVYLAAVLEYLTAEILELAGNAARDNKKTRIIPRHLQLAIRNDEELNKLLGKVTIAQGGVLPNIQAVLLPKKTESHHKAK

SEQ ID NO: 196 - DNA, 2722 bp, Homosapiens
aagccgaacaccatggccgtctggcttgcccagtggctgggccctctgctcttggtttccctctggggactcttggctccagcctcccttcttaggcgcctgggtgagcacattcagcagtttcaggagagctctgcccagggcctgggcctgagcctggggccaggtgctgcagccctcccaaaagtggggtggctggagcaactgctggaccccttcaacgtgtccgacagacgatccttcctacagcgttactgggtgaatgaccaacattgggttggccaggatggacccatattcctgcatctagggggtgagggcagccttgggcctggctcagtgatgagaggccatcccgcagccttggccccagcctggggcgccctggtgataagcctggaacacagattttatggcctgagtatacctgctggaggcctggaaatggcccagctccgcttcttgtccagccgccttgcgctggctgatgtggtctctgcccgcctggcactttcccgcctctttaacatctcctcctccagcccctggatctgcttcggaggctcctatgccggctccttggccgcctgggcccggctgaagttcccccatctcattttcgcgtcggtcgcctcctccgccccggtgcgggccgtgctggatttctccgagtataatgacgtggtatcccgaagcctaatgagcaccgcgatcggcgggtccctggagtgccgggcggcggtgtccgtcgccttcgctgaagtggagcggcggctgcgctcgggtggggcggctcaagcagcattgcggacggagctgagcgcttgcgggcccctgggccgcgctgaaaaccaggcggagctgttgggggcgctgcaggcactggtgggaggtgtagtgcagtatgatgggcagacgggagcgccgctaagcgtgcgacagctctgcggacttctcctcgggggcgggggcaaccgcagccactccacgccctactgcgggcttcgtcgggcggtgcagattgtcttgcacagcctgggccagaagtgtttaagcttttcccgagcagagacagtggcacagctgaggagcacagaacctcaactgtctggtgtgggtgaccggcagtggttgtatcagacatgtaccgagttcggcttctatgtcacctgtgagaatcccagatgtcctttctcccagctcccagcactgccctcccagctagacctatgtgagcaggtgtttgggctctcagccttgtcagtagcccaggctgtggctcagacgaactcctactacggtggccagacccctggggctaacaaagtgctgtttgttaatggggacacagacccctggcatgtgctaagtgtaacacaggctttaggatcctcagaatcaactcttcttatccgcactggctcccactgcttggacatggcacctgagaggccctcagactcccccagcctccgcctagggcgccagaacatcttccagcagctacagacctggctcaagctggcaaaggagagccagattaagggtgaagtctgaatctcataccctttccactccctgcatggtcacctcagtcctggacatacttgttcactgaacaaaagaaagcagcttgttttgaaagaagaaactcccaggaattggaattcagcacctgttccgcacgtaattggcatgtgtctgcaaacatccttattcccaacttaaagtgctttattgcagagagttatggaaatataagtggatgattattctcattgtaaatattggtattttgaatgttaaatgtcaaacaaatgtgacttatgctggtgccctcgccctgctgatcagattctggttcaaattctgccactccagctcctgggttaggggctttgctgtaagtttctttttctggactttagatcctgaacctgtccttgcttctcagtttctctcactgtacccctttccctcagtctcttcctctctctttcccctgtcactatttgtctttctaatctccttctgtttctctgaatatcttcatttctatctctgtgtttctgtctatttctctgtttatctttctgtccttcaatctgtgtttttgtttctggctctccgtcagtgtctttttctctcctctctctcttgctctgccatggctatttccactgctctatttctgactctcatttttggtctctgtgtgtctcctagtcactttctttctcactctgtctctgtctctatttctgtctctcctctgctgtgtcctcaatctctctgtctccctgaggctctatttctgtctctcctctgctgtgtcctcaatctctctgtctccctgaggctctatttctgtctctgatgctcttcttctgtgtctctatttctcttcctgtcacttaatcttttccttctctatctctcttatttagtcttccttccacacccttcactcaccatcttttcccacaatcaaatatcactccctggtacttccagcttccaactctagggattcatgattctggtggagattccttcttccagggcctgggaggatagggctaatcccaagggtgcctgcttaggctatgttagctgtgacaggaacctgccatagatttgcactgttctttcctaaagatcaattattttcagcaataaatacttctcagctttttgtatgtctttgtatgcaaaaaaaaaa

SEQ ID NO: 197 - protein, 514 aa, Homosapiens
MAVWLAQWLGPLLLVSLWGLLAPASLLRRLGEHIQQFQESSAQGLGLSLGPGAAALPKVGWLEQLLDPFNVSDRRSFLQRYWVNDQHWVGQDGPIFLHLGGEGSLGPGSVMRGHPAALAPAWGALVISLEHRFYGLSIPAGGLEMAQLRFLSSRLALADVVSARLALSRLFNISSSSPWICFGGSYAGSLAAWARLKFPHLIFASVASSAPVRAVLDFSEYNDVVSRSLMSTAIGGSLECRAAVSVAFAEVERRLRSGGAAQAALRTELSACGPLGRAENQAELLGALQALVGGVVQYDGQTGAPLSVRQLCGLLLGGGGNRSHSTPYCGLRRAVQIVLHSLGQKCLSFSRAETVAQLRSTEPQLSGVGDRQWLYQTCTEFGFYVTCENPRCPFSQLPALPSQLDLCEQVFGLSALSVAQAVAQTNSYYGGQTPGANKVLFVNGDTDPWHVLSVTQALGSSESTLLIRTGSHCLDMAPERPSDSPSLRLGRQNIFQQLQTWLKLAKESQIKGEV

SEQ ID NO: 198 - DNA, 3648 bp, Homosapiens
atgcgatttcccattcgcccactccggatctctgaggccactcctgacggcaatctgcatgagttctccaatgccacaaatgccatccgggcggcacagccaccggtccagatctccagtcctgagcacctgcgaaagccgcccgcactcactctacggggtgcggatagtgctccccactcagactccggggatcccgcgggccgacagatctgcgccggggccctgagccgcctgagcctgtaccttcgaggccatactgcaactcgctgcggagacagcagaggtctgaccgccccgctgaggtctcagaacagcaaagcaagttactgggactgccgaagtcccgcgtgtcccccgttcccgcgggtgccgggcctggagagtgctaagcaccctgagactcgcgctttcctagcgcgtgaatcccaaccgtcaaccgaacactgcgctcttcgactctgtccgattctgcagacgtccgaaacctcggaagccaaaaccgtgcttgaactcactgcccgcgcctcatctctcctcatgggcagtttcctgagcaaactggaactttcgccctcgtccccagcccaggtgcgcaccgacttgcccgagaggcccacgaaacgccggccacctcagccccttcaccaagttcatcgggttcagttcgtccaccgcgcccaccctgccccacggtatagacctgtgaggaggcggccaaacctggatcctgccaatccaaccacgtggctggccaacgaggcctggaggcgctttcccatgaagaagtcccagaattcccccctggggcctctcccttcagactggtgggaaagttacttaaagcggactatttggtctcttcgacatcccaggccaatttggagcccagtgaccatcaggatcactcctcctgaccagagagtgcccccttccacttctcctgaagatgtaattgcccttgcaggactcccgccctctgaggagctcgcagatccatgttcaaaggagacagtgttgagggccctcagagagtgcagaaaagggaaagggaggttggaagaaccactattccctgagagtctggacagtaagagaaggagtccagagaccagaccatcggcatttaagcccctgatgaaaaatggaaccctcacttcttttgtgcccaggcctgggccgctgaagagaagtctccactcctggggctcagatcacagcttgactaagaggcccaattgctcctccatgagctccttggccagcatatacagaggtggcaccctcagctccaaaaggaatgctattggcagctcttacagctcttgcagaaatttctcagacccttggaagagaagtgttcccagtgtatcattcgagacaccagagtggccaataaaaaaggaaaaaagttgtcatcggccttcctctccagtcccactggtatcagattttgagtccctaggaggatctgaaagttctgggcagcaaaaccagaagattccacagctgccgtctagccctgagaacctggtgtcagagatcccacctccccagcttggttatgcagtctctgatgagaacttgactttggggaagaaagctgagctacaggtaagcaacaacgcaggagaagatacaactgaggtcaacacagaccctttccctgagacttggcttgctattcagccttccttgtctcttgctctgccttcttcagaaacagatctaacccagggagcaaatcctcagttggaaaacttaagaaaaatgcagaagtctctaggtccactggcctctccacagtccacgggagaggcaaccagtgtggcccattctcctttgaagacacccagcctaccgaccccacctgggtgctcacagtcagagctccttccaggcacctctccagactcaaagcccacagctactttcatcctgctgacccccacctctcccacattaccagttactgacaccacctggccgccttcaacctctcaggctgacaggtctcccatgcccccagacccacctgcaccacccaccatccaaagtactttgcttggaatggtgagtagcccaacatcccatctttctgcatctgcacctcctgatgcaacttctgctcacctcatgttaaaaccgattttggggcccctgcacaacagcgagattggaagctcctcatattccagaatttcagtcacagctgcagcatcttcaatctcttccctttccacaattcagggtaccttaactcctaccttcaagcctatctttggcagcatagatccacttaaaactacgcccatgatagctcctttctcctccaagcagacccctcctccatttactcatgcttctacccatcatttccatggcctggtcaaggccacctctgtggtcatgtccaccaccctagccagcacatctaaagactctgtttttaagccacctttggattttggtgtagtgaatgtcaccagtgccgtaggcaacacttattctgtcccttccacttgcgacactttcctgcttgggactgctcaggccttcagggccgacttcaccccagccacaggattcattttcccaccacaccaccatcctacaattcctactgtgcatacagtcaccatgtttacccaggtcctttccagtgttgtacagatatcccctagaagcagcactgctaatttcaggggtatgggcagccctctgcctgcctctgccctagtatccacaaactggcttgcatcaacccccagcatctccaacctgactccagcaatcacaagtcccttgggatcaagctcaaggccacctttcccactatcccaaggagctaatccccagcctgcatttggtgccacaaatggacagaaacaagggccttcccagccagcccttatgccaagtgtcagtagttcttttctttttgggagctcagcagtggcattgccaacccccatgccaactccagctcagccagccttcattagtaccacacagtcagccttggggtgtttgacaccctcagcctccacctctcaaacccctgccagcacctggtcaggcattggcggcattccagcaggttttcccattagtcaagctagtacaactgggtttagaattgtaattcagacccaccaaagtggggcttttggctcagtgtttggcagcagagctccacaacctttcacttttgggggattcgtgacccctatggactgtgatgagtctgggatcataatgactggtccagacatgagccccacctctggagctttcagcattggagcattgcctagtgggaccactaacaccatgatcccctttggaaaaggctggagccagaacactgaaggcctgcccagccaccgcacagctttttccttggggagaggcagcatttctgcaagaaagactatggcccccattgctcaaaacaccccagtccctggacaagctaaggcaggcagcagtgttggctttgggatgccttttccacctgcccagggctctgttgggagaggaccttttagatcatcagcctcttcattttccattggcgcaaaatcaaaaaccccaaagaatcgggagaaagggcattcccgaaggcatcatgcctacaagaagtag

SEQ ID NO: 199 - protein, 1215 aa, Homosapiens [sequence omitted]

SEQ ID NO: 200 - DNA, 1164 bp, Homosapiens
gctgctgtttaggctgtgctggcttcaatcaaaagatccaagaaaaccatgaatattttgtattcaagtgacacaacactgggaatcttacctgtctttcaaagtggcattgggctcatggggaacttattgctattcattacatatatgtacatcttcttattttggccccatcagaagaaccccttagatgtgattctcatgcacctaactttggctaatgttataacagttatcatcaggggtgttccatatataatgtcatccttcagacttagaagtacttttgttgatactggttgtaaaacagggctatacatttataaaatgacatggggcatttgtgtatgtacttcttctctcctgagtacatttcaggctgttatcatctgtccttgtcattccaagtgggcatggctcaaactcaaatctccccataaattttcccttattgatttattcctaaacaacaggctaatcaatatgtgggtcattataagcaccgtagccaccagcaaatccactaatgttggacttgtatattctctgatatactgtaaaacaagactgtttatatactaccatgcaatgatatttcaaagtgccatgtttactcaaggtttcctcttcttgttcctcatgatttggactagtttctacatggtgactattttcttaaggcatcaaaagacggtctttcatattcacagtatcagtctgtctccacaatcttttcctgaaacagaagccagtcatgttttcttcttgctggtgagccgctttgttttcttttatgggactaacgtgtgtctttccacttatattagctccatgtatgagaacagcctaatcctggagaacattactagttttgtttcatcttcctacccaattatctgtactttgatattgattaattatgataataaagtttccagattaacctgtgccattttaaatatgattatttccccctgcttaccacacagctttctattgcatcaaagaaatcctgataaaaattattttaaccacaagagaatgtgtttttaaactttcctgagtttagaaatttagtcctttggcctgggaggtccaggctgcaatgagccaagatcacgccactgaactccagcctgggagacagcaagaccctgtctgaaa

SEQ ID NO: 201 - protein, 334 aa, Homosapiens
MNILYSSDTTLGILPVFQSGIGLMGNLLLFITYMYIFLFWPHQKNPLDVILMHLTLANVITVIIRGVPYIMSSFRLRSTFVDTGCKTGLYIYKMTWGICVCTSSLLSTFQAVIICPCHSKWAWLKLKSPHKFSLIDLFLNNRLINMWVIISTVATSKSTNVGLVYSLIYCKTRLFIYYHAMIFQSAMFTQGFLFLFLMIWTSFYMVTIFLRHQKTVFHIHSISLSPQSFPETEASHVFFLLVSRFVFFYGTNVCLSTYISSMYENSLILENITSFVSSSYPIICTLILINYDNKVSRLTCAILNMIISPCLPHSFLLHQRNPDKNYFNHKRMCF

SEQ ID NO: 202 - DNA, 4028 bp, Homosapiens
agacttacatatatatgccaggcacagttttgttgttaggaacataaagatgggaaaatcttgattcgtgtgtaggggtggggatggcaaaagatactccaaaagataatttcaaaacaggtagtaaatgctatgatagagtctaggtaactgctcttgttatctggaacctacttaaaccatggatggtgtcttagactgcttctattgctgtaaaggaatacctaagctggttaatttaaaaagaaaagaggcttatttggctcatagttctgtagattatataaaaagaatggctccagcatctacttctggtgacggcttcaagttgcttccattcatggtggaaggtgaaagagagctggcacgtgcagagattacatggcaagagaagaagaaagcgagaatggagagggggaccaggctctttttaacaaccggctttagcctggagcggtagctcacacctgtaatcccagcactttgggaggccgaggcggatggatcacgaggtcaagagattgagaccatcctggccaacatggtggaacccatctctactaaaaatacaaaaattagccgagagtggtggcgggtgcctgtagtcccagctactcaggaggctgaggcaggggaatcgctttatcccgggaggcggagggtgcagtgagccaagattgtgctaatgcactccaacctggcgacagagtgagactccacctcaaccaaagtaaataaataaatgaataaatcagctcttgcaggaactaatagagtgagaaccttactatgggggacaataccaagccattcatgagggattcaccgccgtgatccaaagcttcccattaggcccacctccaacattgggaattgaatttcaacaagaggtttgggaaggcaaacattcaaactattgagaatgcaatgcctgtggcgtttccgtggtcatgaggtggcaaggaatgtttggttgcctttacttcctggagctgaagattcagttggtatgacttcaaaaacataccacatatgtggatttctagaccagtgctatgcaatataacttttgtggatatttttgatgtatacattgctcggtacagtagccactaaccacattagctattgagcactgaaatgtgactattgcaattgaagaattaagtcttttatttaattttaatttaaatagctacatgtggggaatggctaccatattggagagtgtagttctagaatatcaagtggttgctatagacacaagctgacttcttcgtagctcctctctcttccctcagagccactgtctcaagactctgcccttcttcaagagaagagcccagaagaagagagaatgactgctaggccctttatggctggattcaggccatgtaaggcatgcctgcttccccttcaccttccaccatgattgtaagtttcctgaggcctccccaggtgtgcttcctgtacagcctgtggaatgttaccaaagacgttggaagaggtggctatggacatcacctgggagaagtggaagcaaatggacactgttcagaagtccatatacagaaacatgttggaaaaatatagaaacctggttttgctagatgggaagcttgaacgtggggccaagacatcaagagtagagcagcaggacatttcaaaagaagattaatctcaaagattagagatggaagaacttgcaaagagaaagtctgtaccggaagaaatctggaaatctagaggccagtttaagaatcagcagctaaacaaggagaataatctagggcaagagatagctacctgcacaaaaattcctaccagaaaaagagacatagaatctaatgaatttgtgaaaaattttactgtaagatcaatacttgttgcagaacagatagatcctatggaagagaattgtcataaatatggtacatgttgaaagatgctcaaacaaaactcagatttaattatacaaagaaagtatgatggaaaaaaaaaaaaccttgtaaatatagtgaatgtgggagaaccttcagaggccacatcactcttgttcagcatcaaataactcattgtggagagagaccctgtaaatgtactgagtgtagaaagggatttaatcagagttcccacttaagaaataatcagaaaactctttcaggagaaaagccctacaaatgcagtgagtgtgggaaggccttcagttattgcttagttcttaatcaacaccagagaattcacagtggagagaaaccttatgagggtactgaatgtggcaagacattcagtcgtagtacataccttactcagcatcaaagaattcacactggtgagaagccctatacatgtcttgaatgtggaaaggcttttagtcagaacacacatcttactctacatcagagaatccatactggagagaaaccttatgaatgcaatgaatgtggtaggtcctttagtcagagtgcacatcttactcaacatcaaagaatgtatacaggagaaaaactctatgaatgtaatgaatgtgagaaagccttccatgatcactcagctcttattcaacatcatattgtccatactgcagagaaaccctatgaatatcatgactgggaaaactttcagttactgttcagacctcattcaacatcagagaatgcacactggagagaaaccatacaaatgcaatgaatgtgggaatgcctttagtgattgttcatcccttattcagcatcaaagaactcacaccggagaagagccttatgaatgtaagcaatgtggaaaagcctttagcagaagcacataccttactcaacatcagagaagtcacgcaggagagaaacagtataaatgcaatgaatgtgagaaaactttcagcctgagttcattccttacacagcatatgagggttcagactggagaaaaaccctacaaatataatgaatatggaaaagcttttagtgactgctcaggacattttcagagaactcacactggagagaagccctgtgaatgtaatgactgtgggaaacctttcagtttctgttcagccctaattcaacataagagaattcataccagaaagaagccctgactgtaccttcataccagtaaatgcactgactgtggaaaagccttcagtgattggttagcacttgttcaacatcagataactcaacactggagaaaaaccgtataaatgtactgaatgtggaaaagccttcagttggagtacagaccccaaaaatcaccagaaaactcatactagtgaaaaatcctataaatgtaatgaatgtagaaaggcctttagttactgctctggtcttattcaatgtcaggtcattcatactatagaaaaaccttatgaatacggtaaatgtggcaaagcctttaggcagaggacagaccttaaaaaacatcagaaaatgcataccgaagagaaaccctatgaatgtaatgaatgtgggaaagcctttagccagagcacatatcttacaaaacaccaaaaaattcatagtgaagagaaatcaaatatacatactgagtgtggggaaaccattagacaaaactcttcttttttacaacaataaaaacctcacactggagagattctctgaatgccttaagaatttggttaatatggagacccttcccagggaaacagaaggaggatcgtgaaaactgttgactacttagaatgatcacatggtttagtggagagagcatgattctgggttttaaaagtcatggatctcaatctcagctcctattactaactagatcttttactttggggtaagtcacttcatatctttaggccttaatttcctcatctgaaaaactggaaggcctgacttgttgagctttaagatcctcaattattatatttactaggaattcaagtttctatagatgtggttcagaattgtgacttatttattgtacatcaggtgtgattcacaagtgagcttgtagtagttattaaggagtcaataaagatatgatatagaaaaaaaaaaaaaaaaaaa

SEQ ID NO: 203 - DNA, 6456 bp, Homosapiens
gagttgtgcctggagtgatgtttaagccaatgtcagggcaaggcaacagtccctggccgtcctccagcacctttgtaatgcatatgagctcgggagaccagtacttaaagttggaggcccgggagcccaggagctggcggagggcgttcgtcctgggactgcacttgctcccgtcgggtcgcccggcttcaccggacccgcaggctcccggggcagggccggggccagagctcgcgtgtcggcgggacatgcgctgcgtcgcctctaacctcgggctgtgctctttttccaggtggcccgccggtttctgagccttctgccctgcggggacacggtctgcaccctgcccgcggccacggaccatgaccatgaccctccacaccaaagcatccgggatggccctactgcatcagatccaagggaacgagctggagcccctgaaccgtccgcagctcaagatccccctggagcggcccctgggcgaggtgtacctggacagcagcaagcccgccgtgtacaactaccccgagggcgccgcctacgagttcaacgccgcggccgccgccaacgcgcaggtctacggtcagaccggcctcccctacggccccgggtctgaggctgcggcgttcggctccaacggcctggggggtttccccccactcaacagcgtgtctccgagcccgctgatgctactgcacccgccgccgcagctgtcgcctttcctgcagccccacggccagcaggtgccctactacctggagaacgagcccagcggctacacggtgcgcgaggccggcccgccggcattctacaggccaaattcagataatcgacgccagggtggcagagaaagattggccagtaccaatgacaagggaagtatggctatggaatctgccaaggagactcgctactgtgcagtgtgcaatgactatgcttcaggctaccattatggagtctggtcctgtgagggctgcaaggccttcttcaagagaagtattcaaggacataacgactatatgtgtccagccaccaaccagtgcaccattgataaaaacaggaggaagagctgccaggcctgccggctccgcaaatgctacgaagtgggaatgatgaaaggtgggatacgaaaagaccgaagaggagggagaatgttgaaacacaagcgccagagagatgatggggagggcaggggtgaagtggggtctgctggagacatgagagctgccaacctttggccaagcccgctcatgatcaaacgctctaagaagaacagcctggccttgtccctgacggccgaccagatggtcagtgccttgttggatgctgagccccccatactctattccgagtatgatcctaccagacccttcagtgaagcttcgatgatgggcttactgaccaacctggcagacagggagctggttcacatgatcaactgggcgaagagggtgccaggctttgtggatttgaccctccatgatcaggtccaccttctagaatgtgcctggctagagatcctgatgattggtctcgtctggcgctccatggagcacccagggaagctactgtttgctcctaacttgctcttggacaggaaccagggaaaatgtgtagagggcatggtggagatcttcgacatgctgctggctacatcatctcggttccgcatgatgaatctgcagggagaggagtttgtgtgcctcaaatctattattttgcttaattctggagtgtacacatttctgtccagcaccctgaagtctctggaagagaaggaccatatccaccgagtcctggacaagatcacagacactttgatccacctgatggccaaggcaggcctgaccctgcagcagcagcaccagcggctggcccagctcctcctcatcctctcccacatcaggcacatgagtaacaaaggcatggagcatctgtacagcatgaagtgcaagaacgtggtgcccctctatgacctgctgctggagatgctggacgcccaccgcctacatgcgcccactagccgtggaggggcatccgtggaggagacggaccaaagccacttggccactgcgggctctacttcatcgcattccttgcaaaagtattacatcacgggggaggcagagggtttccctgccacggtctgagagctccctggctcccacacggttcagataatccctgctgcattttaccctcatcatgcaccactttagccaaattctgtctcctgcatacactccggcatgcatccaacaccaatggctttctagatgagtggccattcatttgcttgctcagttcttagtggcacatcttctgtcttctgttgggaacagccaaagggattccaaggctaaatctttgtaacagctctctttcccccttgctatgttactaagcgtgaggattcccgtagctcttcacagctgaactcagtctatgggttggggctcagataactctgtgcatttaagctacttgtagagacccaggcctggagagtagacattttgcctctgataagcactttttaaatggctctaagaataagccacagcaaagaatttaaagtggctcctttaattggtgacttggagaaagctaggtcaagggtttattatagcaccctcttgtattcctatggcaatgcatccttttatgaaagtggtacaccttaaagcttttatatgactgtagcagagtatctggtgattgtcaattcattccccctataggaatacaaggggcacacagggaaggcagatcccctagttggcaagactattttaacttgatacactgcagattcagatgtgctgaaagctctgcctctggctttccggtcatgggttccagttaattcatgcctcccatggacctatggagagcagcaagttgatcttagttaagtctccctatatgagggataagttcctgatttttgtttttatttttgtgttacaaaagaaagccctccctccctgaacttgcagtaaggtcagcttcaggacctgttccagtgggcactgtacttggatcttcccggcgtgtgtgtgccttacacaggggtgaactgttcactgtggtgatgcatgatgagggtaaatggtagttgaaaggagcaggggccctggtgttgcatttagccctggggcatggagctgaacagtacttgtgcaggattgttgtggctactagagaacaagagggaaagtagggcagaaactggatacagttctgaggcacagccagacttgctcagggtggccctgccacaggctgcagctacctaggaacattccttgcagaccccgcattgccctttgggggtgccctgggatccctggggtagtccagctcttcttcatttcccagcgtggccctggttggaagaagcagctgtcacagctgctgtagacagctgtgttcctacaattggcccagcaccctggggcacgggagaagggtggggaccgttgctgtcactactcaggctgactggggcctggtcagattacgtatgcccttggtggtttagagataatccaaaatcagggtttggtttggggaagaaaatcctcccccttcctcccccgccccgttccctaccgcctccactcctgccagctcatttccttcaatttcctttgaacctataggctaaaaaagaaaggctcattccagccacagggcagccttccctgggcctttgcttctctagcacaattatgggttacttcctttttcttaacaaaaaagaatgtttgatttcctctgggtgaccttattgtctgtaattgaaaccctattgagaggtgatgtctgtgttagccaatgacccaggtgagctgctcgggcttctcttggtatgtcttgtttggaaaagtggatttcattcatttctgattgtccagttaagtgatcaccaaaggactgagaatctgggagggcaaaaaaaaaaaaaaagtttttatgtgcacttaaatttggggacaattttatgtatctgtgttaaggatatgtttaagaacataattcttttgttgctgtttgtttaagaagcaccttagtttgtttaagaagcaccttatatagtataatatatatttttttgaaattacattgcttgtttatcagacaattgaatgtagtaattctgttctggatttaatttgactgggttaacatgcaaaaaccaaggaaaaatatttagtttttttttttttttttgtatacttttcaagctaccttgtcatgtatacagtcatttatgcctaaagcctggtgattattcatttaaatgaagatcacatttcatatcaacttttgtatccacagtagacaaaatagcactaatccagatgcctattgttggatattgaatgacagacaatcttatgtagcaaagattatgcctgaaaaggaaaattattcagggcagctaattttgcttttaccaaaatatcagtagtaatatttttggacagtagctaatgggtcagtgggttctttttaatgtttatacttagattttcttttaaaaaaattaaaataaaacaaaaaaaaatttctaggactagacgatgtaataccagctaaagccaaacaattatacagtggaaggttttacattattcatccaatgtgtttctattcatgttaagatactactacatttgaagtgggcagagaacatcagatgattgaaatgttcgcccaggggtctccagcaactttggaaatctctttgtatttttacttgaagtgccactaatggacagcagatattttctggctgatgttggtattgggtgtaggaacatgatttaaaaaaaaactcttgcctctgctttcccccactctgaggcaagttaaaatgtaaaagatgtgatttatctggggggctcaggtatggtggggaagtggattcaggaatctggggaatggcaaatatattaagaagagtattgaaagtatttggaggaaaatggttaattctgggtgtgcaccagggttcagtagagtccacttctgccctggagaccacaaatcaactagctccatttacagccatttctaaaatggcagcttcagttctagagaagaaagaacaacatcagcagtaaagtccatggaatagctagtggtctgtgtttcttttcgccattgcctagcttgccgtaatgattctataatgccatcatgcagcaattatgagaggctaggtcatccaaagagaagaccctatcaatgtaggttgcaaaatctaacccctaaggaagtgcagtctttgatttgatttccctagtaaccttgcagatatgtttaaccaagccatagcccatgccttttgagggctgaacaaataagggacttactgataatttacttttgatcacattaaggtgttctcaccttgaaatcttatacactgaaatggccattgatttaggccactggcttagagtactccttcccctgcatgacactgattacaaatactttcctattcatactttccaattatgagatggactgtgggtactgggagtgatcactaacaccatagtaatgtctaatattcacaggcagatctgcttggggaagctagttatgtgaaaggcaaatagagtcatacagtagctcaaaaggcaaccataattctctttggtgcaggtcttgggagcgtgatctagattacactgcaccattcccaagttaatcccctgaaaacttactctcaactggagcaaatgaactttggtcccaaatatccatcttttcagtagcgttaattatgctctgtttccaactgcatttcctttccaattgaattaaagtgtggcctcgtttttagtcatttaaaattgttttctaagtaattgctgcctctattatggcacttcaattttgcactgtcttttgagattcaagaaaaatttctattcttttttttgcatccaattgtgcctgaacttttaaaatatgtaaatgctgccatgttccaaacccatcgtcagtgtgtgtgtttagagctgtgcaccctagaaacaacatattgtcccatgagcaggtgcctgagacacagacccctttgcattcacagagaggtcattggttatagagacttgaattaataagtgacattatgccagtttctgttctctcacaggtgataaacaatgctttttgtgcactacatactcttcagtgtagagctcttgttttatgggaaaaggctcaaatgccaaattgtgtttgatggattaatatgcccttttgccgatgcatactattactgatgtgactcggttttgtcgcagctttgctttgtttaatgaaacacacttgtaaacctcttttgcactttgaaaaagaatccagcgggatgctcgagcacctgtaaacaattttctcaacctatttgatgttcaaataaagaattaaact

SEQ ID NO: 204 - protein, 595 aa, Homosapiens [sequence omitted]

SEQ ID NO: 205 - DNA, 8192 bp, Homosapiens
caaaaatcagtctgatctcgggaaacctggagaaatttattttctgtactctaatgttctttcattttggtgaccatcaaggtgctgggagaggaattagatggctgtaattcaaagttaatggaattagatgcagcagtacagaaattcttggaacagaatggccaactgggtaagccactggccaagaagataggaaaactgactgaacttcaccagcagaccattagacaagctgagaatcggctctccaagctcaatcaggcaacatcacatttagaagaatacaatgaaatgcttgaattaattttgaagtggattgaaaaagctaaagtcttggctcatggaactattgcatggaattctgcaagccagcttcggaaacaatatattttgcatcagaccctgctagaagaatccaaagaaattgacagtgagctggaagcaatgactgagaaattacagtacctcactagcgtgtactgtacagaaaaaatgtctcagcaagtggcagaactgggacgggagactgaggagttgcgacagatgatcaaaattcgtttgcagaacctccaagatgcagctaaggatatgaaaaaatttgaagcagagttgaaaaagttacaagctgccttggagcaagcccaggcaacactgacttctccagaagttggacgtctcagtctcaaggagcagctctctcatcggcagcatttgttgtctgagatggagtcactgaagccgaaggtgcaagcagtgcagctctgccagagtgccctccggatccccgaggatgtggttgccagcttacctctctgtcatgctgctctgcggctgcaggaagaggccagccggctgcagcacaccgccatccagcagtgtaacatcatgcaggaagctgtggtacaatatgaacaatatgagcaagaaatgaaacatctccagcaactgatagaaggagctcacagagagattgaggataaacctgttgccaccagtaacatacaggagctgcaggctcagatttctcggcatgaggagctggcgcagaaaattaagggctaccaggagcagatcgcttctttgaattccaagtgcaagatgctgacgatgaaagccaagcacgccaccatgctgctgacggtgaccgaggtcgaggggctggcggaagggacagaggacctggatggggagctcctccccacgccttcggcccacccctctgtggtcatgatgactgcaggtcgctgtcacactttgctgtcaccggtcactgaggagtctggggaggagggaaccaacagtgagatttcctctccacctgcctgtcgctccccttcacctgtggctaatacagatgcttctgttaaccaggacattgcatattaccaagccttgtctgctgagaggttgcagacagatgctgcaaaaattcaccccagcacatccgcatcccaggagttctatgaaccgggattggagccatccgctactgccaaactgggtgatttgcagcgttcttgggaaaccttaaagaatgtgatcagtgagaagcagcgcacactctatgaagctttggagcgccagcagaagtaccaggactccctccagtccatctctacgaagatggaggccattgagctgaaactcagtgagagcccagagcctggcaggagtccagaaagccagatggctgaacatcaggcattgatggatgagattctcatgctccaggatgaaatcaatgagctccagtcctctctcgcagaggagctggtatccgagtcttgtgaggccgaccctgcggagcagctggccttgcagtccacgctcactgtcttagccgagcgaatgtccaccatcaggatgaaagcctcggggaaacggcagcttttggaggagaagttgaatgatcagctggaggaacaaaggcaggaacaggccctgcagaggtatcgctgtgaagccgatgagctggacagctggctcttgagtaccaaggccactctggacactgcgctgagtccacccaaggagcccatggacatggaggcccagcttatggactgccagaatatgctggtggaaatagagcagaaggtggtggctttatcagaactgtcagtccacaatgagaacctgctgctggagggcaaagctcacaccaaggacgaggccgagcagctggctggaaagctgagaaggctcaaggggagcctgctggagctgcagagagccctgcatgataagcagctcaacatgcagggaacagcacaggagaaggaggagagcgatgttgacctaacagccacgcagagccccggcgtccaggaatggctggcccaagctcgcaccacatggacccagcagcggcagagcagtctccagcaacaaaaagagttagaacaggaattagccgagcagaagagtctccttcgctcagtagccagtcgtggagaggagattctaattcaacattcggcggcagagacctctggtgatgctggcgaaaaacctgatgtgttatcccaggagttggggatggaaggggagaaatcatccgctgaagaccagatgagaatgaaatgggaaagcctacatcaagaatttagtaccaagcagaaactactacagaatgttctggaacaggaacaagagcaagtgctttatagcaggccaaatcgactcttgtctggtgtgccactgtacaaaggggacgtgccaacccaagataaatctgcagttacatctttgctggatggactgaaccaagccttcgaggaggtttcatcccagagtggaggggcaaagaggcagagtatacacttggagcagaagttgtatgatggagtctcagccacctctacttggttggatgacgttgaagaacgtttatttgttgccacagcacttttaccagaagaaacagagacttgtctcttcaaccaagagattcttgccaaagacattaaggaaatgtctgaagaaatggataagaacaaaaacttgttttcccaagcttttccagagaatggtgataatcgagatgttattgaagatactttgggttgtcttttgggcaggttatccttgctagactcagtagtgaatcaacgatgtcatcagatgaaagaaagacttcagcaaatactaaatttccagaatgatctgaaagtgctgtttacatcactggctgacaacaaatacatcattctgcaaaaactggcaaatgtgtttgaacagcccgtagcagaacaaatagaggcaatacaacaggctgaagatggactcaaagaatttgatgcaggaatcattgaattaaagaggcgtggtgacgagctacaggtcgagcagccgtccatgcaagaactctccaagctccaggacatgtatgatgagctgatgatgatcattggctcccggaggagtggtctgaatcagaaccttacactcaagagtcagtatgagagggccctacaagatctggctgacctgctagaaactggtcaggagaagatggcaggagaccagaaaatcatcgtgtcttccaaagaggaaatccagcaaccacttgacaaacataaggaatactttcagggcctggaatctcatatgatcttgactgtaacactcttcagaaagataatcagctttgcagtccaaaaggaaacccagttccatacagagctgatggctcaggcttctgctgtactgaaacgggctcacaagaggggtgtggagctggagtacattctagagacgtggtcccatctggatgaggaccagcaggagctcagcagacagctggaggtggtggaaagcagcatcccaagcgtgggtctggtggaggagaacgaggacaggcttattgaccgcataacactctaccagcatttaaaatctagccttaatgaataccagcccaaattatatcaagtattagatgatgggaaacgacttctgatatccatcagctgctcagatctagaaagccaactaaatcaacttggagagtgctggctaagtaacaccaataaaatgtctaaggaacttcacagactggaaacaatattgaaacactggaccagatatcaaagtgaatctgcagatctaattcactggttacaatctgcaaaagaccggctagaattttggactcagcaatctgtgacagtcccacaagagctggaaatggtccgtgatcatctaaatgctttcctggagttttctaaagaagtggatgcccaatcttccctgaaatcatctgttctgagtactggaaatcagctccttcgactaaaaaaggtggacacagccacgctgcgctctgagttgtcgcgcattgatagccagtggactgacctgctaaccaatatcccagccgtccaggagaagctccaccagctccagatggataaactgccttcccgccatgccatttctgaagtcatgagttggacttctctaatggaaaatgctattcagaaggatgaagataatattaaaaattccataggttacaaggcaattcatgaataccttcagaaatataagggttttaagatagacattaactgtaaacagctgacagtggattttgtgaaccagtccgtgctacaaatcagcagtcaggatgtggaaagtaagcgtagtgataagactgattttgctgagcaacttggagcaatgaataaaagttggcaaattctgcaaggtctagtaactgagaagatccagctgttggaaggcttattggaatcttggtcagaatatgaaaataatgtacaatgtctgaaaacatggtttgaaacccaggaaaagagactaaaacaacagcatcgaattggagatcaggcttctgttcaaaatgcactgaaagactgtcaggatctggaagatctgattaaagcaaaagataaagaagtagagaaaattgagcagaatggacttgctttgattcagaccaagaaagaagacgtctctagcattgtcatgagcacactgcgagagctcggccaaacctgggcaaatttagatcacatggttggacaattaaagatactgctgaaatcagtgcttgaccaatggagtagtcacaaagtggcctttgacaagataaacagttacctcatggaggccagatactctctttcccgattccgtctgctgactggctccttagaagctgtgcaagttcaggtggacaatcttcagaatctccaagatgatctggaaaaacaggaaaggagcttacagaaatttggctctatcaccaaccaattattaaaagagtgtcacccacccgtgacagaaactcttaccaatacactgaaagaagtcaacatgagatggaataacttgctggaagagattgctgagcagctacagtccagcaaggccctacttcagctttggcaaagatacaaggactactccaaacagtgtgcttcgacagttcagcagcaggaggatcgaaccaatgagctgttgaaggcagccacaaacaaggacattgccgatgatgaggttgccacatggattcaagattgcaacgacctcctcaaaggactgggcacagttaaagattccctctttgttctccatgagctgggagagcaactgaagcaacaagtggatgcttccgcagcatcagctattcaatcggatcaactctctttgagtcaacacttgtgtgccctggagcaagctctctgcaaacagcagacttcattacaggctggagttcttgattatgaaacctttgccaagagtttagaagctttggaggcctggatagtggaagctgaagaaatactacaagggcaggaccctagccactcatctgacctctccacaatccaggaaaggatggaagaacttaagggacagatgttaaaattcagcagcatggctccagatttagaccgtctaaatgagcttggatataggttacccttgaatgataaggaaatcaaaagaatgcagaatctgaaccgccattggtctctgatctcctctcagactacagaaagattcagcaagttgcagtcatttttgctacaacatcagactttcttggaaaaatgtgaaacatggatggaattcctagttcagacagaacaaaagttagcagtagagatttcaggaaattatcagcaccttttggaacagcagagagcacacgagttgtttcaagccgagatgttcagtcgtcagcagattttgcactcaatcattattgatgggcaacgtcttctagaacaaggtcaagttgatgacagggatgaattcaacctgaaattgacactcctcagtaatcaatggcagggagtgattcgcagggcccagcagaggcgggggatcattgacagccagattcgccagtggcagcgctatagggagatggcagaaaagcttcgtaaatggttggttgaagtgtcctacctccccatgagtggtctcggaagtgttcctataccactgcaacaagcaaggaccctctttgatgaagtgcagttcaaagaaaaagtgtttctgcggcaacaaggcagctacatcctgactgtggaggctggcaagcaactccttctctcggcggacagtggcgctgaggccgccttgcaggccgaactcgctgaaatccaagagaaatggaaatcagccagcatgcggctggaagaacagaagaaaaaactagccttcttgttgaaagactgggaaaaatgtgagaaaggaatagcagattccctggagaaactacgaactttcaaaaagaagctttcgcagtctctcccggatcaccatgaagagctccatgcagaacaaatgcgttgcaaggaattagaaaatgcagttgggagctggacagatgacttgacccagttgagcctgctgaaggacaccctctctgcctatatcagtgctgatgatatctccattcttaatgaacgcgtagagcttctgcaaaggcagtgggaagaactatgccaccagctctccttaaggcggcagcaaataggtgaaagattgaatgaatgggcagtcttcagtgaaaagaacaaggaactctgtgagtggttgactcaaatggaaagcaaagtttctcagaatggagacattctcattgaagaaatgatagagaagctcaagaaggattatcaagaggaaattgctattgctcaagagaacaaaatacagctccaacaaatgggagaacgacttgctaaagccagccatgaaagcaaagcatctgagattgaatacaagctgggaaaggtcaacgaccggtggcagcatctcctggacctcattgcagccagggtgaagaagctgaaggagaccctggtagccgtgcagcagcttgataagaacatgagcagcctgaggacctggctcgctcacatcgagtcagagctggccaagccaatagtctacgattcctgtaactcggaagaaatacagagaaagcttaatgagcagcaggagcttcagagagacatagagaagcacagtacaggtgttgcatctgtcctcaacctgtgtgaagtcctgctgcacgactgtgacgcctgtgccactgatgccgagtgtgactctatacagcaggctacgagaaacctggaccggcggtggagaaacatttgtgctatgtccatggaaaggaggctgaaaatcgaagagacgtggcgattgtggcagaaatttctggatgactattcacgttttgaagattggctgaagtcttcagaaaggacagctgcttttcccagctcttctggggtgatctatacagttgccaaggaagaactaaagaaatttgaggctttccagcgacaggtccacgagtgcctgacgcagctggaactgatcaacaagcagtaccgccgcctggccagggagaaccgcactgattcagcatgtagcctcaaacagatggttcacgaaggcaaccagagatgggacaacctgcaaaagcgtgtcacctccatcttgcgcagactcaagcattttattggccagcgtgaggagtttgagactgcgcgggacagcattctggtctggctcacagagatggatctgcagctcactaatattgaacatttttctgagtgtgatgttcaagctaaaataaagcaactcaaggccttccagcaggaaatttcactgaaccacaataagattgagcagataat

SEQ ID NO: 206 - protein, 3321 aa, Homosapiens
MELDAAVQKFLEQNGQLGKPLAKKIGKLTELHQQTIRQAENRLSKLNQATSHLEEYNEMLELILKWIEKAKVLAHGTIAWNSASQLRKQYILHQTLLEESKEIDSELEAMTEKLQYLTSVYCTEKMSQQVAELGRETEELRQMIKIRLQNLQDAAKDMKKFEAELKKLQAALEQAQATLTSPEVGRLSLKEQLSHRQHLLSEMESLKPKVQAVQLCQSALRIPEDVVASLPLCHAALRLQEEASRLQHTAIQQCNIMQEAVVQYEQYEQEMKHLQQLIEGAHREIEDKPVATSNIQELQAQISRHEELAQKIKGYQEQIASLNSKCKMLTMKAKHATMLLTVTEVEGLAEGTEDLDGELLPTPSAHPSVVMMTAGRCHTLLSPVTEESGEEGTNSEISSPPACRSPSPVANTDASVNQDIAYYQALSAERLQTDAAKIHPSTSASQEFYEPGLEPSATAKLGDLQRSWETLKNVISEKQRTLYEALERQQKYQDSLQSISTKMEAIELKLSESPEPGRSPESQMAEHQALMDEILMLQDEINELQSSLAEELVSESCEADPAEQLALQSTLTVLAERMSTIRMKASGKRQLLEEKLNDQLEEQRQEQALQRYRCEADELDSWLLSTKATLDTALSPPKEPMDMEAQLMDCQNMLVEIEQKVVALSELSVHNENLLLEGKAHTKDEAEQLAGKLRRLKGSLLELQRALHDKQLNMQGTAQEKEESDVDLTATQSPGVQEWLAQARTTWTQQRQSSLQQQKELEQELAEQKSLLRSVASRGEEILIQHSAAETSGDAGEKPDVLSQELGMEGEKSSAEDQMRMKWESLHQEFSTKQKLLQNVLEQEQEQVLYSRPNRLLSGVPLYKGDVPTQDKSAVTSLLDGLNQAFEEVSSQSGGAKRQSIHLEQKLYDGVSATSTWLDDVEERLFVATALLPEETETCLFNQEILAKDIKEMSEEMDKNKNLFSQAFPENGDNRDVIEDTLGCLLGRLSLLDSVVNQRCHQMKERLQQILNFQNDLKVLFTSLADNKYIILQKLANVFEQPVAEQIEAIQQAEDGLKEFDAGIIELKRRGDELQVEQPSMQELSKLQDMYDELMMIIGSRRSGLNQNLTLKSQYERALQDLADLLETGQEKMAGDQKIIVSSKEEIQQPLDKHKEYFQGLESHMILTVTLFRKIISFAVQKETQFHTELMAQASAVLKRAHKRGVELEYILETWSHLDEDQQELSRQLEVVESSIPSVGLVEENEDRLIDRITLYQHLKSSLNEYQPKLYQVLDDGKRLLISISCSDLESQLNQLGECWLSNTNKMSKELHRLETILKHWTRYQSESADLIHWLQSAKDRLEFWTQQSVTVPQELEMVRDHLNAFLEFSKEVDAQSSLKSSVLSTGNQLLRLKKVDTATLRSELSRIDSQWTDLLTNIPAVQEKLHQLQMDKLPSRHAISEVMSWTSLMENAIQKDEDNIKNSIGYKAIHEYLQKYKGFKIDINCKQLTVDFVNQSVLQISSQDVESKRSDKTDFAEQLGAMNKSWQILQGLVTEKIQLLEGLLESWSEYENNVQCLKTWFETQEKRLKQQHRIGDQASVQNALKDCQDLEDLIKAKDKEVEKIEQNGLALIQTKKEDVSSIVMSTLRELGQTWANLDHMVGQLKILLKSVLDQWSSHKVAFDKINSYLMEARYSLSRFRLLTGSLEAVQVQVDNLQNLQDDLEKQERSLQKFGSITNQLLKECHPPVTETLTNTLKEVNMRWNNLLEEIAEQLQSSKALLQLWQRYKDYSKQCASTVQQQEDRTNELLKAATNKDIADDEVATWIQDCNDLLKGLGTVKDSLFVLHELGEQLKQQVDASAASAIQSDQLSLSQHLCALEQALCKQQTSLQAGVLDYETFAKSLEALEAWIVEAEEILQGQDPSHSSDLSTIQERMEELKGQMLKFSSMAPDLDRLNELGYRLPLNDKEIKRMQNLNRHWSLISSQTTERFSKLQSFLLQHQTFLEKCETWMEFLVQTEQKLAVEISGNYQHLLEQQRAHELFQAEMFSRQQILHSIIIDGQRLLEQGQVDDRDEFNLKLTLLSNQWQGVIRRAQQRRGIIDSQIRQWQRYREMAEKLRKWLVEVSYLPMSGLGSVPIPLQQARTLFDEVQFKEKVFLRQQGSYILTVEAGKQLLLSADSGAEAALQAELAEIQEKWKSASMRLEEQKKKLAFLLKDWEKCEKGIADSLEKLRTFKKKLSQSLPDHHEELHAEQMRCKELENAVGSWTDDLTQLSLLKDTLSAYISADDISILNERVELLQRQWEELCHQLSLRRQQIGERLNEWAVFSEKNKELCEWLTQMESKVSQNGDILIEEMIEKLKKDYQEEIAIAQENKIQLQQMGERLAKASHESKASEIEYKLGKVNDRWQHLLDLIAARVKKLKETLVAVQQLDKNMSSLRTWLAHIESELAKPIVYDSCNSEEIQRKLNEQQELQRDIEKHSTGVASVLNLCEVLLHDCDACATDAECDSIQQATRNLDRRWRNICAMSMERRLKIEETWRLWQKFLDDYSRFEDWLKSSERTAAFPSSSGVIYTVAKEELKKFEAFQRQVHECLTQLELINKQYRRLARENRTDSACSLKQMVHEGNQRWDNLQKRVTSILRRLKHFIGQREEFETARDSILVWLTEMDLQLTNIEHFSECDVQAKIKQLKAFQQEISLNHNKIEQIIAQGEQLIEKSEPLDAAIIEEELDELRRYCQEVFGRVERYHKKLIRLPLPDDEHDLSDRELELEDSAALSDLHWHDRSADSLLSPQPSSNLSLSLAQPLRSERSGRDTPASVDSIPLEWDHDYDLSRDLESAMSRALPSEDEEGQDDKDFYLRGAVALSGDHSALESQIRQLGKALDDSRFQIQQTENIIRSKTPTGPELDTSYKGYMKLLGECSSSIDSVKRLEHKLKEEEESLPGFVNLHSTETQTAGVIDRWELLQAQALSKELRMKQNLQKWQQFNSDLNSIWAWLGDTEEELEQLQRLELSTDIQTIELQIKKLKELQKAVDHRKAIILSINLCSPEFTQADSKESRDLQDRLSQMNGRWDRVCSLLEEWRGLLQDALMQCQGFHEMSHGLLLMLENIDRRKNEIVPIDSNLDAEILQDHHKQLMQIKHELLESQLRVASLQDMSCQLLVNAEGTDCLEAKEKVHVIGNRLKLLLKEVSRHIKELEKLLDVSSSQQDLSSWSSADELDTSGSVSPTSGRSTPNRQKTPRGKCSLSQPGPSVSSPHSRSTKGGSDSSLSEPGPGRSGRGFLFRVLRAALPLQLLLLLLIGLACLVPMSEEDYSCALSNNFARSFHPMLRYTNGPPPL

SEQ ID NO: 207 - DNA, 8192 bp, Homosapiens
cggccgccggccgcagcgggctgagattgttgtcctctgtcaccagggcggctgggctcccgcagtcctgcagaccgcgcccgatcccggcgacagggcgggcggacagccgcgcatccccggggtcccgccgagcctgggcgcagagagccgggaggaagcgttcgctcgcttcgccttgctgctgggaaactgaacgaggccgagagagaaggttcttgagttcatgtaagaggacagtcttaaaacggaagaagaaaaagaagcagttcagtctttgggagagctgcctccttgttgagtgctgcaaaggcctggaattcatttatgacagaatagatctagaaaagtccaagcatgttttctagagtggtgtagccctgtgctgcctccagtgaagagtctcttggtgttggcttcgtgcttccggagggaccatggcaacctccagaggggcctcccggtgtcctcgggatatcgccaatgtgatgcagaggctgcaagatgagcaagagatagtacaaaaacgaactttcacaaaatggatcaactctcatctggccaagcggaaacctccaatggtggtggacgatctttttgaagacatgaaagatggtgttaaactgcttgcccttctggaggtcctgtctgggcagaaactgccttgtgaacaaggacgccggatgaagcgaatccatgctgtggctaacattggcacggcactcaagttcctcgaaggaagaaagtccatgcacagaggatcaccgattaaattagtcaacattaactccaccgatatagctgatggccgaccctcaatagttcttggattgatgtggaccattattctatatttccagattgaagagttgaccagcaacctgccccagctccagtctttgtccagcagcgcatcctccgtggacagcatagttagctctgagactcccagcccaccaagtaaacggaaggtgaccaccaagatccaaggaaatgctaagaaggctttattaaagtgggttcagtacacagctggcaagcagactggaatagaagtaaaagattttgggaagagttggagaagcggggttgcctttcattcagttattcatgccattcgaccggaattggtggacttggagacagtgaaaggcagatccaaccgagaaaatttggaggatgctttcactatcgccgaaacagaactggggatcccaagactgctagatcctgaagacgttgatgtggataaaccagatgagaaatctattatgacctatgtagcccagtttctgaaacattatcctgacatccacaatgcaagcactgatgggcaagaggatgatgaaatacttccaggtttcccatcttttgcaaattctgtacaaaattttaagagagaagacagagtaatttttaaggaaatgaaagtttggatagaacaatttgagagagatttgacaagagcacagatggtggaatcaaatttacaggataaatatcagtcatttaagcacttcagagttcaatatgaaatgaagaggaaacagattgaacatttaatacaaccattacacagagacggtaaattgtcacttgaccaagcattggtaaaacaatcttgggatagagtgacctccaggctctttgactggcatatacagcttgataaatctcttcctgcacctctgggcaccataggtgcctggctgtacagagcggaggtggccctgagagaggaaataaccgttcaacaggtccacgaggaaacagcaaacacgatacaacggaaacttgagcaacataaggatctgcttcaaaacacggatgcccacaaaagagcattccatgaaatctaccggaccaggtctgttaacgggattccagtgccacctgatcaattagaggacatggccgagaggtttcattttgtttcctccacatcagagctacacctaatgaaaatggaatttttagaattaaagtaccgtctgctctcactgctggttcttgcagagtcaaagctgaagtcttggatcattaagtacgggaggagagagtcagtggagcagcttctacaaaactacgtgtcttttatagaaaatagcaagttctttgaacaatatgaggtgacataccagatcttgaaacagacagctgagatgtatgtcaaagcagatggttcagtggaagaagctgagaatgtgatgaaattcatgaatgaaaccaccgctcagtggaggaatctctcagtagaagtgaggagtgtgaggagcatgctggaagaagtgatctctaactgggatcgctatggcaatacagtggctagtctgcaagcctggctagaggatgctgaaaaaatgctcaatcaatcagaaaatgccaaaaaggatttttttcgaaatttacctcattggattcagcagcatactgccatgaacgatgctggcaattttctaattgaaacctgtgatgagatggtttcccgtgacctgaagcagcaattactgttgctaaatgggcggtggagggagttgtttatggaagtcaagcaatatgctcaagctgatgagatggacagaatgaagaaggaatacacagactgtgttgttaccctgtctgcttttgcaacggaagcccataagaaactttctgaacccttagaagtctcttttatgaatgtcaagctattaattcaagacttggaggatattgagcagagggtgcctgtgatggatgcccaatacaagataattacaaagacagcacacctcattaccaaagaaagcccccaagaagaaggaaaagaaatgtttgcgaccatgtcaaagctcaaagagcagctaaccaaggtcaaagaatgttactccccactcctttatgagtctcagcagctgttgattccgttggaggaattagaaaagcagatgacgtccttttatgactcacttgggaaaatcaatgaaattatcacagttcttgagcgtgaggcacaatcgagtgccctttttaaacaaaaacatcaggaactgttagcttgtcaagaaaactgtaagaaaaccttgacacttattgagaaaggcagtcaaagtgttcaaaagtttgtgaccttgagcaacgtgttaaagcattttgatcagacgaggctacaaagacagattgcagatattcatgttgcttttcagagtatggtaaagaaaactggagattggaagaagcatgtggaaaccaacagtcgcttgatgaagaagtttgaggagtctcgagcagagttggagaaggtactgcggattgctcaggagggcctggaggaaaagggggatccagaggagctcctgcggagacacactgagtttttcagtcagctggatcagagggtgctcaatgctttcctgaaagcttgtgatgaactcaccgacatccttccagagcaggagcagcaggggctgcaggaagctgttcgaaagctccacaaacaatggaaggatcttcaaggagaagccccttatcatttgcttcatctgaagattgatgtggagaagaataggttcttagcctctgtagaagaatgcagaactgagctggatcgagagaccaagctgatgccccaggaaggcagtgaaaagataattaaagagcacagggttttcttcagtgacaaaggtcctcatcatctctgtgagaaaaggttacagctcatcgaggaactctgtgtgaaactcccagtgcgggacccagtaagggacacacctggaacctgtcacgtgactctcaaagagctcagagctgccattgacagcacctacaggaagctcatggaagacccagacaagtggaaggactacactagcagattctctgagttctcatcttggatatctacaaatgagacacaattaaaggggatcaagggtgaggccatcgatactgccaaccacggagaggttaaacgtgccgttgaagagatcagaaatggtgttaccaaaaggggtgagaccctcagctggctgaaatccaggctgaaagttttgacagaagtttcttctgagaatgaagcccaaaagcagggagatgagctggcaaaattatccagctctttcaaggctcttgtgacgctgctgtcagaggttgaaaagatgctaagcaattttggggactgtgtccagtacaaagaaatagtcaaaaattctctcgaagaattaatttctggctctaaagaagtccaggaacaagctgagaagatcttggatactgaaaatctgtttgaagcacagcagttacttcttcatcaccagcaaaagacaaagcggatctcagcaaagaagagagatgtgcagcagcagatcgcgcaggcgcagcagggagaaggggggctgcctgaccgaggccacgaggagctgcggaagctggagagcacactggatggcctggagcgcagccgggagaggcaggaacgccgcatccaggtcacattaagaaaatgggagcgatttgaaacaaacaaagaaacagtagtaagatacctttttcaaacaggttccagtcatgaacgcttcttgagttttagcagtttggaaagtttatcttcagaactggaacaaacaaaggagttttctaaacggacagaaagtattgcagtccaggctgagaaccttgtaaaggaagcttcagagataccgcttgggccccaaaataagcagctgcttcaacagcaggccaagtcaatcaaagaacaagtcaaaaaattagaagacacgcttgaagaagatattaaaaccatggaaatggtgaaaaccaagtgggatcattttggcagtaattttgagactctgtccgtctggataactgagaaagaaaaagaactcaatgccttggaaacttcgtcatctgccatggacatgcaaatcagccaaattaaggtcacaattcaggaaatagaaagtaagctcagcagcattgtaggattagaagaagaagcccagtcttttgctcagtttgttaccactggagaatctgctcgaattaaagccaagttgacacaaataagaagatacggggaagagcttcgagagcatgcacagtgtctggaaggaacaatcctgggacatttatctcagcagcaaaagtttgaagagaaccttagaaagatccagcaatctgtgtctgaatttgaagataaacttgctgttccaattaaaatatgttcttcagctacagaaacatacaaagttcttcaagaacatatggatctctgccaggccctggagtcactgagcagcgcgatcactgccttctcagccagtgccaggaaggttgtgaacagagattcctgtgttcaggaggctgcggctctacagcagcaatacgaggacatcctaaggagggcgaaggagagacagacggcgctggagaatctgctggcccactggcagaggctagagaaagaactatcatcctttttgacctggttagagcggggtgaagctaaagccagttccccagaaatggacatttctgcagacagagtcaaagtggaaggtgaacttcagttaatacaggcactgcaaaatgaagttgtatcccaggcctcattctatagcaaacttttgcaattgaaggaatcattgttctcagtagcctccaaagatgatgtgaaaatgatgaaactacatttggagcagttggatgagagatggagagatttaccacagatcattaacaaaaggattaattttcttcagtctgtggttgctgaacaccagcaatttgatgagctgctgctttccttttctgtctggattaaactgtttctcagtgaattacaaactacctctgagattagcataatggaccatcaagtagcccttactcggcataaggaccacgcagcagaagtagagagcaaaaagggcgaattgcagagtctgcagggtcacttagcaaagttgggttctctgggccgtgctgaggacctccacctcctgcagggaaaggctgaggactgcttccagctgtttgaggaggccagccaggttgtggagaggcggcagcttgccctgtcccatttggcagaattcctccagagccatgcctctctgtccggcattctccgccagctgaggcaaacagtggaagcaaccaacagtatgaataagaacgagtctgatttgatagaaaaggacctcaatgatgctcttcaaaatgctaaagcattagaatctgctgccgtcagtctggatggcattctttccaaagcccaataccatctgaaaatcgggagctctgagcaaaggacttcctgcagagccacggctgatcagctctgtggagaggtagagaggatccagaaccttctgggaaccaagcagagtgaggcagatgctctggcagtgttgaaaaaagcattccaagaccagaaagaggagcttctgaaaagcattgaggacattgaagaaaggactgacaaagagcgattgaaagaacctacccgccaagctcttcagcagaggttaagagtgtttaatcagctagaagatgaattgaattctcacgagcatgaactatgttggttgaaagacaaagccaagcaaattgcccagaaagatgtagcttttgcacctgaagttgacagggagataaaccgcttagaggtcacctgggatgataccaaaagactaattcatgaaaatcagggtcagtgctgtggacttattgacttaatgagagaatatcagaacctgaaatcagctgtatctaaagtcttagaaaatgccagcagtgtgattgtaaccagaactaccataaaagatcaggaggatcttaaatgggctttttccaagcatgaaactgccaagaacaaaatgaattacaaacagaaagacttggataactttaccagcaaaggaaaacacttgttatctgagctgaagaaaattcacagtagtgatttcagcttggtgaaaacagacatggagagcaccgtggacaaatggctggatgtatcagagaaacttgaagaaaacatggataggctgagagtaagcctgtccatttgggatgatgtactgtcaactagagatgagattgagggatggtcaaacaactgcgttccacagatggcagaaaacatcagcaacctggataaccacctcagagctgaagaactgcttaaagaatttgagtctgaagttaaaaacaaagcattgagattggaagaactgcattccaaagttaatgatctgaaagaattaactaaaaatctagaaacaccgccagaccttcagtttatagaagcagacttaatgcagaaactggagcatgccaaagaaataactgaagtagcaaaaggaaccctgaaggatttcacggctcaaagtacacaagtggagaagtttattaatgacataacaacatggttcacaaaagtggaagaatcgttgatgaactgtgcccaaaatgagacttgtgaagcattgaaaaaagtcaaggatatacaaaaagaacttcaaagtcaacaaagcaacatcagctctacccaagaaaatctcaatagcttgtgccgcaagtaccactcagctgagttggagagcctgggccgtgcaatgactggtctgataaagaaacatgaagccgtgagccagttgtgctccaaaacccaggccagcctgcaggaatctctggaaaaacacttcagtgagtctatgcaggaattccaagaatggtttttgggagcaaaggcagcagcaaaagaatcatcagatcgcaccggtgacagcaaagttctagaagcaaagctccatgatcttcagaacattttggactcagtcagtgatgggcagagcaaacttgatgcagtgactcaagaaggacaaactttgtatgcacatttgtctaaacaaattgtcagtagcattcaagaacaaatcacaaaggccaatgaagagtttcaagcatttctgaaacaatgccttaaagataagcaggctcttcaagactgtgcttcagaacttggaagctttgaagatcagcacagaaaactgaacttatggatccatgaaatggaagaaaggttcaatacggaaaacttgggagagagtaaacagcacattcctgagaagaaaaatgaagttcataaagttgaaatgtttttgggagaactgctggctgcaagagagtctcttgataagctttcc

SEQ ID NO: 208 - protein, 8192 aa, Homosapiens
MATSRGASRCPRDIANVMQRLQDEQEIVQKRTFTKWINSHLAKRKPPMVVDDLFEDMKDGVKLLALLEVLSGQKLPCEQGRRMKRIHAVANIGTALKFLEGRKSMHRGSPIKLVNINSTDIADGRPSIVLGLMWTIILYFQIEELTSNLPQLQSLSSSASSVDSIVSSETPSPPSKRKVTTKIQGNAKKALLKWVQYTAGKQTGIEVKDFGKSWRSGVAFHSVIHAIRPELVDLETVKGRSNRENLEDAFTIAETELGIPRLLDPEDVDVDKPDEKSIMTYVAQFLKHYPDIHNASTDGQEDDEILPGFPSFANSVQNFKREDRVIFKEMKVWIEQFERDLTRAQMVESNLQDKYQSFKHFRVQYEMKRKQIEHLIQPLHRDGKLSLDQALVKQSWDRVTSRLFDWHIQLDKSLPAPLGTIGAWLYRAEVALREEITVQQVHEETANTIQRKLEQHKDLLQNTDAHKRAFHEIYRTRSVNGIPVPPDQLEDMAERFHFVSSTSELHLMKMEFLELKYRLLSLLVLAESKLKSWIIKYGRRESVEQLLQNYVSFIENSKFFEQYEVTYQILKQTAEMYVKADGSVEEAENVMKFMNETTAQWRNLSVEVRSVRSMLEEVISNWDRYGNTVASLQAWLEDAEKMLNQSENAKKDFFRNLPHWIQQHTAMNDAGNFLIETCDEMVSRDLKQQLLLLNGRWRELFMEVKQYAQADEMDRMKKEYTDCVVTLSAFATEAHKKLSEPLEVSFMNVKLLIQDLEDIEQRVPVMDAQYKIITKTAHLITKESPQEEGKEMFATMSKLKEQLTKVKECYSPLLYESQQLLIPLEELEKQMTSFYDSLGKINEIITVLEREAQSSALFKQKHQELLACQENCKKTLTLIEKGSQSVQKFVTLSNVLKHFDQTRLQRQIADIHVAFQSMVKKTGDWKKHVETNSRLMKKFEESRAELEKVLRIAQEGLEEKGDPEELLRRHTEFFSQLDQRVLNAFLKACDELTDILPEQEQQGLQEAVRKLHKQWKDLQGEAPYHLLHLKIDVEKNRFLASVEECRTELDRETKLMPQEGSEKIIKEHRVFFSDKGPHHLCEKRLQLIEELCVKLPVRDPVRDTPGTCHVTLKELRAAIDSTYRKLMEDPDKWKDYTSRFSEFSSWISTNETQLKGIKGEAIDTANHGEVKRAVEEIRNGVTKRGETLSWLKSRLKVLTEVSSENEAQKQGDELAKLSSSFKALVTLLSEVEKMLSNFGDCVQYKEIVKNSLEELISGSKEVQEQAEKILDTENLFEAQQLLLHHQQKTKRISAKKRDVQQQIAQAQQGEGGLPDRGHEELRKLESTLDGLERSRERQERRIQVTLRKWERFETNKETVVRYLFQTGSSHERFLSFSSLESLSSELEQTKEFSKRTESIAVQAENLVKEASEIPLGPQNKQLLQQQAKSIKEQVKKLEDTLEEDIKTMEMVKTKWDHFGSNFETLSVWITEKEKELNALETSSSAMDMQISQIKVTIQEIESKLSSIVGLEEEAQSFAQFVTTGESARIKAKLTQIRRYGEELREHAQCLEGTILGHLSQQQKFEENLRKIQQSVSEFEDKLAVPIKICSSATETYKVLQEHMDLCQALESLSSAITAFSASARKVVNRDSCVQEAAALQQQYEDILRRAKERQTALENLLAHWQRLEKELSSFLTWLERGEAKASSPEMDISADRVKVEGELQLIQALQNEVVSQASFYSKLLQLKESLFSVASKDDVKMMKLHLEQLDERWRDLPQIINKRINFLQSVVAEHQQFDELLLSFSVWIKLFLSELQTTSEISIMDHQVALTRHKDHAAEVESKKGELQSLQGHLAKLGSLGRAEDLHLLQGKAEDCFQLFEEASQVVERRQLALSHLAEFLQSHASLSGILRQLRQTVEATNSMNKNESDLIEKDLNDALQNAKALESAAVSLDGILSKAQYHLKIGSSEQRTSCRATADQLCGEVERIQNLLGTKQSEADALAVLKKAFQDQKEELLKSIEDIEERTDKERLKEPTRQALQQRLRVFNQLEDELNSHEHELCWLKDKAKQIAQKDVAFAPEVDREINRLEVTWDDTKRLIHENQGQCCGLIDLMREYQNLKSAVSKVLENASSVIVTRTTIKDQEDLKWAFSKHETAKNKMNYKQKDLDNFTSKGKHLLSELKKIHSSDFSLVKTDMESTVDKWLDVSEKLEENMDRLRVSLSIWDDVLSTRDEIEGWSNNCVPQMAENISNLDNHLRAEELLKEFESEVKNKALRLEELHSKVNDLKELTKNLETPPDLQFIEADLMQKLEHAKEITEVAKGTLKDFTAQSTQVEKFINDITTWFTKVEESLMNCAQNETCEALKKVKDIQKELQSQQSNISSTQENLNSLCRKYHSAELESLGRAMTGLIKKHEAVSQLCSKTQASLQESLEKHFSESMQEFQEWFLGAKAAAKESSDRTGDSKVLEAKLHDLQNILDSVSDGQSKLDAVTQEGQTLYAHLSKQIVSSIQEQITKANEEFQAFLKQCLKDKQALQDCASELGSFEDQHRKLNLWIHEMEERFNTENLGESKQHIPEKKNEVHKVEMFLGELLAARESLDKLSQRGQLLSEEGHGAGQEGRLCSQLLTSHQNLLRMTKEKLRSCQVALQEHEALEEALQSMWFWVKAIQDRLACAESTLGSKDTLEKRLSQIQDILLMKGEGEVKLNMAIGKGEQALRSSNKEGQRVIQTQLETLKEVWADIMSSSVHAQSTLESVISQWNDYVERKNQLEQWMESVDQKIEHPLQPQPGLKEKFVLLDHLQSILSEAEDHTRALHRLIAKSRELYEKTEDESFKDTAQEELKTQFNDIMTVAKEKMRKVEEIVKDHLMYLDAVHEFTDWLHSAKEELHRWSDMSGDSSATQKKLSKIKELIDSREIGASRLSRVESLAPEVKQNTTASGCELMHTEMQALRADWKQWEDSVFQTQSCLENLVSQMALSEQEFSGQVAQLEQALEQFSALLKTWAQQLTLLEGKNTDEEIVECWHKGQEILDALQKAEPRTEDLKSQLNELCRFSRDLSTYSGKVSGLIKEYNCLCLQASKGCQNKEQILQQRFRKAFRDFQQWLVNAKITTAKCFDIPQNISEVSTSLQKIQEFLSESENGQHKLNMMLSKGELLSTLLTKEKAKGIQAKVTAAKEDWKNFHSNLHQKESALENLKIQMKDFEVSAEPIQDWLSKTEKMVHESSNRLYDLPAKRREQQKLQSVLEEIHCYEPQLNRLKEKAQQLWEGQAASKSFRHRVSQLSSQYLALSNLTKEKVSRLDRIVAEHNQFSLGIKELQDWMTDAIHMLDSYCHPTSDKSVLDSRTLKLEALLSVKQEKEIQMKMIVTRGESVLQNTSPEGIPTIQQQLQSVKDMWASLLSAGIRCKSQLEGALSKWTSYQDGVRQFSGWMDSMEANLNESERQHAELRDKTTMLGKAKLLNEEVLSYSSLLETIEVKGAGMTEHYVTQLELQDLQERYRAIQERAKEAVTKSEKLVRLHQEYQRDLKAFEVWLGQEQEKLDQYSVLEGDAHTHETTLRDLQELQVHCAEGQALLNSVLHTREDVIPSGIPQAEDRALESLRQDWQAYQHRLSETRTQFNNVVNKLRLMEQKFQQVDEWLKTAEEKKWHEEVTAYRDEVEEVGARAQEILDESHVNSRMGCQATQLTSRYQALLLQVLEQIKFLEEEIQSLEESESSLSSYSDWYGSTHKNFKNVATKIDKVDTVMMGKKLKTLEVLLKDMEKGHSLLKSAREKGERAVKYLEEGEAERLRKEIHDHMEQLKELTSTVRKEHMTLEKGLHLAKEFSDKCKALTQWIAEYQEILHVPEEPKMELYEKKAQLSKYKSLQQTVLSHEPSVKSVREKGEALLELVQDVTLKDKIDQLQSDYQDLCSIGKAMMEEIAGFEDRLNNLQMKGDTLIGQCADHLQAKLKQNVHAHLQGTKDSYSAICSTAQRMYQSLEHELQKHVSRQDTLQQCQAWLSAVQPDLEPSPQPPLSRAEAIKQVKHFRALQEQARTYLDLLCSMCDLSNASVKTTAKDIQQTEQTIEQKLVQAQNLTQGWEEIKHLKSELWIYLQDADQQLQNMKRRHSELELNIAQNMVSQVKDFVKKLQSKQASVNTIIEKVNKLTKKEESPEHKEINHLNDQWLDLCRQSNNLCLQREEDLQRTRDYHDCMNVVEVFLEKFTTEWDNLARSDAESTAVHLEALKKLALALQERKYAIEDLKDQKQKMIEHLNLDDKELVKEQTSHLEQRWFQLEDLIKRKIQVSVTNLEELNVVQSRFQELMEWAEEQQPNIAEALKQSPPPDMAQNLLMDHLAICSELEAKQMLLKSLIKDADRVMADLGLNERQVIQKALSDAQSHVNCLSDLVGQRRKYLNKALSEKTQFLMAVFQATSQIQQHERKIMFREHICLLPDDVSKQVKTCKSAQASLKTYQNEVTGLWAQGRELMKEVTEQEKSEVLGKLQELQSVYDSVLQKCSHRLQELEKNLVSRKHFKEDFDKACHWLKQADIVTFPEINLMNESSELHTQLAKYQNILEQSPEYENLLLTLQRTGQTILPSLNEVDHSYLSEKLNALPRQFNVIVALAKDKFYKVQEAILARKEYASLIELTTQSLSELEAQFLRMSKVPTDLAVEEALSLQDGCRAILDEVAGLGEAVDELNQKKEGFRSTGQPWQPDKMLHLVTLYHRLKRQTEQRVSLLEDTTSAYQEHEKMCQQLERQLKSVKEEQSKVNEETLPAEEKLKMYHSLAGSLQDSGIVLKRVTIHLEDLAPHLDPLAYEKARHQIQSWQGELKLLTSAIGETVTECESRMVQSIDFQTEMSRSLDWLRRVKAELSGPVYLDLNLQDIQEEIRKIQIHQEEVQSSLRIMNALSHKEKEKFTKAKELISADLEHSLAELSELDGDIQEALRTRQATLTEIYSQCQRYYQVFQAANDWLEDAQELLQLAGNGLDVESAEENLKSHMEFFSTEDQFHSNLEELHSLVATLDPLIKPTGKEDLEQKVASLELRSQRMSRDSGAQVDLLQRCTAQWHDYQKAREEVIELMNDTEKKLSEFSLLKTSSSHEAEEKLSEHKALVSVVNSFHEKIVALEEKASQLEKTGNDASKATLSRSMTTVWQRWTRLRAVAQDQEKILEDAVDEWTGFNNKVKKATEMIDQLQDKLPGSSAEKASKAELLTLLEYHDTFVLELEQQQSALGMLRQQTLSMLQDGAAPTPGEEPPLMQEITAMQDRCLNMQEKVKTNGKLVKQELKDREMVETQINSVKCWVQETKEYLGNPTIEIDAQLEELQILLTEATNHRQNIEKMAEEQKEKYLGLYTILPSELSLQLAEVALDLKIRDQIQDKIKEVEQSKATSQELSRQIQKLAKDLTTILTKLKAKTDNVVQAKTDQKVLGEELDGCNSKLMELDAAVQKFLEQNGQLGKPLAKKIGKLTELHQQTIRQAENRLSKLNQAASHLEEYNEMLELILKWIEKAKVLAHGTIAWNSASQLREQYILHQTLLEESKEIDSELEAMTEKLQYLTSVYCTEKMSQQVAELGRETEELRQMIKIRLQNLQDAAKDMKKFEAELKKLQAALEQAQATLTSPEVGRLSLKEQLSHRQHLLSEMESLKPKVQAVQLCQSALRIPEDVVASLPLCHAALRLQEEASRLQHTAIQQCNIMQAAVVQYEQYEQEMKHLQQLIEGAHREIEDKPVATSNIQELQAQISRHEELAQKIKGYQEQIASLNSKCKMLTMKAKHATMLLTVTEVEGLAEGTEDLDGELLPTPSAHPSVVMMTAGRCHTLLSPVTEESGEEGTNSEISSPPACRSPSPVANTDASVNQDIAYYQALSAERLQTDAAKIHPSTSASQEFYEPGLEPSATAKLGDLQRSWETLKNVISEKQRTLYEALERQQKYQDSLQSISTKMEAIELKLSESPEPGRSPESQMAEHQALMDEILMLQDEINELQSSLAEELVSESCEADPAEQLALQSTLTVLAERMSTIRMKASGKRQLLEEKLNDQLEEQRQEQALQRYRCEADELDSWLLSTKATLDTALSPPKEPMDMEAQLMDCQNMLVEIEQKVVALSELSVHNENLLLEGKAHTKDEAEQLAGKLRRLKGSLLELQRALHDKQLNMQGTAQEKEESDVDLTATQSPGVQEWLAQARTTWTQQRQSSLQQQKELEQELAEQKSLLRSVASRGEEILIQHSAAETSGDAGEKPDVLSQELGMEGEKSSAEDQMRMKWESLHQEFSTKQKLLQNVLEQEQEQVLYSRPNRLLSGVPLYKGDVPTQDKSAVTSLLDGLNQAFEEVSSQSGGAKRQSIHLEQKLYDGVSATSTWLDDVEERLFVATALLPEETETCLFNQEILAKDIKEMSEEMDKNKNLFSQAFPENGDNRDVIEDTLGCLLGRLSLLDSVVNQRCHQMKERLQQILNFQNDLKVLFTSLADNKYIILQKLANVFEQPVAEQIEAIQQAEDGLKEFDAGIIELKRRGDKLQVEQPSMQELSKLQDMYDELMMIIGSRRSGLNQNLTLKSQYERALQDLADLLETGQEKMAGDQKIIVSSKEEIQQLLDKHKEYFQGLESHMILTETLFRKIISFAVQKETQFHTELMAQASAVLKRAHKRGVELEYILETWSHLDEDQQELSRQLEVVESSIPSVGLVEENEDRLIDRITLYQHLKSSLNEYQPKLYQVLDDGKRLLISISCSDLESQLNQLGECWLSNTNKMSKELHRLETILKHWTRYQSESADLIHWLQSAKDRLEFWTQQSVTVPQELEMVRDHLNAFLEFSKEVDAQSSLKSSVLSTGNQLLRLKKVDTATLRSELSRIDSQWTDLLTNIPAVQEKLHQLQMDKLPSRHAISEVMSWISLMENVIQKDEDNIKNSIGYKAIHEYLQKYKGFKIDINCKQLTVDFVNQSVLQISSQDVESKRSDKTDFAEQLGAMNKSWQILQGLVTEKIQLLEGLLESWSEYENNVQCLKTWFETQEKRLKQQHRIGDQASVQNALKDCQDLEDLIKAKEKEVEKIEQNGLALIQNKKEDVSSIVMSTLRELGQTWANLDHMVGQLKILLKSVLDQWSSHKVAFDKINSYLMEARYSLSRFRLLTGSLEAVQVQVDNLQNLQDDLEKQERSLQKFGSITNQLLKECHPPVTETLTNTLKEVNMRWNNLLEEIAEQLQSSKALLQLWQRYKDYSKQCASTVQQQEDRTNELLKAATNKDIADDEVATWIQDCNDLLKGLGTVKDSLFFLHELGEQLKQQVDASAASAIQSDQLSLSQHLCALEQALCKQQTSLQAGVLDYETFAKSLEALEAWIVEAEEILQGQDPSHSSDLSTIQERMEELKGQMLKFSSMAPDLDRLNELGYRLPLNDKEIKRMQNLNRHWSLISSQTTERFSKLQSFLLQHQTFLEKCETWMEFLVQTEQKLAVEISGNYQHLLEQQRAHELFQAEMFSRQQILHSIIIDGQRLLEQGQVDDRDEFNLKLTLLSNQWQGVIRRAQQRRGIIDSQIRQWQRYREMAEKLRKWLVEVSYLPMSGLGSVPIPLQQARTLFDEVQFKEKVFLRQQGSYILTVEAGKQLLLSADSGAEAALQAELAEIQEKWKSASMRLEEQKKKLAFLLKDWEKCEKGIADSLEKLRTFKKKLSQSLPDHHEELHAEQMRCKELENAVGSWTDDLTQLSLLKDTLSAYISADDISILNERVELLQRQWEELCHQLSLRRQQIGERLNEWAVFSEKNKELCEWLTQMESKVSQNGDILIEEMIEKLKKDYQEEIAIAQENKIQLQQMGERLAKASHESKASEIEYKLGKVNDRWQHLLDLIAARVKKLKETLVAVQQLDKNMSSLRTWLAHIESELAKPIVYDSCNSEEIQRKLNEQQELQRDIEKHSTGVASVLNLCEVLLHDCDACATDAECDSIQQATRNLDRRWRNICAMSMERRLKIEETWRLWQKFLDDYSRFEDWLKSSERTAAFPSSSGVIYTVAKEELKKFEAFQRQVHECLTQLELINKQYRRLARENRTDSACSLKQMVHEGNQRWDNLQKRVTSILRRLKHFIGQREEFETARDSILVWLTEMDLQLTNIEHFSECDVQAKIKQLKAFQQEISLNHNKIEQIIAQGEQLIEKSEPLDAAIIEEELDELRRYCQEVFGRVERYHKKLIRLPLPDDEHDLSDRELELEDSAALSDLHWHDRSADSLLSPQPSSNLSLSLAQ

SEQ ID NO: 209 - DNA, 3801 bp, Homosapiens
aaggtaaagccactagagagaaactgaaagaaaacattcttaagataaattgaattgacattttctctctaaaatatgatttatagaccacagataggaattaagagtttcctgataattttggcttcatattattttaaaggattatcaagaggaaattgctattgctcaagagaacaaaatacagctccaacaaatgggagaacgacttgctaaagccagccatgaaagcaaagcatctgagattgaatacaagctgggaaaggtcaacgaccggtggcagcatctcctggacctcattgcagccagggtgaagaagctgaaggagaccctggtagccgtgcagcagcttgataagaacatgagcagcctgaggacctggctcgctcacatcgagtcagagctggccaagccaatagtctacgattcctgtaactcggaagaaatacagagaaagcttaatgagcagcaggagcttcagagagacatagagaagcacagtacaggtgttgcatctgtcctcaacctgtgtgaagtcctgctgcacgactgtgacgcctgtgccactgatgccgagtgtgactctatacagcaggctacgagaaacctggaccggcggtggagaaacatttgtgctatgtccatggaaaggaggctgaaaatcgaagagacgtggcgattgtggcagaaatttctggatgactattcacgttttgaagattggctgaagtcttcagaaaggacagctgcttttcccagctcttctggggtgatctatacagttgccaaggaagaactaaagaaatttgaggctttccagcgacaggtccacgagtgcctgacgcagctggaactgatcaacaagcagtaccgccgcctggccagggagaaccgcactgattcagcatgtagcctcaaacagatggttcacgaaggcaaccagagatgggacaacctgcaaaagcgtgtcacctccatcttgcgcagactcaagcattttattggccagcgtgaggagtttgagactgcgcgggacagcattctggtctggctcacagagatggatctgcagctcactaatattgaacatttttctgagtgtgatgttcaagctaaaataaagcaactcaaggccttccagcaggaaatttcactgaaccacaataagattgagcagataattgcccaaggagaacagctgatagaaaagagtgagcccttggatgcagcgatcatcgaggaggaactagatgagctccgacggtactgccaggaggtcttcgggcgtgtggaaagataccataagaaactgatccgcctgcctctcccagacgatgagcacgacctctcagacagggagctggagctggaagactctgcagctctgtcggacctgcactggcacgaccgctctgcagacagcctgctttctccacagccttcctccaatctctccctctcgctcgctcagcccctccggagcgagcggtcaggacgagacaccccagctagtgtggactccatccccctggagtgggatcacgactatgacctcagtcgggacctggagtctgcaatgtccagagctctgccctctgaggatgaagaaggtcaggatgacaaagatttctacctccggggagctgttgccttatcagatgtaatgatccccgaaagccctgaggcctatgtaaaactcacagaaaatgcaatcaaaaatacctccggggaccacagtgccctagagtcacagatccgacaactgggcaaagccctggatgatagccgctttcagatacagcaaaccgaaaatatcattcgcagcaaaactcccacggggccggagctagacaccagctacaaaggctacatgaaactgctgggcgaatgcagtagcagtatagactccgtgaagagactggagcacaaactgaaggaggaagaggagagccttcctggctttgttaacctgcatagtaccgaaacccaaacggctggtgtgattgaccgatgggagcttctccaggcccaggcattgagcaaggagttgaggatgaagcagaacctccagaagtggcagcagtttaactcagacttgaacagcatctgggcctggctgggggacacggaggaggagttggaacagctccagcgtctggaactcagcactgacatccagaccatcgagctccagatcaaaaagctcaaggagctccagaaagctgtggaccaccgcaaagccatcatcctctccatcaatctctgcagccctgagttcacccaggctgacagcaaggagagccgggacctgcaggatcgcttgtcgcagatgaatgggcgctgggaccgagtgtgctctctgctggaggagtggcggggcctgctgcaggatgccctgatgcagtgccagggtttccatgaaatgagccatggtttgcttcttatgctggagaacattgacagaaggaaaaatgaaattgtccctattgattctaaccttgatgcagagatacttcaggaccatcacaaacagcttatgcaaataaagcatgagctgttggaatcccaactcagagtagcctctttgcaagacatgtcttgccaactactggtgaatgctgaaggaacagactgtttagaagccaaagaaaaagtccatgttattggaaatcggctcaaacttctcttgaaggaggtcagtcgtcatatcaaggaactggagaagttattagacgtgtcaagtagtcagcaggatttgtcttcctggtcttctgctgatgaactggacacctcagggtctgtgagtcccacatcaggaaggagcaccccaaacagacagaaaacgccacgaggcaagtgtagtctctcacagcctggaccctctgtcagcagtccacatagcaggtccacaaaaggtggctccgattcctccctttctgagccagggccaggtcggtccggccgcggcttcctgttcagagtcctccgagcagctcttccccttcagcttctcctgctcctcctcatcgggcttgcctgccttgtaccaatgtcagaggaagactacagctgtgccctctccaacaactttgcccggtcattccaccccatgctcagatacacgaatggccctcctccactctgaactaagcagatgccatctgcagaagtgctggtagcataaggaggatcgggtcataagcaatcccaaactaccaacaagaggaccttgatcttggcgaaagccctcggtgtggcagctttagccctcctccagatcacatgtgtgcaaattatggcttcagaggtggaagataaacagtgacgggggaacaaacagacaacaagaaggtttggaagaaatctggtttgagactctgaaccttagcactaaggagattgagtaaggacctccaaagttccccggactcatgaattctgggcccttggcccattctgtgcacagccaaggacttcagtagaccatctgggcagctttcccatggtgctgctccaaccatcagataaatgaccctcccaagcaccatgtcagtgtcgtacaatctaccaaccaaccagtgctgaagagattttagaaccttgtaacatacaatttttaagagcttatatggcagcttcctttttaccttgttttcctttggggcatgatgttttaacctttgctttagaagcacaagctgtaaatctaaaaggcacttttttttagaggtataaagaaaaactagatgtaataaataagatcatggaaggctttatgtgaaaaaagttgaatgttatagt

SEQ ID NO: 210 - protein, 982 aa, Homosapiens
MGERLAKASHESKASEIEYKLGKVNDRWQHLLDLIAARVKKLKETLVAVQQLDKNMSSLRTWLAHIESELAKPIVYDSCNSEEIQRKLNEQQELQRDIEKHSTGVASVLNLCEVLLHDCDACATDAECDSIQQATRNLDRRWRNICAMSMERRLKIEETWRLWQKFLDDYSRFEDWLKSSERTAAFPSSSGVIYTVAKEELKKFEAFQRQVHECLTQLELINKQYRRLARENRTDSACSLKQMVHEGNQRWDNLQKRVTSILRRLKHFIGQREEFETARDSILVWLTEMDLQLTNIEHFSECDVQAKIKQLKAFQQEISLNHNKIEQIIAQGEQLIEKSEPLDAAIIEEELDELRRYCQEVFGRVERYHKKLIRLPLPDDEHDLSDRELELEDSAALSDLHWHDRSADSLLSPQPSSNLSLSLAQPLRSERSGRDTPASVDSIPLEWDHDYDLSRDLESAMSRALPSEDEEGQDDKDFYLRGAVALSDVMIPESPEAYVKLTENAIKNTSGDHSALESQIRQLGKALDDSRFQIQQTENIIRSKTPTGPELDTSYKGYMKLLGECSSSIDSVKRLEHKLKEEEESLPGFVNLHSTETQTAGVIDRWELLQAQALSKELRMKQNLQKWQQFNSDLNSIWAWLGDTEEELEQLQRLELSTDIQTIELQIKKLKELQKAVDHRKAIILSINLCSPEFTQADSKESRDLQDRLSQMNGRWDRVCSLLEEWRGLLQDALMQCQGFHEMSHGLLLMLENIDRRKNEIVPIDSNLDAEILQDHHKQLMQIKHELLESQLRVASLQDMSCQLLVNAEGTDCLEAKEKVHVIGNRLKLLLKEVSRHIKELEKLLDVSSSQQDLSSWSSADELDTSGSVSPTSGRSTPNRQKTPRGKCSLSQPGPSVSSPHSRSTKGGSDSSLSEPGPGRSGRGFLFRVLRAALPLQLLLLLLIGLACLVPMSEEDYSCALSNNFARSFHPMLRYTNGPPPL

SEQ ID NO: 211 - DNA, 8192 bp, Homosapiens
cccgggcagtggaaaccgtgggcaaaagttagctggcaggacagcgcagctcctccaggcagcggaggcagcgcgtcccggctctcagggacatttccttcccacctcgacccccgggaggtggtcccggtataaaggctcgctgagcgggtgggtcacagcacagttttgcagctgcggagaaacgcccaaggccgtgcatctccaggagggcggctgggctcccgcagtcctgcagaccgcgcccgatcccggcgacagggcgggcggacagccgcgcatccccggggtcccgccgagcctgggcgcagagagccgggaggaagcattcgctcgcttcgccttgctgctgggaaactgaacgaggccgagagagaaggttcttgagttcatgtaagaggacagtcttaaaacggaagaagaaaaagaagcagttcagtctttgggagagctgcctccttgttgagtgctgcaaaggcctggaattcatttatgacagaatagatctagaaaagtccaagcatgttttctagagtggtgtagccctgtgctgcctccagtgaagagtctcttggtgttggcttcgtgcttccggagggaccatggcaacctccagaggggcctcccggtgtcctcgggatatcgccaatgtgatgcagaggctgcaagatgagcaagagatagtacaaaaacgaactttcacaaaatggatcaactctcatctggccaagcggaaacctccaatggtggtggacgatctttttgaagacatgaaagatggtgttaaactgcttgcccttctggaggtcctgtctgggcagaaactgccttgtgaacaaggacgccggatgaagcgaatccatgctgtggctaacattggcacggcactcaagctcctcgaaggaagaaagattaaattagtcaacattaactccaccgatatagccgatggccgaccctcaatagttcttggattgatgtggaccattattctatatttccagattgaagagttgaccagcaacctgccccagctccagtctttgtccagcagcgcatcctccgtggacagcatagttagctctgagactcccagcccaccaagtaaacggaaggtgaccaccaagatccaaggaaatgctaagaaggctttattaaagtgggttcagtacacagctggcaagcagactggaatagaagtaaaagattttgggaagagttggagaagcggggttgcctttcattcagttattcatgccattcgaccggaattggtggacttggagacagtgaaaggcagatccaaccgagaaaatttggaggatgctttcactatcgccgaaacagaactggggatcccaagactgctagatcctgaagacgttgatgtggataaaccagatgagaaatctattatgacctatgtagcccagtttctgaaacattatcctgacatccacaatgcaagcactgatgggcaagaggatgatgaaatacttccaggtttcccatcttttgcaaattctgtacaaaattttaagagagaagacagagtaatttttaaggaaatgaaagtttggatagaacaatttgagagagatttgacaagagcacagatggtggaatcaaatttacaggataaatatcagtcatttaagcacttcagagttcaatatgaaatgaagaggaaacagattgaacatttaatacaaccattacacagagacggtaaattgtcacttgaccaagcattggtaaaacaatcttgggatagagtgacctccaggctctttgactggcatatacagcttgataaatctcttcctgcacctctgggcaccataggtgcctggctgtacagagcggaggtggccctgagagaggaaataaccgttcaacaggtccacgaggaaacagcaaacacgatacaacggaaacttgagcaacataaggatctgcttcaaaacacggatgcccacaaaagagcattccatgaaatctaccggaccaggtctgttaacgggattccagtgccacctgatcaattagaggacatggccgagaggtttcattttgtttcctccacatcagagctacacctaatgaaaatggaatttttagaattaaagtaccgtctgctctcactgctggttcttgcagagtcaaagctgaagtcttggatcattaagtacgggaggagagagtcagtggagcagcttctacaaaactacgtgtcttttatagaaaatagcaagttctttgaacaatatgaggtgacataccagatcttgaaacagacagctgagatgtatgtcaaagcagatggttcagtggaagaagctgagaatgtgatgaaattcatgaatgaaaccaccgctcagtggaggaatctctcagtagaagtgaggagtgtgaggagcatgctggaagaagtgatctctaactgggatcgctatggcaatacagtggctagtctgcaagcctggctagaggatgctgaaaaaatgctcaatcaatcagaaaatgccaaaaaggatttttttcgaaatttacctcattggattcagcagcatactgccatgaacgatgctggcaattttctaattgaaacctgtgatgagatggtttcccgtgacctgaagcagcaattactgttgctaaatgggcggtggagggagttgtttatggaagtcaagcaatatgctcaagctgatgagatggacagaatgaagaaggaatacacagactgtgttgttaccctgtctgcttttgcaacggaagcccataagaaactttctgaacccttagaagtctcttttatgaatgtcaagctattaattcaagacttggaggatattgagcagagggtgcctgtgatggatgcccaatacaagataattacaaagacagcacacctcattaccaaagaaagcccccaagaagaaggaaaagaaatgtttgcgaccatgtcaaagctcaaagagcagctaaccaaggtcaaagaatgttactccccactcctttatgagtctcagcagctgttgattccgttggaggaattagaaaagcagatgacgtccttttatgactcacttgggaaaatcaatgaaattatcacagttcttgagcgtgaggcacaatcgagtgccctttttaaacaaaaacatcaggaactgttagcttgtcaagaaaactgtaagaaaaccttgacacttattgagaaaggcagtcaaagtgttcaaaagtttgtgaccttgagcaacgtgttaaagcattttgatcagacgaggctacaaagacagattgcagatattcatgttgcttttcagagtatggtaaagaaaactggagattggaagaagcatgtggaaaccaacagtcgcttgatgaagaagtttgaggagtctcgagcagagttggagaaggtactgcggattgctcaggagggcctggaggaaaagggggatccagaggagctcctgcggagacacactgagtttttcagtcagctggatcagagggtgctcaatgctttcctgaaagcttgtgatgaactcaccgacatccttccagagcaggagcagcaggggctgcaggaagctgttcgaaagctccacaaacaatggaaggatcttcaaggagaagccccttatcatttgcttcatctgaagattgatgtggagaagaataggttcttagcctctgtagaagaatgcagaactgagctggatcgagagaccaagctgatgccccaggaaggcagtgaaaagataattaaagagcacagggttttcttcagtgacaaaggtcctcatcatctctgtgagaaaaggttacagctcatcgaggaactctgtgtgaaactcccagtgcgggacccagtaagggacacacctggaacctgtcacgtgactctcaaagagctcagagctgccattgacagcacctacaggaagctcatggaagacccagacaagtggaaggactacactagcagattctctgagttctcatcttggatatctacaaatgagacacaattaaaggggatcaagggtgaggccatcgatactgccaaccacggagaggttaaacgtgccgttgaagagatcagaaatggtgttaccaaaaggggtgagaccctcagctggctgaaatccaggctgaaagttttgacagaagtttcttctgagaatgaagcccaaaagcagggagatgagctggcaaaattatccagctctttcaaggctcttgtgacgctgctgtcagaggttgaaaagatgctaagcaattttggggactgtgtccagtacaaagaaatagtcaaaaattctctcgaagaattaatttctggctctaaagaagtccaggaacaagctgagaagatcttggatactgaaaatctgtttgaagcacagcagttacttcttcatcaccagcaaaagacaaagcggatctcagcaaagaagagagatgtgcagcagcagatcgcgcaggcgcagcagggagaaggggggctgcctgaccgaggccacgaggagctgcggaagctggagagcacactggatggcctggagcgcagccgggagaggcaggaacgccgcatccaggtcacattaagaaaatgggagcgatttgaaacaaacaaagaaacagtagtaagatacctttttcaaacaggttccagtcatgaacgcttcttgagttttagcagtttggaaagtttatcttcagaactggaacaaacaaaggagttttctaaacggacagaaagtattgcagtccaggctgagaaccttgtaaaggaagcttcagagataccgcttgggccccaaaataagcagctgcttcaacagcaggccaagtcaatcaaagaacaagtcaaaaaattagaagacacgcttgaagaagatattaaaaccatggaaatggtgaaaaccaagtgggatcattttggcagtaattttgagactctgtccgtctggataactgagaaagaaaaagaactcaatgccttggaaacttcgtcatctgccatggacatgcaaatcagccaaattaaggtcacaattcaggaaatagaaagtaagctcagcagcattgtaggattagaagaagaagcccagtcttttgctcagtttgttaccactggagaatctgctcgaattaaagccaagttgacacaaataagaagatacggggaagagcttcgagagcatgcacagtgtctggaaggaacaatcctgggacatttatctcagcagcaaaagtttgaagagaaccttagaaagatccagcaatctgtgtctgaatttgaagataaacttgctgttccaattaaaatatgttcttcagctacagaaacatacaaagttcttcaagaacatatggatctctgccaggccctggagtcactgagcagcgcgatcactgccttctcagccagtgccaggaaggttgtgaacagagattcctgtgttcaggaggctgcggctctacagcagcaatacgaggacatcctaaggagggcgaaggagagacagacggcgctggagaatctgctggcccactggcagaggctagagaaagaactatcatcctttttgacctggttagagcggggtgaagctaaagccagttccccagaaatggacatttctgcagacagagtcaaagtggaaggtgaacttcagttaatacaggcactgcaaaatgaagttgtatcccaggcctcattctatagcaaacttttgcaattgaaggaatcattgttctcagtagcctccaaagatgatgtgaaaatgatgaaactacatttggagcagttggatgagagatggagagatttaccacagatcattaacaaaaggattaattttcttcagtctgtggttgctgaacaccagcaatttgatgagctgctgctttccttttctgtctggattaaactgtttctcagtgaattacaaactacctctgagattagcataatggaccatcaagtagcccttactcggcataaggaccacgcagcagaagtagagagcaaaaagggcgaattgcagagtctgcagggtcacttagcaaagttgggttctctgggccgtgctgaggacctccacctcctgcagggaaaggctgaggactgcttccagctgtttgaggaggccagccaggttgtggagaggcggcagcttgccctgtcccatttggcagaattcctccagagccatgcctctctgtccggcattctccgccagctgaggcaaacagtggaagcaaccaacagtatgaataagaacgagtctgatttgatagaaaaggacctcaatgatgctcttcaaaatgctaaagcattagaatctgctgccgtcagtctggatggcattctttccaaagcccaataccatctgaaaatcgggagctctgagcaaaggacttcctgcagagccacggctgatcagctctgtggagaggtagagaggatccagaaccttctgggaaccaagcagagtgaggcagatgctctggcagtgttgaaaaaagcattccaagaccagaaagaggagcttctgaaaagcattgaggacattgaagaaaggactgacaaagagcgattgaaagaacctacccgccaagctcttcagcagaggttaagagtgtttaatcagctagaagatgaattgaattctcacgagcatgaactatgttggttgaaagacaaagccaagcaaattgcccagaaagatgtagcttttgcacctgaagttgacagggagataaaccgcttagaggtcacctgggatgataccaaaagactaattcatgaaaatcagggtcagtgctgtggacttattgacttaatgagagaatatcagaacctgaaatcagctgtatctaaagtcttagaaaatgccagcagtgtgattgtaaccagaactaccataaaagatcaggaggatcttaaatgggctttttccaagcatgaaactgccaagaacaaaatgaattacaaacagaaagacttggataactttaccagcaaaggaaaacacttgttatctgagctgaagaaaattcacagtagtgatttcagcttggtgaaaacagacatggagagcaccgtggacaaatggctggatgtatcagagaaacttgaagaaaacatggataggctgagagtaagcctgtccatttgggatgatgtactgtcaactagagatgagattgagggatggtcaaacaactgcgttccacagatggcagaaaacatcagcaacctggataaccacctcagagctgaagaactgcttaaagaatttgagtctgaagttaaaaacaaagcattgagattggaagaactgcattccaaagttaatgatctgaaagaattaactaaaaatctagaaacaccgccagaccttcagtttatagaagcagacttaatgcagaaactggagcatgccaaagaaataactgaagtagcaaaaggaaccctgaaggatttcacggctcaaagtacacaagtggagaagtttattaatgacataacaacatggttcacaaaagtggaagaatcgttgatgaactgtgcccaaaatgagacttgtgaagcattgaaaaaagtcaaggatatacaaaaagaacttcaaagtcaacaaagcaacatcagctctacccaagaaaatctcaatagcttgtgccgcaagtaccactcagctgagttggagagcctgggccgtgcaatgactggtctgataaagaaacatgaagccgtgagccagttgtgctccaaaacccaggccagcctgcaggaatctctggaaaaacacttcagtgagtctatgcaggaattccaagaatggtttttgggagcaaaggcagcagcaaaagaatcatcagatcgcaccggtgacagcaaagttctagaagcaaagctccatgatcttcagaacattttggactcagtcagtgatgggcagagcaaacttgatgcagtgactcaagaaggacaaactttgtatgcacatttgtctaaacaaattgtcagtagcattcaagaacaaatcacaaaggccaatgaagagtttcaagcatttctgaaacaatgccttaaagataagcaggctcttcaagactgtgcttcagaacttggaagctttgaagatcagcacagaaaactgaacttatgg

SEQ ID NO: 212 - protein, 8192 aa, Homosapiens
MATSRGASRCPRDIANVMQRLQDEQEIVQKRTFTKWINSHLAKRKPPMVVDDLFEDMKDGVKLLALLEVLSGQKLPCEQGRRMKRIHAVANIGTALKLLEGRKIKLVNINSTDIADGRPSIVLGLMWTIILYFQIEELTSNLPQLQSLSSSASSVDSIVSSETPSPPSKRKVTTKIQGNAKKALLKWVQYTAGKQTGIEVKDFGKSWRSGVAFHSVIHAIRPELVDLETVKGRSNRENLEDAFTIAETELGIPRLLDPEDVDVDKPDEKSIMTYVAQFLKHYPDIHNASTDGQEDDEILPGFPSFANSVQNFKREDRVIFKEMKVWIEQFERDLTRAQMVESNLQDKYQSFKHFRVQYEMKRKQIEHLIQPLHRDGKLSLDQALVKQSWDRVTSRLFDWHIQLDKSLPAPLGTIGAWLYRAEVALREEITVQQVHEETANTIQRKLEQHKDLLQNTDAHKRAFHEIYRTRSVNGIPVPPDQLEDMAERFHFVSSTSELHLMKMEFLELKYRLLSLLVLAESKLKSWIIKYGRRESVEQLLQNYVSFIENSKFFEQYEVTYQILKQTAEMYVKADGSVEEAENVMKFMNETTAQWRNLSVEVRSVRSMLEEVISNWDRYGNTVASLQAWLEDAEKMLNQSENAKKDFFRNLPHWIQQHTAMNDAGNFLIETCDEMVSRDLKQQLLLLNGRWRELFMEVKQYAQADEMDRMKKEYTDCVVTLSAFATEAHKKLSEPLEVSFMNVKLLIQDLEDIEQRVPVMDAQYKIITKTAHLITKESPQEEGKEMFATMSKLKEQLTKVKECYSPLLYESQQLLIPLEELEKQMTSFYDSLGKINEIITVLEREAQSSALFKQKHQELLACQENCKKTLTLIEKGSQSVQKFVTLSNVLKHFDQTRLQRQIADIHVAFQSMVKKTGDWKKHVETNSRLMKKFEESRAELEKVLRIAQEGLEEKGDPEELLRRHTEFFSQLDQRVLNAFLKACDELTDILPEQEQQGLQEAVRKLHKQWKDLQGEAPYHLLHLKIDVEKNRFLASVEECRTELDRETKLMPQEGSEKIIKEHRVFFSDKGPHHLCEKRLQLIEELCVKLPVRDPVRDTPGTCHVTLKELRAAIDSTYRKLMEDPDKWKDYTSRFSEFSSWISTNETQLKGIKGEAIDTANHGEVKRAVEEIRNGVTKRGETLSWLKSRLKVLTEVSSENEAQKQGDELAKLSSSFKALVTLLSEVEKMLSNFGDCVQYKEIVKNSLEELISGSKEVQEQAEKILDTENLFEAQQLLLHHQQKTKRISAKKRDVQQQIAQAQQGEGGLPDRGHEELRKLESTLDGLERSRERQERRIQVTLRKWERFETNKETVVRYLFQTGSSHERFLSFSSLESLSSELEQTKEFSKRTESIAVQAENLVKEASEIPLGPQNKQLLQQQAKSIKEQVKKLEDTLEEDIKTMEMVKTKWDHFGSNFETLSVWITEKEKELNALETSSSAMDMQISQIKVTIQEIESKLSSIVGLEEEAQSFAQFVTTGESARIKAKLTQIRRYGEELREHAQCLEGTILGHLSQQQKFEENLRKIQQSVSEFEDKLAVPIKICSSATETYKVLQEHMDLCQALESLSSAITAFSASARKVVNRDSCVQEAAALQQQYEDILRRAKERQTALENLLAHWQRLEKELSSFLTWLERGEAKASSPEMDISADRVKVEGELQLIQALQNEVVSQASFYSKLLQLKESLFSVASKDDVKMMKLHLEQLDERWRDLPQIINKRINFLQSVVAEHQQFDELLLSFSVWIKLFLSELQTTSEISIMDHQVALTRHKDHAAEVESKKGELQSLQGHLAKLGSLGRAEDLHLLQGKAEDCFQLFEEASQVVERRQLALSHLAEFLQSHASLSGILRQLRQTVEATNSMNKNESDLIEKDLNDALQNAKALESAAVSLDGILSKAQYHLKIGSSEQRTSCRATADQLCGEVERIQNLLGTKQSEADALAVLKKAFQDQKEELLKSIEDIEERTDKERLKEPTRQALQQRLRVFNQLEDELNSHEHELCWLKDKAKQIAQKDVAFAPEVDREINRLEVTWDDTKRLIHENQGQCCGLIDLMREYQNLKSAVSKVLENASSVIVTRTTIKDQEDLKWAFSKHETAKNKMNYKQKDLDNFTSKGKHLLSELKKIHSSDFSLVKTDMESTVDKWLDVSEKLEENMDRLRVSLSIWDDVLSTRDEIEGWSNNCVPQMAENISNLDNHLRAEELLKEFESEVKNKALRLEELHSKVNDLKELTKNLETPPDLQFIEADLMQKLEHAKEITEVAKGTLKDFTAQSTQVEKFINDITTWFTKVEESLMNCAQNETCEALKKVKDIQKELQSQQSNISSTQENLNSLCRKYHSAELESLGRAMTGLIKKHEAVSQLCSKTQASLQESLEKHFSESMQEFQEWFLGAKAAAKESSDRTGDSKVLEAKLHDLQNILDSVSDGQSKLDAVTQEGQTLYAHLSKQIVSSIQEQITKANEEFQAFLKQCLKDKQALQDCASELGSFEDQHRKLNLWIHEMEERFNTENLGESKQHIPEKKNEVHKVEMFLGELLAARESLDKLSQRGQLLSEEGHGAGQEGRLCSQLLTSHQNLLRMTKEKLRSCQVALQEHEALEEALQSMWFWVKAIQDRLACAESTLGSKDTLEKRLSQIQDILLMKGEGEVKLNMAIGKGEQALRSSNKEGQRVIQTQLETLKEVWADIMSSSVHAQSTLESVISQWNDYVERKNQLEQWMESVDQKIEHPLQPQPGLKEKFVLLDHLQSILSEAEDHTRALHRLIAKSRELYEKTEDESFKDTAQEELKTQFNDIMTVAKEKMRKVEEIVKDHLMYLDAVHEFTDWLHSAKEELHRWSDMSGDSSATQKKLSKIKELIDSREIGASRLSRVESLAPEVKQNTTASGCELMHTEMQALRADWKQWEDSVFQTQSCLENLVSQMALSEQEFSGQVAQLEQALEQFSALLKTWAQQLTLLEGKNTDEEIVECWHKGQEILDALQKAEPRTEDLKSQLNELCRFSRDLSTYSGKVSGLIKEYNCLCLQASKGCQNKEQILQQRFRKAFRDFQQWLVNAKITTAKCFDIPQNISEVSTSLQKIQEFLSESENGQHKLNMMLSKGELLSTLLTKEKAKGIQAKVTAAKEDWKNFHSNLHQKESALENLKIQMKDFEVSAEPIQDWLSKTEKMVHESSNRLYDLPAKRREQQKLQSVLEEIHCYEPQLNRLKEKAQQLWEGQAASKSFRHRVSQLSSQYLALSNLTKEKVSRLDRIVAEHNQFSLGIKELQDWMTDAIHMLDSYCHPTSDKSVLDSRTLKLEALLSVKQEKEIQMKMIVTRGESVLQNTSPEGIPTIQQQLQSVKDMWASLLSAGIRCKSQLEGALSKWTSYQDGVRQFSGWMDSMEANLNESERQHAELRDKTTMLGKAKLLNEEVLSYSSLLETIEVKGAGMTEHYVTQLELQDLQERYRAIQERAKEAVTKSEKLVRLHQEYQRDLKAFEVWLGQEQEKLDQYSVLEGDAHTHETTLRDLQELQVHCAEGQALLNSVLHTREDVIPSGIPQAEDRALESLRQDWQAYQHRLSETRTQFNNVVNKLRLMEQKFQQVDEWLKTAEEKVSPRTRRQSNRATKEIQLHQMKKWHEEVTAYRDEVEEVGARAQEILDESHVNSRMGCQATQLTSRYQALLLQVLEQIKFLEEEIQSLEESESSLSSYSDWYGSTHKNFKNVATKIDKVDTVMMGKKLKTLEVLLKDMEKGHSLLKSAREKGERAVKYLEEGEAERLRKEIHDHMEQLKELTSTVRKEHMTLEKGLHLAKEFSDKCKALTQWIAEYQEILHVPEEPKMELYEKKAQLSKYKSLQQTVLSHEPSVKSVREKGEALLELVQDVTLKDKIDQLQSDYQDLCSIGKEHVFSLEAKVKDHEDYNSELQEVEKWLLQMSGRLVAPDLLETSSLETITQQLAHHKAMMEEIAGFEDRLNNLQMKGDTLIGQCADHLQAKLKQNVHAHLQGTKDSYSAICSTAQRMYQSLEHELQKHVSRQDTLQQCQAWLSAVQPDLEPSPQPPLSRAEAIKQVKHFRALQEQARTYLDLLCSMCDLSNASVKTTAKDIQQTEQTIEQKLVQAQNLTQGWEEIKHLKSELWIYLQDADQQLQNMKRRHSELELNIAQNMVSQVKDFVKKLQSKQASVNTIIEKVNKLTKKEESPEHKEINHLNDQWLDLCRQSNNLCLQREEDLQRTRDYHDCMNVVEVFLEKFTTEWDNLARSDAESTAVHLEALKKLALALQERKYAIEDLKDQKQKMIEHLNLDDKELVKEQTSHLEQRWFQLEDLIKRKIQVSVTNLEELNVVQSRFQELMEWAEEQQPNIAEALKQSPPPDMAQNLLMDHLAICSELEAKQMLLKSLIKDADRVMADLGLNERQVIQKALSDAQSHVNCLSDLVGQRRKYLNKALSEKTQFLMAVFQATSQIQQHERKIMFREHICLLPDDVSKQVKTCKSAQASLKTYQNEVTGLWAQGRELMKEVTEQEKSEVLGKLQELQSVYDSVLQKCSHRLQELEKNLVSRKHFKEDFDKACHWLKQADIVTFPEINLMNESTELHTQLAKYQNILEQSPEYENLLLTLQRTGQTILPSLNEVDHSYLSEKLNALPRQFNVIVALAKDKFYKVQEAILARKEYASLIELTTQSLSELEAQFLRMSKVPTDLAVEEALSLQDGCRAILDEVAGLGEAVDELNQKKEGFRSTGQPWQPDKMLHLVTLYHRLKRQTEQRVSLLEDTTSAYQEHEKMCQQLERQLKSVKEEQSKVNEETLPAEEKLKMYHSLAGSLQDSGIVLKRVTIHLEDLAPHLDPLAYEKARHQIQSWQGELKLLTSAIGETVTECESRMVQSIDFQTEMSRSLDWLRRVKAELSGPVYLDLNLQDIQEEIRKIQIHQEEVQSSLRIMNALSHKEKEKFTKAKELISADLEHSLAELSELDGDIQEALRTRQATLTEIYSQCQRYYQVFQAANDWLEDAQEMLQLAGNGLDVESAEENLKSHMEFFSTEDQFHSNLEELHSLVATLDPLIKPTGKEDLEQKVASLELRSQRMSRDSGAQVDLLQRCTAQWHDYQKAREEVIELMNDTEKKLSEFSLLKTSSSHEAEEKLSEHKALVSVVNSFHEKIVALEEKASQLEKTGNDASKATLSRSMTTVWQRWTRLRAVAQDQEKILEDAVDEWTGFNNKVKKATEMIDQLQDKLPGSSAEKASKAELLTLLEYHDTFVLELEQQQSALGMLRQQTLSMLQDGAAPTPGEEPPLMQEITAMQDRCLNMQEKVKTNGKLVKQELKDREMVETQINSVKCWVQETKEYLGNPTIEIDAQLEELQILLTEATNHRQNIEKMAEEQKEKYLGLYTILPSELSLQLAEVALDLKIRDQIQDKIKEVEQSKATSQELSRQIQKLAKDLTTILTKLKAKTDNVVQAKTDQKVLGEELDGCNSKLMELDAAVQKFLEQNGQLGKPLAKKIGKLTELHQQTIRQAENRLSKLNQAASHLEEYNEMLELILKWIEKAKVLAHGTIAWNSASQLREQYILHQTLLEESKEIDSELEAMTEKLQYLTSVYCTEKMSQQVAELGRETEELRQMIKIRLQNLQDAAKDMKKFEAELKKLQAALEQAQATLTSPEVGRLSLKEQLSHRQHLLSEMESLKPKVQAVQLCQSALRIPEDVVASLPLCHAALRLQEEASRLQHTAIQQCNIMQEAVVQYEQYEQEMKHLQQLIEGAHREIEDKPVATSNIQELQAQISRHEELAQKIKGYQEQIASLNSKCKMLTMKAKHATMLLTVTEVEGLAEGTEDLDGELLPTPSAHPSVVMMTAGRCHTLLSPVTEESGEEGTNSEISSPPACRSPSPVANTDASVNQDIAYYQALSAERLQTDAAKIHPSTSASQEFYEPGLEPSATAKLGDLQRSWETLKNVISEKQRTLYEALERQQKYQDSLQSISTKMEAIELKLSESPEPGRSPESQMAEHQALMDEILMLQDEINELQSSLAEELVSESCEADPAEQLALQSTLTVLAERMSTIRMKASGKRQLLEEKLNDQLEEQRQEQALQRYRCEADELDSWLLSTKATLDTALSPPKEPMDMEAQLMDCQNMLVEIEQKVVALSELSVHNENLLLEGKAHTKDEAEQLAGKLRRLKGSLLELQRALHDKQLNMQGTAQEKEESDVDLTATQSPGVQEWLAQARTTWTQQRQSSLQQQKELEQELAEQKSLLRSVASRGEEILIQHSAAETSGDAGEKPDVLSQELGMEGEKSSAEDQMRMKWESLHQEFSTKQKLLQNVLEQEQEQVLYSRPNRLLSGVPLYKGDVPTQDKSAVTSLLDGLNQAFEEVSSQSGGAKRQSIHLEQKLYDGVSATSTWLDDVEERLFVATALLPEETETCLFNQEILAKDIKEMSEEMDKNKNLFSQAFPENGDNRDVIEDTLGCLLGRLSLLDSVVNQRCHQMKERLQQILNFQNDLKVLFTSLADNKYIILQKLANVFEQPVAEQIEAIQQAEDGLKEFDAGIIELKRRGDELQVEQPSMQELSKLQDMYDELMMIIGSRRSGLNQNLTLKSQYERALQDLADLLETGQEKMAGDQKIIVSSKEEIQQPLDKHKEYFQGLESHMILTVTLFRKIISFAVQKETQFHTELMAQASAVLKRAHKRGVELEYILETWSHLDEDQQELSRQLEVVESSIPSVGLVEENEDRLIDRITLYQHLKSSLNEYQPKLYQVLDDGKRLLISISCSDLESQLNQLGECWLSNTNKMSKELHRLETILKHWTRYQSESADLIHWLQSAKDRLEFWTQQSVTVPQELEMVRDHLNAFLEFSKEVDAQSSLKSSVLSTGNQLLRLKKVDTATLRSELSRIDSQWTDLLTNIPAVQEKLHQLQMDKLPSRHAISEVMSWTSLMENAIQKDEDNIKNSIGYKAIHEYLQKYKGFKIDINCKQLTVDFVNQSVLQISSQDVESKRSDKTDFAEQLGAMNKSWQILQGLVTEKIQLLEGLLESWSEYENNVQCLKTWFETQEKRLKQQHRIGDQASVQNALKDCQDLEDLIKAKDKEVEKIEQNGLALIQTKKEDVSSIVMSTLRELGQTWANLDHMVGQLKILLKSVLDQWSSHKVAFDKINSYLMEARYSLSRFRLLTGSLEAVQVQVDNLQNLQDDLEKQERSLQKFGSITNQLLKECHPPVTETLTNTLKEVNMRWNNLLEEIAEQLQSSKALLQLWQRYKDYSKQCASTVQQQEDRTNELLKAATNKDIADDEVATWIQDCNDLLKGLGTVKDSLFVLHELGEQLKQQVDASAASAIQSDQLSLSQHLCALEQALCKQQTSLQAGVLDYETFAKSLEALEAWIVEAEEILQGQDPSHSSDLSTIQERMEELKGQMLKFSSMAPDLDRLNELGYRLPLNDKEIKRMQNLNRHWSLISSQTTERFSKLQSFLLQHQTFLEKCETWMEFLVQTEQKLAVEISGNYQHLLEQQRAHELFQAEMFSRQQILHSIIIDGQRLLEQGQVDDRDEFNLKLTLLSNQWQGVIRRAQQRRGIIDSQIRQWQRYREMAEKLRKWLVEVSYLPMSGLGSVPIPLQQARTLFDEVQFKEKVFLRQQGSYILTVEAGKQLLLSADSGAEAALQAELAEIQEKWKSASMRLEEQKKKLAFLLKDWEKCEKGIADSLEKLRTFKKKLSQSLPDHHEELHAEQMRCKELENAVGSWTDDLTQLSLLKDTLSAYISADDISILNERVELLQRQWEELCHQLSLRRQQIGERLNEWAVFSEKNKELCEWLTQMESKVSQNGDILIEEMIEKLKKDYQEEIAIAQENKIQLQQMGERLAKASHESKASEIEYKLGKVNDRWQHLLDLIAARVKKLKETLVAVQQLDKNMSSLRTWLAHIESELAKPIVYDSCNSEEIQRKLNEQQELQRDIEKHSTGVASVLNLCEVLLHDCDACATDAECDSIQQATRNLDRRWRNICAMSMERRLKIEETWRLWQKFLDDYSRFEDWLKSSERTAAFPSSSGVIYTVAKEELKKFEAFQRQVHECLTQLELINKQYRRLARENRTDSACSLKQMVHEGNQRWDNLQKRVTSILRRLKHFIGQREEFETARDSILVWLTEMDLQLTNIEHFSECDVQAKIKQLKAFQQEISLNHNKIEQIIAQGEQLIEKSEPLDAAIIEEELDEL

SEQ ID NO: 213 - DNA, 1095 bp, Homosapiens
atgcgaacacaagtatatgaggggttgtgtaaaaattatttttctcttgctgtactacaaagagatagaatcaaactgctttttttcgacatactggtttttctttctgtttttcttctctttcttctatttcttgtggatattatggctaataacacaacaagtttagggagtccatggccagaaaacttttgggaggaccttatcatgtccttcactgtatccatggcaatcgggctggtacttggaggatttatttgggctgtgttcatttgtctgtctcgaagaagaagagccagtgctcccatctcacagtggagttcaagcaggagatctaggtcttcttacacccacggcctcaacagaactggattttaccgccacagtggctgtgaacgtcgaagcaacctcagcctggccagtctcaccttccagcgacgagcttccctggaacaagcaaattcctttccaagaaaatcaagtttcagagcttctactttccatccctttctgcaatgtccaccacttcctgtggaaactgagagtcagctggtgactctcccttcttccaatatctctcccaccatcagcacttcccacagtctgagccgtcctgactactggtccagtaacagtcttcgagtgggcctttcaacaccgcccccacctgcctatgagtccatcatcaaggcattcccagattcctgagtagggtggcttttggtttttgtttctttcttgtcttgtcttttattgaaaggaaatcaaaaataggctaaacagaattttgagggcatggcccaaataactcatgagttccaagttgaaacatggttgtgcaagttggacattacaatgtaaaacacattttcttcaaacacgttttcccttttgtttcaaaaaatgtaatattttcccccaagcgttttatatttatgtattttgtattcaatgtgaggcttattaaaaatagtgattctaatgtaagaatcagctaagatgcattatatatattttaattaaaattaaaacttcagatatttgtggattacaatcctcatttacttccaatgtgactaaaaaaaaaaaaaaaaa

SEQ ID NO: 214 - protein, 235 aa, Homosapiens
MRTQVYEGLCKNYFSLAVLQRDRIKLLFFDILVFLSVFLLFLLFLVDIMANNTTSLGSPWPENFWEDLIMSFTVSMAIGLVLGGFIWAVFICLSRRRRASAPISQWSSSRRSRSSYTHGLNRTGFYRHSGCERRSNLSLASLTFQRRASLEQANSFPRKSSFRASTFHPFLQCPPLPVETESQLVTLPSSNISPTISTSHSLSRPDYWSSNSLRVGLSTPPPPAYESIIKAFPDS

SEQ ID NO: 215 - DNA, 1618 bp, Homosapiens
gggtagagtgagaagcaccagcaggcagtaacagccaacccttagccattgctaagggcagagaactggtggagcctttctcttactcccaggacttcagcacctaagacagctccaaaacaaaccagaacagtcagctccgggggagcacgactgggcgagaggcacagaaatggacaccagaaataaggcccagctccttgtgctcctgactcttctcagtgtgctcttctcacagacttcggcatggcctctttacagggcaccttctgctctcaggttgggtgacagaataccctttgagggagcaaatgaacctgatcaagtttcattaaaagaagacattgacatgttgcaaaatgcattagctgaaaatgacacaccctattatgatgtatccagaaatgccaggcatgctgatggagttttcaccagtgacttcagtaaactcttgggtcaactttctgccaaaaagtaccttgagtctcttatgggaaaacgtgttagcagtaacatctcagaagaccctgtaccagtcaaacgtcactcagatgcagtcttcactgacaactatacccgccttagaaaacaaatggctgtaaagaaatatttgaactcaattctgaatggaaagaggagcagtgagggagaatctcccgactttccagaagagttagaaaaatgatgaaaaagacctttggagcaaagctgatgacaacttcccagtgaattcttgaaggaaaatgatacgcaacataattaaattttgagttctacataagtaattcaagaaaacaacttcaatatccaaaccaaataaaaatattgtgttgtgaatgttgtgatgtattctagctaatgtaataactgtgaagtttacattgtaaatagtatttgagagttctaaattttgtctttaactcataaaaagcctgcaatttcatatgctgtatatcctttctaacaaaaaaatatatttaatgataagtaaatgctaggttaattccaattatatgagacgtttttggaagagtagtaatagagcaaaattgatgtgtttatttatagagtgtacttaactattcaggagagtagaacagataatcagtgtgtctaaatttgaatgttaagcagatggaatgctgtgttaaataaacctcaaaatgtctaagatagtaacaatgaagataaaaagacattcttccaaaaagattttcagaaaatattatgtgtttccatattttataggcaacctttatttttaatggtgttttaaaaaatctcaaatttggattgctaatcaccaaaggctctctcctgatagtctttcagttaaggagaacgacccctgcttctgacactgaaacttccctttctgcttgtgttaagtatgtgtaaaatgtgaagtgaatgaaacactcagttgttcaataataaatatttttgccataatgactcagaatattgctttggtcatatgagcttccttctgtgaaagtacatttggagacacaactatttttccaaaataattttaagaaatcaaagagagaaaataaagaccttgcttatgattgcagataaaaaaaaaaaaaaaaaaaaaaaaaaaaaaaaaaaa

SEQ ID NO: 216 - protein, 170 aa, Homosapiens
MDTRNKAQLLVLLTLLSVLFSQTSAWPLYRAPSALRLGDRIPFEGANEPDQVSLKEDIDMLQNALAENDTPYYDVSRNARHADGVFTSDFSKLLGQLSAKKYLESLMGKRVSSNISEDPVPVKRHSDAVFTDNYTRLRKQMAVKKYLNSILNGKRSSEGESPDFPEELEK

SEQ ID NO: 217 - DNA, 1615 bp, Homosapiens
gggtagagtgagaagcaccagcaggcagtaacagccaacccttagccattgctaagggcagagaactggtggagcctttctcttactcccaggacttcagcacctaagacagctccaaaacaaaccagaacagtcagctccgggggagcacgactgggcgagaggcacagaaatggacaccagaaataaggcccagctccttgtgctcctgactcttctcagtgtgctcttctcacagacttcggcatggcctctttacagggcaccttctgctctcaggttgggtgacagaataccctttgagggagcaaatgaacctgatcaagtttcattaaaagaagacattgacatgttgcaaaatgcattagctgaaaatgacacaccctattatgatgtatccagaaatgccaggcatgctgatggagttttcaccagtgacttcagtaaactcttgggtcaactttctgccaaaaagtaccttgagtctcttatgggaaaacgtgttagtaacatctcagaagaccctgtaccagtcaaacgtcactcagatgcagtcttcactgacaactatacccgccttagaaaacaaatggctgtaaagaaatatttgaactcaattctgaatggaaagaggagcagtgagggagaatctcccgactttccagaagagttagaaaaatgatgaaaaagacctttggagcaaagctgatgacaacttcccagtgaattcttgaaggaaaatgatacgcaacataattaaattttgagttctacataagtaattcaagaaaacaacttcaatatccaaaccaaataaaaatattgtgttgtgaatgttgtgatgtattctagctaatgtaataactgtgaagtttacattgtaaatagtatttgagagttctaaattttgtctttaactcataaaaagcctgcaatttcatatgctgtatatcctttctaacaaaaaaatatatttaatgataagtaaatgctaggttaattccaattatatgagacgtttttggaagagtagtaatagagcaaaattgatgtgtttatttatagagtgtacttaactattcaggagagtagaacagataatcagtgtgtctaaatttgaatgttaagcagatggaatgctgtgttaaataaacctcaaaatgtctaagatagtaacaatgaagataaaaagacattcttccaaaaagattttcagaaaatattatgtgtttccatattttataggcaacctttatttttaatggtgttttaaaaaatctcaaatttggattgctaatcaccaaaggctctctcctgatagtctttcagttaaggagaacgacccctgcttctgacactgaaacttccctttctgcttgtgttaagtatgtgtaaaatgtgaagtgaatgaaacactcagttgttcaataataaatatttttgccataatgactcagaatattgctttggtcatatgagcttccttctgtgaaagtacatttggagacacaactatttttccaaaataattttaagaaatcaaagagagaaaataaagaccttgcttatgattgcagataaaaaaaaaaaaaaaaaaaaaaaaaaaaaaaaaaaa

SEQ ID NO: 218 - protein, 169 aa, Homosapiens
MDTRNKAQLLVLLTLLSVLFSQTSAWPLYRAPSALRLGDRIPFEGANEPDQVSLKEDIDMLQNALAENDTPYYDVSRNARHADGVFTSDFSKLLGQLSAKKYLESLMGKRVSNISEDPVPVKRHSDAVFTDNYTRLRKQMAVKKYLNSILNGKRSSEGESPDFPEELEK

SEQ ID NO: 219 - DNA, 3844 bp, Homosapiens
gatctcggctcactgcaagccccgcctcccgggttcacgccattctcctgcctcagcctcccgagtagcccggactataggggcctgccaccatgtccagctaattttttgtatttttagtagagacgaggtttcaccgtgttagccaggatggtctcgatttcctgacttcatgatccacctgcctcggcctcccaaagtgctgggattacaggctttagctacggcgcccggccattcccctcccttttctgctaggctcactgaactattaacgagcaaaaagtaaacttcccttttctttgagttattatacatttggggtctatttgttagagcaatgcgcttgccctactatactctccctgggccttgtatgatgaaattggtaacagccacaaaaactgcatctgggacacagaaggtggtagaggggaaaataatctgactgacaaagattctgtttataggtgactttttaggattgtggagttaggcaaagctgggatcactcacacagcctgataggggattttcctacgtgggtgggctgacctggtggtcctggttacactgcccaccagccttctggtgtctctactaggagtaaggtgccttctctttctcctccaggaccccacacctccagaccctgctgagggagggccacccatttctagtcccagctcctactctaactatctgtgtgaccttaaacaaggcctttcccctctctggcctcagtatccgcctctgaataatggggctgggcctgccgaccttctggcccttttctgctctgtgagtttgtgaacttgtgatagggagacaggagtcctaggaaggaaatggaactggtgatagggagacaagagtcctaggaaggaaatggaacttgtgatagggagacaagagtcctaggaaatggaaggagagcacgtttcactctgtccagcagagggcagcagctacccacaaatcaacagctgagcaaggccagggctgtgtgggagctatgcacaggttctgcctccagaagccttcagtgcctgcctctgagccagagggttccaagcagaagaggtcccgcccccggagagggacctcagagaggtcctccaagcccctctcagctcttacttacggcatcccagatgccctattcctcttctgcagagagaaggtggttcagccactaaatggtgctgggacctcgcagtttggtgggaaggaggaagcttactcaagcaaggaatatgagacaggcaaaaacccacgcataagccaaaagcccctccaaagcgaggtgttgttccaggctgacaagtgtccagcagggtggacttcagactccctgttaggaactgaattgtgtcccccaaaaagagaaagtcaccccagggtatgacctaattcaggaaaggtcattgcagatgcatttaattaaatgaagatgagctcatgctggagtagggtggactctgaacccagtgggacaagcgtccttattaagaagagggaaatctggacacacacagagcagagaccgccgtgtgaagatggaggcagagatcggagagatgctgccacacgccacaaatgcctggggctcccagaaactacacggagcctcccccagcggcttcagcaggagcatggctcggccaacactttgatcttggtcttccagcctccagaacggtgagtcgttttcctaaaattcccttttccactggtgtgtggtgcaagatgaggcacattttccatggatggtgaacagagggaggagccttttgatcacaaccaggtcaccccacttctaagccactgtgcctccagccccacaagactaaggagagagagcgcagcgtggtggagagtgagctgtgctgggaccattgtttccgtaacctcgttttctgtgtccagctgacacaccttcaaagtggcatcaggtcctaaactgtagcttgcaatgtgcctgtttccagaaaccaaggtgaaagtgcttttagacagtgttcccatgcaagagtcccttcccagcttttttctggaaatgcatgtttctctgaactctgagtcccaagaaaaatcacttgagacaccaagaaaatgggggaagtgctaaaattgtgtgggaattcaagcttaacaataaacatcaagacatttttgataaaaatgaatccactgacatcggggaggagcaagagaacagcacgctgacactgggtcagaggctaagaccgacatttctgggaaccactcccggaagggcacagaggagacgctttcagcctctcatcagccagcctggcctgtagctgctgcacgttatgagtgtgttcctggcatgactgcttctaacagtgagttttctggcaaatcaaataaatactaataagtctgtatgcacattatactttatacaaatcctatgagtgatgttccagaaataacaagttttgaaggcaaaataagtccttaaattggcaactttgacacataattccatgtagtagttaatcttgctagaagatcccaatgttgttattctaatacaatctgataatgttcactggcattttccactgttggcatctttactatagcctacagttgtttgtttgtttatttgagatggagtcttgctctgttgcctaggctagagtgcagtggcgtgatcttggctcactgcaacctccccctcccaggttcaagcagttctcctgcctcggcctccctagaagctgggattacaggcacgtgctaccacgcccagctaatttttgtatttttggtagagacgtggtttcatcatattggccaggctggtcttgaactcctgacctcaggtgatcagcctgtctcggcctcccacacacagtgctggggttacaggtgtgagccacgattcctggctgcctacagttctttgtaaagcagacaaaatagtttcattttttaaagaaatgaacatatatgaggcaacctgtacctaacttaggagttcagaaattccctggactgcctatacattttggtttctcattcctaattcccaaagattaaaatctgtcaggaatttggaaacattgaatcacaggccaaaataggaccatgtctccattcattcattcattcaacaattatttattgagcgcatgctatttttcaggcactgtgccacatattgagaatagagtagtgagtaagacaaagtcatcactttagggagtttatattttagaggagagaaagacaaatgaaagtgtttaggctgggcatggtggctcacacctgtaatcccagcactttgggaggtcaaggcaggtggatcacctgagctcaggagttcaagaccagcctgggcaacaatcccatctctaacaaaaacataaaaaattaaccaggtgtggtagcacatgcctgtggtctcagcaacttgggaggctgaggtggaaggatctcttgagcctgggaggcagaggttgcagtgagctgaggttgtgacactggacttcaacctgagtgacagatcccatctcaaaaacaaccctgggccgggtgtggtggctcacacctgtaatcccagcactttgggaggccgaggcaggaagatcttgaggtcaggagattgagaccatcctggctaacatggtgaaaccccgtctctactaaaaatacaaaaaattagctgggcatggtggcggttgcctatagtcccaactactcgggaggctgaggctggagaattgcttgaacccgggaggcagaagtagcagtgagccgagattgcaccgctgcactccagcctgggcaacagagtgagactccatct

SEQ ID NO: 220 - protein, 130 aa, Homosapiens [sequence omitted]

SEQ ID NO: 221 - DNA, 2742 bp, Homosapiens
gtcactcgtataaaaacctatgctttgaaggttctcgtgtgtctcggcctgcaggtctcgctcagagctgtgtccctgaacatccaccctgctggggtggcttgacgcacttctgtgcaaatctgttcgctcgcaaccctacctacctctctcccgaaccggagaaaaccttcggcggggtccttccgggttttgtgtcgaatctgcggcggcgacccggcgccgcgtcacgcggtggtgaatgtgcggcagtacgcgcgccgcgtcgtttacgcggcgatttcatcatgctccgagccggcggcgcgcgccgcttccgtcgccaccctctctggacagcccagggccgcaggctcatgccctctccgcgtccagtgctgcttagaggtgctcgcgccgctctgctgctgctgctgccgccccggctcttagcccgaccctcgctcctcctccgccggtccctcagcgcggcctcctgcgccccgatctccttgcccgccgccgcctcccggagcagcatggacggcgcgggggctgaggaggtgctggcacctctgaggctagcagtgcgccagcagggagatcttgtgcgaaaactcaaagaagataaagcaccccaagtagacgtagacaaagcagtggctgagctcaaagcccgcaagagggttctggaagcaaaggagctggcgttacagcccaaagatgatattgtagaccgagcaaaaatggaagataccctgaagaggaggtttttctatgatcaagcttttgctatttatggaggtgttagtggtctgtatgactttgggccagttggctgtgctttgaagaacaatattattcagacctggaggcagcactttatccaagaggaacagatcctggagatcgattgcaccatgctcacccctgagccagttttaaagacctctggccatgtagacaaatttgctgacttcatggtgaaagacgtaaaaaatggagaatgttttcgtgctgaccatctattaaaagctcatttacagaaattgatgtctgataagaagtgttctgtcgaaaagaaatcagaaatggaaagtgttttggcccagcttgataactatggacagcaagaacttgcggatctttttgtgaactataatgtaaaatctcccattactggaaatgatctatcccctccagtgtcttttaacttaatgttcaagactttcattgggcctggaggaaacatgcctgggtacttgagaccagaaactgcacaggggattttcttgaatttcaaacgacttttggagttcaaccaaggaaagttgccttttgctgctgcccagattggaaattcttttagaaatgagatctcccctcgatctggactgatcagagtcagagaattcacaatggcagaaattgagcactttgtagatcccagtgagaaagaccaccccaagttccagaatgtggcagaccttcacctttatttgtattcagcaaaagcccaggtcagcggacagtccgctcggaaaatgcgcctgggagatgctgttgaacagggtgtgattaataacacagtattaggctatttcattggccgcatctacctctacctcacgaaggttggaatatctccagataaactccgcttccggcagcacatggagaatgagatggcccattatgcctgtgactgttgggatgcagaatccaaaacatcctacggttggattgagattgttggatgtgctgatcgttcctgttatgacctctcctgtcatgcacgagccaccaaagtcccacttgtagctgagaaacctctgaaagaacccaaaacagtcaatgttgttcagtttgaacccagtaagggagcaattggtaaggcatataagaaggatgcaaaactggtgatggagtatcttgccatttgtgatgagtgctacattacagaaatggagatgctgctgaatgagaaaggggaattcacaattgaaactgaagggaaaacatttcagttaacaaaagacatgatcaatgtgaagagattccagaaaacactatatgtggaagaagttgttccgaatgtaattgaaccttccttcggcctgggtaggatcatgtatacggtatttgaacatacattccatgtacgagaaggagatgaacagagaacattcttcagtttccctgctgtagttgctccattcaaatgttccgtcctcccactgagccaaaaccaggagttcatgccatttgtcaaggaattatcggaagccctgaccaggcatggagtatctcacaaagtagacgattcctctgggtcaatcggaaggcgctatgccaggactgatgagattggcgtggcttttggtgtcaccattgactttgacacagtgaacaagaccccccacactgcaactctgagggaccgtgactcaatgcggcagataagagcagagatctctgagctgcccagcatagtccaagacctagccaatggcaacatcacatgggctgatgtggaggccaggtatcctctgtttgaagggcaagagactggtaaaaaagagacaatcgaggaatgaggacaattttgacaacttttgaccacttgcgctaataaaaaaaaaaaaactactcttatgtccactttacaaaagaaaacagcattgtgattactcccagggaccgtattttatcttcagtggctgcctgattttacccccacaattaaagttgaaggaatcctga

SEQ ID NO: 222 - protein, 685 aa, Homosapiens
MDGAGAEEVLAPLRLAVRQQGDLVRKLKEDKAPQVDVDKAVAELKARKRVLEAKELALQPKDDIVDRAKMEDTLKRRFFYDQAFAIYGGVSGLYDFGPVGCALKNNIIQTWRQHFIQEEQILEIDCTMLTPEPVLKTSGHVDKFADFMVKDVKNGECFRADHLLKAHLQKLMSDKKCSVEKKSEMESVLAQLDNYGQQELADLFVNYNVKSPITGNDLSPPVSFNLMFKTFIGPGGNMPGYLRPETAQGIFLNFKRLLEFNQGKLPFAAAQIGNSFRNEISPRSGLIRVREFTMAEIEHFVDPSEKDHPKFQNVADLHLYLYSAKAQVSGQSARKMRLGDAVEQGVINNTVLGYFIGRIYLYLTKVGISPDKLRFRQHMENEMAHYACDCWDAESKTSYGWIEIVGCADRSCYDLSCHARATKVPLVAEKPLKEPKTVNVVQFEPSKGAIGKAYKKDAKLVMEYLAICDECYITEMEMLLNEKGEFTIETEGKTFQLTKDMINVKRFQKTLYVEEVVPNVIEPSFGLGRIMYTVFEHTFHVREGDEQRTFFSFPAVVAPFKCSVLPLSQNQEFMPFVKELSEALTRHGVSHKVDDSSGSIGRRYARTDEIGVAFGVTIDFDTVNKTPHTATLRDRDSMRQIRAEISELPSIVQDLANGNITWADVEARYPLFEGQETGKKETIEE

SEQ ID NO: 223 - DNA, 2107 bp, Homosapiens
atggacgcggcactgctccacagcctgctggaggccaactgcagcctggcgctggctgaagagctgctcttggacggctgggggccacccctggaccccgagggtccctactcctactgcaacacgaccttggaccagatcggaacgtgctggccccgcagcgctgccggagccctcgtggagaggccgtgccccgagtacttcaacggcgtcaagtacaacacgacccggaatgcctatcgagaatgcttggagaatgggacgtgggcctcaaagatcaactactcacagtgtgagcccattttggatgacaagcagaggaagtatgacctgcactaccgcatcgcccttgtcgtcaactacctgggccactgcgtatctgtggcagccctggtggccgccttcctgcttttcctggccctgcggagcattcgctgtctgcggaatgtgattcactggaacctcatcaccacctttatcctgcgaaatgtcatgtggttcctgctgcagctcgttgaccatgaagtgcacgagagcaatgaggtctggtgccgctgcatcaccaccatcttcaactacttcgtggtgaccaacttcttctggatgtttgtggaaggctgctacctgcacacggccattgtcatgacctactccactgagcgcctgcgcaagtgcctcttcctcttcatcggatggtgcatccccttccccatcatcgtcgcctgggccatcggcaagctctactatgagaatgaacagtgctggtttggcaaggagcctggcgacctggtggactacatctaccaaggccccatcattctcgtgctcctgatcaatttcgtatttctgttcaacatcgtcaggatcctaatgacaaagttacgcgcgtccaccacatccgagacaatccagtacaggaaggcagtgaaggccaccctggtgctcctgcccctcctgggcatcacctacatgctcttcttcgtcaatcccggggaggacgacctgtcacagatcatgttcatctatttcaactccttcctgcagtcgttccagggtttcttcgtgtctgtcttctactgcttcttcaatggagaggtgcgctcagccgtgaggaagaggtggcaccgctggcaggaccatcactcccttcgagtccccatggcccgggccatgtccatccctacatcacccacacggatcagcttccacagcatcaagcagacggccgctgtgtgacccctcggtcgcccacctgcacagctcccctgtcctcctccaccttcttcctctgggttctctgtgctgggcaggctctcgtggggcaggagatgggaggggagagaccagctctccagcctggcaggaaagagggggtgcggcagccaagggggactgcaagggacagggatgagtgggggccaccaggctcagcgcaagaggaagcagagggaattcacaggaccccctgagaagagccagtcagatgtctgcaggcatttgcccatcccagcctctctggccagggccttactgggcccagagcagagaaggacctgtccaacacacacagctatttatagtagcagacacagggctcccctgccctactcatggagccagcagccaggcaatggtgtggccctgcactggcccttggactccacactcagtggtgccctgcagttgggtgggttacgccagcaaaggatcagtttggctgccttatcccagggctgtcacctagagaggctcacttgtaccccaccctgttcctgtgtcccctccccagccatcctcccgccttgggggctccatgaaggatgcaggcttccaggcctggcttcctctcttgggagaccccttctctgcctagtccacagattaggcaatcaaggaagacgccatcagggaagccacatccttagtcaaccagttgcatcgtgcggggcaaaatgaggagcagaggcatggaggagggaggcgtgggatgggaatagcagaaccaccatgtcttcagtgattgaaactcataccccattgccctttgccctccagtctccccttcagaaacatctctgctctctgtgaaataaaccatgcctcttgg

SEQ ID NO: 224 - protein, 411 aa, Homosapiens
MDAALLHSLLEANCSLALAEELLLDGWGPPLDPEGPYSYCNTTLDQIGTCWPRSAAGALVERPCPEYFNGVKYNTTRNAYRECLENGTWASKINYSQCEPILDDKQRKYDLHYRIALVVNYLGHCVSVAALVAAFLLFLALRSIRCLRNVIHWNLITTFILRNVMWFLLQLVDHEVHESNEVWCRCITTIFNYFVVTNFFWMFVEGCYLHTAIVMTYSTERLRKCLFLFIGWCIPFPIIVAWAIGKLYYENEQCWFGKEPGDLVDYIYQGPIILVLLINFVFLFNIVRILMTKLRASTTSETIQYRKAVKATLVLLPLLGITYMLFFVNPGEDDLSQIMFIYFNSFLQSFQGFFVSVFYCFFNGEVRSAVRKRWHRWQDHHSLRVPMARAMSIPTSPTRISFHSIKQTAAV

SEQ ID NO: 225 - DNA, 2639 bp, Homosapiens
acatttcagggacaccatgaagggtggcttcactgggggtgatgagtaccagaagcacttcctgcccagggactacttggctacttactacagcttcgatggcagcccctcacccgaggccgagatgctgaagtttaacttggaatgtctccacaagaccttcggccctggaggcctccaaggggacacgctgattgacattggctcaggtcctaccatctaccaagttcttgctgcctgtgattccttccaagacatcactctctccgactttaccgaccgcaaccgggaggagctggaaaagtggctgaagaaggagccgggggcctatgactggaccccagcggtgaaattcgcctgtgagctggaaggaaacagcggccgatgggaggagaaggaggagaagctgcgggcagcggtgaagcgggtgctcaagtgcgatgtccacctgggcaacccgctggccccggctgtgttgcctctcgccgactgtgtgctcaccctgctggccatggagtgtgcctgctgtagccttgatgcctaccgcgctgccctgtgcaaccttgcctcactgctcaagccgggtggccacctggtgaccactgtcacgcttcggctcccgtcctacatggtggggaagcgtgaattttcctgcgtggccctggagaaagaggaggtggagcaggctgtcctggatgctggctttgacattgaacagctcctacacagtccccagagctactctgtcaccaatgctgccaacaatggggtctgcttcattgtggctcgcaagaagcctgggccctgagccaggagggccagccagaggtctggtcaggctgtgaggccttggccatctgtatgctagagaggggtgaggaatggatactgtctaacagtctctgatttcaacactaacattccatcttctgaaattctgagattctaacatccttgttttagaattctaagtttccaacattcctcattctaggatcctaggagtggaattttccattttctaatatactaagccttacagctatcttagatgcgatctgactcctgtgtgactgtggagcacccagggacgtggttttagagtctacctaatatgttaaggacaaggaaacctctgagtctacctaatatgttaaggacaaggaaacctctggacagtggtatattggggaattttttttttttttttgagacggagtctggctctgtcacccaggctagagtgcaatggcacgatctcggctcactgcaagctctgcgtcctgggttgacgccattctcctgcctcagcctcccgagtagctgggactacaggagctcgccaccacacccagctaatttttttttttttttttttatttgagacggagtttcgctctgtcgcccaggctggagtgcagtggcgcgatctcgactcactgcaagctccgcctcccgggttcacgccattctcctgcctcagcctcccgtgtagctgggactacaggcacgcgccaccatgcccggctaatttttgtatttttagtagagatggggtttcaccgtgttagccaggatggtctcgatctcctgacctggtgatccacccaccttggcctcccaaagtgctgggattacaggcgtgagccaccgcacccagccagggggaatgttctataaccagctctgtaaaggaaaagcactgatgtgtggtagtcaccaatttctgtggtgtaaatactcccaccatggttgatttcaagccaccagtggtttaataaccagctcataaatctcctaaatattttacagttgactctcatgagctgattggagtcagctggaacataccactgcctctagactaaggtcagcagatttagcaaatacagactgccccagttcattgaattttagataaatgaaataaatctataaggttaagtatgtccccagaactgcatggaacatgcttaatctaaacaatgatttgttgttcacctgaaattcaaatttagctgggtgtcctgtatttcatctggcaaccctacttcagacccaggtgtaaggtacatggatgtgctttggtcaaggaataggccaaggcagagatccatgcctgcatgactcagtgggtttggtgcacaggcacacacctccacttgttatataacctgtttgtgtaagttcatacttggtctgagccactgttgtctgtaaaaggtaattgtcctgctaatgctgtacaggggctcttggggttcggctcagctcaacatggcttgacatggtgggcacactggcgcccagtaagagagagagagagccaaagctgtccgttttgcagatggacaggaaggagccaggacacagctcagcttgctcacgcccagagagagaaaaagttaagctgctgaccctgaaggcaagggagagcaggctgcacagctgtgtgtggaagccacgggctcaagcagccaaggcagggcggacagtgtgagagagctagtgtaagctgttgatgagagctgttgctgaataaaaccatattcacctgccaaaaaaaaaaaaaaaaaaaaaaaaaaaaaaaaaaaaaaaaaaaaaaaaaaaaaaaaaaaaaaaaaaaaaaaaaaaaaaaa

SEQ ID NO: 226 - protein, 263 aa, Homosapiens
MKGGFTGGDEYQKHFLPRDYLATYYSFDGSPSPEAEMLKFNLECLHKTFGPGGLQGDTLIDIGSGPTIYQVLAACDSFQDITLSDFTDRNREELEKWLKKEPGAYDWTPAVKFACELEGNSGRWEEKEEKLRAAVKRVLKCDVHLGNPLAPAVLPLADCVLTLLAMECACCSLDAYRAALCNLASLLKPGGHLVTTVTLRLPSYMVGKREFSCVALEKEEVEQAVLDAGFDIEQLLHSPQSYSVTNAANNGVCFIVARKKPGP

SEQ ID NO: 227 - DNA, 2744 bp, Homosapiens
gccggacagacccagttgcctggtgctgcggcccggcgtgggcctcgtgggcagagccagagccagagccatggacagcctcttcgtggaggaggtggccgcctccttggtcagggagttcctcagcagaaagggcttaaagaagacatgtgtgaccatggaccaggaacgcccacgctctgacctcagcataaacaacagaaatgatcttcgaaaggttttgcatcttgaatttctctataaggagaacaaggcaaaggaaaatcctctaaaaacaagccttgaactcatcaccagatactttctggatcactttggaaatacggctaacaatttcactcaagataccccaatccctgcactctcagttccaaagaaaaataacaaagtgccatcaagatgctcagagactacactggtaaatatatatgacctttcagatgaagatgcaggatggagaacatcattgtcagaaacaagcaaagccagacatgacaatcttgatggagatgtacttggtaattttgtatcatctaaaaggcccccgcacaaaagtaagcccatgcagacggtcccgggtgaaactcctgtgttgacttctgcatgggagaagatagacaagcttcactcggagccttccttggatgtgaagaggatgggagagaattccaggccaaagtctggtctgattgtgcgaggaatgatgtctgggcccatcgccagctccccacaggattcttttcacagacactatctgagacggtcctcaccgtcaagcagctccacccaaccccaagaagagagcgggaaggtccctgagctctttgtctgcacccaacaggacattctggcttcgagcaacagctccccctccaggrcctccctgggtcagcttagtgaactgaccgtagaaaggcagaaaaccactgccagcagccctccccatctgcccagcaaacggctgcccccatgggacagggccaggccgagggatccctccgaggacaccccagcagtggacggcagcacagacacggacaggatgcccttgaagctctacttgcctggtggtaattccaggatgacccaggagaggctggaaagagcgttcaaacggcagggcagccagcccgcacctgtcaggaaaaatcagttgctgccgtctgacaaggtggatggtgagctgggtgccctgcggctcgaggatgtggaggatgagttgataagggaagaggtcatcctgtcgccagtcccatcagtgctcaagttgcagacagcatcaaaaccaattgacctctcagtagcaaaggaaataaagacccttctgtttggttccagcttttgctgtttcaatgaagaatggaaacttcagagtttttcctttagtaacacagcctcattaaaatacggcatagtgcagaacaagggtggtccttgcggagtcctggcagctgtccaaggctgtgtcctacagaaactcctgtttgaaggagatagcaaagccgactgtgctcaggcactgcagccttcagatgcccaccggacccgctgcctcgtcctggccctcgcagacattgtgtggcgggcagggggccgagagagagccgttgttgcactggcttcgagaacacagcagttcagtccaacagggaaatacaaagcagatggagtcttagaaacacttacgcttcacagtttgacctgctatgaggacctggtgacttttcttcaacaaagcattcatcagtttgaagtgggcccctatggctgcatcctgctcaccctttctgccatcctgtccaggtctacagagctcatccgccaggactttgatgtccccaccagccacctgattggagcacatggctactgtacacaggaacttgtcaatctgctcctaactgggaaagctgtgtccaaacgttttcaacgatgtggttgagctggattctggggatgggaacttcacacttctcagaggcattgctgcacgcagtgatattggcttcttttctctctttgagcattacaacatgtgccaggttggctgcttcctgaagaccccgaggttccccatctgggtggtttgcagtgagagccacttcagcatcctctttagcctgcagccggggctcctgcgtgactggaggactgagaggctctttkacttgtactactacgatggcctggccaaccagcaggagcagatccggctgaccattgacaccacccaaaccatctctgaggacacagacaacgaccttgtcccacccctcgagctctgcatcagaaccaagtggaagggggcatcagtgaactggaacggctcagaccccatcctgtgaccgttggatgtgggtaaaccctgtggtccaccactcatcacctcatcaccgaggatgacagctgaaccccaagcctctggggcaggtctcatgtaccccaacctgggtcagcatgactgcagaagcatccagagcctccctgccccttccatgaagggcccacccaagactgtgctggggacccagtgtgttgctgggtcccctcccagctgagctgtgactgctgagtactggaaggaggttgccagggtctctgctacctttgtctgcatccctcccttgctccctgctgggtggtccctcacccaggcctccaatgtggttggccctggggactcattacttctggtagctggctttctataaaaatgggtcaaacccaaaaaaaaaaaaaaaaaa

SEQ ID NO: 228 - protein, 623 aa, Homosapiens
  misc_feature (270)..(270): Xaa can be any naturally occurring amino acid
MDSLFVEEVAASLVREFLSRKGLKKTCVTMDQERPRSDLSINNRNDLRKVLHLEFLYKENKAKENPLKTSLELITRYFLDHFGNTANNFTQDTPIPALSVPKKNNKVPSRCSETTLVNIYDLSDEDAGWRTSLSETSKARHDNLDGDVLGNFVSSKRPPHKSKPMQTVPGETPVLTSAWEKIDKLHSEPSLDVKRMGENSRPKSGLIVRGMMSGPIASSPQDSFHRHYLRRSSPSSSSTQPQEESGKVPELFVCTQQDILASSNSSPSRXSLGQLSELTVERQKTTASSPPHLPSKRLPPWDRARPRDPSEDTPAVDGSTDTDRMPLKLYLPGGNSRMTQERLERAFKRQGSQPAPVRKNQLLPSDKVDGELGALRLEDVEDELIREEVILSPVPSVLKLQTASKPIDLSVAKEIKTLLFGSSFCCFNEEWKLQSFSFSNTASLKYGIVQNKGGPCGVLAAVQGCVLQKLLFEGDSKADCAQALQPSDAHRTRCLVLALADIVWRAGGRERAVVALASRTQQFSPTGKYKADGVLETLTLHSLTCYEDLVTFLQQSIHQFEVGPYGCILLTLSAILSRSTELIRQDFDVPTSHLIGAHGYCTQELVNLLLTGKAVSKRFQRCG

SEQ ID NO: 229 - DNA, 2764 bp, Homosapiens
agctctcagagggaattgagcacccggcagcggtctcaggccaagccccctgccagcatggccagcgagttcaagaagaagctcttctggagggcagtggtggccgagttcctggccacgaccctctttgtcttcatcagcatcggttctgccctgggcttcaaatacccggtggggaacaaccagacggcggtccaggacaacgtgaaggtgtcgctggccttcgggctgagcatcgccacgctggcgcagagtgtgggccacatcagcggcgcccacctcaacccggctgtcacactggggctgctgctcagctgccagatcagcatcttccgtgccctcatgtacatcatcgcccagtgcgtgggggccatcgtcgccaccgccatcctctcaggcatcacctcctccctgactgggaactcgcttggccgcaatgacctggctgatggtgtgaactcgggccagggcctgggcatcgagatcatcgggaccctccagctggtgctatgcgtgctggctactaccgaccggaggcgccgtgaccttggtggctcagccccccttgccatcggcctctctgtagcccttggacacctcctggctattgactacactggctgtgggattaaccctgctcggtcctttggctccgcggtgatcacacacaacttcagcaaccactggattttctgggtggggccattcatcgggggagccctggctgtactcatctacgacttcatcctggccccacgcagcagtgacctcacagaccgcgtgaaggtgtggaccagcggccaggtggaggagtatgacctggatgccgacgacatcaactccagggtggagatgaagcccaaatagaaggggtctggcccgggcatccacgtagggggcaggggcaggggcgggcggagggaggggaggggtgaaatccatactgtagacactctgacaagctggccaaagtcacttccccaagatctgccagacctgcatggtcaagcctcttatgggggtgtttctatctctttctttctctttctgtttcctggcctcagagcttcctggggaccaagatttaccaattcacccactcccttgaagttgtggaggaggtgaaagaaagggacccacctgctagtcgcccctcagagcatgatgggaggtgtgccagaaagtcccccctcgccccaaagttgctcaccgactcacctgcgcaagtgcctgggattctaccgtaattgctttgtgcctttgggcacggccctccttcttttcctaacatgcaccttgctcccaatggtgcttggagggggaagagatcccaggaggtgcagtggagggggcaagctttgctccttcagttctgcttgctcccaagcccctgacccgctcggacttactgcctgaccttggaatcgtccctatatcagggcctgagtgacctccttctgcaaagtggcagggaccggcagagctctacaggcctgcagcccctaagtgcaaacacagcatgggtccagaagacgtggtctagaccagggctgctctttccacttgccctgtgttctttccccaggggcatgactgtcgccacacgcctctgtgtacatgtgtgcagagcagacaggctacaaagcagagatcgacagacagccaggtagttggaactttctgttccctatggagaggcttccctacacagggcctgctattgcagaatgaagccatttagagggtgaaggagaaatacccatgttacttctctgagttttagttggtctttccatctatcactgcattatcttgctcattcttcagttctctactccctcttgtcagtgtagacacaggtcaccattatgctggtgtatgtttatcaaagagcacttgagctgtctgaagcccaaagcctgaggacagaaagaccctgatgcaggtcagcccatggaggcagatgcccttgctgggcctgggggttttccaagccctcagctggtcctgaccaggatggagcaagctcttcccttgctcatgagctcctgatcagaggcatttgagcagctgaataacctgcacaggcttgctgtatgacccctggccacagccttccctctgcattgacctggaggggagaggtcagccttgacctaatgaggtagctatagttgcagcccaaggacagttcagagatcaggatcagctttgaaggctggattctatctacataagtcctttcaattccaccagggccagagcagctccaccactgtgcacttagccatgatggcaacagaaaccaagagacacaattacgcaggtatttagaagcagagggacaaccagaaggcccttaactatcaccagtgcatcacatctgcacactctcttctccattccctagcaggaacttctagctcatttaacagataaagaaactgaggcccacggtttcagctagacaatgatttggccaggcctagtaaccaaggccctgtctctggctactccctggaccacgaggctgattcctctcatttccagcttctcagtttctgcctgggcaatggccaggggccaggagtggggagagttgtgatggaggggagaggggtcacacccaccccctgcctggttctaggctgctgcacaccaaggccctgcatctgtctgctctgcatatatgtctctttggagttggaatttcattatatgttaagaaaataaaggaaaatgacttgtaaggtcaaaaaaaaaa

SEQ ID NO: 230 - protein, 269 aa, Homosapiens
MASEFKKKLFWRAVVAEFLATTLFVFISIGSALGFKYPVGNNQTAVQDNVKVSLAFGLSIATLAQSVGHISGAHLNPAVTLGLLLSCQISIFRALMYIIAQCVGAIVATAILSGITSSLTGNSLGRNDLADGVNSGQGLGIEIIGTLQLVLCVLATTDRRRRDLGGSAPLAIGLSVALGHLLAIDYTGCGINPARSFGSAVITHNFSNHWIFWVGPFIGGALAVLIYDFILAPRSSDLTDRVKVWTSGQVEEYDLDADDINSRVEMKPK

SEQ ID NO: 231 - DNA, 1614 bp, Homosapiens
agccaaggcttactgaggctggtggagggagccactgctgggctcaccatggaccgccggatgtggggggcccacgtcttctgcgtgttgagcccgttaccgaccgtattgggccacatgcacccagaatgtgacttcatcacccagctgagagaggatgagagtgcctgtctacaagcagcagaggagatgcccaacaccaccctgggctgccctgcgacctgggatgggctgctgtgctggccaacggcaggctctggcgagtgggtcaccctcccctgcccggatttcttctctcacttcagctcagagtcaggggctgtgaaacgggattgtactatcactggctggtctgagccctttccaccttaccctgtggcctgccctgtgcctctggagctgctggctgaggaggaatcttacttctccacagtgaagattatctacaccgtgggccatagcatctctattgtagccctcttcgtggccatcaccatcctggttgctctcaggaggctccactgcccccggaactacgtccacacccagctgttcaccacttttatcctcaaggcgggagctgtgttcctgaaggatgctgcccttttccacagcgacgacactgaccactgcagcttctccactgttctatgcaaggtctctgtggccgcctcccatttcgccaccatgaccaacttcagctggctgttggcagaagccgtctacctgaactgcctcctggcctccacctcccccagctcaaggagagccttctggtggctggttctcgctggctgggggctgcccgtgctcttcactggcacgtgggtgagctgcaaactggccttcgaggacatcgcgtgctgggacctggacgacacctccccctactggtggatcatcaaagggcccattgtcctctcggtcggggtgaactttgggctttttctcaatattatccgcatcctggtgaggaaactggagccagctcagggcagcctccatacccagtctcagtattggcgtctctccaagtcgacacttttcctgatcccactctttggaattcactacatcatcttcaacttcctgccagacaatgctggcctgggcatccgcctccccctggagctgggactgggttccttccagggcttcattgttgccatcctctactgcttcctcaaccaagaggtgaggactgagatctcacggaagtggcatggccatgaccctgagcttctgccagcctggaggacccgtgctaagtggaccacgccttcccgctcggcggcaaaggtgctgacatctatgtgctaggctgcctcatcacgccactggagtccacacttgaatttgggcagctaccacgggtctgccatgctctggaggagcaagggggccacatccccaccccagctgttacccagcccggggcaggtgcagcccttcctccctgtctctgcatctgactctcttttgaggtccctgtatgtctacctctgacttctgtggtccctctgtgtctgctctcatccattcctcttactggggcctggggctctagcccaaggctcagaggagccaataaacctgtaaatgaaaaaaaaaaaa

SEQ ID NO: 232 - protein, 423 aa, Homosapiens
MDRRMWGAHVFCVLSPLPTVLGHMHPECDFITQLREDESACLQAAEEMPNTTLGCPATWDGLLCWPTAGSGEWVTLPCPDFFSHFSSESGAVKRDCTITGWSEPFPPYPVACPVPLELLAEEESYFSTVKIIYTVGHSISIVALFVAITILVALRRLHCPRNYVHTQLFTTFILKAGAVFLKDAALFHSDDTDHCSFSTVLCKVSVAASHFATMTNFSWLLAEAVYLNCLLASTSPSSRRAFWWLVLAGWGLPVLFTGTWVSCKLAFEDIACWDLDDTSPYWWIIKGPIVLSVGVNFGLFLNIIRILVRKLEPAQGSLHTQSQYWRLSKSTLFLIPLFGIHYIIFNFLPDNAGLGIRLPLELGLGSFQGFIVAILYCFLNQEVRTEISRKWHGHDPELLPAWRTRAKWTTPSRSAAKVLTSMC

SEQ ID NO: 233 - DNA, 1130 bp, Homosapiens
agcagccaaggcttactgaggctggtggagggagccactgctgggctcaccatggaccgccggatgtggggggcccacgtcttctgcgtgttgagcccgttaccgaccgtattgggccacatgcacccagaatgtgacttcatcacccagctgagagaggatgagagtgcctgtctacaagcagcagaggagatgcccaacaccaccctgggctgccctgcgacctgggatgggctgctgtgctggccaacggcaggctctggcgagtgggtcaccctcccctgcccggatttcttctctcacttcagctcagagtcaggggctgtgaaacgggattgtactatcactggctggtctgagccctttccaccttaccctgtggcctgccctgtgcctctggagctgctggctgaggaggaatcttacttctccacagtgaagattatctacaccgtgggccatagcatctctattgtagccctcttcgtggccatcaccatcctggttgctctcaggaggctccactgcccccggaactacgtccacacccagctgttcaccacttttatcctcaaggcgggagctgtgttcctgaaggatgctgcccttttccacagcgacgacactgaccactgcagcttctccactgttctatgcaaggtctctgtggccgcctcccatttcgccaccatgaccaacttcagctggctgttggcagaagccgtctacctgaactgcctcctggcctccacctcccccagctcaaggagagccttctggtggctggttctcgctggctgggggctgcccgtgctcttcactggcacgtgggtgagctgcaaactggccttcgaggacatcgcgtgctgggacctggacgacacctccccctactggtggatcatcaaagggcccattgtcctctcggtcggggtgaactttgggctttttctcaatattatccgcatcctggtgaggaaactggagccagctcagggcagcctccatacccagtctcagtattggtactgtgtgtttgtgtctggggatactgggaaagggtaactggagggggattcaatgtgtctgtctcatccaataagcactcatgacctcagccccatactctt

SEQ ID NO: 234 - protein, 337 aa, Homosapiens
MDRRMWGAHVFCVLSPLPTVLGHMHPECDFITQLREDESACLQAAEEMPNTTLGCPATWDGLLCWPTAGSGEWVTLPCPDFFSHFSSESGAVKRDCTITGWSEPFPPYPVACPVPLELLAEEESYFSTVKIIYTVGHSISIVALFVAITILVALRRLHCPRNYVHTQLFTTFILKAGAVFLKDAALFHSDDTDHCSFSTVLCKVSVAASHFATMTNFSWLLAEAVYLNCLLASTSPSSRRAFWWLVLAGWGLPVLFTGTWVSCKLAFEDIACWDLDDTSPYWWIIKGPIVLSVGVNFGLFLNIIRILVRKLEPAQGSLHTQSQYWYCVFVSGDTGKG

SEQ ID NO: 235 - DNA, 1643 bp, Homosapiens
cagccggccacacaggcgcggagacccggctcggcgcgcgctcctcggcgcacacgctccccatccccgcgccgcgcgggccgcggacttgcaggctgcgcgtcctttgcggagtctgccccggccccacggacaggccccgcagtgagcagcccagagacacattggggctgacctgccgctgctgtcagtgggaggccagtggtgctggccaagaagtgtcatggctggtgtcgtgcacgtttccctggctgctctcctcctgctgcctatggcccctgccatgcattctgactgcatcttcaagaaggagcaagccatgtgcctggagaagatccagagggccaatgagctgatgggcttcaatgattcctctccaggctgtcctgggatgtgggacaacatcacgtgttggaagcccgcccatgtgggtgagatggtcctggtcagctgccctgagctcttccgaatcttcaacccagaccaagtctgggagaccgaaaccattggagagtctgattttggtgacagtaactccttagatctctcagacatgggagtggtgagccggaactgcacggaggatggctggtcggaacccttccctcattactttgatgcctgtgggtttgatgaatatgaatctgagactggggaccaggattattactacctgtcagtgaaggccctctacacggttggctacagcacatccctcgtcaccctcaccactgccatggtcatcctttgtcgcttccggaagctgcactgcacacgcaacttcatccacatgaacctgtttgtgtcgttcatgctgagggcgatctccgtcttcatcaaagactggattctgtatgcggagcaggacagcaaccactgcttcatctccactgtggaatgtaaggccgtcatggttttcttccactactgtgttgtgtccaactacttctggctgttcatcgagggcctgtacctcttcactctgctggtggagaccttcttccctgaaaggagatacttctactggtacaccatcattggctgggggaccccaactgtgtgtgtgacagtgtgggctacgctgagactctactttgatgacacaggctgctgggatatgaatgacagcacagctctgtggtgggtgatcaaaggccctgtggttggctctatcatggttaactttgtgctttttattggcattatcgtcatccttgtgcagaaacttcagtctccagacatgggaggcaatgagtccagcatctacttgcgactggcccggtccaccctgctgctcatcccactattcggaatccactacacagtatttgccttctccccagagaatgtcagcaaaagggaaagactcgtgtttgagctggggctgggctccttccagggctttgtggtggctgttctctactgttttctgaatggtgaggtacaagcggagatcaagcgaaaatggcgaagctggaaggtgaaccgttacttcgctgtggacttcaagcaccgacacccgtctctggccagcagtggggtgaatgggggcacccagctctccatcctgagcaagagcagctcccaaatccgcatgtctggcctccctgctgacaatctggccacctgagccatgctcccct

SEQ ID NO: 236 - protein, 468 aa, Homosapiens
MAGVVHVSLAALLLLPMAPAMHSDCIFKKEQAMCLEKIQRANELMGFNDSSPGCPGMWDNITCWKPAHVGEMVLVSCPELFRIFNPDQVWETETIGESDFGDSNSLDLSDMGVVSRNCTEDGWSEPFPHYFDACGFDEYESETGDQDYYYLSVKALYTVGYSTSLVTLTTAMVILCRFRKLHCTRNFIHMNLFVSFMLRAISVFIKDWILYAEQDSNHCFISTVECKAVMVFFHYCVVSNYFWLFIEGLYLFTLLVETFFPERRYFYWYTIIGWGTPTVCVTVWATLRLYFDDTGCWDMNDSTALWWVIKGPVVGSIMVNFVLFIGIIVILVQKLQSPDMGGNESSIYLRLARSTLLLIPLFGIHYTVFAFSPENVSKRERLVFELGLGSFQGFVVAVLYCFLNGEVQAEIKRKWRSWKVNRYFAVDFKHRHPSLASSGVNGGTQLSILSKSSSQIRMSGLPADNLAT

SEQ ID NO: 237 - DNA, 3622 bp, Homosapiens
aggggacgctgctttccgcgctggacggaccaagcgagggagggtgcgaggggaaaccggaaggaagaggcggcggcgccagccttcctcggccggaggcggaggcgagaccccaggcgaggccgcggcgggagggccacgcccccgccgccgcgccggaggggcccagtgtggacggggccacgggctggagcggatcccacacctccggaccgagggacgcggttactccacaggatccgctgaacataggatgttgccacaaaatctacctcgtgtatttttctctttcactcatgagctgcacaattgcagatttgagcacaatgtctgcagactgtgttgaaaaactctgaagaacctaattaacacaggatgacctaggagtgattctaagtctgtgtaacaagatattactcattagtgaatgtgtcagtcttggtactgaatgctgcagataacagcaagtaggttctcctttatttctgaagtattcacttgaccttccatcagtaagacggacttttctaatctgttcctggagatattaatggaatacagtcatgtccactcaagacgagaggcagatcaatactgaatatgctgtgtcattgttggaacagttgaaactgttttatgaacagcagttgtttactgacatagtgttaattgttgagggcactgaattcccttgtcataagatggttcttgcaacatgtagctcttatttcagggccatgtttatgagtggactaagtgaaagcaaacaaacccatgtacacctgaggaatgtcgatgctgccaccttacagataataataacttatgcatacacgggtaacttggcaatgaatgacagcactgtagaacagctttatgaaacagcttgcttcctacaggtagaagatgtgttacaacgttgtcgagaatatttaattaaaaaaataaatgcagagaattgtgtacgattgttgagttttgctgatctcttcagttgtgaggaattaaaacagagtgctaaaagaatggtggagcacaagttcactgctgtgtatcataaggacgcgttcatgcagctgtcacatgacctactgatagatattctcagtagtgacaatttaaatgtagaaaaggaagaaaccgttcgagaagctgctatgctgtggctagagtataacacagaatcacgatcccagtatttgtcttctgttcttagccaaatcagaattgatgcactttcagaagtaacacagagagcttggtttcaaggtctgccacccaatgataagtcagtggtggttcaaggtctgtataagtccatgcccaagtttttcaaaccaagacttgggatgactaaagaggaaatgatgattttcattgaagcatcttcagaaaatccttgtagtctttactcttctgtctgttacagcccccaagcagaaaaagtttacaagttatgtagcccaccagctgatttgcataaggttgggaccgttgtaactcctgataatgatatctacatagcagggggtcaagttcctctgaaaaacacaaaaacaaatcacagtaaaacaagcaaacttcagactgccttcagaactgtgaattgcttttattggtttgatgcacagcaaaatacctggtttccaaagaccccaatgctttttgtccgcataaagccatctttggtttgctgtgaaggctatatctatgcaattggaggagatagcgtaggtggagaacttaatcggaggaccgtagaaagatacgacactgagaaagatgagtggacgatggtaagccctttaccttgtgcttggcaatggagtgcagcagttgtggttcatgactgcatttatgtgatgacactgaacctcatgtactgttattttccaaggtctgactcatgggtagaaatggccatgagacagactagtaggtcctttgcttcagctgcagcttttggtgataaaattttctatattggagggttgcatattgctaccaattccggcataagactcccctctggcactgtagatgggtcttcagtaactgtggaaatttatgatgtgaataaaaatgagtggaaaatggcagccaacatccctgctaagaggtactctgacccctgtgttagagctgttgtgatctcaaattctctatgtgtgtttatgcgagaaacccacttaaatgagcgagctaaatatgtcacctaccaatatgacctggaacttgaccggtggtctctgcggcagcatatatctgaacgtgtactgtgggacttggggagagattttcgatgcactgtggggaaactctatccatcctgccttgaagagtatccatggaaaccaccaacttatcttttttcaacggatgggacagaagagtttgaactggatggagaaatggttgcactaccacctgtatagtggggaagttcagggagtgcacgcctgagttatgtgctttgtcattttctttgctaaacaaaagaggctatgaaagaactaaatatgagtacataaaattctatctttgataaattttatttttatgccctacttaatatttgcatcagtataatatatatcagtgagtcttacagaaagatatgcttccataatatgaaatagattattcaataattgagaaactttatgtgtaatcatgagagtataagaatctggattatctaacattgttagccctgtgtatgtacagttcaaaaagttcatttataaaagtagtttcctgttcctagtgtgatgtatcacaaattgtgctgaggttattttagtatgtgtgtttcattcccgtgcttctgttctgaagtcctggaatacagttttcagtgtaattaattcaactgcacttaacactaatgtccgtgttggtatagaaatgtctaaatcctatactctagttgaggaagatcttccataattttatggtattacacagggaaagctatgactgcaggatcagtctaactatactattaggtgcatgtattctcttttcactaacttatacttgtctatctagaatacaggtcttccagtcagctggtcatttaccaggtgtggacttaagttgctgggcttgcagtaagaattgccagccactcattgtgcgggtctgcgtggagctttaatcagaaaaagcctccactttctgtattatgttaacattggctcatgcatataactatctgctgctgatgtagttctccatcttcaagatttagagtgggttaaccaggtcattacatcttaatttaataacaagcattactgtagagtgattgtgtatagatctgttagctgtcagggtgtgttttttttaacctgttgtgtgcgtgtgggggttaggattagtaaggtgaactgttcaggaattctctgcactagctgtgcagaagagcagataactagcgctgctctggcattaatcccaggaaccactagcagtagtggggcgccgccaatctaacatgagcacaggtgcttcatgacaaacattactagcatgttcaactgcaccatgttctggcactgtattttgaatgacattaatttattaaataaattgtatatattcaaaaaaaaaaaaaaaa

SEQ ID NO: 238 - protein, 623 aa, Homosapiens
MSTQDERQINTEYAVSLLEQLKLFYEQQLFTDIVLIVEGTEFPCHKMVLATCSSYFRAMFMSGLSESKQTHVHLRNVDAATLQIIITYAYTGNLAMNDSTVEQLYETACFLQVEDVLQRCREYLIKKINAENCVRLLSFADLFSCEELKQSAKRMVEHKFTAVYHKDAFMQLSHDLLIDILSSDNLNVEKEETVREAAMLWLEYNTESRSQYLSSVLSQIRIDALSEVTQRAWFQGLPPNDKSVVVQGLYKSMPKFFKPRLGMTKEEMMIFIEASSENPCSLYSSVCYSPQAEKVYKLCSPPADLHKVGTVVTPDNDIYIAGGQVPLKNTKTNHSKTSKLQTAFRTVNCFYWFDAQQNTWFPKTPMLFVRIKPSLVCCEGYIYAIGGDSVGGELNRRTVERYDTEKDEWTMVSPLPCAWQWSAAVVVHDCIYVMTLNLMYCYFPRSDSWVEMAMRQTSRSFASAAAFGDKIFYIGGLHIATNSGIRLPSGTVDGSSVTVEIYDVNKNEWKMAANIPAKRYSDPCVRAVVISNSLCVFMRETHLNERAKYVTYQYDLELDRWSLRQHISERVLWDLGRDFRCTVGKLYPSCLEEYPWKPPTYLFSTDGTEEFELDGEMVALPPV

SEQ ID NO: 239 - DNA, 3349 bp, Homosapiens
gttattggcgcttgctcggcatttgtggaccgaacaggcaagttcaaccgagcacgctgcccccgcgctccacctctgagttccctgggccactgcgacatggagaaaccccgttcttttcatcctctgctatggagaagggacgaggacacgggtcctgcagtgttggtgtggcgaggcccggaagaagagagaatgggcggcggggactggccacggcgctgctagttatgaaaaacctcctcctgggcttatcaagatggagtttcgctcttgttgcccaggctggagtacaatggcatgatctcggctcaccgcgacctccgcctcccgggttcaagcgattctcctgcctcagtcttcccaagtggctgggattacaggcatgcgccactatgcctggctaattttgtatttttagtagaggcggggtttcttcatgttggtcagtctggtctcgaacttccagcctcaggtgatccgcccgcctcggcctcccaaagtgctgggattacaggtgtaagccaccgcgatggcctgctgtgttttaattttctgacatcccctttgactcatggattggttacgcatgtgttattcagtttctacatactggattcttcaaatttccttatattgttgctttgtaatttgagtccatcctagttagagaatatactttgtatggtttaaatccttttaattatattaattcttgttttatggcctaatatagggtctctggataatgttccatattgacttcaaaaagtgtttattgttgggtggtagagtgttttataagtaactgttaggttcaattgatttatattgttgtttaagtcttgtaattcattgctgatcttctctctagttgttttatccattattgaatgaggagtattgaaatctctattattgttacaccgttctattttccccttcaattctatcagtttgtgtctcaactatctggcactcttttgctaggttacatacatatttataaatgttgtatcttcttgatggattgacctttttatcaatacaaaatatccttctttgtctctggtaacagtttttgtcttagggtgtattttgtctgaaattatcggagcagctttagttccctttgggttactgtttgcatcatatattcctttccatccttttactgccaacctaattgggtctttaaatctacagtgtgtcacttatatctagtgcttggatagcatttttcctttttttttttttttttttttttttgagacagggcctctctgctgcccagggtggagtgcagtggcacaatcacagcacactgcagcctagacctcccaggctcgggcagtcctcccgcctcagccttctgagtggctggaaccacaggtgcttgccaccatgcctggctaatttttaaaaattttttgtacagacgggatctcaccttgttgcttaggctattctcatactcctgggctcaagcagtcctcctgccttggcctcccaaggtgttgggattacaggcatgagccactgcacctggcggataacatttttatccattctataaatctctgccttttgattgaagtgtttaatccatttgcatgtaatataattactgttaaggtaattacaaacctatgcacatggttttgattttaccaattttagtattaattagaaaagtggttctcccactttgatatttctacaaataaccagtaaatcttttaaaattcaggttatatgtccatatcaggcccagcccagaaatactgaatatccagtatttgaatatccaaaatactgaatactggatattcaatatttctgggttgggtcctataccttgcttttctaacaaccttgctcatattgttgaatttgctggtccatggaccacactttgaatatctgggatcacctttccataataagaggattttgagcggaaatggtatcttctggatatctatacatcaatgcttgttccatggcatttcacatcccttcagctttgccataaaggcacatattagtttgaaagagtgtagtccttctcccccaaactttaaatggtgagggagataaggatagggatagctcacaggcaatcaatagaaatccacaaacttaggccaggcacagtggctcacacctgtaatcccaacactttggaaggctgaggtgggctggtcacgaggtcaggagttcaaaaccagcctggccaacatgacgaaaccgtctctaccaaaaatataaagaattggctgggtttggtggcatgcatctgtgatcccagccacttgggaggctggggcggaagaattgcttgaacccgggaggcggaggttgcagtgagccaagatcgcgccactacactccagcctgggcaacagagcgagactcgtctcaaaaaaaaaaaaaaaaacccacaaacttaatttttttcagtggtttcctgcattcaatcctcaaataaaaataaaaagagaaaaactttcttgccctgtcactacgtattttctgtagttgccagcatagagcaaacttggctgaacttacctaaatccctcttcatacttcccgacctagttgcttagaattgcttaatactcaaacacagggtctcattcaccattcccatacagtttcctgatttacaccacatccagatggtgctgagaggatatgaacaggcgagagaagtaacaaggatctcatccattcttgcttcactcaccacttcctttttctcagaggtcaatgcctgatgccaggtccactcactgaaattccatgaagactggaatttgttgccttggagcatgtatatacattctcttgttattctcctcccagttcctcatcaggaccttctgttgcttctaatagttaacctctttaaatagcacagtttccctcttctgcaagtaaagttgcagtagggttctgatggcattaatattttaaaagaacttgtgattttgtttacttaaaagtgagggatgtgaacagatgtcgactcaacctgagaaagaaggtatttgttctagtgactaaatttataaatgagattcagagccacttgattaatagaagatatttactttgaaaaatacagcgagacacactaaaaaaattgaccttttgcagtacttttcattggattgcttcataatttcttggtgttggaaaattaattcctaaagcacaagattaaaggatgcttgggtaagcaattagtttacctgtcttttctgggaccttacacggttcatccatgattgcattttcttttagaattggagtttaatgaataaaaactttaatataatct

SEQ ID NO: 240 - protein, 121 aa, Homosapiens
MISAHRDLRLPGSSDSPASVFPSGWDYRHAPLCLANFVFLVEAGFLHVGQSGLELPASGDPPASASQSAGITGVSHRDGLLCFNFLTSPLTHGLVTHVLFSFYILDSSNFLILLLCNLSPS

SEQ ID NO: 241 - DNA, 3425 bp, Homosapiens
gagacggggtggcggctgcagcccgggtagggccaggagacccggtccacgtttgcaaacgcagccgaacgcccaggccgacccgtgccgcccgagcgccgcgctgcgtccgcgccactcttctcgccgccccgatggcgttccggggctggaggcccccgccgccaccgctgctcctgctgctgctctgggtgaccgggcaggcagcgcccgtggcgggcctgggctccgacgcggagctgcagatcgagcggcgcttcgtgcccgacgagtgcccgcgcaccgtgcgcagcggcgacttcgtgcgctaccactacgtggggacgttccccgacggccagaagttcgactccagctatgacagagactccactttcaatgtgtttgtgggaaaaggacagctgatcacagggatggaccaggctcttgttgggatgtgcgtaaacgagagacgtttcgtgaagattcccccaaagcttgcctacggaaatgaaggagtttctggtgtgatcccccccaattcagtgcttcattttgatgtacttctgatggatatttggaattctgaagaccaggttcagattcacacctatttcaagcccccgagttgccctcggaccatccaggtgtctgattttgtgaggtaccactacaacgggacgttcctggacggaactctgtttgattcgagtcacaatcgcatgaaaacatatgacacgtatgtgggaattggctggctgattcctggaatggataaagggctgctggggatgtgtgtgggtgagaagcgcatcatcaccattcctccttttctggcctatggagaggatggagatgggaaagacattcccggtcaggcatctctggtgtttgatgttgcattattggacctccataaccccaaggacagcatttccattgagaacaaggtagtacctgaaaactgtgagcggataagtcaaagtggggactttctcaggtatcattacaatggcacgcttctggatggcaccctctttgattccagctactctcggaaccgcacgtttgacacgtacattgggcagggctacgtgattcctgggatggatgaaggtctacttggtgtttgcattggagaaaagcgaaggattgtggtcccgcctcacctggggtatggagaggaaggaagagggaatatccccggctcggctgtgctggtgtttgacatccatgtgatcgacttccacaacccttcggactccatcagcatcacctcccactacaaaccccctgactgctcagtgctgagtaagaagggagattacctcaaatatcactacaatgcctcacttctggatgggaccctgctggactccacgtggaatttaggcaaaacttacaatattgttctgggatctgggcaagttgtgttggggatggacatgggtctcagagagatgtgcgttggcgagaaacggacagtgatcattccgcctcacctgggctatggggaagctggcgtggatggagaagtgcccggcagtgccgtattagtgtttgacattgagctgctggagctggtggctggccttcctgaggggtacatgttcatatggaatggtgaggtgtcacccaacctctttgaagaaattgacaaggatggcaacggagaagtcctcctggaagagttctcagagtacattcacgcccaggtggcatctggcaaagggaaactcgctcctggctttgatgctgagctgattgtgaagaatatgttcaccaaccaggaccggaatggagatgggaaggtcacagccgaggaatttaaactcaaagaccaggaagccaaacacgatgaactctaaacctggcatgaaccagatggtgccagggagtacgtgacaccaagccacctgtgtggcaagacgtgcagtgagggtgcaagggtctctcagaagttgcatcattagccagtagtaggtgggtcacatagtacctggtgtacacatcggggtgggttgatatatggggtgagaagtttgggctgatcgccagtgatagtaaacaaaatctgtgcagagggccttagcatgggatgtgtccagtattgaaaaggctgcactgccaaccatgatttgtgagccttctgggaaattttgttattaaaggaatatatagtgtcagacggaagttataatcatcttggaggaaccataagaaaaggtgtccagggtatctatataaagagggttaaatttttttttaacttgctggttaaaacattttagaaatattctagagatgggcaggagagtcaaagggcttgcttgccccagcagagttcccagcagacagccatggctcttcccagcagcctgtgcaaattctgatgatggccccacccccgcacacgcacacgcacatcatgcttttccagctcatcacaccccgccccactatgggcctaccattaatagtgtataacttggaggttaaaagagccttttggacagaaaactgggccaggaaaaggcatctcagaccacaaatagagaatttgattcctcatttgccacataagtcatctgcttagcttttcctttccttttttttttttttttttttctggaggcagagtctccctttgtcgccaggctggagtgcagtggtgccatctcggctcactgcagcactgtctcggctcactgcagcctccgcctcccgtattcaagcgattctcctgtctcagcctcctgagtagctgggactacaggtgtgcaccaccacgcccggctaatttttgtatttttagtagagacggggtttcactgtgttggccaggatggtctcaatctcgacctcgtgatccgcccaccttggcctcccaaagtgttgggattacaggcgtgactcaccatgcccagccacttagttttttcttattcccacctttctatcccatagaacactcttttttatcttccctgaaccatattgatgagataaatagggctgggggctgggccccgctggtcactcaacagagtatttcccttggccgagatggaagttttgtcccaatagatgagctgctgagcatcaacaaggtgacatttttctgctgcccatttgtgtcctggagacggtggtaccctgaaggcagaggccagctgccgcaagacagcaatgacagtccacctgccgacctgattcctgcatcatggaataaccacatggctaccttctatcctctgttcccaaatggtggtggcacttatcctgaagtcgtcaatgatttccctttgaaactactttattttactaatttaaactattttgtactgatgtagccctgaggtagttcatgaaaatgctgtgcactcattccatggaataaatgttggaaagctgatcttttctgatataaaatgttgaatgatatt

SEQ ID NO: 242 - protein, 570 aa, Homosapiens
MAFRGWRPPPPPLLLLLLWVTGQAAPVAGLGSDAELQIERRFVPDECPRTVRSGDFVRYHYVGTFPDGQKFDSSYDRDSTFNVFVGKGQLITGMDQALVGMCVNERRFVKIPPKLAYGNEGVSGVIPPNSVLHFDVLLMDIWNSEDQVQIHTYFKPPSCPRTIQVSDFVRYHYNGTFLDGTLFDSSHNRMKTYDTYVGIGWLIPGMDKGLLGMCVGEKRIITIPPFLAYGEDGDGKDIPGQASLVFDVALLDLHNPKDSISIENKVVPENCERISQSGDFLRYHYNGTLLDGTLFDSSYSRNRTFDTYIGQGYVIPGMDEGLLGVCIGEKRRIVVPPHLGYGEEGRGNIPGSAVLVFDIHVIDFHNPSDSISITSHYKPPDCSVLSKKGDYLKYHYNASLLDGTLLDSTWNLGKTYNIVLGSGQVVLGMDMGLREMCVGEKRTVIIPPHLGYGEAGVDGEVPGSAVLVFDIELLELVAGLPEGYMFIWNGEVSPNLFEEIDKDGNGEVLLEEFSEYIHAQVASGKGKLAPGFDAELIVKNMFTNQDRNGDGKVTAEEFKLKDQEAKHDEL

SEQ ID NO: 243 - DNA, 1743 bp, Homosapiens
cgtgatgctctgggatcccgcgcttccgagactcgcagtctacgcgagctgcctgtttttttcctgcttggacgcgcatgagggccccgtccatggaccgcgcggccgtggcgagggtgggcgcggtagcgagcgccagcgtgtgcgccctggtggcgggggtggtgctggctcagtacatattcaccttgaagaggaagacggggcggaagaccaagatcatcgagatgaagattggataaccaagaaatgactaatcaagagtctgccgtacatgtgaaaatgatgccagaattccagaaaagttcagttcgaatcaagaaccctacaagagtagaagaaattatctgtggtcttatcaaaggaggagctgccaaacttcagataataacggactttgatatgacactcagtagattttcatataaagggaaaagatgcccaacatgtcataatatcattgacaactgtaagctggttacagatgaatgtagaaaaaagttattgcaactaaaggaaaaatattacgctattgaagttgatcctgttcttactgtagaagagaagtacccttatatggtggaatggtatactaaatcacatggtttgcttgttcagcaagctttaccaaaagctaaacttaaagaaattgtggcagaatctgacgttatgctcaaagaaggatatgagaatttctttgataagctccaacaacatagcatccccgtgttcatattttcggctggaatcggcgatgtactagaggaagttattcgtcaagctggtgtttatcatcccaatgtcaaagttgtgtccaattttatggattttgatgaaactggggtgctcaaaggatttaaaggagaactaattcatgtatttaacaaacatgatggtgccttgaggaatacagaatatttcaatcaactaaaagacaatagtaacataattcttctgggagactcccaaggagacttaagaatggcagatggagtggccaatgttgagcacattctgaaaattggatatctaaatgatagagtggatgagcttttagaaaagtacatggactcttatgatattgttttagtacaagatgaatcattagaagtagccaactctattttacagaagattctataaacaagcattctccaagaagacctctctcctgtgggtgcaattgaactgttcatccgttcatcttgctgagagacttatttataatatatccttactctcgaagtgttccctttgtataactgaagtattttcagatatggtgaatgcattgactggaagctccttttctccacctctctcaacacactcctcaccgtatcttttaacccatttaaaaaaaaaaaaaagctaaaattagaaaaataactccctacttttccaaagtgaattttgtagtttaatgttatcatgcagcttttgaggagtcttttacactgggaaagtttgtagaaattttaaaataagttttatgaaatggtgaaataatatgcatgattttaagtattgccatttttgtaatttgggttattatgctgatggtatcaccatctcttgaaattgtgttaggtttggttattttgtctggggaaaaaatatttactggaaaagactagcagttagtgttggaaaaacctggtggtgtttacaatgttgctaatcattacaaaacattctatattgaagcactgataataaatatgaaatgcaaaacctttttaa

SEQ ID NO: 244 - protein, 297 aa, Homosapiens
MTNQESAVHVKMMPEFQKSSVRIKNPTRVEEIICGLIKGGAAKLQIITDFDMTLSRFSYKGKRCPTCHNIIDNCKLVTDECRKKLLQLKEKYYAIEVDPVLTVEEKYPYMVEWYTKSHGLLVQQALPKAKLKEIVAESDVMLKEGYENFFDKLQQHSIPVFIFSAGIGDVLEEVIRQAGVYHPNVKVVSNFMDFDETGVLKGFKGELIHVFNKHDGALRNTEYFNQLKDNSNIILLGDSQGDLRMADGVANVEHILKIGYLNDRVDELLEKYMDSYDIVLVQDESLEVANSILQKIL

SEQ ID NO: 245 - DNA, 1688 bp, Homosapiens
cgtgatgctctgggatcccgcgcttccgagactcgcagtctacgcgagctgcctgtttttttcctgcttggacgcgcatgagggccccgtccatggaccgcgcggccgtggcgagggtgggcgcggtagcgagcgccagcgtgtgcgccctggtggcgggggtggtgctggctcagtacatattcaccttgaagaggaagacggggcggaagaccaagatcatcgagatgatgccagaattccagaaaagttcagttcgaatcaagaaccctacaagagtagaagaaattatctgtggtcttatcaaaggaggagctgccaaacttcagataataacggactttgatatgacactcagtagattttcatataaagggaaaagatgcccaacatgtcataatatcattgacaactgtaagctggttacagatgaatgtagaaaaaagttattgcaactaaaggaaaaatattacgctattgaagttgatcctgttcttactgtagaagagaagtacccttatatggtggaatggtatactaaatcacatggtttgcttgttcagcaagctttaccaaaagctaaacttaaagaaattgtggcagaatctgacgttatgctcaaagaaggatatgagaatttctttgataagctccaacaacatagcatccccgtgttcatattttcggctggaatcggcgatgtactagaggaagttattcgtcaagctggtgtttatcatcccaatgtcaaagttgtgtccaattttatggattttgatgaaactggggtgctcaaaggatttaaaggagaactaattcatgtatttaacaaacatgatggtgccttgaggaatacagaatatttcaatcaactaaaagacaatagtaacataattcttctgggagactcccaaggagacttaagaatggcagatggagtggccaatgttgagcacattctgaaaattggatatctaaatgatagagtggatgagcttttagaaaagtacatggactcttatgatattgttttagtacaagatgaatcattagaagtagccaactctattttacagaagattctataaacaagcattctccaagaagacctctctcctgtgggtgcaattgaactgttcatccgttcatcttgctgagagacttatttataatatatccttactctcgaagtgttccctttgtataactgaagtattttcagatatggtgaatgcattgactggaagctccttttctccacctctctcaacacactcctcaccgtatcttttaacccatttaaaaaaaaaaaaaagctaaaattagaaaaataactccctacttttccaaagtgaattttgtagtttaatgttatcatgcagcttttgaggagtcttttacactgggaaagtttgtagaaattttaaaataagttttatgaaatggtgaaataatatgcatgattttaagtattgccatttttgtaatttgggttattatgctgatggtatcaccatctcttgaaattgtgttaggtttggttattttgtctggggaaaaaatatttactggaaaagactagcagttagtgttggaaaaacctggtggtgtttacaatgttgctaatcattacaaaacattctatattgaagcactgataataaatatgaaatgcaaaacctttttaa

SEQ ID NO: 246 - protein, 336 aa, Homosapiens
MRAPSMDRAAVARVGAVASASVCALVAGVVLAQYIFTLKRKTGRKTKIIEMMPEFQKSSVRIKNPTRVEEIICGLIKGGAAKLQIITDFDMTLSRFSYKGKRCPTCHNIIDNCKLVTDECRKKLLQLKEKYYAIEVDPVLTVEEKYPYMVEWYTKSHGLLVQQALPKAKLKEIVAESDVMLKEGYENFFDKLQQHSIPVFIFSAGIGDVLEEVIRQAGVYHPNVKVVSNFMDFDETGVLKGFKGELIHVFNKHDGALRNTEYFNQLKDNSNIILLGDSQGDLRMADGVANVEHILKIGYLNDRVDELLEKYMDSYDIVLVQDESLEVANSILQKIL

SEQ ID NO: 247 - DNA, 1552 bp, Homosapiens
ttttcttttgctggtgtagctcgtccggttaccttcaggaagattggataaccaagaaatgactaatcaagagtctgccgtacatgtgaaaatgatgccagaattccagaaaagttcagttcgaatcaagaaccctacaagagtagaagaaattatctgtggtcttatcaaaggaggagctgccaaacttcagataataacggactttgatatgacactcagtagattttcatataaagggaaaagatgcccaacatgtcataatatcattgacaactgtaagctggttacagatgaatgtagaaaaaagttattgcaactaaaggaaaaatattacgctattgaagttgatcctgttcttactgtagaagagaagtacccttatatggtggaatggtatactaaatcacatggtttgcttgttcagcaagctttaccaaaagctaaacttaaagaaattgtggcagaatctgacgttatgctcaaagaaggatatgagaatttctttgataagctccaacaacatagcatccccgtgttcatattttcggctggaatcggcgatgtactagaggaagttattcgtcaagctggtgtttatcatcccaatgtcaaagttgtgtccaattttatggattttgatgaaactggggtgctcaaaggatttaaaggagaactaattcatgtatttaacaaacatgatggtgccttgaggaatacagaatatttcaatcaactaaaagacaatagtaacataattcttctgggagactcccaaggagacttaagaatggcagatggagtggccaatgttgagcacattctgaaaattggatatctaaatgatagagtggatgagcttttagaaaagtacatggactcttatgatattgttttagtacaagatgaatcattagaagtagccaactctattttacagaagattctataaacaagcattctccaagaagacctctctcctgtgggtgcaattgaactgttcatccgttcatcttgctgagagacttatttataatatatccttactctcgaagtgttccctttgtataactgaagtattttcagatatggtgaatgcattgactggaagctccttttctccacctctctcaacacactcctcaccgtatcttttaacccatttaaaaaaaaaaaaaagctaaaattagaaaaataactccctacttttccaaagtgaattttgtagtttaatgttatcatgcagcttttgaggagtcttttacactgggaaagtttgtagaaattttaaaataagttttatgaaatggtgaaataatatgcatgattttaagtattgccatttttgtaatttgggttattatgctgatggtatcaccatctcttgaaattgtgttaggtttggttattttgtctggggaaaaaatatttactggaaaagactagcagttagtgttggaaaaacctggtggtgtttacaatgttgctaatcattacaaaacattctatattgaagcactgataataaatatgaaatgcaaaacctttttaa

SEQ ID NO: 248 - protein, 297 aa, Homosapiens; identical to SEQ ID NO: 244

SEQ ID NO: 249 - DNA, 1184 bp, Homosapiens
ggcgctgcgggggctgacatgtcgtcccggcctgggcgcgaggacgtgggggctgcgggcgcgcggcggccgcgtgagccgccggagcaggagctgcagcgacgtcgggagcagaagcggcggcgacacgacgcgcagcagctgcagcagctcaagcacctggagtccttttacgaaaaacctcctcctgggcttatcaaggaagatgagactaagccagaagattgcataccagatgtaccaggcaatgaacacgccagggaatttctggctcatgcaccaactaaaggactttggatgccactggggaaagaagtcaaagttatgcagtgttggcgttgcaaacgctatggtcaccgaacgggtgacaaagaatgccctttctttatcaaaggcaaccaaaagttagagcagttcagagtggcacatgaagatcccatgtatgacatcatacgagacaataaacgacatgaaaaggacgtaaggatacagcagttaaaacagttactggaggattctacctcagatgaagataggagcagctccagttcctctgaaggtaaagagaaacacaagaaaaagaagaagaaagaaaagcataagaaaaggaagaaagaaaagaaaaagaagaaaaaacggaagcacaaatcttccaagtcaaatgagggttctgactcagagtgacaaggatgtgacttgttcaacattctcttctcaaacactgaccaaggaacagaggaagatgcagtcagagaaagcagcaggatagagacgccgagagaggagtatatgtgggtcacagcagtgagctcccacccgccttgcagtgaagatgtgaccccaggagagggagtgtctccttccaggtgctagctctggacagcagctgattttaggcaggaaagtttcttcatcgttgtcctccctgctggtcacatgagtttacgattcctttgaagtgtctcccacagggtggcaggactgggagaatctctgaggcgtgtcttccaggccctcccacagcttgtgccctccacagtgtggactcaggtcccatagacatcaggctggagtcttctctgttgttgagaataataaaagctcattatttattttttaaaaaaaaaaaaaaaaaaaaaaaaaaaaaaaaaaaaaaaaaaaaaaaaaaaaaaaaaaaaaaaaaa

SEQ ID NO: 250 - protein, 221 aa, Homosapiens
MSSRPGREDVGAAGARRPREPPEQELQRRREQKRRRHDAQQLQQLKHLESFYEKPPPGLIKEDETKPEDCIPDVPGNEHAREFLAHAPTKGLWMPLGKEVKVMQCWRCKRYGHRTGDKECPFFIKGNQKLEQFRVAHEDPMYDIIRDNKRHEKDVRIQQLKQLLEDSTSDEDRSSSSSSEGKEKHKKKKKKEKHKKRKKEKKKKKKRKHKSSKSNEGSDSE

SEQ ID NO: 251 - DNA, 3914 bp, Homosapiens
agtggcgtccgttgtaagtgctatgacaacagggcgaagatggctcagagttaggctggagaggggaggtgtcccttccgctgcggccgtcgggtttctgctacatcccattcaccgcctcctccatcctttcctcctcggtgtgagcagcaggacttgcatttgttctcgcctgcctagtgtcttccaagggatagatgccgtttcctctgctggtctctgggggtgacggggggcgcaggggagcttcttgggggaatcactccaactctgtggagctggtggtgctgcctggtggggctctctctttgcccgggacgtggaacaactttcagctggaggacgagagggaatagtgaagctaaaggttgcttttctctgcaccgtccgttcttgctccctctgctccatcactgggaccttgtcaggcgttcataaagcaaaatttgccgaacgagggttcgcagaaaggtggggcagagctcatctgacgtggcatcagtgtgaaagaaaatgtctttatttaaagcccgtgattggtggtctactattctgggagataaagaagaatttgatcaaggctgtttgtgtctggctaatgttgacaatagtggaaatggacaagataaaataattgtgggtagctttatgggatacctaaggatctttagcccccatcctgcaaaaacaggagatggagctcaagccgaagatttgcttctagaagtggatctacgagatccagtacttcaagtggaagtaggaaagtttgtttcaggtaccgaaatgctacatttggctgtgttacattctagaaaactttgtgtctactctgtctcaggaaccttgggtaatgtggaacatgggaaccaatgtcagatgaaattgatgtatgaacataatcttcagagaacagcctgcaatatgacctatggatcatttggtggtgtaaaaggtcgagatttaatttgcatccagtctatggatgggatgctgatggtatttgagcaggagagctatgcttttggaagatttctccctggctttcttctgcctggtcctcttgcctacagttcccgtacagattccttccttactgtctcttcctgccaacaagtggaaagttataagtaccaggtacttgcttttgcaacagatgcagataaaaggcaggagactgaacagcaaaaacttggttctggaaaaagactagttgtggattggactctaaatattggagagcaagcccttgacatatgtattgtctctttcaatcagtcggcatcctctgtttttgttcttggtgagagaaactttttttgccttaaggataatggacaaattcgattcatgaagaagcttgattggagcccaagttgttttctgccatattgctcagtttctgaaggaacaataaatactttgattggaaatcataataacatgctgcatatttatcaagatgtgacactgaagtgggccacccaacttccccacattcctgtagcagtaagagtgggctgtttgcatgatttaaagggagtgatagtcactctgagtgatgatggtcacttgcagtgttcatacctggggacagatccttctctgttccaagctccaaacgttcaatctcgagaactaaactatgatgaacttgatgtagaaatgaaagaacttcagaaaatcatcaaagatgttaacaaatcacaaggtgtttggcccatgactgagagagaagatgacttgaacgtttctgtcgtggtttctcctaactttgattcagtttctcaagcgaccgatgttgaggtgggaactgaccttgtcccttctgtcacggtgaaggtcacactgcagaacagagtgatattgcaaaaagccaaattatcagtctacgtgcaaccaccattagaattgacttgtgatcagttcacctttgaatttatgaatcgaaatcctgatggcattccgcgagttatccaatgtaaatttagacttcccctaaagttaatttgcctaccaggtcagccttcaaaaactgcaagccacaaaattactattgataccaacaaatctccagtcagtcttcttagtctcttcccaggttttgccagtcagtcagatgatgatcaggtgaatgtaatgggttttcacttcttaggaggtgctcgaattactgttcttgcttccaaaacttctcaacgatatcgcattcagagtgaacaatttgaagatctttggctcataaccaatgagcttattcttcgccttcaagaatattttgaaaaacagggagtcaaagattttgcatgttctttttcgggatctataccccttcaagaatattttgagttgattgatcatcattttgagctacggataaatggtgaaaaattagaagaactcttatctgagagagctgtacaatttcgggccattcaacgccggctactagcaagattcaaagataaaactcctgcccctcttcaacacctggacaccttgttagatggaacctacaagcaggtaattgctctagcagatgcagtggaggaaaaccaaggcaatctgttccagtcattcaccaggctgaagagtgccacccatttggtgattctgctgatcgcgctgtggcagaagcttagtgctgaccaggttgctattctggaagcggcatttctgccgctacaagaagacactcaagaattgggctgggaagaaacggtggatgccgccatttcccacctgttgaagacttgcctgtcgaagagttctaaggagcaggctttgaacctcaacagccagctgaacatacccaaagacacaagccaactgaagaaacatatcaccttgctctgcgatagattatccaaaggtggccgtctctgcctaagtaccgatgcagcagccccacagaccatggtcatgccaggtggttgtactacaatcccagagtcagacctagaagaaagatcagtagaacaagactctacagaactgtttaccaaccacagacatctcactgcagagacacccaggcctgaagtttcacccctccaaggagtctcggaataattcaagtagagttgtttggttgagaggaacatccccatctcaaggccgaacctgtgtgaacctcatgccaagcacagatatagggctggcgcaggtgcttcctaaagctcaccttcctggagatgacatgcatagaaagaggggttgggactttttacttcactaggagaacttgtaacaccatggggaagtcagctgaaacttgtcttgttttgccaggaaaggaagtagttgcctttggtcatccatctgctaatagtcacagaatacagtgaaatgacatagttttgggttagattttataatgcaaagattcagatccaaaataatttcataccccattttttcacagaattcttatatagtaaatgtatcaagtttaataaagcatctcattgtcaaataatatcttggattttatttataattagagggatttatgagtgattgctctacattatttcttcaaaggaaaggaaaggaattgaagactttgctactctctggtaagacttgaatgtgattattttataaataaaagaaccactatgaaactttcatgtgatttgttctattaagctaaacgtggaagaagggaagttttctagtattgtatgaaaatgtttaaatattttcaaggaagctagtacattaacatccccttttcattaccccattgggtggcaccttttaaaaatccaggttattaaaggattcacactttattacagttaaaatttaaggtttttatgtgtaagaagtgaaagaaactttgctaatttcaagttcgaattacagttgtgagattgatttatttaaataaaaatatgcctttgccagtt

SEQ ID NO: 252 - protein, 852 aa, Homosapiens
MSLFKARDWWSTILGDKEEFDQGCLCLANVDNSGNGQDKIIVGSFMGYLRIFSPHPAKTGDGAQAEDLLLEVDLRDPVLQVEVGKFVSGTEMLHLAVLHSRKLCVYSVSGTLGNVEHGNQCQMKLMYEHNLQRTACNMTYGSFGGVKGRDLICIQSMDGMLMVFEQESYAFGRFLPGFLLPGPLAYSSRTDSFLTVSSCQQVESYKYQVLAFATDADKRQETEQQKLGSGKRLVVDWTLNIGEQALDICIVSFNQSASSVFVLGERNFFCLKDNGQIRFMKKLDWSPSCFLPYCSVSEGTINTLIGNHNNMLHIYQDVTLKWATQLPHIPVAVRVGCLHDLKGVIVTLSDDGHLQCSYLGTDPSLFQAPNVQSRELNYDELDVEMKELQKIIKDVNKSQGVWPMTEREDDLNVSVVVSPNFDSVSQATDVEVGTDLVPSVTVKVTLQNRVILQKAKLSVYVQPPLELTCDQFTFEFMNRNPDGIPRVIQCKFRLPLKLICLPGQPSKTASHKITIDTNKSPVSLLSLFPGFASQSDDDQVNVMGFHFLGGARITVLASKTSQRYRIQSEQFEDLWLITNELILRLQEYFEKQGVKDFACSFSGSIPLQEYFELIDHHFELRINGEKLEELLSERAVQFRAIQRRLLARFKDKTPAPLQHLDTLLDGTYKQVIALADAVEENQGNLFQSFTRLKSATHLVILLIALWQKLSADQVAILEAAFLPLQEDTQELGWEETVDAAISHLLKTCLSKSSKEQALNLNSQLNIPKDTSQLKKHITLLCDRLSKGGRLCLSTDAAAPQTMVMPGGCTTIPESDLEERSVEQDSTELFTNHRHLTAETPRPEVSPLQGVSE

SEQ ID NO: 253 - DNA, 4004 bp, Homosapiens
agtggcgtccgttgtaagtgctatgacaacagggcgaagatggctcagagttaggctggagaggggaggtgtcccttccgctgcggccgtcgggtttctgctacatcccattcaccgcctcctccatcctttcctcctcggtgtgagcagcaggacttgcatttgttctcgcctgcctagtgtcttccaagggatagatgccgtttcctctgctggtctctgggggtgacggggggcgcaggggagcttcttgggggaatcactccaactctgtggagctggtggtgctgcctggtggggctctctctttgcccgggacgtggaacaactttcagctggaggacgagagggaatagtgaagctaaaggttgcttttctctgcaccgtccgttcttgctccctctgctccatcactgggaccttgtcaggcgttcataaagcaaaatttgccgaacgagggttcgcagaaaggtggggcagagctcatctgacgtggcatcagtgtgaaagaaaatgtctttatttaaagcccgtgattggtggtctactattctgggagataaagaagaatttgatcaaggctgtttgtgtctggctaatgttgacaatagtggaaatggacaagataaaataattgtgggtagctttatgggatacctaaggatctttagcccccatcctgcaaaaacaggagatggagctcaagccgaagatttgcttctagaagtggatctacgagatccagtacttcaagtggaagtaggaaagtttgtttcaggtaccgaaatgctacatttggctgtgttacattctagaaaactttgtgtctactctgtctcaggaaccttgggtaatgtggaacatgggaaccaatgtcagatgaaattgatgtatgaacataatcttcagagaacagcctgcaatatgacctatggatcatttggtggtgtaaaaggtcgagatttaatttgcatccagtctatggatgggatgctgatggtatttgagcaggagagctatgcttttggaagatttctccctggctttcttctgcctggtcctcttgcctacagttcccgtacagattccttccttactgtctcttcctgccaacaagtggaaagttataagtaccaggtacttgcttttgcaacagatgcagataaaaggcaggagactgaacagcaaaaacttggttctggaaaaagactagttgtggattggactctaaatattggagagcaagcccttgacatatgtattgtctctttcaatcagtcggcatcctctgtttttgttcttggtgagagaaactttttttgccttaaggataatggacaaattcgattcatgaagaagcttgattggagcccaagttgttttctgccatattgctcagtttctgaaggaacaataaatactttgattggaaatcataataacatgctgcatatttatcaagatgtgacactgaagtgggccacccaacttccccacattcctgtagcagtaagagtgggctgtttgcatgatttaaagggagtgatagtcactctgagtgatgatggtcacttgcagtgttcatacctggggacagatccttctctgttccaagctccaaacgttcaatctcgagaactaaactatgatgaacttgatgtagaaatgaaagaacttcagaaaatcatcaaagatgttaacaaatcacaaggtgtttggcccatgactgagagagaagatgacttgaacgtttctgtcgtggtttctcctaactttgattcagtttctcaagcgaccgatgttgaggtgggaactgaccttgtcccttctgtcacggtgaaggtcacactgcagaacagagtgatattgcaaaaagccaaattatcagtctacgtgcaaccaccattagaattgacttgtgatcagttcacctttgaatttatgacaccagatttgactagaacagtaagcttttctgtttatctgaaaagaagttatacaccatcagaattggaaggaaatgctgttgtttcttattccagaccaacaggcattccgcgagttatccaatgtaaatttagacttcccctaaagttaatttgcctaccaggtcagccttcaaaaactgcaagccacaaaattactattgataccaacaaatctccagtcagtcttcttagtctcttcccaggttttgccagtcagtcagatgatgatcaggtgaatgtaatgggttttcacttcttaggaggtgctcgaattactgttcttgcttccaaaacttctcaacgatatcgcattcagagtgaacaatttgaagatctttggctcataaccaatgagcttattcttcgccttcaagaatattttgaaaaacagggagtcaaagattttgcatgttctttttcgggatctataccccttcaagaatattttgagttgattgatcatcattttgagctacggataaatggtgaaaaattagaagaactcttatctgagagagctgtacaatttcgggccattcaacgccggctactagcaagattcaaagataaaactcctgcccctcttcaacacctggacaccttgttagatggaacctacaagcaggtaattgctctagcagatgcagtggaggaaaaccaaggcaatctgttccagtcattcaccaggctgaagagtgccacccatttggtgattctgctgatcgcgctgtggcagaagcttagtgctgaccaggttgctattctggaagcggcatttctgccgctacaagaagacactcaagaattgggctgggaagaaacggtggatgccgccatttcccacctgttgaagacttgcctgtcgaagagttctaaggagcaggctttgaacctcaacagccagctgaacatacccaaagacacaagccaactgaagaaacatatcaccttgctctgcgatagattatccaaaggtggccgtctctgcctaagtaccgatgcagcagccccacagaccatggtcatgccaggtggttgtactacaatcccagagtcagacctagaagaaagatcagtagaacaagactctacagaactgtttaccaaccacagacatctcactgcagagacacccaggcctgaagtttcacccctccaaggagtctcggaataattcaagtagagttgtttggttgagaggaacatccccatctcaaggccgaacctgtgtgaacctcatgccaagcacagatatagggctggcgcaggtgcttcctaaagctcaccttcctggagatgacatgcatagaaagaggggttgggactttttacttcactaggagaacttgtaacaccatggggaagtcagctgaaacttgtcttgttttgccaggaaaggaagtagttgcctttggtcatccatctgctaatagtcacagaatacagtgaaatgacatagttttgggttagattttataatgcaaagattcagatccaaaataatttcataccccattttttcacagaattcttatatagtaaatgtatcaagtttaataaagcatctcattgtcaaataatatcttggattttatttataattagagggatttatgagtgattgctctacattatttcttcaaaggaaaggaaaggaattgaagactttgctactctctggtaagacttgaatgtgattattttataaataaaagaaccactatgaaactttcatgtgatttgttctattaagctaaacgtggaagaagggaagttttctagtattgtatgaaaatgtttaaatattttcaaggaagctagtacattaacatccccttttcattaccccattgggtggcaccttttaaaaatccaggttattaaaggattcacactttattacagttaaaatttaaggtttttatgtgtaagaagtgaaagaaactttgctaatttcaagttcgaattacagttgtgagattgatttatttaaataaaaatatgcctttgccagtt

SEQ ID NO: 254 - protein, 882 aa, Homosapiens
MSLFKARDWWSTILGDKEEFDQGCLCLANVDNSGNGQDKIIVGSFMGYLRIFSPHPAKTGDGAQAEDLLLEVDLRDPVLQVEVGKFVSGTEMLHLAVLHSRKLCVYSVSGTLGNVEHGNQCQMKLMYEHNLQRTACNMTYGSFGGVKGRDLICIQSMDGMLMVFEQESYAFGRFLPGFLLPGPLAYSSRTDSFLTVSSCQQVESYKYQVLAFATDADKRQETEQQKLGSGKRLVVDWTLNIGEQALDICIVSFNQSASSVFVLGERNFFCLKDNGQIRFMKKLDWSPSCFLPYCSVSEGTINTLIGNHNNMLHIYQDVTLKWATQLPHIPVAVRVGCLHDLKGVIVTLSDDGHLQCSYLGTDPSLFQAPNVQSRELNYDELDVEMKELQKIIKDVNKSQGVWPMTEREDDLNVSVVVSPNFDSVSQATDVEVGTDLVPSVTVKVTLQNRVILQKAKLSVYVQPPLELTCDQFTFEFMTPDLTRTVSFSVYLKRSYTPSELEGNAVVSYSRPTGIPRVIQCKFRLPLKLICLPGQPSKTASHKITIDTNKSPVSLLSLFPGFASQSDDDQVNVMGFHFLGGARITVLASKTSQRYRIQSEQFEDLWLITNELILRLQEYFEKQGVKDFACSFSGSIPLQEYFELIDHHFELRINGEKLEELLSERAVQFRAIQRRLLARFKDKTPAPLQHLDTLLDGTYKQVIALADAVEENQGNLFQSFTRLKSATHLVILLIALWQKLSADQVAILEAAFLPLQEDTQELGWEETVDAAISHLLKTCLSKSSKEQALNLNSQLNIPKDTSQLKKHITLLCDRLSKGGRLCLSTDAAAPQTMVMPGGCTTIPESDLEERSVEQDSTELFTNHRHLTAETPRPEVSPLQGVSE

SEQ ID NO: 255 - DNA, 3899 bp, Homosapiens
agtggcgtccgttgtaagtgctatgacaacagggcgaagatggctcagagttaggctggagaggggaggtgtcccttccgctgcggccgtcgggtttctgctacatcccattcaccgcctcctccatcctttcctcctcggtgtgagcagcaggacttgcatttgttctcgcctgcctagtgtcttccaagggatagatgccgtttcctctgctggtctctgggggtgacggggggcgcaggggagcttcttgggggaatcactccaactctgtggagctggtggtgctgcctggtggggctctctctttgcccgggacgtggaacaactttcagctggaggacgagagggaatagtgaagctaaaggttgcttttctctgcaccgtccgttcttgctccctctgctccatcactgggaccttgtcaggcgttcataaagcaaaatttgccgaacgagggttcgcagaaaggtggggcagagctcatctgacgtggcatcagtgtgaaagaaaatgtctttatttaaagcccgtgattggtggtctactattctgggagataaagaagaatttgatcaaggctgtttgtgtctggctaatgttgacaatagtggaaatggacaagataaaataattgtgggtagctttatgggatacctaaggatctttagcccccatcctgcaaaaacaggagatggagctcaagccgaagatttgcttctagaagtggatctacgagatccagtacttcaagtggaagtaggaaagtttgtttcaggtaccgaaatgctacatttggctgtgttacattctagaaaactttgtgtctactctgtctcaggaaccttgggtaatgtggaacatgggaaccaatgtcagatgaaattgatgtatgaacataatcttcagagaacagcctgcaatatgacctatggatcatttggtggtgtaaaaggtcgagatttaatttgcatccagtctatggatgggatgctgatggtatttgagcaggagagctatgcttttggaagatttctccctggctttcttctgcctggtcctcttgcctacagttcccgtacagattccttccttactgtctcttcctgccaacaagtggaaagttataagtaccaggtacttgcttttgcaacagatgcagataaaaggcaggagactgaacagcaaaaacttggttctggaaaaagactagttgtggattggactctaaatattggagagcaagcccttgacatatgtattgtctctttcaatcagtcggcatcctctgtttttgttcttggtgagagaaactttttttgccttaaggataatggacaaattcgattcatgaagaagcttgattggagcccaagttgttttctgccatattgctcagtttctgaaggaacaataaatactttgattggaaatcataataacatgctgcatatttatcaagatgtgacactgaagtgggccacccaacttccccacattcctgtagcagtaagagtgggctgtttgcatgatttaaagggagtgatagtcactctgagtgatgatggtcacttgcagtgttcatacctggggacagatccttctctgttccaagctccaaacgttcaatctcgagaactaaactatgatgaacttgatgtagaaatgaaagaacttcagaaaatcatcaaagatgttaacaaatcacaaggtgtttggcccatgactgagagagaagatgacttgaacgtttctgtcgtggtttctcctaactttgattcagtttctcaagcgaccgatgttgaggtgggaactgaccttgtcccttctgtcacggtgaaggtcacactgcagaacagagtgatattgcaaaaagccaaattatcagtctacgtgcaaccaccattagaattgacttgtgatcagttcacctttgaatttatgagcattccgcgagttatccaatgtaaatttagacttcccctaaagttaatttgcctaccaggtcagccttcaaaaactgcaagccacaaaattactattgataccaacaaatctccagtcagtcttcttagtctcttcccaggttttgccagtcagtcagatgatgatcaggtgaatgtaatgggttttcacttcttaggaggtgctcgaattactgttcttgcttccaaaacttctcaacgatatcgcattcagagtgaacaatttgaagatctttggctcataaccaatgagcttattcttcgccttcaagaatattttgaaaaacagggagtcaaagattttgcatgttctttttcgggatctataccccttcaagaatattttgagttgattgatcatcattttgagctacggataaatggtgaaaaattagaagaactcttatctgagagagctgtacaatttcgggccattcaacgccggctactagcaagattcaaagataaaactcctgcccctcttcaacacctggacaccttgttagatggaacctacaagcaggtaattgctctagcagatgcagtggaggaaaaccaaggcaatctgttccagtcattcaccaggctgaagagtgccacccatttggtgattctgctgatcgcgctgtggcagaagcttagtgctgaccaggttgctattctggaagcggcatttctgccgctacaagaagacactcaagaattgggctgggaagaaacggtggatgccgccatttcccacctgttgaagacttgcctgtcgaagagttctaaggagcaggctttgaacctcaacagccagctgaacatacccaaagacacaagccaactgaagaaacatatcaccttgctctgcgatagattatccaaaggtggccgtctctgcctaagtaccgatgcagcagccccacagaccatggtcatgccaggtggttgtactacaatcccagagtcagacctagaagaaagatcagtagaacaagactctacagaactgtttaccaaccacagacatctcactgcagagacacccaggcctgaagtttcacccctccaaggagtctcggaataattcaagtagagttgtttggttgagaggaacatccccatctcaaggccgaacctgtgtgaacctcatgccaagcacagatatagggctggcgcaggtgcttcctaaagctcaccttcctggagatgacatgcatagaaagaggggttgggactttttacttcactaggagaacttgtaacaccatggggaagtcagctgaaacttgtcttgttttgccaggaaaggaagtagttgcctttggtcatccatctgctaatagtcacagaatacagtgaaatgacatagttttgggttagattttataatgcaaagattcagatccaaaataatttcataccccattttttcacagaattcttatatagtaaatgtatcaagtttaataaagcatctcattgtcaaataatatcttggattttatttataattagagggatttatgagtgattgctctacattatttcttcaaaggaaaggaaaggaattgaagactttgctactctctggtaagacttgaatgtgattattttataaataaaagaaccactatgaaactttcatgtgatttgttctattaagctaaacgtggaagaagggaagttttctagtattgtatgaaaatgtttaaatattttcaaggaagctagtacattaacatccccttttcattaccccattgggtggcaccttttaaaaatccaggttattaaaggattcacactttattacagttaaaatttaaggtttttatgtgtaagaagtgaaagaaactttgctaatttcaagttcgaattacagttgtgagattgatttatttaaataaaaatatgcctttgccagtt

SEQ ID NO: 256 - protein, 847 aa, Homosapiens
MSLFKARDWWSTILGDKEEFDQGCLCLANVDNSGNGQDKIIVGSFMGYLRIFSPHPAKTGDGAQAEDLLLEVDLRDPVLQVEVGKFVSGTEMLHLAVLHSRKLCVYSVSGTLGNVEHGNQCQMKLMYEHNLQRTACNMTYGSFGGVKGRDLICIQSMDGMLMVFEQESYAFGRFLPGFLLPGPLAYSSRTDSFLTVSSCQQVESYKYQVLAFATDADKRQETEQQKLGSGKRLVVDWTLNIGEQALDICIVSFNQSASSVFVLGERNFFCLKDNGQIRFMKKLDWSPSCFLPYCSVSEGTINTLIGNHNNMLHIYQDVTLKWATQLPHIPVAVRVGCLHDLKGVIVTLSDDGHLQCSYLGTDPSLFQAPNVQSRELNYDELDVEMKELQKIIKDVNKSQGVWPMTEREDDLNVSVVVSPNFDSVSQATDVEVGTDLVPSVTVKVTLQNRVILQKAKLSVYVQPPLELTCDQFTFEFMSIPRVIQCKFRLPLKLICLPGQPSKTASHKITIDTNKSPVSLLSLFPGFASQSDDDQVNVMGFHFLGGARITVLASKTSQRYRIQSEQFEDLWLITNELILRLQEYFEKQGVKDFACSFSGSIPLQEYFELIDHHFELRINGEKLEELLSERAVQFRAIQRRLLARFKDKTPAPLQHLDTLLDGTYKQVIALADAVEENQGNLFQSFTRLKSATHLVILLIALWQKLSADQVAILEAAFLPLQEDTQELGWEETVDAAISHLLKTCLSKSSKEQALNLNSQLNIPKDTSQLKKHITLLCDRLSKGGRLCLSTDAAAPQTMVMPGGCTTIPESDLEERSVEQDSTELFTNHRHLTAETPRPEVSPLQGVSE

SEQ ID NO: 257 - DNA, 4019 bp, Homosapiens
agtggcgtccgttgtaagtgctatgacaacagggcgaagatggctcagagttaggctggagaggggaggtgtcccttccgctgcggccgtcgggtttctgctacatcccattcaccgcctcctccatcctttcctcctcggtgtgagcagcaggacttgcatttgttctcgcctgcctagtgtcttccaagggatagatgccgtttcctctgctggtctctgggggtgacggggggcgcaggggagcttcttgggggaatcactccaactctgtggagctggtggtgctgcctggtggggctctctctttgcccgggacgtggaacaactttcagctggaggacgagagggaatagtgaagctaaaggttgcttttctctgcaccgtccgttcttgctccctctgctccatcactgggaccttgtcaggcgttcataaagcaaaatttgccgaacgagggttcgcagaaaggtggggcagagctcatctgacgtggcatcagtgtgaaagaaaatgtctttatttaaagcccgtgattggtggtctactattctgggagataaagaagaatttgatcaaggctgtttgtgtctggctaatgttgacaatagtggaaatggacaagataaaataattgtgggtagctttatgggatacctaaggatctttagcccccatcctgcaaaaacaggagatggagctcaagccgaagatttgcttctagaagtggatctacgagatccagtacttcaagtggaagtaggaaagtttgtttcaggtaccgaaatgctacatttggctgtgttacattctagaaaactttgtgtctactctgtctcaggaaccttgggtaatgtggaacatgggaaccaatgtcagatgaaattgatgtatgaacataatcttcagagaacagcctgcaatatgacctatggatcatttggtggtgtaaaaggtcgagatttaatttgcatccagtctatggatgggatgctgatggtatttgagcaggagagctatgcttttggaagatttctccctggctttcttctgcctggtcctcttgcctacagttcccgtacagattccttccttactgtctcttcctgccaacaagtggaaagttataagtaccaggtacttgcttttgcaacagatgcagataaaaggcaggagactgaacagcaaaaacttggttctggaaaaagactagttgtggattggactctaaatattggagagcaagcccttgacatatgtattgtctctttcaatcagtcggcatcctctgtttttgttcttggtgagagaaactttttttgccttaaggataatggacaaattcgattcatgaagaagcttgattggagcccaagttgttttctgccatattgctcagtttctgaaggaacaataaatactttgattggaaatcataataacatgctgcatatttatcaagatgtgacactgaagtgggccacccaacttccccacattcctgtagcagtaagagtgggctgtttgcatgatttaaagggagtgatagtcactctgagtgatgatggtcacttgcagtgttcatacctggggacagatccttctctgttccaagctccaaacgttcaatctcgagaactaaactatgatgaacttgatgtagaaatgaaagaacttcagaaaatcatcaaagatgttaacaaatcacaaggtgtttggcccatgactgagagagaagatgacttgaacgtttctgtcgtggtttctcctaactttgattcagtttctcaagcgaccgatgttgaggtgggaactgaccttgtcccttctgtcacggtgaaggtcacactgcagaacagagtgatattgcaaaaagccaaattatcagtctacgtgcaaccaccattagaattgacttgtgatcagttcacctttgaatttatgacaccagatttgactagaacagtaagcttttctgtttatctgaaaagaagttatacaccatcagaattggaaggaaatgctgttgtttcttattccagaccaacagatcgaaatcctgatggcattccgcgagttatccaatgtaaatttagacttcccctaaagttaatttgcctaccaggtcagccttcaaaaactgcaagccacaaaattactattgataccaacaaatctccagtcagtcttcttagtctcttcccaggttttgccagtcagtcagatgatgatcaggtgaatgtaatgggttttcacttcttaggaggtgctcgaattactgttcttgcttccaaaacttctcaacgatatcgcattcagagtgaacaatttgaagatctttggctcataaccaatgagcttattcttcgccttcaagaatattttgaaaaacagggagtcaaagattttgcatgttctttttcgggatctataccccttcaagaatattttgagttgattgatcatcattttgagctacggataaatggtgaaaaattagaagaactcttatctgagagagctgtacaatttcgggccattcaacgccggctactagcaagattcaaagataaaactcctgcccctcttcaacacctggacaccttgttagatggaacctacaagcaggtaattgctctagcagatgcagtggaggaaaaccaaggcaatctgttccagtcattcaccaggctgaagagtgccacccatttggtgattctgctgatcgcgctgtggcagaagcttagtgctgaccaggttgctattctggaagcggcatttctgccgctacaagaagacactcaagaattgggctgggaagaaacggtggatgccgccatttcccacctgttgaagacttgcctgtcgaagagttctaaggagcaggctttgaacctcaacagccagctgaacatacccaaagacacaagccaactgaagaaacatatcaccttgctctgcgatagattatccaaaggtggccgtctctgcctaagtaccgatgcagcagccccacagaccatggtcatgccaggtggttgtactacaatcccagagtcagacctagaagaaagatcagtagaacaagactctacagaactgtttaccaaccacagacatctcactgcagagacacccaggcctgaagtttcacccctccaaggagtctcggaataattcaagtagagttgtttggttgagaggaacatccccatctcaaggccgaacctgtgtgaacctcatgccaagcacagatatagggctggcgcaggtgcttcctaaagctcaccttcctggagatgacatgcatagaaagaggggttgggactttttacttcactaggagaacttgtaacaccatggggaagtcagctgaaacttgtcttgttttgccaggaaaggaagtagttgcctttggtcatccatctgctaatagtcacagaatacagtgaaatgacatagttttgggttagattttataatgcaaagattcagatccaaaataatttcataccccattttttcacagaattcttatatagtaaatgtatcaagtttaataaagcatctcattgtcaaataatatcttggattttatttataattagagggatttatgagtgattgctctacattatttcttcaaaggaaaggaaaggaattgaagactttgctactctctggtaagacttgaatgtgattattttataaataaaagaaccactatgaaactttcatgtgatttgttctattaagctaaacgtggaagaagggaagttttctagtattgtatgaaaatgtttaaatattttcaaggaagctagtacattaacatccccttttcattaccccattgggtggcaccttttaaaaatccaggttattaaaggattcacactttattacagttaaaatttaaggtttttatgtgtaagaagtgaaagaaactttgctaatttcaagttcgaattacagttgtgagattgatttatttaaataaaaatatgcctttgccagtt

SEQ ID NO: 258 - protein, 887 aa, Homosapiens
MSLFKARDWWSTILGDKEEFDQGCLCLANVDNSGNGQDKIIVGSFMGYLRIFSPHPAKTGDGAQAEDLLLEVDLRDPVLQVEVGKFVSGTEMLHLAVLHSRKLCVYSVSGTLGNVEHGNQCQMKLMYEHNLQRTACNMTYGSFGGVKGRDLICIQSMDGMLMVFEQESYAFGRFLPGFLLPGPLAYSSRTDSFLTVSSCQQVESYKYQVLAFATDADKRQETEQQKLGSGKRLVVDWTLNIGEQALDICIVSFNQSASSVFVLGERNFFCLKDNGQIRFMKKLDWSPSCFLPYCSVSEGTINTLIGNHNNMLHIYQDVTLKWATQLPHIPVAVRVGCLHDLKGVIVTLSDDGHLQCSYLGTDPSLFQAPNVQSRELNYDELDVEMKELQKIIKDVNKSQGVWPMTEREDDLNVSVVVSPNFDSVSQATDVEVGTDLVPSVTVKVTLQNRVILQKAKLSVYVQPPLELTCDQFTFEFMTPDLTRTVSFSVYLKRSYTPSELEGNAVVSYSRPTDRNPDGIPRVIQCKFRLPLKLICLPGQPSKTASHKITIDTNKSPVSLLSLFPGFASQSDDDQVNVMGFHFLGGARITVLASKTSQRYRIQSEQFEDLWLITNELILRLQEYFEKQGVKDFACSFSGSIPLQEYFELIDHHFELRINGEKLEELLSERAVQFRAIQRRLLARFKDKTPAPLQHLDTLLDGTYKQVIALADAVEENQGNLFQSFTRLKSATHLVILLIALWQKLSADQVAILEAAFLPLQEDTQELGWEETVDAAISHLLKTCLSKSSKEQALNLNSQLNIPKDTSQLKKHITLLCDRLSKGGRLCLSTDAAAPQTMVMPGGCTTIPESDLEERSVEQDSTELFTNHRHLTAETPRPEVSPLQGVSE

SEQ ID NO: 259 - DNA, 3522 bp, Homosapiens
acgcttgcgcggcgagtagaacgtgtggcggcggcggagatcgcgtctctttcgctccgtgtcccgctgctgctcctgtgagcgcccggcgagtccgtcccgtccaccgtccgcagctggtagccagcctgcccctcgcctcgactccctttcaccaacaccgacacccacattgacacctccagtccggccagccgctccactcgttgcctttgcatctccacacatggcgtcctccgcgcagagcggcggctcctccgggggacccgcggtccccaccgtgcagcggggcatcatcaagatggtcctctcagggtgcgccatcattgtccgaggtcagcctcgtggtgggcctcctcctgagcggcagatcaacctcagcaacattcgtgctggaaatcttgctcgccgggcagccgccacacaacctgatgcaaaggatacccctgatgagccctgggcatttccagctcgagagttccttcgaaagaagctgattgggaaggaagtctgtttcacgatagaaaacaagactccccaggggcgagagtatggcatgatctaccttggaaaagataccaatggggaaaacattgcagaatcactggttgcagagggcttagccacccggagagaaggcatgagagctaataatcctgagcagaaccggctttcagaatgtgaagaacaagcaaaggcagccaagaaagggatgtggagtgaggggaacggttcacatactatccgggatctcaagtataccattgaaaacccaaggcactttgtggactcacaccaccagaagcctgttaatgctatcatcgagcatgtgcgggacggcagtgtggtcagggccctgctcctcccagattactacctggttacagtcatgctgtcaggcatcaagtgcccaacttttcgacgggaagcagatggcagtgaaactccagagccttttgctgcagaagccaaatttttcactgagtcgcgactgcttcagagagatgttcagatcattctggagagctgccacaaccagaacattctgggtaccatccttcatccaaatggcaacatcacagagctcctcctgaaggaaggtttcgcacgctgtgtggactggtcgattgcagtttacacccggggcgcagaaaagctgagggcggcagagaggtttgccaaagagcgcaggctgagaatatggagagactatgtggctcccacagctaatttggaccaaaaggacaagcagtttgttgccaaggtgatgcaggttctgaatgctgatgccattgttgtgaagctgaactcaggcgattacaagacgattcacctgtccagcatccgaccaccgaggctggagggggagaacacccaggataagaacaagaaactgcgtcccctgtatgacattccttacatgtttgaggcccgggaatttcttcgaaaaaagcttattgggaagaaggtcaatgtgacggtggactacattagaccagccagcccagccacagagacagtgcctgccttttcagagcgtacctgtgccactgtcaccattggaggaataaacattgctgaggctcttgtcagcaaaggtctagccacagtgatcagataccggcaggatgatgaccagagatcatcacactacgatgaactgcttgctgcagaggccagagctattaagaatggcaaaggattgcatagcaagaaggaagtgcctatccaccgtgttgcagatatatctggggatacccaaaaagcaaagcagttcctgccttttcttcagcgggcaggtcgttctgaagctgtggtggaatacgtcttcagtggttctcgtctcaaactctatttgccaaaggaaacttgccttatcaccttcttgcttgcaggcattgaatgccccagaggagcccgaaacctcccaggcttggtgcaggaaggagagcccttcagcgaggaagctacacttttcaccaaggaactggtgctgcagcgagaggtggaggtggaggtggagagcatggacaaggccggcaactttatcggctggctgcacatcgacggtgccaacctgtccgtcctgctggtggagcacgcgctctccaaggtccacttcaccgccgaacgcagctcctactacaagtccctgctgtctgccgaggaggccgcaaagcagaagaaagagaaggtctgggcccactatgaggagcagcccgtggaggaggtgatgccagtgctggaggagaaggagcgatctgctagctacaagcccgtgtttgtgactgagatcactgatgacctgcacttctacgtgcaggatgtggagaccggcacccagttggagaagctgatggagaacatgcgcaatgacattgccagtcacccccctgtagagggctcctatgccccccgcaggggagagttctgcattgccaaatttgtagatggagaatggtaccgtgcccgagtagagaaagtcgagtctcctgccaaaatacatgtcttctacattgactacggcaacagagaggtcctgccatccacccgcctgggtaccctatcacctgccttcagcactcgggtgctgccagctcaagccacggagtatgccttcgccttcatccaggtgccccaagatgatgatgcccgcacggacgccgtggacagcgtagttcgggatatccagaacactcagtgcctgctcaacgtggaacacctgagtgccggctgcccccatgtcaccctgcagtttgcagattccaagggcgatgtggggctgggcttggtgaaggaagggctggtcatggtggaggtgcgcaaggagaaacagttccagaaagtgatcacagaatacctgaatgcccaagagtcagccaagagcgccaggctgaacctgtggcgctatggagactttcgagctgatgatgcagacgaatttggctacagccgctaaggaggggatcgggtttggcccccagccccgctcacgccagtccctcttcctctgccgggagggtgttttcaactccaaaccccagagaggggttgtagattgggtccagctttgcttcagtgtgtggaaatgtctcgtggggtggcatcggggctgcggggtggggaccccaaggctttctggggcagacccttgtcctctgggatgatgggcactgctatccacagtctctgccagttggttttatttggaggtttgtgggctttttttaaaaaaaaaaagtcctcaaatcaggaagaaacatcaaagactatgtcctagtggagggagtaatcctaacacccaggctggccgccagctggcacctgcctctatcccagactgccctcgtcccagctctctgtccaactgttgattatgtgatttttctgatacgtccattctcaaatgccagtgtgttcacatcttcgctctggccagcccattctgtatttaaagcttttgaggcccaataaaatagtacgtgctgtctgcagcccttattgatcaaaaaaaaaaaaaaa

SEQ ID NO: 260 - protein, 910 aa, Homosapiens
MASSAQSGGSSGGPAVPTVQRGIIKMVLSGCAIIVRGQPRGGPPPERQINLSNIRAGNLARRAAATQPDAKDTPDEPWAFPAREFLRKKLIGKEVCFTIENKTPQGREYGMIYLGKDTNGENIAESLVAEGLATRREGMRANNPEQNRLSECEEQAKAAKKGMWSEGNGSHTIRDLKYTIENPRHFVDSHHQKPVNAIIEHVRDGSVVRALLLPDYYLVTVMLSGIKCPTFRREADGSETPEPFAAEAKFFTESRLLQRDVQIILESCHNQNILGTILHPNGNITELLLKEGFARCVDWSIAVYTRGAEKLRAAERFAKERRLRIWRDYVAPTANLDQKDKQFVAKVMQVLNADAIVVKLNSGDYKTIHLSSIRPPRLEGENTQDKNKKLRPLYDIPYMFEAREFLRKKLIGKKVNVTVDYIRPASPATETVPAFSERTCATVTIGGINIAEALVSKGLATVIRYRQDDDQRSSHYDELLAAEARAIKNGKGLHSKKEVPIHRVADISGDTQKAKQFLPFLQRAGRSEAVVEYVFSGSRLKLYLPKETCLITFLLAGIECPRGARNLPGLVQEGEPFSEEATLFTKELVLQREVEVEVESMDKAGNFIGWLHIDGANLSVLLVEHALSKVHFTAERSSYYKSLLSAEEAAKQKKEKVWAHYEEQPVEEVMPVLEEKERSASYKPVFVTEITDDLHFYVQDVETGTQLEKLMENMRNDIASHPPVEGSYAPRRGEFCIAKFVDGEWYRARVEKVESPAKIHVFYIDYGNREVLPSTRLGTLSPAFSTRVLPAQATEYAFAFIQVPQDDDARTDAVDSVVRDIQNTQCLLNVEHLSAGCPHVTLQFADSKGDVGLGLVKEGLVMVEVRKEKQFQKVITEYLNAQESAKSARLNLWRYGDFRADDADEFGYSR

SEQ ID NO: 261 - DNA, 3723 bp, Homosapiens
ggacaccacgccagtgctttcctgccttccttccgagatggaaagaggagctcctagctcacttaagccggggtagggctggttctcctttccgagccaaaatcccaggcgatggtgaattatgaacgtgccacaccatgaagctcttgtggcaggtaactgtgcaccaccacacctggaatgccatcctgctcccgttcgtctacctcacggcgcaagtgtggattctgtgtgcagccatcgctgctgccgcctcagccgggccccagaactgcccctccgtctgctcgtgcagtaaccagttcagcaaggtggtgtgcacgcgccggggcctctccgaggtcccgcagggtattccctcgaacacccggtacctcaacctcatggagaacaacatccagatgatccaggccgacaccttccgccacctccaccacctggaggtcctgcagttgggcaggaactccatccggcagattgaggtgggggccttcaacggcctggccagcctcaacaccctggagctgttcgacaactggctgacagtcatccctagcggggcctttgaatacctgtccaagctgcgggagctctggcttcgcaacaaccccatcgaaagcatcccctcttacgccttcaaccgggtgccctccctcatgcgcctggacttgggggagctcaagaagctggagtatatctctgagggagcttttgaggggctgttcaacctcaagtatctgaacttgggcatgtgcaacattaaagacatgcccaatctcacccccctggtggggctggaggagctggagatgtcagggaaccacttccctgagatcaggcctggctccttccatggcctgagctccctcaagaagctctgggtcatgaactcacaggtcagcctgattgagcggaatgcttttgacgggctggcttcacttgtggaactcaacttggcccacaataacctctcttctttgccccatgacctctttaccccgctgaggtacctggtggagttgcatctacaccacaacccttggaactgtgattgtgacattctgtggctagcctggtggcttcgagagtatatacccaccaattccacctgctgtggccgctgtcatgctcccatgcacatgcgaggccgctacctcgtggaggtggaccaggcctccttccagtgctctgcccccttcatcatggacgcacctcgagacctcaacatttctgagggtcggatggcagaacttaagtgtcggactccccctatgtcctccgtgaagtggttgctgcccaatgggacagtgctcagccacgcctcccgccacccaaggatctctgtcctcaacgacggcaccttgaacttttcccacgtgctgctttcagacactggggtgtacacatgcatggtgaccaatgttgcaggcaactccaacgcctcggcctacctcaatgtgagcacggctgagcttaacacctccaactacagcttcttcaccacagtaacagtggagaccacggagatctcgcctgaggacacaacgcgaaagtacaagcctgttcctaccacgtccactggttaccagccggcatataccacctctaccacggtgctcattcagactacccgtgtgcccaagcaggtggcagtacccgcgacagacaccactgacaagatgcagaccagcctggatgaagtcatgaagaccaccaagatcatcattggctgctttgtggcagtgactctgctagctgccgccatgttgattgtcttctataaacttcgtaagcggcaccagcagcggagtacagtcacagccgcccggactgttgagataatccaggtggacgaagacatcccagcagcaacatccgcagcagcaacagcagctccgtccggtgtatcaggtgagggggcagtagtgctgcccacaattcatgaccatattaactacaacacctacaaaccagcacatggggcccactggacagaaaacagcctggggaactctctgcaccccacagtcaccactatctctgaaccttatataattcagacccataccaaggacaaggtacaggaaactcaaatatgactcccctcccccaaaaaacttataaaatgcaatagaatgcacacaaagacagcaacttttgtacagagtggggagagactttttcttgtatatgcttatatattaagtctatgggctggttaaaaaaaacagattatattaaaatttaaagacaaaaagtcaaaacaaaaatattttctaacttgtaagttctatttaaagggggtgggggggaatcttgggaacgttgtggggtacaagccacaagttaacttgctatgctgccagaagggatttctggtataaggttgaaattgctgagataaaataaactaaaacaacaaacatccttaaagaggtagggtgtgggctgctgagggggcaagagggatagactgaatctgtcattttttagaagatgcttcataggacacaggactatccatttctacagacatctttcttaagccgagagctgtctttgcagaattatcttattaaaaaaaaatacaaaaaaaaagcaccatgaatttgtactgtgccaaaatgatagtggcaataatatttttcttcagaggctaaggggaagatagacctgtacatgtattttaagcaggaaaaccaccaaaattcaaacgaacccttaaaggggctgagtctttgtccatgtgcacaagtcttgggggtctgtgcactggacacacatgtgccttgcctgacagaattgcttagaaaggagcagagaaggacgggagctggcgtagctctcagtctaatgctttcacattgcaccagattcctgcagttgggcttaacccactctgcaaggcatgtgtctattcagggtttcccaggaggaggaggcccctgaaggggtgcggcagcaggggggtggtaagggagggtaaagcagagagaatgtattcacaggaggccataaattagcattgtgccatgtccacctgttgttcctggactctgacacatgattgtagacaatgatggcattttatgatttttaaaaaagattttgtttgttttaaggtggagagggaggagaagcctgaattggggagcttgggagtggaagcttttctcatgcttgtgatttggtgactcttctaaatgctgattcattagggattattacagcggatgtcaactggttgtggtgatggggtgggggcagaacatgagtagcaaagaaaagggagagacgaaaagggtacaggctcacgtaaagtaatgaagcctttcccaaccaggatggttcacaaaaaagctgtgagatccacagttacaagtgacacgcatgcacacatggagttccacatggggtactgttgaatggagcacactgatgggaagcttccctctcccaggccccctcaggagaaggtggaagagaaagggtgggcgtgggtggggaaggcagagatctctgttattctggtccatctaatgatgtaacttctttcagttattattttagctttaaaaggaaataaggggttcagatttgaaagggggtggtatgggtgggggaggggaattgccaacaaaagaacactgattgtaatgtgagaaaagtgtatttttgtattttaataaatattgttgaatttttaaaaaaaaaaaaaaaaaa

SEQ ID NO: 262 - protein, 653 aa, Homosapiens
MKLLWQVTVHHHTWNAILLPFVYLTAQVWILCAAIAAAASAGPQNCPSVCSCSNQFSKVVCTRRGLSEVPQGIPSNTRYLNLMENNIQMIQADTFRHLHHLEVLQLGRNSIRQIEVGAFNGLASLNTLELFDNWLTVIPSGAFEYLSKLRELWLRNNPIESIPSYAFNRVPSLMRLDLGELKKLEYISEGAFEGLFNLKYLNLGMCNIKDMPNLTPLVGLEELEMSGNHFPEIRPGSFHGLSSLKKLWVMNSQVSLIERNAFDGLASLVELNLAHNNLSSLPHDLFTPLRYLVELHLHHNPWNCDCDILWLAWWLREYIPTNSTCCGRCHAPMHMRGRYLVEVDQASFQCSAPFIMDAPRDLNISEGRMAELKCRTPPMSSVKWLLPNGTVLSHASRHPRISVLNDGTLNFSHVLLSDTGVYTCMVTNVAGNSNASAYLNVSTAELNTSNYSFFTTVTVETTEISPEDTTRKYKPVPTTSTGYQPAYTTSTTVLIQTTRVPKQVAVPATDTTDKMQTSLDEVMKTTKIIIGCFVAVTLLAAAMLIVFYKLRKRHQQRSTVTAARTVEIIQVDEDIPAATSAAATAAPSGVSGEGAVVLPTIHDHINYNTYKPAHGAHWTENSLGNSLHPTVTTISEPYIIQTHTKDKVQETQI

SEQ ID NO: 263 - DNA, 3426 bp, Homosapiens
gtaggaatcgcagcgccaacggttgcaaggcccaagaagccatcctgggaaggaaaatgcattggggaaccctgtgcggattcttgtggctttggccctatcttttctatgtccaagctgtgcccatccaaaaagtccaagatgacaccaaaaccctcatcaagacaattgtcaccaggatcaatgacatttcacacacgcagtcagtctcctccaaacagaaagtcaccggtttggacttcattcctgggctccaccccatcctgaccttatccaagatggaccagacactggcagtctaccaacagatcctcaccagtatgccttccagaaacgtgatccaaatatccaacgacctggagaacctccgggatcttcttcacgtgctggccttctctaagagctgccacttgccctgggccagtggcctggagaccttggacagcctggggggtgtcctggaagcttcaggctactccacagaggtggtggccctgagcaggctgcaggggtctctgcaggacatgctgtggcagctggacctcagccctgggtgctgaggccttgaaggtcactcttcctgcaaggactacgttaagggaaggaactctggcttccaggtatctccaggattgaagagcattgcatggacaccccttatccaggactctgtcaatttccctgactcctctaagccactcttccaaaggcataagaccctaagcctccttttgcttgaaaccaaagatatatacacaggatcctattctcaccaggaagggggtccacccagcaaagagtgggctgcatctgggattcccaccaaggtcttcagccatcaacaagagttgtcttgtcccctcttgacccatctccccctcactgaatgcctcaatgtgaccaggggtgatttcagagagggcagaggggtaggcagagcctttggatgaccagaacaaggttccctctgagaattccaaggagttccatgaagaccacatccacacacgcaggaactcccagcaacacaagctggaagcacatgtttatttattctgcattttattctggatggatttgaagcaaagcaccagcttctccaggctctttggggtcagccagggccaggggtctccctggagtgcagtttccaatcccatagatgggtctggctgagctgaacccattttgagtgactcgagggttgggttcatctgagcaagagctggcaaaggtggctctccagttagttctctcgtaactggtttcatttctactgtgactgatgttacatcacagtgtttgcaatggtgttgccctgagtggatctccaaggaccaggttattttaaaaagatttgttttgtcaagtgtcatatgtaggtgtctgcacccaggggtggggaatgtttgggcagaagggagaaggatctagaatgtgttttctgaataacatttgtgtggtgggttctttggaaggagtgagatcattttcttatcttctgcaattgcttaggatgtttttcatgaaaatagctctttcaggggggttgtgaggcctggccaggcaccccctggagagaagtttctggccctggctgaccccaaagagcctggagaagctgatgctttgcttcaaatccatccagaataaaacgcaaagggctgaaagccatttgttggggcagtggtaagctctggctttctccgactgctagggagtggtctttcctatcatggagtgacggtcccacactggtgactgcgatcttcagagcaggggtccttggtgtgaccctctgaatgggtccagggttgatcacactctgggtttattacatggcagtgttcctatttggggcttgcatgccaaattgtagttcttgtctgattggctcacccaagcaaggccaaaattaccaaaaatcttggggggtttttactccagtggtgaagaaaactcctttagcaggtggtcctgagacctgacaagcactgctaggcgagtgccaggactccccaggccaggccaccaggatgcccttcccactggaggtcacattcaggaagatgaaagaggaggtttggggtctgccaccatcctgctgctgtgtttttgctatcacacagtgggtggtggatctgtccaaggaaacttgaatcaaagcagttaactttaagactgagcacctgcttcatgctcagccctgactggtgctataggctggagaagctcacccaataaacattaagattgaggcctgccctcagggatcttgcgttcccagtggtcaaaccgcactcacccatgtgccaaggtggggtatttaccacagcagctgaacagccaaatgcatggtgcagttgacagcaggtgggaaatggtatgagctgaggggggccgtgcccaggggcccacagggaaccctgcttgcactttgtaacatgtttacttttcagggcatcttagcttctattatagccacatccctttgaaacaagataactgagaatttaaaaataagaaaatacataagaccataacagccaacaggtggcaggaccaggactatagcccaggtcctctgatacccagagcattacgtgagccaggtaatgagggactggaaccagggagaccgagcgctttctggaaaagaggagtttcgaggtagagtttgaaggaggtgagggatgtgaattgcctgcagagagaagcctgttttgttggaaggtttggtgtgtggagatgcagaggtaaaagtgtgagcagtgagttacagcgagaggcagagaaagaagagacaggagggcaagggccatgctgaagggaccttgaagggtaaagaagtttgatattaaaggagttaagagtagcaagttctagagaagaggctggtgctgtggccagggtgagagctgctctggaaaatgtgacccagatcctcacaaccacctaatcaggctgaggtgtcttaagccttttgctcacaaaacctggcacaatggctaattcccagagtgtgaaacttcctaagtataaatggttgtctgtttttgtaacttaaaaaaaaaaaaaaaagtttggccgggtgcggtggctcacgcctgtaatcccagcactttgggaggccaaggtggggggatcacaaggtcactagatggcgagcatcctggccaacatggtgaaaccccgtctctactaaaaacacaaaagttagctgagcgtggtggcgggcgcctgtagtcccagccactcgggaggctgagacaggagaatcgcttaaacctgggaggcggagagtacagtgagccaagatcgcgccactgcactccggcctgatgacagagcgagattccgtcttaaaaaaaaaaaaaaaaaaagtttgtttttaaaaaaatctaaataaaataactttgccccctg

SEQ ID NO: 264 - protein, 167 aa, Homosapiens
MHWGTLCGFLWLWPYLFYVQAVPIQKVQDDTKTLIKTIVTRINDISHTQSVSSKQKVTGLDFIPGLHPILTLSKMDQTLAVYQQILTSMPSRNVIQISNDLENLRDLLHVLAFSKSCHLPWASGLETLDSLGGVLEASGYSTEVVALSRLQGSLQDMLWQLDLSPGC

SEQ ID NO: 265 - DNA, 2809 bp, Homosapiens
acttccggaatctctcggcgtgtgagcttggttgtcctaccaaagccagcgtttcggctcgcgtgcgccggcctagtttgctcgcgccctcacgcgctttgggtttcccggtctcatggccggcctgaccttatttgtgggccgcctcccgccctcggcccgcagtgagcagctggaggaactgttcagtcaggtggggccggtgaagcagtgcttcgtggtgactgaaaaagggagtaaggcatgtcgaggctttggctatgtcactttttcaatgctggaagatgttcagagggccctcaaggagattaccacctttgaaggttgcaagatcaacgtgactgttgccaagaaaaaactgaggaacaagacaaaggaaaaggggaaaaatgaaaactcagagtgcccaaagaaggagccgaaggctaaaaaagccaaagtggcagataagaaagccagattaattattcggaacctgagctttaagtgttcagaagatgacttgaagacagtatttgctcaatttggagctgtcctggaagtaaatatccctaggaaaccagatgggaagatgcgcggttttggttttgttcagttcaaaaacctcctagaagcaggtaaagctctcaaaggcatgaacatgaaagagataaaaggccggacagtggctgtggattgggccgtggcaaaggataaatataaagatacacagtctgtttctgctataggtgaggaaaagagccatgaatctaaacatcaggaatcagttaaaaagaagggcagagaggaagaggatatggaagaggaagaaaacgatgatgatgacgatgatgatgatgaagaagatggggtttttgatgatgaagatgaagaggaagagaatatagaatcaaaggtgaccaagcctgtgcaaattcagaagagagcagtcaagagaccagcccctgcaaaaagcagtgatcattctgaggaggacagtgacctagaggaaagcgatagtattgatgatggagaggaactggctcagagtgataccagcactgaggagcaagaggataaagctgtgcaagtctcaaacaaaaagaagaggaaattaccctctgatgtgaatgaagggaaaactgtttttatcagaaatctgtcctttgactcagaagaagaagaacttggggagcttctccaacagtttggagaactcaaatatgtccgcattgtcttgcatccagacacagagcattctaaaggttgtgcatttgcccagttcatgactcaagaagcagctcagaaatgccttctagctgcttctccagagaatgaggctggtgggcttaaactggatggccggcagctcaaggttgacttggcggtgacccgtgatgaggctgcaaagcttcagacgacgaaggtgaagaagccgactggcacccggaatctctatctggcccgagaaggcttgattcgtgctgggacgaaggctgcagagggtgtgagtgctgctgatatggccaaaagagaacggtttgagctgctgaagcatcagaaactcaaggaccagaatatctttgtctcccgaaccaggctctgcctgcacaatctcccaaaggctgtagatgacaaacagctcagaaagctgctgctgagtgctactagtggagagaaaggggtgcgcatcaaggagtgtagagtgatgcgagacctcaaaggagttcatgggaacatgaagggtcagtccctgggctacgcctttgcggagttccaagagcacgagcatgccctgaaagccctccgcctcatcaacaacaatccagaaatctttgggcctctgaagagaccaatagtggagttctctttagaagatcgaagaaaacttaaaatgaaggaattaaggatccagcgcagcttgcaaaaaatgagatccaagcctgcaactggtgagcctcagaaggggcaaccagagcctgcaaaagaccagcaacagaaggcagctcaacaccacacagaggaacaaagcaaggtgcccccagagcagaagagaaaggcgggctctacctcatggaccgggttccagaccaaggctgaagtggagcaggtggagctgcctgatggaaagaagagaagaaaggtcctggcgctcccctcacaccgaggccccaaaatcaggttgcgggacaaaggcaaagtgaagcccgtccatcccaaaaagccaaagccacagataaaccagtggaagcaggagaagcagcaattatcgtccgagcaggtatctaggaaaaaagctaagggaaataagacggaaacccgcttcaaccagctggtcgaacaatataagcggaaattattgggaccttctaaaggagcacctcttgcaaagaggagcaaatggtttgatagttgatgatggcagcaggctgggtaagaagctgggttgtgtactttctggtgacactcctgggctcctccccatcccccgtgtctctcactgagggaaagaaaatccccaagggcactgccactgtgctcggaggtgccctggactgtgtacatctgaactttggtccatcctttgatgtgtggttcgttagccacaaagagaaatatctgaaagtcaacatgatgcttcttgcatattatccagattattgtatgaagttgtgtctataattattaccaattttttattctttatttctcaaatggaaacacctgaaaaagcattctggagtgctgaatttttaagatgtatattttgttaagcatattctctaaatgagatattgtgtggctttttagtaacaacgtcatttctaat

SEQ ID NO: 266 - protein, 759 aa, Homosapiens
MAGLTLFVGRLPPSARSEQLEELFSQVGPVKQCFVVTEKGSKACRGFGYVTFSMLEDVQRALKEITTFEGCKINVTVAKKKLRNKTKEKGKNENSECPKKEPKAKKAKVADKKARLIIRNLSFKCSEDDLKTVFAQFGAVLEVNIPRKPDGKMRGFGFVQFKNLLEAGKALKGMNMKEIKGRTVAVDWAVAKDKYKDTQSVSAIGEEKSHESKHQESVKKKGREEEDMEEEENDDDDDDDDEEDGVFDDEDEEEENIESKVTKPVQIQKRAVKRPAPAKSSDHSEEDSDLEESDSIDDGEELAQSDTSTEEQEDKAVQVSNKKKRKLPSDVNEGKTVFIRNLSFDSEEEELGELLQQFGELKYVRIVLHPDTEHSKGCAFAQFMTQEAAQKCLLAASPENEAGGLKLDGRQLKVDLAVTRDEAAKLQTTKVKKPTGTRNLYLAREGLIRAGTKAAEGVSAADMAKRERFELLKHQKLKDQNIFVSRTRLCLHNLPKAVDDKQLRKLLLSATSGEKGVRIKECRVMRDLKGVHGNMKGQSLGYAFAEFQEHEHALKALRLINNNPEIFGPLKRPIVEFSLEDRRKLKMKELRIQRSLQKMRSKPATGEPQKGQPEPAKDQQQKAAQHHTEEQSKVPPEQKRKAGSTSWTGFQTKAEVEQVELPDGKKRRKVLALPSHRGPKIRLRDKGKVKPVHPKKPKPQINQWKQEKQQLSSEQVSRKKAKGNKTETRFNQLVEQYKRKLLGPSKGAPLAKRSKWFDS

SEQ ID NO: 267 - DNA, 2971 bp, Homosapiens
ggagccccggcgcgggcggcttcgccggggagcgaggctcggagccaggaggcggcgccgctgggagggagcgcggagtgcggagtgcggagcgcggggcctggccgcccgcctggtgagagcgctgcgggccggggctgggccgggggcggctcaggggcagcggggcggcgaggctgcggtctctggactaggcgaggggccgccgggggctggaggtccggatcttcagtcggggcgctgggcacaacagagagaagcggtgagataccacgaagcgttgcccagctgggcgccagggccgccacgaccgccccttttcggaggctcggcgaggagacctgcctgcgggagagaccccggggagcaggaccttcctcctcaaaagctgctgaacaactgagtccctgcccaccaaggccacccgaagccaggtggggccatggccaggcatggctgtctagggctgggactgttctgctgcgtcctgtttgctgctactgtgggcccccagcccaccccctccatcccaggtgcccctgccaccactttgacccccgtacctcaaagtgaggcctctatgctgtctctcaacctgggacttaacttcaaattccatcttcggggacctgctgctgtctgggggagcccagtcacagagacccagccactctctcttgggccaggccaggagccaggggaagaggtggccagtgggctgaggactgaccccctttgggaattgctggtgggctcctcagggaactctctcactgagtggggctccaccgaaggtggctcaaagccccgggcctcctccctgcttccggagtccacatcccggcgctctgggcccagcgatgggcccactgccccctatcagcccaggaggagcactgtgacctgggacactgctctgatggtgacagcacttccatccagtgctcccaggccccaccagagcgagctggagctgaagtttgacatggcactgagagcaggtgcagcccccacgcttgggcatcgaacgctgcccctgctgcccagcctgcgggccagcctggcagagattgctgggcgcctgggaccctttggattctttggcactactctgtccccactccggaacttctccggcctgagccccccaggtgaaactacatccacaagctctgcctctggagtttcgggttctctggggttccttggtaccactctgtccctgcccccatactccctggagaggaagctctccagcccaagtcctctggacccagctgcttccctaagttttgcctcgattgcaacaacatcattagaccccacagtccccatctctggcccagatgacctctctcctcccgccagcctcgggaacccttcggggcagccagagtgtgggccagggtcctgcagcgtgggagaattgcctgaacgcgaggggcagcctcccgaggcgccgaggcccctctttttcctgaccctggaggccgactgggcagaggccagggctcgctgggggctggcctgggaggcccacgtgtacggggtaggcgcgctcttcggcctggttgccttgctggcgctgctggctctggccctcttgccctggcggtgcccgcccggcgccccctgcctggcgctgctggacctgctgctgctgtcggccgggaccacgcgggccttcccgctcttctacgacgcctatgggcacagggatcgactgcccgcgctcgcctggctgctgctgcaggaccttccgctgccctgcttggctgccggcctggggctggcctgcctgctgctggcccggccgcgcccgccgcggtgccccaccggcctggctgcgctgctgctcctggggctggggctggcggccgccgccgccctcgggagcgccgggcgcagccccttcgcccctcgggagtcctggcggcgcgcggcgcgcacggccccggtggcgggcaccttcgggctgctgagcggagccctgcagggctatgaggtgctgcacgccctgggctacggcggccaatccggcctggaagggccctggccctggtgggccttccagctaggcctgcgcctgggcgaggtgggcgtcgcgctcccgttggcgctgctgggcctctacccggcgctctgcagtcctcgcgtgccgccgcgctgctgggccaagctcttccgcttgtccccgggccacgcggctccgctgctgccgggaggctgggtcactgggcccccagacaaggagcccctggggagcgccatcgctcgcggggacgcggagctgctgcagctgtgcgcgctggcagggccaggcccagacctcctactccagggcggaggttgccggggcttcgaaggcgcggcggccaacccggccccgtccccggcttcctctccctgcagcgattacaccgtggacttccgcccgccctccccaatcaacctgcgacgcagcatcgaggaggccctctgcagcgaggccctgcttgcgcctggcctcttccagggccctgccttcgaggacgctctgcctgggctcggactctaccgcaccgcctcgctggggaccgggggcagggccagtgagagatcaggggaggcctctggccccgctgcgcccccggagctcccctcccctggggcttggcccgcaggcagcagcgtctcatctggctcgttctgcggactctcgcgggacagctcgtccatgctgctgtgttccagccccgacaggcccccgcgctgccctctggtctgcgtcctcagtcccccgcggccctcaggaagcagccccagcctcccggcctcaggatcctaccaggccctgtccccaccctctcgcgactccccagagcctgcttctgagctgcaggccgaggaggccttgctgcaggagcagttcctggacgcctgccgacagatcgacgagctgagcgtgggcagcgacaccatagacctgtga

SEQ ID NO: 268 - protein, 842 aa, Homosapiens
MARHGCLGLGLFCCVLFAATVGPQPTPSIPGAPATTLTPVPQSEASMLSLNLGLNFKFHLRGPAAVWGSPVTETQPLSLGPGQEPGEEVASGLRTDPLWELLVGSSGNSLTEWGSTEGGSKPRASSLLPESTSRRSGPSDGPTAPYQPRRSTVTWDTALMVTALPSSAPRPHQSELELKFDMALRAGAAPTLGHRTLPLLPSLRASLAEIAGRLGPFGFFGTTLSPLRNFSGLSPPGETTSTSSASGVSGSLGFLGTTLSLPPYSLERKLSSPSPLDPAASLSFASIATTSLDPTVPISGPDDLSPPASLGNPSGQPECGPGSCSVGELPEREGQPPEAPRPLFFLTLEADWAEARARWGLAWEAHVYGVGALFGLVALLALLALALLPWRCPPGAPCLALLDLLLLSAGTTRAFPLFYDAYGHRDRLPALAWLLLQDLPLPCLAAGLGLACLLLARPRPPRCPTGLAALLLLGLGLAAAAALGSAGRSPFAPRESWRRAARTAPVAGTFGLLSGALQGYEVLHALGYGGQSGLEGPWPWWAFQLGLRLGEVGVALPLALLGLYPALCSPRVPPRCWAKLFRLSPGHAAPLLPGGWVTGPPDKEPLGSAIARGDAELLQLCALAGPGPDLLLQGGGCRGFEGAAANPAPSPASSPCSDYTVDFRPPSPINLRRSIEEALCSEALLAPGLFQGPAFEDALPGLGLYRTASLGTGGRASERSGEASGPAAPPELPSPGAWPAGSSVSSGSFCGLSRDSSSMLLCSSPDRPPRCPLVCVLSPPRPSGSSPSLPASGSYQALSPPSRDSPEPASELQAEEALLQEQFLDACRQIDELSVGSDTIDL

SEQ ID NO: 269 - DNA, 2971 bp, Homosapiens
ggagccccggcgcgggcggcttcgccggggagcgaggctcggagccaggaggcggcgccgctgggagggagcgcggagtgcggagtgcggagcgcggggcctggccgcccgcctggtgagagcgctgcgggccggggctgggccgggggcggctcaggggcagcggggcggcgaggctgcggtctctggactaggcgaggggccgccgggggctggaggtccggatcttcagtcggggcgctgggcacaacagagagaagcggtgagataccacgaagcgttgcccagctgggcgccagggccgccacgaccgccccttttcggagactcggcgaggagacctgcctgcgggagagaccccggggagcaggaccttcctcctcaaaagctgctgaataactgagtccctgcccaccaaggccacccgaagccaggtggggccatggccaggcatggctgtctagggctgggactgttctgctgcgtcctgtttgctgctactgtgggcccccagcccaccccctccatcccaggtgcccctgccaccactttgacccccgtacctcaaagtgaggcctctatgctgtctctcaacctgggacttaacttcaaattccatcttcggggacctgctgctgtctgggggagcccagtcacagagacccagccactctctcttgggccaggccaggagccaggggaagaggtggccagtgggctgaggactgaccccctttgggaattgctggtgggctcctcagggaactctctcactgagtggggctccaccgaaggtggctcaaagccccgggcctcctccctgcttccggagtccacatcccggcgctctgggcccagcgatgggcccactgccccctatcagcccaggaggagcactgtgacctgggacactgctctgatggtgacagcacttccatccagtgctcccaggccccaccagagcgagctggagctgaagtttgacatggcactgagagcaggtgcagcccccacgcttgggcatcgaacgctgcccctgctgcccagcctgcgggccagcctggcagagattgctgggcgcctgggaccctttggattctttggcactactctgtccccactccggaacttctccggcctgagccccccaggtgaaactacatccacaagctctgcctctggagtttcgggttctctggggttccttggtaccactctgtccctgcccccatactccctggagaggaagctctccagcccaagtcctctggacccagctgcttccctaagttttgcctcgattgcaacaacatcattagaccccacagtccccatctctggcccagatgacctctctcctcccgccagcctcgggaacccttcggggcagccagagtgtgggccagggtcctgcagcgtgggagaattgcctgaacgcgaggggcagcctcccgaggcgccgaggcccctctttttcctgaccctggaggccgactgggcagaggccagggctcgctgggggctggcctgggaggcccacgtgtacggggtaggcgcgctcttcggcctggttgccttgctggcgctgctggctctggccctcttgccctggcgctgcccgcccggcgccccctgcctggcgctgctggacctgctgctgctgtcggccgggaccacgcgggccttcccgctcttctacgacgcctatgggcacagggatcgactgcccgcgctcgcctggctgctgctgcaggaccttccgctgccctgcttggctgccggcctggggctggcctgcctgctgctggcccggccgcgcccgccgcggtgccccaccggcctggctgcgctgctgctcctggggctggggctggcggccgccgccgccctcgggagcgccgggcgcagccccttcgcccctcgggagtcctggcggcgcgcggcgcgcacggccccggtggcgggcaccttcgggctgctgagcggagccctgcagggctatgaggtgctgcacgccctgggctacggcggccaatccggcctggaagggccctggccctggtgggccttccagctaggcctgcgcctgggcgaggtgggcgtcgcgctcccgttggcgctgctgggcctctacccggcgctctgcagtcctcgcgtgccgccgcgctgctgggccaagctcttccgcttgtccccgggccacgcggctccgctgctgccgggaggctgggtcactgggcccccagacaaggagcccctggggagcgccatcgctcgcggggacgcggagctgctgcagctgtgcgcgctggcagggccaggcccagacctcctactccagggcggaggttgccggggcttcgaaggcgcggcggccaacccggccccgtccccggcttcctctccctgcagcgattacaccgtggacttccgcccgccctccccaatcaacctgcgacgcagcatcgaggaggccctctgcagcgaggccctgcttgcgcctggcctcttccagggccctgccttcgaggacgctctgcctgggctcggactctaccgcaccgcctcgctggggaccgggggcagggccagtgagagatcaggggaggcctctggccccgctgcgcccccggagctcccctcccctggggcttggcccgcaggcagcagcgtctcatctggctcgttctgcggactctcgcgggacagctcgtccatgctgctgtgttccagccccgacaggcccccgcgctgccctctggtctgcgtcctcagtcccccgcggccctcaggaagcagccccagcctcccggcctcaggatcctaccaggccctgtccccaccctctcgcgactccccagagcctgcttctgagctgcaggccgaggaggccttgctgcaggagcagttcctggacgcctgccgacagatcgacgagctgagcgtgggcagcgacaccatagacctgtga

SEQ ID NO: 270 - protein, 842 aa, Homosapiens; identical to SEQ ID NO: 268

SEQ ID NO: 271 - DNA, 2880 bp, Homosapiens
tcggaaggggccaggagacactggaaggtccggacggcagggaaggggacggggttctttccagtcccacccgtgtagggacacctctccccctcatcccccgatgtaccctcgctgaatctgggatgggagagacgaaccgagtctaggcatctgcgtagcagcgccggggagagcggggagcccagggcggagcccagtcgactcccggattcccctgccccgcccccggcacgaggccccgccccggcggccccgcccctcctcgggactcgaccgggctgcgctcactgcccagccggggccccgggagcctccaggctcccgcccgccctgagctgcggcctccgcatggaggggccactcactccaccaccgctgcagggaggcggagccgccgctgttccggagcccggagcccggcaacacccgggacacgagacggcggcgcagcggtacagcgcccgactgctgcaggccggctacgagcccgagagccctagattggacctcgctacacacccgacgacaccccgttcagaactatcttcagtggtcttactggcaggtgttggtgtccagatggatcgccttcgcagggctagcatggcggactacctgatcagcggcggcaccggctacgtgcccgaggatgggctcaccgcgcagcagctcttcgccagcgccgacggcctcacctacaacgacttcctgattctcccaggattcatagacttcatagctgatgaggtggacctgacctcagccctgacccggaagatcacgctgaagacgccactgatctcctcccccatggacactgtgacagaggctgacatggccattgccatggctctgatgggaggtattggtttcattcaccacaactgcaccccagagttccaggccaacgaggtgcggaaggtcaagaagtttgaacagggcttcatcacggaccctgtggtgctgagcccctcgcacactgtgggcgatgtgctggaggccaagatgcggcatggcttctctggcatccccatcactgagacgggcaccatgggcagcaagctggtgggcatcgtcacctcccgagacatcgactttcttgctgagaaggaccacaccaccctcctcagtgaggtgatgacgccaaggattgaactggtggtggctccagcaggtgtgacgttgaaagaggcaaatgagatcctgcagcgtagcaagaaagggaagctgcctatcgtcaatgattgcgatgagctggtggccatcatcgcccgcaccgacctgaagaagaaccgagactaccctctggcctccaaggattcccagaagcagctgctctgtggggcagctgtgggcacccgtgaggatgacaaataccgtctggacctgctcacccaggcgggcgtcgacgtcatagtcttggactcgtcccaagggaattcggtgtatcagatcgccatggtgcattacatcaaacagaagtacccccacctccaggtgattggggggaacgtggtgacagcagcccaggccaagaacctgattgatgctggtgtggacgggctgcgcgtgggcatgggctgcggctccatctgcatcacccaggaagtgatggcctgtggtcggccccagggcactgctgtgtacaaggtggctgagtatgcccggcgctttggtgtgcccatcatagccgatggcggcatccagaccgtgggacacgtggtcaaggccctggcccttggagcctccacagtgatgatgggctccctgctggccgccactacggaggcccctggcgagtacttcttctcagacggggtgcggctcaagaagtaccggggcatgggctcactggatgccatggagaagagcagcagcagccagaaacgatacttcagcgagggggataaagtgaagatcgcgcagggtgtctcgggctccatccaggacaaaggatccattcagaagttcgtgccctacctcatagcaggcatccaacacggctgccaggatatcggggcccgcagcctgtctgtccttcggtccatgatgtactcaggagagctcaagtttgagaagcggaccatgtcggcccagattgagggtggtgtccatggcctgcactcttacgaaaagcggctgtactgaggacagcggtggaggccgaggtggtggaggggatgcaccccagtgtccacttttgggcacagcctccctccataactgagtggtccacagatttgcactacgggttctccagctcctttccaggcagagaggaggggaggtcctgaggggactgctgcccctcactcggcatcccctgcagagtcaggactgctcccggggccaggctgccctgggagcccccctccgagcccagccagccaggctctcaggccctgcgcctgcctcaggtctttcttgctgcagcctgctccagcctggcccccaccccaggggcaggcggcccctcctggcttctcctgtagggcacctccctgcccctagcctcccaggaaatggtgctctcctggccctgcctctggcccttcccgggccgctgcccctcagccatgtggcacttctgagctcctgacctaggccaaggggaggtctctgcccccttccccggccctgggctacccttgggtcctgctcctcaggccgctcccctgtccctggccatgggtaggagactgccctggtcatggccgcctgcctgtcattcctgactcaccaccgtccccaggtgaaccattcctcccttctcctcagctgcagtcgaaggctttaactttgcacacttgggatcacagttgcgtcattgtgtattaaatacttggaataaatcaagcaggtctcaacgcctccact

SEQ ID NO: 272 - protein, 599 aa, Homosapiens
MEGPLTPPPLQGGGAAAVPEPGARQHPGHETAAQRYSARLLQAGYEPESPRLDLATHPTTPRSELSSVVLLAGVGVQMDRLRRASMADYLISGGTGYVPEDGLTAQQLFASADGLTYNDFLILPGFIDFIADEVDLTSALTRKITLKTPLISSPMDTVTEADMAIAMALMGGIGFIHHNCTPEFQANEVRKVKKFEQGFITDPVVLSPSHTVGDVLEAKMRHGFSGIPITETGTMGSKLVGIVTSRDIDFLAEKDHTTLLSEVMTPRIELVVAPAGVTLKEANEILQRSKKGKLPIVNDCDELVAIIARTDLKKNRDYPLASKDSQKQLLCGAAVGTREDDKYRLDLLTQAGVDVIVLDSSQGNSVYQIAMVHYIKQKYPHLQVIGGNVVTAAQAKNLIDAGVDGLRVGMGCGSICITQEVMACGRPQGTAVYKVAEYARRFGVPIIADGGIQTVGHVVKALALGASTVMMGSLLAATTEAPGEYFFSDGVRLKKYRGMGSLDAMEKSSSSQKRYFSEGDKVKIAQGVSGSIQDKGSIQKFVPYLIAGIQHGCQDIGARSLSVLRSMMYSGELKFEKRTMSAQIEGGVHGLHSYEKRLY

SEQ ID NO: 273 - DNA, 2534 bp, Homosapiens
tcgggactcgaccgggctgcgctcactgcccagccggggccccgggagcctccaggctcccgcccgccctgagctgcggcctccgcatggaggggccactcactccaccaccgctgcagggaggcggagccgccgctgttccggagcccggagcccggcaacacccgggacacgagacggcggcgcagcggtacagcgcccgactgctgcaggccggctacgagcccgagagcatggcggactacctgatcagcggcggcaccggctacgtgcccgaggatgggctcaccgcgcagcagctcttcgccagcgccgacggcctcacctacaacgacttcctgattctcccaggattcatagacttcatagctgatgaggtggacctgacctcagccctgacccggaagatcacgctgaagacgccactgatctcctcccccatggacactgtgacagaggctgacatggccattgccatggctctgatgggaggtattggtttcattcaccacaactgcaccccagagttccaggccaacgaggtgcggaaggtcaagaagtttgaacagggcttcatcacggaccctgtggtgctgagcccctcgcacactgtgggcgatgtgctggaggccaagatgcggcatggcttctctggcatccccatcactgagacgggcaccatgggcagcaagctggtgggcatcgtcacctcccgagacatcgactttcttgctgagaaggaccacaccaccctcctcagtgaggtgatgacgccaaggattgaactggtggtggctccagcaggtgtgacgttgaaagaggcaaatgagatcctgcagcgtagcaagaaagggaagctgcctatcgtcaatgattgcgatgagctggtggccatcatcgcccgcaccgacctgaagaagaaccgagactaccctctggcctccaaggattcccagaagcagctgctctgtggggcagctgtgggcacccgtgaggatgacaaataccgtctggacctgctcacccaggcgggcgtcgacgtcatagtcttggactcgtcccaagggaattcggtgtatcagatcgccatggtgcattacatcaaacagaagtacccccacctccaggtgattggggggaacgtggtgacagcagcccaggccaagaacctgattgatgctggtgtggacgggctgcgcgtgggcatgggctgcggctccatctgcatcacccaggaagtgatggcctgtggtcggccccagggcactgctgtgtacaaggtggctgagtatgcccggcgctttggtgtgcccatcatagccgatggcggcatccagaccgtgggacacgtggtcaaggccctggcccttggagcctccacagtgatgatgggctccctgctggccgccactacggaggcccctggcgagtacttcttctcagacggggtgcggctcaagaagtaccggggcatgggctcactggatgccatggagaagagcagcagcagccagaaacgatacttcagcgagggggataaagtgaagatcgcgcagggtgtctcgggctccatccaggacaaaggatccattcagaagttcgtgccctacctcatagcaggcatccaacacggctgccaggatatcggggcccgcagcctgtctgtccttcggtccatgatgtactcaggagagctcaagtttgagaagcggaccatgtcggcccagattgagggtggtgtccatggcctgcactcttacgaaaagcggctgtactgaggacagcggtggaggccgaggtggtggaggggatgcaccccagtgtccacttttgggcacagcctccctccataactgagtggtccacagatttgcactacgggttctccagctcctttccaggcagagaggaggggaggtcctgaggggactgctgcccctcactcggcatcccctgcagagtcaggactgctcccggggccaggctgccctgggagcccccctccgagcccagccagccaggctctcaggccctgcgcctgcctcaggtctttcttgctgcagcctgctccagcctggcccccaccccaggggcaggcggcccctcctggcttctcctgtagggcacctccctgcccctagcctcccaggaaatggtgctctcctggccctgcctctggcccttcccgggccgctgcccctcagccatgtggcacttctgagctcctgacctaggccaaggggaggtctctgcccccttccccggccctgggctacccttgggtcctgctcctcaggccgctcccctgtccctggccatgggtaggagactgccctggtcatggccgcctgcctgtcattcctgactcaccaccgtccccaggtgaaccattcctcccttctcctcagctgcagtcgaaggctttaactttgcacacttgggatcacagttgcgtcattgtgtattaaatacttggaataaatcaagcaggtctcaacgcctccactaaaaaaaaaaaaaaaaaaaaaaaaaaa

SEQ ID NO: 274 - protein, 563 aa, Homosapiens
MEGPLTPPPLQGGGAAAVPEPGARQHPGHETAAQRYSARLLQAGYEPESMADYLISGGTGYVPEDGLTAQQLFASADGLTYNDFLILPGFIDFIADEVDLTSALTRKITLKTPLISSPMDTVTEADMAIAMALMGGIGFIHHNCTPEFQANEVRKVKKFEQGFITDPVVLSPSHTVGDVLEAKMRHGFSGIPITETGTMGSKLVGIVTSRDIDFLAEKDHTTLLSEVMTPRIELVVAPAGVTLKEANEILQRSKKGKLPIVNDCDELVAIIARTDLKKNRDYPLASKDSQKQLLCGAAVGTREDDKYRLDLLTQAGVDVIVLDSSQGNSVYQIAMVHYIKQKYPHLQVIGGNVVTAAQAKNLIDAGVDGLRVGMGCGSICITQEVMACGRPQGTAVYKVAEYARRFGVPIIADGGIQTVGHVVKALALGASTVMMGSLLAATTEAPGEYFFSDGVRLKKYRGMGSLDAMEKSSSSQKRYFSEGDKVKIAQGVSGSIQDKGSIQKFVPYLIAGIQHGCQDIGARSLSVLRSMMYSGELKFEKRTMSAQIEGGVHGLHSYEKRLY

SEQ ID NO: 275 - DNA, 1372 bp, Homosapiens
gcacgagggcgcttttgtctccggtgagttttgtggcgggaagcttctgcgctggtgcttagtaaccgactttcctccggactcctgcacgacctgctcctacagccggcgatccactcccggctgttcccccggagggtccagaggcctttcagaaggagaaggcagctctgtttctctgcagaggagtagggtcctttcagccatgaagcatgtgttgaacctctacctgttaggtgtggtactgaccctactctccatcttcgttagagtgatggagtccctagaaggcttactagagagcccatcgcctgggacctcctggaccaccagaagccaactagccaacacagagcccaccaagggccttccagaccatccatccagaagcatgtgataagacctccttccatactggccatattttggaacactgacctagacatgtccagatgggagtcccattcctagcagacaagctgagcaccgttgtaaccagagaactattactaggccttgaagaacctgtctaactggatgctcattgcctgggcaaggcctgtttaggccggttgcggtggctcatgcctgtaatcctagcactttgggaggctgaggtgggtggatcacctgaggtcaggagttcgagaccagcctcgccaacatggcgaaaccccatctctactaaaaatacaaaagttagctgggtgtggtggcagaggcctgtaatcccagttccttgggaggctgaggcgggagaattgcttgaacccggggacggaggttgcagtgaaccgagatcgcactgctgtacccagcctgggccacagtgcaagactccatctcaaaaaaaaaaagaaaagaaaaagcctgtttaatgcacaggtgtgagtggattgcttatggctatgagataggttgatctcgcccttaccccggggtctggtgtatgctgtgctttcctcagcagtatggctctgacatctcttagatgtcccaacttcagctgttgggagatggtgatattttcaaccctacttcctaaacatctgtctggggttcctttagtcttgaatgtcttatgctcaattatttggtgttgagcctctcttccacaagagctcctccatgtttggatagcagttgaagaggttgtgtgggtgggctgttgggagtgaggatggagtgttcagtgcccatttctcattttacattttaaagtcgttcctccaacatagtgtgtattggtctgaagggggtggtgggatgccaaagcctgctcaagttatggacattgtggccaccatgtggcttaaatgattttttctaactaataaagtggaatatatatttcaaaaaaaaaaaaaaaaaa

SEQ ID NO: 276 - protein, 63 aa, Homosapiens
MKHVLNLYLLGVVLTLLSIFVRVMESLEGLLESPSPGTSWTTRSQLANTEPTKGLPDHPSRSM

SEQ ID NO: 277 - DNA, 1664 bp, Homosapiens
tcatggccggctcctaccctgaaggtgcacctgcaatcctcgccgataagaggcagcagttcggaagccggttcctgagcgatccggcgcgggtcttccaccacaatgcctgttgattatgagatcaatgcccacaaatactggaatgacttctacaaaatccacgaaaatgggtttttcaaggatagacattggctttttaccgaattccctgagctggcacctagccaaaatcaaaatcatttgaaggattggttcttggagaacaagagtgaagtatgtgaatgtagaaacaatgaggatggacctggtttaataatggaagaacagcacaagtgttcttcgaagagccttgaacataaaacacagacacctcctgtggaggagaatgtaactcagaaaattagtgacctggaaatttgtgctgatgagtttcctggatcctcagccacctaccgaatactggaggttggctgtggtgtgggaaacacagtctttccaattttacaaacgaacaatgacccaggactctttgtttattgctgtgatttttcttccacagctatagaactggtccagacaaattcagaatatgatccttctcggtgttttgcctttgttcacgacctgtgtgatgaagagaagagttacccagtgcccaagggcagtcttgatattatcattctcatatttgttctttcagcaattgttccagacaagatgcagaaggctatcaacaggctgagcaggcttctgaaacctggggggatggtacttctgcgagattacggccgctatgacatggctcagcttcggtttaaaaaaggtcagtgtctatctggaaatttctatgtgagaggtgatggaaccagagtttacttcttcacacaagaggaactggacacgcttttcaccactgctggactggaaaaagttcagaacctggtggaccgccgactgcaggtgaaccgagggaagcaactgacaatgtaccgggtttggattcagtgcaaatactgcaagccccttctgtccagcaccagctaagaggcacctgctgccaacacgatgcaagcccgttgtgtttccgagctttttttaaaaaaaaatttgtagcaccgggcatggtgcatgcctgtaatcccagccactcaggaggctgaggcagggaggatccattgagcccaggagtccagcctgggcaaaatagcgagagaccctgaatctgaaagtaatgataaaataaaaagaatataaatgaggtctcgttgatgctggacaattcaagaattcagacttgaaccttaaacctaggaaaagttactttgtatcaggattctaacaattatgcttcatatttgtgaagtcctttaaaacataattttctcaagttctttctttgagacctcaatctgtcttagcattttgtaactaataactgaaattttattcaaaggaattgtaaaccttaaaccaccaatttatttccatgtgaaaaagtgttatatatgacaagtgttttttgattgtaattgcgttaaatcttttgagagtgtaaatgccgggctaggcaattgcagttaatacatacaggggttagtgaagggcttattaagttgtaggggaagcaagctgggaagaatcagatcagatattttcctgac

SEQ ID NO: 278 - protein, 313 aa, Homosapiens
MPVDYEINAHKYWNDFYKIHENGFFKDRHWLFTEFPELAPSQNQNHLKDWFLENKSEVCECRNNEDGPGLIMEEQHKCSSKSLEHKTQTPPVEENVTQKISDLEICADEFPGSSATYRILEVGCGVGNTVFPILQTNNDPGLFVYCCDFSSTAIELVQTNSEYDPSRCFAFVHDLCDEEKSYPVPKGSLDIIILIFVLSAIVPDKMQKAINRLSRLLKPGGMVLLRDYGRYDMAQLRFKKGQCLSGNFYVRGDGTRVYFFTQEELDTLFTTAGLEKVQNLVDRRLQVNRGKQLTMYRVWIQCKYCKPLLSSTS

SEQ ID NO: 279 - DNA, 8192 bp, Homosapiens
acaagctctccatgtgagctgacaggcgagtggaaacccctcgagtcacgctgcccggcggcggagggagcgctcgcccgcagtggcaacagctgcaccaccgtccccgtcgctctgccttcctcttctgcagcctctgctcttctgattacctccctcccccgtcctttggtgatttttttttttcaagaaggagagggcggggtaggtgtccgttccctcccctcttccccctcctttgccttcttggtttgaatttcctcccccggcgttgcactggcacacagtgcaagaggcaatacccgcacggagggagaacgaaggctgagactcccctgccgctccaagcccggaagaactggagcctggaggggggtgaggggagaagaggaagcgggaggggcttggcttcctcgcgtatttgaggacagcccatctcccttcaagaaccctacggagagtcggactgcatctccgcagcgagctcttggagcgccgccggccgggaggcgaaggatgcaggcggctccgcgcgccggctgcggggcagcgctcctgctgtggattgtcagcagctgcctctgcagagcctggacggctccctccacgtcccaaaaatgtgatgagccacttgtctctggactcccccatgtggctttcagcagctcctcctccatctctggtagctattctcccggctatgccaagataaacaagagaggaggtgctgggggatggtctccatcagacagcgaccattatcaatggcttcaggttgactttggcaatcggaagcagatcagtgccattgcaacccaaggaaggtatagcagctcagattgggtgacccaataccggatgctctacagcgacacagggagaaactggaaaccctatcatcaagatgggaatatctgggcatttcccggaaacattaactctgacggtgtggtccggcacgaattacagcatccgattattgcccgctatgtgcgcatagtgcctctggattggaatggagaaggtcgcattggactcagaattgaagtttatggctgttcttactgggctgatgttatcaactttgatggccatgttgtattaccatatagattcagaaacaagaagatgaaaacactgaaagatgtcattgccttgaactttaagacgtctgaaagtgaaggagtaatcctgcacggagaaggacagcaaggagattacattaccttggaactgaaaaaagccaagctggtcctcagtttaaacttaggaagcaaccagcttggccccatatatggccacacatcagtgatgacaggaagtttgctggatgaccaccactggcactctgtggtcattgagcgccaggggcggagcattaacctcactctggacaggagcatgcagcacttccgtaccaatggagagtttgactacctggacttggactatgagataacctttggaggcatccctttctctggcaagcccagctccagcagtagaaagaatttcaaaggctgcatggaaagcatcaactacaatggcgtcaacattactgatcttgccagaaggaagaaattagagccctcaaatgtgggaaatttgagcttttcttgtgtggaaccctatacggtgcctgtctttttcaacgctacaagttacctggaggtgcccggacggcttaaccaggacctgttctcagtcagtttccagtttaggacatggaaccccaatggtctcctggtcttcagtcactttgcggataatttgggcaatgtggagattgacctcactgaaagcaaagtgggtgttcacatcaacatcacacagaccaagatgagccaaatcgatatttcctcaggttctgggttgaatgatggacagtggcacgaggttcgcttcctagccaaggaaaattttgctattctcaccatcgatggagatgaagcatcagcagttcgaactaatagtccccttcaagttaaaactggcgagaagtacttttttggaggttttctgaaccagatgaataactcaagtcactctgtccttcagccttcattccaaggatgcatgcagctcattcaagtggacgatcaacttgtaaatttatacgaagtggcacaaaggaagccgggaagtttcgcgaatgtcagcattgacatgtgtgcgatcatagacagatgtgtgcccaatcactgtgagcatggtggaaagtgctcgcaaacatgggacagcttcaaatgcacttgtgatgagacaggatacagtggggccacctgccacaactctatctacgagccttcctgtgaagcctacaaacacctaggacagacatcaaattattactggatagatcctgatggcagcggacctctggggcctctgaaagtttactgcaacatgacagaggacaaagtgtggaccatagtgtctcatgacttgcagatgcagacgcctgtggtcggctacaacccagaaaaatactcagtgacacagctcgtttacagcgcctccatggaccagataagtgccatcactgacagtgccgagtactgcgagcagtatgtctcctatttctgcaagatgtcaagattgttgaacaccccagatggaagcccttacacttggtgggttggcaaagccaacgagaagcactactactggggaggctctgggcctggaatccagaaatgtgcctgcggcatcgaacgcaactgcacagatcccaagtactactgtaactgcgacgcggactacaagcaatggaggaaggatgctggtttcttatcatacaaagatcacctgccagtgagccaagtggtggttggagatactgaccgtcaaggctcagaagccaaattgagcgtaggtcctctgcgctgccaaggagacaggaattattggaatgccgcctctttcccaaacccatcctcctacctgcacttctctactttccaaggggaaactagcgctgacatttctttctacttcaaaacattaaccccctggggagtgtttcttgaaaatatgggaaaggaagatttcatcaagctggagctgaagtctgccacagaagtgtccttttcatttgatgtgggaaatgggccagtagagattgtagtgaggtcaccaacccctctcaacgatgaccagtggcaccgggtcactgcagagaggaatgtcaagcaggccagcctacaggtggaccggctaccgcagcagatccgcaaggccccaacagaaggccacacccgcctggagctctacagccagttatttgtgggtggtgctgggggccagcagggcttcctgggctgcatccgctccttgaggatgaatggggtgacacttgacctggaggaaagagcaaaggtcacatctgggttcatatccggatgctcgggccattgcaccagctatggaacaaactgtgaaaatggaggcaaatgcctagagagataccacggttactcctgcgattgctctaatactgcatatgatggaacattttgcaacaaagatgttggtgcattttttgaagaagggatgtggctacgatataactttcaggcaccagcaacaaatgccagagactccagcagcagagtagacaacgctcccgaccagcagaactcccacccggacctggcacaggaggagatccgcttcagcttcagcaccaccaaggcgccctgcattctcctctacatcagctccttcaccacagacttcttggcagtcctcgtcaaacccactggaagcttacagattcgatacaacctgggtggcacccgagagccatacaatattgacgtagaccacaggaacatggccaatggacagccccacagtgtcaacatcacccgccacgagaagaccatctttctcaagctcgatcattatccttctgtgagttaccatctgccaagttcatccgacaccctcttcaattctcccaagtcgctctttctgggaaaagttatagaaacagggaaaattgaccaagagattcacaaatacaacaccccaggattcactggttgcctctccagagtccagttcaaccagatcgcccctctcaaggccgccttgaggcagacaaacgcctcggctcacgtccacatccagggcgagctggtggagtccaactgcggggcctcgccgctgaccctctcccccatgtcgtccgccaccgacccctggcacctggatcacctggattcagccagtgcggattttccatataatccaggacaaggccaagctataagaaatggagtcaacagaaactcggctatcattggaggcgtcattgctgtggtgattttcaccatcctgtgcaccctggtcttcctgatccggtacatgttccgccacaagggcacctaccataccaacgaagcaaagggggcggagtcggcagagagcgcggacgccgccatcatgaacaacgaccccaacttcacagagaccattgatgaaagcaaaaaggaatggctcatttgaggggtggctacttggctatgggatagggaggagggaattactagggaggagagaaagggacaaaagcaccctgcttcatactcttgagcacatccttaaaatatcagcacaagttgggggaggcaggcaatggaatataatggaatattcttgagactgatcacaaaaaaaaaaacctttttaatatttctttatagctgagttttcccttctgtatcaaaacaaaataatacaaaaaatgcttttagagtttaagcaatggttgaaatttgtaggtactatctgtcttattttgtgtgtgtttagaggtgttctaaagacccgtggtaacagggcaagttttctacgtttttaagagcccttagaacgtgggtattttttttcttgagaaaagctaatgcacctacagatggcccccaacattctcttccttttgcttctagtcaaccttaatgggctgttacagaaactagttcgtgtttatatactatttcctttgatgtcctataagtcggaaaagaaaggggcaaagagaacctattatttgccagtttttaagcagagctcaatctatgccagctctctggcatctggggttcctgactgataccagcagttgaaggaagagagtgcatggcacctggtgtgtaacgacacaatcagcacaactggagagaggcattaaagaaccagggaaggtagtttgatttttcattgaattctacaagctaatattgttccacgtatgtagtcttagaccaatagctgtaactatcagctgcaataccatggtgaccagctgttacaaaagattttttcctgttttatctgaaacatactggatttatatatgtataagcgcctcaatggggaattagagccagatgttatgatttgtttgctctttttcttttatagtttagttatagcaaaaatatggataatttctagtgaatgcataaattaggttgcgtttcttattttgctttaaatctctggtagtttttccacccctgtgacacaatcctaatagacagtgtcctgtaaatggacacaacacaataaagtcaagttattattgctgttactctggatgatatggaaaacactgccatattttaaatcaactactccacgtgtttttccatccaatcacactgctgtgattcagggatctttcttctaagacggacacatttgaacctcaggttcatcacaaacctggtacctgttgcttcccagaggatggagaagtgtagttaatcacacctcttagtttaatctgaaatcttgacccagttatttaacaaataaatacctcattgattatatttaaaagtaatacacttcctgtaaacaaatggggacaatgcatccaaaaaatctttttaaacagattacacaaaaattatttccagaaaggctaccatttatcatcattatatttcaagcctcttatacttaataagcactttctaaaaagtcttgagatcccaccattctgaggaattcaatatgatcactttttccttctttgcctgggagaggttaagaggaggtttcgaaggtatagatgctattgttctgatggcccggctgaataaaatggaaattctagtttgttagaattatgcattctttttcaagattctcagtgtgcctaacttattggagcacatcagtttcttgggtaatggaaaacattacctagagttgccagtggcacattacaccagtacagagcacattccaaaggagacattggaccagttaattcccatacaagtcaaggtaacagaacaaaagggaatcctgatgcccttttaccattgctggttgagctcaggcactgtcatggacacccttaattttaaaaggttttaatcattcttctataaaatacatttaaaatggaaaaatacttaatatcactaaatatcagaacaatgtaacatttacaaatgacatattgaaagcaaaggctgttttatttagccaagatgattaccattaggagttactttatgtattgttgaaagcaaattttaaacatgatgttttagaagtgtttctgatttttaaacctggtttacaggtattacttctgcacttaccaaataatgccagatggaaatttattatttcttgcaattcccatgatagctctgttctttatgcattgtctcaacactttcccttttttcccaaaatgagtagagaattaaagccacccaaaacagcttctgctactaaaatgttctcatcctttctcctccctctccttttcctgccacaaaaggtgaaaaatgagatccaatcctctcaccaaaatttcaaacctaggacactggaatgactgcagggatcagtggttctcccatatcaccatcaattaagacatataggacactgtcttccttcaagagggttacaatgtggccatcagacaggaaaccaaacggtggataaagtattaagtaactaagtgccaaataaatgctggaaatcttgacctctccttgggattatgggtgtaacaaaaatccctacatctgtttatgaaggccatattcagtacattttaaatggtaaataatctgtttatgtgaagaaaaagaattaagtctttcttccaactctctccttggatagcctagcacagtgcagcctccataaccatgacattcccgcccaagctctcagtgcctaatcctgctttgtcattcacatctcacaaaatcttgacatcttacattccaatacattatcaagcaagcacaagtatgctggtagtagcctctttaaataatatgtatagacaacaacaacgacaaaaaatagactgttttaaagtttcagggaaagttggtggctgatttaaagttgtgcaggaaacatcttctgtgtatgaagcaaatgtcgatgttttgaaaaaagctaggagatgactttgaatgaatgcaaggttagtgagatcctaagctctcaaaatagcatattccctagagctcaagaaagctggtccaggaggttgaaaaagctattttgttgttaaattattttctggcccttcttaatatttaaaaatgtatttccccttgtggctttcaaccacctgctcaaaaaaagagacttgttacatgaaagttttcattaaagagctgaaaacaagaatttagagagccattcctagaaaatgtcctactgccctgcatttgacaaacaagcatcctttactaacaagagcaggaattcagaggcacaagaaaaagcattggcatgagccaaagagtctgtcttaatgttacttttgaaaatctgctgagcggccaccatatgcaggctgagagctgggcacaggcgaagccattggaagcacttcaggaacaagcacacagctgtgggacttgaacatgcaagtgttcaggttgtgtcaagaagcttttctttccttctatgatggaatctgttcttttctatcctacttttttctctcttcctctcctcaccacattataccctgctcttacgcagtaaacgttttaatggcccgtttatgtctcatgcctccaaacaacactgaatttgaaaccccccattttttcttttcaccaccctgttgagcaattttcccaaaaaaagggcagcaattattaaattgaattcaagtaagccagcca

SEQ ID NO: 280 - protein, 1331 aa, Homosapiens
MQAAPRAGCGAALLLWIVSSCLCRAWTAPSTSQKCDEPLVSGLPHVAFSSSSSISGSYSPGYAKINKRGGAGGWSPSDSDHYQWLQVDFGNRKQISAIATQGRYSSSDWVTQYRMLYSDTGRNWKPYHQDGNIWAFPGNINSDGVVRHELQHPIIARYVRIVPLDWNGEGRIGLRIEVYGCSYWADVINFDGHVVLPYRFRNKKMKTLKDVIALNFKTSESEGVILHGEGQQGDYITLELKKAKLVLSLNLGSNQLGPIYGHTSVMTGSLLDDHHWHSVVIERQGRSINLTLDRSMQHFRTNGEFDYLDLDYEITFGGIPFSGKPSSSSRKNFKGCMESINYNGVNITDLARRKKLEPSNVGNLSFSCVEPYTVPVFFNATSYLEVPGRLNQDLFSVSFQFRTWNPNGLLVFSHFADNLGNVEIDLTESKVGVHINITQTKMSQIDISSGSGLNDGQWHEVRFLAKENFAILTIDGDEASAVRTNSPLQVKTGEKYFFGGFLNQMNNSSHSVLQPSFQGCMQLIQVDDQLVNLYEVAQRKPGSFANVSIDMCAIIDRCVPNHCEHGGKCSQTWDSFKCTCDETGYSGATCHNSIYEPSCEAYKHLGQTSNYYWIDPDGSGPLGPLKVYCNMTEDKVWTIVSHDLQMQTPVVGYNPEKYSVTQLVYSASMDQISAITDSAEYCEQYVSYFCKMSRLLNTPDGSPYTWWVGKANEKHYYWGGSGPGIQKCACGIERNCTDPKYYCNCDADYKQWRKDAGFLSYKDHLPVSQVVVGDTDRQGSEAKLSVGPLRCQGDRNYWNAASFPNPSSYLHFSTFQGETSADISFYFKTLTPWGVFLENMGKEDFIKLELKSATEVSFSFDVGNGPVEIVVRSPTPLNDDQWHRVTAERNVKQASLQVDRLPQQIRKAPTEGHTRLELYSQLFVGGAGGQQGFLGCIRSLRMNGVTLDLEERAKVTSGFISGCSGHCTSYGTNCENGGKCLERYHGYSCDCSNTAYDGTFCNKDVGAFFEEGMWLRYNFQAPATNARDSSSRVDNAPDQQNSHPDLAQEEIRFSFSTTKAPCILLYISSFTTDFLAVLVKPTGSLQIRYNLGGTREPYNIDVDHRNMANGQPHSVNITRHEKTIFLKLDHYPSVSYHLPSSSDTLFNSPKSLFLGKVIETGKIDQEIHKYNTPGFTGCLSRVQFNQIAPLKAALRQTNASAHVHIQGELVESNCGASPLTLSPMSSATDPWHLDHLDSASADFPYNPGQGQAIRNGVNRNSAIIGGVIAVVIFTILCTLVFLIRYMFRHKGTYHTNEAKGAESAESADAAIMNNDPNFTETIDESKKEWLI

SEQ ID NO: 281 - DNA, 525 bp, Homosapiens
atgcgacaaagtgactcggaaacacgtggattgctgcattggccatctctagacacagtcacgaacagaagctctgagggacagggccctgtagaaaccaaccggctgtcctccatgccaccaactctaaaaaggggcctgctctgtgacttccgccacgctcccacgggtggcggcgaggagcctgagccggcgatggtgctacaggaggcgctggagccggccatgtgcctggatcgctacccgcatgtgcagcttgaggcctcggagctgctgctggaagatggcggctcagccctggccactgagctcaacaccgccaagcttgccctggcctatgcaggcatggagatgaatgacttggtggtgagctgcggcctgggcctcacgccagggtccgtgcccacctggctgctggaccccatgcggctcgaggaggagcacaccgcccccggtgtcaccttggcactcctgcccatgctgaatcaggtggcccggctgctggctgcagggagggcggcctga

SEQ ID NO: 282 - protein, 174 aa, Homosapiens
MRQSDSETRGLLHWPSLDTVTNRSSEGQGPVETNRLSSMPPTLKRGLLCDFRHAPTGGGEEPEPAMVLQEALEPAMCLDRYPHVQLEASELLLEDGGSALATELNTAKLALAYAGMEMNDLVVSCGLGLTPGSVPTWLLDPMRLEEEHTAPGVTLALLPMLNQVARLLAAGRAA

SEQ ID NO: 283 - DNA, 1374 bp, Homosapiens
gagctgcaggcaacgtgatctgaattacatggaggacaagctccagctgactttccgtaaactcgcattaggattctaataggagacgacaggagcaggtggggataatgagctggcggaaggggctgcctatcacactgctcggtggcccctctttcacccccactttgcctcaggcattttctactcagctgtgaccttacttatggtgatgccaatccagtggtcaggagcgaggcgcccagcctgtgtctgaatcctcctactgaccctggggatccgtgcgacttgatcttagatattggtggtgaagcgccgctctccttgacagcatccaggaaaggtaattacctttgccaaaatgcaagtggaagttcaaagcctcagccttgaagagtgtccctggagacttccaggcccccaatgtgaatgtgaagccctcctgcccagtggggcaaggcgccggattgaccttcgcctgagtgggagggcagtcgctgtttgggtccacgttaggggcggtccaggtcaatttaacttgtcatatgccacgggaagacataagaagccaaacccacaccaaaacatgaaccgggggatggaatttattgctcctgtatcagctcccaccaaatctggtgccccgtggcattttctttctcaaggtcccacggatgcccagagagcagtcagaatcaggccaggcaccaggatgggcttgtcctcagatccagttgtcggcaccttgtcttccagttacctagatctgctaactctctcttacaagcctgggaggacagtgacaagttcatacctaaacgtacgtgggcatgaagtaagaaagctccagaattctgttgaggccacaaggatttccagaactgacagcagttaagaattttgcagaatctaagagtcacacctctaaatttgtgtagattgtgaaatctcttcttgcaagaaaaaagagaaatagctgaagttctggaaataacagttgatgaaaacttggtaatctgaagtctgaactttgaacaccagcagacaggctgagaattctctttgatcatgagcccaagttccacgtgtacctgcaggaatctgtgtggcatttgtgcactggtgtggggcccaggagaggaccacggagtgacaagccaccaggttctaaagggagacgaagatccccagaggacctggatagagatgtttccctgaccattgtctgctgtgtgctcccgatgatgagactctagagtttacaactgaaacacactgtcatttatgatattatttgtaatatctggtatgtctaagtaaaacatgcattcagtaaaactcgcgatgaaacttaaaaaaaaaaaaaaaaaaaaa

SEQ ID NO: 284 - protein, 177 aa, Homosapiens
MQVEVQSLSLEECPWRLPGPQCECEALLPSGARRRIDLRLSGRAVAVWVHVRGGPGQFNLSYATGRHKKPNPHQNMNRGMEFIAPVSAPTKSGAPWHFLSQGPTDAQRAVRIRPGTRMGLSSDPVVGTLSSSYLDLLTLSYKPGRTVTSSYLNVRGHEVRKLQNSVEATRISRTDSS

SEQ ID NO: 285 - DNA, 1505 bp, Homosapiens
gcacgaggccagcttggccagtggctccgcaggctgccggctccacccctcagggactggctggcttcgagcagggcatcggaaccaggcctcctggcactggcctgggtagagccagggcgagcaccagctgacccccagtggaaccctgtgacagtcctgccagggcccaggccatcccaaccgacttccatctcatggaccctccagcggagaagccgggagaggctggcggactgcagatcacaccccagctgctgaagtcacgcacaggcgagttctccctggagtccatcctgctactgaagctgcgtggcttgggactggctgacctgggctgcctgggagagtgcctgggcctggagtggctggacctatcaggcaacgcgctcacccacctgggcccgctggcctccttgcgccagctagctgtgctcaatgtctccaacaatcggctgacgggcctggagccactggccacctgtgagaacttgcagagtctcaatgccgcaggcaacctactggccaccccgggccagctgcagtgtctggctgggctaccgtgcctggagtacctgcggctccgagaccctttggcccggctcagcaacccgctctgtgccaacccctcctactgggctgcagtccgggagctgctgcctggcctgaaagtcatcgacggtgagcgtgtgattgggcgtggtagtgagttctaccagctgtgccgagacctggacagctccttgcgtcccagctccagtccaggccccagagccaccgaggcccagccctgggtggagccaggctactgggagtcctggcccagccggagcagctccatcctggaggaggcctgccggcagttccaggacacactgcaggagtgctgggacctggaccgccaggccagcgacagcctggcccaggcggagcaggtactcagctctgcgggccccacctcttccttcgtcttctgaacgtggcctatggcccaggacagcctggcaggtggcctcgctgcccccagttcccctctctgcccccacactcgtcttagttgcttcacactggtcactggccctgcacactgggctattgctttatccctatcctgagagcagcccctccccaccatccctccacatgctgcaaggacagactgaagggctgtgagcaggtgtaagggctcccacatccgtgagcctgtgtccgcagctgctgccactctgggctgctccagcctgcaacttagtggaaggaattacttcctcctgaggctacaggcgagaaaggtagggatgggccagcctcccgtctcagctgttgggagacagtaggcaggctgagtggcccagagcactcctggaagtgggactcccctgccttgcaaatgtgcctctccagactgctcctgcacttaccccctccccgcagcaccttctctgcccgttcttgtccacacatctattaaatgcttctgttttcaaaaaaaaaaaaaaaaaaaa

SEQ ID NO: 286 - protein, 259 aa, Homosapiens
MDPPAEKPGEAGGLQITPQLLKSRTGEFSLESILLLKLRGLGLADLGCLGECLGLEWLDLSGNALTHLGPLASLRQLAVLNVSNNRLTGLEPLATCENLQSLNAAGNLLATPGQLQCLAGLPCLEYLRLRDPLARLSNPLCANPSYWAAVRELLPGLKVIDGERVIGRGSEFYQLCRDLDSSLRPSSSPGPRATEAQPWVEPGYWESWPSRSSSILEEACRQFQDTLQECWDLDRQASDSLAQAEQVLSSAGPTSSFVF

SEQ ID NO: 287 - DNA, 2896 bp, Homosapiens
gttccaagggctgatgctgggaaccttgctctggatgcgaggcctgcccctggagggagccgcggaggactggcagctgcagatgctggagcaggccagcctgtggctgggccgtagcttcctgctggcaggcttcctggtatcgagcagctgccccagcctggagcaggcggccaagggtgagggctgttcccccatcccttgtttcgcccactgcctcgactccctggtgagaaactttctgtgtcaccctcacagtgtccagatcatcctgggcactgccagggccacctgcagccatttctaaggctctgtggaggcccagggactcctcacccagctccagcgccagcgcagcctcctagcccaccagccctttgaggagctcttggaccactgggtctcggcctaccacctgctggagtggctggtggagcagcagcagccccttcaagagtacaagggcaggcaccagctggggaaggctggtgttgccttgtcggccacattctggagcccggcagacagcctcagcaagctcctgtagcccttccagatggtggtccgcgaggcgagtgcggcacaggcctctctgagccaggtgctgccccagctgcgctacctgcacatcttcctggagcaggttcacacacactttcaggagcagagtgtcggggagaggggcgcagccatccagctggctgaggggttggcccggcagctctgcaccgactgtcagctcaacaagctcttctaccgcgaggagtttgtgctggccaccttgctggacccttgcttcaaggggaagattgaggccatcctgccatgggggccgaccgacattgaccactggaagcaagtcctcgtgtacaaggtgaaggagattagagtgtctgaatactctttgaactccccaagtcccctgcaaagccccaggggtctgtgcgtggaccccaccagggtagccaagagctccggggtggaggggagaagccagggggagcctctgcagagcagcagccactctggggccttcctgctggcccagagggagaagggcttgctggagagcatggggctgctggcctctgagagaagcgggggctcgctgtccaccaagagccactgggccagcatcattgtcaagaagtatctgtgggagaatgagaccgttggagcccaggatgaccccctggcttactgggagaagaagcgagaagcctggccaccatctatctgtcttaccccccacaggagccttctctgaaagcatctttgcctccctgaacagccccacccttgtagagcaaaactcttctctcaaggtggaagccattgagcatctcctcttcttgaaggccaacctggagcagttccccaactacaccccgcctcccctcatctgctctagtggtgacctggccaaggggatacagaccctgcagtccgctcagggtgggatggcagacatggcaggtgccggtgctcaccctgcccgtgaactcctagagagcccctgcctgtaataggtcaaagcagagagctgggtgttgcatcctgggcgccacatgctcatggccagaatcttaaacctatttggtaggaaagggtcagtttctcacttgacagattgccatatttttttttctgggagatgtcattttccatctcccgattacttcctttacgtctagcagtatgtgccgagaagaggcttactctcttcgtaggtgactgtgaattttgtactacgtggctttgtacatgtgatgctctgttaaaacataagtgggtatgaaggtccttgcatacaccttgtctgtgtggataagtggacacatgcccttaagaggcttgctttctcaaaaagtggccaaggatgtggagtgggcatgtgctggcaggtgggatatgtcctcagcctttgggggcctggataagctattgcagcactttctgaggctttcactgtagggagaaggaaaccccaagggtagaatagccatttccagagggaagtacacacatacccccacacaccagtctttttgggggtttcagagtggccggagaaaccgactgaagggactgaccagctagctaggagagctgagacgccagtcctcaaatggcgttcttaccaatagtctatttccagactactggaaacgttggggtttcttcctccagtgacagcagcctcagtagctttcctgggctccaggcggctggctgcacaccctgcctgccatcacccttgcccctgcttgtcctggaccacttttaaaggggaagtcccttatttggaagagagaaaggatgtgtgtagcacacactcatcatggattgctcagagttcctttagggcagagctgagggcctgggatccaggaaccagtgggattggatgggagaagaaggaagggggtggcccgtcacccccgcaagacttgcatccaggtagcctaaggactcctggtcactgggtagggtggctgctgagatgcaggtcggaagaggcaggggaaggctccaggcctaacttggagcatgtcactggccatgggggtgaggggacagactctgctctcactggctggcagccccaggagcctgttcccttgcctctcctggatgggttgtcagccctgtgtttcactgtgaccaattcattataacatttggatattactgaaaatgtaaggaagcaggaaaaattaactactttcattcagagatagcctctatcaatagtttgacatttttccctcttttacattgagatcataccctaggtactgtttagtatgcaatattttcattttcgcagtataataattgcacctgttaaataaagttttgtaaacatttaaaaaaaaaaaaaaaaaaaaaaaaa

SEQ ID NO: 288 - protein, 236 aa, Homosapiens
MVVREASAAQASLSQVLPQLRYLHIFLEQVHTHFQEQSVGERGAAIQLAEGLARQLCTDCQLNKLFYREEFVLATLLDPCFKGKIEAILPWGPTDIDHWKQVLVYKVKEIRVSEYSLNSPSPLQSPRGLCVDPTRVAKSSGVEGRSQGEPLQSSSHSGAFLLAQREKGLLESMGLLASERSGGSLSTKSHWASIIVKKYLWENETVGAQDDPLAYWEKKREAWPPSICLTPHRSLL

SEQ ID NO: 289 - DNA, 734 bp, Homosapiens
gcgggacggtcaggggagacctccaggcgcagggaaggacggccagggtgacacggaagcatgcgacggctgctgatccctctggccctgtggctgggtgcggtgggcgtgggcgtcgccgagctcacggaagcccagcgccggggcctgcaggtggccctggaggaatttcacaagcacccgcccgtgcagtgggccttccaggagaccagtgtggagagcgccgtggacacgcccttcccagctggaatatttgtgaggctggaatttaagctgcagcagacaagctgccggaagagggactggaagaaacccgagtgcaaagtcaggcccaatgggaggaaacggaaatgcctggcctgcatcaaactgggctctgaggacaaagttctgggccggttggtccactgccccatagagacccaagttctgcgggaggctgaggagcaccaggagacccagtgcctcagggtgcagcgggctggtgaggacccccacagcttctacttccctggacagttcgccttctccaaggccctgccccgcagctaagccagcactgagctgcgtggtgcctccaggaccgctgcgggtggtaaccagtggaagaccccagcccccagggagaggaacccgttctatccccagccatgataataaagctgctctcccaaaaaaaaaaaaaaaaaaaaaaaaaaaaaaaaaaaaaaaaaaaaaaaaaaaaaaaaaaaaaa

SEQ ID NO: 290 - protein, 163 aa, Homosapiens
MRRLLIPLALWLGAVGVGVAELTEAQRRGLQVALEEFHKHPPVQWAFQETSVESAVDTPFPAGIFVRLEFKLQQTSCRKRDWKKPECKVRPNGRKRKCLACIKLGSEDKVLGRLVHCPIETQVLREAEEHQETQCLRVQRAGEDPHSFYFPGQFAFSKALPRS

SEQ ID NO: 291 - DNA, 2954 bp, Homosapiens
cgctgtttgtccagcttctcagagttgctgtgcagctcggatgtggcataggaaacagcagacacagggagagggcagcataaggcactgtagggagcagtggccacattttctgcagaggaagaaccgatgctggaacgtcgttgcaggggccccctggccatgggcctggcccagccccgactcctttctgggccctcccaggagtcaccccagaccctggggaaggagtcccgcgggctgaggcaacaaggcacgtcagtggcccagtctggtgcccaagccccaggcagggcccatcgctgtgcccactgtcgaaggcacttccctggctgggtggctctgtggcttcacacccgccggtgccaggcccggctgcccttgccctgccctgagtgtggccgtcgctttcgccatgcccccttcttagcactgcaccgccaggtccatgctgctgccaccccagacctgggctttgcctgccacctctgtgggcagagcttccgaggctgggtggccctggttctgcatctgctggcccattcagctgcaaagcaacccatcgcttgtcccaaatgcgagagacgcttctggcgacgaaagcagcttcgagctcatctgcggcggtgccaccctcccgccccggaggcccggcccttcatatgcggcaactgtggccggagctttgcccagtgggaccagctagttgcccacaagcgggtgcacgtagctgaggccctggaggaggccgcagccaaggctctggggccccggcccaggggccgccccgcggtgaccgccccccggcccggtggagatgccgtcgaccgccccttccagtgtgcctgttgtggcaagcgcttccggcacaagcccaacttgatcgctcaccgccgcgtgcacacgggcgagcggccccaccagtgccccgagtgcgggaagcgctttaccaataagccctatctgacttcgcaccggcgcatccacaccggcgagaagccctacccgtgcaaagagtgcggccgccgcttccggcacaaacccaacctgctgtctcacagcaagattcacaagcgatccgaggggtcggcccaggccgcccccggcccggggagcccccagctgccagccggcccccaggagtccgcggccgagcccaccccggcggtacctctgaaaccggcccaggagccgccgccaggggccccgccagagcacccgcaggacccgatcgaagcccccccctccctctacagctgcgacgactgcggcaggagcttccggctggagcgcttcctgcgggcccaccagcggcacgacaccggggagcggcccttcacctgcgccgagtgcgggaagaacttcggcaagaagacgcacctggtggcgcactcgccggtgcactccggcgagcggcccttcgcctgcgaggagtgcggccgccgcttctcccagggcagccatctggcggcgcatcggccggaccacgcccccgatcggcccttcgtgtgtcccgactgcggcaaggccttccgccacaaaccctacctggcgcggcaccggcgcatccacaccggcgagaagccctacgtctgccccgactgcggcaaagccttcagccagaagtccaacctggtgtcgcaccggcgcatccacacgggcgagcggccctacgcctgtcccgactgcgaccgcagcttcagccagaagtccaacctcatcacccaccgcaagagccacatccgggacggcgccttctgctgtgccatctgtggccagaccttcgacgacgaggagagactcctggcccaccagaagaagcacgatgtctgagacggtgggcggggccgtgttggctgagagagggctggggtccttcgtggtgggagtcgcagtgggctgggggtgcctgcctagtgctggagtaggggacaatgggaatcctagaggggatggaagatgcggggagtgagctgggtgggccctgctagcgagagaggtcaaccccggtggccagggaacccacttccaagcgcagggacgccggcctccagctggtgtgtgctaaggctccgtcctgactgccctgtgccctggaaaagcagcaatacatccgccccttacagccctctggctagaggagccaccagtggaaaggaagccctccatcctctggtattaacgccttaatgcccctgtcttttactgtaagttacttagatcatttttggaagcaggcgtggtagagtcctgtaaatgaatgctctgggctagatacagcttggagaacctgctggccttgttagacagaacttgggcctttgccagcagcaagaggtgaagcgaagccactcttacctctcccttcccctcccacctgccccctgcgtaggcacccagacttggagagacccgtctgctgttaatacttccatcctcttccttcccaaagagcagatcccaaggcatttactccttggtctgtctcgctttatctgtcgcccctcccagcgctgagagcctcccctggctgtcagcagcactgtgtccaggctcttgtctgaacaccgcagcccctccttcgctccttccacagctcagcatgtcacggcaaggactgccgcattggtgatggagggccagctgaggggaagttgctggtgagtttcctttctccatttctagcatatgacacctggcctctgcttgagcacttaggtgacaggaacttccgcacctcctgaggccctggatgattctaattgttagaaattctaattgttagaaatccttccttataatgaatgaattctgctttcctataatttctacctattgggccttgttctgttctctggaactaaacagaacaaccatttacccctccttttcaaactagagaataaacatttggttttagaaaaaaaaaaaaaaaaaaaaaaaaaaaaaaaaaa

SEQ ID NO: 292 - protein, 567 aa, Homosapiens
MLERRCRGPLAMGLAQPRLLSGPSQESPQTLGKESRGLRQQGTSVAQSGAQAPGRAHRCAHCRRHFPGWVALWLHTRRCQARLPLPCPECGRRFRHAPFLALHRQVHAAATPDLGFACHLCGQSFRGWVALVLHLLAHSAAKQPIACPKCERRFWRRKQLRAHLRRCHPPAPEARPFICGNCGRSFAQWDQLVAHKRVHVAEALEEAAAKALGPRPRGRPAVTAPRPGGDAVDRPFQCACCGKRFRHKPNLIAHRRVHTGERPHQCPECGKRFTNKPYLTSHRRIHTGEKPYPCKECGRRFRHKPNLLSHSKIHKRSEGSAQAAPGPGSPQLPAGPQESAAEPTPAVPLKPAQEPPPGAPPEHPQDPIEAPPSLYSCDDCGRSFRLERFLRAHQRHDTGERPFTCAECGKNFGKKTHLVAHSPVHSGERPFACEECGRRFSQGSHLAAHRPDHAPDRPFVCPDCGKAFRHKPYLARHRRIHTGEKPYVCPDCGKAFSQKSNLVSHRRIHTGERPYACPDCDRSFSQKSNLITHRKSHIRDGAFCCAICGQTFDDEERLLAHQKKHDV

SEQ ID NO: 293 - DNA, 2878 bp, Homosapiens
gggagaaacaggggcagagtgagttggtctctggagtgactgtgcttttccaccctcagcagaggaagaaccgatgctggaacgtcgttgcagggccccctggccatgggcccggcccagccccgactcctttctgggccctcccaggagtcaccccagaccctggggaaggagtcccgcgggctgaggcaacaaggcacgtcagtggcccagtctggtgcccaagccccaggcagggcccatcgctgtgcccactgtcgaaggcacttccctggctgggtggctctgtggcttcacacccgccggtgccaggcccggctgcccttgccctgccctgagtgtggccgtcgctttcgccatgcccccttcttagcactgcaccgccaggtccatgctgctgccaccccagacctgggctttgcctgccacctctgtgggcagagcttccgaggctgggtggccctggttctgcatctgcgggcccattcagctgcaaagcggcccatcgcttgtcccaaatgcgagagacgcttctggcgacgaaagcagcttcgagctcatctgcagcggtgccaccctcccgccccggcggcccggcccttcatatgcggaaactgtggccggagctttgcccagtgggaccagctagttgcccacaagcgggtgcacgtagctgaggccctggaggaggccgcagccaaggttctggggccccggtccagggggcgccccgcggtgaccgccccccggcccggtggagatgccgtcgaccgccccttccagtgtgcctgttgtggcaagcgcttccggcacaagcccaacttgatcgctcaccgccgcgtgcacacgggcgagcggccccaccagtgccccgagtgcgggaagcgctttaccaataagccctatctgacttcgcaccggcgcatccacaccggcgagaagccctacccgtgcaaagagtgcggccgccgcttccggcacaaacccaacctgctgtctcacagcaagattcacaagcgatccgaggggtcggcccaggccgcccccggcccggggagcccccagctgccagccggcccccaggagtccgcggccgagcccaccccggcggtacctctgaaaccggcccaggagccgccgccaggggccccgccagagcacccgcaggacccgatcgaagcccccccctccctctacagctgcgacgactgcggcaggagcttccggctggagcgcttcctgcgggcccaccagcggcagcacaccggggagcggcccttcacctgcgccgagtgcgggaagaacttcggcaagaagacgcacctggtggcgcactcgcgcgtgcactccggcgagcggcccttcgcctgcgaggagtgcggccgccgcttctcccagggcagccatctggcggcgcatcggcgcgaccacgcccccgatcggcccttcgtgtgtcccgactgcggcaaggccttccgccacaaaccctacctggcggcgcaccggcgcatccacaccggcgagaagccctacgtctgccccgactgcggcaaagccttcagacagaagtccaacctggtgtcgcaccggcgcatccacacgggcgagcggtcctacgcctgtcccgactgcgaccgcagcttcagccagaagtccaacctcatcacccaccgcaagagccacatccgggacggcgccttctgctgtgccatctgtggccagaccttcgacgacgaggagagactcctggcccaccagaagaagcacgatgtctgagacggtgggcggggccgtgttggctgagagagggctggggtccttcgtggtgggagtcgcagtgggctgggggtgcctgcctagtgctggagtaggggacaatgggaatcctagaggggatggaagacgcggggagtgagctgggtgggccctgctagcgagagaggtcaaccccggtggccagggaagccacttccaagcgcagggaccgccggcctccagctggtgtgtgctaaggctccgtcctgactgccctgtgccctggaaaagcagcaatagcatccgccccttagagccctctggctagaggagccaccagtggaaaggaagaccctccatcctctggtattaacgccttaatgcccctgtcttttactgtaagttacttaagatcatttttggaagcaggctggtagagtcctgtaaatgaatgctctgggctagatacagcttggagaacctgctggccttgttagacagcacttgggcctttgccagcagcaagaggtgaagcgaagccactcttacctctcccttcccctcccacctgccccctgcgtaggcacccagacttggagagacccgtctgctgttaatacttccatcctcttccttcccaaagagcagatcccaaggcatttactccttgggtctgtctcgctttatctgtcgcccctcccagcgctgagagcctcccctggctgtcagcagcactgtgttccaggctcttgtctgaacaccgcagcccctccttcgctccttccagagctcagcatgtcacagcaaggactgccgcattggtgatggagggccagctgaggggaagttgctggtgagtttccttttctccatttctagcatatggacacctggcctctgcttgagcacttaggtgacaggaacttccgcacctcctgaggccctggatgattctaattgttagaaattctaattgttagaaatccttccttataatgaatgaattctgctttcctataatttctacctattgggccttgttctgttctctggaactaaacagaacaaccatttacccctccttttcaaactagagaataaagatttgggttttagaaaaaaa

SEQ ID NO: 294 - protein, 556 aa, Homosapiens
MGPAQPRLLSGPSQESPQTLGKESRGLRQQGTSVAQSGAQAPGRAHRCAHCRRHFPGWVALWLHTRRCQARLPLPCPECGRRFRHAPFLALHRQVHAAATPDLGFACHLCGQSFRGWVALVLHLRAHSAAKRPIACPKCERRFWRRKQLRAHLQRCHPPAPAARPFICGNCGRSFAQWDQLVAHKRVHVAEALEEAAAKVLGPRSRGRPAVTAPRPGGDAVDRPFQCACCGKRFRHKPNLIAHRRVHTGERPHQCPECGKRFTNKPYLTSHRRIHTGEKPYPCKECGRRFRHKPNLLSHSKIHKRSEGSAQAAPGPGSPQLPAGPQESAAEPTPAVPLKPAQEPPPGAPPEHPQDPIEAPPSLYSCDDCGRSFRLERFLRAHQRQHTGERPFTCAECGKNFGKKTHLVAHSRVHSGERPFACEECGRRFSQGSHLAAHRRDHAPDRPFVCPDCGKAFRHKPYLAAHRRIHTGEKPYVCPDCGKAFRQKSNLVSHRRIHTGERSYACPDCDRSFSQKSNLITHRKSHIRDGAFCCAICGQTFDDEERLLAHQKKHDV

SEQ ID NO: 295 - DNA, 2246 bp, Homosapiens
agttcccgttaaccttagccacaaagtcaaagatggcaggaaagggacacagccggcgctgatgctgggaggcctccagggatggagagtggcctggctggcaacggcacaggagctgggctggtgatgaaggtcaagcaggagaagccggagcggctgctgcagacgctggcgccgcaggccatgcttgtggagaaggacaaggagaacatctttcagcagcaccggggcctcccgccacgccagaccatggggcggcctcgagccctggggggacaggaggagtctgggagtccaaggtgggcccctcccactgagcaggatgcggggctggcaggccgggctcccgggtcagcctccggccccctgagcccctcgctttcctccggcgagggtcactttgtatgcctggactgcgggaagaggttcagctggtggtcgtccctgaagatccaccagcgcacccacaccggggagaagccgtacctctgcggcaagtgcggcaagagcttcagccagaagccgaacctggcgcgccaccagcggcaccacacgggcgagcgacccttctgctgccccgagtgcgcgcggcgcttcagccagaagcagcacctgctcaagcaccagaagacccactcccggcccgccacccactcgtgccccgagtgcgagcgctgcttccgtcaccaggtgggcctccgcatccaccagcgcgcgcacgcccgggaccgccagggctcccgcgccggcctgcacgagctgattcaggacgcggcggcgcgccgggcctgtcgcctgcagccggggccgccgcgggggcgccccgagtgggcctggctggggctctgccagggctggtggggccagcccggggcccgggccgcggtctccggcccccgaggggccgggcgagccgcgccagttcatctgcaacgagtgtggcaagagcttcacctggtggtcgtcgctgaacatccaccagcgcatccacactggcgagcgcccctatgcgtgccccgagtgcggccgccgcttcagccagaagcccaacttgacgcggcacctgcgcaaccacacaggcgagcgcccgcacccctgcccgcactgtggccgcggcttccgccagaagcagcacctgctcaagcacctgcgcacgcacctgcccggcgcccaggctgcgccctgccccagctgcggtaagagctgccgcagccgcgccgcgctgcgcgcccaccagcgcgcccacgctgtcgctgagcccgccgttccggccggggaaccgggcgaccagccgcaggccgaggccatcccgggcttggccgcgaggccgcggagctcccaacggtccccgggggcccgggacgcgctgtggggccggggacaagcgggcctcgctgggcctggcgagccgcgccagttcatctgcaacgagtgcggcaagagcttctcgtggtggtcggcgctcaccatccaccagcgcatccacacgggtgagcggccctacccgtgccccgagtgcggccgccgcttcagccagaagcccaacctgacgcggcaccggcgcaaccacacaggcgagcggccctacctgtgtcccgcctgcggccgcggcttcagccagaagcagcacctgctcaagcaccagcgcgtgcaccgcgcggcccctgcgtgcagccccaaggaggaggcgcgctagtggactggacctcagcggacccgtggtggtgcgggggatgtttgcggggtgtgtgtggggagtgggggtggccaggattgctggctcctagaaccccttagagcgggaccggtggattccttaaggctctgaagggctgagaacagttctagaagcgtcccaaagggtgctgggaaaggtcccagcgtgggttgagggaggagggaagatccgagttcctcaccgcgggccgggatgtgaccaccctcttcagaggttggaccccaggcttcaagcaccgagtgaggggtctgttggggacgctgggagagtctctggtgtgaagtggcttaggtctggactggtcagctgtggcaccagccggtcctgcccacgcttcaggatggccgggggctgcccctgtgggagagttgccaagactcggcgataccaaggatggaagccagaggctgtggcgagggagagccaagcatattcccagcaccagggccactgctggcacgtcgtagacatccaataaatatttttggaaggaaaaaaaaaaaaaaaa

SEQ ID NO: 296 - protein, 372 aa, Homosapiens
MESGLAGNGTGAGLVMKVKQEKPERLLQTLAPQAMLVEKDKENIFQQHRGLPPRQTMGRPRALGGQEESGSPRWAPPTEQDAGLAGRAPGSASGPLSPSLSSGEGHFVCLDCGKRFSWWSSLKIHQRTHTGEKPYLCGKCGKSFSQKPNLARHQRHHTGERPFCCPECARRFSQKQHLLKHQKTHSRPATHSCPECERCFRHQVGLRIHQRAHARDRQGSRAGLHELIQDAAARRACRLQPGPPRGRPEWAWLGLCQGWWGQPGARAAVSGPRGAGRAAPVHLQRVWQELHLVVVAEHPPAHPHWRAPLCVPRVRPPLQPEAQLDAAPAQPHRRAPAPLPALWPRLPPEAAPAQAPAHAPARRPGCALPQLR

SEQ ID NO: 297 - DNA, 3952 bp, Homosapiens
gaggcgctcagcacccagggaaggcgcgtgtgtccccgatgctggctcctccctgagccccgacggctctcgaggttctgagcctgtggcctgcacagggaacttcctctccgactgcatttatgcctctgtggatgtgaaggctatttctagaaatctcttcctttgcagaaacacccgaaaccctcctgccaggaagaccagggcctgggaagagggtcgctctccggccattctcccctcaccctcctcaccttcctcacatcctgtgccctgggggaccagcagctgcttccacccagaacaagcgggagcctgtgtcaggaaagcatgtcagagcagagctgccagatgtccgaactgcggctcctcctcctgggaaaatgccgctcgggaaaaagtgccacaggaaatgccattctgggcaaacatgtgttcaagtccaagttcagtgatcagacagtgatcaaaatgtgccagagagagagttgggtcctgagagaaaggaaggttgtggtaattgacacccctgaccttttctcctcaatagcttgtgctgaagacaagcaacgcaacatccaacactgcttggagctctctgctcccagcctccatgctctgctcttggtaattgccatcggccatttcacaagggaggatgaggaaacagccaagggcatccaacaagtgtttggagctgaagccaggaggcacatcattattgtcttcactcggaaggatgatttgggggatgacttgctgcaagatttcattgaaaaaaacaaacctctcaagcagttggttcaagactatgagggccgatactgcattttcaacaacaagaccaatagtaaggatgagcagatcacccaggtgttggagctccttcgcaaggttgagtctttggtgaatacgaacggaggaccctatcatgtgaacttcaaaactgaaggcagcaggtttcaagattgtgtgaatgaagctgcatctcaagagggagacaagccacagggcccaagggaaaggcagctgcagtccacaggacccgagcagaatccggggacatcagaactgacagtcctccttgtggggaaacgcggtgctggaaaaagtgcagcaggaaacagcattctggggaggcaggcctttcagaccggatttagtgagcagtcagtaacccagagcttcttgtctgagagcagaagctggagaaaaaagaaagtttcgatcattgatgctccggacatctcatctttaaagaacattgactcagaagttagaaaacacatctgtacaggcccccatgccttcctgctggtgacaccactgggcttttacactaagaatgatgaggcagtgctgagcaccatccaaaacaattttggagaaaaattctttgagtacatgatcatacttcttaccaggaaagaagatttaggggatcaggatctagatacgttcttaagaaacagcaataaagctctctatggtctcatccagaagtgtaaaaacagatatagtgccttcaactaccgggcaacaggagaagaagagcaaaggcaggcggacgagctcctggaaaaaattgagagcatggtgcatcagaatgggaacaagcattgcgttttcagagaaaaagaaaccctgaacattgtccttgtggggagaagcgggactgggaagagtgcgaccgggaactctatcctggggagcctcgtcttcacctctcggctccgggcccagccagtcaccaagaccagccagagtggcaggaggacatgggacggacaggaggtggtggttgtggacactccttccttcaaccagatgctggatgtcgaaaaggacccatcccggttagaagaggaggtcaagcgctgtttgtcctgctgtgaaaaaggggacacattttttgtcctggtgttccagctgggacgattcactgaagaggacaaaacagctgtggcgaaactggaggccatctttggagcagactttacgaaatacgcgattatgctgttcacccggaaggaagacctaggggcggggaatttggaagacttcatgaagaactcagataacaaagcccttcggcgcatttttaaaaagtgtgggcggcgagtttgtgcttttaacaacaaagaaacaggccaggcccaggaaacccaggtgaaagctcttttaacaaaggtcaatgatctgagaaaagaaagtgggtggtccgggtatccccatacacaggagaacgtcagcaaactaattaaaaatgtccaggaaatgtcccaagccgaaaaactccttaaaaatttaataggtattttacaataggtagccgaagtgcctggggtctcttcaattagagacaccctcaggttggggggaggggcggggcatggtacaacctgtgggaagggaagcgggttcatggctttgagggcctgagaggcaaatgcatcccgccttgtgatgtatcagctatttgtagataaataaattgcaggtgggggcgaatagtagggtattataaaggagaaagaagatacaaggtggggaaatctggaaaaagatttcagacattaggctgataataagtggtagaatcaagtcacaagaatcacctcacttgtgtaggtaggttggaatcaggatagacactgtgatcaaggctgaggccacctgggatgagaatatagatagtcgtacaacaacccaggggatccagatacatgagaccagggcagcgttcagcacactcctgggcatggcggaagcaggaagcagactccagagggcctccctgttgtccagggccgttggctccctgagctctcctgtctcctttgggatgcgacttagggctagagtgttcttttcttcacacgttagccattccttacggctcttcacgttccacgcctagatgtgaagtgggacatagtcttccattgctggctgtccctgaggaaacagacatgagtcttggaggttctgaatgattttattgctaattatcacagtgacatagactagaacagaaattagaagcatagtaagattgccaaaatcagagaatcttgcaaagttctgtaattctaagtgttgttctagatttcctctagagaaggttattagaatctccattgcgtttctctttctccttctctttcccttgaggttaggaaacaggttaaaactcagagaactccaataataatggtttaaaaacatcaggggcttcctgtatctcctgtcaggaagccgaggaataagcaggctggggctggtgggcgtcaacatcccagttttgttctatctttctgtcccacctgcactgggatgtggcttctacactcgaatttgcttcttggtttcaagacagtggtgttctttccatagctgagcagattattttgagaggtgggtgatatgtgagagagaaatctggaaccttcttctgggtagatacaggataagatagatacagggtaaaatgttgagcactttgtacatgctttgagagcataatctttgtcatctgtttttttcccctagacaatatcaggttaccgtcaacattaatccatttaaaaggacatggactgttgccattaatacttttggattccatataacccttaacacaataacttctagaaaatgtgtgtgccgtagacacaaagaagggaacaatagacaccagggtatacttgagggtggagggtggcaggagggtgaagattgaaaagctgcctattgcgtgttatgctggtttcctgggtgacaaaattacctgtacaccacacccctgtgacacacaacttactcatgtaacaaacctgtgcatgtaccccttgaacctgaaataaaaattggaaagtaaaaaaaagtgtgtaaatatatttagttgaatcaaataataaagatgaatcattatgaattcacaaaaaaaaaa

SEQ ID NO: 298 - protein, 665 aa, Homosapiens
MSEQSCQMSELRLLLLGKCRSGKSATGNAILGKHVFKSKFSDQTVIKMCQRESWVLRERKVVVIDTPDLFSSIACAEDKQRNIQHCLELSAPSLHALLLVIAIGHFTREDEETAKGIQQVFGAEARRHIIIVFTRKDDLGDDLLQDFIEKNKPLKQLVQDYEGRYCIFNNKTNSKDEQITQVLELLRKVESLVNTNGGPYHVNFKTEGSRFQDCVNEAASQEGDKPQGPRERQLQSTGPEQNPGTSELTVLLVGKRGAGKSAAGNSILGRQAFQTGFSEQSVTQSFLSESRSWRKKKVSIIDAPDISSLKNIDSEVRKHICTGPHAFLLVTPLGFYTKNDEAVLSTIQNNFGEKFFEYMIILLTRKEDLGDQDLDTFLRNSNKALYGLIQKCKNRYSAFNYRATGEEEQRQADELLEKIESMVHQNGNKHCVFREKETLNIVLVGRSGTGKSATGNSILGSLVFTSRLRAQPVTKTSQSGRRTWDGQEVVVVDTPSFNQMLDVEKDPSRLEEEVKRCLSCCEKGDTFFVLVFQLGRFTEEDKTAVAKLEAIFGADFTKYAIMLFTRKEDLGAGNLEDFMKNSDNKALRRIFKKCGRRVCAFNNKETGQAQETQVKALLTKVNDLRKESGWSGYPHTQENVSKLIKNVQEMSQAEKLLKNLIGILQ

SEQ ID NO: 299 - DNA, 1242 bp, Homosapiens
agacacttttaactcacagtaaaagcaaaagcaacagctcaagcagcctccttggagaaaacctgaaaattcaacttgttcaagagaaggtcttgtacgtgcctaagttctagagcctcctgacgtgagcatggctgagagtgaggaccgctccctgaggatcgttctggtagggaaaactggaagtgggaaaagtgcaacagcgaacaccatccttggagaggaaatctttgattctagaattgctgcccaagctgttaccaagaactgtcaaaaagcatcccgggaatggcaggggagagaccttcttgttgtagacactccagggctctttgacaccaaggagagcctggacaccacctgcaaggaaatcagccgctgcatcatctcctcctgcccagggccccatgctattgtcctagttctgctgctgggccgctacacagaggaggagcagaaaaccgttgcattgatcaaggctgtctttgggaagtcagccatgaagcacatggtcatcttgttcactcgcaaagaagagttggagggccagagcttccatgacttcatagcagatgcggatgtgggcctaaaaagcatcgtcaaggagtgcgggaaccgctgctgtgcctttagcaacagcaagaaaaccagtaaggcagagaaggaaagtcaagtgcaggagttggtggagctgatagagaaaatggtgcagtgcaacgaaggggcttacttttctgatgacatatacaaggacacagaggaaaggctgaaacaacgggaagaggttttgaggaaaatctacactgaccaattaaatgaagaaattaaactagtagaagaggataagcataaatcagaggaagaaaaggagaaagaaattaaattactaaaattaaaatatgatgaaaaaataaaaaatataagggaagaagctgagagaaatatatttaaagatgtttttaataggatttggaagatgctttcagaaatatggcataggtttttgtcgaaatgtaagttttattcttcctaatttactgtgatttgttaatggatgaattgtattttgcaaagatagttagagaaatacctccttccccttagctttattaaggtatcattgataaataaaaataaaatatgtttaatgtatataatgtgatttttaaatatatatatatatatacacacattgtgaaataatgaaataaaggtaattaacacatctaaaaaaaaaaaaaa

SEQ ID NO: 300 - protein, 300 aa, Homosapiens
MAESEDRSLRIVLVGKTGSGKSATANTILGEEIFDSRIAAQAVTKNCQKASREWQGRDLLVVDTPGLFDTKESLDTTCKEISRCIISSCPGPHAIVLVLLLGRYTEEEQKTVALIKAVFGKSAMKHMVILFTRKEELEGQSFHDFIADADVGLKSIVKECGNRCCAFSNSKKTSKAEKESQVQELVELIEKMVQCNEGAYFSDDIYKDTEERLKQREEVLRKIYTDQLNEEIKLVEEDKHKSEEEKEKEIKLLKLKYDEKIKNIREEAERNIFKDVFNRIWKMLSEIWHRFLSKCKFYSS

SEQ ID NO: 301 - DNA, 1983 bp, Homosapiens
gtttctcaacatcctggcttagtattgtgtgcaaaatcagagaggggtgcaagatcctgatttttcaggagttcaagcgacaatggcagcccaatacggcagtatgagcttcaaccccagcacaccaggggccagttatgggcctggaaggcaagagcccagaaattcccaattgagaattgtgttagtgggtaaaaccggagcaggaaaaagtgcaacaggaaacagcatccttggccggaaagtgtttcattctggcactgcagcaaaatccattaccaagaagtgtgagaaacgcagcagctcatggaaggaaacagaacttgtcgtagttgacacaccaggcattttcgacacagaggtgcccaatgctgaaacgtccaaggagattattcgctgcattcttctgacctccccagggcctcatgctctgcttctggtggttccactgggccgttacactgaggaagagcacaaagccacagagaagatcctgaaaatgtttggagagagggctagaagtttcatgattctcatattcacccggaaagatgacttaggtgacaccaatttgcatgactacttaagggaagctccagaagacattcaagacttgatggacattttcggtgaccgctactgtgcgttaaacaacaaggcaacaggcgctgagcaggaggcccagagggcacagttgctgggcctgatccagcgcgtggtgagggagaacaaggaaggctgctacactaataggatgtaccaaagggcggaggaggagatccagaagcaaacacaagcaatgcaagaactccacagagtggagctggagagagagaaagcgcggataagagaggagtatgaagagaaaatcagaaagctggaagataaagtggagcaggaaaagagaaagaagcaaatggagaagaaactagcagaacaggaggctcactatgctgtaaggcagcaaagggcaagaacggaagtggagagtaaggatgggatacttgaattaatcatgacagcgttacagattgcttcctttattttgttacgtctgttcgcggaagattaaacttaatgaaaatctgtttgtattttctgcatattctctggcaaccttgccccatacttacttatttagcatagtcgagtgctctagtttctgtctctcaggcactcgtaactaaggaccaccattggccattggtagatgtttgattgacttaacaagagagggacaaattttcaatttgtgaaactccaaagcagaaagtattggtgcttgctaccttgtgaattcttccttagacatgcagagaaaatgtatgcaagagaccaaaaagatggctccaagctatgtcatgttacctgtaataaaatcttttcttctagattctttctatgttggcagataatctccccttgtagcttccactcacttattcttgcattcagagtcacaatgatcatcttacccatgtggtttttgagaaagaaagatcaattctttgtttgcagtaggtaatcttagagatggagatgattgtagaattattcctagatgagtgtcaatttatttaattccattgtcatataaggagtcaaattgtttcttatcatttgttcattgaagaacagagacctgtctggaaaatcgatctctacaaattcaattaaataatgatccccaaatgctgaaaaagtgaaatacagcaattcaacagataatagagcaatgtttagtatattcagctgtatctgtagaaactctttgacgaacctcaatttaaccaatttgatgaatacccagttctcttcttttctagagaaagatagttgcaacctcacctccctcactcaacactttgaatacttattgtttggcaggtcatccacacacttctgcccccactgcattgaattttttgcttatgttgtttataataaaacttttcaattatctcaaaaaaaaaaaaaaaaaaa

SEQ ID NO: 302 - protein, 329 aa, Homosapiens
MAAQYGSMSFNPSTPGASYGPGRQEPRNSQLRIVLVGKTGAGKSATGNSILGRKVFHSGTAAKSITKKCEKRSSSWKETELVVVDTPGIFDTEVPNAETSKEIIRCILLTSPGPHALLLVVPLGRYTEEEHKATEKILKMFGERARSFMILIFTRKDDLGDTNLHDYLREAPEDIQDLMDIFGDRYCALNNKATGAEQEAQRAQLLGLIQRVVRENKEGCYTNRMYQRAEEEIQKQTQAMQELHRVELEREKARIREEYEEKIRKLEDKVEQEKRKKQMEKKLAEQEAHYAVRQQRARTEVESKDGILELIMTALQIASFILLRLFAED

SEQ ID NO: 303 - DNA, 1523 bp, Homosapiens
ctttctttttctcttggagctgagctataagacaacaggactgaacagggagccaactgtttctttgaacagtaaatcaggaacaccaatggaccaaaatgaacacagtcactggggaccacatgcaaagggccaatgtgccagcagatctgagctgagaatcatcctggtgggcaaaacaggaactggcaaaagtgctgcagggaacagcatcctcaggaagcaagcatttgaatcgaagctgggttcccagaccttgactaagacttgcagcaaaagtcagggaagctggggaaatagagagattgtcattattgacacaccagatatgttttcttggaaggaccactgtgaagctctgtacaaagaggtgcagaggtgctacttgctgtctgcaccaggaccccatgtgctgctcctggtgactcagctgggccgctatacctcacaggaccagcaggctgcacagagggtgaaggagatctttggagaggatgccatgggacacacaattgtcctctttacccacaaggaagacctcaatggtggctccctgatggattacatgcacgactcagataacaaagccctaagcaagctggtggcagcatgtggtgggcgaatctgtgcctttaataaccgtgctgaagggagcaatcaggatgaccaagtgaaggaactaatggactgtattgaggatctgttgatggagaaaaatggtgatcactataccaatgggttgtacagcctaatacagaggtctaaatgtggacctgtgggatcagatgaaagagtaaaggaattcaaacagagccttataaagtacatggaaactcaaagaagttacacagccttggctgaagcaaactgcctaaaaggagccttaatcaaaacacaactgtgtgttttattttgtattcagttgtttctcagattgataattctgtggctttgcatactgcacagcatgtgcaatttgttttgttgcttactctttagtatgtgcaatttattctgcagtttgctgtttattatacccaaaaagttaatgatatttttgagaacagttattagactagaacgcaagactcctaggttatagttacagatcccagttattatttactcactatcatttagtgggtgaatcacagtaatttccctgtaaaatgtggtacctgaagtcatatttgagattctatgaaatgtttaaatctgaacatcactccaattattaatgaaccaaatcatacgataagttactgtttgcattgaaatataatatcaaagccttttgaaatctgtaaacataaaattcctctcattttcaaatatctaaagccagttttatgttcctaaaatctcattttcttctttctagtactactatttctactgaatataatgaaaatggcaataaaataatattacataaactgtaaaaaaaaaaaaaaaaaaaaaaaaaaaaaaaaaaaaaaaaaaaaaaaaaaaaaaaaaaaaaaaaaaaaaaaaaaaaaaaaaaa

SEQ ID NO: 304 - protein, 337 aa, Homosapiens
MDQNEHSHWGPHAKGQCASRSELRIILVGKTGTGKSAAGNSILRKQAFESKLGSQTLTKTCSKSQGSWGNREIVIIDTPDMFSWKDHCEALYKEVQRCYLLSAPGPHVLLLVTQLGRYTSQDQQAAQRVKEIFGEDAMGHTIVLFTHKEDLNGGSLMDYMHDSDNKALSKLVAACGGRICAFNNRAEGSNQDDQVKELMDCIEDLLMEKNGDHYTNGLYSLIQRSKCGPVGSDERVKEFKQSLIKYMETQRSYTALAEANCLKGALIKTQLCVLFCIQLFLRLIILWLCILHSMCNLFCCLLFSMCNLFCSLLFIIPKKLMIFLRTVIRLERKTPRL

SEQ ID NO: 305 - DNA, 1248 bp, Homosapiens
agccttctgcactcacagccgaagggaaagcagcaggttggggcttcttgtggccaacttcagagcctgtcaccaggaaaggtaagcatgggaggaaggaagatggcgacagatgaagaaaatgtctatggtttagaagagaacgctcagtcccggcaggagtccacgcggaggctcatccttgttgggagaacaggggccgggaagagcgccactgggaacagcatcctgggccagagacggttcttctccaggctgggggccacgtctgtgaccagggcctgcaccacgggcagccgcaggtgggacaagtgccacgtggaagtcgtggacactccggacattttcagctcccaagtgtccaagacagatcctggctgtgaggagagaggtcactgctacctgctctcggcccccggaccccacgcgctgctcctggtgacccagttgggtcggttcaccgcccaggaccagcaggcggtgaggcaggtgagggacatgttcggggaggacgtcctaaaatggatggtcatcgtcttcaccaggaaggaggacctggccgggggctccctgcacgattacgtgagcaacacagagaaccgggccttgcgcgagctggtggccgagtgcgggggccgggtctgtgcctttgataaccgggccaccggccgggagcaggaagcccaggtggagcagctgctggggatggtcgagggcttggtgctggagcacaagggcgcccattactccaacgaggtgtatgagctggcgcaggtgctgcgctgggcaggccctgaggagcggctccggcgggtggcggagcgcgtggcagccagggtgcagaggaggccatggggcgcctggctgtcggcccggctgtggaagtggctgaagtcccccaggagctggaggctgggcctggccctgctgctggggggcgcgctcctgttctgggtgctgctccacaggcggtggtcggaggccgttgcggaggtcgggcctgactgacagcgcaggtcctaaaactgaaggcaacttggttaagggaggctgaattcttggagctgaagggaaaacttcattccaacggaaggaatcctgtagtttcaggcatagttttaatgacacagaaaactttgctgcatcacctttgcaactttgccaaagctcagagttcactttttaagtttttaactcattttaaatgatgtgtatgcagagttttaaaataaattcgtctaacaataa

SEQ ID NO: 306 - protein, 306 aa, Homosapiens
MGGRKMATDEENVYGLEENAQSRQESTRRLILVGRTGAGKSATGNSILGQRRFFSRLGATSVTRACTTGSRRWDKCHVEVVDTPDIFSSQVSKTDPGCEERGHCYLLSAPGPHALLLVTQLGRFTAQDQQAVRQVRDMFGEDVLKWMVIVFTRKEDLAGGSLHDYVSNTENRALRELVAECGGRVCAFDNRATGREQEAQVEQLLGMVEGLVLEHKGAHYSNEVYELAQVLRWAGPEERLRRVAERVAARVQRRPWGAWLSARLWKWLKSPRSWRLGLALLLGGALLFWVLLHRRWSEAVAEVGPD

SEQ ID NO: 307 - DNA, 1861 bp, Homosapiens
ccgttaaggaagcagcacatcgctgcattcggctggttttcagggtcttgttcccaatcagtttccagccaacaccagggtgtcctagtccgcagaggtgtgggggacacactccataatctctacttttctttttgtgcagctgagtcatggagctttcagccccagcacatggctcctccttaactgcgtctgctcaacctccctcagccctgtgaacagcatccccgcacacagacgcagagcaggactctctctgctgccacttcaccttcctgagagaggaccagcggccagagcctcagtgactgccaccctggaggacagggcacaacaaccgtttctggagagaatgggaggattccagaggggcaaatatggaactatggctgaaggtagatcagaagataacttgtctgcaacaccaccggcattgaggattatcctagtgggcaaaacaggctgcgggaaaagtgccacagggaacagcatccttggccagcccgtgtttgagtccaagctgagggcccagtcagtgaccaggacgtgccaggtgaaaacaggaacatggaacgggaggaaagtcctggtggttgacacgccctccatctttgagtcacaggccgatacccaagagctgtacaagaacatcggggactgctacctgctctctgccccggggccccacgtcctgcttctggtgatccagctggggcgtttcactgctcaggacacagtggccatcaggaaggtgaaagaggtctttgggacaggggccatgagacatgtggtcatcctcttcacccacaaagaggacttagggggccaggccctggatgactatgtagcaaacacggacaactgcagcctgaaagacctggtgcgggagtgtgagagaaggtactgtgccttcaacaactggggctctgtggaggagcagaggcagcagcaggcagagctcctggctgtgattgagaggctggggagggagcgagagggctccttccacagcaatgacctcttcttggatgcccagctgctccaaagaactggagctggggcctgccaggaagactacaggcagtaccaggccaaagtggaatggcaggtggagaagcacaagcaagagctgagggagaacgagagtaactgggcatacaaggcgctcctcagagtcaaacacttgatgcttttgcattatgagatttttgtttttctattgttgtgcagcatactttttttcattatttttctgttcatctttcattacatttaaatctctggaccctggagcacttctaatgtatcaccccatggagtcattgttctaataatcaccaattcagactcagatcctcgtggtctatggagcatgctgcttgctgtctgtgcagctcccatttccccttcttcctgatagacttggagctgtgtgcctccactccaaggctgcctgcctgctgtaaacactattccactctgtctgccaacaactgcttcaggaatgggcctgagatcccatgcaggtccctgagaagtgagtaaaagtccgcagaggtggggatggaagatctctccttagatagaacctgtcttcctccctggcattgtggggtctgggcgtgacactgggactctcagcagctttgtgctgccaacctgagattgaaggcagtgcctcagagcagcacagagagttggggccccctgagccctgagccaccagccctgcagcctgccctatctccgcatttccagttgtattagccaatagatttcctacttatttaagctatttgagctccgggtctcttctacctgcattctaaaacattcaaagtaataaaaatttctccacatt

SEQ ID NO: 308 - protein, 307 aa, Homosapiens
MGGFQRGKYGTMAEGRSEDNLSATPPALRIILVGKTGCGKSATGNSILGQPVFESKLRAQSVTRTCQVKTGTWNGRKVLVVDTPSIFESQADTQELYKNIGDCYLLSAPGPHVLLLVIQLGRFTAQDTVAIRKVKEVFGTGAMRHVVILFTHKEDLGGQALDDYVANTDNCSLKDLVRECERRYCAFNNWGSVEEQRQQQAELLAVIERLGREREGSFHSNDLFLDAQLLQRTGAGACQEDYRQYQAKVEWQVEKHKQELRENESNWAYKALLRVKHLMLLHYEIFVFLLLCSILFFIIFLFIFHYI

SEQ ID NO: 309 - DNA, 1357 bp, Homosapiens
ctcccagggccctggcgtctgggtcaagcagcgccccacacctcgacccctcaccccctcctcccgggctcttcctgcggcctcccctccacagtccgcaggctctgggacaggaccgagtccttggctgcctgtggagctcctgtgccagcagctgcgccccggctgcgctccggatacccccatccccgccaccgccgacctcccgctccaccgactgctgctcacgcccgacgggttcacgccgcccctgccccgtgaaggaccgcgctgcggtgcggaggcaggatgacgcaaaacacggtgattgtgaatggagttgctatggcctctaggccatcccagcccacccacgtcaacgtccacatccaccaggagtcagctttgacacaactgctgaaagctggaggttctctgaagaagtttctttttcaccctggggacactgtgccttccacagccaggattggttatgagcagctggctctaggggtgactcagatattgctgggggttgtgagttgtgttcttggagtgtgtctcagcttggggccctggactgtgctgcgtgcctcaggctgtgccttctgggcggggtctgtggtgatcgcagcaggagctggggccattgtccatgagaagcacccgggcaaacttgctggctatatatccagcctgctcaccctgacaggctttgctacagctatggctgctgttgtcctctgcgtgaatagcttcatctggcaaactgaaccctttttatacatcgacactgtgtgtgatcgctcagaccctgtcttccctaccactgggtacagatggatgcggcgaagtcaagagaaccaatggcagaaggaggagtgtagagcttacatgcagatgctgaggaagttgttcacagcaatccgtgccctgttcctggctgtctgtgtcttgaaggtcattgtgtccttggtttccttgggagtaggtcttcgaaacttgtgtggccagagctcccagcccctgaatgaggaaggatcagagaagaggctactgggggagaattcagtgcccccttcgccctctagggagcagacctccactgccattgtcctgtgagccgccaaagaccccacggggtgcccgcatgtccctgtctagggcagcccagggcccccactcctggctcctcacacttgcctcccctatggccgctctccagaccctcctcctttcttctccccacatccgcacctgctgttcccactctggggttctcaagtccatgaacagatattgttgcattttccacaatgctgattaaacataataaacaatccagaaaagcaaaaaaaaaaaaaaaaaaaaaaaaaaa

SEQ ID NO: 310 - protein, 270 aa, Homosapiens
MTQNTVIVNGVAMASRPSQPTHVNVHIHQESALTQLLKAGGSLKKFLFHPGDTVPSTARIGYEQLALGVTQILLGVVSCVLGVCLSLGPWTVLRASGCAFWAGSVVIAAGAGAIVHEKHPGKLAGYISSLLTLTGFATAMAAVVLCVNSFIWQTEPFLYIDTVCDRSDPVFPTTGYRWMRRSQENQWQKEECRAYMQMLRKLFTAIRALFLAVCVLKVIVSLVSLGVGLRNLCGQSSQPLNEEGSEKRLLGENSVPPSPSREQTSTAIVL

SEQ ID NO: 311 - DNA, 1047 bp, Homosapiens
cccacttctccagccagcgccccagccctcccgccgcccgctcgcaggtcccgaggagcgcagactgtgtccctgacaatgggaacagccgacagtgatgagatggccccggaggccccacagcacacccacatcgatgtgcacatccaccaggagtctgccctggccaagctcctgctcacctgctgctctgcgctgcggccccgggccacccaggccaggggcagcagccggctgctggtggcctcgtgggtgatgcagatcgtgctggggatcttgagtgcagtcctaggaggatttttctacatccgcgactacaccctcctcgtcacctcgggagctgccatctggacaggggctgtggctgtgctggctggagctgctgccttcatttacgagaaacggggtggtacatactgggccctgctgaggactctgctaacgctggcagctttctccacagccatcgctgccctcaaactttggaatgaagatttccgatatggctactcttattacaacagtgcctgccgcatctccagctcgagtgactggaacactccagcccccactcagagtccagaagaagtcagaaggctacacctatgtacctccttcatggacatgctgaaggccttgttcagaacccttcaggccatgctcttgggtgtctggattctgctgcttctggcatctctgacccctctgtggctgtactgctggagaatgttcccaaccaaagggaaaagagaccagaaggaaatgttggaagtgagtggaatctagccatgcctctcctgattattagtgcctggtgcttctgcaccgggcgtccctgcatctgactgctggaagaagaaccagactgaggaaaagaggctcttcaacagccccagttatcctggccccatgaccgtggccacagccctgctccagcagcacttgcccattccttacaccccttccccatcctgctccgcttcatgtcccctcctgagtagtcatgtgataataaactctcatgttattgttcccaggaaaaaaaaa

SEQ ID NO: 312 - protein, 235 aa, Homosapiens
MGTADSDEMAPEAPQHTHIDVHIHQESALAKLLLTCCSALRPRATQARGSSRLLVASWVMQIVLGILSAVLGGFFYIRDYTLLVTSGAAIWTGAVAVLAGAAAFIYEKRGGTYWALLRTLLTLAAFSTAIAALKLWNEDFRYGYSYYNSACRISSSSDWNTPAPTQSPEEVRRLHLCTSFMDMLKALFRTLQAMLLGVWILLLLASLTPLWLYCWRMFPTKGKRDQKEMLEVSGI

SEQ ID NO: 313 - DNA, 3900 bp, Homosapiens
ccatgggctcaggatgccggtgcggaggggccacgtcgcgccgcagaacaccttcctggacaccatcatccgcaagtttgagggccagagccgtaagttcatcatcgccaacgctcgggtggagaactgcgccgtcatctactgcaacgacggcttctgcgagctgtgcggctactcgcgggccgaggtgatgcagcgaccctgcacctgcgacttcctgcacgggccgcgcacgcagcgccgcgctgccgcgcagatcgcgcaggcactgctgggcgccgaggagcgcaaagtggaaatcgccttctaccggaaagatgggagctgcttcctatgtctggtggatgtggtgcccgtgaagaacgaggatggggctgtcatcatgttcatcctcaatttcgaggtggtgatggagaaggacatggtggggtccccggctcatgacaccaaccaccggggcccccccaccagctggctggccccaggccgcgccaagaccttccgcctgaagctgcccgcgctgctggcgctgacggcccgggagtcgtcggtgcggtcgggcggcgcgggcggcgcgggcgccccgggggccgtggtggtggacgtggacctgacgcccgcggcacccagcagcgagtcgctggccctggacgaagtgacagccatggacaaccacgtggcagggctcgggcccgcggaggagcggcgtgcgctggtgggtcccggctctccgccccgcagcgcgcccggccagctcccatcgccccgggcgcacagcctcaaccccgacgcctcgggctccagctgcagcctggcccggacgcgctcccgagaaagctgcgccagcgtgcgccgcgcctcgtcggccgacgacatcgaggccatgcgcgccggggtgctgcccccgccaccgcgccacgccagcaccggggccatgcacccactgcgcagcggcttgctcaactccacctcggactccgacctcgtgcgctaccgcaccattagcaagattccccaaatcaccctcaactttgtggacctcaagggcgaccccttcttggcttcgcccaccagtgaccgtgagatcatagcacctaagataaaggagcgaacccacaatgtcactgagaaggtcacccaggtcctgtccctgggcgccgacgtgctgcctgagtacaagctgcaggcaccgcgcatccaccgctggaccatcctgcattacagccccttcaaggccgtgtgggactggctcatcctgctgctggtcatctacacggctgtcttcacaccctactcggctgccttcctgctgaaggagacggaagaaggcccgcctgctaccgagtgtggctacgcctgccagccgctggctgtggtggacctcatcgtggacatcatgttcattgtggacatcctcatcaacttccgcaccacctacgtcaatgccaacgaggaggtggtcagccaccccggccgcatcgccgtccactacttcaagggctggttcctcatcgacatggtggccgccatccccttcgacctgctcatcttcggctctggctctgaggagctgatcgggctgctgaagactgcgcggctgctgcggctggtgcgcgtggcgcggaagctggatcgctactcagagtacggcgcggccgtgctgttcttgctcatgtgcacctttgcgctcatcgcgcactggctagcctgcatctggtacgccatcggcaacatggagcagccacacatggactcacgcatcggctggctgcacaacctgggcgaccagataggcaaaccctacaacagcagcggcctgggcggcccctccatcaaggacaagtatgtgacggcgctctacttcaccttcagcagcctcaccagtgtgggcttcggcaacgtctctcccaacaccaactcagagaagatcttctccatctgcgtcatgctcattggctccctcatgtatgctagcatcttcggcaacgtgtcggccatcatccagcggctgtactcgggcacagcccgctaccacacacagatgctgcgggtgcgggagttcatccgcttccaccagatccccaatcccctgcgccagcgcctcgaggagtacttccagcacgcctggtcctacaccaacggcatcgacatgaacgcggtgctgaagggcttccctgagtgcctgcaggctgacatctgcctgcacctgaaccgctcactgctgcagcactgcaaacccttccgaggggccaccaagggctgccttcgggccctggccatgaagttcaagaccacacatgcaccgccaggggacacactggtgcatgctggggacctgctcaccgccctgtacttcatctcccggggctccatcgagatcctgcggggcgacgtcgtcgtggccatcctggggaagaatgacatctttggggagcctctgaacctgtatgcaaggcctggcaagtcgaacggggatgtgcgggccctcacctactgtgacctacacaagatccatcgggacgacctgctggaggtgctggacatgtaccctgagttctccgaccacttctggtccagcctggagatcaccttcaacctgcgagataccaacatgatcccgggctcccccggcagtacggagttagagggtggcttcagtcggcaacgcaagcgcaagttgtccttccgcaggcgcacggacaaggacacggagcagccaggggaggtgtcggccttggggccgggccgggcgggggcagggccgagtagccggggccggccgggggggccgtggggggagagcccgtccagtggcccctccagccctgagagcagtgaggatgagggcccaggccgcagctccagccccctccgcctggtgcccttctccagccccaggccccccggagagccgccgggtggggagcccctgatggaggactgcgagaagagcagcgacacttgcaaccccctgtcaggcgccttctcaggagtgtccaacattttcagcttctggggggacagtcggggccgccagtaccaggagctccctcgatgccccgcccccacccccagcctcctcaacatccccctctccagcccgggtcggcggccccggggcgacgtggagagcaggctggatgccctccagcgccagctcaacaggctggagacccggctgagtgcagacatggccactgtcctgcagctgctacagaggcagatgacgctggtcccgcccgcctacagtgctgtgaccaccccggggcctggccccacttccacatccccgctgttgcccgtcagccccctccccaccctcaccttggactcgctttctcaggtttcccagttcatggcgtgtgaggagctgcccccgggggccccagagcttccccaagaaggccccacacgacgcctctccctaccgggccagctgggggccctcacctcccagcccctgcacagacacggctcggacccgggcagttagtggggctgcccagtgtggacacgtggctcacccagggatcaaggcgctgctgggccgctccccttggaggccctgctcaggaggccctgaccgtggaaggggagaggaactcgaaagcacagctcctcccccagcccttgggaccatcttctcctgcagtcccctgggccccagtgagaggggcaggggcagggccggcagtaggtggggcctgtggtccccccactgccctgagggcattagctggtctaactgcccggaggcacccggccctgggccttaggcacctcaaggacttttctgctatttactgctcttattgttaaggataataattaaggatcatatgaataattaatgaagatgctgatgactatgaataataaataattatcctgaggagaaaa

SEQ ID NO: 314 - protein, 1159 aa, Homosapiens
MPVRRGHVAPQNTFLDTIIRKFEGQSRKFIIANARVENCAVIYCNDGFCELCGYSRAEVMQRPCTCDFLHGPRTQRRAAAQIAQALLGAEERKVEIAFYRKDGSCFLCLVDVVPVKNEDGAVIMFILNFEVVMEKDMVGSPAHDTNHRGPPTSWLAPGRAKTFRLKLPALLALTARESSVRSGGAGGAGAPGAVVVDVDLTPAAPSSESLALDEVTAMDNHVAGLGPAEERRALVGPGSPPRSAPGQLPSPRAHSLNPDASGSSCSLARTRSRESCASVRRASSADDIEAMRAGVLPPPPRHASTGAMHPLRSGLLNSTSDSDLVRYRTISKIPQITLNFVDLKGDPFLASPTSDREIIAPKIKERTHNVTEKVTQVLSLGADVLPEYKLQAPRIHRWTILHYSPFKAVWDWLILLLVIYTAVFTPYSAAFLLKETEEGPPATECGYACQPLAVVDLIVDIMFIVDILINFRTTYVNANEEVVSHPGRIAVHYFKGWFLIDMVAAIPFDLLIFGSGSEELIGLLKTARLLRLVRVARKLDRYSEYGAAVLFLLMCTFALIAHWLACIWYAIGNMEQPHMDSRIGWLHNLGDQIGKPYNSSGLGGPSIKDKYVTALYFTFSSLTSVGFGNVSPNTNSEKIFSICVMLIGSLMYASIFGNVSAIIQRLYSGTARYHTQMLRVREFIRFHQIPNPLRQRLEEYFQHAWSYTNGIDMNAVLKGFPECLQADICLHLNRSLLQHCKPFRGATKGCLRALAMKFKTTHAPPGDTLVHAGDLLTALYFISRGSIEILRGDVVVAILGKNDIFGEPLNLYARPGKSNGDVRALTYCDLHKIHRDDLLEVLDMYPEFSDHFWSSLEITFNLRDTNMIPGSPGSTELEGGFSRQRKRKLSFRRRTDKDTEQPGEVSALGPGRAGAGPSSRGRPGGPWGESPSSGPSSPESSEDEGPGRSSSPLRLVPFSSPRPPGEPPGGEPLMEDCEKSSDTCNPLSGAFSGVSNIFSFWGDSRGRQYQELPRCPAPTPSLLNIPLSSPGRRPRGDVESRLDALQRQLNRLETRLSADMATVLQLLQRQMTLVPPAYSAVTTPGPGPTSTSPLLPVSPLPTLTLDSLSQVSQFMACEELPPGAPELPQEGPTRRLSLPGQLGALTSQPLHRHGSDPGS

SEQ ID NO: 315 - DNA, 3164 bp, Homosapiens
ccatgggctcaggatgccggtgcggaggggccacgtcgcgccgcagaacaccttcctggacaccatcatccgcaagtttgagggccagagccgtaagttcatcatcgccaacgctcgggtggagaactgcgccgtcatctactgcaacgacggcttctgcgagctgtgcggctactcgcgggccgaggtgatgcagcgaccctgcacctgcgacttcctgcacgggccgcgcacgcagcgccgcgctgccgcgcagatcgcgcaggcactgctgggcgccgaggagcgcaaagtggaaatcgccttctaccggaaagatgggagctgcttcctatgtctggtggatgtggtgcccgtgaagaacgaggatggggctgtcatcatgttcatcctcaatttcgaggtggtgatggagaaggacatggtggggtccccggctcatgacaccaaccaccggggcccccccaccagctggctggccccaggccgcgccaagaccttccgcctgaagctgcccgcgctgctggcgctgacggcccgggagtcgtcggtgcggtcgggcggcgcgggcggcgcgggcgccccgggggccgtggtggtggacgtggacctgacgcccgcggcacccagcagcgagtcgctggccctggacgaagtgacagccatggacaaccacgtggcagggctcgggcccgcggaggagcggcgtgcgctggtgggtcccggctctccgccccgcagcgcgcccggccagctcccatcgccccgggcgcacagcctcaaccccgacgcctcgggctccagctgcagcctggcccggacgcgctcccgagaaagctgcgccagcgtgcgccgcgcctcgtcggccgacgacatcgaggccatgcgcgccggggtgctgcccccgccaccgcgccacgccagcaccggggccatgcacccactgcgcagcggcttgctcaactccacctcggactccgacctcgtgcgctaccgcaccattagcaagattccccaaatcaccctcaactttgtggacctcaagggcgaccccttcttggcttcgcccaccagtgaccgtgagatcatagcacctaagataaaggagcgaacccacaatgtcactgagaaggtcacccaggtcctgtccctgggcgccgacgtgctgcctgagtacaagctgcaggcaccgcgcatccaccgctggaccatcctgcattacagccccttcaaggccgtgtgggactggctcatcctgctgctggtcatctacacggctgtcttcacaccctactcggctgccttcctgctgaaggagacggaagaaggcccgcctgctaccgagtgtggctacgcctgccagccgctggctgtggtggacctcatcgtggacatcatgttcattgtggacatcctcatcaacttccgcaccacctacgtcaatgccaacgaggaggtggtcagccaccccggccgcatcgccgtccactacttcaagggctggttcctcatcgacatggtggccgccatccccttcgacctgctcatcttcggctctggctctgaggagctgatcgggctgctgaagactgcgcggctgctgcggctggtgcgcgtggcgcggaagctggatcgctactcagagtacggcgcggccgtgctgttcttgctcatgtgcacctttgcgctcatcgcgcactggctagcctgcatctggtacgccatcggcaacatggagcagccacacatggactcacgcatcggctggctgcacaacctgggcgaccagataggcaaaccctacaacagcagcggcctgggcggcccctccatcaaggacaagtatgtgacggcgctctacttcaccttcagcagcctcaccagtgtgggcttcggcaacgtctctcccaacaccaactcagagaagatcttctccatctgcgtcatgctcattggctccctcatgtatgctagcatcttcggcaacgtgtcggccatcatccagcggctgtactcgggcacagcccgctaccacacacagatgctgcgggtgcgggagttcatccgcttccaccagatccccaatcccctgcgccagcgcctcgaggagtacttccagcacgcctggtcctacaccaacggcatcgacatgaacgcggtgctgaagggcttccctgagtgcctgcaggctgacatctgcctgcacctgaaccgctcactgctgcagcactgcaaacccttccgaggggccaccaagggctgccttcgggccctggccatgaagttcaagaccacacatgcaccgccaggggacacactggtgcatgctggggacctgctcaccgccctgtacttcatctcccggggctccatcgagatcctgcggggcgacgtcgtcgtggccatcctgggtatggggtggggggcgggcactggactggaaatgccctctgcagcctcaagaggtgcgagccttctgaatatgcagtcactggggctgtggacctgggactgcctgcagggtcactgggctcctttaattcacctaaactcaggccctccaagcggggccatggagaggagccccacgtggggtgaggctgctgaactctggggttcccacattctccttcccttcaggatccgccacaaacagacactttttgcttccttaaagtaggatcaaatctagatcctctagcctgggcagtagaggaagaaatgctagcctggaagctcggcatttggtttcactaagggccatgtggttccctgcagcctcatgcctggccccttgacacatccaaagcaaagggagtcctgccccctccccccacttcctttctaccctgcctgtgcacagtgggtgggttggtgtgtctggacactgaggacttcctccccctttgcctgtccttccctcggccctgtgtgcctcagggcagatatagcaagctctttcgaccatagttgatggtaggacattttagactttgtttctcagctctgtacaaacacaaatacacacccccacaaaactaaaatcaaagtttcactacataacactgggccttactgcatgtggttcattctagcatttctgttctgtgctgtgctaagctatactactgtatgttctttcagtaaaaaaaaaaaaaaaaaaa

SEQ ID NO: 316 - protein, 888 aa, Homosapiens
MPVRRGHVAPQNTFLDTIIRKFEGQSRKFIIANARVENCAVIYCNDGFCELCGYSRAEVMQRPCTCDFLHGPRTQRRAAAQIAQALLGAEERKVEIAFYRKDGSCFLCLVDVVPVKNEDGAVIMFILNFEVVMEKDMVGSPAHDTNHRGPPTSWLAPGRAKTFRLKLPALLALTARESSVRSGGAGGAGAPGAVVVDVDLTPAAPSSESLALDEVTAMDNHVAGLGPAEERRALVGPGSPPRSAPGQLPSPRAHSLNPDASGSSCSLARTRSRESCASVRRASSADDIEAMRAGVLPPPPRHASTGAMHPLRSGLLNSTSDSDLVRYRTISKIPQITLNFVDLKGDPFLASPTSDREIIAPKIKERTHNVTEKVTQVLSLGADVLPEYKLQAPRIHRWTILHYSPFKAVWDWLILLLVIYTAVFTPYSAAFLLKETEEGPPATECGYACQPLAVVDLIVDIMFIVDILINFRTTYVNANEEVVSHPGRIAVHYFKGWFLIDMVAAIPFDLLIFGSGSEELIGLLKTARLLRLVRVARKLDRYSEYGAAVLFLLMCTFALIAHWLACIWYAIGNMEQPHMDSRIGWLHNLGDQIGKPYNSSGLGGPSIKDKYVTALYFTFSSLTSVGFGNVSPNTNSEKIFSICVMLIGSLMYASIFGNVSAIIQRLYSGTARYHTQMLRVREFIRFHQIPNPLRQRLEEYFQHAWSYTNGIDMNAVLKGFPECLQADICLHLNRSLLQHCKPFRGATKGCLRALAMKFKTTHAPPGDTLVHAGDLLTALYFISRGSIEILRGDVVVAILGMGWGAGTGLEMPSAASRGASLLNMQSLGLWTWDCLQGHWAPLIHLNSGPPSGAMERSPTWGEAAELWGSHILLPFRIRHKQTLFASLK

SEQ ID NO: 317 - DNA, 3191 bp, Homosapiens
ccggctggaggagctgaggttccgagtgcggccgctgctgggctggcgggcgggcagagcacggcaccctggcagcagggcccacgccacggggccatgggcagctcgagccaggcaggctgctgcccacgcttactgccagggtgaccccagccctggggcccagccacaaccaccctggcttcatgccaggggctgctctggttgccagtcggccagcctcgggggtgcagcctgggctgggactgctgctggggtgcaggtgaggcagtggccgggccctcaggccccagggcaggcaggctgcagggagccaagtcctccatggcggccccagccgggaaggcgagcaggacaggggctctgcggcccagggcccagaaaggccgggtgaggcgggccgtgcgcatctccagcctcgtggcccaggaggtcctgtccctgggcgccgacgtgctgcctgagtacaagctgcaggcaccgcgcatccaccgctggaccatcctgcattacagccccttcaaggccgtgtgggactggctcatcctgctgctggtcatctacacggctgtcttcacaccctactcggctgccttcctgctgaaggagacggaagaaggcccgcctgctaccgagtgtggctacgcctgccagccgctggctgtggtggacctcatcgtggacatcatgttcattgtggacatcctcatcaacttccgcaccacctacgtcaatgccaacgaggaggtggtcagccaccccggccgcatcgccgtccactacttcaagggctggttcctcatcgacatggtggccgccatccccttcgacctgctcatcttcggctctggctctgaggagctgatcgggctgctgaagactgcgcggctgctgcggctggtgcgcgtggcgcggaagctggatcgctactcagagtacggcgcggccgtgctgttcttgctcatgtgcacctttgcgctcatcgcgcactggctagcctgcatctggtacgccatcggcaacatggagcagccacacatggactcacgcatcggctggctgcacaacctgggcgaccagataggcaaaccctacaacagcagcggcctgggcggcccctccatcaaggacaagtatgtgacggcgctctacttcaccttcagcagcctcaccagtgtgggcttcggcaacgtctctcccaacaccaactcagagaagatcttctccatctgcgtcatgctcattggctccctcatgtatgctagcatcttcggcaacgtgtcggccatcatccagcggctgtactcgggcacagcccgctaccacacacagatgctgcgggtgcgggagttcatccgcttccaccagatccccaatcccctgcgccagcgcctcgaggagtacttccagcacgcctggtcctacaccaacggcatcgacatgaacgcggtgctgaagggcttccctgagtgcctgcaggctgacatctgcctgcacctgaaccgctcactgctgcagcactgcaaacccttccgaggggccaccaagggctgccttcgggccctggccatgaagttcaagaccacacatgcaccgccaggggacacactggtgcatgctggggacctgctcaccgccctgtacttcatctcccggggctccatcgagatcctgcggggcgacgtcgtcgtggccatcctggggaagaatgacatctttggggagcctctgaacctgtatgcaaggcctggcaagtcgaacggggatgtgcgggccctcacctactgtgacctacacaagatccatcgggacgacctgctggaggtgctggacatgtaccctgagttctccgaccacttctggtccagcctggagatcaccttcaacctgcgagataccaacatgatcccgggctcccccggcagtacggagttagagggtggcttcagtcggcaacgcaagcgcaagttgtccttccgcaggcgcacggacaaggacacggagcagccaggggaggtgtcggccttggggccgggccgggcgggggcagggccgagtagccggggccggccgggggggccgtggggggagagcccgtccagtggcccctccagccctgagagcagtgaggatgagggcccaggccgcagctccagccccctccgcctggtgcccttctccagccccaggccccccggagagccgccgggtggggagcccctgatggaggactgcgagaagagcagcgacacttgcaaccccctgtcaggcgccttctcaggagtgtccaacattttcagcttctggggggacagtcggggccgccagtaccaggagctccctcgatgccccgcccccacccccagcctcctcaacatccccctctccagcccgggtcggcggccccggggcgacgtggagagcaggctggatgccctccagcgccagctcaacaggctggagacccggctgagtgcagacatggccactgtcctgcagctgctacagaggcagatgacgctggtcccgcccgcctacagtgctgtgaccaccccggggcctggccccacttccacatccccgctgttgcccgtcagccccctccccaccctcaccttggactcgctttctcaggtttcccagttcatggcgtgtgaggagctgcccccgggggccccagagcttccccaagaaggccccacacgacgcctctccctaccgggccagctgggggccctcacctcccagcccctgcacagacacggctcggacccgggcagttagtggggctgcccagtgtggacacgtggctcacccagggatcaaggcgctgctgggccgctccccttggaggccctgctcaggaggccctgaccgtggaaggggagaggaactcgaaagcacagctcctcccccagcccttgggaccatcttctcctgcagtcccctgggccccagtgagaggggcaggggcagggccggcagtaggtggggcctgtggtccccccactgccctgagggcattagctggtctaactgcccggaggcacccggccctgggccttaggcacctcaaggacttttctgctatttactgctcttattgttaaggataataattaaggatcatatgaataattaatgaagatgctgatgactatgaataataaataattatcctgaggagaaaa

SEQ ID NO: 318 - protein, 819 aa, Homosapiens
MAAPAGKASRTGALRPRAQKGRVRRAVRISSLVAQEVLSLGADVLPEYKLQAPRIHRWTILHYSPFKAVWDWLILLLVIYTAVFTPYSAAFLLKETEEGPPATECGYACQPLAVVDLIVDIMFIVDILINFRTTYVNANEEVVSHPGRIAVHYFKGWFLIDMVAAIPFDLLIFGSGSEELIGLLKTARLLRLVRVARKLDRYSEYGAAVLFLLMCTFALIAHWLACIWYAIGNMEQPHMDSRIGWLHNLGDQIGKPYNSSGLGGPSIKDKYVTALYFTFSSLTSVGFGNVSPNTNSEKIFSICVMLIGSLMYASIFGNVSAIIQRLYSGTARYHTQMLRVREFIRFHQIPNPLRQRLEEYFQHAWSYTNGIDMNAVLKGFPECLQADICLHLNRSLLQHCKPFRGATKGCLRALAMKFKTTHAPPGDTLVHAGDLLTALYFISRGSIEILRGDVVVAILGKNDIFGEPLNLYARPGKSNGDVRALTYCDLHKIHRDDLLEVLDMYPEFSDHFWSSLEITFNLRDTNMIPGSPGSTELEGGFSRQRKRKLSFRRRTDKDTEQPGEVSALGPGRAGAGPSSRGRPGGPWGESPSSGPSSPESSEDEGPGRSSSPLRLVPFSSPRPPGEPPGGEPLMEDCEKSSDTCNPLSGAFSGVSNIFSFWGDSRGRQYQELPRCPAPTPSLLNIPLSSPGRRPRGDVESRLDALQRQLNRLETRLSADMATVLQLLQRQMTLVPPAYSAVTTPGPGPTSTSPLLPVSPLPTLTLDSLSQVSQFMACEELPPGAPELPQEGPTRRLSLPGQLGALTSQPLHRHGSDPGS

SEQ ID NO: 319 - DNA, 4341 bp, Homosapiens
gaaactaggggcaaggagacgaagagaacatgaaagttaaactttaagatgaagaacaaagctgaacatactgatgcattggatctttggagaggatctcagaactcattgtacttaatttacaggctaaaaccttagaagaggaatttattatatcctacacaagactccagggaagcacatggccttggactgaaggctggcatctggaagctgtcagccaccagcaccttctgcagcaggaaaaggccagggctctgctggagcaggcagcagagtggacgcacagtaacatgggcaacttgaagagcgtggcccaggagcctgggccaccctgcggcctggggctggggctgggccttgggctgtgcggcaagcagggcccagccaccccggcccctgagcccagccgggccccagcatccctactcccaccagcgccagaacacagccccccgagctccccgctaacccagcccccagaggggcccaagttccctcgtgtgaagaactgggaggtggggagcatcacctatgacaccctcagcgcccaggcgcagcaggatgggccctgcaccccaagacgctgcctgggctccctggtatttccacggaaactacagggccggccctcccccggccccccggcccctgagcagctgctgagtcaggcccgggacttcatcaaccagtactacagctccattaagaggagcggctcccaggcccacgaacagcggcttcaagaggtggaagccgaggtggcagccacaggcacctaccagcttagggagagcgagctggtgttcggggctaagcaggcctggcgcaacgctccccgctgcgtgggccggatccagtgggggaagctgcaggtgttcgatgcccgggactgcaggtctgcacaggaaatgttcacctacatctgcaaccacatcaagtatgccaccaaccggggcaaccttcgctcggccatcacagtgttcccgcagcgctgccctggccgaggagacttccgaatctggaacagccagctggtgcgctacgcgggctaccggcagcaggatggctctgtgcggggggacccagccaacgtggagatcaccgagctctgcattcagcacggctggaccccaggaaacggtcgcttcgacgtgctgcccctgctgctgcaggccccagatgatcccccagaactcttccttctgccccccgagctggtccttgaggtgcccctggagcaccccacgctggagtggtttgcagccctgggcctgcgctggtacgccctcccggcagtgtccaacatgctgctggaaattgggggcctggagttccccgcagcccccttcagtggctggtacatgagcactgagatcggcacgaggaacctgtgtgaccctcaccgctacaacatcctggaggatgtggctgtctgcatggacctggatacccggaccacctcgtccctgtggaaagacaaggcagcagtggaaatcaacgtggccgtgctgcacagttaccagctagccaaagtcaccatcgtggaccaccacgccgccacggcctctttcatgaagcacctggagaatgagcagaaggccagggggggctgccctgcagactgggcctggatcgtgccccccatctcgggcagcctcactcctgttttccatcaggagatggtcaactatttcctgtccccggccttccgctaccagccagacccctggaaggggagtgccgccaagggcaccggcatcaccaggaagaagacctttaaagaagtggccaacgccgtgaagatctccgcctcgctcatgggcacggtgatggcgaagcgagtgaaggcgacaatcctgtatggctccgagaccggccgggcccagagctacgcacagcagctggggagactcttccggaaggcttttgatccccgggtcctgtgtatggatgagtatgacgtggtgtccctcgaacacgagacgctggtgctggtggtaaccagcacatttgggaatggggatcccccggagaatggagagagctttgcagctgccctgatggagatgtccggcccctacaacagctcccctcggccggaacagcacaagagttataagatccgcttcaacagcatctcctgctcagacccactggtgtcctcttggcggcggaagaggaaggagtccagtaacacagacagtgcaggggccctgggcaccctcaggttctgtgtgttcgggctcggctcccgggcatacccccacttctgcgcctttgctcgtgccgtggacacacggctggaggaactgggcggggagcggctgctgcagctgggccagggcgacgagctgtgcggccaggaggaggccttccgaggctgggcccaggctgccttccaggccgcctgtgagaccttctgtgtgggagaggatgccaaggccgccgcccgagacatcttcagccccaaacggagctggaagcgccagaggtaccggctgagcgcccaggccgagggcctgcagttgctgccaggtctgatccacgtgcacaggcggaagatgttccaggctacaatccgctcagtggaaaacctgcaaagcagcaagtccacgagggccaccatcctggtgcgcctggacaccggaggccaggaggggctgcagtaccagccgggggaccacataggtgtctgcccgcccaaccggcccggccttgtggaggcgctgctgagccgcgtggaggacccgccggcgcccactgagcccgtggcagtagagcagctggagaagggcagccctggtggccctccccccggctgggtgcgggacccccggctgcccccgtgcacgctgcgccaggctctcaccttcttcctggacatcacctccccacccagccctcagctcttgcggctgctcagcaccttggcagaagagcccagggaacagcaggagctggaggccctcagccaggatccccgacgctacgaggagtggaagtggttccgctgccccacgctgctggaggtgctggagcagttcccgtcggtggcgctgcctgccccactgctcctcacccagctgcctctgctccagccccggtactactcagtcagctcggcacccagcacccacccaggagagatccacctcactgtagctgtgctggcatacaggactcaggatgggctgggccccctgcactatggagtctgctccacgtggctaagccagctcaagcccggagaccctgtgccctgcttcatccggggggctccctccttccggctgccacccgatcccagcttgccctgcatcctggtgggtccaggcactggcattgcccccttccggggattctggcaggagcggctgcatgacattgagagcaaagggctgcagcccactcccatgactttggtgttcggctgccgatgctcccaacttgaccatctctaccgcgacgaggtgcagaacgcccagcagcgcggggtgtttggccgagtcctcaccgccttctcccgggaacctgacaaccccaagacctacgtgcaggacatcctgaggacggagctggctgcggaggtgcaccgcgtgctgtgcctcgagcggggccacatgtttgtctgcggcgatgttaccatggcaaccaacgtcctgcagaccgtgcagcgcatcctggcgacggagggcgacatggagctggacgaggccggcgacgtcatcggcgtgctgcgggatcagcaacgctaccacgaagacattttcgggctcacgctgcgcacccaggaggtgacaagccgcatacgcacccagagcttttccttgcaggagcgtcagttgcggggcgcagtgccctgggcgttcgaccctcccggctcagacaccaacagcccctgagagccgcctggctttcccttccagttccgggagagcggctgcccgactcaggtccgcccgaccaggatcagccccgctcctcccctcttgaggtggtgccttctcacatctgtccagaggctgcaaggattcagcattattcctccaggaaggagcaaaacgcctcttttccctctctaggcctgttgcctcgggcctgggtccgccttaatctggaaggcccctcccagcagcggtaccccagggcctactgccacccgcttcctgtttcttagtcgaatgttagattcctcttgcctctctcaggagtatcttacctgtaaagtctaatctctaaatcaagtatttattattgaagatttaccataagggactgtgccagatgttaggagaactactaaagtgcctaccccagctcaaaaaaaaaaaaaaaaaa

SEQ ID NO: 320 - protein, 1203 aa, Homosapiens
MGNLKSVAQEPGPPCGLGLGLGLGLCGKQGPATPAPEPSRAPASLLPPAPEHSPPSSPLTQPPEGPKFPRVKNWEVGSITYDTLSAQAQQDGPCTPRRCLGSLVFPRKLQGRPSPGPPAPEQLLSQARDFINQYYSSIKRSGSQAHEQRLQEVEAEVAATGTYQLRESELVFGAKQAWRNAPRCVGRIQWGKLQVFDARDCRSAQEMFTYICNHIKYATNRGNLRSAITVFPQRCPGRGDFRIWNSQLVRYAGYRQQDGSVRGDPANVEITELCIQHGWTPGNGRFDVLPLLLQAPDDPPELFLLPPELVLEVPLEHPTLEWFAALGLRWYALPAVSNMLLEIGGLEFPAAPFSGWYMSTEIGTRNLCDPHRYNILEDVAVCMDLDTRTTSSLWKDKAAVEINVAVLHSYQLAKVTIVDHHAATASFMKHLENEQKARGGCPADWAWIVPPISGSLTPVFHQEMVNYFLSPAFRYQPDPWKGSAAKGTGITRKKTFKEVANAVKISASLMGTVMAKRVKATILYGSETGRAQSYAQQLGRLFRKAFDPRVLCMDEYDVVSLEHETLVLVVTSTFGNGDPPENGESFAAALMEMSGPYNSSPRPEQHKSYKIRFNSISCSDPLVSSWRRKRKESSNTDSAGALGTLRFCVFGLGSRAYPHFCAFARAVDTRLEELGGERLLQLGQGDELCGQEEAFRGWAQAAFQAACETFCVGEDAKAAARDIFSPKRSWKRQRYRLSAQAEGLQLLPGLIHVHRRKMFQATIRSVENLQSSKSTRATILVRLDTGGQEGLQYQPGDHIGVCPPNRPGLVEALLSRVEDPPAPTEPVAVEQLEKGSPGGPPPGWVRDPRLPPCTLRQALTFFLDITSPPSPQLLRLLSTLAEEPREQQELEALSQDPRRYEEWKWFRCPTLLEVLEQFPSVALPAPLLLTQLPLLQPRYYSVSSAPSTHPGEIHLTVAVLAYRTQDGLGPLHYGVCSTWLSQLKPGDPVPCFIRGAPSFRLPPDPSLPCILVGPGTGIAPFRGFWQERLHDIESKGLQPTPMTLVFGCRCSQLDHLYRDEVQNAQQRGVFGRVLTAFSREPDNPKTYVQDILRTELAAEVHRVLCLERGHMFVCGDVTMATNVLQTVQRILATEGDMELDEAGDVIGVLRDQQRYHEDIFGLTLRTQEVTSRIRTQSFSLQERQLRGAVPWAFDPPGSDTNSP

SEQ ID NO: 321 - DNA, 2439 bp, Homosapiens
atagagccctcagtgggatgagggtgaaactgctattgccggcggctcctgttttaccgcgtcacgatgctggtgcatttatttcgggtcgggattcggggtggcccattcccaggcaggctgctaccgcccctccgcttccagacattctcagctgtcaggtactctgatggctaccgcagctcctccctcctccgggccgtggcccacctgcggtcccagctctgggcccacctccctcgagcccccctagctcccagatggagcccctctgcctggtgctgggttgggggagccctgctaggccccatggtactgagtaagcatccccacctctgccttgtggccctgtgtgaggcagaagaggcccctcctgccagctccacaccccatgtcgtggggtctcgctttaactggaagctcttctggcagtttctgcacccccacctgctggtcctgggggtagccgtcgtgctggccttgggtgcggcactcgtgaatgtacagatccccctgctcctgggccagctggtaaaggtcgtggccaagtacacaagggaccacgtagggagtttcatgactgagtcccagaatctcagcacccacctgcttatcctctatggtgtccagggactgctgaccttcgggtacctggtgctgctgtcccacgttggcgagcgcatggctgtggacatgcggagggccctcttcagctccctgctccgacaaaacatcaccttctttgacgccaataagacagggcagctggtgagccgcttgacaactgacgtgcaggaatttaagtcatccttcaagcttgtcatctcccaggggctgcgaagctgctcccaggtggcaggctgcctggtgtccctgtccatgctgtcgacacgcctcacgctgctgctgatggtggccacaccagccctgatgggagtgggcaccctgatgggctcaggcctccgaaaattgtctcgccagtgtcaggaacatatcgccagggcaatgggcgtagcagacgaggccctgggcaatgtgcggactgtgcgagccttggccatggagcaacgggaagaggagcgctatggggcagagctggaagcctgccgctgccgggcagaggagctgggccgcggcatcgccttgttccaagggctttccaacatcgccttcaactgcatggtcttgggtaccctatttattgggggctcccttgtggccggacagcagctgacagggggagacctcatgtccttcctggtggcctcccagacagtgcaaaggtccatggccaacctctctgtcctgtttgggcaggtggtccgggggctgagtgcaggtgcccgggtctttgagtacatggccctgaacccctgcatcccactgtctgggggctgctgcgtccccaaagagcagctgcgtggctccgttacatttcagaacgtctgcttcagctacccctgccgccccggcttcgaggtgctgaaagacttcaccctgacgctgccccctggcaagatcgtggccctcgtgggccagtctggcggaggaaagaccaccgtggcttccctgctggagcgcttctacgaccccacggcaggcgtggtgatgctggatgggcgggacctgcgcacccttgacccctcctggctccggggccaggttgtcggtttcatcagccaggagcccgtcctgtttgggacgaccatcatggaaaacatccgctttgggaagctggaagcttccgatgaagaggtgtacacagccgcccgggaagcgaatgctcacgagttcatcaccagtttccccgagggctacaacacggtcgtcggtgaacggggcactaccctgtctgggggccagaagcagcgcctggccatcgcccgagcccttatcaagcagcccacggtgctgatactggatgaagctaccagcgcgctggatgcagagtccgagcgggttgtacaggaggccctggaccgggccagtgcaggccgcacggtgctggtaattgcccaccggctcagcactgtccgtggggcccactgcattgtcgtcatggccgatggccgtgtctgggaggctgggacacatgaagagctcctgaagaaaggcgggctatacgccgagctcatccggaggcaggccctggatgccccgaggacagcggccccaccgcccaaaaagccagaaggccccaggagccaccagcacaagtcctgagaagggccccctgaggtgtggtcgctgccaagcatcagtgttagggctggggctcagcctgggggagcctactggggactgagcccccaggagggccagcatgtggagagtcgctgcggctgctcctgctcacaataaagccggggccgagcagctggcaggggaggccaatccctccctcccctccccagtcctgccggctgcctccctcccacc

SEQ ID NO: 322 - protein, 718 aa, Homosapiens
MLVHLFRVGIRGGPFPGRLLPPLRFQTFSAVRYSDGYRSSSLLRAVAHLRSQLWAHLPRAPLAPRWSPSAWCWVGGALLGPMVLSKHPHLCLVALCEAEEAPPASSTPHVVGSRFNWKLFWQFLHPHLLVLGVAVVLALGAALVNVQIPLLLGQLVKVVAKYTRDHVGSFMTESQNLSTHLLILYGVQGLLTFGYLVLLSHVGERMAVDMRRALFSSLLRQNITFFDANKTGQLVSRLTTDVQEFKSSFKLVISQGLRSCSQVAGCLVSLSMLSTRLTLLLMVATPALMGVGTLMGSGLRKLSRQCQEHIARAMGVADEALGNVRTVRALAMEQREEERYGAELEACRCRAEELGRGIALFQGLSNIAFNCMVLGTLFIGGSLVAGQQLTGGDLMSFLVASQTVQRSMANLSVLFGQVVRGLSAGARVFEYMALNPCIPLSGGCCVPKEQLRGSVTFQNVCFSYPCRPGFEVLKDFTLTLPPGKIVALVGQSGGGKTTVASLLERFYDPTAGVVMLDGRDLRTLDPSWLRGQVVGFISQEPVLFGTTIMENIRFGKLEASDEEVYTAAREANAHEFITSFPEGYNTVVGERGTTLSGGQKQRLAIARALIKQPTVLILDEATSALDAESERVVQEALDRASAGRTVLVIAHRLSTVRGAHCIVVMADGRVWEAGTHEELLKKGGLYAELIRRQALDAPRTAAPPPKKPEGPRSHQHKS

SEQ ID NO: 323 - DNA, 1746 bp, Homosapiens
agaattcggcacgacggggttctggccatgaagcccacctcaggcccagaggaggcccggcggccagcctcggacatccgcgtgttcgccagcaactgctcgatgcacgggctgggccacgtcttcgggccaggcagcctgagcctgcgccgggggatgtgggcagcggccgtggtcctgtcagtggccaccttcctctaccaggtggctgagagggtgcgctactacagggagttccaccaccagactgccctggatgagcgagaaagccaccggctcatcttcccggctgtcaccctgtgcaacatcaacccactgcgccgctcgcgcctaacgcccaacgacctgcactgggctgggtctgcgctgctgggcctggatcccgcagagcacgccgccttcctgcgcgccctgggccggccccctgcaccgcccggcttcatgcccagtcccacctttgacatggcgcaactctatgcccgtgctgggcactccctggatgacatgctgctggactgtcgcttccgtggccaaccttgtgggcctgagaacttcaccacgatcttcacccggatgggaaagtgctacacatttaactctggcgctgatggggcagagctgctcaccactactaggggtggcatgggcaatgggctggacatcatgctggacgtgcagcaggaggaatatctacctgtgtggagggacaatgaggagaccccgtttgaggtggggatccgagtgcagatccacagccaggaggagccgcccatcatcgatcagctgggcttgggggtgtccccgggctaccagacctttgtttcttgccagcagcagcagctgagcttcctgccaccgccctggggcgattgcagttcagcatctctgaaccccaactatgagccagagccctctgatcccctaggctcccccagccccagccccagccctccctatacccttatggggtgtcgcctggcctgcgaaacccgctacgtggctcggaagtgcggctgccgaatggtgtacatgccaggcgacgtgccagtgtgcagcccccagcagtacaagaactgtgcccacccggccatagatgccatgcttcgcaaggactcgtgcgcctgccccaacccgtgcgccagcacgcgctacgccaaggagctctccatggtgcggatcccgagccgcgccgccgcgcgcttcctggcccggaagctcaaccgcagcgaggcctacatcgcggagaacgtgctggccctggacatcttctttgaggccctcaactatgagaccgtggagcagaagaaggcctatgagatgtcagagctgcttggtgacattgggggccagatggggctgttcatcggggccagcctgctcaccatcctcgagatcctagactacctctgtgaggtgttccgagacaaggtcctgggatatttctggaaccgacagcactcccaaaggcactccagcaccaatctgcttcaggaagggctgggcagccatcgaacccaagttccccacctcagcctgggccccagacctcccacccctccctgtgccgtcaccaagactctctccgcctcccaccgcacctgctaccttgtcacacagctctagacctgctgtctgtgtcctcggagccccgccctgacatcctggacatgcctagcctgcacgtagcttttccgtcttcaccccaaataaagtcctaatgcatcaaaaaaaaaaaaaaaaaaaaaa

SEQ ID NO: 324 - protein, 531 aa, Homosapiens
MKPTSGPEEARRPASDIRVFASNCSMHGLGHVFGPGSLSLRRGMWAAAVVLSVATFLYQVAERVRYYREFHHQTALDERESHRLIFPAVTLCNINPLRRSRLTPNDLHWAGSALLGLDPAEHAAFLRALGRPPAPPGFMPSPTFDMAQLYARAGHSLDDMLLDCRFRGQPCGPENFTTIFTRMGKCYTFNSGADGAELLTTTRGGMGNGLDIMLDVQQEEYLPVWRDNEETPFEVGIRVQIHSQEEPPIIDQLGLGVSPGYQTFVSCQQQQLSFLPPPWGDCSSASLNPNYEPEPSDPLGSPSPSPSPPYTLMGCRLACETRYVARKCGCRMVYMPGDVPVCSPQQYKNCAHPAIDAMLRKDSCACPNPCASTRYAKELSMVRIPSRAAARFLARKLNRSEAYIAENVLALDIFFEALNYETVEQKKAYEMSELLGDIGGQMGLFIGASLLTILEILDYLCEVFRDKVLGYFWNRQHSQRHSSTNLLQEGLGSHRTQVPHLSLGPRPPTPPCAVTKTLSASHRTCYLVTQL

SEQ ID NO: 325 - DNA, 1766 bp, Homosapiens
agaattcggcacgacggggttctggccatgaagcccacctcaggcccagaggaggcccggcggccagcctcggacatccgcgtgttcgccagcaactgctcgatgcacgggctgggccacgtcttcgggccaggcagcctgagcctgcgccgggggatgtgggcagcggccgtggtcctgtcagtggccaccttcctctaccaggtggctgagagggtgcgctactacagggagttccaccaccagactgccctggatgagcgagaaagccaccggctcatcttcccggctgtcaccctgtgcaacatcaacccactgcgccgctcgcgcctaacgcccaacgacctgcactgggctgggtctgcgctgctgggcctggatcccgcagagcacgccgccttcctgcgcgccctgggccggccccctgcaccgcccggcttcatgcccagtcccacctttgacatggcgcaactctatgcccgtgctgggcactccctggatgacatgctgctggactgtcgcttccgtggccaaccttgtgggcctgagaacttcaccacgatcttcacccggatgggaaagtgctacacatttaactctggcgctgatggggcagagctgctcaccactactaggggtggcatgggcaatgggctggacatcatgctggacgtgcagcaggaggaatatctacctgtgtggagggacaatgaggagaccccgtttgaggtggggatccgagtgcagatccacagccaggaggagccgcccatcatcgatcagctgggcttgggggtgtccccgggctaccagacctttgtttcttgccagcagcagcagctgagcttcctgccaccgccctggggcgattgcagttcagcatctctgaaccccaactatgagccagagccctctgatcccctaggctcccccagccccagccccagccctccctatacccttatggggtgtcgcctggcctgcgaaacccgctacgtggctcggaagtgcggctgccgaatggtgtacatgccaggcgacgtgccagtgtgcagcccccagcagtacaagaactgtgcccacccggccatagatgccatgcttcgcaaggactcgtgcgcctgccccaacccgtgcgccagcacgcgctacgccaaggagctctccatggtgcggatcccgagccgcgccgccgcgcgcttcctggcccggaagctcaaccgcagcgaggcctacatcgcggagaacgtgctggccctggacatcttctttgaggccctcaactatgagaccgtggagcagaagaaggcctatgagatgtcagagctgcttggtgacattgggggccagatggggctgttcatcggggccagcctgctcaccatcctcgagatcctagactacctctgtgaggtgttccgagacaaggtcctgggatatttctggaaccgacagcactcccaaaggcactccagcaccaatctgcttcaggaagggctgggcagccatcgaacccaagttccccacctcagcctgggccccagcactctgctctgttccgaagacctcccacccctccctgtgccgtcaccaagactctctccgcctcccaccgcacctgctaccttgtcacacagctctagacctgctgtctgtgtcctcggagccccgccctgacatcctggacatgcctagcctgcacgtagcttttccgtcttcaccccaaataaagtcctaatgcatcaaaaaaaaaaaaaaaaaaaaaa

SEQ ID NO: 326 - protein, 549 aa, Homosapiens
MKPTSGPEEARRPASDIRVFASNCSMHGLGHVFGPGSLSLRRGMWAAAVVLSVATFLYQVAERVRYYREFHHQTALDERESHRLIFPAVTLCNINPLRRSRLTPNDLHWAGSALLGLDPAEHAAFLRALGRPPAPPGFMPSPTFDMAQLYARAGHSLDDMLLDCRFRGQPCGPENFTTIFTRMGKCYTFNSGADGAELLTTTRGGMGNGLDIMLDVQQEEYLPVWRDNEETPFEVGIRVQIHSQEEPPIIDQLGLGVSPGYQTFVSCQQQQLSFLPPPWGDCSSASLNPNYEPEPSDPLGSPSPSPSPPYTLMGCRLACETRYVARKCGCRMVYMPGDVPVCSPQQYKNCAHPAIDAMLRKDSCACPNPCASTRYAKELSMVRIPSRAAARFLARKLNRSEAYIAENVLALDIFFEALNYETVEQKKAYEMSELLGDIGGQMGLFIGASLLTILEILDYLCEVFRDKVLGYFWNRQHSQRHSSTNLLQEGLGSHRTQVPHLSLGPSTLLCSEDLPPLPVPSPRLSPPPTAPATLSHSSRPAVCVLGAPP

SEQ ID NO: 327 - DNA, 1671 bp, Homosapiens
agaattcggcacgacggggttctggccatgaagcccacctcaggcccagaggaggcccggcggccagcctcggacatccgcgtgttcgccagcaactgctcgatgcacgggctgggccacgtcttcgggccaggcagcctgagcctgcgccgggggatgtgggcagcggccgtggtcctgtcagtggccaccttcctctaccaggtggctgagagggtgcgctactacagggagttccaccaccagactgccctggatgagcgagaaagccaccggctcatcttcccggctgtcaccctgtgcaacatcaacccactgcgccgctcgcgcctaacgcccaacgacctgcactgggctgggtctgcgctgctgggcctggatcccgcagagcacgccgccttcctgcgcgccctgggccggccccctgcaccgcccggcttcatgcccagtcccacctttgacatggcgcaactctatgcccgtgctgggcactccctggatgacatgctgctggactgtcgcttccgtggccaaccttgtgggcctgagaacttcaccacgatcttcacccggatgggaaagtgctacacatttaactctggcgctgatggggcagagctgctcaccactactaggggtggcatgggcaatgggctggacatcatgctggacgtgcagcaggaggaatatctacctgtgtggagggacaatgaggagaccccgtttgaggtggggatccgagtgcagatccacagccaggaggagccgcccatcatcgatcagctgggcttgggggtgtccccgggctaccagacctttgtttcttgccagcagcagcagctgagcttcctgccaccgccctggggcgattgcagttcagcatctctgaaccccaactatgagccagagccctctgatcccctaggctcccccagccccagccccagccctccctatacccttatggggtgtcgcctggcctgcgaaacccgctacgtggctcggaagtgcggctgccgaatggtgtacatgccaggcgacgtgccagtgtgcagcccccagcagtacaagaactgtgcccacccggccatagatgccatgcttcgcaaggactcgtgcgcctgccccaacccgtgcgccagcacgcgctacgccaaggagctctccatggtgcggatcccgagccgcgccgccgcgcgcttcctggcccggaagctcaaccgcagcgaggcctacatcgcggagaacgtgctggccctggacatcttctttgaggccctcaactatgagaccgtggagcagaagaaggcctatgagatgtcagagctgcttggtgacattgggggccagatggggctgttcatcggggccagcctgctcaccatcctcgagatcctagactacctctgtgaggtgttccgagacaaggtcctgggatatttctggaaccgacagcactcccaaaggcactccagcaccaatctgacctcccacccctccctgtgccgtcaccaagactctctccgcctcccaccgcacctgctaccttgtcacacagctctagacctgctgtctgtgtcctcggagccccgccctgacatcctggacatgcctagcctgcacgtagcttttccgtcttcaccccaaataaagtcctaatgcatcaaaaaa

SEQ ID NO: 328 - protein, 543 aa, Homosapiens
MKPTSGPEEARRPASDIRVFASNCSMHGLGHVFGPGSLSLRRGMWAAAVVLSVATFLYQVAERVRYYREFHHQTALDERESHRLIFPAVTLCNINPLRRSRLTPNDLHWAGSALLGLDPAEHAAFLRALGRPPAPPGFMPSPTFDMAQLYARAGHSLDDMLLDCRFRGQPCGPENFTTIFTRMGKCYTFNSGADGAELLTTTRGGMGNGLDIMLDVQQEEYLPVWRDNEETPFEVGIRVQIHSQEEPPIIDQLGLGVSPGYQTFVSCQQQQLSFLPPPWGDCSSASLNPNYEPEPSDPLGSPSPSPSPPYTLMGCRLACETRYVARKCGCRMVYMPGDVPVCSPQQYKNCAHPAIDAMLRKDSCACPNPCASTRYAKELSMVRIPSRAAARFLARKLNRSEAYIAENVLALDIFFEALNYETVEQKKAYEMSELLGDIGGQMGLFIGASLLTILEILDYLCEVFRDKVLGYFWNRQHSQRHSSTNLTSHPSLCRHQDSLRLPPHLLPCHTALDLLSVSSEPRPDILDMPSLHVAFPSSPQIKS

SEQ ID NO: 329 - DNA, 1143 bp, Homosapiens
tgcaacgccggggccagagtcttaaaaccgagggcccgcaggggtccccgcggccgccgcgatgcagaaatacgagaaactggaaaagattggggaaggcacctacggaactgtgttcaaggccaaaaaccgggagactcatgagatcgtggctctgaaacgggtgaggctggatgacgatgatgagggtgtgccgagttccgccctccgggagatctgcctactcaaggagctgaagcacaagaacatcgtcaggcttcatgacgtcctgcacagcgacaagaagctgactttggtttttgaattctgtgaccaggacctgaagaagtattttgacagttgcaatggtgacctcgatcctgagattgtaaagtcattcctcttccagctactaaaagggctgggattctgtcatagccgcaatgtgctacacagggacctgaagccccagaacctgctaataaacaggaatggggagctgaaattggctgattttggcctggctcgagcctttgggattcccgtccgctgttactcagctgaggtggtcacactgtggtaccgcccaccggatgtcctctttggggccaagctgtactccacgtccatcgacatgtggtcagccggctgcatctttgcagagctggccaatgctgggcggcctctttttcccggcaatgatgtcgatgaccagttgaagaggatcttccgactgctggggacgcccaccgaggagcagtggccctctatgaccaagctgccagactataagccctatccgatgtacccggccacaacatccctggtgaacgtcgtgcccaaactcaatgccacagggagggatctgctgcagaaccttctgaagtgtaaccctgtccagcgtatctcagcagaagaggccctgcagcacccctacttctccgacttctgtccgccctaggccccgggacccccggcctccaggctggggcctggcctatttaagccccctcttgagaggggtgagacagtgggggtgcctggtgcgctgtgctccagcagtgctgggcccagccggggtggggtgcctgagcccgaatttctcactccctttgtggactttatttaatttcataaattggctcctttcccacagtcaaaaaa

SEQ ID NO: 330 - protein, 292 aa, Homosapiens
MQKYEKLEKIGEGTYGTVFKAKNRETHEIVALKRVRLDDDDEGVPSSALREICLLKELKHKNIVRLHDVLHSDKKLTLVFEFCDQDLKKYFDSCNGDLDPEIVKSFLFQLLKGLGFCHSRNVLHRDLKPQNLLINRNGELKLADFGLARAFGIPVRCYSAEVVTLWYRPPDVLFGAKLYSTSIDMWSAGCIFAELANAGRPLFPGNDVDDQLKRIFRLLGTPTEEQWPSMTKLPDYKPYPMYPATTSLVNVVPKLNATGRDLLQNLLKCNPVQRISAEEALQHPYFSDFCPP

SEQ ID NO: 331 - DNA, 4078 bp, Homosapiens
gcgggggcgcgccccggggtgggcacggggcagtcgtcgggagcgcgcgagtgcgccggaggacggggagagaccccgagacccccggggcacgaagtccagagcgagcgggttatgcctccgcctcgttgccctgaaagccgcagcgacagcgaaaagggctaagattcggccatgagcagcgcccctcggcgccccgccaagggcgcagattctttctgtacgccagagccagagagcttgggccctgggacgcctgggttccccgagcaggaggaagacgaacttcaccgcaccctgggcgtggagcggtttgaggagatcctacaggaggccgggtctcgtggaggggaggagccaggccgcagctatggggaggaagactttgagtaccaccgccagtcctcccaccacatccatcacccactgtccacccacctgcctccggatgcacgccgccgcaagacaccccagggcccaggacggaagcctcgaaggcgcccgggagcctccccgactggagaaaccccgaccattgaggagggggaggaagatgaggatgaggccagcgaggctgagggggcccgggctctcactcagccgtcccctgtctccacaccctcctcggtgcagttctttctccgagaggatgacagtgccgaccggaaggcagagaggaccagtccatcttcccctgcaccactgccccaccaggaggcgactcctcgggcctccaaaggggcccaggctggaacccaggtggaggaggcggaggcggaggcggtggcggtggccagtggcacagcagggggtgacgacgggggtgcctcggggcgccccctgcccaaagcccagcctgggcaccgcagctacaaccttcaggagaggaggcgcatcgggagcatgactggggctgagcaggcactgctgccccgggtccccacggatgagattgaggcccagacgctggccacggccgacctagacctcatgaagagtcaccggtttgaggacgttcctggggtgcggcggcacttggtgcggaagaatgccaaaggttccacacagagtggccgagaagggcgggagcctggccccacacctcgggctcgaccccgggccccccacaagccccatgaggtgtttgtggagctgaatgagttgctcctggacaaaaaccaggagccccagtggcgggagacagctcgctggatcaaatttgaagaggacgtggaggaggagaccgagcgctgggggaagccccacgtggcctccctctccttccgcagtctcctggagctccgcaggaccctggcccatggggctgtgctcttggatctggaccagcagaccctgcccggagtggcccaccaggtggtggagcagatggtcatctctgaccagatcaaggccgaggatagggccaacgtgctgcgggctctgctgttgaaacacagccacccaagtgatgagaaggacttctccttcccccgcaacatctcagctggctccctgggctccctgctggggcatcaccatggtcagggggctgagagtgacccccacgtcaccgagcctctcatgggaggtgttcctgagacccggctggaggtggagcgagagcgtgacgtgccgcccccagcaccaccagctggcatcacccgctccaagtccaagcacgagctgaaactgctggagaagattcctgagaatgccgaggccacggtggtccttgtgggctgcgtggagttcctctcccgccccaccatggcctttgtgcggctccgggaggctgtggagttggacgcagtgttggaggtgccggtgcctgtgcgtttcctcttcctgctgctgggcccgagtagtgccaacatggactaccacgagatcggccgctccatctccaccctcatgtcagacaagcaattccacgaggcagcctacctggctgacgagcgggaggacctgctgacggccatcaacgccttcctggactgcagcgtggtgctgccgccttcagaagtgcagggcgaggagctgctgcgctctgtggcccacttccagcgccagatgctcaagaagcgagaggagcagggccggctgctacctacaggggctgggctggagcccaaatctgcccaagataaggcgctcctgcagatggtagaggcggcaggggcagctgaagatgatccccttcggcggacggggcggccctttggggggctgatccgagatgtgcggcgccgctatccccactacctgagtgacttccgagatgcacttgaccctcagtgcctggccgcagtcatcttcatctactttgccgccctgtctcctgccatcacctttggggggctgctgggagagaagacacaggacctgataggggtgtcggagctgattatgtccacagcgctccagggcgtggtcttctgcctgctgggtgcccagcccctgttggtgatcggcttctcagggcccctgctggtctttgaggaggccttcttctcgttctgtagcagcaaccacctggagtacctggtgggccgtgtgtggatcggcttctggctggtgttcctggccctgctcatggtggccctggaggggagcttcctggtccgcttcgtctcccgcttcacccaggagatcttcgccttcttgatctcactcatcttcatctatgagaccttctacaagctggtgaagatcttccaggagcaccccctgcatggctgctcagcctccaacagctcagaggtggacggcggtgagaacatgacatgggccggggcaagacccacgctggggccgggcaacaggagcttggctgggcagtctgggcaggggaagccccggggccagcccaacacggccctgctgtcgctggtgctcatggccggcaccttcttcatcgccttcttcctgcgcaaattcaagaacagccggttctttcctggccggatccggcgggtgattggggactttggggtgcccatcgccatcctcatcatggtgcttgtggattacagtattgaggacacctatacccagaagctgagcgttcccagtggattctcggtgactgccccagaaaagaggggctgggtcatcaaccccctgggagagaagagccccttccctgtgtggatgatggttgccagcctgctgcccgccatcctggtcttcattctcatcttcatggagacacagatcaccacgctcatcatctccaagaaggagcgcatgctgcagaagggctccggcttccacctggacctgctgctcatcgtggccatgggcggcatctgtgccctctttggcctgccctggttggctgctgccactgtccgctctgtcactcacgccaacgcgctcactgtcatgagcaaggctgtggcacctggggacaagcccaagattcaggaagtcaaggagcagcgggtgacggggctgctggttgccctgcttgtgggcctctccatagttatcggggatctgctccggcagatccccctggccgtgctctttggaattttcctgtacatgggagtcacctcccttaacgggatccagttctatgagcggctgcatctgctgctcatgccgcccaaacaccacccagatgtcacttacgtcaagaaggtccggaccctccgtatgcacctgttcacggccctgcagctgctctgcctggccctgctctgggccgtcatgtccacagctgcctccctggccttccccttcatcctcatcctcacagtgccgctccgcatggtggtgctcacccgtatcttcaccgaccgagagatgaaatgtctggatgctaacgaggcagagccggtgtttgatgagcgggagggtgtggacgagtacaatgagatgcccatgcctgtgtagccgccaccgagggacagccgagggaccgatggacgaggggacaggctggtgggatgggttccccctcccatgcccctccctcctttttatttaagtgaataatttaaagtattctcctcccccactgcccctgcagtaaagtgctttggcccccaaaaaaaaaaaaaaaaaaaaaaaa

SEQ ID NO: 332 - protein, 1241 aa, Homosapiens
MSSAPRRPAKGADSFCTPEPESLGPGTPGFPEQEEDELHRTLGVERFEEILQEAGSRGGEEPGRSYGEEDFEYHRQSSHHIHHPLSTHLPPDARRRKTPQGPGRKPRRRPGASPTGETPTIEEGEEDEDEASEAEGARALTQPSPVSTPSSVQFFLREDDSADRKAERTSPSSPAPLPHQEATPRASKGAQAGTQVEEAEAEAVAVASGTAGGDDGGASGRPLPKAQPGHRSYNLQERRRIGSMTGAEQALLPRVPTDEIEAQTLATADLDLMKSHRFEDVPGVRRHLVRKNAKGSTQSGREGREPGPTPRARPRAPHKPHEVFVELNELLLDKNQEPQWRETARWIKFEEDVEEETERWGKPHVASLSFRSLLELRRTLAHGAVLLDLDQQTLPGVAHQVVEQMVISDQIKAEDRANVLRALLLKHSHPSDEKDFSFPRNISAGSLGSLLGHHHGQGAESDPHVTEPLMGGVPETRLEVERERDVPPPAPPAGITRSKSKHELKLLEKIPENAEATVVLVGCVEFLSRPTMAFVRLREAVELDAVLEVPVPVRFLFLLLGPSSANMDYHEIGRSISTLMSDKQFHEAAYLADEREDLLTAINAFLDCSVVLPPSEVQGEELLRSVAHFQRQMLKKREEQGRLLPTGAGLEPKSAQDKALLQMVEAAGAAEDDPLRRTGRPFGGLIRDVRRRYPHYLSDFRDALDPQCLAAVIFIYFAALSPAITFGGLLGEKTQDLIGVSELIMSTALQGVVFCLLGAQPLLVIGFSGPLLVFEEAFFSFCSSNHLEYLVGRVWIGFWLVFLALLMVALEGSFLVRFVSRFTQEIFAFLISLIFIYETFYKLVKIFQEHPLHGCSASNSSEVDGGENMTWAGARPTLGPGNRSLAGQSGQGKPRGQPNTALLSLVLMAGTFFIAFFLRKFKNSRFFPGRIRRVIGDFGVPIAILIMVLVDYSIEDTYTQKLSVPSGFSVTAPEKRGWVINPLGEKSPFPVWMMVASLLPAILVFILIFMETQITTLIISKKERMLQKGSGFHLDLLLIVAMGGICALFGLPWLAAATVRSVTHANALTVMSKAVAPGDKPKIQEVKEQRVTGLLVALLVGLSIVIGDLLRQIPLAVLFGIFLYMGVTSLNGIQFYERLHLLLMPPKHHPDVTYVKKVRTLRMHLFTALQLLCLALLWAVMSTAASLAFPFILILTVPLRMVVLTRIFTDREMKCLDANEAEPVFDEREGVDEYNEMPMPV

SEQ ID NO: 333 - DNA, 1866 bp, Homosapiens
gggagccacgtctccgaagaccgatagctgcttcgggattggcgtccgggcggctatctaggggctgctgggaagatggcggactcggtggctagccgatgaggaggccgcggggggaacccggcccccgggccccgagaccgactgagggagcgacctgcgcagggcccggggagtcatggtctccatcacccaactccatgcttcgagtcctgctctctgctcagacctcccctgctcggctgtctggcctgctgctgatccctccagtacagccctgctgtttggggcccagcaaatggggggaccggcctgttggaggaggccccagtgcaggtcctgtgcaaggactgcagcggcttctggaacaggcgaagagccctggggagctgctgcgctggctgggccagaaccccagcaaggtgcgcgcccaccactactcggtggcgcttcgtcgtctgggccagctcttggggtctcggccacggccccctcctgtggagcaggtcacactgcaggacttgagtcagctcatcatccgaaactgcccctcctttgacattcacaccatccacgtgtgtctgcaccttgcagtcttacttggctttccatctgatggtcccctggtgtgtgccctggaacaggagcgaaggctccgcctccctccgaagccacctccccctttgcagccccttctccgaggtgggcaagggttggaagctgctctaagctgcccccgttttctgcggtatccacggcagcatctgatcagcagcctggcagaggcaaggccagaggaactgactccccacgtgatggtgctcctggcccagcacctggcccggcaccggttgcgggagccccagcttctggaagccattgcccacttcctggtggttcaggaaacgcaactcagcagcaaggtggtacagaagttggtcctgccctttgggcgactgaactacctgcccctggaacagcagtttatgccctgccttgagaggatcctggctcgggaagcaggggtggcacccctggctacagtcaacatcttgatgtcactgtgccaactgcggtgcctgcccttcagagccctgcactttgttttttcccctggcttcatcaactacatcagtggcacccctcatgctctgattgtgcgtcgctacctctccctgctggacacggccgtggagctggagctcccaggataccggggtccccgccttccccgaaggcagcaagtgcccatctttccccagcctctcatcaccgaccgtgcccgctgcaagtacagtcacaaggacatagtagctgaggggttgcgccagctgctgggggaggagaaataccgccaggacctgactgtgcctccaggctactgcacagacttcctgctgtgcgccagcagctctggtgctgtgcttcccgtgaggacccaggaccccttcctgccatacccaccaaggtcctgcccacagggccaggctgcctctagcgccactactcgagaccctgcccagagggtggtgctggtgttgcgggaacgctggcatttctgccgggacggccgggtgctgctgggctcgagggccctgagggagcggcacctaggcctgatgggctaccagctcctgccgctacccttcgaggaactggagtcccagagaggcctgccccagctcaagagctacctgaggcagaagctccaggccctgggcctgcgctgggggcctgaagggggctgaggggttgatgtggggttcaggatggcccccccatggggggtggatgatttgcactttggttccctgtgttttgatttctcattaaagttcctttccttccccgtaaaaaaaaaaaaaa

SEQ ID NO: 334 - protein, 549 aa, Homosapiens
MRRPRGEPGPRAPRPTEGATCAGPGESWSPSPNSMLRVLLSAQTSPARLSGLLLIPPVQPCCLGPSKWGDRPVGGGPSAGPVQGLQRLLEQAKSPGELLRWLGQNPSKVRAHHYSVALRRLGQLLGSRPRPPPVEQVTLQDLSQLIIRNCPSFDIHTIHVCLHLAVLLGFPSDGPLVCALEQERRLRLPPKPPPPLQPLLRGGQGLEAALSCPRFLRYPRQHLISSLAEARPEELTPHVMVLLAQHLARHRLREPQLLEAIAHFLVVQETQLSSKVVQKLVLPFGRLNYLPLEQQFMPCLERILAREAGVAPLATVNILMSLCQLRCLPFRALHFVFSPGFINYISGTPHALIVRRYLSLLDTAVELELPGYRGPRLPRRQQVPIFPQPLITDRARCKYSHKDIVAEGLRQLLGEEKYRQDLTVPPGYCTDFLLCASSSGAVLPVRTQDPFLPYPPRSCPQGQAASSATTRDPAQRVVLVLRERWHFCRDGRVLLGSRALRERHLGLMGYQLLPLPFEELESQRGLPQLKSYLRQKLQALGLRWGPEGG

SEQ ID NO: 335 - DNA, 1443 bp, Homosapiens
gggagccacgtctccgaagaccgatagctgcttcgggattggcgtccgggcggctatctaggggctgctgggaagatggcggactcggtggctagccgatgaggaggccgcggggggaacccggcccccgggccccgagaccgactgagggagcgacctgcgcagggcccggggagtcatgctttccatctgatggtcccctggtgtgtgccctggaacaggagcgaaggctccgcctccctccgaagccacctccccctttgcagccccttctccgaggtgggcaagggttggaagctgctctaagctgcccccgttttctgcggtatccacggcagcatctgatcagcagcctggcagaggcaaggccagaggaactgactccccacgtgatggtgctcctggcccagcacctggcccggcaccggttgcgggagccccagcttctggaagccattgcccacttcctggtggttcaggaaacgcaactcagcagcaaggtggtacagaagttggtcctgccctttgggcgactgaactacctgcccctggaacagcagtttatgccctgccttgagaggatcctggctcgggaagcaggggtggcacccctggctacagtcaacatcttgatgtcactgtgccaactgcggtgcctgcccttcagagccctgcactttgttttttcccctggcttcatcaactacatcagtggcacccctcatgctctgattgtgcgtcgctacctctccctgctggacacggccgtggagctggagctcccaggataccggggtccccgccttccccgaaggcagcaagtgcccatctttccccagcctctcatcaccgaccgtgcccgctgcaagtacagtcacaaggacatagtagctgaggggttgcgccagctgctgggggaggagaaataccgccaggacctgactgtgcctccaggctactgcacagacttcctgctgtgcgccagcagctctggtgctgtgcttcccgtgaggacccaggaccccttcctgccatacccaccaaggtcctgcccacagggccaggctgcctctagcgccactactcgagaccctgcccagagggtggtgctggtgttgcgggaacgctggcatttctgccgggacggccgggtgctgctgggctcgagggccctgagggagcggcacctaggcctgatgggctaccagctcctgccgctacccttcgaggaactggagtcccagagaggcctgccccagctcaagagctacctgaggcagaagctccaggccctgggcctgcgctgggggcctgaagggggctgaggggttgatgtggggttcaggatggcccccccatggggggtggatgatttgcactttggttccctgtgttttgatttctcattaaagttcctttccttccccgtaaaaaaaaaaaaaa

SEQ ID NO: 336 - protein, 408 aa, Homosapiens
MRRPRGEPGPRAPRPTEGATCAGPGESCFPSDGPLVCALEQERRLRLPPKPPPPLQPLLRGGQGLEAALSCPRFLRYPRQHLISSLAEARPEELTPHVMVLLAQHLARHRLREPQLLEAIAHFLVVQETQLSSKVVQKLVLPFGRLNYLPLEQQFMPCLERILAREAGVAPLATVNILMSLCQLRCLPFRALHFVFSPGFINYISGTPHALIVRRYLSLLDTAVELELPGYRGPRLPRRQQVPIFPQPLITDRARCKYSHKDIVAEGLRQLLGEEKYRQDLTVPPGYCTDFLLCASSSGAVLPVRTQDPFLPYPPRSCPQGQAASSATTRDPAQRVVLVLRERWHFCRDGRVLLGSRALRERHLGLMGYQLLPLPFEELESQRGLPQLKSYLRQKLQALGLRWGPEGG

SEQ ID NO: 337 - DNA, 1494 bp, Homosapiens
gcggagtagatgagcctggggtgaagtcggtgaaggagtagacacactggggtgaagtgggcaggagaatagatacgcttgggggtgaagtttggttggggtgaagtttaggagaggcgttgcttaggcccttaccttgggatagggtttgggtgagttgggagctggttgaagacctcgagctcagatgacagaaagttaggacttgggattcggcgatgggaaggggcacccggagctcggtagcgcggcgggcaaggcaggcgccatgaccctgattgaaggggtgggtgatgaggtgaccgtccttttctcggtgcttgcctgccttctggtgctggcccttgcctgggtctcaacgcacaccgctgagggcggggacccactgccccagccgtcagggaccccaacgccatcccagcccagcgcagccatggcagctaccgacagcatgagaggggaggccccaggggcagagacccccagcctgagacacagaggtcaagctgcacagccagagcccagcacggggttcacagcaacaccgccagccccggactccccgcaggagcccctcgtgctacggctgaaattcctcaatgattcagagcaggtggccagggcctggccccacgacaccattggctccttgaaaaggacccagtttcccggccgggaacagcaggtgcgactcatctaccaagggcagctgctaggcgacgacacccagaccctgggcagccttcacctccctcccaactgcgttctccactgccacgtgtccacgagagtcggtcccccaaatcccccctgcccgccggggtccgagcccggcccctccgggctggaaatcggcagcctgctgctgcccctgctgctcctgctgttgctgctgctctggtactgccagatccagtaccggcccttctttcccctgaccgccactctgggcctggccggcttcaccctgctcctcagtctcctggcctttgccatgtaccgcccgtagtgcctccgcgggcgcttggcagcgtcgccggcccctccggaccttgctccccgcgccgcggcgggagctgctgcctgcccaggcccgcctctccggcctgcctcttcccgctgccctggagcccagccctgcgccgcagaggactcccgggactggcggaggccccgccctgcgaccgccggggctcggggccacctcccggggctgctgaccctcagcccgcactgggagtgggctcctcggggtcgggcatctgctgtcgctgcctcggccccgggcagagccgggccgccccgggggcccgtcttagtgttctgccggaggacccagccgcctccaatccctgacagctccttgggctgagttggggacgccaggtcggtgggaggctggtgaaggggagcggggaggggcagaggagttccccggaacccgtgcagattaaagtaactgtgaagttttcaaaaaaaaaaaaaaaaaaaaaa

SEQ ID NO: 338 - protein, 246 aa, Homosapiens
MTLIEGVGDEVTVLFSVLACLLVLALAWVSTHTAEGGDPLPQPSGTPTPSQPSAAMAATDSMRGEAPGAETPSLRHRGQAAQPEPSTGFTATPPAPDSPQEPLVLRLKFLNDSEQVARAWPHDTIGSLKRTQFPGREQQVRLIYQGQLLGDDTQTLGSLHLPPNCVLHCHVSTRVGPPNPPCPPGSEPGPSGLEIGSLLLPLLLLLLLLLWYCQIQYRPFFPLTATLGLAGFTLLLSLLAFAMYRP

SEQ ID NO: 339 - DNA, 3152 bp, Homosapiens
gccatgaacttccaggcgggcggggggcagagcccgcagcagcagcagcagctggccggcgggcccccccagcagttcgcgctctccaactccgcggccatccgggccgagatccagcgcttcgagtccgtgcatcccaatatctacgccatctacgacctgatcgagcgcatcgaggatttggcgctgcagaaccagatccgggagcacgtcatctccatcgaggactcgtttgtgaacagccaggagtggacgctgagccgctccgtaccggagcttaaagtgggcatagtggggaacctgtctagcgggaagtcagccctggtgcaccgctatctgacggggacctatgtccaggaggagtcccctgaaggggggcggtttaagaaggagattgtggtggatggccagagttacctgctgctgatccgagatgaaggaggcccccctgagctccagtttgctgcctgggtggatgcagtggtgtttgtgttcagcctggaggatgaaatcagtttccagacggtgtacaactacttcctgcgtctctgcagcttccgcaacgccagcgaggtgcccatggtgcttgtgggcacgcaggatgccatcagcgctgcgaatccccgggttatcgacgacagcagagcccgcaagctctccacagatctgaagcggtgcacctactatgagacgtgcgcgacctacgggctcaatgtggagcgtgtcttccaggacgtggcccagaaggtagtggccttgcgaaagaagcagcaactggccatcgggccctgcaagtcactgcccaactcgcccagccactcggccgtgtccgccgcctccatcccggccgtgcacatcaaccaggccacgaatggcggcggcagcgccttcagcgactactcgtcctcagtcccctccacccccagcatcagccagcgggagctgcgcatcgagaccatcgctgcctcctccacccccacacccatccgaaagcagtccaagcggcgctccaacatcttcacgtctcggaagggtgctgacctggaccgggagaagaaggctgccgagtgcaaggtggacagcatcgggagcggccgcgccatccccatcaagcaggggatcctgctaaagcggagcggcaagtccctgaacaaggagtggaagaagaagtatgtgacgctctgtgacaacgggctgctcacctatcaccccagcctgcatgattacatgcagaacatccacggcaaggagattgacctgctgcggacaacggtgaaagtgccagggaagcgcctgccccgagccacacctgccacagccccgggcaccagcccccgtgccaacgggctgtccgtggagcggagtaacacacagctgggtgggggcacaggtgccccccactcggccagcagcgcatccctgcactctgagcgccccctcagcagctcggcctgggctggcccgcgccctgaggggctgcaccagcgctcctgctccgtttccagcgccgaccagtggagtgaggccaccacttccctgcccccaggcatgcagcaccctgccagtggcccagctgaggtactcagttccagccccaagctggatcctcccccatctccccactccaaccggaagaagcaccggaggaaaaagagcaccgggaccccccgaccagacggccccagcagtgctactgaagaggcagaggagtcgtttgaatttgtggtggtgtccctcactgggcagacgtggcacttcgaggcttcaacggcggaggagcgggagctgtgggttcagagtgtgcaggcccagatccttgccagcctgcaaggctgccgcagtgccaaggacaagactcgactggggaaccagaacgcagctctggctgtgcaggccgtccgcaccgtccgcggcaacagcttttgtatcgactgcgatgcacccaatccagactgggccagcctgaacctgggtgccctgatgtgcattgagtgctcaggcatccaccgacacctgggggctcacctgtcccgggtgcgctcccttgacctcgatgactggccgcctgagctgctggctgtcatgactgccatgggcaatgccctcgccaacagcgtctgggagggggccttgggtggctactccaagccagggcctgatgcctgcagagaggagaaggaacgctggatacgggccaagtatgaacagaagctcttcctggccccactgccaagctcagatgtgccactggggcagcagctgctccgggccgtggtggaagatgacctgcggctgttggtgatgctcctggcacatggctccaaagaggaggtgaatgagacctatggggacggggacgggcggacggctctacatctctccagtgccatggccaacgttgtcttcacgcagctgctcatctggtacggggtggacgtgaggagccgggacgcccggggcctgactccactggcatatgctcgccgggccggcagccaggagtgtgcagacatcttgatccagcatggctgccctggggagggctgtggcttagcgcctacccccaacagagagcctgccaatggcaccaacccctctgctgagctgcaccgtagtcctagcctcctataaggcccaggaagagggcagaggggccagaaggactccatggcccaaagaccctcctccctgcaggcactgtgggaacagacacagagatggagaagcagggacatgctgagaggacgaagccaaggaaattagggaggagagtcaaagggatcaaggagagttggggatttgagctgcagcagagagggatgagggatttagccctctgccctaaggtgccattgaaaagggacaggacccttcggaggtgcctgtgaggagaggggagcaggacctctccctcctccagatccctgcctcctagtgccagcccctcacacgccttcatcctgaaacaggaagaggacggcaccaagttgggggtgctggatgaaagagacgaggggtgatctgtgagtcccatgtaaactttgtacattggaatatttatgtttgtgtacatatttgatgtgtgtgtgtatgatgagccaataaaccagactgtgtgcgtggcaaaaaaaaaaaaaaaaaaaaaaaaaaaa

SEQ ID NO: 340 - protein, 875 aa, Homosapiens
MNFQAGGGQSPQQQQQLAGGPPQQFALSNSAAIRAEIQRFESVHPNIYAIYDLIERIEDLALQNQIREHVISIEDSFVNSQEWTLSRSVPELKVGIVGNLSSGKSALVHRYLTGTYVQEESPEGGRFKKEIVVDGQSYLLLIRDEGGPPELQFAAWVDAVVFVFSLEDEISFQTVYNYFLRLCSFRNASEVPMVLVGTQDAISAANPRVIDDSRARKLSTDLKRCTYYETCATYGLNVERVFQDVAQKVVALRKKQQLAIGPCKSLPNSPSHSAVSAASIPAVHINQATNGGGSAFSDYSSSVPSTPSISQRELRIETIAASSTPTPIRKQSKRRSNIFTSRKGADLDREKKAAECKVDSIGSGRAIPIKQGILLKRSGKSLNKEWKKKYVTLCDNGLLTYHPSLHDYMQNIHGKEIDLLRTTVKVPGKRLPRATPATAPGTSPRANGLSVERSNTQLGGGTGAPHSASSASLHSERPLSSSAWAGPRPEGLHQRSCSVSSADQWSEATTSLPPGMQHPASGPAEVLSSSPKLDPPPSPHSNRKKHRRKKSTGTPRPDGPSSATEEAEESFEFVVVSLTGQTWHFEASTAEERELWVQSVQAQILASLQGCRSAKDKTRLGNQNAALAVQAVRTVRGNSFCIDCDAPNPDWASLNLGALMCIECSGIHRHLGAHLSRVRSLDLDDWPPELLAVMTAMGNALANSVWEGALGGYSKPGPDACREEKERWIRAKYEQKLFLAPLPSSDVPLGQQLLRAVVEDDLRLLVMLLAHGSKEEVNETYGDGDGRTALHLSSAMANVVFTQLLIWYGVDVRSRDARGLTPLAYARRAGSQECADILIQHGCPGEGCGLAPTPNREPANGTNPSAELHRSPSLL

SEQ ID NO: 341 - DNA, 1820 bp, Homosapiens
aggtcctaagggcttgagtgaaaggagaagcccccggctgtttctccccgacctcaaagcttgcccaatagcctacaccttggcccaagaacacagtcatgtggagcccagaatagctcctgctggatgcgtggccaggtcagcctcggagcgtgggacacaggggccttctgtctgtctgtatttccctcctgctctctctctctctctctgcctttggcatatacctctcctcctccccactcccctttccctgcccacatgctcatgagttggtctccagaagagtgcaaggggcagggagagcccctcgatgacagacaccccctctgtgccaggctggtggagaagcccagcagagggtctgaggagcacctcaagtctggcccgggacccatcgtcacccgcacagcctcaggacctgcccttgccttctggcaggcagtgctggctggggacgtgggctgtgtctcccgcatcctcgcggactccagtactggcctggctcctgattccgtctttgataccagcgacccagagcgatggagggatttccgcttcaacatccgtgctctgagactctggtctctgacatacgaagaggagctgaccaccccactgcatgtggcagccagccgtggccacacggaagtcctgcggctgctgctgaggcggcgagcaaggccagacagtgcccctgggggccgcaccgccctgcacgaggcctgtgctgcaggccacactgcctgtgttcatgtgctgctggtggcaggagccgaccccaacatcgctgaccaggatgggaaacgccccctgcatctctgccgggggcctggcacccttgagtgtgcggagctgctcctcaggtttggagcgagagtggatggtcggtccgaggaagaagaggagacccctttgcatgtggccgcccggcttggccatgtggagctggcagatctgcttctaagacggggggcatgtcctgatgcccgcaatgccgaaggctggaccccactgctggctgcctgtgacgtccgctgccagtccatcaccgatgccgaggccaccaccgcccgctgcctgcagctgtgcagcttgctgctttcagctggagcagacgctgatgctgcggaccaggacaagcagcgacccctgcacctggcctgccgccgtggccatgcagctgtcgtggagctgctcctgtcctgtggtgtcagcgccaacaccatggactatgggggacacacgcccctgcactgtgctctgcagggcccagctgcagccctggcccagagccccgagcacgtggttcgggctctgctcaaccatggcgccgtccgtgtctggccaggggccctccccaagaaacatcagcgtttctactcctccctcttcgccttggtgaggcagcccaggtcgctgcagcatttgagccgctgtgcgctccgctcccacctggagggcagcctgccccaagcgctgccccgcctccccctgccaccgcgcctgctccgctacctgcagctggattttgagggcgtgctctactagatgtccatggccttttgagagggcctgaaagcagatgccccagcctgcagagggcgcgcctctgcactaactcaggccaggtagccctggcagcaggaggcccagctccgcaggcaggtgtggatgctgcaattcccaatgcagagaagcggaccgacagcggcagccgggtgatgtctgatgaagacacactcctactggggctctcctgaggcccccttctagcctgtgcaaaccctgtatgtgcattaaaaatctccaggtctgtg

SEQ ID NO: 342 - protein, 429 aa, Homosapiens
MLMSWSPEECKGQGEPLDDRHPLCARLVEKPSRGSEEHLKSGPGPIVTRTASGPALAFWQAVLAGDVGCVSRILADSSTGLAPDSVFDTSDPERWRDFRFNIRALRLWSLTYEEELTTPLHVAASRGHTEVLRLLLRRRARPDSAPGGRTALHEACAAGHTACVHVLLVAGADPNIADQDGKRPLHLCRGPGTLECAELLLRFGARVDGRSEEEEETPLHVAARLGHVELADLLLRRGACPDARNAEGWTPLLAACDVRCQSITDAEATTARCLQLCSLLLSAGADADAADQDKQRPLHLACRRGHAAVVELLLSCGVSANTMDYGGHTPLHCALQGPAAALAQSPEHVVRALLNHGAVRVWPGALPKKHQRFYSSLFALVRQPRSLQHLSRCALRSHLEGSLPQALPRLPLPPRLLRYLQLDFEGVLY

SEQ ID NO: 343 - DNA, 1299 bp, Homosapiens
ccagcaaacaaggggcagcgtggaggagtggacacaatgtctgagggagcttaccagcgcctctgggagtcctcccacgcgaccctgcaggagctgctggaccaagagcagcttctgctcgaacctgcgcccgaccgggagcggcagtccttccagtacaggctcgcatcgctctacctgcactacctggggctgctgcgccgcttcgacaccgtctatgaccagatggtgcagccgcagaagcggcggctgctgcgacgcctgctggacggcgtggcgggccgcgtgctggagctcaaggacgagctggtgcgcgccgacctgtgtgagaaccactgcctggaccgcgtgctgcaggatttcaagctcaccccagctgacctggaggttccaatccccaaatacttcctgctggagcagtccaccactgtgcgggagcgagggctgatactggccgagatcctgtccagactggagccagtgtcctcccagaagagctttacaggaatgcaccggactgaggccataattctagtgcaaaaggcagagcgggcgaggcaaggccggcttcgagccaccttcatgcgagagattcgaagagatgaggagcaggatgggaggattcgggaggatggatggcacaagttcagtcagggccaagcagctgtcaccatacagaaggtgtggaaaggctatctgcagaggaaacgcactcagcaggaccggcgaatggagatggagttcattggcatgctcccctcacccaaccaggtagagcacctgagcatcatctcccagccatgcctcgtggaggatgtccagaggctccgccagatggagaaagaggaggagttccgggcagcaatggtgaaggcccatgattctctggtagagacagaggggcctgacatgaaggagaaaatgaaggagcaaatccgacagtggtttatcgagtgccatgaccttactggccggttccctgattatccagatgcgtcttcaggtggatcctactcaatctttgcagacaaaacgccagaacaggaagtggatgcggtgttgcaagtgttgccatccaaatgtatccctatgatctgtgccgggcatgaagaatacttaaatacatggaagaaccggtgtgagagcatacaccccagtcagaattatgactccgagaccctccgggaggagaagaggaaagaggtggagctggagatccggatacaggtggatgagctgatgcgtcaggagctgaggaagctccgtctggctgtggacaaggaggaaaaagacccctga

SEQ ID NO: 344 - protein, 420 aa, Homosapiens
MSEGAYQRLWESSHATLQELLDQEQLLLEPAPDRERQSFQYRLASLYLHYLGLLRRFDTVYDQMVQPQKRRLLRRLLDGVAGRVLELKDELVRADLCENHCLDRVLQDFKLTPADLEVPIPKYFLLEQSTTVRERGLILAEILSRLEPVSSQKSFTGMHRTEAIILVQKAERARQGRLRATFMREIRRDEEQDGRIREDGWHKFSQGQAAVTIQKVWKGYLQRKRTQQDRRMEMEFIGMLPSPNQVEHLSIISQPCLVEDVQRLRQMEKEEEFRAAMVKAHDSLVETEGPDMKEKMKEQIRQWFIECHDLTGRFPDYPDASSGGSYSIFADKTPEQEVDAVLQVLPSKCIPMICAGHEEYLNTWKNRCESIHPSQNYDSETLREEKRKEVELEIRIQVDELMRQELRKLRLAVDKEEKDP

SEQ ID NO: 345 - DNA, 2262 bp, Homosapiens
tgagccggccgcacgcggaggatcctaaggagcagctctgttgcgacataggccgagcagcgaggcccagctccctgaaacaacagtaacctacccctgtgggtcatcatcatgccctccgacctggccaagaagaaggcagccaaaaagaaggaggctgccaaagctcgacagcggcccagaaaaggacatgaagaaaatggagatgttgtcacagaaccacaggtggcagagaagaatgaggccaatggcagagagaccacagaagtagatttgctgaccaaggagctagaggactttgagatgaagaaagctgctgctcgagctgtcactggcgtcctggcctctcaccccaacagtactgatgttcacatcatcaacctctcacttacctttcatggtcaagagctgctcagtgacaccaaactggaattaaactcaggccgtcgttatggcctcattggtttaaatggaattggaaagtccatgctgctctctgctattgggaagcgtgaagtgcccatccctgagcacatcgacatctaccatctgactcgagagatgccccctagtgacaagacacccttgcattgtgtgatggaagtcgacacagagcgggccatgctggagaaagaggcagagcggctggctcatgaggatgcggagtgtgagaagctcatggagctctacgagcgcctggaggagctggatgccgacaaggcagagatgagggcctcgcggatcttgcatggactgggtttcacacctgccatgcagcgcaagaagctaaaagacttcagtgggggctggaggatgagggttgcccttgccagagccctctttattcggcccttcatgctgctcctggatgagcctaccaaccacctggacctagatgcttgcgtgtggttggaagaagaactaaaaacttttaagcgcatcttggtcctcgtctcccattcccaggattttctgaatggtgtctgtaccaatatcattcacatgcacaacaagaaactgaagtattatacgggtaattatgatcagtacgtgaagacgcggctagagctggaggagaaccagatgaagaggtttcactgggagcaagatcagattgcacacatgaagaactacattgcgaggtttggtcatggcagtgccaagctggcccggcaggcccagagcaaggagaagacgctacagaaaatgatggcatcaggactgacagagagggtcgtgagcgataagacactgtcattttatttcccaccatgtggcaagatccctccacctgtcattatggtgcaaaatgtgagcttcaagtatacaaaagatgggccttgcatctacaataatctagaatttggaattgaccttgacacacgagtggctctggtagggcccaatggagcagggaagtcaactcttctgaagctgctaactggagagctactacccacagatggcatgatccgaaaacactctcatgtcaagatagggcgttaccatcagcatttacaagagcagctggacttagatctctcacctttggagtacatgatgaagtgctacccagagatcaaggagaaggaagaaatgaggaagatcattgggcgatacggtctcactgggaaacaacaggtgagcccaatccggaacttgtcagacgggcagaagtgccgagtgtgtctggcctggctggcctggcagaacccccacatgctcttcctggatgaacccaccaatcacctggatatcgagaccatcgacgccctggcagatgccatcaatgagtttgagggtggtatgatgctggtcagccatgacttcagactcattcagcaggttgcacaggaaatttgggtctgtgagaagcagacaatcaccaagtggcctggagacatcctggcttacaaggagcacctcaagtccaagctggtggatgaggagccccagctcaccaagaggacccacaacgtgtgcaccctgacattggcatctctgccaaggccatgagcatcatgaactcgtttgtaaacgacgtgtttgagcagctggcgtgtgaggctgcccggctggcccagtactcgggccggaccaccctgacatcccgagaagtccagacggctgtgcgtctgctgctgcctggggagctggccaagcacgctgtgtctgagggcaccaaggctgtcaccaagtacaccagctccaagtgacccagggcctgacaaaaataaagggtgaactgttaaaaaaaaaaaa

SEQ ID NO: 346 - protein, 634 aa, Homosapiens
MPSDLAKKKAAKKKEAAKARQRPRKGHEENGDVVTEPQVAEKNEANGRETTEVDLLTKELEDFEMKKAAARAVTGVLASHPNSTDVHIINLSLTFHGQELLSDTKLELNSGRRYGLIGLNGIGKSMLLSAIGKREVPIPEHIDIYHLTREMPPSDKTPLHCVMEVDTERAMLEKEAERLAHEDAECEKLMELYERLEELDADKAEMRASRILHGLGFTPAMQRKKLKDFSGGWRMRVALARALFIRPFMLLLDEPTNHLDLDACVWLEEELKTFKRILVLVSHSQDFLNGVCTNIIHMHNKKLKYYTGNYDQYVKTRLELEENQMKRFHWEQDQIAHMKNYIARFGHGSAKLARQAQSKEKTLQKMMASGLTERVVSDKTLSFYFPPCGKIPPPVIMVQNVSFKYTKDGPCIYNNLEFGIDLDTRVALVGPNGAGKSTLLKLLTGELLPTDGMIRKHSHVKIGRYHQHLQEQLDLDLSPLEYMMKCYPEIKEKEEMRKIIGRYGLTGKQQVSPIRNLSDGQKCRVCLAWLAWQNPHMLFLDEPTNHLDIETIDALADAINEFEGGMMLVSHDFRLIQQVAQEIWVCEKQTITKWPGDILAYKEHLKSKLVDEEPQLTKRTHNVCTLTLASLPRP

SEQ ID NO: 347 - DNA, 3552 bp, Homosapiens
tgagccggccgcacgcggaggatcctaaggagcagctctgttgcgacataggccgagcagcgaggcccagctccctgaaacaacagtaacctacccctgtgggtcatcatcatgccctccgacctggccaagaagaaggcagccaaaaagaaggaggctgccaaagctcgacagcggcccagaaaaggacatgaagaaaatggagatgttgtcacagaaccacaggtggcagagaagaatgaggccaatggcagagagaccacagaagtagatttgctgaccaaggagctagaggactttgagatgaagaaagctgctgctcgagctgtcactggcgtcctggcctctcaccccaacagtactgatgttcacatcatcaacctctcacttacctttcatggtcaagagctgctcagtgacaccaaactggaattaaactcaggccgtcgttatggcctcattggtttaaatggaattggaaagtccatgctgctctctgctattgggaagcgtgaagtgcccatccctgagcacatcgacatctaccatctgactcgagagatgccccctagtgacaagacacccttgcattgtgtgatggaagtcgacacagagcgggccatgctggagaaagaggcagagcggctggctcatgaggatgcggagtgtgagaagctcatggagctctacgagcgcctggaggagctggatgccgacaaggcagagatgagggcctcgcggatcttgcatggactgggtttcacacctgccatgcagcgcaagaagctaaaagacttcagtgggggctggaggatgagggttgcccttgccagagccctctttattcggcccttcatgctgctcctggatgagcctaccaaccacctggacctagatgcttgcgtgtggttggaagaagaactaaaaacttttaagcgcatcttggtcctcgtctcccattcccaggattttctgaatggtgtctgtaccaatatcattcacatgcacaacaagaaactgaagtattatacgggtaattatgatcagtacgtgaagacgcggctagagctggaggagaaccagatgaagaggtttcactgggagcaagatcagattgcacacatgaagaactacattgcgaggtttggtcatggcagtgccaagctggcccggcaggcccagagcaaggagaagacgctacagaaaatgatggcatcaggactgacagagagggtcgtgagcgataagacactgtcattttatttcccaccatgtggcaagatccctccacctgtcattatggtgcaaaatgtgagcttcaagtatacaaaagatgggccttgcatctacaataatctagaatttggaattgaccttgacacacgagtggctctggtagggcccaatggagcagggaagtcaactcttctgaagctgctaactggagagctactacccacagatggcatgatccgaaaacactctcatgtcaagatagggcgttaccatcagcatttacaagagcagctggacttagatctctcacctttggagtacatgatgaagtgctacccagagatcaaggagaaggaagaaatgaggaagatcattgggcgatacggtctcactgggaaacaacaggtgagcccaatccggaacttgtcagacgggcagaagtgccgagtgtgtctggcctggctggcctggcagaacccccacatgctcttcctggatgaacccaccaatcacctggatatcgagaccatcgacgccctggcagatgccatcaatgagtttgagggtggtatgatgctggtcagccatgacttcagactcattcagcaggttgcacaggaaatttgggtctgtgagaagcagacaatcaccaagtggcctggagacatcctggcttacaaggagcacctcaagtccaagctggtggatgaggagccccagctcaccaagaggacccacaacgtgtgagccctctacctgggttcgggtcaggagctccatctgggaactaacagctgctaacctgaccagccgctcaggacaggaccctggggctacactcctgcattgctgcaatactgctcccccagcctctcccctgcccctcaacctgccttagctgcactctcttacctacagctggacagtacctgtctgtttcctgtcctccttccagttacatctgtccatgtctggactcggctggccgttccctccagccccttgctggttatcttactctgagtgtgatgcagtcagaggcacctgcgggttagcccaggggcccaagccctggatttggcctgcggaggagcttaggatcctcgttttctgggttttggtgatgttggaggagtaccccccagcccaccgccccgattcctttttgcttctggtttggagctccggaccaggaccttcgtcctggtcagtttttaaataattatttagcagtgtaacttttagacctgcgtgacatctacaaagcgcccaataaagaaagaggaagccacggtccctaccttccttctcgggtctctggggccttctcctccctgcagtgccaacatgcactgcccacagcaggagctggatccagcgtcagtgtgtcgatgggaactgaagactagtccataggagctggaagaactttgtccctttacttctgatttgaaattgtaccttttctcaggcctgtgattcacagactttaacatgaatcagaatcacctggagggctcatgcaatcagattgccagatctcgcctcagcgtttctggttcaataggttttgggggagaccaagaacgttaacatttctagcaagtttccaggtgatgctgttgttgctggtctagagactattttgagaaccactgtccaggagcgtggttttctgattgtgatctgaggttctgccccaactgcacagcagttgggctgcttgttaaaaatgcaggccaggtgcggtggctcacacctgtaatcccagcgctttgggaggctgaggcaggtggatcacttgagctcaggagttcaagaccagcttgggaaacatggcaaaacccgtctttatgtgcctggaatcccacctgctcaggtggctagggtggatggatcgcttgagcccaggaggtggaggttgcagtgagctgagattgcaccactgcattccagcctggatgacagagcaaaaccctgtctcaaaaaaatgcagactggccaggcacagtggctcacacctgtaatccgactgtaagctcatcaccttgggaggccactgtaggaggatcaattgagcctagaagttcaagaccagcctgggcaaagtagggagaccccttctctacaaatagtaataaaatgaaccgggcatagtagcatgtgcctgcggtcccagctgctctgataagaggaggctcacttgagcccaggaggttgaggctgcagtgagcagagcgtgccgctacactccagcctgatgacagaccgagacactgtctcaaaaaaataaaaaaattcagattgctgaaaaaa

SEQ ID NO: 348 - protein, 623 aa, Homosapiens
MPSDLAKKKAAKKKEAAKARQRPRKGHEENGDVVTEPQVAEKNEANGRETTEVDLLTKELEDFEMKKAAARAVTGVLASHPNSTDVHIINLSLTFHGQELLSDTKLELNSGRRYGLIGLNGIGKSMLLSAIGKREVPIPEHIDIYHLTREMPPSDKTPLHCVMEVDTERAMLEKEAERLAHEDAECEKLMELYERLEELDADKAEMRASRILHGLGFTPAMQRKKLKDFSGGWRMRVALARALFIRPFMLLLDEPTNHLDLDACVWLEEELKTFKRILVLVSHSQDFLNGVCTNIIHMHNKKLKYYTGNYDQYVKTRLELEENQMKRFHWEQDQIAHMKNYIARFGHGSAKLARQAQSKEKTLQKMMASGLTERVVSDKTLSFYFPPCGKIPPPVIMVQNVSFKYTKDGPCIYNNLEFGIDLDTRVALVGPNGAGKSTLLKLLTGELLPTDGMIRKHSHVKIGRYHQHLQEQLDLDLSPLEYMMKCYPEIKEKEEMRKIIGRYGLTGKQQVSPIRNLSDGQKCRVCLAWLAWQNPHMLFLDEPTNHLDIETIDALADAINEFEGGMMLVSHDFRLIQQVAQEIWVCEKQTITKWPGDILAYKEHLKSKLVDEEPQLTKRTHNV

SEQ ID NO: 349 - DNA, 3970 bp, Homosapiens
aggggctgtgaggtggcagcggctgcagcggcggagccggcgcctcagcgggcactggggtctgttcccccttccccgtccctgctccctgccaggcgcgtgcgggacgccgctcttggtccccacgcctccgccccgccccctcccgggacgccgggagaccccggccgtcctttatccggtgtccgccggcccccggccctgaaacccgggcctcctccccgagggccttgggcgtccctcctggtcctgcgctcgcggcctcgatgctgtctctggcgcggcctccgctcccgccgactggcctgagaacgaggtctgtgccccagtctcccagccgcgacctccgaccccgcctcgcagaacgacccgagctggtctcccgagcccccttctcagcagcccggtgacgtggccagtttatttctgttttgagacgaacggcgaagactcgcgtcgggtcttcgttctagggctagacttggtctctgatcgccgagaggtagcgcaggggctgtgggcccccggcaggggtcctgtcggaagctggccgcgcttctgtttgcgttcccaggaccctggcattgtctctagttgctgcttgtgctctctctttgcttttggtttgcttcatttggcccctggggccctggtaaaaccaggcaccgaatcgctcgcacacagagttccagtccccgcctgctgtctcctcagcagctggggttccgaggagaatgccctgcaagatggctccatcggccatggcgctcctgagaggctgtcagtgctgagtcaccgatctacctcattcgggtgggcagaacttatgtgtgccatgcgagtggctccagaccgctcctgagtgggaggaggggttcctgtagccgttgcgtcttctcaaacacggggagcagagtagaaagaggctctggccccttcccttgtgcccaccgggcctgccgcagtggctcagcagccccttcagtagcccgcctgaggaccgatgccagaggcaggcattcttccggaaaggcccactgaggcaggctccggctcctctggttggggctgttgttttgatggatcgtgtgcttttcccttacctcttatcacttgctgtcatctgttgacttaggcccagtctgcagatgtgtgtagtgttcctttttgggttagctttggcagtattgagttttacttcctcctctttttagtggaagacagaccataatcccagtgtgagtgaaattgattgtttcatttattaccgttttggctgggggttagttccgacaccttcacagttgaagagcaggcagaaggagttgtgaagacaggacaatcttcttggggatgctggtcctggaagccagcgggcctcgctctgtctttggcctcattgaccccaggttctctggttaaaactgaaagcctactactggcctggtgcccatcaatccattgatccttgaggctgtgcccctggggcacccacctggcagggcctaccaccatgcgactgagctccctgttggctctgctgcggccagcgcttcccctcatcttagggctgtctctggggtgcagcctgagcctcctgcgggtttcctggatccagggggagggagaagatccctgtgtcgaggctgtaggggagcgaggagggccacagaatccagattccagagctcggctagaccaaagtgatgaagacttcaaaccccggattgtcccctactacagggaccccaacaagccctacaagaaggtgctcaggactcggtacatccagacagagctgggctcccgtgagcggttgctggtggctgtcctgacctcccgagctacactgtccactttggccgtggctgtgaaccgtacggtggcccatcacttccctcggttactctacttcactgggcagcggggggcccgggctccagcagggatgcaggtggtgtctcatggggatgagcggcccgcctggctcatgtcagagaccctgcgccaccttcacacacactttggggccgactacgactggttcttcatcatgcaggatgacacatatgtgcaggccccccgcctggcagcccttgctggccacctcagcatcaaccaagacctgtacttaggccgggcagaggagttcattggcgcaggcgagcaggcccggtactgtcatgggggctttggctacctgttgtcacggagtctcctgcttcgtctgcggccacatctggatggctgccgaggagacattctcagtgcccgtcctgacgagtggcttggacgctgcctcattgactctctgggcgtcggctgtgtctcacagcaccaggggcagcagtatcgctcatttgaactggccaaaaatagggaccctgagaaggaagggagctcggctttcctgagtgccttcgccgtgcaccctgtctccgaaggtaccctcatgtaccggctccacaaacgcttcagcgctctggagttggagcgggcttacagtgaaatagaacaactgcaggctcagatccggaacctgaccgtgctgacccccgaaggggaggcagggctgagctggcccgttgggctccctgctcctttcacaccacactctcgctttgaggtgctgggctgggactacttcacagagcagcacaccttctcctgtgcagatggggctcccaagtgcccactacagggggctagcagggcggacgtgggtgatgcgttggagactgccctggagcagctcaatcggcgctatcagccccgcctgcgcttccagaagcagcgactgctcaacggctatcggcgcttcgacccagcacggggcatggagtacaccctggacctgctgttggaatgtgtgacacagcgtgggcaccggcgggccctggctcgcagggtcagcctgctgcggccactgagccgggtggaaatcctacctatgccctatgtcactgaggccacccgagtgcagctggtgctgccactcctggtggctgaagctgctgcagccccggctttcctcgaggcctttgcagccaatgtcctggagccacgagaacatgcattgctcaccctgttgctggtctacgggccacgagaaggtggccgtggagctccagacccatttcttggggtgaaggctgcagcagcggagttagagcgacggtaccctgggacgaggctggcctggctcgctgtgcgagcagaggccccttcccaggtgcgactcatggacgtggtctcgaagaagcaccctgtggacactctcttcttccttaccaccgtgtggacaaggcctgggcccgaagtcctcaaccgctgtcgcatgaatgccatctctggctggcaggccttctttccagtccatttccaggagttcaatcctgccctgtcaccacagagatcacccccagggcccccgggggctggccctgaccccccctcccctcctggtgctgacccctcccggggggctcctataggggggagatttgaccggcaggcttctgcggagggctgcttctacaacgctgactacctggcggcccgagcccggctggcaggtgaactggcaggccaggaagaggaggaagccctggaggggctggaggtgatggatgttttcctccggttctcagggctccacctctttcgggccgtagagccagggctggtgcagaagttctccctgcgagactgcagcccacggctcagtgaagaactctaccaccgctgccgcctcagcaacctggaggggctagggggccgtgcccagctggctatggctctctttgagcaggagcaggccaatagcacttagcccgcctgggggccctaacctcattacctttcctttgtctgcctcagccccaggaagggcaaggcaagatggtggacagatagagaattgttgctgtattttttaaatatgaaaatgttattaaacatgtcttctgcc

SEQ ID NO: 350 - protein, 772 aa, Homosapiens
MRLSSLLALLRPALPLILGLSLGCSLSLLRVSWIQGEGEDPCVEAVGERGGPQNPDSRARLDQSDEDFKPRIVPYYRDPNKPYKKVLRTRYIQTELGSRERLLVAVLTSRATLSTLAVAVNRTVAHHFPRLLYFTGQRGARAPAGMQVVSHGDERPAWLMSETLRHLHTHFGADYDWFFIMQDDTYVQAPRLAALAGHLSINQDLYLGRAEEFIGAGEQARYCHGGFGYLLSRSLLLRLRPHLDGCRGDILSARPDEWLGRCLIDSLGVGCVSQHQGQQYRSFELAKNRDPEKEGSSAFLSAFAVHPVSEGTLMYRLHKRFSALELERAYSEIEQLQAQIRNLTVLTPEGEAGLSWPVGLPAPFTPHSRFEVLGWDYFTEQHTFSCADGAPKCPLQGASRADVGDALETALEQLNRRYQPRLRFQKQRLLNGYRRFDPARGMEYTLDLLLECVTQRGHRRALARRVSLLRPLSRVEILPMPYVTEATRVQLVLPLLVAEAAAAPAFLEAFAANVLEPREHALLTLLLVYGPREGGRGAPDPFLGVKAAAAELERRYPGTRLAWLAVRAEAPSQVRLMDVVSKKHPVDTLFFLTTVWTRPGPEVLNRCRMNAISGWQAFFPVHFQEFNPALSPQRSPPGPPGAGPDPPSPPGADPSRGAPIGGRFDRQASAEGCFYNADYLAARARLAGELAGQEEEEALEGLEVMDVFLRFSGLHLFRAVEPGLVQKFSLRDCSPRLSEELYHRCRLSNLEGLGGRAQLAMALFEQEQANST

SEQ ID NO: 351 - DNA, 1700 bp, Homosapiens
agcaggactcagaggggagagttggaggaaaaaaaaaggcagaaaagggaaagaaagaggaagagagagagagagtgagaggagccgctgagcccaccccgatggccgcggacgaagttgccggaggggcgcgcaaagccacgaaaagcaaactttttgagtttctggtccatggggtgcgccccgggatgccgtctggagcccggatgccccaccagggggcgcccatgggccccccgggctccccgtacatgggcagccccgccgtgcgacccggcctggcccccgcgggcatggagcccgcccgcaagcgagcagcgcccccgcccgggcagagccaggcacagagccagggccagccggtgcccaccgcccccgcgcggagccgcagtgccaagaggaggaagatggctgacaaaatcctccctcaaaggattcgggagctggtccccgagtcccaggcttacatggacctcttggcatttgagaggaaactggatcaaaccatcatgcggaagcgggtggacatccaggaggctctgaagaggcccatgaagcaaaagcggaagctgcgactctatatctccaacacttttaaccctgcgaagcctgatgctgaggattccgacggcagcattgcctcctgggagctacgggtggaggggaagctcctggatgatcccagcaaacagaagcggaagttctcttctttcttcaagagtttggtcatcgagctggacaaagatctttatggccctgacaaccacctcgttgagtggcatcggacacccacgacccaggagacggacggcttccaggtgaaacggcctggggacctgagtgtgcgctgcacgctgctcctcatgctggactaccagcctccccagttcaaactggatccccgcctagcccggctgctggggctgcacacacagagccgctcagccattgtccaggccctgtggcagtatgtgaagaccaacaggctgcaggactcccatgacaaggaatacatcaatggggacaagtatttccagcagatttttgattgtccccggctgaagttttctgagattccccagcgcctcacagccctgctattgccccctgacccaattgtcatcaaccatgtcatcagcgtggacccttcagaccagaagaagacggcgtgctatgacattgacgtggaggtggaggagccattaaaggggcagatgagcagcttcctcctatccacggccaaccagcaggagatcagtgctctggacagtaagatccatgagacgattgagtccataaaccagctcaagatccagagggacttcatgctaagcttctccagagaccccaaaggctatgtccaagacctgctccgctcccagagccgggacctcaaggtgatgacagatgtagccggcaaccctgaagaggagcgccgggctgagttctaccaccagccctggtcccaggaggccgtcagtcgctacttctactgcaagatccagcagcgcaggcaggagctggagcagtcgctggttgtgcgcaacacctaggagcccaaaaataagcagcacgacggaactttcagccgtgtcccgggccccagcattttgccccgggctccagcatcactcctctgccaccttggggtgtggggctggattaaaagtcattcatctgacaaaaaaaaaaaaaaaaaa

SEQ ID NO: 352 - protein, 483 aa, Homosapiens
MAADEVAGGARKATKSKLFEFLVHGVRPGMPSGARMPHQGAPMGPPGSPYMGSPAVRPGLAPAGMEPARKRAAPPPGQSQAQSQGQPVPTAPARSRSAKRRKMADKILPQRIRELVPESQAYMDLLAFERKLDQTIMRKRVDIQEALKRPMKQKRKLRLYISNTFNPAKPDAEDSDGSIASWELRVEGKLLDDPSKQKRKFSSFFKSLVIELDKDLYGPDNHLVEWHRTPTTQETDGFQVKRPGDLSVRCTLLLMLDYQPPQFKLDPRLARLLGLHTQSRSAIVQALWQYVKTNRLQDSHDKEYINGDKYFQQIFDCPRLKFSEIPQRLTALLLPPDPIVINHVISVDPSDQKKTACYDIDVEVEEPLKGQMSSFLLSTANQQEISALDSKIHETIESINQLKIQRDFMLSFSRDPKGYVQDLLRSQSRDLKVMTDVAGNPEEERRAEFYHQPWSQEAVSRYFYCKIQQRRQELEQSLVVRNT

SEQ ID NO: 353 - DNA, 1689 bp, Homosapiens
ctggcatcttcctcccctcctcctttccagatcctcagaatggcccttggtgctgcaggcgcggtgggctccgggcccaggcaccgagggggcactggatgactctccaggtgcaggaccctgccatctatgactccaggtcttcagcacccacccaccgtggtacagcgccccgggatgccgtctggagcccggatgccccaccagggggcgcccatgggccccccgggctccccgtacatgggcagccccgccgtgcgacccggcctggcccccgcgggcatggagcccgcccgcaagcgagcagcgcccccgcccgggcagagccaggcacagagccagggccagccggtgcccaccgcccccgcgcggagccgcagtgccaagaggaggaagatggctgacaaaatcctccctcaaaggattcgggagctggtccccgagtcccaggcttacatggacctcttggcatttgagaggaaactggatcaaaccatcatgcggaagcgggtggacatccaggaggctctgaagaggcccatgaagcaaaagcggaagctgcgactctatatctccaacacttttaaccctgcgaagcctgatgctgaggattccgacggcagcattgcctcctgggagctacgggtggaggggaagctcctggatgatcccagcaaacagaagcggaagttctcttctttcttcaagagtttggtcatcgagctggacaaagatctttatggccctgacaaccacctcgttgagtggcatcggacacccacgacccaggagacggacggcttccaggtgaaacggcctggggacctgagtgtgcgctgcacgctgctcctcatgctggactaccagcctccccagttcaaactggatccccgcctagcccggctgctggggctgcacacacagagccgctcagccattgtccaggccctgtggcagtatgtgaagaccaacaggctgcaggactcccatgacaaggaatacatcaatggggacaagtatttccagcagatttttgattgtccccggctgaagttttctgagattccccagcgcctcacagccctgctattgccccctgacccaattgtcatcaaccatgtcatcagcgtggacccttcagaccagaagaagacggcgtgctatgacattgacgtggaggtggaggagccattaaaggggcagatgagcagcttcctcctatccacggccaaccagcaggagatcagtgctctggacagtaagatccatgagacgattgagtccataaaccagctcaagatccagagggacttcatgctaagcttctccagagaccccaaaggctatgtccaagacctgctccgctcccagagccgggacctcaaggtgatgacagatgtagccggcaaccctgaagaggagcgccgggctgagttctaccaccagccctggtcccaggaggccgtcagtcgctacttctactgcaagatccagcagcgcaggcaggagctggagcagtcgctggttgtgcgcaacacctaggagcccaaaaataagcagcacgacggaactttcagccgtgtcccgggccccagcattttgccccgggctccagcatcactcctctgccaccttggggtgtggggctggattaaaagtcattcatctgacaaaaaaaaaaaaaaaaaa

SEQ ID NO: 354 - protein, 470 aa, Homosapiens
MTPGLQHPPTVVQRPGMPSGARMPHQGAPMGPPGSPYMGSPAVRPGLAPAGMEPARKRAAPPPGQSQAQSQGQPVPTAPARSRSAKRRKMADKILPQRIRELVPESQAYMDLLAFERKLDQTIMRKRVDIQEALKRPMKQKRKLRLYISNTFNPAKPDAEDSDGSIASWELRVEGKLLDDPSKQKRKFSSFFKSLVIELDKDLYGPDNHLVEWHRTPTTQETDGFQVKRPGDLSVRCTLLLMLDYQPPQFKLDPRLARLLGLHTQSRSAIVQALWQYVKTNRLQDSHDKEYINGDKYFQQIFDCPRLKFSEIPQRLTALLLPPDPIVINHVISVDPSDQKKTACYDIDVEVEEPLKGQMSSFLLSTANQQEISALDSKIHETIESINQLKIQRDFMLSFSRDPKGYVQDLLRSQSRDLKVMTDVAGNPEEERRAEFYHQPWSQEAVSRYFYCKIQQRRQELEQSLVVRNT

SEQ ID NO: 355 - DNA, 1728 bp, Homosapiens
gccgggccgagccgagcgccgagcagggagcgggcggccgcgctccgggccggggtcccgggggagcagatcctcagaatggcccttggtgctgcaggcgcggtgggctccgggcccaggcaccgagggggcactggatgactctccaggtgcaggaccctgccatctatgactccaggtcttcagcacccacccaccgtggtacagcgccccgggatgccgtctggagcccggatgccccaccagggggcgcccatgggccccccgggctccccgtacatgggcagccccgccgtgcgacccggcctggcccccgcgggcatggagcccgcccgcaagcgagcagcgcccccgcccgggcagagccaggcacagagccagggccagccggtgcccaccgcccccgcgcggagccgcagtgccaagaggaggaagatggctgacaaaatcctccctcaaaggattcgggagctggtccccgagtcccaggcttacatggacctcttggcatttgagaggaaactggatcaaaccatcatgcggaagcgggtggacatccaggaggctctgaagaggcccatgaagcaaaagcggaagctgcgactctatatctccaacacttttaaccctgcgaagcctgatgctgaggattccgacggcagcattgcctcctgggagctacgggtggaggggaagctcctggatgatcccagcaaacagaagcggaagttctcttctttcttcaagagtttggtcatcgagctggacaaagatctttatggccctgacaaccacctcgttgagtggcatcggacacccacgacccaggagacggacggcttccaggtgaaacggcctggggacctgagtgtgcgctgcacgctgctcctcatgctggactaccagcctccccagttcaaactggatccccgcctagcccggctgctggggctgcacacacagagccgctcagccattgtccaggccctgtggcagtatgtgaagaccaacaggctgcaggactcccatgacaaggaatacatcaatggggacaagtatttccagcagatttttgattgtccccggctgaagttttctgagattccccagcgcctcacagccctgctattgccccctgacccaattgtcatcaaccatgtcatcagcgtggacccttcagaccagaagaagacggcgtgctatgacattgacgtggaggtggaggagccattaaaggggcagatgagcagcttcctcctatccacggccaaccagcaggagatcagtgctctggacagtaagatccatgagacgattgagtccataaaccagctcaagatccagagggacttcatgctaagcttctccagagaccccaaaggctatgtccaagacctgctccgctcccagagccgggacctcaaggtgatgacagatgtagccggcaaccctgaagaggagcgccgggctgagttctaccaccagccctggtcccaggaggccgtcagtcgctacttctactgcaagatccagcagcgcaggcaggagctggagcagtcgctggttgtgcgcaacacctaggagcccaaaaataagcagcacgacggaactttcagccgtgtcccgggccccagcattttgccccgggctccagcatcactcctctgccaccttggggtgtggggctggattaaaagtcattcatctgacaaaaaaaaaaaaaaaaaa

SEQ ID NO: 356 - protein, 470 aa, Homosapiens; identical to SEQ ID NO: 354

SEQ ID NO: 357 - DNA, 3112 bp, Homosapiens
ccggaatgaaaacaaacggcggccgctgccgcatccgggcactctgctggtcgcggcgggagtggcgtggcgcagggatggcacaaaagaaatatcttcaagcaaaattgacccagtttttaagggaagacaggattcaactttggaaacctccatatacagatgaaaataaaaaagttggtttggcattaaaggaccttgctaagcagtactctgacagactagaatgctgtgaaaatgaagtagaaaaggtaatagaagaaatacgttgcaaggcaattgagcgtggaacaggaaatgacaattatagaacaacgggaattgctacaatcgaggtgtttttaccaccaagactaaaaaaagataggaaaaacttgttggagacccgattgcacatcactggcagagaactgaggtccaaaatagctgaaacctttggacttcaagaaaattatatcaaaattgtcataaataagaagcaactacaactagggaaaacccttgaagaacaaggcgtggctcacaatgtgaaagcgatggtgcttgaactaaaacaatctgaagaggacgcgaggaaaaacttccagttagaggaagaggagcaaaatgaggccaaactcaaagaaaaacaaattcagaggaccaagagaggactagaaatactggcaaagagagcagcagagacagtggtggatccagaaatgacaccgtacttagacatagctaaccagacaggcagatcaatcagaattcccccatcagaaagaaaagcccttatgttagctatgggatatcatgagaagggcagagctttcctgaaaagaaaagaatatggaatagccttgccatgtctgttggacgctgacaaatatttctgtgagtgttgcagagagctgctggacacagtggataactacgccgtcctccagctggatatagtgtggtgttacttccgcctggaacagctggaatgccttgatgatgcagaaaaaaaattaaacttggcccagaaatgctttaaaaattgttacggagaaaatcatcagagactggtccacataaaaggaaattgtgggaaagagaaggtactgtttctaagactctacttacttcaagggatccgaaactatcacagtggaaatgatgtagaggcttatgagtatcttaacaaggcacgtcagctctttaaagagctatatattgatccatcaaaagtggacaatttgttgcagttggggtttactgcccaggaagcccggcttggcctgagggcgtgtgatgggaacgtggatcatgcggccactcatattaccaaccgcagagaggaactggcccaaataaggaaggaggaaaaagagaagaaaagacgccgcctcgagaacatcaggtttctgaaagggatgggctactccacgcacgcggcccagcagattctgctcagcaatcctcagatgtggtggttaaatgattccaatcctgaaaccgacaaccgtcaagaaagtccttcccaggaaaacattgaccgattggtgtacatgggttttgatgcactcgtggccgaagctgcgctgagagtgttcagaggcaacgtccagctggccgcccagacccttgctcacaacggaggaagcctgcctcccgagctgccgctgtcgccagaagactctttgtccccgccagccacgtccccttctgactccgcaggaacctctagtgcctcaacagacgaagacatggagacagaggccgtcaatgagatactggaagacattccagagcatgaggaagactatcttgactcaactctggaagatgaagaaattattattgcagagtacctatcctatgtagaaaataggaagtcagcaacaaagaaaaactaaataatgaacagaaatagcgctaattttctgcttataaatgctatcattatgaaaaggctaatgcagctctttctgttcttactttttatctgaattacaagtcctctttgggtgtaggagggggtgggcaggggacaagtccaggaggggtcccagggccttcatgcgtggtctcggggaagaagcttcctctggcctggcgcaggccgttccatctgcctcccaggtctgcgtccctaaccccttccccagcttggtgttttaccccgaaacaggaaggaacaggggtcctgtagaacaggggtcctggggaaggtgtccagggcagggtcctgggaagggtgtcccgaccgcttcctctccagctgtggctccatctgcccagcttgcctgcctcctgcacccactgccctgaccttcctgcttcccacgctgccatctctgccagggtgccacatgggttcctgtgccaccctttccccgcccctcaaatcgtcctttaagtcttccttccaagtgctgtggggcataacgatgaggcgctggccttgggggccacaccaggtcgcagcaaatggcttcagcctgggacgccagtgttttatgctcttagttcagtaaaatacgcccccgaaattcaagattgagtgtcaggctttatatatattcagcattcctcattacagaaatcttctattgaatgggaaaggtttaaatgctaaccaaagcaatttatttttaattaatatttttagactctgtgctgtcatactgaactcactgctagctaagagacctatcagagatttagatatattttctccaggttttttgtgggttttctttgttgttgttgttgttctagccatgtgacagaggctctttctaaaagtatgtagttcgctgtgtgtcggctccagcagtaaccgtcctcactgcgccacgcactcctctgtagatgtgtgcccagtgggagttccttccagccccaggaccacagcagcagccaggtgccgagtggattgagtgccaggtgcatccaagactttccctcccttccagaaggcactgactgaagacaggatggatcatgcggagccggctgaaatgctccaactttttcaaagtgtgggtggtccagtttggactgatgggaatcttcttgtcattctttttaaacggatgataccgatggaaataaaaggtgggaaatatattcaaaaaaaaaa

SEQ ID NO: 358 - protein, 601 aa, Homosapiens
MAQKKYLQAKLTQFLREDRIQLWKPPYTDENKKVGLALKDLAKQYSDRLECCENEVEKVIEEIRCKAIERGTGNDNYRTTGIATIEVFLPPRLKKDRKNLLETRLHITGRELRSKIAETFGLQENYIKIVINKKQLQLGKTLEEQGVAHNVKAMVLELKQSEEDARKNFQLEEEEQNEAKLKEKQIQRTKRGLEILAKRAAETVVDPEMTPYLDIANQTGRSIRIPPSERKALMLAMGYHEKGRAFLKRKEYGIALPCLLDADKYFCECCRELLDTVDNYAVLQLDIVWCYFRLEQLECLDDAEKKLNLAQKCFKNCYGENHQRLVHIKGNCGKEKVLFLRLYLLQGIRNYHSGNDVEAYEYLNKARQLFKELYIDPSKVDNLLQLGFTAQEARLGLRACDGNVDHAATHITNRREELAQIRKEEKEKKRRRLENIRFLKGMGYSTHAAQQILLSNPQMWWLNDSNPETDNRQESPSQENIDRLVYMGFDALVAEAALRVFRGNVQLAAQTLAHNGGSLPPELPLSPEDSLSPPATSPSDSAGTSSASTDEDMETEAVNEILEDIPEHEEDYLDSTLEDEEIIIAEYLSYVENRKSATKKN

SEQ ID NO: 359 - DNA, 1348 bp, Homosapiens
caggccgaccccggggtccattagaggcgccccaggccgagggagcccgcggcggctggaaggacacgaaagctatgtgaccttctgccagctggaggatgaggctgccttcacatgcagcgccgactgcaccatcaggaggtgggacgtgctgaccgggcagtgtctgcaggtgtaccgaggacacacgtccatcgtgaacaggatcctggttgccaacaaccagctcttcagcagctcctatgaccggacagctcgggtctggagtgtggacaaggggcagatgtcccgggagttccggggccaccgcaactgcgtgctgaccctagcctactctgccccgtgggacctccccagcactccctgcgcggaggaggccgcggccggggggcttctggtgaccggcagcacagatggcacagccaaggtgtggcaggtggccagcggctgctgccaccagacgctgcggggccacacgggtgcagtgctgtgcctagtgctagacacgcccggccacacggccttcacaggcagcaccgacgccaccatccgtgcctgggacatcctgagtggggagcagctgcgggtgttccgggagcaccggggctccgtcatctgtctggagtgttcacgggcagcggggacgcttgcgcccgggccttcgacgcgcagtctggagagctgcggagggtgttccggggccacacattcatcatcaactgcatccaggtgcacggccaggtgctctacaccgcctcgcacgacggcgccctgcgcctctgggacgtgcgcgggctccgaggtgccccgcggccccctccgcccacgcgcagcctctcgcggctcttcagcaacaaggtgggctgcgccgccgcgcccctgcagccggcctgatcccgcggggcccctgcagacgccagcccagacacccagcggctcccagagcgccccgccctgctacccgcggtggtggcgcccgatggccggcgaggggcgaggagcgaggaagcccgggcgggaggagagcccgtcgcaggcgtctggtttttctttggtggccaggaggcgctgggagcgggagtgctcgccctggggaccgcccccttttcccttttagggtggctcctgtcctccctccccatccctgacctggcgaaaggcctagtcctggggaccctcccacctcaggggctgcaggcggactgccccagctcccccagccccacgaaactgggcctttcctgctgagaggaagtgactttttacagaagccactgaacctggttattttggcaaatcgtccgtctcgagggccttggggggaactgaaatatacagcctgaacgtt

SEQ ID NO: 360 - protein, 277 aa, Homosapiens
MSREFRGHRNCVLTLAYSAPWDLPSTPCAEEAAAGGLLVTGSTDGTAKVWQVASGCCHQTLRGHTGAVLCLVLDTPGHTAFTGSTDATIRAWDILSGEQLRVFREHRGSVICLECSRAAGTLAPGPSTRSLESCGGCSGATHSSSTASRCTARCSTPPRTTAPCASGTCAGSEVPRGPLRPRAASRGSSATRWAAPPRPCSRPDPAGPLQTPAQTPSGSQSAPPCYPRWWRPMAGEGRGARKPGREESPSQASGFSLVARRRWERECSPWGPPPFPF

SEQ ID NO: 361 - DNA, 1568 bp, Homosapiens
ggagaaaggagagaaaggaaagcgcgaggagccgccgccaccaccagcgcagcagtcctggagctgtgaggagattcgggccgtcaccctgcctcccctgcgtcccgccaccggccgcttctgtcctcggacccattccaacaatctcgtaaaacatggtggattactatgaagttctaggcgtgcagagacatgcctcacccgaggatattaaaaaggcatatcggaaactggcactgaagtggcatccagataaaaatcctgagaataaagaagaagcagagagaaaattcaagcaagtagcggaggcatatgaagtgctgtcggatgctaagaaacgggacatctatgacaaatatggcaaagaaggattaaatggtggaggaggaggtggaagtcattttgacagtccatttgaatttggcttcacattccgtaacccagatgatgtcttcagggaattttttggtggaagggacccattttcatttgacttctttgaagacccttttgaggacttctttgggaatcgaaggggtccccgaggaagcagaagccgagggacggggtcgtttttctctgcgttcagtggatttccgtcttttggaagtggattttcttcttttgatacaggatttacttcatttgggtcactaggtcacgggggcctcacttcattctcttccacgtcatttggtggtagtggcatgggcaacttcaaatcgatatcaacttcaactaaaatggttaatggcagaaaaatcactacaaagagaattgtcgagaacggtcaagaaagagtagaagttgaagaagatggccagttaaagtccttaacaataaatggtaaggagcagctgctgcgcttggataacaagtaattcaacgcacgcacttaacagaaatgttaaactataacaagcaccatttgaggattaacaggaacatttttttgaagatttcaaacgaactcgactttcagtataattgtacctaaagtatttataaacagctcatcggagcctctatttgtcatagacttttgagttgattgttgggaccacataataggaccattttttttttgtctttaaaattgttgtaaatctctgtatgcactttgcttttttattaaacgtactccaaggtgagtcttgactctttagtgtaggacaagattgtacactaacaccagcatggacctgcttttcattgtgtctgaaatgtgagccacgtagtgtcggcctgctgtgaagttaacattgccaggacgattcttctacagaaataatttcaatttttttcagtatttagtagtgaaagatattaatacattaatggtaatacatttctggtttaatataaattaaggatgttttctagttgtgcatgaatgctggcaacttagtaagttttgacaattgtttaaatatgtaatgttaagcttaggtttaaaaaagtaaagctggtaaactgggtctttgtcatttgctttaaaaaaaaaaaaaaagaaaataaatgcgaatgtgttggtgcattcttcctgagtgggatctggaaaaaaaaaa

SEQ ID NO: 362 - protein, 241 aa, Homosapiens
MVDYYEVLGVQRHASPEDIKKAYRKLALKWHPDKNPENKEEAERKFKQVAEAYEVLSDAKKRDIYDKYGKEGLNGGGGGGSHFDSPFEFGFTFRNPDDVFREFFGGRDPFSFDFFEDPFEDFFGNRRGPRGSRSRGTGSFFSAFSGFPSFGSGFSSFDTGFTSFGSLGHGGLTSFSSTSFGGSGMGNFKSISTSTKMVNGRKITTKRIVENGQERVEVEEDGQLKSLTINGKEQLLRLDNK

SEQ ID NO: 363 - DNA, 2494 bp, Homosapiens
gagaaaggagagaaaggaaagcgcgaggagccgccgccaccaccagcgcagcagtcctggagctgtgaggagattcgggccgtcaccctgcctcccctgcgtcccgccaccggccgcttctgtcctcggacccattccaacaatctcgtaaaacatggtggattactatgaagttctaggcgtgcagagacatgcctcacccgaggatattaaaaaggcatatcggaaactggcactgaagtggcatccagataaaaatcctgagaataaagaagaagcagagagaaaattcaagcaagtagcggaggcatatgaagtgctgtcggatgctaagaaacgggacatctatgacaaatatggcaaagaaggattaaatggtggaggaggaggtggaagtcattttgacagtccatttgaatttggcttcacattccgtaacccagatgatgtcttcagggaattttttggtggaagggacccattttcatttgacttctttgaagacccttttgaggacttctttgggaatcgaaggggtccccgaggaagcagaagccgagggacggggtcgtttttctctgcgttcagtggatttccgtcttttggaagtggattttcttcttttgatacaggatttacttcatttgggtcactaggtcacgggggcctcacttcattctcttccacgtcatttggtggtagtggcatgggcaacttcaaatcgatatcaacttcaactaaaatggttaatggcagaaaaatcactacaaagagaattgtcgagaacggtcaagaaagagtagaagttgaagaagatggccagttaaagtccttaacaataaatggtgtggccgacgacgatgccctcgctgaggagcgcatgcggagaggccagaacgccctgccagcccagcctgccggcctccgcccgccgaagccgccccggcctgcctcgctgctgagacacgcgcctcactgtctctctgaggaggagggcgagcaggaccgacctcgggcacccgggccctgggaccccctcgcgtccgcagcaggattgaaagaaggtggcaagaggaagaagcagaagcagagagaggagtcgaagaagaagaagtcgaccaaaggcaatcactagaccggacttgaggcacgcggtgcacccccagacgctggcgctccaccgtgctcggcatgcggtcgtgcacacgcgctaggtagcagcgtcggtcaggactgtctcgaggccacactcgctcggcaggattatgcgatcacggatcagtcagagcagggtcaggagacggggctgacggcacgggtggcggggacagacgtttgggacttggccgcgactctctgcttctctccagctctcaatctgctgcattttcctctagtgcttccggatcctcttcattcttttcggctactcaaccactccgcatgctgctggaatatttctggctttagaagtacaggagggcgcagatggctaactgagtaacattcatgaaatgaggctttctgtggcggcgtagtgtttggaattagaaggtaattcagtagagtgtaacttagagaatattgcaagtgacacattgaatcctgcccgtcagggcaccttttcctcagagcaatccggccacacgaatagaaggctgtcgtgaatcacatcagatgtaaaatcattccttctgtttactcttttaattttcatcctttgcaggtagtgcaaattcaacttcaaatatggtgtaggttttgctagattccatatttttttcttggatttttgctaattatttttagcaaaaaatttttgctcagtggcactctccctagtgtccatgggttagggccatgctggggaaaacgggccggtatttacacacgcgcaaaacacccagagacggcacaaggaggttgaactcatgtttcagttcgcgaacattgactccttacgaaagtcacttcattctaactagatgcgcccacttccggtcattatttcgtttgcatgatgtattgcttcttcacgttttgtttttattgagcacggagtagaattccagggctgccttgacttcttccctgcatgctccctcccagtgactttccttccctttcacatgaggatctgccgttcatgttgctttctcctttgtcctcttggacttgagggcattgtgaaaagctttgctgtgatttaaaaatgccagcaattttaatctagcagtgttgaagctgggaattttttggcgcaatccatgtagcagtgacccaggcttgggagccagaaacaagtgtgacctgggattttatttaacacaactgttgccaaagagttggctttgtttatttggttttggcggggagaggagtggtatttgatgctttctgtggacaatgtaaccctaaacacatcatgtattttaaatgccacctacataaataaaacataagcatattgaatacaaaaaaaaaaaaaaaaaaa

SEQ ID NO: 364 - protein, 326 aa, Homosapiens
MVDYYEVLGVQRHASPEDIKKAYRKLALKWHPDKNPENKEEAERKFKQVAEAYEVLSDAKKRDIYDKYGKEGLNGGGGGGSHFDSPFEFGFTFRNPDDVFREFFGGRDPFSFDFFEDPFEDFFGNRRGPRGSRSRGTGSFFSAFSGFPSFGSGFSSFDTGFTSFGSLGHGGLTSFSSTSFGGSGMGNFKSISTSTKMVNGRKITTKRIVENGQERVEVEEDGQLKSLTINGVADDDALAEERMRRGQNALPAQPAGLRPPKPPRPASLLRHAPHCLSEEEGEQDRPRAPGPWDPLASAAGLKEGGKRKKQKQREESKKKKSTKGNH

SEQ ID NO: 365 - DNA, 4767 bp, Homosapiens
gcctcccgccgcctcccgcgcggccatggactgagcgccgccggccaggccgcggggatggggccgccgctcccgctgctgctgctgctactgctgctgctgccgccacgcgtcctgcctgccgccccttcgtccgtcccccgcggccggcagctcccggggcgtctgggctgcctgctcgaggagggcctctgcggagcgtccgaggcctgtgtgaacgatggagtgtttggaaggtgccagaaggttccggcaatggacttttaccgctacgaggtgtcgcccgtggccctgcagcgcctgcgcgtggcgttgcagaagctttccggcacaggtttcacgtggcaggatgactatactcagtatgtgatggaccaggaacttgcagacctcccgaaaacctacctgaggcgtcctgaagcatccagcccagccaggccctcaaaacacagcgttggcagcgagaggaggtacagtcgggagggcggtgctgccctggccaacgccctccgacgccacctgcccttcctggaggccctgtcccaggccccagcctcagacgtgctcgccaggacccatacggcgcaggacagaccccccgctgagggtgatgaccgcttctccgagagcatcctgacctatgtggcccacacgtctgcgctgacctaccctcccgggccccggacccagctccgcgaggacctcctgccgcggaccctcggccagctccagccagatgagctcagccctaaggtggacagtggtgtggacagacaccatctgatggcggccctcagtgcctatgctgcccagaggcccccagctccccccggggagggcagcctggagccacagtaccttctgcgtgcaccctcaagaatgcccaggcctttgctggcaccagccgccccccagaagtggccttcacctctgggagattccgaagacccctccagcacaggcgatggagcacggattcataccctcctgaaggacctgcagaggcagccggctgaggtgaggggcctgagtggcctggagctggacggcatggctgagctgatggctggcctgatgcaaggcgtggaccatggagtagctcgaggcagccctgggagagcggccctgggagagtctggagaacaggcggatggccccaaggccaccctccgtggagacagctttccagatgacggagtgcaggacgacgatgatagactttaccaagaggtccatcgtctgagtgccacactcgggggcctcctgcaggaccacgggtctcgactcttacctggagccctcccctttgcaaggcccctcgacatggagaggaagaagtccgagcaccctgagtcttccctgtcttcagaagaggagactgccggagtggagaacgtcaagagccagacgtattccaaagatctgctggggcagcagccgcattcggagcccggggccgctgcgtttggggagctccaaaaccagatgcctgggccctcgaaggaggagcagagccttccagcgggtgctcaggaggccctcagcgacggcctgcaattggaggtccagccttccgaggaagaggcgcggggctacatcgtgacagacagagaccccctgcgccccgaggaaggaaggcggctggtggaggacgtcgcccgcctcctgcaggtgcccagcagtgcgttcgctgacgtggaggttctcggaccagcagtgaccttcaaagtgagcgccaatgtccaaaacgtgaccactgaggatgtggagaaggccacagttgacaacaaagacaaactggaggaaacctctggactgaaaattcttcaaaccggagtcgggtcgaaaagcaaactcaagttcctgcctcctcaggcggagcaagaagactccaccaagttcatcgcgctcaccctggtctccctcgcctgcatcctgggcgtcctcctggcctctggcctcatctactgcctccgccatagctctcagcacaggctgaaggagaagctctcgggactagggggcgacccaggtgcagatgccactgccgcctaccaggagctgtgccgccagcgtatggccacgcggccaccagaccgacctgagggcccgcacacgtcacgcatcagcagcgtctcatcccagttcagcgacgggccgatccccagcccctccgcacgcagcagcgcctcatcctggtccgaggagcctgtgcagtccaacatggacatctccaccggccacatgatcctgtcctacatggaggaccacctgaagaacaagaaccggctggagaaggagtgggaagcgctgtgcgcctaccaggcggagcccaacagctcgttcgtggcccagagggaggagaacgtgcccaagaaccgctccctggctgtgctgacctatgaccactcccgggtcctgctgaaggcggagaacagccacagccactcagactacatcaacgctagccccatcatggatcacgacccgaggaaccccgcgtacatcgccacccagggaccgctgcccgccaccgtggctgacttttggcagatggtgtgggagagcggctgcgtggtgatcgtcatgctgacacccctcgcggagaacggcgtccggcagtgctaccactactggccggatgaaggctccaatctctaccacatctatgaggtgaacctggtctccgagcacatctggtgtgaggacttcctggtgaggagcttctatctgaagaacctgcagaccaacgagacgcgcaccgtgacgcagttccacttcctgagttggtatgaccgaggagtcccttcctcctcaaggtccctcctggacttccgcagaaaagtaaacaagtgctacaggggccgttcttgtccaataattgttcattgcagtgacggtgcaggccggagcggcacctacgtcctgatcgacatggttctcaacaagatggccaaaggtgctaaagagattgatatcgcagcgaccctggagcacttgagggaccagagacccggcatggtccagacgaaggagcagtttgagttcgcgctgacagccgtggctgaggaggtgaacgccatcctcaaggcccttccccagtgagcggcagcctcaggggcctcaggggagcccccaccccacggatgttgtcaggaatcatgatctgactttaattgtgtgtcttctattataactgcatagtaatagggcccttagctctcccgtagtcagcgcagtttagcagttaaaagtgtatttttgtttaatcaaacaataataaagagagatttgtggaaaaatccagttacgggtggaggggaatcggttcatcaattttcacttgcttaaaaaaaatactttttcttaaagcacccgttcaccttcttggttgaagttgtgttaacaatgcagtagccagcacgttcgaggcggtttccaggaagagtgtgcttgtcatctgccactttcgggagggtggatccactgtgcaggagtggccggggaagctggcagcactcagtgaggccgcccggcacacaaggcacgtttggcatttctctttgagagagtttatcattgggagaagccgcggggacagaactgaacgtcctgcagcttcggggcaagtgagacaatcacagctcctcgctgcgtctccatcaacactgcgccgggtaccatggacggccccgtcagccacacctgtcagcccaagcagagtgattcaggggctccccgggggcagacacctgtgcaccccatgagtagtgcccacttgaggctggcactcccctgacctcacctttgcaaagttacagatgcaccccaacattgagatgtgtttttaatgttaaaatattgatttctacgttatgaaaacagatgcccccgtgaatgcttacctgtgagataaccacaaccaggaagaacaaatctgggcattgagcaagctatgagggtccccgggagcacacgaaccctgccaggcccccgctggctcctccaggcacgtcccggacctgtggggccccagagaggggacatttccctcctgggagagaaggagatcagggcaactcggagagggctgcgagcatttccctcccgggagaggagatcagggcgacctgcacgcactgcgtagagcctggaagggaagtgagaaaccagccgaccggccctgcccctcttcccgggatcacttaatgaaccacgtgttttgacatcatgtaaacctaagcacgtagagatgattcggatttgacaaaataacatttgagtatccgattcgccatcaccccctaccccagaaataggacaattcacttcattgaccaggatgatcacatggaaggcggcgcagaggcagctgtgtgggctgcagatttcctgtgtggggttcagcgtagaaaacgcacctccatcccgcccttcccacagcattcctccatcttagatagatggtactctccaaaggccctaccagagggaacacggcctactgagcggacagaatgatgccaaaatattgcttatgtctctacatggtattgtaatgaatatctgctttaatatagctatcatttcttttccaaaattacttctctctatctggaatttaattaatcgaaatgaatttatctgaatataggaagcatatgcctacttgtaatttctaactccttatgtttgaagagaaacctccggtgtgagatatacaaatatatttaattgtgtcatattaaacttctgattcaaaaaaaa

SEQ ID NO: 366 - protein, 1015 aa, Homosapiens
MGPPLPLLLLLLLLLPPRVLPAAPSSVPRGRQLPGRLGCLLEEGLCGASEACVNDGVFGRCQKVPAMDFYRYEVSPVALQRLRVALQKLSGTGFTWQDDYTQYVMDQELADLPKTYLRRPEASSPARPSKHSVGSERRYSREGGAALANALRRHLPFLEALSQAPASDVLARTHTAQDRPPAEGDDRFSESILTYVAHTSALTYPPGPRTQLREDLLPRTLGQLQPDELSPKVDSGVDRHHLMAALSAYAAQRPPAPPGEGSLEPQYLLRAPSRMPRPLLAPAAPQKWPSPLGDSEDPSSTGDGARIHTLLKDLQRQPAEVRGLSGLELDGMAELMAGLMQGVDHGVARGSPGRAALGESGEQADGPKATLRGDSFPDDGVQDDDDRLYQEVHRLSATLGGLLQDHGSRLLPGALPFARPLDMERKKSEHPESSLSSEEETAGVENVKSQTYSKDLLGQQPHSEPGAAAFGELQNQMPGPSKEEQSLPAGAQEALSDGLQLEVQPSEEEARGYIVTDRDPLRPEEGRRLVEDVARLLQVPSSAFADVEVLGPAVTFKVSANVQNVTTEDVEKATVDNKDKLEETSGLKILQTGVGSKSKLKFLPPQAEQEDSTKFIALTLVSLACILGVLLASGLIYCLRHSSQHRLKEKLSGLGGDPGADATAAYQELCRQRMATRPPDRPEGPHTSRISSVSSQFSDGPIPSPSARSSASSWSEEPVQSNMDISTGHMILSYMEDHLKNKNRLEKEWEALCAYQAEPNSSFVAQREENVPKNRSLAVLTYDHSRVLLKAENSHSHSDYINASPIMDHDPRNPAYIATQGPLPATVADFWQMVWESGCVVIVMLTPLAENGVRQCYHYWPDEGSNLYHIYEVNLVSEHIWCEDFLVRSFYLKNLQTNETRTVTQFHFLSWYDRGVPSSSRSLLDFRRKVNKCYRGRSCPIIVHCSDGAGRSGTYVLIDMVLNKMAKGAKEIDIAATLEHLRDQRPGMVQTKEQFEFALTAVAEEVNAILKALPQ

SEQ ID NO: 367 - DNA, 4716 bp, Homosapiens
gcctcccgccgcctcccgcgcggccatggactgagcgccgccggccaggccgcggggatggggccgccgctcccgctgctgctgctgctactgctgctgctgccgccacgcgtcctgcctgccgccccttcgtccgtcccccgcggccggcagctcccggggcgtctggatggagtgtttggaaggtgccagaaggttccggcaatggacttttaccgctacgaggtgtcgcccgtggccctgcagcgcctgcgcgtggcgttgcagaagctttccggcacaggtttcacgtggcaggatgactatactcagtatgtgatggaccaggaacttgcagacctcccgaaaacctacctgaggcgtcctgaagcatccagcccagccaggccctcaaaacacagcgttggcagcgagaggaggtacagtcgggagggcggtgctgccctggccaacgccctccgacgccacctgcccttcctggaggccctgtcccaggccccagcctcagacgtgctcgccaggacccatacggcgcaggacagaccccccgctgagggtgatgaccgcttctccgagagcatcctgacctatgtggcccacacgtctgcgctgacctaccctcccgggccccggacccagctccgcgaggacctcctgccgcggaccctcggccagctccagccagatgagctcagccctaaggtggacagtggtgtggacagacaccatctgatggcggccctcagtgcctatgctgcccagaggcccccagctccccccggggagggcagcctggagccacagtaccttctgcgtgcaccctcaagaatgcccaggcctttgctggcaccagccgccccccagaagtggccttcacctctgggagattccgaagacccctctagcacaggcgatggagcacggattcataccctcctgaaggacctgcagaggcagccggctgaggtgaggggcctgaatggcctggagctggacggcatggccgagctgatggctggcctgatgcaaggcgtggaccatggagtagctcgaggcagccctgggagagcggccctgggagagtctggagaacaggcggatggccccaaggccaccctccgtggagacagctttccagatgacggagtgcaggacgacgatgatagactttaccaagaggtccatcgtctgagtgccacactcgggggcctcctgcaggaccacgggtctcgactcttacctggagccctcccctttgcaaggcccctcgacatggagaggaagaagtccgagcaccctgagtcttccctgtcttcagaagaggagactgccggagtggagaacgtcaagagccagacgtattccaaagatctgctggggcagcagccgcattcggagcccggggccgctgcgtttggggagctccaaaaccagatgcctgggccctcgaaggaggagcagagccttccagcgggtgctcaggaggccctcagcgacggcctgcaattggaggtccagccttccgaggaagaggcgcggggctacatcgtgacagacagagaccccctgcgccccgaggaaggaaggcggctggtggaggacgtcgcccgcctcctgcaggtgcccagcagtgcgttcgctgacgtggaggttctcggaccagcagtgaccttcaaagtgagcgccaatgtccaaaacgtgaccactgaggatgtggagaaggccacagttgacaacaaagacaaactggaggaaacctctggactgaaaattcttcaaaccggagtcgggtcgaaaagcaaactcaagttcctgcctcctcaggcggagcaagaagactccaccaagttcatcgcgctcaccctggtctccctcgcctgcatcctgggcgtcctcctggcctctggcctcatctactgcctccgccatagctctcagcacaggctgaaggagaagctctcgggactagggggcgacccaggtgcagatgccactgccgcctaccaggagctgtgccgccagcgtatggccacgcggccaccagaccgacctgagggcccgcacacgtcacgcatcagcagcgtctcatcccagttcagcgacgggccgatccccagcccctccgcacgcagcagcgcctcatcctggtccgaggagcctgtgcagtccaacatggacatctccaccggccacatgatcctgtcctacatggaggaccacctgaagaacaagaaccggctggagaaggagtgggaagcgctgtgcgcctaccaggcggagcccaacagctcgttcgtggcccagagggaggagaacgtgcccaagaaccgctccctggctgtgctgacctatgaccactcccgggtcctgctgaaggcggagaacagccacagccactcagactacatcaacgctagccccatcatggatcacgacccgaggaaccccgcgtacatcgccacccagggaccgctgcccgccaccgtggctgacttttggcagatggtgtgggagagcggctgcgtggtgatcgtcatgctgacacccctcgcggagaacggcgtccggcagtgctaccactactggccggatgaaggctccaatctctaccacatctatgaggtgaacctggtctccgagcacatctggtgtgaggacttcctggtgaggagcttctatctgaagaacctgcagaccaacgagacgcgcaccgtgacgcagttccacttcctgagttggtatgaccgaggagtcccttcctcctcaaggtccctcctggacttccgcagaaaagtaaacaagtgctacaggggccgttcttgtccaataattgttcattgcagtgacggtgcaggccggagcggcacctacgtcctgatcgacatggttctcaacaagatggccaaaggtgctaaagagattgatatcgcagcgaccctggagcacttgagggaccagagacccggcatggtccagacgaaggagcagtttgagttcgcgctgacagccgtggctgaggaggtgaacgccatcctcaaggcccttccccagtgagcggcagcctcaggggcctcaggggagcccccaccccacggatgttgtcaggaatcatgatctgactttaattgtgtgtcttctattataactgcatagtaatagggcccttagctctcccgtagtcagcgcagtttagcagttaaaagtgtatttttgtttaatcaaacaataataaagagagatttgtggaaaaatccagttacgggtggaggggaatcggttcatcaattttcacttgcttaaaaaaaatactttttcttaaagcacccgttcaccttcttggttgaagttgtgttaacaatgcagtagccagcacgttcgaggcggtttccaggaagagtgtgcttgtcatctgccactttcgggagggtggatccactgtgcaggagtggccggggaagctggcagcactcagtgaggccgcccggcacacaaggcacgtttggcatttctctttgagagagtttatcattgggagaagccgcggggacagaactgaacgtcctgcagcttcggggcaagtgagacaatcacagctcctcgctgcgtctccatcaacactgcgccgggtaccatggacggccccgtcagccacacctgtcagcccaagcagagtgattcaggggctccccgggggcagacacctgtgcaccccatgagtagtgcccacttgaggctggcactcccctgacctcacctttgcaaagttacagatgcaccccaacattgagatgtgtttttaatgttaaaatattgatttctacgttatgaaaacagatgcccccgtgaatgcttacctgtgagataaccacaaccaggaagaacaaatctgggcattgagcaagctatgagggtccccgggagcacacgaaccctgccaggcccccgctggctcctccaggcacgtcccggacctgtggggccccagagaggggacatttccctcctgggagagaaggagatcagggcaactcggagagggctgcgagcatttccctcccgggagaggagatcagggcgacctgcacgcactgcgtagagcctggaagggaagtgagaaaccagccgaccggccctgcccctcttcccgggatcacttaatgaaccacgtgttttgacatcatgtaaacctaagcacgtagagatgattcggatttgacaaaataacatttgagtatccgattcgccatcaccccctaccccagaaataggacaattcacttcattgaccaggatgatcacatggaaggcggcgcagaggcagctgtgtgggctgcagatttcctgtgtggggttcagcgtagaaaacgcacctccatcccgcccttcccacagcattcctccatcttagatagatggtactctccaaaggccctaccagagggaacacggcctactgagcggacagaatgatgccaaaatattgcttatgtctctacatggtattgtaatgaatatctgctttaatatagctatcatttcttttccaaaattacttctctctatctggaatttaattaatcgaaatgaatttatctgaatataggaagcatatgcctacttgtaatttctaactccttatgtttgaagagaaacctccggtgtgagatatacaaatatatttaattgtgtcatattaaacttctgattcaaaaaaaa

SEQ ID NO: 368 - protein, 998 aa, Homosapiens
MGPPLPLLLLLLLLLPPRVLPAAPSSVPRGRQLPGRLDGVFGRCQKVPAMDFYRYEVSPVALQRLRVALQKLSGTGFTWQDDYTQYVMDQELADLPKTYLRRPEASSPARPSKHSVGSERRYSREGGAALANALRRHLPFLEALSQAPASDVLARTHTAQDRPPAEGDDRFSESILTYVAHTSALTYPPGPRTQLREDLLPRTLGQLQPDELSPKVDSGVDRHHLMAALSAYAAQRPPAPPGEGSLEPQYLLRAPSRMPRPLLAPAAPQKWPSPLGDSEDPSSTGDGARIHTLLKDLQRQPAEVRGLNGLELDGMAELMAGLMQGVDHGVARGSPGRAALGESGEQADGPKATLRGDSFPDDGVQDDDDRLYQEVHRLSATLGGLLQDHGSRLLPGALPFARPLDMERKKSEHPESSLSSEEETAGVENVKSQTYSKDLLGQQPHSEPGAAAFGELQNQMPGPSKEEQSLPAGAQEALSDGLQLEVQPSEEEARGYIVTDRDPLRPEEGRRLVEDVARLLQVPSSAFADVEVLGPAVTFKVSANVQNVTTEDVEKATVDNKDKLEETSGLKILQTGVGSKSKLKFLPPQAEQEDSTKFIALTLVSLACILGVLLASGLIYCLRHSSQHRLKEKLSGLGGDPGADATAAYQELCRQRMATRPPDRPEGPHTSRISSVSSQFSDGPIPSPSARSSASSWSEEPVQSNMDISTGHMILSYMEDHLKNKNRLEKEWEALCAYQAEPNSSFVAQREENVPKNRSLAVLTYDHSRVLLKAENSHSHSDYINASPIMDHDPRNPAYIATQGPLPATVADFWQMVWESGCVVIVMLTPLAENGVRQCYHYWPDEGSNLYHIYEVNLVSEHIWCEDFLVRSFYLKNLQTNETRTVTQFHFLSWYDRGVPSSSRSLLDFRRKVNKCYRGRSCPIIVHCSDGAGRSGTYVLIDMVLNKMAKGAKEIDIAATLEHLRDQRPGMVQTKEQFEFALTAVAEEVNAILKALPQ

SEQ ID NO: 369 - DNA, 4680 bp, Homosapiens
gcctcccgccgcctcccgcgcggccatggactgagcgccgccggccaggccgcggggatggggccgccgctcccgctgctgctgctgctactgctgctgctgccgccacgcgtcctgcctgccgccccttcgtccgtcccccgcggccggcagctcccggggcgtctgggctgcctgctcgaggagggcctctgcggagcgtccgaggcctgtgtgaacgatggagtgtttggaaggtgccagaaggttccggcaatggacttttaccgctacgaggtgtcgcccgtggccctgcagcgcctgcgcgtggcgttgcagaagctttccggcacaggtttcacgtggcaggatgactatactcagtatgtgatggaccaggaacttgcagacctcccgaaaacctacctgaggcgtcctgaagcatccagcccagccaggccctcaaaacacagcgttggcagcgagaggaggtacagtcgggagggcggtgctgccctggccaacgccctccgacgccacctgcccttcctggaggccctgtcccaggccccagcctcagacgtgctcgccaggacccatacggcgcaggacagaccccccgctgagggtgatgaccgcttctccgagagcatcctgacctatgtggcccacacgtctgcgctgacctaccctcccgggccccggacccagctccgcgaggacctcctgccgcggaccctcggccagctccagccagatgagctcagccctaaggtggacagtggtgtggacagacaccatctgatggcggccctcagtgcctatgctgcccagaggcccccagctccccccggggagggcagcctggagccacagtaccttctgcgtgcaccctcaagaatgcccaggcctttgctggcaccagccgccccccagaagtggccttcacctctgggagattccgaagacccctctagcacaggcgatggagcacggattcataccctcctgaaggacctgcagaggcagccggctgaggtgaggggcctgagtggcctggagctggacggcatggctgagctgatggctggcctgatgcaaggcgtggaccatggagtagctcgaggcagccctgggagagcggccctgggagagtctggagaacaggcggatggccccaaggccaccctccgtggagacagctttccagatgacggagtgcaggacgacgatgatagactttaccaagaggtccatcgtctgagtgccacactcgggggcctcctgcaggaccacgggtctcgactcttacctggagccctcccctttgcaaggcccctcgacatggagaggaagaagtccgagcaccctgagtcttccctgtcttcagaagaggagactgccggagtggagaacgtcaagagccagacgtattccaaagatctgctggggcagcagccgcattcggagcccggggccgctgcgtttggggagctccaaaaccagatgcctgggccctcgaaggaggagcagagccttccagcgggtgctcaggaggccctcagcgacggcctgcaattggaggtccagccttccgaggaagaggcgcggggctacatcgtgacagacagagaggttctcggaccagcagtgaccttcaaagtgagcgccaatgtccaaaacgtgaccactgaggatgtggagaaggccacagttgacaacaaagacaaactggaggaaacctctggactgaaaattcttcaaaccggagtcgggtcgaaaagcaaactcaagttcctgcctcctcaggcggagcaagaagactccaccaagttcatcgcgctcaccctggtctccctcgcctgcatcctgggcgtcctcctggcctctggcctcatctactgcctccgccatagctctcagcacaggctgaaggagaagctctcgggactagggggcgacccaggtgcagatgccactgccgcctaccaggagctgtgccgccagcgtatggccacgcggccaccagaccgacctgagggcccgcacacgtcacgcatcagcagcgtctcatcccagttcagcgacgggccgatccccagcccctccgcacgcagcagcgcctcatcctggtccgaggagcctgtgcagtccaacatggacatctccaccggccacatgatcctgtcctacatggaggaccacctgaagaacaagaaccggctggagaaggagtgggaagcgctgtgcgcctaccaggcggagcccaacagctcgttcgtggcccagagggaggagaacgtgcccaagaaccgctccctggctgtgctgacctatgaccactcccgggtcctgctgaaggcggagaacagccacagccactcagactacatcaacgctagccccatcatggatcacgacccgaggaaccccgcgtacatcgccacccagggaccgctgcccgccaccgtggctgacttttggcagatggtgtgggagagcggctgcgtggtgatcgtcatgctgacacccctcgcggagaacggcgtccggcagtgctaccactactggccggatgaaggctccaatctctaccacatctatgaggtgaacctggtctccgagcacatctggtgtgaggacttcctggtgaggagcttctatctgaagaacctgcagaccaacgagacgcgcaccgtgacgcagttccacttcctgagttggtatgaccgaggagtcccttcctcctcaaggtccctcctggacttccgcagaaaagtaaacaagtgctacaggggccgttcttgtccaataattgttcattgcagtgacggtgcaggccggagcggcacctacgtcctgatcgacatggttctcaacaagatggccaaaggtgctaaagagattgatatcgcagcgaccctggagcacttgagggaccagagacccggcatggtccagacgaaggagcagtttgagttcgcgctgacagccgtggctgaggaggtgaacgccatcctcaaggcccttccccagtgagcggcagcctcaggggcctcaggggagcccccaccccacggatgttgtcaggaatcatgatctgactttaattgtgtgtcttctattataactgcatagtaatagggcccttagctctcccgtagtcagcgcagtttagcagttaaaagtgtatttttgtttaatcaaacaataataaagagagatttgtggaaaaatccagttacgggtggaggggaatcggttcatcaattttcacttgcttaaaaaaaatactttttcttaaagcacccgttcaccttcttggttgaagttgtgttaacaatgcagtagccagcacgttcgaggcggtttccaggaagagtgtgcttgtcatctgccactttcgggagggtggatccactgtgcaggagtggccggggaagctggcagcactcagtgaggccgcccggcacacaaggcacgtttggcatttctctttgagagagtttatcattgggagaagccgcggggacagaactgaacgtcctgcagcttcggggcaagtgagacaatcacagctcctcgctgcgtctccatcaacactgcgccgggtaccatggacggccccgtcagccacacctgtcagcccaagcagagtgattcaggggctccccgggggcagacacctgtgcaccccatgagtagtgcccacttgaggctggcactcccctgacctcacctttgcaaagttacagatgcaccccaacattgagatgtgtttttaatgttaaaatattgatttctacgttatgaaaacagatgcccccgtgaatgcttacctgtgagataaccacaaccaggaagaacaaatctgggcattgagcaagctatgagggtccccgggagcacacgaaccctgccaggcccccgctggctcctccaggcacgtcccggacctgtggggccccagagaggggacatttccctcctgggagagaaggagatcagggcaactcggagagggctgcgagcatttccctcccgggagaggagatcagggcgacctgcacgcactgcgtagagcctggaagggaagtgagaaaccagccgaccggccctgcccctcttcccgggatcacttaatgaaccacgtgttttgacatcatgtaaacctaagcacgtagagatgattcggatttgacaaaataacatttgagtatccgattcgccatcaccccctaccccagaaataggacaattcacttcattgaccaggatgatcacatggaaggcggcgcagaggcagctgtgtgggctgcagatttcctgtgtggggttcagcgtagaaaacgcacctccatcccgcccttcccacagcattcctccatcttagatagatggtactctccaaaggccctaccagagggaacacggcctactgagcggacagaatgatgccaaaatattgcttatgtctctacatggtattgtaatgaatatctgctttaatatagctatcatttcttttccaaaattacttctctctatctggaatttaattaatcgaaatgaatttatctgaatataggaagcatatgcctacttgtaatttctaactccttatgtttgaagagaaacctccggtgtgagatatacaaatatatttaattgtgtcatattaaacttctgattcaaaaaaaa

SEQ ID NO: 370 - protein, 986 aa, Homosapiens
MGPPLPLLLLLLLLLPPRVLPAAPSSVPRGRQLPGRLGCLLEEGLCGASEACVNDGVFGRCQKVPAMDFYRYEVSPVALQRLRVALQKLSGTGFTWQDDYTQYVMDQELADLPKTYLRRPEASSPARPSKHSVGSERRYSREGGAALANALRRHLPFLEALSQAPASDVLARTHTAQDRPPAEGDDRFSESILTYVAHTSALTYPPGPRTQLREDLLPRTLGQLQPDELSPKVDSGVDRHHLMAALSAYAAQRPPAPPGEGSLEPQYLLRAPSRMPRPLLAPAAPQKWPSPLGDSEDPSSTGDGARIHTLLKDLQRQPAEVRGLSGLELDGMAELMAGLMQGVDHGVARGSPGRAALGESGEQADGPKATLRGDSFPDDGVQDDDDRLYQEVHRLSATLGGLLQDHGSRLLPGALPFARPLDMERKKSEHPESSLSSEEETAGVENVKSQTYSKDLLGQQPHSEPGAAAFGELQNQMPGPSKEEQSLPAGAQEALSDGLQLEVQPSEEEARGYIVTDREVLGPAVTFKVSANVQNVTTEDVEKATVDNKDKLEETSGLKILQTGVGSKSKLKFLPPQAEQEDSTKFIALTLVSLACILGVLLASGLIYCLRHSSQHRLKEKLSGLGGDPGADATAAYQELCRQRMATRPPDRPEGPHTSRISSVSSQFSDGPIPSPSARSSASSWSEEPVQSNMDISTGHMILSYMEDHLKNKNRLEKEWEALCAYQAEPNSSFVAQREENVPKNRSLAVLTYDHSRVLLKAENSHSHSDYINASPIMDHDPRNPAYIATQGPLPATVADFWQMVWESGCVVIVMLTPLAENGVRQCYHYWPDEGSNLYHIYEVNLVSEHIWCEDFLVRSFYLKNLQTNETRTVTQFHFLSWYDRGVPSSSRSLLDFRRKVNKCYRGRSCPIIVHCSDGAGRSGTYVLIDMVLNKMAKGAKEIDIAATLEHLRDQRPGMVQTKEQFEFALTAVAEEVNAILKALPQ

SEQ ID NO: 371 - DNA, 5324 bp, Homosapiens
ggggcccgtctggggcgccggcgggtgcgtttgaatctggtccgagcgcgggaaacggcgggtccccgagcccagggttacaaaataaatgccatttgaacagtgccgtctgtcatggaaaaacgtgagacgtttgtacaagccgtgtctaaggagctggttggagagtttttgcaatttgttcaacttgataaagaggcctctgatcctttcagcctaaatgaattactagatgaattatcaaggaaacagaaagaagaattatggcaaaggctgaagaatttattgacagatgtgttgttagaaagcccagtggatgggtggcaggtagtggaagcccagggtgaagacaatatggaaaccgaacatggctcaaaaatgagaaaaagcatagaaataatttatgcaattacatctgtgattcttgcttctgtgtctgtaataaatgaaagtgagaactacgaagccctactggaatgtgttattatattaaatggtattttatatgcattacctgagtctgaacgaaaactacagagttctattcaggatttgtgtgttacctggtgggagaaaggcctgcctgccaaggaagacacaggaaagacagcctttgtcatgttactaaggaggagtctggagactaagacaggtgcagacgtatgtcggctttggcgtatccatcaagctttatattgctttgattatgatttggaggaaagtggagaaattaaagatatgttacttgagtgcttcataaatattaattatatcaagaaagaagagggaagaagatttcttagttgtctcttcaactggaatatcaacttcatcaaaatgatccacgggaccattaaaaaccagttacagggattacaaaagtctttgatggtatacattgcagaaatttatttcagagcttggaaaaaggcttcagggaaaatactggaggcgattgaaaatgattgcatccaggacttcatgttccacgggatacaccttccgaggaggtctccagtgcattccaaagtgcgggaggttctgagttactttcaccatcaaaagaaagttcggcagggagtggaagagatgctttatagattatataagcccatcctttggagaggattaaaggccagaaactctgaagttcgatcaaatgctgcattgttgtttgttgaagcatttcctattagggatccaaaccttcatgctattgaaatggatagtgaaatccagaaacagtttgaagagctctatagccttttagaagatccttacccgatggtccgttccacagggatccttggtgtttgtaaaataacttctaagtactgggaaatgatgcccccgaccattcttattgacctcctgaagaaggtgactggggaactggcatttgacacgagctcagctgatgttcgttgttctgtctttaagtgtctgccaatgattttggacaacaaactgagccacccattgttagagcagctccttccagctctcagatacagtctccacgacaattcggagaaagtgagggtagcttttgtggacatgctgttgaagatcaaagctgtgagggctgctaagttttggaaaatatgtcccatggagcacattctggttcgtctggaaactgattctcgacctgtgtctcggcgcctggtgagcctcatctttaattctttcctgcctgtgaatcagccggaggaggtctggtgcgagcgctgtgtcaccctggtgcagatgaaccacgccgctgccaggaggttctatcagtacgcccacgaacacaccgcctgcaccaacatagcaaagctgattcacgttattcgtcattgcttaaatgcctgtatccagagggcagtgagagagcctccagaggacgaggaggaagaggacggaagggagaaggagaatgtgactgttctggacaaaacactgtcagtaaacgatgttgcatgcatggcaggtttactagaaatcattgtgattctctggaaaagtattgacagaagtatggaaaataataaagaggccaaactttacacgattaacaagtttgcctctgtgcttccagagtatctgaaagtatttaaggatgatcgctgcaagatccctttattcatgctaatgtcctttatgccggcctctgctgtccccccattcagctgtggtgtgatttccacgctgagaagccgggaggagggcgctgtggacaagagctactgcactttgttggattgcctctgctcctgggggcaggtggggcacattctggagcttgttgacaactggctgcccacagagcatgcccaggccaagagcaacacagcttctaaaggtagggtgcagatccatgacacacgcccagtcaaacctgaattggcattggtctacattgagtatctgctgactcatccaaagaaccgcgagtgcttgctctctgctcctcggaagaaacttaaccatcttttgaaagcccttgaaacgtcaaaggcagatctggagtcacttctgcagacaccgggtgggaagcctcgtggcttcagtgaagcagctgccccgcgagcctttggtctccactgtcgcctgagcatccatcttcagcacaagttctgctcagaaggaaaggtgtatttgtccatgttggaagacactggcttttggttagaaagcaaaattttatcttttattcaagatcaagaagaagactacctgaagcttcatagggtcatttatcagcaaattatccagacctacctgactgtgtgtaaagatgttgttatggtaggccttggtgaccatcagtttcagatgcaactcttacagcggagtcttggaatcatgcaaacagtgaagggatttttttatgtttcattacttcttgacattctgaaagagataactggaagttccttgattcagaaaacagattcagatgaagaagttgcaatgctgttggacacagtccagaaagtatttcagaaaatgttggaatgtattgcacggagcttcaggaagcagccggaagaaggcctgcggctgctttattctgttcagaggcctcttcatgagttcattactgctgttcagtctcggcacacagacacccctgtgcaccggggtgtactttctactctgatcgctgggcctgtggttgagataagtcaccagctacggaaggtttctgacgtagaagagcttacccctccagagcatctttctgatcttccaccattttcaaggtgtttaataggaataataataaagtcttcgaatgtggtcaggtcatttttggatgaattaaaggcatgtgtggcttctaatgatattgaaggcattgtgtgcctcacggctgctgtgcatattatcctggttattaatgcaggtaaacataaaagctcaaaagtgagggaggttgcagccactgttcacagaaaactaaagacattcatggaaattactttggaagaggatagcattgaaagatatgaggacttgctgtgttgcccaggctgggctctaactcctggactcctggactcaatctatccttctgcctcagtcccaattggctaggactgcaggcacacaccaccagacccagctaatgtaatttctatccatatgtgtctttatatttaaagtggtttttttatagacagtatataaatgggtcatgttttttgatcttctctgacaatctgtcttaaaattggtgcatatgtaccatattcaaagtgattattgatatagttggattaatatccaccatatttgttactgtcttctatttgttccccttgttatttgttcctatttctgtcttccactccttttctgtcttttgtggttttaactgaacattttatgatgccgttttctttcctagcatatcagttatacttttttttttttaaacctttcttagtggtttctttagagttggaatttttatttgtttttatctttcttagtggttgctttagagttggagttttcgtttataactaatccacgtttgctttcagatgacactataccactttgcaggtagggtggtatataataacaaaataatcctaatccttgcctctcgttccttgtatcattgctgtcattcattttgctaaggtataagcagacataagcatacataattgaatatattgttgctattattattttgaacaaactacatcttaggtcatttaagaataagaaaaataaaagtttttatttaccttcacttactccttctttgatgcttctcctttgtttgtgttgatccaaattctgacctatattcttttccttccctccagagaacttcttttaatgcttctttcaaggcatgtctactggcaactaattctcttaattttggtttgtcagagagtcttttacttctactttatttctttgcagggataatgttatgtagtttataattctagttgatgaatttttttctctctgtactttatttaatttattattattattttttgagacagagtcttgctctgttgcctagggtggaacgcagtggtgtgatctcagttcactgcaacctctgcctcctaagttcaaacgattcttgtacctcagcctgctgagtagctggtatacaggcacatcgccgccacacccagctcatttttgtattagtggagacagggcttcaccatgttgcccaggctggtctcgaattcttgatctcaagtgatctactcgcctcagcttctcaaattgctgggattactccccgtgcccggccactctctgtactttaaacatttcgctatactctcttcttggctcgtgtagtatctgagaaataggatataattctttttttgctcctcagtagataaggcgtatttttccctatctggtttctttcaatactttttctttgtttgatttttctgtaggttgaatatgatatgcctaggtgtagttttcttttctttttttttttttttttggcatttattctattcagtattctatgagcttcctggataaattctcagttattattgtctgaatatttcttctgttcctttctctcttctgaaattcttattatacatgttaacaccttttacagttgtctcacaggtcttggatatttcattctatcaaaacagctgcatttttgagttctgtttgctaatattttatttgagaatgtttgcattaggtttgaaataagattaaatggttgttggttgttttgttaaaaaaaaaaaaaaaaaaaaaaaaaaaaaaaaaaaaaaaaaaaaaaaaaaagaaaaaaaaaaaaaaaaaaa

SEQ ID NO: 372 - protein, 1156 aa, Homosapiens
MEKRETFVQAVSKELVGEFLQFVQLDKEASDPFSLNELLDELSRKQKEELWQRLKNLLTDVLLESPVDGWQVVEAQGEDNMETEHGSKMRKSIEIIYAITSVILASVSVINESENYEALLECVIILNGILYALPESERKLQSSIQDLCVTWWEKGLPAKEDTGKTAFVMLLRRSLETKTGADVCRLWRIHQALYCFDYDLEESGEIKDMLLECFININYIKKEEGRRFLSCLFNWNINFIKMIHGTIKNQLQGLQKSLMVYIAEIYFRAWKKASGKILEAIENDCIQDFMFHGIHLPRRSPVHSKVREVLSYFHHQKKVRQGVEEMLYRLYKPILWRGLKARNSEVRSNAALLFVEAFPIRDPNLHAIEMDSEIQKQFEELYSLLEDPYPMVRSTGILGVCKITSKYWEMMPPTILIDLLKKVTGELAFDTSSADVRCSVFKCLPMILDNKLSHPLLEQLLPALRYSLHDNSEKVRVAFVDMLLKIKAVRAAKFWKICPMEHILVRLETDSRPVSRRLVSLIFNSFLPVNQPEEVWCERCVTLVQMNHAAARRFYQYAHEHTACTNIAKLIHVIRHCLNACIQRAVREPPEDEEEEDGREKENVTVLDKTLSVNDVACMAGLLEIIVILWKSIDRSMENNKEAKLYTINKFASVLPEYLKVFKDDRCKIPLFMLMSFMPASAVPPFSCGVISTLRSREEGAVDKSYCTLLDCLCSWGQVGHILELVDNWLPTEHAQAKSNTASKGRVQIHDTRPVKPELALVYIEYLLTHPKNRECLLSAPRKKLNHLLKALETSKADLESLLQTPGGKPRGFSEAAAPRAFGLHCRLSIHLQHKFCSEGKVYLSMLEDTGFWLESKILSFIQDQEEDYLKLHRVIYQQIIQTYLTVCKDVVMVGLGDHQFQMQLLQRSLGIMQTVKGFFYVSLLLDILKEITGSSLIQKTDSDEEVAMLLDTVQKVFQKMLECIARSFRKQPEEGLRLLYSVQRPLHEFITAVQSRHTDTPVHRGVLSTLIAGPVVEISHQLRKVSDVEELTPPEHLSDLPPFSRCLIGIIIKSSNVVRSFLDELKACVASNDIEGIVCLTAAVHIILVINAGKHKSSKVREVAATVHRKLKTFMEITLEEDSIERYEDLLCCPGWALTPGLLDSIYPSASVPIG

SEQ ID NO: 373 - DNA, 5956 bp, Homosapiens
agtatccaccccgcccgctcccggtgacgtgccagccccaggcccacgccgctcccgccccgcgtgatgacgccaccgtcccgggcggaggcgggcgtgcggcggagccgcgtcccctcagaggggcgctggcgcggggctgagccgcccgggatcagcgcgagcacccagcccgcctcggccgggagggcagcgcggcactgcggggcgatgagcggcgcccggggcgagggcccggaggcgggcgccggcggggctgggggccgcgcggcgcctgagaaccccgggggcgtgctgagcgtggagctgcccgggctgctggcgcagctggcgcggagcttcgcgctgctgctgcccgtgtacgcgctgggctacctggggctcagcttcagctgggttctcctcgcgctcgcgctgctcgcctggtgtcgccgcagccgcggcctcaaggccctgcgcctgtgccgcgcgctggcgctgctggaagacgaggagcgcgtcgtgcgcctgggggtgcgcgcctgcgacctgcccgcctgggttcattttccagacactgaaagagcagaatggctaaataagactgtaaaacacatgtggcctttcatttgccaatttatagagaagttgtttcgagaaactatagaaccagccgtgcggggagcaaacacccaccttagcacctttagtttcacgaaggtcgacgtgggccagcagcccctcaggatcaatggtgttaaggtatacactgaaaatgtagacaaaaggcaaattattttggaccttcagattagttttgtaggaaattgtgagattgatttggagatcaaacgatatttttgtagagctggtgtgaaaagtatccagattcatggtaccatgcgggtgatcctggaaccgttgattggagatatgcccttagttggagctttgtctatcttcttccttaggaaaccacttttagaaattaactggacaggactgacgaatcttctggatgtccctggattgaatggtttatcagatactatcattttggatataatatcaaactatctggtgcttcccaatcgaatcaccgttccacttgtcagtgaagttcaaatagctcagttgcggtttcctgtaccaaagggtgttctaaggatacattttattgaagctcaggatcttcaggggaaagacacttaccttaagggacttgtcaagggaaagtcagacccctatggaatcattagagttggcaaccaaatcttccaaagcagagtcatcaaggagaacctcagtccaaagtggaatgaagtctatgaggctttagtgtatgaacatcctggacaagaattagagattgagctctttgatgaagacccagacaaggatgactttttaggaagtcttatgattgacctcattgaagttgaaaaggagcgccttttagatgaatggttcactctggacgaggttcccaaggggaagctacacttgagactggagtggctcacgttaatgccaaatgcgtcaaacctcgacaaggtgctaacagacatcaaagctgacaaagaccaagccaacgatggtctttcctctgcattgctgatcttgtacttggattcagcaaggaaccttccgtcagggaagaaaataagcagcaacccaaatcctgttgtccagatgtcagttgggcacaaggcccaggagagcaagattcgatacaaaaccaatgaacctgtgtgggaggaaaacttcactttcttcattcacaatcccaagcgccaggaccttgaagttgaggtcagagacgagcagcaccagtgttccctggggaacctgaaggtccccctcagccagctgctcaccagtgaggacatgactgtgagccagcgcttccagctcagtaactcgggtccaaacagcaccatcaagatgaagattgccctgcgggtgctccatctcgaaaagcgagaaaggcctccagaccaccaacactcagctcaagtcaaacgtccctctgtgtccaaagaggggaggaaaacatccatcaaatctcatatgtctgggtctccaggccctggtggcagcaacacagctccatccacaccagtcattgggggcagtgataagcctggtatggaagaaaaggcccagccccctgaggccggccctcaggggctgcacgacctgggcagaagctcctccagcctcctggcctccccaggccacatctcagtcaaggagccgacccccagcatcgcctcggacatctcgctgcccatcgccacccaggagctgcggcaaaggctgaggcagctggaaaacgggacgaccctgggacagtctccactggggcagatccagctgaccatccggcacagctcgcagagaaacaagcttatcgtggtcgtgcatgcctgcagaaacctcattgccttctctgaagacggctctgacccctatgtccgcatgtatttattaccagacaagaggcggtcaggaaggaggaaaacacacgtgtcaaagaaaacattaaatccagtgtttgatcaaagctttgatttcagtgtttcgttaccagaagtccagaggagaacgcttgacgttgccgtgaagaacagtggcggcttcctgtccaaagacaaagggctccttggcaaagtattggttgctctggcatctgaagaacttgccaaaggctggacccagtggtatgacctcacggaagatgggacgaggcctcaggcgatgacatagccgcagcaggcaggaggcgtcctcttcagcgtagctctccacctctacccggaacacaccctctcacagacgtaccaatgttatttttataatttcatggatttagttatacataccttaatagttttataaaattgttgacatttcaggcaaatttggccaatattatcattgaattttctgtgttggatttcctctaggatttcgccagttcctacaacgtgcagtagggcggcggtagctcttgtgtctgtggactctgctcagctgtgtccgtaggagtcggatgtgtctgtgctttattatggccttgtttatatatcactgaggtatactatgccatgtaaatagactattttttataatctttacatgctggtttaaattcagaaggaaatagatcaaggaaatatatatattttcttctaaaacttattaaattcgtgtgacaaataatcattttcatcttggcagcaaaagttctcagtgacctattttgtggtgtttctttttgaaaagaaaagctgaaatattattaaatgctagtatgtttctgcccattatgaaagatgaaataaagtattcaaaatattaacattttcataaatataaggatgtattattgagaagtaagttgaagggcttataaggaaaaatgttttataactgagtaatatattaagagaattgtcatggttcataaatcacattatgctaatctgaaatttcttacataaaaatgaagtgtcttatgtttattttaattgctgttgtaacttactcatgaaacagtatacagacaccttgtacttttcctcaactgtaagagcagactttcaatgttagcaattaagctgttgtcaaacaatcagtcatgagctttgttaattttcaatgttttcccagcctataaaaaaaggaaggtacacgttgtccttttaaaggttgtgaggtagattggagtgagtagacaggatattgcattaaaaattgaaagctcgatctcattattgtcaggaacccccagtgtgacctcacacataggatgtgggacctttgagccgatgtgcactggccaccaccagggttgggggcgccacagctgcgagcccggcccctgctgttctcagcagccacttcccaggctgcctcactttatgccatgactgaccttaatattgggatattgttatgcaatttttatcctgtttagactgttaaaagcaggtttctgtacttaagagtcccccagacctcctgtgaggtgaggctctgttgcagtgtcgtaggctgtgtgtgtctgtaaagaaagaatgcacatatgtagacgattaagtgtatattataagctatatgctgaaaatggcttccatagccatgagaacatcttaaaactatgtgtaaatatattaaggaaagtatagctttgtaatttaaattggagcttttagcttgtttcatggaactatacaacttgtgggtaactcacatgaccaaacaaaccaaagtgcctgtgacggggcgggtggcgtctacccaccctcccttctagcagattcttattttgtttgaatttataaacaaggctggtggctgtctacccaccctcccttctagcagattttgattttgtttcaatttataacttacactttgaaccatgggtttacttataatggagtctgtagcttcacagcatatttcatgtaatcataaagaccagtatattccctcctgctgaatgacatgcgactgtaaagcctctttataaaccatttccaatgttagtatataggattatttgggaagcgtatcaatacctttatagacaaatacgaacatgtatgcacacaaaacatttaactatggtatttatggaagacaggtaacaacattaaatctagttgctttcccttagtattagatttgttgagggttttttaaaaatcaggtctgttgaaagtcttctgtcataatctataaagcagcagcactcatggaaattgtagcatgccagtaatttttaccaacatcccatacatctgagttctgcagtccagtgtgtaatccgctccatgtgtattttgcttaatggaatgctttatttaagcacttaggcagagtagacacaattaaaggtacaaagcccagaggaagtggtagagcagcaccgtgcctgccctgaggcagtggagtcagtagcgctgtccccagggccttgagtgcctggaggtgcttggcctccagtagctgcctccattctcttttaaaaaaagggggtgattctgaggcactgaagtgcctcccagatgtggaggagtgaagccaccatcgaggccacactcagcactccaggatcccagcgatgtcagacactcttgagttgtcaaaacgttaattttcagttttaaataatcagtttatctaagaaaagggaattttaacttttctaccttgagccaagccaatgaagggaaaattaattaacttagtaaatttgaagtgcagctctgttagctcgtacatgtgggttcttatcctgatcctgtgccttaaagtaggaaggtgtttccaagttcagattaaaatagaagcagctggccgggtgcggtggctcacgcctgtaatcccagcactttgggaggccgaggcgggcggatgacctgaggtcaggagttcaagaccagcctggccaacatggagaaaccccatctttactaaaaatacaaaaattagccgggcgtggtggtggagcgcacgcctgtagtcccagctactcgggaggctgaggcaggagaattgcttgaacccaggaggcggaggttgcagtgagccaagatcgcaccactgcactccagcctgggcaacagagtgagactccgtctcaaaaaataaataaaatagaagcagccttgtaactgtatttaccatgataatatattctgcacggtaagaattccttttacagacattctttatcaagaggtcggcccttctttttcaggcacataagccaaatgcaggcctgtgtgtagctgtgtgttttttctgtggttgccgcatttattccacctccagctggaccccccactgcaaatagagaacagcggtgggggatgggggttaaaaagtagagaacctcctttctgttcaactaatttcacgtgacagtgcatgtatttattcaataaaacctttatgttagctc

SEQ ID NO: 374 - protein, 893 aa, Homosapiens
MTPPSRAEAGVRRSRVPSEGRWRGAEPPGISASTQPASAGRAARHCGAMSGARGEGPEAGAGGAGGRAAPENPGGVLSVELPGLLAQLARSFALLLPVYALGYLGLSFSWVLLALALLAWCRRSRGLKALRLCRALALLEDEERVVRLGVRACDLPAWVHFPDTERAEWLNKTVKHMWPFICQFIEKLFRETIEPAVRGANTHLSTFSFTKVDVGQQPLRINGVKVYTENVDKRQIILDLQISFVGNCEIDLEIKRYFCRAGVKSIQIHGTMRVILEPLIGDMPLVGALSIFFLRKPLLEINWTGLTNLLDVPGLNGLSDTIILDIISNYLVLPNRITVPLVSEVQIAQLRFPVPKGVLRIHFIEAQDLQGKDTYLKGLVKGKSDPYGIIRVGNQIFQSRVIKENLSPKWNEVYEALVYEHPGQELEIELFDEDPDKDDFLGSLMIDLIEVEKERLLDEWFTLDEVPKGKLHLRLEWLTLMPNASNLDKVLTDIKADKDQANDGLSSALLILYLDSARNLPSGKKISSNPNPVVQMSVGHKAQESKIRYKTNEPVWEENFTFFIHNPKRQDLEVEVRDEQHQCSLGNLKVPLSQLLTSEDMTVSQRFQLSNSGPNSTIKMKIALRVLHLEKRERPPDHQHSAQVKRPSVSKEGRKTSIKSHMSGSPGPGGSNTAPSTPVIGGSDKPGMEEKAQPPEAGPQGLHDLGRSSSSLLASPGHISVKEPTPSIASDISLPIATQELRQRLRQLENGTTLGQSPLGQIQLTIRHSSQRNKLIVVVHACRNLIAFSEDGSDPYVRMYLLPDKRRSGRRKTHVSKKTLNPVFDQSFDFSVSLPEVQRRTLDVAVKNSGGFLSKDKGLLGKVLVALASEELAKGWTQWYDLTEDGTRPQAMT

SEQ ID NO: 375 - DNA, 2735 bp, Homosapiens
agcagagggatcatgacggggaaaaagtcctcccgggagaaacggcgcaaacgtagcagtcaggaggcggccgcagcgctcgcggccccggacatcgtacccgcgttggccagcggcagcagtggaagcactagcggctgcgggagcgccgggggctgcgggagcgtcagctgctgtgggaacgccaattttagtggaagtgtcaccggcggtgggagcggcggcagctgttggggcgggagcagcgtggagcgcagcgagcgccggaagcggaggagtaccgactcttccagcgtctcgggctccttgcagcaggaaactaaatatattttgccaactttggaaaaagaattattcttggcagagcacagtgaccttgaagaaggtggactggacctgactgtgtcattgaaaccagttagtttctatatatcagacaaaaaagaaatgcttcagcagtgcttctgtattataggagagaaaaagttacagaagatgcttcctgatgtgttaaagaactgttcaatagaagaaattaaaaaactatgccaggaacagttagagctcctgtctgaaaaaaaaattttgaagattcttgagggtgacaatggaatggactctgatatggaagaggaagcagatgatggttctaagatgggatctgatttagtcagtcagcaagacatctgtatagattctgcttcatccgtgagagagaataagcaacctgaaggtttggaattaaaacaaggaaaaggggaagatagtgatgtactcagtataaatgcagatgcttatgacagcgacatagaaggcccatgcaacgaagaagcagctgctcccgaggcaccagaaaatacagtccaaagtgaagctggtcagataaatgacctggagaaagacattgagaaaagtgtgaatgagattctaggactggcagagtctagcccaaacgaacccaaagcagccaccctggctgttcctccaccagaagatgttcaaccttctgcacagcaactggagctgctagaacttgagatgagggcaagagcgattaaagccctaatgaaagctggtgatataaaaaagccagcctaggtatttaacttgattttgaattttaggtatgtttgaacaaagccacatcatttaattttgtatctaaaatttatttggggtcttatatgttatttctcatgtaacccttattaggactcattttagccctaaattacctgtggctgtttctttttatttttttgactacttttatattataaatgtgtgttactgtcttatgaattcatggcaatatagttggatagcctggatactttgttagatgagtatttagctgtgtctgcaaatcttaaaagccattagcaaagagtcgtggtatttttttctttatttttaaatgtttgggcaccaaacctaaaagcaaaagattgacgaagcatgtttctcttaaggctacttgtattttacaatacaatattaaattatttaatttgagaaatttagttttgcttatatgcactttttaaatatatactattttgaagattccttatgtaaatgcaaatttcctagttaaaaccgaataacagagatctgaaatgactgagaaaaacttttttattaaaggaaggaattaatttaaggcaatttttaactatgtagaactaattgcccatgtttaattatagcagacacgccattctaacaggtatttgataccattggatgcattattctaggttttttctttaataaaaatggaacaagttttcatttacattccaagctgtcaggaaatgaagaatattttattatctaggattttatctgatgtagttgcttaaagatctgatgtgctataattccatgaatcagaaataataaaatgctatcattctggatctgaagacttttgatactttttcaaaagcaaaattaatttcaggaacctttgataagttgttgttataattaatctaattttgtatagtttttgtaaataaattaccatccttccacaattagggatgcttttatccccccatcactaattgcagttgtttgataccaaaataaatttacgtagagatccttaacttaaaataaattaattttttcaaaaaacataaatctggaactgttgtttctatatttgataacaaatacagtatattttatttataagccatggtctactgatactgtatgaggactttccttatatataaaagttgcagggattgtgttttattagctgctttaattatgttaattttagagagtttttaaatggaaatagaggacatttatgaaacgctggaattgcagttacaaattctttttgttgttgttgttcctgaacatgccttggaataattctaccattttttccccctccataaatctttctaataaagcatagaaaaagcctatatgattttaaatgcttctcttaagctggtaaacagatttgagttatgagttcattgttattgcttcaagatgaaaagacagtgatataatttttctatttcaacttaaaagtaatagttaatatgctaaagtagtacagaataaactttattgctgcttactaactacaaaatactgtagatggcatctgtatgattaaacatataaagtaaaacaggtctgagggctttgtagatgattaaagtctccaccttcatgaaaaaaaaaaaaaaaaaaaaaaa

SEQ ID NO: 376 - protein, 361 aa, Homosapiens
MTGKKSSREKRRKRSSQEAAAALAAPDIVPALASGSSGSTSGCGSAGGCGSVSCCGNANFSGSVTGGGSGGSCWGGSSVERSERRKRRSTDSSSVSGSLQQETKYILPTLEKELFLAEHSDLEEGGLDLTVSLKPVSFYISDKKEMLQQCFCIIGEKKLQKMLPDVLKNCSIEEIKKLCQEQLELLSEKKILKILEGDNGMDSDMEEEADDGSKMGSDLVSQQDICIDSASSVRENKQPEGLELKQGKGEDSDVLSINADAYDSDIEGPCNEEAAAPEAPENTVQSEAGQINDLEKDIEKSVNEILGLAESSPNEPKAATLAVPPPEDVQPSAQQLELLELEMRARAIKALMKAGDIKKPA

SEQ ID NO: 377 - DNA, 2719 bp, Homosapiens
ccacgcgtccgggctcttctcccgccgcggcccggcgctctccgagtcgcccctgcggactggtctcgcacagtgcctgggcaccgggcgccagacagacactggccatgacgagcggcgcaaccaggtaccggctgagctgctcgctccggggccacgagctggacgtacggggcctggtgtgctgcgcctatccgccgggagcctttgtgtccgtgtcccgagaccgcaccacccgcctctgggccccagacagtccaaacaggagctttacagaaatgcactgtatgagtggccattccaattttgtatcttgtgtatgcatcataccctcaagtgacatctaccctcatggcctaattgccaccggtggaaatgaccacaatatatgcattttctcactggacagtccaatgccactttatattctaaaaggccacaaaaatactgtttgtagtctatcatctggaaaatttgggacattacttagtggttcatgggacaccactgctaaagtctggctgaatgacaagtgcatgatgaccttgcagggtcatacagctgcagtgtgggcggtaaagatcttacctgaacagggcttaatgttgactggatcagcagacaagactgttaaactgtggaaggctggaagatgtgagaggactttttcagggcatgaagactgtgtaagaggtttggcaattttgagtgaaacagaatttctttcctgtgcaaatgatgctagtattagaaggtggcaaatcactggcgagtgtcttgaagtatattatggacatacaaattatatttatagcatatccgtttttccaaattgtagagactttgtgacaacagcagaggacagatctctgagaatctggaaacatggggaatgtgctcaaactatccgacttccagctcagtctatatggtgctgctgtgtgctcgacaatggtgacattgtggttggtgcgagtgatggcattattagagtgtttacagaatcagaagatcgaacagcaagtgctgaagaaatcaaggcttttgaaaaagaactgtctcacgcaaccattgattctaaaactggcgatttaggggacatcaatgctgagcagcttcctgggagggaacatcttaatgaacctggtactagagaaggacagactcgtctaatcagagatggggagaaagtcgaagcctatcagtggagtgttagtgaagggaggtggataaaaattggtgatgttgttggctcatctggtgctaatcagcaaacatctggaaaagttttatatgaagggaaagaatttgattatgttttctcaattgatgtcaatgaaggtggaccatcatataaattgccatataataccagtgatgacccttggttaactgcatacaacttcttacagaagaatgatttgaatcctatgtttctggatcaagtagctaaatttattattgataacacaaaaggtcaaatgttgggacttgggaatcccagcttttcagatccatttacaggtggtggtcggtatgttccgggctcttcgggatcttctaacacactacccacagcagatccttttacaggtgctggtcgttatgtaccaggttctgcaagtatgggaactaccatggccggagttgatccatttacagggaatagtgcctaccgatcagctgcatctaaaacaatgaatatttatttccctaaaaaagaggctgtcacatttgaccaagcaaaccctacacaaatattaggtaaactgaaggaacttaatggaactgcacctgaagagaagaagttaactgaggatgacttgatacttcttgagaagatactgtctctaatatgtaatagttcttcagaaaaacccacagtccagcaacttcagattttgtggaaagctattaactgtcctgaagatattgtctttcctgcacttgacattcttcggttgtcaattaaacaccccagtgtgaatgagaacttctgcaatgaaaaggaaggggctcagttcagcagtcatcttatcaatcttctgaaccctaaaggaaagccagcaaaccagctgcttgctctcaggactttttgcaattgttttgttggccaggcaggacaaaaactcatgatgtcccagagggaatcactgatgtcccatgcaatagaactgaaatcagggagcaataagaacattcacattgctctggctacattggccctgaactattctgtttgttttcataaagaccataacattgaagggaaagcccaatgtttgtcactaattagcacaatcttggaagtagtacaagacctagaagccacttttagacttcttgtggctcttggaacacttatcagtgatgattcaaatgctgtacaattagccaagtctttaggtgttgattctcaaataaaaaagtattcctcagtatcagaaccagctaaagtaagtgaatgctgtagatttatcctaaatttgctgtagcagtggggaagagggacggatatttttaattgattagtgtttttttcctcacatttgacatgactgataacagataattaaaaaaagagaatacggtggattaagtaaaattttacatcttgtaaagtggtggggaggggaaacagaaataaaatttttgcactgctgaaaaaaaaaaaaaaaaaaaaaaaaaaaaaaaaaaaaaaaaaaaaaaaaaaaaaaaa

SEQ ID NO: 378 - protein, 795 aa, Homosapiens
MTSGATRYRLSCSLRGHELDVRGLVCCAYPPGAFVSVSRDRTTRLWAPDSPNRSFTEMHCMSGHSNFVSCVCIIPSSDIYPHGLIATGGNDHNICIFSLDSPMPLYILKGHKNTVCSLSSGKFGTLLSGSWDTTAKVWLNDKCMMTLQGHTAAVWAVKILPEQGLMLTGSADKTVKLWKAGRCERTFSGHEDCVRGLAILSETEFLSCANDASIRRWQITGECLEVYYGHTNYIYSISVFPNCRDFVTTAEDRSLRIWKHGECAQTIRLPAQSIWCCCVLDNGDIVVGASDGIIRVFTESEDRTASAEEIKAFEKELSHATIDSKTGDLGDINAEQLPGREHLNEPGTREGQTRLIRDGEKVEAYQWSVSEGRWIKIGDVVGSSGANQQTSGKVLYEGKEFDYVFSIDVNEGGPSYKLPYNTSDDPWLTAYNFLQKNDLNPMFLDQVAKFIIDNTKGQMLGLGNPSFSDPFTGGGRYVPGSSGSSNTLPTADPFTGAGRYVPGSASMGTTMAGVDPFTGNSAYRSAASKTMNIYFPKKEAVTFDQANPTQILGKLKELNGTAPEEKKLTEDDLILLEKILSLICNSSSEKPTVQQLQILWKAINCPEDIVFPALDILRLSIKHPSVNENFCNEKEGAQFSSHLINLLNPKGKPANQLLALRTFCNCFVGQAGQKLMMSQRESLMSHAIELKSGSNKNIHIALATLALNYSVCFHKDHNIEGKAQCLSLISTILEVVQDLEATFRLLVALGTLISDDSNAVQLAKSLGVDSQIKKYSSVSEPAKVSECCRFILNLL

SEQ ID NO: 379 - DNA, 3240 bp, Homosapiens
agacagtccaaacaggagctttacagaaatgcactgtatgagtggccattccaattttgtatcttgtgtatgcatcataccctcaagtgacatctaccctcatggcctaattgccaccggtggaaatgaccacaatatatgcattttctcactggacagtccaatgccactttatattctaaaaggccacaaaaatactgtttgtagtctatcatctggaaaatttgggacattacttagtggttcatgggacaccactgctaaagtctggctgaatgacaagtgcatgatgaccttgcagggtcatacagctgcagtgtgggcggtaaagatcttacctgaacagggcttaatgttgactggatcagcagacaagactgttaaactgtggaaggctggaagatgtgagaggactttttcagggcatgaagactgtgtaagaggtttggcaattttgagtgaaacagaatttctttcctgtgcaaatgatgctagtattagaaggtggcaaatcactggcgagtgtcttgaagtatattatggacatacaaattatatttatagcatatccgtttttccaaattgtagagactttgtgacaacagcagaggacagatctctgagaatctggaaacatggggaatgtgctcaaactatccgacttccagctcagtctatatggtgctgctgtgtgctcgacaatggtgacattgtggttggtgcgagtgatggcattattagagtgtttacagaatcagaagatcgaacagcaagtgctgaagaaatcaaggcttttgaaaaagaactgtctcacgcaaccattgattctaaaactggcgatttaggggacatcaatgctgagcagcttcctgggagggaacatcttaatgaacctggtactagagaaggacagactcgtctaatcagagatggggagaaagtcgaagcctatcagtggagtgttagtgaagggaggtggataaaaattggtgatgttgttggctcatctggtgctaatcagcaaacatctggaaaagttttatatgaagggaaagaatttgattatgttttctcaattgatgtcaatgaaggtggaccatcatataaattgccatataataccagtgatgacccttggttaactgcatacaacttcttacagaagaatgatttgaatcctatgtttctggatcaagtagctaaatttattattgataacacaaaaggtcaaatgttgggacttgggaatcccagcttttcagatccatttacaggtggtggtcggtatgttccgggctcttcgggatcttctaacacactacccacagcagatccttttacaggtgctggtcgttatgtaccaggttctgcaagtatgggaactaccatggccggagttgatccatttacagggaatagtgcctaccgatcagctgcatctaaaacaatgaatatttatttccctaaaaaagaggctgtcacatttgaccaagcaaaccctacacaaatattaggtaaactgaaggaacttaatggaactgcacctgaagagaagaagttaactgaggatgacttgatacttcttgagaagatactgtctctaatatgtaatagttcttcagaaaaacccacagtccagcaacttcagattttgtggaaagctattaactgtcctgaagatattgtctttcctgcacttgacattcttcggttgtcaattaaacaccccagtgtgaatgagaacttctgcaatgaaaaggaaggggctcagttcagcagtcatcttatcaatcttctgaaccctaaaggaaagccagcaaaccagctgcttgctctcaggactttttgcaattgttttgttggccaggcaggacaaaaactcatgatgtcccagagggaatcactgatgtcccatgcaatagaactgaaatcagggagcaataagaacattcacattgctctggctacattggccctgaactattctgtttgttttcataaagaccataacattgaagggaaagcccaatgtttgtcactaattagcacaatcttggaagtagtacaagacctagaagccacttttagacttcttgtggctcttggaacacttatcagtgatgattcaaatgctgtacaattagccaagtctttaggtgttgattctcaaataaaaaagtattcctcagtatcagaaccagctaaagtaagtgaatgctgtagatttatcctaaatttgctgtagcagtggggaagagggacggatatttttaattgattagtgtttttttcctcacatttgacatgactgataacagataattaaaaaaagagaatacggtggattaagtaaaattttacatcttgtaaagtggtggggaggggaaacagaaataaaatttttgcactgctgaactgtgagattttcctgtgtaatttgggtagattttcaagagtgtgaacacaaatttaaaataagctataatcagcaacaacacaatgacaatgacatcttccccttaccttagccactaagaagacaagggctgttactcatataacttgcttttcttacttaatgtacaccaaactgttgttgtcaattatcttttatttaacttctccaccttcattgctagatccttcgaacagcactgatacatttcaaggtcttgttttaggataactactttaaaattttttaaattatattaaatttataaaataatttataaattcatatattaaaacaatataagataatttcttgatttgtcatttataaatccctaaagtatatttgtttaatggcctatttttggatgaagaaaaagccagttggtaagctgtgttagtcatgtatcagttcagacagacggaggtctcaatttaactccaggcttagatcccagtttccttttgcccttcactatttgaggtaacttcatttttcattctagttttgatatttggctgtttatttttgtcattttccattatttcaaagggaatttggaacatgttgaattttatcaggtggttacataagcaagagtacatcaaactgtattatttgaaagtctagaacctgtcatgtgaaattactatttttgagccctctatgtggtccaggcagaatagtagacacactgatatttaatccttaaaacccctttaaatgagggccagtattatctctgctttcagaagtagacataataggatgaatcatataacaga

SEQ ID NO: 380 - protein, 738 aa, Homosapiens
MHCMSGHSNFVSCVCIIPSSDIYPHGLIATGGNDHNICIFSLDSPMPLYILKGHKNTVCSLSSGKFGTLLSGSWDTTAKVWLNDKCMMTLQGHTAAVWAVKILPEQGLMLTGSADKTVKLWKAGRCERTFSGHEDCVRGLAILSETEFLSCANDASIRRWQITGECLEVYYGHTNYIYSISVFPNCRDFVTTAEDRSLRIWKHGECAQTIRLPAQSIWCCCVLDNGDIVVGASDGIIRVFTESEDRTASAEEIKAFEKELSHATIDSKTGDLGDINAEQLPGREHLNEPGTREGQTRLIRDGEKVEAYQWSVSEGRWIKIGDVVGSSGANQQTSGKVLYEGKEFDYVFSIDVNEGGPSYKLPYNTSDDPWLTAYNFLQKNDLNPMFLDQVAKFIIDNTKGQMLGLGNPSFSDPFTGGGRYVPGSSGSSNTLPTADPFTGAGRYVPGSASMGTTMAGVDPFTGNSAYRSAASKTMNIYFPKKEAVTFDQANPTQILGKLKELNGTAPEEKKLTEDDLILLEKILSLICNSSSEKPTVQQLQILWKAINCPEDIVFPALDILRLSIKHPSVNENFCNEKEGAQFSSHLINLLNPKGKPANQLLALRTFCNCFVGQAGQKLMMSQRESLMSHAIELKSGSNKNIHIALATLALNYSVCFHKDHNIEGKAQCLSLISTILEVVQDLEATFRLLVALGTLISDDSNAVQLAKSLGVDSQIKKYSSVSEPAKVSECCRFILNLL

SEQ ID NO: 381 - DNA, 1995 bp, Homosapiens
agttagtgggtaggcctgagagccgaggaaaactgagcgtgggcctcagaaagaagtcaaggcacccgcgagccgggcaactgccctccttccgcgccggcggagcgattaaagtgaagaaacaatggccagcaatcacaaatcttcagcagctcgccctgtttcaagaggtggagttgggttaacaggaaggcctccttctgggatacgacccctatcaggaaatattcgagtggcaactgcaatgccacctgggacagcaagaccaggttctcgtggttgtcccatagggactggtggagttctgtcttctcaaatcaaagttgcccatcgccctgtaacacaacaaggtttgactggaatgaaaactgggacgaaaggtccccagaggcaaattttagacaaatcttactatcttgggcttcttagaagtaaaataagtgaacttacaactgaagttaataaacttcagaagggaatagaaatgtacaatcaagagaattcagtatatttgtcatatgaaaagagggctgagactttagctgttgagataaaagagcttcaaggacaactagcagactacaacatgttggtagattaacttaataccaacactgaaatggaagaagtaatgaatggttacaatatgcttaaagctcaaaatgatcgagaaacacaaagtttggatgtcatatttactgaaagacaagcgaaagaaaaacaaatcagaagtgtcgaagaagaaattgaacaggaaaaacaagcaacagatgacattatcaaaaatatgtctcttgaaaaccaagtcaagtacctagagatgaaaaccacaaatgagaaactgttacaggaattagatacacttcaacaacaattggattcacagaacatgaaaaaagagagcctggaagcagaaatagctcactcccaggtgaaacaggaggcggtattgctgcatgaaaaactttatgagttggagtcccatcgagatcaaatgattgcagaagacaaaagcataggatctccaatggaagagagagagaaattacttaagcagattaaagatgataatcaggaaatagccagcatggaaagacagttaacagatacaaaagaaaagataaatcagtttattgaagaaattagacaacttgacatggatttagaggaacaccaaggtgaaatgaaccagaaatacaaggagctaaagaaaagggaggaacatatggacacttttattgagacttttgaggaaacaaagaatcaggaactgaaacgaaaggcacagatagaagccaacattgttgcactcttggagcactgcagtcgaaatataaatcgtatagaacagatatcctctatcaccaatcaagagctaaagatgatgcaggatgacctcaattttaaatctactgaagtgcagaaatcacaaagtacagctcagaatttgacttcagacattcaacgtctgcagttggatctgcagaaaatggagcttctagaaagtaagatgactgaagaacagcattctctaaaaagcaaaattaagcaaatgacaactgatctggagatatataatgatttgccagctttaaaatcatcaggtgaagaaaagataaagaaattacatcaggagagaatgatattatcaacccacagaaatgcctttaagaaaataatggagaagcaaaacatagagtatgaggcactaaaaacacaattgcaagaaaatgagacacattctcagcttacaaatttggagagaaagtggcaacaccttgagcaaaataattttgcgatgaaagaattcatagcaaccaagagtcaagagagtgattaccagccaattaagaaaaatgtgaccaagcagattgcagagtacaataaaaccatcgtggatgctttacatagcaccagcggaaactgagtttaagtccactgaaagtctctaaggaagtatcctcttgctgctaaacttggtacaagttgactacc

SEQ ID NO: 382 - protein, 435 aa, Homosapiens
MEEVMNGYNMLKAQNDRETQSLDVIFTERQAKEKQIRSVEEEIEQEKQATDDIIKNMSLENQVKYLEMKTTNEKLLQELDTLQQQLDSQNMKKESLEAEIAHSQVKQEAVLLHEKLYELESHRDQMIAEDKSIGSPMEEREKLLKQIKDDNQEIASMERQLTDTKEKINQFIEEIRQLDMDLEEHQGEMNQKYKELKKREEHMDTFIETFEETKNQELKRKAQIEANIVALLEHCSRNINRIEQISSITNQELKMMQDDLNFKSTEVQKSQSTAQNLTSDIQRLQLDLQKMELLESKMTEEQHSLKSKIKQMTTDLEIYNDLPALKSSGEEKIKKLHQERMILSTHRNAFKKIMEKQNIEYEALKTQLQENETHSQLTNLERKWQHLEQNNFAMKEFIATKSQESDYQPIKKNVTKQIAEYNKTIVDALHSTSGN

SEQ ID NO: 383 - DNA, 3160 bp, Homosapiens
atacgatgtactttttttaatgccgttgaaacagagttaatttcctttagcacacaagtcttagagacaaaagaaaaaaaggtctgcaacatgaaagtcacaggcatcacaatcctcttttggcccctctccatgatattattatcagacaaaatccagtcttctaaaagagaagtccaatgtaattttactgaaaaaaattataccttgattccagcagatatcaagaaagatgttactatacttgatctcagttataaccaaattactcttaatggtacagacacaagagttctacagacatactttttactcacagagctctatttgattgagaacaaggttactatcttacataataacggttttggtaacctctccagtctagaaattttaaatatctgtagaaactccatctatgtaattcaacagggtgcatttttaggcttaaataaactaaaacagttatatctctgccaaaacaaaatagaacaactgaatgctgatgtatttgtgcctctaagaagcctaaaacttctgaatctgcaaggcaatttgattagctatttggatgtaccaccactatttcatctggaattaataactttatatggaaacctatggaactgctcttgcagtctatttaatttgcagaactggttgaacacatcaaatgtgacattagaaaatgagaacatcaccatgtgtagctaccccaacagcctgcagagctacaatatcaaaacagtacctcataaggctgaatgccactcaaaatttccttcatcagtaactgaagatctttatattcattttcagcccatcagcaattcaatatttaatagctcttcgaacaacttaacaagaaattcagaacatgaacctcttggaaaaagttgggcttttcttgttggtgttgttgtcactgtactgacgacttcacttctcatttttattgctatcaaatgcccaatatggtacaatattctgcttagttataatcatcatcgcctggaagagcatgaagcagaaacctatgaagatggttttactggaaatccaagctctctttcacagataccagaaacaaactctgaagaaactacagtaatatttgaacaattacattcatttgtggtagatgatgatggatttattgaagacaaatatatagatatccatgaattatgtgaagaaaattaatttctttcaaagtttgctttttaaagcaaagttatcagctcactcagtttagatatggagattttgctatgtgacataacaaaatacagctggcaggcattcatattaatgacaacatacatgaatatcataaaattatgttctttgcattatattgagcaagcaggttcaaatacagtaactgacactcctcggtagttgacagttacatagtctacaatactagcactactattcttagcagtgcttgggtgaccatacgaactagtaaaaaggtctaaattattcatgaattaaaatgaatggattctcatattaacacaggtatttgacataatatgtattaagttatactaatgtttcaatcagtaaagaaataaaagtttaggatttattaatatatggaagtcaaagtgaggaacagagatagcttaaataatacactaagattgattttatgctcccagaataaaatcatagagttggaaaatatttttttgaaatgcttcctgaaatagcacaataaatttcccttaaaatttcatagcaatttaaagcacaagcacaatgttcaggcataatccctaataagtcactattgattctggttataaagaaaggctgtcaccataatgcaggatcactacagtttaatgtcatactggcttccaaagtgggcatcacaattatctataaatcttgttttaaaaatacatatttctacctctctctgggagatttttattcaaattggtctgtgctgacactaaggaatcttcatgtggtccatggacagctatttctatctattcagtagatagagcaatgtttcccaaattgtttttctagaatactaatttccagagagacattcacaagtatttacagaagaagaaggaggtacatggtcaaattactacaggaaaaactagtagtttaaacaaggtgaaacaagattctttttcttttttttttttttttttttgagacaaagtctcgcactgtctcccaggctggactgcagcagcgcagtctcagatcactgcaacctccgcctcctgggttcaagcaattcttctgactcagcctcccgagtagctgggagtacaggtgcacaccaccatgcctggctaatttctgtatttttagtagagacagggtttcaccatgttggccaggctggtctcgaacgcctgacctcatgatctacccgcctcggcctcccaaagtgctgggattacaggcatggagcaccgtgcctggccaagattctttacaataggatttatgtaaaacttaactaagctaaactgctctctgattattcaagagcaaagtattaaaaatttctcgaacttacttgacaacaaaacccattctttcagttacatctactaagagctcgtagttcaataacattccaaagaacgtagtttggaaaacactggcctatcggctgtaataggaagggtctaaagaaaattatttgctgagtcctcataatcaattggctataatcacaatttaataatttatcaatgcaaacagtacattaaaaactgtagcacaatctataatttttaccttcatatgcagagaaattaagaatttacatcttttacaaatatgtgtatctctgaaataatgaaatatattgatgggtgaaataatatttctggtattttcttcattataacacgtggaatgggacagtggctagaggtatggatggagcaaggtcaaatatgagctgatggagctgggcgctaaataagggtataatatgctacttctgtgtatgttgtgtatggtatagtatgctatttctgtgtatgttcaaattgtttatgtatataataaagttttaaaaatttgtatgtacttgacaattccttagaaaaaagaggctaaaataaaatagatctacgtcataaaaaaaaaaaaaaaaaaaaaaaaa

SEQ ID NO: 384 - protein, 370 aa, Homosapiens
MKVTGITILFWPLSMILLSDKIQSSKREVQCNFTEKNYTLIPADIKKDVTILDLSYNQITLNGTDTRVLQTYFLLTELYLIENKVTILHNNGFGNLSSLEILNICRNSIYVIQQGAFLGLNKLKQLYLCQNKIEQLNADVFVPLRSLKLLNLQGNLISYLDVPPLFHLELITLYGNLWNCSCSLFNLQNWLNTSNVTLENENITMCSYPNSLQSYNIKTVPHKAECHSKFPSSVTEDLYIHFQPISNSIFNSSSNNLTRNSEHEPLGKSWAFLVGVVVTVLTTSLLIFIAIKCPIWYNILLSYNHHRLEEHEAETYEDGFTGNPSSLSQIPETNSEETTVIFEQLHSFVVDDDGFIEDKYIDIHELCEEN

SEQ ID NO: 385 - DNA, 4678 bp, Homosapiens
tgaattgcgagatggatagggcttgagtgcccccagccctgctgataccaaatgcctttaagatacagcctttcccatcctaatctacaaaggaaacaggaaaaaggaacttaaaactccctgtgctcagacagaaatgagactgttacagcctgcttctgtgctgttccttcttgcctctaacttgtaaacaagacgtagtaggacgatgctaatggaaagtcacaaaccgctgggtttttgaaaggatccttgggacctcatgcacatttgtggaaactggatggagagatttggggaagcatggactctttagccagcttagttctctgtggagtcagcttgctcctttctggaactgtggaaggtgccatggacttgatcttgatcaattccctacctcttgtatctgatgctgaaacatctctcacctgcattgcctctgggtggcgcccccatgagcccatcaccataggaagggactttgaagccttaatgaaccagcaccaggatccgctggaagttactcaagatgtgaccagagaatgggctaaaaaagttgtttggaagagagaaaaggctagtaagatcaatggtgcttatttctgtgaagggcgagttcgaggagaggcaatcaggatacgaaccatgaagatgcgtcaacaagcttccttcctaccagctactttaactatgactgtggacaagggagataacgtgaacatatctttcaaaaaggtattgattaaagaagaagatgcagtgatttacaaaaatggttccttcatccattcagtgccccggcatgaagtacctgatattctagaagtacacctgcctcatgctcagccccaggatgctggagtgtactcggccaggtatataggaggaaacctcttcacctcggccttcaccaggctgatagtccggagatgtgaagcccagaagtggggacctgaatgcaaccatctctgtactgcttgtatgaacaatggtgtctgccatgaagatactggagaatgcatttgccctcctgggtttatgggaaggacgtgtgagaaggcttgtgaactgcacacgtttggcagaacttgtaaagaaaggtgcagtggacaagagggatgcaagtcttatgtgttctgtctccctgacccctatgggtgttcctgtgccacaggctggaagggtctgcagtgcaatgaagcatgccaccctggtttttacgggccagattgtaagcttaggtgcagctgcaacaatggggagatgtgtgatcgcttccaaggatgtctctgctctccaggatggcaggggctccagtgtgagagagaaggcataccgaggatgaccccaaagatagtggatttgccagatcatatagaagtaaacagtggtaaatttaatcccatttgcaaagcttctggctggccgctacctactaatgaagaaatgaccctggtgaagccggatgggacagtgctccatccaaaagactttaaccatacggatcatttctcagtagccatattcaccatccaccggatcctcccccctgactcaggagtttgggtctgcagtgtgaacacagtggctgggatggtggaaaagcccttcaacatttctgttaaagttcttccaaagcccctgaatgccccaaacgtgattgacactggacataactttgctgtcatcaacatcagctctgagccttactttggggatggaccaatcaaatccaagaagcttctatacaaacccgttaatcactatgaggcttggcaacatattcaagtgacaaatgagattgttacactcaactatttggaacctcggacagaatatgaactctgtgtgcaactggtccgtcgtggagagggtggggaagggcatcctggacctgtgagacgcttcacaacagcttctatcggactccctcctccaagaggtctaaatctcctgcctaaaagtcagaccactctaaatttgacctggcaaccaatatttccaagctcggaagatgacttttatgttgaagtggagagaaggtctgtgcaaaaaagtgatcagcagaatattaaagttccaggcaacttgacttcggtgctacttaacaacttacatcccagggagcagtacgtggtccgagctagagtcaacaccaaggcccagggggaatggagtgaagatctcactgcttggacccttagtgacattcttcctcctcaaccagaaaacatcaagatttccaacattacacactcctcagctgtgatttcttggacaatattggatggctattctatttcttctattactatccgttacaaggttcaaggcaagaatgaagaccagcacgttgatgtgaagataaagaatgccaccatcactcagtatcagctcaagggcctagagcctgaaacagcataccaggtggacatttttgcagagaacaacatagggtcaagcaacccagccttttctcatgaactggtgaccctcccagaatctcaagcaccagcggacctcggaggggggaagatgctgcttatagccatccttggctctgctggaatgacctgcctgactgtgctgttggcctttctgatcatattgcaattgaagagggcaaatgtgcaaaggagaatggcccaagccttccaaaacgtgagggaagaaccagctgtgcagttcaactcagggactctggccctaaacaggaaggtcaaaaacaacccagatcctacaatttatccagtgcttgactggaatgacatcaaatttcaagatgtgattggggagggcaattttggccaagttcttaaggcgcgcatcaagaaggatgggttacggatggatgctgccatcaaaagaatgaaagaatatgcctccaaagatgatcacagggactttgcaggagaactggaagttctttgtaaacttggacaccatccaaacatcatcaatctcttaggagcatgtgaacatcgaggctacttgtacctggccattgagtacgcgccccatggaaaccttctggacttccttcgcaagagccgtgtgctggagacggacccagcatttgccattgccaatagcaccgcgtccacactgtcctcccagcagctccttcacttcgctgccgacgtggcccggggcatggactacttgagccaaaaacagtttatccacagggatctggctgccagaaacattttagttggtgaaaactatgtggcaaaaatagcagattttggattgtcccgaggtcaagaggtgtatgtgaaaaagacaatgggaaggctcccagtgcgctggatggccatcgagtcactgaattacagtgtgtacacaaccaacagtgatgtatggtcctatggtgtgttactatgggagattgttagcttaggaggcacaccctactgcgggatgacttgtgcagaactctacgagaagctgccccagggctacagactggagaagcccctgaactgtgatgatgaggtgtatgatctaatgagacaatgctggcgggagaagccttatgagaggccatcatttgcccagatattggtgtccttaaacagaatgttagaggagcgaaagacctacgtgaataccacgctttatgagaagtttacttatgcaggaattgactgttctgctgaagaagcggcctaggacagaacatctgtataccctctgtttccctttcactggcatgggagacccttgacacctgctgagaaaacatgcctctgccaaaggatgtgatatataagtgtacatatgtgctgtacacctgggaccttcaccactgtagatcccatgcatggatctatgtagtatgctctgactctaataggactgtatatactgttttaagaatgggctgaaatcagaatgcctgtttgtggtttcatatgcaataatatatttttttaaaaatgtggacttcataggaaggcgtgagtacaattagtataatgcataactcattgttgtcctagatattttgatatttacctttatgttgaatgctattaaatgttttcctgtgtcaaagtaaaatattgttaataaacctaacaatgaccctgatagtacaggttaagtgagagaactatatgaattctaacaagtcataggttaatatttaagacactgaaaaatctaagtgatataaatcagattcttctctctcaattttatccctcacctgtagcagccagtcccgtttcatttagtcatgtgaccactctgtcttgtgtttccacagcctgcaagtcagtccaggatgctaacatctaaaaatagacttaaatctcattgcttacaagcctaagaatctttagagaagtatacataagtttaggataaaataatgggattttcttttcttttctctggtaatattgacttgtatattttaagaaataacagaaagcctgggtgacatttgggagacatgtgacatttatatattgaattaatatccctacatgtattgcacattgtaaaaagttttagttttgatgagttgtgagtttaccttgtatactgtaggcacactttgcactgatatatcatgagtgaataaatgtcttgcctactcacgtctcaaaaaaaaaaaaaaaaaaaaaaaaaaaaaaaaaaaaaaaaaaaaaaaaaaaaaaaaaaa

SEQ ID NO: 386 - protein, 1124 aa, Homosapiens
MDSLASLVLCGVSLLLSGTVEGAMDLILINSLPLVSDAETSLTCIASGWRPHEPITIGRDFEALMNQHQDPLEVTQDVTREWAKKVVWKREKASKINGAYFCEGRVRGEAIRIRTMKMRQQASFLPATLTMTVDKGDNVNISFKKVLIKEEDAVIYKNGSFIHSVPRHEVPDILEVHLPHAQPQDAGVYSARYIGGNLFTSAFTRLIVRRCEAQKWGPECNHLCTACMNNGVCHEDTGECICPPGFMGRTCEKACELHTFGRTCKERCSGQEGCKSYVFCLPDPYGCSCATGWKGLQCNEACHPGFYGPDCKLRCSCNNGEMCDRFQGCLCSPGWQGLQCEREGIPRMTPKIVDLPDHIEVNSGKFNPICKASGWPLPTNEEMTLVKPDGTVLHPKDFNHTDHFSVAIFTIHRILPPDSGVWVCSVNTVAGMVEKPFNISVKVLPKPLNAPNVIDTGHNFAVINISSEPYFGDGPIKSKKLLYKPVNHYEAWQHIQVTNEIVTLNYLEPRTEYELCVQLVRRGEGGEGHPGPVRRFTTASIGLPPPRGLNLLPKSQTTLNLTWQPIFPSSEDDFYVEVERRSVQKSDQQNIKVPGNLTSVLLNNLHPREQYVVRARVNTKAQGEWSEDLTAWTLSDILPPQPENIKISNITHSSAVISWTILDGYSISSITIRYKVQGKNEDQHVDVKIKNATITQYQLKGLEPETAYQVDIFAENNIGSSNPAFSHELVTLPESQAPADLGGGKMLLIAILGSAGMTCLTVLLAFLIILQLKRANVQRRMAQAFQNVREEPAVQFNSGTLALNRKVKNNPDPTIYPVLDWNDIKFQDVIGEGNFGQVLKARIKKDGLRMDAAIKRMKEYASKDDHRDFAGELEVLCKLGHHPNIINLLGACEHRGYLYLAIEYAPHGNLLDFLRKSRVLETDPAFAIANSTASTLSSQQLLHFAADVARGMDYLSQKQFIHRDLAARNILVGENYVAKIADFGLSRGQEVYVKKTMGRLPVRWMAIESLNYSVYTTNSDVWSYGVLLWEIVSLGGTPYCGMTCAELYEKLPQGYRLEKPLNCDDEVYDLMRQCWREKPYERPSFAQILVSLNRMLEERKTYVNTTLYEKFTYAGIDCSAEEAA

SEQ ID NO: 387 - DNA, 2901 bp, Homosapiens
cttcctcacgagaataaacacacattttactctcacctgccacttcccctactatccattgttagagtccttcactcccaaatttcgccgcagactcccgcccagtctcactcaccattggttgggaaagctacgaagctccgcctttgaatagtgatgggctataaaagacggcacctttgagggaaaaggcagtaggtcaggcgctcacctttgcctgctctctggcaacagtgctcacagtttctgagccagtggaggtggcctggagcagcagcccatgctactctctgccggttattttgccatttctctgtgcccttttgacagctccagggatcggtgccagcatttgtactgccagttcaggcacctgcagatctggtggaaaagtgagggaggtgattgcagttgcttggagatgctccaggtgcaaaggagttgtgttgagtccacagcaggagccttactggtgctggaaaagcaagtcctcctgatctacctccctactgccaaaggaacctaggatcagttcctacggactggctgtgacgggaaagaagcaccagcactcgccttagaactagcagccaagtccatctaaagtgaccaggagccttttgggtggtccctcagttcctgaaacactgggttgtagagggaagctgtcccagagatgtttggaaaggtggttggcttgggcaggcgtcaagagcatctcttccatccctcaggaggagcgggcaccagctccccagtaaccgaaagaactgctgggcctgcggggctccacggtgccccagtcctagacataactatggaaaaattagaacagaaaaaatgagttagtcaaggctgaggttgaagaagagcagaagaggatctccaaatgaactttagcacttgaagaactgactcaaagccctgtggcctccttgaatgacacaaatgtgaggcaagattttcctgaaaatagcctgctcccagaggaaaagtgaattgcaccatcaaagaacaaagacagactggaaagtatgtgatggacctcagatgtccagagactgatcttgaatatgatcctttcctcaattattctgcggaggtacttggggcatctaaagcaaagcaggatgaggctgatcaacagcacttctgccacttgaaaacacctatgaccttgcaaaagacaatgtgccaagaatgcaaggtaataatcaagacctcattacttttgaagaagcaaattagccaaatttggttctgatccaatcaaatctgataatggttgtactgaagatgacacctcctctcattctgatgacactatgaaagaatgtctttaagtttctaatgagctcgttgaaagtgaatctcataaggaaaagactgctaaacagtaggacgaggtttcaccctgttggccaggctggtctcgaactcctgacctgaagtgatgcacctgccttggcttcccaaggtgctggaattacaggcgtgagccaccgcgcccggcctagaggattcttttataggaatctacacaggagcagtggattcagtgttcactaaatctgagtttgtggtgacttacagagtataactacctgaaataacaagaatcgactttagttttcaaaataattataaacttttgtaatttataagtgctgaagttcttttatgacataaaaaagaaattgaagaagcagttcagcctcaaccaataaagaggtcattagaccattcagggtaccagtcccactgctaacaagccccactggaatcattcgggcccagcaaagcagtacagataaaggctgccataaagaatgggaaggcttttattgatgccacttcagaacagaagaaaaatgcatctacatgtccagcctctcagagccaaaggaaagaggccaaaagatacatttaacaagatggctcatcggaaaagacattcagtaacatcagaattcttatccaaagtacctgatgaagtaagacaacgctacatcaacctctttgttgagaagtatttgaaagtttgtaaaacagaggatgaggctgtttacaaggctaaaatagaaaaaaaggcaatatatgaaaggtgtagcaggagaaatatgtatgtgaacatagcagtaaattatcttaagaagctaagagatcaaggtgcttaattttatctaagtgatctactttattaagtcctcaaaacaaccatttcaggacttctcccttgggattatcttcactattagcttttctcgttttgttttattttttcacatcccctcaatggaaggcaatacacttagcaggatcaagcatgcaaaggcaagtctccacattggctcatttaccttttctctcccatctcatctggaataatcctacttcatgttttgtttcggcacctaagaagctctgttgtcgatgtggaaaaatatatggtgtgactccctcaggttgacacagcagggtagaagaatgtaactaccaatttggcggagtgttgagtcataaagtcctcagtggctttgaatctcaatacggctgttgtggaggtttccttggatcgccccggtgtcaggtcgccaagcttcatgttcatgaccacaaagaaaacctaaagggctttgtgaagacttttgtcaagttcccacctgctgatggtaatcaccgtgtgtttgcagtaagttgtgagatgttaattcacacttcagttgtggacatatcggttatgtttcctcatcagcttggcttgcctcccaaaagaccccttaggagtctaatggctgattgcctgcagagaatcgttcaggatgatggtcacaatgctagtgaaaatgcaaaagcctgcatggatctggtcatttggaaggtaaaagaagacgtgaaagg

SEQ ID NO: 388 - protein, 101 aa, Homosapiens
MHLHVQPLRAKGKRPKDTFNKMAHRKRHSVTSEFLSKVPDEVRQRYINLFVEKYLKVCKTEDEAVYKAKIEKKAIYERCSRRNMYVNIAVNYLKKLRDQGA

SEQ ID NO: 389 - DNA, 1023 bp, Homosapiens
gttagacacaggacctgctgggccacagaaaggaggctctgggtagacgcactagattactggataaatcacttcaatttcccaatgaattttatattgtttatttttatacctggagttttttccttaaaaagtagcactttgaagcctactattgaagcattgcctaatgtgctacctttaaatgaagatgttaataagcaggaagaaaagaatgaagatcatactcccaattatgctcctgctaatgagaaaaatggcaattattataaagatataaaacaatatgtgttcacaacacaaaatccaaatggcactgagtctgaaatatctgtgagagccacaactgacctgaattttgctctaaaaaacgataaaactgtcaatgcaactacatatgaaaaatccaccattgaagaagaaacaactactagcgaaccctctcataaaaatattcaaagatcaaccccaaacgtgcctgcattttggacaatgttagctaaagctataaatggaacagcagtggtcatggatgataaagatcaattatttcacccaattccagagtctgatgtgaatgctacacagggagaaaatcagccagatctagaggatctgaagatcaaaataatgctgggaatctcgttgatgaccctcctcctctttgtggtcctcttggcattctgtagtgctacactgtacaaactgaggcatctgagttataaaagttgtgagagtcagtactctgtcaacccagagctggccacgatgtcttactttcatccatcagaaggtgtttcagatacatccttttccaagagtgcagagagcagcacatttttgggtaccacttcttcagatatgagaagatcaggcacaagaacatcagaatctaagataatgacggatatcatttccataggctcaaataatgagatgcatgaaaacgatgagtcggttacccggtgaagaaatcaaggaacccggtgaagaaatcttattgatgaataaataactttaatt

SEQ ID NO: 390 - protein, 294 aa, Homosapiens
MNFILFIFIPGVFSLKSSTLKPTIEALPNVLPLNEDVNKQEEKNEDHTPNYAPANEKNGNYYKDIKQYVFTTQNPNGTESEISVRATTDLNFALKNDKTVNATTYEKSTIEEETTTSEPSHKNIQRSTPNVPAFWTMLAKAINGTAVVMDDKDQLFHPIPESDVNATQGENQPDLEDLKIKIMLGISLMTLLLFVVLLAFCSATLYKLRHLSYKSCESQYSVNPELATMSYFHPSEGVSDTSFSKSAESSTFLGTTSSDMRRSGTRTSESKIMTDIISIGSNNEMHENDESVTR

SEQ ID NO: 391 - DNA, 3507 bp, Homosapiens
ccacgcgtccgagcggggcgcctgggtggatgggcgcttgggcgcctgggctgccggacggtgggaacggaagtcgctgtgggacgctgaggaagccaggatggcgactccgagcaagaagacgtcaactccaagcccccagccttccaagagagctctcccgagagacccttcgtcggaggtcccgagcaagaggaagaattcggccccgcagctgccgctgttgcagtcgtccgggcctttcgtggaaggctctatcgtccgcatctcgatggagaacttcctaacatatgatatttgtgaagtatctcctggaccccacttgaatatgatcgttggagccaatggaacagggaagtcgagcattgtgtgtgccatttgccttggtttagctggaaaacctgctttcatgggacgagcagataaggttgggttttttgtgaagagaggatgttctagaggcatggttgaaattgaattgttcagggcttctggaaatcttgtaatcacccgtgagattgatgtggcaaaaaatcagtccttttggttcatcaacaaaaaatctacaacccagaaaatagtggaagagaaagttgcagccttaaatattcaagtggggaatctttgccagtttctccctcaggacaaagttggagaatttgctaaactcagcaaaattgaactcctcgaagccactgaaaagtcaattggtcccccagaaatgcacaaatatcactgtgaactcaaaaacttaagggagaaagaaaaacagctcgagacctcatgcaaagagaaaactgagtatctacagaaaatggttcagaggaatgaaagatataaacaagatgtggagaggttctatgaacggaagcgacatttagatttaattgagatgcttgaagcaaaaaggccatgggtggaatatgaaaatgttcgtcaggaatatgaagaagtaaaactagttcgtgaccgagtgaaggaagaggtcagaaaacttaaagaagggcagattcctataacatgtcgaattgaagaaatggaaaacgagcgtcacaatttggaggctcgaatcaaagaaaaggcaacagatattaaggaggcatctcaaaaatgcaaacagaagcaagatgttatagaaaggaaagataaacatattgaggaacttcagcaggctttaatagtaaagcaaaatgaagagcttgaccgacagaggagaataggtaatacccgcaaaatgatagaggatttgcaaaatgaactaaagaccacggaaaactgcgagaatcttcagccccagattgatgccattacaaatgatctgagacggattcaggatgaaaaggcattatgtgaaggcgaaataattgataagcgaagagagagggaaactctagagaaggagaaaaagagtgtggacgatcatattgtacgttttgacaatcttatgaatcagaaggaagataagctaagacagagattccgtgacacgtatgatgctgttttatggctaagaaataacagagacaaatttaaacaaagagtctgtgagcccataatgctcacgatcaatatgaaagataataaaaatgccaaatatattgaaaatcatattccatcaaatgacttaagagcctttgtatttgaaagtcaagaagatatggaggttttcctcaaagaggttcgtgacaataaaaaattaagagtaaatgctgttattgctcccaagagttcatatgcagacaaagcaccttcaagatctttgaatgaacttaaacaatacggatttttctcttatttgagagaattatttgatgcacctgatcctgtaatgagttacctttgctgtcagtatcatattcatgaagttcctgtaggaactgaaaagaccagagaaagaattgaacgggtaatacaagaaacccgattaaaacagatttatacagcagaagaaaagtatgtggtgaaaacttctttttattcaaacaaagttatttctagtaacacatctctaaaagtagcgcagtttctcactgtcactgtggacctagagcagagaagacacttagaagaacagctaaaggaaattcatagaaaattgcaagcagtggattcagggttgattgccttacgtgaaacaagcaaacatctggagcacaaagacaatgaacttagacaaaagaagaaggagcttcttgagagaaaaaccaagaaaagacaactggaacaaaaaatcagttccaaactaggaagtttaaagctgatggaacaggatacttgcaatcttgaagaggaagagcgaaaagcaagtaccaaaatcaaagaaataaatgttcaaaaagcgaaacttgttaccgaattaacaaacctaataaagatttgtacttctttgcatatacaaaaagtagatttaattctccaaaatactacagtgatctctgagaagaacaaattagaatcagattatatggccgcatcttcacaactccgtcttacagagcaacatttcattgaattggatgaaaatagacagagattattgcagaaatgcaaggaacttatgaaaagagctaggcaagtatgtaacctgggtgcagagcagactcttcctcaagaataccagacacaagtacccaccattccaaatggacacaactcctcactccccatggttttccaagaccttccaaacacattggatgaaattgatgctttattaactgaagaaagatcaagagcttcctgcttcacgggactgaatcctacaattgttcaggaatatacaaaaagagaagaagaaatagaacagttaactgaggaactaaagggaaagaaagttgaactagatcaatacagggaaaacatttcacaggtaaaagaaaggtggcttaatcctttaaaagagctggtagaaaaaattaatgaaaaattcagcaatttttttagttccatgcagtgtgctggtgaagttgatctccatacagaaaatgaggaagattatgataaatatggaattcgaattagagtcaaatttcgaagtagtactcaactgcatgaattaactcctcatcatcaaagtggaggtgaaagaagtgtttctaccatgttatacttgatggcacttcaggagctaaatagatgtccattcagagtagttgatgaaatcaatcagggaatggacccaatcaatgaacggagagtgtttgaaatggttgtaaatactgcctgtaaagaaaatacatctcaatactttttcataacaccaaagctcctgcaaaatcttccttattctgaaaagatgacagttttgtttgtctacaatggccctcatatgctggaaccaaacacatggaatttaaaggctttccaaaggcggcggcgccgtattacattcactcaaccttcttaataaaagtaaagagagggaacttgggaattttttttgttaaattctgtttataagtatggctcaactgaataaaaggagattcactaaaaaaaaaaaaaaaa

SEQ ID NO: 392 - protein, 1101 aa, Homosapiens
MATPSKKTSTPSPQPSKRALPRDPSSEVPSKRKNSAPQLPLLQSSGPFVEGSIVRISMENFLTYDICEVSPGPHLNMIVGANGTGKSSIVCAICLGLAGKPAFMGRADKVGFFVKRGCSRGMVEIELFRASGNLVITREIDVAKNQSFWFINKKSTTQKIVEEKVAALNIQVGNLCQFLPQDKVGEFAKLSKIELLEATEKSIGPPEMHKYHCELKNLREKEKQLETSCKEKTEYLQKMVQRNERYKQDVERFYERKRHLDLIEMLEAKRPWVEYENVRQEYEEVKLVRDRVKEEVRKLKEGQIPITCRIEEMENERHNLEARIKEKATDIKEASQKCKQKQDVIERKDKHIEELQQALIVKQNEELDRQRRIGNTRKMIEDLQNELKTTENCENLQPQIDAITNDLRRIQDEKALCEGEIIDKRRERETLEKEKKSVDDHIVRFDNLMNQKEDKLRQRFRDTYDAVLWLRNNRDKFKQRVCEPIMLTINMKDNKNAKYIENHIPSNDLRAFVFESQEDMEVFLKEVRDNKKLRVNAVIAPKSSYADKAPSRSLNELKQYGFFSYLRELFDAPDPVMSYLCCQYHIHEVPVGTEKTRERIERVIQETRLKQIYTAEEKYVVKTSFYSNKVISSNTSLKVAQFLTVTVDLEQRRHLEEQLKEIHRKLQAVDSGLIALRETSKHLEHKDNELRQKKKELLERKTKKRQLEQKISSKLGSLKLMEQDTCNLEEEERKASTKIKEINVQKAKLVTELTNLIKICTSLHIQKVDLILQNTTVISEKNKLESDYMAASSQLRLTEQHFIELDENRQRLLQKCKELMKRARQVCNLGAEQTLPQEYQTQVPTIPNGHNSSLPMVFQDLPNTLDEIDALLTEERSRASCFTGLNPTIVQEYTKREEEIEQLTEELKGKKVELDQYRENISQVKERWLNPLKELVEKINEKFSNFFSSMQCAGEVDLHTENEEDYDKYGIRIRVKFRSSTQLHELTPHHQSGGERSVSTMLYLMALQELNRCPFRVVDEINQGMDPINERRVFEMVVNTACKENTSQYFFITPKLLQNLPYSEKMTVLFVYNGPHMLEPNTWNLKAFQRRRRRITFTQPS

SEQ ID NO: 393 - DNA, 5208 bp, Homosapiens
cttactcatttgtgtttattcttggacttatcctgacataatggggtttttttaattatagattcacactgcatttattcatcacccctgtcctctcatccataactcaaatttactaccagcaacacaaaatacaaagatgtgtccagtttcactacagctcttcgcgtttacaagtgtcgagcgcttgctttcggaacgcccttgtgattggccgagccaatgccagtgacatcaaccaacttacttttgattggaaggctggttgctgggactgtagcgtttgcaggaagtcacttaactgtttgggagctggaaaaccgaagctgaagttctcttttgccataggaacgagcgcaactgactaggaaagatgtgtcccaaagctccgcaagctggaacgtgagccaggaggcccggaccggccacgggaccgcgaggcactccgaaagtgtgcggctgccccttccctgcctcccagctgttacccttttaaatgtcagtgttcgaggctgtaggggtagcacgaggcagcgaaacggaacagtcggattggccgcacgcctcagttctagacgcacctctccaccgaaggccgttctgactggcagggggagaaagtaaacagagttgaatcaccctccccactggccaattggagggggtttggtttgtgacgtgatgggattctgcgaaattgttactgagcaagagaatgccggaacggtgcggaccggccggagcaggggttcagaagccgtcagtggactcgggaaaaagtgtctcttagacctggcgctcggcgggaccctcgccacccgcgtcggggtgatcgggtgaatgtcctggggctttggctcgacggcgaggcggccgagggcgtgcacctctcttgcagtttcctctcccagcgcctcgggggcgttttcagtcgaataaacttgcgaccgccacgtgtggcatctttccaagggagccggctcagaggggccggcgcgcccgtcgggggatcgcggccggcgcggggcaggggcggcggctagaggcggcggcgcggcggagcccggggccgtggatgctgcgtgcggaggcgctgccggttacgtaaagatgaggggctgaggtcgcctcggcgctcctgcgagtcggaagcgccccgcgcccccgcccccttggccgccgcgccgtgccgcgccgcgccgcgctcgtcgtccgaggccagggcagggcgagccgaacctccgcagccaccgccaagtttgtccgcgccgcctgggctgccgtcgcccgcaccatgtccgcggccgcctacatggacttcgtggctgcccagtgtctggtttccatttcgaaccgcgctgcggtgccggagcatggggtcgctccggacgccgagcggctgcgactacctgagcgcgaggtgaccaaggagcacggtgacccgggggacacctggaaggattactgcacactggtcaccatcgccaagagcttgttggacctgaacaagtaccgacccatccagaccccctccgtgtgcagcgacagtctggaaagtccagatgaggatatgggatccgacagcgacgtgaccaccgaatctgggtcgagtccttcccacagcccggaggagagacaggatcctggcagcgcgcccagcccgctctccctcctccatcctggagtggctgcgaaggggaaacacgcctccgaaaagaggcacaagtgcccctacagtggctgtgggaaagtctatggaaaatcctcccatctcaaagcccattacagagtgcatacaggtgaacggccctttccctgcacgtggccagactgccttaaaaagttctcccgctcagacgagctgacccgccactaccggacccacactggggaaaagcagttccgctgtccgctgtgtgagaagcgcttcatgaggagtgaccacctcacaaagcacgcccggcggcacaccgagttccaccccagcatgatcaagcgatcgaaaaaggcgctggccaacgctttgtgaggtgctgcccgtggaagccagggagggatggaccccgaaaggacaaaagtactcccaggaaacagacgcgtgaaaactgagccccagaagaggcacacttgacggcacaggaagtcactgctctttggtcaatattctgattttcctctccctgcattgtttttaaaaagcacattgtagcctaagatcaaagtcaacaacactcggtccccttgaagaggcaactctctgaacccgtctctgactgttggagggaaggcaaatgcttttgggttttttggtttttgtttttgtttttttttctccttttatttttttgcgggggagggtagggagtgggtgggggggaggggggtaaggccaagactggggtagaattttaaagattcaacactggtgtacatatgtccgctgggtgagttgacctgtggcctcgcacagtgattctgggccctttatgcttgctgtctctcagaattgttttcttaccttttaatgtaatgacgagtgtgcttcagtttgtttagcaaaaccactctcttgaatcacgttaacttttgagattaaaaaaaaaaacgccatagcacagctgtctttatgcaagcaagagcacatctactccagcatgatctgtcatctaaagacttgaaaacaaaaaacagttacttatagtcaatgggtaagcagagtctgaatttatactaatcaagacaaacctttgaaaggttacactaagtacagaacttttaaaccttgctttgtatgagttgtactttttgaacataagctgcacttttattttctaatgcagaggatgaataagttaaatacatgctttgaggatagaagcagatgttctgtttggcaccacgttataatctgcttattttacaatatacacgtttccctaagaaatcatggcagagatgtgagggcagaatatacacaacagatgctgaaggagaaggagggtagtgttttgcaaaagaaaaagaaaagaaccaacagaattttaactctattaacttttccaaattttcctatgcttttagttaacatcattattgtatcctaatgccactaggggagagagcttttgactctgttgggttttatttgaatgtgtgcataacagtaatgagatctggaaacacctattttttggggaaaaaggtttgttggtctccttcctgtgttcctacaaaactcccactctcaggtgcaagagttatgtagaaggaaagggagctgaaataggaacagaaaaatcaacccctataactagtgaacaccaagggaaaataccacaatgatttcagaggagactctgcaaaatcgtcccttgtggagaatgcaggcaacatggaatactaggaatgaaatcacatcactgtatcttttacatcaatagcctcaccactaatatatcttgtatctaggtgtctataatggctgaaaccactacatccatctatgccatttacctgaaaacttaactgtggcctttatgaggccagaaaagtgaactgagttttcgtagttaagacctcaaatgaggggagtcagcagtgatcatgggggaaatgtttacattttttttttcttcagaagtaacgctttctgatgattttatctgatatttaaaacagggagctatggtgcactctagtttatacttgcgctctgaaatgtgtaaacatagggtgcctacctatttcacctgacccatactcgtttctgattcagaatcagtgtgggctcctgcagtgggcgcgggtcacggctgactccaacttccaatacaacagccatcactagcacagtgtttttttgtttaaccaacgtagttgtattagtagttctataaagagaactgcttttaacattagggactgggagcagtccatgggataaaaaggaaagtgttttctcacgagaaaacatgtcaggaaaaataaagaacactttctacctctgtttcagatttttgaaacacttattttaaaccaaattttaatttctgtgtccaaaataagttttaaggacatctgttcttccatacgaaataggttaggctgcctatttctcactgagctcatggaatggttctgcttatgatactctgcacgctgccttttagtgagtgaggagtttggggttgcctagcaacttgctaacttgtaaaaagtcatctttccctcacagaaagaaacgaaagaaagcaaagcaaagtcagtgaaagacaatctttatagtttcaggagtaaatctaaatgtggcttttgtcaagcacttagatggatataaatgcagcaacttgttttaaaaaaatgcacaatttacttcccaaaaaagttgttacttgccttttcaagttgttgacaaacacacatttgatattctcttatatgttatagtaatgtaacgtataaactcaagcctttttattctttgtgattaaatcctgttttaaaatgtcacaaaacaggaaccagcattctaattagatttactatatcaagatatggttcaaataggactactagagttcattgaacactaaaactatgaaacaattactttttatattaaaaagaccatggatttaacttatgaaaatccaaatgcaggatagtaatttttgtttacttttttaaccaaactgaatttttgaaagactattgcaggtgtttaaaaagaaagaaaagttgttttatctaatactgtaagtagttgtcatattctggaaaatttaatagttttagagttaagatatctcctctctttggttagggaagaagaaagcccttcaccattgtggaatgatgccctggctttaaggtttagctccacatcatgcttctcttgagaattctatttggtagttacaattacagaaactgattagtttgtcagtttgcagatagatttagcacagtactcatcactcggatagattgagatgttctttcacatcagatgatctgtaacactgtaagatactgatctttacaactgtttaatcagttttatttttgtacagtattagtgacctaagttattttgctgtcccgtttttgtaaatcaaatgaaattataaaagaggattctgacagtaggtattttgtacatatgtatatatgttgtccaaataaaaataataaatgataaagactgaa

SEQ ID NO: 394 - protein, 244 aa, Homosapiens
MSAAAYMDFVAAQCLVSISNRAAVPEHGVAPDAERLRLPEREVTKEHGDPGDTWKDYCTLVTIAKSLLDLNKYRPIQTPSVCSDSLESPDEDMGSDSDVTTESGSSPSHSPEERQDPGSAPSPLSLLHPGVAAKGKHASEKRHKCPYSGCGKVYGKSSHLKAHYRVHTGERPFPCTWPDCLKKFSRSDELTRHYRTHTGEKQFRCPLCEKRFMRSDHLTKHARRHTEFHPSMIKRSKKALANAL

SEQ ID NO: 395 - DNA, 1378 bp, Homosapiens
agctgcagcaaaatgaaagcaacaggagctgctccggggactgcttttgccagtacccagaatcagtgctcaggctcagaaatcctggatagaaagagcattttataaaagagaatgtgtccacatcatacccagcaccaaagacccccataggtgttgctgtgggcgtctgataggccagcatgttggcctcacccccagtatctccgtgcttcagaatgagaaaaatgaaagtcgcctctcccgaaatgacatccagtctgaaaagtggtccatcagcaaacacactcaactcagccctacggatgcttttgggaccattgagttccaaggaggtggccattccaacaaagccatgtatgtgcgagtatcttttgatacaaaacctgatctcctcttacacctgatgaccaaggaatggcagttggagcttcccaagcttctcatctctgtccatgggggcctgcagaactttgaactccagccaaaactcaagcaagtctttgggaaagggctcatcaaagcagcaatgacaactggagcgtggatattcactggaggggttaacacaggtgttattcgtcatgttggcgatgccttgaaggatcatgcctctaagtctcgaggaaagatatgcaccataggtattgccccctggggaattgtggaaaaccaggaggacctcattggaagagatgttgtccggccataccagaccatgtccaatcccatgagcaagctcactgttctcaacagcatgcattcccacttcattctggctgacaacgggaccactggaaaatatggagcagaggtgaaacttcgaagacaactggaaaagcatatttcactccagaagataaacacaagatgcctgccgtttttctctcttgactcccgcttgttttattcattttggggtagttgccagttagactcagttggaatcggtcaaggtgttcctgtggtggcactcatagtggaaggaggacccaatgtgatctcgattgttttggagtaccttcgagacacccctcccgtgccagtggttgtctgtgatgggagtggacgggcatcggacatcctggcctttgggcataaatactcagaagaaggcgggtaggtaactttccaggccccatggaagaaccctaaagcctgtttggaaacgagggtatgagtggattatgttttcagtagctcaaccaagacctcaaatcaaaacaagctatgaacaaattgtctaaaaaatgtctgtcatgggagggctgtggtgaagaacagagaaacatattctaaatgtcctgtgaagtgggaaattctatgaaagctacacggataataaaaagggtgaggaaaagaaaaaaaaaaaaaaaaa

SEQ ID NO: 396 - protein, 255 aa, Homosapiens
MYVRVSFDTKPDLLLHLMTKEWQLELPKLLISVHGGLQNFELQPKLKQVFGKGLIKAAMTTGAWIFTGGVNTGVIRHVGDALKDHASKSRGKICTIGIAPWGIVENQEDLIGRDVVRPYQTMSNPMSKLTVLNSMHSHFILADNGTTGKYGAEVKLRRQLEKHISLQKINTRCLPFFSLDSRLFYSFWGSCQLDSVGIGQGVPVVALIVEGGPNVISIVLEYLRDTPPVPVVVCDGSGRASDILAFGHKYSEEGG

SEQ ID NO: 397 - DNA, 6289 bp, Homosapiens
tccgaccacaggctgttttatgcaggctgtccctcttcttcaaaatcgtgcatcccctccccgaagcagcaggcagtgtgcctccattcagccacatttggtatgcatgagcacggctgcagagagaggggaggtggctgttttaagaaggttcaggggctcaggcaaggctacttgactagtcttccaagttccaggaagcctctgccctaatggaatttgcaggtgtggagatgaccatgggatgccagagccgtgggggaccgtttattttctaggcattgctcaggttttcagtttcttgttttcctggtggaatttggaaggggtcatgaatcaggctgatgctcctcgacccctaaactggaccatccggaagctgtgccacgcagcctttcttccatctgtcagacttctgaaggctcagaaatcctggatagaaagagcattttataaaagagaatgtgtccacatcatacccagcaccaaagacccccataggtgttgctgtgggcgtctgataggccagcatgttggcctcacccccagtatctccgtgcttcagaatgagaaaaatgaaagtcgcctctcccgaaatgacatccagtctgaaaagtggtccatcagcaaacacactcaactcagccctacggatgcttttgggaccattgagttccaaggaggtggccattccaacaaagccatgtatgtgcgagtatcttttgatacaaaacctgatctcctcttacacctgatgaccaaggaatggcagttggagcttcccaagcttctcatctctgtccatgggggcctgcagaactttgaactccagccaaaactcaagcaagtctttgggaaagggctcatcaaagcagcaatgacaactggagcgtggatattcactggaggggttaacacaggtgttattcgtcatgttggcgatgccttgaaggatcatgcctctaagtctcgaggaaagatatgcaccataggtattgccccctggggaattgtggaaaaccaggaggacctcattggaagagatgttgtccggccataccagaccatgtccaatcccatgagcaagctcactgttctcaacagcatgcattcccacttcattctggctgacaacgggaccactggaaaatatggagcagaggtgaaacttcgaagacaactggaaaagcatatttcactccagaagataaacacaagaatcggtcaaggtgttcctgtggtggcactcatagtggaaggaggacccaatgtgatctcgattgttttggagtaccttcgagacacccctcccgtgccagtggttgtctgtgatgggagtggacgggcatcggacatcctggcctttgggcataaatactcagaagaaggcggactgataaatgaatctttgagggaccagctgttggtgactatacagaagactttcacatacactcgaacccaagctcagcatctgttcatcatcctcatggagtgcatgaagaagaaggaattgattacggtatttcggatgggatcagaaggacaccaggacattgatttggctatcctgacagctttactcaaaggagccaatgcctcggccccagaccaactgagcttagctttagcctggaacagagtcgacatcgctcgcagccagatctttatttacgggcaacagtggccggtgggatctctggagcaagccatgttggatgccttagttctggacagagtggattttgtgaaattactcatagagaatggagtaagcatgcaccgttttctcaccatctccagactagaggaattgtacaatacgagacatgggccctcaaatacattgtaccacttggtcagggatgtcaaaaaggggaacctgcccccagactacagaatcagcctgattgacatcggcctggtgatcgagtacctgatgggcggggcttatcgctgcaactacacgcgcaagcgcttccggaccctctaccacaacctcttcggccccaagaggcccaaagccttgaaactgctgggaatggaggatgatattcccttgaggcgaggaagaaagacaaccaagaaacgtgaagaagaggtggacattgacttggatgatcctgagatcaaccacttccccttccctttccatgagctcatggtgtgggctgttctcatgaagcggcagaagatggccctgttcttctggcagcacggtgaggaggccatggccaaggccctggtggcctgcaagctctgcaaagccatggctcatgaggcctctgagaacgacatggttgacgacatttcccaggagctgaatcacaattccagagactttggccagctggctgtggagctcctggaccagtcctacaagcaggacgaacagctggccatgaaactgctgacgtatgagctgaagaactggagcaacgccacgtgcctgcagcttgccgtggctgccaaacaccgcgacttcatcgcgcacacgtgcagccagatgctgctcaccgacatgtggatgggccggctccgcatgcgcaagaactcaggcctcaaggtaattctgggaattctacttcctccttcaattctcagcttggagttcaagaacaaagacgacatgccctatatgtctcaggcccaggaaatccacctccaagagaaggaggcagaagaaccagagaagcccacaaaggaaaaagaggaagaggacatggagctcacagcaatgttgggacgaaacaacggggagtcctccaggaagaaggatgaagaggaagttcagagcaagcaccggttaatccccctcggcagaaaaatctatgaattctacaatgcacccatcgtgaagttctggttctacacactggcgtatatcggatacctgatgctcttcaactatatcgtgttagtgaagatggaacgctggccgtccacccaggaatggatcgtaatctcctatattttcaccctgggaatagaaaagatgagagagattctgatgtcagagccagggaagttgctacagaaagtgaaggtatggctgcaggagtactggaatgtcacggacctcatcgccatccttctgttttctgtcggaatgatccttcgtctccaagaccagcccttcaggagtgacgggagggtcatctactgcgtgaacatcatttactggtatatccgtctcctagacatcttcggcgtgaacaagtatttgggcccgtatgtaatgatgattggaaaaatgatgatagacatgatgtactttgtcatcattatgctggtggttctgatgagctttggggtcgccaggcaagccatcctttttcccaatgaggagccatcatggaaactggccaagaacatcttctacatgccctattggatgatttatggggaagtgtttgcggaccagatagaccctccctgtggacagaatgagacccgagaggatggtaaaataatccagctgcctccctgcaagacaggagcttggatcgtgccggccatcatggcctgctacctcttagtggcaaacatcttgctggtcaacctcctcattgctgtctttaacaatacattttttgaagtaaaatcgatatccaaccaagtctggaagtttcagaggtatcagctcatcatgactttccatgaaaggccagttctgcccccaccactgatcatcttcagccacatgaccatgatattccagcacctgtgctgccgatggaggaaacacgagagcgacccggatgaaagggactacggcctgaaactcttcataaccgatgatgagctcaagaaagtacatgactttgaagagcaatgcatagaagaatacttcagagaaaaggatgatcggttcaactcatctaatgatgagaggatacgggtgacttcagaaagggtggagaacatgtctatgcggctggaggaagtcaacgagagagagcactccatgaaggcttcactccagaccgtggacatccggctggcgcagctggaagaccttatcgggcgcatggccacggccctggagcgcctgacaggtctggagcgggccgagtccaacaaaatccgctcgaggacctcgtcagactgcacggacgccgcctacattgtccgtcagagcagcttcaacagccaggaagggaacaccttcaagctccaagagagtatagaccctgcaggtgaggagaccatgtccccaacttctccaaccttaatgccccgtatgcgaagccattctttctattcggtcaatatgaaagacaaaggtggtatagaaaagttggaaagtatttttaaagaaaggtccctgagcctacaccgggctactagttcccactctgtagcaaaagaacccaaagctcctgcagcccctgccaacaccttggccattgttcctgattccagaagaccatcatcgtgtatagacatctatgtctctgctatggatgagctccactgtgatatagaccctctggacaattccgtgaacatccttgggctaggcgagccaagcttttcaactccagtaccttccacagccccttcaagtagtgcctatgcaacacttgcacccacagacagacctccaagccggagcattgattttgaggacatcacctccatggacactagatctttttcttcagactacacccacctcccagaatgccaaaacccctgggactcagagcctccgatgtaccacaccattgagcgttccaaaagtagccgctacctagccaccacaccctttcttctagaagaggctcccattgtgaaatctcatagctttatgttttccccctcaaggagctattatgccaactttggggtgcctgtaaaaacagcagaatacacaagtattacagactgtattgacacaaggtgtgtcaatgcccctcaagcaattgcggacagagctgccttccctggaggtcttggagacaaagtggaggacttaacttgctgccatccagagcgagaagcagaactgagtcaccccagctctgacagtgaggagaatgaggccaaaggccgcagagccaccattgcaatatcctcccaggagggtgataactcagagagaaccctgtccaacaacatcactgttcccaagatagagcgcgccaacagctactcggcagaggagccaagtgcgccatatgcacacaccaggaagagcttctccatcagtgacaaactcgacaggcagcggaacacagcaagcctgcgaaatcccttccagagaagcaagtcctccaagccggagggccgaggggacagcctgtccatgaggaaactgtccagaacatcggctttccaaagctttgaaagcaagcacacctaaaccttcttaatatccgccacagaaggctcaagaatccagccctaaaattctctccaactccagtttttcccctttccttgaatcatacctgctttattcttagctgagcaaaacaagcaatgctttgggaggtgttaactcaaaggtgacttctgggccacagatcaagaaagcatttgatctgacccagtgccagacacaggggatttaaggcatgttcacacttgctgggcagggagggggaagagagggagaaggaagggttagagatgaatgtgtatccgcagtcacagcagaaagccatgagagcaggggaaacaaggggcttcgagcacgctccatgccaggaggcatctgttgatttctgaccattatcaagagttgtaggatgcagggctaaattgcaaaataaaataaaatagccagcgtacacaatgagatattctaaacttccattctgttttcttttcacattggctccatcactggtgactgatgaagagcatcctctttattcagtataagccggcagcaagcagttctacctaacgtcccacatccttctcatgccaacacttctgtaattgatcattataaagaaaaaacaaggtaacagtcatagttcacctgtctcttatctattcacttctggtgccacaactgtttatccttttttgaagaaaataagggaacagaaatgcctttttgtattgcaatcgaaatgaaagaagagttgatgttaaaaaaacaaaagtcaagtgatttattatatacagtgggcgttcaagtctagtcgagcaagctcaggagaatgtaattaaataattttatattttttaatttattttgtatctcacctgtcatggatgaattcattcactgaatatgtaatattgaacttaaaaaaaaaaaaaaaaaaaa

SEQ ID NO: 398 - protein, 1707 aa, Homosapiens
MPEPWGTVYFLGIAQVFSFLFSWWNLEGVMNQADAPRPLNWTIRKLCHAAFLPSVRLLKAQKSWIERAFYKRECVHIIPSTKDPHRCCCGRLIGQHVGLTPSISVLQNEKNESRLSRNDIQSEKWSISKHTQLSPTDAFGTIEFQGGGHSNKAMYVRVSFDTKPDLLLHLMTKEWQLELPKLLISVHGGLQNFELQPKLKQVFGKGLIKAAMTTGAWIFTGGVNTGVIRHVGDALKDHASKSRGKICTIGIAPWGIVENQEDLIGRDVVRPYQTMSNPMSKLTVLNSMHSHFILADNGTTGKYGAEVKLRRQLEKHISLQKINTRIGQGVPVVALIVEGGPNVISIVLEYLRDTPPVPVVVCDGSGRASDILAFGHKYSEEGGLINESLRDQLLVTIQKTFTYTRTQAQHLFIILMECMKKKELITVFRMGSEGHQDIDLAILTALLKGANASAPDQLSLALAWNRVDIARSQIFIYGQQWPVGSLEQAMLDALVLDRVDFVKLLIENGVSMHRFLTISRLEELYNTRHGPSNTLYHLVRDVKKGNLPPDYRISLIDIGLVIEYLMGGAYRCNYTRKRFRTLYHNLFGPKRPKALKLLGMEDDIPLRRGRKTTKKREEEVDIDLDDPEINHFPFPFHELMVWAVLMKRQKMALFFWQHGEEAMAKALVACKLCKAMAHEASENDMVDDISQELNHNSRDFGQLAVELLDQSYKQDEQLAMKLLTYELKNWSNATCLQLAVAAKHRDFIAHTCSQMLLTDMWMGRLRMRKNSGLKVILGILLPPSILSLEFKNKDDMPYMSQAQEIHLQEKEAEEPEKPTKEKEEEDMELTAMLGRNNGESSRKKDEEEVQSKHRLIPLGRKIYEFYNAPIVKFWFYTLAYIGYLMLFNYIVLVKMERWPSTQEWIVISYIFTLGIEKMREILMSEPGKLLQKVKVWLQEYWNVTDLIAILLFSVGMILRLQDQPFRSDGRVIYCVNIIYWYIRLLDIFGVNKYLGPYVMMIGKMMIDMMYFVIIMLVVLMSFGVARQAILFPNEEPSWKLAKNIFYMPYWMIYGEVFADQIDPPCGQNETREDGKIIQLPPCKTGAWIVPAIMACYLLVANILLVNLLIAVFNNTFFEVKSISNQVWKFQRYQLIMTFHERPVLPPPLIIFSHMTMIFQHLCCRWRKHESDPDERDYGLKLFITDDELKKVHDFEEQCIEEYFREKDDRFNSSNDERIRVTSERVENMSMRLEEVNEREHSMKASLQTVDIRLAQLEDLIGRMATALERLTGLERAESNKIRSRTSSDCTDAAYIVRQSSFNSQEGNTFKLQESIDPAGEETMSPTSPTLMPRMRSHSFYSVNMKDKGGIEKLESIFKERSLSLHRATSSHSVAKEPKAPAAPANTLAIVPDSRRPSSCIDIYVSAMDELHCDIDPLDNSVNILGLGEPSFSTPVPSTAPSSSAYATLAPTDRPPSRSIDFEDITSMDTRSFSSDYTHLPECQNPWDSEPPMYHTIERSKSSRYLATTPFLLEEAPIVKSHSFMFSPSRSYYANFGVPVKTAEYTSITDCIDTRCVNAPQAIADRAAFPGGLGDKVEDLTCCHPEREAELSHPSSDSEENEAKGRRATIAISSQEGDNSERTLSNNITVPKIERANSYSAEEPSAPYAHTRKSFSISDKLDRQRNTASLRNPFQRSKSSKPEGRGDSLSMRKLSRTSAFQSFESKHT

SEQ ID NO: 399 - DNA, 5941 bp, Homosapiens
agctgcagcaaaatgaaagcaacaggagctgctccggggactgcttttgccagtacccagaatcagtgctcaggctcagaaatcctggatagaaagagcattttataaaagagaatgtgtccacatcatacccagcaccaaagacccccataggtgttgctgtgggcgtctgataggccagcatgttggcctcacccccagtatctccgtgcttcagaatgagaaaaatgaaagtcgcctctcccgaaatgacatccagtctgaaaagtggtccatcagcaaacacactcaactcagccctacggatgcttttgggaccattgagttccaaggaggtggccattccaacaaagccatgtatgtgcgagtatcttttgatacaaaacctgatctcctcttacacctgatgaccaaggaatggcagttggagcttcccaagcttctcatctctgtccatgggggcctgcagaactttgaactccagccaaaactcaagcaagtctttgggaaagggctcatcaaagcagcaatgacaactggagcgtggatattcactggaggggttaacacaggtgttattcgtcatgttggcgatgccttgaaggatcatgcctctaagtctcgaggaaagatatgcaccataggtattgccccctggggaattgtggaaaaccaggaggacctcattggaagagatgttgtccggccataccagaccatgtccaatcccatgagcaagctcactgttctcaacagcatgcattcccacttcattctggctgacaacgggaccactggaaaatatggagcagaggtgaaacttcgaagacaactggaaaagcatatttcactccagaagataaacacaagaatcggtcaaggtgttcctgtggtggcactcatagtggaaggaggacccaatgtgatctcgattgttttggagtaccttcgagacacccctcccgtgccagtggttgtctgtgatgggagtggacgggcatcggacatcctggcctttgggcataaatactcagaagaaggcggactgataaatgaatctttgagggaccagctgttggtgactatacagaagactttcacatacactcgaacccaagctcagcatctgttcatcatcctcatggagtgcatgaagaagaaggaattgattacggtatttcggatgggatcagaaggacaccaggacattgatttggctatcctgacagctttactcaaaggagccaatgcctcggccccagaccaactgagcttagctttagcctggaacagagtcgacatcgctcgcagccagatctttatttacgggcaacagtggccggtgggatctctggagcaagccatgttggatgccttagttctggacagagtggattttgtgaaattactcatagagaatggagtaagcatgcaccgttttctcaccatctccagactagaggaattgtacaatacgagacatgggccctcaaatacattgtaccacttggtcagggatgtcaaaaaggggaacctgcccccagactacagaatcagcctgattgacatcggcctggtgatcgagtacctgatgggcggggcttatcgctgcaactacacgcgcaagcgcttccggaccctctaccacaacctcttcggccccaagaggcccaaagccttgaaactgctgggaatggaggatgatattcccttgaggcgaggaagaaagacaaccaagaaacgtgaagaagaggtggacattgacttggatgatcctgagatcaaccacttccccttccctttccatgagctcatggtgtgggctgttctcatgaagcggcagaagatggccctgttcttctggcagcacggtgaggaggccatggccaaggccctggtggcctgcaagctctgcaaagccatggctcatgaggcctctgagaacgacatggttgacgacatttcccaggagctgaatcacaattccagagactttggccagctggctgtggagctcctggaccagtcctacaagcaggacgaacagctggccatgaaactgctgacgtatgagctgaagaactggagcaacgccacgtgcctgcagcttgccgtggctgccaaacaccgcgacttcatcgcgcacacgtgcagccagatgctgctcaccgacatgtggatgggccggctccgcatgcgcaagaactcaggcctcaaggtaattctgggaattctacttcctccttcaattctcagcttggagttcaagaacaaagacgacatgccctatatgtctcaggcccaggaaatccacctccaagagaaggaggcagaagaaccagagaagcccacaaaggaaaaagaggaagaggacatggagctcacagcaatgttgggacgaaacaacggggagtcctccaggaagaaggatgaagaggaagttcagagcaagcaccggttaatccccctcggcagaaaaatctatgaattctacaatgcacccatcgtgaagttctggttctacacactggcgtatatcggatacctgatgctcttcaactatatcgtgttagtgaagatggaacgctggccgtccacccaggaatggatcgtaatctcctatattttcaccctgggaatagaaaagatgagagagattctgatgtcagagccagggaagttgctacagaaagtgaaggtatggctgcaggagtactggaatgtcacggacctcatcgccatccttctgttttctgtcggaatgatccttcgtctccaagaccagcccttcaggagtgacgggagggtcatctactgcgtgaacatcatttactggtatatccgtctcctagacatcttcggcgtgaacaagtatttgggcccgtatgtaatgatgattggaaaaatgatgatagacatgatgtactttgtcatcattatgctggtggttctgatgagctttggggtcgccaggcaagccatcctttttcccaatgaggagccatcatggaaactggccaagaacatcttctacatgccctattggatgatttatggggaagtgtttgcggaccagatagaccctccctgtggacagaatgagacccgagaggatggtaaaataatccagctgcctccctgcaagacaggagcttggatcgtgccggccatcatggcctgctacctcttagtggcaaacatcttgctggtcaacctcctcattgctgtctttaacaatacattttttgaagtaaaatcgatatccaaccaagtctggaagtttcagaggtatcagctcatcatgactttccatgaaaggccagttctgcccccaccactgatcatcttcagccacatgaccatgatattccagcacctgtgctgccgatggaggaaacacgagagcgacccggatgaaagggactacggcctgaaactcttcataaccgatgatgagctcaagaaagtacatgactttgaagagcaatgcatagaagaatacttcagagaaaaggatgatcggttcaactcatctaatgatgagaggatacgggtgacttcagaaagggtggagaacatgtctatgcggctggaggaagtcaacgagagagagcactccatgaaggcttcactccagaccgtggacatccggctggcgcagctggaagaccttatcgggcgcatggccacggccctggagcgcctgacaggtctggagcgggccgagtccaacaaaatccgctcgaggacctcgtcagactgcacggacgccgcctacattgtccgtcagagcagcttcaacagccaggaagggaacaccttcaagctccaagagagtatagaccctgcaggtgaggagaccatgtccccaacttctccaaccttaatgccccgtatgcgaagccattctttctattcggtcaatatgaaagacaaaggtggtatagaaaagttggaaagtatttttaaagaaaggtccctgagcctacaccgggctactagttcccactctgtagcaaaagaacccaaagctcctgcagcccctgccaacaccttggccattgttcctgattccagaagaccatcatcgtgtatagacatctatgtctctgctatggatgagctccactgtgatatagaccctctggacaattccgtgaacatccttgggctaggcgagccaagcttttcaactccagtaccttccacagccccttcaagtagtgcctatgcaacacttgcacccacagacagacctccaagccggagcattgattttgaggacatcacctccatggacactagatctttttcttcagactacacccacctcccagaatgccaaaacccctgggactcagagcctccgatgtaccacaccattgagcgttccaaaagtagccgctacctagccaccacaccctttcttctagaagaggctcccattgtgaaatctcatagctttatgttttccccctcaaggagctattatgccaactttggggtgcctgtaaaaacagcagaatacacaagtattacagactgtattgacacaaggtgtgtcaatgcccctcaagcaattgcggacagagctgccttccctggaggtcttggagacaaagtggaggacttaacttgctgccatccagagcgagaagcagaactgagtcaccccagctctgacagtgaggagaatgaggccaaaggccgcagagccaccattgcaatatcctcccaggagggtgataactcagagagaaccctgtccaacaacatcactgttcccaagatagagcgcgccaacagctactcggcagaggagccaagtgcgccatatgcacacaccaggaagagcttctccatcagtgacaaactcgacaggcagcggaacacagcaagcctgcgaaatcccttccagagaagcaagtcctccaagccggagggccgaggggacagcctgtccatgaggaaactgtccagaacatcggctttccaaagctttgaaagcaagcacacctaaaccttcttaatatccgccacagaaggctcaagaatccagccctaaaattctctccaactccagtttttcccctttccttgaatcatacctgctttattcttagctgagcaaaacaagcaatgctttgggaggtgttaactcaaaggtgacttctgggccacagatcaagaaagcatttgatctgacccagtgccagacacaggggatttaaggcatgttcacacttgctgggcagggagggggaagagagggagaaggaagggttagagatgaatgtgtatccgcagtcacagcagaaagccatgagagcaggggaaacaaggggcttcgagcacgctccatgccaggaggcatctgttgatttctgaccattatcaagagttgtaggatgcagggctaaattgcaaaataaaataaaatagccagcgtacacaatgagatattctaaacttccattctgttttcttttcacattggctccatcactggtgactgatgaagagcatcctctttattcagtataagccggcagcaagcagttctacctaacgtcccacatccttctcatgccaacacttctgtaattgatcattataaagaaaaaacaaggtaacagtcatagttcacctgtctcttatctattcacttctggtgccacaactgtttatccttttttgaagaaaataagggaacagaaatgcctttttgtattgcaatcgaaatgaaagaagagttgatgttaaaaaaacaaaagtcaagtgatttattatatacagtgggcgttcaagtctagtcgagcaagctcaggagaatgtaattaaataattttatattttttaatttattttgtatctcacctgtcatggatgaattcattcactgaatatgtaatattgaacttaaaaaaaaaaaaaaaaaaaa

SEQ ID NO: 400 - protein, 1554 aa, Homosapiens
MYVRVSFDTKPDLLLHLMTKEWQLELPKLLISVHGGLQNFELQPKLKQVFGKGLIKAAMTTGAWIFTGGVNTGVIRHVGDALKDHASKSRGKICTIGIAPWGIVENQEDLIGRDVVRPYQTMSNPMSKLTVLNSMHSHFILADNGTTGKYGAEVKLRRQLEKHISLQKINTRIGQGVPVVALIVEGGPNVISIVLEYLRDTPPVPVVVCDGSGRASDILAFGHKYSEEGGLINESLRDQLLVTIQKTFTYTRTQAQHLFIILMECMKKKELITVFRMGSEGHQDIDLAILTALLKGANASAPDQLSLALAWNRVDIARSQIFIYGQQWPVGSLEQAMLDALVLDRVDFVKLLIENGVSMHRFLTISRLEELYNTRHGPSNTLYHLVRDVKKGNLPPDYRISLIDIGLVIEYLMGGAYRCNYTRKRFRTLYHNLFGPKRPKALKLLGMEDDIPLRRGRKTTKKREEEVDIDLDDPEINHFPFPFHELMVWAVLMKRQKMALFFWQHGEEAMAKALVACKLCKAMAHEASENDMVDDISQELNHNSRDFGQLAVELLDQSYKQDEQLAMKLLTYELKNWSNATCLQLAVAAKHRDFIAHTCSQMLLTDMWMGRLRMRKNSGLKVILGILLPPSILSLEFKNKDDMPYMSQAQEIHLQEKEAEEPEKPTKEKEEEDMELTAMLGRNNGESSRKKDEEEVQSKHRLIPLGRKIYEFYNAPIVKFWFYTLAYIGYLMLFNYIVLVKMERWPSTQEWIVISYIFTLGIEKMREILMSEPGKLLQKVKVWLQEYWNVTDLIAILLFSVGMILRLQDQPFRSDGRVIYCVNIIYWYIRLLDIFGVNKYLGPYVMMIGKMMIDMMYFVIIMLVVLMSFGVARQAILFPNEEPSWKLAKNIFYMPYWMIYGEVFADQIDPPCGQNETREDGKIIQLPPCKTGAWIVPAIMACYLLVANILLVNLLIAVFNNTFFEVKSISNQVWKFQRYQLIMTFHERPVLPPPLIIFSHMTMIFQHLCCRWRKHESDPDERDYGLKLFITDDELKKVHDFEEQCIEEYFREKDDRFNSSNDERIRVTSERVENMSMRLEEVNEREHSMKASLQTVDIRLAQLEDLIGRMATALERLTGLERAESNKIRSRTSSDCTDAAYIVRQSSFNSQEGNTFKLQESIDPAGEETMSPTSPTLMPRMRSHSFYSVNMKDKGGIEKLESIFKERSLSLHRATSSHSVAKEPKAPAAPANTLAIVPDSRRPSSCIDIYVSAMDELHCDIDPLDNSVNILGLGEPSFSTPVPSTAPSSSAYATLAPTDRPPSRSIDFEDITSMDTRSFSSDYTHLPECQNPWDSEPPMYHTIERSKSSRYLATTPFLLEEAPIVKSHSFMFSPSRSYYANFGVPVKTAEYTSITDCIDTRCVNAPQAIADRAAFPGGLGDKVEDLTCCHPEREAELSHPSSDSEENEAKGRRATIAISSQEGDNSERTLSNNITVPKIERANSYSAEEPSAPYAHTRKSFSISDKLDRQRNTASLRNPFQRSKSSKPEGRGDSLSMRKLSRTSAFQSFESKHT

SEQ ID NO: 401 - DNA, 5977 bp, Homosapiens
agctgcagcaaaatgaaagcaacaggagctgctccggggactgcttttgccagtacccagaatcagtgctcaggctcagaaatcctggatagaaagagcattttataaaagagaatgtgtccacatcatacccagcaccaaagacccccataggtgttgctgtgggcgtctgataggccagcatgttggcctcacccccagtatctccgtgcttcagaatgagaaaaatgaaagtcgcctctcccgaaatgacatccagtctgaaaagtggtccatcagcaaacacactcaactcagccctacggatgcttttgggaccattgagttccaaggaggtggccattccaacaaagccatgtatgtgcgagtatcttttgatacaaaacctgatctcctcttacacctgatgaccaaggaatggcagttggagcttcccaagcttctcatctctgtccatgggggcctgcagaactttgaactccagccaaaactcaagcaagtctttgggaaagggctcatcaaagcagcaatgacaactggagcgtggatattcactggaggggttaacacaggtgttattcgtcatgttggcgatgccttgaaggatcatgcctctaagtctcgaggaaagatatgcaccataggtattgccccctggggaattgtggaaaaccaggaggacctcattggaagagatgttgtccggccataccagaccatgtccaatcccatgagcaagctcactgttctcaacagcatgcattcccacttcattctggctgacaacgggaccactggaaaatatggagcagaggtgaaacttcgaagacaactggaaaagcatatttcactccagaagataaacacaagaatcggtcaaggtgttcctgtggtggcactcatagtggaaggaggacccaatgtgatctcgattgttttggagtaccttcgagacacccctcccgtgccagtggttgtctgtgatgggagtggacgggcatcggacatcctggcctttgggcataaatactcagaagaaggcggactgataaatgaatctttgagggaccagctgttggtgactatacagaagactttcacatacactcgaacccaagctcagcatctgttcatcatcctcatggagtgcatgaagaagaaggaattgattacggtatttcggatgggatcagaaggacaccaggacattgatttggctatcctgacagctttactcaaaggagccaatgcctcggccccagaccaactgagcttagctttagcctggaacagagtcgacatcgctcgcagccagatctttatttacgggcaacagtggccggtgggatctctggagcaagccatgttggatgccttagttctggacagagtggattttgtgaaattactcatagagaatggagtaagcatgcaccgttttctcaccatctccagactagaggaattgtacaatacgagacatgggccctcaaatacattgtaccacttggtcagggatgtcaaaaagcgagagtatccaggtttcggttggatctattttaaggggaacctgcccccagactacagaatcagcctgattgacatcggcctggtgatcgagtacctgatgggcggggcttatcgctgcaactacacgcgcaagcgcttccggaccctctaccacaacctcttcggccccaagaggcccaaagccttgaaactgctgggaatggaggatgatattcccttgaggcgaggaagaaagacaaccaagaaacgtgaagaagaggtggacattgacttggatgatcctgagatcaaccacttccccttccctttccatgagctcatggtgtgggctgttctcatgaagcggcagaagatggccctgttcttctggcagcacggtgaggaggccatggccaaggccctggtggcctgcaagctctgcaaagccatggctcatgaggcctctgagaacgacatggttgacgacatttcccaggagctgaatcacaattccagagactttggccagctggctgtggagctcctggaccagtcctacaagcaggacgaacagctggccatgaaactgctgacgtatgagctgaagaactggagcaacgccacgtgcctgcagcttgccgtggctgccaaacaccgcgacttcatcgcgcacacgtgcagccagatgctgctcaccgacatgtggatgggccggctccgcatgcgcaagaactcaggcctcaaggtaattctgggaattctacttcctccttcaattctcagcttggagttcaagaacaaagacgacatgccctatatgtctcaggcccaggaaatccacctccaagagaaggaggcagaagaaccagagaagcccacaaaggaaaaagaggaagaggacatggagctcacagcaatgttgggacgaaacaacggggagtcctccaggaagaaggatgaagaggaagttcagagcaagcaccggttaatccccctcggcagaaaaatctatgaattctacaatgcacccatcgtgaagttctggttctacacactggcgtatatcggatacctgatgctcttcaactatatcgtgttagtgaagatggaacgctggccgtccacccaggaatggatcgtaatctcctatattttcaccctgggaatagaaaagatgagagagattctgatgtcagagccagggaagttgctacagaaagtgaaggtatggctgcaggagtactggaatgtcacggacctcatcgccatccttctgttttctgtcggaatgatccttcgtctccaagaccagcccttcaggagtgacgggagggtcatctactgcgtgaacatcatttactggtatatccgtctcctagacatcttcggcgtgaacaagtatttgggcccgtatgtaatgatgattggaaaaatgatgatagacatgatgtactttgtcatcattatgctggtggttctgatgagctttggggtcgccaggcaagccatcctttttcccaatgaggagccatcatggaaactggccaagaacatcttctacatgccctattggatgatttatggggaagtgtttgcggaccagatagaccctccctgtggacagaatgagacccgagaggatggtaaaataatccagctgcctccctgcaagacaggagcttggatcgtgccggccatcatggcctgctacctcttagtggcaaacatcttgctggtcaacctcctcattgctgtctttaacaatacattttttgaagtaaaatcgatatccaaccaagtctggaagtttcagaggtatcagctcatcatgactttccatgaaaggccagttctgcccccaccactgatcatcttcagccacatgaccatgatattccagcacctgtgctgccgatggaggaaacacgagagcgacccggatgaaagggactacggcctgaaactcttcataaccgatgatgagctcaagaaagtacatgactttgaagagcaatgcatagaagaatacttcagagaaaaggatgatcggttcaactcatctaatgatgagaggatacgggtgacttcagaaagggtggagaacatgtctatgcggctggaggaagtcaacgagagagagcactccatgaaggcttcactccagaccgtggacatccggctggcgcagctggaagaccttatcgggcgcatggccacggccctggagcgcctgacaggtctggagcgggccgagtccaacaaaatccgctcgaggacctcgtcagactgcacggacgccgcctacattgtccgtcagagcagcttcaacagccaggaagggaacaccttcaagctccaagagagtatagaccctgcaggtgaggagaccatgtccccaacttctccaaccttaatgccccgtatgcgaagccattctttctattcggtcaatatgaaagacaaaggtggtatagaaaagttggaaagtatttttaaagaaaggtccctgagcctacaccgggctactagttcccactctgtagcaaaagaacccaaagctcctgcagcccctgccaacaccttggccattgttcctgattccagaagaccatcatcgtgtatagacatctatgtctctgctatggatgagctccactgtgatatagaccctctggacaattccgtgaacatccttgggctaggcgagccaagcttttcaactccagtaccttccacagccccttcaagtagtgcctatgcaacacttgcacccacagacagacctccaagccggagcattgattttgaggacatcacctccatggacactagatctttttcttcagactacacccacctcccagaatgccaaaacccctgggactcagagcctccgatgtaccacaccattgagcgttccaaaagtagccgctacctagccaccacaccctttcttctagaagaggctcccattgtgaaatctcatagctttatgttttccccctcaaggagctattatgccaactttggggtgcctgtaaaaacagcagaatacacaagtattacagactgtattgacacaaggtgtgtcaatgcccctcaagcaattgcggacagagctgccttccctggaggtcttggagacaaagtggaggacttaacttgctgccatccagagcgagaagcagaactgagtcaccccagctctgacagtgaggagaatgaggccaaaggccgcagagccaccattgcaatatcctcccaggagggtgataactcagagagaaccctgtccaacaacatcactgttcccaagatagagcgcgccaacagctactcggcagaggagccaagtgcgccatatgcacacaccaggaagagcttctccatcagtgacaaactcgacaggcagcggaacacagcaagcctgcgaaatcccttccagagaagcaagtcctccaagccggagggccgaggggacagcctgtccatgaggagactgtccagaacatcggctttccaaagctttgaaagcaagcacacctaaaccttcttaatatccgccacagaaggctcaagaatccagccctaaaattctctccaactccagtttttcccctttccttgaatcatacctgctttattcttagctgagcaaaacaagcaatgctttgggaggtgttaactcaaaggtgacttctgggccacagatcaagaaagcatttgatctgacccagtgccagacacaggggatttaaggcatgttcacacttgctgggcagggagggggaagagagggagaaggaagggttagagatgaatgtgtatccgcagtcacagcagaaagccatgagagcaggggaaacaaggggcttcgagcacgctccatgccaggaggcatctgttgatttctgaccattatcaagagttgtaggatgcagggctaaattgcaaaataaaataaaatagccagcgtacacaatgagatattctaaacttccattctgttttcttttcacattggctccatcactggtgactgatgaagagcatcctctttattcagtataagccggcagcaagcagttctacctaacgtcccacatccttctcatgccaacacttctgtaattgatcattataaagaaaaaacaaggtaacagtcatagttcacctgtctcttatctattcacttctggtgccacaactgtttatccttttttgaagaaaataagggaacagaaatgcctttttgtattgcaatcgaaatgaaagaagagttgatgttaaaaaaacaaaagtcaagtgatttattatatacagtgggcgttcaagtctagtcgagcaagctcaggagaatgtaattaaataattttatattttttaatttattttgtatctcacctgtcatggatgaattcattcactgaatatgtaatattgaacttaaaaaaaaaaaaaaaaaaaa

SEQ ID NO: 402 - protein, 1566 aa, Homosapiens
MYVRVSFDTKPDLLLHLMTKEWQLELPKLLISVHGGLQNFELQPKLKQVFGKGLIKAAMTTGAWIFTGGVNTGVIRHVGDALKDHASKSRGKICTIGIAPWGIVENQEDLIGRDVVRPYQTMSNPMSKLTVLNSMHSHFILADNGTTGKYGAEVKLRRQLEKHISLQKINTRIGQGVPVVALIVEGGPNVISIVLEYLRDTPPVPVVVCDGSGRASDILAFGHKYSEEGGLINESLRDQLLVTIQKTFTYTRTQAQHLFIILMECMKKKELITVFRMGSEGHQDIDLAILTALLKGANASAPDQLSLALAWNRVDIARSQIFIYGQQWPVGSLEQAMLDALVLDRVDFVKLLIENGVSMHRFLTISRLEELYNTRHGPSNTLYHLVRDVKKREYPGFGWIYFKGNLPPDYRISLIDIGLVIEYLMGGAYRCNYTRKRFRTLYHNLFGPKRPKALKLLGMEDDIPLRRGRKTTKKREEEVDIDLDDPEINHFPFPFHELMVWAVLMKRQKMALFFWQHGEEAMAKALVACKLCKAMAHEASENDMVDDISQELNHNSRDFGQLAVELLDQSYKQDEQLAMKLLTYELKNWSNATCLQLAVAAKHRDFIAHTCSQMLLTDMWMGRLRMRKNSGLKVILGILLPPSILSLEFKNKDDMPYMSQAQEIHLQEKEAEEPEKPTKEKEEEDMELTAMLGRNNGESSRKKDEEEVQSKHRLIPLGRKIYEFYNAPIVKFWFYTLAYIGYLMLFNYIVLVKMERWPSTQEWIVISYIFTLGIEKMREILMSEPGKLLQKVKVWLQEYWNVTDLIAILLFSVGMILRLQDQPFRSDGRVIYCVNIIYWYIRLLDIFGVNKYLGPYVMMIGKMMIDMMYFVIIMLVVLMSFGVARQAILFPNEEPSWKLAKNIFYMPYWMIYGEVFADQIDPPCGQNETREDGKIIQLPPCKTGAWIVPAIMACYLLVANILLVNLLIAVFNNTFFEVKSISNQVWKFQRYQLIMTFHERPVLPPPLIIFSHMTMIFQHLCCRWRKHESDPDERDYGLKLFITDDELKKVHDFEEQCIEEYFREKDDRFNSSNDERIRVTSERVENMSMRLEEVNEREHSMKASLQTVDIRLAQLEDLIGRMATALERLTGLERAESNKIRSRTSSDCTDAAYIVRQSSFNSQEGNTFKLQESIDPAGEETMSPTSPTLMPRMRSHSFYSVNMKDKGGIEKLESIFKERSLSLHRATSSHSVAKEPKAPAAPANTLAIVPDSRRPSSCIDIYVSAMDELHCDIDPLDNSVNILGLGEPSFSTPVPSTAPSSSAYATLAPTDRPPSRSIDFEDITSMDTRSFSSDYTHLPECQNPWDSEPPMYHTIERSKSSRYLATTPFLLEEAPIVKSHSFMFSPSRSYYANFGVPVKTAEYTSITDCIDTRCVNAPQAIADRAAFPGGLGDKVEDLTCCHPEREAELSHPSSDSEENEAKGRRATIAISSQEGDNSERTLSNNITVPKIERANSYSAEEPSAPYAHTRKSFSISDKLDRQRNTASLRNPFQRSKSSKPEGRGDSLSMRRLSRTSAFQSFESKHT

SEQ ID NO: 403 - DNA, 5911 bp, Homosapiens
agctgcagcaaaatgaaagcaacaggagctgctccggggactgcttttgccagtacccagaatcagtgctcaggctcagaaatcctggatagaaagagcattttataaaagagaatgtgtccacatcatacccagcaccaaagacccccataggtgttgctgtgggcgtctgataggccagcatgttggcctcacccccagtatctccgtgcttcagaatgagaaaaatgaaagtcgcctctcccgaaatgacatccagtctgaaaagtggtccatcagcaaacacactcaactcagccctacggatgcttttgggaccattgagttccaaggaggtggccattccaacaaagccatgtatgtgcgagtatcttttgatacaaaacctgatctcctcttacacctgatgaccaaggaatggcagttggagcttcccaagcttctcatctctgtccatgggggcctgcagaactttgaactccagccaaaactcaagcaagtctttgggaaagggctcatcaaagcagcaatgacaactggagcgtggatattcactggaggggttaacacaggtgttattcgtcatgttggcgatgccttgaaggatcatgcctctaagtctcgaggaaagatatgcaccataggtattgccccctggggaattgtggaaaaccaggaggacctcattggaagagatgttgtccggccataccagaccatgtccaatcccatgagcaagctcactgttctcaacagcatgcattcccacttcattctggctgacaacgggaccactggaaaatatggagcagaggtgaaacttcgaagacaactggaaaagcatatttcactccagaagataaacacaagaatcggtcaaggtgttcctgtggtggcactcatagtggaaggaggacccaatgtgatctcgattgttttggagtaccttcgagacacccctcccgtgccagtggttgtctgtgatgggagtggacgggcatcggacatcctggcctttgggcataaatactcagaagaaggcggactgataaatgaatctttgagggaccagctgttggtgactatacagaagactttcacatacactcgaacccaagctcagcatctgttcatcatcctcatggagtgcatgaagaagaaggaattgattacggtatttcggatgggatcagaaggacaccaggacattgatttggctatcctgacagctttactcaaaggagccaatgcctcggccccagaccaactgagcttagctttagcctggaacagagtcgacatcgctcgcagccagatctttatttacgggcaacagtggccggtgggatctctggagcaagccatgttggatgccttagttctggacagagtggattttgtgaaattactcatagagaatggagtaagcatgcaccgttttctcaccatctccagactagaggaattgtacaatacgagacatgggccctcaaatacattgtaccacttggtcagggatgtcaaaaaggggaacctgcccccagactacagaatcagcctgattgacatcggcctggtgatcgagtacctgatgggcggggcttatcgctgcaactacacgcgcaagcgcttccggaccctctaccacaacctcttcggccccaagagggatgatattcccttgaggcgaggaagaaagacaaccaagaaacgtgaagaagaggtggacattgacttggatgatcctgagatcaaccacttccccttccctttccatgagctcatggtgtgggctgttctcatgaagcggcagaagatggccctgttcttctggcagcacggtgaggaggccatggccaaggccctggtggcctgcaagctctgcaaagccatggctcatgaggcctctgagaacgacatggttgacgacatttcccaggagctgaatcacaattccagagactttggccagctggctgtggagctcctggaccagtcctacaagcaggacgaacagctggccatgaaactgctgacgtatgagctgaagaactggagcaacgccacgtgcctgcagcttgccgtggctgccaaacaccgcgacttcatcgcgcacacgtgcagccagatgctgctcaccgacatgtggatgggccggctccgcatgcgcaagaactcaggcctcaaggtaattctgggaattctacttcctccttcaattctcagcttggagttcaagaacaaagacgacatgccctatatgtctcaggcccaggaaatccacctccaagagaaggaggcagaagaaccagagaagcccacaaaggaaaaagaggaagaggacatggagctcacagcaatgttgggacgaaacaacggggagtcctccaggaagaaggatgaagaggaagttcagagcaagcaccggttaatccccctcggcagaaaaatctatgaattctacaatgcacccatcgtgaagttctggttctacacactggcgtatatcggatacctgatgctcttcaactatatcgtgttagtgaagatggaacgctggccgtccacccaggaatggatcgtaatctcctatattttcaccctgggaatagaaaagatgagagagattctgatgtcagagccagggaagttgctacagaaagtgaaggtatggctgcaggagtactggaatgtcacggacctcatcgccatccttctgttttctgtcggaatgatccttcgtctccaagaccagcccttcaggagtgacgggagggtcatctactgcgtgaacatcatttactggtatatccgtctcctagacatcttcggcgtgaacaagtatttgggcccgtatgtaatgatgattggaaaaatgatgatagacatgatgtactttgtcatcattatgctggtggttctgatgagctttggggtcgccaggcaagccatcctttttcccaatgaggagccatcatggaaactggccaagaacatcttctacatgccctattggatgatttatggggaagtgtttgcggaccagatagaccctccctgtggacagaatgagacccgagaggatggtaaaataatccagctgcctccctgcaagacaggagcttggatcgtgccggccatcatggcctgctacctcttagtggcaaacatcttgctggtcaacctcctcattgctgtctttaacaatacattttttgaagtaaaatcgatatccaaccaagtctggaagtttcagaggtatcagctcatcatgactttccatgaaaggccagttctgcccccaccactgatcatcttcagccacatgaccatgatattccagcacctgtgctgccgatggaggaaacacgagagcgacccggatgaaagggactacggcctgaaactcttcataaccgatgatgagctcaagaaagtacatgactttgaagagcaatgcatagaagaatacttcagagaaaaggatgatcggttcaactcatctaatgatgagaggatacgggtgacttcagaaagggtggagaacatgtctatgcggctggaggaagtcaacgagagagagcactccatgaaggcttcactccagaccgtggacatccggctggcgcagctggaagaccttatcgggcgcatggccacggccctggagcgcctgacaggtctggagcgggccgagtccaacaaaatccgctcgaggacctcgtcagactgcacggacgccgcctacattgtccgtcagagcagcttcaacagccaggaagggaacaccttcaagctccaagagagtatagaccctgcaggtgaggagaccatgtccccaacttctccaaccttaatgccccgtatgcgaagccattctttctattcggtcaatatgaaagacaaaggtggtatagaaaagttggaaagtatttttaaagaaaggtccctgagcctacaccgggctactagttcccactctgtagcaaaagaacccaaagctcctgcagcccctgccaacaccttggccattgttcctgattccagaagaccatcatcgtgtatagacatctatgtctctgctatggatgagctccactgtgatatagaccctctggacaattccgtgaacatccttgggctaggcgagccaagcttttcaactccagtaccttccacagccccttcaagtagtgcctatgcaacacttgcacccacagacagacctccaagccggagcattgattttgaggacatcacctccatggacactagatctttttcttcagactacacccacctcccagaatgccaaaacccctgggactcagagcctccgatgtaccacaccattgagcgttccaaaagtagccgctacctagccaccacaccctttcttctagaagaggctcccattgtgaaatctcatagctttatgttttccccctcaaggagctattatgccaactttggggtgcctgtaaaaacagcagaatacacaagtattacagactgtattgacacaaggtgtgtcaatgcccctcaagcaattgcggacagagctgccttccctggaggtcttggagacaaagtggaggacttaacttgctgccatccagagcgagaagcagaactgagtcaccccagctctgacagtgaggagaatgaggccaaaggccgcagagccaccattgcaatatcctcccaggagggtgataactcagagagaaccctgtccaacaacatcactgttcccaagatagagcgcgccaacagctactcggcagaggagccaagtgcgccatatgcacacaccaggaagagcttctccatcagtgacaaactcgacaggcagcggaacacagcaagcctgcgaaatcccttccagagaagcaagtcctccaagccggagggccgaggggacagcctgtccatgaggaaactgtccagaacatcggctttccaaagctttgaaagcaagcacacctaaaccttcttaatatccgccacagaaggctcaagaatccagccctaaaattctctccaactccagtttttcccctttccttgaatcatacctgctttattcttagctgagcaaaacaagcaatgctttgggaggtgttaactcaaaggtgacttctgggccacagatcaagaaagcatttgatctgacccagtgccagacacaggggatttaaggcatgttcacacttgctgggcagggagggggaagagagggagaaggaagggttagagatgaatgtgtatccgcagtcacagcagaaagccatgagagcaggggaaacaaggggcttcgagcacgctccatgccaggaggcatctgttgatttctgaccattatcaagagttgtaggatgcagggctaaattgcaaaataaaataaaatagccagcgtacacaatgagatattctaaacttccattctgttttcttttcacattggctccatcactggtgactgatgaagagcatcctctttattcagtataagccggcagcaagcagttctacctaacgtcccacatccttctcatgccaacacttctgtaattgatcattataaagaaaaaacaaggtaacagtcatagttcacctgtctcttatctattcacttctggtgccacaactgtttatccttttttgaagaaaataagggaacagaaatgcctttttgtattgcaatcgaaatgaaagaagagttgatgttaaaaaaacaaaagtcaagtgatttattatatacagtgggcgttcaagtctagtcgagcaagctcaggagaatgtaattaaataattttatattttttaatttattttgtatctcacctgtcatggatgaattcattcactgaatatgtaatattgaacttaaaaaaaaaaaaaaaaaaaa

SEQ ID NO: 404 - protein, 1544 aa, Homosapiens
MYVRVSFDTKPDLLLHLMTKEWQLELPKLLISVHGGLQNFELQPKLKQVFGKGLIKAAMTTGAWIFTGGVNTGVIRHVGDALKDHASKSRGKICTIGIAPWGIVENQEDLIGRDVVRPYQTMSNPMSKLTVLNSMHSHFILADNGTTGKYGAEVKLRRQLEKHISLQKINTRIGQGVPVVALIVEGGPNVISIVLEYLRDTPPVPVVVCDGSGRASDILAFGHKYSEEGGLINESLRDQLLVTIQKTFTYTRTQAQHLFIILMECMKKKELITVFRMGSEGHQDIDLAILTALLKGANASAPDQLSLALAWNRVDIARSQIFIYGQQWPVGSLEQAMLDALVLDRVDFVKLLIENGVSMHRFLTISRLEELYNTRHGPSNTLYHLVRDVKKGNLPPDYRISLIDIGLVIEYLMGGAYRCNYTRKRFRTLYHNLFGPKRDDIPLRRGRKTTKKREEEVDIDLDDPEINHFPFPFHELMVWAVLMKRQKMALFFWQHGEEAMAKALVACKLCKAMAHEASENDMVDDISQELNHNSRDFGQLAVELLDQSYKQDEQLAMKLLTYELKNWSNATCLQLAVAAKHRDFIAHTCSQMLLTDMWMGRLRMRKNSGLKVILGILLPPSILSLEFKNKDDMPYMSQAQEIHLQEKEAEEPEKPTKEKEEEDMELTAMLGRNNGESSRKKDEEEVQSKHRLIPLGRKIYEFYNAPIVKFWFYTLAYIGYLMLFNYIVLVKMERWPSTQEWIVISYIFTLGIEKMREILMSEPGKLLQKVKVWLQEYWNVTDLIAILLFSVGMILRLQDQPFRSDGRVIYCVNIIYWYIRLLDIFGVNKYLGPYVMMIGKMMIDMMYFVIIMLVVLMSFGVARQAILFPNEEPSWKLAKNIFYMPYWMIYGEVFADQIDPPCGQNETREDGKIIQLPPCKTGAWIVPAIMACYLLVANILLVNLLIAVFNNTFFEVKSISNQVWKFQRYQLIMTFHERPVLPPPLIIFSHMTMIFQHLCCRWRKHESDPDERDYGLKLFITDDELKKVHDFEEQCIEEYFREKDDRFNSSNDERIRVTSERVENMSMRLEEVNEREHSMKASLQTVDIRLAQLEDLIGRMATALERLTGLERAESNKIRSRTSSDCTDAAYIVRQSSFNSQEGNTFKLQESIDPAGEETMSPTSPTLMPRMRSHSFYSVNMKDKGGIEKLESIFKERSLSLHRATSSHSVAKEPKAPAAPANTLAIVPDSRRPSSCIDIYVSAMDELHCDIDPLDNSVNILGLGEPSFSTPVPSTAPSSSAYATLAPTDRPPSRSIDFEDITSMDTRSFSSDYTHLPECQNPWDSEPPMYHTIERSKSSRYLATTPFLLEEAPIVKSHSFMFSPSRSYYANFGVPVKTAEYTSITDCIDTRCVNAPQAIADRAAFPGGLGDKVEDLTCCHPEREAELSHPSSDSEENEAKGRRATIAISSQEGDNSERTLSNNITVPKIERANSYSAEEPSAPYAHTRKSFSISDKLDRQRNTASLRNPFQRSKSSKPEGRGDSLSMRKLSRTSAFQSFESKHT

SEQ ID NO: 405 - DNA, 5947 bp, Homosapiens
agctgcagcaaaatgaaagcaacaggagctgctccggggactgcttttgccagtacccagaatcagtgctcaggctcagaaatcctggatagaaagagcattttataaaagagaatgtgtccacatcatacccagcaccaaagacccccataggtgttgctgtgggcgtctgataggccagcatgttggcctcacccccagtatctccgtgcttcagaatgagaaaaatgaaagtcgcctctcccgaaatgacatccagtctgaaaagtggtccatcagcaaacacactcaactcagccctacggatgcttttgggaccattgagttccaaggaggtggccattccaacaaagccatgtatgtgcgagtatcttttgatacaaaacctgatctcctcttacacctgatgaccaaggaatggcagttggagcttcccaagcttctcatctctgtccatgggggcctgcagaactttgaactccagccaaaactcaagcaagtctttgggaaagggctcatcaaagcagcaatgacaactggagcgtggatattcactggaggggttaacacaggtgttattcgtcatgttggcgatgccttgaaggatcatgcctctaagtctcgaggaaagatatgcaccataggtattgccccctggggaattgtggaaaaccaggaggacctcattggaagagatgttgtccggccataccagaccatgtccaatcccatgagcaagctcactgttctcaacagcatgcattcccacttcattctggctgacaacgggaccactggaaaatatggagcagaggtgaaacttcgaagacaactggaaaagcatatttcactccagaagataaacacaagaatcggtcaaggtgttcctgtggtggcactcatagtggaaggaggacccaatgtgatctcgattgttttggagtaccttcgagacacccctcccgtgccagtggttgtctgtgatgggagtggacgggcatcggacatcctggcctttgggcataaatactcagaagaaggcggactgataaatgaatctttgagggaccagctgttggtgactatacagaagactttcacatacactcgaacccaagctcagcatctgttcatcatcctcatggagtgcatgaagaagaaggaattgattacggtatttcggatgggatcagaaggacaccaggacattgatttggctatcctgacagctttactcaaaggagccaatgcctcggccccagaccaactgagcttagctttagcctggaacagagtcgacatcgctcgcagccagatctttatttacgggcaacagtggccggtgggatctctggagcaagccatgttggatgccttagttctggacagagtggattttgtgaaattactcatagagaatggagtaagcatgcaccgttttctcaccatctccagactagaggaattgtacaatacgagacatgggccctcaaatacattgtaccacttggtcagggatgtcaaaaagcgagagtatccaggtttcggttggatctattttaaggggaacctgcccccagactacagaatcagcctgattgacatcggcctggtgatcgagtacctgatgggcggggcttatcgctgcaactacacgcgcaagcgcttccggaccctctaccacaacctcttcggccccaagagggatgatattcccttgaggcgaggaagaaagacaaccaagaaacgtgaagaagaggtggacattgacttggatgatcctgagatcaaccacttccccttccctttccatgagctcatggtgtgggctgttctcatgaagcggcagaagatggccctgttcttctggcagcacggtgaggaggccatggccaaggccctggtggcctgcaagctctgcaaagccatggctcatgaggcctctgagaacgacatggttgacgacatttcccaggagctgaatcacaattccagagactttggccagctggctgtggagctcctggaccagtcctacaagcaggacgaacagctggccatgaaactgctgacgtatgagctgaagaactggagcaacgccacgtgcctgcagcttgccgtggctgccaaacaccgcgacttcatcgcgcacacgtgcagccagatgctgctcaccgacatgtggatgggccggctccgcatgcgcaagaactcaggcctcaaggtaattctgggaattctacttcctccttcaattctcagcttggagttcaagaacaaagacgacatgccctatatgtctcaggcccaggaaatccacctccaagagaaggaggcagaagaaccagagaagcccacaaaggaaaaagaggaagaggacatggagctcacagcaatgttgggacgaaacaacggggagtcctccaggaagaaggatgaagaggaagttcagagcaagcaccggttaatccccctcggcagaaaaatctatgaattctacaatgcacccatcgtgaagttctggttctacacactggcgtatatcggatacctgatgctcttcaactatatcgtgttagtgaagatggaacgctggccgtccacccaggaatggatcgtaatctcctatattttcaccctgggaatagaaaagatgagagagattctgatgtcagagccagggaagttgctacagaaagtgaaggtatggctgcaggagtactggaatgtcacggacctcatcgccatccttctgttttctgtcggaatgatccttcgtctccaagaccagcccttcaggagtgacgggagggtcatctactgcgtgaacatcatttactggtatatccgtctcctagacatcttcggcgtgaacaagtatttgggcccgtatgtaatgatgattggaaaaatgatgatagacatgatgtactttgtcatcattatgctggtggttctgatgagctttggggtcgccaggcaagccatcctttttcccaatgaggagccatcatggaaactggccaagaacatcttctacatgccctattggatgatttatggggaagtgtttgcggaccagatagaccctccctgtggacagaatgagacccgagaggatggtaaaataatccagctgcctccctgcaagacaggagcttggatcgtgccggccatcatggcctgctacctcttagtggcaaacatcttgctggtcaacctcctcattgctgtctttaacaatacattttttgaagtaaaatcgatatccaaccaagtctggaagtttcagaggtatcagctcatcatgactttccatgaaaggccagttctgcccccaccactgatcatcttcagccacatgaccatgatattccagcacctgtgctgccgatggaggaaacacgagagcgacccggatgaaagggactacggcctgaaactcttcataaccgatgatgagctcaagaaagtacatgactttgaagagcaatgcatagaagaatacttcagagaaaaggatgatcggttcaactcatctaatgatgagaggatacgggtgacttcagaaagggtggagaacatgtctatgcggctggaggaagtcaacgagagagagcactccatgaaggcttcactccagaccgtggacatccggctggcgcagctggaagaccttatcgggcgcatggccacggccctggagcgcctgacaggtctggagcgggccgagtccaacaaaatccgctcgaggacctcgtcagactgcacggacgccgcctacattgtccgtcagagcagcttcaacagccaggaagggaacaccttcaagctccaagagagtatagaccctgcaggtgaggagaccatgtccccaacttctccaaccttaatgccccgtatgcgaagccattctttctattcggtcaatatgaaagacaaaggtggtatagaaaagttggaaagtatttttaaagaaaggtccctgagcctacaccgggctactagttcccactctgtagcaaaagaacccaaagctcctgcagcccctgccaacaccttggccattgttcctgattccagaagaccatcatcgtgtatagacatctatgtctctgctatggatgagctccactgtgatatagaccctctggacaattccgtgaacatccttgggctaggcgagccaagcttttcaactccagtaccttccacagccccttcaagtagtgcctatgcaacacttgcacccacagacagacctccaagccggagcattgattttgaggacatcacctccatggacactagatctttttcttcagactacacccacctcccagaatgccaaaacccctgggactcagagcctccgatgtaccacaccattgagcgttccaaaagtagccgctacctagccaccacaccctttcttctagaagaggctcccattgtgaaatctcatagctttatgttttccccctcaaggagctattatgccaactttggggtgcctgtaaaaacagcagaatacacaagtattacagactgtattgacacaaggtgtgtcaatgcccctcaagcaattgcggacagagctgccttccctggaggtcttggagacaaagtggaggacttaacttgctgccatccagagcgagaagcagaactgagtcaccccagctctgacagtgaggagaatgaggccaaaggccgcagagccaccattgcaatatcctcccaggagggtgataactcagagagaaccctgtccaacaacatcactgttcccaagatagagcgcgccaacagctactcggcagaggagccaagtgcgccatatgcacacaccaggaagagcttctccatcagtgacaaactcgacaggcagcggaacacagcaagcctgcgaaatcccttccagagaagcaagtcctccaagccggagggccgaggggacagcctgtccatgaggaaactgtccagaacatcggctttccaaagctttgaaagcaagcacacctaaaccttcttaatatccgccacagaaggctcaagaatccagccctaaaattctctccaactccagtttttcccctttccttgaatcatacctgctttattcttagctgagcaaaacaagcaatgctttgggaggtgttaactcaaaggtgacttctgggccacagatcaagaaagcatttgatctgacccagtgccagacacaggggatttaaggcatgttcacacttgctgggcagggagggggaagagagggagaaggaagggttagagatgaatgtgtatccgcagtcacagcagaaagccatgagagcaggggaaacaaggggcttcgagcacgctccatgccaggaggcatctgttgatttctgaccattatcaagagttgtaggatgcagggctaaattgcaaaataaaataaaatagccagcgtacacaatgagatattctaaacttccattctgttttcttttcacattggctccatcactggtgactgatgaagagcatcctctttattcagtataagccggcagcaagcagttctacctaacgtcccacatccttctcatgccaacacttctgtaattgatcattataaagaaaaaacaaggtaacagtcatagttcacctgtctcttatctattcacttctggtgccacaactgtttatccttttttgaagaaaataagggaacagaaatgcctttttgtattgcaatcgaaatgaaagaagagttgatgttaaaaaaacaaaagtcaagtgatttattatatacagtgggcgttcaagtctagtcgagcaagctcaggagaatgtaattaaataattttatattttttaatttattttgtatctcacctgtcatggatgaattcattcactgaatatgtaatattgaacttaaaaaaaaaaaaaaaaaaaa

SEQ ID NO: 406 - protein, 1556 aa, Homosapiens
MYVRVSFDTKPDLLLHLMTKEWQLELPKLLISVHGGLQNFELQPKLKQVFGKGLIKAAMTTGAWIFTGGVNTGVIRHVGDALKDHASKSRGKICTIGIAPWGIVENQEDLIGRDVVRPYQTMSNPMSKLTVLNSMHSHFILADNGTTGKYGAEVKLRRQLEKHISLQKINTRIGQGVPVVALIVEGGPNVISIVLEYLRDTPPVPVVVCDGSGRASDILAFGHKYSEEGGLINESLRDQLLVTIQKTFTYTRTQAQHLFIILMECMKKKELITVFRMGSEGHQDIDLAILTALLKGANASAPDQLSLALAWNRVDIARSQIFIYGQQWPVGSLEQAMLDALVLDRVDFVKLLIENGVSMHRFLTISRLEELYNTRHGPSNTLYHLVRDVKKREYPGFGWIYFKGNLPPDYRISLIDIGLVIEYLMGGAYRCNYTRKRFRTLYHNLFGPKRDDIPLRRGRKTTKKREEEVDIDLDDPEINHFPFPFHELMVWAVLMKRQKMALFFWQHGEEAMAKALVACKLCKAMAHEASENDMVDDISQELNHNSRDFGQLAVELLDQSYKQDEQLAMKLLTYELKNWSNATCLQLAVAAKHRDFIAHTCSQMLLTDMWMGRLRMRKNSGLKVILGILLPPSILSLEFKNKDDMPYMSQAQEIHLQEKEAEEPEKPTKEKEEEDMELTAMLGRNNGESSRKKDEEEVQSKHRLIPLGRKIYEFYNAPIVKFWFYTLAYIGYLMLFNYIVLVKMERWPSTQEWIVISYIFTLGIEKMREILMSEPGKLLQKVKVWLQEYWNVTDLIAILLFSVGMILRLQDQPFRSDGRVIYCVNIIYWYIRLLDIFGVNKYLGPYVMMIGKMMIDMMYFVIIMLVVLMSFGVARQAILFPNEEPSWKLAKNIFYMPYWMIYGEVFADQIDPPCGQNETREDGKIIQLPPCKTGAWIVPAIMACYLLVANILLVNLLIAVFNNTFFEVKSISNQVWKFQRYQLIMTFHERPVLPPPLIIFSHMTMIFQHLCCRWRKHESDPDERDYGLKLFITDDELKKVHDFEEQCIEEYFREKDDRFNSSNDERIRVTSERVENMSMRLEEVNEREHSMKASLQTVDIRLAQLEDLIGRMATALERLTGLERAESNKIRSRTSSDCTDAAYIVRQSSFNSQEGNTFKLQESIDPAGEETMSPTSPTLMPRMRSHSFYSVNMKDKGGIEKLESIFKERSLSLHRATSSHSVAKEPKAPAAPANTLAIVPDSRRPSSCIDIYVSAMDELHCDIDPLDNSVNILGLGEPSFSTPVPSTAPSSSAYATLAPTDRPPSRSIDFEDITSMDTRSFSSDYTHLPECQNPWDSEPPMYHTIERSKSSRYLATTPFLLEEAPIVKSHSFMFSPSRSYYANFGVPVKTAEYTSITDCIDTRCVNAPQAIADRAAFPGGLGDKVEDLTCCHPEREAELSHPSSDSEENEAKGRRATIAISSQEGDNSERTLSNNITVPKIERANSYSAEEPSAPYAHTRKSFSISDKLDRQRNTASLRNPFQRSKSSKPEGRGDSLSMRKLSRTSAFQSFESKHT

SEQ ID NO: 407 - DNA, 6016 bp, Homosapiens
agctgcagcaaaatgaaagcaacaggagctgctccggggactgcttttgccagtacccagaatcagtgctcaggctcagaaatcctggatagaaagagcattttataaaagagaatgtgtccacatcatacccagcaccaaagacccccataggtgttgctgtgggcgtctgataggccagcatgttggcctcacccccagtatctccgtgcttcagaatgagaaaaatgaaagtcgcctctcccgaaatgacatccagtctgaaaagtggtccatcagcaaacacactcaactcagccctacggatgcttttgggaccattgagttccaaggaggtggccattccaacaaagccatgtatgtgcgagtatcttttgatacaaaacctgatctcctcttacacctgatgaccaaggaatggcagttggagcttcccaagcttctcatctctgtccatgggggcctgcagaactttgaactccagccaaaactcaagcaagtctttgggaaagggctcatcaaagcagcaatgacaactggagcgtggatattcactggaggggttaacacaggtgttattcgtcatgttggcgatgccttgaaggatcatgcctctaagtctcgaggaaagatatgcaccataggtattgccccctggggaattgtggaaaaccaggaggacctcattggaagagatgttgtccggccataccagaccatgtccaatcccatgagcaagctcactgttctcaacagcatgcattcccacttcattctggctgacaacgggaccactggaaaatatggagcagaggtgaaacttcgaagacaactggaaaagcatatttcactccagaagataaacacaagatgcctgccgtttttctctcttgactcccgcttgttttattcattttggggtagttgccagttagactcagttggaatcggtcaaggtgttcctgtggtggcactcatagtggaaggaggacccaatgtgatctcgattgttttggagtaccttcgagacacccctcccgtgccagtggttgtctgtgatgggagtggacgggcatcggacatcctggcctttgggcataaatactcagaagaaggcggactgataaatgaatctttgagggaccagctgttggtgactatacagaagactttcacatacactcgaacccaagctcagcatctgttcatcatcctcatggagtgcatgaagaagaaggaattgattacggtatttcggatgggatcagaaggacaccaggacattgatttggctatcctgacagctttactcaaaggagccaatgcctcggccccagaccaactgagcttagctttagcctggaacagagtcgacatcgctcgcagccagatctttatttacgggcaacagtggccggtgggatctctggagcaagccatgttggatgccttagttctggacagagtggattttgtgaaattactcatagagaatggagtaagcatgcaccgttttctcaccatctccagactagaggaattgtacaatacgagacatgggccctcaaatacattgtaccacttggtcagggatgtcaaaaaggggaacctgcccccagactacagaatcagcctgattgacatcggcctggtgatcgagtacctgatgggcggggcttatcgctgcaactacacgcgcaagcgcttccggaccctctaccacaacctcttcggccccaagaggcccaaagccttgaaactgctgggaatggaggatgatattcccttgaggcgaggaagaaagacaaccaagaaacgtgaagaagaggtggacattgacttggatgatcctgagatcaaccacttccccttccctttccatgagctcatggtgtgggctgttctcatgaagcggcagaagatggccctgttcttctggcagcacggtgaggaggccatggccaaggccctggtggcctgcaagctctgcaaagccatggctcatgaggcctctgagaacgacatggttgacgacatttcccaggagctgaatcacaattccagagactttggccagctggctgtggagctcctggaccagtcctacaagcaggacgaacagctggccatgaaactgctgacgtatgagctgaagaactggagcaacgccacgtgcctgcagcttgccgtggctgccaaacaccgcgacttcatcgcgcacacgtgcagccagatgctgctcaccgacatgtggatgggccggctccgcatgcgcaagaactcaggcctcaaggtaattctgggaattctacttcctccttcaattctcagcttggagttcaagaacaaagacgacatgccctatatgtctcaggcccaggaaatccacctccaagagaaggaggcagaagaaccagagaagcccacaaaggaaaaagaggaagaggacatggagctcacagcaatgttgggacgaaacaacggggagtcctccaggaagaaggatgaagaggaagttcagagcaagcaccggttaatccccctcggcagaaaaatctatgaattctacaatgcacccatcgtgaagttctggttctacacactggcgtatatcggatacctgatgctcttcaactatatcgtgttagtgaagatggaacgctggccgtccacccaggaatggatcgtaatctcctatattttcaccctgggaatagaaaagatgagagagattctgatgtcagagccagggaagttgctacagaaagtgaaggtatggctgcaggagtactggaatgtcacggacctcatcgccatccttctgttttctgtcggaatgatccttcgtctccaagaccagcccttcaggagtgacgggagggtcatctactgcgtgaacatcatttactggtatatccgtctcctagacatcttcggcgtgaacaagtatttgggcccgtatgtaatgatgattggaaaaatgatgatagacatgatgtactttgtcatcattatgctggtggttctgatgagctttggggtcgccaggcaagccatcctttttcccaatgaggagccatcatggaaactggccaagaacatcttctacatgccctattggatgatttatggggaagtgtttgcggaccagatagaccctccctgtggacagaatgagacccgagaggatggtaaaataatccagctgcctccctgcaagacaggagcttggatcgtgccggccatcatggcctgctacctcttagtggcaaacatcttgctggtcaacctcctcattgctgtctttaacaatacattttttgaagtaaaatcgatatccaaccaagtctggaagtttcagaggtatcagctcatcatgactttccatgaaaggccagttctgcccccaccactgatcatcttcagccacatgaccatgatattccagcacctgtgctgccgatggaggaaacacgagagcgacccggatgaaagggactacggcctgaaactcttcataaccgatgatgagctcaagaaagtacatgactttgaagagcaatgcatagaagaatacttcagagaaaaggatgatcggttcaactcatctaatgatgagaggatacgggtgacttcagaaagggtggagaacatgtctatgcggctggaggaagtcaacgagagagagcactccatgaaggcttcactccagaccgtggacatccggctggcgcagctggaagaccttatcgggcgcatggccacggccctggagcgcctgacaggtctggagcgggccgagtccaacaaaatccgctcgaggacctcgtcagactgcacggacgccgcctacattgtccgtcagagcagcttcaacagccaggaagggaacaccttcaagctccaagagagtatagaccctgcaggtgaggagaccatgtccccaacttctccaaccttaatgccccgtatgcgaagccattctttctattcggtcaatatgaaagacaaaggtggtatagaaaagttggaaagtatttttaaagaaaggtccctgagcctacaccgggctactagttcccactctgtagcaaaagaacccaaagctcctgcagcccctgccaacaccttggccattgttcctgattccagaagaccatcatcgtgtatagacatctatgtctctgctatggatgagctccactgtgatatagaccctctggacaattccgtgaacatccttgggctaggcgagccaagcttttcaactccagtaccttccacagccccttcaagtagtgcctatgcaacacttgcacccacagacagacctccaagccggagcattgattttgaggacatcacctccatggacactagatctttttcttcagactacacccacctcccagaatgccaaaacccctgggactcagagcctccgatgtaccacaccattgagcgttccaaaagtagccgctacctagccaccacaccctttcttctagaagaggctcccattgtgaaatctcatagctttatgttttccccctcaaggagctattatgccaactttggggtgcctgtaaaaacagcagaatacacaagtattacagactgtattgacacaaggtgtgtcaatgcccctcaagcaattgcggacagagctgccttccctggaggtcttggagacaaagtggaggacttaacttgctgccatccagagcgagaagcagaactgagtcaccccagctctgacagtgaggagaatgaggccaaaggccgcagagccaccattgcaatatcctcccaggagggtgataactcagagagaaccctgtccaacaacatcactgttcccaagatagagcgcgccaacagctactcggcagaggagccaagtgcgccatatgcacacaccaggaagagcttctccatcagtgacaaactcgacaggcagcggaacacagcaagcctgcgaaatcccttccagagaagcaagtcctccaagccggagggccgaggggacagcctgtccatgaggagactgtccagaacatcggctttccaaagctttgaaagcaagcacacctaaaccttcttaatatccgccacagaaggctcaagaatccagccctaaaattctctccaactccagtttttcccctttccttgaatcatacctgctttattcttagctgagcaaaacaagcaatgctttgggaggtgttaactcaaaggtgacttctgggccacagatcaagaaagcatttgatctgacccagtgccagacacaggggatttaaggcatgttcacacttgctgggcagggagggggaagagagggagaaggaagggttagagatgaatgtgtatccgcagtcacagcagaaagccatgagagcaggggaaacaaggggcttcgagcacgctccatgccaggaggcatctgttgatttctgaccattatcaagagttgtaggatgcagggctaaattgcaaaataaaataaaatagccagcgtacacaatgagatattctaaacttccattctgttttcttttcacattggctccatcactggtgactgatgaagagcatcctctttattcagtataagccggcagcaagcagttctacctaacgtcccacatccttctcatgccaacacttctgtaattgatcattataaagaaaaaacaaggtaacagtcatagttcacctgtctcttatctattcacttctggtgccacaactgtttatccttttttgaagaaaataagggaacagaaatgcctttttgtattgcaatcgaaatgaaagaagagttgatgttaaaaaaacaaaagtcaagtgatttattatatacagtgggcgttcaagtctagtcgagcaagctcaggagaatgtaattaaataattttatattttttaatttattttgtatctcacctgtcatggatgaattcattcactgaatatgtaatattgaacttaaaaaaaaaaaaaaaaaaaa

SEQ ID NO: 408 - protein, 1579 aa, Homosapiens
MYVRVSFDTKPDLLLHLMTKEWQLELPKLLISVHGGLQNFELQPKLKQVFGKGLIKAAMTTGAWIFTGGVNTGVIRHVGDALKDHASKSRGKICTIGIAPWGIVENQEDLIGRDVVRPYQTMSNPMSKLTVLNSMHSHFILADNGTTGKYGAEVKLRRQLEKHISLQKINTRCLPFFSLDSRLFYSFWGSCQLDSVGIGQGVPVVALIVEGGPNVISIVLEYLRDTPPVPVVVCDGSGRASDILAFGHKYSEEGGLINESLRDQLLVTIQKTFTYTRTQAQHLFIILMECMKKKELITVFRMGSEGHQDIDLAILTALLKGANASAPDQLSLALAWNRVDIARSQIFIYGQQWPVGSLEQAMLDALVLDRVDFVKLLIENGVSMHRFLTISRLEELYNTRHGPSNTLYHLVRDVKKGNLPPDYRISLIDIGLVIEYLMGGAYRCNYTRKRFRTLYHNLFGPKRPKALKLLGMEDDIPLRRGRKTTKKREEEVDIDLDDPEINHFPFPFHELMVWAVLMKRQKMALFFWQHGEEAMAKALVACKLCKAMAHEASENDMVDDISQELNHNSRDFGQLAVELLDQSYKQDEQLAMKLLTYELKNWSNATCLQLAVAAKHRDFIAHTCSQMLLTDMWMGRLRMRKNSGLKVILGILLPPSILSLEFKNKDDMPYMSQAQEIHLQEKEAEEPEKPTKEKEEEDMELTAMLGRNNGESSRKKDEEEVQSKHRLIPLGRKIYEFYNAPIVKFWFYTLAYIGYLMLFNYIVLVKMERWPSTQEWIVISYIFTLGIEKMREILMSEPGKLLQKVKVWLQEYWNVTDLIAILLFSVGMILRLQDQPFRSDGRVIYCVNIIYWYIRLLDIFGVNKYLGPYVMMIGKMMIDMMYFVIIMLVVLMSFGVARQAILFPNEEPSWKLAKNIFYMPYWMIYGEVFADQIDPPCGQNETREDGKIIQLPPCKTGAWIVPAIMACYLLVANILLVNLLIAVFNNTFFEVKSISNQVWKFQRYQLIMTFHERPVLPPPLIIFSHMTMIFQHLCCRWRKHESDPDERDYGLKLFITDDELKKVHDFEEQCIEEYFREKDDRFNSSNDERIRVTSERVENMSMRLEEVNEREHSMKASLQTVDIRLAQLEDLIGRMATALERLTGLERAESNKIRSRTSSDCTDAAYIVRQSSFNSQEGNTFKLQESIDPAGEETMSPTSPTLMPRMRSHSFYSVNMKDKGGIEKLESIFKERSLSLHRATSSHSVAKEPKAPAAPANTLAIVPDSRRPSSCIDIYVSAMDELHCDIDPLDNSVNILGLGEPSFSTPVPSTAPSSSAYATLAPTDRPPSRSIDFEDITSMDTRSFSSDYTHLPECQNPWDSEPPMYHTIERSKSSRYLATTPFLLEEAPIVKSHSFMFSPSRSYYANFGVPVKTAEYTSITDCIDTRCVNAPQAIADRAAFPGGLGDKVEDLTCCHPEREAELSHPSSDSEENEAKGRRATIAISSQEGDNSERTLSNNITVPKIERANSYSAEEPSAPYAHTRKSFSISDKLDRQRNTASLRNPFQRSKSSKPEGRGDSLSMRRLSRTSAFQSFESKHT

SEQ ID NO: 409 - DNA, 5986 bp, Homosapiens
agctgcagcaaaatgaaagcaacaggagctgctccggggactgcttttgccagtacccagaatcagtgctcaggctcagaaatcctggatagaaagagcattttataaaagagaatgtgtccacatcatacccagcaccaaagacccccataggtgttgctgtgggcgtctgataggccagcatgttggcctcacccccagtatctccgtgcttcagaatgagaaaaatgaaagtcgcctctcccgaaatgacatccagtctgaaaagtggtccatcagcaaacacactcaactcagccctacggatgcttttgggaccattgagttccaaggaggtggccattccaacaaagccatgtatgtgcgagtatcttttgatacaaaacctgatctcctcttacacctgatgaccaaggaatggcagttggagcttcccaagcttctcatctctgtccatgggggcctgcagaactttgaactccagccaaaactcaagcaagtctttgggaaagggctcatcaaagcagcaatgacaactggagcgtggatattcactggaggggttaacacaggtgttattcgtcatgttggcgatgccttgaaggatcatgcctctaagtctcgaggaaagatatgcaccataggtattgccccctggggaattgtggaaaaccaggaggacctcattggaagagatgttgtccggccataccagaccatgtccaatcccatgagcaagctcactgttctcaacagcatgcattcccacttcattctggctgacaacgggaccactggaaaatatggagcagaggtgaaacttcgaagacaactggaaaagcatatttcactccagaagataaacacaagatgcctgccgtttttctctcttgactcccgcttgttttattcattttggggtagttgccagttagactcagttggaatcggtcaaggtgttcctgtggtggcactcatagtggaaggaggacccaatgtgatctcgattgttttggagtaccttcgagacacccctcccgtgccagtggttgtctgtgatgggagtggacgggcatcggacatcctggcctttgggcataaatactcagaagaaggcggactgataaatgaatctttgagggaccagctgttggtgactatacagaagactttcacatacactcgaacccaagctcagcatctgttcatcatcctcatggagtgcatgaagaagaaggaattgattacggtatttcggatgggatcagaaggacaccaggacattgatttggctatcctgacagctttactcaaaggagccaatgcctcggccccagaccaactgagcttagctttagcctggaacagagtcgacatcgctcgcagccagatctttatttacgggcaacagtggccggtgggatctctggagcaagccatgttggatgccttagttctggacagagtggattttgtgaaattactcatagagaatggagtaagcatgcaccgttttctcaccatctccagactagaggaattgtacaatacgagacatgggccctcaaatacattgtaccacttggtcagggatgtcaaaaaggggaacctgcccccagactacagaatcagcctgattgacatcggcctggtgatcgagtacctgatgggcggggcttatcgctgcaactacacgcgcaagcgcttccggaccctctaccacaacctcttcggccccaagagggatgatattcccttgaggcgaggaagaaagacaaccaagaaacgtgaagaagaggtggacattgacttggatgatcctgagatcaaccacttccccttccctttccatgagctcatggtgtgggctgttctcatgaagcggcagaagatggccctgttcttctggcagcacggtgaggaggccatggccaaggccctggtggcctgcaagctctgcaaagccatggctcatgaggcctctgagaacgacatggttgacgacatttcccaggagctgaatcacaattccagagactttggccagctggctgtggagctcctggaccagtcctacaagcaggacgaacagctggccatgaaactgctgacgtatgagctgaagaactggagcaacgccacgtgcctgcagcttgccgtggctgccaaacaccgcgacttcatcgcgcacacgtgcagccagatgctgctcaccgacatgtggatgggccggctccgcatgcgcaagaactcaggcctcaaggtaattctgggaattctacttcctccttcaattctcagcttggagttcaagaacaaagacgacatgccctatatgtctcaggcccaggaaatccacctccaagagaaggaggcagaagaaccagagaagcccacaaaggaaaaagaggaagaggacatggagctcacagcaatgttgggacgaaacaacggggagtcctccaggaagaaggatgaagaggaagttcagagcaagcaccggttaatccccctcggcagaaaaatctatgaattctacaatgcacccatcgtgaagttctggttctacacactggcgtatatcggatacctgatgctcttcaactatatcgtgttagtgaagatggaacgctggccgtccacccaggaatggatcgtaatctcctatattttcaccctgggaatagaaaagatgagagagattctgatgtcagagccagggaagttgctacagaaagtgaaggtatggctgcaggagtactggaatgtcacggacctcatcgccatccttctgttttctgtcggaatgatccttcgtctccaagaccagcccttcaggagtgacgggagggtcatctactgcgtgaacatcatttactggtatatccgtctcctagacatcttcggcgtgaacaagtatttgggcccgtatgtaatgatgattggaaaaatgatgatagacatgatgtactttgtcatcattatgctggtggttctgatgagctttggggtcgccaggcaagccatcctttttcccaatgaggagccatcatggaaactggccaagaacatcttctacatgccctattggatgatttatggggaagtgtttgcggaccagatagaccctccctgtggacagaatgagacccgagaggatggtaaaataatccagctgcctccctgcaagacaggagcttggatcgtgccggccatcatggcctgctacctcttagtggcaaacatcttgctggtcaacctcctcattgctgtctttaacaatacattttttgaagtaaaatcgatatccaaccaagtctggaagtttcagaggtatcagctcatcatgactttccatgaaaggccagttctgcccccaccactgatcatcttcagccacatgaccatgatattccagcacctgtgctgccgatggaggaaacacgagagcgacccggatgaaagggactacggcctgaaactcttcataaccgatgatgagctcaagaaagtacatgactttgaagagcaatgcatagaagaatacttcagagaaaaggatgatcggttcaactcatctaatgatgagaggatacgggtgacttcagaaagggtggagaacatgtctatgcggctggaggaagtcaacgagagagagcactccatgaaggcttcactccagaccgtggacatccggctggcgcagctggaagaccttatcgggcgcatggccacggccctggagcgcctgacaggtctggagcgggccgagtccaacaaaatccgctcgaggacctcgtcagactgcacggacgccgcctacattgtccgtcagagcagcttcaacagccaggaagggaacaccttcaagctccaagagagtatagaccctgcaggtgaggagaccatgtccccaacttctccaaccttaatgccccgtatgcgaagccattctttctattcggtcaatatgaaagacaaaggtggtatagaaaagttggaaagtatttttaaagaaaggtccctgagcctacaccgggctactagttcccactctgtagcaaaagaacccaaagctcctgcagcccctgccaacaccttggccattgttcctgattccagaagaccatcatcgtgtatagacatctatgtctctgctatggatgagctccactgtgatatagaccctctggacaattccgtgaacatccttgggctaggcgagccaagcttttcaactccagtaccttccacagccccttcaagtagtgcctatgcaacacttgcacccacagacagacctccaagccggagcattgattttgaggacatcacctccatggacactagatctttttcttcagactacacccacctcccagaatgccaaaacccctgggactcagagcctccgatgtaccacaccattgagcgttccaaaagtagccgctacctagccaccacaccctttcttctagaagaggctcccattgtgaaatctcatagctttatgttttccccctcaaggagctattatgccaactttggggtgcctgtaaaaacagcagaatacacaagtattacagactgtattgacacaaggtgtgtcaatgcccctcaagcaattgcggacagagctgccttccctggaggtcttggagacaaagtggaggacttaacttgctgccatccagagcgagaagcagaactgagtcaccccagctctgacagtgaggagaatgaggccaaaggccgcagagccaccattgcaatatcctcccaggagggtgataactcagagagaaccctgtccaacaacatcactgttcccaagatagagcgcgccaacagctactcggcagaggagccaagtgcgccatatgcacacaccaggaagagcttctccatcagtgacaaactcgacaggcagcggaacacagcaagcctgcgaaatcccttccagagaagcaagtcctccaagccggagggccgaggggacagcctgtccatgaggagactgtccagaacatcggctttccaaagctttgaaagcaagcacacctaaaccttcttaatatccgccacagaaggctcaagaatccagccctaaaattctctccaactccagtttttcccctttccttgaatcatacctgctttattcttagctgagcaaaacaagcaatgctttgggaggtgttaactcaaaggtgacttctgggccacagatcaagaaagcatttgatctgacccagtgccagacacaggggatttaaggcatgttcacacttgctgggcagggagggggaagagagggagaaggaagggttagagatgaatgtgtatccgcagtcacagcagaaagccatgagagcaggggaaacaaggggcttcgagcacgctccatgccaggaggcatctgttgatttctgaccattatcaagagttgtaggatgcagggctaaattgcaaaataaaataaaatagccagcgtacacaatgagatattctaaacttccattctgttttcttttcacattggctccatcactggtgactgatgaagagcatcctctttattcagtataagccggcagcaagcagttctacctaacgtcccacatccttctcatgccaacacttctgtaattgatcattataaagaaaaaacaaggtaacagtcatagttcacctgtctcttatctattcacttctggtgccacaactgtttatccttttttgaagaaaataagggaacagaaatgcctttttgtattgcaatcgaaatgaaagaagagttgatgttaaaaaaacaaaagtcaagtgatttattatatacagtgggcgttcaagtctagtcgagcaagctcaggagaatgtaattaaataattttatattttttaatttattttgtatctcacctgtcatggatgaattcattcactgaatatgtaatattgaacttaaaaaaaaaaaaaaaaaaaa

SEQ ID NO: 410 - protein, 1569 aa, Homosapiens
MYVRVSFDTKPDLLLHLMTKEWQLELPKLLISVHGGLQNFELQPKLKQVFGKGLIKAAMTTGAWIFTGGVNTGVIRHVGDALKDHASKSRGKICTIGIAPWGIVENQEDLIGRDVVRPYQTMSNPMSKLTVLNSMHSHFILADNGTTGKYGAEVKLRRQLEKHISLQKINTRCLPFFSLDSRLFYSFWGSCQLDSVGIGQGVPVVALIVEGGPNVISIVLEYLRDTPPVPVVVCDGSGRASDILAFGHKYSEEGGLINESLRDQLLVTIQKTFTYTRTQAQHLFIILMECMKKKELITVFRMGSEGHQDIDLAILTALLKGANASAPDQLSLALAWNRVDIARSQIFIYGQQWPVGSLEQAMLDALVLDRVDFVKLLIENGVSMHRFLTISRLEELYNTRHGPSNTLYHLVRDVKKGNLPPDYRISLIDIGLVIEYLMGGAYRCNYTRKRFRTLYHNLFGPKRDDIPLRRGRKTTKKREEEVDIDLDDPEINHFPFPFHELMVWAVLMKRQKMALFFWQHGEEAMAKALVACKLCKAMAHEASENDMVDDISQELNHNSRDFGQLAVELLDQSYKQDEQLAMKLLTYELKNWSNATCLQLAVAAKHRDFIAHTCSQMLLTDMWMGRLRMRKNSGLKVILGILLPPSILSLEFKNKDDMPYMSQAQEIHLQEKEAEEPEKPTKEKEEEDMELTAMLGRNNGESSRKKDEEEVQSKHRLIPLGRKIYEFYNAPIVKFWFYTLAYIGYLMLFNYIVLVKMERWPSTQEWIVISYIFTLGIEKMREILMSEPGKLLQKVKVWLQEYWNVTDLIAILLFSVGMILRLQDQPFRSDGRVIYCVNIIYWYIRLLDIFGVNKYLGPYVMMIGKMMIDMMYFVIIMLVVLMSFGVARQAILFPNEEPSWKLAKNIFYMPYWMIYGEVFADQIDPPCGQNETREDGKIIQLPPCKTGAWIVPAIMACYLLVANILLVNLLIAVFNNTFFEVKSISNQVWKFQRYQLIMTFHERPVLPPPLIIFSHMTMIFQHLCCRWRKHESDPDERDYGLKLFITDDELKKVHDFEEQCIEEYFREKDDRFNSSNDERIRVTSERVENMSMRLEEVNEREHSMKASLQTVDIRLAQLEDLIGRMATALERLTGLERAESNKIRSRTSSDCTDAAYIVRQSSFNSQEGNTFKLQESIDPAGEETMSPTSPTLMPRMRSHSFYSVNMKDKGGIEKLESIFKERSLSLHRATSSHSVAKEPKAPAAPANTLAIVPDSRRPSSCIDIYVSAMDELHCDIDPLDNSVNILGLGEPSFSTPVPSTAPSSSAYATLAPTDRPPSRSIDFEDITSMDTRSFSSDYTHLPECQNPWDSEPPMYHTIERSKSSRYLATTPFLLEEAPIVKSHSFMFSPSRSYYANFGVPVKTAEYTSITDCIDTRCVNAPQAIADRAAFPGGLGDKVEDLTCCHPEREAELSHPSSDSEENEAKGRRATIAISSQEGDNSERTLSNNITVPKIERANSYSAEEPSAPYAHTRKSFSISDKLDRQRNTASLRNPFQRSKSSKPEGRGDSLSMRRLSRTSAFQSFESKHT

SEQ ID NO: 411 - DNA, 1303 bp, Homosapiens
agctgcagcaaaatgaaagcaacaggagctgctccggggactgcttttgccagtacccagaatcagtgctcaggctcagaaatcctggatagaaagagcattttataaaagagaatgtgtccacatcatacccagcaccaaagacccccataggtgttgctgtgggcgtctgataggccagcatgttggcctcacccccagtatctccgtgcttcagaatgagaaaaatgaaagtcgcctctcccgaaatgacatccagtctgaaaagtggtccatcagcaaacacactcaactcagccctacggatgcttttgggaccattgagttccaaggaggtggccattccaacaaagccatgtatgtgcgagtatcttttgatacaaaacctgatctcctcttacacctgatgaccaaggaatggcagttggagcttcccaagcttctcatctctgtccatgggggcctgcagaactttgaactccagccaaaactcaagcaagtctttgggaaagggctcatcaaagcagcaatgacaactggagcgtggatattcactggaggggttaacacaggtgttattcgtcatgttggcgatgccttgaaggatcatgcctctaagtctcgaggaaagatatgcaccataggtattgccccctggggaattgtggaaaaccaggaggacctcattggaagagatgttgtccggccataccagaccatgtccaatcccatgagcaagctcactgttctcaacagcatgcattcccacttcattctggctgacaacgggaccactggaaaatatggagcagaggtgaaacttcgaagacaactggaaaagcatatttcactccagaagataaacacaagaatcggtcaaggtgttcctgtggtggcactcatagtggaaggaggacccaatgtgatctcgattgttttggagtaccttcgagacacccctcccgtgccagtggttgtctgtgatgggagtggacgggcatcggacatcctggcctttgggcataaatactcagaagaaggcgggtaggtaactttccaggccccatggaagaaccctaaagcctgtttggaaacgagggtatgagtggattatgttttcagtagctcaaccaagacctcaaatcaaaacaagctatgaacaaattgtctaaaaaatgtctgtcatgggagggctgtggtgaagaacagagaaacatattctaaatgtcctgtgaagtgggaaattctatgaaagctacacggataataaaaagggtgaggaaaagaaaaaaaaaaaaaaaaa

SEQ ID NO: 412 - protein, 230 aa, Homosapiens
MYVRVSFDTKPDLLLHLMTKEWQLELPKLLISVHGGLQNFELQPKLKQVFGKGLIKAAMTTGAWIFTGGVNTGVIRHVGDALKDHASKSRGKICTIGIAPWGIVENQEDLIGRDVVRPYQTMSNPMSKLTVLNSMHSHFILADNGTTGKYGAEVKLRRQLEKHISLQKINTRIGQGVPVVALIVEGGPNVISIVLEYLRDTPPVPVVVCDGSGRASDILAFGHKYSEEGG

SEQ ID NO: 413 - DNA, 2764 bp, Homosapiens
gctatcattttaggcttaactaccaccatctcctcgcgggcagtgggggcaaccgcgaagacagaatttcacaaactttcagctccagcagtttcaaggaaatgtcaaatgacaagatggaagaccgagtgtcaagagctaagacaacaaaaaggcccccaaaatttgttttcaagaaaaccaatgaaaaaagcaagcaatcagaacgtgaagtccaggatcatggatgtgcttatcttcacagtcactgccgggtcctgaagttctcctctggcccagtgccagctgcgaagccctctgccaaagggccagaggaggccggtgatatagagctctgattacccacccgtcagggcaccgctgaaggtcactgaatacttactgtgcacccgaaaaataaatcctgcgagttcacgcccgcgtagttcgccccctgattttgagcgactcctttcgcatgggatctacaaaaccgaactgccttaaagacctctttcacacggacgtgaagtcacagaactgacaaaatcccatcctgtcaaagtgcacgggtctttgaaatctaacacaaaaagccatagaaagattctctaaacaccctgtactaagaggaacacggacagggcactgcgttctgaagtagaggccagggcactggcccttagacacgtctcgctgtcaccgggctaacaacattggcaagggcggcggcagcagcactgatatttgcagcccccaagggctctggcgaaaccccctctattactctgtaccctgcctgcttccaagatgaacctgttgctgggaaagaacaggctaaattagaaaagggagtattttgtcaaagttgaaggtgagtgatagcctgcccgcctcaaataggatgggaaaaactaaggatattggggatgatgacactgtcgcctccgaattctggtccggggctttctcccagccctcaagtgtccccacgcggccgcggaccccgaacagggacagctggagacgggcttgggcagcgcgcggcctgcacccgcggccatccatcttgcagcccggcccggccaggctatcccgggcaagggctgggggaactcgctgcccccagcgccgccacggccgggcgacattctgcgccctgggaagggggataggggtgcggcgcggccccggtccccggcccgcccggatccccggcctcaccttgacgtggaagcggatgagcgccaggcggatgcagtgggccatgcagacgggcggcaggaaccagacctttggcggcggggtgcccttgttctggacatggctgacgatctgctgtgccgtctggcgctcgttgccctgccgcttgacccactcgtgcagccgggccttctcgagcgcgccgttgaagaagacgaagagctcgatgttgccgccgaagcaggccttggccagcgccgccagaaacctctgtagaggagcaggatgcaaccgacaggctgtggccggacagctgctgcccagcacatggagcctgcacgcgcacggtttggccaaagaagcccccatactcccggtgaaaaagatttccagaagctgttctgtcaataacaaagtctcagagaaaaccacaaaaccaccaacactaagatcattcttgagtccaatttgaaaaactagggtcaagttctgcagaggcattgaaaggacaagaaaccaccctgatacccatcgtgtgagggaaaatgctctattcaccattcctcagcttctgcttctggtttcagagttctctctatattggagggtgttttaaagctagagtggtctttatccacttttattaacacatctgaatgtgaaggtcaagagaggaaagtgatatgtcctaagtcagagtagagtcaacaagaaaataagacaaacagcgactgagcccctggtgtatactgggcattggccagctactggggatatggagatgaagaaaacataacccttcttcaaggagcccaacctaccaaggtagacagacatatagacaaatagatacttgcatagaaaaaaagaggaaaaggggatcagtgtgacctgtgtaactaagtaccctataaaccctcctgcaacagatcatattgccctttatagtggggatggtaatcccatctgaattccacaggtactttgcagtcataccacacccatgtgtctgtcggtcctgactgtaccatttataaacagcttcactttcagcagttctcagccctcttaagctagggtcattgtcagtagggatactgcttcataagcaccagcagaacaccaaaggagaccatatgggtgaaagcaaccagcactgccctggcgcttcataggttcttagagtttttatcttttactttcagtctaacacagcactgcctgctttttgtttttgttgcttggtttgtttttttcttaccgtgttcaccaaacttgtgtccaaatagctttgggctgatgcaaaaatatctatgtggaagagaagagttgttctcatggagggccttcagatgagtgctatagactctctaggcaactccaagaggcttctcaagcagggtgggcagtgagagctgctatggaatcaatggacaaactgacagggactgctttgaaagacagtactcagttgagtatatatattctctcttaagggctaaaagtttataatcatcccttaaacactctgtgatgggatcttcaggatcatcttttgaagtaaactatattttacaatgtg

SEQ ID NO: 414 - protein, 256 aa, Homosapiens
MGKTKDIGDDDTVASEFWSGAFSQPSSVPTRPRTPNRDSWRRAWAARGLHPRPSILQPGPARLSRARAGGTRCPQRRHGRATFCALGRGIGVRRGPGPRPARIPGLTLTWKRMSARRMQWAMQTGGRNQTFGGGVPLFWTWLTICCAVWRSLPCRLTHSCSRAFSSAPLKKTKSSMLPPKQALASAARNLCRGAGCNRQAVAGQLLPSTWSLHAHGLAKEAPILPVKKISRSCSVNNKVSEKTTKPPTLRSFLSPI

SEQ ID NO: 415 - DNA, 4957 bp, Homosapiens
ccgcgcccgcgcccccgccgccgccatgggcgtgcagggcttccaggactacatcgagaagcactgcccgagcgccgtggtgccggtggagctgcagaagctggcccggggcagcctggtgggcggcgggcggcagcggcccccgcagaccccgctgcgcctgctggtggacgccgacaactgcctgcaccgcctctacggcggcttctacaccgactgggtcagcggcggccagtggaaccacatgcttggctacctggcggcgctggccaaggcctgcttcggcggcaacatcgagctcttcgtcttcttcaacggcgcgctcgagaaggcccggctgcacgagtgggtcaagcggcagggcaacgagcgccagacggcacagcagatcgtcagccatgtccagaacaagggcaccccgccgccaaaggtctggttcctgccgcccgtctgcatggcccactgcatccgcctggcgctcatccgcttccacgtcaaggttgcacagagcattgaggatcaccatcaggaagtgattggtttctgcagagagaatggtttccatggcttggttgcgtatgactctgattatgcactgtgcaacatcccctactatttcagtgcccatgccctaaaactgagccggaacgggaaaagtctcaccacaagccaatatctgatgcatgaagttgccaagcaactggacctgaatccaaatcgttttcctatttttgctgctctcttaggaaatcacattctgcctgatgaagatctggcttcctttcactggagtttacttggtccagaacatccactagcctcactaaaggtccgggcccaccagctggtcttgccaccttgcgacgtagtgatcaaagccgttgctgactatgtacgcaacattcaggacacctctgacttggatgccatagctaaagatgttttccagcattcacagtctagaacagatgacaaagttattcgatttaagagagcaattggatattattcagcgactagtaagcctatgtcatttcatccaccacattacttagcagccagacccggtccgtttggaatgcctgggatggtgccgccgcatgttcctcctcagatgctcaacattccgcagacctctctgcaagcaaagcccgtggccccacaggtgcccagcccagggggcgccccgggccagggtccatacccgtacagcctctctgagccagcacctctcactttggacacgagcgggaagaatctgacggagcagaacagctacagcaacattcctcacgaagggaagcacacgccgctgtatgagcggtcctcgcccatcaacccggcccagagcggcagccccaaccacgtggattccgcctacttccctggctcttctacatcgtcatcttccgacaacgacgagggcagcggaggggcgacaaaccatatcagcgggaacaagattggctgggagaagacgggaagccactcagagcctcaggcacgaggagacccaggagaccaaacaaaggcagaaggctcgtccactgcctcttcaggaagccaactagccgaaggcaagggaagccagatgggcactgtccagccaatcccgtgcctcctgtcgatgcccaccaggaaccacatggacatcaccacacctcccctgccccccgtcgcacctgaggtgctgagagtggccgagcacaggcacaagaaggggctgatgtacccctacatcttccatgtcctgacgaagggtgaaatcaaaattgctgtttctattgaagatgaagccaacaaggacctgcctccggccgctctgctctataggccagttcgtcagtatgtttacggagtcctgtttagtttggcagaaagcagaaagaaaactgagagacttgcttttagaaagaacagacttccaccagaattttcaccagtgatcattaaagaatgggcagcttacaaaggaaagtctcctcaaaccccggaactggttgaagctcttgccttcagggagtggacctgccccaacctgaagaggctgtggttgggtaaggcggtagaggacaagaaccgcaggatgagggccttcctggcctgcatgaggtcggacaccccagccatgctcaaccctgccaacgtgcccactcacctcatggtgctctgctgcgtcttacggtacatggtgcagtggccgggagcacgcatccttcggcgtcaggagctagatgccttcctggctcaggcgctgtcccccaaactctacgagcctgatcagctccaggagctcaagattgagaacctagatccccgaggaattcagctatcagctctcttcatgagtggagtagacatggccttgtttgcaaatgatgcatgcggacagccaatcccctgggaacactgttgtccttggatgtattttgatgggaagctcttccaatccaaactcctcaaagccagccgggaaaagaccccactcattgacctctgtgatggtcaggctgatcaggctgccaaggtagagaagatgcgccagagcgtcctcgaggggctcagcttctccaggcagagccacacgctccctttcccgccgccacctgccctgcccttctaccctgcctctgcgtacccccggcactttgggcctgtcccaccctctcagggcaggggcagaggctttgcaggcgtctgtggctttggaggcccctatggggaaacggtagcaacaggcccttaccgtgccttccgtgtggcggcagcatcgggacactgcggagccttctcaggcagtgacagcagcaggactagcaagtcccagggcggagtccaacctataccttctcagggaggcaaactagaaatagctggcactgtggttggccattgggctgggagcaggcggggccgtgggggccgggggcctttccccctgcaggtggtttctgtcggaggaccagctagagggcgtccaagaggagttatttccaccccagtgattagaacatttggaagaggtggaaggtactatggcagaggttacaaaaaccaggcagcaattcagggcagacctccttatgctgcttcagcagaagaagtggccaaagaacttaagtcaaaatctggggaatcgaagtcctctgctatgtcttcagacgggtccctggctgaaaacggagtgatggccgaggagaagccggctccccagatgaacgggagcacgggtgacgccagggcccccagccactctgaaagtgccttgaataatgactctaaaacgtgcaatacaaatcctcatttaaatgcactaagtacagacagcgcttgccgcagagaagctgctctggaggcagctgtcttaaataaagaagagtaaacttattttttatagagggtgaaggatgctggaagggtaaggatttaggaatatctggagagaaagagagcctgcagttatgtacattttgtcctttccgtaagagaaaaatgaggactttggaaattcagatccctctttgatatcagagatttaaacaacacatttttagttttaaccagttgtagtcaaaatgctacaataaaacaaaaaagagaaagaaaatgaagagcatttgactcccgcacttaaaatgaagtacacataaagtttaaactggttatgacaaaagcctttagttgtgtttcttgaactataaagaaaacaaattttggcagtctttaagtatatatagcttaaaatataatttttagcatttggcaccatatgtatgccattatatttgattttgcattactgtttcacaatgaagctttctttaaggctttgatttttatgattatgaaagaaataaggcacaaccacagtttttctttcttaaatttcatcactgttgatgtggttcttttgtgttaaaaaaaaaaagtgcaactatcaaaactaaaaaattatagagtaatattgccgttctgctgattttaaatatacaatacatcatacatactttacaagcaagttaaatggagataaagttgaaatcatagaagatgcaaatgacctttcaaaatcaacacaatgtgttctgaaactttcgtgactaataccatgcatctgtgatcaatgaactatgtggttttgaatcggatgtagaccattagtactactacttgagctaaacttctgcatggttcataatttttaaagtgtgtagttaatatgcatgttatcgtcctttcttccattcttaacagtatgtgcccatttgcaaaacaaaaatgctaataatcagtaatagtcctataaaagatgttaactctgtttagtcattgactgatcttgctctaaccttaaaattttgtgattattgacctctgttgcatttattctaaagccccccaaaaattatctagccgtttcgaatatcaacattaccctggtgtattcactgctgtatgcattattgttctttgttgctgttttatgccttcatattagcaaatatgaaattctgtgaaaaaaaaccctttgatcttaaaaaaaaaaaaaccaccccccccttctgtagcaggaaacaaattgcttgttcttgagaactttcccatcaagaatttagtagaagcaggtatacttctatcattttgatgtttttgttaatgtttccaaacaatgtactttgaaatcagaatcacttcttatcgttttcatatacttctgatgctcttcatcacattagtgatcagaaatgaggtgtaattccccaacccctgcccgcaagagctaagtaggatcttactgtaagttgaagggagttttgccctaactcatggattgtgcaagaatgaactgctgttgggtttgattgactgtcgatggattgtggtgtggtgtatctgaaggctattgaatgcaacttacaatgcttaataaaaatctttattcttttagtataaagta

SEQ ID NO: 416 - protein, 1118 aa, Homosapiens
MGVQGFQDYIEKHCPSAVVPVELQKLARGSLVGGGRQRPPQTPLRLLVDADNCLHRLYGGFYTDWVSGGQWNHMLGYLAALAKACFGGNIELFVFFNGALEKARLHEWVKRQGNERQTAQQIVSHVQNKGTPPPKVWFLPPVCMAHCIRLALIRFHVKVAQSIEDHHQEVIGFCRENGFHGLVAYDSDYALCNIPYYFSAHALKLSRNGKSLTTSQYLMHEVAKQLDLNPNRFPIFAALLGNHILPDEDLASFHWSLLGPEHPLASLKVRAHQLVLPPCDVVIKAVADYVRNIQDTSDLDAIAKDVFQHSQSRTDDKVIRFKRAIGYYSATSKPMSFHPPHYLAARPGPFGMPGMVPPHVPPQMLNIPQTSLQAKPVAPQVPSPGGAPGQGPYPYSLSEPAPLTLDTSGKNLTEQNSYSNIPHEGKHTPLYERSSPINPAQSGSPNHVDSAYFPGSSTSSSSDNDEGSGGATNHISGNKIGWEKTGSHSEPQARGDPGDQTKAEGSSTASSGSQLAEGKGSQMGTVQPIPCLLSMPTRNHMDITTPPLPPVAPEVLRVAEHRHKKGLMYPYIFHVLTKGEIKIAVSIEDEANKDLPPAALLYRPVRQYVYGVLFSLAESRKKTERLAFRKNRLPPEFSPVIIKEWAAYKGKSPQTPELVEALAFREWTCPNLKRLWLGKAVEDKNRRMRAFLACMRSDTPAMLNPANVPTHLMVLCCVLRYMVQWPGARILRRQELDAFLAQALSPKLYEPDQLQELKIENLDPRGIQLSALFMSGVDMALFANDACGQPIPWEHCCPWMYFDGKLFQSKLLKASREKTPLIDLCDGQADQAAKVEKMRQSVLEGLSFSRQSHTLPFPPPPALPFYPASAYPRHFGPVPPSQGRGRGFAGVCGFGGPYGETVATGPYRAFRVAAASGHCGAFSGSDSSRTSKSQGGVQPIPSQGGKLEIAGTVVGHWAGSRRGRGGRGPFPLQVVSVGGPARGRPRGVISTPVIRTFGRGGRYYGRGYKNQAAIQGRPPYAASAEEVAKELKSKSGESKSSAMSSDGSLAENGVMAEEKPAPQMNGSTGDARAPSHSESALNNDSKTCNTNPHLNALSTDSACRREAALEAAVLNKEE

SEQ ID NO: 417 - DNA, 5279 bp, Homosapiens
gccgagcggcggcgcggcgcggcaacatggcgacggtgcccgtgtactgcgtctgccggctcccctacgacgttacccgcttcatgatcgagtgcgacgcctgcaaggactggttccacggcagctgtgttggggtggaagaggaggaggcgcccgacatcgacatataccactgcccaaactgtgagaaaacccatgggaagtccaccttaaagaagaagcggacctggcacaaacacggcccggggcaagcgcctgacgtcaagcccgtgcagaatggcagccagctcttcatcaaggagctgcggagccggacctttcccagtgctgaagacgtggtggcccgtgtgccaggaagtcagctcacgctgggctacatggaggagcacggcttcaccgagcccatcctcgtccctaagaaagacgggctgggtctggctgtcccggcccccacgttctatgtcagtgacgtcgagaactacgtggggccggaacggagtgtggatgtgacagatgtcaccaagcagaaggactgcaagatgaagctgaaggagtttgtggactattactacagcaccaaccgcaagcgggtcctcaacgtcaccaacctcgagttctctgacacccgaatgtccagcttcgtggagccacctgacattgtaaagaaactgtcatgggtagaaaactactggccagatgatgcattgctggccaagcccaaagtgaccaagtactgcctaatctgcgtgaaggacagttacaccgacttccacatcgactctgggggcgcctctgcctggtaccacgtgctcaagggggagaagaccttctatctcatcaggccggcctcggccaacatctccctgtatgagcgctggcggtctgcctctaaccacagcgagatgttctttgctgaccaggtcgacaaatgctacaagtgcatcgtcaagcagggccagaccctcttcatcccctcaggctggatctacgccacactcacccctgtggactgcctggccttcgcgggacatttcctccacagcctgagtgtggagatgcagatgagagcatatgaagtggaaaggaggttgaaactgggcagcctgactcagtttcccaactttgaaactgcgtgctggtacatggggaagcacctgctggaggcattcaaaggctctcacaaatctgggaagcagctgccccctcatctagtccaaggagctaaaattctcaatggtgctttccgatcgtggacgaagaagcaggctttggcagagcatgaggacgagctcccggagcacttcaaaccttcacagctaatcaaagacctggccaaagagatccggctcagtgagaatgcctccaaagccgtccgaccggaagtgaatactgtcgcctcgtcagatgaggtgtgtgacggggaccgggagaaggaggagcccccgtctcccattgaggccaccccgcctcaatccctcctggagaaagtgtccaaaaaaaagactcccaaaactgtgaagatgcccaagccatccaaaatccccaagcccccgaagccccctaagcccccaaggccccccaaaacgctgaagctcaaagatggaggcaagaagaaagggaagaagtcccgggagtcagcctcacccaccatccccaacctggacctgctcgaagcccacaccaaggaggcactgaccaagatggagccgcccaagaagggcaaggccacaaagagtgtcctgagtgtgcccaacaaagatgtggttcacatgcagaatgatgtggagaggctggaaattcgagagcaaaccaagagcaagtcagaggccaagtggaagtacaagaacagcaaacctgactccttactgaagatggaagaggagcagaagctagagaagtcgcctctagctggaaacaaagacaataagttctctttttctttctccaacaagaaactcctcggctccaaggctctcaggcccccgacgagccctggtgtgttcggggccttgcagaacttcaaggaggacaagcccaagcccgtgcgggatgagtatgagtacgtgtcggatgacggtgagctcaagatcgacgagtttcccatcaggaggaagaaaaacgccccgaaaagggacttgtccttcttgttggataagaaggctgtgctgcccacgcctgtcacgaagccaaagctggactcggcagcgtacaagagtgatgactcctcggacgagggttcgctgcacatcgacacagacaccaagcccggccgcaatgccagagtcaagaaggagagtgggagctcggcagctggcatcttggacctgctgcaggccagtgaggaggttggcgcgctggagtacaaccccagcagccagcccccggcctcccccagcacacaggaagccattcagggaatgctgtccatggccaacctgcaggcctccgactcctgcctgcagaccacgtggggagctggccaggccaaggggagctcgctggctgcccatggtgcccggaagaatgggggtggcagtggcaagagtgcaggcaaacgactgctgaagagggctgccaagaacagtgtcgacctggacgactacgaggaagagcaggaccacctggatgcctgcttcaaggactcagactacgtttacccctcactggagtcagatgaagacaaccccatctttaagtcccggtcgaagaaaaggaaaggctcagacgacgctccctacagcccaacagcaagggtcggcccatcggtgccaagacaggacaggcctgtgcgtgagggtacacgggtggcttccatcgagaccgggctggcggctgctgcagctaagttgtcccagcaggaggagcagaaaagcaagaaaaaaaagagtgccaagaggaagctgactcctaacaccacctccccttccacctccacctccatctctgccggcaccacctccacctccaccacgccagcctccaccacgccagcctctaccaccccggcctccaccaccccggcctccaccagcacggccagcagccaggcctcgcaggagggcagctcgccagagcccccgcctgagtcgcatagcagcagcctggcggaccatgagtacacagccgctggcaccttcaccggggcccaggctggccgcacctcccagcccatggcccctggggtctttctcacacagaggcggccctccgcatcgtctccaaacaacaacaccgctgccaaaggaaaacgtacgaaaaagggcatggcgaccgccaagcagaggcttgggaaaattttgaaaattcatcggaacgggaaactactcctttaagatttggaaagccaggatccttctgctccgctcaggacccccggagccccgcgaaaacatctgcctcccaggagggtgccgagctgcctcaccagggagggccttgcctcttcccggctgccatctccccaacaagcgtctgtcccttcagccggcagagcgagcccagcgtggcccctcaatttgaaaatggacgtcttttctcaagttgctaagagtgatctgtcccagaaaagcggccctgcaagtttgaggaccgcttattccactttaaggacagccttcaggccccctgagcgtgggtgtgattgcagggcctctgcagctctgctgagagcatgagtccttcaaggaagacagagtgagccaatgctcaccagccccagagtcagagctggccacaggctggcagcctccaggggcttaaaaaaaaaggcaaagaacacagaaagaggaggagcaagtgggatgtttatgtccccccttctcttcctgagtgattctcagccaagtccagacagtgctcggcgggtgaggaagggtctgccccgagctttctggttggcaggtggcagcaggatggtgggtgttcagcctgaatgcccaggagcatttctggggggcagctaagactggcagctgggttggtgtgttagcgggcaggggagccattgtggggtccccaggaaagggcaagggctcagccacatcttggggtctgggaggcccaggctaagccatgtggcagggaccgtcttgccctgctggccacactctggagaagcacttctcagccaaggcacccctgccctgggactggcagggcaggggcaggggcagggacagtggccaggcggcccgaggacttacggtcggcacttctctgttctcccgtgtcagcgtgtggtgtcgcctgcatgggtcgtacctggatggtgtgtccaccatcgacacggaggggctggatttgtttctcaggcaatcctgtattttaattttagatgtatttcctgaagcatatttttcatagaatgtagcgtgtaaatagctttttaaataacttcttttttataagagtaaaagtatctttaggaatttctttctatagagttcttcattaacatttatacgagttttttgctgagtcagatggacagttgggttctgatgctttttccttctcctttccttttattattattatttttttcttttaagaactaaggtattgcctgaaaaacaagtgatgtctgtgcagccttacactctgtctttacagaagcaaatagtacacaaaagatctatttcagacacattttgaagatgaatcttcaactttaataccagctctttgttttccttgtatgatgaggggattgggggatacagttattttactagcaccttgtgaagtgtttccgtgttttgtgatgctgtaatttattaatgtttgtagctttttatatttgtacatttcttatgagctttgtttatatacccattacctggatgtttttgtccactgggagaggcagcttggtggaggccttatccactcccacttgtcctgtttggagggacgcagtccctagggcccgagactgggtgggagagggggagtctcacggggccccaggcttattcagaactggtgtttttaaagtttcctttaccctgcccttgttgaacatttatataatctaacctggacatcaagctgttctctctctctcttttttttaattttattattattattttggcaacatgtacatttctaacaaagtttatcgtggctattaaagtgttttatttcccaattcatattactcttgtatcgagtccatgaggtctaaggcaacttagatcaaagttttaaaaaagtaaaaatatttcaggttttgtacaaaaaaaaaaaaaaaaaaaaaaaaaaaaaaaaaaaaaaaa

SEQ ID NO: 418 - protein, 1101 aa, Homosapiens
MATVPVYCVCRLPYDVTRFMIECDACKDWFHGSCVGVEEEEAPDIDIYHCPNCEKTHGKSTLKKKRTWHKHGPGQAPDVKPVQNGSQLFIKELRSRTFPSAEDVVARVPGSQLTLGYMEEHGFTEPILVPKKDGLGLAVPAPTFYVSDVENYVGPERSVDVTDVTKQKDCKMKLKEFVDYYYSTNRKRVLNVTNLEFSDTRMSSFVEPPDIVKKLSWVENYWPDDALLAKPKVTKYCLICVKDSYTDFHIDSGGASAWYHVLKGEKTFYLIRPASANISLYERWRSASNHSEMFFADQVDKCYKCIVKQGQTLFIPSGWIYATLTPVDCLAFAGHFLHSLSVEMQMRAYEVERRLKLGSLTQFPNFETACWYMGKHLLEAFKGSHKSGKQLPPHLVQGAKILNGAFRSWTKKQALAEHEDELPEHFKPSQLIKDLAKEIRLSENASKAVRPEVNTVASSDEVCDGDREKEEPPSPIEATPPQSLLEKVSKKKTPKTVKMPKPSKIPKPPKPPKPPRPPKTLKLKDGGKKKGKKSRESASPTIPNLDLLEAHTKEALTKMEPPKKGKATKSVLSVPNKDVVHMQNDVERLEIREQTKSKSEAKWKYKNSKPDSLLKMEEEQKLEKSPLAGNKDNKFSFSFSNKKLLGSKALRPPTSPGVFGALQNFKEDKPKPVRDEYEYVSDDGELKIDEFPIRRKKNAPKRDLSFLLDKKAVLPTPVTKPKLDSAAYKSDDSSDEGSLHIDTDTKPGRNARVKKESGSSAAGILDLLQASEEVGALEYNPSSQPPASPSTQEAIQGMLSMANLQASDSCLQTTWGAGQAKGSSLAAHGARKNGGGSGKSAGKRLLKRAAKNSVDLDDYEEEQDHLDACFKDSDYVYPSLESDEDNPIFKSRSKKRKGSDDAPYSPTARVGPSVPRQDRPVREGTRVASIETGLAAAAAKLSQQEEQKSKKKKSAKRKLTPNTTSPSTSTSISAGTTSTSTTPASTTPASTTPASTTPASTSTASSQASQEGSSPEPPPESHSSSLADHEYTAAGTFTGAQAGRTSQPMAPGVFLTQRRPSASSPNNNTAAKGKRTKKGMATAKQRLGKILKIHRNGKLLL

SEQ ID NO: 419 - DNA, 5238 bp, Homosapiens
cgagcggcggcgcggcgcggcaacatggcgacggtgcccgtgtactgcgtctgccggctcccctacgacgttacccgcccccgcgcggcccggcccccggcccggcccggaccgacccgggcagcgcagcggcggggccgagcggcggcgcccgacatcgacatataccactgcccaaactgtgagaaaacccatgggaagtccacagtaaagaagaagcggacctggcacaaacacggcccggggcaagcgcctgacgtcaagcccgtgcagaatggcagccagctcttcatcaaggagctgcggagccggacctttcccagtgctgaagacgtggtggcccgtgtgccaggaagtcagctcacgctgggctacatggaggagcacggcttcaccgagcccatcctcgtccctaagaaagacgggctgggtctggctgtcccggcccccacgttctatgtcagtgacgtcgagaactacgtggggccggaacggagtgtggatgtgacagatgtcaccaagcagaaggactgcaagatgaagctgaaggagtttgtggactattactacagcaccaaccgcaagcgggtcctcaacgtcaccaacctcgagttctctgacacccgaatgtccagcttcgtggagccacctgacattgtaaagaaactgtcatgggtagaaaactactggccagatgatgcattgctggccaagcccaaagtgaccaagtactgcctaatctgcgtgaaggacagttacaccgacttccacatcgactctgggggcgcctctgcctggtaccacgtgctcaagggggagaagaccttctatctcatcaggccggcctcggccaacatctccctgtatgagcgctggcggtctgcctctaaccacagcgagatgttctttgctgaccaggtcgacaaatgctacaagtgcatcgtcaagcagggccagaccctcttcatcccctcaggctggatctacgccacactcacccctgtggactgcctggccttcgcgggacatttcctccacagcctgagtgtggagatgcagatgagagcatatgaagtggaaaggaggttgaaactgggcagcctgactcagtttcccaactttgaaactgcgtgctggtacatggggaagcacctgctggaggcattcaaaggctctcacaaatctgggaagcagctgccccctcatctagtccaaggagctaaaattctcaatggtgctttccgatcgtggacgaagaagcaggctttggcagagcatgaggacgagctcccggagcacttcaaaccttcacagctaatcaaagacctggccaaagagatccggctcagtgagaatgcctccaaagccgtccgaccggaagtgaatactgtcgcctcgtcagatgaggtgtgtgacggggaccgggagaaggaggagcccccgtctcccattgaggccaccccgcctcaatccctcctggagaaagtgtccaaaaaaaagactcccaaaactgtgaagatgcccaagccatccaaaatccccaagcccccgaagccccctaagcccccaaggccccccaaaacgctgaagctcaaagatggaggcaagaagaaagggaagaagtcccgggagtcagcctcacccaccatccccaacctggacctgctcgaagcccacaccaaggaggcactgaccaagatggagccgcccaagaagggcaaggccacaaagagtgtcctgagtgtgcccaacaaagatgtggttcacatgcagaatgatgtggagaggctggaaattcgagagcaaaccaagagcaagtcagaggccaagtggaagtacaagaacagcaaacctgactccttactgaagatggaagaggagcagaagctagagaagtcgcctctagctggaaacaaagacaataagttctctttttctttctccaacaagaaactcctcggctccaaggctctcaggcccccgacgagccctggtgtgttcggggccttgcagaacttcaaggaggacaagcccaagcccgtgcgggatgagtatgagtacgtgtcggatgacggtgagctcaagatcgacgagtttcccatcaggaggaagaaaaacgccccgaaaagggacttgtccttcttgttggataagaaggctgtgctgcccacgcctgtcacgaagccaaagctggactcggcagcgtacaagagtgatgactcctcggacgagggttcgctgcacatcgacacagacaccaagcccggccgcaatgccagagtcaagaaggagagtgggagctcggcagctggcatcttggacctgctgcaggccagtgaggaggttggcgcgctggagtacaaccccagcagccagcccccggcctcccccagcacacaggaagccattcagggaatgctgtccatggccaacctgcaggcctccgactcctgcctgcagaccacgtggggagctggccaggccaaggggagctcgctggctgcccatggtgcccggaagaatgggggtggcagtggcaagagtgcaggcaaacgactgctgaagagggctgccaagaacagtgtcgacctggacgactacgaggaagagcaggaccacctggatgcctgcttcaaggactcagactacgtttacccctcactggagtcagatgaagacaaccccatctttaagtcccggtcgaagaaaaggaaaggctcagacgacgctccctacagcccaacagcaagggtcggcccatcggtgccaagacaggacaggcctgtgcgtgagggtacacgggtggcttccatcgagaccgggctggcggctgctgcagctaagttgtcccagcaggaggagcagaaaagcaagaaaaaaaagagtgccaagaggaagctgactcctaacaccacctccccttccacctccacctccatctctgccggcaccacctccacctccaccacgccagcctctaccaccccagcctccaccaccccggcctccaccaccccggcctccaccagcacggccagcagccaggcctcgcaggagggcagctcgccagagcccccgcctgagtcgcatagcagcagcctggcggaccatgagtacacagccgctggcaccttcaccggggcccaggctggccgcacctcccagcccatggcccctggggtctttctcacacagaggcggccctccgcatcgtctccaaacaacaacaccgctgccaaaggaaaacgtacgaaaaagggcatggcgaccgccaagcagaggcttgggaaaattttgaaaattcatcggaacgggaaactactcctttaagatttggaaagccaggatccttctgctccgctcaggacccccggagccccgcgaaaacatctgcctcccaggagggtgccgagctgcctcaccagggagggccttgcctcttcccggctgccatctccccaacaagcgtctgtcccttcagccggcagagcgagcccagcgtggcccctcaatttgaaaatggacgtcttttctcaagttgctaagagtgatctgtcccagaaaagcggccctgcaagtttgaggaccgcttattccactttaaggacagccttcaggccccctgagcgtgggtgtgattgcagggcctctgcagctctgctgagagcatgagtccttcaaggaagacagagtgagccaatgctcaccagccccagagtcagagctggccacaggctggcagcctccaggggcttaaaaaaaaaggcaaagaacacagaaagaggaggagcaagtgggatgtttatgtccccccttctcttcctgagtgattctcagccaagtccagacagtgctcggcgggtgaggaagggtctgccccgagctttctggttggcaggtggcagcaggatggtgggtgttcagcctgaatgcccaggagcatttctggggggcagctaagactggcagctgggttggtgtgttagcgggcaggggagccattgtggggtccccaggaaagggcaagggctcagccacatcttggggtctgggaggcccaggctaagccatgtggcagggaccgtcttgccctgctggccacactctggagaagcacttctcagccaaggcacccctgccctgggactggcagggcaggggcaggggcagggacagtggccaggcggcccgaggacttacggtcggcacttctctgttctcccgtgtcagcgtgtggtgtcgcctgcatgggtcgtacctggatggtgtgtccaccatcgacacggaggggctggatttgtttctcaggcaatcctgtattttaattttagatgtatttcctgaagcatatttttcatagaatgtagcgtgtaaatagctttttaaataacttcttttttataagagtaaaagtatctttaggaatttctttctatagagttcttcattaacatttatacgagttttttgctgagtcagatggacagttgggttctgatgctttttccttctcctttccttttattattattatttttttcttttaagaactaaggtattgcctgaaaaacaagtgatgtctgtgcagccttacactctgtctttacagaagcaaatagtacacaaaagatctatttcagacacattttgaagatgaatcttcaactttaataccagctctttgttttccttgtatgatgaggggattgggggatacagttattttactagcaccttgtgaagtgtttccgtgttttgtgatgctgtaatttattaatgtttgtagctttttatatttgtacatttcttatgagctttgtttatatacccattacctggatgtttttgtccactgggagaggcagcttggtggaggccttatccactcccacttgtcctgtttggagggacgcagtccctagggcccgagactgggtgggagagggggagtctcacggggccccaggcttattcagaactggtgtttttaaagtttcctttaccctgcccttgttgaacatttatataatctaacctggacatcaagctgttctctctctctcttttttttaattttattattattattttggcaacatgtacatttctaacaaagtttatcgtggctattaaagtgttttatttcccaattcatattactcttgtatcgagtccatgaggtctaaggcaacttagatcaaagttttaaaaaagtaaaaatatttcaggttttgtaca

SEQ ID NO: 420 - protein, 1101 aa, Homosapiens
MATVPVYCVCRLPYDVTRPRAARPPARPGPTRAAQRRGRAAAPDIDIYHCPNCEKTHGKSTVKKKRTWHKHGPGQAPDVKPVQNGSQLFIKELRSRTFPSAEDVVARVPGSQLTLGYMEEHGFTEPILVPKKDGLGLAVPAPTFYVSDVENYVGPERSVDVTDVTKQKDCKMKLKEFVDYYYSTNRKRVLNVTNLEFSDTRMSSFVEPPDIVKKLSWVENYWPDDALLAKPKVTKYCLICVKDSYTDFHIDSGGASAWYHVLKGEKTFYLIRPASANISLYERWRSASNHSEMFFADQVDKCYKCIVKQGQTLFIPSGWIYATLTPVDCLAFAGHFLHSLSVEMQMRAYEVERRLKLGSLTQFPNFETACWYMGKHLLEAFKGSHKSGKQLPPHLVQGAKILNGAFRSWTKKQALAEHEDELPEHFKPSQLIKDLAKEIRLSENASKAVRPEVNTVASSDEVCDGDREKEEPPSPIEATPPQSLLEKVSKKKTPKTVKMPKPSKIPKPPKPPKPPRPPKTLKLKDGGKKKGKKSRESASPTIPNLDLLEAHTKEALTKMEPPKKGKATKSVLSVPNKDVVHMQNDVERLEIREQTKSKSEAKWKYKNSKPDSLLKMEEEQKLEKSPLAGNKDNKFSFSFSNKKLLGSKALRPPTSPGVFGALQNFKEDKPKPVRDEYEYVSDDGELKIDEFPIRRKKNAPKRDLSFLLDKKAVLPTPVTKPKLDSAAYKSDDSSDEGSLHIDTDTKPGRNARVKKESGSSAAGILDLLQASEEVGALEYNPSSQPPASPSTQEAIQGMLSMANLQASDSCLQTTWGAGQAKGSSLAAHGARKNGGGSGKSAGKRLLKRAAKNSVDLDDYEEEQDHLDACFKDSDYVYPSLESDEDNPIFKSRSKKRKGSDDAPYSPTARVGPSVPRQDRPVREGTRVASIETGLAAAAAKLSQQEEQKSKKKKSAKRKLTPNTTSPSTSTSISAGTTSTSTTPASTTPASTTPASTTPASTSTASSQASQEGSSPEPPPESHSSSLADHEYTAAGTFTGAQAGRTSQPMAPGVFLTQRRPSASSPNNNTAAKGKRTKKGMATAKQRLGKILKIHRNGKLLL

SEQ ID NO: 421 - DNA, 2666 bp, Homosapiens
tgcgttgtccagaaggaacttcgtcctgcgtgagcctggattaatcatgagagagctcgtcaacattccactggtacatattcttactctggttgccttcagcggaactgagaaacttccaaaagctcctgtcatcaccactcctcttgaaacagtggatgccttagttgaagaagtggctactttcatgtgtgcagtggaatcctacccccagcctgagatttcctggactagaaataaaattctcattaaactctttgacacccggtacagcatccgggagaatgggcagctcctcaccatcctgagtgtggaagacagtgatgatggcatttactgctgcacggccaacaatggtgtgggaggagctgtggagagttgtggagccctgcaagtgaagatgaaacctaaaataactcgccctcccataaatgtgaaaataatagagggattaaaagcagtcctaccatgtactacaatgggtaatcccaaaccatcagtgtcttggataaagggagacagccctctcagggaaaattcccgaattgcagttcttgaatctgggagcttgaggattcataacgtacaaaaggaagatgcaggacagtatcgatgtgtggcaaaaaacagcctcgggacagcatattccaaagtggtgaagctggaagttgaggtttttgccaggatcctgcgggctcctgaatcccacaatgtcacctttggctcctttgtgaccctgcactgtacagcaacaggcattcctgtccccaccatcacctggattgaaaacggaaatgctgtttcttctgggtccattcaagagagtgtgaaagaccgagtgattgactcaagactgcagctgtttatcaccaagccaggactctacacatgcatagctaccaataagcatggggagaagttcagtactgccaaggctgcagccaccatcagcatagcagaatggagtaaaccacagaaagataacaaaggctactgcgcccagtacagaggggaggtgtgtaatgcagtcctggcaaaagatgctcttgtttttctcaacacctcctatgcggaccctgaggaggcccaagagctactggtccacacggcctggaatgaactgaaagtagtgagcccagtctgccggccagctgctgaggctttgttgtgtaaccacatcttccaggagtgcagtcctggagtagtgcctactcctattcccatttgcagagagtactgcttggcagtaaaggagctcttctgcgcaaaagaatggctggtaatggaagagaagacccacagaggactctacagatccgagatgcatttgctgtccgtgccagaatgcagcaagcttcccagcatgcattgggaccccacggcctgtgccagactgccacatctagattataacaaagaaaacctaaaaacattcccaccaatgacgtcctcaaagccaagtgtggacattccaaatctgccttcctcctcctcttcttccttctctgtctcacctacatactccatgactgtaataatctccatcatgtccagctttgcaatatttgtgcttcttaccataactactctctattgctgccgaagaagaaaacaatggaaaaataagaaaagagaatcagcagcagtaaccctcaccacactgccttctgagctcttactagatagacttcatcccaaccccatgtaccagaggatgccgctccttctgaaccccaaattgctcagcctggagtatccaaggaataacattgaatatgtgagagacatcggagagggagcgtttggaagggtgtttcaagcaagggcaccaggcttacttccctatgaacctttcactatggtggcagtaaagatgctcaaagaagaagcctcggcagatatgcaagcggactttcagagggaggcagccctcatggcagaatttgacaaccctaacattgtgaagctattaggagtgtgtgctgtcgggaagccaatgtgcctgctctttgaatacatggcctatggtgacctcaatgagttcctccgcagcatgtcccctcacaccgtgtgcagcctcagtcacagtgacttgtctatgagggctcaggtctccagccctgggcccccacccctctcctgtgctgagcagctttgcattgccaggcaggtggcagctggcatggcttacctctcagaacgtaagtttgttcaccgagatttagccaccaggaactgcctggtgggcgagaacatggtggtgaaaattgccgactttggcctctccaggaacatctactcagcagactactacaaagctaatgaaaacgacgctatccctatccgttggatgccaccagagtccattttttataaccgctacactacagagtctgatgtgtgggcctatggcgtggtcctctgggagatcttctcctatggcctgcagccctactatgggatggcccatgaggaggtcatttactacgtgcgagatggcaacatcctctcctgccctgagaactgccccgtggagctgtacaatctcatgcgtctatgttggagcaagctgcctgcagacagacccagtttcaccagtattcaccgaattctggaacgcatgtgtgagagggcagagggaactgtgagtgtctaaggttgaagac

SEQ ID NO: 422 - protein, 869 aa, Homosapiens
MRELVNIPLVHILTLVAFSGTEKLPKAPVITTPLETVDALVEEVATFMCAVESYPQPEISWTRNKILIKLFDTRYSIRENGQLLTILSVEDSDDGIYCCTANNGVGGAVESCGALQVKMKPKITRPPINVKIIEGLKAVLPCTTMGNPKPSVSWIKGDSPLRENSRIAVLESGSLRIHNVQKEDAGQYRCVAKNSLGTAYSKVVKLEVEVFARILRAPESHNVTFGSFVTLHCTATGIPVPTITWIENGNAVSSGSIQESVKDRVIDSRLQLFITKPGLYTCIATNKHGEKFSTAKAAATISIAEWSKPQKDNKGYCAQYRGEVCNAVLAKDALVFLNTSYADPEEAQELLVHTAWNELKVVSPVCRPAAEALLCNHIFQECSPGVVPTPIPICREYCLAVKELFCAKEWLVMEEKTHRGLYRSEMHLLSVPECSKLPSMHWDPTACARLPHLDYNKENLKTFPPMTSSKPSVDIPNLPSSSSSSFSVSPTYSMTVIISIMSSFAIFVLLTITTLYCCRRRKQWKNKKRESAAVTLTTLPSELLLDRLHPNPMYQRMPLLLNPKLLSLEYPRNNIEYVRDIGEGAFGRVFQARAPGLLPYEPFTMVAVKMLKEEASADMQADFQREAALMAEFDNPNIVKLLGVCAVGKPMCLLFEYMAYGDLNEFLRSMSPHTVCSLSHSDLSMRAQVSSPGPPPLSCAEQLCIARQVAAGMAYLSERKFVHRDLATRNCLVGENMVVKIADFGLSRNIYSADYYKANENDAIPIRWMPPESIFYNRYTTESDVWAYGVVLWEIFSYGLQPYYGMAHEEVIYYVRDGNILSCPENCPVELYNLMRLCWSKLPADRPSFTSIHRILERMCERAEGTVSV

SEQ ID NO: 423 - DNA, 3104 bp, Homosapiens
acggcgcgctgggctcacactgtcccgccgcggacgggctttgtggttgggggcgcgcgtgcgagtgccagtgagagtgtgggtgcgcgctgtgggccgcggcgcgggtgggtggccgtgcgttcttgcgagccggcctgcaggaggcgaggctcccctggcctcccgcacccagcggcggaccgagcccctggagggaagttgccgcagccgcccgggccgccggccctcctgtcccgcgccaggtacacagcttctcctagcatgacttcgatctgatcagcaaacaagaaaatttgtctcccgtagttctggggcgtgttcaccacctacaaccacagagctgtcatggctgccatctctacttccatccctgtaatttcacagccccagttcacagccatgaatgaaccacagtgcttctacaacgagtccattgccttcttttataaccgaagtggaaagcatcttgccacagaatggaacacagtcagcaagctggtgatgggacttggaatcactgtttgtatcttcatcatgttggccaacctattggtcatggtggcaatctatgtcaaccgccgcttccattttcctatttattacctaatggctaatctggctgctgcagacttctttgctgggttggcctacttctatctcatgttcaacacaggacccaatactcggagactgactgttagcacatggctccttcgtcagggcctcattgacaccagcctgacggcatctgtggccaacttactggctattgcaatcgagaggcacattacggttttccgcatgcagctccacacacggatgagcaaccggcgggtagtggtggtcattgtggtcatctggactatggccatcgttatgggtgctatacccagtgtgggctggaactgtatctgtgatattgaaaattgttccaacatggcacccctctacagtgactcttacttagtcttctgggccattttcaacttggtgacctttgtggtaatggtggttctctatgctcacatctttggctatgttcgccagaggactatgagaatgtctcggcatagttctggaccccggcggaatcgggataccatgatgagtcttctgaagactgtggtcattgtgcttggggcctttatcatctgctggactcctggattggttttgttacttctagacgtgtgctgtccacagtgcgacgtgctggcctatgagaaattcttccttctccttgctgaattcaactctgccatgaaccccatcatttactcctaccgcgacaaagaaatgagcgccacctttaggcagatcctctgctgccagcgcagtgagaaccccaccggccccacagaaggctcagaccgctcggcttcctccctcaaccacaccatcttggctggagttcacagcaatgaccactctgtggtttagaacggaaactgagatgaggaaccagccgtcctctcttggaggataaacagcctccccctacccaattgccagggcaaggtggggtgtgagagaggagaaaagtcaactcatgtacttaaacactaaccaatgacagtatttgttcctggaccccacaagacttgatatatattgaaaattagcttatgtgacaaccctcatcttgatccccatcccttctgaaagtaggaagttggagctcttgcaatggaattcaagaacagactctggagtgtccatttagactacactaactagacttttaaaagattttgtgtggtttggtgcaagtcagaataaattctggctagttgaatccacaacttcatttatatacaggcttcccttttttatttttaaaggatacgtttcacttaataaacacgtttatgcctatcagcatgtttgtgatggatgagactatggactgcttttaaactaccataattccattttttcccttacataggaaaactgtaagttggaattatcttttgtttagaaagcatgcatgtaatgtatgtatgcagtatgccttacttaaaaagattaaaaggatactaatgttaaatcttctaggaaatagaacctagacttcaaagccagtatttgtttaggtcatgaagcaaacaatgctctaatcacaatattaactgtttaattaaaatgttgtaacaagtataaaacagggaatgtaagtttattaccaaagtgatatgtattccaaaaaagtcatagaagatgaagcactataatattgttcccatatatttaaaatacccaagtacattctaattaccagtatatcagaggaaaattttcgtagtctttgtaaaataatatactcatcatagaaaacttgaaaaatgcagaaatgtataaaaaagcaaaaatgattactgataatatcacaacccagaagtaaccacctttaaaaagcaacccccatgtatgcctatatgtgtattgtatactttttttacataattggagtcatactgtaaacagttttataagtagatctttttcattgcaaaattgccacattttcttatggcattaaaaattttacaaaaacataattttaatggctatattatattccatttaatggatgcaactcagtttatttaaccattcccatgttgttaactatttaggttgtttctaattttcattattataaagttgcagaaatttggtgtacataaaactgtctccatataattgattattaggatatattcccatgaaggattctttttttaaaaaaatgtgaaatgtcatcttgtacttacacctttcatgaaaagggatttcctgcttttgtactgcatgggtggcagttgtgaggaaaagccagtcaaatgacctttttacaaaagaaatgcagtggtcacttcagttgagagtgactttttaatacaacaagatcaactagaagaattcaactgtctcaagaatcaaggtaccccaatatatctcgcaattccaaactttgtttgagggactcgttatccagctcttggtagccacacctgcaatgtaaaatggaagaaaatgcaaagaaaccaaatgtgccgagtgaataaaggattgtcatatcaaaaaaaaaaaaaaaa

SEQ ID NO: 424 - protein, 364 aa, Homosapiens
MAAISTSIPVISQPQFTAMNEPQCFYNESIAFFYNRSGKHLATEWNTVSKLVMGLGITVCIFIMLANLLVMVAIYVNRRFHFPIYYLMANLAAADFFAGLAYFYLMFNTGPNTRRLTVSTWLLRQGLIDTSLTASVANLLAIAIERHITVFRMQLHTRMSNRRVVVVIVVIWTMAIVMGAIPSVGWNCICDIENCSNMAPLYSDSYLVFWAIFNLVTFVVMVVLYAHIFGYVRQRTMRMSRHSSGPRRNRDTMMSLLKTVVIVLGAFIICWTPGLVLLLLDVCCPQCDVLAYEKFFLLLAEFNSAMNPIIYSYRDKEMSATFRQILCCQRSENPTGPTEGSDRSASSLNHTILAGVHSNDHSVV

SEQ ID NO: 425 - DNA, 3182 bp, Homosapiens
acggcgcgctgggctcacactgtcccgccgcggacgggctttgtggttgggggcgcgcgtgcgagtgccagtgagagtgtgggtgcgcgctgtgggccgcggcgcgggtgggtggccgtgcgttcttgcgagccggcctgcaggaggcgaggctcccctggcctcccgcacccagcggcggaccgagcccctggagggaagttgccgcagccgcccgggccgccggccctcctgtcccgcgccaggtggacgtctgatttatgaagctccccatccacctatctgagtacctgacttctcaggactgacacctacagcatcaggtacacagcttctcctagcatgacttcgatctgatcagcaaacaagaaaatttgtctcccgtagttctggggcgtgttcaccacctacaaccacagagctgtcatggctgccatctctacttccatccctgtaatttcacagccccagttcacagccatgaatgaaccacagtgcttctacaacgagtccattgccttcttttataaccgaagtggaaagcatcttgccacagaatggaacacagtcagcaagctggtgatgggacttggaatcactgtttgtatcttcatcatgttggccaacctattggtcatggtggcaatctatgtcaaccgccgcttccattttcctatttattacctaatggctaatctggctgctgcagacttctttgctgggttggcctacttctatctcatgttcaacacaggacccaatactcggagactgactgttagcacatggctccttcgtcagggcctcattgacaccagcctgacggcatctgtggccaacttactggctattgcaatcgagaggcacattacggttttccgcatgcagctccacacacggatgagcaaccggcgggtagtggtggtcattgtggtcatctggactatggccatcgttatgggtgctatacccagtgtgggctggaactgtatctgtgatattgaaaattgttccaacatggcacccctctacagtgactcttacttagtcttctgggccattttcaacttggtgacctttgtggtaatggtggttctctatgctcacatctttggctatgttcgccagaggactatgagaatgtctcggcatagttctggaccccggcggaatcgggataccatgatgagtcttctgaagactgtggtcattgtgcttggggcctttatcatctgctggactcctggattggttttgttacttctagacgtgtgctgtccacagtgcgacgtgctggcctatgagaaattcttccttctccttgctgaattcaactctgccatgaaccccatcatttactcctaccgcgacaaagaaatgagcgccacctttaggcagatcctctgctgccagcgcagtgagaaccccaccggccccacagaaggctcagaccgctcggcttcctccctcaaccacaccatcttggctggagttcacagcaatgaccactctgtggtttagaacggaaactgagatgaggaaccagccgtcctctcttggaggataaacagcctccccctacccaattgccagggcaaggtggggtgtgagagaggagaaaagtcaactcatgtacttaaacactaaccaatgacagtatttgttcctggaccccacaagacttgatatatattgaaaattagcttatgtgacaaccctcatcttgatccccatcccttctgaaagtaggaagttggagctcttgcaatggaattcaagaacagactctggagtgtccatttagactacactaactagacttttaaaagattttgtgtggtttggtgcaagtcagaataaattctggctagttgaatccacaacttcatttatatacaggcttcccttttttatttttaaaggatacgtttcacttaataaacacgtttatgcctatcagcatgtttgtgatggatgagactatggactgcttttaaactaccataattccattttttcccttacataggaaaactgtaagttggaattatcttttgtttagaaagcatgcatgtaatgtatgtatgcagtatgccttacttaaaaagattaaaaggatactaatgttaaatcttctaggaaatagaacctagacttcaaagccagtatttgtttaggtcatgaagcaaacaatgctctaatcacaatattaactgtttaattaaaatgttgtaacaagtataaaacagggaatgtaagtttattaccaaagtgatatgtattccaaaaaagtcatagaagatgaagcactataatattgttcccatatatttaaaatacccaagtacattctaattaccagtatatcagaggaaaattttcgtagtctttgtaaaataatatactcatcatagaaaacttgaaaaatgcagaaatgtataaaaaagcaaaaatgattactgataatatcacaacccagaagtaaccacctttaaaaagcaacccccatgtatgcctatatgtgtattgtatactttttttacataattggagtcatactgtaaacagttttataagtagatctttttcattgcaaaattgccacattttcttatggcattaaaaattttacaaaaacataattttaatggctatattatattccatttaatggatgcaactcagtttatttaaccattcccatgttgttaactatttaggttgtttctaattttcattattataaagttgcagaaatttggtgtacataaaactgtctccatataattgattattaggatatattcccatgaaggattctttttttaaaaaaatgtgaaatgtcatcttgtacttacacctttcatgaaaagggatttcctgcttttgtactgcatgggtggcagttgtgaggaaaagccagtcaaatgacctttttacaaaagaaatgcagtggtcacttcagttgagagtgactttttaatacaacaagatcaactagaagaattcaactgtctcaagaatcaaggtaccccaatatatctcgcaattccaaactttgtttgagggactcgttatccagctcttggtagccacacctgcaatgtaaaatggaagaaaatgcaaagaaaccaaatgtgccgagtgaataaaggattgtcatatcaaaaaaaaaaaaaaaa

SEQ ID NO: 426 - protein, 364 aa, Homosapiens; identical to SEQ ID NO: 424

SEQ ID NO: 427 - DNA, 6196 bp, Homosapiens
atgccaagaactggagctcaggatggagcatggatccaaaagcaggttgtttttgaaggtcaaatggcttcaacgtatgaacaggatgaagtcattgctattgatgatatatctttcagttcaggctgcttgcctgccaatgatggaattttactgtgtcaagaagcattgaatgctgagcgggagctatgccatccagatacagatctctgcagatttgatgctacagatgaagagttgagattgtgtcaggcctgtgggtttgaatttgacatgtgtgagtggacgtcagaagcatctgctggccaaatttcctggatgcgcacaaaagcgagagagatccctgcattcgaatccacacctcagcaggatcaaggaggtgatgatgaaggttattatgtatgggtaggcgctaagcatggtttcactcttaaccatttagacagcagggcttacctaaatagctctgtgtgtcattgcctgggcaagagctgtcatcttcaattctattatgcaatggaaagcagtgtcctgagagtaagactgtataataataagatgcgatcaaaagtagtgaaactcaacaacattgactttggtacccttgatttcttcactggaagagaaaagcatagactggcatctctaagagatagagtgttaataaatatgttaaatatttttcttgaaagctttttcaattttactaccaagactttagatttcctagtactttatatcatacaggaagaagaaatattttggacatacaacatatcaactcacagccaatgggtgaaagcagatgtgttaataccagaagatctgaagacatttaagattatttttgaagggactcttttgagccagagaagttttattgcccttgatcacctctgggtctatgcctgtggacagacccaatccagaaagctttgctctgcagacgaattcccttgcactagtggccagtgcatcgccaaagaatctgtctgtgactctcggcaggactgctccgatgagagtgatgaagacccagcaacttgctcaaagcatctcacctgtgactttgagtcgggtttctgcggttgggagccatttctcacagaagattcacactggaagctgatgaaaggattgaataatggagagcaccactttcctgcagctgatcacacagcaaacataaatcatggatcgtttatttatttggaggcacagcgctcccccggggtggccaagcttggaagtcctgttcttacaaaattgctcactgcctctaccccatgtcaggtgcagttttggtatcatttgtctcaacattcaaatctctcagtttttacaagaacgtctctagatggaaacttgcaaaagcagggcaaaataatcagattctccgaatctcagtggagccacgcaaaaattgatctcattgcagaagcgggagaatctactctaccttttcagttaattttggaagctactgttttgtcgtcaaatgctaccgttgctctagatgacatcagtgtgtcccaggaatgtgaaatttcctataaatcactaccaaggaccagtacacaaagcaagttttccaagtgtgactttgaagcaaacagctgtgattggtttgaagcaattagtggtgaccattttgactggatacggagctctcagagtgaactttctgctgattttgagcaccaggctccacctcgggatcatagtctcaacgcatctcaagggcattttatgttcattctgaagaaaagcagcagcttgtggcaagttgctaagcttcagagcccaactttcagccagacaggacctggatgcatactttccttctggttctataactatggcctgtcagtgggagcagctgagctgcagctacatatggaaaattctcatgactcaacagtgatttggagagtattatacaatcagggcaaacaatggttggaggcaaccattcagctagggcgcctttcgcagcccttccatttgtcactagataaagtcagtctgggcatttatgatggggtctcagctattgatgacatccgatttgaaaattgtactctccctcttcctgctgagagctgtgaagggctggatcatttctggtgtcgccacaccagggcttgcatagaaaagcttcggttatgtgatctggtggatgactgtggtgatcgtactgatgaagtcaactgtgcacctgagctgcagtgtaactttgaaactggaatctgtaactgggaacaagatgcaaaagatgactttgattggaccaggagccagggtccaactccaacacttaacacagggccaatgaaagataacactctgggcacagctaaaggacactatctctacatagaatcttcagagccacaggcttttcaagacagtgctgccttactcagcccaatccttaatgccactgatacaaaaggctgcaccttccgcttctattaccacatgtttggaaagcgcatttataggttggcaatctaccaacgaatctggagtgactcaaggggacagctgctgtggcagatatttgggaatcaaggcaacagatggattaggaaacacctcaacatttccagcaggcagccctttcagatattggtggaggcttcagtgggagatggcttcactggagatattgcgattgatgatctgtcatttatggactgcaccctctaccctggtaatttgccagcagacctcccaactccaccagaaacgtcagttcctgtaacattacctccacacaactgcacagacaatgaatttatctgcaggtctgatggtcactgcattgaaaaaatgcagaaatgtgattttaaatatgactgccctgacaaatcagatgaagcatcctgtgttatggaagtttgcagctttgagaaaagaagcctgtgtaaatggtatcaaccaatcccagtacatttgcttcaagattcaaacacattcaggtgggggcttgggaacgggatcagcattcatcatggggaagaaaaccacaggccatcagtggatcatacacaaaataccactgatggctggtacctgtatgctgacagttctaatgggaaatttggtgacacggctgacattctcactcctatcatttcactcacgggaccaaaatgtaccttggtgttctggacacatatgaatggggccaccgttggttctctccaggtgctcatcaagaaagataacgttacttctaaattgtgggctcaaactggacagcaaggtgcacagtggaagagagcagaagtgtttttaggcattcgttcacatacacagattgtcttcagagccaaacgtggtatcagttacataggagatgtagcagtggatgatatttccttccaagattgctcccctttgcttagcccagagagaaagtgtactgatcatgaattcatgtgtgctaataagcactgcattgccaaagacaagctgtgtgattttgtgaatgattgtgctgataattcagatgagactactttcatttgccgtacctccagtgggcgctgtgatttcgaatttgatctttgttcctggaagcaggagaaagatgaggactttgactggaacctgaaagctagcagcatccctgcagcaggcacagagccagcagcagatcacactttgggaaattcatctggtcattacatctttataaagagtttgtttcctcagcagcccatgagagctgccagaatttcaagtccagttataagtaagagaagcaaaaactgcaagattatttttcattatcacatgtatggaaatggcattggggcactcaccttaatgcaggtgtcagtcacaaaccaaacgaaggttctacttaacctcactgtagaacaaggcaatttctggcggagagaagaactgtcactgtttggtgatgaagacttccaactcaaatttgaaggtagagttgggaaaggtcagcgtggagacattgcacttgatgacattgtgcttacagaaaattgtctatcactccatgattccgtgcaagaagaactggcagtgcctcttccaacaggtttctgcccacttggctatagggaatgtcataatggaaaatgctataggctggaacaaagctgtaacttcgtagataactgtggagataatactgatgaaaatgagtgtggtagctcctgtacttttgaaaaaggctggtgtggctggcaaaactcccaggctgacaactttgattgggttttaggggttggctctcatcaaagcttaagacctcccaaagaccacacacttggaaatgaaaatgggcacttcatgtatctggaagctactgcagtgggccttcggggtgacaaagcacacttcaggagtaccatgtggcgagaatccagtgcagcctgcaccatgagcttctggtatttcgtatctgcaaaggccacaggatccattcagattctcatcaagacagagaaaggactatcaaaagtatggcaagaaagtaagcagaaccctggtaatcattggcaaaaggctgacatcctgctaggaaagttaaggaattttgaagtcatatttcaaggtatcagaacaagggacctgggaggaggagctgcaattgatgatattgaatttaaaaactgcacaactgtgggagagatctctgagctttgtccggaaatcactgattttttgtgccgggacaagaagtgcattgcatcccaccttctttgtgactataagccagactgctctgataggtctgatgaagctcactgtgcacattatacaagcacaacaggaagctgcaattttgaaacaagttcaggaaactggaccacagcctgcagtcttactcaagactctgaggatgacttggactgggccattggcagcagaattcctgccaaagcattaattccagactctgatcacacgccaggtagtggtcagcacttcctgtacgtcaactcatctggctccaaggaaggatccgttgccagaattactacttccaaatccttcccagcaagccttggaatgtgtactgttcggttctggttctacatgattgatcccaggagtatgggaatattaaaggtgtataccattgaagaatcggggctaaacatcctggtgtggtcagtgattggaaataaaagaacgggatggacatatggctctgtgcctctctccagtaacagtccgtttaaggtggcatttgaagctgatttggatggaaatgaggacatctttattgctcttgatgacatctcttttaccccagagtgtgtgactggaggtcctgtcccagtgcagccatcaccctgtgaagctgatcagttttcttgtatctacacactccaatgtgtccctctctcagggaaatgtgatggacatgaagactgcatagatggatctgatgaaatggattgtcctctcagccccacccctccactctgtagtaacatggagttcccgtgctctacagacgagtgtataccttccctcctgctatgcgatggagtgcccgactgccactttaatgaagatgagctcatctgctccaacaaaagctgttctaatggagctctggtgtgtgcctcctccaacagctgtatcccagcccaccagcgctgtgatggttttgccgactgcatggatttccagcttgatgagtccagctgctccgatacatggactctcctgggtattggattagcattcctgatgactcacatcacagttgcagtcttgtgttttcttgcaaacagaaaggtaccaataaggaaaaccgagggaagtggtaactgtgcctttgtcaatccagtttacgggaactggagcaacccagagaaaacagagagttctgtctattccttctcaaacccattatatggcacaacatcaggaagcctggagaccctgtcacatcatctcaaatagcagcatcgagaccaagtctgatccaacatgtgtagtttctagaaaattgaagtctccacaatctgatagaaactcatcttctacaatggtaaaaagagaaaggattgtaaatgccagtgtaattataacatttatgaatgaattttcttgcagaatatagagaatgtttatatggaatcagaatcagtaccttatcttcactgaacatctgaatattttaataaaatttctattt

SEQ ID NO: 428 - protein, 1986 aa, Homosapiens
MPRTGAQDGAWIQKQVVFEGQMASTYEQDEVIAIDDISFSSGCLPANDGILLCQEALNAERELCHPDTDLCRFDATDEELRLCQACGFEFDMCEWTSEASAGQISWMRTKAREIPAFESTPQQDQGGDDEGYYVWVGAKHGFTLNHLDSRAYLNSSVCHCLGKSCHLQFYYAMESSVLRVRLYNNKMRSKVVKLNNIDFGTLDFFTGREKHRLASLRDRVLINMLNIFLESFFNFTTKTLDFLVLYIIQEEEIFWTYNISTHSQWVKADVLIPEDLKTFKIIFEGTLLSQRSFIALDHLWVYACGQTQSRKLCSADEFPCTSGQCIAKESVCDSRQDCSDESDEDPATCSKHLTCDFESGFCGWEPFLTEDSHWKLMKGLNNGEHHFPAADHTANINHGSFIYLEAQRSPGVAKLGSPVLTKLLTASTPCQVQFWYHLSQHSNLSVFTRTSLDGNLQKQGKIIRFSESQWSHAKIDLIAEAGESTLPFQLILEATVLSSNATVALDDISVSQECEISYKSLPRTSTQSKFSKCDFEANSCDWFEAISGDHFDWIRSSQSELSADFEHQAPPRDHSLNASQGHFMFILKKSSSLWQVAKLQSPTFSQTGPGCILSFWFYNYGLSVGAAELQLHMENSHDSTVIWRVLYNQGKQWLEATIQLGRLSQPFHLSLDKVSLGIYDGVSAIDDIRFENCTLPLPAESCEGLDHFWCRHTRACIEKLRLCDLVDDCGDRTDEVNCAPELQCNFETGICNWEQDAKDDFDWTRSQGPTPTLNTGPMKDNTLGTAKGHYLYIESSEPQAFQDSAALLSPILNATDTKGCTFRFYYHMFGKRIYRLAIYQRIWSDSRGQLLWQIFGNQGNRWIRKHLNISSRQPFQILVEASVGDGFTGDIAIDDLSFMDCTLYPGNLPADLPTPPETSVPVTLPPHNCTDNEFICRSDGHCIEKMQKCDFKYDCPDKSDEASCVMEVCSFEKRSLCKWYQPIPVHLLQDSNTFRWGLGNGISIHHGEENHRPSVDHTQNTTDGWYLYADSSNGKFGDTADILTPIISLTGPKCTLVFWTHMNGATVGSLQVLIKKDNVTSKLWAQTGQQGAQWKRAEVFLGIRSHTQIVFRAKRGISYIGDVAVDDISFQDCSPLLSPERKCTDHEFMCANKHCIAKDKLCDFVNDCADNSDETTFICRTSSGRCDFEFDLCSWKQEKDEDFDWNLKASSIPAAGTEPAADHTLGNSSGHYIFIKSLFPQQPMRAARISSPVISKRSKNCKIIFHYHMYGNGIGALTLMQVSVTNQTKVLLNLTVEQGNFWRREELSLFGDEDFQLKFEGRVGKGQRGDIALDDIVLTENCLSLHDSVQEELAVPLPTGFCPLGYRECHNGKCYRLEQSCNFVDNCGDNTDENECGSSCTFEKGWCGWQNSQADNFDWVLGVGSHQSLRPPKDHTLGNENGHFMYLEATAVGLRGDKAHFRSTMWRESSAACTMSFWYFVSAKATGSIQILIKTEKGLSKVWQESKQNPGNHWQKADILLGKLRNFEVIFQGIRTRDLGGGAAIDDIEFKNCTTVGEISELCPEITDFLCRDKKCIASHLLCDYKPDCSDRSDEAHCAHYTSTTGSCNFETSSGNWTTACSLTQDSEDDLDWAIGSRIPAKALIPDSDHTPGSGQHFLYVNSSGSKEGSVARITTSKSFPASLGMCTVRFWFYMIDPRSMGILKVYTIEESGLNILVWSVIGNKRTGWTYGSVPLSSNSPFKVAFEADLDGNEDIFIALDDISFTPECVTGGPVPVQPSPCEADQFSCIYTLQCVPLSGKCDGHEDCIDGSDEMDCPLSPTPPLCSNMEFPCSTDECIPSLLLCDGVPDCHFNEDELICSNKSCSNGALVCASSNSCIPAHQRCDGFADCMDFQLDESSCSDTWTLLGIGLAFLMTHITVAVLCFLANRKVPIRKTEGSGNCAFVNPVYGNWSNPEKTESSVYSFSNPLYGTTSGSLETLSHHLK

SEQ ID NO: 429 - DNA, 2594 bp, Homosapiens
gccctaaccttcccagggctcagctctttggagctgcccattcctccggctgcgagaaaggacgcgcgccctgcgtcgggcgaagaaaagaagcaaaacttgtcgggagggtttcgtcatcaacctccttcccgcaaacctaaacctcctgccggggccatccctagacagaggaaagttcctgcagagccgaccagccctagtggatctggggcaggcagcggcgctggctgtggaattagatctgttttgaacccagtggagcgcatcgctggggctcggaagtcaccgtccgcgggcaccgggttggcgctgcccgagtggaaccgacagtttgcgagcctcggctgcaagtggcctctcctccccgcggttgttgttcagtgtcgggtgagggctgcgagtgtggcaagttgcaaagagagcctcagaggtccgaagagcgctgcgctcctactcgcgttcgcttcttcctcttctcggttccctactgtgaaatcgcagcgacatttacaaaggcctccgggtcctaccgagaccgatccgcagcgtttggcccggtcgtgcctattgcatcgggagcccccgagcaccggcgaaggactggcgggtggggtagggaggtggcggcggcggcatggcgaggttcccgaaggccgacctggccgctgcaggagttatgttactttgccacttcttcacggaccagtttcagttcgccgatgggaaacccggagaccaaatccttgattggcagtatggagttactcaggccttccctcacacagaggaggaggtggaagttgattcacacgcgtacagccacaggtggaaaagaaacttggactttctcaaggcggtagacacgaaccgagcaagcgtcggccaagactctcctgagcccagaagcttcacagacctgctgctggatgatgggcaggacaataacactcagatcgaggaggatacagaccacaattactatatatctcgaatatatggtccatctgattctgccagccgggatttatgggtgaacatagaccaaatggaaaaagataaagtgaagattcatggaatattgtccaatactcatcggcaagctgcaagagtgaatctgtccttcgattttccattttatggccacttcctacgtgaaatcactgtggcaaccgggggtttcatatacactggagaagtcgtacatcgaatgctaacagccacacagtacatagcacctttaatggcaaatttcgatcccagtgtatccagaaattcaactgtcagatattttgataatggcacagcacttgtggtccagtgggaccatgtacatctccaggataattataacctgggaagcttcacattccaggcaaccctgctcatggatggacgaatcatctttggatacaaagaaattcctgtcttggtcacacagataagttcaaccaatcatccagtgaaagtcggactgtccgatgcatttgtcgttgtccacaggatccaacaaattcccaatgttcgaagaagaacaatttatgaataccaccgagtagagctacaaatgtcaaaaattaccaacatttcggctgtggagatgaccccattacccacatgcctccagtttaacagatgtggcccctgtgtatcttctcagattggcttcaactgcagttggtgtagtaaacttcaaagatgttccagtggatttgatcgtcatcggcaggactgggtggacagtggatgccctgaagagtcaaaagagaagatgtgtgagaatacagaaccagtggaaacttcttctcgaaccaccacaaccgtaggagcgacaaccacccagttcagggtcctaactaccaccagaagagcagtgacttctcagtttcccaccagcctccctacagaagatgataccaagatagcactacatctaaaagataatggagcttctacagatgacagtgcagctgagaagaaagggggaaccctccacgctggcctcatcattggaatcctcatcctggtcctcattgtagccacagccattcttgtgacagtctatatgtatcaccacccaacatcagcagccagcatcttctttattgagagacgcccaagcagatggcctgcgatgaagtttagaagaggctctggacatcctgcctatgctgaagttgaaccagttggagagaaagaaggctttattgtatcagagcagtgctaaaatttctaggacagaacaacaccagtactggtttacaggtgttaagactaaaattttgcctatacctttaagacaaacaaacaaacacacacacaaacaagctctaagctgctgtagcctgaagaagacaagatttctggacaagctcagcccaggaaacaaagggtaaacaaaaaactaaaacttatacaagataccatttacactgaacatagaattccctagtggaatgtcatctatagttcactcggaacatctcccgtggacttatctgaagtatgacaagattataatgcttttggcttaggtgcagggttgcaaagggatcagaaaaaaaaaatcataataaagctttagttcatgaggg

SEQ ID NO: 430 - protein, 529 aa, Homosapiens
MARFPKADLAAAGVMLLCHFFTDQFQFADGKPGDQILDWQYGVTQAFPHTEEEVEVDSHAYSHRWKRNLDFLKAVDTNRASVGQDSPEPRSFTDLLLDDGQDNNTQIEEDTDHNYYISRIYGPSDSASRDLWVNIDQMEKDKVKIHGILSNTHRQAARVNLSFDFPFYGHFLREITVATGGFIYTGEVVHRMLTATQYIAPLMANFDPSVSRNSTVRYFDNGTALVVQWDHVHLQDNYNLGSFTFQATLLMDGRIIFGYKEIPVLVTQISSTNHPVKVGLSDAFVVVHRIQQIPNVRRRTIYEYHRVELQMSKITNISAVEMTPLPTCLQFNRCGPCVSSQIGFNCSWCSKLQRCSSGFDRHRQDWVDSGCPEESKEKMCENTEPVETSSRTTTTVGATTTQFRVLTTTRRAVTSQFPTSLPTEDDTKIALHLKDNGASTDDSAAEKKGGTLHAGLIIGILILVLIVATAILVTVYMYHHPTSAASIFFIERRPSRWPAMKFRRGSGHPAYAEVEPVGEKEGFIVSEQC

SEQ ID NO: 431 - DNA, 3330 bp, Homosapiens
cggcggaagcggagagcaacagcgcgccgagacggagttttgccatgttgtccaggctggtgtcgaaatcctgagctcaagtggtctgcctgcctcggcttcccaaagtgctgggattacaggtgaggctgctgtcagaaaggaacttttacacagtttgccttcagagacagtctatcggcatgttgtagagttttattactaagaaaataaatgttacttacatgattgtggtggtgccatgcagcaagaatcagagagatgcagagttagagccagaaggcctgacatggcactttatgtacctaaagctcgtaggggtgcagtactccttaagacaggtgatgaagaagaaagctgtggttcacctaactctgtggtgaaagaaaagcaaaaagaaagttctctctcccaaaaagaagtctttaaagacaaaccggaggctcgaagactaaatatcaatcctgatagaaaggagcataattgtagagaagaaaagaaatcttcaacaaaattaagaatggacacatgccttcaaaaaacaaatagagtttgttctaagagaggaaccactgaatccaaagaagtattatcccaaggacaacagcagggagccccaaatgctggggttataactaatgcacctttgcagagacattttaaaccaaagaaggtggagtgtttggaagttgaaactacggatgtgacaggacatgagaggatacttctttcacaggcctgtttagaaatcagcgaggctcaagttccaagcaaaccattccaaaatgtggaattctgtgacttcagtaggcatgaacctgatggggaagcatttgaagacaaagatttggaaggcagaattgaaactgataccgaggttttggagatactatatgagtttcctagagtttttagttctgtcatgaaacctgagaatatgattgtaccaataaaactaagctctgattctgaaattgtacaacaaagcatgcaaacatcagatggaatattgaatcccagcagcggaggcatcaccactacttctgttcctggaagtccagatggtgtctttgatcaaacttgcgtagattttgaagttgagagtgtaggtggtatagccaatagtacaggtttcatcttagatcaaaaagatacagattccattcctgcaactatgggtcacatctctctgtcagagagcacaaatgacactgttagtccagtaatgattagagaatgtgagaagaatgacagcactgctgatgagttacatgtaaagcacgaacctcctgatacagctgtccttgctcatgaaacacatagagatagtggatttaagaatgtaggtgacattaccaataaagcatgtatgatggacactacaggtatgtcctgtagtgatcatgtaactgttgatagcccttatgtagttgcagttagaatagctgatgagacctctattaatacacgaagtttctcaaagtttgtaggaatgagtgcagatgcaacccctcttcatgtagctagaagtgggaatgacactgaagatttcagcaacccttctgcttgctcagatatttatggtgagagtatttcatctcattttacagagtcaacaggaaagttgatagagagcttgtcagattgtgcttcctccttacctataaaaaagattgctggtagtaattataacacttttttggactctgaactcagtatgttaaatgggacaaaagttctttcagacagtgccgtgggcattgacctgggtagtactggtgatacaacagaagcattgcacgaactaagaactgccgaagagttcaaaacagaagagcaagatgactcagggagtatagaatttggtgtatcttttcctgatagggaatcatcatctatggaaacatccatcgaaccaaaagcaactgaaacttctcgcacagagggaattactgccattgaggagagctgggagtctatgtttaacgatgatggtgactgcctggatccacgtcttctacaagagttatcagggaataccaagagcagagagagcatccaggaacctagatctgattactacaatcatgaagttcctgatattgacctcagtgattgtgaattcccacatgtcattgaaatttatgactttccccaagaatttcgtactgaagaccttctacgggttttctgcagttatcaaaagaaaggatttgatattaaatgggtggatgatacacatgccctaggagtattctccagtccaattacagctcgtgatgcgttgggtattaaacacaccatggtgaagattcgtcccttgtcacaggccacaagagcagccaaggccaaagctagagcttatgctgagttcctccagccagcaaaggagcgtcctgagacttcagcagccctagccagaaggttagtcatcagtgcccttggggttcgaagtaagcagagcaaaaccgaacgagaagcagagctcaagaaactgcaagaagccagagagagaaagcggttggaagccaagcaacgggaagacatctgggaaggcagagaccagtctacagtttgaacatcactcaatgaaagggataattccatgaatcagaaaatgtttccatagccttcagataagatgatccttccagagctctatgtacatgcagatgtgcatgttaaagagataaagtgatcgagacaaggactgactgggtatagaaggaagacagactcctgtcttcactcctaaatgcagttctttggaatcaccctactgtggtgggcgtagtagggagccatcagctaggaagaaacgtgggagatgtgaattccaagagttgcctggacagggcaagtcatgttagcgtgggtcacacttccaagatatttaaagcaaatacaaaacagaacagaggattcaaaccgcaagtatgggagatttaggccctgcagaggcagaccattccttagtatctcacaaagcagagtaatactggaggcagagtagggggtggttggagagcagttagtacaaagaggcagaacagtgtctggtttacttggcatacacagaatctgcactgccggttccagaactccaaagttggtgaactacaggagatgtgggtatttagactccaaagtttatactgagctcagtgcctgggaccgctccagctgcactgcagccaggggggataccagcttcattcctcagagtaaaccaaccttgggagctgtgtgccagttccagtgtaagcagtaataccatgttgtaagagggaacattaaagcccattttatgacataaaaaaaaaaaaaaaa

SEQ ID NO: 432 - protein, 778 aa, Homosapiens
MQQESERCRVRARRPDMALYVPKARRGAVLLKTGDEEESCGSPNSVVKEKQKESSLSQKEVFKDKPEARRLNINPDRKEHNCREEKKSSTKLRMDTCLQKTNRVCSKRGTTESKEVLSQGQQQGAPNAGVITNAPLQRHFKPKKVECLEVETTDVTGHERILLSQACLEISEAQVPSKPFQNVEFCDFSRHEPDGEAFEDKDLEGRIETDTEVLEILYEFPRVFSSVMKPENMIVPIKLSSDSEIVQQSMQTSDGILNPSSGGITTTSVPGSPDGVFDQTCVDFEVESVGGIANSTGFILDQKDTDSIPATMGHISLSESTNDTVSPVMIRECEKNDSTADELHVKHEPPDTAVLAHETHRDSGFKNVGDITNKACMMDTTGMSCSDHVTVDSPYVVAVRIADETSINTRSFSKFVGMSADATPLHVARSGNDTEDFSNPSACSDIYGESISSHFTESTGKLIESLSDCASSLPIKKIAGSNYNTFLDSELSMLNGTKVLSDSAVGIDLGSTGDTTEALHELRTAEEFKTEEQDDSGSIEFGVSFPDRESSSMETSIEPKATETSRTEGITAIEESWESMFNDDGDCLDPRLLQELSGNTKSRESIQEPRSDYYNHEVPDIDLSDCEFPHVIEIYDFPQEFRTEDLLRVFCSYQKKGFDIKWVDDTHALGVFSSPITARDALGIKHTMVKIRPLSQATRAAKAKARAYAEFLQPAKERPETSAALARRLVISALGVRSKQSKTEREAELKKLQEARERKRLEAKQREDIWEGRDQSTV

SEQ ID NO: 433 - DNA, 3657 bp, Homosapiens
ggctggggggccgcgggcgggaggcggataaaaaggccccagggcgcccggggagggagcccgttagcgctgctccgccgcggcgcccgcccagccccggactgtccgcgctccatctggtatcttggcctcagctgtccttgaagtcaccatggcgtggtccccaccagccaccctctttctgttcctgctgctgctaggccagccccctcccagcaggccacagtcactgggcaccactaagctccggctggtgggcccagagagcaagccagaggagggccgcctggaggtgctgcaccagggccagtggggcaccgtgtgtgatgacaactttgctatccaggaggccacagtggcttgccgccagctgggcttcgaagctgccttgacctgggcccacagtgccaagtacggccaaggggagggacccatctggctggacaatgtgcgctgtgtgggcacagagagctccttggaccagtgcgggtctaatggctggggagtcagtgactgcagtcactcagaagacgtaggggtgatatgccacccccggcgccatcgtggctacctttctgaaactgtctccaatgcccttgggccccagggccggcggctggaggaggtgcggctcaagcccatccttgccagtgccaagcagcatagcccagtgaccgagggagccgtggaggtgaagtatgagggccactggcggcaggtgtgtgaccagggctggaccatgaacaacagcagggtggtgtgcgggatgctgggcttccccagcgaggtgcctgtcgacagccactactacaggaaagtctgggatctgaagatgagggaccctaagtctaggctgaagagcctgacgaataagaactccttctggatccaccaggtcacctgcctggggacagagccccacatggccaactgccaggtgcaggtggctccagcccggggcaagctgcggccagcctgcccaggtggcatgcacgctgtggtcagctgtgtggcagggcctcacttccgcccaccgaagacaaagccacaacgcaaagggtcctgggcagaggagccgagggtgcgcctgcgctccggggcccaggtgggcgagggccgggtggaagtgctcatgaaccgccagtggggcacggtctgtgaccacaggtggaacctcatctctgccagtgtcgtgtgtcgtcagctgggctttggctctgctcgggaggccctctttggggcccggctgggccaagggctagggcccatccacctgagtgaggtgcgctgcaggggatatgagcggaccctcagcgactgccctgccctggaagggtcccagaatggttgccaacatgagaatgatgctgctgtcaggtgcaatgtccctaacatgggctttcagaatcaggtgcgcttggctggtgggcgtatccctgaggaggggctattggaggtgcaggtggaggtgaacggggtcccacgctgggggagcgtgtgcagtgaaaactgggggctcaccgaagccatggtggcctgccgacagctcggcctgggttttgccatccatgcctacaaggaaacctggttctggtcggggacgccaagggcccaggaggtggtgatgagtggggtgcgctgctcaggcacagagctggccctgcagcagtgccagaggcacgggccggtgcactgctcccacggtggcgggcgcttcctggctggagtctcctgcatggacagtgcaccagacctggtgatgaacgcccagctagtgcaggagacggcctacttggaggaccgcccgctcagccagctgtattgtgcccacgaggagaactgcctctccaagtctgcggatcacatggactggccctacggataccgccgcctattgcgcttctccacacagatctacaatctgggccggactgactttcgtccaaagactggacgcgatagctgggtttggcaccagtgccacaggcattaccacagcattgaggtcttcacccactacgacctcctcactctcaatggctccaaggtggctgaggggcacaaggccagcttctgtctggaggacacaaactgccccacaggactgcagcggcgctacgcatgtgccaactttggagaacagggagtgactgtaggctgctgggacacctaccggcatgacattgattgccagtgggtggatatcacagatgtgggccccgggaattatatcttccaggtgattgtgaacccccactatgaagtggcagagtcagatttctccaacaatatgctgcagtgccgctgcaagtatgatgggcaccgggtctggctgcacaactgccacacagggaattcatacccagccaatgcagaactctccctggagcaggaacagcgtctcaggaacaacctcatctgaagctgtcactgcacactcctagctgctgccgatacaccagatacctcagcttattggagccatgcccttcacagagtcccaactcagaggaaaagggccagtgccaaggggcaccaagaacctgctcaggaagccttttgatggcaagatcaccaatccagatggtattgctccctcaggatggctctgggcctgcccctaagggcctgtggcctatggaatatgtcctccaggctttgctcagctgagctcctcttctgtaaggaaacccagtcatccctgaatcttgccacagagatccgggattcaggagctctcagtttcttagggatggactatggcccagtcccccatctaagtggtgctttgcaaatgtcttggaggagtataggacagaggaccaaaatacacagcaggtagtgttagctctctgctaggagctcaaagcaacacaacttgtatcaaaatcacaactggcagagaagctggtggatccaatcctttcttcatctgttgttatttagaactcacctctcacactctgttctttagtgtccttacctttatcttaccacacacatgggtgtttctattatccttggaagcacagacctcgggcatccccttattgcctgatgggccaacaccaacagttacggagtgcttgagaaggggcaagtttcacagaaatggccagatagggccttcctacagagcagcaagagtaggccaagcagaaagactgctgaggtaacacggaccccagcccctgtcagggcctctgccaaggaaataatatggaccatttacctggcaggcagtctgctctctctcaggatcaccacgcatctcaggattggtctaaacttcaagtctcaaccaagtgtctgaagtgaactttgcattgaataaatttttgccatggaaagaacatcaaacaagccactcatctctacagagataagaaaacaagtttggcagagcaagagacagaagaccgtggagaaatcagaagggggaacagtcagtttagttaaggatggaacctgggaaaggccaccattcctgcttgatggggctctgatttgctcttgctcaagtggaataaaaccccatggtcttcttgacatgattcttgatcttttctccactgagacacacttaagtgatgatccttacaggactgacaccctaatgccaataaaagttgctcattatggactgctacaaagacc

SEQ ID NO: 434 - protein, 756 aa, Homosapiens
MAWSPPATLFLFLLLLGQPPPSRPQSLGTTKLRLVGPESKPEEGRLEVLHQGQWGTVCDDNFAIQEATVACRQLGFEAALTWAHSAKYGQGEGPIWLDNVRCVGTESSLDQCGSNGWGVSDCSHSEDVGVICHPRRHRGYLSETVSNALGPQGRRLEEVRLKPILASAKQHSPVTEGAVEVKYEGHWRQVCDQGWTMNNSRVVCGMLGFPSEVPVDSHYYRKVWDLKMRDPKSRLKSLTNKNSFWIHQVTCLGTEPHMANCQVQVAPARGKLRPACPGGMHAVVSCVAGPHFRPPKTKPQRKGSWAEEPRVRLRSGAQVGEGRVEVLMNRQWGTVCDHRWNLISASVVCRQLGFGSAREALFGARLGQGLGPIHLSEVRCRGYERTLSDCPALEGSQNGCQHENDAAVRCNVPNMGFQNQVRLAGGRIPEEGLLEVQVEVNGVPRWGSVCSENWGLTEAMVACRQLGLGFAIHAYKETWFWSGTPRAQEVVMSGVRCSGTELALQQCQRHGPVHCSHGGGRFLAGVSCMDSAPDLVMNAQLVQETAYLEDRPLSQLYCAHEENCLSKSADHMDWPYGYRRLLRFSTQIYNLGRTDFRPKTGRDSWVWHQCHRHYHSIEVFTHYDLLTLNGSKVAEGHKASFCLEDTNCPTGLQRRYACANFGEQGVTVGCWDTYRHDIDCQWVDITDVGPGNYIFQVIVNPHYEVAESDFSNNMLQCRCKYDGHRVWLHNCHTGNSYPANAELSLEQEQRLRNNLI

SEQ ID NO: 435 - DNA, 2046 bp, Homosapiens
ccaatcgctagcaaactccctgcctagcaaggcccagcctggggcagaaatggctgcaagtggccgaggtctctgcaaggctgtggccgcctctcccttcccggcgtggagacgagataacacggaagccaggggaggtctgaagcctgagtatgatgcggtggtgataggagcaggacacaacggactggtggctgcagcgtacctgcagagactgggggtgaacaccgccgtcttcgagaggcgccatgtgatcgggggtgcagctgtcactgaggagatcatcccagggtttaagttctcccgtgcgtcctacctgctcagcctgctgaggccgcagatttacactgatctggagctgaagaaacatgggctgaggcttcatcttcgaaacccctactccttcacccccatgctggaagagggtgcaggcagcaaggtgcccaggtgccttctgctgggcacagacatggcagaaaaccagaagcagatcgcccagttctcccagaaggatgcccaggtctttcccaaatatgaggagttcatgcatcgcttggcattagccattgaccctctgctggatgcggcccccgtggacatggcggccttccagcatggctccttgctgcaaaggatgaggtcgctctccaccctcaagcccctgctgaaggcaggccgcatcctgggagcccagcttccccgatattatgaggtcctcacagctcccattaccaaggtgctggatcagtggttcgagtctgagcctttaaaagccactctagccacagatgcagtgattggagccatgacaagtccccacactccggggagtgggtatgtgctgctgcaccatgtgatggggggcctggagggaatgcagggggcctggggctacgtccaggggggcatgggtgccctctctgatgcgatcgcaagctcagccaccacacatggagcaagcatcttcactgaaaagacagtggcgaaggtgcaggtgaacagtgaaggctgtgttcaaggagttgtgctggaagatggcacagaggtgagaagcaaaatggtgctgtccaacacatcaccgcagatcaccttcctgaagctgacgccacaggagtggcttcctgaggagttcctggagagaatctctcagctggacacccggtcgcctgtcaccaagatcaatgtggccgtagacaggctgcccagcttcctggcggcccccaatgctcccaggggccagccgctgccccatcaccaatgctccatccacctgaactgtgaagacaccctcctccttcatcaggcctttgaagatgccatggatggcctgtcttcccacaggcctgtgattgagctctgcatcccttcctcgctggaccccaccctggctccccctggctgccatgtagtctccctcttcactcagtacacgccctatacgctggctggaggcaaggcctgggacgagcaggagagagacgcttatgcagacagagtgtttgattgcatcgaggtctatgcccctggcttcaaggactctgtggttggcagagacatcctcacaccaccagatttggagagaatcttcgggcttcctggagggaacatattccactgcgccatgtccctggaccagctctacttcgcccgccccgtgcccctgcattctggctaccgctgccctctccagggcctgtatctctgtggaagtggggctcatcctggaggaggtgtgatgggagctgctgggcgaaatgcagcacatgtggcctttagggacctcaagagcatgtgaccctgaaccagctctgacccaggaagaagactccacccctgaattccaagtgctccattggatcagcttcccaggaagttcagcttcgggttagtacataaggccaccacaatgctcaagaaattattttagaaaaaacgtacgagttacatttagtgcaagttgaccttatgcccatgcctccatacatggactggttctgttttattaaaactaatatttcatacagataaaaaaaaaaaaaaaaaaaa

SEQ ID NO: 436 - protein, 581 aa, Homosapiens
MAASGRGLCKAVAASPFPAWRRDNTEARGGLKPEYDAVVIGAGHNGLVAAAYLQRLGVNTAVFERRHVIGGAAVTEEIIPGFKFSRASYLLSLLRPQIYTDLELKKHGLRLHLRNPYSFTPMLEEGAGSKVPRCLLLGTDMAENQKQIAQFSQKDAQVFPKYEEFMHRLALAIDPLLDAAPVDMAAFQHGSLLQRMRSLSTLKPLLKAGRILGAQLPRYYEVLTAPITKVLDQWFESEPLKATLATDAVIGAMTSPHTPGSGYVLLHHVMGGLEGMQGAWGYVQGGMGALSDAIASSATTHGASIFTEKTVAKVQVNSEGCVQGVVLEDGTEVRSKMVLSNTSPQITFLKLTPQEWLPEEFLERISQLDTRSPVTKINVAVDRLPSFLAAPNAPRGQPLPHHQCSIHLNCEDTLLLHQAFEDAMDGLSSHRPVIELCIPSSLDPTLAPPGCHVVSLFTQYTPYTLAGGKAWDEQERDAYADRVFDCIEVYAPGFKDSVVGRDILTPPDLERIFGLPGGNIFHCAMSLDQLYFARPVPLHSGYRCPLQGLYLCGSGAHPGGGVMGAAGRNAAHVAFRDLKSM

SEQ ID NO: 437 - DNA, 3714 bp, Homosapiens
ggtcctacccggaagcgcgcccgggctcctgcaggcggggcgctgtgcgcgccgcgatccggtacgtgggcctccgggctgtcccctctgggggcggcgatcctccctccggagccccccttcaaccctcccggaagtgaggaccagggatgctgtgctgctctcccatgagccagtcaccgagtcggtctgctgcagccctttctgaacctctggccgtctggatgctccactgtgcttgccaagatgaagtgcgtcttggtggccactgagggcgcagaggtcctcttctactggacagatcaggagtttgaagagagtctccggctgaagttcgggcagtcagagaatgaggaagaagagctccctgccctggaggaccagctcagcaccctcctagccccggtcatcatctcctccatgacgatgctggagaagctctcggacacctacacctgcttctccacggaaaatggcaacttcctgtatgtccttcacctgtttggagaatgcctgttcattgccatcaatggtgaccacaccgagagcgagggggacctgcggcggaagctgtatgtgctcaagtacctgtttgaagtgcactttgggctggtgactgtggacggtcatcttatccgaaaggagctgcggcccccagacctggcgcagcgtgtccagctgtgggagcacttccagagcctgctgtggacctacagccgcctgcgggagcaggagcagtgcttcgccgtggaggccctggagcgactgattcacccccagctctgtgagctgtgcatagaggcgctggagcggcacgtcatccaggctgtcaacaccagccccgagcggggaggcgaggaggccctgcatgccttcctgctcgtgcactccaagctgctggcattctactctagccacagtgccagctccctgcgcccggccgacctgcttgccctcatcctcctggttcaggacctctaccccagcgagagcacagcagaggacgacattcagccttccccgcggagggcccggagcagccagaacatccccgtgcagcaggcctggagccctcactccacgggcccaactggggggagctctgcagagacggagacagacagcttctccctccctgaggagtacttcacaccagctccttcccctggcgatcagagctcaggtagcaccatctggctggaggggggcaccccccccatggatgcccttcagatagcagaggacaccctccaaacactggttccccactgccctgtgccttccggccccagaaggatcttcctggatgccaacgtgaaggaaagctactgccccctagtgccccacaccatgtactgcctgcccctgtggcagggcatcaacctggtgctcctgaccaggagccccagcgcgcccctggccctggttctgtcccagctgatggatggcttctccatgctggagaagaagctgaaggaagggccggagcccggggcctccctgcgctcccagcccctcgtgggagacctgcgccagaggatggacaagtttgtcaagaatcgaggggcacaggagattcagagcacctggctggagtttaaggccaaggctttctccaaaagtgagcccggatcctcctgggagctgctccaggcatgtgggaagctgaagcggcagctctgcgccatctaccggctgaactttctgaccacagcccccagcaggggaggcccacacctgccccagcacctgcaggaccaagtgcagaggctcatgcgggagaagctgacggactggaaggacttcttgctggtgaagagcaggaggaacatcaccatggtgtcctacctagaagacttcccaggcttggtgcacttcatctatgtggaccgcaccactgggcagatggtggcgccttccctcaactgcagtcaaaagacctcgtcggagttgggcaaggggccgctggctgcctttgtcaaaactaaggtctggtctctgatccagctggcgcgcagatacctgcagaagggctacaccacgctgctgttccaggagggggatttctactgctcctacttcctgtggttcgagaatgacatggggtacaaactccagatgatcgaggtgcccgtcctctccgacgactcagtgcctatcggcatgctgggaggagactactacaggaagctcctgcgctactacagcaagaaccgcccaaccgaggctgtcaggtgctacgagctgctggccctgcacctgtctgtcatccccactgacctgctggtgcagcaggccggccagctggcccggcgcctctgggaggcctcccgtatccccctgctctaggccaaggtggccgcagtctgcctttgcatcctgtcctccagccacccttgcttgccactgttccccatgacgagagcctcctgtctgcagtggccatcctgaggatagggcagagtgcccagggtggccccagggcttctaaaaccccacctagaccaccctccatgtcaggtactgagcaaggccccagatccttctctctggaggaagagggaagcccaggggtcctgtttgtaaaacaacggtggcaacagctcctcttccagagctgcctctgcctttatcctgggagatggggaggaagccccatctctgctgttccctgcgtggaggaagcccacccagcaagctctctcctaccccaggtaaaaggtgctcctttgcctgggtttgaattccagcgctgccacttcctctctgcacctcctggcaagtttcttctattccccacgtttaaagcgatggcacctccgtcccagggtggtgtgaggattacccagtgtggtaggtgctcaataaatgttggtcattgttatcactgaagcccaacatgctagtgcttctagacccttctgtcagtgctgataagcccttgctaagtcccagccccttcatgcttggctggcgtctgccctagggctggggttctcaagcccctggccctggcccagagatttggattcccttggcggccgtggagcccagcctttgatgtctttcaaagcttctgtggtgcgccctggattgagaaccaccacccgaggggtacagcccctctcttccaaccgagaagttcctgtcccagaatggacccagggacaagagaccctgagagccctgggactgggagtgtctgctcctctgaggccaggaggccggtgctgggccagagaggacggcgtggcgaaagtcagcgtccactgcagcacaggatcagatggccgtgtgctgtgcatgcaggagcctcgccttctgtgtctttagtcttgagccaaaatttgctcaaagactgatctcttccttgcagggaacagctttggggctgggggaactagaacccacatgttggtctaaaccctgagaaggtggcagtgaggaagtatcccctcaggtgactggatctgtgttcctccttaacatcatctgatggaatggcaatgaaaagcgtggattgtggaaaatacagaaaaacataaaggaaaaaactccaatcccctgagcccaccactgttcaggacccctgcttttgtcacctactatttccctttagtttttagcagcggctggatgtgatatgtctagtttaaccagtccccttgatctttctatataataaataacacaggagtgaacatcctgaatcag

SEQ ID NO: 438 - protein, 700 aa, Homosapiens [sequence omitted]

SEQ ID NO: 439 - DNA, 3667 bp, Homosapiens
ggtcctacccggaagcgcgcccgggctcctgcaggcggggcgctgtgcgcgccgcgatccggtacgtgggcctccgggctgtcccctctgggggcggcgatcctccctccggagccccccttcaaccctcccggaagtgagcatttgcaggaccagggatgctgtgctgctctcccatgagccagtcaccgagtcggtctgctgcagccctttctgaacctctggccgtctggatgctccactgtgcttgccaagatgaagtgcgtcttggtggccactgagggcgcagaggtcctcttctactggacagatcaggagtttgaagagagtctccggctgaagttcgggcagtcagagaatgaggaagaagagctccctgccctggaggaccagctcagcaccctcctagccccggtcatcatctcctccatgacgatgctggagaagctctcggacacctacacctgcttctccacggaaaatggcaacttcctgtatgtccttcacctgtttggagaatgcctgttcattgccatcaatggtgaccacaccgagagcgagggggacctgcggcggaagctgtatgtgctcaagtacctgtttgaagtgcactttgggctggtgactgtggacggtcatcttatccgaaaggagctgcggcccccagacctggcgcagcgtgtccagctgtgggagcacttccagagcctgctgtggacctacagccgcctgcgggagcaggagcagtgcttcgccgtggaggtgactactgggcgcgggagtcctcaggacttgaagctgtcaggccctggagcgactgattcacccccagctctgtgagctgtgcatagaggcgctggagcggcacgtcatccaggctgtcaacaccagccccgagcggggaggcgaggaggccctgcatgccttcctgctcgtgcactccaagctgctggcattctactctagccacagtgccagctccctgcgcccggccgacctgcttgccctcatcctcctggttcaggacctctaccccagcgagagcacagcagaggacgacattcaggagacagacagcttctccctccctgaggagtacttcacaccagctccttcccctggcgatcagagctcaggtagcaccatctggctggaggggggcaccccccccatggatgcccttcagatagcagaggacaccctccaaacactggttccccactgccctgtgccttccggccccagaaggatcttcctggatgccaacgtgaaggaaagctactgccccctagtgccccacaccatgtactgcctgcccctgtggcagggcatcaacctggtgctcctgaccaggagccccagcgcgcccctggccctggttctgtcccagctgatggatggcttctccatgctggagaagaagctgaaggaagggccggagcccggggcctccctgcgctcccagcccctcgtgggagacctgcgccagaggatggacaagtttgtcaagaatcgaggggcacaggagattcagagcacctggctggagtttaaggccaaggctttctccaaaagtgagcccggatcctcctgggagctgctccaggcatgtgggaagctgaagcggcagctctgcgccatctaccggctgaactttctgaccacagcccccagcaggggaggcccacacctgccccagcacctgcaggaccaagtgcagaggctcatgcgggagaagctgacggactggaaggacttcttgctggtgaagagcaggaggaacatcaccatggtgtcctacctagaagacttcccaggcttggtgcacttcatctatgtggaccgcaccactgggcagatggtggcgccttccctcaactgcagtcaaaagacctcgtcggagttgggcaaggggccgctggctgcctttgtcaaaactaaggtctggtctctgatccagctggcgcgcagatacctgcagaagggctacaccacgctgctgttccaggagggggatttctactgctcctacttcctgtggttcgagaatgacatggggtacaaactccagatgatcgaggtgcccgtcctctccgacgactcagtgcctatcggcatgctgggaggagactactacaggaagctcctgcgctactacagcaagaaccgcccaaccgaggctgtcaggtgctacgagctgctggccctgcacctgtctgtcatccccactgacctgctggtgcagcaggccggccagctggcccggcgcctctgggaggcctcccgtatccccctgctctaggccaaggtggccgcagtctgcctttgcatcctgtcctccagccacccttgcttgccactgttccccatgacgagagcctcctgtctgcagtggccatcctgaggatagggcagagtgcccagggtggccccagggcttctaaaaccccacctagaccaccctccatgtcaggtactgagcaaggccccagatccttctctctggaggaagagggaagcccaggggtcctgtttgtaaaacaacggtggcaacagctcctcttccagagctgcctctgcctttatcctgggagatggggaggaagccccatctctgctgttccctgcgtggaggaagcccacccagcaagctctctcctaccccaggtaaaaggtgctcctttgcctgggtttgaattccagcgctgccacttcctctctgcacctcctggcaagtttcttctattccccacgtttaaagcgatggcacctccgtcccagggtggtgtgaggattacccagtgtggtaggtgctcaataaatgttggtcattgttatcactgaagcccaacatgctagtgcttctagacccttctgtcagtgctgataagcccttgctaagtcccagccccttcatgcttggctggcgtctgccctagggctggggttctcaagcccctggccctggcccagagatttggattcccttggcggccgtggagcccagcctttgatgtctttcaaagcttctgtggtgcgccctggattgagaaccaccacccgaggggtacagcccctctcttccaaccgagaagttcctgtcccagaatggacccagggacaagagaccctgagagccctgggactgggagtgtctgctcctctgaggccaggaggccggtgctgggccagagaggacggcgtggcgaaagtcagcgtccactgcagcacaggatcagatggccgtgtgctgtgcatgcaggagcctcgccttctgtgtctttagtcttgagccaaaatttgctcaaagactgatctcttccttgcagggaacagctttggggctgggggaactagaacccacatgttggtctaaaccctgagaaggtggcagtgaggaagtatcccctcaggtgactggatctgtgttcctccttaacatcatctgatggaatggcaatgaaaagcgtggattgtggaaaatacagaaaaacataaaggaaaaaactccaatcccctgagcccaccactgttcaggacccctgcttttgtcacctactatttccctttagtttttagcagcggctggatgtgatatgtctagtttaaccagtccccttgatctttctatataataaataacacaggagtgaacatcctgaatcag

SEQ ID NO: 440 - protein, 194 aa, Homosapiens
MKCVLVATEGAEVLFYWTDQEFEESLRLKFGQSENEEEELPALEDQLSTLLAPVIISSMTMLEKLSDTYTCFSTENGNFLYVLHLFGECLFIAINGDHTESEGDLRRKLYVLKYLFEVHFGLVTVDGHLIRKELRPPDLAQRVQLWEHFQSLLWTYSRLREQEQCFAVEVTTGRGSPQDLKLSGPGATDSPPAL

SEQ ID NO: 441 - DNA, 3320 bp, Homosapiens
ggtcctacccggaagcgcgcccgggctcctgcaggcggggcgctgtgcgcgccgcgatccggtacgtgggcctccgggctgtcccctctgggggcggcgatcctccctccggagccccccttcaaccctcccggaagtgagcatttgcaggaccagggatgctgtgctgctctcccatgagccagtcaccgagtcggtctgctgcagccctttctgaacctctggccgtctggatgctccactgtgcttgccaagatgaagtgcgtcttggtggccactgagggcgcagaggtcctcttctactggacagatcaggagtttgaagagagtctccggctgaagttcgggcagtcagagaatgaggaagaagagctccctgccctggaggaccagctcagcaccctcctagccccggtcatcatctcctccatgacgatgctggagaagctctcggacacctacacctgcttctccacggaaaatggcaacttcctgtatgtccttcacctggctgcggcccccagacctggcgcagcgtgtccagctgtgggagcacttccagagcctgctgtggacctacagccgcctgcgggagcaggagcagtgcttcgccgtggagccacagtgccagctccctgcgcccggccgacctgcttgccctcatcctcctggttcaggacctctaccccagcgagagcacagcagaggacgacattcaggagacagacagcttctccctccctgaggagtacttcacaccagctccttcccctggcgatcagagctcaggtagcaccatctggctggaggggggcaccccccccatggatgcccttcagatagcagaggacaccctccaaacactggttccccactgccctgtgccttccggccccagaaggatcttcctggatgccaacgtgaaggaaagctactgccccctagtgccccacaccatgtactgcctgcccctgtggcagggcatcaacctggtgctcctgaccaggagccccagcgcgcccctggccctggttctgtcccagctgatggatggcttctccatgctggagaagaagctgaaggaagggccggagcccggggcctccctgcgctcccagcccctcgtgggagacctgcgccagaggatggacaagtttgtcaagaatcgaggggcacaggagattcagagcacctggctggagtttaaggccaaggctttctccaaaagtgagcccggatcctcctgggagctgctccaggcatgtgggaagctgaagcggcagctctgcgccatctaccggctgaactttctgaccacagcccccagcaggggaggcccacacctgccccagcacctgcaggaccaagtgcagaggctcatgcgggagaagctgacggactggaaggacttcttgctggtgaagagcaggaggaacatcaccatggtgtcctacctagaagacttcccaggcttggtgcacttcatctatgtggaccgcaccactgggcagatggtggcgccttccctcaactgcagtcaaaagacctcgtcggagttgggcaaggggccgctggctgcctttgtcaaaactaaggtctggtctctgatccagctggcgcgcagatacctgcagaagggctacaccacgctgctgttccaggagggggatttctactgctcctacttcctgtggttcgagaatgacatggggtacaaactccagatgatcgaggtgcccgtcctctccgacgactcagtgcctatcggcatgctgggaggagactactacaggaagctcctgcgctactacagcaagaaccgcccaaccgaggctgtcaggtgctacgagctgctggccctgcacctgtctgtcatccccactgacctgctggtgcagcaggccggccagctggcccggcgcctctgggaggcctcccgtatccccctgctctaggccaaggtggccgcagtctgcctttgcatcctgtcctccagccacccttgcttgccactgttccccatgacgagagcctcctgtctgcagtggccatcctgaggatagggcagagtgcccagggtggccccagggcttctaaaaccccacctagaccaccctccatgtcaggtactgagcaaggccccagatccttctctctggaggaagagggaagcccaggggtcctgtttgtaaaacaacggtggcaacagctcctcttccagagctgcctctgcctttatcctgggagatggggaggaagccccatctctgctgttccctgcgtggaggaagcccacccagcaagctctctcctaccccaggtaaaaggtgctcctttgcctgggtttgaattccagcgctgccacttcctctctgcacctcctggcaagtttcttctattccccacgtttaaagcgatggcacctccgtcccagggtggtgtgaggattacccagtgtggtaggtgctcaataaatgttggtcattgttatcactgaagcccaacatgctagtgcttctagacccttctgtcagtgctgataagcccttgctaagtcccagccccttcatgcttggctggcgtctgccctagggctggggttctcaagcccctggccctggcccagagatttggattcccttggcggccgtggagcccagcctttgatgtctttcaaagcttctgtggtgcgccctggattgagaaccaccacccgaggggtacagcccctctcttccaaccgagaagttcctgtcccagaatggacccagggacaagagaccctgagagccctgggactgggagtgtctgctcctctgaggccaggaggccggtgctgggccagagaggacggcgtggcgaaagtcagcgtccactgcagcacaggatcagatggccgtgtgctgtgcatgcaggagcctcgccttctgtgtctttagtcttgagccaaaatttgctcaaagactgatctcttccttgcagggaacagctttggggctgggggaactagaacccacatgttggtctaaaccctgagaaggtggcagtgaggaagtatcccctcaggtgactggatctgtgttcctccttaacatcatctgatggaatggcaatgaaaagcgtggattgtggaaaatacagaaaaacataaaggaaaaaactccaatcccctgagcccaccactgttcaggacccctgcttttgtcacctactatttccctttagtttttagcagcggctggatgtgatatgtctagtttaaccagtccccttgatctttctatataataaataacacaggagtgaacatcctgaatcag

SEQ ID NO: 442 - protein, 195 aa, Homosapiens
MKCVLVATEGAEVLFYWTDQEFEESLRLKFGQSENEEEELPALEDQLSTLLAPVIISSMTMLEKLSDTYTCFSTENGNFLYVLHLAAAPRPGAACPAVGALPEPAVDLQPPAGAGAVLRRGATVPAPCARPTCLPSSSWFRTSTPARAQQRTTFRRQTASPSLRSTSHQLLPLAIRAQVAPSGWRGAPPPWMPFR

SEQ ID NO: 443 - DNA, 1625 bp, Homosapiens
ggtcctacccggaagcgcgcccgggctcctgcaggcggggcgctgtgcgcgccgcgatccggtacgtgggcctccgggctgtcccctctgggggcggcgatcctccctccggagccccccttcaaccctcccggaagtgagcatttgcaggaccagggatgctgtgctgctctcccatgagccagtcaccgagtcggtctgctgcagccctttctgaacctctggccgtctggatgctccactgtgcttgccaagatgaagtgcgtcttggtggccactgagggcgcagaggtcctcttctactggacagatcaggagtttgaagagagtctccggctgaagttcgggcagtcagagaatgaggaagaagagctccctgccctggaggaccagctcagcaccctcctagccccggtcatcatctcctccatgacgatgctggagaagctctcggacacctacacctgcttctccacggaaaatggcaacttcctgtatgtccttcacctgtttggagaatgcctgttcattgccatcaatggtgaccacaccgagagcgagggggacctgcggcggaagctgtatgtgctcaagtacctgtttgaagtgcactttgggctggtgactgtggacggtcatcttatccgaaaggagctgcggcccccagacctggcgcagcgtgtccagctgtgggagcacttccagagcctgctgtggacctacagccgcctgcgggagcaggagcagtgcttcgccgtggaggccctggagcgactgattcacccccagctctgtgagctgtgcatagaggcgctggagcggcacgtcatccaggctgtcaacaccagccccgagcggggaggcgaggaggccctgcatgccttcctgctcgtgcactccaagctgctggcattctactctagccacagtgccagctccctgcgcccggccgacctgcttgccctcatcctcctggttcaggacctctaccccagcgagagcacagcagaggacgacattcagccttccccgcggagggcccggagcagccagaacatccccgtgcagcaggcctggagccctcactccacgggcccaactggggggagctctgcagagacggagacagacagcttctccctccctgaggagtacttcacaccagctccttcccctggcgatcagagctcaggtgaggaccggaggaaagcaggaggaaacaatagctagctgcgagcgacaggcagcccaggacatctgtcttaggctccagtggacccccgtgcctcctaaggcttgagtgcaggtacccgtgttcctagagcacaggacgctgtctgcggctccccatcttccctgccagctccagcctgaactcaaggattgttaagaccactccactgatccctaaagctgttgatgacaagttgattcatttaaaacttctgtacatgcattctcagactcatcttttttgtaattaaaattaaaaattaagttaaatttagtaataatcatctaatttctatacattctaaaatatattcagcatctgtagtttatactttgtttctccaaagtatgtgggtaaacaataaaaaaaaactataaatattcaaaaaaaa

SEQ ID NO: 444 - protein, 324 aa, Homosapiens
MKCVLVATEGAEVLFYWTDQEFEESLRLKFGQSENEEEELPALEDQLSTLLAPVIISSMTMLEKLSDTYTCFSTENGNFLYVLHLFGECLFIAINGDHTESEGDLRRKLYVLKYLFEVHFGLVTVDGHLIRKELRPPDLAQRVQLWEHFQSLLWTYSRLREQEQCFAVEALERLIHPQLCELCIEALERHVIQAVNTSPERGGEEALHAFLLVHSKLLAFYSSHSASSLRPADLLALILLVQDLYPSESTAEDDIQPSPRRARSSQNIPVQQAWSPHSTGPTGGSSAETETDSFSLPEEYFTPAPSPGDQSSGEDRRKAGGNNS

SEQ ID NO: 445 - DNA, 2293 bp, Homosapiens
aaggacaattagtcactagcgagacccagtaggaagagaggtttaaatcagagggattgaatgagggtgctttgtgccttccctgaagccatgccctccagcaactcccgcccccccgcgtgcctagccccgggggctctctacttggctctgttgctccatctctccctttcctcccaggctggagacaggagacccttgcctgtagacagagctgcaggtttgaaggaaaagaccctgattctacttgatgtgagcaccaagaacccagtcaggacagtcaatgagaacttcctctctctgcagctggatccgtccatcattcatgatggctggctcgatttcctaagctccaagcgcttggtgaccctggcccggggactttcgcccgcctttctgcgcttcgggggcaaaaggaccgacttcctgcagttccagaacctgaggaacccggcgaaaagccgcgggggcccgggcccggattactatctcaaaaactatgaggatgacattgttcgaagtgatgttgccttagataaacagaaaggctgcaagattgcccagcaccctgatgttatgctggagctccaaagggagaaggcagctcagatgcatctggttcttctaaaggagcaattctccaatacttacagtaatctcatattaacagccaggtctctagacaaactttataactttgctgattgctctggactccacctgatatttgctctaaatgcactgcgtcgtaatcccaataactcctggaacagttctagtgccctgagtctgttgaagtacagcgccagcaaaaagtacaacatttcttgggaactgggtaatgagccaaataactatcggaccatgcatggccgggcagtaaatggcagccagttgggaaaggattacatccagctgaagagcctgttgcagcccatccggatttattccagagccagcttatatggccctaatattgggcggccgaggaagaatgtcatcgccctcctagatggattcatgaaggtggcaggaagtacagtagatgcagttacctggcaacattgctacattgatggccgggtggtcaaggtgatggacttcctgaaaactcgcctgttagacacactctctgaccagattaggaaaattcagaaagtggttaatacatacactccaggaaagaagatttggcttgaaggtgtggtgaccacctcagctggaggcacaaacaatctatccgattcctatgctgcaggattcttatggttgaacactttaggaatgctggccaatcagggcattgatgtcgtgatacggcactcattttttgaccatggatacaatcacctcgtggaccagaattttaacccattaccagactactggctctctctcctctacaagcgcctgatcggccccaaagtcttggctgtgcatgtggctgggctccagcggaagccacggcctggccgagtgatccgggacaaactaaggatttatgctcactgcacaaaccaccacaaccacaactacgttcgtgggtccattacactttttatcatcaacttgcatcgatcaagaaagaaaatcaagctggctgggactctcagagacaagctggttcaccagtacctgctgcagccctatgggcaggagggcctaaagtccaagtcagtgcaactgaatggccagcccttagtgatggtggacgacgggaccctcccagaattgaagccccgcccccttcgggccggccggacattggtcatccctccagtcaccatgggcttttttgtggtcaagaatgtcaatgctttggcctgccgctaccgataagctatcctcacactcatggctaccagtgggcctgctgggctgcttccactcctccactccagtagtatcctctgttttcagacatcctagcaaccagcccctgctgccccatcctgctggaatcaacacagacttgctctccaaagagactaaatgtcatagcgtgatcttagcctaggtaggccacatccatcccaaaggaaaatgtagacatcacctgtacctatataaggataaaggcatgtgtatagagcagaatgtttcccttcatgtgcactatgaaaacgagctgacagcacactcccaggagaaatgtttccagacaactccccatgatcctgtcacacagcattataaccacaaatccaaaccttagcctgctgctgctgctgccctcagaggaagatgaggaaggaaaaaaactgggtggacctacaaaaacccatcctctccc

SEQ ID NO: 446 - protein, 592 aa, Homosapiens
MRVLCAFPEAMPSSNSRPPACLAPGALYLALLLHLSLSSQAGDRRPLPVDRAAGLKEKTLILLDVSTKNPVRTVNENFLSLQLDPSIIHDGWLDFLSSKRLVTLARGLSPAFLRFGGKRTDFLQFQNLRNPAKSRGGPGPDYYLKNYEDDIVRSDVALDKQKGCKIAQHPDVMLELQREKAAQMHLVLLKEQFSNTYSNLILTARSLDKLYNFADCSGLHLIFALNALRRNPNNSWNSSSALSLLKYSASKKYNISWELGNEPNNYRTMHGRAVNGSQLGKDYIQLKSLLQPIRIYSRASLYGPNIGRPRKNVIALLDGFMKVAGSTVDAVTWQHCYIDGRVVKVMDFLKTRLLDTLSDQIRKIQKVVNTYTPGKKIWLEGVVTTSAGGTNNLSDSYAAGFLWLNTLGMLANQGIDVVIRHSFFDHGYNHLVDQNFNPLPDYWLSLLYKRLIGPKVLAVHVAGLQRKPRPGRVIRDKLRIYAHCTNHHNHNYVRGSITLFIINLHRSRKKIKLAGTLRDKLVHQYLLQPYGQEGLKSKSVQLNGQPLVMVDDGTLPELKPRPLRAGRTLVIPPVTMGFFVVKNVNALACRYR

SEQ ID NO: 447 - DNA, 4812 bp, Homosapiens
ctggctggctggctgtacacctcgctgccgccgggcttcgggggcaccggggaagactacagcgaagaggggatccacttcccgtggctgccggcgctcgtgtgcaccggcgcggtattcctgggcgccgaaatctgcccctactcagtgtgttcgcggcacgggctggccatcgcctcgcacagcgtgtgcctgacccggcttctgatggcagccgccttccccgtgtgctacccgctgggccgcctgctggactgggcgctgcgccaggagataagcaccttctacacgcgggagaagttgctggagacgttgcgggccgcagacccctacagtgacctggtgaaggaggagctcaacatcatacagggtgccctggagctgcgcaccaaagtggtggaggaggtgctgacccccctgggagactgcttcatgctgcgctcagacgcggtgctcgacttcgccactgtctccgagatcctgcgcagcggctacactcgcatcccagtgtacgagggtgaccagcggcacaacattgtggacattttatttgtcaaggacttggccttcgtggaccccgacgactgcaccccgctcctcactgtcacccgcttctacaaccggcccctgcattgtgttttcaatgacacccgactggacacggttctggaggagtttaagaagggaaaatctcacctggccattgtccagcgggtgaataatgagggagaaggggaccctttctatgaggtgatgggcattgtcacgctggaggatatcatagaggagattatcaagtcggagatcctggatgaaactgatctctacactgacaatcggaaaaagcagagggtcccgcaacgggagcggaagcggcatgacttctccttgtttaagctttcggacacggagatgcgggtgaagatctcaccacagcttctgctagccacacaccgcttcatggccacagaagtggagccctttaagtctctgtacctttcggagaagatcctgctccggctcctgaaacatcccaacgtgatccaggagctgaagtttgatgagaagaacaagaaggccccggaacactacctctaccagcgcaaccgccctgtggactactttgtgctgcttctacagggtaaagtggaggtggaggttggtaaggaaggccttcgctttgaaaatggagcctttacttactatggcgtcccagccatcatgaccactgcttgctcagataatgacgtgcggaaggttggaagtctggctggatcttctgtctttctaaaccggtccccttctcgctgcagtgggttgaatcgctctgagtctccaaaccgagagcgcagtgactttgggggcagcaacacccagctgtacagcagcagcaacaacctctacatgcctgactactcagtccacatcctcagcgatgtgcagtttgtgaagatcacacggcagcaatatcagaacgcactcactgcctgccacatggacagctcacctcagtcccctgacatggaggccttcacagacggggactccactaaggcccccacaacccggggcacaccccagacccctaaggatgaccccgccatcacgctcctcaacaacaggaacagcctgccgtgcagccgctcagacgggctgagaagccccagcgaggtagtgtacctgaggatggaggagctggccttcacccaggaagaaatgactgacttcgaggagcacagcacacagcagctcacgctgtctcctgcagccgttcccacgagagcagcatcagatagtgaatgttgtaacatcaacctggatacagagaccagcccctgcagtagcgattttgaggaaaacgtgggcaagaagctgctgagaaccttgagtggccaaaaaaggaagaggtcaccagaaggagagagaacctctgaggacaactccaatttaacacctctgatcacatgacagggcaaagccagcattcactgggtgtgtgaaattccagagctttgggggagaatccaccctcccatcatctgcttcccccaaggcctcccacaggtgacagaatgttctgccttcccttccatctcttcacccctagctgtcagtttggcagattttccctcgttacctccagttcgactcagaaccttgacatggccataacagaaggaggtgcctctgatagaacatgctagaaatggtcttttccacagcatagtctgggactggaaaagagatgtctgactgcaagctgacaatgccactctgggacccctgatgctcttctttgttctttgggtcccctgatgccataggagacctatcgtcttggaacttgccattctttcctccagaacaaaatgttaactttctaacacatttcatgcatagcttggctcagaaggtgccattggcagacaggcacatgggaggctggagtaggaggtctgaagattagttcaggggatggaccaagaatttcccccagagctttaaagaagtgggactcagccatgttggcgcgtgattgacattacagcacagaaaactgttagtgactggtttcctgttagataagggttccagcagcctggggcagtatgtctcagctggaatggaaagaatgtgagatggaacctcaagtcactgtttttaccagggacacatctgttttggctcccaatcagcagtcttcaatcgatcaataattctgctctggaagagaaggaacagggagcagagagacccaactgggagccagagatggaacttcaggtcttaagtgcaaatcaaagcaaaaaacaaacaaaacttacatggaaaaactgtaagtgctgaaagcaagtttagccatgacaaaccaaagagtgcccaggtcagccaagaaagatacataatctcatgggacttcagtgggagttacacaggaatgttgaagaatcattcttctttttcatgcatttgtccttctcccacccccttactacaccctagcagatcagctgagtgtactttattccaagaacttactggatctctggtttttctcctgaagttggggcaggtgcaattccaagcataaccaccagatggcagagtgaccgcgcatacctgcttccaagaataaaacagttctgaaaagcaaccgcaaagccgggcgcggtggctcacacctgtaatcccaacagtttggaagaccgaggcgggtggatcacttgaagtcaggagtttgagaccagcctggccaacatggtgaaacccccatctctcctgggcatgtagtcccagctactcgggaggctgaggcaggagaatcgcttgaacctgggaggcagaggttgcagtgagctgagatcacaccactgcacttcatcctaggcaacagagcgagactctgtctcccccctcaaaaaaaaaaaagaaagaaagaaagagaaaagaaaagaaaagcaaccacagccagccttagggaaaacttggaagtaagtgaaatttgtcttcagaataactatctccctttctgatctgtctcctactctttagatgttctcagtcaagtactcactgaactcattgatcgagtgctgtctgctaaatctccaaaccattcccaaacctttccccgtagtataccatccagcttccctccccttcctccaaaaccctccctcccacctccccacacccattgagtcattcacaggcaggagggagactgatcattcctctgggttatctgcatctcaaaagaaaatgcttacccacaggaactgttaactcaggggttcttaacttggggtccatcaccccagggggtccatagttggacttcagagggtctatgaaacccctaaaactgtcagtatttaatgtatttattcttgtatgttttttccagagcattaaagctttcataaggttctcaaaggtctcagacctacaaagagttaaaacaaacagacaaacaaaaaaaaacactactattttaaatagtggaactttcagcccagcgtttctgcaatgcagagtgaagtggatactgggcagttcgagacaggtttttaatcataagtggtcttttcaaatgtccatcaattgatggggaaggctggcacccaccaagaagtggaagtcctcagaaattctcggcacaccctagagtattgtacaaccaacacccccacataactttgtcccctcttccccaacaacccagagcaggtgttgcagacaggagggccacagcgtgtggaagtaaagactttggagctagagatgccttttccagcaatgattattgacttcaccacaccccttgcctggcctggcctgaggctcagcagtgcatgacttctcgtagataacttcacagtcatccagtcccaacacctgctcttgcctggtaggaacaggcgaagtgtcagccctcaatgttgggtacttagacccaaaccaataaatggtgagttttgaacaagaactaccatcatgcaggcttcttgcccagctgaccactggccccggggtgcctgcctggctggtcttcatcacctgaggccaccaggctcaagccactgctgttgcattacacccatccctttgcaaaatccctatggagcctgtcaccactcccctccctatatacccccaccccacaaagattttcttcaggttaaaaaaaaagtttaaaaaaaagattttaaaataaagcatttatgaaggcttaataaattgtaaataatttttaaataaaatgaaaatgcctttcctggaaaaaaaaaaaaaaaaaaaaaaaaaaaaaaa

SEQ ID NO: 448 - protein, 586 aa, Homosapiens
MAAAFPVCYPLGRLLDWALRQEISTFYTREKLLETLRAADPYSDLVKEELNIIQGALELRTKVVEEVLTPLGDCFMLRSDAVLDFATVSEILRSGYTRIPVYEGDQRHNIVDILFVKDLAFVDPDDCTPLLTVTRFYNRPLHCVFNDTRLDTVLEEFKKGKSHLAIVQRVNNEGEGDPFYEVMGIVTLEDIIEEIIKSEILDETDLYTDNRKKQRVPQRERKRHDFSLFKLSDTEMRVKISPQLLLATHRFMATEVEPFKSLYLSEKILLRLLKHPNVIQELKFDEKNKKAPEHYLYQRNRPVDYFVLLLQGKVEVEVGKEGLRFENGAFTYYGVPAIMTTACSDNDVRKVGSLAGSSVFLNRSPSRCSGLNRSESPNRERSDFGGSNTQLYSSSNNLYMPDYSVHILSDVQFVKITRQQYQNALTACHMDSSPQSPDMEAFTDGDSTKAPTTRGTPQTPKDDPAITLLNNRNSLPCSRSDGLRSPSEVVYLRMEELAFTQEEMTDFEEHSTQQLTLSPAAVPTRAASDSECCNINLDTETSPCSSDFEENVGKKLLRTLSGQKRKRSPEGERTSEDNSNLTPLIT

SEQ ID NO: 449 - DNA, 1941 bp, Homosapiens
tctcttgattcctagtctctcgatatggcacctccgtcagtctttgccgaggttccgcaggcccagcctgtcctggtcttcaagctcactgccgacttcagggaggatccggacccccgcaaggtcaacctgggagtgggagcatatcgcacggatgactgccatccctgggttttgccagtagtgaagaaagtggagcagaagattgctaatgacaatagcctaaatcacgagtatctgccaatcctgggcctggctgagttccggagctgtgcttctcgtcttgcccttggggatgacagcccagcactcaaggagaagcgggtaggaggtgtgcaatctttggggggaacaggtgcacttcgaattggagctgatttcttagcgcgttggtacaatggaacaaacaacaagaacacacctgtctatgtgtcctcaccaacctgggagaatcacaatgctgtgttttccgctgctggttttaaagacattcggtcctatcgctactgggatgcagagaagagaggattggacctccagggcttcctgaatgatctggagaatgctcctgagttctccattgttgtcctccacgcctgtgcacacaacccaactgggattgacccaactccggagcagtggaagcagattgcttctgtcatgaagcaccggtttctgttccccttctttgactcagcctatcagggcttcgcatctggaaacctggagagagatgcctgggccattcgctattttgtgtctgaaggcttcgagttcttctgtgcccagtccttctccaagaacttcgggctctacaatgagagagtcgggaatctgactgtggttggaaaagaacctgagagcatcctgcaagtcctttcccagatggagaagatcgtgcggattacttggtccaatccccccgcccagggagcacgaattgtggccagcaccctctctaaccctgagctctttgaggaatggacaggtaatgtgaagacaatggctgaccggattctgaccatgagatctgaactcagggcacgactagaagccctcaaaacccctgggacctggaaccacatcactgatcaaattggcatgttcagcttcactgggttgaaccccaagcaggttgagtatctggtcaatgaaaagcacatctacctgctgccaagtggtcgaatcaacgtgagtggcttaaccaccaaaaatctagattacgtggccacctccatccatgaagcagtcaccaaaatccagtgaagaaacaccacccgtccagtaccaccaaagtagttctctgtcatgtgtgttccctgcctgcacaaacctacatgtacataccatggattagagacacttgcaggactgaaagctgctctggtgaggcagcctctgtttaaaccggccccacatgaagagaacatcccttgagacgaatttggagactgggattagagcctttggaggtcaaagcaaattaagatttttatttaagaataaaagagtactttgatcatgagacataggtatcttgtccctctcactaaaaaggagtgttgtgtgtggcggccacgtgcttctatgtggtgtttgactctgtacaaattctagtcccaaagatcaagttgtctgaaggagccaaagtgtgaatgtgggtgtcggctgcggcattaaattcatcatctcaacccagagtgtctggtctccctgctctttctgcatggttgtgtccctagtcctaagctttggttctttagggtgactgtggtaagaaggatatttaatcatgacatgcacggacacgtacatatttaactgaaacaagttttaccaaacagtatttactcgtgatgtgcgtagtgcattctgatatttttgagccattctattgtgttctacttcacctaaaaaaataaaataaaaatgttgatcaag

SEQ ID NO: 450 - protein, 413 aa, Homosapiens
MAPPSVFAEVPQAQPVLVFKLTADFREDPDPRKVNLGVGAYRTDDCHPWVLPVVKKVEQKIANDNSLNHEYLPILGLAEFRSCASRLALGDDSPALKEKRVGGVQSLGGTGALRIGADFLARWYNGTNNKNTPVYVSSPTWENHNAVFSAAGFKDIRSYRYWDAEKRGLDLQGFLNDLENAPEFSIVVLHACAHNPTGIDPTPEQWKQIASVMKHRFLFPFFDSAYQGFASGNLERDAWAIRYFVSEGFEFFCAQSFSKNFGLYNERVGNLTVVGKEPESILQVLSQMEKIVRITWSNPPAQGARIVASTLSNPELFEEWTGNVKTMADRILTMRSELRARLEALKTPGTWNHITDQIGMFSFTGLNPKQVEYLVNEKHIYLLPSGRINVSGLTTKNLDYVATSIHEAVTKIQ

SEQ ID NO: 451 - DNA, 7777 bp, Homosapiens
agaggggaaaagaacgtcaggagagtgaacgggagcaaataaaacgctgtccattctgactggaagggccagagccgtgtctaagggcgggggccgggaggtggcccgcggtggtgtctctaccaggacgaggcctggggtatctgaagaggggatgacgtccaggcgctttgctaaagggaagccagaagggtatgagttgctagggtcagagatggggctttcggctcgagtctttccctgcagggcagagagtccgaagagcccgagaaggcagggaggacagtgggcctggtccttccccggccggcagagggagtcccgagatggaacgtccagctctcctctaacgaaaagcgtttgcatggctgtctcgccaattctgtacctcccggggctgaggaagagccgaggtgactagaagctagcgacaagtgccggccacctccgacgccaggcgccgggcttggagcccgacgggccgaattctcgcgagagcggccgccgccatttttccattgattgcagcgggctgggggaggggccgacgacgaaggcggctgtggtagcggcggcggcggcggcggagccctgggtcggtgtctgcgcgctggtgtctgaggcccaggctgaggcctccgctattgctggagcgcaggcggcggagaggatgactgccgctgccattctctcttgagctagcgagccgccgccaccctccaccctcccccggcagggcggagaggagcggccggagtcagcgatggtgcccggcgaggagaaccaactggtcccgaaagaggcaccactggatcataccagtgacaagtcacttctcgacgctaattttgagccaggaaagaagaactttctgcatttgacagataaagatggtgaacaacctcaaatactgctggaggattccagtgctggggaagacagtgttcatgacaggtttataggtccgcttccaagagaaggttctgggggttctaccagtgattatgtcagccaaagctactcctactcatctattttgaataaatcagaaactggatatgtgggactagtaaaccaagcaatgacttgctatttgaatagccttttgcaaacactttttatgactcctgaatttaggaatgcattatataagtgggaatttgaagaatctgaagaagatccagtgacaagtattccataccaacttcaaaggctttttgttttgttacaaaccagcaaaaagagagcaattgaaaccacagatgttacaaggagctttggatgggatagtagtgaggcttggcagcagcatgatgtacaagaactatgcagagtcatgtttgatgctttggaacagaaatggaagcaaacagaacaggctgatcttataaatgagctatatcaaggcaagctgaaggactacgtgagatgtctggaatgtggttatgagggctggcgaatcgacacatatcttgatattccattggtcatccgaccttatgggtccagccaagcatttgctagtgtggaagaagcattgcatgcatttattcagccagagattctggatggcccaaatcagtatttttgtgaacgttgtaagaagaagtgtgatgcacggaagggccttcggtttttgcattttccttatctgctgaccttacagctgaaaagattcgattttgattatacaaccatgcataggattaaactgaatgatcgaatgacatttcccgaggaactagatatgagtacttttattgatgttgaagatgagaaatctcctcagactgaaagttgcactgacagtggagcagaaaatgaaggtagttgtcacagtgatcagatgagcaacgatttctccaatgatgatggtgttgatgaaggaatctgtcttgaaaccaatagtggaactgaaaagatctcaaaatctggacttgaaaagaattccttgatctatgaacttttctctgttatggttcattctgggagcgctgctggtggtcattattatgcatgtataaagtcattcagtgatgagcagtggtacagcttcaatgatcaacatgtcagcaggataacacaagaggacattaagaaaacacatggtggatcttcaggaagcagaggatattattctagtgctttcgcaagttccacaaatgcatatatgctgatctatagactgaaggatccagccagaaatgcaaaatttctagaagtggatgaatacccagaacatattaaaaacttggtgcagaaagagagagagttggaagaacaagaaaagagacaacgagaaattgagcgcaatacatgcaagataaaattattctgtttgcatcctacaaaacaagtaatgatggaaaataaattggaggttcataaggataagacattaaaggaagcagtagaaatggcttataagatgatggatttagaagaggtaatacccctggattgctgtcgccttgttaaatatgatgagtttcatgattatctagaacggtcatatgaaggagaagaagatacaccaatggggcttctactaggtggcgtcaagtcaacatatatgtttgatctgctgttggagacgagaaagcctgatcaggttttccaatcttataaacctggagaagtgatggtgaaagttcatgttgttgatctaaaggcagaatctgtagctgctcctataactgttcgtgcttacttaaatcagacagttacagaattcaaacaactgatttcaaaggccatccatttacctgctgaaacaatgagaatagtgctggaacgctgctacaatgatttgcgtcttctcagtgtctccagtaaaaccctgaaagctgaaggattttttagaagtaacaaggtgtttgttgaaagctccgagactttggattaccagatggcctttgcagactctcatttatggaaactcctggatcggcatgcaaatacaatcagattatttgttttgctacctgaacaatccccagtatcttattccaaaaggacagcataccagaaagctggaggcgattctggtaatgtggatgatgactgtgaaagagtcaaaggacctgtaggaagcctaaagtctgtggaagctattctagaagaaagcactgaaaaactcaaaagcttgtcactgcagcaacagcaggatggagataatggggacagcagcaaaagtactgagacaagtgactttgaaaacatcgaatcacctctcaatgagagggactcttcagcatcagtggataatagagaacttgaacagcatattcagacttctgatccagaaaattttcagtctgaagaacgatcagactcagatgtgaataatgacaggagtacaagttcagtggacagtgatattcttagctccagtcatagcagtgatactttgtgcaatgcagacaatgctcagatccctttggctaatggacttgactctcacagtatcacaagtagtagaagaacgaaagcaaatgaagggaaaaaagaaacatgggatacagcagaagaagactctggaactgatagtgaatatgatgagagtggcaagagtaggggagaaatgcagtacatgtatttcaaagctgaaccttatgctgcagatgaaggttctggggaaggacataaatggttgatggtgcatgttgataaaagaattactctggcagctttcaaacaacatttagagccctttgttggagttttgtcctctcacttcaaggtctttcgagtgtatgccagcaatcaagagtttgagagcgtccggctgaatgagacactttcatcattttctgatgacaataagattacaattagactggggagagcacttaaaaaaggagaatacagagttaaagtataccagcttttggtcaatgaacaagagccatgcaagtttctgctagatgctgtgtttgctaaaggaatgactgtacggcaatcaaaagaggaattaattcctcagctcagggagcaatgtggtttagagctcagtattgacaggtttcgtctaaggaaaaaaacatggaagaatcctggcactgtctttttggattatcatatttatgaagaagatattaatatttccagcaactgggaggttttccttgaagttcttgatggggtagagaagatgaagtccatgtcacagcttgcagttttgtcaagacggtggaagccttcagagatgaagttggatcccttccaggaggttgtattggaaagcagtagtgtggacgaattgcgagagaagcttagtgaaatcagtgggattcctttggatgatattgaatttgctaagggtagaggaacatttccctgtgatatttctgtccttgatattcatcaggatttagactggaatcctaaagtttctaccctgaatgtctggcctctttatatctgtgatgatggtgcggtcatattttatagggataaaacagaagaattaatggaattgacagatgagcaaagaaatgaactgatgaaaaaagaaagcagtcgactccagaagactggacatcgtgtaacatactcacctcgtaaagagaaagcactaaaaatatatctggatggagcaccaaataaagatctgactcaagactgactctgatagtgtagcattttccctgggggagttttggttttaattagatggttcactaccactgggtagtgccattttggccggacatggttggggtaacccagtgacaccagcactgattggactgccctacaccaatcagaagctcagtgcccaatgggccactgttttgactcggaatcatgttgtgcactatagtcaaatgtactgtaaagtgaaaagggatgtgcaaaaaaataaaaaaaaacaacaaaaaaagctaaccttctattagaaaaggggacaggggaatgagtaaacttcttttattgcggacaaatgtgcacatagccgctagtaaaactagcctcaaacaggatgctcatagcttaataataaaagctgtgcaaaggccatgaatgaatgaattttctgtttatttcactgatgcacacattacctcattgacaattcagaagtaaatccaacgtgtgttgactcttggaaagcagcaaaaacaggagctgaagaaaagaaattcttggaaccagccgtaacccagtaaggaattgtgaagttgtgtttttattttgtttcattttttgcagagtattaagaacattattctggaacatcagaacgtttcccttagaccgatcccagcaggtggcagctcagattgctgcagtgttgtaattataactgattgtacttaagttatggatgtagagaatatgtttcattcatttattcagcatgtaaataaaattgatcctgttgagttatcataattgcagttcaactatctgccatgattattcttttcacgtatcattcattctgtacatttgtgtacattgagaagtatagcaatctatgtaaatgtaatcctcagtgaggttcctcagtgctaggtcccataggattgtcgttgcccttgttaatgaggtttctctgttcagcggcttcaatttttttctctttgtacatctagttttgaagatttacttcaagtttgaatcttctagaatgcttgtaagtccagttttaatttttagagtcaatttgtagttacatgtagtttaacttttgggaaacgtcttaacattgttctgaataaacttgctaatgaggtcaggtcatggtacagactgatgcagtcaacatgatttcattgcagagtttattagtatcagcaagtttttgctttgctaaataaaagtactcaatgaacacaattctacataaattttgacataccatctaatttataaaaatcaataaaaaaggttttggtaaaactttttcatgccagatgctgtttacaacaatgaacatgccaataaaacatttgttcattctgttgtgttattttagtcattaaacttctgtggatgaagaatctgggttaagaatagatttgtcatctttaaatatgacattttgtaatgtgtattggatatctcatttctatgataaaggtatatttacagtaaagttctcataagagaaatgaaaagctgtgttaatatctaactttggggaaccctgtcagtatttcagatccgatttttaccctttttttcttataagaaagataaaattagaaaatactgttagcaaatgtggctctgccatttgaatataatcaccgagaattccatgtcttaaaagtctcctggaatccacaatgaaaaaaaaaatcttttctaaggtatttttctggctaatttttatttgaagaaagctatagcatttagcgaaatttgactgaagtaatgttctgagtttgcattagtgggattggtgatgttctcagaagaaaattggaaacacttgtgatgaattgtctttcagatcacttagattttctgatgtaagaggacagctgtttggttctgatacaggcctgcttacttgggatgtagggttagtaaatggggtttctgctttaaaggactgacttgctatcacacaaaagaggcagacttgtaaacacaatgggctttggagtttggtctgattgggtttggtttagtattcctatgagcgtaaatggtaaaattcttctgatacccactctttagactgtgccttctgctctgttctttgttttatgtttaactgctgtttctaattgcaggtgtattacagatacaaataagagtaaagaaaatatatttcattatagaaaagaaaaaattaaaagcttcttgcttttcagtgcctgatagagtgaaaacacaaagttgcactttaataatttcaataaaagctaatctgtgtcagcctccctctgcttcagagagtcaggtgagcatccataacctaacaggcagagccctagcgatgtggatcaagtttcctgagcccgggggcggtggagcctcatgatctcttatcttttgaggctgaggcaggtcacatgcaacaaattgtgaccctgctccccacaagtcatgcaaaggttttgaagagcttttaccgtggggcagatgaacttgtgtcaaccatgcacaccctgtgagaaccaagtacctgtgtttctaaggcgggcactcaaggtgaggggtgcattctggccaaagaaacaaaagctgtggtttcaggaccatgccgtgtgtagctgatctgtacgggacgtgtatgtaaggaagagcaatcatgatagataagaacagtgtgtgaagcagccttcacactagagtgtttggtcatctcttataatgtaagggaaggtactttaaaattctgggaagatgcgatgaactcatgtcccagtcagaaaataatccaatgaaataagcattggttgccaggccacagttaggaattgtattgtgatacatctagaggccaagagagcaggagagagctaccaacttacactgtggtttaagctaaatgaccgcacagcatcatagcattgcagtgttgttactaaatctggaagtgacctgtgaatgtatggaatacaataaagtcttttattctggttcatttgctagtacttcctttttgattggatactgtagttcttcctctggattttattttgttcagcgtcaaggccctaattttgcaaatgtagtctaaaccacattacgtggactagaggatactctgaattagcaagttttttgtttgctgaataaaactattccatcttaa

SEQ ID NO: 452 - protein, 1287 aa, Homosapiens
MVPGEENQLVPKEAPLDHTSDKSLLDANFEPGKKNFLHLTDKDGEQPQILLEDSSAGEDSVHDRFIGPLPREGSGGSTSDYVSQSYSYSSILNKSETGYVGLVNQAMTCYLNSLLQTLFMTPEFRNALYKWEFEESEEDPVTSIPYQLQRLFVLLQTSKKRAIETTDVTRSFGWDSSEAWQQHDVQELCRVMFDALEQKWKQTEQADLINELYQGKLKDYVRCLECGYEGWRIDTYLDIPLVIRPYGSSQAFASVEEALHAFIQPEILDGPNQYFCERCKKKCDARKGLRFLHFPYLLTLQLKRFDFDYTTMHRIKLNDRMTFPEELDMSTFIDVEDEKSPQTESCTDSGAENEGSCHSDQMSNDFSNDDGVDEGICLETNSGTEKISKSGLEKNSLIYELFSVMVHSGSAAGGHYYACIKSFSDEQWYSFNDQHVSRITQEDIKKTHGGSSGSRGYYSSAFASSTNAYMLIYRLKDPARNAKFLEVDEYPEHIKNLVQKERELEEQEKRQREIERNTCKIKLFCLHPTKQVMMENKLEVHKDKTLKEAVEMAYKMMDLEEVIPLDCCRLVKYDEFHDYLERSYEGEEDTPMGLLLGGVKSTYMFDLLLETRKPDQVFQSYKPGEVMVKVHVVDLKAESVAAPITVRAYLNQTVTEFKQLISKAIHLPAETMRIVLERCYNDLRLLSVSSKTLKAEGFFRSNKVFVESSETLDYQMAFADSHLWKLLDRHANTIRLFVLLPEQSPVSYSKRTAYQKAGGDSGNVDDDCERVKGPVGSLKSVEAILEESTEKLKSLSLQQQQDGDNGDSSKSTETSDFENIESPLNERDSSASVDNRELEQHIQTSDPENFQSEERSDSDVNNDRSTSSVDSDILSSSHSSDTLCNADNAQIPLANGLDSHSITSSRRTKANEGKKETWDTAEEDSGTDSEYDESGKSRGEMQYMYFKAEPYAADEGSGEGHKWLMVHVDKRITLAAFKQHLEPFVGVLSSHFKVFRVYASNQEFESVRLNETLSSFSDDNKITIRLGRALKKGEYRVKVYQLLVNEQEPCKFLLDAVFAKGMTVRQSKEELIPQLREQCGLELSIDRFRLRKKTWKNPGTVFLDYHIYEEDINISSNWEVFLEVLDGVEKMKSMSQLAVLSRRWKPSEMKLDPFQEVVLESSSVDELREKLSEISGIPLDDIEFAKGRGTFPCDISVLDIHQDLDWNPKVSTLNVWPLYICDDGAVIFYRDKTEELMELTDEQRNELMKKESSRLQKTGHRVTYSPRKEKALKIYLDGAPNKDLTQD

SEQ ID NO: 453 - DNA, 2587 bp, Homosapiens
cgcgcctctgatcgcgttccgggacacacaggcggcggctgcgggcgcagagcggagatgcagcggcttggggccaccctgctgtgcctgctgctggcggcggcggtccccacggcccccgcgcccgctccgacggcgacctcggctccagtcaagcccggcccggctctcagctacccgcaggaggaggccaccctcaatgagatgttccgcgaggttgaggaactgatggaggacacgcagcacaaattgcgcagcgcggtggaagagatggaggcagaagaagctgctgctaaagcatcatcagaagtgaacctggcaaacttacctcccagctatcacaatgagaccaacacagacacgaaggttggaaataataccatccatgtgcaccgagaaattcacaagataaccaacaaccagactggacaaatggtcttttcagagacagttatcacatctgtgggagacgaagaaggcagaaggagccacgagtgcatcatcgacgaggactgtgggcccagcatgtactgccagtttgccagcttccagtacacctgccagccatgccggggccagaggatgctctgcacccgggacagtgagtgctgtggagaccagctgtgtgtctggggtcactgcaccaaaatggccaccaggggcagcaatgggaccatctgtgacaaccagagggactgccagccggggctgtgctgtgccttccagagaggcctgctgttccctgtgtgcacacccctgcccgtggagggcgagctttgccatgaccccgccagccggcttctggacctcatcacctgggagctagagcctgatggagccttggaccgatgcccttgtgccagtggcctcctctgccagccccacagccacagcctggtgtatgtgtgcaagccgaccttcgtggggagccgtgaccaagatggggagatcctgctgcccagagaggtccccgatgagtatgaagttggcagcttcatggaggaggtgcgccaggagctggaggacctggagaggagcctgactgaagagatggcgctgagggagcctgcggctgccgccgctgcactgctgggaggggaagagatttagatctggaccaggctgtgggtagatgtgcaatagaaatagctaatttatttccccaggtgtgtgctttaggcgtgggctgaccaggcttcttcctacatcttcttcccagtaagtttcccctctggcttgacagcatgaggtgttgtgcatttgttcagctcccccaggctgttctccaggcttcacagtctggtgcttgggagagtcaggcagggttaaactgcaggagcagtttgccacccctgtccagattattggctgctttgcctctaccagttggcagacagccgtttgttctacatggctttgataattgtttgaggggaggagatggaaacaatgtggagtctccctctgattggttttggggaaatgtggagaagagtgccctgctttgcaaacatcaacctggcaaaaatgcaacaaatgaattttccacgcagttctttccatgggcataggtaagctgtgccttcagctgttgcagatgaaatgttctgttcaccctgcattacatgtgtttattcatccagcagtgttgctcagctcctacctctgtgccagggcagcattttcatatccaagatcaattccctctctcagcacagcctggggagggggtcattgttctcctcgtccatcagggatctcagaggctcagagactgcaagctgcttgcccaagtcacacagctagtgaagaccagagcagtttcatctggttgtgactctaagctcagtgctctctccactaccccacaccagccttggtgccaccaaaagtgctccccaaaaggaaggagaatgggatttttcttttgaggcatgcacatctggaattaaggtcaaactaattctcacatccctctaaaagtaaactactgttaggaacagcagtgttctcacagtgtggggcagccgtccttctaatgaagacaatgatattgacactgtccctctttggcagttgcattagtaactttgaaaggtatatgactgagcgtagcatacaggttaacctgcagaaacagtacttaggtaattgtagggcgaggattataaatgaaatttgcaaaatcacttagcagcaactgaagacaattatcaaccacgtggagaaaatcaaaccgagcagggctgtgtgaaacatggttgtaatatgcgactgcgaacactgaactctacgccactccacaaatgatgttttcaggtgtcatggactgttgccaccatgtattcatccagagttcttaaagtttaaagttgcacatgattgtataagcatgctttctttgagttttaaattatgtataaacataagttgcatttagaaatcaagcataaatcacttcaactgctcttctgtagttcttggatttcttttcccttttgactttgaataaatgtaaaatcctttcagccagaaaaagtaaaatagaaacaacctgtattaaaaatcttccatagaaaaaaaaaaa

SEQ ID NO: 454 - protein, 350 aa, Homosapiens
MQRLGATLLCLLLAAAVPTAPAPAPTATSAPVKPGPALSYPQEEATLNEMFREVEELMEDTQHKLRSAVEEMEAEEAAAKASSEVNLANLPPSYHNETNTDTKVGNNTIHVHREIHKITNNQTGQMVFSETVITSVGDEEGRRSHECIIDEDCGPSMYCQFASFQYTCQPCRGQRMLCTRDSECCGDQLCVWGHCTKMATRGSNGTICDNQRDCQPGLCCAFQRGLLFPVCTPLPVEGELCHDPASRLLDLITWELEPDGALDRCPCASGLLCQPHSHSLVYVCKPTFVGSRDQDGEILLPREVPDEYEVGSFMEEVRQELEDLERSLTEEMALREPAAAAAALLGGEEI

SEQ ID NO: 455 - DNA, 2755 bp, Homosapiens
ggcggagagggagcctggtgggcgggcggggcgcgtcttgcgggctccctcgggtaccggcgctgccgcaccccgccgcgctcccgcacccgcggcccgcccaccgcgccgctcccgcatctgcacccgcagcccggcggcctcccggcgggagcgagcagatccagtccggcccgcagcgcaactcggtccagtcggggcggcggctgcgggcgcagagcggagatgcagcggcttggggccaccctgctgtgcctgctgctggcggcggcggtccccacggcccccgcgcccgctccgacggcgacctcggctccagtcaagcccggcccggctctcagctacccgcaggaggaggccaccctcaatgagatgttccgcgaggttgaggaactgatggaggacacgcagcacaaattgcgcagcgcggtggaagagatggaggcagaagaagctgctgctaaagcatcatcagaagtgaacctggcaaacttacctcccagctatcacaatgagaccaacacagacacgaaggttggaaataataccatccatgtgcaccgagaaattcacaagataaccaacaaccagactggacaaatggtcttttcagagacagttatcacatctgtgggagacgaagaaggcagaaggagccacgagtgcatcatcgacgaggactgtgggcccagcatgtactgccagtttgccagcttccagtacacctgccagccatgccggggccagaggatgctctgcacccgggacagtgagtgctgtggagaccagctgtgtgtctggggtcactgcaccaaaatggccaccaggggcagcaatgggaccatctgtgacaaccagagggactgccagccggggctgtgctgtgccttccagagaggcctgctgttccctgtgtgcacacccctgcccgtggagggcgagctttgccatgaccccgccagccggcttctggacctcatcacctgggagctagagcctgatggagccttggaccgatgcccttgtgccagtggcctcctctgccagccccacagccacagcctggtgtatgtgtgcaagccgaccttcgtggggagccgtgaccaagatggggagatcctgctgcccagagaggtccccgatgagtatgaagttggcagcttcatggaggaggtgcgccaggagctggaggacctggagaggagcctgactgaagagatggcgctgagggagcctgcggctgccgccgctgcactgctgggaggggaagagatttagatctggaccaggctgtgggtagatgtgcaatagaaatagctaatttatttccccaggtgtgtgctttaggcgtgggctgaccaggcttcttcctacatcttcttcccagtaagtttcccctctggcttgacagcatgaggtgttgtgcatttgttcagctcccccaggctgttctccaggcttcacagtctggtgcttgggagagtcaggcagggttaaactgcaggagcagtttgccacccctgtccagattattggctgctttgcctctaccagttggcagacagccgtttgttctacatggctttgataattgtttgaggggaggagatggaaacaatgtggagtctccctctgattggttttggggaaatgtggagaagagtgccctgctttgcaaacatcaacctggcaaaaatgcaacaaatgaattttccacgcagttctttccatgggcataggtaagctgtgccttcagctgttgcagatgaaatgttctgttcaccctgcattacatgtgtttattcatccagcagtgttgctcagctcctacctctgtgccagggcagcattttcatatccaagatcaattccctctctcagcacagcctggggagggggtcattgttctcctcgtccatcagggatctcagaggctcagagactgcaagctgcttgcccaagtcacacagctagtgaagaccagagcagtttcatctggttgtgactctaagctcagtgctctctccactaccccacaccagccttggtgccaccaaaagtgctccccaaaaggaaggagaatgggatttttcttttgaggcatgcacatctggaattaaggtcaaactaattctcacatccctctaaaagtaaactactgttaggaacagcagtgttctcacagtgtggggcagccgtccttctaatgaagacaatgatattgacactgtccctctttggcagttgcattagtaactttgaaaggtatatgactgagcgtagcatacaggttaacctgcagaaacagtacttaggtaattgtagggcgaggattataaatgaaatttgcaaaatcacttagcagcaactgaagacaattatcaaccacgtggagaaaatcaaaccgagcagggctgtgtgaaacatggttgtaatatgcgactgcgaacactgaactctacgccactccacaaatgatgttttcaggtgtcatggactgttgccaccatgtattcatccagagttcttaaagtttaaagttgcacatgattgtataagcatgctttctttgagttttaaattatgtataaacataagttgcatttagaaatcaagcataaatcacttcaactgctcttctgtagttcttggatttcttttcccttttgactttgaataaatgtaaaatcctttcagccagaaaaagtaaaatagaaacaacctgtattaaaaatcttccatagaaaaaaaaaaa

SEQ ID NO: 456 - protein, 350 aa, Homosapiens; identical to SEQ ID NO: 454

SEQ ID NO: 457 - DNA, 2769 bp, Homosapiens
cgacgccaaggggagggggctgacctgtgcttggtccaccccaggtaggggctgagagaggcttgaggtggaagtgggggtcgggcactctgacctggtcgaggaggggctagggtttgaaccggggacagagtctaggtgagctggggcttgggagctattagcgtagaggatccgggttcggttgctctggcgagggctccagcatcacaggcggcggctgcgggcgcagagcggagatgcagcggcttggggccaccctgctgtgcctgctgctggcggcggcggtccccacggcccccgcgcccgctccgacggcgacctcggctccagtcaagcccggcccggctctcagctacccgcaggaggaggccaccctcaatgagatgttccgcgaggttgaggaactgatggaggacacgcagcacaaattgcgcagcgcggtggaagagatggaggcagaagaagctgctgctaaagcatcatcagaagtgaacctggcaaacttacctcccagctatcacaatgagaccaacacagacacgaaggttggaaataataccatccatgtgcaccgagaaattcacaagataaccaacaaccagactggacaaatggtcttttcagagacagttatcacatctgtgggagacgaagaaggcagaaggagccacgagtgcatcatcgacgaggactgtgggcccagcatgtactgccagtttgccagcttccagtacacctgccagccatgccggggccagaggatgctctgcacccgggacagtgagtgctgtggagaccagctgtgtgtctggggtcactgcaccaaaatggccaccaggggcagcaatgggaccatctgtgacaaccagagggactgccagccggggctgtgctgtgccttccagagaggcctgctgttccctgtgtgcacacccctgcccgtggagggcgagctttgccatgaccccgccagccggcttctggacctcatcacctgggagctagagcctgatggagccttggaccgatgcccttgtgccagtggcctcctctgccagccccacagccacagcctggtgtatgtgtgcaagccgaccttcgtggggagccgtgaccaagatggggagatcctgctgcccagagaggtccccgatgagtatgaagttggcagcttcatggaggaggtgcgccaggagctggaggacctggagaggagcctgactgaagagatggcgctgagggagcctgcggctgccgccgctgcactgctgggaggggaagagatttagatctggaccaggctgtgggtagatgtgcaatagaaatagctaatttatttccccaggtgtgtgctttaggcgtgggctgaccaggcttcttcctacatcttcttcccagtaagtttcccctctggcttgacagcatgaggtgttgtgcatttgttcagctcccccaggctgttctccaggcttcacagtctggtgcttgggagagtcaggcagggttaaactgcaggagcagtttgccacccctgtccagattattggctgctttgcctctaccagttggcagacagccgtttgttctacatggctttgataattgtttgaggggaggagatggaaacaatgtggagtctccctctgattggttttggggaaatgtggagaagagtgccctgctttgcaaacatcaacctggcaaaaatgcaacaaatgaattttccacgcagttctttccatgggcataggtaagctgtgccttcagctgttgcagatgaaatgttctgttcaccctgcattacatgtgtttattcatccagcagtgttgctcagctcctacctctgtgccagggcagcattttcatatccaagatcaattccctctctcagcacagcctggggagggggtcattgttctcctcgtccatcagggatctcagaggctcagagactgcaagctgcttgcccaagtcacacagctagtgaagaccagagcagtttcatctggttgtgactctaagctcagtgctctctccactaccccacaccagccttggtgccaccaaaagtgctccccaaaaggaaggagaatgggatttttcttttgaggcatgcacatctggaattaaggtcaaactaattctcacatccctctaaaagtaaactactgttaggaacagcagtgttctcacagtgtggggcagccgtccttctaatgaagacaatgatattgacactgtccctctttggcagttgcattagtaactttgaaaggtatatgactgagcgtagcatacaggttaacctgcagaaacagtacttaggtaattgtagggcgaggattataaatgaaatttgcaaaatcacttagcagcaactgaagacaattatcaaccacgtggagaaaatcaaaccgagcagggctgtgtgaaacatggttgtaatatgcgactgcgaacactgaactctacgccactccacaaatgatgttttcaggtgtcatggactgttgccaccatgtattcatccagagttcttaaagtttaaagttgcacatgattgtataagcatgctttctttgagttttaaattatgtataaacataagttgcatttagaaatcaagcataaatcacttcaactgctcttctgtagttcttggatttcttttcccttttgactttgaataaatgtaaaatcctttcagccagaaaaagtaaaatagaaacaacctgtattaaaaatcttccatagaaaaaaaaaaa

SEQ ID NO: 458 - protein, 350 aa, Homosapiens; identical to SEQ ID NO: 454

SEQ ID NO: 459 - DNA, 3934 bp, Homosapiens
ctcggctggctaagcctgcgccgggccgcctcgctcgctcccagctctgtcagtggcccgcggggcccgatcgctgcgcccgcggccagggccgaggcaggcctgacccggggccgggcagcccgcgcgactttcggaacatggcaacccgtgtgtgtctcatcccagaaagagaagactttaaccactgtgatgcctgagaatccagtgagtgtgacgtttctccagatacttcatgctgttcacctgtgtcctcgccgcaccactgccgcacacgactcctgaaccatgggggaaaacgaggatgagaagcaggcccaggcggggcaggtttttgagaactttgtccaggcatccacgtgcaaaggtaccctccaggccttcaacattctcacacgacacctggacctagaccctctggaccacagaaacttttattccaagctcaagtccaaggtgaccacctggaaagccaaagccctgtggtacaaattggataagcgtggttcccacaaagagtataagcgagggaagtcgtgcacgaacaccaagtgtctcatagttgggggaggaccctgtggcttgcgcactgccattgaacttgcctacctgggagccaaagtggtcgtggtggagaagagggactccttctcccggaacaacgtgctacacctctggcctttcaccatccatgaccttcggggcctgggagccaagaagttctatgggaagttctgtgctggctccatcgaccatatcagtattcgccaactacagctcatcctattcaaggtggccctgatgctgggagttgaaatccatgtgaatgtggagttcgtgaaggttctagagcctcctgaagatcaagaaaatcaaaaaattggctggcgggcagaatttctccctacagaccattctctgtcggagtttgagtttgacgtcatcattggtgccgatggccgcaggaacaccctggaagggttcagaagaaaagaattccgtgggaagctggcgattgccatcaccgccaacttcataaacagaaacagcacagcggaagccaaggtggaagagattagtggtgtggctttcatcttcaatcagaaattttttcaggaccttaaagaagaaacaggcatagatcttgagaacattgtttactacaaggactgcacccactattttgtaatgacagccaagaagcagagcctgctcgacaaaggtgtcatcattaacgactacatcgacacagagatgctgctgtgtgcggagaacgtgaaccaagacaacctgctatcctatgcccgggaagctgcagactttgccaccaactaccagctgccatccttagactttgccatgaaccactatgggcagcctgatgtggccatgtttgactttacctgcatgtatgcctcagagaacgcggccctggtgcgggagcggcaggcgcaccagctgctcgtggcccttgtgggtgacagcttgcttgagccattttggcccatgggtacaggctgtgcccgtggcttcctggcagcctttgacacggcatggatggtgaagagctggaaccagggcacccctcccctggagctgctggctgaaagggaaagtctctaccggctgttacctcagacaaccccggagaacatcaacaagaactttgagcagtacacgttggacccagggacacggtacccaaacctcaactcacactgtgtcaggccccatcaggtgaagcatttgtatatcactaaggagctggagcactaccctctcgagagactgggctcggtgaggagatctgtcaacctctccaggaaggagtcagatatccggcccagcaagctcctgacctggtgccagcagcagacagagggctaccagcatgtcaacgtcaccgacctgaccacatcctggcgcagtgggttggccctgtgtgccatcatccaccgcttccggcctgagctcatcaactttgactctttgaatgaagatgatgctgtggagaacaaccagctcgcatttgatgtggccgagcgagagtttgggatccctccagtgaccacgggcaaagagatggcatctgcccaggagcctgacaagctcagcatggtcatgtacctctccaagttctacgagctcttccggggcaccccactgaggcccgtggattcttggcgcaaaaactatggagaaaatgctgacctcagcttggccaaatcatccatttctaataactatctcaacctcacatttccaaggaagaggactccacgggtggatggtcaaaccggagagaatgacatgaacaaacggagacggaagggcttcaccaacctggacgagccttcaaacttttccagccgtagcttgggctccaatcaagagtgtgggagcagtaaggaaggtggaaatcagaacaaagtcaagtccatggcgaatcagctgctggccaagtttgaggagagcactcggaacccctcactcatgaagcaggaacgccgtgtctcagggataggtaagccggtcctgtgctcttcctccggccctcctgttcactcttgctgccccaagccggaggaggccacacccagcccatcacctcctctgaaaaggcagttcccctctgtggtcgtgacggggcacgtgctcagagagctcaagcaagtgtctgctggcagtgagtgcctgagcagaccttggagagccagagccaagtctgacctacagctgggtgggacagaaaatttcgctaccctgccttctacccgcccgagggcgcaggctctttccggggtgctgtggcggctgcagcaagtggaggaaaagattctccagaagagggctcagaacttggccaacagggaatttcacacaaagaacattaaggagaaggcggctcaccttgcctccatgtttggacacggggatttcccgcagaataaactactctctaaaggcctgtctcatactcatcctccatctcctccctctcgccttccgtctcctgatccagctgcttcttcctctccatcaactgttgactctgcttctcctgccagaaaggaaaagaagtcaccttcagggttccattttcatcccagccatttgagaacagtgcatcctcagctgacggtagggaaagtgtccagcggaataggggctgcagctgaagtcctggtcaatctgtacatgaatgatcacagacctaaggcccaggccacctctccagacctggaatctatgcgaaagtcatttccccttaacctgggaggcagcgacacgtgttacttctgtaagaaacgtgtgtacgtgatggaacggctgagcgccgagggccacttcttccaccgggagtgtttccgctgcagcatctgtgccaccaccttgcgcctggccgcctacacctttgactgcgatgaaggcaaattttactgcaagcctcacttcattcactgtaaaaccaatagcaaacaacggaagagacgggcagagttgaagcaacaaagagaggaggaggcaacatggcaagagcaggaagcccctcggagagacactcccaccgaaagttcttgcgcagtggccgccattggcaccctggaaggcagccccccagttcatttcagccttccagtgctacacccacttcttggctgacacacttctgctctaagagtctccctccctttatagaatgtcaaccaaagagtgccctcctcccctctcagcctcctctttagctagcctccccatctcatcacaacgcatgtctgtgacctttggtaatcatttacagtgccacacggaaccctgtattttgcacacagcaaaacaaacaatgtttagctttatttatggtatttgatgctgtaaatggaaataaatattgttctttataaaaaaaaaaaaaagaaaaaaaaaaaaaaaa

SEQ ID NO: 460 - protein, 1124 aa, Homosapiens
MGENEDEKQAQAGQVFENFVQASTCKGTLQAFNILTRHLDLDPLDHRNFYSKLKSKVTTWKAKALWYKLDKRGSHKEYKRGKSCTNTKCLIVGGGPCGLRTAIELAYLGAKVVVVEKRDSFSRNNVLHLWPFTIHDLRGLGAKKFYGKFCAGSIDHISIRQLQLILFKVALMLGVEIHVNVEFVKVLEPPEDQENQKIGWRAEFLPTDHSLSEFEFDVIIGADGRRNTLEGFRRKEFRGKLAIAITANFINRNSTAEAKVEEISGVAFIFNQKFFQDLKEETGIDLENIVYYKDCTHYFVMTAKKQSLLDKGVIINDYIDTEMLLCAENVNQDNLLSYAREAADFATNYQLPSLDFAMNHYGQPDVAMFDFTCMYASENAALVRERQAHQLLVALVGDSLLEPFWPMGTGCARGFLAAFDTAWMVKSWNQGTPPLELLAERESLYRLLPQTTPENINKNFEQYTLDPGTRYPNLNSHCVRPHQVKHLYITKELEHYPLERLGSVRRSVNLSRKESDIRPSKLLTWCQQQTEGYQHVNVTDLTTSWRSGLALCAIIHRFRPELINFDSLNEDDAVENNQLAFDVAEREFGIPPVTTGKEMASAQEPDKLSMVMYLSKFYELFRGTPLRPVDSWRKNYGENADLSLAKSSISNNYLNLTFPRKRTPRVDGQTGENDMNKRRRKGFTNLDEPSNFSSRSLGSNQECGSSKEGGNQNKVKSMANQLLAKFEESTRNPSLMKQERRVSGIGKPVLCSSSGPPVHSCCPKPEEATPSPSPPLKRQFPSVVVTGHVLRELKQVSAGSECLSRPWRARAKSDLQLGGTENFATLPSTRPRAQALSGVLWRLQQVEEKILQKRAQNLANREFHTKNIKEKAAHLASMFGHGDFPQNKLLSKGLSHTHPPSPPSRLPSPDPAASSSPSTVDSASPARKEKKSPSGFHFHPSHLRTVHPQLTVGKVSSGIGAAAEVLVNLYMNDHRPKAQATSPDLESMRKSFPLNLGGSDTCYFCKKRVYVMERLSAEGHFFHRECFRCSICATTLRLAAYTFDCDEGKFYCKPHFIHCKTNSKQRKRRAELKQQREEEATWQEQEAPRRDTPTESSCAVAAIGTLEGSPPVHFSLPVLHPLLG

SEQ ID NO: 461 - DNA, 8192 bp, Homosapiens
aggaggaaatttgcaagaggcggcagcccctgagcgcccagagctcttgaaaggccacccaggagaggtgtgagacccggcggcagcatccgtccaggtgggacccgctgagcgccgtggccagtcccccattcccatcccggcaccccaaaggcgcgctcgcccgattgcttcgagttccccgacctggggattttttttttagccgctggtggtgggcgcctcgtgggctaaggcccggcgcctgctctgctacccgcgctgcctttagcggtcgcccccgccgccgctgccagggacgtgctgggaaagcccaagccccgggagaagatgccggccatcctggtcgcctccaaaatgaagtcgggactgcccaaacccgtgcacagcgccgcgcccatcctgcacgtgcccccggcccgggcgggcccccagccctgctacctgaagttgggaagcaaggtggaggtgagcaagaccacctatcctagccagatccccctgaaatcgcaggtgctgcaggggctgcaggagccagcgggggaggggctcccgctgcggaagagcggctcggtggaaaacgggttcgatacccagatctacacagactgggccaatcattacctagccaaatccggccacaagcgtctcatcagggatctccagcaagatgtgacagatggcgtcctcctggcccagattatccaggttgtggcaaatgaaaagattgaagacatcaatggctgtccgaagaacagatcccaaatgattgaaaacatagatgcctgcttgaatttcctggcagctaagggaataaacatccaggggctgtctgcagaagagatcaggaatggaaacctcaaggccattctaggcctcttcttcagcctctcccgatacaagcagcagcagcagcagccccagaagcagcacctctcctcacctctgccgcccgccgtatcccaggtggccggggccccctcccagtgccaggctggcacccctcagcagcaggtgccagtcactccccaagccccgtgccagcctcaccagccagcgccacatcagcagtcaaaagcacaagctgaaatgcagtccagacttccaggtcctaccgcgagggtatccgctgcaggcagcgaggccaaaacacgcggagggtcaactactgctaacaaccgacgcagccagagctttaacaactatgataaatccaaaccagtcacctccccacccccaccgccaagcagccacgagaaagagcctttggcaagttcagcctcctcccaccccggaatgagtgacaatgcacctgcttccttggagagcggcagcagctccacccctactaattgcagtacctcctcggccatcccgcagcccggtgcagccaccaagccttggcgcagcaaatccctcagcgtgaagcacagtgccacggtatccatgctctcggtcaagcctcctgggcctgaggcccccaggcccacacctgaagccatgaagccggcccccaacaatcagaagtccatgctggaaaagctgaaacttttcaacagtaaagggggctcaaaggcaggtgaggggccggggtcccgggacacaagctgtgagcggctggagactctgcccagcttcgaagagagcgaggagctggaggccgccagtcgcatgctcaccaccgtgggccctgcttccagcagccccaagattgcactcaagggcattgcccagaggacttttagccgggcactgaccaacaagaagagttctctgaaaggcaatgagaaagagaaggagaaacaacagcgggagaaggataaggagaaaagcaaggaccttgccaagagagcctctgtgacggagaggctggacctcaaggaggagccaaaagaagaccccagtggagcagctgtgcccgagatgccaaaaaagtcctccaagattgccagcttcatccccaaaggggggaagctcaacagtgccaagaaggagcccatggccccttcccacagtggaataccaaaaccaggaatgaagagcatgcccgggaaatccccaagtgccccagcgccttccaaggaaggggagcggagccggagtgggaagctgagctcaggactcccccagcagaagccccagctggacggcagacactccagttcctcttccagcctggcgtcctcagaaggaaaaggcccaggagggaccaccctgaaccacagcatcagcagccagactgtcagtgggtctgtcgggaccacccagaccacaggaagcaataccgtcagtgttcagctacctcagccccagcagcaatacaaccatcccaacactgccacggttgcacctttcctgtacaggtctcagacggacactgaagggaatgttactgccgagtcaagctcaacaggtgtgagcgtggagcccagccacttcaccaagactggacagcctgctctggaagaactcactggggaagatcctgaggctcggcggctgcggacagtgaagaacatcgctgatctgcggcagaatttggaggaaaccatgtccagtttaaggggaactcaggttacacacagcacattggaaaccacgtttgacaccaatgtcaccacggagatgagtggccgtagcatactcagcttgacagggaggcccacacctctgtcctggagactgggccagtccagccctcggctccaagcaggagacgccccctcaatgggcaatgggtatccccctcgagccaacgccagcaggttcatcaacactgagtcaggtcgctatgtgtactccgcccctctgagaaggcagctggcctcccggggcagtagtgtctgccatgtggacgtctcagacaaggcaggagatgagatggacctggaaggcatcagcatggacgcccccggctacatgagcgatggggatgttctgagcaagaacatccggaccgatgacattacaagcggatacatgactgatggtggacttggcctctatacccgtcgcctgaaccggctccctgatgggatggctgtggtacgggagaccctgcaacgaaatacctccctgggcctcggagacgctgacagctgggacgacagcagctccgtcagcagcggcatcagcgacaccatagacaacctcagcactgatgacatcaacaccagctcctccatcagctcttatgccaacacacctgcctcctctcgaaaaaacctggatgtgcagactgatgctgagaagcactcacaggtggagaggaattccctgtggtctggtgatgatgtcaagaaatcagacggaggctcagacagcggcataaaaatggagccaggttccaagtggaggcggaatccttctgatgtgtctgacgagtccgacaaaagcacgtcgggcaagaagaatcctgtcatctcccagacaggctcatggcggcgaggcatgacagctcaggtgggcatcaccatgccaaggacgaagccttcagccccggcaggcgcactgaagaccccaggaactggaaaaacagacgacgcaaaggtgtctgagaaaggaaggctttctcctaaagcctcccaggtgaagcgctccccatcagatgcaggccggagcagtggtgacgaatccaaaaagcccctccccagcagctctaggacacctactgccaatgccaacagctttgggttcaagaagcagagtggttccgccgccggcctggccatgatcacagccagcggggtgactgtcaccagcaggtcagccacactgggcaaaatcccaaagtcatctgcactcgtcagtcggtctgctggtcggaagtcaagtatggatggggctcagaatcaggatgacgggtatctagccctaagctcccggacaaaccttcagtaccggagtttgccgaggcccagtaagtccaacagccggaacggggctgggaacaggtctagcaccagcagcatagattccaacattagcagcaagtccgcaggcctgccagtgcccaaactgagggagccttccaaaacagccctaggcagctctctaccaggtctggtcaaccaaacagacaaggagaaaggcatctcatcagacaacgagagtgtggcttcctgtaactcggtgaaagtgaatccggcagcccagcctgtgtccagtccggctcagaccagtctccagcctggagccaagtacccagatgtggcctctcccacactccgcagactctttggtgggaagcctaccaagcaagtgcccatcgccacagctgaaaacatgaaaaattcggtggtcatctccaatcctcatgccaccatgactcagcaaggtaacctagactccccgtcaggcagtggcgtcctgagcagtgggagcagcagtcctctctacagcaagaatgtggacctcaaccagtctccgctagcctccagccccagctcagcccactcggccccttccaacagcctcacctggggcaccaacgccagcagctcctccgcagttagcaaggatggcctgggctttcagtctgtcagcagcctccacaccagctgtgagtccatcgacatctccctcagcagtggaggggtccccagccacaattcttccactggcctcatcgcctcctccaaggacgactccttgactccctttgtcagaactaacagtgtgaagaccacactgtcagaaagccctctctcttcccctgctgctagccctaagttctgcagaagtactctgcccaggaaacaggacagtgacccgcaccttgataggaacactttgcctaagaaaggactcaggtatactcccacctcccagcttcgcacgcaagaagatgcaaaagaatggttacggtcccattctgcaggaggccttcaggacaccgctgccaattcccccttttcctctggctccagcgtgacttctccctccggaacaagattcaacttttcccagcttgcgagtcccaccactgtcacccagatgagcttgtccaacccgaccatgctgaggactcacagcctctccaatgctgatgggcagtatgatccatacactgacagccgcttccggaatagctccatgtccctggatgagaagagcagaaccatgagccgttcaggctcattccgggatgggtttgaagaagttcatggatcctcactctccttggtttccagcacatcgtcagtttattctacaccagaagaaaaatgccagtcagagattcgcaagctgcggcgggaactggatgcctcccaggagaaagtttcagctttgaccacccagctgacagcaaatgctcaccttgtggcagcctttgaacagagtcttggtaacatgacaatcaggctccagagtctgaccatgacagctgagcagaaggactcagaactgaatgagttaagaaaaaccattgagctgctaaagaaacagaacgcagctgcccaggctgccattaatggagtaattaacacacctgagctcaactgcaaaggaaacggcactgcccagtctgcagacctccgcatccgcaggcagcactcctcagacagcgtctccagcatcaacagtgccaccagccactccagcgtgggcagcaacatagagagtgactcaaagaagaagaagcggaagaactggttacgcagctccttcaagcaagctttcgggaagaagaagtccccaaaatctgcgtcctctcattcagatattgaggagatgacggattcttctttgccttcctcaccaaagttaccgcacaatgggtccacaggttccaccccactgctgaggaattctcactccaactctctaatttcagaatgcatggatagtgaagctgagaccgtcatgcagctccgaaatgagttaagagacaaggagatgaagctgacggatatccgcttagaagctctcagttctgcccaccagctggaccagctccgggaggccatgaacaggatgcagagtgaaatagagaagctgaaagctgagaatgatcggctgaagtcagagtctcaaggcagtggctgcagccgggctccttcccaagtgtccatctctgcctccccgaggcagtccatgggcctctcccagcacagcttgaacctcactgagtcaaccagcctggacatgttgctggatgacactggtgaatgctcggctcggaaggaaggaggcaggcatgttaagatagttgtcagctttcaggaggaaatgaagtggaaggaggattccagaccacatctctttcttattggctgcattggagttagtggcaagacgaagtgggatgtgctcgatggggtggttagacggctgttcaaagaatacatcattcatgtcgacccagtgagtcagctagggctgaattcagacagcgttcttggctacagcattggagaaatcaagcgcagcaacacttccgaaacaccggagctgcttccttgtggctatctggttggagagaacacgaccatctcagtgactgtgaaagggctcgcagaaaacagcctggactcactggtgtttgagtccttgattcccaagcccatcctgcagcgctacgtctccctcctgatagagcaccgtcggatcattctctctggccccagcggcactgggaaaacctacctggccaaccggctgtctgagtatatagtgcttcgagagggacgggagttgacagacggggttatcgccacctttaacgtggaccataagtccagcaaggaattgcgccagtacctgtccaaccttgctgaccagtgcaacagtgagaacaatgctgtggacatgcccctcgtcatcatcctggacaacctacaccacgtgagctctctgggcgagatcttcaatgggctgctcaactgcaagtaccacaaatgcccttacataattggcacaatgaaccaggctacctcttcgactcccaacctgcagcttcaccataacttcagatgggtgctttgtgccaaccacacggagcctgtgaagggtttccttggccgattcctgaggaggaagctcatggaaacagagatcagtgggcgggtgcgcaatatggagctggtaaaaatcattgactggattcccaaggtctggcatcacctcaaccgcttcctggaggctcacagttcctcggacgtcaccatcggcccccggctcttcctgtcatgccccatcgatgtggacggctcgagagtgtggttcaccgacttgtggaactattccattatcccctatctcctggaagccgtcagagaaggactccagctctatggaaggcgcgccccctgggaggatcctgccaagtgggtgatggacacatatccatgggcagccagcccacaacagcacgagtggcctcccctgctgcagttacggcctgaggatgtcggcttcgacggctactccatgcctcgggagggatcgacaagcaagcagatgccccccagtgatgctgaaggtgacccgctgatgaacatgctgatgaggctgcaggaggcagccaactactccagcccccagagctatgacagcgactccaacagcaacagccatcacgatgacatcttggactcctctttggagtccactctgtgacaggggcccggagcccagcgccctcctcttctcctcaccgcattccacctgcatcccccacatcaccctgaagatgacttcctgagccagcccccagccacagccttagagctgcgggaacaccgagaccccccgtccttcagcctcgacctgggtgcaggcatcccgggccagctgcctgcggaccgcttccttccacagcgagaactgcactaccttctgttgtactttaattattgttttgccttgttgctgtgacctccctaagacactgaagatacttctcgggaaaggatcatcgccgttgaaatgaaaagagagacagagagaaaaaaaaaaagagaacccacatgaagctctgaaaccaaacagcatcctgccatgagcttcccagagacagaagagactggagcaaagtcggaaacacagagaagcacggcttcccctcagcacagaccctccagactgggtctcagagccgtgccacccaccctcccacacagccggccacagggagaactggtgctaaccagggtgcttgctttggtcacgttcaacgcactacagagcta

SEQ ID NO: 462 - protein, 2429 aa, Homosapiens
MPAILVASKMKSGLPKPVHSAAPILHVPPARAGPQPCYLKLGSKVEVSKTTYPSQIPLKSQVLQGLQEPAGEGLPLRKSGSVENGFDTQIYTDWANHYLAKSGHKRLIRDLQQDVTDGVLLAQIIQVVANEKIEDINGCPKNRSQMIENIDACLNFLAAKGINIQGLSAEEIRNGNLKAILGLFFSLSRYKQQQQQPQKQHLSSPLPPAVSQVAGAPSQCQAGTPQQQVPVTPQAPCQPHQPAPHQQSKAQAEMQSRLPGPTARVSAAGSEAKTRGGSTTANNRRSQSFNNYDKSKPVTSPPPPPSSHEKEPLASSASSHPGMSDNAPASLESGSSSTPTNCSTSSAIPQPGAATKPWRSKSLSVKHSATVSMLSVKPPGPEAPRPTPEAMKPAPNNQKSMLEKLKLFNSKGGSKAGEGPGSRDTSCERLETLPSFEESEELEAASRMLTTVGPASSSPKIALKGIAQRTFSRALTNKKSSLKGNEKEKEKQQREKDKEKSKDLAKRASVTERLDLKEEPKEDPSGAAVPEMPKKSSKIASFIPKGGKLNSAKKEPMAPSHSGIPKPGMKSMPGKSPSAPAPSKEGERSRSGKLSSGLPQQKPQLDGRHSSSSSSLASSEGKGPGGTTLNHSISSQTVSGSVGTTQTTGSNTVSVQLPQPQQQYNHPNTATVAPFLYRSQTDTEGNVTAESSSTGVSVEPSHFTKTGQPALEELTGEDPEARRLRTVKNIADLRQNLEETMSSLRGTQVTHSTLETTFDTNVTTEMSGRSILSLTGRPTPLSWRLGQSSPRLQAGDAPSMGNGYPPRANASRFINTESGRYVYSAPLRRQLASRGSSVCHVDVSDKAGDEMDLEGISMDAPGYMSDGDVLSKNIRTDDITSGYMTDGGLGLYTRRLNRLPDGMAVVRETLQRNTSLGLGDADSWDDSSSVSSGISDTIDNLSTDDINTSSSISSYANTPASSRKNLDVQTDAEKHSQVERNSLWSGDDVKKSDGGSDSGIKMEPGSKWRRNPSDVSDESDKSTSGKKNPVISQTGSWRRGMTAQVGITMPRTKPSAPAGALKTPGTGKTDDAKVSEKGRLSPKASQVKRSPSDAGRSSGDESKKPLPSSSRTPTANANSFGFKKQSGSAAGLAMITASGVTVTSRSATLGKIPKSSALVSRSAGRKSSMDGAQNQDDGYLALSSRTNLQYRSLPRPSKSNSRNGAGNRSSTSSIDSNISSKSAGLPVPKLREPSKTALGSSLPGLVNQTDKEKGISSDNESVASCNSVKVNPAAQPVSSPAQTSLQPGAKYPDVASPTLRRLFGGKPTKQVPIATAENMKNSVVISNPHATMTQQGNLDSPSGSGVLSSGSSSPLYSKNVDLNQSPLASSPSSAHSAPSNSLTWGTNASSSSAVSKDGLGFQSVSSLHTSCESIDISLSSGGVPSHNSSTGLIASSKDDSLTPFVRTNSVKTTLSESPLSSPAASPKFCRSTLPRKQDSDPHLDRNTLPKKGLRYTPTSQLRTQEDAKEWLRSHSAGGLQDTAANSPFSSGSSVTSPSGTRFNFSQLASPTTVTQMSLSNPTMLRTHSLSNADGQYDPYTDSRFRNSSMSLDEKSRTMSRSGSFRDGFEEVHGSSLSLVSSTSSVYSTPEEKCQSEIRKLRRELDASQEKVSALTTQLTANAHLVAAFEQSLGNMTIRLQSLTMTAEQKDSELNELRKTIELLKKQNAAAQAAINGVINTPELNCKGNGTAQSADLRIRRQHSSDSVSSINSATSHSSVGSNIESDSKKKKRKNWLRSSFKQAFGKKKSPKSASSHSDIEEMTDSSLPSSPKLPHNGSTGSTPLLRNSHSNSLISECMDSEAETVMQLRNELRDKEMKLTDIRLEALSSAHQLDQLREAMNRMQSEIEKLKAENDRLKSESQGSGCSRAPSQVSISASPRQSMGLSQHSLNLTESTSLDMLLDDTGECSARKEGGRHVKIVVSFQEEMKWKEDSRPHLFLIGCIGVSGKTKWDVLDGVVRRLFKEYIIHVDPVSQLGLNSDSVLGYSIGEIKRSNTSETPELLPCGYLVGENTTISVTVKGLAENSLDSLVFESLIPKPILQRYVSLLIEHRRIILSGPSGTGKTYLANRLSEYIVLREGRELTDGVIATFNVDHKSSKELRQYLSNLADQCNSENNAVDMPLVIILDNLHHVSSLGEIFNGLLNCKYHKCPYIIGTMNQATSSTPNLQLHHNFRWVLCANHTEPVKGFLGRFLRRKLMETEISGRVRNMELVKIIDWIPKVWHHLNRFLEAHSSSDVTIGPRLFLSCPIDVDGSRVWFTDLWNYSIIPYLLEAVREGLQLYGRRAPWEDPAKWVMDTYPWAASPQQHEWPPLLQLRPEDVGFDGYSMPREGSTSKQMPPSDAEGDPLMNMLMRLQEAANYSSPQSYDSDSNSNSHHDDILDSSLESTL

SEQ ID NO: 463 - DNA, 8192 bp, Homosapiens
aggaggaaatttgcaagaggcggcagcccctgagcgcccagagctcttgaaaggccacccaggagaggtgtgagacccggcggcagcatccgtccaggtgggacccgctgagcgccgtggccagtcccccattcccatcccggcaccccaaaggcgcgctcgcccgattgcttcgagttccccgacctggggattttttttttagccgctggtggtgggcgcctcgtgggctaaggcccggcgcctgctctgctacccgcgctgcctttagcggtcgcccccgccgccgctgccagggacgtgctgggaaagcccaagccccgggagaagatgccggccatcctggtcgcctccaaaatgaagtcgggactgcccaaacccgtgcacagcgccgcgcccatcctgcacgtgcccccggcccgggcgggcccccagccctgctacctgaagttgggaagcaaggtggaggtgagcaagaccacctatcctagccagatccccctgaaatcgcaggtgctgcaggggctgcaggagccagcgggggaggggctcccgctgcggaagagcggctcggtggaaaacgggttcgatacccagatctacacagactgggccaatcattacctagccaaatccggccacaagcgtctcatcagggatctccagcaagatgtgacagatggcgtcctcctggcccagattatccaggttgtggcaaatgaaaagattgaagacatcaatggctgtccgaagaacagatcccaaatgattgaaaacatagatgcctgcttgaatttcctggcagctaagggaataaacatccaggggctgtctgcagaagagatcaggaatggaaacctcaaggccattctaggcctcttcttcagcctctcccgatacaagcagcagcagcagcagccccagaagcagcacctctcctcacctctgccgcccgccgtatcccaggtggccggggccccctcccagtgccaggctggcacccctcagcagcaggtgccagtcactccccaagccccgtgccagcctcaccagccagcgccacatcagcagtcaaaagcacaagctgaaatgcagtccagtgcatcatccaaggactcatctcaaagcaaaatcatccgcttcactctgggtcagaaaaagatctctagacttccaggtcctaccgcgagggtatccgctgcaggcagcgaggccaaaacacgcggagggtcaactactgctaacaaccgacgcagccagagctttaacaactatgataaatccaaaccagtcacctccccacccccaccgccaagcagccacgagaaagagcctttggcaagttcagcctcctcccaccccggaatgagtgacaatgcacctgcttccttggagagcggcagcagctccacccctactaattgcagtacctcctcggccatcccgcagcccggtgcagccaccaagccttggcgcagcaaatccctcagcgtgaagcacagtgccacggtatccatgctctcggtcaagcctcctgggcctgaggcccccaggcccacacctgaagccatgaagccggcccccaacaatcagaagtccatgctggaaaagctgaaacttttcaacagtaaagggggctcaaaggcaggtgaggggccggggtcccgggacacaagctgtgagcggctggagactctgcccagcttcgaagagagcgaggagctggaggccgccagtcgcatgctcaccaccgtgggccctgcttccagcagccccaagattgcactcaagggcattgcccagaggacttttagccgggcactgaccaacaagaagagttctctgaaaggcaatgagaaagagaaggagaaacaacagcgggagaaggataaggagaaaagcaaggaccttgccaagagagcctctgtgacggagaggctggacctcaaggaggagccaaaagaagaccccagtggagcagctgtgcccgagatgccaaaaaagtcctccaagattgccagcttcatccccaaaggggggaagctcaacagtgccaagaaggagcccatggccccttcccacagtggaataccaaaaccaggaatgaagagcatgcccgggaaatccccaagtgccccagcgccttccaaggaaggggagcggagccggagtgggaagctgagctcaggactcccccagcagaagccccagctggacggcagacactccagttcctcttccagcctggcgtcctcagaaggaaaaggcccaggagggaccaccctgaaccacagcatcagcagccagactgtcagtgggtctgtcgggaccacccagaccacaggaagcaataccgtcagtgttcagctacctcagccccagcagcaatacaaccatcccaacactgccacggttgcacctttcctgtacaggtctcagacggacactgaagggaatgttactgccgagtcaagctcaacaggtgtgagcgtggagcccagccacttcaccaagactggacagcctgctctggaagaactcactggggaagatcctgaggctcggcggctgcggacagtgaagaacatcgctgatctgcggcagaatttggaggaaaccatgtccagtttaaggggaactcaggttacacacagcacattggaaaccacgtttgacaccaatgtcaccacggagatgagtggccgtagcatactcagcttgacagggaggcccacacctctgtcctggagactgggccagtccagccctcggctccaagcaggagacgccccctcaatgggcaatgggtatccccctcgagccaacgccagcaggttcatcaacactgagtcaggtcgctatgtgtactccgcccctctgagaaggcagctggcctcccggggcagtagtgtctgccatgtggacgtctcagacaaggcaggagatgagatggacctggaaggcatcagcatggacgcccccggctacatgagcgatggggatgttctgagcaagaacatccggaccgatgacattacaagcggatacatgactgatggtggacttggcctctatacccgtcgcctgaaccggctccctgatgggatggctgtggtacgggagaccctgcaacgaaatacctccctgggcctcggagacgctgacagctgggacgacagcagctccgtcagcagcggcatcagcgacaccatagacaacctcagcactgatgacatcaacaccagctcctccatcagctcttatgccaacacacctgcctcctctcgaaaaaacctggatgtgcagactgatgctgagaagcactcacaggtggagaggaattccctgtggtctggtgatgatgtcaagaaatcagacggaggctcagacagcggcataaaaatggagccaggttccaagtggaggcggaatccttctgatgtgtctgacgagtccgacaaaagcacgtcgggcaagaagaatcctgtcatctcccagacaggctcatggcggcgaggcatgacagctcaggtgggcatcaccatgccaaggacgaagccttcagccccggcaggcgcactgaagaccccaggaactggaaaaacagacgacgcaaaggtgtctgagaaaggaaggctttctcctaaagcctcccaggtgaagcgctccccatcagatgcaggccggagcagtggtgacgaatccaaaaagcccctccccagcagctctaggacacctactgccaatgccaacagctttgggttcaagaagcagagtggttccgccgccggcctggccatgatcacagccagcggggtgactgtcaccagcaggtcagccacactgggcaaaatcccaaagtcatctgcactcgtcagtcggtctgctggtcggaagtcaagtatggatggggctcagaatcaggatgacgggtatctagccctaagctcccggacaaaccttcagtaccggagtttgccgaggcccagtaagtccaacagccggaacggggctgggaacaggtctagcaccagcagcatagattccaacattagcagcaagtccgcaggcctgccagtgcccaaactgagggagccttccaaaacagccctaggcagctctctaccaggtctggtcaaccaaacagacaaggagaaaggcatctcatcagacaacgagagtgtggcttcctgtaactcggtgaaagtgaatccggcagcccagcctgtgtccagtccggctcagaccagtctccagcctggagccaagtacccagatgtggcctctcccacactccgcagactctttggtgggaagcctaccaagcaagtgcccatcgccacagctgaaaacatgaaaaattcggtggtcatctccaatcctcatgccaccatgactcagcaaggtaacctagactccccgtcaggcagtggcgtcctgagcagtgggagcagcagtcctctctacagcaagaatgtggacctcaaccagtctccgctagcctccagccccagctcagcccactcggccccttccaacagcctcacctggggcaccaacgccagcagctcctccgcagttagcaaggatggcctgggctttcagtctgtcagcagcctccacaccagctgtgagtccatcgacatctccctcagcagtggaggggtccccagccacaattcttccactggcctcatcgcctcctccaaggacgactccttgactccctttgtcagaactaacagtgtgaagaccacactgtcagaaagccctctctcttcccctgctgctagccctaagttctgcagaagtactctgcccaggaaacaggacagtgacccgcaccttgataggaacactttgcctaagaaaggactcaggtatactcccacctcccagcttcgcacgcaagaagatgcaaaagaatggttacggtcccattctgcaggaggccttcaggacaccgctgccaattcccccttttcctctggctccagcgtgacttctccctccggaacaagattcaacttttcccagcttgcgagtcccaccactgtcacccagatgagcttgtccaacccgaccatgctgaggactcacagcctctccaatgctgatgggcagtatgatccatacactgacagccgcttccggaatagctccatgtccctggatgagaagagcagaaccatgagccgttcaggctcattccgggatgggtttgaagaagaatcatgggagaaaagttctgtggacaactttgtcagccgtcttcacagctcacttcatttctctcttcctttgttccatcacgcaaggtatgagttagttcatggatcctcactctccttggtttccagcacatcgtcagtttattctacaccagaagaaaaatgccagtcagagattcgcaagctgcggcgggaactggatgcctcccaggagaaagtttcagctttgaccacccagctgacagcaaatgctcaccttgtggcagcctttgaacagagtcttggtaacatgacaatcaggctccagagtctgaccatgacagctgagcagaaggactcagaactgaatgagttaagaaaaaccattgagctgctaaagaaacagaacgcagctgcccaggctgccattaatggagtaattaacacacctgagctcaactgcaaaggaaacggcactgcccagtctgcagacctccgcatccgcaggcagcactcctcagacagcgtctccagcatcaacagtgccaccagccactccagcgtgggcagcaacatagagagtgactcaaagaagaagaagcggaagaactgggtcaatgagttacgcagctccttcaagcaagctttcgggaagaagaagtccccaaaatctgcgtcctctcattcagatattgaggagatgacggattcttctttgccttcctcaccaaagttaccgcacaatgggtccacaggttccaccccactgctgaggaattctcactccaactctctaatttcagaatgcatggatagtgaagctgagaccgtcatgcagctccgaaatgagttaagagacaaggagatgaagctgacggatatccgcttagaagctctcagttctgcccaccagctggaccagctccgggaggccatgaacaggatgcagagtgaaatagagaagctgaaagctgagaatgatcggctgaagtcagagtctcaaggcagtggctgcagccgggctccttcccaagtgtccatctctgcctccccgaggcagtccatgggcctctcccagcacagcttgaacctcactgagtcaaccagcctggacatgttgctggatgacactggtgaatgctcggctcggaaggaaggaggcaggcatgttaagatagttgtcagctttcaggaggaaatgaagtggaaggaggattccagaccacatctctttcttattggctgcattggagttagtggcaagacgaagtgggatgtgctcgatggggtggttagacggctgttcaaagaatacatcattcatgtcgacccagtgagtcagctagggctgaattcagacagcgttcttggctacagcattggagaaatcaagcgcagcaacacttccgaaacaccggagctgcttccttgtggctatctggttggagagaacacgaccatctcagtgactgtgaaagggctcgcagaaaacagcctggactcactggtgtttgagtccttgattcccaagcccatcctgcagcgctacgtctccctcctgatagagcaccgtcggatcattctctctggccccagcggcactgggaaaacctacctggccaaccggctgtctgagtatatagtgcttcgagagggacgggagttgacagacggggttatcgccacctttaacgtggaccataagtccagcaaggaattgcgccagtacctgtccaaccttgctgaccagtgcaacagtgagaacaatgctgtggacatgcccctcgtcatcatcctggacaacctacaccacgtgagctctctgggcgagatcttcaatgggctgctcaactgcaagtaccacaaatgcccttacataattggcacaatgaaccaggctacctcttcgactcccaacctgcagcttcaccataacttcagatgggtgctttgtgccaaccacacggagcctgtgaagggtttccttggccgattcctgaggaggaagctcatggaaacagagatcagtgggcgggtgcgcaatatggagctggtaaaaatcattgactggattcccaaggtctggcatcacctcaaccgcttcctggaggctcacagttcctcggacgtcaccatcggcccccggctcttcctgtcatgccccatcgatgtggacggctcgagagtgtggttcaccgacttgtggaactattccattatcccctatctcctggaagccgtcagagaaggactccagctctatggaaggcgcgccccctgggaggatcctgccaagtgggtgatggacacatatccatgggcagccagcccacaacagcacgagtggcctcccctgctgcagttacggcctgaggatgtcggcttcgacggctactccatgcctcgggagggatcgacaagcaagcagatgccccccagtgatgctgaaggtgacccgctgatgaacatgctgatgaggctgcaggaggcagccaactactccagcccccagagctatgacagcgactccaacagcaacagccatcacgatgacatcttggactcctctttggagtccactctgtgacaggggcccggagcccagcgccctcctcttctcctcaccgcattccacctgcatcccccacatcaccctgaagatgacttcctgagccagcccccagccacagccttagagctgcgggaacaccgagaccccccgtccttcagcctcgacctgggtgcaggcatcccgggccagctgcctgcggaccgcttccttccacagcgagaactgcactaccttctgttgtactttaattattgttttgccttgttgctgtgacctccctaagacactgaagatacttctcgggaaaggatcatcgccgttgaaatgaaaagagagacagagagaaaaaaaaaaagagaacccacatgaagctctgaaaccaaacagcatcctgccatgagcttcccaga

SEQ ID NO: 464 - protein, 2488 aa, Homosapiens
MPAILVASKMKSGLPKPVHSAAPILHVPPARAGPQPCYLKLGSKVEVSKTTYPSQIPLKSQVLQGLQEPAGEGLPLRKSGSVENGFDTQIYTDWANHYLAKSGHKRLIRDLQQDVTDGVLLAQIIQVVANEKIEDINGCPKNRSQMIENIDACLNFLAAKGINIQGLSAEEIRNGNLKAILGLFFSLSRYKQQQQQPQKQHLSSPLPPAVSQVAGAPSQCQAGTPQQQVPVTPQAPCQPHQPAPHQQSKAQAEMQSSASSKDSSQSKIIRFTLGQKKISRLPGPTARVSAAGSEAKTRGGSTTANNRRSQSFNNYDKSKPVTSPPPPPSSHEKEPLASSASSHPGMSDNAPASLESGSSSTPTNCSTSSAIPQPGAATKPWRSKSLSVKHSATVSMLSVKPPGPEAPRPTPEAMKPAPNNQKSMLEKLKLFNSKGGSKAGEGPGSRDTSCERLETLPSFEESEELEAASRMLTTVGPASSSPKIALKGIAQRTFSRALTNKKSSLKGNEKEKEKQQREKDKEKSKDLAKRASVTERLDLKEEPKEDPSGAAVPEMPKKSSKIASFIPKGGKLNSAKKEPMAPSHSGIPKPGMKSMPGKSPSAPAPSKEGERSRSGKLSSGLPQQKPQLDGRHSSSSSSLASSEGKGPGGTTLNHSISSQTVSGSVGTTQTTGSNTVSVQLPQPQQQYNHPNTATVAPFLYRSQTDTEGNVTAESSSTGVSVEPSHFTKTGQPALEELTGEDPEARRLRTVKNIADLRQNLEETMSSLRGTQVTHSTLETTFDTNVTTEMSGRSILSLTGRPTPLSWRLGQSSPRLQAGDAPSMGNGYPPRANASRFINTESGRYVYSAPLRRQLASRGSSVCHVDVSDKAGDEMDLEGISMDAPGYMSDGDVLSKNIRTDDITSGYMTDGGLGLYTRRLNRLPDGMAVVRETLQRNTSLGLGDADSWDDSSSVSSGISDTIDNLSTDDINTSSSISSYANTPASSRKNLDVQTDAEKHSQVERNSLWSGDDVKKSDGGSDSGIKMEPGSKWRRNPSDVSDESDKSTSGKKNPVISQTGSWRRGMTAQVGITMPRTKPSAPAGALKTPGTGKTDDAKVSEKGRLSPKASQVKRSPSDAGRSSGDESKKPLPSSSRTPTANANSFGFKKQSGSAAGLAMITASGVTVTSRSATLGKIPKSSALVSRSAGRKSSMDGAQNQDDGYLALSSRTNLQYRSLPRPSKSNSRNGAGNRSSTSSIDSNISSKSAGLPVPKLREPSKTALGSSLPGLVNQTDKEKGISSDNESVASCNSVKVNPAAQPVSSPAQTSLQPGAKYPDVASPTLRRLFGGKPTKQVPIATAENMKNSVVISNPHATMTQQGNLDSPSGSGVLSSGSSSPLYSKNVDLNQSPLASSPSSAHSAPSNSLTWGTNASSSSAVSKDGLGFQSVSSLHTSCESIDISLSSGGVPSHNSSTGLIASSKDDSLTPFVRTNSVKTTLSESPLSSPAASPKFCRSTLPRKQDSDPHLDRNTLPKKGLRYTPTSQLRTQEDAKEWLRSHSAGGLQDTAANSPFSSGSSVTSPSGTRFNFSQLASPTTVTQMSLSNPTMLRTHSLSNADGQYDPYTDSRFRNSSMSLDEKSRTMSRSGSFRDGFEEESWEKSSVDNFVSRLHSSLHFSLPLFHHARYELVHGSSLSLVSSTSSVYSTPEEKCQSEIRKLRRELDASQEKVSALTTQLTANAHLVAAFEQSLGNMTIRLQSLTMTAEQKDSELNELRKTIELLKKQNAAAQAAINGVINTPELNCKGNGTAQSADLRIRRQHSSDSVSSINSATSHSSVGSNIESDSKKKKRKNWVNELRSSFKQAFGKKKSPKSASSHSDIEEMTDSSLPSSPKLPHNGSTGSTPLLRNSHSNSLISECMDSEAETVMQLRNELRDKEMKLTDIRLEALSSAHQLDQLREAMNRMQSEIEKLKAENDRLKSESQGSGCSRAPSQVSISASPRQSMGLSQHSLNLTESTSLDMLLDDTGECSARKEGGRHVKIVVSFQEEMKWKEDSRPHLFLIGCIGVSGKTKWDVLDGVVRRLFKEYIIHVDPVSQLGLNSDSVLGYSIGEIKRSNTSETPELLPCGYLVGENTTISVTVKGLAENSLDSLVFESLIPKPILQRYVSLLIEHRRIILSGPSGTGKTYLANRLSEYIVLREGRELTDGVIATFNVDHKSSKELRQYLSNLADQCNSENNAVDMPLVIILDNLHHVSSLGEIFNGLLNCKYHKCPYIIGTMNQATSSTPNLQLHHNFRWVLCANHTEPVKGFLGRFLRRKLMETEISGRVRNMELVKIIDWIPKVWHHLNRFLEAHSSSDVTIGPRLFLSCPIDVDGSRVWFTDLWNYSIIPYLLEAVREGLQLYGRRAPWEDPAKWVMDTYPWAASPQQHEWPPLLQLRPEDVGFDGYSMPREGSTSKQMPPSDAEGDPLMNMLMRLQEAANYSSPQSYDSDSNSNSHHDDILDSSLESTL

SEQ ID NO: 465 - DNA, 1149 bp, Homosapiens
atgatgttccccggcctcctcgcgccccccgccgggtaccctagcctcctgcggcccacgcccaccttgacgctgccccagtccttgcagtcggcattttccggccactccagcttcctggtggaggatctgatccgcatcagccgaccccccgcctacctgccccgcagcgtgcccaccgccagcatgtcgccgcccaggcagggggcccccacggccctcaccgacacgggggcctcggacctgggctccccgggtcccggcagccgacggggcggctctccgccgactgccttctcccctgccagcgagacgacgtttctgaagtttggagtgaacgccatcctctcctcggggcccagaacagaaacatccccagccttgctccagagcgtccctcccaagaccttcgcctttccctacttcgaagggtcttttcagcctttcatcagatcttcttatttcccagcttcctccagcgtggtgcccatccccgggaccttctcctggccgctggccgcgcgcgggaagcctcggcggggcatgctgcgtcgagcagtcttctccgacgtgcagcggaaggcgctggagaagatgttccagaagcagaagtacatcagcaagcccgaccgcaagaagctggcggccaagctgggcctgaaagactcgcaggacacagcccgaaggacagagcctgcacccgactccactccccgcccccgtgcgtcccccggagcccctgatctgacctctgcttctcccttcttctcgccggccgggacattccaggtgaaaatctggttccagaaccgacgcatgaaatggcggaactccaaggagcgcgaactcctgtctagcgggggctgtcgcgagcagaccctgcccaccaagctcaatccgcacccggacctcagcgacgtgggccagaagggccctgggaacgaagaggaggaggagggcccgggcagccccagccaccgcctggcctaccacgcgtcctccgacccccagcacctgcgggacccgcggctgccagggccgctgcccccctcgcccgcgcactcgagcagtcccgggaaaccttcggacttctcagattccgaggaggaagaggagggcgaggaacaggaggaaatcaccgtgtcctag

SEQ ID NO: 466 - protein, 382 aa, Homosapiens
MMFPGLLAPPAGYPSLLRPTPTLTLPQSLQSAFSGHSSFLVEDLIRISRPPAYLPRSVPTASMSPPRQGAPTALTDTGASDLGSPGPGSRRGGSPPTAFSPASETTFLKFGVNAILSSGPRTETSPALLQSVPPKTFAFPYFEGSFQPFIRSSYFPASSSVVPIPGTFSWPLAARGKPRRGMLRRAVFSDVQRKALEKMFQKQKYISKPDRKKLAAKLGLKDSQDTARRTEPAPDSTPRPRASPGAPDLTSASPFFSPAGTFQVKIWFQNRRMKWRNSKERELLSSGGCREQTLPTKLNPHPDLSDVGQKGPGNEEEEEGPGSPSHRLAYHASSDPQHLRDPRLPGPLPPSPAHSSSPGKPSDFSDSEEEEEGEEQEEITVS

SEQ ID NO: 467 - DNA, 3868 bp, Homosapiens
agcgggtggtgaggccctggtgggcgcgaggcagggggagggggaggaggaggagcccgcggcccgggcggcggcggctctcgggttctccgtagggccccgcctcggagcgggcggcggcggaggaggagactgaggagcaggatggcggcctcggccctgtacgcctgcaccaagtgtacccagcgttatcctttcgaggagctctcccagggccagcagctctgcaaggaatgtcggattgcacatcctattgtaaaatgtacttactgcagatcagaatttcaacaagagagcaaaactaacacaatttgtaagaagtgtgctcaaaatgtgaagcaatttgggacgcccaagccttgtcagtactgtaacataattgcagcatttattggtaccaagtgtcagcgttgcacaaattcagaaaaaaagtatggaccacctcagacctgtgaacagtgcaaacagcaatgtgcttttgatcggaaggaggaaggaagaagaaaggttgatggaaagttattatgctggctctgtactttatcgtacaaaagagttttacagaagacgaaagaacaaaggaagagcctgggatcttcacattcaaattcatcttcttcatctcttactgagaaagaccagcatcatccaaaacatcatcaccaccatcatcaccatcaccatcgtcacagcagtagccatcacaaaatcagcaatctaagtccagaagaagagcagggactgtggaaacagagccataaatcctctgcaacaattcagaatgaaactccaaagaaaaagcccaaattggaatctaagccatctaatggagataggagtatgtaatgtgtgccattagtaaggtaatttgccagttgcatccatttctgtcagtagctctataaatcagtcagcagatagtgggggaacagacaattttgtccttataagtcaactgaaagaagaagtgatgtcacttaagcgtctcttacagcagagagaccagaccattttagaaaaagataaaaagttaactgaactaaaggcagactttcagtaccaagagtcaaatttgagaacaaaaatgaacagtatggaaaaagcccacaaagaaactgtggaacaacttcaggccaaaaacagagaactactcaaacaggtcgcagcattatcaaagggtaaaaaatttgacaaaagtggaagcatactaacatctccttgagaaagtcatttgtttagcatttcttcttacaatgtaaatttggggaaaaaaaattctgtgaagcccttaaattctgtgtagtagaaaaatatttttgcacaccaaatgaattggtgtgtttcctgttcacttttgtaattgatatacagcattttttaagttgtaaaacattcaaataaaacttcaactggtttgaagtaactttttaattatttgatatccaggaacttttttgccagcaatagtattaaacagttgtaaaggagtgcatgagtagtgctctttatgaaacgcaacatgcaataatagagtaggtatggtttcagaagtcagagcagcagggtttttttgttttgtttttgttttacactatgctaatttcagacaaacagttttcaatttagaaatacaaaaacttttaaactcgaaaaatggcgaacactggttttttgggaattgtgtttttactttgcatcaagatgaatttaggagaaaatcacggtgcttttattaaatgaacttcagatatatgtaaatttgttttttaaagttacatcattaacattagtaacctagcattttcattattggtataggaattaatgtttattgtacagtatctaaggtaaaatgtgtttctgttttgtaaaaactactgtagatttttacttacaagtgcctttttgccacctaatgtttttatttataggaatgctgatcttttgtacatacattttgttttaaaatcatgtttaataaatgtttgtatataaatgcatatgtacagaagcctatttcaaaaggaaatcaaagttgctagtaaaatgtttgagattacatttagaactaactgataatgcatatagattgtagaaaattttgtgatttgtttctgtgtgataagggaagctgttggtctttgaattcatttaattatgtcaaaatagttccccaaagatttaattttaagttgcttcttaaagagtaattttattttttatgtcatgtggcttcatattagtattgtgtgagttacatgttttgctttatattttataaaattttttaaaaattttaatgtttctgcaatgatccatgtatctgctttccctatgtgtggttatctaagttaatatttatgtacaatgtaatttgtaaatttaaagcaaatctgaaaaaaattaaatgatctttttaatccaatctgtgataatctttgaataaattggcatctactataagattcaggcattataagtaaattgtcctaaagtctttaaaattgtctataaaaggttaaggtagggtgggataggttatatgaagttattgactatattctgatccagcggttttcagcctgaaatagaatttatctcctagttattatcagttcagagttttagtttgattttaaagtattgctagatacactgtatagagtgagttgcttctcttaataatttatgggcaaagataaatttgcttcatgtaaaactgttactaaatttataagttttaaaggttttgttttatacaagcattgattgtgaatgtcatatcaaagattggctttcttaagaacacatgattgaaacaatttttttttaacatgacgtgtttcaatagactgttctcatagttcattataaagtgaataccaaataattctttgtccattttgaaagcataatatagggtaattttcaagtgatacaaaaagattcagttagaatcttgtaaactaaaccagtttatttttatgggatcttcatgtaataattttcttaaatttagtactctcaaccatgatagataatgccttaacatggattttaacgtttgcaggatttgctaaattcataagatagttattacctttctttgaaatttgtaatgttttatattcttgtttcatagccatttgtcagtccacagtggtcattatggttttactttttgatagttcttacaccttgttggagaaactacaaaagaaagttgtcctcgtccttccccttagctaacatcaaaattaaaaagttgaatattaatattagctaacattaaaatggaaggtaattcagttttagtgttagctaacattaacagtctaataatttagctttgtaaattccaaggctaaaaccctttcatgggcttcacagtatttagtcctaattaaatacccttctttattccatgaccttattttataacttaaatttttttgcaattgtataaattagtaattcagtcccagtcctggatctctgtagtgttttgacataataaactgatattctttaaatgtggacctgtaaggagatactatggtgtggtgtattgtgcttttagcctgttttccactattaattagcatttaccagtaagggtcattttgactcaagttatttatgtattaatagcctgtgaatattgcagtcctttttagattatattggtctaaatatgcattctgcagtgaacctgttaagctgttcacatgtatagactattgaaatactgtacttgtacacatctgactgttgacattttgtacttttttctagatccaatatttcacaataaaaaacttgtcaaaggcaaaaaaaaaaaaaaaaaaaagaaaaaaaaaaaaaaaaa

SEQ ID NO: 468 - protein, 233 aa, Homosapiens
MAASALYACTKCTQRYPFEELSQGQQLCKECRIAHPIVKCTYCRSEFQQESKTNTICKKCAQNVKQFGTPKPCQYCNIIAAFIGTKCQRCTNSEKKYGPPQTCEQCKQQCAFDRKEEGRRKVDGKLLCWLCTLSYKRVLQKTKEQRKSLGSSHSNSSSSSLTEKDQHHPKHHHHHHHHHHRHSSSHHKISNLSPEEEQGLWKQSHKSSATIQNETPKKKPKLESKPSNGDRSM

SEQ ID NO: 469 - DNA, 3158 bp, Homosapiens
gtccgttaggacgtgttgccctttctgtgtaagctgtgagcgtaggcggccctgagggggtgtgttgcaggggtttccaagcccagcaccagcacccttgcccttttccatcaggggttcagcctagggtccccgctggtgggcggctcccgagtcttggagaagagcacgagaacctagaccgcccccgaagtgcggagaccccctgggcaggctgaaagatggcggcggcgtctgtctctgcggcttctggttctcacttgtcgaacagctttgctgagccatcaaggtctaatggaagcatggttcggcattcttcatctccatatgtagtatatccttcggataagcctttccttaatagtgatctacgacgctccccaagtaagcctacacttgcctatccagaaagcaacagcagagccatattttctgctcttaagaatcttcaagataagattcgacgcttggaacttgagaggattcaggcagaagaaagtgtgaaaaccttgtctagagaaacaattgaatataagaaagtactggatgaacagatacaagaaagggagaattcaaagaatgaggaatcaaagcacaatcaagaactgacatctcagttgttagctgcagaaaataaatgcaatctattagaaaaacaattggaatacatgcgaaatatgataaagcatgccgaaatggagaggacatctgtcttagagaaacaagtttccctagaaagagaacgacaacatgatcaaacacatgttcagagccaacttgaaaaattggatcttcttgaacaggagtataacaaacttaccacaatgcaggcccttgcagaaaaaaaaatgcaagagttggaagcaaaactccatgaagaagaacaggaaaggaaacgcatgcaagctaaggcagctgagttgcagactggtctagaaacaaatagacttatctttgaagataaggcaactccgtgtgttcccaatgcaagaagaattaaaaaaaagaagtcaaaaccaccagaaaagaaaagttctaggaactattttggtgcacaaccacattatagattatgcttgggtgatatgccatttgtagctgggaagtccacaagccctagccatgccgtggtagccaatgttcagcttgtcttgcatctaatgaagcaacacagtaaagctttgtgcaatgatcgagtcatcaacagtattcctttggcaaagcaagtatcttcacgaggtggtaaaagtaagaagttgtcagtaacacctccctcctccaacggtattaatgaggagttgtcagaagtcttacagactttacaggatgaatttgggcaaatgagctttgatcaccagcagcttgcaaaacttatccaggagtcgccaaccgttgaactgaaagacaagttggagtgtgaattggaggcattagtgggaaggatggaagcaaaagccaaccaaataactaaagttcgaaaataccaagcccagctggagaaacagaagttagagaagcagaagaaggaattaaaagctaccaaaaagactcttgatgaagaaagaaacagcagcagccgttctggaatcacagggaccacaaataagaaagattttatgaaactgagacctggagaaaaaaggagaaaaaatcttcagttattgaaggacatgcaaagcatacagaattcattacaaagcagtagtttgtgttgggattactgactcataaccaggtcagaaattttattcagataatctgtacctcatcaatcagatgatgacaatttacttcccaggtctcatactcacttatgttggaattaattaatagcaggtgttaaaggacccaggcttcattacacaggcttttcatgtatgcaggatgactcaatgttaaagcatttaaatggaaaccaggggagttttaaagcccgagaaaccacacataatcttttgttgagatgagtttgctgtactgacgctgcactttgtaaacagattaccagttttttacttgtgggtgtgattttttaaaatagttctttatatataattaaaattaggtttaaattttcaaaatatgagactatgctataggcagtgcttgcttgaaaagtctcatttttaaatctccctggcatgaggtgcccacttcccctttccaaagcaaccattaaacatactttgtttctactattggtggagtttttctatatttaaaaatacatatatatttcagaggatttttattttgctttttggcatttcagactttgatcagtgttaagtgcacttgtattgctttttaatctgttaattttttaaagacccaagcagtcattttgagttatatctataaaaattataaaaggatttttgaaagtataaacaaattgtcagtgaaataaatgagattttggaataaagtgagaatgggagaagggatatgttgtgagcatataccttcacagttcttaatacctgttttgtaatcatgatattcagtcaaggcattatggtttttaatcttgaaacttagagaaccctttgaatatttgcttttactggtgtacagtatgagtggaatataaactgtacacataattatcatgttgatataaatcataatttcaactagatcaagacatgttaaccttttataaatttaaagtcaataaagcacctttttaaaggaaacactgcaactttccttaacagcctgttaataaaggctttgtgacaagctctcaaaaaatgcatttctaaataggaggacatcaatgtattgatgaagagaaaaaactagtacttagttgccacactcatgcttacatagaaagagagcccaagaatattagatttcctcatgatacaagatactacagtaacaggctttaatttaggatccttaagattttggggtattatttgtgactctcctgaaattgtaaacttgtgcttctgtgtccagttttctaatgagtaggttcgtagcttgattgaattaataattgtgagcccatagacacaagggaagtgagaaacagtgctctggtgacatgataaatatatgtgtcaaccaccatttcagctattaaaaactcctgttatctccttgtttgaatttcaggtcattaaattgtataaccatcattt

SEQ ID NO: 470 - protein, 500 aa, Homosapiens
MAAASVSAASGSHLSNSFAEPSRSNGSMVRHSSSPYVVYPSDKPFLNSDLRRSPSKPTLAYPESNSRAIFSALKNLQDKIRRLELERIQAEESVKTLSRETIEYKKVLDEQIQERENSKNEESKHNQELTSQLLAAENKCNLLEKQLEYMRNMIKHAEMERTSVLEKQVSLERERQHDQTHVQSQLEKLDLLEQEYNKLTTMQALAEKKMQELEAKLHEEEQERKRMQAKAAELQTGLETNRLIFEDKATPCVPNARRIKKKKSKPPEKKSSRNYFGAQPHYRLCLGDMPFVAGKSTSPSHAVVANVQLVLHLMKQHSKALCNDRVINSIPLAKQVSSRGGKSKKLSVTPPSSNGINEELSEVLQTLQDEFGQMSFDHQQLAKLIQESPTVELKDKLECELEALVGRMEAKANQITKVRKYQAQLEKQKLEKQKKELKATKKTLDEERNSSSRSGITGTTNKKDFMKLRPGEKRRKNLQLLKDMQSIQNSLQSSSLCWDY

SEQ ID NO: 471 - DNA, 4493 bp, Homosapiens
gcactctgggggaacatggccgcttccggtctccctcccgggccggcgctggcctgactgcggccccggtccgtagcactccgccctccgcttctcccgccctgtagccgcgaagactgcttcagcctttccctgtgctgcccctgccgcgcgatggagaagagctcgagctgcgagagtcttggctcccagccggcggcggctcggccgcccagcgtggactccttgtccagtgcctccacttctcattcagagaattcagtgcatacaaaatcagcttctgttgtatcatcagattccatttcaacttctgccgacaacttttctcctgatttgagggtcctgagggagtctaacaagttagcagaaatggaagaaccacccttgcttccaggagaaaatattaaagacatggccaaagatgtaacttatatatgtccattcactggcgctgtacgaggaactctgactgtcacgaattataggttatatttcaaaagcatggaacgggatcccccatttgttttagatgcttcccttggtgtgataaatagagtagaaaaaattggtggtgcttctagtcgaggtgaaaattcttatggactagaaactgtgtgtaaggatattaggaatttacgatttgctcataaacctgaggggcggacaagaagatccatatttgagaatctaatgaaatatgcatttcctgtctctaataacctgcctctttttgcttttgaatacaaagaagtattccctgaaaatgggtggaagctatatgaccctcttttagagtatagaaggcagggaattccaaatgaaagctggagaataacaaagataaatgaacgatatgaactttgtgatacataccctgccctcctggttgtgccagcaaatattcctgatgaagaattaaagagagtggcatccttcagatcaagaggccgtatcccagttttatcatggattcatcctgaaagtcaagccacaatcactcggtgtagccagcccatggttggagtgagtggaaagcgaagcaaagaagatgaaaaataccttcaagctatcatggattccaatgcccagtctcacaaaatctttatatttgatgcccggccaagtgttaatgctgttgccaacaaggcaaagggtggaggttatgaaagtgaagatgcctatcaaaatgctgaactagttttcctggatatccacaatattcatgttatgagagaatcattacgaaaacttaaggagattgtgtaccccaacattgaggaaacccactggttgtctaacttggaatctactcattggctagaacatattaagcttattcttgcaggggctcttaggattgctgacaaggtagagtcagggaagacgtctgtggtagtgcattgcagtgatggttgggatcgcacagctcagctcacttcccttgccatgctcatgttggatggatactatcgaaccatccgaggatttgaagtccttgtggagaaagaatggctaagttttggacatcgatttcaactaagagttggccatggagataagaaccatgcagatgcagacagatcgcctgtttttcttcaatttattgactgtgtctggcagatgacaagacagtttcctaccgcatttgaattcaatgagtattttctcattaccattttggaccacctatacagctgcttattcggaacattcctctgtaatagtgaacaacagagaggaaaagagaatcttcctaaaaggactgtgtcactgtggtcttacataaacagccagctggaagacttcactaatcctctctatgggagctattccaatcatgtcctttatccagtagccagcatgcgccacctagagctctgggtgggatattacataaggtggaatccacggatgaaaccacaggaacctattcacaacagatacaaagaacttcttgctaaacgagcagagcttcagaaaaaagtagaggaactacagagagagatttctaaccgatcaacctcatcctcagagagagccagctctcctgcacagtgtgtcactcctgtccaaactgttgtataaaggactgtaagatcaggggcatcattgctatacactcttgattacactggcagctctatgagtagaaagtcttcggaatttagaacccatctatgagagaaagttcagtcactttatttattttaaatctctctaggatgagtttagaactgtagcagtgcaggtggcttaagtgaagtaactccatatgtaattacatgattatgatactaatcttttaagtatccaaagaatattaaaatacttcaatcctggattcacagtgggaacaagtttctattaaaaggcaaatgctgttacaaatttttggcatctggtaatattaaaaccattttagaaatacactctgtgctcactgtgcagaggaacatcagttttcaaaccaacactgaaattctgtggcatcacatatattgggccttgatgtcatgacagatcaaaatcatttgatatccctttctccattctaggtttttctttttttcagtaactgatttaccttgatcacttttcaacttccatattcttcatatagtaaaaggcaaagtgttgaagatactacggtgtggtagtagttgaaaattattgccgtcattatttacatacttaagacatattagcaagttgatccaaaatgggaggccttatagatgtgcttgggggaaaatgaaggggagaaagtagccatacaggagttcaaagaattccatgcccttcagattagcccaattaccagaaacatcatgaaagatattttaaaaactaattatttactacagtgtatttcacttgtcttgtgtgtctgaacacacagaagctaattagcaagtttttaagaagtatttaaaaatcttactaggattgacattttttctgaattctgtataaatagcttatagtgagaagtactgtgctcaaattttacatttttttcctttgcaaattctgtaatttcactcaacgattaagtctaccaaagaacacactgcatgtaaaagatgtattacaatctcaaagccagtaaaagaaatcttgcttcactgttcacctgctacaagtaagagtttggtgctggtagaaacatttgactctgatgtctattttattctacataagagccatatgtaatgtactgtaacaaaggagcttcttgtccccttggtcttttaattaaaagaaattccaactgacttttaaactttgttcttgtccaaagttgccatttcttttttttccccagaaatatttggaaattattggaggaatatgcaccccagatgaaaatgttcagtttgtacccatttttccttaaccaacacccaaatcaaacaattaaaatatacagtgtttttccactcactaattcactatacagagagtctgaaccttagcctccctcttggtcttgcagtgaggaagtttctattagtatatccaatttagcaaaattggtaccaaaatgatttctttggtaattgtgtgaaatataagctttttaacagggcatttaagtggctagcaaatcagtaattaaaaattaagctttctactccaagtatttcacaaacgcatctgccattttcctcatttaaaccttggttatcttggcctgataccacataaaagaatgtagaatggctgaagagatcaagaatttaaagcttctagtcttaacatacttgcatccacttcaaattcaaatcaaaagccagggaaatctaagtgcaaccctaccacttctctgctgagaaccttccagtggttcccctcaccttctgcagaagtctccaatatggagtacatgcacttgggcatttaatatataccactggtgtgtgtgggagggagggaggaggaatactagccctttttatatatttacacaagcaaaacttttaaatatttgaattgacagttacatgtttcataactttgtatgtctattggttgtgcaggtgtaattttttccctttttgattagggttacaaaatttagagaccagtatgattaagttgaagctccttagcctccttcgacctagtctctgcatacctcaacttttacgtaccaatgctactctgctgttcacaattgcctcatgtaatctgcagattcctgcctccccactttggttcagtctgtcttgtgcacctggaacaactgttctcccttgtgactaattcctattttctagagtttaggcatcatctcttcctttgggaagttatctgattcacgactgccttctctgacatccccaccttcctctgtgcccccatagcactgtgtataccgctactaccactgcaattcacattatattggaatgaacaattcacatgtctaccacaagtctgtaaacataaccttatttgaaatgaattgcaataaagctctgttacaacgt

SEQ ID NO: 472 - protein, 643 aa, Homosapiens
MEKSSSCESLGSQPAAARPPSVDSLSSASTSHSENSVHTKSASVVSSDSISTSADNFSPDLRVLRESNKLAEMEEPPLLPGENIKDMAKDVTYICPFTGAVRGTLTVTNYRLYFKSMERDPPFVLDASLGVINRVEKIGGASSRGENSYGLETVCKDIRNLRFAHKPEGRTRRSIFENLMKYAFPVSNNLPLFAFEYKEVFPENGWKLYDPLLEYRRQGIPNESWRITKINERYELCDTYPALLVVPANIPDEELKRVASFRSRGRIPVLSWIHPESQATITRCSQPMVGVSGKRSKEDEKYLQAIMDSNAQSHKIFIFDARPSVNAVANKAKGGGYESEDAYQNAELVFLDIHNIHVMRESLRKLKEIVYPNIEETHWLSNLESTHWLEHIKLILAGALRIADKVESGKTSVVVHCSDGWDRTAQLTSLAMLMLDGYYRTIRGFEVLVEKEWLSFGHRFQLRVGHGDKNHADADRSPVFLQFIDCVWQMTRQFPTAFEFNEYFLITILDHLYSCLFGTFLCNSEQQRGKENLPKRTVSLWSYINSQLEDFTNPLYGSYSNHVLYPVASMRHLELWVGYYIRWNPRMKPQEPIHNRYKELLAKRAELQKKVEELQREISNRSTSSSERASSPAQCVTPVQTVV

SEQ ID NO: 473 - DNA, 4688 bp, Homosapiens
tgcactctgggggaacatggccgcttccggtctccctcccgggccggcgctggcctgactgcggccccggtccgtagcactccgccctccgcttctcccgccctgtagccgcgaagactgcttcagcctttccctgtgctgcccctgccgcgcgatggagaagagctcgagctgcgagagtcttggctcccagccggcggcggctcggccgcccagcgtggactccttgtccagttaatgtgttaagagccattgacatttgaagatcatcagaagtgaagataaaacatctcaaaaattataattgcctccacttctcattcagagaattcagtgcatacaaaatcagcttctgttgtatcatcagattccatttcaacttctgccgacaacttttctcctgatttgaggagggagtctcgctctatcccctaggctggagtgcattggcgccatctcggctcatttgcaacctctgtctcccgggttcaagcgattctcctgcctcagcttcccgaggagctgggattacaggtcctgagggagtctaacaagttagcagaaatggaagaaccacccttgcttccaggagaaaatattaaagacatggccaaagatgtaacttatatatgtccattcactggcgctgtacgaggaactctgactgtcacgaattataggttatatttcaaaagcatggaacgggatcccccatttgttttagatgcttcccttggtgtgataaatagagtagaaaaaattggtggtgcttctagtcgaggtgaaaattcttatggactagaaactgtgtgtaaggatattaggaatttacgatttgctcataaacctgaggggcggacaagaagatccatatttgagaatctaatgaaatatgcatttcctgtctctaataacctgcctctttttgcttttgaatacaaagaagtattccctgaaaatgggtggaagctatatgaccctcttttagagtatagaaggcagggaattccaaatgaaagctggagaataacaaagataaatgaacgatatgaactttgtgatacataccctgccctcctggttgtgccagcaaatattcctgatgaagaattaaagagagtggcatccttcagatcaagaggccgtatcccagttttatcatggattcatcctgaaagtcaagccacaatcactcggtgtagccagcccatggttggagtgagtggaaagcgaagcaaagaagatgaaaaataccttcaagctatcatggattccaatgcccagtctcacaaaatctttatatttgatgcccggccaagtgttaatgctgttgccaacaaggcaaagggtggaggttatgaaagtgaagatgcctatcaaaatgctgaactagttttcctggatatccacaatattcatgttatgagagaatcattacgaaaacttaaggagattgtgtaccccaacattgaggaaacccactggttgtctaacttggaatctactcattggctagaacatattaagcttattcttgcaggggctcttaggattgctgacaaggtagagtcagggaagacgtctgtggtagtgcattgcagtgatggttgggatcgcacagctcagctcacttcccttgccatgctcatgttggatggatactatcgaaccatccgaggatttgaagtccttgtggagaaagaatggctaagttttggacatcgatttcaactaagagttggccatggagataagaaccatgcagatgcagacagatcgcctgtttttcttcaatttattgactgtgtctggcagatgacaagacagtttcctaccgcatttgaattcaatgagtattttctcattaccattttggaccacctatacagctgcttattcggaacattcctctgtaatagtgaacaacagagaggaaaagagaatcttcctaaaaggactgtgtcactgtggtcttacataaacagccagctggaagacttcactaatcctctctatgggagctattccaatcatgtcctttatccagtagccagcatgcgccacctagagctctgggtgggatattacataaggtggaatccacggatgaaaccacaggaacctattcacaacagatacaaagaacttcttgctaaacgagcagagcttcagaaaaaagtagaggaactacagagagagatttctaaccgatcaacctcatcctcagagagagccagctctcctgcacagtgtgtcactcctgtccaaactgttgtataaaggactgtaagatcaggggcatcattgctatacactcttgattacactggcagctctatgagtagaaagtcttcggaatttagaacccatctatgagagaaagttcagtcactttatttattttaaatctctctaggatgagtttagaactgtagcagtgcaggtggcttaagtgaagtaactccatatgtaattacatgattatgatactaatcttttaagtatccaaagaatattaaaatacttcaatcctggattcacagtgggaacaagtttctattaaaaggcaaatgctgttacaaatttttggcatctggtaatattaaaaccattttagaaatacactctgtgctcactgtgcagaggaacatcagttttcaaaccaacactgaaattctgtggcatcacatatattgggccttgatgtcatgacagatcaaaatcatttgatatccctttctccattctaggtttttctttttttcagtaactgatttaccttgatcacttttcaacttccatattcttcatatagtaaaaggcaaagtgttgaagatactacggtgtggtagtagttgaaaattattgccgtcattatttacatacttaagacatattagcaagttgatccaaaatgggaggccttatagatgtgcttgggggaaaatgaaggggagaaagtagccatacaggagttcaaagaattccatgcccttcagattagcccaattaccagaaacatcatgaaagatattttaaaaactaattatttactacagtgtatttcacttgtcttgtgtgtctgaacacacagaagctaattagcaagtttttaagaagtatttaaaaatcttactaggattgacattttttctgaattctgtataaatagcttatagtgagaagtactgtgctcaaattttacatttttttcctttgcaaattctgtaatttcactcaacgattaagtctaccaaagaacacactgcatgtaaaagatgtattacaatctcaaagccagtaaaagaaatcttgcttcactgttcacctgctacaagtaagagtttggtgctggtagaaacatttgactctgatgtctattttattctacataagagccatatgtaatgtactgtaacaaaggagcttcttgtccccttggtcttttaattaaaagaaattccaactgacttttaaactttgttcttgtccaaagttgccatttcttttttttccccagaaatatttggaaattattggaggaatatgcaccccagatgaaaatgttcagtttgtacccatttttccttaaccaacacccaaatcaaacaattaaaatatacagtgtttttccactcactaattcactatacagagagtctgaaccttagcctccctcttggtcttgcagtgaggaagtttctattagtatatccaatttagcaaaattggtaccaaaatgatttctttggtaattgtgtgaaatataagctttttaacagggcatttaagtggctagcaaatcagtaattaaaaattaagctttctactccaagtatttcacaaacgcatctgccattttcctcatttaaaccttggttatcttggcctgataccacataaaagaatgtagaatggctgaagagatcaagaatttaaagcttctagtcttaacatacttgcatccacttcaaattcaaatcaaaagccagggaaatctaagtgcaaccctaccacttctctgctgagaaccttccagtggttcccctcaccttctgcagaagtctccaatatggagtacatgcacttgggcatttaatatataccactggtgtgtgtgggagggagggaggaggaatactagccctttttatatatttacacaagcaaaacttttaaatatttgaattgacagttacatgtttcataactttgtatgtctattggttgtgcaggtgtaattttttccctttttgattagggttacaaaatttagagaccagtatgattaagttgaagctccttagcctccttcgacctagtctctgcatacctcaacttttacgtaccaatgctactctgctgttcacaattgcctcatgtaatctgcagattcctgcctccccactttggttcagtctgtcttgtgcacctggaacaactgttctcccttgtgactaattcctattttctagagtttaggcatcatctcttcctttgggaagttatctgattcacgactgccttctctgacatccccaccttcctctgtgcccccatagcactgtgtataccgctactaccactgcaattcacattatattggaatgaacaattcacatgtctaccacaagtctgtaaacataaccttatttgaaatgaattgcaataaagctctgttacaacgt

SEQ ID NO: 474 - protein, 571 aa, Homosapiens
MEEPPLLPGENIKDMAKDVTYICPFTGAVRGTLTVTNYRLYFKSMERDPPFVLDASLGVINRVEKIGGASSRGENSYGLETVCKDIRNLRFAHKPEGRTRRSIFENLMKYAFPVSNNLPLFAFEYKEVFPENGWKLYDPLLEYRRQGIPNESWRITKINERYELCDTYPALLVVPANIPDEELKRVASFRSRGRIPVLSWIHPESQATITRCSQPMVGVSGKRSKEDEKYLQAIMDSNAQSHKIFIFDARPSVNAVANKAKGGGYESEDAYQNAELVFLDIHNIHVMRESLRKLKEIVYPNIEETHWLSNLESTHWLEHIKLILAGALRIADKVESGKTSVVVHCSDGWDRTAQLTSLAMLMLDGYYRTIRGFEVLVEKEWLSFGHRFQLRVGHGDKNHADADRSPVFLQFIDCVWQMTRQFPTAFEFNEYFLITILDHLYSCLFGTFLCNSEQQRGKENLPKRTVSLWSYINSQLEDFTNPLYGSYSNHVLYPVASMRHLELWVGYYIRWNPRMKPQEPIHNRYKELLAKRAELQKKVEELQREISNRSTSSSERASSPAQCVTPVQTVV

SEQ ID NO: 475 - DNA, 4565 bp, Homosapiens
tgcactctgggggaacatggccgcttccggtctccctcccgggccggcgctggcctgactgcggccccggtccgtagcactccgccctccgcttctcccgccctgtagccgcgaagactgcttcagcctttccctgtgctgcccctgccgcgcgatggagaagagctcgagctgcgagagtcttggctcccagccggcggcggctcggccgcccagcgtggactccttgtccagttaatgtgttaagagccattgacatttgaagatcatcagaagtgaagataaaacatctcaaaaattataattgcctccacttctcattcagagaattcagtgcatacaaaatcagcttctgttgtatcatcagattccatttcaacttctgccgacaacttttctcctgatttgagggtcctgagggagtctaacaagttagcagaaatggaagaaccacccttgcttccaggagaaaatattaaagacatggccaaagatgtaacttatatatgtccattcactggcgctgtacgaggaactctgactgtcacgaattataggttatatttcaaaagcatggaacgggatcccccatttgttttagatgcttcccttggtgtgataaatagagtagaaaaaattggtggtgcttctagtcgaggtgaaaattcttatggactagaaactgtgtgtaaggatattaggaatttacgatttgctcataaacctgaggggcggacaagaagatccatatttgagaatctaatgaaatatgcatttcctgtctctaataacctgcctctttttgcttttgaatacaaagaagtattccctgaaaatgggtggaagctatatgaccctcttttagagtatagaaggcagggaattccaaatgaaagctggagaataacaaagataaatgaacgatatgaactttgtgatacataccctgccctcctggttgtgccagcaaatattcctgatgaagaattaaagagagtggcatccttcagatcaagaggccgtatcccagttttatcatggattcatcctgaaagtcaagccacaatcactcggtgtagccagcccatggttggagtgagtggaaagcgaagcaaagaagatgaaaaataccttcaagctatcatggattccaatgcccagtctcacaaaatctttatatttgatgcccggccaagtgttaatgctgttgccaacaaggcaaagggtggaggttatgaaagtgaagatgcctatcaaaatgctgaactagttttcctggatatccacaatattcatgttatgagagaatcattacgaaaacttaaggagattgtgtaccccaacattgaggaaacccactggttgtctaacttggaatctactcattggctagaacatattaagcttattcttgcaggggctcttaggattgctgacaaggtagagtcagggaagacgtctgtggtagtgcattgcagtgatggttgggatcgcacagctcagctcacttcccttgccatgctcatgttggatggatactatcgaaccatccgaggatttgaagtccttgtggagaaagaatggctaagttttggacatcgatttcaactaagagttggccatggagataagaaccatgcagatgcagacagatcgcctgtttttcttcaatttattgactgtgtctggcagatgacaagacagtttcctaccgcatttgaattcaatgagtattttctcattaccattttggaccacctatacagctgcttattcggaacattcctctgtaatagtgaacaacagagaggaaaagagaatcttcctaaaaggactgtgtcactgtggtcttacataaacagccagctggaagacttcactaatcctctctatgggagctattccaatcatgtcctttatccagtagccagcatgcgccacctagagctctgggtgggatattacataaggtggaatccacggatgaaaccacaggaacctattcacaacagatacaaagaacttcttgctaaacgagcagagcttcagaaaaaagtagaggaactacagagagagatttctaaccgatcaacctcatcctcagagagagccagctctcctgcacagtgtgtcactcctgtccaaactgttgtataaaggactgtaagatcaggggcatcattgctatacactcttgattacactggcagctctatgagtagaaagtcttcggaatttagaacccatctatgagagaaagttcagtcactttatttattttaaatctctctaggatgagtttagaactgtagcagtgcaggtggcttaagtgaagtaactccatatgtaattacatgattatgatactaatcttttaagtatccaaagaatattaaaatacttcaatcctggattcacagtgggaacaagtttctattaaaaggcaaatgctgttacaaatttttggcatctggtaatattaaaaccattttagaaatacactctgtgctcactgtgcagaggaacatcagttttcaaaccaacactgaaattctgtggcatcacatatattgggccttgatgtcatgacagatcaaaatcatttgatatccctttctccattctaggtttttctttttttcagtaactgatttaccttgatcacttttcaacttccatattcttcatatagtaaaaggcaaagtgttgaagatactacggtgtggtagtagttgaaaattattgccgtcattatttacatacttaagacatattagcaagttgatccaaaatgggaggccttatagatgtgcttgggggaaaatgaaggggagaaagtagccatacaggagttcaaagaattccatgcccttcagattagcccaattaccagaaacatcatgaaagatattttaaaaactaattatttactacagtgtatttcacttgtcttgtgtgtctgaacacacagaagctaattagcaagtttttaagaagtatttaaaaatcttactaggattgacattttttctgaattctgtataaatagcttatagtgagaagtactgtgctcaaattttacatttttttcctttgcaaattctgtaatttcactcaacgattaagtctaccaaagaacacactgcatgtaaaagatgtattacaatctcaaagccagtaaaagaaatcttgcttcactgttcacctgctacaagtaagagtttggtgctggtagaaacatttgactctgatgtctattttattctacataagagccatatgtaatgtactgtaacaaaggagcttcttgtccccttggtcttttaattaaaagaaattccaactgacttttaaactttgttcttgtccaaagttgccatttcttttttttccccagaaatatttggaaattattggaggaatatgcaccccagatgaaaatgttcagtttgtacccatttttccttaaccaacacccaaatcaaacaattaaaatatacagtgtttttccactcactaattcactatacagagagtctgaaccttagcctccctcttggtcttgcagtgaggaagtttctattagtatatccaatttagcaaaattggtaccaaaatgatttctttggtaattgtgtgaaatataagctttttaacagggcatttaagtggctagcaaatcagtaattaaaaattaagctttctactccaagtatttcacaaacgcatctgccattttcctcatttaaaccttggttatcttggcctgataccacataaaagaatgtagaatggctgaagagatcaagaatttaaagcttctagtcttaacatacttgcatccacttcaaattcaaatcaaaagccagggaaatctaagtgcaaccctaccacttctctgctgagaaccttccagtggttcccctcaccttctgcagaagtctccaatatggagtacatgcacttgggcatttaatatataccactggtgtgtgtgggagggagggaggaggaatactagccctttttatatatttacacaagcaaaacttttaaatatttgaattgacagttacatgtttcataactttgtatgtctattggttgtgcaggtgtaattttttccctttttgattagggttacaaaatttagagaccagtatgattaagttgaagctccttagcctccttcgacctagtctctgcatacctcaacttttacgtaccaatgctactctgctgttcacaattgcctcatgtaatctgcagattcctgcctccccactttggttcagtctgtcttgtgcacctggaacaactgttctcccttgtgactaattcctattttctagagtttaggcatcatctcttcctttgggaagttatctgattcacgactgccttctctgacatccccaccttcctctgtgcccccatagcactgtgtataccgctactaccactgcaattcacattatattggaatgaacaattcacatgtctaccacaagtctgtaaacataaccttatttgaaatgaattgcaataaagctctgttacaacgt

SEQ ID NO: 476 - protein, 571 aa, Homosapiens; identical to SEQ ID NO: 474

SEQ ID NO: 477 - DNA, 5428 bp, Homosapiens
ctccctctcctatcggagcacaatgaaagcctgtgtatcgccgtgactccgggcgggagccagtgtcagcaaagcggctaacaacagacgagaaagagaaaggaaaatacaagctactttttttttccatctataaagcggagcaaatacaggagatagaaccagattgcttattgcgagtccagaccctcagatccactggccggggatggaatgtacaaaagtggacagaaaagtggctggacatgactcggtgcaatttgctggaagtttgtaagtttgaccatcgtttgtaaattactctcggaagagtttgtctctcttgatactgtattagaatagagccgggggtgaggaatagaaacgtaagcgggaaagaaaaaaatgtgttgaaggatctctctcagtggctagcgacttaagattgcttttcatttaaggctaggaaaccttagagggagtgaggattttaccggtgattggattagctgaagaaaaaagcatggtccaaaagtccaattactgacattgttaacagttgaaaagctgtctccctcttttgggagaagacaacatcctacagtaccccaaagaggagaaaacaccggagcgaaaggaaagggaggaaaaattaaaagccaaaagacagtctcccttgatttttgcacattttgaacagtgacttaaacatcttctgaaacagcactgttttgttttgttttggttttttatttaacctgaggaaaagtcaaggctgctggttacatagacatggtagaaatgtgtttctctgcagaaacatccccataaagaattgtcggaaacaactaggtgagggggagtcctctctattaatacctctctcaataccttttgctgtgtgtttctgtctcttgctggacaatccctgaattcttgatctaacccccagatcgtgtgtttacaaagtacctagtggctcttgtcagcttggtggaggaaaaaaaatccaccaactctgtccaacttctccagagctgtcaaatgcaattagagtaagttaatcagggtttgtttccaacttatcctccccccagttggtttctattctttctccccaccctctttttactaactcccctcccccacaacttctccacggctcccccacaacctctgaagacctctattcatgtggccctgaacactgagctcacattgtcaaaaacagacttgcctgcaatagccagcagtagcctctttccacctcaccatcccagaggcagcaatcattgtgtccggtaagatgggggacacagcgcccccgcaggcccccgcaggagggctagggggggcctctggggcggggctccttggagggggctcagtcaccccgagagtgcacagtgctatcgtggagcgcctccgggctcggatcgctgtctgccgccaacaccacctgagctgtgaaggacgatatgaacgaggtagggccgagagctcagaccgggaaagagaaagcaccttgcagctcctgagccttgtacagcatggccagggggcaaggaaagctggcaaacacaccaaggccaccgccactgctgccaccactacagcccctccaccgccccctgctgcccctcctgcggcctcccaagcagcagcaacagcagccccaccgcccccaccagactatcaccatcaccaccagcagcacctgctgaacagtagcaataatggtggcagtggtgggataaacggagagcagcagccgcccgcttcaaccccaggggaccagaggaactcagccctgattgcgctccagggttccttgaaaagaaaacaggtagttaacctatctcctgccaacagcaagcgacccaatggctttgtggacaactcatttcttgatatcaaaagaattcgtgttggggagaatctctctgcaggacaaggtggcctccaaataaacaatggacaaagtcagattatgtcagggaccttgcctatgagccaagcacccctgcgaaagactaacactctgccatcccatacacattctcctggcaatggcctgtttaacatgggcttaaaggaggtaaagaaggagccaggagagactctgtcttgcagtaagcacatggatggccaaatgacccaagagaatatttttcctaataggtacggagacgaccctggagaacaactgatggatcctgagctgcaggaactgttcaatgaactgaccaacatatctgtgcctcccatgagtgaccttgaactggagaacatgatcaatgccaccataaagcaggatgacccatttaacattgacttgggtcagcaaagccagaggagcacacctaggccctccttacccatggagaaaatagtgatcaaaagtgaatactcaccgggcttgactcagggcccctcaggctctcctcagctgaggcccccatcagctggccccgcattctccatggccaactctgccctctccacttcgtctccaatcccttcagtccctcagagccaggctcagcctcagacaggctccggagcaagccgggccttgccaagctggcaggaagtatcccatgcccagcagctcaaacagatagctgctaatcgtcagcagcatgcccggatgcagcagcaccagcagcagcaccagcctaccaactggtcagccttgccctcttctgctggaccatcaccaggtccatttgggcaggagaaaatccccagcccttcttttggtcagcagacattcagcccacagagctcccccatgcctggggtagctggcggcagcggccagtcgaaagtaatggctaactacatgtacaaggccggcccctcagcccagggtgggcacctagatgtcctcatgcagcaaaagcctcaggatctcagtcgaagttttattaacaacccgcacccagccatggagccccgtcagggcaacaccaagcctttgtttcattttaactcagatcaagcgaaccagcagatgccttctgttttgccttcccagaacaagccttctctcctacactacacccaacagcaacagcagcaacagcagcagcagcagcagcagcagcagcagcagcagcagcaacagcagcagcagcagcaacagcaacagcaacagcaacagcagagttcaatttcagctcaacaacagcaacagcagcagagctcaatttcagcccaacagcagcagcagcagcaacaacagcagcagcagcagcaacaacaacagcaacaacagcagcagcagcagcagcaacaaccatcttctcagcctgcccaatctctaccaagccagcctttgctaaggtcacctttgccacttcagcaaaagctcctacttcagcaaatgcagaatcagcccattgcaggaatgggataccaagtctcccaacaacagagacaggatcaacactctgtggtaggccagaacacaggccccagtccaagtcctaacccctgctcaaatccaaacactggaagtggttacatgaactcccagcaatcactgttgaatcagcaattgatgggaaagaagcagactctacagaggcagatcatggagcagaaacagcaacttcttctccagcagcagatgctggctgacgcggagaaaattgctccacaagatcagataaaccgacatttgtcaaggccacctccagattataaagaccaaagaagaaatgtgggcaatatgcaaccaactgctcagtattctggtggctcatccacaataagcttaaactctaaccaggctttggcaaacccagtttcaacacacaccattttaactcccaattccagcctcctgtctacttctcacgggacaagaatgccatcattatctacagcagttcagaatatggggatgtatggaaatctgccttgtaatcaacctaacacatacagtgtcacttcaggaatgaatcaattgacccaacagagaaacccaaagcaattgttagcaaatcaaaacaaccctatgatgccacggccacctaccttagggccaagtaataataacaatgtagccacttttggagctggatctgttggtaattcacaacaattgagaccaaatttaacccatagtatggcaagcatgccaccacagagaacatcaaacgtaatgatcacatccaacacaactgcaccaaactgggcctctcaagaaggaacaagcaaacagcaagaagccctgacgtctgcaggagtccgcttccccacaggtacacctgcagcctataccccaaatcagtcactgcaacaggcagtaggtagccagcaattttcccagagggcagtggctcctcctaaccagttaacaccagcagtgcaaatgagacccatgaaccaaatgagccaaacactaaatgggcaaaccatgggtcccctcaggggtctgaatctcagacccaatcagctaagcacacagattttgcctaatttgaatcagtcaggaacagggttgaatcagtcgaggacgggcatcaaccagccaccatccctgacgcccagcaattttccttcacccaaccaaagttccagggcttttcaaggaactgaccacagcagtgacttagcttttgacttcctcagccaacaaaatgataacatgggccctgccctaaacagtgatgctgatttcattgattctttattgaagacagagcctggtaatgatgactggatgaaagacatcaatcttgatgaaatcttggggaacaattcctaaagaagaaagggaagacaatttacaaactccaagcactaaaaggcagtatattacagaaactctgtagaggctgaactgttgatgttcaggtggactacatgaagataacatgcttaaaaatggaaagcagaaagtaactgcagtgatgaacattttggtccaaattcttgttttaaatcttacacctgaaagtaaaatattgggatcacttttccctgtctaaactccaggatacagtatccaatttatccaaacagaactgtggtgtcaatgtgtaattaattgtgtaaaatagccttcccaagtttctttttccctggaaaataaaaaaggtaatagaacttgtagtttatttaaaccccatgtcatgaggaggtactagttccaagcaacaaactccttaatttgctctaatagataggtatggtttaatctttccattgtgtcttttcatttaattttcctgaagcttgcaggatagattgaaatgttataggtttgtttggagtaaccaaacagtatgcaaattaagaaaaagccagagaacctagaaaacatccagtggattacagaatttcttccccatattcactcctcacttttacaattttcccacaatcctctacttcagtgggatgctgtgtctagtgattaaacaaaaatatagagctg

SEQ ID NO: 478 - protein, 1156 aa, Homosapiens
MGDTAPPQAPAGGLGGASGAGLLGGGSVTPRVHSAIVERLRARIAVCRQHHLSCEGRYERGRAESSDRERESTLQLLSLVQHGQGARKAGKHTKATATAATTTAPPPPPAAPPAASQAAATAAPPPPPDYHHHHQQHLLNSSNNGGSGGINGEQQPPASTPGDQRNSALIALQGSLKRKQVVNLSPANSKRPNGFVDNSFLDIKRIRVGENLSAGQGGLQINNGQSQIMSGTLPMSQAPLRKTNTLPSHTHSPGNGLFNMGLKEVKKEPGETLSCSKHMDGQMTQENIFPNRYGDDPGEQLMDPELQELFNELTNISVPPMSDLELENMINATIKQDDPFNIDLGQQSQRSTPRPSLPMEKIVIKSEYSPGLTQGPSGSPQLRPPSAGPAFSMANSALSTSSPIPSVPQSQAQPQTGSGASRALPSWQEVSHAQQLKQIAANRQQHARMQQHQQQHQPTNWSALPSSAGPSPGPFGQEKIPSPSFGQQTFSPQSSPMPGVAGGSGQSKVMANYMYKAGPSAQGGHLDVLMQQKPQDLSRSFINNPHPAMEPRQGNTKPLFHFNSDQANQQMPSVLPSQNKPSLLHYTQQQQQQQQQQQQQQQQQQQQQQQQQQQQQQQQQQSSISAQQQQQQQSSISAQQQQQQQQQQQQQQQQQQQQQQQQQQQPSSQPAQSLPSQPLLRSPLPLQQKLLLQQMQNQPIAGMGYQVSQQQRQDQHSVVGQNTGPSPSPNPCSNPNTGSGYMNSQQSLLNQQLMGKKQTLQRQIMEQKQQLLLQQQMLADAEKIAPQDQINRHLSRPPPDYKDQRRNVGNMQPTAQYSGGSSTISLNSNQALANPVSTHTILTPNSSLLSTSHGTRMPSLSTAVQNMGMYGNLPCNQPNTYSVTSGMNQLTQQRNPKQLLANQNNPMMPRPPTLGPSNNNNVATFGAGSVGNSQQLRPNLTHSMASMPPQRTSNVMITSNTTAPNWASQEGTSKQQEALTSAGVRFPTGTPAAYTPNQSLQQAVGSQQFSQRAVAPPNQLTPAVQMRPMNQMSQTLNGQTMGPLRGLNLRPNQLSTQILPNLNQSGTGLNQSRTGINQPPSLTPSNFPSPNQSSRAFQGTDHSSDLAFDFLSQQNDNMGPALNSDADFIDSLLKTEPGNDDWMKDINLDEILGNNS

SEQ ID NO: 479 - DNA, 2726 bp, Homosapiens
cggcacgaggctggttgccggggcaggggcggaggcggaggcagaggtggaggcgctttgaaagccgtcattgtgtggcactggacggggaatcaagagacccggtttctaatccctgctctgtcactaacaagctgcgtgatcttcggaaaaaagtaatcctcttggaaagctggaaacatagtccgaagcttaagtgaaaatgatacatgttagaagacatgaaacaaggagaaattctaagagtcacgtgcctgagcagaaatctcgagttgattggaggcgaactaaaagaagtagtatctcacaattacttgatagtgatgaagagcttgatagtgaagaatttgatagtgatgaagagcttgatagtgatgaaagttttgaaaatgatgaagagcttgatagtaacaagggacctgattgtaataaaacaccaggaagtgaaagagagctcaacttaagtaaaattcaaagtgaaggaaatgacagtaagtgtctcattaactctggcaacggttcaacatatgaagaagaaacgaacaaaatcaaacataggaatattgacttacaagatcaggaaaaacatttaagtcaagaggataatgatctcaacaaacaaactggacaaataatagaggatgatcaggaaaaacatttaagtcaagaggataatgatctcaacaaacaaactggacaaataatagaggatgatttagaagaagaagacatcaagcgaggaaaaagaaaaaggctatcctctgtgatgtgtgacagtgatgagagtgatgacagcgatatcctagttagaaaagtaggtgttaaacgtccccgtagagtggttgaagatgaaggttcttcagtggaaatggagcaaaagactcctgaaaaaacattagctgcacaaaagcgagaaaaacttcagaagctcaaagaactctcaaaacaaagatctcgtcagagacgcagtagtggtagagattttgaggactctgaaaaggaatcttgcccaagcagtgatgaagttgatgaggaggaagaagaggataattatgaatctgatgaagatggagatgattatattatcgatgactttgtagtgcaagatgaggagggtgatgaagagaataaaaaccaacaaggagaaaaattgactacatcacaactgaaattagtaaaacagaattctctttattcttttagtgaccactatactcattttgaaagagttgtgaaggctcttctgatcaacgctttagatgaatcttttctgggaacattatatgatggcacaaggcaaaaatcatatgcaaaagatatgctaacatctcttcattatttggataaccgctttgttcagcctcgtctagagagcttggtatctagaagtcgttggaaagagcaatataaggagcgagtagaaaattattctaatgtaagtattcatttgaagaatcctgaaaactgttcctgccaggcttgtggactgcatcgctactgtaaatattcagtgcatttatcaggagagttgtataacaccaggaccatgcaaatagataatttcatgtcacatgataaacaggtgttcactgttggcagaatttgtgccagccgtaccagaatttatcataaactgaaacattttaaattcaaactataccaggaatgttgcaccattgcaatgacagaagaagttgaagatgaacaagttaaagaaacagtggaaagaattttcaggcggtcaaaagaaaatggctggattaaggagaaatatggtcaacttgaagaatatctcaattttgcggattactttcaagaagagaagtttgagttgtaacacatttccatcagagaagattttttaaattcctgtaaatgtgaagatcatgattcttgtttttctgtatcatgtgacatgtttgtacattttatctatatcttcatggcaaaatattttgtttaaaacatgattatcttaattcctgtgaagtggcactctacactctaattaaacttttatctgatgtacataaaagcattatcttaatttttaagtctgtaaatatattttaaagttatataataatggctttataacagatgactgtcaagtgaatgagctgttgatatcctgtcagtttagtcaaaatatattgtatcttaaaaatgtatttagactaacgtctacatgtatttttacggaattcctggccagatctgtttattcttttacagtattaaatgattttcactaatatattttttactgctatcatctaaatcagtgggccatggaagaaacctcatatatcattcagttcaatcccattgcttcagaatcagatcatagcatatctattctaagtagaggaatgcttttttccttttcttgaaagtttctctttcaaatagatttcaggcctctagagtctttcaaccctcacattcaggaataattttatgtaaattttcatgctttataatgttcttacttttttctattcaattttgtctatatattgatgattaagatgtattttatttatttttatccatagctttttccatataagtatgtatcttagggtcagaactgctgaaagagacaaactcagccaaaaacacttggaaagcatattttggtatctgcattgctttgcatatctaaattttcccataaagtaataaagtaaaatggttgcagaggaaaaaaaaagaaaaaaaaa

SEQ ID NO: 480 - protein, 544 aa, Homosapiens
MIHVRRHETRRNSKSHVPEQKSRVDWRRTKRSSISQLLDSDEELDSEEFDSDEELDSDESFENDEELDSNKGPDCNKTPGSERELNLSKIQSEGNDSKCLINSGNGSTYEEETNKIKHRNIDLQDQEKHLSQEDNDLNKQTGQIIEDDQEKHLSQEDNDLNKQTGQIIEDDLEEEDIKRGKRKRLSSVMCDSDESDDSDILVRKVGVKRPRRVVEDEGSSVEMEQKTPEKTLAAQKREKLQKLKELSKQRSRQRRSSGRDFEDSEKESCPSSDEVDEEEEEDNYESDEDGDDYIIDDFVVQDEEGDEENKNQQGEKLTTSQLKLVKQNSLYSFSDHYTHFERVVKALLINALDESFLGTLYDGTRQKSYAKDMLTSLHYLDNRFVQPRLESLVSRSRWKEQYKERVENYSNVSIHLKNPENCSCQACGLHRYCKYSVHLSGELYNTRTMQIDNFMSHDKQVFTVGRICASRTRIYHKLKHFKFKLYQECCTIAMTEEVEDEQVKETVERIFRRSKENGWIKEKYGQLEEYLNFADYFQEEKFEL

SEQ ID NO: 481 - DNA, 2930 bp, Homosapiens
atgtcagggaaacggaagcgtgtggtgttgactattaaagataagcttgatataataaagaaacttgaagacggaggttcttccaaacaactggcagtgatttatggaattggtgaaacaacagttcgggatataagaaaaaataaggaaaagattataacttatgcaagcagttctgattccacaagtcttttggccaagaggaaatctatgaagccatccatgtatgaggaattggacagggcaatgctggaatggttcaaccagcaaagagcaaaagggaatcccatatctggaccaatttgtgcaaaaagggcagagttcttcttttatgctttgggaatggatggtgattttaacccctctgccggttggctaactcgttttaagcagcggcacagcattagagagattaacattagaaatgaaagattaaatggagatgagactgcggtggaagatttttgtaataactttcgagattttattgaacgagagaatttacagcctgaacaaatctacaatgcagatgaaactggactcttttggaagtgcttgccttctaggatttcagtaatcaaaggtaaatgcactgtccctgggcacaaatcaattgaagaaagagtcacaatcatgtgttgtgccaatgcaacaggtttacacaaacttaaactttgtgttgtggggaaagcaaagaaacctcgctcctttaaatcaactgacaccttaaacctgccagtctcttatttcagccaaaaaggtgcatggatggatctttccattttccgacaatggtttgataaaatttttgtgccgcaagttcgagagtatttaagatctaaaggcttgcaggaaaaggctgtgctcttgttggataattcaccaacacatccaaatgaaaatgtcctaaggtcagatgatggccaaatatttgctaaatatttaccacctaatgtggcctcattgattcagccttcagatcagggagtcatagcaacgatgaagagaaattatcgtgcaggtcttctccagaacaacttggaagaaggtaatgacctgaaatcattctggaagaagctaactctgttggatgcactttatgaaatagcaatggcatggaacttagtaaaaccagttaccattagcagagcatggaagaagattctccctatggtagaggagaaagagagcctggactttgatgttgaagatatttctgtggctactgtggctgccattttacaacacaccaaaggattggaaaatgtgactactgagaaccttgaaaaatggcttgaagtagacagtactgaaccaggctatgaagtgttaactgatagcgaaatcatcagaagagcacaaggccaggcagatgaatccagtgaaaatgaggaggaggaaatagaactaattccagagaaacatattaatcatgcagctgccctccagtggactgaaaatttattggattatctagaacaacaaggtgatatgattctacctgatagactggtaatacgtaaacttcgagccaccatcagaaataaacagaagatgacaaagtcaagtcaataatgtcatttcaattttattgttctgctcattgtgtttgtgacaaactctttgcaatatggcttaattttctttgtgttctgaattctcagacttggtcctgtgaaatacaggcacaaaatgtatctgaagtggtttgaggattatgtgttttcatcatctgtgtcttttgtccttttatttgtacagataatcagaagatgatactgaatagatataaattacatgtacacatgtattcactttttagaatctgcaattataccttctgtaacagtggcattcccttaattttctagtgaaagttagagataactgaacagactgaagcacttttctgaaatcttttgcttgatttatgaaggctgccatagttatcttttcttgtgttaaccatcttaaatgatgttttgtatattttaatagactgataggatgagaaagatttatattattagatttcaggatgatttataataattcaaaaatgaaattcaataatggggaaataattatgaattatagaaattatgccttcattctcttacatttgtgtgggttgcaagagggggagattattctggaaatgaagtaaatatgggaagttattgccaaatgagagagaaactatgggaaagctgatctataaagaggcattctgatcaattcatttgtaggaaactgggaaataaaaacctggggaactttaggttatttatacaagggaataaataggctgattttaatttggtaagttgatctttttattatgaatttggtaatagtataggtttattatttattcatctaattttatagtacaggttttgtaatgttacatgtgatgatatgagctcccaccttatatgggggaacatcttgggaatttgagatttaataagtttttttttttttttttttagtgtttttactgcatactcacaaatgttgtctataatttgaaaaatattgtcatatctggccctttgatgagaaaaggaaattacaataataaagttttatgattttaaataagtcatatgtttgtatcctgttttatgaagaaagcagaaataattactgaaagtgccagacactaaggaatattattgtttattattttaatacatataaaaagggattaatctgctaaaatgtaatctaaatcagaattttgataaattttttttgtaaactaagtatgtttattcaagacattgaaactactttgcacatatgaatattaatgtaacttgtaatttaaaagtaaagtgtttccatgctatttcatgttttggccaaaaatttttaaaaaataaattacaattgttctctattagtaaaaaaaaaaaaaaaaa

SEQ ID NO: 482 - protein, 524 aa, Homosapiens
MSGKRKRVVLTIKDKLDIIKKLEDGGSSKQLAVIYGIGETTVRDIRKNKEKIITYASSSDSTSLLAKRKSMKPSMYEELDRAMLEWFNQQRAKGNPISGPICAKRAEFFFYALGMDGDFNPSAGWLTRFKQRHSIREINIRNERLNGDETAVEDFCNNFRDFIERENLQPEQIYNADETGLFWKCLPSRISVIKGKCTVPGHKSIEERVTIMCCANATGLHKLKLCVVGKAKKPRSFKSTDTLNLPVSYFSQKGAWMDLSIFRQWFDKIFVPQVREYLRSKGLQEKAVLLLDNSPTHPNENVLRSDDGQIFAKYLPPNVASLIQPSDQGVIATMKRNYRAGLLQNNLEEGNDLKSFWKKLTLLDALYEIAMAWNLVKPVTISRAWKKILPMVEEKESLDFDVEDISVATVAAILQHTKGLENVTTENLEKWLEVDSTEPGYEVLTDSEIIRRAQGQADESSENEEEEIELIPEKHINHAAALQWTENLLDYLEQQGDMILPDRLVIRKLRATIRNKQKMTKSSQ

SEQ ID NO: 483 - DNA, 1990 bp, Homosapiens
caaggagccatgccagctggacacacacttcttccagggcctctggcagccaggacagagttgagaccacagctgttgagaccctgagccctgagtctgtattgctcaagaagggccttccccagcaatgacctcctcattgcttctggcctttctcctcctggctccaaccacagtggccactcccagagctggcggtcagtgtccagcatgtggggggcccaccttggaactggagagccagcgggagctgcttcttgatctggccaagagaagcatcttggacaagctgcacctcacccagcgcccaacactgaaccgccctgtgtccagagctgctttgaggactgcactgcagcacctccacggggtcccacagggggcacttctagaggacaacagggaacaggaatgtgaaatcatcagctttgctgagacaggcctctccaccatcaaccagactcgtcttgattttcacttctcctctgatagaactgctggtgacagggaggtccagcaggccagtctcatgttctttgtgcagctcccttccaataccacttggaccttgaaagtgagagtccttgtgctgggtccacataataccaacctcaccttggctactcagtacctgctggaggtggatgccagtggctggcatcaactccccctagggcctgaagctcaagctgcctgcagccaggggcacctgaccctggagctggtacttgaaggccaggtagcccagagctcagtcatcctgggtggagctgcccataggccttttgtggcagcccgggtgagagttgggggcaaacaccagattcaccgacgaggcatcgactgccaaggagggtccaggatgtgctgtcgacaagagttttttgtggacttccgtgagattggctggcacgactggatcatccagcctgagggctacgccatgaacttctgcatagggcagtgcccactacacatagcaggcatgcctggtattgctgcctcctttcacactgcagtgctcaatcttctcaaggccaacacagctgcaggcaccactggagggggctcatgctgtgtacccacggcccggcgccccctgtctctgctctattatgacagggacagcaacattgtcaagactgacatacctgacatggtagtagaggcctgtgggtgcagttagtctatgtgtggtatgggcagcccaaggttgcatgggaaaacacgcccctacagaagtgcacttccttgagaggagggaatgacctcattctctgtccagaatgtggactccctcttcctgagcatcttatggaaattaccccacctttgacttgaagaaaccttcatctaaagcaagtcactgtgccatcttcctgaccactaccctctttcctagggcatagtccatcccgctagtccatcccgctagccccactccagggactcagacccatctccaaccatgagcaatgccatctggttcccaggcaaagacacccttagctcacctttaatagaccccataacccactatgccttcctgtcctttctactcaatggtccccactccaagatgagttgacacaaccccttcccccaatttttgtggatctccagagaggcccttctttggattcaccaaagtttagatcactgctgcccaaaatagaggcttacctacccccctctttgttgtgagcccctgtccttcttagttgtccaggtgaactactaaagctctctttgcataccttcatccattttttgtccttctctgcctttctctatgcccttaaggggtgacttgcctgagctctatcacctgagctcccctgccctctggcttcctgctgaggtcagggcatttcttatccctgttccctctctgtctaggtgtcatggttctgtgtaactgtggctattctgtgtccctacactacctggctacccccttccatggccccagctctgcctacattctgat

SEQ ID NO: 484 - protein, 352 aa, Homosapiens
MTSSLLLAFLLLAPTTVATPRAGGQCPACGGPTLELESQRELLLDLAKRSILDKLHLTQRPTLNRPVSRAALRTALQHLHGVPQGALLEDNREQECEIISFAETGLSTINQTRLDFHFSSDRTAGDREVQQASLMFFVQLPSNTTWTLKVRVLVLGPHNTNLTLATQYLLEVDASGWHQLPLGPEAQAACSQGHLTLELVLEGQVAQSSVILGGAAHRPFVAARVRVGGKHQIHRRGIDCQGGSRMCCRQEFFVDFREIGWHDWIIQPEGYAMNFCIGQCPLHIAGMPGIAASFHTAVLNLLKANTAAGTTGGGSCCVPTARRPLSLLYYDRDSNIVKTDIPDMVVEACGCS

SEQ ID NO: 485 - DNA, 2453 bp, Homosapiens
cagacatgagctgtgagggtcaagcacagctatccatcagatgatctactttcagccttcctgagtcccagacaatagaagacaggtggctgtacccttggccaagggtaggtgtggcagtggtgtctgctgtcactgtgccctcattggcccccagcaatcagactcaacagacggagcaactgccatccgaggctcctgaaccagggccattcaccaggagcatgcggctccctgatgtccagctctggctggtgctgctgtgggcactggtgcgagcacaggggacagggtctgtgtgtccctcctgtgggggctccaaactggcaccccaagcagaacgagctctggtgctggagctagccaagcagcaaatcctggatgggttgcacctgaccagtcgtcccagaataactcatcctccaccccaggcagcgctgaccagagccctccggagactacagccagggagtgtggctccagggaatggggaggaggtcatcagctttgctactgtcacagactccacttcagcctacagctccctgctcacttttcacctgtccactcctcggtcccaccacctgtaccatgcccgcctgtggctgcacgtgctccccacccttcctggcactctttgcttgaggatcttccgatggggaccaaggaggaggcgccaagggtcccgcactctcctggctgagcaccacatcaccaacctgggctggcataccttaactctgccctctagtggcttgaggggtgagaagtctggtgtcctgaaactgcaactagactgcagacccctagaaggcaacagcacagttactggacaaccgaggcggctcttggacacagcaggacaccagcagcccttcctagagcttaagatccgagccaatgagcctggagcaggccgggccaggaggaggacccccacctgtgagcctgcgacccccttatgttgcaggcgagaccattacgtagacttccaggaactgggatggcgggactggatactgcagcccgaggggtaccagctgaattactgcagtgggcagtgccctccccacctggctggcagcccaggcattgctgcctctttccattctgccgtcttcagcctcctcaaagccaacaatccttggcctgccagtacctcctgttgtgtccctactgcccgaaggcccctctctctcctctacctggatcataatggcaatgtggtcaagacggatgtgccagatatggtggtggaggcctgtggctgcagctagcaagaggacctggggctttggagtgaagagaccaagatgaagtttcccaggcacagggcatctgtgactggaggcatcagattcctgatccacaccccaacccaacaaccacctggcaatatgactcacttgacccctatgggacccaaatgggcactttcttgtctgagactctggcttattccaggttggctgatgtgttgggagatgggtaaagcgtttcttctaaaggggtctacccagaaagcatgatttcctgccctaagtcctgtgagaagatgtcagggactagggagggagggagggaaggcagagaaaaattacttagcctctcccaagatgagaaagtcctcaagtgaggggaggaggaagcagatagatggtccagcaggcttgaagcagggtaagcaggctggcccagggtaagggctgttgaggtaccttaagggaaggtcaagagggagatgggcaaggcgctgagggaggatgcttaggggacccccagaaacaggagtcaggaaaatgaggcactaagcctaagaagttccctggtttttcccaggggacaggacccactgggagacaagcatttatactttctttcttcttttttatttttttgagatcgagtctcgctctgtcaccaggctggagtgcagtgacacgatcttggctcactgcaacctccgtctcctgggttcaagtgattcttctgcctcagcctcccgagcagctgggattacaggcgcccactaatttttgtattcttagtagaaacgaggtttcaacatgttggccaggatggtctcaatctcttgacctcttgatccacccgacttggcctcccgaagtgatgagattataggcgtgagccaccgcgcctggcttatactttcttaataaaaaggagaaagaaaatcaacaaatgtgagtcataaagaagggttagggtgatggtccagagcaacagttcttcaagtgtactctgtaggcttctgggaggtcccttttcaggggtgtccacaaagtcaaagctattttcataataatactaacatgttatttgccttttgaattctcattatcttaaaattgtattgtggagttttccagaggccgtgtgacatgtgattacatcatctttctgacatcattgttaaaaaaaaaaaaaaaaaa

SEQ ID NO: 486 - protein, 350 aa, Homosapiens
MRLPDVQLWLVLLWALVRAQGTGSVCPSCGGSKLAPQAERALVLELAKQQILDGLHLTSRPRITHPPPQAALTRALRRLQPGSVAPGNGEEVISFATVTDSTSAYSSLLTFHLSTPRSHHLYHARLWLHVLPTLPGTLCLRIFRWGPRRRRQGSRTLLAEHHITNLGWHTLTLPSSGLRGEKSGVLKLQLDCRPLEGNSTVTGQPRRLLDTAGHQQPFLELKIRANEPGAGRARRRTPTCEPATPLCCRRDHYVDFQELGWRDWILQPEGYQLNYCSGQCPPHLAGSPGIAASFHSAVFSLLKANNPWPASTSCCVPTARRPLSLLYLDHNGNVVKTDVPDMVVEACGCS

SEQ ID NO: 487 - DNA, 3600 bp, Homosapiens
cccagactccagccctggaccgcgcatcccgagcccagcgcccagacagagtgtccccacaccctcctctgagacgccatgttcaactcgatgaccccaccaccaatcagtagctatggcgagccctgctgtctccggcccctccccagtcagggggcccccagtgtggggacagaaggactgtctggcccgcccttctgccaccaagctaacctcatgtccggcccccacagttatgggccagccagagagaccaacagctgcaccgagggcccactcttttcttctccccggagtgcagtcaagttgaccaagaagcgggcactgtccatctcacctctgtcggatgccagcctggacctgcagacggttatccgcacctcacccagctccctcgtagctttcatcaactcgcgatgcacatctccaggaggctcctacggtcatctctccattggcaccatgagcccatctctgggattcccagcccagatgaatcaccaaaaagggccctcgccttcctttggggtccagccttgtggtccccatgactctgcccggggtgggatgatcccacatcctcagtcccggggacccttcccaacttgccagctgaagtctgagctggacatgctggttggcaagtgccgggaggaacccttggaaggtgatatgtccagccccaactccacaggcatacaggatcccctgttggggatgctggatgggcgggaggacctcgagagagaggagaagcgtgagcctgaatctgtgtatgaaactgactgccgttgggatggctgcagccaggaatttgactcccaagagcagctggtgcaccacatcaacagcgagcacatccacggggagcggaaggagttcgtgtgccactgggggggctgctccagggagctgaggcccttcaaagcccagtacatgctggtggttcacatgcgcagacacactggcgagaagccacacaagtgcacgtttgaagggtgccggaagtcatactcacgcctcgaaaacctgaagacgcacctgcggtcacacacgggtgagaagccatacatgtgtgagcacgagggctgcagtaaagccttcagcaatgccagtgaccgagccaagcaccagaatcggacccattccaatgagaagccgtatgtatgtaagctccctggctgcaccaaacgctatacagatcctagctcgctgcgaaaacatgtcaagacagtgcatggtcctgacgcccatgtgaccaaacggcaccgtggggatggccccctgcctcgggcaccatccatttctacagtggagcccaagagggagcgggaaggaggtcccatcagggaggaaagcagactgactgtgccagagggtgccatgaagccacagccaagccctggggcccagtcatcctgcagcagtgaccactccccggcagggagtgcagccaatacagacagtggtgtggaaatgactggcaatgcagggggcagcactgaagacctctccagcttggacgagggaccttgcattgctggcactggtctgtccactcttcgccgccttgagaacctcaggctggaccagctacatcaactccggccaatagggacccggggtctcaaactgcccagcttgtcccacaccggtaccactgtgtcccgccgcgtgggccccccagtctctcttgaacgccgcagcagcagctccagcagcatcagctctgcctatactgtcagccgccgctcctccctggcctctcctttcccccctggctccccaccagagaatggagcatcctccctgcctggccttatgcctgcccagcactacctgcttcgggcaagatatgcttcagccagagggggtggtacttcgcccactgcagcatccagcctggatcggataggtggtcttcccatgcctccttggagaagccgagccgagtatccaggatacaaccccaatgcaggggtcacccggagggccagtgacccagcccaggctgctgaccgtcctgctccagctagagtccagaggttcaagagcctgggctgtgtccataccccacccactgtggcagggggaggacagaactttgatccttacctcccaacctctgtctactcaccacagccccccagcatcactgagaatgctgccatggatgctagagggctacaggaagagccagaagttgggacctccatggtgggcagtggtctgaacccctatatggacttcccacctactgatactctgggatatgggggacctgaaggggcagcagctgagccttatggagcgaggggtccaggctctctgcctcttgggcctggtccacccaccaactatggccccaacccctgtccccagcaggcctcatatcctgaccccacccaagaaacatggggtgagttcccttcccactctgggctgtacccaggccccaaggctctaggtggaacctacagccagtgtcctcgacttgaacattatggacaagtgcaagtcaagccagaacaggggtgcccagtggggtctgactccacaggactggcaccctgcctcaatgcccaccccagtgaggggcccccacatccacagcctctcttttcccattacccccagccctctcctccccaatatctccagtcaggcccctatacccagccaccccctgattatcttccttcagaacccaggccttgcctggactttgattcccccacccattccacagggcagctcaaggctcagcttgtgtgtaattatgttcaatctcaacaggagctactgtgggagggtgggggcagggaagatgcccccgcccaggaaccttcctaccagagtcccaagtttctggggggttcccaggttagcccaagccgtgctaaagctccagtgaacacatatggacctggctttggacccaacttgcccaatcacaagtcaggttcctatcccaccccttcaccatgccatgaaaattttgtagtgggggcaaatagggcttcacatagggcagcagcaccacctcgacttctgcccccattgcccacttgctatgggcctctcaaagtgggaggcacaaaccccagctgtggtcatcctgaggtgggcaggctaggagggggtcctgccttgtaccctcctcccgaaggacaggtatgtaaccccctggactctcttgatcttgacaacactcagctggactttgtggctattctggatgagccccaggggctgagtcctcctccttcccatgatcagcggggcagctctggacataccccacctccctctgggccccccaacatggctgtgggcaacatgagtgtcttactgagatccctacctggggaaacagaattcctcaactctagtgcctaaagagtagggaatctcatccatcacagatcgcatttcctaaggggtttctatccttccagaaaaattgggggagctgcagtcccctgcacaagatgccccagggatgggaggtatgggctgggggctatgtatagtctgtatacgttttgaggagaaatttgataatgacactgtttcctgataataaaggaactgcatcag

SEQ ID NO: 488 - protein, 1106 aa, Homosapiens
MFNSMTPPPISSYGEPCCLRPLPSQGAPSVGTEGLSGPPFCHQANLMSGPHSYGPARETNSCTEGPLFSSPRSAVKLTKKRALSISPLSDASLDLQTVIRTSPSSLVAFINSRCTSPGGSYGHLSIGTMSPSLGFPAQMNHQKGPSPSFGVQPCGPHDSARGGMIPHPQSRGPFPTCQLKSELDMLVGKCREEPLEGDMSSPNSTGIQDPLLGMLDGREDLEREEKREPESVYETDCRWDGCSQEFDSQEQLVHHINSEHIHGERKEFVCHWGGCSRELRPFKAQYMLVVHMRRHTGEKPHKCTFEGCRKSYSRLENLKTHLRSHTGEKPYMCEHEGCSKAFSNASDRAKHQNRTHSNEKPYVCKLPGCTKRYTDPSSLRKHVKTVHGPDAHVTKRHRGDGPLPRAPSISTVEPKREREGGPIREESRLTVPEGAMKPQPSPGAQSSCSSDHSPAGSAANTDSGVEMTGNAGGSTEDLSSLDEGPCIAGTGLSTLRRLENLRLDQLHQLRPIGTRGLKLPSLSHTGTTVSRRVGPPVSLERRSSSSSSISSAYTVSRRSSLASPFPPGSPPENGASSLPGLMPAQHYLLRARYASARGGGTSPTAASSLDRIGGLPMPPWRSRAEYPGYNPNAGVTRRASDPAQAADRPAPARVQRFKSLGCVHTPPTVAGGGQNFDPYLPTSVYSPQPPSITENAAMDARGLQEEPEVGTSMVGSGLNPYMDFPPTDTLGYGGPEGAAAEPYGARGPGSLPLGPGPPTNYGPNPCPQQASYPDPTQETWGEFPSHSGLYPGPKALGGTYSQCPRLEHYGQVQVKPEQGCPVGSDSTGLAPCLNAHPSEGPPHPQPLFSHYPQPSPPQYLQSGPYTQPPPDYLPSEPRPCLDFDSPTHSTGQLKAQLVCNYVQSQQELLWEGGGREDAPAQEPSYQSPKFLGGSQVSPSRAKAPVNTYGPGFGPNLPNHKSGSYPTPSPCHENFVVGANRASHRAAAPPRLLPPLPTCYGPLKVGGTNPSCGHPEVGRLGGGPALYPPPEGQVCNPLDSLDLDNTQLDFVAILDEPQGLSPPPSHDQRGSSGHTPPPSGPPNMAVGNMSVLLRSLPGETEFLNSSA

SEQ ID NO: 489 - DNA, 2937 bp, Homosapiens
gctggaagcaacagatggggactgcagaggaggtggtggtattgggatagtgctgcagccaagaacttaacgactgaaagtaactgggatatcttcataattatctgaaggtcacagtgggagaacaaaattaaaagaactgagaagacttacaagagaacctcctaagagtcacccaaacaatcggctgagaatgagaagaggttcaagtgattcttgtgcctcaggctcccaagtagctgggactacagtagctgggccagcacacccagaaagcctcacattgtgcagtggagaagctgagagaagaggaaaagaggagtggccagactcccaccactacccaggaccaactcctgctcctgaatcttctgatgggccccacaaggtgacagtgctggctacaatgctatccagccggtggtggccaagttcctgggggatcctagggctgggcccccgaagccctcctcggggatcccagctctgtgccctctatgcctttacttatactggggcagatggccagcaggtgtctctggctgaaggggataggttcctactgcttcgaaagaccaactccgactggtggttggcaagacgcctagaagctccctccacctctcgacccatcttcgtcccagcagcctatatgatagaggaatccatcccttcccagagtccaactaccgtcatccccggccaattgctctggactcctgggccgaagttgtttcatggttccctggaggagttgtctcaggccctcccaagcagggctcaggctagctcggagcagcctcctccacttccccgcaaaatgtgtaggagcgtcagcactgacaatctgagccccagctttctgaagcctttccaggaaggaccaagcggaagatccctctcccaggaagacttgccgtcagaagccagtgccagcacagcaggcccccagcccctcatgtcagagccccctgtgtactgtaacctggtggaccttcgccgctgtcctcggtccccacccccaggccctgcatgccccctgctgcagaggctggatgcctgggagcagcacctggaccccaactctggacgctgcttctacataaattcactgactggctgcaagtcctggaagcccccgcgccgcagtcgcagcgagacgaaccctggctccatggaggggacacagaccctgaagaggaacaatgatgtcctgcaacctcaggcaaagggcttcagatctgacacagggaccccagaaccgcttgacccacagggttcactcagcctcagccaacgcacctcgcagcttgaccctccagccttgcaggcccctcgacctctgccgcagctcctggacgacccccatgaggtggaaaagtcgggtctgctcaacatgaccaagattgcccaaggggggcgcaagctcaggaagaactggggcccgtcttgggtggtgttaacgggtaacagcctggtgttctaccgagagccaccgccgacagcgccctcctcaggctggggaccagcgggtagccggcccgaaagtagcgtggacctgcgcggggcggccctggcgcacggccgccacctgtccagccgccgcaacgtcctgcacatccgcacgatccctggccacgagttcctgctgcagtcggaccacgagacagagctgcgagcctggcaccgcgcgctgcggactgtcatcgagcggctggttagatgggtggaggcccggagggaggctccgaccggccgggaccaagggagtggggatcgggagaaccccctggagctgcgtctgtcgggctctggacccgcggagctgagcgccggggaggacgaagaagaggagtcggagctggtgtccaagccgctgctgcgcctcagcagccgccggagctccattcgggggcccgaaggcaccgagcagaaccgcgtgcgcaacaaactaaagcggctcatcgcgaagagaccgcccttacaaagcctgcaggagcggggtctgctccgagaccaggtgttcggctgccagttggaatcactctgccagcgggaaggagacacggtgcccagctttttgcggctctgcattgctgctgtggataaaagaggtctagatgtggatggcatttatcgggtgagcgggaacttggcagtggtccagaagcttcgctttctggtggacagagagcgtgcggtcacctccgatgggaggtatgtgttcccagaacagccaggacaagaaggtcggttagatttggacagtactgagtgggatgacattcatgtggtcaccggagccctgaagctttttctccgggagctgccccagcctctggtgccaccactgctgctgccccatttccgtgctgcccttgcactctccgaatcagagcagtgcctctctcagatacaagaattaataggctcaatgccaaagcccaaccatgacactctacggtacctcctggagcatttatgcagggtgatagcacactcagataagaatcgcatgacaccccacaacctgggaattgtgtttggaccaaccctgtttcggccagagcaggagacatctgacccagcagcccatgctctctacccagggcagctggtccagctgatgctcaccaacttcaccagcctcttcccctgatgcagggaaggaagaagagaaaacatatttccggtcatctctggtggtgagaggctggtgttctgttttgaggatatccctttaaatctcccaaatgactgtctctatcttcatgagtgtgacttgaggtgttgggatgggtgagggagcttctctaaagaggaaagtgagtggattaacccctgcttctcttcttgttccctgttatcattcctccccaacataataatacataaagtggcatggtatttttaaaaaaaaaaaaaaaaaaaaaaaaa

SEQ ID NO: 490 - protein, 750 aa, Homosapiens
MLSSRWWPSSWGILGLGPRSPPRGSQLCALYAFTYTGADGQQVSLAEGDRFLLLRKTNSDWWLARRLEAPSTSRPIFVPAAYMIEESIPSQSPTTVIPGQLLWTPGPKLFHGSLEELSQALPSRAQASSEQPPPLPRKMCRSVSTDNLSPSFLKPFQEGPSGRSLSQEDLPSEASASTAGPQPLMSEPPVYCNLVDLRRCPRSPPPGPACPLLQRLDAWEQHLDPNSGRCFYINSLTGCKSWKPPRRSRSETNPGSMEGTQTLKRNNDVLQPQAKGFRSDTGTPEPLDPQGSLSLSQRTSQLDPPALQAPRPLPQLLDDPHEVEKSGLLNMTKIAQGGRKLRKNWGPSWVVLTGNSLVFYREPPPTAPSSGWGPAGSRPESSVDLRGAALAHGRHLSSRRNVLHIRTIPGHEFLLQSDHETELRAWHRALRTVIERLVRWVEARREAPTGRDQGSGDRENPLELRLSGSGPAELSAGEDEEEESELVSKPLLRLSSRRSSIRGPEGTEQNRVRNKLKRLIAKRPPLQSLQERGLLRDQVFGCQLESLCQREGDTVPSFLRLCIAAVDKRGLDVDGIYRVSGNLAVVQKLRFLVDRERAVTSDGRYVFPEQPGQEGRLDLDSTEWDDIHVVTGALKLFLRELPQPLVPPLLLPHFRAALALSESEQCLSQIQELIGSMPKPNHDTLRYLLEHLCRVIAHSDKNRMTPHNLGIVFGPTLFRPEQETSDPAAHALYPGQLVQLMLTNFTSLFP

SEQ ID NO: 491 - DNA, 2795 bp, Homosapiens
atcagcgagggattcacggcgaaatgagactgttcgtgagtgatggcgtcccgggttgcttgccggtgctggccgccgccgggagagcccggggcagagcagaggtgctcatcagcactgtaggcccggaagattgtgtggtcccgttcctgacccggcctaaggtccctgtcttgcagctggatagcggcaactacctcttctccactagtgcaatctgccgatatttttttttgttatctggctgggagcaagatgacctcactaaccagtggctggaatgggaagcgacagagctgcagccagctttgtctgctgccctgtactatttagtggtccaaggcaagaagggggaagatgttcttggttcagtgcggagagccctgactcacattgaccacagcttgagtcgtcagaactgtcctttcctggctggggagacagaatctctagccgacattgttttgtggggagccctatacccattactgcaagatcccgcctacctccctgaggagctgagtgccctgcacagctggttccagacactgagtacccaggaaccatgtcagcgagctgcagagactgtactgaaacagcaaggtgtcctggctctccggccttacctccaaaagcagccccagcccagccccgctgagggaagggctgtcaccaatgagcctgaggaggaggagctggctaccctatctgaggaggagattgctatggctgttactgcttgggagaagggcctagaaagtttgcccccgctgcggccccagcagaatccagtgttgcctgtggctggagaaaggaatgtgctcatcaccagtgccctcccttacgtcaacaatgtcccccaccttgggaacatcattggttgtgtgctcagtgccgatgtctttgccaggtactctcgcctccgccagtggaacaccctctatctgtgtgggacagatgagtatggtacagcaacagagaccaaggctctggaggagggactaaccccccaggagatctgcgacaagtaccacatcatccatgctgacatctaccgctggtttaacatttcgtttgatatttttggtcgcaccaccactccacagcagaccaaaatcacccaggacattttccagcagttgctgaaacgaggttttgtgctgcaagatactgtggagcaactgcgatgtgagcactgtgctcgcttcctggctgaccgcttcgtggagggcgtgtgtcccttctgtggctatgaggaggctcggggtgaccagtgtgacaagtgtggcaagctcatcaatgctgtcgagcttaagaagcctcagtgtaaagtctgccgatcatgccctgtggtgcagtcgagccagcacctgtttctggacctgcctaagctggagaagcgactggaggagtggttggggaggacattgcctggcagtgactggacacccaatgcccagtttatcacccgttcttggcttcgggatggcctcaagccacgctgcataacccgagacctcaaatggggaacccctgtacccttagaaggttttgaagacaaggtattctatgtctggtttgatgccactattggctatctgtccatcacagccaactacacagaccagtgggagagatggtggaagaacccagagcaagtggacctgtatcagttcatggccaaagacaatgttcctttccatagcttagtctttccttgctcagccctaggagctgaggataactataccttggtcagccacctcattgctacagagtacctgaactatgaggatgggaaattctctaagagccgcggtgtgggagtgtttggggacatggcccaggacacggggatccctgctgacatctggcgcttctatctgctgtacattcggcctgagggccaggacagtgctttctcctggacggacctgctgctgaagaataattctgagctgcttaacaacctgggcaacttcatcaacagagctgggatgtttgtgtctaagttctttgggggctatgtgcctgagatggtgctcacccctgatgatcagcgcctgctggcccatgtcaccctggagctccagcactatcaccagctacttgagaaggttcggatccgggatgccttgcgcagtatcctcaccatatctcgacatggcaaccaatatattcaggtgaatgagccctggaagcggattaaaggcagtgaggctgacaggcaacgggcaggaacagtgactggcttggcagtgaatatagctgccttgctctctgtcatgcttcagccttacatgcccacggttagtgccacaatccaggcccagctgcagctcccacctccagcctgcagtatcctgctgacaaacttcctgtgtaccttaccagcaggacaccagattggcacagtcagtcccttgttccaaaaattggaaaatgaccagattgaaagtttaaggcagcgctttggagggggccaggcaaaaacgtccccgaagccagcagttgtagagactgttacaacagccaagccacagcagatacaagcgctgatggatgaagtgacaaaacaaggaaacattgtccgagaactgaaagcacaaaaggcagacaagaacgaggttgctgcggaggtggcgaaactcttggatctaaagaaacagttggctgtagctgaggggaaaccccctgaagcccctaaaggcaagaagaaaaagtaaaagaccttggctcatagaaagtcactttaatagatagggacagtaataaataaatgtacaatctctata

SEQ ID NO: 492 - protein, 900 aa, Homosapiens
MRLFVSDGVPGCLPVLAAAGRARGRAEVLISTVGPEDCVVPFLTRPKVPVLQLDSGNYLFSTSAICRYFFLLSGWEQDDLTNQWLEWEATELQPALSAALYYLVVQGKKGEDVLGSVRRALTHIDHSLSRQNCPFLAGETESLADIVLWGALYPLLQDPAYLPEELSALHSWFQTLSTQEPCQRAAETVLKQQGVLALRPYLQKQPQPSPAEGRAVTNEPEEEELATLSEEEIAMAVTAWEKGLESLPPLRPQQNPVLPVAGERNVLITSALPYVNNVPHLGNIIGCVLSADVFARYSRLRQWNTLYLCGTDEYGTATETKALEEGLTPQEICDKYHIIHADIYRWFNISFDIFGRTTTPQQTKITQDIFQQLLKRGFVLQDTVEQLRCEHCARFLADRFVEGVCPFCGYEEARGDQCDKCGKLINAVELKKPQCKVCRSCPVVQSSQHLFLDLPKLEKRLEEWLGRTLPGSDWTPNAQFITRSWLRDGLKPRCITRDLKWGTPVPLEGFEDKVFYVWFDATIGYLSITANYTDQWERWWKNPEQVDLYQFMAKDNVPFHSLVFPCSALGAEDNYTLVSHLIATEYLNYEDGKFSKSRGVGVFGDMAQDTGIPADIWRFYLLYIRPEGQDSAFSWTDLLLKNNSELLNNLGNFINRAGMFVSKFFGGYVPEMVLTPDDQRLLAHVTLELQHYHQLLEKVRIRDALRSILTISRHGNQYIQVNEPWKRIKGSEADRQRAGTVTGLAVNIAALLSVMLQPYMPTVSATIQAQLQLPPPACSILLTNFLCTLPAGHQIGTVSPLFQKLENDQIESLRQRFGGGQAKTSPKPAVVETVTTAKPQQIQALMDEVTKQGNIVRELKAQKADKNEVAAEVAKLLDLKKQLAVAEGKPPEAPKGKKKK

SEQ ID NO: 493 - DNA, 927 bp, Homosapiens
gaggtcagagacttaagtctaaggcactgagcgtatcatgttaaagatgagcgggtggcagcgacagagccaaaatcagagctggaacctgaggagagagtgttcaagaaggaagtgtatcttcatacatcaccacacctgaaagcagatgtgcttttccagactgatccaactgcagagatggcagctgagtcattgcctttctccttcgggacactgtccagctgggagctggaagcctggtatgaggacctgcaagaggtcctgtcttcagatgaaaatgggggtacctatgtttcacctcctggaaatgaagaggaagaatcaaaaatcttcaccactcttgaccctgcttctctggcttggctgactgaggaggagccagaaccagcagaggtcacaagcacctcccagagccctcactctccagattccagtcagagctccctggctcaggaggaagaggaggaagaccaagggagaaccaggaaacggaaacagagtggtcattccccagcccgggctggaaagcagcgcatgaaggagaaagaacaggagaatgaaaggaaagtggcacagctagctgaagagaatgaacggctcaagcaggaaatcgagcgcctgaccagggaagtagaggcgactcgccgagctctgattgaccgaatggtgaatctgcaccaagcatgaacaattgggagcatcagtcccccacttgggccacactacccacctttcccagaagtggctactgactaccctctcactagtgccaatgatgtgaccctcaatcccacatacgcagggggaaggcttggagtagacaaaaggaaaggtctcagcttgtatatagagattgtacatttatttattactgtccctatctattaaagtgactttctatgagccaaaaaaaaaaaaaaaaaa

SEQ ID NO: 494 - protein, 169 aa, Homosapiens
MAAESLPFSFGTLSSWELEAWYEDLQEVLSSDENGGTYVSPPGNEEEESKIFTTLDPASLAWLTEEEPEPAEVTSTSQSPHSPDSSQSSLAQEEEEEDQGRTRKRKQSGHSPARAGKQRMKEKEQENERKVAQLAEENERLKQEIERLTREVEATRRALIDRMVNLHQA

SEQ ID NO: 495 - DNA, 4214 bp, Homosapiens
ggcagcggcgcttcctgctaggaccggccggggccgtaccggaggctcgggctccaccgaccctcctcccaccccctcccactcaccctctgggccgcgactgcgcagggcggggccggccgaaccatgggccgcggtgtgggctaagctggtggccccggctttagactggaccccacaatgtttgcagagatgttcaggcacgcgggagctgattacacacaatgaatgggggcaatgagagcagtggagcagacagagctgggggccctgtggccacatctgtccccatcggctggcagcgctgtgtgcgagagggtgctgtgctctacatcagtccaagtggcacagagctgtcttccttggagcaaacccggagctacctcctcagcgatgggacctgcaagtgcggtctggagtgtccacttaatgtccccaaggttttcaactttgaccctttggccccggtgaccccgggtggggctggggtggggccagcatcagaggaggacatgaccaagctgtgcaaccaccggcggaaagctgttgctatggcaactctgtaccgcagcatggagaccacctgctcacactcttctcctggagagggagcgagcccccaaatgttccacactgtgtccccagggcccccctctgcccgccctccctgtcgagttcctcctacaactccacttaatgggggtcctggctcccttcccccagaaccaccctcagtttcccaggcctttcccactctagcaggccctggggggcttttccccccaaggcttgctgacccagtcccttctgggggcagtagcagcccccgtttcctcccaaggggcaatgccccctctccagccccacctcctccacctgctatcagcctcaatgctccctcatacaactggggagctgccctcagatccagcctggtgccctctgacctgggctctcctccggcccctcatgcctcctcctcaccaccttcagaccctcctctcttccactgtagtgatgccttaacaccccctcccctgcccccgagcaataatctccccgcccaccctggtcctgcctctcagccaccagtgtcttcagccactatgcacctgcccctggtcctggggcccctgggaggggcccccacggtggaggggcctggggcaccccccttccttgctagcagcctactctctgcagcggccaaggcacagcatcccccactaccccctcccagcactttacagggccgaaggccccgtgcccaggcaccctcagcttcccactcctcatcacttcgtccctctcagcgtcgtccccgcagaccccctactgtatttcgattgctagaagggagaggccctcaaacccctagacggagccgtcctcgggcccctgctcctgtcccccaacccttttctctcccggagccatcccaaccaattctcccttctgtgctgtccctgctgggactccccacccctggcccttcccactctgatggaagctttaaccttttggggtcagatgcacaccttcctcctcccccaaccctctcctcagggagccctccccagcccaggcaccccatccagccctccctgcctgggaccaccagtggcagcctcagcagtgtgccaggtgcccctgccccaccagctgcctccaaagccccagtagtccccagccctgtgcttcaaagcccatccgaaggactggggatgggggcaggcccggcctgccctctgcctcccctggctggtggagaggctttccctttccccagccctgagcagggcctggcactgagtggagctggcttccctgggatgcttggggccttgcctctccctctgagtctggggcagcctccaccttctccattgctcaaccacagtttatttggtgtgctgactgggggaggaggacaacctccccctgagcccctgctacccccaccaggaggacctggtcctcccctagccccaggagagcctgaagggccttcgcttttggtggcttccttgcttcctccaccaccctcagaccttcttccacctccttcagcacctcccagcaacctccttgcctctttcctgcccctgttggctctgggccccacagctggggatggggagggatctgcagagggagccgggggtccaagtggggagccattttcaggcttgggagacctgtcccccctacttttccccccactttcagccccccctaccctcatagctttaaattctgcgctgctggctgccaccctggatcccccctcggggacacccccccagccctgtgtcctgagtgccccccaacctggaccacctacctccagtgtcaccacggcaactactgacccgggggcctcctctctgggcaaggccccctccaactcagggagacccccccaactccttagccctctgctgggtgccagcctgctgggtgacctgtcttcactgaccagcagccctggagccctccccagcctgttgcagcctcctggccctcttctctctggccagttggggctgcagctcctccctggggggggagctcctccacccctctcagaggcttctagtcccctagcctgcctgctacagagtctccagatccctccagagcagccagaagccccctgtctaccccccgagagccctgcctcagccctcgaaccagagcctgccaggcctcccctcagtgccttagccccaccccatggttctcccgaccccccagtccctgagctgctcactgggagggggtcagggaaacggggccggaggggaggagggggacttaggggcattaatggtgaggccaggccagcccggggccgaaagcctggcagccggcgggagcctggccgactggccctcaaatgggggacacgtggtggcttcaatggacaaatggaaaggtccccaagaagaacccaccattggcagcataatggggagctggctgaagggggtgctgagcccaaggatccaccccctcccgggccccattctgaggaccttaaggtgcccccgggagtagtcagaaagtctcgtcgtggccgtaggagaaaatacaaccctacccggaacagcaatagctcccgccaggacattaccttggaacccagccctacagcccgagcagctgtccctctgcctccccgggcccgccctggccgtcctgccaaaaacaagaggaggaaactggccccatagcagccatacctggagctggatctgaccctgattggggagagctgagtgctgagccttgggagcccctgccagccacctgcacctgtggacagtgggtgggggcactactccccactcagagcacaaatgcaactccttcccctacaatcccatcctgagccattgcagggggcagggaagttcacccccccccaccacccccccgcccccccgaagccatgtcactgaaaaggcctgggggggatggtatatggccctttccccaccaggcgctaaggggaacacccccttccccaggtcttttatttgtttaagttatttttgcacaaatgactcttttatatttaattcgatttcattgcctcccttcttaaagccaacaggctcagtttacaaacctgtgagctactgttggctgctgccctccttcccagtgaaaggtacaaagcaataagcatcatgcatcctccccttacccctccaacacccctctgcctctggctcaggttgctcaaagcacagatcctctcttaccccgtccccaggtttgaaacacatagcctcatttcaaggtgtagccaggttcccccgactttcctctgggatataaaaaagggggtaagggggcaaagagagccctctgggcctctcctcccatacacactacactgccccttctccccccatcaaaacgctcagagacgttgtgatgatgcgactgaggattatgcaacgtggtccaaccggagcggccagcatgaccagctgtccaggggctgcctcctgccttttcttttgtaaagacaagacccttgggagttttaattctgttttgtacttgccctgtggggcctccactgcttttctatgggagacactcttaatttaacagatgagaatattttgaaactctgaaaaaaaaaaaaaaaaaaaaaaaaaaaaaaaaaaaaaaaaaaaaaaaaaaaaaaaaaaaaaaaa

SEQ ID NO: 496 - protein, 1003 aa, Homosapiens
MNGGNESSGADRAGGPVATSVPIGWQRCVREGAVLYISPSGTELSSLEQTRSYLLSDGTCKCGLECPLNVPKVFNFDPLAPVTPGGAGVGPASEEDMTKLCNHRRKAVAMATLYRSMETTCSHSSPGEGASPQMFHTVSPGPPSARPPCRVPPTTPLNGGPGSLPPEPPSVSQAFPTLAGPGGLFPPRLADPVPSGGSSSPRFLPRGNAPSPAPPPPPAISLNAPSYNWGAALRSSLVPSDLGSPPAPHASSSPPSDPPLFHCSDALTPPPLPPSNNLPAHPGPASQPPVSSATMHLPLVLGPLGGAPTVEGPGAPPFLASSLLSAAAKAQHPPLPPPSTLQGRRPRAQAPSASHSSSLRPSQRRPRRPPTVFRLLEGRGPQTPRRSRPRAPAPVPQPFSLPEPSQPILPSVLSLLGLPTPGPSHSDGSFNLLGSDAHLPPPPTLSSGSPPQPRHPIQPSLPGTTSGSLSSVPGAPAPPAASKAPVVPSPVLQSPSEGLGMGAGPACPLPPLAGGEAFPFPSPEQGLALSGAGFPGMLGALPLPLSLGQPPPSPLLNHSLFGVLTGGGGQPPPEPLLPPPGGPGPPLAPGEPEGPSLLVASLLPPPPSDLLPPPSAPPSNLLASFLPLLALGPTAGDGEGSAEGAGGPSGEPFSGLGDLSPLLFPPLSAPPTLIALNSALLAATLDPPSGTPPQPCVLSAPQPGPPTSSVTTATTDPGASSLGKAPSNSGRPPQLLSPLLGASLLGDLSSLTSSPGALPSLLQPPGPLLSGQLGLQLLPGGGAPPPLSEASSPLACLLQSLQIPPEQPEAPCLPPESPASALEPEPARPPLSALAPPHGSPDPPVPELLTGRGSGKRGRRGGGGLRGINGEARPARGRKPGSRREPGRLALKWGTRGGFNGQMERSPRRTHHWQHNGELAEGGAEPKDPPPPGPHSEDLKVPPGVVRKSRRGRRRKYNPTRNSNSSRQDITLEPSPTARAAVPLPPRARPGRPAKNKRRKLAP

SEQ ID NO: 497 - DNA, 1757 bp, Homosapiens
gagacttcctgctcatctgccgctccctttgccgccgccttagcccgggacccgaacccagcctctcccctacccgaacaccggccccggctccaccgaggcccgggtcccccagcccgtctcgccgccgccatggcggaccctaaatacgccgaccttcccggcattgccaggaatgagccagatgtttatgaaactagcgacctacctgaggatgatcaagcggagttcgatgcgtttgcacaagagctggaggagctgacaagcacaagtgtggaacacatcattgtcaatcctaatgctgcctatgacaagttcaaggacaagagagtggggacaaagggacttgatttctcagatcgtattggaaaaaccaagaggacaggatatgaatctggagaatatgagatgcttggagagggtctgggagtgaaggagacaccccagcaaaagtaccagcgcctactgcatgaggtccaagagctgacaactgaagttgaaaaaatcaagacgacagtgaaggagtcagccacagaggagaagctgacccctgtgttgctggctaaacagctggcagccctgaagcagcagctggttgcttcccacctggagaagctgctgggaccagatgctgcaatcaaccttaccgaccccgatggcgccctggctaagcgcctactactgcagctggaagcaacaaagaacagcaaagggggatcagggggaaaaaccactgggacccccccagatagcagccttgtcacttatgaactacattctcggcctgagcaggacaagttctctcaagctgccaaagtcgcagaacttgaaaagcgcctgacagagctggagacagctgtacgttgtgatcaggatgctcagaatcccctttctgcaggtctacagggagcctgtctcatggagactgtagagctgttgcaagcaaaggtgagcgccctagaccttgcagttttggatcaagtggaggctcggctacagagtgtcctgggaaaggtgaacgagattgccaagcataaagcctctgtagaagatgcagatacacaaagcaaggtgcaccagctatatgaaactatacagcgctggagccccattgcctccaccctccctgagctggtgcagagacttgtcaccatcaagcagctgcacgagcaagccatgcagtttggtcagctcctgacacacttggataccacccagcagatgattgctaattccttgaaggacaataccaccctcttgacccaggtgcagacaaccatgcgtgaaaacctggccacagttgaggggaactttgccagcattgatgaacggatgaagaagctgggaaagtgagcacatttgggagctggagaacaggggttatccctacccctgtgaactctgttaacagcttacatagggtttcccctttactataactctagcatccccatcccatttgacactgggggcaagggttcttcttgcatgtggggtttatacccctcccctgatgaatacagagtggtagctaggggttggttatcatcagaaggtggtctcccctcaggcctgggggataaggacgtgggcccagccacatgccaactcatgtccaatactgctttgcctggtgtggggaaggattgggtcttgtcccccaacacagcttctgtggctgactgtaatactgtacaactgtttctgaccattaaatgctgttgtactctgaaaaaaaaaaaaaaaaaaaaaaaaaa

SEQ ID NO: 498 - protein, 406 aa, Homosapiens
MADPKYADLPGIARNEPDVYETSDLPEDDQAEFDAFAQELEELTSTSVEHIIVNPNAAYDKFKDKRVGTKGLDFSDRIGKTKRTGYESGEYEMLGEGLGVKETPQQKYQRLLHEVQELTTEVEKIKTTVKESATEEKLTPVLLAKQLAALKQQLVASHLEKLLGPDAAINLTDPDGALAKRLLLQLEATKNSKGGSGGKTTGTPPDSSLVTYELHSRPEQDKFSQAAKVAELEKRLTELETAVRCDQDAQNPLSAGLQGACLMETVELLQAKVSALDLAVLDQVEARLQSVLGKVNEIAKHKASVEDADTQSKVHQLYETIQRWSPIASTLPELVQRLVTIKQLHEQAMQFGQLLTHLDTTQQMIANSLKDNTTLLTQVQTTMRENLATVEGNFASIDERMKKLGK

SEQ ID NO: 499 - DNA, 3897 bp, Homosapiens
acgcccaggtcgcccgcatcccgctgccgcaggagagagacagcgcgccccggccctgctccccaggcttcgcccgggcgccctcaactctgtccccagagactgagcacctgtcctccgcctcggcctctgctgagagccctctcctctggagcacacaccacccctgcagcccaagaagagtcccagccccacgccggctaccaccatggcggagaccaacaacgaatgtagcatcaaggtgctctgccgattccggcccctgaaccaggctgagattctgcggggagacaagttcatccccattttccaaggggacgacagcgtcgttattggggggaagccatatgtttttgaccgtgtattccccccaaacacgactcaagagcaagtttatcatgcatgtgccatgcagattgtcaaagatgtccttgctggctacaatggcaccatttttgcttatggacagacatcctcagggaaaacacataccatggagggaaagctgcacgaccctcagctgatgggaatcattcctcgaattgcccgagacatcttcaaccacatctactccatggatgagaaccttgagttccacatcaaggtttcttactttgaaatttacctggacaaaattcgtgaccttctggatgtgaccaagacaaatctgtccgtgcacgaggacaagaaccgggtgccatttgtcaagggttgtactgaacgctttgtgtccagcccggaggagattctggatgtgattgatgaagggaaatcaaatcgtcatgtggctgtcaccaacatgaatgaacacagctctcggagccacagcatcttcctcatcaacatcaagcaggagaacatggaaacggagcagaagctcagtgggaagctgtatctggtggacctggcagggagtgagaaggtcagcaagactggagcagagggagccgtgctggacgaggcaaagaatatcaacaagtcactgtcagctctgggcaatgtgatctccgcactggctgagggcactaaaagctatgttccatatcgtgacagcaaaatgacaaggattctccaggactctctcgggggaaactgccggacgactatgttcatctgttgctcaccatccagttataatgatgcagagaccaagtccaccctgatgtttgggcagcgggcaaagaccattaagaacactgcctcagtaaatttggagttgactgctgagcagtggaagaagaaatatgagaaggagaaggagaagacaaaggcccagaaggagacgattgcgaagctggaggctgagctgagccggtggcgcaatggagagaatgtgcctgagacagagcgcctggctggggaggaggcagccctgggagccgagctctgtgaggagacccctgtgaatgacaactcatccatcgtggtgcgcatcgcgcccgaggagcggcagaaatacgaggaggagatccgccgtctctataagcagcttgacgacaaggatgatgaaatcaaccaacaaagccaactcatagagaagctcaagcagcaaatgctggaccaggaagagctgctggtgtccacccgaggagacaacgagaaggtccagcgggagctgagccacctgcaatcagagaacgatgccgctaaggatgaggtgaaggaagtgctgcaggccctggaggagctggctgtgaactatgaccagaagtcccaggaggtggaggagaagagccagcagaaccagcttctggtggatgagctgtctcagaaggtggccaccatgctgtccctggagtctgagttgcagcggctacaggaggtcagtggacaccagcgaaaacgaattgctgaggtgctgaacgggctgatgaaggatctgagcgagttcagtgtcattgtgggcaacggggagattaagctgccagtggagatcagtggggccatcgaggaggagttcactgtggcccgactctacatcagcaaaatcaaatcagaagtcaagtctgtggtcaagcggtgccggcagctggagaacctccaggtggagtgtcaccgcaagatggaagtgaccgggcgggagctctcatcctgccagctcctcatctctcagcatgaggccaagatccgctcgcttacggaatacatgcagagcgtggagctaaagaagcggcacctggaagagtcctatgactccttgagcgatgagctggccaagctccaggcccaggaaactgtgcatgaagtggccctgaaggacaaggagcctgacactcaggatgcagatgaagtgaagaaggctctggagctgcagatggagagtcaccgggaggcccatcaccggcagctggcccggctccgggacgagatcaacgagaagcagaagaccattgatgagctcaaagacctaaatcagaagctccagttagagctagagaagcttcaggctgactacgagaagctgaagagcgaagaacacgagaagagcaccaagctgcaggagctgacatttctgtacgagcgacatgagcagtccaagcaggacctcaagggtctggaggagacagttgcccgggaactccagaccctccacaaccttcgcaagctgttcgttcaagacgtcacgactcgagtcaagaaaagtgcagaaatggagcccgaagacagtggggggattcactcccaaaagcagaagatttcctttcttgagaacaacctggaacagcttacaaaggttcacaaacagctggtacgtgacaatgcagatctgcgttgtgagcttcctaaattggaaaaacgacttagggctacggctgagagagttaaggccctggagggtgcactgaaggaggccaaggagggcgccatgaaggacaagcgccggtaccagcaggaggtggaccgcatcaaggaggccgttcgctacaagagctcgggcaaacggggccattctgcccagattgccaaacccgtccggcctggccactacccagcatcctcacccaccaacccctatggcacccggagccctgagtgcatcagttacaccaacagcctcttccagaactaccagaatctctacctgcaggccacacccagctccacctcagatatgtactttgcaaactcctgtaccagcagtggagccacatcttctggcggccccttggcttcctaccagaaggccaacatggacaatggaaatgccacagatatcaatgacaataggagtgacctgccgtgtggctatgaggctgaggaccaggccaagcttttccctctccaccaagagacagcagccagctaatctcccacacccacggctgcatacctgcactttcagtttctaagagggactgaggcctcttctcagcatgctgcaaacctgtggtctctgatactaactccctccccaacccctgttgttggactgtactatgtttgatgtcttctcttacttactctgtatctctttgtactctgtatctatatatcaaaagctgctgctatgtctctcttctgtcttattctcaagtatctactgatgtatttagcaatttcaaagcatagtctaccttccttatttggggcaatagggaggagggtgaatgtttcttctttctcatctactcgtctcacactgagtggtgttagtcactgagtagaggtcacagagatgacaaaaggaaaaatgggagctagagggttgtgacccttcatacacacacgcacgcacgcacacaaacatgcacacacgcatgcacacacacaaagccttaagcagaagaatgtcttagcatcatgagacagagaaatagactcttcctccctcctctttcacatatagcacaggggaaggtaaaatggaagggctgctaattgagacatataattttc

SEQ ID NO: 500 - protein, 1032 aa, Homosapiens
MAETNNECSIKVLCRFRPLNQAEILRGDKFIPIFQGDDSVVIGGKPYVFDRVFPPNTTQEQVYHACAMQIVKDVLAGYNGTIFAYGQTSSGKTHTMEGKLHDPQLMGIIPRIARDIFNHIYSMDENLEFHIKVSYFEIYLDKIRDLLDVTKTNLSVHEDKNRVPFVKGCTERFVSSPEEILDVIDEGKSNRHVAVTNMNEHSSRSHSIFLINIKQENMETEQKLSGKLYLVDLAGSEKVSKTGAEGAVLDEAKNINKSLSALGNVISALAEGTKSYVPYRDSKMTRILQDSLGGNCRTTMFICCSPSSYNDAETKSTLMFGQRAKTIKNTASVNLELTAEQWKKKYEKEKEKTKAQKETIAKLEAELSRWRNGENVPETERLAGEEAALGAELCEETPVNDNSSIVVRIAPEERQKYEEEIRRLYKQLDDKDDEINQQSQLIEKLKQQMLDQEELLVSTRGDNEKVQRELSHLQSENDAAKDEVKEVLQALEELAVNYDQKSQEVEEKSQQNQLLVDELSQKVATMLSLESELQRLQEVSGHQRKRIAEVLNGLMKDLSEFSVIVGNGEIKLPVEISGAIEEEFTVARLYISKIKSEVKSVVKRCRQLENLQVECHRKMEVTGRELSSCQLLISQHEAKIRSLTEYMQSVELKKRHLEESYDSLSDELAKLQAQETVHEVALKDKEPDTQDADEVKKALELQMESHREAHHRQLARLRDEINEKQKTIDELKDLNQKLQLELEKLQADYEKLKSEEHEKSTKLQELTFLYERHEQSKQDLKGLEETVARELQTLHNLRKLFVQDVTTRVKKSAEMEPEDSGGIHSQKQKISFLENNLEQLTKVHKQLVRDNADLRCELPKLEKRLRATAERVKALEGALKEAKEGAMKDKRRYQQEVDRIKEAVRYKSSGKRGHSAQIAKPVRPGHYPASSPTNPYGTRSPECISYTNSLFQNYQNLYLQATPSSTSDMYFANSCTSSGATSSGGPLASYQKANMDNGNATDINDNRSDLPCGYEAEDQAKLFPLHQETAAS

SEQ ID NO: 501 - DNA, 2937 bp, Homosapiens
ggttgcgcgggagactatggcgtcctcctcggtcccaccagccacggtatcggcggcgacagcaggccccggcccaggtttcggcttcgcctccaagaccaagaagaagcatttcgtgcagcagaaggtgaaggtgttccgggcggccgacccgctggtgggtgtgttcctgtggggcgtagcccactcgatcaatgagctcagccaggtgcctcccccggtgatgctgctgccagatgactttaaggccagctccaagatcaaggtcaacaatcaccttttccacagggaaaatctgcccagtcatttcaagttcaaggagtattgtccccaggtcttcaggaacctccgtgatcgatttggcattgatgaccaagattacttggtgtcccttacccgaaacccccccagcgaaagtgaaggcagtgatggtcgcttccttatctcctacgatcggactctggtcatcaaagaagtatccagtgaggacattgctgacatgcatagcaacctctccaactatcaccagtacattgtgaagtgccatggcaacacgcttctgccccagttcctggggatgtaccgagtcagtgtggacaacgaagacagctacatgcttgtgatgcgcaatatgtttagccaccgtcttcctgtgcacaggaagtatgacctcaagggttccctagtgtcccgggaagccagcgataaggaaaaggttaaagaattgcccacccttagggatatggactttctcaacaagaaccagaaagtatatattggtgaagaggagaagaaaatatttctggagaagctgaagagagatgtggagtttctagtgcagctgaagatcatggactacagccttctgctaggcatccacgacatcattcggggctctgaaccagaggaggaagcgcccgtgcgggaggatgagtcagaggtggatggggactgcagcctgactggacctcctgctctggtgggctcctatggcacctccccagagggtatcggaggctacatccattcccatcggcccctgggcccaggagagtttgagtccttcattgatgtctatgccatccggagtgctgaaggagccccccagaaggaggtctacttcatgggcctcattgatatccttacacagtatgatgccaagaagaaagcagctcatgcagccaaaactgtcaagcatggggctggggcagagatctctactgtccatccggagcagtatgctaagcgattcctggattttattaccaacatctttgcctaagagactgcctggttctctctgatgttcaaggtggtggggttctgagacacttgggggaattgtggggatattctagccaccagttctcttcttcctttgctaaattcaggctgcaggctccttccatccagataactccatcctgtcgagtaggctctttctgaccctcagaaatacattgtcctttttcctctttgcccatttttcttccctctcttcctccccatgagaagtctgcttgtagtattagaatgttattgttgactctctcccaagtgccttgatctttgtaatatctcctgttgtttctatgatataggagctaggggaagggggttgtttgccttcttcaggacctgactggacagatggacctggctcaagcaactactctggatgcactttgctgtgtgggatgaactaaaagtgtctgaattttgctgataactttataaaactcactatggcatgcttccctcctggtgggccctaggatggatgacactcaagatactacagatgtgggtgcaggcatgcacacacacgatggaatatggccattcctacacaggtggggtagagagtgggtcagcagcctggcacctcacagaggtgggacctaagaggactcatgattatgcagagaattggattgggtctctgtcatagattgagtaatctcttcccttacctcaattccatctccacccatctctacatctgggcacagcaacccagagatggccaaaagcattcaagcctgggggaagatgtttgactattgctgctcttcaccagaacctcacacctctcctgggactggaacccttcagtgggtgtgtggccagttttggaggctggaatgatgggccagggtgtaggattcattctccatgtaaagtttcctttcatcctgcctagccatccccaaggtttatttccagaagaaaggaatatctctacttggatcaattctggtcatttcaagaggatggaggcctcaagtgtgggaacttcccctactccctggatgtgtgtacctagcacacttccttctcccacccctttttccagttggatttgtttttctgttctcttctgtcctgtcttatactgcaactgtgtctcctaggggacagatggccttctttgtcatcttcactctccacccccagagaggagtcagagccataactcaatcactcagcccctccaaagatagttgatgtgtgataatctcataatgttgagaaccctgatgagatacattgtcttcctctccctacaatgcctctggggccaaggcacccattcttcttgctatcctccatcccccttgaggcttccactttttttttttttagacataaagctgggcatcagcaactggcctgtggtgatgcaaagctgctttgctctgtatctggctggactgatctgtctcacaagaagccatgaggccatagggagaagctccctctccccttcatcttctgctccaaaggtggtagcaagaggagtacccagttaggggttggagcccccatataacatcttcctgtcagaagactgatggatctttttcattccaaccatctccctttcccccgatgaatgcaataaaactctgtgacaccagcaaaaaaaaaaaaaaa

SEQ ID NO: 502 - protein, 421 aa, Homosapiens
MASSSVPPATVSAATAGPGPGFGFASKTKKKHFVQQKVKVFRAADPLVGVFLWGVAHSINELSQVPPPVMLLPDDFKASSKIKVNNHLFHRENLPSHFKFKEYCPQVFRNLRDRFGIDDQDYLVSLTRNPPSESEGSDGRFLISYDRTLVIKEVSSEDIADMHSNLSNYHQYIVKCHGNTLLPQFLGMYRVSVDNEDSYMLVMRNMFSHRLPVHRKYDLKGSLVSREASDKEKVKELPTLRDMDFLNKNQKVYIGEEEKKIFLEKLKRDVEFLVQLKIMDYSLLLGIHDIIRGSEPEEEAPVREDESEVDGDCSLTGPPALVGSYGTSPEGIGGYIHSHRPLGPGEFESFIDVYAIRSAEGAPQKEVYFMGLIDILTQYDAKKKAAHAAKTVKHGAGAEISTVHPEQYAKRFLDFITNIFA

SEQ ID NO: 503 - DNA, 2029 bp, Homosapiens
ctcagtcatgtgaccggcaatggcggcgctgacgagagctgcatttggaagtgttgtggagacagccccgtagcccaatgcgaccagactcagggaaaacatcaggcccctccagctgagcccttgtgtgagccccgcccctccctaaatgccagacttgggagctgacagacagcactgcctgtgctgggtttaaaagtcctggtcagctgagtggaaatagaaggatttctgctgccatcatcttccatgggctttccaggtcacacgacctacaagtagggagcagggaaagaagagtgagcctgcatgccaattctaagctcttcaggatcaaatgtcgttcgtcctgtccagaatggcagcctgtggaggcacctgcaagaacaaagtgactgtgtccaagcccgtgtgggacttcctgagcaaagagaccccagcccggctggcccggcttcgggaggagcaccgtgtgtctatcctcatagatggcgagacttctgacatctatgttctccagctttccccacagggtcctcccccggcccctccaaatgggctctacctagcccggaaggctctcaaggggctgctaaaagaggcagagaaagagctgaagaaagctcagaggcagggggagctgatgggctgcctggctctggggggtggaggggagcaccctgagatgcaccgcgcaggcccaccccctctccgagcagccccacttctgcccccaggagctcgggggctcccccctcctcctccccccctgcccccacctcttcctcctcgccttcgggaggaggcagaagagcaggagagcacctgccccatctgtctgggggagatccagaatgccaagacattggagaagtgccggcattcattctgcgagggctgcatcacccgggctctgcaggtgaaaaaggcctgccccatgtgcggccgcttctatgggcagctggtgggcaaccagccccagaatgggcggatgctggtctctaaggacgccaccctcctactgcccagctatgagaagtacggcaccattgtcatccagtacgtcttcccgcccggtgtccagggggctgaacacccaaacccaggagttcggtatcctggcaccacacgggtggcctacctcccggactgccctgagggcaacaaggtgctgaccctgttccgcaaggcgtttgaccagcgtctcaccttcactatcggcacgtccatgaccacagggagaccgaatgtcatcacctggaacgacatccaccacaagaccagctgcacagggggaccccagctgtttgggtacccagaccccacctacctgacccgggtgcaagaggagctgagagcgaagggtatcacagatgactgaaggacatcgcctttgccaaggcccctgctgtctgcctctactaggacccagcagaagcctctttctcctctctgccccctgccccccacaccacacctgtaggggacctgtctgactgggaagggagttccgagagggagggggcaatcccttcccccatcccccactggccaagtgtttcaatgcagtgtgagccactcccttctggcagaggccgacctccaaggctctgttctcccctccccgtgtacatatactcccggtttccctgcccctccattgcccttggctttttctggtatgtgctgtgctccacgaccaagccgagaaaggacctagggtggggaagggagggtctcttgattcctaaccgcccccacatactgctccaccgctgaacttcgggtgccggggaggagaaattgggctgatgtgagctccccgtcacccgccatggagccggctgtgtgtgttcatcagatacagttctcccttaaccttgtcctttctctcctgtgtctcagtctccgtcagtctgtctttctccgctcttctctgacccctgtgaggaacctccttaccctgttctggaatcgctgccagactgtagcttttaatttaataaaaataaagtaaaatatgcaactc

SEQ ID NO: 504 - protein, 347 aa, Homosapiens
MSFVLSRMAACGGTCKNKVTVSKPVWDFLSKETPARLARLREEHRVSILIDGETSDIYVLQLSPQGPPPAPPNGLYLARKALKGLLKEAEKELKKAQRQGELMGCLALGGGGEHPEMHRAGPPPLRAAPLLPPGARGLPPPPPPLPPPLPPRLREEAEEQESTCPICLGEIQNAKTLEKCRHSFCEGCITRALQVKKACPMCGRFYGQLVGNQPQNGRMLVSKDATLLLPSYEKYGTIVIQYVFPPGVQGAEHPNPGVRYPGTTRVAYLPDCPEGNKVLTLFRKAFDQRLTFTIGTSMTTGRPNVITWNDIHHKTSCTGGPQLFGYPDPTYLTRVQEELRAKGITDD

SEQ ID NO: 505 - DNA, 2166 bp, Homosapiens
gggggtcgctgtgcctgtccccgtgtgatccgaaaagtgctggcaaaatgcggctgctgcttcgcccgggggggtaagggggtgccctggtgaaattttctatcctggccaactcaaatgaggatggcaagagagtgagcccttggagagagaggctgagcatcatgaagagaagaccctgggagttccctggggaccctgagtctggagctggggcaaggccccccagggcccgtcagtggcctgaggagatggttggatcattccaaacattgtctcagtgtggaaactgaggcagacagtggtcaggcaggaccatatgagaactggatgttggagccagctctagccacaggagaggagctgccggaactgaccttgctgaccacactgttggagggccctggagataagacgcagccacctgaagaggagactttgtcccaagcccctgagagtgaggaggaacagaagaagaaggctctggaaaggagtatgtatgtcctgagtgaactggtagaaacagagaaaatgtacgtggacgacttggggcagattgtggagggttatatggccaccatggctgctcagggggtccccgagagtcttcgaggccgtgacaggattgtgtttgggaatatccagcaaatctatgagtggcaccgagactatttcttgcaagagctacaacggtgtctgaaagatcctgattggctggctcagctattcatcaaacacgagcgccggctgcatatgtatgtggtgtactgtcagaataagcccaagtcagagcatgtggtgtcagagtttggggacagctactttgaggagctccggcagcagctggggcaccgcctgcagctgaacgacctcctcatcaaacctgtgcagcggatcatgaaataccagctgctgctcaaggattttctcaagtattacaatagagctgggatggatactgcagacctagagcaagctgtggaggtcatgtgctttgtgcccaagcgctgcaacgatatgatgacgctggggagattgcggggatttgagggcaaactgactgctcaggggaagctcttgggccaggacactttctgggtcaccgagcctgaggctggagggctgctatcttcccgaggtcgagagaggcgcgtcttcctctttgagcaaatcatcatcttcagtgaagccctgggaggaggagtgagaggtggaacacagcctggatatgtatacaagaacagcattaaggtgagctgcctgggactggaggggaacctccaaggtgacccttgccgctttgcactgacctccagagggccagagggtgggatccagcgctatgtcctgcaggctgcagaccctgctatcagtcaggcctggatcaagcatgtggctcagatcttggagagccaacgggacttcctcaacgcattgcagtcacccattgagtaccagagacgggagagccagaccaacagcctggggcggccaagagggcctggagtggggagccctggaagaattcggcttggagatcaggcccagggcagcacacacacacccatcaatggctctctcccctctctgctgctgtcacccaaaggggaggtggccagagccctcttgccactggataaacaggcccttggtgacatcccccaggctccccatgactctcctccagtctctccaactccaaaaacccctccctgccaagccagacttgccaagctggatgaagatgagctgtaactggtgaaaaccatgggggtggtgctgactcagccgcctattccccaaggagcttcagggcagtccttctggcactgctccagaattcctccttcttggtgtgtctggagggtgggcaaggctgggagggatatcaacttggaggagaacacctagacccaaggacttttttctgcccaaggaacacagtttccttcagctcccatccctatgcatgcatcatggtccccccaaaaggaggatatgtgggtgggtgggagggctggggcaggggccagatagaaattattggttttgttttttaattttgtttttcctgttttctgagaataaaggttttgttatatcaaaaaaaaaaaaaaaaaaaaaaaaaaaaaaaaaaaaaaaaaaaaaaaaaaaaaaaaaaaaaaa

SEQ ID NO: 506 - protein, 474 aa, Homosapiens
MLEPALATGEELPELTLLTTLLEGPGDKTQPPEEETLSQAPESEEEQKKKALERSMYVLSELVETEKMYVDDLGQIVEGYMATMAAQGVPESLRGRDRIVFGNIQQIYEWHRDYFLQELQRCLKDPDWLAQLFIKHERRLHMYVVYCQNKPKSEHVVSEFGDSYFEELRQQLGHRLQLNDLLIKPVQRIMKYQLLLKDFLKYYNRAGMDTADLEQAVEVMCFVPKRCNDMMTLGRLRGFEGKLTAQGKLLGQDTFWVTEPEAGGLLSSRGRERRVFLFEQIIIFSEALGGGVRGGTQPGYVYKNSIKVSCLGLEGNLQGDPCRFALTSRGPEGGIQRYVLQAADPAISQAWIKHVAQILESQRDFLNALQSPIEYQRRESQTNSLGRPRGPGVGSPGRIRLGDQAQGSTHTPINGSLPSLLLSPKGEVARALLPLDKQALGDIPQAPHDSPPVSPTPKTPPCQARLAKLDEDEL

SEQ ID NO: 507 - DNA, 2567 bp, Homosapiens
attcagctctccgctccgctgggacccgcacagcgccagtggctcgggggtcggccctcgcctcctccccggcccgggcctagagccacccctaaccagaggccggagacagctggagcggctgccgcatcccggcccagcctcccctaccatccctcccccttccactggacatctggaccctaggcccccgcaccgacagggttccggaaaccctccccgcccagcccggcggccgggccccgcgcctctctctctctagagcccccagccctcctcaagactagacttccgcctacccctggacacctcctcccggtcccctccctccccccctcccacagcctggaccggggtaggagggagggggggtgtgcgcccggcgccatccccgccccgccccccgtgattccccctgcatggccggcccgggtggggggcgcgggggggcccgggcgccatgcggggggggcacaaagggggtcgctgtgcctgtccccgtgtgatccgaaaagtgctggcaaaatgcggctgctgcttcgcccgggggggacgtgaatcctattccattgcgggcagtgaggggagtatatcggcttctgctgcctccggtctggctgccccctctggccccagctctggcctcagctctggcccctgttccccaggccccccagggcccgtcagtggcctgaggagatggttggatcattccaaacattgtctcagtgtggaaactgaggcagacagtggtcaggcaggaccatatgagaactggatgttggagccagctctagccacaggagaggagctgccggaactgaccttgctgaccacactgttggagggccctggagataagacgcagccacctgaagaggagactttgtcccaagcccctgagagtgaggaggaacagaagaagaaggctctggaaaggagtatgtatgtcctgagtgaactggtagaaacagagaaaatgtacgtggacgacttggggcagattgtggagggttatatggccaccatggctgctcagggggtccccgagagtcttcgaggccgtgacaggattgtgtttgggaatatccagcaaatctatgagtggcaccgagactatttcttgcaagagctacaacggtgtctgaaagatcctgattggctggctcagctattcatcaaacacgagcgccggctgcatatgtatgtggtgtactatcagaataagcccaagtcagagcatgtggtgtcagagtttggggacagctactttgaggagctccggcagcagctggggcaccgcctgcagctgaacgacctcctcatcaaacctgtgcagcggatcatgaaataccagctgctgctcaaggattttctcaagtattacaatagagctgggatggatactgcagacctagagcaagctgtggaggtcatgtgctttgtgcccaagcgctgcaacgatatgatgacgctggggagattgcggggatttgagggcaaactgactgctcaggggaagctcttgggccaggacactttctgggtcaccgagcctgaggctggagggctgctgtcttcccgaggtcgagagaggcgcgtcttcctctttgagcaaatcatcatcttcagtgaagccctgggaggaagagtgagaggtggaacacagcctggatatgtatacaagaacagcattaaggtgagctgcctgggactggaggggaacctccaaggtgacccttgccgctttgcactgacctccagagggccagagggtgggatccagcgctatgtcctgcaggctgcagaccctgctatcagtcaggcctggatcaagcatgtggctcagatcttggagagccaacgggacttcctcaacgcattgcagtcacccattgagtaccagagacgggagagccagaccaacagcctggggcggccaagagggcctggagtggggagccctggaagaattcggcttggagatcaggcccagggcagcacacacacacccatcaatggctctctcccctctctgctgctgtcacccaaaggggaggtggccagagccctcttgccactggataaacaggcccttggtgacatcccccaggctccccatgactctcctccagtctctccaactccaaaaacccctccctgccaagccagacttgccaagctggatgaagatgagctgtaactggtgaaaaccatgggggtggtgctgactcagccgcctattccccaaggagcttcagggcagtccttctggcactgctccagaattcctccttcttggtgtgtctggagggtgggcaaggctgggagggatatcaacttggaggagaacacctagacccaaggacttttttctgcccaaggaacacagtttccttcagctcccatccctatgcatgcatcatggtccccccaaaaggaggatatgtgggtgggtgggagggctggggcaggggccagatagaaattattggttttgttttttaattttgtttttcctgttttctgagaataaaggttttgttataacaaaaaaaaaaaaaaaa

SEQ ID NO: 508 - protein, 580 aa, Homosapiens
MRGGHKGGRCACPRVIRKVLAKCGCCFARGGRESYSIAGSEGSISASAASGLAAPSGPSSGLSSGPCSPGPPGPVSGLRRWLDHSKHCLSVETEADSGQAGPYENWMLEPALATGEELPELTLLTTLLEGPGDKTQPPEEETLSQAPESEEEQKKKALERSMYVLSELVETEKMYVDDLGQIVEGYMATMAAQGVPESLRGRDRIVFGNIQQIYEWHRDYFLQELQRCLKDPDWLAQLFIKHERRLHMYVVYYQNKPKSEHVVSEFGDSYFEELRQQLGHRLQLNDLLIKPVQRIMKYQLLLKDFLKYYNRAGMDTADLEQAVEVMCFVPKRCNDMMTLGRLRGFEGKLTAQGKLLGQDTFWVTEPEAGGLLSSRGRERRVFLFEQIIIFSEALGGRVRGGTQPGYVYKNSIKVSCLGLEGNLQGDPCRFALTSRGPEGGIQRYVLQAADPAISQAWIKHVAQILESQRDFLNALQSPIEYQRRESQTNSLGRPRGPGVGSPGRIRLGDQAQGSTHTPINGSLPSLLLSPKGEVARALLPLDKQALGDIPQAPHDSPPVSPTPKTPPCQARLAKLDEDEL

SEQ ID NO: 509 - DNA, 2258 bp, Homosapiens
cacaagctctagagggcttccgggaggaggcttagggagctgggaatccgggagcagatggtgggttcctaccgtcgagggtgggagagagggatctgaggccaagtttgaggtaaggactgtggagctccatcagatccccatccccacctcccctcatctgcgcaatcctgcgagaagccttagacaggttctggctcagagaaccggagagaggcacaacgcctggcccccaggacttggccacagcgtccctgaccttgtctgctccatgacctctcactgaggcccattaacccctcagttccctgatgaggcttgatttagcatccttgatgtcagctcctaagagtctgggaagtgcatttaagtcctggaggttggacaaggccccctccccacagcacacctttccatccacttctatcccaggcatggcttttgctctcctggcctccgtgcccccggtgtttggactctacacttctttcttccccgtcctcatctacagcttgctaggtactgggagacacctgtccacaggaactttcgccatactcagcctcatgacaggctcggccgtcgagcggctggtgccggaacccctcgtggggaatctgagcggaatcgagaaggagcagctggacgctcaacgggttggggtagccgcggccgtggccttcgggagcggggcgttgatgctggggatgttcgtgctgcagctcggcgtcttgtccacctttttgtccgagcctgtggtcaaggcgctgaccagcggggccgcgctgcacgtgctcttgtcccagctgccgagcctcttggggttgtccctcccgcgccagatcggctgcttctctctcttcaagacgctggcctccttgctgactgcgctgcctcggagcagtccggccgaactgaccatctccgcgctcagcctggcgctgctcgtgccggtcaaggaattgaacgtgagattccgagaccggctacccacgccgatcccgggggaagtcgtcttggtgcttctggcctccgtgctctgcttcacctcttctgtggacacaagataccaagtccagatagtggggctgttgcctggaggatttccccaacccctcctccccaacctggctgagctgcccaggattctggctgactcgctgcccattgcactggttagttttgcggtgtctgcctccctggcctccatccatgcagacaagtatagctacactattgactccaaccaggagttcctggcacatggtgcctccaacctcatctcctccctcttctcttgctttcccaactcggctacgctggccaccaccaatctactggtggatgctggtgggaaaacacagctggcaggcctcttctcctgcacagtggtcctgtcggtgctgctgtggctggggcccttcttttactatctgcccaaggctgtcctggcttgcatcaacatctccagcatgcgccaggtgttctgccagatgcaggaacttccacaactatggcacatcagccgagtggactttgctgtgtggatggtcacctgggtggcagtagtgaccctgagtgtggatttgggcctggctgtgggtgtggtcttctccatgatgactgtggtctgccgcacccggagctcctccaggtcccggggctctgcatcctgagctatccaacaccactgtactttgggacccgtgggcagtttcgctgcaacctggagtggcacctggggctcggagaaggagaaaaggagacttcaaagccagatggcccaatggttgcagttgctgagcctgtcagggtggtggtcctagacttcagtggtgtcacctttgcagatgctgctggggccagagaagtggtgcagctggccagccgatgtcgagatgctaggatccgcctcctcctggctcagtgtaatgccttggtgcaggggacactgacccgggtaggactcctggacagggtgactccagatcagctgtttgtgagtgtgcaggatgcagctgcttatgccctggggagcctgttaaggggcagtagcaccaggagcgggagccaggaggcactgggctgcggcaagtgaggcaggggagctcactgacccaaagatttgcaccgtgtgggtctgacctcatcatgtggagtgcagagggccctgatgacatgtgtgtgatgaggaccatgacccttgaacccccttacctaacgtaactaataaaatgaagctgagagctttggaatcc

SEQ ID NO: 510 - protein, 454 aa, Homosapiens
MRLDLASLMSAPKSLGSAFKSWRLDKAPSPQHTFPSTSIPGMAFALLASVPPVFGLYTSFFPVLIYSLLGTGRHLSTGTFAILSLMTGSAVERLVPEPLVGNLSGIEKEQLDAQRVGVAAAVAFGSGALMLGMFVLQLGVLSTFLSEPVVKALTSGAALHVLLSQLPSLLGLSLPRQIGCFSLFKTLASLLTALPRSSPAELTISALSLALLVPVKELNVRFRDRLPTPIPGEVVLVLLASVLCFTSSVDTRYQVQIVGLLPGGFPQPLLPNLAELPRILADSLPIALVSFAVSASLASIHADKYSYTIDSNQEFLAHGASNLISSLFSCFPNSATLATTNLLVDAGGKTQLAGLFSCTVVLSVLLWLGPFFYYLPKAVLACINISSMRQVFCQMQELPQLWHISRVDFAVWMVTWVAVVTLSVDLGLAVGVVFSMMTVVCRTRSSSRSRGSAS

SEQ ID NO: 511 - DNA, 2446 bp, Homosapiens
cacaagctctagagggcttccgggaggaggcttagggagctgggaatccgggagcagatggtgggttcctaccgtcgagggtgggagagagggatctgaggccaagtttgaggtaaggactgtggagctccatcagatccccatccccacctcccctcatctgcgcaatcctgcgagaagccttagacaggttctggctcagagaaccggagagaggcacaacgcctggcccccaggacttggccacagcgtccctgaccttgtctgctccatgacctctcactgaggcccattaacccctcagttccctgatgaggcttgatttagcatccttgatgtcagctcctaagagtctgggaagtgcatttaagtcctggaggttggacaaggccccctccccacagcacacctttccatccacttctatcccaggcatggcttttgctctcctggcctccgtgcccccggtgtttggactctacacttctttcttccccgtcctcatctacagcttgctaggtactgggagacacctgtccacaggaactttcgccatactcagcctcatgacaggctcggccgtcgagcggctggtgccggaacccctcgtggggaatctgagcggaatcgagaaggagcagctggacgctcaacgggttggggtagccgcggccgtggccttcgggagcggggcgttgatgctggggatgttcgtgctgcagctcggcgtcttgtccacctttttgtccgagcctgtggtcaaggcgctgaccagcggggccgcgctgcacgtgctcttgtcccagctgccgagcctcttggggttgtccctcccgcgccagatcggctgcttctctctcttcaagacgctggcctccttgctgactgcgctgcctcggagcagtccggccgaactgaccatctccgcgctcagcctggcgctgctcgtgccggtcaaggaattgaacgtgagattccgagaccggctacccacgccgatcccgggggaagtcgtcttggtgcttctggcctccgtgctctgcttcacctcttctgtggacacaagataccaagtccagatagtggggctgttgcctggaggatttccccaacccctcctccccaacctggctgagctgcccaggattctggctgactcgctgcccattgcactggttagttttgcggtgtctgcctccctggcctccatccatgcagacaagtatagctacactattgactccaaccaggagttcctggcacatggtgcctccaacctcatctcctccctcttctcttgctttcccaactcggctacgctggccaccaccaatctactggtggatgctggtgggaaaacacagctggcaggcctcttctcctgcacagtggtcctgtcggtgctgctgtggctggggcccttcttttactatctgcccaaggctgtcctggcttgcatcaacatctccagcatgcgccaggtgttctgccagatgcaggaacttccacaactatggcacatcagccgagtggactttctcctccaggtcccggggctctgcatcctgagctatccaacaccactgtactttgggacccgtgggcagtttcgctgcaacctggagtggcacctggggctcggagaaggagaaaaggagacttcaaagccagatggcccaatggttgcagttgctgagcctgtcagggtggtggtcctagacttcagtggtgtcacctttgcagatgctgctggggccagagaagtggtgcaggtgagggagaggctggccagccgatgtcgagatgctaggatccgcctcctcctggctcagtgtaatgccttggtgcaggggacactgacccgggtaggactcctggacagggtgactccagatcagctgtttgtgagtgtgcaggatgcagctgcttatgccctggggagcctgttaaggggcagtagcaccaggagcgggagccaggaggcactgggctgcggcaagtgaggcaggggtaagtggctggagacccagggagaggggtttgggaaagggtctgaggaagatcaagaagaaaagggtggggacggaatgaatagtagattgaagaccaaatcagggagcccgggctgagctatgggtgaggaactgaagaactcagatccctaagtaggtggggtacccctgagaggactgccacatttcattaaggaagaggggtgcctaatctattcctgacatgtctcctctcttctccaggagctcactgacccaaagatttgcaccgtgtgggtctgacctcatcatgtggagtgcagagggccctgatgacatgtgtgtgatgaggaccatgacccttgaacccccttacctaacgtaactaataaaatgaagctgagagctttggaatccaaaaaaaaaaaaaaaaaaaaaaaaaaaaaaaaaaaaaa

SEQ ID NO: 512 - protein, 563 aa, Homosapiens
MRLDLASLMSAPKSLGSAFKSWRLDKAPSPQHTFPSTSIPGMAFALLASVPPVFGLYTSFFPVLIYSLLGTGRHLSTGTFAILSLMTGSAVERLVPEPLVGNLSGIEKEQLDAQRVGVAAAVAFGSGALMLGMFVLQLGVLSTFLSEPVVKALTSGAALHVLLSQLPSLLGLSLPRQIGCFSLFKTLASLLTALPRSSPAELTISALSLALLVPVKELNVRFRDRLPTPIPGEVVLVLLASVLCFTSSVDTRYQVQIVGLLPGGFPQPLLPNLAELPRILADSLPIALVSFAVSASLASIHADKYSYTIDSNQEFLAHGASNLISSLFSCFPNSATLATTNLLVDAGGKTQLAGLFSCTVVLSVLLWLGPFFYYLPKAVLACINISSMRQVFCQMQELPQLWHISRVDFLLQVPGLCILSYPTPLYFGTRGQFRCNLEWHLGLGEGEKETSKPDGPMVAVAEPVRVVVLDFSGVTFADAAGAREVVQVRERLASRCRDARIRLLLAQCNALVQGTLTRVGLLDRVTPDQLFVSVQDAAAYALGSLLRGSSTRSGSQEALGCGK

SEQ ID NO: 513 - DNA, 3010 bp, Homosapiens
cgcattccccgcgcggagccgaagcagccgcaacgagccgggagctgagccgcgctgcgctgcggtgcgaagagccgggcggcggccagagccctccccgcgctgccagtgggacgcggagccagggatccccggctttgccccggggctggggtgcaacagactcttaacttggtcctcgcgccccgccaaccgcccccgggcaggaaacgcccagaaccaccaccgcgccgcgctccacaaaagccccgggagttccaagacgggagggatcgggcgcgctccagaggcaggagggtcccccacaccctcaggctcatgcccagctcccccatcgggcagcccccagccccatgaggaccctcaggccggggcgagagcccggcacagcccggaccgaaattttgccgctgccttagagcgttagacaggatgtggctgggccgccgggccctgtgcgctctggtccttctgctcgcctgcgcctcgctggggctcctgtacgcgagcacccgggacgcgcccggcctccggctacctcttgcgccgtgggcgcccccgcaaagcccccgcaggcccgagctgccagatcttgctcctgagccccgctacgcacacatcccggtcaggatcaaggagcaagtagtggggctgctggcttggaacaactgcagttgtgagtccagtggggggggcctccccctccccttccagaaacaagtccgagctattgacctcaccaaggcctttgaccctgcagagctgagggctgcctctgccacaagagagcaggagttccaggcctttctgtcgaggagccagtccccagctgaccagctgctcatagcccctgccaactccccgctccagtaccccctacagggtgtggaagttcagcccctcaggagcatcttggtgccagggctgagccttcaggcagcttctggtcaggaggtataccaggtgaacctgactgcctccctaggcacctgggacgtggcaggggaagtgactggagttactctcactggagagggtcaggcagatctcacccttgtcagcccagggctggaccaactcaacaggcaactacaactggtcacttacagcagccgaagctaccagaccaacacagcagacacagtccggttctccaccgagggacatgaggctgctttcactatccgcataagacacccgcccaaccctcggctgtacccacctgggtctctaccccagggagcccagtacaacatcagcgctctagtcacgattgccaccaagaccttcctccgttatgatcggctacgggctctcatcaccagtatccgccgcttctacccaacggttaccgtggtcatcgctgacgacagcgacaagccagagcgcgttagtggcccctacgtggaacactatctcatgcccttcggcaagggctggttcgcaggccggaacctggccgtgtctcaagtaaccaccaagtacgtgctgtgggtggacgacgacttcgtcttcacggcgcggacgcggctggagaggcttgtggacgtgctggagcggacgccgctggacctggtggggggcgcggtgcgcgagatctccggctttgccaccacttatcggcagctgctgagcgtggagcccggcgccccaggcctcgggaactgcctccggcaaaggcgcggcttccaccacgagctcgtcggcttcccaggctgcgtggtcaccgacggcgtggttaacttcttcctggcgcggactgacaaggtgcgcgaggtcggtttcgacccccgcctcagccgcgtggctcatctggaattcttcttggatgggcttggttcccttcgggttggctcctgctccgacgtcgtggtggatcatgcatccaaactgaagctgccttggacatcaagggatgccggagcagagacttacgcccggtaccgttacccaggatcactggacgagagccagatggccaaacaccggctgctcttcttcaaacaccggctgcagtgcatgacctcccagtgatggcccgctggggatttctgactgtcaggctgggcctgcctccttgtccctgccaggaatttccaacaaaccccaccaccctgtgagcactctactggctgtccctgagcctctagttcctcactcttccttttcagaacctgatgcccagtaggggttgtcctggtgacacccctcctttttccagtgcccagaggcctggtggagccataacctctcccacagccagtgccaagtcctccccctgcccattctcatggggcaggaaatggggggatcactttccaagtgccaaagagcccagagggactctaagaacctaaggtggaaacactgtcctctcatcttgggaccgagggggtggggaagttccccaacacataatcccaagactgtgcccctcatctgcatcttcagatccagtactctgtgtacctgctccagccccacccccacagagagaacttgtggctctggggctggggtgagggctggtggttggtgaaagccattcttagttgtgtctctgcaatgctgtgggcacaaaagaaggggcaccagagtccctgtgcaaacacctagactcacttcatggattccaaagctctcagcttcattttattagttacgttaggtaagggggttcaagggtcatggtcctcatcacacacatgtcatcagggccctctgcactccacatgatgaggtcagacccacacggtgcaaatctttgggtcagtgagctcctggagaagagaggagacatgtcaggaatagattaggcacccctcttccttaatgaaatgtggcagtcctctcaggggtaccccacctacttagggatctgagttcttcagttcctcacccatagctcagcccgggctccctgatttggtcttcaatctactattcattccgtccccacccttttcttcttgatcttcctcagaccctttcccaaacccctctccctggg

SEQ ID NO: 514 - protein, 533 aa, Homosapiens
MWLGRRALCALVLLLACASLGLLYASTRDAPGLRLPLAPWAPPQSPRRPELPDLAPEPRYAHIPVRIKEQVVGLLAWNNCSCESSGGGLPLPFQKQVRAIDLTKAFDPAELRAASATREQEFQAFLSRSQSPADQLLIAPANSPLQYPLQGVEVQPLRSILVPGLSLQAASGQEVYQVNLTASLGTWDVAGEVTGVTLTGEGQADLTLVSPGLDQLNRQLQLVTYSSRSYQTNTADTVRFSTEGHEAAFTIRIRHPPNPRLYPPGSLPQGAQYNISALVTIATKTFLRYDRLRALITSIRRFYPTVTVVIADDSDKPERVSGPYVEHYLMPFGKGWFAGRNLAVSQVTTKYVLWVDDDFVFTARTRLERLVDVLERTPLDLVGGAVREISGFATTYRQLLSVEPGAPGLGNCLRQRRGFHHELVGFPGCVVTDGVVNFFLARTDKVREVGFDPRLSRVAHLEFFLDGLGSLRVGSCSDVVVDHASKLKLPWTSRDAGAETYARYRYPGSLDESQMAKHRLLFFKHRLQCMTSQ

SEQ ID NO: 515 - DNA, 2556 bp, Homosapiens
gaggccgctgcctggcttagggcggaaacagattctctgcataagaaggggaacgaaagatggcggcggaaacgctgctgtccagtttgttaggactgctgcttctgggactcctgttacccgcaagtctgaccggcggtgtcgggagcctgaacctggaggagctgagtgagatgcgttatgggatcgagatcctgccgttgcctgtcatgggagggcagagccaatcttcggacgtggtgattgtctcctctaagtacaaacagcgctatgagtgtcgcctgccagctggagctattcacttccagcgtgaaagggaggaggaaacacctgcttaccaagggcctgggatccctgagttgttgagcccaatgagagatgctccctgcttgctgaagacaaaggactggtggacatatgaattctgttatggacgccacatccagcaataccacatggaagattcagagatcaaaggtgaagtcctctatctcggctactaccaatcagccttcgactgggatgatgaaacagccaaggcctccaagcagcatcgtcttaaacgctaccacagccagacctatggcaatgggtccaagtgcgaccttaatgggaggccccgggaggccgaggttcggttcctctgtgacgagggtgcaggtatctctggggactacatcgatcgcgtggacgagcccttgtcctgctcttatgtgctgaccattcgcactcctcggctctgcccccaccctctcctccggcccccacccagtgctgcaccgcaggccatcctctgtcacccttccctacagcctgaggagtacatggcctacgttcagaggcaagccgactcaaagcagtatggagataaaatcatagaggagctgcaagatctaggcccccaagtgtggagtgagaccaagtctggggtggcaccccaaaagatggcaggtgcgagcccgaccaaggatgacagtaaggactcagatttctggaagatgcttaatgagccagaggaccaggccccaggaggggaggaggtgccggctgaggagcaggacccaagccctgaggcagcagattcagcttctggtgctcccaatgattttcagaacaacgtgcaggtcaaagtcattcgaagccctgcggatttgattcgattcatagaggagctgaaaggtggaacaaaaaaggggaagccaaatataggccaagagcagcctgtggatgatgctgcagaagtccctcagagggaaccagagaaggaaaggggtgatccagaacggcagagagagatggaagaagaggaggatgaggatgaggatgaggatgaagatgaggatgaacggcagttactgggagaatttgagaaggaactggaagggatcctgcttccgtcagaccgagaccggctccgttcggaggtgaaggctggcatggagcgggaactggaaaacatcatccaggagacagagaaagagctggacccagatgggctgaagaaggagtcagagcgggatcgggcaatgctggctctcacatccactctcaacaaactcatcaaaagactggaggaaaaacagagtccagagctggtgaagaagcacaagaaaaagagggttgtccccaaaaagcctcccccatcaccccaacctacagggaaaattgagatcaaaattgtccgcccatgggctgaagggactgaagagggtgcacgttggctgactgatgaggacacgagaaacctcaaggagatcttcttcaatatcttggtgccgggagctgaagaggcccagaaggaacgccagcggcagaaagagctggagagcaattaccgccgggtgtggggctctccaggtggggagggcacaggggacctggacgaatttgacttctgagaccaacactacacttgacccttcacggaatccagactcttcctggactggcttgcctcctccccacctccccaccctggaacccctgagggccaaacagcagagtggagctgagctgtggacctctcgggcaactctgtgggtgtgggggccctgggtgaatgctgctgcccctgctggcagccaccttgagacctcaccgggcctgtgatatttgctctcctgaactctcactcaatcctcttcctctcctctgtggcttttcctgttattgtcccctaatgataggatattccctgctgcctacctggagattcagtaggatcttttgagtggaggtgggtagagagagcaaggagggcaggacacttagcaggcactgagcaagcaggcccccacctgcccttagtgatgtttggagtcgttttaccctcttctattgaattgccttgggatttccttctccctttccctgcccaccctgtcccctacaatttgtgcttctgagttgaggagccttcacctctgttgctgaggaaatggtagaatgctgcctatcacctccagcacaatcccagtgaaaaaggtgtgaagcacccaccatgttcttgaacaatcaggtttctaaataaacaactggaccatcaaaaaaaaaaaa

SEQ ID NO: 516 - protein, 612 aa, Homosapiens
MAAETLLSSLLGLLLLGLLLPASLTGGVGSLNLEELSEMRYGIEILPLPVMGGQSQSSDVVIVSSKYKQRYECRLPAGAIHFQREREEETPAYQGPGIPELLSPMRDAPCLLKTKDWWTYEFCYGRHIQQYHMEDSEIKGEVLYLGYYQSAFDWDDETAKASKQHRLKRYHSQTYGNGSKCDLNGRPREAEVRFLCDEGAGISGDYIDRVDEPLSCSYVLTIRTPRLCPHPLLRPPPSAAPQAILCHPSLQPEEYMAYVQRQADSKQYGDKIIEELQDLGPQVWSETKSGVAPQKMAGASPTKDDSKDSDFWKMLNEPEDQAPGGEEVPAEEQDPSPEAADSASGAPNDFQNNVQVKVIRSPADLIRFIEELKGGTKKGKPNIGQEQPVDDAAEVPQREPEKERGDPERQREMEEEEDEDEDEDEDEDERQLLGEFEKELEGILLPSDRDRLRSEVKAGMERELENIIQETEKELDPDGLKKESERDRAMLALTSTLNKLIKRLEEKQSPELVKKHKKKRVVPKKPPPSPQPTGKIEIKIVRPWAEGTEEGARWLTDEDTRNLKEIFFNILVPGAEEAQKERQRQKELESNYRRVWGSPGGEGTGDLDEFDF

SEQ ID NO: 517 - DNA, 2511 bp, Homosapiens
gaggccgctgcctggcttagggcggaaacagattctctgcataagaaggggaacgaaagatggcggcggaaacgctgctgtccagtttgttaggactgctgcttctgggactcctgttacccgcaagtctgaccggcggtgtcgggagcctgaacctggaggagctgagtgagatgcgttatgggatcgagatcctgccgttgcctgtcatgggagggcagagccaatcttcggacgtggtgattgtctcctctaagtacaaacagcgctatgagtgtcgcctgccagctggagctattcacttccagcgtgaaagggaggaggaaacacctgcttaccaagggcctgggatccctgagttgttgagcccaatgagagatgctccctgcttgctgaagacaaaggactggtggacatatgaattctgttatggacgccacatccagcaataccacatggaagattcagagatcaaaggtgaagtcctctatctcggctactaccaatcagccttcgactgggatgatgaaacagccaaggcctccaagcagcatcgtcttaaacgctaccacagccagacctatggcaatgggtccaagtgcgaccttaatgggaggccccgggaggccgaggttcggttcctctgtgacgagggtgcaggtatctctggggactacatcgatcgcgtggacgagcccttgtcctgctcttatgtgctgaccattcgcactcctcggctctgcccccaccctctcctccggcccccacccagtgctgcaccgcaggccatcctctgtcacccttccctacagcctgaggagtacatggcctacgttcagaggcaagccgactcaaagcagtatggagataaaatcatagaggagctgcaagatctaggcccccaagtgtggagtgagaccaagtctggggtggcaccccaaaagatggcaggtgcgagcccgaccaaggatgacagtaaggactcagatttctggaagatgcttaatgagccagaggaccaggccccaggaggggaggaggtgccggctgaggagcaggacccaagccctgaggcagcagattcagcttctggtgctcccaatgattttcagaacaacgtgcaggtcaaagtcattcgaagccctgcggatttgattcgattcatagaggagctgaaaggtggaacaaaaaaggggaagccaaatataggccaagagcagcctgtggatgatgctgcagaagtccctcagagggaaccagagaaggaaaggggtgatccagaacggcagagagagatggaagaagaggaggatgaggatgaggatgaggatgaagatgaggatgaacggcagttactgggagaatttgagaaggaactggaagggatcctgcttccgtcagaccgagaccggctccgttcggagacagagaaagagctggacccagatgggctgaagaaggagtcagagcgggatcgggcaatgctggctctcacatccactctcaacaaactcatcaaaagactggaggaaaaacagagtccagagctggtgaagaagcacaagaaaaagagggttgtccccaaaaagcctcccccatcaccccaacctacagggaaaattgagatcaaaattgtccgcccatgggctgaagggactgaagagggtgcacgttggctgactgatgaggacacgagaaacctcaaggagatcttcttcaatatcttggtgccgggagctgaagaggcccagaaggaacgccagcggcagaaagagctggagagcaattaccgccgggtgtggggctctccaggtggggagggcacaggggacctggacgaatttgacttctgagaccaacactacacttgacccttcacggaatccagactcttcctggactggcttgcctcctccccacctccccaccctggaacccctgagggccaaacagcagagtggagctgagctgtggacctctcgggcaactctgtgggtgtgggggccctgggtgaatgctgctgcccctgctggcagccaccttgagacctcaccgggcctgtgatatttgctctcctgaactctcactcaatcctcttcctctcctctgtggcttttcctgttattgtcccctaatgataggatattccctgctgcctacctggagattcagtaggatcttttgagtggaggtgggtagagagagcaaggagggcaggacacttagcaggcactgagcaagcaggcccccacctgcccttagtgatgtttggagtcgttttaccctcttctattgaattgccttgggatttccttctccctttccctgcccaccctgtcccctacaatttgtgcttctgagttgaggagccttcacctctgttgctgaggaaatggtagaatgctgcctatcacctccagcacaatcccagtgaaaaaggtgtgaagcacccaccatgttcttgaacaatcaggtttctaaataaacaactggaccatcaaaaaaaaaaaa

SEQ ID NO: 518 - protein, 597 aa, Homosapiens
MAAETLLSSLLGLLLLGLLLPASLTGGVGSLNLEELSEMRYGIEILPLPVMGGQSQSSDVVIVSSKYKQRYECRLPAGAIHFQREREEETPAYQGPGIPELLSPMRDAPCLLKTKDWWTYEFCYGRHIQQYHMEDSEIKGEVLYLGYYQSAFDWDDETAKASKQHRLKRYHSQTYGNGSKCDLNGRPREAEVRFLCDEGAGISGDYIDRVDEPLSCSYVLTIRTPRLCPHPLLRPPPSAAPQAILCHPSLQPEEYMAYVQRQADSKQYGDKIIEELQDLGPQVWSETKSGVAPQKMAGASPTKDDSKDSDFWKMLNEPEDQAPGGEEVPAEEQDPSPEAADSASGAPNDFQNNVQVKVIRSPADLIRFIEELKGGTKKGKPNIGQEQPVDDAAEVPQREPEKERGDPERQREMEEEEDEDEDEDEDEDERQLLGEFEKELEGILLPSDRDRLRSETEKELDPDGLKKESERDRAMLALTSTLNKLIKRLEEKQSPELVKKHKKKRVVPKKPPPSPQPTGKIEIKIVRPWAEGTEEGARWLTDEDTRNLKEIFFNILVPGAEEAQKERQRQKELESNYRRVWGSPGGEGTGDLDEFDF

SEQ ID NO: 519 - DNA, 2676 bp, Homosapiens
gaggccgctgcctggcttagggcggaaacagattctctgcataagaaggggaacgaaagatggcggcggaaacgctgctgtccagtttgttaggactgctgcttctgggactcctgttacccgcaagtctgaccggcggtgtcgggagcctgaacctggaggagctgagtgagatgcgttatgggatcgagatcctgccgttgcctgtcatgggagggcagagccaatcttcggacgtggtgattgtctcctctaagtacaaacagcgctatgagtgtcgcctgccagctggagctattcacttccagcgtgaaagggaggaggaaacacctgcttaccaagggcctgggatccctgagttgttgagcccaatgagagatgctccctgcttgctgaagacaaaggactggtggacatatgaattctgttatggacgccacatccagcaataccacatggaagattcagagatcaaaggtgaagtcctctatctcggctactaccaatcagccttcgactgggatgatgaaacagccaaggcctccaagcagcatcgtcttaaacgctaccacagccagacctatggcaatgggtccaagtgcgaccttaatgggaggccccgggaggccgaggttcggttcctctgtgacgagggtgcaggtatctctggggactacatcgatcgcgtggacgagcccttgtcctgctcttatgtgctgaccattcgcactcctcggctctgcccccaccctctcctccggcccccacccagtgctgcaccgcaggccatcctctgtcacccttccctacagcctgaggagtacatggcctacgttcagaggcaagccgactcaaagcagtatggagataaaatcatagaggagctgcaagatctaggcccccaagtgtggagtgagaccaagtctggggtggcaccccaaaagatggcaggtgcgagcccgaccaaggatgacagtaaggactcagatttctggaagatgcttaatgagccagaggaccaggccccaggaggggaggaggtgccggctgaggagcaggacccaagccctgaggcagcagattcagcttctggtgctcccaatgattttcagaacaacgtgcaggtcaaagtcattcgaagccctgcggatttgattcgattcatagaggagctgaaaggtggaacaaaaaaggggaagccaaatataggccaagagcagcctgtggatgatgctgcagaagtccctcagagggaaccagagaaggaaaggggtgatccagaacggcagagagagatggaagaagaggaggatgaggatgaggatgaggatgaagatgaggatgaacggcagttactgggagaatttgagaaggaactggaagggatcctgcttccgtcagaccgagaccggctccgttcggagacagagaaagagctggacccagatgggctgaagaaggagtcagagcgggatcgggcaatgctggctctcacatccactctcaacaaactcatcaaaagactggaggaaaaacagagtccagagctggtgaagaagcacaagaaaaagagggttgtccccaaaaagcctcccccatcaccccaacctacagaggaggatcctgagcacagagtccgggtccgggtcaccaagctccgtctcggaggccctaatcaggatctgactgtcctcgagatgaaacgggaaaacccacagctgaaacaaatcgaggggctggtgaaggagctgctggagagggagggactcacagctgcagggaaaattgagatcaaaattgtccgcccatgggctgaagggactgaagagggtgcacgttggctgactgatgaggacacgagaaacctcaaggagatcttcttcaatatcttggtgccgggagctgaagaggcccagaaggaacgccagcggcagaaagagctggagagcaattaccgccgggtgtggggctctccaggtggggagggcacaggggacctggacgaatttgacttctgagaccaacactacacttgacccttcacggaatccagactcttcctggactggcttgcctcctccccacctccccaccctggaacccctgagggccaaacagcagagtggagctgagctgtggacctctcgggcaactctgtgggtgtgggggccctgggtgaatgctgctgcccctgctggcagccaccttgagacctcaccgggcctgtgatatttgctctcctgaactctcactcaatcctcttcctctcctctgtggcttttcctgttattgtcccctaatgataggatattccctgctgcctacctggagattcagtaggatcttttgagtggaggtgggtagagagagcaaggagggcaggacacttagcaggcactgagcaagcaggcccccacctgcccttagtgatgtttggagtcgttttaccctcttctattgaattgccttgggatttccttctccctttccctgcccaccctgtcccctacaatttgtgcttctgagttgaggagccttcacctctgttgctgaggaaatggtagaatgctgcctatcacctccagcacaatcccagtgaaaaaggtgtgaagcacccaccatgttcttgaacaatcaggtttctaaataaacaactggaccatcaaaaaaaaaaaa

SEQ ID NO: 520 - protein, 652 aa, Homosapiens
MAAETLLSSLLGLLLLGLLLPASLTGGVGSLNLEELSEMRYGIEILPLPVMGGQSQSSDVVIVSSKYKQRYECRLPAGAIHFQREREEETPAYQGPGIPELLSPMRDAPCLLKTKDWWTYEFCYGRHIQQYHMEDSEIKGEVLYLGYYQSAFDWDDETAKASKQHRLKRYHSQTYGNGSKCDLNGRPREAEVRFLCDEGAGISGDYIDRVDEPLSCSYVLTIRTPRLCPHPLLRPPPSAAPQAILCHPSLQPEEYMAYVQRQADSKQYGDKIIEELQDLGPQVWSETKSGVAPQKMAGASPTKDDSKDSDFWKMLNEPEDQAPGGEEVPAEEQDPSPEAADSASGAPNDFQNNVQVKVIRSPADLIRFIEELKGGTKKGKPNIGQEQPVDDAAEVPQREPEKERGDPERQREMEEEEDEDEDEDEDEDERQLLGEFEKELEGILLPSDRDRLRSETEKELDPDGLKKESERDRAMLALTSTLNKLIKRLEEKQSPELVKKHKKKRVVPKKPPPSPQPTEEDPEHRVRVRVTKLRLGGPNQDLTVLEMKRENPQLKQIEGLVKELLEREGLTAAGKIEIKIVRPWAEGTEEGARWLTDEDTRNLKEIFFNILVPGAEEAQKERQRQKELESNYRRVWGSPGGEGTGDLDEFDF

SEQ ID NO: 521 - DNA, 2721 bp, Homosapiens
gaggccgctgcctggcttagggcggaaacagattctctgcataagaaggggaacgaaagatggcggcggaaacgctgctgtccagtttgttaggactgctgcttctgggactcctgttacccgcaagtctgaccggcggtgtcgggagcctgaacctggaggagctgagtgagatgcgttatgggatcgagatcctgccgttgcctgtcatgggagggcagagccaatcttcggacgtggtgattgtctcctctaagtacaaacagcgctatgagtgtcgcctgccagctggagctattcacttccagcgtgaaagggaggaggaaacacctgcttaccaagggcctgggatccctgagttgttgagcccaatgagagatgctccctgcttgctgaagacaaaggactggtggacatatgaattctgttatggacgccacatccagcaataccacatggaagattcagagatcaaaggtgaagtcctctatctcggctactaccaatcagccttcgactgggatgatgaaacagccaaggcctccaagcagcatcgtcttaaacgctaccacagccagacctatggcaatgggtccaagtgcgaccttaatgggaggccccgggaggccgaggttcggttcctctgtgacgagggtgcaggtatctctggggactacatcgatcgcgtggacgagcccttgtcctgctcttatgtgctgaccattcgcactcctcggctctgcccccaccctctcctccggcccccacccagtgctgcaccgcaggccatcctctgtcacccttccctacagcctgaggagtacatggcctacgttcagaggcaagccgactcaaagcagtatggagataaaatcatagaggagctgcaagatctaggcccccaagtgtggagtgagaccaagtctggggtggcaccccaaaagatggcaggtgcgagcccgaccaaggatgacagtaaggactcagatttctggaagatgcttaatgagccagaggaccaggccccaggaggggaggaggtgccggctgaggagcaggacccaagccctgaggcagcagattcagcttctggtgctcccaatgattttcagaacaacgtgcaggtcaaagtcattcgaagccctgcggatttgattcgattcatagaggagctgaaaggtggaacaaaaaaggggaagccaaatataggccaagagcagcctgtggatgatgctgcagaagtccctcagagggaaccagagaaggaaaggggtgatccagaacggcagagagagatggaagaagaggaggatgaggatgaggatgaggatgaagatgaggatgaacggcagttactgggagaatttgagaaggaactggaagggatcctgcttccgtcagaccgagaccggctccgttcggaggtgaaggctggcatggagcgggaactggaaaacatcatccaggagacagagaaagagctggacccagatgggctgaagaaggagtcagagcgggatcgggcaatgctggctctcacatccactctcaacaaactcatcaaaagactggaggaaaaacagagtccagagctggtgaagaagcacaagaaaaagagggttgtccccaaaaagcctcccccatcaccccaacctacagaggaggatcctgagcacagagtccgggtccgggtcaccaagctccgtctcggaggccctaatcaggatctgactgtcctcgagatgaaacgggaaaacccacagctgaaacaaatcgaggggctggtgaaggagctgctggagagggagggactcacagctgcagggaaaattgagatcaaaattgtccgcccatgggctgaagggactgaagagggtgcacgttggctgactgatgaggacacgagaaacctcaaggagatcttcttcaatatcttggtgccgggagctgaagaggcccagaaggaacgccagcggcagaaagagctggagagcaattaccgccgggtgtggggctctccaggtggggagggcacaggggacctggacgaatttgacttctgagaccaacactacacttgacccttcacggaatccagactcttcctggactggcttgcctcctccccacctccccaccctggaacccctgagggccaaacagcagagtggagctgagctgtggacctctcgggcaactctgtgggtgtgggggccctgggtgaatgctgctgcccctgctggcagccaccttgagacctcaccgggcctgtgatatttgctctcctgaactctcactcaatcctcttcctctcctctgtggcttttcctgttattgtcccctaatgataggatattccctgctgcctacctggagattcagtaggatcttttgagtggaggtgggtagagagagcaaggagggcaggacacttagcaggcactgagcaagcaggcccccacctgcccttagtgatgtttggagtcgttttaccctcttctattgaattgccttgggatttccttctccctttccctgcccaccctgtcccctacaatttgtgcttctgagttgaggagccttcacctctgttgctgaggaaatggtagaatgctgcctatcacctccagcacaatcccagtgaaaaaggtgtgaagcacccaccatgttcttgaacaatcaggtttctaaataaacaactggaccatcaaaaaaaaaaaa

SEQ ID NO: 522 - protein, 667 aa, Homosapiens
MAAETLLSSLLGLLLLGLLLPASLTGGVGSLNLEELSEMRYGIEILPLPVMGGQSQSSDVVIVSSKYKQRYECRLPAGAIHFQREREEETPAYQGPGIPELLSPMRDAPCLLKTKDWWTYEFCYGRHIQQYHMEDSEIKGEVLYLGYYQSAFDWDDETAKASKQHRLKRYHSQTYGNGSKCDLNGRPREAEVRFLCDEGAGISGDYIDRVDEPLSCSYVLTIRTPRLCPHPLLRPPPSAAPQAILCHPSLQPEEYMAYVQRQADSKQYGDKIIEELQDLGPQVWSETKSGVAPQKMAGASPTKDDSKDSDFWKMLNEPEDQAPGGEEVPAEEQDPSPEAADSASGAPNDFQNNVQVKVIRSPADLIRFIEELKGGTKKGKPNIGQEQPVDDAAEVPQREPEKERGDPERQREMEEEEDEDEDEDEDEDERQLLGEFEKELEGILLPSDRDRLRSEVKAGMERELENIIQETEKELDPDGLKKESERDRAMLALTSTLNKLIKRLEEKQSPELVKKHKKKRVVPKKPPPSPQPTEEDPEHRVRVRVTKLRLGGPNQDLTVLEMKRENPQLKQIEGLVKELLEREGLTAAGKIEIKIVRPWAEGTEEGARWLTDEDTRNLKEIFFNILVPGAEEAQKERQRQKELESNYRRVWGSPGGEGTGDLDEFDF

SEQ ID NO: 523 - DNA, 3938 bp, Homosapiens
ggggccttctgaggtttgggggctgtagggccatgggcctcagggccagaggtggttgttagcctggcaagacaggtctgggcaacatgcatgcccagaggcagttcgttgtagctgcagtgagagcagaagtcagacgacatgaggtggccaagcaggctctaaaccgcctcaggaagctggcagagagggtggacgaccccgaactccaggacagcatccaggcctcattggacagcattcgagaggctgtgatcaatagccaggaatggactttgagccgctccattcctgaactgcgcctgggtgtgctgggcgatgccaggagtgggaagtcatcgctcatccaccgattcctgactggctcataccaggtgctggagaagacagagagtgagcagtacaagaaagaaatgttggtggatggacagacacatctggtgctaatccgagaggaagctggggcacctgatgccaagttctcaggctgggcagatgctgtgatcttcgtcttcagcctggaggatgagaacagtttccaggctgtgagccgtctccatgggcagctgagttcccttcgcggggagggacgaggaggcctggccttggcactggtggggacacaagacaggatcagtgcttcctcccctcgggtggtgggagatgctcgtgccagagctctgtgcgcggacatgaaacgctgcagctactatgagacttgtgcaacctatgggctcaatgtggatcgggtcttccaggaggtggcccagaaggtggtgaccttgcgcaagcagcaacagcttctggctgcctgcaagtccctgcccagctccccaagccactcagctgcatccactccggtagctggccaggctagtaacgggggccacactagcgactactcttcttccctcccgtcctcaccgaatgttggtcaccgggagctccgagccgaggcagctgcagtggctggattgagcaccccagggtccctgcaccgggcagccaagcgcaggaccagcctttttgcgaatcgtcggggtagtgactccgagaaacgaagcttggatagtcggggagagacaacagggagtgggcgagccatccccatcaaacagagcttcctactaaaacgaagtggcaattccttgaacaaagaatggaagaagaaatatgtaaccctgtccagtaatggctttctactctaccaccccagtattaacgattacatccacagtacccacggcaaggagatggacttgctgcgaacaacagtcaaagtcccgggcaagcggcccccgagggccatctctgcctttggcccctcagccagcattaacgggctcgtcaaggacatgagcactgtccagatgggtgaaggcctggaagccactactcccatgccaagccctagccccagccccagttccctgcagccaccaccagatcagacatccaaacacctgctgaagccagaccggaatttggcccgagccctcagcacggactgtaccccatctggagacctgagccccctgagtcgggaaccccctccttctcccatggtgaagaagcagaggaggaaaaaattgacaacaccatccaagactgaaggctcggctgggcaggctgaagaggaaaactttgagttcctgatcgtgtccagcacgggtcagacgtggcactttgaggcagccagttttgaggagcgggatgcctgggtccaggccatcgagagtcagatcctagccagtctgcaatgctgtgagagcagcaaggtcaagctgcgcacagacagccaaagcgaggccgtggccatccaggcgatccggaacgccaaggggaattcaatctgcgtggactgcggggcccccaaccccacgtgggccagcttgaacctgggcgccctcatctgcatcgagtgttctggcatccaccgcaacctgggcacacacctgtcccgcgttcgctcgctggacttggacgactggccacgggagctgaccctggtgctgacggctattggcaacgacacggccaaccgcgtgtgggaaagcgacacgcgaggccgtgccaagccctcgcgggactcttcgcgggaggagcgcgagtcgtggattcgcgccaagtacgagcagctactgttcctggcgccgctgagcacctcggaggagccgctgggccgccagctgtgggccgccgtgcaggcccaggacgtggctaccgttctcctgcttttggcccatgcgcgacacgggccgctcgacaccagcgtagaggacccacagctgcgctccccactccacctggcggccgagctcgcccacgtcgtcatcacgcaactgctgctgtggtacggcgcggacgtggcggcccgtgacgcccagggccgcacggcgctgttctacgcccgccaggctggaagccagctgtgcgccgacatccttctccagcacggctgcccgggtgagggcggcagcgcggccaccacgcccagcgcggccaccacgcccagcatcaccgccacgcccagcccccgccgccggagcagcgccgctagcgtgggccgcgccgacgccccggttgcgctggtatagttgcccagcgggagagacacccccatccccacgcgggccgggcacgaccacaccgggcggaccgctggacagacgcacccactcacctctccgatccgcaccccgccccacgggagcacttcctacccccacgagggcacagcccccacgccttccagaagacacaaactcacctccctctccccaacgaggcatggagaccccagctcaacacgccccctctccattgtttccacactcggattgctctgggtctacccgctcggggttcgcggaaggggaggtccccagcggtacgggctcctaggcgcttggacatgcccgcttgtgccccctaggggcggaaagaagacccggtcctgcccgagctcaacaatcccagggcgggagcccatacccaggctggctcctggggcgacgccacgccagagggagggtttagtacatgggagggctagccccgggacttggggccaatacggaaaccctaccccttccatgctcatctcactgcccagtgaagggggcaagggcagcgaggggcaggacccctgctgctcatgggggtgggggttcccaaccctttccgtgaaagggaccgtgagtagtggaaaccaggacgtcccctacacctacccatgggtggaagctaaagagtccggggggaaccaagagcctgggtccctcccactactatcttgggagggagaagggatggagcaggagcgggctaagagggctgcgggggccttgtaatttattgctttgttccccaacatggggatgggggcgggcaggggcgtggggagggcgttttggggtaggggaagcccagggtgggcagggggtgggttggggtgggggtgctctcgggttgtgtctgtgaccgtgactgcgtacctgtgactgtgcagcgcccgtggtgatctggggtagggggcacccctacagtgggacccctcccccattattctttctgtccagcccctccctcccactggagcagctccagagccattcctcacccccgtgacctctcccagccagggctgagaggattcgaggtggctgggagggtttccaggccccctgccccttccccacaaactgggtgatagggcggacttacctggcccagccctgcctccctcagccaacccagcccttgggctgtctgtgtcagtggtttccggtctttttttttttttttttttctggctaaaatagtttgcaaaggaccaggtaattggggaggggagagaggtgggggcaagggggaaatgcccccccatctccttggaggcagtggtgtgaatcttcttcaacagcaattaaagagga

SEQ ID NO: 524 - protein, 836 aa, Homosapiens
MHAQRQFVVAAVRAEVRRHEVAKQALNRLRKLAERVDDPELQDSIQASLDSIREAVINSQEWTLSRSIPELRLGVLGDARSGKSSLIHRFLTGSYQVLEKTESEQYKKEMLVDGQTHLVLIREEAGAPDAKFSGWADAVIFVFSLEDENSFQAVSRLHGQLSSLRGEGRGGLALALVGTQDRISASSPRVVGDARARALCADMKRCSYYETCATYGLNVDRVFQEVAQKVVTLRKQQQLLAACKSLPSSPSHSAASTPVAGQASNGGHTSDYSSSLPSSPNVGHRELRAEAAAVAGLSTPGSLHRAAKRRTSLFANRRGSDSEKRSLDSRGETTGSGRAIPIKQSFLLKRSGNSLNKEWKKKYVTLSSNGFLLYHPSINDYIHSTHGKEMDLLRTTVKVPGKRPPRAISAFGPSASINGLVKDMSTVQMGEGLEATTPMPSPSPSPSSLQPPPDQTSKHLLKPDRNLARALSTDCTPSGDLSPLSREPPPSPMVKKQRRKKLTTPSKTEGSAGQAEEENFEFLIVSSTGQTWHFEAASFEERDAWVQAIESQILASLQCCESSKVKLRTDSQSEAVAIQAIRNAKGNSICVDCGAPNPTWASLNLGALICIECSGIHRNLGTHLSRVRSLDLDDWPRELTLVLTAIGNDTANRVWESDTRGRAKPSRDSSREERESWIRAKYEQLLFLAPLSTSEEPLGRQLWAAVQAQDVATVLLLLAHARHGPLDTSVEDPQLRSPLHLAAELAHVVITQLLLWYGADVAARDAQGRTALFYARQAGSQLCADILLQHGCPGEGGSAATTPSAATTPSITATPSPRRRSSAASVGRADAPVALV

SEQ ID NO: 525 - DNA, 1749 bp, Homosapiens
aatccagaggcaggggagggacggtgcaggcgcagagtattgggtttggctggcctcgatttaaagagacagaagctgtcggggtcctggaagacggtccccaataccctccccccaagtccttgggaccacttgggtccccagagctggggagatggtttgtggcggctttgcctgctccaagaatgcgctttgcgctctcaacgtggtctacatgctggtgagcttgttgctcattggagtggctgcttggggcaagggcctgggtctggtgtccagcatccacatcatcggcggagtcattgctgtgggagtcttccttctccttattgcagtggctggactggtgggtgctgtcaaccaccaccaagtcctgctgttcttttacatgatcatccttggtttggtcttcatcttccaatttgtaatctcttgctcatgtctggctattaaccgaagcaaacagacagatgtcatcaatgcttcttggtgggtcatgagcaacaagactcgggatgaactggaaagaagttttgattgttgtggcttattcaacctcacaaccctgtatcaacaagattatgatttctgcactgcaatctgcaagagccagagccccacatgccagatgtgtggagaaaagtttcttaagcattcagacgaagccctgaaaatcctagggggtgttggactcttctttagctttacagagatccttggtgtttggctagcaatgagatttcggaatcagaaggatcctagagccaaccccagtgcctttctatgagactttggatccttctgacttttcttctgctctctctaagctttctcttcctcccttagggaatatctagggtctgtaaccgttttggtttgagaaaaaggaaaggccccttgtcacatcctctaaaattgatggaatagcaagactttatgccttgacatattttagtgggagccagactataaggaataaaaggaaaaactttcttcctctctctccaagaggatatgggaagcttctgtgagtgcataggatgggggctggagtcattcttagctgtttcccttcctctgtccatatactggatcacctcaacataccctggtgtggctctaagggtaaatcagggatagggccaaggagaaaacaaccaagaactctttcctgtaataagcaggatccagtttgagaaagtttagcgaatataaaagtaaaagccatttaaaaatctatattctttttttttttttgacacagagtcttgctctgttgcccaggctggagtgcaatggcatgatctcggctcaccgcaacctctgcctcccgggttcaagcgatcctcctgcctcagtctcccaagtagctgggattacaggtgtgcaccaccacgcctgactaattttgtatttttagtagagacagggtttcaccatgttagtcaggctggtctcgaactcctgacctcaggtgatccacccgcgttggcctcccaacgtgctgggattataggcgtgagccaccacgccccgcctaaaatccatattcaaagaagcaatttcagttcctttctaagctttgtcagtcaaggggctccactgacttcctaggccctgtaatttaaccagtctttaaggttttgcaggaaagtcccttcttccaagtggtttttccaaatcgcacaatggcaaagccaaacagaggaagaaacattaaaaaaaaaaaaaagaccattaaaaaaaaaa

SEQ ID NO: 526 - protein, 210 aa, Homosapiens
MVCGGFACSKNALCALNVVYMLVSLLLIGVAAWGKGLGLVSSIHIIGGVIAVGVFLLLIAVAGLVGAVNHHQVLLFFYMIILGLVFIFQFVISCSCLAINRSKQTDVINASWWVMSNKTRDELERSFDCCGLFNLTTLYQQDYDFCTAICKSQSPTCQMCGEKFLKHSDEALKILGGVGLFFSFTEILGVWLAMRFRNQKDPRANPSAFL

SEQ ID NO: 527 - DNA, 1474 bp, Homosapiens
agccctcccagtttccgcgcgcctctttggcagctggtcacatggtgagggtgggggtgagggggcctctctagcttgcggcctgtgtctatggtcgggccctctgcgtccagctgctccggaccgagctcgggtgtatggggccgtaggaaccggctccggggccccgataacgggccgcccccacagcaccccgggctggcgtgagggtctcccttgatctgagaatggctacctctcgatatgagccagtggctgaaattggtgtcggtgcctatgggacagtgtacaaggcccgtgatccccacagtggccactttgtggccctcaagagtgtgagagtccccaatggaggaggaggtggaggaggccttcccatcagcacagttcgtgaggtggctttactgaggcgactggaggcttttgagcatcccaatgttgtccggctgatggacgtctgtgccacatcccgaactgaccgggagatcaaggtaaccctggtgtttgagcatgtagaccaggacctaaggacatatctggacaaggcacccccaccaggcttgccagccgaaacgatcaaggatctgatgcgccagtttctaagaggcctagatttccttcatgccaattgcatcgttcaccgagatctgaagccagagaacattctggtgacaagtggtggaacagtcaagctggctgactttggcctggccagaatctacagctaccagatggcacttacacccgtggttgttacactctggtaccgagctcccgaagttcttctgcagtccacatatgcaacacctgtggacatgtggagtgttggctgtatctttgcagagatgtttcgtcgaaagcctctcttctgtggaaactctgaagccgaccagttgggcaaaatctttgacctgattgggctgcctccagaggatgactggcctcgagatgtatccctgccccgtggagcctttccccccagagggccccgcccagtgcagtcggtggtacctgagatggaggagtcgggagcacagctgctgctggaaatgctgacttttaacccacacaagcgaatctctgcctttcgagctctgcagcactcttatctacataaggatgaaggtaatccggagtgagcaatggagtggctgccatggaaggaagaaaagctgccatttcccttctggacactgagagggcaatctttgcctttatctctgaggctatggagggtcctcctccatctttctacagagattactttgctgccttaatgacattcccctcccacctctccttttgaggcttctccttctccttcccatttctctacactaaggggtatgttccctcttgtccctttccctacctttatatttggggtccttttttatacaggaaaaacaaaacaaagaaataatggtcttttttttttttttaaaaaaaaaaaaaaaaaaaaaaaaaaaaaaaa

SEQ ID NO: 528 - protein, 303 aa, Homosapiens
MATSRYEPVAEIGVGAYGTVYKARDPHSGHFVALKSVRVPNGGGGGGGLPISTVREVALLRRLEAFEHPNVVRLMDVCATSRTDREIKVTLVFEHVDQDLRTYLDKAPPPGLPAETIKDLMRQFLRGLDFLHANCIVHRDLKPENILVTSGGTVKLADFGLARIYSYQMALTPVVVTLWYRAPEVLLQSTYATPVDMWSVGCIFAEMFRRKPLFCGNSEADQLGKIFDLIGLPPEDDWPRDVSLPRGAFPPRGPRPVQSVVPEMEESGAQLLLEMLTFNPHKRISAFRALQHSYLHKDEGNPE

SEQ ID NO: 529 - DNA, 2462 bp, Homosapiens
accgccgagcgcacgggccgagccaagcctgatcccggagccggagggggactgggaccgagagaacggcgatggggggcggccccgccgcaggaggacccgggcgcgtaaccccgggggcccggcccgctccagacccagacccgcggggtgcggcaccctgagcccccctccccgccccctgccctggccatggccgcccaccccgccgcccccgggccgccagcccgctcggccccgcaagcaccggagccccggcggtggcagcagtgaacggctgtcgcaggccccgaagaccccggcccggctcggctctctagcgcgcgcccccttcccggccttgtcctctcccctccccccgccgctagcgagccccccttgcacgctgccccccgcccccggtgtccggacgatgctcaagtctcggctccgcatgtttctgaacgagctgaagctgctggtgctgacaggcggggggcggccccgggccgagccgcaaccccgggggggccggggaggcggctgcggctgggcgcccttcgctggttgctccacccgggacggcgacggcgacgaggaggagtactacgggtcggagccgcgggcccggggcctggccggcgacaaggagccgcgggccggacccctgccgccgcccgcgccgccgctgccgcccccgggcgcgctggacgccctgtcgctcagcagtagcctggacagcggactccgaacccctcagtgccggatctgcttccagggcccggagcagggggagctcttaagcccctgccgctgcgacggctcagtgcgctgcacgcatcagccctgcctcatccgctggatcagcgagaggggctcctggagctgtgagctctgctacttcaagtaccaggtcctggcgatcagcaccaagaacccactgcagtggcaggccatctccctgacggtcatcgagaaggtccagattgctgccatagttctgggctcgctcttcctggttgccagcatctcctggctcatctggtcctcactcagcccttcagccaagtggcaacgacaggatctgctctttcagatctgctacggcatgtatggcttcatggatgtcgtctgcataggcctcatcatccatgaaggctcctctgtctaccgcatcttcaagcgctggcaggcagtgaaccagcagtggaaggtcctaaattatgacaagaccaaggacataggaggagatgcagggggagggacggcagggaagtcaggccccaggaactcacggacgggccccacctctggggccacgagccgccccccagctgcccagcgcatgcggacgctcttgcctcagcgctgcggttatacaatcttgcacctccttgggcagctgcggccaccagatgcccgttccagctcccattctggccgagaggttgtcatgagggtcactacagtctgaactggactccaggagcagggatcttgagtcaatgcatcagtcagagaagaactctcatggctgctggaggtaccagctggacaaggtgtttggggcatgctgcccccgtcaccgaggatctgtgtgggtagcctcaagctggagacattgtctggcctcactgcccactgggtagagacacctggatgacatttcagtacccgctggcagctcctcccactcatccagagacggccggtgggcaggcggggagagcagctttccttccctggagagaaccgtctttacctcagctcctagggcctccagccccccagctccaccacggtgacttggtgaagggggaccaatgccagaagaaaggggctgtagacccctattccccaccccatggccacagggcatctggcaataagactagtatacattgacctcccgttccctgcatgagggcggggagttccccctgctccatcccccattgcatgggggaagggcataaagaatcatttatatgcacgtggagactcctttctcatctggggcttttctggagggttgggagatgtggggaggtttctctgcacaggttgcaaatcccaaatgcagcagtgggttctgagttgtaggtgtgactcccacttgctggtgaataattcatgttggctgctaggtggcagcactccgaggtatctaaagggtagacctggacctgccacctatgagttgtgtgatatagaaaaaaatctcttagctctggttttcctgtctacttcatagggttggaataaggataaatgagggacaggttggatgccgttgcagagaaaatcagcaatgacataaagagatttctagaatagttgatggtccatttatttcaaatagtagctggtgtaacaaattctaaaatgtgtttttcatctggagttgcacagaatcatggaattttgtgttgagtgacataataggtatggaaatatgaggggaaatagacattgcaaatgtg

SEQ ID NO: 530 - protein, 346 aa, Homosapiens
MLKSRLRMFLNELKLLVLTGGGRPRAEPQPRGGRGGGCGWAPFAGCSTRDGDGDEEEYYGSEPRARGLAGDKEPRAGPLPPPAPPLPPPGALDALSLSSSLDSGLRTPQCRICFQGPEQGELLSPCRCDGSVRCTHQPCLIRWISERGSWSCELCYFKYQVLAISTKNPLQWQAISLTVIEKVQIAAIVLGSLFLVASISWLIWSSLSPSAKWQRQDLLFQICYGMYGFMDVVCIGLIIHEGSSVYRIFKRWQAVNQQWKVLNYDKTKDIGGDAGGGTAGKSGPRNSRTGPTSGATSRPPAAQRMRTLLPQRCGYTILHLLGQLRPPDARSSSHSGREVVMRVTTV

SEQ ID NO: 531 - DNA, 2503 bp, Homosapiens
gggtgctaatccccagcacagaccactcaggaggagggattggctgaggagcttggagagggggcgtcatcacctcacccaaaggttaaataggggttgagatatgatgctcaggagaagcgctttctttcgcgagcaccctgaaccagaccatgacccagaccctcaagtacgcctccagagtgttccatcgcgtccgctgggcgcccgagttgggcgcctccctaggctaccgagagtaccactcagcacgccggagcttggcagacatcccaggcccctctacgcccagctttctggccgaacttttctgcaagggggggctgtcgaggctacacgagctgcaggtgcagggcgccgcgcacttcgggccggtgtggctagccagctttgggacagtgcgcaccgtgtacgtggctgcccctgcactcgtcgaggagctgctgcgacaggagggaccccggcccgagcgctgcagcttctcgccctggacggagcaccgccgctgccgccagcgggcttgcggactgctcactgcggaaggcgaagaatggcaaaggctccgcagtctcctggccccgctcctcctccggcctcaagcggccgcccgctacgccggaaccctgaacaacgtagtctgcgaccttgtgcggcgtctgaggcgccagcggggacgtggcacggggccgcccgccctggttcgggacgtggcgggggaattttacaagttcggactggaaggcatcgccgcggttctgctcggctcgcgcttgggctgcctggaggctcaagtgccacccgacacggagaccttcatccgcgctgtgggctcggtgtttgtgtccacgctgttgaccatggcgatgccccactggctgcgccaccttgtgcctgggccctggggccgcctctgccgagactgggaccagatgtttgcatttgctcagaggcacgtggagcggcgagaggcagaggcagccatgaggaacggaggacagcccgagaaggacctggagtctggggcgcacctgacccacttcctgttccgggaagagttgcctgcccagtccatcctgggaaatgtgacagagttgctattggcgggagtggacacggtgtccaacacgctctcttgggctctgtatgagctctcccggcaccccgaagtccagacagcactccactcagagatcacagctgccctgagccctggctccagtgcctacccctcagccactgttctgtcccagctgcccctgctgaaggcggtggtcaaggaagtgctaagactgtaccctgtggtacctggaaattctcgtgtcccagacaaagacattcatgtgggtgactatattatccccaaaaatacgctggtcactctgtgtcactatgccacttcaagggaccctgcccagttcccagagccaaattcttttcgtccagctcgctggctgggggagggtcccaccccccacccatttgcatctcttccctttggctttggcaagcgcagctgtatggggagacgcctggcagagcttgaattgcaaatggctttggcccagatcctaacacattttgaggtgcagcctgagccaggtgcggccccagttagacccaagacccggactgtcctggtacctgaaaggagcatcaacctacagtttttggacagatagtcccatggaaagagactgtcatcatcaccctttcattcatcatagggataagattttttgtaggcacaagaccaaggtatacatcttcccctaatgcctatctgaccaaactggatagaaccaccatagtgaagtgtgaggcggccctgaccaatgtgtgaagtatgcacttggcctgactcaggaagccaggtgagaaaaccatggtctctctgcttgcttggcccttctgatcatgtatgcatcccccaaggatgaaatcagattttaactaataatgctggatggcctgaggaaagattcaactgcctctctttttgggctttcatagtgttcattgatgctgctggctaagcatttatcaaagcataagctcagtaactgtgcatctggtctgtacctggttggtccttcgtctttgcatgtaagctctttgagaggaagggtgaagccttatttgttttttatgtcccctgccagggcctgtctctgactaggtgtcaccatacacattcttagattgaatctgaaccatgtggcagaagggataagcagcttacttagtaggctctgtctacccccttccttctttgtcttgcccctaggaaggtgaatctgccctagcctggtttacggtttcttataactctcctttgctctctggccactattaagtgggtttgccccatcacttagttctcaggcagagacatctttgggcctgtccctgcccaggcctctggctttttatattgaaaatttttaaatattcacaaattttagaataaatcaaatattccattcttgaaaaaaaaaaaaaaaaa

SEQ ID NO: 532 - protein, 508 aa, Homosapiens
MTQTLKYASRVFHRVRWAPELGASLGYREYHSARRSLADIPGPSTPSFLAELFCKGGLSRLHELQVQGAAHFGPVWLASFGTVRTVYVAAPALVEELLRQEGPRPERCSFSPWTEHRRCRQRACGLLTAEGEEWQRLRSLLAPLLLRPQAAARYAGTLNNVVCDLVRRLRRQRGRGTGPPALVRDVAGEFYKFGLEGIAAVLLGSRLGCLEAQVPPDTETFIRAVGSVFVSTLLTMAMPHWLRHLVPGPWGRLCRDWDQMFAFAQRHVERREAEAAMRNGGQPEKDLESGAHLTHFLFREELPAQSILGNVTELLLAGVDTVSNTLSWALYELSRHPEVQTALHSEITAALSPGSSAYPSATVLSQLPLLKAVVKEVLRLYPVVPGNSRVPDKDIHVGDYIIPKNTLVTLCHYATSRDPAQFPEPNSFRPARWLGEGPTPHPFASLPFGFGKRSCMGRRLAELELQMALAQILTHFEVQPEPGAAPVRPKTRTVLVPERSINLQFLDR

SEQ ID NO: 533 - DNA, 1743 bp, Homosapiens
ccgagaccaggagtaaggggacaggagcgaggactgatgccactgtagaaggcgaggtctctagacccctctcacctgtggggtgcacaggtgcctgcaaccaggatggtaacccagaccaggcagaagcaagctaagagaaaacgttgggtccctgggcctggcctcgccctcccagttggaggctaacggtgcggaggttccctccagcactcgctccttacagccctccccacctagcccagcccagcccagcccagcccagctgaatttgctcttgggtctttaaggggcgggaactgccaccaacgcgcatggctgcgtcattaacttgcgcctctggcctgcgcctccacgtggatttggtagagaaaccccggactgggatcatggcagccgagactcggaacgtggccggagcagaggccccaccgccccagaagcgctactaccggcaacgtgctcactccaaccccatggcggaccacacgctgcgctaccctgtgaagccagaggagatggactggtctgagctatacccagagttcttcgctccactcactcaaaatcagagccacgatgacccaaaggataagaaagaaaagagagctcaggcccaagtggagtttgcagacataggctgtggctatggtggcctgttagtggaactgtcaccgctgttcccagacacacttattctgggtctggagatccgggtgaaggtctcagactatgtacaagaccggattcgggccctacgcgcagctcctgcaggtggcttccagaacatcgcctgtctccgtagcaatgccatgaagcaccttcctaacttcttctacaagggccagctgacaaagatgttcttcctcttccccgacccacatttcaagcggacaaagcacaagtggcgaatcatcagtcccaccctgctagcagaatatgcctacgtgctaagagttggggggctggtgtataccataaccgatgtgctggagctacacgactggatgtgcactcatttcgaagagcacccactgtttgagcgtgtgcctctggaggacctgagtgaagaccccgttgtgggacatctaggcacctcaactgaggaggggaagaaagttctacgtaatggagggaagaatttcccagccatcttccgaagaatacaagatcccgtcctccaggcagtgacctcccaaaccagcctgcctggtcactgactgcttactctaccttagctggacctcgtctcccagggactagagaaaagagcaggagtcctgggtcttcccagttgagactgctggagctgagacacagtactctcttaaagaaggtggggagctgcccagggcagaacccactggtgttcatgactacccctggctcctctcaccttgtccctccactgccaacagaaaacaaagcagctgactgagatggtcaaaggactttggaccataggggatctttggaaggctgtggggtcttgctcttccttagcactcctttctccttgtgagatctctcctcagctggaatgaggaatgtagtccatctaaactgcttgctaggctcaattaccacttctgtttgctttgtggatcctgggataacatgtatatgtgtacacatgcctattctgccatttctcaggaaagggtggagtatgtatcatatgccttctaccatcctcctgtcctctccctgcgtaagacttgacctggggaatctgtgttccct

SEQ ID NO: 534 - protein, 276 aa, Homosapiens
MAAETRNVAGAEAPPPQKRYYRQRAHSNPMADHTLRYPVKPEEMDWSELYPEFFAPLTQNQSHDDPKDKKEKRAQAQVEFADIGCGYGGLLVELSPLFPDTLILGLEIRVKVSDYVQDRIRALRAAPAGGFQNIACLRSNAMKHLPNFFYKGQLTKMFFLFPDPHFKRTKHKWRIISPTLLAEYAYVLRVGGLVYTITDVLELHDWMCTHFEEHPLFERVPLEDLSEDPVVGHLGTSTEEGKKVLRNGGKNFPAIFRRIQDPVLQAVTSQTSLPGH

SEQ ID NO: 535 - DNA, 1594 bp, Homosapiens
ggcctgcgcctccacgtggatttggtagagaaaccccggactgggatcatggcagccgagactcggaacgtggccggagcagaggccccaccgccccagaagcgctactaccggcaacgtgctcactccaaccccatggcggaccacacgctgcgctaagcacaaacacaaagtaggatcccagtgcattaggcagccagtctcgggagaaggggaacttgtgccccagaaagggcagttacccggccagggtcacatcaaccgccagaagtggagttgggcagccctgtgaagccagaggagatggactggtctgagctatacccagagttcttcgctccactcactcaaaatcagagccacgatgacccaaaggataagaaagaaaagagagctcaggcccaagtggagtttgcagacataggctgtggctatggtggcctgttagtggaactgtcaccgctgttcccagacacacttattctgggtctggagatccgggtgaaggtctcagactatgtacaagaccggattcgggccctacgcgcagctcctgcaggtggcttccagaacatcgcctgtctccgtagcaatgccatgaagcaccttcctaacttcttctacaagggccagctgacaaagatgttcttcctcttccccgacccacatttcaagcggacaaagcacaagtggcgaatcatcagtcccaccctgctagcagaatatgcctacgtgctaagagttggggggctggtgtataccataaccgatgtgctggagctacacgactggatgtgcactcatttcgaagagcacccactgtttgagcgtgtgcctctggaggacctgagtgaagaccccgttgtgggacatctaggcacctcaactgaggaggggaagaaagttctacgtaatggagggaagaatttcccagccatcttccgaagaatacaagatcccgtcctccaggcagtgacctcccaaaccagcctgcctggtcactgactgcttactctaccttagctggacctcgtctcccagggattagagaaaagagcaggagtcctgggtcttcccagttgagactgctggagctgagacacagtactctcttaaagaaggtggggagctgcccagggcagaacccactggtgttcatgactacccctggctcctctcaccttgtccctccactgccaacagaaaacaaagcagctgactgagatggtcaaaggactttggaccataggggatctttggaaggctgtggggtcttgctcttccttagcactcctttctccttgtgagatctctcctcagctggaatgaggaatgtagtccatctaaactgcttgctaggctcaattaccacttctgtttgctttgtggatcctgggataacatgtatatgtgtacacatgcctattctgccatttctcaggaaagggtggagtatgtatcatatgccttctaccatcctcctgtcctctccctgcgtaagacttgacctggggaatctgtgttccctaaaaaaaaaaaaaaaaaaaaaaaaaaaaaaaaaaaaaaaaaaaaaaaaaaaaaaaaaaaaaaaaaa

SEQ ID NO: 536 - protein, 36 aa, Homosapiens
MAAETRNVAGAEAPPPQKRYYRQRAHSNPMADHTLR

SEQ ID NO: 537 - DNA, 1283 bp, Homosapiens
ggcctgcgcctccacgtggatttggtagagaaaccccggactgggatcatggcagccgagactcggaacgtggccggagcagaggccccaccgccccagaagcgctactaccggcaacgtgctcactccaaccccatggcggaccacacgctgcgctaccctgtgaagccagaggagatggactggtctgagctatacccagagttcttcgctccactcactcaaaatcagagccacgatgacccaaaggataagaaagaaaagagagctcaggcccaagtggagtttgcagacataggctgtggctatggtggcctgttagctgacaaagatgttcttcctcttccccgacccacatttcaagcggacaaagcacaagtggcgaatcatcagtcccaccctgctagcagaatatgcctacgtgctaagagttggggggctggtgtataccataaccgatgtgctggagctacacgactggatgtgcactcatttcgaagagcacccactgtttgagcgtgtgcctctggaggacctgagtgaagaccccgttgtgggacatctaggcacctcaactgaggaggggaagaaagttctacgtaatggagggaagaatttcccagccatcttccgaagaatacaagatcccgtcctccaggcagtgacctcccaaaccagcctgcctggtcactgactgcttactctaccttagctggacctcgtctcccagggattagagaaaagagcaggagtcctgggtcttcccagttgagactgctggagctgagacacagtactctcttaaagaaggtggggagctgcccagggcagaacccactggtgttcatgactacccctggctcctctcaccttgtccctccactgccaacagaaaacaaagcagctgactgagatggtcaaaggactttggaccataggggatctttggaaggctgtggggtcttgctcttccttagcactcctttctccttgtgagatctctcctcagctggaatgaggaatgtagtccatctaaactgcttgctaggctcaattaccacttctgtttgctttgtggatcctgggataacatgtatatgtgtacacatgcctattctgccatttctcaggaaagggtggagtatgtatcatatgccttctaccatcctcctgtcctctccctgcgtaagacttgacctggggaatctgtgttccctaaaaaaaaaaaaaaaaaaaaaaaaaaaaaaaaaaaaaaaaaaaaaaaaaaaaaaaaaaaaaaaaaa

SEQ ID NO: 538 - protein, 155 aa, Homosapiens
MAAETRNVAGAEAPPPQKRYYRQRAHSNPMADHTLRYPVKPEEMDWSELYPEFFAPLTQNQSHDDPKDKKEKRAQAQVEFADIGCGYGGLLADKDVLPLPRPTFQADKAQVANHQSHPASRICLRAKSWGAGVYHNRCAGATRLDVHSFRRAPTV

SEQ ID NO: 539 - DNA, 2717 bp, Homosapiens
ctcagggaggcggggctcgttccacagggacaccacgacggctcgcggcccccagcctctaccccgctccggatccgggatctgagcgccggccgcggtgcccaggcactcccttggcgggccggatggcggaccccggcccagatcccgaatctgagtcggaatcggtgttcccgcgggaggtcgggctctttgcagactcttactcggagaagagccagttctgtttctgtgggcatgtgctgaccatcacgcagaactttgggtcccgcctcggggtggcggcgcgcgtgtgggacgcggccctgagcctgtgcaattatttcgagagtcaaaatgtggatttccgaggcaagaaggtgatcgaactgggtgcggggacaggcatcgtggggatcttggcagcgctgcaggggggggatgttaccatcactgacctgcccctggccctagaacagatccagggcaacgtccaggccaatgtgccagctggaggccaggcccaggtgcgtgccttgtcctgggggattgaccatcatgtcttccctgcaaactatgacctggtgctgggggctgatatcgtgtacctggaacccaccttccctctgctgctggggaccctccaacacctgtgcaggccccatggcaccatctatctggcctccaagatgagaaaggagcatgggacagagagcttctttcagcacctcctgccccagcatttccaactggagctggctcagcgggatgaggatgaaaatgtcaacatctatagggccaggcacagggaaccaagacctgcttgacatcacccttgctgttcttctcaatctcttgctctaatgaaggaactgtgtatctcaaaaaccatatttccagagccacaaacatgaggaccaaaaaggatggatttccctggcctctctcactttcctccttccctctttgttaccccagatactcttgggcaggtgcagtgaggtgcctgcttacaaggaatcccagagttctggcagcactagtgttagaacaccaaggaggttcctggctcctgttctcagagaaggaggatggtaaggtatccaggatttttagggggtaagggagatatatgggatgtgagagcagtgattgtagacagactgtcactgatcacttccattcctgttgctgtttacacagaatggactttaaaaaaattctgtgggatttttttttctttttttctttttttttgagacagggtctcactctgtcatccaggctggagtgcagtggtgtgatcacagctcactgcagcctcaacctctgaaggcccagatgatcttcctgcctcagctccccaagtagctgggactagaggcatgcgccaccacacccggctaatttttgtattttcagtagagacagggtttcgccatgttgcccagggtggtctcaaactcctgggctcaagtgatccacccgccttgcctcccaaagtgctgggattgcaggcatggcccactgtgctagcctaggatttttttttttttttaagaaagaattaagccttaaaaatctattgtgcaagaacccaacttttactcaggagctgagaaggaagaagcctcaaaccacccatttcctgctttttagagatagagtctagtggaaccatggctctaactgggtcaagtcctcctagctctgaagctaaggctgcagagctgtcctttggactgtatttcttcatgctttccagagttagagccttgatcacggaacatcattgtgtgcagaagaatactgtacctagtactaagttcttttcatctttgatttttctttagcttcatcagtccttccttcctaatctctaatcccctgaagcctaacacagttcctaatgtgttttgccttaacctcttttctcttcccacattggtacttctggttggggctctctttacttactgcttaggcacatagtcaccttctctggactccctgcttccatgctttctccttcagtccattccgcaaactcttgtgatcttccaaaattagctctgattagctttcacttcctgtagaagcaagaacaagctcctctgcttggtacttagtctgtgtccatgtgatccaaaattaccttcctattgcatttcctactcctttgctacgtgtattggacctctggccaaattacaaaagatgtactctttgttctctaaaaccacactaaagttttctgacttctttcacactctttatgataatcctctgcctgaaaggctattgccacctgtcaaaatcttcattattctttgcctctttcctgagcctcttgcttgaatgtgatttctttctccctgagacccataaggttcatcttatgggaccttaatttgtcttgcatggacatttgtgattctcattttctcaccattaaattaccttggagggtagggctgtggtttactcctgtctaaacccctgaagcctaacacagttcctggcacacaacaggtgttcaacagatattgtgctcattcaataaatatttactcgctttgtttaatggattccacccctgccttcctaggtgaccttggacaaattctcgaacccattcaccaaccacacaagtttgttgtgagtcataaatggataatgaatataaatgcgcattgaaaataaacataaaatgttacccacaaaaaaaaaaaaaaaaa

SEQ ID NO: 540 - protein, 226 aa, Homosapiens
MADPGPDPESESESVFPREVGLFADSYSEKSQFCFCGHVLTITQNFGSRLGVAARVWDAALSLCNYFESQNVDFRGKKVIELGAGTGIVGILAALQGGDVTITDLPLALEQIQGNVQANVPAGGQAQVRALSWGIDHHVFPANYDLVLGADIVYLEPTFPLLLGTLQHLCRPHGTIYLASKMRKEHGTESFFQHLLPQHFQLELAQRDEDENVNIYRARHREPRPA

SEQ ID NO: 541 - DNA, 2856 bp, Homosapiens
ctcagggaggcggggctcgttccacagggacaccacgacggctcgcggcccccagcctctaccccgctccggatccgggatctgagcgccggccgcggtgcccaggcactcccttggcgggccggatggcggaccccggcccagatcccgaatctgagtcggaatcggtgttcccgcgggaggtcgggctctttgcagactcttactcggagaagagccagttctgtttctgtgggcatgtgctgaccatcacgcagaactttgggtcccgcctcggggtggcggcgcgcgtgtgggacgcggccctgagcctgtgcaattatttcgagagtcaaaatgtggatttccgaggcaagaaggtgatcgaactgggtgcggggacaggcatcgtggggatcttggcagcgctgcagggagcttatggtctagtgagggagacagaggacgatgtcatagaacaagaactctggcgaggtatgcgtggagcctgtggacatgctctatccatgtctaccatgactccctgggaatccatcaagggaagctctgtcagggggggatgttaccatcactgacctgcccctggccctagaacagatccagggcaacgtccaggccaatgtgccagctggaggccaggcccaggtgcgtgccttgtcctgggggattgaccatcatgtcttccctgcaaactatgacctggtgctgggggctgatatcgtgtacctggaacccaccttccctctgctgctggggaccctccaacacctgtgcaggccccatggcaccatctatctggcctccaagatgagaaaggagcatgggacagagagcttctttcagcacctcctgccccagcatttccaactggagctggctcagcgggatgaggatgaaaatgtcaacatctatagggccaggcacagggaaccaagacctgcttgacatcacccttgctgttcttctcaatctcttgctctaatgaaggaactgtgtatctcaaaaaccatatttccagagccacaaacatgaggaccaaaaaggatggatttccctggcctctctcactttcctccttccctctttgttaccccagatactcttgggcaggtgcagtgaggtgcctgcttacaaggaatcccagagttctggcagcactagtgttagaacaccaaggaggttcctggctcctgttctcagagaaggaggatggtaaggtatccaggatttttagggggtaagggagatatatgggatgtgagagcagtgattgtagacagactgtcactgatcacttccattcctgttgctgtttacacagaatggactttaaaaaaattctgtgggatttttttttctttttttctttttttttgagacagggtctcactctgtcatccaggctggagtgcagtggtgtgatcacagctcactgcagcctcaacctctgaaggcccagatgatcttcctgcctcagctccccaagtagctgggactagaggcatgcgccaccacacccggctaatttttgtattttcagtagagacagggtttcgccatgttgcccagggtggtctcaaactcctgggctcaagtgatccacccgccttgcctcccaaagtgctgggattgcaggcatggcccactgtgctagcctaggatttttttttttttttaagaaagaattaagccttaaaaatctattgtgcaagaacccaacttttactcaggagctgagaaggaagaagcctcaaaccacccatttcctgctttttagagatagagtctagtggaaccatggctctaactgggtcaagtcctcctagctctgaagctaaggctgcagagctgtcctttggactgtatttcttcatgctttccagagttagagccttgatcacggaacatcattgtgtgcagaagaatactgtacctagtactaagttcttttcatctttgatttttctttagcttcatcagtccttccttcctaatctctaatcccctgaagcctaacacagttcctaatgtgttttgccttaacctcttttctcttcccacattggtacttctggttggggctctctttacttactgcttaggcacatagtcaccttctctggactccctgcttccatgctttctccttcagtccattccgcaaactcttgtgatcttccaaaattagctctgattagctttcacttcctgtagaagcaagaacaagctcctctgcttggtacttagtctgtgtccatgtgatccaaaattaccttcctattgcatttcctactcctttgctacgtgtattggacctctggccaaattacaaaagatgtactctttgttctctaaaaccacactaaagttttctgacttctttcacactctttatgataatcctctgcctgaaaggctattgccacctgtcaaaatcttcattattctttgcctctttcctgagcctcttgcttgaatgtgatttctttctccctgagacccataaggttcatcttatgggaccttaatttgtcttgcatggacatttgtgattctcattttctcaccattaaattaccttggagggtagggctgtggtttactcctgtctaaacccctgaagcctaacacagttcctggcacacaacaggtgttcaacagatattgtgctcattcaataaatatttactcgctttgtttaatggattccacccctgccttcctaggtgaccttggacaaattctcgaacccattcaccaaccacacaagtttgttgtgagtcataaatggataatgaatataaatgcgcattgaaaataaacataaaatgttacccacaaaaaaaaaaaaaaaaa

SEQ ID NO: 542 - protein, 149 aa, Homosapiens
MADPGPDPESESESVFPREVGLFADSYSEKSQFCFCGHVLTITQNFGSRLGVAARVWDAALSLCNYFESQNVDFRGKKVIELGAGTGIVGILAALQGAYGLVRETEDDVIEQELWRGMRGACGHALSMSTMTPWESIKGSSVRGGCYHH

SEQ ID NO: 543 - DNA, 1253 bp, Homosapiens
ggggggagggtgtttatcgcggctagagagatgtcgctgctgcggtcgctgcgcgtgtttctggtcgcgcggaccgggagctacccggctgggtctcttctgcgtcagtcgccccagccaaggcacacattttatgctgggccccgtctgtctgcctcggcctccagcaaggagctcctcatgaagctgcggcggaaaacaggctactcctttgtaaattgcaagaaagctctggagacttgtggcggggacctcaaacaggcagagatctggctccacaaggaggcccagaaggagggctggagcaaagctgccaagctccaagggaggaagaccaaagaaggcctgattgggctgttgcaggaaggaaacacaactgtattagtagaggtaaactgtgagacagattttgtttctagaaatttaaaatttcaactgttggtccagcaagtagcccttggaaccatgatgcattgtcagaccctaaaggatcaaccctctgcatacagtaaagtgcagtggctcacgcctgtaaacctagcactttgggaggctgaagcaggtggatcacttgagggtttcttgaattcctctgagctttctggacttccagctgggcctgacagagaaggctcactcaaggatcagttggctttagcaattggaaaactgggagaaaacatgattcttaaacgagctgcatgggtgaaggtgccatctgggttctacgttggctcttatgtccacggagcaatgcagagtccctcacttcacaagctggtgctggggaagtatggggccctggtcatctgtgagacgtctgaacagaaaacaaaccttgaagacgttggccgccgccttgggcagcatgtggtgggcatggcccccctctctgttggctccctggacgatgagcctgggggagaggcagagactaagatgctgtcccagccgtatttgctggatccctccattaccttggggcagtatgtgcagcctcagggggtgtcggtagtagactttgtgcggtttgaatgtggagaaggtgaagaggcagcagaaactgaataggttccagagacttttggcccaggaggaatatttacttttagctctggacatcattacaaaaaggaatatttcccaaacctcttcagaccgagaatgcatgggtaaaattattaaatagttgtataataaaaataattttttccttgtttgcacaaaaaaaaaaaaaaaaaaaaaaaaaaaaa

SEQ ID NO: 544 - protein, 346 aa, Homosapiens
MSLLRSLRVFLVARTGSYPAGSLLRQSPQPRHTFYAGPRLSASASSKELLMKLRRKTGYSFVNCKKALETCGGDLKQAEIWLHKEAQKEGWSKAAKLQGRKTKEGLIGLLQEGNTTVLVEVNCETDFVSRNLKFQLLVQQVALGTMMHCQTLKDQPSAYSKVQWLTPVNLALWEAEAGGSLEGFLNSSELSGLPAGPDREGSLKDQLALAIGKLGENMILKRAAWVKVPSGFYVGSYVHGAMQSPSLHKLVLGKYGALVICETSEQKTNLEDVGRRLGQHVVGMAPLSVGSLDDEPGGEAETKMLSQPYLLDPSITLGQYVQPQGVSVVDFVRFECGEGEEAAETE

SEQ ID NO: 545 - DNA, 2711 bp, Homosapiens
gatgtttcagtcctggaaagacaagcatcatgcctctgaccagtgccttcagggctgtggacaacgaccctgggatcattgtctggagaatagagaaaatggagctggcgctggtgcctgtgagcgcccacggcaacttctatgagggggactgctacgtcatcctctcgacccggagagtggccagtctcctatcccaggacatccacttctggatcgggaaggactcctcccaggatgagcaaagctgcgcagccatatataccacacagctggacgactacctgggaggcagccctgtgcagcaccgagaggtccagtaccatgagtcagacactttccgtggctacttcaagcagggcatcatctacaagcaggggggtgtcgcctctgggatgaagcacgtggagaccaatacctacgacgtgaagcggctgctacatgtgaaagggaaaagaaacatcagggctaccgaggtggaaatgagctgggacagtttcaaccgaggtgatgtcttcttgctggaccttgggaaagtcatcatccaatggaatggcccagagagcaacagtggggagcgcctgaaggctatgcttctggcaaaggatattcgagacagggagcgagggggccgtgctgaaataggagtgatcgagggagacaaggaggcagccagcccagagctgatgaaggtccttcaggacacccttggccgacgctccattatcaagcctacagtccctgatgagatcatagatcagaagcagaaatcaactatcatgttgtatcatatctcagattcagctgggcagctggcagtcacagaggtagcaacaaggcctctggtccaggacttactgaaccatgatgactgctacatcctggaccaaagtggaaccaaaatctacgtgtggaaaggaaaaggagccacaaaggctgaaaaacaggcagccatgtctaaagcgctgggcttcatcaagatgaagagctaccccagcagcaccaatgtggagaccgtcaacgatggtgctgagtcggccatgttcaagcagctgttccagaagtggtcagtaaaggaccagaccatgggcctggggaaaacgttcagcattggtaaaattgctaaagttttccaggataaatttgatgtgactctgctacacaccaagccagaggtagctgcccaggaaagaatggtcgatgatggcaacggaaaagttgaggtctggagaattgagaacctggagctggtccctgtggagtatcaatggtatggcttcttttatgggggagactgttatctggtcctctacacatacgaggtaaatgggaagccacatcacatcttgtacatctggcagggccgccacgcctcacaggatgagctggcagcctcagcataccaggcagtggaggtggatcggcagtttgatggggctgctgtgcaggttcgagtcaggatgggaacggagccacgccacttcatggccatcttcaaagggaagctagttatctttgagggtgggacttccaggaagggaaatgccgagcctgaccctccagtaagactcttccaaattcatggaaatgacaaatctaacaccaaagcagtggaagttccagcctttgcctcctccctaaactccaatgatgtctttctgctgcgaactcaggcagagcactacctgtggtatggcaaggggtctagtggggatgagcgggcaatggctaaggagctggccagccttctctgtgatggcagcgagaacactgtggccgagggccaggagccagccgagttctgggacctactgggagggaaaactccctatgccaatgataaaagacttcagcaggaaatcctagatgtccagtctcgtctctttgaatgttccaataagaccggccaattcgttgtcactgagatcacagacttcacccaggatgacctgaaccctactgacgtgatgctcctagatacctgggaccaggtgttcttgtggattggggctgaggccaatgccacggagaaggagagtgcccttgccacagcacagcagtacctgcacactcaccccagcggccgagatcccgacacaccaatcctgatcattaagcaggggtttgagcctcccatcttcacaggctggttcctagcctgggaccctaacatttggagtgcaggaaaaacatatgaacaattaaaagaagagctgggagatgctgctgctatcatgcgaatcactgctgacatgaagaatgcaaccctctccctgaattctaatgacagtgagccaaaatattaccctatagcagttctgttgaaaaaccagaatcaggagctgcctgaggatgtaaaccctgccaaaaaggagaattacctctctgaacaggactttgtgtctgtgtttggcatcacaagagggcaatttgcagctctgcctggctggaaacagctccaaatgaagaaagaaaaggggcttttctaaagcaagaaggcctatacctattgcaaggccacagaaaagagcagatagtgccaatatcaggaaataatttatccaccaatttctgcctgacattcagctacttaatttagatataatagagtctgcaaatcacggcatgttctccattttttctcatccttgcattccttgcttgttatatacctaaaatgttaaccatatagtttttgggttttgtggccc

SEQ ID NO: 546 - protein, 819 aa, Homosapiens
MPLTSAFRAVDNDPGIIVWRIEKMELALVPVSAHGNFYEGDCYVILSTRRVASLLSQDIHFWIGKDSSQDEQSCAAIYTTQLDDYLGGSPVQHREVQYHESDTFRGYFKQGIIYKQGGVASGMKHVETNTYDVKRLLHVKGKRNIRATEVEMSWDSFNRGDVFLLDLGKVIIQWNGPESNSGERLKAMLLAKDIRDRERGGRAEIGVIEGDKEAASPELMKVLQDTLGRRSIIKPTVPDEIIDQKQKSTIMLYHISDSAGQLAVTEVATRPLVQDLLNHDDCYILDQSGTKIYVWKGKGATKAEKQAAMSKALGFIKMKSYPSSTNVETVNDGAESAMFKQLFQKWSVKDQTMGLGKTFSIGKIAKVFQDKFDVTLLHTKPEVAAQERMVDDGNGKVEVWRIENLELVPVEYQWYGFFYGGDCYLVLYTYEVNGKPHHILYIWQGRHASQDELAASAYQAVEVDRQFDGAAVQVRVRMGTEPRHFMAIFKGKLVIFEGGTSRKGNAEPDPPVRLFQIHGNDKSNTKAVEVPAFASSLNSNDVFLLRTQAEHYLWYGKGSSGDERAMAKELASLLCDGSENTVAEGQEPAEFWDLLGGKTPYANDKRLQQEILDVQSRLFECSNKTGQFVVTEITDFTQDDLNPTDVMLLDTWDQVFLWIGAEANATEKESALATAQQYLHTHPSGRDPDTPILIIKQGFEPPIFTGWFLAWDPNIWSAGKTYEQLKEELGDAAAIMRITADMKNATLSLNSNDSEPKYYPIAVLLKNQNQELPEDVNPAKKENYLSEQDFVSVFGITRGQFAALPGWKQLQMKKEKGLF

SEQ ID NO: 547 - DNA, 4833 bp, Homosapiens
gccatttcctcctcttgttttcactccggattctccatgttggacccaaactgaggagcccggagctgccgctgggggatcggggccgggggcacccgggggagccgctgcccgggccgcccgccctttgtacaggccgcctcccttcccggtccggggaggaaacgagaggggggatgtgaacagctgtggaagtcggagtctcgggagccggagcgggcccccgcccaggccccccagcccagcccagcccgcgcgcccgcccgtcctcccgtccagccagcccgggcccgcgggattgttagatggaacacggctccatcatcacccaggcgcggagggaagacgccctggtgctcaccaagcaaggcctggtctccaagtcctctcctaagaagcctcgtggacgtaacatcttcaaggcccttttctgctgttttcgcgcccagcatgttggccagtcaagttcctccactgagctcgctgcgtataaggaggaagcaaacaccattgctaagtcggatctgctccagtgtctccagtaccagttctaccagatcccagggacctgcctgctcccagaggtgacagaggaagatcaaggaaggatctgtgtggtcattgacctcgatgaaacccttgtgcatagctcctttaagccaatcaacaatgctgacttcatagtgcctatagagattgaggggaccactcaccaggtgtatgtgctcaagaggccttatgtggatgagttcctgagacgcatgggggaactctttgaatgtgttctcttcactgccagcctggccaagtatgccgaccctgtgacagacctgctggaccggtgtggggtgttccgggcccgcctattccgtgagtcttgcgtgttccaccagggctgctacgtcaaggacctcagccgcctggggagggacctgagaaagaccctcatcctggacaactcgcctgcttcttacatattccaccccgagaatgcagtgcctgtgcagtcctggtttgatgacatggcagacactgagttgctgaacctgatcccaatctttgaggagctgagcggagcagaggacgtctacaccagccttggggcagctgcgggccccttagcctgccctgcttccaagcgacggccatcccagtaggggactttcccacactgtgcctttacgatcagcgtgacagagtagaagctggagtgcctcaccacacggcccggaaacagcgggaagtaactggaaagagctttaggacagcttagatgccgagtgggcgaatgccagaccaatgatacccagagctacctgccgccaacttgttgagatgtgtgtttgactgtgagagagtgtgtgtttgtgtgtgtgttttgccatgaactgtggccccagtgtatagtgtttcagtgggggagaagctgaaagaccaagactcttcccaagttagcttgtctcctctcctgtcaccctaagagccactgagttgtgtagggatgaaractattgaagactccattgccaaaccatggcctttcctcagtgttgtaaggcctatgccaaggataaaggaagggtatgcctttgggtactccaggcatacacctttctgaaatccttctccagccagctgctgcagacaaaagatcacatttctgggaagatgagaacttgtttccagaccagcatccagtggccatcaggtcttgtggcccaaaggctatgcttgcctccggctgagtgcctgggataggccttttctatgtctccccaaggctggggtgctgagcctgccttcctcaccacctagccatagtctcaaacctgtggggaaggaggttttctccctgcccgggaagaggacagataactgatttccgttcttttgactgtgttttaaaattctctttctaaacacagagtgttgggcctggtttgtttctgacaaagttacagtcctgggcctgtaatgaatgtcggcggcgctggggttgcagggaaaagacaaatcctcaaagcgtggacgtgtgtccccatggcttgtggatcagctaagctcgggatcatttccataagtctgcttttcagggattctctgctggtgctggtgcaaggacttctgttccaaaggctgggaaaaactaagctgtcccagcccctcccatttcttgggcagggctcttttcctgttgtgtcttcccccagggcctgtcctgtaccgagctctgtctgttccagcctacatccttcctgggtgttgcttttcctcttaagggcctcagaactcttgctcttcctggggtgagggggaatgagtgttcttgacatgtgacagcctaatgcgcatgctttctgcctctggtaacaggagtgagtgagcccctcagacctgcactctgggtgtctcctgcttacaaaggttcttaatagtgaatgctttaaaattaaagtcatcacgaaatggaagttttcccagggtggaaaataagaggaagtgctgctgtaattgggagcacaaggggcctcccaaaaaggagccccacctcagcatcactgccttaatcgtggcctccctggggtgggtggggttctctcctccctccctccctcctcctggggtgggagggcgctcctgttcccatctctgtgttccctggaggcaggtatcacaaagcatttgtgaattgctttaggtgcagggacaccacccactcaggactcttccccatcatcccttccattgccacaccctagatccagcctcaggaactaacaagttktgagaaaagcaggtggtagagcagcagcttcgtgctctcagcggtggctggctggcatttttctctagcgttgtggtgccaccttcccttcttgtcccaaggttataaggccttgtctttctctttggaatcataaagtggaacagagtccccagaactcatgtgghcatttccgacagcatcactccccggtgcctatggggtcccggtgtacctaaagggagaaggaccccatgtgctagccagaaatatactgtctcttgaaggaaagcaggagctcagactcttagagccagctgtggcttcggacccaaggcctgacctaggctgctatcctaatattggaggaggggcctctcttccaagccccaccctaagggttagcccttggacaaatcttgtgccgtctaggcccagccaggcttttctgactaaataagcaataagaggctctaagctgactgagttgcaaggaccctttccgccctcccttggatctccatgtttctccagatggcggaagagcatgtgccaccccctttcctaacagacttgtccaagtgcttggcgtgggacccatgaccaaagcccaggatggcttggtgggagtgtccctgctgcatctgcatgaagcccctgctttttaggcctcactcccatcagaaccctgcctgcccacctgcaactcccccccaacaatgccattcccacttgccccagagaagctactcggccaaacctagccagggtctgttcttgtggaccagagccagcctagtcattatttgctgtcgggtttccagtttcaccgtgtgttagggtgagggatgattgtaaaatttgctcctcaaaggaatcaggccagactcaattttgggagggcaagacagggaggaggccgcttcatcccagactctcttctagggcttcccaccatcagcccctcccacttgagactggtctttgggaggcaataggccaccatgcctggtcagcaccaattcaagccatgccaggaatctgcctacctgccaggttcagttcttttaaggtgcctcttcagggacacagtgtgtctctctgattgggcttctaaatcaaaagcctgatgttcgtgtccctctcatagggggagctttggacacaggaccagtttggaaaagggtcaggtaagggtttccactctgcacattgtagagggaacactctgtaggcccatgggtcccttactagagaggttgagtgaatttgccttcagttaacatgggaccttctgtttagcttcctcttgcttcccaaagattttaagcattttgtaaatgtataaactcacctctggtaacagtggcccagacgctgctttgtgctaaaagcatgggaaatgtaaaggcagtctttctctgggaaatggatgctattctattctgctgcccctacctgttcctgaggcctcatttagaaagaaaatcccctcagaaggctgtctggcacccagtgtcctagccaggccaagtatatgagaaaggtaagtccattttccccttcaggtcctcagtggattacttaaccactgctgtccctcggtccctttttcctaaacgggtttagttctgtcttttttctccttttttctaaatgctggtaaatatttacattcagccagggaagaggaggccagaggtcgggccagctgccccattcttttaacgttgtagggcctgcccatggagcggaccctcctctttgggcctcgtgagcttttttgcttatcatgttccatttcgtgccgctttcccccttcaagatgccatttggagggtaggggatctgcttcccactgtgactgggctatgggattctgactaccttgcttacagattcatggtttgataaatttgttgtattccaaaacttgaaatgcaggacgccattaagtgtctgtttatatttttggaatatttgtattacttacaattaattaataaaagtgggtttaaaaaacctttccaggaaaaaaaaaaaaaaaaaaaaaaaaaaaaaaaaaaaaa

SEQ ID NO: 548 - protein, 283 aa, Homosapiens
MEHGSIITQARREDALVLTKQGLVSKSSPKKPRGRNIFKALFCCFRAQHVGQSSSSTELAAYKEEANTIAKSDLLQCLQYQFYQIPGTCLLPEVTEEDQGRICVVIDLDETLVHSSFKPINNADFIVPIEIEGTTHQVYVLKRPYVDEFLRRMGELFECVLFTASLAKYADPVTDLLDRCGVFRARLFRESCVFHQGCYVKDLSRLGRDLRKTLILDNSPASYIFHPENAVPVQSWFDDMADTELLNLIPIFEELSGAEDVYTSLGAAAGPLACPASKRRPSQ

SEQ ID NO: 549 - DNA, 1182 bp, Homosapiens
cctgagccaggaggaagcagcggcgaggtctgcgggaggcatggcgggagctccggacgagcgccggcggggccccgcggcaggggagcagctgcagcagcaacacgtctcttgccaggtcttccccgagcgtctggcccaggggaatccccagcaagggttcttctccagcttcttcaccagcaaccagaagtgccagcttaggctcctgaagacgctggagacaaatccatatgtcaaacttctgcttgatgctatgaaacactcaggttgtgctgttaacaaagatagacacttttcttgcgaagactgtaatggaaatgtcagtggaggttttgatgcttcaacatctcagatagttttgtgccagaataatatccataatcaggcccatatgaacagagtggtcacacacgagcttattcatgcatttgatcattgtcgtgcccatgtcgactggttcaccaacatcagacatttggcgtgctcagaggttcgagctgctaaccttagtggagactgctcacttgtcaatgaaatattcaggttacattttggattaaaacaacaccaccagacttgtgtgcgagacagagccactctttctatcctggctgttaggaatatcagcaaagaagtagctaaaaaggctgttgatgaagtttttgaatcttgtttcaatgaccatgaaccttttggaaggatcccacataacaagacttatgcaagatatgctcacagagactttgaaaaccgtgatcggtattattcaaatatatgagcacaatgacatttttatattacagagcttccatcatcatgaagaaaaaaaaatttggttctcaagtgaacaaacatataaaatgtaaacaatccctacaatccagataaaacagagaagactgtgattctagcatattatcagaaaaagtaactatggcaaaaaatgaaactgctttaaactccaaggcagaaattgtatctttatagctaaccatttagtaaataaatacattacatttttgtattttagtcatttgtttttattacatgtgattattttaaaatttgattatgaaacctgtgaagtgtgctcttccatgatgttgataggtgaccactgttggtatttacattaaatgtaaagaaatgtgtactgaaaaaaaaaaaaaaaaaaaaaaa

SEQ ID NO: 550 - protein, 246 aa, Homosapiens
MAGAPDERRRGPAAGEQLQQQHVSCQVFPERLAQGNPQQGFFSSFFTSNQKCQLRLLKTLETNPYVKLLLDAMKHSGCAVNKDRHFSCEDCNGNVSGGFDASTSQIVLCQNNIHNQAHMNRVVTHELIHAFDHCRAHVDWFTNIRHLACSEVRAANLSGDCSLVNEIFRLHFGLKQHHQTCVRDRATLSILAVRNISKEVAKKAVDEVFESCFNDHEPFGRIPHNKTYARYAHRDFENRDRYYSNI

SEQ ID NO: 551 - DNA, 2085 bp, Homosapiens
cagcctcggagggtgagcgtcatggcggcttcttgccctctcccggtgaccccggacctgcccacgctgcgtgccaagttgcagggactgctgcagttcctgagggatgccctgtccatttccaatgcacataccgtggatttctacacagaatccgtgtgggaggagctggtcgacttgccaccggagacagtgctggctgcgctgaggaagtcagcgtcggagacggaggccctgccctcagagacgcgccccctagtggaagcagagtgggaagcaggtatgactgattttcccaaaatattttgtgaaacttctcagaagttggtgagtgtggaagcctttgctctggctgcgaaatactattctgtacaaaacttgggaatatgtactccttttgaacagttgcttgtagcccttcgaggaaatcaaaaccagagaattggtgaaaatcagaaggcagttgagtttatgaatatgaagaaatctcatgaagttcaggcaatgtcagagctgattagcagtattgctgactactatggaataaagcaggtgattgacttgggttccggtaaaggctacctaagctcttttttgtccttgaagtatggcttaaaagtttatggaattgattcttcaaataccaatactcatggagctgaggagagaaacagaaaattgaagaaacattggaaactctgtcatgctcagtcaagattagatgtcaatggactagcattaaaaatggcaaaagaaaggaaagtgaaaaataaagttaaaaataaagctgatactgaggaagtgtttaacaacagtcctacaaatcaagaaaagatgcctacctcagctattttgcctgatttttctggctctgtaatttctaatatcagaaaccaaatggaaacccttcattctcagccacatcaagaagaaaatttgtgttttgaaaattccttttctcttataaaccttttgcctattaatgctgtagagcctacttcttcacagcaaatacccaacagagaaacatctgaagccaataaagagagaagaaaaatgacatcaaagtcaagtgaatcaaatatatattcacctttaacctcttttatcactgctgattcagaactccatgacattattaaagatttggaggattgtttgatggtgggtctccacacttgtggtgatctggctccaaatactttgcgaatatttacctccaactctgaaatcaagggagtttgcagtgtgggttgttgctaccacctcttatctgaagaatttgaaaaccagcataaagaacgtactcaggaaaagtggggatttccaatgtgccactatttaaaggaagagagatggtgctgtggtcgtaatgccagaatgtcagcatgtttggcattggagcgggttgcagctggccaagggctgcctactgaatcactcttctatcgtgctgttcttcaggatattattaaagattgttatggcatcaccaaatgtgatcggcatgttggtaaaatttattccaaatgttcttcttttctggattatgtcagacggtctctaaagaagcttggattagatgagtccaagctgccagaaaaaattataatgaactactacgagaagtataagcctcgaatgaatgagctggaagcttttaatatgttgaaagttgtactggctccctgtatagagactttgattcttctggatcgactttgttacctgaaagagcaggaagatattgcatggtctgctcttgtgaagttgtttgatcccgtgaaatctcccagatgttatgctgttattgccctgaagaagcagcagtgatttccattgaagcaaattattagatgtatttctctatgagacctgttgctgagattgcttttctaaacatatatgtcctgttatacaaaaatttttaaatgactgttatgtattttaaataataaaataatggctaacaacaaaaaaaaaaaaaaaaaaaaaaaaaaaaaaaaaaaaaaaaaaaaaaaaaaaaaaaaaaaaaaaaaaaaaaaaaaaaaaaaaaaaaaaaaaaaaaaaaaaaaaaaaaaaaaa

SEQ ID NO: 552 - protein, 603 aa, Homosapiens
MAASCPLPVTPDLPTLRAKLQGLLQFLRDALSISNAHTVDFYTESVWEELVDLPPETVLAALRKSASETEALPSETRPLVEAEWEAGMTDFPKIFCETSQKLVSVEAFALAAKYYSVQNLGICTPFEQLLVALRGNQNQRIGENQKAVEFMNMKKSHEVQAMSELISSIADYYGIKQVIDLGSGKGYLSSFLSLKYGLKVYGIDSSNTNTHGAEERNRKLKKHWKLCHAQSRLDVNGLALKMAKERKVKNKVKNKADTEEVFNNSPTNQEKMPTSAILPDFSGSVISNIRNQMETLHSQPHQEENLCFENSFSLINLLPINAVEPTSSQQIPNRETSEANKERRKMTSKSSESNIYSPLTSFITADSELHDIIKDLEDCLMVGLHTCGDLAPNTLRIFTSNSEIKGVCSVGCCYHLLSEEFENQHKERTQEKWGFPMCHYLKEERWCCGRNARMSACLALERVAAGQGLPTESLFYRAVLQDIIKDCYGITKCDRHVGKIYSKCSSFLDYVRRSLKKLGLDESKLPEKIIMNYYEKYKPRMNELEAFNMLKVVLAPCIETLILLDRLCYLKEQEDIAWSALVKLFDPVKSPRCYAVIALKKQQ

SEQ ID NO: 553 - DNA, 4855 bp, Homosapiens
ccagagcccggcttggtccggtccctctgcccccatcccgcacccttccacctcctccgagtcccactcctcacctaggacgccccaaactgccatgggttagggtggggatcgcgacccgcgcgaaagaccagccctgcgcttccgccgggggacgcggagcccaaacgccgctcaccgcttgcgggcgccgggcatggggagtgtggtgtgagcccgcacccggggaggacgcaggagctgcggagacgggcgcgaggaggaggagaggagtcgtggattggaaggacccgagggagggagggtggggaagcgagggaaaagtgaagctgggaggagaaggcggcggaaggtggagattgatgcttctgttttttgttgccgctgctgccctcgcgctgggagccgagccggagggaaggcggtggagagatgattgcagagttggtgagcagcgctctggggctcgccttgtatctcaacaccctgagtgcggatttctgctatgatgacagccgtgctatcaagactaatcaggaccttctcccagaaactccatggacgcacattttctacaatgatttttgggggactcttctaacccacagtggcagccacaagtcctaccggccactctgcactctttcttttcgcctgaaccatgccattggagggttgaatccctggagctaccatcttgtcaatgtcctgttgcatgcagcagtcactggtctcttcacaagcttctccaagatcctccttggtgatggatactggacattcatggctggcttgatgtttgcttctcaccccattcacacggaggcagtggcaggaatcgtgggacgagccgatgtcggggccagtctcttctttctcctctccttgctctgctacattaaacactgttctacaagaggctactcagccagaacctggggctggttcctggggtcaggactgtgcgcaggatgcagcatgttgtggaaggaacaaggagtgactgttctcgcagtttcagcagtttatgatgtctttgtctttcacaggctgaaaataaaacagatattacctaccatttacaaaaggaagaacttgtcgcttttcctaagcattagtttgttaattttctggggttcctcccttttgggtgcccggttatactggatgggaaacaaaccaccaagcttttccaactcggacaaccccgctgctgattcggacagcctcctcacccgcactctcaccttcttctacttgccaaccaagaacctctggctgttgctatgtccagataccctcagttttgattggtcaatggatgctgtgcctctgctcaaaacagtttgtgactggagaaacctacacactgtggccttctatactggactccttctccttgcctactatggtttgaagagcccgagcgtagacagagaatgcaatgggaaaactgtaacaaatggcaagcagaatgcaaatggacatagctgcctttcagatgtggagtaccagaactcagagactaagtccagctttgcatccaaagtagaaaatggcattaaaaacgatgtatcacagagaacccagcttccttctacggagaacattgttgttctgtctttatctttgttaatcataccctttgttcctgccacgaacctgtttttctatgtcggctttgtaattgcagagcgagtattatatattcctagtatgggcttctgcctactgattacagtgggtgctagagccctttatgtcaaagtccaaaagcggttcctcaagagcttgattttttatgctacagctacactaattgttttttatggactcaagactgcgatcaggaatggagactggcagaatgaggaaatgctttatagatcagggataaaagtaaacccagctaaagcatggggtaaccttggaaatgttctgaagagtcagagcaaaatttctgaagctgaaagcgcctatagaaatgctttgtactaccgcagcaacatggctgacatgctttataatttagggctacttctccaggagaacagcaggtttgcagaagcactacattattataaattggccattgggagcaggcctaccctggcttctgcatatttaaataccggtattattctaatgaaccaaggaaggacggaagaagcccgacggacattcttaaagtgttcggagatcccagatgaaaacctaaaggaccctcatgcacacaagagctctgttaccagttgtttgtacaacctaggaaagctgtatcatgagcagggacactatgaggaagcccttagtgtatacaaggaagcaattcagaaaatgccaaggcagtttgccccacagagcttgtacaacatgatgggtgaagcatatatgcgtttaagcaaactccccgaagcagagcattggtatatggaatcactgagatccaagactgaccacatccctgctcatctcacctatgggaagctgctagctctaacaggtcgtaagagtgaggctgaaaagctcttcttgaaggctattgagctggatcccaccaaaggaaactgttacatgcattatggtcagtttcttctggaagaagctcgtctcatagaagcagctgagatggcaaaaaaagcagctgaactagacagcacagagtttgatgttgtcttcaatgctgcccacatgctcagacaggctagcctcaatgaagcagctgagaagtattatgatctggcagccaggctgaggcctaattatccggctgctttgatgaacctgggagccattctgcacctcaatggcagactccagaaggccgaggccaactacctgcgggccctgcagctcaagccagacgatgtcatcacacagtccaatctccgcaaactgtggaacatcatggaaaaacaaggcttaaagacttctaagacctgacacaggaggcagaagcccatcctcctccatttttaaaagctggcttccttagcagacagaacttcccagcagtgctatgacaagagctggtgttagacttcaagaccagggcagaggtcattgaggtcactaccgcttctggaagaatccactttgctgtaggcacagctgttaacaccaaaaaggggaaagccggaaacctcctggaggatgtcattgttacccatagactgtaaaccagagcacttaaaacagaaccttttggcattcttaaaaagggaggggtgggtgtgtaagtcacagattttgttcattttctgaaagctaatttcaaaattatgttgttccttaaacactgtgagaggaagtcagagtgtccattcaggcatggcaaacaattagggttaagtgttacgagggagtgataaacacgtagtgtgagtcccagtgagccgccggttgtcctaacgctgctgtcttccctgtttgggacagcctgcttatcaatttctgaagcttagaacactttttttaatactgtgtcaagatctgtcagaatctgctatgtttcttgaccagtgcacataatgttttatgatttggatgtcagaggcttcattcttttggacatcatttgctttttatgttctgaaaaggatatggagagtagagctaaccatacttcacactcgagttgtatgagggactggggaggccttatatgtgtcaggcaggcattttttaaattttaatatcgtcaatattttcccccaaactgcccagtagaattcattgtattaattcttttgaaattacctttgaaaatagctattcctggagaatgtgcaagcttacataaggataaaggacaggggaggagtttgtaagccttgcagttccaataactaaccaacaggttattagacaaaagggaaggtgttttgtgcttctcagatgttgctggtttaggagtgtgtgatgatgcttgccagtgattttgtgttttggaaagggtaggtatcgaatgttaatcactttctaatgggtacctaaacagcaatgctgataaatgttcaaggaattattttcatcttagtttgttcttctcaaaaggcatcaaaaacaacttatttgaagctgcaatagagtgtagcattagcctgcatgtttctaggtcttctgccaagtgcttttctcagttgaaaactatttttcactagcaaaattggtattttatttcattacctgttagtaactacttcaatgatcatttcacaagaaaaagactataaattaagtagagaacaacatttttattgaacatttttggcttgcaatcaaactttgccactaaaaattaacttcataaaacactagtccgttatcaacttcttcacagagaaagtagctatactataccctacatatttatttatttattattctactatagcagaataacaaaacttgatgcattaagccagttctttgcaactgaaaattacctgtttctccttccctttcacactccatgtatatatgatcagcctctccattaaaaagaagctggacatgcaaatacatcatattatgttttctccatattttatgtttttctatgtatctgaatacagtgggataaataattgaaagtagtgttcctatggcattagtgtttttgtgagaagggtaaatgtagtgagaaaggttttttcatggcattaataagaaagcccttctgtaatatatatattattttgtaaacatttcactgaagggccaaaagttaaattataactaaatcactgtgttttcagaatgatatttaacaacaaacccgtggtcaaaccaaaatagtgggttgaagtgtattattcatcttttagtgcattggcaaaaaaaaaaaaaaaaa

SEQ ID NO: 554 - protein, 836 aa, Homosapiens
MIAELVSSALGLALYLNTLSADFCYDDSRAIKTNQDLLPETPWTHIFYNDFWGTLLTHSGSHKSYRPLCTLSFRLNHAIGGLNPWSYHLVNVLLHAAVTGLFTSFSKILLGDGYWTFMAGLMFASHPIHTEAVAGIVGRADVGASLFFLLSLLCYIKHCSTRGYSARTWGWFLGSGLCAGCSMLWKEQGVTVLAVSAVYDVFVFHRLKIKQILPTIYKRKNLSLFLSISLLIFWGSSLLGARLYWMGNKPPSFSNSDNPAADSDSLLTRTLTFFYLPTKNLWLLLCPDTLSFDWSMDAVPLLKTVCDWRNLHTVAFYTGLLLLAYYGLKSPSVDRECNGKTVTNGKQNANGHSCLSDVEYQNSETKSSFASKVENGIKNDVSQRTQLPSTENIVVLSLSLLIIPFVPATNLFFYVGFVIAERVLYIPSMGFCLLITVGARALYVKVQKRFLKSLIFYATATLIVFYGLKTAIRNGDWQNEEMLYRSGIKVNPAKAWGNLGNVLKSQSKISEAESAYRNALYYRSNMADMLYNLGLLLQENSRFAEALHYYKLAIGSRPTLASAYLNTGIILMNQGRTEEARRTFLKCSEIPDENLKDPHAHKSSVTSCLYNLGKLYHEQGHYEEALSVYKEAIQKMPRQFAPQSLYNMMGEAYMRLSKLPEAEHWYMESLRSKTDHIPAHLTYGKLLALTGRKSEAEKLFLKAIELDPTKGNCYMHYGQFLLEEARLIEAAEMAKKAAELDSTEFDVVFNAAHMLRQASLNEAAEKYYDLAARLRPNYPAALMNLGAILHLNGRLQKAEANYLRALQLKPDDVITQSNLRKLWNIMEKQGLKTSKT

SEQ ID NO: 555 - DNA, 975 bp, Homosapiens
atggaggtcttagggttctcgaatagtaagatggatgtcagagccaaacgtcaacttgaaatctggatggaaatggctccctccaagcccgaacctcaggggaaggctcagcagtcacagcccaccagtgtcctctcagctgccaacgctgctcagagagggaagtgctgctgctgccgggaggggcacagccctgaagattacggaagacagtgggcagagaatgtggaaaatcacccagaggttgctgctcacacttcatgtcttcagagcatcacccctcattttatagctggagagatggggtgcacagccaaggaaagccaggaacaggttccggcttccatcactcagatactcaggaatccctggttctcgaggctggacagtccaagatcaaggtgcctgcatctggcgtctagtgtggaccctattcctggtttgcagttcttcattgttattgtctcagatcaccaaaaagtggacagggaggaggagtggaagcaaggaaaaataaggaaagaaatacactggatcccattgtttacaatgtggtcttggctccagtgtgttgaggaccgatctatagcaggaattcccaaacttgaacatggtgactcgcaccagactgagtcactcctggatgttctggtgggagggttttggggagtcccccacacagccccacctcgcctccaagaggctggaggccccacaggtgggtgcggtgttggtggccagccccttggtggccgtggccagtgggtgggcgaggagactggtccagttggtggacctcatgcctggtgggtgccgcccacggcaccgggtacttccttggtccttttggtgctgttggcacagcctttccagagcagcgaatggatgccagtctcctcccacacccctccaggaacgcagaccaacacagctgctctattaaatgtgtgcacttcttattctgagtatgtctga

SEQ ID NO: 556 - protein, 324 aa, Homosapiens
MEVLGFSNSKMDVRAKRQLEIWMEMAPSKPEPQGKAQQSQPTSVLSAANAAQRGKCCCCREGHSPEDYGRQWAENVENHPEVAAHTSCLQSITPHFIAGEMGCTAKESQEQVPASITQILRNPWFSRLDSPRSRCLHLASSVDPIPGLQFFIVIVSDHQKVDREEEWKQGKIRKEIHWIPLFTMWSWLQCVEDRSIAGIPKLEHGDSHQTESLLDVLVGGFWGVPHTAPPRLQEAGGPTGGCGVGGQPLGGRGQWVGEETGPVGGPHAWWVPPTAPGTSLVLLVLLAQPFQSSEWMPVSSHTPPGTQTNTAALLNVCTSYSEYV

SEQ ID NO: 557 - DNA, 1767 bp, Homosapiens
gcgcgccgctttctgttgccgggcgcaatggcggatacgctggagtcctcgctggaggacccactgcggagctttgtgcgagttttggagaagcgggatggtacagtgctacgactacagcagtatagctccggtggcgtgggttgcgttgtgtgggacgctgccattgtcctttctaaatacctggaaacgcccgagttttctggcgacggggcccacgcgctgagccggcggtcggtgctggagctgggttcgggcaccggggccgtggggctcatggctgctaccctcggggctgatgttgtagtcaccgatcttgaggaattgcaagacttgctgaagatgaatattaatatgaacaagcatcttgtcactggttctgttcaagccaaggggggaagaaatagaaggctttccttctccacccgacttcatactgatggccgactgcatatactatgaagagtctttggagccattgctgaaaactctaaaagatatcagcggatttgaaacttgtattatatgttgttatgaacaacgaacaatggggaaaaattcagaaattgagaaaaaatattttgagctccttcagctagattttgactttgaaaaaattcctttggaaaaacgtgatgaagagtatcgaagtgaagatattcatattatatacatcagaaagaaaaaatcgaaatttccatcgtgaagcctttaatcatcttacccaaggctctaacaacctgggtaaactaaagatgtgaatagagcatgtgaatacagcatgggaagattgtgttcacagatttttttttccggcacgtccttagagatccgatgtatagatgatgaccaccaggggctgtctgcaatacgaaaaattcctgcttgcctgcctgcctgccaatggccctgaatccagcttaggttacttagttcagcatcaagttcttcttaaatgttgggaatcagttattcaaataaaaattggtattgaggcgaggctgaaatctgccaaaaacagccaacatgatttgactggaccttttacaggaagctagagataaatttctgaagagaactatctgctattatataataatgttttaaattcaaactagtaaattttagtttgtcttcagagtttaaaaggttttcattttgtacataattatacaatatttatcatttgtattttccacttcatttcttttaaaatatctttaatactgaaatgttcttttaattttaaaaagaactgagatattgtcttgtatacttatattggccaaagttttcttttcctccaccatacatgtctatgtgatttaatcagtaaattgtactgtaatgagttgctaagaagacaaatcagaagattggaggaacaaaagatatctttacagatttttcatttgagcatggagtgagaatagaaagaccagtttcaggcttatgcacttacgtggctcatgcactttatgtatatgttccaggaaaatctggcttaaaaatactggtattgtttacatgaagcagtgaaaggtttttgaataactacaaatgtagttctatatgtatataccaaatgaatttctgttctgtgtctctctgttttatgttatgaagccattcgctcatatacaataatctgtcaaggactttaatcatacttgttccaaagagtagtaaccggatggaattctggtatttacaggcattggtgctagatggtacattttatgtgttaaaataaacattgtttttgag

SEQ ID NO: 558 - protein, 144 aa, Homosapiens
MADTLESSLEDPLRSFVRVLEKRDGTVLRLQQYSSGGVGCVVWDAAIVLSKYLETPEFSGDGAHALSRRSVLELGSGTGAVGLMAATLGADVVVTDLEELQDLLKMNINMNKHLVTGSVQAKGGRNRRLSFSTRLHTDGRLHIL

SEQ ID NO: 559 - DNA, 3999 bp, Homosapiens
atgcagcaggcgccgcagccttacgagttcttcagcgaggagaacagtccgaaatggcggggactgttggtctcggccctgcggaaggttcaggttcaagtgcatcccactctctcagctaatgaagagtctctctattatattgaagagctgatttttcagctgcttaataaattatgcatggcccagccaaggactgttcaagatgtagaggagcgagttcagaagacctttcctcacccaattgataaatgggccattgctgatgcacaatctgctatagaaaaacgaaaacgaagaaatcctcttttactgcctgtggacaaaatccatccttcgttgaaggaagtattagggtacaaagtggactaccatgtatccctatatattgtggctgtactagagtatatctcagctgatattttaaaattggctggtaattatgtttttaatatccggcattatgaaatatctcagcaggacattaaagtgtcaatgtgtgcggataaggttttgatggacatgtttgatcaggatgacataggtttggtttctctctgtgaagatgaaccctgttcttctggtgaattaaactactatgatcttgtcagaactgaaatcgcagaagaaagacagtatctacgggaattaaatatgatcataaaagtgtttcgagaagcctttctttctgatagaaagctgtttaaaccttctgtatacgaaaagatttttagtaacatttcagatatacatgaattgactgtgaaacttttaggtttgattgaagacacagttgaaatgactgatgaaagcagtcctcatcccttagctggcagctgttttgaagatttggcagaagagcaagcatttgatccttatgaaacattatcacaggacattctttcaccagagtttcatgaacatttcaataaattgatggccagacctgcagttgctctacactttcagtccattgctgatggttttaaagaggcagttcgttatgtccttccacgtcttatgctggtgccagtgtatcactgttggcactactttgagttactaaagcaattgaaagcatgtagtgaagaacaagaagacagagaatgtttgaaccaagctattactgctctcatgaatcaccaaggtagcatggaccgaatttacaagcagtattcacctagacgtcgacctggagatcctgtttgccctttttatagtcaccaattaagaagcaaacacctggctatcaaaaaaatgaatgaaattcagaaaaatatcgatggatgggaaggcaaagatattggacagtgttgtaatgaattcattatggagggaccattgacaagaatcggtgccaaacatgaacggcatatttttctgtttgatggcttaatgatcagttgtaaacctaatcatggccagactcggcttccaggttacactagtgcagaatacaggttaaaagaaaaatttgtcatgaggaaaatacaaatttgtgataaagaagatacttgtgagcacaagcatgcatttgaattagtatccaaagatgagaacagcataatatttgctgctaagtctgctgaagaaaaaaacaactggatggcagcccttatttctcttcattatcgtagtactctagatcgaatgttagattcagtattattgaaagaagaaaatgagcaaccactgagattaccaagtcctgaagtatatcgttttgtagtaaaagactctgaggaaaacattgtttttgaagacaacttgcaaagtagaagtggcatccccattattaaaggaggaactgtagtgaaattaattgaaaggttaacatatcatatgtatgcagatcccaattttgttcgtacttttcttaccacatatcgttcattttgtaaaccacaggaattgctgagcttactgattgaacggtttgaaattccagagccagaacctactgacgcagacaaattggcaatagagaaaggcgagcagccaatcagtgcagaccttaaaagatttcgcaaggaatatgtccaaccagtacaacttagggtacttaatgtattccgccattgggttgaccatcattattatgactttgaaagagacctggaattgctggaaagactagaatccttcatttcaagtgtaagagggaaagctatgaaaaaatgggtagagtcaattgctaagatcatcaggaggaagaagcaagctcaggcaaatggagtaagccataatattacctttgaaagtccacctccaccaattgaatggcatatcagcaaaccaggacagtttgaaacatttgatctcatgacacttgatccaatagaaattgcacgtcagctgacacttttggagtctgatctttacaggaaagttcaaccgtctgaacttgtagggagtgtgtggaccaaagaagataaagaaataaattctccaaatttattaaaaatgattcgccataccacaaatctcaccctctggtttgaaaaatgcattgtggaagcagaaaattttgaagaacgggtggcagtactaagtagaattatagaaattctgcaagtttttcaagatttgaataatttcaatggcgtattggagatagtcagtgcagtaaattcagtgtcagtatacagactagaccatacctttgaggcactgcaggaaaggaaaaggaaaattttggacgaagctgtggaattaagtcaagatcactttaaaaaatacctagtaaaacttaagtcaatcaatccaccttgtgtgcctttttttggaatatatttaacaaatattctgaagaccgaagaagggaataatgattttttaaaaagaaagggaaaagatttaatcaatttcagtaagaggaggaaagtagctgaaattactggagaaattcagcagtatcagaatcagccttactgtttacggatagaaccagatatgaggagattctttgaaaaccttaaccccatgggaagtgcatctgaaaaagagtttacagattatttgttcaacaagtcactagaaattgaacctcgaaactgcaaacagccacctcgatttcctaggaaatcaactttttccttaaaatctcctggaataaggcctaacacaggccgacatggctctacctcaggtactttacgaggtcacccaacaccattagaaagagaaccatgtaaaataagctttagtcggattgctgaaactgagctggaatcaacagtgtcagcaccaacctctccaaatacaccatctactccaccagtatctgcttcttcagaccttagtgtatttttagatgtggatctcaacagctcctgtggcagcaatagcatctttgctccagtgcttttgccacattcaaagtctttctttagttcatgtggtagtttacataaactaagtgaagagcccctgattcctcctcctcttcctcctcgaaaaaagtttgatcatgatgcttcaaattccaagggaaatatgaaatctgatgatgatcctcctgctattccaccgagacagcctcctcctccaaaggtaaaacccagagttcctgttcctactggtgcatttgatgggcctctgcatagtccacctccgccaccaccaagagatcctcttcctgatacccctccaccagttccccttcggcctccagaacactttataaactgtccatttaatcttcagccacctccactggggcatcttcacagagattcagactggctcagagacattagtacgtgtccaaattcgccaagcactcctcctagcacaccctctccaagggtaccgcgtcgatgctatgtgctcagttctagtcagaataatcttgctcatcctccagctccccctgttccaccaaggcagaattcaagccctcatctgccaaaactgccaccaaagacttacaaacgggagctttcgcaccccccattgtacagactgcctttgctagaaaatgcagaaactccccaatga

SEQ ID NO: 560 - protein, 1332 aa, Homosapiens
MQQAPQPYEFFSEENSPKWRGLLVSALRKVQVQVHPTLSANEESLYYIEELIFQLLNKLCMAQPRTVQDVEERVQKTFPHPIDKWAIADAQSAIEKRKRRNPLLLPVDKIHPSLKEVLGYKVDYHVSLYIVAVLEYISADILKLAGNYVFNIRHYEISQQDIKVSMCADKVLMDMFDQDDIGLVSLCEDEPCSSGELNYYDLVRTEIAEERQYLRELNMIIKVFREAFLSDRKLFKPSVYEKIFSNISDIHELTVKLLGLIEDTVEMTDESSPHPLAGSCFEDLAEEQAFDPYETLSQDILSPEFHEHFNKLMARPAVALHFQSIADGFKEAVRYVLPRLMLVPVYHCWHYFELLKQLKACSEEQEDRECLNQAITALMNHQGSMDRIYKQYSPRRRPGDPVCPFYSHQLRSKHLAIKKMNEIQKNIDGWEGKDIGQCCNEFIMEGPLTRIGAKHERHIFLFDGLMISCKPNHGQTRLPGYTSAEYRLKEKFVMRKIQICDKEDTCEHKHAFELVSKDENSIIFAAKSAEEKNNWMAALISLHYRSTLDRMLDSVLLKEENEQPLRLPSPEVYRFVVKDSEENIVFEDNLQSRSGIPIIKGGTVVKLIERLTYHMYADPNFVRTFLTTYRSFCKPQELLSLLIERFEIPEPEPTDADKLAIEKGEQPISADLKRFRKEYVQPVQLRVLNVFRHWVDHHYYDFERDLELLERLESFISSVRGKAMKKWVESIAKIIRRKKQAQANGVSHNITFESPPPPIEWHISKPGQFETFDLMTLDPIEIARQLTLLESDLYRKVQPSELVGSVWTKEDKEINSPNLLKMIRHTTNLTLWFEKCIVEAENFEERVAVLSRIIEILQVFQDLNNFNGVLEIVSAVNSVSVYRLDHTFEALQERKRKILDEAVELSQDHFKKYLVKLKSINPPCVPFFGIYLTNILKTEEGNNDFLKRKGKDLINFSKRRKVAEITGEIQQYQNQPYCLRIEPDMRRFFENLNPMGSASEKEFTDYLFNKSLEIEPRNCKQPPRFPRKSTFSLKSPGIRPNTGRHGSTSGTLRGHPTPLEREPCKISFSRIAETELESTVSAPTSPNTPSTPPVSASSDLSVFLDVDLNSSCGSNSIFAPVLLPHSKSFFSSCGSLHKLSEEPLIPPPLPPRKKFDHDASNSKGNMKSDDDPPAIPPRQPPPPKVKPRVPVPTGAFDGPLHSPPPPPPRDPLPDTPPPVPLRPPEHFINCPFNLQPPPLGHLHRDSDWLRDISTCPNSPSTPPSTPSPRVPRRCYVLSSSQNNLAHPPAPPVPPRQNSSPHLPKLPPKTYKRELSHPPLYRLPLLENAETPQ

SEQ ID NO: 561 - DNA, 2064 bp, Homosapiens
gctaaagagcgcgggtcctcggccgtggagggtcaagtggcttcttctgagcgctgagggaggggagcgtgcgtaggggatggtgccagcgctgcgttatttggttggtgcctgcggacgggcccgcgggcttttcgccggtggctcccctggggcgtgcgggttcgcgtctgggaggccaagaccgctgtgtggaggtagccgcagcgccagcaccagctcatttgatatagtcatcgttggtggcggaattgtggggcttgcctctgccagagcactcatcctgcgacatccatcactttctattggtgttctggaaaaggagaaagatttagctgttcaccagactggacataacagtggtgtcatacatagtggaatttattataaacctgagtctctgaaagccaaattatgtgtacaaggtgcagccctcctctatgagtactgtcagcaaaaggggatttcctacaagcagtgtggcaagcttatagtagctgttgaacaagaagaaattcccagacttcaggccctatatgagaaaggcctccagaatggtgtcccgggcctgaggctgatccagcaggaggatataaaaaagaaggagccatattgtaggggtctaatggctattgattgtccacatactggcattgtggactatcggcaggtggctttgtcatttgcccaggatttccaagaagcaggtggctctgtcttgaccaattttgaagtaaaaggtattgaaatggctaaagaaagtccttcaagaagtatagatggaatgcaatatccaattgttataaagaatacaaagggagaggaaattcgatgtcagtatgttgtgacatgtgcaggactttactcagaccgtatttcagagttgagtggctgcactcctgatcctcgaattgtaccattccggggagattacctgcttttgaagccagaaaaatgttatcttgtaaaaggaaatatttatccggtcccagatagccggtttcctttcctaggagttcacttcacaccaaggatggatggcagtatttggctagggcctaatgcagttcttgcctttaaacgagagggttacagaccctttgacttcagtgccacagatgttatggatataattatcaatagtggcttgattaaactggcatcccagaatttttcctatggagttactgaaatgtataaagcatgttttcttggtgcaacagtgaagtatcttcaaaaattcatccctgaaattactatcagtgatatacttaggggcccagctggagtaagagcccaggccctggatagagatggaaatctggtagaagattttgtatttgatgcaggagttggggatattggaaatcgcattcttcatgtgagaaatgcaccttctcctgctgctacttcttccattgcaatttctggaatgattgcagatgaagtacaacaaagatttgaattataaataatgaaaggagctaggtatgcactgtaatcttcatgtcagcaacaagaatgtactaattgcattctttaatttaaaaaatggtttttaaactttcgtttttaggtcaaagataaccactgcattgttaaaatgatgtaacatagaaataataattttctacaaaaattagccaggcatggtggcgcatgcctgtaatctcagctactcaggaggctgaggcaggagaatcaattgaaccgagcagacggaggtgagctgagagctgagattgcaccactgcactccagcctgggtgacagagcaagaaaataataataataataattttcaaaatgttaggctgggggccgtggccagcactttgggaagccaaggcaggtagattgtagcccaggagtttgagaacagcctgggcaacatggcaaaaccctgtttctacacaaagttagctgggtctggtgcctctgtggttccagctcctcagtaggctgaggtgagaggatcacttgagcccaggaggtctaggctgcagtgagcttatgttcatgactctgtattccaggctggatgatagagcaagatcttgtctc

SEQ ID NO: 562 - protein, 463 aa, Homosapiens
MVPALRYLVGACGRARGLFAGGSPGACGFASGRPRPLCGGSRSASTSSFDIVIVGGGIVGLASARALILRHPSLSIGVLEKEKDLAVHQTGHNSGVIHSGIYYKPESLKAKLCVQGAALLYEYCQQKGISYKQCGKLIVAVEQEEIPRLQALYEKGLQNGVPGLRLIQQEDIKKKEPYCRGLMAIDCPHTGIVDYRQVALSFAQDFQEAGGSVLTNFEVKGIEMAKESPSRSIDGMQYPIVIKNTKGEEIRCQYVVTCAGLYSDRISELSGCTPDPRIVPFRGDYLLLKPEKCYLVKGNIYPVPDSRFPFLGVHFTPRMDGSIWLGPNAVLAFKREGYRPFDFSATDVMDIIINSGLIKLASQNFSYGVTEMYKACFLGATVKYLQKFIPEITISDILRGPAGVRAQALDRDGNLVEDFVFDAGVGDIGNRILHVRNAPSPAATSSIAISGMIADEVQQRFEL

SEQ ID NO: 563 - DNA, 1567 bp, Homosapiens
ggccagggtgccgcagacgcggggacgctggctcgctccctccctccctccctccgacgctgtgagtagagaagctaggccccgagccgggcgggactagggtggtggttgtgttctgccctcgcccgtcgccaacgctgggctgactgaaaacctggccctttgggtcgcgcgtcttcgactttcaccgccatgcggacatggggccgtgggagaaactctgggcgggattacggtgaaaattcttgtttgggcgggccctgcggcttctttcttccggctcgccctcggccccgcccccgccccgcccccgctccagctccagccgggtcctcgctcggccccgcacgcggcccgcggtagacggagggcctgggcacccaccgtctccatcccggccccagcccagtcgagcgtccactagaagggcgctccctgtccggccctaatcctcgctcctcacggaggctctttgtcacagcgaagactgacagcccgcagtcttctggacttcttttatggggctcctggcggtgctattcattcagtcattgattcgtcttgtaaatatggagcgcctgctctgtactcgacccggcactgggtaccggaagaaccagacagctcggtttttgccaccatttataagtctgtgtccttttcttgagtactgaaccgagatacagttttaaatgtgctgtgcggtctctgagcagcgactcacctgtgcagatcaaatgatgccgtttggaaaaatttcccagcagttgtgtggcgtaaagaaactcccatggtcatgtgactccagatacttctggggctggttgaatgcagtgtttaataaggtggattatgatcgcatcagggatgttggccctgacagggcggcatccgagtggttgctgcgctgtggggccatggtgcgctaccatggccaggagaggtggcagaaggactacaaccaccttccaacaggccctctggacaaatacaagattcaggcgatcgacgccaccgactcttgtatcatgagcattggatttgatcacatggagggcctagagcatgttgaaaaaataaggctgtgcaagtgtcattatatcgaggatgactgtttgctgagacttagtcaacttgaaaatttacaaaaaaccatattggaaatggaaataatatcctgtgggaatatcacagacaaaggcatcattgctttgcgtcatttaagaaacctcaaatatttgttgttaagtgatcttcctggagtaagagaaaaagaaaatcttgtccaagcctttaagacagcactgccttctctggaactaaaattacaattgaagtaaaataatgtgtcttatttcagtataaaggatcatttgaaactgttgattccaaacatcaactaatattatatagtcatcagtagaattataaggatgccatatcatgacattttagaagtggagagtgcatcatatgtagaaaataaatattcagacgtggctcattaatgttactaagttggaagtgagaatttatgaacattaattcattttaagaaaagtgcagc

SEQ ID NO: 564 - protein, 215 aa, Homosapiens
MCCAVSEQRLTCADQMMPFGKISQQLCGVKKLPWSCDSRYFWGWLNAVFNKVDYDRIRDVGPDRAASEWLLRCGAMVRYHGQERWQKDYNHLPTGPLDKYKIQAIDATDSCIMSIGFDHMEGLEHVEKIRLCKCHYIEDDCLLRLSQLENLQKTILEMEIISCGNITDKGIIALRHLRNLKYLLLSDLPGVREKENLVQAFKTALPSLELKLQLK

SEQ ID NO: 565 - DNA, 1395 bp, Homosapiens
ggccagggtgccgcagacgcggggacgctggctcgctccctccctccctccctccgacgctgtgagtagagaagctaggccccgagccgggcgggactagggtggtggttgtgttctgccctcgcccgtcgccaacgctgggctgactgaaaacctggccctttgggtcgcgcgtcttcgactttcaccgccatgcggacatggggccgtgggagaaactctgggcgggattacggtgaaaattcttgtttgggcgggccctgcggcttctttcttccggctcgccctcggccccgcccccgccccgcccccgctccagctccagccgggtcctcgctcggccccgcacgcggcccgcggtagacggagggcctgggcacccaccgtctccatcccggccccagcccagtcgagcgtccactagaagggcgctccctgtccggccctaatcctcgctcctcacggaggctctttgtcacagcgaagactgacagcccgcagtcttctggacttcttttatggggctcctggcggtgctattcattcagtcattgattcgtcttgtaaatatggagcgcctgctctgtactcgacccggcactgggtaccggaagaaccagacagctcggtttttgccaccatttataagtctgtgtccttttcttgagtactgaaccgagatacagttttaaatgtgctgtgcggtctctgagcagcgactcacctgtgcagatcaaatgatgccgtttggaaaaatttcccagcagttgtgtggcgtaaagaaactcccatggtcatgtgactccagatacttctggggctggttgaatgcagtgtttaataaggtggattatgatcgcatcagggatgttggccctgacagggcggcatccgagtggttgctgcgctgtggggccatggtgcgctaccatggccaggagaggtggcagaaggactacaaccaccttccaacaggccctctggacaaatacaagattcaggcgatcgacgccaccgactcttgtatcatgagcattggatttgatcacatggaaacctcaaatatttgttgttaagtgatcttcctggagtaagagaaaaagaaaatcttgtccaagcctttaagacagcactgccttctctggaactaaaattacaattgaagtaaaataatgtgtcttatttcagtataaaggatcatttgaaactgttgattccaaacatcaactaatattatatagtcatcagtagaattataaggatgccatatcatgacattttagaagtggagagtgcatcatatgtagaaaataaatattcagacgtggctcattaatgttactaagttggaagtgagaatttatgaacattaattcattttaagaaaagtgcagc

SEQ ID NO: 566 - protein, 127 aa, Homosapiens
MCCAVSEQRLTCADQMMPFGKISQQLCGVKKLPWSCDSRYFWGWLNAVFNKVDYDRIRDVGPDRAASEWLLRCGAMVRYHGQERWQKDYNHLPTGPLDKYKIQAIDATDSCIMSIGFDHMETSNICC

SEQ ID NO: 567 - DNA, 1359 bp, Homosapiens
ggccagggtgccgcagacgcggggacgctggctcgctccctccctccctccctccgacgctgtgagtagagaagctaggccccgagccgggcgggactagggtggtggttgtgttctgccctcgcccgtcgccaacgctgggctgactgaaaacctggccctttgggtcgcgcgtcttcgactttcaccgccatgcggacatggggccgtgggagaaactctgggcgggattacggtgaaaattcttgtttgggcgggccctgcggcttctttcttccggctcgccctcggccccgcccccgccccgcccccgctccagctccagccgggtcctcgctcggccccgcacgcggcccgcggtagacggagggcctgggcacccaccgtctccatcccggccccagcccagtcgagcgtccactagaagggcgctccctgtccggccctaatcctcgctcctcacggaggctctttgtcacagcgaagactgacagcccgcagtcttctggacttcttttatggggctcctggcggtgctattcattcagtcattgattcgtcttgtaaatatggagcgcctgctctgtactcgacccggcactgggtaccggaagaaccagacagctcggtttttgccaccatttataagtctgtgtccttttcttgagtactgaaccgagatacagttttaaatgtgctgtgcggtctctgagcagcgactcacctgtgcagatcaaatgatgccgtttggaaaaatttcccagcagttgtgtggcgtaaagaaactcccatggtcatgtgactccagatacttctggggctggttgaatgcagtgtttaataaggtggattatgatcgcatcagggatgttggccctgacagggcggcatccgagtggttgctgcgctgtggggccatggtgcgctaccatggccaggagaggtggcagaaggactacaaccaccttccaacaggccctctggacaaatacaagattcaggcgatcgacgccaccgactcttgtatcatgagcattggatttgatcacatgggtaactaccctatcgttttgctaatagaaaatgcagatgatttgcagtgaccattttgttgcagttgactcacgattatagtcataggtatgtcctttttgcccatttcattatagtcaagtttgtttcttcctgtgtttgatatttattttcaaattaaattgaggttacagacaccttcctctccttcctcctctcactaagcttgtttctgtatgtctctagtctttggtttattgacttaaaatccagggccttgtttgtcaaactatctttgtcaaacttctgtcattgagaagccctcaa

SEQ ID NO: 568 - protein, 136 aa, Homosapiens
MCCAVSEQRLTCADQMMPFGKISQQLCGVKKLPWSCDSRYFWGWLNAVFNKVDYDRIRDVGPDRAASEWLLRCGAMVRYHGQERWQKDYNHLPTGPLDKYKIQAIDATDSCIMSIGFDHMGNYPIVLLIENADDLQ

SEQ ID NO: 569 - DNA, 1177 bp, Homosapiens
gatccattttaagaagatttattcctctatgatggagaagtatgaaaaaattgggaaaattggagaaggatcctatggagttgttttcaaatgtagaaacagggacacgggtcagattgtggccatcaagaagtttctggaatcagaagatgaccctgtcataaagaaaattgcccttcgggaaatccgaatgctcaagcaactcaagcatcccaaccttgttaacctcctggaagtcttcaggaggaaacggaggcttcacctggtgtttgaatattgtgaccacacagttctccatgagttggacagataccaaagaggggtaccagaacatctcgtgaagagcataacttggcagacactgcaagctgtaaatttttgccataaacacaattgcatacatagagacgtgaagccagaaaatatcctcatcacgaaacattccgtgattaagctttgtgactttggatttgctcggcttttgactggaccgagtgactactatacagactacgtggctaccaggtggtaccgctcccctgagctgctggtgggggacacgcagtacggccccccggtggatgtttgggcaattggctgtgtctttgctgagctgctgtcaggagtgcctctgtggccaggaaaatcggatgtggatcagctgtatctgattaggaagaccttgggggatctcattcctaggcaccagcaagtgtttagcacgaatcagtacttcagtggagtgaaaattccagaccctgaagatatggaaccacttgaattaaaattcccaaacatctcttatcctgccctggggctcctaaagggctgtctccacatggaccctactcaaaggctgacatgtgaacagctgttgcatcacccatattttgaaaacatcagagaaatagaggatttggcaaaagaacacaacaaaccaacaaggaagaccctaagaaagagccgaaagcaccactgctttacagaaacatccaagttgcagtacctaccccagctaactggcagcagcatccttccagctttggataataagaagtactactgtgataccaagaaacttaactaccgttttccaaacatttaaaggagctaggagacatgattttaaaaaaggaatcaatagatgctttgaagaaaataaaacttatacagttga

SEQ ID NO: 570 - protein, 358 aa, Homosapiens
MMEKYEKIGKIGEGSYGVVFKCRNRDTGQIVAIKKFLESEDDPVIKKIALREIRMLKQLKHPNLVNLLEVFRRKRRLHLVFEYCDHTVLHELDRYQRGVPEHLVKSITWQTLQAVNFCHKHNCIHRDVKPENILITKHSVIKLCDFGFARLLTGPSDYYTDYVATRWYRSPELLVGDTQYGPPVDVWAIGCVFAELLSGVPLWPGKSDVDQLYLIRKTLGDLIPRHQQVFSTNQYFSGVKIPDPEDMEPLELKFPNISYPALGLLKGCLHMDPTQRLTCEQLLHHPYFENIREIEDLAKEHNKPTRKTLRKSRKHHCFTETSKLQYLPQLTGSSILPALDNKKYYCDTKKLNYRFPNI

SEQ ID NO: 571 - DNA, 4373 bp, Homosapiens
ggcgccgacccatgctggctgggaacgtgtctcccggtgacgcagccccgggtggggaacgtggtgcggcggcggcggcggcggcgactgtacgcgcctccgccgcccccgagaggacgcgccgtgcagcggctgagtggcggcggcggcgacggcaaacccggagctgccggccggcgcgcgggaggaggacgcgggtgcggtctaggaaacggagctgcgggcggaggctccatgttgggaagcggcgccgttcgtgcttgttagcgggaatccgggagccgcggggtgagctggcgggggccgggccctaagtgaagatggaggccccgctgcggcctgccgcggacatcctgaggcggaacccgcagcaggactacgaactcgtccagagggtcggcagcggcacctacggggacgtctataaggccagaaatgtacacacaggagagctggctgcagtaaaaatcattaaattggagcctggagatgatttttctttgattcaacaagaaatatttatggttaaagaatgtaaacattgtaacatcgttgcctactttgggagttatcttagtcgggaaaaactatggatttgtatggaatactgtggtggcggatcacttcaagatatttaccatgttactggaccattatcagaattgcaaatagcctatgtatgcagagaaaccttacagggtcttgcctatttgcatactaaaggcaaaatgcatagagatatcaaaggtgctaatattttattgacagaccatggcgatgtaaaattagctgactttggtgtggctgcaaaaataacagctaccattgcaaaacgaaaatctttcattggcaccccttactggatggccccagaagttgcagcagtagagaagaatggtggctacaaccaactctgtgatatctgggcagtaggaataacagcaattgaacttggagaacttcagccacctatgtttgatctccacccaatgagggctctcttcttaatgtcaaaaagtaattttcagcctccaaaactaaaggacaaaacaaaatggtcatcaacattccataattttgtcaaaatagcactaaccaaaaacccaaaaaaaagaccaactgctgaaagacttctgactcacacttttgttgcacagccaggtctctctagagccctagcagttgaactgttagacaaagtgaacaatccagataaccacgcacattacactgaagcagatgacgatgactttgagccccatgcaatcattcgtcataccattagatctacaaacaggaatgccagagctgaacggacagcttcagaaataaattttgacaaattacaatttgaacctcctctgagaaaagaaacagaagcacgagatgaaatgggattgtcatcagacccaaatttcatgttacagtggaatccttttgttgatggtgcaaatactggcaaatcaacctcaaaacgtgcaataccacctcccctacctcctaagccaaggataagcagttaccctgaagacaactttccggatgaagaaaaagcatcaaccataaaacattgtcctgattcagaaagcagagctccccaaattctcagaagacagagtagcccaagttgtgggcctgtggcagagacttcttctattggaaatggtgatggtatttcaaaactgatgagtgaaaatacagaaggatcagcacaagcaccacagttaccacgaaaaaaggacaaacgagacttccctaaaccagccatcaatggccttccacccaccccaaaagttctgatgggagcatgcttttcaaaagtttttgatggctgtcctttgaaaattaattgtgcaacatcctggatacatcctgatacaaaagatcagtacattatttttggaactgaagatggtatttacacactgaatctcaatgagctacatgaggcaacgatggaacagttatttccacggaagtgtacttggctgtatgttatcaataatactttaatgtcattatcagaaggaaaaacctttcagctctactctcacaatcttatagctttgtttgaacatgccaaaaaaccaggattagctgcccatattcaaactcacaggtttccagaccgaatactaccaagaaaattcgctttaacaacaaagattcctgatacaaaaggctgccacaaatgttgcatagtcagaaacccttacacgggacataaatacctctgtggagctttacagtctggaattgttttacttcagtggtatgagccaatgcagaaattcatgttgataaagcactttgattttcctttgccaagtcctttgaatgtttttgaaatgctggtgatacctgaacaggaataccctatggtctgtgtagctattagcaaaggcactgaatcgaatcaggtagttcagtttgagacaatcaatttgaactctgcatcttcatggtttacagaaattggtgcaggcagccagcagttagattccattcatgtaacacagttggagagagataccgttttagtgtgtttagacaaatttgtgaaaattgtaaatctacaaggaaaattaaaatcaagtaagaaactggcctctgagttaagttttgattttcgcattgaatctgtagtatgccttcaagacagtgtgttggctttctggaaacatgggatgcagggtaaaagcttcaagtcagatgaggttacccaggagatttcagatgaaacaagagttttccgcttattaggatcagacagggttgtcgttttggaaagtaggccaacagaaaatcctactgcacacagcaatctctacatcttggctggacatgaaaatagttactaagcaacagaaactgatctcaaatgacaggaaaatgaatatactccattgaaaggaaaaataaggaaattcaatacaaactgcactatgatttgctttaactattatgggttatattgcaaatgatctgtactttagggtagaattcaatattttctgcagctggaaacagctagtctatctcttgccactgtgtggtggttatatcaagtttgcttaataaaagctatgagacaaatagtcctctagttccaggaaacacagtctttttttaaaaaaaacaatgtttgtaacaagggtgccatggtatttttagataactcgtgattatcttaagagaggtaaatttagtgatcattttatatcatgtcttattccttcttaatgaacataatttgttaaattctcaagcaaggttttcacttttatattggccattctgtatgtttttgtaaaacagaatatttaatccttatttattaatctcttgctggagtggtgtaatgtatctaacttttagcaaaggagggttgcagagcagcttaaattttttttataatgtataagaattttgtttatcttttaagagtagtaaagtactttgagtgtttgggggttcaacacacacatgcaattttgcttaacaaaagtattttataatacagtttcatacagaattaccttaaaagggagtcttatgttttcaactacagatagttgtaagggatcatacagaagatattgatgatagttgaaatattcttagaaggggtgtgtatgtctagctgtgtctaccatgtgtatgtattcttgacaagcagtataaaatacctgtgatttttctttacattagggataatgcataaggaattaatcttcatatatattatcatccctaatgtagcagggggaagtatttaattgcccatgatatgtattttacttatactatgccagagaggaaactataaagtaattacacatgtaatcttgggtttttcacatatgtaggtattcattttgagtaggttgaagaagaaaaaaaatatttaaatgaattgaattcctgatgggatagtatcaataagtatttaaaagccagtattctaaaaataataaagggtagggtcatttttgagtttgtttttcttttgctattgttaatattcaaaattaaagtgttacattggtacctgttgtcttaatgcatttattgagaacagcattgagatgatgaacaaggggttagcaatagcaaactctataattattttgactaattacttaagaggaaaacagtataagtatctcattcagtatttagcaattctgtaaaataagtattatctctatttttcagatgaggaagtaagggtttagcaaggttaagagatctatccaatttacacagcaagttagtagttgagcctgaccatgagtcttctgactctgttcttttcactatgcaatacgcaaacaataaaatgttatacaaataaaaaaaaaaaaaaaaaa

SEQ ID NO: 572 - protein, 846 aa, Homosapiens
MEAPLRPAADILRRNPQQDYELVQRVGSGTYGDVYKARNVHTGELAAVKIIKLEPGDDFSLIQQEIFMVKECKHCNIVAYFGSYLSREKLWICMEYCGGGSLQDIYHVTGPLSELQIAYVCRETLQGLAYLHTKGKMHRDIKGANILLTDHGDVKLADFGVAAKITATIAKRKSFIGTPYWMAPEVAAVEKNGGYNQLCDIWAVGITAIELGELQPPMFDLHPMRALFLMSKSNFQPPKLKDKTKWSSTFHNFVKIALTKNPKKRPTAERLLTHTFVAQPGLSRALAVELLDKVNNPDNHAHYTEADDDDFEPHAIIRHTIRSTNRNARAERTASEINFDKLQFEPPLRKETEARDEMGLSSDPNFMLQWNPFVDGANTGKSTSKRAIPPPLPPKPRISSYPEDNFPDEEKASTIKHCPDSESRAPQILRRQSSPSCGPVAETSSIGNGDGISKLMSENTEGSAQAPQLPRKKDKRDFPKPAINGLPPTPKVLMGACFSKVFDGCPLKINCATSWIHPDTKDQYIIFGTEDGIYTLNLNELHEATMEQLFPRKCTWLYVINNTLMSLSEGKTFQLYSHNLIALFEHAKKPGLAAHIQTHRFPDRILPRKFALTTKIPDTKGCHKCCIVRNPYTGHKYLCGALQSGIVLLQWYEPMQKFMLIKHFDFPLPSPLNVFEMLVIPEQEYPMVCVAISKGTESNQVVQFETINLNSASSWFTEIGAGSQQLDSIHVTQLERDTVLVCLDKFVKIVNLQGKLKSSKKLASELSFDFRIESVVCLQDSVLAFWKHGMQGKSFKSDEVTQEISDETRVFRLLGSDRVVVLESRPTENPTAHSNLYILAGHENSY

SEQ ID NO: 573 - DNA, 4421 bp, Homosapiens
ggcgccgacccatgctggctgggaacgtgtctcccggtgacgcagccccgggtggggaacgtggtgcggcggcggcggcggcggcgactgtacgcgcctccgccgcccccgagaggacgcgccgtgcagcggctgagtggcggcggcggcgacggcaaacccggagctgccggccggcgcgcgggaggaggacgcgggtgcggtctaggaagtaggtcccgggctccgcgctcaacaaagacggggccgcccccattagacggagctgcgggcggaggctccatgttgggaagcggcgccgttcgtgcttgttagcgggaatccgggagccgcggggtgagctggcgggggccgggccctaagtgaagatggaggccccgctgcggcctgccgcggacatcctgaggcggaacccgcagcaggactacgaactcgtccagagggtcggcagcggcacctacggggacgtctataaggccagaaatgtacacacaggagagctggctgcagtaaaaatcattaaattggagcctggagatgatttttctttgattcaacaagaaatatttatggttaaagaatgtaaacattgtaacatcgttgcctactttgggagttatcttagtcgggaaaaactatggatttgtatggaatactgtggtggcggatcacttcaagatatttaccatgttactggaccattatcagaattgcaaatagcctatgtatgcagagaaaccttacagggtcttgcctatttgcatactaaaggcaaaatgcatagagatatcaaaggtgctaatattttattgacagaccatggcgatgtaaaattagctgactttggtgtggctgcaaaaataacagctaccattgcaaaacgaaaatctttcattggcaccccttactggatggccccagaagttgcagcagtagagaagaatggtggctacaaccaactctgtgatatctgggcagtaggaataacagcaattgaacttggagaacttcagccacctatgtttgatctccacccaatgagggctctcttcttaatgtcaaaaagtaattttcagcctccaaaactaaaggacaaaacaaaatggtcatcaacattccataattttgtcaaaatagcactaaccaaaaacccaaaaaaaagaccaactgctgaaagacttctgactcacacttttgttgcacagccaggtctctctagagccctagcagttgaactgttagacaaagtgaacaatccagataaccacgcacattacactgaagcagatgacgatgactttgagccccatgcaatcattcgtcataccattagatctacaaacaggaatgccagagctgaacggacagcttcagaaataaattttgacaaattacaatttgaacctcctctgagaaaagaaacagaagcacgagatgaaatgggattgtcatcagacccaaatttcatgttacagtggaatccttttgttgatggtgcaaatactggcaaatcaacctcaaaacgtgcaataccacctcccctacctcctaagccaaggataagcagttaccctgaagacaactttccggatgaagaaaaagcatcaaccataaaacattgtcctgattcagaaagcagagctccccaaattctcagaagacagagtagcccaagttgtgggcctgtggcagagacttcttctattggaaatggtgatggtatttcaaaactgatgagtgaaaatacagaaggatcagcacaagcaccacagttaccacgaaaaaaggacaaacgagacttccctaaaccagccatcaatggccttccacccaccccaaaagttctgatgggagcatgcttttcaaaagtttttgatggctgtcctttgaaaattaattgtgcaacatcctggatacatcctgatacaaaagatcagtacattatttttggaactgaagatggtatttacacactgaatctcaatgagctacatgaggcaacgatggaacagttatttccacggaagtgtacttggctgtatgttatcaataatactttaatgtcattatcagaaggaaaaacctttcagctctactctcacaatcttatagctttgtttgaacatgccaaaaaaccaggattagctgcccatattcaaactcacaggtttccagaccgaatactaccaagaaaattcgctttaacaacaaagattcctgatacaaaaggctgccacaaatgttgcatagtcagaaacccttacacgggacataaatacctctgtggagctttacagtctggaattgttttacttcagtggtatgagccaatgcagaaattcatgttgataaagcactttgattttcctttgccaagtcctttgaatgtttttgaaatgctggtgatacctgaacaggaataccctatggtctgtgtagctattagcaaaggcactgaatcgaatcaggtagttcagtttgagacaatcaatttgaactctgcatcttcatggtttacagaaattggtgcaggcagccagcagttagattccattcatgtaacacagttggagagagataccgttttagtgtgtttagacaaatttgtgaaaattgtaaatctacaaggaaaattaaaatcaagtaagaaactggcctctgagttaagttttgattttcgcattgaatctgtagtatgccttcaagacagtgtgttggctttctggaaacatgggatgcagggtaaaagcttcaagtcagatgaggttacccaggagatttcagatgaaacaagagttttccgcttattaggatcagacagggttgtcgttttggaaagtaggccaacagaaaatcctactgcacacagcaatctctacatcttggctggacatgaaaatagttactaagcaacagaaactgatctcaaatgacaggaaaatgaatatactccattgaaaggaaaaataaggaaattcaatacaaactgcactatgatttgctttaactattatgggttatattgcaaatgatctgtactttagggtagaattcaatattttctgcagctggaaacagctagtctatctcttgccactgtgtggtggttatatcaagtttgcttaataaaagctatgagacaaatagtcctctagttccaggaaacacagtctttttttaaaaaaaacaatgtttgtaacaagggtgccatggtatttttagataactcgtgattatcttaagagaggtaaatttagtgatcattttatatcatgtcttattccttcttaatgaacataatttgttaaattctcaagcaaggttttcacttttatattggccattctgtatgtttttgtaaaacagaatatttaatccttatttattaatctcttgctggagtggtgtaatgtatctaacttttagcaaaggagggttgcagagcagcttaaattttttttataatgtataagaattttgtttatcttttaagagtagtaaagtactttgagtgtttgggggttcaacacacacatgcaattttgcttaacaaaagtattttataatacagtttcatacagaattaccttaaaagggagtcttatgttttcaactacagatagttgtaagggatcatacagaagatattgatgatagttgaaatattcttagaaggggtgtgtatgtctagctgtgtctaccatgtgtatgtattcttgacaagcagtataaaatacctgtgatttttctttacattagggataatgcataaggaattaatcttcatatatattatcatccctaatgtagcagggggaagtatttaattgcccatgatatgtattttacttatactatgccagagaggaaactataaagtaattacacatgtaatcttgggtttttcacatatgtaggtattcattttgagtaggttgaagaagaaaaaaaatatttaaatgaattgaattcctgatgggatagtatcaataagtatttaaaagccagtattctaaaaataataaagggtagggtcatttttgagtttgtttttcttttgctattgttaatattcaaaattaaagtgttacattggtacctgttgtcttaatgcatttattgagaacagcattgagatgatgaacaaggggttagcaatagcaaactctataattattttgactaattacttaagaggaaaacagtataagtatctcattcagtatttagcaattctgtaaaataagtattatctctatttttcagatgaggaagtaagggtttagcaaggttaagagatctatccaatttacacagcaagttagtagttgagcctgaccatgagtcttctgactctgttcttttcactatgcaatacgcaaacaataaaatgttatacaaataaaaaaaaaaaaaaaaaa

SEQ ID NO: 574 - protein, 846 aa, Homosapiens; identical to SEQ ID NO: 572

SEQ ID NO: 575 - DNA, 2271 bp, Homosapiens
gtgtgacgctggtatctgtgtgaactcgggcttgtgatgctgagcttggttcatctgctttctcctcccttttcctccccactccttcccaccagcgccacagcaacatcctcagagtctgagcgaactgcgcccagcgcgggcacggagcctcccaccgccagcaacctgcggccccggagaaggcagcgagcgcagtgacagcgcctcaccgccaccagctcctggaccaccatggccaagaaccgcagggacagaaacagttggggtggattttcggaaaagacatatgaatggagctcagaagaggaggagccagtgaaaaaggcaggaccagtccaagtcctcattgtcaaagatgaccattcctttgagttagatgaaactgcattaaatcggatccttctctcggaggctgtcagagacaaggaggttgttgctgtatctgttgctggagcatttagaaaaggaaaatcattcctgatggacttcatgttgagatacatgtacaaccaggaatcagttgattgggttggagactacaatgaaccattgactggtttttcatggagaggtggatctgagcgagagaccacaggaattcagatatggagtgaaatcttccttatcaataaacctgatggtaaaaaggttgcagtgttattgatggatactcagggaacctttgatagtcagtcaactttgagagattcagccacagtatttgcccttagcacaatgatcagctcaatacaggtatataacttatcccaaaatgtccaggaggatgatcttcagcacctccagcttttcactgagtatggcagactggcaatggaggaaacattcctgaagccatttcagagtctgatatttcttgttcgagactggagtttcccatacgaattttcatatggagccgatggtggtgccaaattcttggaaaaacgcctcaaggtctcagggaaccagcatgaagaactacagaacgtcagaaaacacatccattcctgtttcaccaacatttcctgttttctgctacctcatcctggcttaaaagtagctaccaatccaaactttgatggaaaattgaaagaaatagatgatgaattcatcaaaaacttgaaaatactgattccttggctacttagtcccgagagcctagatattaaagagatcaatgggaataaaatcacctgccggggtctggtggagtacttcaaggcttatataaagatctatcaaggtgaagaattaccacatcccaaatccatgttacaggccacagcagaagctaacaatttagcagccgtggcaactgccaaggacacatacaacaaaaaaatggaagagatttgtggtggtgacaaaccatttctggccccaaatgacttgcagaccaaacacctgcaacttaaggaagaatctgtgaagctattccgaggggtgaagaagatgggtggggaagaatttagccggcgttacctgcagcagttggagagtgaaatagatgaactttacatccaatatatcaagcacaatgatagcaaaaatatcttccatgcagctcgtaccccagccacactgtttgtagtcatctttatcacatatgtgattgctggtgtgactggattcattggtttggacatcatagctagcctatgcaatatgataatgggactgacccttatcaccctgtgcacttgggcatatatccggtactctggagaataccgagagctgggagctgtaatagaccaggtggctgcagctctgtgggaccagggaagtacaaatgaggctttgtacaagctttacagtgcagcagcaacccacagacatctgtatcatcaagctttccctacaccaaagtcggaatctactgaacaatcagaaaagaaaaaaatgtaatgcaaattttaagaaatacaggtgcatgaccaattgtcaattaaatattcagttttatgtctccatgcaaacattcaaagtgcttccatcagaacggagtaaaatactaaacacctctgaagactgcaaactggattagttcttttacttcagtgtttaataagcagatgtatgtatgcatggttatactattttgttaacatgtacaatttcctgatttttcttcaaaaatgctgttataaagtatttgtctatttatgataacagtacacgtgttctgcttgaatttactaaattctactactgggttataattaaatcatgtgatattccaaaaaaaaaaaaaaaaaaaaaaaaaaa

SEQ ID NO: 576 - protein, 558 aa, Homosapiens
MAKNRRDRNSWGGFSEKTYEWSSEEEEPVKKAGPVQVLIVKDDHSFELDETALNRILLSEAVRDKEVVAVSVAGAFRKGKSFLMDFMLRYMYNQESVDWVGDYNEPLTGFSWRGGSERETTGIQIWSEIFLINKPDGKKVAVLLMDTQGTFDSQSTLRDSATVFALSTMISSIQVYNLSQNVQEDDLQHLQLFTEYGRLAMEETFLKPFQSLIFLVRDWSFPYEFSYGADGGAKFLEKRLKVSGNQHEELQNVRKHIHSCFTNISCFLLPHPGLKVATNPNFDGKLKEIDDEFIKNLKILIPWLLSPESLDIKEINGNKITCRGLVEYFKAYIKIYQGEELPHPKSMLQATAEANNLAAVATAKDTYNKKMEEICGGDKPFLAPNDLQTKHLQLKEESVKLFRGVKKMGGEEFSRRYLQQLESEIDELYIQYIKHNDSKNIFHAARTPATLFVVIFITYVIAGVTGFIGLDIIASLCNMIMGLTLITLCTWAYIRYSGEYRELGAVIDQVAAALWDQGSTNEALYKLYSAAATHRHLYHQAFPTPKSESTEQSEKKKM

SEQ ID NO: 577 - DNA, 2256 bp, Homosapiens
gtgtgacgctggtatctgtgtgaactcgggcttgtgatgctgagcttggttcatctgctttctcctcccttttcctccccactccttcccaccagcgccacagcaacatcctcagagtctgagcgaactgcgcccagcgcgggcacggagcctcccaccgccagcaacctgcggccccggagaaggcagcgagcgcagtgacagcgcctcaccgccaccagctcctggaccaccatggccaagaaccgcagggacagaaacagttggggtggattttcggaaaagacatatgaatggagctcagaagaggaggagccagtgaaaaaggcaggaccagtccaagtcctcattgtcaaagatgaccattcctttgagttagatgaaactgcattaaatcggatccttctctcggaggctgtcagagacaaggaggttgttgctgtatctgttgctggagcatttagaaaaggaaaatcattcctgatggacttcatgttgagatacatgtacaaccaggaatcagttgattgggttggagactacaatgaaccattgactggtttttcatggagaggtggatctgagcgagagaccacaggaattcagatatggagtgaaatcttccttatcaataaacctgatggtaaaaaggttgcagtgttattgatggatactcagggaacctttgatagtcagtcaactttgagagattcagccacagtatttgcccttagcacaatgatcagctcaatacaggtatataacttatcccaaaatgtccaggaggatgatcttcagcacctccagcttttcactgagtatggcagactggcaatggaggaaacattcctgaagccatttcagagtctgatatttcttgttcgagactggagtttcccatacgaattttcatatggagccgatggtggtgccaaattcttggaaaaacgcctcaaggtctcagggaaccagcatgaagaactacagaacgtcagaaaacacatccattcctgtttcaccaacatttcctgttttctgctacctcatcctggcttaaaagtagctaccaatccaaactttgatggaaaattgaaagaaatagatgatgaattcatcaaaaacttgaaaatactgattccttggctacttagtcccgagagcctagatattaaagagatcaatgggaataaaatcacctgccggggtctggtggagtacttcaaggcttatataaagatctatcaaggtgaagaattaccacatcccaaatccatgttacaggccacagcagaagctaacaatttagcagccgtggcaactgccaaggacacatacaacaaaaaaatggaagagatttgtggtggtgacaaaccatttctggccccaaatgacttgcagaccaaacacctgcaacttaaggaagaatctgtgaagctattccgaggggtgaagaagatgggtggggaagaatttagccggcgttacctgcagcagttggagagtgaaatagatgaactttacatccaatatatcaagcacaatgatagcaaaaatatcttccatgcagctcgtaccccagccacactgtttgtagtcatctttatcacatatgtgattgctggtgtgactggattcattggtttggacatcatagctagcctatgcaatatgataatgggactgacccttatcaccctgtgcacttgggcatatatccggtactctggagaataccgagagctgggagctgtaatagaccaggtggctgcagctctgtgggaccaggctttgtacaagctttacagtgcagcagcaacccacagacatctgtatcatcaagctttccctacaccaaagtcggaatctactgaacaatcagaaaagaaaaaaatgtaatgcaaattttaagaaatacaggtgcatgaccaattgtcaattaaatattcagttttatgtctccatgcaaacattcaaagtgcttccatcagaacggagtaaaatactaaacacctctgaagactgcaaactggattagttcttttacttcagtgtttaataagcagatgtatgtatgcatggttatactattttgttaacatgtacaatttcctgatttttcttcaaaaatgctgttataaagtatttgtctatttatgataacagtacacgtgttctgcttgaatttactaaattctactactgggttataattaaatcatgtgatattccaaaaaaaaaaaaaaaaaaaaaaaaaaa

SEQ ID NO: 578 - protein, 553 aa, Homosapiens
MAKNRRDRNSWGGFSEKTYEWSSEEEEPVKKAGPVQVLIVKDDHSFELDETALNRILLSEAVRDKEVVAVSVAGAFRKGKSFLMDFMLRYMYNQESVDWVGDYNEPLTGFSWRGGSERETTGIQIWSEIFLINKPDGKKVAVLLMDTQGTFDSQSTLRDSATVFALSTMISSIQVYNLSQNVQEDDLQHLQLFTEYGRLAMEETFLKPFQSLIFLVRDWSFPYEFSYGADGGAKFLEKRLKVSGNQHEELQNVRKHIHSCFTNISCFLLPHPGLKVATNPNFDGKLKEIDDEFIKNLKILIPWLLSPESLDIKEINGNKITCRGLVEYFKAYIKIYQGEELPHPKSMLQATAEANNLAAVATAKDTYNKKMEEICGGDKPFLAPNDLQTKHLQLKEESVKLFRGVKKMGGEEFSRRYLQQLESEIDELYIQYIKHNDSKNIFHAARTPATLFVVIFITYVIAGVTGFIGLDIIASLCNMIMGLTLITLCTWAYIRYSGEYRELGAVIDQVAAALWDQALYKLYSAAATHRHLYHQAFPTPKSESTEQSEKKKM

SEQ ID NO: 579 - DNA, 3031 bp, Homosapiens
gtggtagcggttattcggcggcccgcggcggaccatggccctggccctggcccggcgtcgctgggctttcctcacggcgtccccgagcagcgtcgcagagcgggccgacttccgggaaggaactgaccagcgactgagcggcggccggcgcgcttagcgccctgaacatgcggcagtccctgcgggcgaccccgggctccggacaggcggcggcggaggcggcggctcgggagggaaggaggcggcggcgccggcggaggtggcggcggagacggccggcgcccggcgcggagccctagggaggcagttcagcgcggcctcgggcctcgtcgagaaggatgctgtcccgaaagaaaaccaaaaacgaagtgtccaagccggccgaggtgcaggggaagtacgtgaagaaggagacgtcgcctctgcttcggaatcttatgccttcattcatccggcatggtccaacaattccaagacgaactgatatctgtcttccagattcaagccctaatgccttttcaacttctggagatgtagtttcaagaaaccagagtttccttagaactccaattcaaagaacacctcatgaaataatgagaagagaaagcaacagattatctgcaccttcttatcttgccagaagtctagcagatgtccctagagagtatggttcttctcagtcatttgtaacggaagttagttttgctgttgaaaatggagactctggttcccgatattattattcagacaatttttttgatggtcagagaaagcggccacttggagatcgtgcacatgaagactacagatattatgaatacaaccatgatctcttccaaagaatgccacagaatcaggggaggcatgcttcaggtattgggagagttgctgctacatctttaggaaatttgactaaccatggttctgaagatttaccccttcctcctggctggtctgtggactggacaatgagagggagaaaatattatatagatcataacacaaatacaactcactggagccatcctcttgagcgagaaggacttcctcctggatgggaacgagttgagtcatccgaatttggaacctattatgtagatcacacaaataagaaggcccaatacaggcatccctgtgctcctagtgtacctcggtatgatcaaccacctcctgtcacataccagccacagcaaactgaaagaaatcagtcccttctggtacctgcaaatccatatcatactgcagaaattcctgactggcttcaggtttacgcacgagcccctgtgaaatatgaccacattctgaagtgggaactcttccagctggctgacctggatacataccagggaatgctaaagttgctcttcatgaaagaattggagcagattgttaaaatgtatgaagcatacagacaagcccttcttacagagttggaaaaccgaaagcagagacagcagtggtatgcccaacaacatggaaaaaatttttgagctgattttttaaaaatttaagttttgtaagagctttaaaatattttcacagataaaaaattgcaaacaagtactctggttaataaatgctgcttcctttgtggaaattataaaattctaactttacatgtattttgttattagaaattttcttttattgaatgagaaaaattagtctatcattttaagagccaatatggcaaacactttcaaatactgtatattaggaaactgttttggtattcttgatggaaaaaaacgcagcggaaatgtcattatgaacagatgttaaataggaaattattacttgttaacttcttacagcagtagtaccttctttaaaaaaaaaaaagaatctgcggtatttttttaaaaaaaaagtttaccgctgtagtgtgaaatattgtctggaaagggatggtttaaatattaccatgatgtagttgaaatataaaataggatttggaaccttattgtgataaatatttatatatgatgtatgtttgtctcccctctccaaagtaaggaacccagctgggcgtggtggctcactcctgtaatcccagcattttgggaggccgaggtgggtggaccgcttgagtccacgagtttaagaccagcctgggcaacatggtgaagccccatctctacaaaaaatacaaaaaaattagccgggtatgatggtgtgtgcctctagtcccagctacttgggaggctgaggtcagaggatggcttgagcccaagaggcagaggttgcagggtcaagatcgcaccacttgcactgcagcctgagagagagagagccagaccttgtctcaaaaaataaaaaataaaaaaataaaaacaaaataaggaatccttttaaagcatgttgagaaagtattttttggtatgaatgggtgacgggccttttaatctttcaggaatacatataagcaggaatacttagcctgtattgggaaggtgcgtgaaactcaaagttgctaacatcatcttccttattttcagccagtgctgttactgcatttagcatggctctgacgaggcagtggagagttcctgacagcatagcatactgccttctgacagactgggttaagctaccaaaaatgacaaccagggattcaaaaaaaatttttggtcattaaatcgaatgtatattattactttttaattttctaagtatttatcacaggactttaacaccatatatttccctcccagtttttctccccttttggtttaatagttaaaacatttttcataattagtgctgtacatttgattgcaaacaaattggtgatacttctaaactataactataaatctctagaattctgtgaatttcaacattatttgaagtagttcttcagttatatttacatgtgttgtaaatatgtaaatatacttttagcttaggaagtcttccagaatacaaactactcccagttagatatcagtgagtttgaataactgaagaaatgttgacaatgttaagtgtttgattttatataacaagcttattaaatatatttttgtgg

SEQ ID NO: 580 - protein, 383 aa, Homosapiens
MLSRKKTKNEVSKPAEVQGKYVKKETSPLLRNLMPSFIRHGPTIPRRTDICLPDSSPNAFSTSGDVVSRNQSFLRTPIQRTPHEIMRRESNRLSAPSYLARSLADVPREYGSSQSFVTEVSFAVENGDSGSRYYYSDNFFDGQRKRPLGDRAHEDYRYYEYNHDLFQRMPQNQGRHASGIGRVAATSLGNLTNHGSEDLPLPPGWSVDWTMRGRKYYIDHNTNTTHWSHPLEREGLPPGWERVESSEFGTYYVDHTNKKAQYRHPCAPSVPRYDQPPPVTYQPQQTERNQSLLVPANPYHTAEIPDWLQVYARAPVKYDHILKWELFQLADLDTYQGMLKLLFMKELEQIVKMYEAYRQALLTELENRKQRQQWYAQQHGKNF

SEQ ID NO: 581 - DNA, 4410 bp, Homosapiens
cctcctccacagtggtgaggtcacagccccttggagccctccctcttcccacccctcccgctcccgggtctcctttggcctggggtaacccgaggtgcagagctgagaatgaggcgatttcggaggatggagaaatagccccgagtcccgtggaaaatgaggccggcggacttgctgcagctggtgctgctgctcgacctgcccagggacctgggcggaatggggtgttcgtctccaccctgcgagtgccatcaggaggaggacttcagagtcacctgcaaggatattcaacgcatccccagcttaccgcccagtacgcagactctgaagcttattgagactcacctgagaactattccaagtcatgcattttctaatctgcccaatatttccagaatctacgtatctatagatgtgactctgcagcagctggaatcacactccttctacaatttgagtaaagtgactcacatagaaattcggaataccaggaacttaacttacatagaccctgatgccctcaaagagctccccctcctaaagttccttggcattttcaacactggacttaaaatgttccctgacctgaccaaagtttattccactgatatattctttatacttgaaattacagacaacccttacatgacgtcaatccctgtgaatgcttttcagggactatgcaatgaaaccttgacactgaagctgtacaacaatggctttacttcagtccaaggatatgctttcaatgggacaaagctggatgctgtttacctaaacaagaataaatacctgacagttattgacaaagatgcatttggaggagtatacagtggaccaagcttgctggacgtgtctcaaaccagtgtcactgcccttccatccaaaggcctggagcacctgaaggaactgatagcaagaaacacctggactcttaagaaacttccactttccttgagtttccttcacctcacacgggctgacctttcttacccaagccactgctgtgcttttaagaatcagaagaaaatcagaggaatccttgagtccttgatgtgtaatgagagcagtatgcagagcttgcgccagagaaaatctgtgaatgccttgaatagccccctccaccaggaatatgaagagaatctgggtgacagcattgttgggtacaaggaaaagtccaagttccaggatactcataacaacgctcattattacgtcttctttgaagaacaagaggatgagatcattggttttggccaggagctcaaaaacccccaggaagagactctacaagcttttgacagccattatgactacaccatatgtggggacagtgaagacatggtgtgtacccccaagtccgatgagttcaacccgtgtgaagacataatgggctacaagttcctgagaattgtggtgtggttcgttagtctgctggctctcctgggcaatgtctttgtcctgcttattctcctcaccagccactacaaactgaacgtcccccgctttctcatgtgcaacctggcctttgcggatttctgcatggggatgtacctgctcctcatcgcctctgtagacctctacactcactctgagtactacaaccatgccatcgactggcagacaggccctgggtgcaacacggctggtttcttcactgtctttgcaagcgagttatcggtgtatacgctgacggtcatcaccctggagcgctggtatgccatcaccttcgccatgcgcctggaccggaagatccgcctcaggcacgcatgtgccatcatggttgggggctgggtttgctgcttccttctcgccctgcttcctttggtgggaataagtagctatgccaaagtcagtatctgcctgcccatggacaccgagacccctcttgctctggcatatattgtttttgttctgacgctcaacatagttgccttcgtcatcgtctgctgctgttatgtgaagatctacatcacagtccgaaatccgcagtacaacccaggggacaaagataccaaaattgccaagaggatggctgtgttgatcttcaccgacttcatatgcatggccccaatctcattctatgctctgtcagcaattctgaacaagcctctcatcactgttagcaactccaaaatcttgctggtactcttctatccacttaactcctgtgccaatccattcctctatgctattttcaccaaggccttccagagggatgtgttcatcctactcagcaagtttggcatctgtaaacgccaggctcaggcataccgggggcagagggttcctccaaagaacagcactgatattcaggttcaaaaggttacccacgagatgaggcagggtctccacaacatggaagatgtctatgaactgattgaaaactcccatctaaccccaaagaagcaaggccaaatctcagaagagtatatgcaaacggttttgtaagttaacactacactactcacaatggtaggggaacttacaaaataatagtttcttgaatatgcattccaatcccatgacacccccaacacatagctgccctcactcttgtgcaggcgatgtttcaatgtttcatggggcaagagtttatctctggagagtgattagtattaacctaatcattgcccccaagaaggaagttaggctaccagcatatttgaatgccaggtgaaatcaaaataatctacactatctagaagactttcttgatgccaagtccagagatgtcattgtgtaggatgttcagtaaatattaactgagctatgtcaatatagagcttctcagttttgtataacatttcatactaaagattcagcaaatggaaaatgctattaatttggttggtgaccacaagataaaatcagtcccacgttggctcagttcaactagatgttccctgatacaaagagaacttgatttccttaaaactgaaaagccaaacacagctagctgtcatacaagaaacagctattatgagacatgaaggagggtaagaattagctttaagttttgttttgctttgttttgttttttaactcaacctattaatcatctcttcacaagaatccacctgatgtgaccaagctattatgtgttgcctggaaaaactggcaagatttcagcttatgtggcctagcaaactaagaattgctcttcttggccagcctcatagcataaaagatgtgaactctaggaagtctttctgagtagcaataagtgggaattatgggcagagcacactcaatcccctgttgattaataaaacaggctggacactaattaactatgggacttaaatctgtagaaatgaaggagtccaatagcttcttccaattttaaaactctagtacatccctttccctcaaatatatatttctaagataaagagaaagaagagcactaagtaagtagaatctgtttttcctattttgtagggctgctgactcctagtccttgaagcctagacacatgacccaggaaatttttcctttgtttcacttttgattatgatgtctgagccaaaaattcaattaagtaaacatactcgcctggatctgaatcattcatttaattactagatctacccagctgttatatcaggccaaaaacagattcgtgtttatataaaagagtaaacgatggttgcaaattttggctatttagagttgctacttcactatgaagagtcacttcaaaacacttcgcttgtctttagggatgatttttgccatttccagtccacggtatgatactaaagctgtcaagagaggtttcttcttttctgaaactgccagctctttccagccctgttgatcactggacataaagcttcttttccccaataattcttctttacttaaaatagtcaggatctttatctacagatgtactctccaggttacctgtgatgatagccccctaatgtcctgctagaaaagtctccaagcagagatgacattacttctgaatgctcataaaccacaccatgaaataaaagctctttgttgttttaagattgtgaagtgtcgttaatgggtccccacagatggtccctgctggactcacctggaatctctccacagccatacccactcatcactatcattgagacctgcacatcttaatagaaatattataaacatcgaaaatcatgacttacctagaagttcgcttgtaactaatgaaattaaacaaatgtgttgccttttgtcatgtgtttctctcctgtgacatttcaaaatatcacatcttgataaataatgtgtttcatcttgaatagctgaactaattgctttggaaacagagtcctagaaaagtgacttcaacagaattgttactaaaatttgcactcacaacatgaaataaattttcttcctatggaataatcgtgaaaaaaaaaa

SEQ ID NO: 582 - protein, 764 aa, Homosapiens
MRPADLLQLVLLLDLPRDLGGMGCSSPPCECHQEEDFRVTCKDIQRIPSLPPSTQTLKLIETHLRTIPSHAFSNLPNISRIYVSIDVTLQQLESHSFYNLSKVTHIEIRNTRNLTYIDPDALKELPLLKFLGIFNTGLKMFPDLTKVYSTDIFFILEITDNPYMTSIPVNAFQGLCNETLTLKLYNNGFTSVQGYAFNGTKLDAVYLNKNKYLTVIDKDAFGGVYSGPSLLDVSQTSVTALPSKGLEHLKELIARNTWTLKKLPLSLSFLHLTRADLSYPSHCCAFKNQKKIRGILESLMCNESSMQSLRQRKSVNALNSPLHQEYEENLGDSIVGYKEKSKFQDTHNNAHYYVFFEEQEDEIIGFGQELKNPQEETLQAFDSHYDYTICGDSEDMVCTPKSDEFNPCEDIMGYKFLRIVVWFVSLLALLGNVFVLLILLTSHYKLNVPRFLMCNLAFADFCMGMYLLLIASVDLYTHSEYYNHAIDWQTGPGCNTAGFFTVFASELSVYTLTVITLERWYAITFAMRLDRKIRLRHACAIMVGGWVCCFLLALLPLVGISSYAKVSICLPMDTETPLALAYIVFVLTLNIVAFVIVCCCYVKIYITVRNPQYNPGDKDTKIAKRMAVLIFTDFICMAPISFYALSAILNKPLITVSNSKILLVLFYPLNSCANPFLYAIFTKAFQRDVFILLSKFGICKRQAQAYRGQRVPPKNSTDIQVQKVTHEMRQGLHNMEDVYELIENSHLTPKKQGQISEEYMQTVL

SEQ ID NO: 583 - DNA, 1183 bp, Homosapiens
cctcctccacagtggtgaggtcacagccccttggagccctccctcttcccacccctcccgctcccgggtctcctttggcctggggtaacccgaggtgcagagctgagaatgaggcgatttcggaggatggagaaatagccccgagtcccgtggaaaatgaggccggcggacttgctgcagctggtgctgctgctcgacctgcccagggacctgggcggaatggggtgttcgtctccaccctgcgagtgccatcaggaggaggacttcagagtcacctgcaaggatattcaacgcatccccagcttaccgcccagtacgcagactctgaagcttattgagactcacctgagaactattccaagtcatgcattttctaatctgcccaatatttccagaatctacgtatctatagatgtgactctgcagcagctggaatcacactccttctacaatttgagtaaagtgactcacatagaaattcggaataccaggaacttaacttacatagaccctgatgccctcaaagagctccccctcctaaagttccttggcattttcaacactggacttaaaatgttccctgacctgaccaaagtttattccactgatatattctttatacttgaaattacagacaacccttacatgacgtcaatccctgtgaatgcttttcagggactatgcaatgaaaccttgacactgaagctgtacaacaatggctttacttcagtccaaggatatgctttcaatgggacaaagctggatgctgtttacctaaacaagaataaatacctgacagttattgacaaagatgcatttggaggagtatacagtggaccaagcttgctgctacctcttggaagaaagtccttgtcctttgagactcagaaggccccacgctccagtatgccatcatgatgcctgctaaggcagccaccttggtgtacatgctcacagaggctctgttcatggagcagctgctgtttgaaaaattttgaaatgcaagatccacaactagatggaaggcactctagtctttgcagaaaaaaatgtacctgaatgtacattgcacaatgcctggcacaaagaaggaagaatataaatgatagttcgactcgtctgtggaagaacttacaatcatggggaaagatggaataaaaacattttttaaacagcatgaaaa

SEQ ID NO: 584 - protein, 253 aa, Homosapiens
MRPADLLQLVLLLDLPRDLGGMGCSSPPCECHQEEDFRVTCKDIQRIPSLPPSTQTLKLIETHLRTIPSHAFSNLPNISRIYVSIDVTLQQLESHSFYNLSKVTHIEIRNTRNLTYIDPDALKELPLLKFLGIFNTGLKMFPDLTKVYSTDIFFILEITDNPYMTSIPVNAFQGLCNETLTLKLYNNGFTSVQGYAFNGTKLDAVYLNKNKYLTVIDKDAFGGVYSGPSLLLPLGRKSLSFETQKAPRSSMPS

SEQ ID NO: 585 - DNA, 1736 bp, Homosapiens
cggcggcggcggcggcggtggtggctcgcgcagcttgttggctcgctatataaaggagagaagcgggcggaccggacggctggagctgcagccggtggcggcagcggcggcgcagggagcggtgaccggtggtggtttccctccttggcgcggggtggggagcgggcaacgccccccggacccctgaagggtcgtggctttttttttttttttaaggcgattctcgaggttttcagctgcgggaggagtgcccccctcctcctcctctctccgctctcccctactccttcaggattgattttgtttaaaattttttccccaatcttgcggtgatttgggtcaccctccgggtgttatagtttttttttttttggttttgtttttatcttgttttcttggggttgccccctcttgtttgtgttgtgtgtggaaatggcgaactcggcaaatacaaacaccgtgcctaaattatacagatctgtgattgaagatgtcattaatgatgtgagagacatctttctggatgatggagtggatgaacaagtactgatggaactaaaaactttatgggaaaacaaactaatgcagtccagggcagtagatggatttcattcagaagagcagcagcttctactgcaagttcaacagcagcatcaaccccagcagcagcagcatcaccaccatcaccatcatcagcaagctcagcctcagcagacagtacctcagcaagcgcagacccagcaggttcttattcctgcatcacagcaagccacagcaccacaagttattgttccagattctaagttgatacagcatatgaatgcatcaaacatgagtgctgctgctacagctgctaccttagcactccctgcaggtgtgactcctgttcagcagatattaacaaattcaggccagcttcttcaggtggtcagagcagccaatggtgcccaatatatctttcagcctcagcagtcagtggttctacaacaacaggttataccacaaatgcagcctggtggagtacaagctcctgttatacagcaggtgctggctcctcttcctggagggatttcaccacagacaggtgtcatcatccagcctcagcaaatcttatttacaggaaataagactcaagttatacctacgacagtggcagcacctacaccagcccaagcacagataactgcaactggccagcagcaaccgcaggcccagcctgctcaaacacaagctccattggtcttacaagttgatggaactggggatacatcatctgaagaagatgaagatgaagaagaagactatgatgatgatgaggaggaagacaaagagaaagatggagctgaagatgggcaggtggaagaagagcccctcaatagtgaagatgatgtgagtgatgaggaaggacaggaactctttgacacagaaaatgttgttgtatgccaatatgataagatacacagaagtaaaaacaaatggaaatttcatctcaaggatggcattatgaatcttaatggaagagattatatattttccaaagccattggagatgcagaatggtgaagagttgctttttttcttttataaataaaagaaacttaaaaaaaatgtaaagcggacagtttgaaacttggggcatatgccaaccaaaacttcgtttctgcatgtcagaaaagtgcagtagaagcaaagctactggaacaaagatagaccttgacaacatagacactacttac

SEQ ID NO: 586 - protein, 376 aa, Homosapiens
MANSANTNTVPKLYRSVIEDVINDVRDIFLDDGVDEQVLMELKTLWENKLMQSRAVDGFHSEEQQLLLQVQQQHQPQQQQHHHHHHHQQAQPQQTVPQQAQTQQVLIPASQQATAPQVIVPDSKLIQHMNASNMSAAATAATLALPAGVTPVQQILTNSGQLLQVVRAANGAQYIFQPQQSVVLQQQVIPQMQPGGVQAPVIQQVLAPLPGGISPQTGVIIQPQQILFTGNKTQVIPTTVAAPTPAQAQITATGQQQPQAQPAQTQAPLVLQVDGTGDTSSEEDEDEEEDYDDDEEEDKEKDGAEDGQVEEEPLNSEDDVSDEEGQELFDTENVVVCQYDKIHRSKNKWKFHLKDGIMNLNGRDYIFSKAIGDAEW

SEQ ID NO: 587 - DNA, 1358 bp, Homosapiens
gctttgcaagttcttcaccgcaaagaactgccgcagacttccgcctgggtgccaaccacgtgatcacgcgagcgttggagaggccctaaattatacagatctgtgattgaagatgtcattaatgatgtgagagacatctttctggatgatggagtggatgaacaagtactgatggaactaaaaactttatgggaaaacaaactaatgcagtccagggcagtagatggatttcattcagaagagcagcagcttctactgcaagttcaacagcagcatcaaccccagcagcagcagcatcaccaccatcaccatcatcagcaagctcagcctcagcagacagtacctcagcaagcgcagacccagcaggttcttattcctgcatcacagcaagccacagcaccacaagttattgttccagattctaagttgatacagcatatgaatgcatcaaacatgagtgctgctgctacagctgctaccttagcactccctgcaggtgtgactcctgttcagcagatattaacaaattcaggccagcttcttcaggtggtcagagcagccaatggtgcccaatatatctttcagcctcagcagtcagtggttctacaacaacaggttataccacaaatgcagcctggtggagtacaagctcctgttatacagcaggtgctggctcctcttcctggagggatttcaccacagacaggtgtcatcatccagcctcagcaaatcttatttacaggaaataagactcaagttatacctacgacagtggcagcacctacaccagcccaagcacagataactgcaactggccagcagcaaccgcaggcccagcctgctcaaacacaagctccattggtcttacaagttgatggaactggggatacatcatctgaagaagatgaagatgaagaagaagactatgatgatgatgaggaggaagacaaagagaaagatggagctgaagatgggcaggtggaagaagagcccctcaatagtgaagatgatgtgagtgatgaggaaggacaggaactctttgacacagaaaatgttgttgtatgccaatatgataagatacacagaagtaaaaacaaatggaaatttcatctcaaggatggcattatgaatcttaatggaagagattatatattttccaaagccattggagatgcagaatggtgaagagttgctttttttcttttataaataaaagaaacttaaaaaaaatgtaaagcggacagtttgaaacttggggcatatgccaaccaaaacttcgtttctgcatgtcagaaaagtgcagtagaagcaaagctactggaacaaagatagaccttgacaacatagacactacttac

SEQ ID NO: 588 - protein, 337 aa, Homosapiens
MELKTLWENKLMQSRAVDGFHSEEQQLLLQVQQQHQPQQQQHHHHHHHQQAQPQQTVPQQAQTQQVLIPASQQATAPQVIVPDSKLIQHMNASNMSAAATAATLALPAGVTPVQQILTNSGQLLQVVRAANGAQYIFQPQQSVVLQQQVIPQMQPGGVQAPVIQQVLAPLPGGISPQTGVIIQPQQILFTGNKTQVIPTTVAAPTPAQAQITATGQQQPQAQPAQTQAPLVLQVDGTGDTSSEEDEDEEEDYDDDEEEDKEKDGAEDGQVEEEPLNSEDDVSDEEGQELFDTENVVVCQYDKIHRSKNKWKFHLKDGIMNLNGRDYIFSKAIGDAEW

SEQ ID NO: 589 - DNA, 2919 bp, Homosapiens
cagatttctgcctggcagattaaccaacggcaagagaggctgatctgtctacattctgagtactgcccttggcaagacacctagaacagaccctggacccaagtctaccgtactaccatacccctactccagcccaccccagacagtattctggggttcacctgaggtcagcagtgtgaagatgaccagtgcctttttagcatgacgactttggaccatgtgattgccacccaccagtcagaatgggtctccttcaatgaagagccaccctttcctgcccactcgcaggggggcacggaagagcacctcccaggactgtcatcttccccagaccagtccgagagctcctccggggagaaccatgtggtggatggaggctctcaagaccattcccactcggagcaggatgactcctctgaaaagatgggcctcatctctgaagcagcttccccacctgggagccctgagcagcccccacctgacctggcctcggccatcagcaactgggttcagtttgaagatgacacaccctgggccagcacatctccacctcatcaggaaacagctgagacagccctaccattgaccatgccctgctggacatgcccttcctttgactccctggggagatgccctctgacttctgagagcagctggaccacccattctgaagacaccagcagtcctagctttggatgttcgtatacagatctgcagctcatcaatgctgaggagcagacgagtggccaggcttctggggctgactcaactgacaattcctcctcgcttcaagaagatgaagaagtagagatggaggccatcagctggcaggccagcagtccagccatgaatgggcaccctgcccctccagtgacctctgctcgttttcccagctgggtcacctttgatgacaatgaagtcagctgccctttaccaccagtcacctctcctctgaagccaaatacaccaccaagtgcatctgtgatcccagatgtaccttataattcaatgggatcatttaagaagagggaccgtcccaagagcactttgatgaacttctccaaagttcagaagctggatatttcctctttaaaccgcacgccttctgtaactgaggcttcaccttggagggcaaccaaccctttcctgaatgagactctgcaggatgtacagccctcccctatcaaccctttcagtgctttctttgaggagcaggagaggcgctcccaaaacagttccatttccagtaccacgggcaaaagccaaagagattccctcattgtcatctaccaggatgccatcagttttgatgattcaagcaaaacccagtcacactctgatgctgttgaaaaactcaaacaactccaaattgatgaccctgatcactttggcagtgcaactctacctgatgatgacccagtagcctggattgaactagatgctcacccgcctggatcagcacggtcccagcctcgtgacgggtggccaatgatgttgaggatccctgagaagaaaaacatcatgtcctccaggcactggggaccgatcttcgtcaaactgacagacactggttacctgcagctgtattatgagcagggcctagaaaaaccattccgtgagttcaagctggagatctgtcatgagatttcagaaccccggcttcaaaactatgatgagaatggcagaatccacagcttgcggatagaccgtgtcacctataaagagaagaagaaataccagcccaaacctgctgtggcccacacagcagagagggaacaggtgattaagctgggcaccaccaattacgatgacttcctgagtttcatccatgcagttcaggaccgtctcatggatctgccagtgttgtcaatggacttgagcacagttggcctcaactaccttgaagaggagattacagtggatgtcagagatgaattctctggcattgtgagcaaaggagacaaccagattctccagcaccatgtcttgacacggatccacatcctgagtttcctgtctgggctcgcagagtgccgcctgggcctcaatgacatcctcgtcaaagggaatgaaatagttttgaggcaggacatcatgcccaccaccaccacaaagtggatcaagctccatgagtgccgtttccatgggtgtgtggatgaggatgttttccacaactcacgggtcattctgttcaaccctttggatgcgtgccggtttgagctaatgcggttcaggacagtgtttgctgagaagaccttgcctttcacactcaggacggccacaagtgtcaatggggcagaggtggaggtgcagagctggctgaggatgtcaactggcttctccgccaatcgtgaccccctcactcaggttccctgtgagaatgtgatgatccgttaccctgtgcccagtgagtgggtgaaaaacttccgcagggaaagtgtcctgggggaaaagtctttgaaagccaaagtgaaccggggggcaagttttggctccactagtgtttctggctctgagcctgtcatgagagtaactctgggaactgccaagtacgagcatgccttcaactccattgtgtggaggataaaccgactgccggacaaaaactcagcttccggtcacccacactgtttcttttgccaccttgaactcggctctgaccgggaagtgccttccagatttgccaatcacgtgaatgtcgagttcagcatgcccacaacttctgcctccaaagccagcgtgagatctatctctgtagaagacaagactgacgtcaggaagtgggtcaattattctgcacactacagctaccaggtagccttgggaagcatctggctaatgcttccaactccatttgttcaccccactaccctccccctcttattccttttagccatgcttactatgttcgcctggtaa

SEQ ID NO: 590 - protein, 905 aa, Homosapiens
MTTLDHVIATHQSEWVSFNEEPPFPAHSQGGTEEHLPGLSSSPDQSESSSGENHVVDGGSQDHSHSEQDDSSEKMGLISEAASPPGSPEQPPPDLASAISNWVQFEDDTPWASTSPPHQETAETALPLTMPCWTCPSFDSLGRCPLTSESSWTTHSEDTSSPSFGCSYTDLQLINAEEQTSGQASGADSTDNSSSLQEDEEVEMEAISWQASSPAMNGHPAPPVTSARFPSWVTFDDNEVSCPLPPVTSPLKPNTPPSASVIPDVPYNSMGSFKKRDRPKSTLMNFSKVQKLDISSLNRTPSVTEASPWRATNPFLNETLQDVQPSPINPFSAFFEEQERRSQNSSISSTTGKSQRDSLIVIYQDAISFDDSSKTQSHSDAVEKLKQLQIDDPDHFGSATLPDDDPVAWIELDAHPPGSARSQPRDGWPMMLRIPEKKNIMSSRHWGPIFVKLTDTGYLQLYYEQGLEKPFREFKLEICHEISEPRLQNYDENGRIHSLRIDRVTYKEKKKYQPKPAVAHTAEREQVIKLGTTNYDDFLSFIHAVQDRLMDLPVLSMDLSTVGLNYLEEEITVDVRDEFSGIVSKGDNQILQHHVLTRIHILSFLSGLAECRLGLNDILVKGNEIVLRQDIMPTTTTKWIKLHECRFHGCVDEDVFHNSRVILFNPLDACRFELMRFRTVFAEKTLPFTLRTATSVNGAEVEVQSWLRMSTGFSANRDPLTQVPCENVMIRYPVPSEWVKNFRRESVLGEKSLKAKVNRGASFGSTSVSGSEPVMRVTLGTAKYEHAFNSIVWRINRLPDKNSASGHPHCFFCHLELGSDREVPSRFANHVNVEFSMPTTSASKASVRSISVEDKTDVRKWVNYSAHYSYQVALGSIWLMLPTPFVHPTTLPLLFLLAMLTMFAW

SEQ ID NO: 591 - DNA, 5168 bp, Homosapiens
gccttggtcattggaccggctcccaaccaaaaccacaccatagggttttctgctcttggccaacccaacatgagaaaagaggaattaaatggtcctactaataagaaagcctcagcgtagcattaagggacgtagcaggtcttctggccacactcccctacaaatgtggaaagctcattggtgaaaacagttctcaggggtcaaagcaaaggaactgatctgggtaaagtagaggctgcctgatcccaatcagacatcctcacctctcaataacctttgccatttctctgccatagagtgaaagtgtccccaggccaaaagcccagggctccaggctgccatcaggatggtgggtgaaggaccctaccttatctcagatctggaccagcgaggccggcggagatcctttgcagaaagatatgaccccagcctgaagaccatgatcccagtgcgaccctgtgcaaggttagcacccaacccggtggatgatgccgggctactctccttcgccacattttcctggctcacgccggtgatggtgaaaggctaccggcaaaggctgaccgtagacaccctgcccccattgtcgacatatgactcatctgacaccaatgccaaaagatttcgagtcctttgggatgaagaggtagcaagggtgggtcctgagaaggcctctctgagccacgtggtgtggaaattccagaggacacgcgtgttgatggacatcgtggccaacatcctgtgcatcatcatggcagccatagggccggtgattctcattcaccaaatcctccagcagactgagaggacctctgggaaagtctgggttggcattggactgtgcatagccctttttgccaccgagtttaccaaagtcttcttttgggcccttgcctgggccatcaactaccgcacggccatccggttgaaggtggcgctctccaccttggtttttgaaaacctagtgtccttcaagacattgacccacatctctgttggcgaggtgctcaatatactgtcaagtgatagctattctttgtttgaagctgccttgttttgtcctttgccagccaccatcccgatcctaatggtcttttgtgcggcgtacgcctttttcattctggggcccacagctctcatcgggatatcagtgtatgtcatattcatacccgtccagatgtttatggccaagctcaattcagctttccgaaggtcagcaattttggtgacagacaagcgagttcagacaatgaatgagtttctgacctgcatcaggctgatcaaaatgtatgcctgggagaaatcttttaccaacactatccaagatataagaaggagggaaagaaaattactggaaaaagctggatttgtccaaagtggaaactctgccctggcccccatcgtgtccaccatagccatcgtgctgacattatcctgccacatcctcctgagacgcaaactcaccgcacccgtggcatttagtgtgattgccatgtttaatgtaatgaagttttccattgcaatcttgcccttctccatcaaagcaatggctgaagcgaatgtctctctaaggagaatgaagaaaattctcatagataaaagccccccatcttacatcacccaaccagaagacccagatactgtcttgcttttagcaaatgccaccttgacatgggagcatgaagccagcaggaaaagtaccccaaagaaattgcagaaccagaaaaggcatttatgcaagaaacagaggtcagaggcatacagtgagaggagtccaccagccaagggagccactggcccagaggagcaaagtgacagcctcaaatcggttctgcacagcataagctttgtggtgagaaaggggaagatcttgggaatatgtgggaatgtgggaagtggaaagagctccctccttgcagctctcctaggacagatgcagctgcagaaaggggtggtggcagtcaatggaactttggcctacgtttcacagcaggcatggatctttcatggaaatgtgagagaaaacatactctttggagaaaagtatgatcaccaaaggtatcagcacacagtccgcgtctgtggcctccagaaggacctgagcaacctcccctatggagacctgactgagattggggagcggggcctcaacctctctggggggcagaggcagaggattagcctggcccgcgctgtctactccgaccgtcagctctacctgctggacgaccccctgtcggccgtggacgcccacgtggggaagcacgtctttgaggagtgcattaagaagacgctcaggggaaagacagtcgtcctggtgacccaccagctacagttcttagagtcttgtgatgaagttattttattagaagatggagagatttgtgaaaagggaacccacaaggagttaatggaggagagagggcgctatgcaaaactgattcacaacctgcgaggattgcagttcaaggatcctgaacacctttacaatgcagcaatggtggaagccttcaaggagagccctgctgagagagaggaagatgctggtataatcgttttggctccaggaaatgagaaagatgaaggaaaagaatctgaaacaggctcagaatttgtagacacaaaagttcctgagcaccagctcatccagactgaatccccccaggaaggaaccgtgacctggaaaacatatcacacgtacattaaggcttctggagggtacctcctttctctcttcactgtgttcctcttcctcctgatgattggcagcgctgccttcagcaactggtggctgggtctctggttggacaagggctcacggatgacctgtgggccccagggcaacaggaccatgtgtgaggtcggcgcggtgctggcagacatcggtcagcatgtgtaccagtgggtgtacactgcaagcatggtgttcatgctggtgtttggcgtcaccaaaggcttcgtcttcaccaagaccacactgatggcatcctcctctctgcatgacacggtgtttgataagatcttaaagagcccaatgagtttctttgacacgactcccactggcaggctaatgaaccgtttttccaaggatatggacgagctggatgtgaggctgccgtttcacgcagagaactttctgcagcagttttttatggtggtgtttattctcgtgatcttggctgctgtgtttcctgctgtccttttagtcgtggccagccttgctgtaggcttcttcattctgttacgcattttccacagaggagtccaggagctcaagaaggtggagaatgtcagccggtcaccctggttcacccacatcacctcctccatgcagggcctgggcatcattcacgcctatggcaagaaggagagctgcatcacctatcacctcctctactttaactgtgctctcaggtggtttgcgctgagaatggatgtcctcatgaacatccttaccttcactgtggccttgttggtgaccctgagtttctcctccatcagtacttcatccaaaggcctgtcattgtcatacatcatccagctgagcggactgctccaagtgtgtgtgcgaacgggaacagagacgcaagccaaattcacctccgtggagctgctcagggaatacatttcgacctgtgttcctgaatgcactcatcccctcaaagtggggacctgtcccaaggactggcccagccgtggggagatcaccttcagagactatcagatgagatacagagacaacaccccccttgttctcgacagcctgaacttgaacatacaaagtgggcagacagtcgggattgttggaagaacaggttccggaaagtcatcgttaggaatggctttgtttcgtctggtggagccagccagtggcacaatctttattgatgaggtggatatctgcattctcagcttggaagacctcagaaccaagctgactgtgatcccacaggatcctgtcctgtttgtaggtacagtaaggtacaacttggatccctttgagagtcacaccgatgagatgctctggcaggttctggagagaacattcatgagagacacaataatgaaactcccagaaaaattacaggcagaagtcacagaaaatggagaaaacttctcagtaggggaacgtcagctgctttgtgtggcccgagctcttctccgtaattcaaagatcattctccttgatgaagccaccgcctctatggactccaagactgacaccctggttcagaacaccatcaaagatgccttcaagggctgcactgtgctgaccatcgcccaccgcctcaacacagttctcaactgcgatcacgtcctggttatggaaaatgggaaggtgattgagtttgacaagcctgaagtccttgcagagaagccagattctgcatttgcgatgttactagcagcagaagtcagattgtagaggtcctggcggctgattctagaggaggaagaggctctgtgagatgaataggaggagtcttcaggaggaggggctgtcctctccgcaggcagccctggtcttcagcccctcccatccacggagtgagctggggctgaagttgtccccactgccatactcagtccatgtcaccccacttggtgggcttggggttggttctgggtggtgaaccggggcagacccagctaatggattaaaaaactgcccttcacctcccaaatccccaagggttcctcatgtgttttcaccaaaaccaccccagtgcctgagattgaaaatattgtaactttcagttagaaatcagccacaataaacaacatgggaaaatgccttaggatggagtttgcaaggtttccttgcccattatcagaaggaaaaagagcagaattttcttctcgtttaaccccactcacttccatcttgactgggtgacaagtggtaatgacacagatttgtagcgtgaaagactgaatacagtgtttggccaaaaatttttttaaaaatcatattatatgtttcaattgatctgttagaataaccaagaaaacaaaatgctggagtttctctataaatgacacttttatatcttctttattcgtcgttaaaacgcggtaggaaattaccctgaaatgtcgccttgcaattatttcactgaagatattccaatttccatactatttcctccaatagacccttgttgcct

SEQ ID NO: 592 - protein, 1359 aa, Homosapiens
MVGEGPYLISDLDQRGRRRSFAERYDPSLKTMIPVRPCARLAPNPVDDAGLLSFATFSWLTPVMVKGYRQRLTVDTLPPLSTYDSSDTNAKRFRVLWDEEVARVGPEKASLSHVVWKFQRTRVLMDIVANILCIIMAAIGPVILIHQILQQTERTSGKVWVGIGLCIALFATEFTKVFFWALAWAINYRTAIRLKVALSTLVFENLVSFKTLTHISVGEVLNILSSDSYSLFEAALFCPLPATIPILMVFCAAYAFFILGPTALIGISVYVIFIPVQMFMAKLNSAFRRSAILVTDKRVQTMNEFLTCIRLIKMYAWEKSFTNTIQDIRRRERKLLEKAGFVQSGNSALAPIVSTIAIVLTLSCHILLRRKLTAPVAFSVIAMFNVMKFSIAILPFSIKAMAEANVSLRRMKKILIDKSPPSYITQPEDPDTVLLLANATLTWEHEASRKSTPKKLQNQKRHLCKKQRSEAYSERSPPAKGATGPEEQSDSLKSVLHSISFVVRKGKILGICGNVGSGKSSLLAALLGQMQLQKGVVAVNGTLAYVSQQAWIFHGNVRENILFGEKYDHQRYQHTVRVCGLQKDLSNLPYGDLTEIGERGLNLSGGQRQRISLARAVYSDRQLYLLDDPLSAVDAHVGKHVFEECIKKTLRGKTVVLVTHQLQFLESCDEVILLEDGEICEKGTHKELMEERGRYAKLIHNLRGLQFKDPEHLYNAAMVEAFKESPAEREEDAGIIVLAPGNEKDEGKESETGSEFVDTKVPEHQLIQTESPQEGTVTWKTYHTYIKASGGYLLSLFTVFLFLLMIGSAAFSNWWLGLWLDKGSRMTCGPQGNRTMCEVGAVLADIGQHVYQWVYTASMVFMLVFGVTKGFVFTKTTLMASSSLHDTVFDKILKSPMSFFDTTPTGRLMNRFSKDMDELDVRLPFHAENFLQQFFMVVFILVILAAVFPAVLLVVASLAVGFFILLRIFHRGVQELKKVENVSRSPWFTHITSSMQGLGIIHAYGKKESCITYHLLYFNCALRWFALRMDVLMNILTFTVALLVTLSFSSISTSSKGLSLSYIIQLSGLLQVCVRTGTETQAKFTSVELLREYISTCVPECTHPLKVGTCPKDWPSRGEITFRDYQMRYRDNTPLVLDSLNLNIQSGQTVGIVGRTGSGKSSLGMALFRLVEPASGTIFIDEVDICILSLEDLRTKLTVIPQDPVLFVGTVRYNLDPFESHTDEMLWQVLERTFMRDTIMKLPEKLQAEVTENGENFSVGERQLLCVARALLRNSKIILLDEATASMDSKTDTLVQNTIKDAFKGCTVLTIAHRLNTVLNCDHVLVMENGKVIEFDKPEVLAEKPDSAFAMLLAAEVRL

SEQ ID NO: 593 - DNA, 4576 bp, Homosapiens
gtgtatttgaataaaccaggttggcaaatcatactatagctgaaagaattggcaggaactgaaaatgactaggaagaggacatactgggtgcccaactcttctggtggcctcgtgaatcgtggcatcgacataggcgatgacatggtttcaggacttatttataaaacctatactctccaagatggcccctggagtcagcaagagagaaatcctgaggctccagggagggcagctgtcccaccgtgggggaagtatgatgctgccttgagaaccatgattcccttccgtcccaagccgaggtttcctgccccccagcccctggacaatgctggcctgttctcctacctcaccgtgtcatggctcaccccgctcatgatccaaagcttacggagtcgcttagatgagaacaccatccctccactgtcagtccatgatgcctcagacaaaaatgtccaaaggcttcaccgcctttgggaagaagaagtctcaaggcgagggattgaaaaagcttcagtgcttctggtgatgctgaggttccagagaacaaggttgattttcgatgcacttctgggcatctgcttctgcattgccagtgtactcgggccaatattgattataccaaagatcctggaatattcagaagagcagttggggaatgttgtccatggagtgggactctgctttgccctttttctctccgaatgtgtgaagtctctgagtttctcctccagttggatcatcaaccaacgcacagccatcaggttccgagcagctgtttcctcctttgcctttgagaagctcatccaatttaagtctgtaatacacatcacctcaggagaggccatcagcttcttcaccggtgatgtaaactacctgtttgaaggggtgtgctatggacccctagtactgatcacctgcgcatcgctggtcatctgcagcatttcttcctacttcattattggatacactgcatttattgccatcttatgctatctcctggttttcccactggcggtattcatgacaagaatggctgtgaaggctcagcatcacacatctgaggtcagcgaccagcgcatccgtgtgaccagtgaagttctcacttgcattaagctgattaaaatgtacacatgggagaaaccatttgcaaaaatcattgaagacctaagaaggaaggaaaggaaactattggagaagtgcgggcttgtccagagcctgacaagtataaccttgttcatcatccccacagtggccacagcggtctgggttctcatccacacatccttaaagctgaaactcacagcgtcaatggccttcagcatgctggcctccttgaatctccttcggctgtcagtgttctttgtgcctattgcagtcaaaggtctcacgaattccaagtctgcagtgatgaggttcaagaagtttttcctccaggagagccctgttttctatgtccagacattacaagaccccagcaaagctctggtctttgaggaggccaccttgtcatggcaacagacctgtcccgggatcgtcaatggggcactggagctggagaggaacgggcatgcttctgaggggatgaccaggcctagagatgccctcgggccagaggaagaagggaacagcctgggcccagagttgcacaagatcaacctggtggtgtccaaggggatgatgttaggggtctgcggcaacacggggagtggtaagagcagcctgttgtcagccatcctggaggagatgcacttgctcgagggctcggtgggggtgcagggaagcctggcctatgtcccccagcaggcctggatcgtcagcgggaacatcagggagaacatcctcatgggaggcgcatatgacaaggcccgatacctccaggtgctccactgctgctccctgaatcgggacctggaacttctgccctttggagacatgacagagattggagagcggggcctcaacctctctggggggcagaaacagaggatcagcctggcccgcgccgtctattccgaccgtcagatctacctgctggacgaccccctgtctgctgtggacgcccacgtggggaagcacatttttgaggagtgcattaagaagacactcagggggaagacggtcgtcctggtgacccaccagctgcagtacttagaattttgtggccagatcattttgttggaaaatgggaaaatctgtgaaaatggaactcacagtgagttaatgcagaaaaaggggaaatatgcccaacttatccagaagatgcacaaggaagccacttcggacatgttgcaggacacagcaaagatagcagagaagccaaaggtagaaagtcaggctctggccacctccctggaagagtctctcaacggaaatgctgtgccggagcatcagctcacacaggaggaggagatggaagaaggctccttgagttggagggtctaccaccactacatccaggcagctggaggttacatggtctcttgcataattttcttcttcgtggtgctgatcgtcttcttaacgatcttcagcttctggtggctgagctactggttggagcagggctcggggaccaatagcagccgagagagcaatggaaccatggcagacctgggcaacattgcagacaatcctcaactgtccttctaccagctggtgtacgggctcaacgccctgctcctcatctgtgtgggggtctgctcctcagggattttcaccaaggtcacgaggaaggcatccacggccctgcacaacaagctcttcaacaaggttttccgctgccccatgagtttctttgacaccatcccaataggccggcttttgaactgcttcgcaggggacttggaacagctggaccagctcttgcccatcttttcagagcagttcctggtcctgtccttaatggtgatcgccgtcctgttgattgtcagtgtgctgtctccatatatcctgttaatgggagccataatcatggttatttgcttcatttattatatgatgttcaagaaggccatcggtgtgttcaagagactggagaactatagccggtctcctttattctcccacatcctcaattctctgcaaggcctgagctccatccatgtctatggaaaaactgaagacttcatcagccagtttaagaggctgactgatgcgcagaataactacctgctgttgtttctatcttccacacgatggatggcattgaggctggagatcatgaccaaccttgtgaccttggctgttgccctgttcgtggcttttggcatttcctccaccccctactcctttaaagtcatggctgtcaacatcgtgctgcagctggcgtccagcttccaggccactgcccggattggcttggagacagaggcacagttcacggctgtagagaggatactgcagtacatgaagatgtgtgtctcggaagctcctttacacatggaaggcacaagttgtccccaggggtggccacagcatggggaaatcatatttcaggattatcacatgaaatacagagacaacacacccaccgtgcttcacggcatcaacctgaccatccgcggccacgaagtggtgggcatcgtgggaaggacgggctctgggaagtcctccttgggcatggctctcttccgcctggtggagcccatggcaggccggattctcattgacggcgtggacatttgcagcatcggcctggaggacttgcggtccaagctctcagtgatccctcaagatccagtgctgctctcaggaaccatcagattcaacctagatccctttgaccgtcacactgaccagcagatctgggatgccttggagaggacattcctgaccaaggccatctcaaagttccccaaaaagctgcatacagatgtggtggaaaacggtggaaacttctctgtgggggagaggcagctgctctgcattgccagggctgtgcttcgcaactccaagatcatccttatcgatgaagccacagcctccattgacatggagacagacaccctgatccagcgcacaatccgtgaagccttccagggctgcaccgtgctcgtcattgcccaccgtgtcaccactgtgctgaactgtgaccacatcctggttatgggcaatgggaaggtggtagaatttgatcggccggaggtactgcggaagaagcctgggtcattgttcgcagccctcatggccacagccacttcttcactgagataaggagatgtggagacttcatggaggctggcagctgagctcagaggttcacacaggtgcagcttcgaggcccacagtctgcgaccttcttgtttggagatgagaacttctcctggaagcaggggtaaatgtagggggggtggggattgctggatggaaaccctggaataggctacttgatggctctcaagaccttagaaccccagaaccatctaagacatgggattcagtgatcatgtggttctccttttaacttacatgctgaataattttataataaggtaaaagcttatagttttctgatctgtgttagaagtgttgcaaatgctgtactgactttgtaaaatataaaactaaggaaaactc

SEQ ID NO: 594 - protein, 1382 aa, Homosapiens
MTRKRTYWVPNSSGGLVNRGIDIGDDMVSGLIYKTYTLQDGPWSQQERNPEAPGRAAVPPWGKYDAALRTMIPFRPKPRFPAPQPLDNAGLFSYLTVSWLTPLMIQSLRSRLDENTIPPLSVHDASDKNVQRLHRLWEEEVSRRGIEKASVLLVMLRFQRTRLIFDALLGICFCIASVLGPILIIPKILEYSEEQLGNVVHGVGLCFALFLSECVKSLSFSSSWIINQRTAIRFRAAVSSFAFEKLIQFKSVIHITSGEAISFFTGDVNYLFEGVCYGPLVLITCASLVICSISSYFIIGYTAFIAILCYLLVFPLAVFMTRMAVKAQHHTSEVSDQRIRVTSEVLTCIKLIKMYTWEKPFAKIIEDLRRKERKLLEKCGLVQSLTSITLFIIPTVATAVWVLIHTSLKLKLTASMAFSMLASLNLLRLSVFFVPIAVKGLTNSKSAVMRFKKFFLQESPVFYVQTLQDPSKALVFEEATLSWQQTCPGIVNGALELERNGHASEGMTRPRDALGPEEEGNSLGPELHKINLVVSKGMMLGVCGNTGSGKSSLLSAILEEMHLLEGSVGVQGSLAYVPQQAWIVSGNIRENILMGGAYDKARYLQVLHCCSLNRDLELLPFGDMTEIGERGLNLSGGQKQRISLARAVYSDRQIYLLDDPLSAVDAHVGKHIFEECIKKTLRGKTVVLVTHQLQYLEFCGQIILLENGKICENGTHSELMQKKGKYAQLIQKMHKEATSDMLQDTAKIAEKPKVESQALATSLEESLNGNAVPEHQLTQEEEMEEGSLSWRVYHHYIQAAGGYMVSCIIFFFVVLIVFLTIFSFWWLSYWLEQGSGTNSSRESNGTMADLGNIADNPQLSFYQLVYGLNALLLICVGVCSSGIFTKVTRKASTALHNKLFNKVFRCPMSFFDTIPIGRLLNCFAGDLEQLDQLLPIFSEQFLVLSLMVIAVLLIVSVLSPYILLMGAIIMVICFIYYMMFKKAIGVFKRLENYSRSPLFSHILNSLQGLSSIHVYGKTEDFISQFKRLTDAQNNYLLLFLSSTRWMALRLEIMTNLVTLAVALFVAFGISSTPYSFKVMAVNIVLQLASSFQATARIGLETEAQFTAVERILQYMKMCVSEAPLHMEGTSCPQGWPQHGEIIFQDYHMKYRDNTPTVLHGINLTIRGHEVVGIVGRTGSGKSSLGMALFRLVEPMAGRILIDGVDICSIGLEDLRSKLSVIPQDPVLLSGTIRFNLDPFDRHTDQQIWDALERTFLTKAISKFPKKLHTDVVENGGNFSVGERQLLCIARAVLRNSKIILIDEATASIDMETDTLIQRTIREAFQGCTVLVIAHRVTTVLNCDHILVMGNGKVVEFDRPEVLRKKPGSLFAALMATATSSLR

SEQ ID NO: 595 - DNA, 4862 bp, Homosapiens
actgggataaagcaagaagactgattttatgagcaggggtttgatacatcaaaggagattgcccaggatcaagggtgcggtgttgggggtgggttggggagggtggttagagaaggtttcactaagtgatttgggcctgaggcctgagaagatgtttaaaaagagggatcaagcacaggctaaggagaggaaagagcaggcacccaaacctctgcatggccccaatatgctccctgcagggtagtgccccctcttctggctgctcaaggcgagatctaagcttcttctaactcctgctgtcttttcatattctctgattctgggaaacgaagaattggcaggaactgaaaatgactaggaagaggacatactgggtgcccaactcttctggtggcctcgtgaatcgtggcatcgacataggcgatgacatggtttcaggacttatttataaaacctatactctccaagatggcccctggagtcagcaagagagaaatcctgaggctccagggagggcagctgtcccaccgtgggggaagtatgatgctgccttgagaaccatgattcccttccgtcccaagccgaggtttcctgccccccagcccctggacaatgctggcctgttctcctacctcaccgtgtcatggctcaccccgctcatgatccaaagcttacggagtcgcttagatgagaacaccatccctccactgtcagtccatgatgcctcagacaaaaatgtccaaaggcttcaccgcctttgggaagaagaagtctcaaggcgagggattgaaaaagcttcagtgcttctggtgatgctgaggttccagagaacaaggttgattttcgatgcacttctgggcatctgcttctgcattgccagtgtactcgggccaatattgattataccaaagatcctggaatattcagaagagcagttggggaatgttgtccatggagtgggactctgctttgccctttttctctccgaatgtgtgaagtctctgagtttctcctccagttggatcatcaaccaacgcacagccatcaggttccgagcagctgtttcctcctttgcctttgagaagctcatccaatttaagtctgtaatacacatcacctcaggagaggccatcagcttcttcaccggtgatgtaaactacctgtttgaaggggtgtgctatggacccctagtactgatcacctgcgcatcgctggtcatctgcagcatttcttcctacttcattattggatacactgcatttattgccatcttatgctatctcctggttttcccactggcggtattcatgacaagaatggctgtgaaggctcagcatcacacatctgaggtcagcgaccagcgcatccgtgtgaccagtgaagttctcacttgcattaagctgattaaaatgtacacatgggagaaaccatttgcaaaaatcattgaagacctaagaaggaaggaaaggaaactattggagaagtgcgggcttgtccagagcctgacaagtataaccttgttcatcatccccacagtggccacagcggtctgggttctcatccacacatccttaaagctgaaactcacagcgtcaatggccttcagcatgctggcctccttgaatctccttcggctgtcagtgttctttgtgcctattgcagtcaaaggtctcacgaattccaagtctgcagtgatgaggttcaagaagtttttcctccaggagagccctgttttctatgtccagacattacaagaccccagcaaagctctggtctttgaggaggccaccttgtcatggcaacagacctgtcccgggatcgtcaatggggcactggagctggagaggaacgggcatgcttctgaggggatgaccaggcctagagatgccctcgggccagaggaagaagggaacagcctgggcccagagttgcacaagatcaacctggtggtgtccaaggggatgatgttaggggtctgcggcaacacggggagtggtaagagcagcctgttgtcagccatcctggaggagatgcacttgctcgagggctcggtgggggtgcagggaagcctggcctatgtcccccagcaggcctggatcgtcagcgggaacatcagggagaacatcctcatgggaggcgcatatgacaaggcccgatacctccaggtgctccactgctgctccctgaatcgggacctggaacttctgccctttggagacatgacagagattggagagcggggcctcaacctctctggggggcagaaacagaggatcagcctggcccgcgccgtctattccgaccgtcagatctacctgctggacgaccccctgtctgctgtggacgcccacgtggggaagcacatttttgaggagtgcattaagaagacactcagggggaagacggtcgtcctggtgacccaccagctgcagtacttagaattttgtggccagatcattttgttggaaaatgggaaaatctgtgaaaatggaactcacagtgagttaatgcagaaaaaggggaaatatgcccaacttatccagaagatgcacaaggaagccacttcggacatgttgcaggacacagcaaagatagcagagaagccaaaggtagaaagtcaggctctggccacctccctggaagagtctctcaacggaaatgctgtgccggagcatcagctcacacaggaggaggagatggaagaaggctccttgagttggagggtctaccaccactacatccaggcagctggaggttacatggtctcttgcataattttcttcttcgtggtgctgatcgtcttcttaacgatcttcagcttctggtggctgagctactggttggagcagggctcggggaccaatagcagccgagagagcaatggaaccatggcagacctgggcaacattgcagacaatcctcaactgtccttctaccagctggtgtacgggctcaacgccctgctcctcatctgtgtgggggtctgctcctcagggattttcaccaaggtcacgaggaaggcatccacggccctgcacaacaagctcttcaacaaggttttccgctgccccatgagtttctttgacaccatcccaataggccggcttttgaactgcttcgcaggggacttggaacagctggaccagctcttgcccatcttttcagagcagttcctggtcctgtccttaatggtgatcgccgtcctgttgattgtcagtgtgctgtctccatatatcctgttaatgggagccataatcatggttatttgcttcatttattatatgatgttcaagaaggccatcggtgtgttcaagagactggagaactatagccggtctcctttattctcccacatcctcaattctctgcaaggcctgagctccatccatgtctatggaaaaactgaagacttcatcagccagtttaagaggctgactgatgcgcagaataactacctgctgttgtttctatcttccacacgatggatggcattgaggctggagatcatgaccaaccttgtgaccttggctgttgccctgttcgtggcttttggcatttcctccaccccctactcctttaaagtcatggctgtcaacatcgtgctgcagctggcgtccagcttccaggccactgcccggattggcttggagacagaggcacagttcacggctgtagagaggatactgcagtacatgaagatgtgtgtctcggaagctcctttacacatggaaggcacaagttgtccccaggggtggccacagcatggggaaatcatatttcaggattatcacatgaaatacagagacaacacacccaccgtgcttcacggcatcaacctgaccatccgcggccacgaagtggtgggcatcgtgggaaggacgggctctgggaagtcctccttgggcatggctctcttccgcctggtggagcccatggcaggccggattctcattgacggcgtggacatttgcagcatcggcctggaggacttgcggtccaagctctcagtgatccctcaagatccagtgctgctctcaggaaccatcagattcaacctagatccctttgaccgtcacactgaccagcagatctgggatgccttggagaggacattcctgaccaaggccatctcaaagttccccaaaaagctgcatacagatgtggtggaaaacggtggaaacttctctgtgggggagaggcagctgctctgcattgccagggctgtgcttcgcaactccaagatcatccttatcgatgaagccacagcctccattgacatggagacagacaccctgatccagcgcacaatccgtgaagccttccagggctgcaccgtgctcgtcattgcccaccgtgtcaccactgtgctgaactgtgaccacatcctggttatgggcaatgggaaggtggtagaatttgatcggccggaggtactgcggaagaagcctgggtcattgttcgcagccctcatggccacagccacttcttcactgagataaggagatgtggagacttcatggaggctggcagctgagctcagaggttcacacaggtgcagcttcgaggcccacagtctgcgaccttcttgtttggagatgagaacttctcctggaagcaggggtaaatgtagggggggtggggattgctggatggaaaccctggaataggctacttgatggctctcaagaccttagaaccccagaaccatctaagacatgggattcagtgatcatgtggttctccttttaacttacatgctgaataattttataataaggtaaaagcttatagttttctgatctgtgttagaagtgttgcaaatgctgtactgactttgtaaaatataaaactaaggaaaactc

SEQ ID NO: 596 - protein, 1382 aa, Homosapiens; identical to SEQ ID NO: 594

SEQ ID NO: 597 - DNA, 4462 bp, Homosapiens
gtgtatttgaataaaccaggttggcaaatcatactatagctgaaagaattggcaggaactgaaaatgactaggaagaggacatactgggtgcccaactcttctggtggcctcgtgaatcgtggcatcgacataggcgatgacatggtttcaggacttatttataaaacctatactctccaagatggcccctggagtcagcaagagagaaatcctgaggctccagggagggcagctgtcccaccgtgggggaagtatgatgctgccttgagaaccatgattcccttccgtcccaagccgaggtttcctgccccccagcccctggacaatgctggcctgttctcctacctcaccgtgtcatggctcaccccgctcatgatccaaagcttacggagtcgcttagatgagaacaccatccctccactgtcagtccatgatgcctcagacaaaaatgtccaaaggcttcaccgcctttgggaagaagaagtctcaaggcgagggattgaaaaagcttcagtgcttctggtgatgctgaggttccagagaacaaggttgattttcgatgcacttctgggcatctgcttctgcattgccagtgtactcgggccaatattgattataccaaagatcctggaatattcagaagagcagttggggaatgttgtccatggagtgggactctgctttgccctttttctctccgaatgtgtgaagtctctgagtttctcctccagttggatcatcaaccaacgcacagccatcaggttccgagcagctgtttcctcctttgcctttgagaagctcatccaatttaagtctgtaatacacatcacctcaggagaggccatcagcttcttcaccggtgatgtaaactacctgtttgaaggggtgtgctatggacccctagtactgatcacctgcgcatcgctggtcatctgcagcatttcttcctacttcattattggatacactgcatttattgccatcttatgctatctcctggttttcccactggcggtattcatgacaagaatggctgtgaaggctcagcatcacacatctgaggtcagcgaccagcgcatccgtgtgaccagtgaagttctcacttgcattaagctgattaaaatgtacacatgggagaaaccatttgcaaaaatcattgaagacctaagaaggaaggaaaggaaactattggagaagtgcgggcttgtccagagcctgacaagtataaccttgttcatcatccccacagtggccacagcggtctgggttctcatccacacatccttaaagctgaaactcacagcgtcaatggccttcagcatgctggcctccttgaatctccttcggctgtcagtgttctttgtgcctattgcagtcaaaggtctcacgaattccaagtctgcagtgatgaggttcaagaagtttttcctccaggagagccctgttttctatgtccagacattacaagaccccagcaaagctctggtctttgaggaggccaccttgtcatggcaacagacctgtcccgggatcgtcaatggggcactggagctggagaggaacgggcatgcttctgaggggatgaccaggcctagagatgccctcgggccagaggaagaagggaacagcctgggcccagagttgcacaagatcaacctggtggtgtccaaggggatgatgttaggggtctgcggcaacacggggagtggtaagagcagcctgttgtcagccatcctggaggagatgcacttgctcgagggctcggtgggggtgcagggaagcctggcctatgtcccccagcaggcctggatcgtcagcgggaacatcagggagaacatcctcatgggaggcgcatatgacaaggcccgatacctccaggtgctccactgctgctccctgaatcgggacctggaacttctgccctttggagacatgacagagattggagagcggggcctcaacctctctggggggcagaaacagaggatcagcctggcccgcgccgtctattccgaccgtcagatctacctgctggacgaccccctgtctgctgtggacgcccacgtggggaagcacatttttgaggagtgcattaagaagacactcagggggaagacggtcgtcctggtgacccaccagctgcagtacttagaattttgtggccagatcattttgttggaaaatgggaaaatctgtgaaaatggaactcacagtgagttaatgcagaaaaaggggaaatatgcccaacttatccagaagatgcacaaggaagccacttcggacatgttgcaggacacagcaaagatagcagagaagccaaaggtagaaagtcaggctctggccacctccctggaagagtctctcaacggaaatgctgtgccggagcatcagctcacacaggaggaggagatggaagaaggctccttgagttggagggtctaccaccactacatccaggcagctggaggttacatggtctcttgcataattttcttcttcgtggtgctgatcgtcttcttaacgatcttcagcttctggtggctgagctactggttggagcagggctcggggaccaatagcagccgagagagcaatggaaccatggcagacctgggcaacattgcagacaatcctcaactgtccttctaccagctggtgtacgggctcaacgccctgctcctcatctgtgtgggggtctgctcctcagggattttcaccaaggtcacgaggaaggcatccacggccctgcacaacaagctcttcaacaaggttttccgctgccccatgagtttctttgacaccatcccaataggccggcttttgaactgcttcgcaggggacttggaacagctggaccagctcttgcccatcttttcagagcagttcctggtcctgtccttaatggtgatcgccgtcctgttgattgtcagtgtgctgtctccatatatcctgttaatgggagccataatcatggttatttgcttcatttattatatgatgttcaagaaggccatcggtgtgttcaagagactggagaactatagccggtctcctttattctcccacatcctcaattctctgcaaggcctgagctccatccatgtctatggaaaaactgaagacttcatcagccagtttaagaggctgactgatgcgcagaataactacctgctgttgtttctatcttccacacgatggatggcattgaggctggagatcatgaccaaccttgtgaccttggctgttgccctgttcgtggcttttggcatttcctccaccccctactcctttaaagtcatggctgtcaacatcgtgctgcagctggcgtccagcttccaggccactgcccggattggcttggagacagaggcacagttcacggctgtagagaggatactgcagtacatgaagatgtgtgtctcggaagctcctttacacatggaaggcacaagttgtccccaggggtggccacagcatggggaaatcatatttcaggattatcacatgaaatacagagacaacacacccaccgtgcttcacggcatcaacctgaccatccgcggccacgaagtggtgggcatcgtgggaaggacgggctctgggaagtcctccttgggcatggctctcttccgcctggtggagcccatggcaggccggattctcattgacggcgtggacatttgcagcatcggcctggaggacttgcggtccaagctctcagtgatccctcaagatccagtgctgctctcaggaaccatcagattcaacctagatccctttgaccgtcacactgaccagcagatctgggatgccttggagaggacattcctgaccaaggccatcatccttatcgatgaagccacagcctccattgacatggagacagacaccctgatccagcgcacaatccgtgaagccttccagggctgcaccgtgctcgtcattgcccaccgtgtcaccactgtgctgaactgtgaccacatcctggttatgggcaatgggaaggtggtagaatttgatcggccggaggtactgcggaagaagcctgggtcattgttcgcagccctcatggccacagccacttcttcactgagataaggagatgtggagacttcatggaggctggcagctgagctcagaggttcacacaggtgcagcttcgaggcccacagtctgcgaccttcttgtttggagatgagaacttctcctggaagcaggggtaaatgtagggggggtggggattgctggatggaaaccctggaataggctacttgatggctctcaagaccttagaaccccagaaccatctaagacatgggattcagtgatcatgtggttctccttttaacttacatgctgaataattttataataaggtaaaagcttatagttttctgatctgtgttagaagtgttgcaaatgctgtactgactttgtaaaatataaaactaaggaaaactc

SEQ ID NO: 598 - protein, 1344 aa, Homosapiens
MTRKRTYWVPNSSGGLVNRGIDIGDDMVSGLIYKTYTLQDGPWSQQERNPEAPGRAAVPPWGKYDAALRTMIPFRPKPRFPAPQPLDNAGLFSYLTVSWLTPLMIQSLRSRLDENTIPPLSVHDASDKNVQRLHRLWEEEVSRRGIEKASVLLVMLRFQRTRLIFDALLGICFCIASVLGPILIIPKILEYSEEQLGNVVHGVGLCFALFLSECVKSLSFSSSWIINQRTAIRFRAAVSSFAFEKLIQFKSVIHITSGEAISFFTGDVNYLFEGVCYGPLVLITCASLVICSISSYFIIGYTAFIAILCYLLVFPLAVFMTRMAVKAQHHTSEVSDQRIRVTSEVLTCIKLIKMYTWEKPFAKIIEDLRRKERKLLEKCGLVQSLTSITLFIIPTVATAVWVLIHTSLKLKLTASMAFSMLASLNLLRLSVFFVPIAVKGLTNSKSAVMRFKKFFLQESPVFYVQTLQDPSKALVFEEATLSWQQTCPGIVNGALELERNGHASEGMTRPRDALGPEEEGNSLGPELHKINLVVSKGMMLGVCGNTGSGKSSLLSAILEEMHLLEGSVGVQGSLAYVPQQAWIVSGNIRENILMGGAYDKARYLQVLHCCSLNRDLELLPFGDMTEIGERGLNLSGGQKQRISLARAVYSDRQIYLLDDPLSAVDAHVGKHIFEECIKKTLRGKTVVLVTHQLQYLEFCGQIILLENGKICENGTHSELMQKKGKYAQLIQKMHKEATSDMLQDTAKIAEKPKVESQALATSLEESLNGNAVPEHQLTQEEEMEEGSLSWRVYHHYIQAAGGYMVSCIIFFFVVLIVFLTIFSFWWLSYWLEQGSGTNSSRESNGTMADLGNIADNPQLSFYQLVYGLNALLLICVGVCSSGIFTKVTRKASTALHNKLFNKVFRCPMSFFDTIPIGRLLNCFAGDLEQLDQLLPIFSEQFLVLSLMVIAVLLIVSVLSPYILLMGAIIMVICFIYYMMFKKAIGVFKRLENYSRSPLFSHILNSLQGLSSIHVYGKTEDFISQFKRLTDAQNNYLLLFLSSTRWMALRLEIMTNLVTLAVALFVAFGISSTPYSFKVMAVNIVLQLASSFQATARIGLETEAQFTAVERILQYMKMCVSEAPLHMEGTSCPQGWPQHGEIIFQDYHMKYRDNTPTVLHGINLTIRGHEVVGIVGRTGSGKSSLGMALFRLVEPMAGRILIDGVDICSIGLEDLRSKLSVIPQDPVLLSGTIRFNLDPFDRHTDQQIWDALERTFLTKAIILIDEATASIDMETDTLIQRTIREAFQGCTVLVIAHRVTTVLNCDHILVMGNGKVVEFDRPEVLRKKPGSLFAALMATATSSLR

SEQ ID NO: 599 - DNA, 4342 bp, Homosapiens
gggtctgaggtttggtgactgcggggcaggccgggggcagctgtctgtctggctctttttgacagcccccagtgcgaaaggctgccagcatgtcatcagtgagccccatccagatccccagtcgcctcccgctgctgctcacccacgagggcgtcctgctgcccggctccaccatgcgcaccagcgtggactcggcccgcaacctgcagctggtgcggagccgccttctgaagggcacgtcgctgcaaagcaccatcctgggcgtcatccccaacacgcctgaccccgccagcgacgcgcaggacctgccgccgctgcacaggattggcacagctgcactggccgttcaggttgtgggcagtaactggcccaagccccactacactctgttgattacaggcctatgccgtttccagattgtacaggtcttaaaagagaagccatatcccattgctgaagtggagcagttggaccgacttgaggagtttcccaacacctgtaaaatgagggaggagctaggagaactatcagagcagttttacaaatatgcagtacaattggttgaaatgttggatatgtctgtccctgcagttgctaaattgagacgtcttttagatagtcttccaagggaagctttaccagacatcttgacatcaattatccgaacaagcaacaaagagaaactccagattttagatgctgtgagcctagaggagcggttcaagatgactataccactgcttgtcagacaaattgaaggcctgaaattgcttcaaaaaaccagaaaacccaagcaagatgatgataagagggttatagcaatacgccctattaggagaattacacatatctcaggtactttagaagatgaagatgaagatgaagataatgatgacattgtcatgctagagaaaaaaatacgaacatctagtatgccagagcaggcccataaagtctgtgtcaaagagataaagagactcaaaaaaatgcctcagtcaatgccagaatatgctctgactagaaattatttggaacttatggtagaacttccttggaacaaaagtacaactgaccgcctggacattagggcagcccggattcttctggataatgaccattacgccatggaaaaattgaagaaaagagtactggaatacttggctgtcagacagctcaaaaataacctgaagggcccaatcctatgctttgttggccctcctggagttggtaaaacaagtgtgggaagatcagtggccaagactctaggtcgagagttccacaggattgcacttggaggagtatgtgatcagtctgacattcgaggacacaggcgcacctatgttggcagcatgcctggtcgcatcatcaacggcttgaagactgtgggagtgaacaacccagtgttcctattagatgaggttgacaaactgggaaaaagtctacagggtgatccagcagcagctctgcttgaggtgttggatcctgaacaaaaccataacttcacagatcattatctaaatgtggcctttgacctttctcaagttctttttatagctactgccaacaccactgctaccattccagctgccttgttggacagaatggagatcattcaggttccaggttatacacaggaggagaagatagagattgcccataggcacttgatccccaagcagctggaacaacatgggctgactccacagcagattcagataccccaggtcaccactcttgacatcatcaccaggtataccagagaggcaggggttcgttctctggatagaaaacttggggccatttgccgagctgtggccgtgaaggtggcagaaggacagcataaggaagccaagttggaccgttctgatgtgactgagagagaaggttgcagagaacacatcttagaagatgaaaaacctgaatctatcagtgacactactgacttggctctaccacctgaaatgccgattttgattgatttccatgctctgaaagacatccttgggcccccgatgtatgaaatggaggtatctcagcgtttgagtcagccaggagtagcaataggtttggcttggactcccttaggtggagaaatcatgttcgtggaggcgagtcgaatggatggcgagggccagttaactctgaccggccagctcggggacgtgatgaaggagtccgcccacctcgctatcagctggctccgcagcaacgcaaagaagtaccagctgaccaatgcttttggaagttttgatcttcttgacaacacagacatccatctgcacttcccagctggagctgtcacaaaagatggaccatctgctggagttaccatagtaacctgtctcgcctcactttttagtgggcggctggtacgttcagatgtagccatgactggagaaattacactgagaggtcttgttcttccagtgggtggaattaaagacaaagtgctggcggcacacagagcgggactgaagcaagtcattattcctcggagaaatgaaaaagaccttgagggaatcccaggcaacgtacgacaggatttaagttttgtcacagcaagctgcctggatgaggttcttaatgcagcttttgatggtggctttactgtcaagaccagacctggtctgttaaatagcaaactgtaggtccaaatctcaattttttagaattttaagttatgaagtgctcaaaggtactgacacagttgattttattcacaccattaggggtatgcaagatgtccctgttttataaacataatcacaacagtaataaacctcaagtagtggctagtgtttagtatagaaatataagatgttgatttagtaaactgataaaaatcgaattcttgtctttttagtgggatccttactgtccctggaaagatatagcatagtggttctcagcacagtctccagaacagaagcatctgtagtacctggtaacttgttagaaatgtacattctcaggctccacagcaggccgcctgaatcaaatcctgggaggtggggacagaaatctgtgttttaagaagccttccaggtaattctgctgcacactcaagttcaggaaccaccggtatagaccattaccttagtggatttacctgtagagtttattggatcctgaaaccaatcaattacttagaactaggcaaagatgaaagtatagccaactattcttggctatatatatatattcaagtgggccgggcgtgatggctcacacctgtaattccagcactttgggaggtcgaggtaggcagatcaccgagcccaagagttcaagacaatcctggccaacggcgaaactctgtctctacaaaaaatatacaggcgtgttagcatgtgcctgtaatcccagcttcttgggaagctgaggcacaagaattgcctgaacccaggaggtggaggttgcagtgagctgggatcgcgccattgcactccagcctggctgacagagcgagactgtctctaaaaaaaaaagactcaagtggaccctacaatgaagcctacacatcccaatagaagccccttcttatgctgagggaagcagccctcagaacatgatagcttgtatccagcagagtggcacgtgctggcacacctcacagaagcaccctggccctggatgcctgcaacctcagaagagtgcagctcccagagggaggcagccatccatctgggatggtcctaagcatggaatcctaactcctgattccgtctcctatttcttgcttggctacgccagttcccaaatctggtagatgtccatgcccatgtgctcctgctgggactcaattcaggctatgtatgactatgaagtcaggctcatctgcttactggctgtgtgaactttttgtatcttggttttcttcatccatgaaatccaagtaatactacctaattgttactgtggagattaagttcaaatgcaatgtatagtaatattaagcaatttctagttattattctagccagtaatggacttcagaatcttttattacacaatataagaatatgtatgtaaagacattttggaatttcctggatgagaaggaagtctgggctgggcatggtggctcacccctgtaaccctagcactttaggaaatcgaggcgagtggatcacttaagctcaggagttcaaggccagcctgggcaacatggcaaaaccccatttctacaaaaaatacaaaaattagctgggcatggtggcacccgcctgtagtccagctacttgaggctgagatgggaggatgagggaggtcggggctgcagtgagccaagatcacgccactgcactccagcaccctgggcgacagagtgagaccctgtctc

SEQ ID NO: 600 - protein, 852 aa, Homosapiens
MSSVSPIQIPSRLPLLLTHEGVLLPGSTMRTSVDSARNLQLVRSRLLKGTSLQSTILGVIPNTPDPASDAQDLPPLHRIGTAALAVQVVGSNWPKPHYTLLITGLCRFQIVQVLKEKPYPIAEVEQLDRLEEFPNTCKMREELGELSEQFYKYAVQLVEMLDMSVPAVAKLRRLLDSLPREALPDILTSIIRTSNKEKLQILDAVSLEERFKMTIPLLVRQIEGLKLLQKTRKPKQDDDKRVIAIRPIRRITHISGTLEDEDEDEDNDDIVMLEKKIRTSSMPEQAHKVCVKEIKRLKKMPQSMPEYALTRNYLELMVELPWNKSTTDRLDIRAARILLDNDHYAMEKLKKRVLEYLAVRQLKNNLKGPILCFVGPPGVGKTSVGRSVAKTLGREFHRIALGGVCDQSDIRGHRRTYVGSMPGRIINGLKTVGVNNPVFLLDEVDKLGKSLQGDPAAALLEVLDPEQNHNFTDHYLNVAFDLSQVLFIATANTTATIPAALLDRMEIIQVPGYTQEEKIEIAHRHLIPKQLEQHGLTPQQIQIPQVTTLDIITRYTREAGVRSLDRKLGAICRAVAVKVAEGQHKEAKLDRSDVTEREGCREHILEDEKPESISDTTDLALPPEMPILIDFHALKDILGPPMYEMEVSQRLSQPGVAIGLAWTPLGGEIMFVEASRMDGEGQLTLTGQLGDVMKESAHLAISWLRSNAKKYQLTNAFGSFDLLDNTDIHLHFPAGAVTKDGPSAGVTIVTCLASLFSGRLVRSDVAMTGEITLRGLVLPVGGIKDKVLAAHRAGLKQVIIPRRNEKDLEGIPGNVRQDLSFVTASCLDEVLNAAFDGGFTVKTRPGLLNSKL

SEQ ID NO: 601 - DNA, 2393 bp, Homosapiens
gctggctcagggagcgcacttccttctcagccagcgcgtcgccccctgcatccgtggcctccactggagctgggcaggaccctacccagtgaatctggagaaaacaaacttgggagacagacgaaagcttagggcacattggaggacagcgcagctgtggctcccatttttggagatgcagtcgaatttgagctcacagggaggtgtggttgcctcctggggatggaaaggcttcctttctccacctctgtaactggtgcttctgagaagtaaatggtatttggatcctgacctcagacgcgaatttgggtcttctgtgcttaggagcagaaagagcccaggaggggcctgttcctttacttcttgggggaaacgcaatgcgtggcctgacttctcatgacgggaaaggctactccaccttctctgtactcctggaggggagtcttgttcacatgtttaccagcggccaggacaaggaagagaaaagaaatgagccgtcagactgctacagcattacctaccggtacctcgaagtgtccaccatcccagagggtgcctgccctgactggcacaactgcatccaacaatgacttggcgagtctttttgagtgtccagtctgctttgactatgtgttaccgcccattcttcaatgtcagagtggccatcttgtttgtagcaactgtcgcccaaagctcacatgttgtccaacttgccggggccctttgggatccattcgcaacttggctatggagaaagtggctaattcagtacttttcccctgtaaatatgcgtcttctggatgtgaaataactctgccacacacagaaaaagcagaccatgaagagctctgtgagtttaggccttattcctgtccgtgccctggtgcttcctgtaaatggcaaggctctctggatgctgtaatgccccatctgatgcatcagcataagtccattacaaccctacagggagaggatatagtttttcttgctacagacattaatcttcctggtgctgttgactgggtgatgatgcagtcctgttttggctttcacttcatgttagtcttagagaaacaggaaaaatacgatggtcaccagcagttcttcgcaatcgtacagctgataggaacacgcaagcaagctgaaaattttgcttaccgacttgagctaaatggtcataggcgacgattgacttgggaagcgactcctcgatctattcatgaaggaattgcaacagccattatgaatagcgactgtctagtctttgacaccagcattgcacagctttttgcagaaaatggcaatttaggcatcaatgtaactatttccatgtgttgaaatggcaatcaaacattttctggccagtgtttaaaacttcagtttcacagaaaataaggcacccatctgtctgccaacctaaaactctttcggtaggtggaagctagacacatgaaggtaaataaaaagaaaggctgttaaatacaggaaacagttgcatgtagtaacactaatatatttaaaaataagtcaacagtaaaccactgaaaaaatatatgtatatacacccaagatgggcatcttttgtattaagaaaggaagcattgtaaaataattctgagttttgtgtttgttgtagattgattgtattgttgaaaaagtttgtttttgcgtgggagtgtgtgcctgcgtgggtgtgtgcgtgtttgggtttttttcctttaactgacaagccatcttgagtggtcatgggccactgcttttccctttgtgagtcaatacatagtgctgctgtgtgctttttttgtgtgtatttgctaatttttattaattttagtttttcattaaataaatttgacttttctgtaattcaggtttttcctttttttgtaccattttaaagttagtatcttttgatatgcatatttgtttatggtaaaaaatttataacgtgttcaatattttcttttcccccattaatcagttcattagaaatattttaaaatcagctattttgtgaagccatgagttccagaaagtaaaggtgacatcggaaaaataatcaaaagctatttaaagcatctataaggtgctctctttctgtcttctacagatgagtcacacctttgagcttaatctttgaaaggttagagaataaattgatttttataaatactgcaaatcaggcttttgtttcctttttcagatatcttggacaaatcacatattttaaaatttgttcttgtatttattggttttgcagaagaaggcatcgtcatgcacagtatttgtaattaaaagcaaatcatttgtttaaaaaggcagtttgcaaaaaatgtttttggtcttttataattctcattaaaagaatatctggcaaattaaaaaaaaaaaaa

SEQ ID NO: 602 - protein, 313 aa, Homosapiens
MTGKATPPSLYSWRGVLFTCLPAARTRKRKEMSRQTATALPTGTSKCPPSQRVPALTGTTASNNDLASLFECPVCFDYVLPPILQCQSGHLVCSNCRPKLTCCPTCRGPLGSIRNLAMEKVANSVLFPCKYASSGCEITLPHTEKADHEELCEFRPYSCPCPGASCKWQGSLDAVMPHLMHQHKSITTLQGEDIVFLATDINLPGAVDWVMMQSCFGFHFMLVLEKQEKYDGHQQFFAIVQLIGTRKQAENFAYRLELNGHRRRLTWEATPRSIHEGIATAIMNSDCLVFDTSIAQLFAENGNLGINVTISMC

SEQ ID NO: 603 - DNA, 2003 bp, Homosapiens
gtcccgtcggtctcggcgccgggaagaggcggtggcgctgcccgcggtggcgggggttggcgacggagcgcgttggtgccaggaccggggtccgaggcgcgctctccgcccacagaaatgagccgtcagactgctacagcattacctaccggtacctcgaagtgtccaccatcccagagggtgcctgccctgactggcacaactgcatccaacaatgacttggcgagtctttttgagtgtccagtctgctttgactatgtgttaccgcccattcttcaatgtcagagtggccatcttgtttgtagcaactgtcgcccaaagctcacatgttgtccaacttgccggggccctttgggatccattcgcaacttggctatggagaaagtggctaattcagtacttttcccctgtaaatatgcgtcttctggatgtgaaataactctgccacacacagaaaaagcagaccatgaagagctctgtgagtttaggccttattcctgtccgtgccctggtgcttcctgtaaatggcaaggctctctggatgctgtaatgccccatctgatgcatcagcataagtccattacaaccctacagggagaggatatagtttttcttgctacagacattaatcttcctggtgctgttgactgggtgatgatgcagtcctgttttggctttcacttcatgttagtcttagagaaacaggaaaaatacgatggtcaccagcagttcttcgcaatcgtacagctgataggaacacgcaagcaagctgaaaattttgcttaccgacttgagctaaatggtcataggcgacgattgacttgggaagcgactcctcgatctattcatgaaggaattgcaacagccattatgaatagcgactgtctagtctttgacaccagcattgcacagctttttgcagaaaatggcaatttaggcatcaatgtaactatttccatgtgttgaaatggcaatcaaacattttctggccagtgtttaaaacttcagtttcacagaaaataaggcacccatctgtctgccaacctaaaactctttcggtaggtggaagctagacacatgaaggtaaataaaaagaaaggctgttaaatacaggaaacagttgcatgtagtaacactaatatatttaaaaataagtcaacagtaaaccactgaaaaaatatatgtatatacacccaagatgggcatcttttgtattaagaaaggaagcattgtaaaataattctgagttttgtgtttgttgtagattgattgtattgttgaaaaagtttgtttttgcgtgggagtgtgtgcctgcgtgggtgtgtgcgtgtttgggtttttttcctttaactgacaagccatcttgagtggtcatgggccactgcttttccctttgtgagtcaatacatagtgctgctgtgtgctttttttgtgtgtatttgctaatttttattaattttagtttttcattaaataaatttgacttttctgtaattcaggtttttcctttttttgtaccattttaaagttagtatcttttgatatgcatatttgtttatggtaaaaaatttataacgtgttcaatattttcttttcccccattaatcagttcattagaaatattttaaaatcagctattttgtgaagccatgagttccagaaagtaaaggtgacatcggaaaaataatcaaaagctatttaaagcatctataaggtgctctctttctgtcttctacagatgagtcacacctttgagcttaatctttgaaaggttagagaataaattgatttttataaatactgcaaatcaggcttttgtttcctttttcagatatcttggacaaatcacatattttaaaatttgttcttgtatttattggttttgcagaagaaggcatcgtcatgcacagtatttgtaattaaaagcaaatcatttgtttaaaaaggcagtttgcaaaaaatgtttttggtcttttataattctcattaaaagaatatctggc

SEQ ID NO: 604 - protein, 282 aa, Homosapiens
MSRQTATALPTGTSKCPPSQRVPALTGTTASNNDLASLFECPVCFDYVLPPILQCQSGHLVCSNCRPKLTCCPTCRGPLGSIRNLAMEKVANSVLFPCKYASSGCEITLPHTEKADHEELCEFRPYSCPCPGASCKWQGSLDAVMPHLMHQHKSITTLQGEDIVFLATDINLPGAVDWVMMQSCFGFHFMLVLEKQEKYDGHQQFFAIVQLIGTRKQAENFAYRLELNGHRRRLTWEATPRSIHEGIATAIMNSDCLVFDTSIAQLFAENGNLGINVTISMC

SEQ ID NO: 605 - DNA, 4633 bp, Homosapiens
gccctccattgtctccacggcggcgaggagcgccggcgagcgcagcccgggaccgagcggggcggcgcggctggcggggccggcggcggctgaagcgagagcgcgacgcgacgcgaccgcggcttcccgagctgcgcctggccgcccagcgccgcggcccgcccgaggcctggaggggtccgggccgccgtccatggtcgcggcgtcctgaggcgggggacgcgcccggcgcccccggccctcctccgcctcctcccgcggggcgggcggcctcctccggcgcctccccgcgcccgcccgccgctcgccgccgcctccctccctccttccctgcggctcccccggctttcggagcccgggggcggcctgtggcgcgcggagcccgcgccggactgcgcctctttggaccttgaggggaaacatgcgtttgccttggatcgtttgaaattctgagtttgggatccccgcccgcccgcctgcctcttccgccccgcgggttttttccttttttccttttgctttttttccttttctccctccgggtctcctttttgactccctccccctttatgctcgcccagccctccccctgctgctgagaagtgggggagggtctcggcctccaggttcccgccccaccggggcccgggcgagcatggggggcaagcagagcacggcggcccgctcccggggccccttcccgggggtctccaccgatgacagcgccgtgccgccgccgggaggggcgccccatttcgggcactaccggacgggcggcggggccatggggctgcgcagccgctcggtcagctcggtggcaggcatgggcatggaccccagcacggccgggggggtgccctttggcctctacacccccgcctcccggggcaccggcgactccgagagggcgcccggcggcggagggtctgcgtccgactccacctatgcccatggcaatggttaccaggagacgggcggcggtcaccatagagacgggatgctgtacctgggctcccgagcctcgctggcggatgctctacctctgcacatcgcacccaggtggttcagctcgcatagtggtttcaagtgccccatttgctccaagtctgtggcttctgacgagatggaaatgcactttataatgtgtttgagcaaacctcgcctctcctacaacgatgatgtgctgactaaagacgcgggtgagtgtgtgatctgcctggaggagctgctgcagggggacacgatagccaggctgccctgcctgtgcatctatcacaaaagctgcatagactcgtggtttgaagtgaacagatcttgtccggaacaccctgcggactgacctgcgggcttgcttgctgactcctctcaaagggacagagcgcccctgctccagggaggaggctcaccggaccctggggcagagctgagcttgggacaccagcgggaacagggcaccccttctgcactgacttccagatcatggttctcccttcctccctgaggacaccaaattggatgagagcaagtttgagagaagaatgaatcaactgctatccttcccctcacccctcagcccaggagggaaagggcattttctttttcatctttgaaaggcattgtgggtctgtctttaaagtgtttacaaaaaaaaattatataaaaaaaaagtctagtgtcgactggtgttttccctcgtgatgtttacagcttgctgtttgctgcccagccataacccactcagtgacagacgaacacagctaaggcctcgctgccagccttctgacggcgggcgagcacacggtctcttcccctgccccaactggccctctccaccaccaacttctctactttgggtttgtttggttttttccctctatttttctggctggttttttgctcttttctccccttgagaccctaatatcttgacttcattgccaaaaaacaacccattgagaactttcttcctactgatcccatctcttttcccttctttcctcctggttccggtcagttcagaggatttaacaatcacaagtgtcctgcaaaaatgcctgaacattattcttaggccctcgtggattttttttttcagaaaacttaaacaaaaaaagacttactaagaaatatgtacagctacccctgttttcaggcactatgtttgagaacattttagccattgatgttcacacgtggcatcagcccatgcaagataggtttctgtatttatatattaaaatacaaaaaaaaacttataaaatgtttaaaaaaatgttcaaagcttgggagaaaagctttcttcattagtcaaggtgttttgatatggtattaaaatgtctaataaaagatggcactgcgtgattttattttaatgaagtgttatacaatcaagaaatgggggcaagggcctgccccccactccctcacctacctccttagcattccttcaggctgctactcggggctccaggtgtgtgaattggtcctcagatagtcaggcctgggtggagggagtggcaagtcaggcgtgcctcctacaagcttcctaacctcttaagcatcatggaaccagtcagccctctgtggagtcattgtgccggacctctgaaaagatctgcaggggccaagatgttgcagccaccggaggctgcaaggatgtgggttcttccaggtgtgggcccagcccccctccttccagcctttgctccccatcccacgttccactcgccctgcctgttgttcagtttgcgtctcagtgctgactcacgggcatgcttcattgaggcccaggaagaggccctggtttggggctgtgccagctcagagcccttgaaccagaaccaactgctcaggctcacaaaagttggcaaaatgcgggctgggcaggcagctcggggcagggagcagcagtgcaggcctggcctgtgtccccgtgcccagcgggctcccggagcagcattccagagcctcctgcagagccagcgaaggaaagctctagagggagacgactccaccgcctctctgctctgacccttctcaggcccgcctgatgtgctggaccatccccctgctgccacggcccctggctccgcagtcaccctccatcagatgcttccagaagcacctactctgtgcaagggcattcacaacaggccagtgggcaaacgtgagccagggccagcggagaaacactaaagaagactcggtggttcagagcctgggtctcagcgcgggacccgtctggggtgaagaccttggggctgttgtgagtcggtggcaggaacgtgggctctagactgtgcattcaggctctcctacttggcagaatgatcttggggaaacgacttcatctgaacttcagatatttcacatgtgaagcggggacaaaaccatgcagctcagaggtccctgtgggggctgggggagctgccctgcaggtcttggcacatgcacagcaggctccccatagctttgtcaccacaaagggcactgttctattcacagcacctcctgcttctgcctggcaactgtgtctccctgtgctatatttaattccaccagcaaagctggcgaggcagggcccagccctgaaggagatctccttgcctgacccctggacctggaaatggaggcttcatgtgcccgccttggcggcttaagcctgctgctttggcagtgccatgggtgagccgagcagctgtgaggtgggtggggcagggctgtagcccacgccgggtgctattccaggctctaggggctggtgctcatccccacccccagcgacttccgtcctacctggcatgctgcagccctctgccggctgtggtgtcctctgaatttggacccaggttgcctgctcttgttgtgggggtgggattggggctgtctgtgtttcccaggtggagctcatgtttgtgatcctctatctggacagctctccagaatcctgtgttgcccctgttctgcctttctgggatgggagagaaggtgagggagccggcgagcaggttctaccctctctgctaagggcctagcacactttgatgaggttcctggacgtgagaccctcacaaagaccaaccattcctctaatagccatttaacggtactgcagttcatgggaaaatgtcctcattcttaggagatagatgctggattatataggtgaatgccttcaagaaatgtgtaatttaattccaaatagttccccccaaaatacacaaagcaaataaggccaaaatgttcattgttgaatctgcagtggctggtatttcagtgaacagtgtacttgttctttcaacttttctgtatgtttggaatttttcttaataaaagattgtgggaaatggtcatttgctgagcgcctcctagttgccaggcactggagggcgcatcaaagaagagtcctacccaggagggagagcgcagctgctgcaggattctcgcctggaagagtgggtggctggctggctggctggaaggggaggggcgagagggctgtctcggtgatgagcacacgcgtgctggggtggtttggggagagggctgagatttgtcaccagtgagcccttggcacggtctctgctccccaccagggcagcacgggacagaaacgtcacggaggagtagcctc

SEQ ID NO: 606 - protein, 227 aa, Homosapiens
MGGKQSTAARSRGPFPGVSTDDSAVPPPGGAPHFGHYRTGGGAMGLRSRSVSSVAGMGMDPSTAGGVPFGLYTPASRGTGDSERAPGGGGSASDSTYAHGNGYQETGGGHHRDGMLYLGSRASLADALPLHIAPRWFSSHSGFKCPICSKSVASDEMEMHFIMCLSKPRLSYNDDVLTKDAGECVICLEELLQGDTIARLPCLCIYHKSCIDSWFEVNRSCPEHPAD

SEQ ID NO: 607 - DNA, 2091 bp, Homosapiens
ggtcaccctgccacccagtgctcacaccctctggccagtgcctggctatggcccgactgctcaggtctgcaacctgggagctgttcccctggaggggctactgctcccagaaggcaaagggagagctctgcagggacttcgtagaggctctgaaggccgtggtgggcggctcccacgtgtccactgccgcggtggtccgagagcagcacgggcgcgatgagtcggtgcacaggtgcgaacctcctgatgctgtggtgtggccccagaacgtggagcaggtcagccggctggcagccctgtgctatcgccaaggtgtgcccatcatcccattcggcaccggcaccgggcttgagggtggcgtctgtgctgtgcagggcggcgtctgcgttaacctgacgcatatggaccgaatcctggagctgaaccaggaggacttctctgtggtggtggagccaggtgtcacccgcaaagccctcaacgcccacctgcgggacagcggcctctggtttcccgtggacccaggcgcggacgcctctctctgtggcatggcggccaccggggcgtcggggaccaacgcggtccgctacggcaccatgcgggacaacgtgctcaacctggaggtggtgctgcccgacgggcggctgctgcacacggcgggccgaggccggcatttccgcttcggcttctggccagaaatccctcatcacacagcctggtactcaccttgtgtgtccctgggacgtaggaagagtgcagccggctacaacctcacggggctcttcgtgggctccgaggggacgctgggcctcatcacagccaccaccctgcgcctgcaccctgcccctgaggccacagtggccgccacgtgtgcgttccccagtgtccaggctgctgtggacagcactgtacacatcctccaggctgcagtgcccgtagcccgcattgagttcctggatgaagtcatgatggatgcctgcaacaggtacagcaagctgaattgcttagtggcgcccacactcttcctggagttccatggctcccagcaggcactggaggagcagctgcagcgcacagaggagatagtccagcagaacggagcctctgacttctcctgggccaaggaggccgaggagcgcagccggctttggacagcacggcacaatgcctggtacgcagccctggccacgcggccaggctgcaagggctactccacggatgtgtgtgtgcccatctcccggctgccggagatcgtggtgcagaccaaggaggatctgaatgcctcaggactcacaggaagcattgtcgggcatgtgggtgacggcaacttccactgcatcctgctggtcaaccctgatgacgccgaggaactgggcagggtcaaggcttttgcagaacagctgggcaggcgggcactggctctccacggaacgtgcacgggggagcatggcatcggaatgggcaagcggcagctgctgcaggaggaggtgggcgccgtgggcgtggagaccatgcggcagctcaaggccgtgctagacccccaaggcctcatgaatccaggcaaagtgctgtgaagggggtctgagcacttagcccacaagttccctgactacggagccggttctggaacttttcttcatgccacggcccctgcaaggaaatagatgctgaggcagtcttcctgccagcgagcccactgtatctgggcccaaggccagagggcccagagagaagcctgagcaccgtgttacctccctggccctctggctggccccaggagcctttggttcagtaaacgacccagggtggttcccagcaaagctgcttcctctctgctcctacgcatcctgtcctggcgggaagagagcgtctgggtccattcaagactctgatgacacccctccccgaggcctcccactgccggggtcccaggacccttcccccttcacctggtgacaggaacactcctttcctggtatggaacgtgagctcccgtgacatgatgataggtcttctccttggggcctcccccaataaatctgtaataaacctgaaacccacctacagctaaaaaaaaaaaaaaaaaaaaaaaaa

SEQ ID NO: 608 - protein, 507 aa, Homosapiens
MARLLRSATWELFPWRGYCSQKAKGELCRDFVEALKAVVGGSHVSTAAVVREQHGRDESVHRCEPPDAVVWPQNVEQVSRLAALCYRQGVPIIPFGTGTGLEGGVCAVQGGVCVNLTHMDRILELNQEDFSVVVEPGVTRKALNAHLRDSGLWFPVDPGADASLCGMAATGASGTNAVRYGTMRDNVLNLEVVLPDGRLLHTAGRGRHFRFGFWPEIPHHTAWYSPCVSLGRRKSAAGYNLTGLFVGSEGTLGLITATTLRLHPAPEATVAATCAFPSVQAAVDSTVHILQAAVPVARIEFLDEVMMDACNRYSKLNCLVAPTLFLEFHGSQQALEEQLQRTEEIVQQNGASDFSWAKEAEERSRLWTARHNAWYAALATRPGCKGYSTDVCVPISRLPEIVVQTKEDLNASGLTGSIVGHVGDGNFHCILLVNPDDAEELGRVKAFAEQLGRRALALHGTCTGEHGIGMGKRQLLQEEVGAVGVETMRQLKAVLDPQGLMNPGKVL

SEQ ID NO: 609 - DNA, 2022 bp, Homosapiens
ggtcaccctgccacccagtgctcacaccctctggccagtgcctggctatggcccgactgctcaggtctgcaacctgggagctgttcccctggaggggctactgctcccagaaggcaaagggagagctctgcagggacttcgtagaggctctgaaggccgtggtgggcggctcccacgtgtccactgccgcggtggtccgagagcagcacgggcgcgatgagtcggtgcacaggtgcgaacctcctgatgctgtggtgtggccccagaacgtggagcaggtcagccggctggcagccctgtgctatcgccaaggtgtgcccatcatcccattcggcaccggcaccgggcttgagggtggcgtctgtgctgtgcagggcggcgtctgcgttaacctgacgcatatggaccgaatcctggagctgaaccaggaggacttctctgtggtggtggagccaggtgtcacccgcaaagccctcaacgcccacctgcgggacagcggcctctggtttcccgtggacccaggcgcggacgcctctctctgtggcatggcggccaccggggcgtcggggaccaacgcggtccgctacggcaccatgcgggacaacgtgctcaacctggaggtggtgctgcccgacgggcggctgctgcacacggcgggccgaggccggcatttccggaagagtgcagccggctacaacctcacggggctcttcgtgggctccgaggggacgctgggcctcatcacagccaccaccctgcgcctgcaccctgcccctgaggccacagtggccgccacgtgtgcgttccccagtgtccaggctgctgtggacagcactgtacacatcctccaggctgcagtgcccgtagcccgcattgagttcctggatgaagtcatgatggatgcctgcaacaggtacagcaagctgaattgcttagtggcgcccacactcttcctggagttccatggctcccagcaggcactggaggagcagctgcagcgcacagaggagatagtccagcagaacggagcctctgacttctcctgggccaaggaggccgaggagcgcagccggctttggacagcacggcacaatgcctggtacgcagccctggccacgcggccaggctgcaagggctactccacggatgtgtgtgtgcccatctcccggctgccggagatcgtggtgcagaccaaggaggatctgaatgcctcaggactcacaggaagcattgtcgggcatgtgggtgacggcaacttccactgcatcctgctggtcaaccctgatgacgccgaggaactgggcagggtcaaggcttttgcagaacagctgggcaggcgggcactggctctccacggaacgtgcacgggggagcatggcatcggaatgggcaagcggcagctgctgcaggaggaggtgggcgccgtgggcgtggagaccatgcggcagctcaaggccgtgctagacccccaaggcctcatgaatccaggcaaagtgctgtgaagggggtctgagcacttagcccacaagttccctgactacggagccggttctggaacttttcttcatgccacggcccctgcaaggaaatagatgctgaggcagtcttcctgccagcgagcccactgtatctgggcccaaggccagagggcccagagagaagcctgagcaccgtgttacctccctggccctctggctggccccaggagcctttggttcagtaaacgacccagggtggttcccagcaaagctgcttcctctctgctcctacgcatcctgtcctggcgggaagagagcgtctgggtccattcaagactctgatgacacccctccccgaggcctcccactgccggggtcccaggacccttcccccttcacctggtgacaggaacactcctttcctggtatggaacgtgagctcccgtgacatgatgataggtcttctccttggggcctcccccaataaatctgtaataaacctgaaacccacctacagctaaaaaaaaaaaaaaaaaaaaaaaaa

SEQ ID NO: 610 - protein, 484 aa, Homosapiens
MARLLRSATWELFPWRGYCSQKAKGELCRDFVEALKAVVGGSHVSTAAVVREQHGRDESVHRCEPPDAVVWPQNVEQVSRLAALCYRQGVPIIPFGTGTGLEGGVCAVQGGVCVNLTHMDRILELNQEDFSVVVEPGVTRKALNAHLRDSGLWFPVDPGADASLCGMAATGASGTNAVRYGTMRDNVLNLEVVLPDGRLLHTAGRGRHFRKSAAGYNLTGLFVGSEGTLGLITATTLRLHPAPEATVAATCAFPSVQAAVDSTVHILQAAVPVARIEFLDEVMMDACNRYSKLNCLVAPTLFLEFHGSQQALEEQLQRTEEIVQQNGASDFSWAKEAEERSRLWTARHNAWYAALATRPGCKGYSTDVCVPISRLPEIVVQTKEDLNASGLTGSIVGHVGDGNFHCILLVNPDDAEELGRVKAFAEQLGRRALALHGTCTGEHGIGMGKRQLLQEEVGAVGVETMRQLKAVLDPQGLMNPGKVL

SEQ ID NO: 611 - DNA, 3190 bp, Homosapiens
aaaaaacttcccccaccaccagcggcgagtgggtgacagagcccccgtctccgcgcgtcttcgccgccctgcgccgtgacccgctgtggcactgggccacgagtggaggctgcgcccctccagttctgccttcatagttctctgcctttgcccaaaactgcagaaaatgaacaaatcccagggatcagtttcattcacggatgtgactgtggactttacccaggaggaatgggaacaactggacccctctcagaggatcctatacatggatgtgatgctggagaattatagcaacttgctttcagtgggtaaggacggttttcagaagtgtggaaggctgatgaccagatggagagagaccacagaaacccagacgagcaggcgaggcaatttttaattcttaagaaccaaaccccaattgaggaaagaggcgatctctttggaaaagcacttaatctgaacacagactttgtttctttaagacaagtaccttataaatatgacttatatgaaaaaactttgaaatataattcagacttgcttaatagtaatagaagctatgcaggaaagcagactgatgagtgtaatgaatttggaaaagcacttctctacctgaagcaagagaaaacccacagtggagtagaatattctgaatacaataaaagtggaaaagccctcagccataaagcagccatttttaaacatcagaaaataaaaaacttggttcaacctttcatttgtacttactgtgacaaggctttctcctttaagtcactcctcattagtcataagagaatacatactggagaaaagccatatgaatgcaatgtatgtaagaaaaccttctcccataaggccaacctcatcaaacatcagagaattcacactggggagaaacctttcgagtgtccggaatgtggaaaagctttcacccaccagtcaaacctcattgtacaccagagagcacatatggagaagaagccctatgagtgcagtgaatgtggaaagacatttgcccaaaagtttgaactcaccacacaccagagaattcatacaggagagcgaccctatgagtgtaacgaatgtgcaaaaaccttctttaagaagtcaaaccttatcatacatcagaagattcacacgggggagaaacgctatgagtgcagtgaatgtggaaaatcctttatccagaactcacagctcatcatacacatgagaactcatacaggagagaaaccctatgaatgtactgagtgcggcaaaactttcagccagaggtcaactcttagattacacttgcgaatccacacaggagagaaaccatatgagtgttccgaatgtgggaaggcctttagcaggaagtcccgactcagtgtccatcagagagttcacatcggggagaaaccctgaaactccagccaggtcttactgtggaaaactcctgccagaactcttcaagcgggtgaaaaacctcatgacagtattgagggaacatgggaatttatactgagatgcaatctctcaactcaaaaatgtattaaaaataggatcccatgagaacattatactggaagttacatgtgatacccagctaaagaatacatatcagaatatatccagttgtaaatagccatacccagttgtactacaatgagctttttaaaatcttgaatgaattgagtattctagacagcagcataagaaatatacaaacagtatcctatgaatttagtggttttatgtggatatgccacaaaacacaagtggtatgctttagatctgcacatgtgaatttagcataatcactgggaatttgaaattcttgtcctctgtgataattaggacataacaagattttccatactaaacatcacatgtgtttttcagtatctctgcaatccagtatgcattccaaatgaaatgtgtaacatttaaagtagcatggaacctacgtctttccctactgcttgctggcatatatcagttggtatgaacattgttcttgagctgcctcttaggaaacagaagacagtgttgaagttttccctgcttctggtttgctgaagattttctagactgcttctggtttgctgaagattttctagaagcactatttacacaaatatgcaaatgtgaaataaccgatctataacgtgaaggaggcagacatgagctgtactactcagtatgcaccacagaataagagtttgccgtgtaaagacaatatccccattcgtcatgctcttattttcccgtgggatatttgcatacaaatgcatgtctgttaccaaaatattgtgtaacacagacagaaaccacctgtttttgtctttccttgtttcccttaatatttcatgaattgtctagcaaaaatggtaggatgcttctgtagttcacaaatgttacatttcagagactttggaggaaaaattattttaaataactgtcaactgtttcattgctttttaaatttttcacgtgcataaccccctttagaagtaaatttttacactattttgttgtttaaaggaggcatttctacttccttgagttttgctgttgccaacctaaaacatttccctttggaacatgagttataagttattacttttcctttacatgtttacacttttataaaaatcagatttttcagtggtctctccagatattaacaagaattgttgtgtaactcaaagatttgcttttatagacttgatttcaaattcttaagttcagcctttccctatcaatcacaaatcatgtattggaaattataaatggcaaccaaaaaccggcttttaaaaaatatttttggatatcattgatgtgctgtcacactatatattgagtgactttctgaacaaatttatccagaacatccatagcccaataagcttttgtctaagttgtcatcttacttactcacaaaggaggggaaaacgttattttcatagctgcttttagaaatgtagattgtaacagcctccttggacaacattgtgagtctgttttaacattaatatactcttacaacctaggaatctcctgggaatctatccctaaggagtaaaaagcgccagcacttaagattatatgtttactaatgtatattgtattttttggtaaggaccaaaaaaacaaacaaaaaaaagaccatcagtaagggaatggatgaataaattgtggtaaaaac

SEQ ID NO: 612 - protein, 352 aa, Homosapiens
MERDHRNPDEQARQFLILKNQTPIEERGDLFGKALNLNTDFVSLRQVPYKYDLYEKTLKYNSDLLNSNRSYAGKQTDECNEFGKALLYLKQEKTHSGVEYSEYNKSGKALSHKAAIFKHQKIKNLVQPFICTYCDKAFSFKSLLISHKRIHTGEKPYECNVCKKTFSHKANLIKHQRIHTGEKPFECPECGKAFTHQSNLIVHQRAHMEKKPYECSECGKTFAQKFELTTHQRIHTGERPYECNECAKTFFKKSNLIIHQKIHTGEKRYECSECGKSFIQNSQLIIHMRTHTGEKPYECTECGKTFSQRSTLRLHLRIHTGEKPYECSECGKAFSRKSRLSVHQRVHIGEKP

SEQ ID NO: 613 - DNA, 960 bp, Homosapiens
ggcagcggcatggcttccctctggctcctctcctgcttctcccttgtgggggccgcctttggctgcggggtccccgccatccaccctgtgctcagcggcctgtccaggatcgtgaatggggaggacgccgtccccggctcctggccctggcaggtgtccctgcaggacaaaaccggcttccacttctgcgggggctccctcatcagcgaggactgggtggtcaccgctgcccactgcggggtcaggacctccgacgtggtcgtggctggggagtttgaccagggctctgacgaggagaacatccaggtcctgaagatcgccaaggtcttcaagaaccccaagttcagcattctgaccgtgaacaatgacatcaccctgctgaagctggccacacctgcccgcttctcccagacagtgtccgccgtgtgcctgcccagcgccgacgacgacttccccgcggggacactgtgtgccaccacaggctggggcaagaccaagtacaacgccaacaagacccctgacaagctgcagcaggcagccctgcccctcctgtccaatgccgaatgcaagaagtcctggggcaggaggatcaccgacgtgatgatctgtgccggggccagtggcgtctcctcctgcatgggtgactctggaggccccctggtctgccagaaggacggagcctggaccctggtgggcattgtgtcctggggcagccgcacctgctctaccaccacgcccgctgtgtacgcccgtgtcaccaagctcataccctgggtgcagaagatcctggccgccaactgagcccgcagctcctgccacccctgccttaagatttcccattaaatgcatctgtttagaaaaaaaaaaaaaaaaaaaaaaaaaaaaaaaaaaaaaaaaaaaaaaaaaaaaaaaaaaaaaaaaaaaaaaaaaaaaaaaaaaaaaaaaaaaaaaaaaaaaaaa

SEQ ID NO: 614 - protein, 263 aa, Homosapiens
MASLWLLSCFSLVGAAFGCGVPAIHPVLSGLSRIVNGEDAVPGSWPWQVSLQDKTGFHFCGGSLISEDWVVTAAHCGVRTSDVVVAGEFDQGSDEENIQVLKIAKVFKNPKFSILTVNNDITLLKLATPARFSQTVSAVCLPSADDDFPAGTLCATTGWGKTKYNANKTPDKLQQAALPLLSNAECKKSWGRRITDVMICAGASGVSSCMGDSGGPLVCQKDGAWTLVGIVSWGSRTCSTTTPAVYARVTKLIPWVQKILAAN

SEQ ID NO: 615 - DNA, 915 bp, Homosapiens
gggaccggcagacaggcgtcctacacccctgccagcggcaccatggctttcctctggctcctctcctgctgggccctcctgggtaccaccttcggctgcggggtccccgccatccaccctgtgctcagcggcctgtccaggatcgtgaatggggaggacgccgtccccggctcctggccctggcaggtgtccctgcaggacaaaaccggcttccacttctgcgggggctccctcatcagcgaggactgggtggtcaccgctgcccactgcggggtcaggacctccgacgtggtcgtggctggggagtttgaccagggctctgacgaggagaacatccaggtcctgaagatcgccaaggtcttcaagaaccccaagttcagcattctgaccgtgaacaatgacatcaccctgctgaagctggccacacctgcccgcttctcccagacagtgtccgccgtgtgcctgcccagcgccgacgacgacttccccgcggggacactgtgtgccaccacaggctggggcaagaccaagtacaacgccaacaagacccctgacaagctgcagcaggcagccctgcccctcctgtccaatgccgaatgcaagaagtcctggggcaggaggatcaccgacgtgatgatctgtgccggggccagtggcgtctcctcctgcatgggcgactctggcggtcccctggtctgccaaaaggatggagcctggaccctggtgggcattgtgtcctggggcagcgacacctgctccacctccagccctggcgtgtacgcccgtgtcaccaagctcataccttgggtgcagaagatcctggctgccaactgagcccgcggctccctccgaccctgctccccacagagcctcagtaaacccatgaaaaaaaaaaaaaaaaaaaaaaaaaaaaaa

SEQ ID NO: 616 - protein, 263 aa, Homosapiens
MAFLWLLSCWALLGTTFGCGVPAIHPVLSGLSRIVNGEDAVPGSWPWQVSLQDKTGFHFCGGSLISEDWVVTAAHCGVRTSDVVVAGEFDQGSDEENIQVLKIAKVFKNPKFSILTVNNDITLLKLATPARFSQTVSAVCLPSADDDFPAGTLCATTGWGKTKYNANKTPDKLQQAALPLLSNAECKKSWGRRITDVMICAGASGVSSCMGDSGGPLVCQKDGAWTLVGIVSWGSDTCSTSSPGVYARVTKLIPWVQKILAAN

SEQ ID NO: 617 - DNA, 3241 bp, Homosapiens
gaggcggcagctgcgcggcggcaccggggcggctgcggcgcgctcggagccccgagggcacgcggcccgggcagctcggtgtgcgcccccgcgagagccggggccccaggcccgccggacaccatgaaccacctgaacgtgctggccaaagcgctctatgacaatgtggccgagtccccggatgagctctccttccgcaagggtgacatcatgacggtgctggagcaggacacgcagggcctggacggctggtggctctgctcgctgcatgggcgccagggcatcgtgcctgggaaccgcctcaagatcttggtgggcatgtatgataagaagccagcagggcctggccccggccctcccgccaccccggcccagcctcagcctggcctccatgccccagcgcctccggcctcccagtacacgcccatgctccccaacacctaccagccccagccagacagcgtctacctggtgcccactcccagcaaggctcagcaaggcctctaccaagtcccgggtcccagccctcagttccagtctcccccagccaagcagacatccaccttctcgaagcagacaccccatcacccgtttcccagcccggccacagacctgtaccaggtgcccccagggcctggaggccctgcccaggatatttaccaggtgccaccttctgccgggatggggcatgacatctaccaggtccccccgtccatggacacacgcagctgggagggcacgaagcccccggcaaaggtggtggtgcccacccgcgtggggcagggctatgtatacgaggccgcccagccggagcaggacgagtacgacatcccgcgacacctgctggccccggggccacaggacatctatgatgtgcccccggttcgggggctgcttcccagccagtatggccaggaggtgtatgacacaccccccatggctgtcaagggtcccaatggccgagacccgttgctggaggtgtatgacgtgccccccagtgtggagaagggcctgccaccgtccaaccaccacgcagtctacgacgttcctccatcggtgagcaaggatgtgcccgatggcccactgctgcgtgaggagacctacgatgtgccccccgccttcgccaaggccaagccctttgacccggcccgcaccccactggtactggctgcgccccctccagactccccgccggccgaggacgtgtatgacgtgccgcccccggctcctgacctctacgacgtgccccctggcttgcggcggcctggcccgggcaccctgtacgatgtgccccgtgaacgggtgcttcctcctgaggtggctgatggtggcgtggtcgacagtggtgtgtatgcggtgcctcccccagctgaacgtgaagccccggcagagggcaagcgcctgtcggcctccagcaccggcagcacacgcagcagccagtctgcgtcctccttggaggtggcagggccgggccgggaacccctggagctggaagttgctgtggaggccctggcacggctgcagcagggtgtgagcgccaccgttgcccaccttctggacctggcaggcagcgccggtgcgactgggagctggcgtagcccctctgagccacaggagccgctggtgcaggacctgcaggctgctgtggccgctgtccagagtgccgtccacgagctgttggagtttgcccgcagcgcggtgggcaatgctgcccacacatctgaccgtgccctgcatgccaagcttagccggcagctgcagaagatggaggacgtgcaccagacgctggtggcacatggtcaggccctcgacgctggccggggaggctctggagccacccttgaggacctggaccggctggtggcctgctcgcgggctgtgcccgaggacgccaagcagctggcctccttcctgcacggcaatgcctcactgctcttcagacggaccaaggccactgccccggggcctgaggggggtggcaccctgcaccccaaccccactgacaagaccagcagcatccagtcacgacccctgccctcaccccctaagttcacctcccaggactcgccagatgggcagtacgagaacagcgaggggggctggatggaggactatgactacgtccacctacaggggaaggaggagtttgagaagacccagaaggagctgctggaaaagggcagcatcacgcggcagggcaagagccagctggagttgcagcagctgaagcagtttgaacgactggaacaggaggtgtcacggcccatagaccacgacctggccaactggacgccagcccaacccctggccccggggcgaacaggcggcctggggccctcggaccggcagctgctgctcttctacctggagcagtgtgaggccaacctgaccacactgaccaacgccgtggacgccttctttaccgccgtggccaccaaccagccgcccaagatctttgtggcgcacagcaagttcgtcatcctcagcgcccacaagctggtgttcatcggggacacactgtcacggcaggccaaggctgctgacgtgcgcagccaggtgacccactacagcaacctgctgtgcgacctcctgcgcggcatcgtggccaccaccaaggccgctgccttgcagtacccatcgccttccgcggcccaggacatggtggagagggtcaaggagctgggccacagcacccagcagttccgccgcgtcctaggccagctggcagccgcctgagggtggtgaccccaggagggaggcaggggaggggtgcggcggtcccagctccctggctcccatgtcaagagtcgctgtgccacaggcttagggacaggaccccagctctgcgtcggtcctggtgccctggatgcccaggaatctgtatatatttatggccgggcagggtgtggggccatgcctcctcaggagccgaagcccaggggccggccagtggccttccccagcatgcaccacgggcccgggttgggtcaccagacggggctggagtgtgagggtcctgcagcctgcaggacctcgtgccaccccgagggctgagcctggtcccacgagggtgccgtgtcccctgacagggccagtgcagtttggtgtgtcctccgccttaccaggagaagaacctgaagaactatttttcgttattggttttccaatcatttgactaagagtctccatttaaataaagtttttaaaaggaagagcaaaaaaaaaaaaaaaaaaaaaaaaa

SEQ ID NO: 618 - protein, 870 aa, Homosapiens
MNHLNVLAKALYDNVAESPDELSFRKGDIMTVLEQDTQGLDGWWLCSLHGRQGIVPGNRLKILVGMYDKKPAGPGPGPPATPAQPQPGLHAPAPPASQYTPMLPNTYQPQPDSVYLVPTPSKAQQGLYQVPGPSPQFQSPPAKQTSTFSKQTPHHPFPSPATDLYQVPPGPGGPAQDIYQVPPSAGMGHDIYQVPPSMDTRSWEGTKPPAKVVVPTRVGQGYVYEAAQPEQDEYDIPRHLLAPGPQDIYDVPPVRGLLPSQYGQEVYDTPPMAVKGPNGRDPLLEVYDVPPSVEKGLPPSNHHAVYDVPPSVSKDVPDGPLLREETYDVPPAFAKAKPFDPARTPLVLAAPPPDSPPAEDVYDVPPPAPDLYDVPPGLRRPGPGTLYDVPRERVLPPEVADGGVVDSGVYAVPPPAEREAPAEGKRLSASSTGSTRSSQSASSLEVAGPGREPLELEVAVEALARLQQGVSATVAHLLDLAGSAGATGSWRSPSEPQEPLVQDLQAAVAAVQSAVHELLEFARSAVGNAAHTSDRALHAKLSRQLQKMEDVHQTLVAHGQALDAGRGGSGATLEDLDRLVACSRAVPEDAKQLASFLHGNASLLFRRTKATAPGPEGGGTLHPNPTDKTSSIQSRPLPSPPKFTSQDSPDGQYENSEGGWMEDYDYVHLQGKEEFEKTQKELLEKGSITRQGKSQLELQQLKQFERLEQEVSRPIDHDLANWTPAQPLAPGRTGGLGPSDRQLLLFYLEQCEANLTTLTNAVDAFFTAVATNQPPKIFVAHSKFVILSAHKLVFIGDTLSRQAKAADVRSQVTHYSNLLCDLLRGIVATTKAAALQYPSPSAAQDMVERVKELGHSTQQFRRVLGQLAAA

SEQ ID NO: 619 - DNA, 1281 bp, Homosapiens
gcatgtgcaaagcgctgtcgggggccgccctagctgccgtcgccgccgccggggctctatggtctctccctagagctttgccgttggaggcggctgctgcggtcttgtgagtttgaccagcgtcgagcggcagcaacatggaggaattcgactccgaagacttctctacgtcggaggaggacgaggactacgtgccgtcgggtggagagtatagtgaagatgatgtaaatgaattagtgaaggaagatgaagtggatggtgaagagcagacacagaaaacccaagggaaaaaaagaaaggcccagagcattccagccaggaagagaagacaaggtggcctctcattagaagaagaggaagaggaggatgccaattcagaatctgagggaagcagtagtgaggaggaagatgacgctgcagagcaggaaaaaggcattggatcagaggatgccaggaaaaagaaggaggacgaactctgggccagcttcctcaatgatgtgggaccaaaatcaaaagtgcccccaagtacacaagttaagaaaggagaggagactgaagagacaagttcaagtaaattgttggtaaaagcagaagagctagagaaacctaaagaaacagaaaaagttaaaatcaccaaggtgtttgattttgctggtgaagaagtaagggtaactaaggaagtggatgctacatctaaagaggccaaatccttcttcaagcagaatgagaaagaaaaaccacaggctaatgttccttcagctctgccatcactccctgccgggtcagggttaaaaagatcaagtggcatgagcagccttttggggaaaattggtgccaagaagcagaaaatgagcacccttgagaagtccaaactggactgggagagcttcaaggaggaagaggggattggtgaagaactggccatccataatcgagggaaagaggggtacattgaacggaaagccttccttgaccgagtggatcacaggcagtttgaaattgagcgagatctcaggctgagcaaaatgaaaccttgatgttacgggctaaatcaagagcagcttaatcctgtttacaatgtgagctttttgtgcgtctgtgaaatgttttacagtgtttctcatcatctgtttcccagcaaggtcttttttttttctacattgaagttctgtctatgtatcttaatcacaaatggtttcattcactttacttttaaaaatttgtccttaaatgaataaataaaataaaagttggtcctgtgagaggataatgaagatgaaa

SEQ ID NO: 620 - protein, 299 aa, Homosapiens
MEEFDSEDFSTSEEDEDYVPSGGEYSEDDVNELVKEDEVDGEEQTQKTQGKKRKAQSIPARKRRQGGLSLEEEEEEDANSESEGSSSEEEDDAAEQEKGIGSEDARKKKEDELWASFLNDVGPKSKVPPSTQVKKGEETEETSSSKLLVKAEELEKPKETEKVKITKVFDFAGEEVRVTKEVDATSKEAKSFFKQNEKEKPQANVPSALPSLPAGSGLKRSSGMSSLLGKIGAKKQKMSTLEKSKLDWESFKEEEGIGEELAIHNRGKEGYIERKAFLDRVDHRQFEIERDLRLSKMKP

SEQ ID NO: 621 - DNA, 1068 bp, Homosapiens
gctgaggcggcgagggtgagtcggcgccggccgctaccgcacttcgggcgctcgtccctcatttctctgtggtgaatggcgacgggatggagcgcgaggggagcggcggcagcggcgggtcggccgggctcctgcagcagatcctgagcctgaaggttgtgccgcgggtgggcaacgggaccctgtgccccaactctacttccctctgctccttcccagagatgtggtatggtgtattcctgtgggcactggtgtcttctctcttctttcatgtccctgctggattactggccctcttcaccctcagacatcacaaatatggtaggttcatgtctgtaagcatcctgttgatgggcatcgtgggaccaattactgctggaatcttgacaagtgcagctattgctggagtttaccgagcagcagggaaggaaatgataccatttgaagccctcacactgggcactggacagacattttgcgtcttggtggtctcctttttacggattttagctactctatagcatacatccttatgctgagatgttgaacttaaactttatggaatcctccaaaagaatacattatggagtgtagtgttttcttagttcttcaaagggaagcaacttggatgaacaggaacatgaaggacaacacatctcagccttttcttcattttgaagctcctagaattgaagacttatgtggactcctattgttctcaaccaaaacaagtcttttggctttcttttttgtagatatttaatttaagcagttttaatgtgtacctttacccaagccaagtcaacagtgtctctggggtggcatcctttgcactgaaatttacagtattctgtgagatgtcgcatattttgaagaaaccgtggaagatactggtttatttcaaatgagcagagtatgttgtattaaaatcttatctaatcttgattaaaatttggcaaactcttttctttgctacatcttagtgacaataaatgccaaataggttttggttgagtatagttttgaaaacaaatttggtgaaataaagcaggaaaaaaaaaaaaaaaa

SEQ ID NO: 622 - protein, 144 aa, Homosapiens
MEREGSGGSGGSAGLLQQILSLKVVPRVGNGTLCPNSTSLCSFPEMWYGVFLWALVSSLFFHVPAGLLALFTLRHHKYGRFMSVSILLMGIVGPITAGILTSAAIAGVYRAAGKEMIPFEALTLGTGQTFCVLVVSFLRILATL

SEQ ID NO: 623 - DNA, 3778 bp, Homosapiens
gacgacgtttgggagcctttgctgagtccagggagagaggcgtcccccaccgtgccgctgcagctcgggcagagccgccaagctttggggtgctgaggaacctctaatcatctcccatggatttgtgatcagcgttgcagctctcccagcagccctggacagtggcccccagcagtcagcatgtggctgccgcgcgtctccagcacagcagtgaccgcgctcctcctggcgcagaccttcctcctcctctttctggtttcccggccagggccctcgtccccagcaggcggcgaggcgcgcgtgcatgtgctggtgctgtcctcgtggcgctcgggctcgtccttcgtgggccaactcttcaaccagcaccccgacgtcttctacctaatggagcccgcgtggcacgtgtggaccaccctgtcgcagggcagcgccgcaacgctgcacatggctgtgcgcgacctggtgcgctccgtcttcctgtgcgacatggacgtgtttgatgcctatctgccttggcgccgcaacctgtccgacctcttccagtgggccgtgagccgtgcactgtgctcgccacccgcctgcagtgcctttccccgaggcgccatcagcagcgaggccgtgtgcaagccactgtgcgcgcggcagtccttcaccctggcccgggaggcctgccgctcctacagccacgtggtgctcaaggaggtgcgcttcttcaacctgcaggtgctctacccgctgctcagcgaccccgcgctcaacctacgcatcgtgcacctggtgcgcgacccgcgggccgtgctgcgctcccgggagcagacagccaaggctctggcgcgtgacaacggcatcgtgctgggcaccaacggcacgtgggtggaggccgaccccggcctgcgcgtggtgcgcgaggtgtgccgtagccacgtacgcatcgccgaggccgccacactcaagccgccaccctttctgcgcggccgctaccgcctggtgcgcttcgaggacctggcgcgggagccgctggcagaaatccgtgcgctctacgccttcactgggctcagtctcacgccacagctcgaggcctggatccataacatcacccacggatctggacctggtgcgcgccgcgaagccttcaagacttcgtccaggaatgcgctcaacgtctcccaggcctggcgccatgcgctgccctttgccaagatccgccgcgtgcaggaactgtgcgctggtgcgctgcagctgctgggctaccggcctgtgtactctgaggacgagcagcgcaacctcgcccttgatctggtgctgccacgaggcctgaacggcttcacttgggcatcatccaccgcctcgcacccccgaaattagtggaggccacagttgtagcaggcgctaggcccgggaggagagtgcatggtgcagagggggctggggcgcacggagaagcaggtccctatattgaccaaggagtttgtggtacgacccctccccctccccaagtaggcaaggactgcacgtttctttctctcttgattcttggttttcctttgagtcctctggagctgccttctcatcaggtgcactcttcatggaaagcaactcttgcccctcctcctctgggcacagggtgtgcgttcagatgacttggctcctactcaagggctttcttcccctttaactctctccttctggtgacacatcctgcagcagctgagggggtgccctggcactggctgggagtggagaggcactgtggtgaaatggctccagaggtctgtacatcacatacatatgcacacaggcacacatggcaaaactcggaagtgaaaggacttgtctgaaatcacatggtgagaaggaggatgaagggaggagagagcttttgctctgggtctccagtggataggagaggacctgcctcctgggtgagaagggtcagattttcctattttaattgctttagggaagagcaagcagagtcatgaccagggacacagctgagagatagaggaggctgtgaatgctgagaccagagtttatcatgctggacaagcctggaaggaggcaataagtgggaaaggtaggaggagagaaggctggggagggctgggcagcaagccaggcacagtgagtggcagagcaagagggggaaagcaggatcagtgcctggaaggcaggtgtgcccgtcagcggggagtggaactcatcaggcttgccaagaggttggaagggaaatggctctgggctggaactgtcttcccttggtccttctggtccaggccttggaggaaagcagaggatgatccctgcctgtgagccacacctcctagctctgggggcaaaggggcttagtaaaggaatgctggatgtgtagagggtttagtcccgagctcaggaaatgagagcctataagtgcccagtacatgtttaaaagaagagctcatggaacctctggaaaggacagggaagttgagttagccacataaatgaacccaagtcacattggaacacagagctggtctgggaactgtgttggctgccaacagaacttctgaccctgttacctgtgaaatgaggcagtttccctcacgttgccatcagctaccaggagcgatgctggtggtcactagcttctgatcctcatcctgggtgtggccacagattgggggaacctggattgtggagtcacatcctccctgcaaagcaagcagggcaagggagatctggcattttctgctttacgtggagggagaacaggcacattagccttgaagctgaagctcattttaggttccttccaggtttagaagcttcaaccaaatgaaacttgaatctgtccctcgtgacaattataggaggaaggtatttaaaaccccagatttatgaatgtgtactacatggcttagagaatgtctttgttcttgttcaggtggttataacaaaataccttaagagtggattacaggcatgagccactgtacctggcgaaaaacagtttgttaacacaggcagccaacatcactcaggataagcctcaatgaaaagtaacaaagtgatggcttggaacactgtcttacacagcatttttaaaaaatacaataaatttgtagagataggatgaccaaggacaacagttttaggcttccaaaggtggtaaactatgggatggtaaatatccgagaggaagctgatgcaacaggatttgtctgcagcagcctctggtaccacctctgagtcaagggttgtgtccagtgatggagagtttatatcgtgcctttaggcagaaaaggggagggaaacctgaacttttcctgcactttctgcttcttaattgccttcagctgaaaatcattttttatgtgaaaaaggcatagtctgagctgacgcctctgctttcctccacctgaagagaacctgcgtgctgctcctttgcttcggacctccgcctctgcccgggagaaagcccaggccagcctgctggacaagcagagaccatgagaaggagagttcaggggtcccaatccaggccatcctagaccagccagctccagctgatccgcacgcagccacttcggctaccttctactggccaaagggagtcccagggctcacccagattcagaggtggggaaactgagtccaccacttgagaagagtagctataaagacatatgagcgaggccagctgagcccagcactgcggccaagtcgaagactttaggagcaataaaagtgcttattgtgtttcagaaaaaaaaaaaaaaaaaaaaaaaaaaaa

SEQ ID NO: 624 - protein, 395 aa, Homosapiens
MWLPRVSSTAVTALLLAQTFLLLFLVSRPGPSSPAGGEARVHVLVLSSWRSGSSFVGQLFNQHPDVFYLMEPAWHVWTTLSQGSAATLHMAVRDLVRSVFLCDMDVFDAYLPWRRNLSDLFQWAVSRALCSPPACSAFPRGAISSEAVCKPLCARQSFTLAREACRSYSHVVLKEVRFFNLQVLYPLLSDPALNLRIVHLVRDPRAVLRSREQTAKALARDNGIVLGTNGTWVEADPGLRVVREVCRSHVRIAEAATLKPPPFLRGRYRLVRFEDLAREPLAEIRALYAFTGLSLTPQLEAWIHNITHGSGPGARREAFKTSSRNALNVSQAWRHALPFAKIRRVQELCAGALQLLGYRPVYSEDEQRNLALDLVLPRGLNGFTWASSTASHPRN

SEQ ID NO: 625 - DNA, 3784 bp, Homosapiens
attcaacaggaggaacccgcgggagaggagccccactcccccagcgccgcagccaccgcagccaccgcagcccgtgcgccccgcgccctcgagcgccatggccaaggaaggcgtggagaaggcggaggagacggagcaaatgatcgagaaggaggcaggcaaggagccggcggagggcggcggcggcgacggctcgcaccgcctcggggacgcccaggagatgcgcgcggtggtgctggctggcttcggggggctcaacaagctgcggctcttcaggaaggccatgcccgagcctcaggacggcgagctcaagatccgcgtcaaagcctgtggattaaacttcattgacttgatggtgcgacaagggaatattgacaaccctcccaagactcccctggtgccaggatttgagtgttctgggattgttgaagctctgggggacagcgtgaaaggatatgagattggagaccgtgtcatggcatttgtcaattacaatgcctgggcagaggtggtctgcacaccagtggagtttgtctacaagatcccggatgacatgagcttctcggaggctgctgcattccccatgaacttcgtcacagcctatgtgatgctgtttgaagttgccaacctccgggaagggatgtctgtgctcgtgcactcagctggtgggggcgtgggtcaagctgtggctcagctgtgttccactgtccccaacgtgactgtctttggaacagcctctactttcaagcatgaagcaatcaaagactctgtgacccacctctttgacagaaatgcagactacgtgcaagaagttaaaagaatctctgctgaaggtgtggacatcgttttggattgcctctgtggggacaacactggaaaaggtctcagtcttctcaaacccctgggaacctacattttatatggctcatccaacatggtaactggagagaccaagagcttcttcagctttgcaaaatcatggtggcaggtggagaaggtgaaccccatcaagctgtatgaggagaacaaagtcatcgcggggttttcccttttaaatctgctcttcaaacaaggccgggcgggcctcattcggggagtggtggaaaaactcatagggctctacaaccagaagaagatcaagcctgtggtggactccttgtgggctctggaggaggtgaaggaggccatgcagcggattcacgaccgagggaacattggcaagttaattctggatgtagaaaagaccccaactccactgatggccaatgacagcacagagaccagtgaagcaggggaagaggaggaggaccacgagggagacagcgagaacaaggagcggatgccctttatccagtaactgaggacccaggtgggagaatgtgaaggatggtttggaagatgaggacccggctgagaaaactcttctgtgccccagtgaacaaatgctgtagtccagtgcgtgtcgtgtttgtctgcagtcagctgagctaaaaagctgttgatcactgttgttttttgaagtgccaatcccatgccatgcagtattatgtccctctcctatctgtgtattacacattcccctctcccctgtatcaaaaccatccatctgtgggttcttcttgacagttctagaacagccttgcaaattaatacaagtcccaggcccaatgcctaagagaccagacgtgggcaaagacaagtttggatggaaaggtgttatcacagagccctgtccagctcctagaattcctcaggccagtgacacttttttgctgctggccacccatgcctctgatgagaacacttgccaatttggccagcagaaagagagtaggccggatgttttcatgagcccacaaatttagaaactctcctagtagtactttttctctctccatttaagagacaactacggtcaaaagtttgagccattctcttctaccccttcagtgtctgaccctttcactggctcttatctgtaaacacagggaggcaggtatggatttttcacagtagacaatgggtcaacagcatgagtttgaggacctgctgtgaagatttctcctccaaaatacatctcatgggcaggattcttcctgctccatatctgtttcaattttaagaaagcaccacatacaagacacattcagaagtcattcctgagcattgctggtgtttgcacacttgccacctgcattaccaattctgtaaatttcaattcctggtggaaagtgaccactttgaccatggatttcccaaagaagagttcctttgcagaccataggtggaaaagtcaatgagcatctccttccttgccaaagcatgtcccaacatgtaacaaactctagggatacaaaaggtttatattcagcatctgatgtcagatgtacagttcctcccctcccatatataaaccccggtgtagaatctgcagcgccctgctcttcggaaaccaaggaacaagccacctgctcacacaccttgttcaacttttcagctcctaaggaaccccacccccatgcaatttgactgtgcttgagaggtgaatacagttaccttcgagaaacagagggagctcctcaccccgtccttccagtccttttggctaaaatgcttaactatcactcacaaacaaatgtggagataccaggagctcatttgattcataccccaactttgtgttctgaaaaacatcagagggattttacattgcccagtttctccaccaacaagccttagggtggacccaaccctttccgcaagtggtaggaacgaatgcatcttagcaattacctgatttccaaagtccttttgtagcaaatgtcacctcattcgtggtctttttacctatcctaagcttatgatgatgagttatgtatgccaaatatttatctgaagagtttctcctcattgtgaatgtgtatgtaaaatatgaagacaagaaagggtgctttcatctgaggaaccaaggggtgagagtatcccaaaggaggacaccagcatcatcttttcttcgtactccaggacccaccaatattccagttctgggtcatttagagagataatggggcgtttattcccctattacctttgctaagtgctatattattggctgtttctcccgtaaccatgctgaaaagggggtcttagggagaactgtcatccaagtggcattcctagtaagttgggtagaaatgacattttccagagctgaaggagtgaagagcccttggccatactagggctctccttcccccggggagtgggaattcagccacattcagaattcacatcgcctttgttatgtccagaggagaggcataaaaaggcactctcccccaccacccctaccgaatctgggtttggtttggttttatttaactagcaaagttaatccagtaatcgcaaattactccagatggttaaagaaaaccctttcagaatacagaacgagaaaactagagtttgaccaataagaccaatttctgccatgaagaaccgggggacgcaagttaattgtttaacgtactctcattttaagcaccttctttcctgtctcttgattgttttttctgaaggaagtgtaaagaatgtctcagtctgccttaaaggaactgtgaaggcttctctgtaatttaagcttgattgaagtgaactgaaacattgtctaatgtctttgtggctttagagcttttgttatattgtgcctataaagcaaattatgtttacataaaaatataaataaagtattcagcatagcaaaaccccaaaaaaaaaaaaaaaa

SEQ ID NO: 626 - protein, 419 aa, Homosapiens
MAKEGVEKAEETEQMIEKEAGKEPAEGGGGDGSHRLGDAQEMRAVVLAGFGGLNKLRLFRKAMPEPQDGELKIRVKACGLNFIDLMVRQGNIDNPPKTPLVPGFECSGIVEALGDSVKGYEIGDRVMAFVNYNAWAEVVCTPVEFVYKIPDDMSFSEAAAFPMNFVTAYVMLFEVANLREGMSVLVHSAGGGVGQAVAQLCSTVPNVTVFGTASTFKHEAIKDSVTHLFDRNADYVQEVKRISAEGVDIVLDCLCGDNTGKGLSLLKPLGTYILYGSSNMVTGETKSFFSFAKSWWQVEKVNPIKLYEENKVIAGFSLLNLLFKQGRAGLIRGVVEKLIGLYNQKKIKPVVDSLWALEEVKEAMQRIHDRGNIGKLILDVEKTPTPLMANDSTETSEAGEEEEDHEGDSENKERMPFIQ

SEQ ID NO: 627 - DNA, 1915 bp, Homosapiens
ggcaacatggctcagcaggcttgccccagagccatggcaaagaatggacttgtaatttgcatcctggtgatcaccttactcctggaccagaccaccagccacacatccagattaaaagccaggaagcacagcaaacgtcgagtgagagacaaggatggagatctgaagactcaaattgaaaagctctggacagaagtcaatgccttgaaggaaattcaagccctgcagacagtctgtctccgaggcactaaagttcacaagaaatgctaccttgcttcagaaggtttgaagcatttccatgaggccaatgaagactgcatttccaaaggaggaatcctggttatccccaggaactccgacgaaatcaacgccctccaagactatggtaaaaggagcctgccaggtgtcaatgacttttggctgggcatcaatgacatggtcacggaaggcaagtttgttgacgtcaacggaatcgctatctccttcctcaactgggaccgtgcacagcctaacggtggcaagcgagaaaactgtgtcctgttctcccaatcagctcagggcaagtggagtgatgaggcctgtcgcagcagcaagagatacatatgcgagttcaccatccctaaataggtctttctccaatgtgtcctccaagcaagattcatcataacttataggttcatgatctctaagatcaagtaaaaatcataatttttacttattaaaaaattgcaacacaagatcaatgtccatagcaatatgatagcatcagccaattttgctaacacatttctttgggattttgcccttcctggggtataggggatcagaaatattgatccatgtgcacgcagataaaatggcttctgctaaacagactaaaatctttctctctagtctttctcacttgtacaaacccagtttgttttcaaaaaatcacagtagcaatgcaactcatcactctagaaaagcaagcttaggctacctgaaagattttcccttggaagtttagcgtatgtttgactaacaaaaattccctacatcagagactctaggtgctatataatccaaaaacttttcagcctgttgctcattctgtcccatgctggcaataataccttgtcagcccattacccttattttgaattgctccatctcctggtgggacttgtatcttgtctgccatatcagaacacaaacccctgaagaggttctgatttgattttttttttttcttcatgcctaccctttttttggaagtttccagccgcaatttgaaatgaaatgacaaggtgtatatttgatcaattttcattcccaccattgcattacaacctctaacttaaatgggtaaccctaaggcatatcaaagaagcagattgcatgataaacggaaatagaaaaaaagaacctacatttattttgctttagcatccttactctcaccttttatgagattgagagtggacttacatttccttttttacattttcgtatatttattttttttagccatcattatatgtttaagtctattatgggcaaccaatctttggaagctgaaaactgaatttaaagaatgctatcttggaaaattgcatacgtctgtgcaattttttattctgcctagtgctattctgcttgtttaactagattgtacaaaataacttcattgcttaatatcaaattacaaagtttagacttggagggaaatgggctttttagaagcaaacaattttaaatatattttgttcttcaaataaatagtgtttaaacattgaatgtgttttgtgaacaatatcccactttgcaaactttaactacacatgcttggaattaagttttagctgttttcattgctcaataataaagcctgaattctgatcaataaaaaaaaaaaaaaaaaaaaaaaaaaaaa

SEQ ID NO: 628 - protein, 197 aa, Homosapiens
MAKNGLVICILVITLLLDQTTSHTSRLKARKHSKRRVRDKDGDLKTQIEKLWTEVNALKEIQALQTVCLRGTKVHKKCYLASEGLKHFHEANEDCISKGGILVIPRNSDEINALQDYGKRSLPGVNDFWLGINDMVTEGKFVDVNGIAISFLNWDRAQPNGGKRENCVLFSQSAQGKWSDEACRSSKRYICEFTIPK

SEQ ID NO: 629 - DNA, 2264 bp, Homosapiens
gcagtgcgcaggcgtgagcggtcgggccccgacgcgcgcgggtctcgtttggagcgggagtgagttcctgagcgagtggacccggcagcgggcgataggggggccaggtgcctccacagtcagccatggcagcgctgcgctacgcggggctggacgacacggacagtgaggacgagctgcctccgggctgggaggagagaaccaccaaggacggctgggtttactacgccaatcacaccgaggagaagactcagtgggaacatccaaaaactggaaaaagaaaacgagtggcaggagatttgccatacggatgggaacaagaaactgatgagaacggacaagtgttttttgttgaccatataaataaaagaaccacctacttggacccaagactggcgtttactgtggatgataatccgaccaagccaaccacccggcaaagatacgacggcagcaccactgccatggaaattctccagggccgggatttcactggcaaagtggttgtggtcactggagctaattcaggaatagggttcgaaaccgccaagtcttttgccctccatggtgcacatgtgatcttggcctgcaggaacatggcaagggcgagtgaagcagtgtcacgcattttagaagaatggcataaagccaaggtagaagcaatgaccctggacctcgctctgctccgtagcgtgcagcattttgctgaagcattcaaggccaagaatgtgcctcttcatgtgcttgtgtgcaacgcagcaacttttgctctaccctggagtctcaccaaagatggcctggagaccacctttcaagtgaatcatctggggcacttctaccttgtccagctcctccaggatgttttgtgccgctcagctcctgcccgtgtcattgtggtctcctcagagtcccatcgatttacagatattaacgactccttgggaaaactggacttcagtcgcctctctccaacaaaaaacgactattgggcgatgctggcttataacaggtccaagctctgcaacatcctcttctccaacgagctgcaccgtcgcctctccccacgcggggtcacgtcgaacgcagtgcatcctggaaatatgatgtactccaacattcatcgcagctggtgggtgtacacactgctgtttaccttggcgaggcctttcaccaagtccatgcaacagggagctgccaccaccgtgtactgtgctgctgtcccagaactggagggtctgggagggatgtacttcaacaactgctgccgctgcatgccctcaccagaagctcagagcgaagagacggcccggaccctgtgggcgctcagcgagaggctgatccaagaacggcttggcagccagtccggctaagtggagctcagagcggatgggcacacacacccgccctgtgtgtgtcccctcacgcaagtgccagggctgggccccttccaaatgtccctccaacacagatccgcaagagtaaaggaaataagagcagtcacaacagagtgaaaaatcttaagtaccaatgggaagcagggaattcctggggtaaagtatcacttttctggggctgggctaggcataggtctctttgctttctggtggtggcctgtttgaaagtaaaaacctgcttggtgtgtaggttccgtatctccctggagaagcaccagcaattctctttcttttactgttatagaatagcctgaggtcccctcgtcccatccagctaccaccacggccaccactgcagccgggggctggccttctcctacttagggaagaaaaagcaagtgttcactgctccttgctgcattgatccaggagataattgtttcattcatcctgaccaagactgagccagcttagcaactgctggggagacaaatctcagaaccttgtcccagccagtgaggatgacagtgacacccagagggagtagaatacgcagaactaccaggtggcaaagtacttgtcatagactcctttgctaatgctatgcaaaaaattctttagagattataacaaatttttcaaatcattccttagataccttgaaaggcaggaagggaagcgtatatacttaagaatacacaggatattttggggggcagagaataaaacgttagttaatccctttgtctgtcaatcacagtctcagttctcttgctttcacattgtacttaaacctcctgctgtgcctcgcatcctatgcttaataaaagaacatgcttgaatatcaaaaaaaaaaaaaaaaaaaaaaaa

SEQ ID NO: 630 - protein, 414 aa, Homosapiens
MAALRYAGLDDTDSEDELPPGWEERTTKDGWVYYANHTEEKTQWEHPKTGKRKRVAGDLPYGWEQETDENGQVFFVDHINKRTTYLDPRLAFTVDDNPTKPTTRQRYDGSTTAMEILQGRDFTGKVVVVTGANSGIGFETAKSFALHGAHVILACRNMARASEAVSRILEEWHKAKVEAMTLDLALLRSVQHFAEAFKAKNVPLHVLVCNAATFALPWSLTKDGLETTFQVNHLGHFYLVQLLQDVLCRSAPARVIVVSSESHRFTDINDSLGKLDFSRLSPTKNDYWAMLAYNRSKLCNILFSNELHRRLSPRGVTSNAVHPGNMMYSNIHRSWWVYTLLFTLARPFTKSMQQGAATTVYCAAVPELEGLGGMYFNNCCRCMPSPEAQSEETARTLWALSERLIQERLGSQSG

SEQ ID NO: 631 - DNA, 735 bp, Homosapiens
gcagtgcgcaggcgtgagcggtcgggccccgacgcgcgcgggtctcgtttggagcgggagtgagttcctgagcgagtggacccggcagcgggcgataggggggccaggtgcctccacagtcagccatggcagcgctgcgctacgcggggctggacgacacggacagtgaggacgagctgcctccgggctgggaggagagaaccaccaaggacggctgggtttactacgccaatcacaccgaggagaagactcagtgggaacatccaaaaactggaaaaagaaaacgagtggcaggagatttgccatacggatgggaacaagaaactgatgagaacggacaagtgttttttgttgaccatataaataaaagaaccacctacttggacccaagactggcgtttactgtggatgataatccgaccaagccaaccacccggcaaagatacgacggcagcaccactgccatggaaattctccagggccgggatttcactggcaaagtggttgtggtcactggagctaattcaggaatagggttcgaaaccgccaagtcttttgccctccatggtgcacatgtgatcttggcctgcaggaacatggcaagggcgagtgaagcagtgtcacgcattttagaagaatggaaaacaaaataccaccctccgccagaaaagtgcagaataaaaattttccactagcaaaagaaggaaaaaataaaagatcttgaatagtctcatc

SEQ ID NO: 632 - protein, 189 aa, Homosapiens
MAALRYAGLDDTDSEDELPPGWEERTTKDGWVYYANHTEEKTQWEHPKTGKRKRVAGDLPYGWEQETDENGQVFFVDHINKRTTYLDPRLAFTVDDNPTKPTTRQRYDGSTTAMEILQGRDFTGKVVVVTGANSGIGFETAKSFALHGAHVILACRNMARASEAVSRILEEWKTKYHPPPEKCRIKIFH

SEQ ID NO: 633 - DNA, 545 bp, Homosapiens
gcagtgcgcaggcgtgagcggtcgggccccgacgcgcgcgggtctcgtttggagcgggagtgagttcctgagcgagtggacccggcagcgggcgataggggggccaggtgcctccacagtcagccatggcagcgctgcgctacgcggggctggacgacacggacagtgaggacgagctgcctccgggctgggaggagagaaccaccaaggacggctgggtttactacgccaagtaagggggccgcagtggggccgcggacgcacctgggaccctgcacagcccacggacgccacctgcgcggggaggacgcgcactccagcgcagcgcgtgcggtgcaaagtgaaagtaactgttaaggagcttcagggaaaagggtccagggttcccagtaggggccggcccccttggtgggcctcgggtccagcgggggtcacctggtggcttcccggcgcgccctctgctgttcaggatgcagcactgcgcggcgcggcgagggcaaagcggcctcatccccgccaaaaaataaagatgttttaaaaagcgc

SEQ ID NO: 634 - protein, 36 aa, Homosapiens
MAALRYAGLDDTDSEDELPPGWEERTTKDGWVYYAK

SEQ ID NO: 635 - DNA, 5216 bp, Homosapiens
gactcccagcacacagggagctgcggggcaggcaatgagagctgcactctggctggggaaggcatgagtgacagacccacagcaaggcggtggggtaagtgtggacctttgtgtaccagagagaacatcatggtggctttcaaaggggtctggactcaagctttctggaaagcagtcacagcggaatttctggccatgcttatttttgttctcctcagcctgggatccaccatcaactggggtggaacagaaaagcctttaccggtcgacatggttctcatctccctttgctttggactcagcattgcaaccatggtgcagtgctttggccatatcagcggtggccacatcaaccctgcagtgactgtggccatggtgtgcaccaggaagatcagcatcgccaagtctgtcttctacatcgcagcccagtgcctgggggccatcattggagcaggaatcctctatctggtcacacctcccagtgtggtgggaggcctgggagtcaccatggttcatggaaatcttaccgctggtcatggtctcctggttgagttgataatcacatttcaattggtgtttactatctttgccagctgtgattccaaacggactgatgtcactggctcaatagctttagcaattggattttctgttgcaattggacatttatttgcaatcaattatactggtgccagcatgaatcccgcccgatcctttggacctgcagttatcatgggaaattgggaaaaccattggatatattgggttgggcccatcataggagctgtcctcgctggtggcctttatgagtatgtcttctgtccagatgttgaattcaaacgtcgttttaaagaagccttcagcaaagctgcccagcaaacaaaaggaagctacatggaggtggaggacaacaggagtcaggtagagacggatgacctgattctaaaacctggagtggtgcatgtgattgacgttgaccggggagaggagaagaaggggaaagaccaatctggagaggtattgtcttcagtatgactagaagatcgcactgaaagcagacaagactccttagaactgtcctcagatttccttccacccattaaggaaacagatttgttataaattagaaatgtgcaggtttgttgtttcatgtcatattactcagtctaaacaataaatatttcataatttacaaaggaggaacggaagaaacctattgtgaattccaaatctaaaaaaagaaatatttttaaaatgttcttaagcaaatatatacctattttatctagttacctttcattaacaaccaattttaaccgtgtgtcaagatttggttaagtcttgcctgacagaactcaaagacacgtctatcagcttattccttctctactggaatattggtatagtcaattcttatttgaatatttattctattaaactgagtttaacaatggcaaaatacagtatgtcacagtcatgcacattcaagagagaaaatataacaagttcttttatgagcaatcccttatgcatagactaccttggcaaaagagcattagcaagtgtcactgctcatcagttacttccttccatttatatcacaaatacccaagtttcaattctaacttcatttcatggtatttcttcctcctcaatgcccaaggtaatgtgggactaaagcccagaaatttgaaaagaatattcagaaatccttcccaaatcataagggcacctattgagattcaagacaagcagactcgtaaaatcttgtagaggcagaggcaaagttatcatcatacaaaaatcacaaacaaaaaggagatctgtattcgggtatcaaacggttgatctgttttcagtgcacaccctcaaatgcaccacaccagttttacgatctaagcttttaacccctttaccactttgcttatttttaaaaaatttattggcaaaactggggattttgtttgtaactttggttatctatatttaaacattagctgagacatatttttgataacaagaacttagctagttgagtcctggctttttgttgattattaagctgtgttcactctagaaggtgtaaaggccctgtcccaatctctgctctctcacttctcgtgacatttgttgataatctttactgcaagtgtaatgatatttgagtgaattaaaatgcatgacagacaaggtacaacatggttgcagaataaaagggtgaggacatcagatcactctgtattcaaagcttactagacgaacaatctttcatttctggatatattgtagctaacccaacacatttttaaactatttttgttactgactcacttacttgtcaaaataattggtttttctgtcctgctttgccttttgtcactagaatgttctccagaaaccccagtttctgtcatcttaactgtctagtctagccgttaacttagacaaagaagtgcaaatgtcaatttcactaaacaaaagctattagaagtaaagcagaaacctatcactgcaaggagtgacttgtaaataactgatgatcaagggctgtcttctctcaagcatggttccaactctgtgtcactttttagcgttaatggcagttgtgtgtctgtggcagtgagataatggaccactattaaacctgattctcttcggtgctaggaaagagtgatgtgtgagattcccagagagtcgtcacaccagtgttatgcctgggagtgccactggcataccgcaggtgcctaaatcccaggcccctttctcagggggcgtggccacaccacacactgcgccagtgacacatagttacttcctggctgggacggcacctatagaaactagggtacaaatctcccaaagatggtttgcaccgtcatttcaaatgtttgcacaatataccacttagaggcttaaaatcagggtggttcagttcaaaaggtaatatcaaccgtcagcaaacatgtcagtttaaaaataagttcggttaacaaggaagtgttaagcagattttttgaatacacttacaatatactggcttataatcatttttattctgccatatggtttatttcatatacactcacttttacactcacttccaattatagcattcaataagttacggttaaagaaaagtgaatggtgtttttgtaatttgttttctagtagctagcagagagcctggcacatagtatgtattcaaaacaagtgtgttaattaataaaaatatataaatctcatttgagatttaagaatataaataattttcttttaatctttattttgctcaatatttaataggaagtatgatttcaaggactactaaaggaaggcaatatacatgtgaaaaccataaaatacattttttgcattctactatttttaggggcatgaaatgaatgaaagctttagcacttttttgcccctacatatgagacaacatattttgtatttcactcaaggctctgccagtaaaaagtaatgaaattgtacctttctaatgacatctatgcagcaggggtctatcgccttgtggatggcaccaaattatccaagtgtattaggagactggggcttttttctttaatcccttcttattaatgaagtgcatagtgctgctcccaggagaccactgctgacagatacacagagaagagatcagagaggaaaaactgggaagacataaatgaattatacccagccatgaaacaatgccaactgtctcttccctaaggaagagtacaagtaccctaaaattgaaaggtggtccctacactgaaaacgcacatagtttgtcaaaagtgtacaaaagggaaagagtcttattttaagctttcaggctttcttaaaaacttggggaccagaatttcaatgtatgtttccattgttgaagataacattttcttcaaagagccttaaccttttgtactggaaggaaatattttctggacttaagtagttgcctaaatttaagattcctacactttatttctgccattgatgcttttcctaaacccttatactatctttttattatctgagccttttcctaatgcagctcataggtgctagctagagctgctgctcagtattgaagactttacaaggagattagaaatctttggaaaacatatgtgatgaaattgagctatatgatttatcagagatctgattccaaagagcacagaatactgttctcagaccatgaaaccagacaacacatgtattggtttaaactcgataatgacaggaaaattccaaactagagcagtaaattcaaatggtaagatgaatcctagaaggcctctgattgcagcatgttgacaccaacctcacgttacgaacaattcacagagaatttgcctttgtggcaactgaagatggaagtctggggggcacagacaaccttatcaaacaatataaaagccaatataaattctcataagcactatagaatttgcaaattcagaacattttatacctaaaagtaattctgtctttcctaaagtgtttttaacatgaaaattagtaggaagatgtggttactatttggaaagtgtaatgtaacaaaactctcttttgttaccacaaattttgtgagtttagtactctacagattgccccataagagcagtagcttttgaaactcataattctctgaaataaatgaaagacatttaattcaaggatcaaaaattgtggccatctttgcaaatgactacctatagcctgtgaaaatacatttcaaaaaatgttatgtgcaatgaacactaaatttaagagcagttacagtgtgactcactcatgtttaaaaaaaatcgaagagctaaaaaatacgtctaatttatgtaacccattggaatgtatttctaggttctcttcaggattaattaaataaacatgcaatttatgaaaacatataaacaattatttatcacttttatgacccaaatcacaataaaattgtcatttaggataaactggggagaatagactgaacatatggttatattcacagttatttattaacttaaatgttattccaacattagagctaatgttaaaaagatttaaactgtaacgtctaatatttggaataatatattaaagtattagcactgtggttgattttcttgaattatgttgcatcttgtactactaagcttgtgaaaataaacatttggatgttttaaaaggtaaaaaaaaaaaaaaaa

SEQ ID NO: 636 - protein, 323 aa, Homosapiens
MSDRPTARRWGKCGPLCTRENIMVAFKGVWTQAFWKAVTAEFLAMLIFVLLSLGSTINWGGTEKPLPVDMVLISLCFGLSIATMVQCFGHISGGHINPAVTVAMVCTRKISIAKSVFYIAAQCLGAIIGAGILYLVTPPSVVGGLGVTMVHGNLTAGHGLLVELIITFQLVFTIFASCDSKRTDVTGSIALAIGFSVAIGHLFAINYTGASMNPARSFGPAVIMGNWENHWIYWVGPIIGAVLAGGLYEYVFCPDVEFKRRFKEAFSKAAQQTKGSYMEVEDNRSQVETDDLILKPGVVHVIDVDRGEEKKGKDQSGEVLSSV

SEQ ID NO: 637 - DNA, 5136 bp, Homosapiens
tgtttctcttttcagtaagtgtggacctttgtgtaccagagagaacatcatggtggctttcaaaggggtctggactcaagctttctggaaagcagtcacagcggaatttctggccatgcttatttttgttctcctcagcctgggatccaccatcaactggggtggaacagaaaagcctttaccggtcgacatggttctcatctccctttgctttggactcagcattgcaaccatggtgcagtgctttggccatatcagcggtggccacatcaaccctgcagtgactgtggccatggtgtgcaccaggaagatcagcatcgccaagtctgtcttctacatcgcagcccagtgcctgggggccatcattggagcaggaatcctctatctggtcacacctcccagtgtggtgggaggcctgggagtcaccatggttcatggaaatcttaccgctggtcatggtctcctggttgagttgataatcacatttcaattggtgtttactatctttgccagctgtgattccaaacggactgatgtcactggctcaatagctttagcaattggattttctgttgcaattggacatttatttgcaatcaattatactggtgccagcatgaatcccgcccgatcctttggacctgcagttatcatgggaaattgggaaaaccattggatatattgggttgggcccatcataggagctgtcctcgctggtggcctttatgagtatgtcttctgtccagatgttgaattcaaacgtcgttttaaagaagccttcagcaaagctgcccagcaaacaaaaggaagctacatggaggtggaggacaacaggagtcaggtagagacggatgacctgattctaaaacctggagtggtgcatgtgattgacgttgaccggggagaggagaagaaggggaaagaccaatctggagaggtattgtcttcagtatgactagaagatcgcactgaaagcagacaagactccttagaactgtcctcagatttccttccacccattaaggaaacagatttgttataaattagaaatgtgcaggtttgttgtttcatgtcatattactcagtctaaacaataaatatttcataatttacaaaggaggaacggaagaaacctattgtgaattccaaatctaaaaaaagaaatatttttaaaatgttcttaagcaaatatatacctattttatctagttacctttcattaacaaccaattttaaccgtgtgtcaagatttggttaagtcttgcctgacagaactcaaagacacgtctatcagcttattccttctctactggaatattggtatagtcaattcttatttgaatatttattctattaaactgagtttaacaatggcaaaatacagtatgtcacagtcatgcacattcaagagagaaaatataacaagttcttttatgagcaatcccttatgcatagactaccttggcaaaagagcattagcaagtgtcactgctcatcagttacttccttccatttatatcacaaatacccaagtttcaattctaacttcatttcatggtatttcttcctcctcaatgcccaaggtaatgtgggactaaagcccagaaatttgaaaagaatattcagaaatccttcccaaatcataagggcacctattgagattcaagacaagcagactcgtaaaatcttgtagaggcagaggcaaagttatcatcatacaaaaatcacaaacaaaaaggagatctgtattcgggtatcaaacggttgatctgttttcagtgcacaccctcaaatgcaccacaccagttttacgatctaagcttttaacccctttaccactttgcttatttttaaaaaatttattggcaaaactggggattttgtttgtaactttggttatctatatttaaacattagctgagacatatttttgataacaagaacttagctagttgagtcctggctttttgttgattattaagctgtgttcactctagaaggtgtaaaggccctgtcccaatctctgctctctcacttctcgtgacatttgttgataatctttactgcaagtgtaatgatatttgagtgaattaaaatgcatgacagacaaggtacaacatggttgcagaataaaagggtgaggacatcagatcactctgtattcaaagcttactagacgaacaatctttcatttctggatatattgtagctaacccaacacatttttaaactatttttgttactgactcacttacttgtcaaaataattggtttttctgtcctgctttgccttttgtcactagaatgttctccagaaaccccagtttctgtcatcttaactgtctagtctagccgttaacttagacaaagaagtgcaaatgtcaatttcactaaacaaaagctattagaagtaaagcagaaacctatcactgcaaggagtgacttgtaaataactgatgatcaagggctgtcttctctcaagcatggttccaactctgtgtcactttttagcgttaatggcagttgtgtgtctgtggcagtgagataatggaccactattaaacctgattctcttcggtgctaggaaagagtgatgtgtgagattcccagagagtcgtcacaccagtgttatgcctgggagtgccactggcataccgcaggtgcctaaatcccaggcccctttctcagggggcgtggccacaccacacactgcgccagtgacacatagttacttcctggctgggacggcacctatagaaactagggtacaaatctcccaaagatggtttgcaccgtcatttcaaatgtttgcacaatataccacttagaggcttaaaatcagggtggttcagttcaaaaggtaatatcaaccgtcagcaaacatgtcagtttaaaaataagttcggttaacaaggaagtgttaagcagattttttgaatacacttacaatatactggcttataatcatttttattctgccatatggtttatttcatatacactcacttttacactcacttccaattatagcattcaataagttacggttaaagaaaagtgaatggtgtttttgtaatttgttttctagtagctagcagagagcctggcacatagtatgtattcaaaacaagtgtgttaattaataaaaatatataaatctcatttgagatttaagaatataaataattttcttttaatctttattttgctcaatatttaataggaagtatgatttcaaggactactaaaggaaggcaatatacatgtgaaaaccataaaatacattttttgcattctactatttttaggggcatgaaatgaatgaaagctttagcacttttttgcccctacatatgagacaacatattttgtatttcactcaaggctctgccagtaaaaagtaatgaaattgtacctttctaatgacatctatgcagcaggggtctatcgccttgtggatggcaccaaattatccaagtgtattaggagactggggcttttttctttaatcccttcttattaatgaagtgcatagtgctgctcccaggagaccactgctgacagatacacagagaagagatcagagaggaaaaactgggaagacataaatgaattatacccagccatgaaacaatgccaactgtctcttccctaaggaagagtacaagtaccctaaaattgaaaggtggtccctacactgaaaacgcacatagtttgtcaaaagtgtacaaaagggaaagagtcttattttaagctttcaggctttcttaaaaacttggggaccagaatttcaatgtatgtttccattgttgaagataacattttcttcaaagagccttaaccttttgtactggaaggaaatattttctggacttaagtagttgcctaaatttaagattcctacactttatttctgccattgatgcttttcctaaacccttatactatctttttattatctgagccttttcctaatgcagctcataggtgctagctagagctgctgctcagtattgaagactttacaaggagattagaaatctttggaaaacatatgtgatgaaattgagctatatgatttatcagagatctgattccaaagagcacagaatactgttctcagaccatgaaaccagacaacacatgtattggtttaaactcgataatgacaggaaaattccaaactagagcagtaaattcaaatggtaagatgaatcctagaaggcctctgattgcagcatgttgacaccaacctcacgttacgaacaattcacagagaatttgcctttgtggcaactgaagatggaagtctggggggcacagacaaccttatcaaacaatataaaagccaatataaattctcataagcactatagaatttgcaaattcagaacattttatacctaaaagtaattctgtctttcctaaagtgtttttaacatgaaaattagtaggaagatgtggttactatttggaaagtgtaatgtaacaaaactctcttttgttaccacaaattttgtgagtttagtactctacagattgccccataagagcagtagcttttgaaactcataattctctgaaataaatgaaagacatttaattcaaggatcaaaaattgtggccatctttgcaaatgactacctatagcctgtgaaaatacatttcaaaaaatgttatgtgcaatgaacactaaatttaagagcagttacagtgtgactcactcatgtttaaaaaaaatcgaagagctaaaaaatacgtctaatttatgtaacccattggaatgtatttctaggttctcttcaggattaattaaataaacatgcaatttatgaaaacatataaacaattatttatcacttttatgacccaaatcacaataaaattgtcatttaggataaactggggagaatagactgaacatatggttatattcacagttatttattaacttaaatgttattccaacattagagctaatgttaaaaagatttaaactgtaacgtctaatatttggaataatatattaaagtattagcactgtggttgattttcttgaattatgttgcatcttgtactactaagcttgtgaaaataaacatttggatgttttaaaaggtaaaaaaaaaaaaaaaa

SEQ ID NO: 638 - protein, 301 aa, Homosapiens
MVAFKGVWTQAFWKAVTAEFLAMLIFVLLSLGSTINWGGTEKPLPVDMVLISLCFGLSIATMVQCFGHISGGHINPAVTVAMVCTRKISIAKSVFYIAAQCLGAIIGAGILYLVTPPSVVGGLGVTMVHGNLTAGHGLLVELIITFQLVFTIFASCDSKRTDVTGSIALAIGFSVAIGHLFAINYTGASMNPARSFGPAVIMGNWENHWIYWVGPIIGAVLAGGLYEYVFCPDVEFKRRFKEAFSKAAQQTKGSYMEVEDNRSQVETDDLILKPGVVHVIDVDRGEEKKGKDQSGEVLSSV

SEQ ID NO: 639 - DNA, 2393 bp, Homosapiens
actttctagctgaacactcagcttcatccactccaggacagctgagcgtctggatggtgtctcaccctgttgcccaggctggaatacagtggcacgatcctggctcactgcaatctccatctcccgggttcaagcgattctcctgcctcagcctctcaagtagctgggattacagggcttcagaagctgatggcatagttatgagaggggtgaagactgcgactgcatttccaacagaccctgaggacaattgggaagaatgcgctgaatatttttgagcaatttctatatgataagcagtttttagggcaagtataggttgcactgatcctgaccttttggcctgaggatggaagtcttcagtatctgtacaactttactcccaagagctggtgtagaatgagttcctctggccatgggaggatcgcagaggggcacctgccaccagcagcccagcctcagcacttttctcttcagcgtcttcttcaaggtatttccagttgcccgccctgaactgtttcagaatgaggaggacacctggaggaatctacacgtgcatagaccaatttgcaaaagaacctgtgagccaacattattacctcagctggaagaattaataagcaacacgttcacccaagaagtatttactgagcacctactatgtgcattattttctggtgttggggctagggggcaaacgactctgacaagtctctgttctcaaggctggagtgcagcggcgcgatctcggctcactgcaagctccgcctcccgggttcacgccattctcctgcctcagcctcccgagtagctgggactacaggcgcccgcaaccacgcccggctaatttttttgtatttttagtagagatggggtttcaccatgttagtcaggatggtctcgatttcctgaccttgtgatccgcccgcccccgcctcccaaagtgctgggattacaggcgtgagccaccgcgcccggccgtagtttacattttctaaagcgtactctgccagccaagtggcaaacagacttgggcctcttaagagtggaagcaggaggaaacccgaagatcctggagagagactggtggctggtaccagtggagagggagcaaaaaggaaaatacaggatacaatttcaggaaaaatttcataccaatttcctgaggtaatttctgaactcgaacattttcagtgtcaccacattgtgtttcctgctgaatcaagtctacatcacttcggtttttaaagccttccacgatccttccctgaacactgtagttttcactgatggttggctgtttcaaactcccatgtgatccatactgtatcattaataagcaagcaaggaataacacaccctctgctattctgtgcagtgtttcaggtttttagttttctctttcaagatagaaaatccctttagagtaggaactcggctggcactttctttcacatcctgcatagcacttagcaaagttctgtacacagggcacatgtggaaattgcttattgattgattaaaagcatatatcactggcatttgtatcttcagtatttctcttgtatgaagaagggtgattatctgtcaatattcattgcatcattgaaccaatgtacaatgcattaatcatcactgaagataaccagatgaggctttattgtaatctccttctattttgctgagataatttcacttgctttagagtttatgaggccataagtggctcccatctgttgatgaacatatttctaagagtcatttagtctcaagtatggaatacttgaggggaagttaaattgtaacttttatattaagtgtcatcttagtaacagaaccaaaattggaagcatgtgttcaattttggtttttcattttcaaagctttaggtcaggcaaagaattaatttcatttgtttacaaagtagattatgcctaataaaatctattttgtttatggtcacattttaatcaatccactgctttagaaaatgagagaattctgattggctagtcattcaacatagtaaattacattattccacatccacagaacactggcctaactgcattatccagtaatgataaaaatattccttttaatacattttgagcaaggcatataccagtggtgaaacagggaagaatcttgtttattccatccttgtttgatgatcgaccacagaatataacataacacttctgtgtataagaattttttcaacattaaggataataaggacaaggtagttttcactggatccttactggtactctgaattttcactatttgtccgcatttcttctccttcccggaaatttgttttctgcgaaaaacaagtgctactttgtcaaataaagcttaaataaaattggtttcaatttatgcataat

SEQ ID NO: 640 - protein, 131 aa, Homosapiens
MGGSQRGTCHQQPSLSTFLFSVFFKVFPVARPELFQNEEDTWRNLHVHRPICKRTCEPTLLPQLEELISNTFTQEVFTEHLLCALFSGVGARGQTTLTSLCSQGWSAAARSRLTASSASRVHAILLPQPPE

SEQ ID NO: 641 - DNA, 2157 bp, Homosapiens
cccggagcgcggggaagtttcctccgaagctgcgctcctggaacagcagcacctgcaagcgcccggcagcggcccgcgaggttactttatggaattgggctcttagagaacaagaaaagactgaagttttacgggaaaacaaatcatgtggtcttcagattctgaaataaggagaaatgcagccatctgaaatggtcatgaaccccaaacaggtcttcctctctgtgctgatatttggagtagctgggctactcctcttcatgtatttgcaagtctggattgaagaacaacatacagggagagtggagaagagaagagaacaaaaagtaacttcaggatggggaccagtgaagtacttgcggcctgtacccagaatcatgagtacagaaaaaatccaggaacatatcaccaaccagaaccccaagtttcacatgcctgaggatgtacgagaaaaaaaggaaaatcttctactcaattctgagagatctactaggctcttaacaaagaccagtcattcacaaggaggggatcaagctttaagtaagtccacagggtcaccaacagagaagttgattgaaaaacatcaaggagctaagactgtttttaacaagttcagcaacatggattggccagtggacattcaccctttaaacaaaagtttagtcaaagataataaatggaagaaaactgaggagacccaagagaaacgaaggtctttccttcaggagttttgcaagaaatacggtggggtgagtcatcatcagtcacatctttttcatacagtatccagaatctatgtagaagataaacacaaaatcttatattgtgaggtacctaaggctggctgttccaattggaaaagaattctgatggtactaaatggattggcttcctctgcatacaacatctcccacaatgctgtccactacgggaagcatttgaagaagctagatagctttgacctaaaagggatatatacccgcttaaatacttacaccaaagctgtgtttgttcgtgatcccatggaaagattagtatcagcctttagggacaaatttgaacaccccaatagttattaccatccagtattcggaaaggcaattatcaagaaatatcgaccaaatgcctgtgaagaagcattaattaatggatctggagtcaagttcaaagagtttatccactacttgctggattcccaccgtccagtaggaatggacattcactgggaaaaggtcagcaaactctgctatccgtgtttgatcaactatgattttgtagggaaatttgagactttggaagaagatgccaattactttttacagatgatcggtgctccaaaggagctgaaatttcccaactttaaggataggcactcttccgatgaaagaaccaatgctcaagtcgtgagacagtatttaaaggatctgactagaactgagagacaattaatctatgacttttattacttggactatttaatgtttaattatacaactccatttttgtagtttgcattcattttctaaaaccctgtatatacttaatgatgataagttcaaatcagctgtaatttttctataattctctgtatgacagaaatttaaccaagtgcagttgtcttgatttaatgtagatttttaccaaatagtatgacaccaattggcacaaagttataggaaaatcacctacaggagatgtaaacaacttgagttgctctaaaatgtttggaaaagagctgcttttgcattatgaattatattgttgaagcaataacctagccagctgttgcattagctaaagcagcctcttgcaatggtaggaaaaaaggatctcaaatagcatgagtgtatgtctatatcctgaaatttattgtctaaaatgcatgaatatatttttagcagtctgtggcatattaatcaaactgttgaattgttttcttacaccctggaaatctttctatcaactataatgataaatccattttgaagtgatattttggacttaggcattttactttagattggaaggcattatgtgatttacaatatgagaatatagcagaaaaaccagatgaggctgtggctttttatattcaacagccaataaaaaatgcacaacatgctaagatcaaagcaaaaaaaaaaaaaaaaaaaaaaa

SEQ ID NO: 642 - protein, 438 aa, Homosapiens
MVMNPKQVFLSVLIFGVAGLLLFMYLQVWIEEQHTGRVEKRREQKVTSGWGPVKYLRPVPRIMSTEKIQEHITNQNPKFHMPEDVREKKENLLLNSERSTRLLTKTSHSQGGDQALSKSTGSPTEKLIEKHQGAKTVFNKFSNMDWPVDIHPLNKSLVKDNKWKKTEETQEKRRSFLQEFCKKYGGVSHHQSHLFHTVSRIYVEDKHKILYCEVPKAGCSNWKRILMVLNGLASSAYNISHNAVHYGKHLKKLDSFDLKGIYTRLNTYTKAVFVRDPMERLVSAFRDKFEHPNSYYHPVFGKAIIKKYRPNACEEALINGSGVKFKEFIHYLLDSHRPVGMDIHWEKVSKLCYPCLINYDFVGKFETLEEDANYFLQMIGAPKELKFPNFKDRHSSDERTNAQVVRQYLKDLTRTERQLIYDFYYLDYLMFNYTTPFL

SEQ ID NO: 643 - DNA, 1344 bp, Homosapiens
ttcctttgattctagtctaccagttgccacttctggtccatttgcatataacactggagaagtgttcctttatctttgtgaagcccttaacattcaaggagccactactgcttctatgctgctgaaaaatacaagacactgcctctacctctgcatctgtcctttgctttttgcttggaaactatcacatcaaatcacactgagatcagttcctactgagctctcactggcaaactatcagtagaagaagcctggacaaaactgagttcaatgcttcacaattgctgcgctcttcttctccccagtggaaaaaaaaatgctctctgcaccacatggccgctggccgctgccagaggatggaggaaggggtgatgttggtcattcaagactgtttttcctacctcttcagtgcctctttcaactgtatgaagttaaaaccagcttggcaggctctagagagactgacctctgcagatggtttaaagggagaagctcaagggtccacagttcacagggctgccaatcaggcctgtgcagaaaactcaacagtctaaaagaatatatgaagacagaacctcaacctagaagaaatggacaaattcccagacacatcaaggaattcctagacaaactatcaaaactgaatcatgattagatagaaaatctgaacagatcaatataagtaaagagattaaagcagtaataaactctcccatcaaagaaaagctcaggacctgatggcttcactgctgaattctaccaaacgtttaaagaactaacaccaatgattctcaaactctttttaaaaattgaagatgagagaacacttccaaattcatatcacgaggccagcattaccctgataccaacgccagacaaagacactataagaaaaggcaattatggaccaatatccctgataaacatggatgtaaaaatcctcatcaaaatactagcaaatgaaattcaaccacaaatttaaaaaagcattcaccatgatcgagtgggatttatccctgggatgcaggaagtttcaacatacacaaatccataaacatgatacaccacatcaacaagatgaaggacaaaatctttataatctcaatagatgcaggaaaagcatttaacagaattcagcaccctttcatgatttaaaaaaactcaacaaaatatagaaggactgtaccccaacacaataaagaccagatatgacaaacccacagctaacattctcaacagtgaaaagttaaaagcttttcttctgagatcaggaacaagacaataatgctcactctctcgacttctgttcatcgtaacgttggaagttctagacagagcaattag

SEQ ID NO: 644 - protein, 73 aa, Homosapiens
MAAGRCQRMEEGVMLVIQDCFSYLFSASFNCMKLKPAWQALERLTSADGLKGEAQGSTVHRAANQACAENSTV

SEQ ID NO: 645 - DNA, 2828 bp, Homosapiens
gggcagggtccccgcgcaccgcggagtgggctgtgattggaggaggagcccgtgccgggcgggcccgagcgggtgtcgagccggttcctccagtctgccccgcgcgcggagctgcgcgcactgggtccccaagagcccgcgggcgtccggcagccgagcgcacgttctttcggatgcacacgcccgggtccctggcgtctgacgccgtggggagggcagcgaggccccaggtacttactacaccattctttggcgaaggctattcagcagtggtgacctcttccaatccaacactctacagattattatctctggactcccagctgacaccctgccggaggcaagagctactaagccaactggaactgtgccttttctcttgtcaaggtttttttcttacacaggaaaaagaaagaaaaaaaaaagatgaagttgggcaaagtggagttctgccattttctgcagctaatagctcttttcctgtgtttttctgggatgagtcaagcagaactctcaaggtccagatcaaagccctatttccaatcagggaggtcccggaccaagcgcagctgggtgtggaatcagttctttgtgctggaggaatacatgggttcagaccccctctatgtaggaaagcttcactctgatgttgataaaggagatggttccatcaaatacatcttgtcaggcgaaggggcaagttccattttcattattgatgagaacactggggatattcatgccaccaagagactggatcgtgaggagcaggcctactacacgctccgagctcaagcgctggataggctcaccaacaaacccgtggagcccgagtcggagtttgtcatcaaaattcaggatatcaacgacaatgaacccaaatttttggatggcccatacacggcaggagttcccgaaatgtctcccgtggggacctcagtggtacaagtgacagcgacggatgctgatgatcctacatatggcaacagtgccagagtggtctacagtattctgcaaggacagccgtacttctcagtggagccaaagacaggagtcatcaagactgcccttccaaacatggatagagaggctaaagaccagtatttgcttgtcattcaggcaaaggatatggttggtcaaaatggaggactgtcaggaactacatcagtcactgtgaccctaactgatgtcaacgataatccacctcgctttcctcgaaggtcttatcaatataacgtcccagagtcattacctgtagcctcagttgtggccagaattaaagctgctgatgcagatattggagctaatgctgaaatggagtacaagattgtggatggtgatggtttgggcatttttaagatttctgttgacaaagaaacccaggaaggaatcattactatacagaaggagctggattttgaagccaaaacaagttacacgctacggatagaagctgcaaataaagatgccgaccctcgctttctgagcttgggtccgttcagtgacacgacaactgtgaagataattgtggaagatgtagatgagccccctgtgttctcttcacccttgtaccctatggaggtgtcggaagctacccaggttgggaatatcattggcactgtagcagctcatgacccagattcttccaatagccctgtgaggtactcaattgacagaaacacagacttggagagatacttcaatattgatgccaacagtggggtcatcacaactgccaagtctttggatcgagagacaaatgctattcacaatatcacagtccttgcaatggagagccagaatccatctcaagtaggaagaggctatgtggccatcactatacttgacatcaatgataacgcccctgaatttgccatggactatgagaccaccgtctgtgaaaatgcccagccggggcaggttatccagaaaatcagtgctgtggataaagatgagccatccaatggacaccagttttacttcagcttaacaacggatgcaacaaataaccacaacttttcattgaaagataacaaagacaacacagcctcaatactgaccaggagaaacggcttccggagacaggaacaatcagtttactatctgccaattttcattgtggacagtggatctccctcacttagcagcaccaacaccctcaccatccgcgtgtgtgactgtgatgctgacggcgtagcccagacctgcaatgcagaggcctatgtcctacctgctggcctcagtacaggagccctgatagccatactcgcctgtgtcttgacattattggtgttgatcctccttatcgtcactatgagaagacggaaaaaagagccccttatttttgacgaagaaagagacatcagagaaaatattgtgagatacgatgacgagggcgggggagaggaggacacggaagcgtttgacatggctgcactgagaaacctcaacgtcatccgagacaccaagacccggagggatgtgactccagaaattcaattcctgagtcgaccagcttttaaaagcatcccagataatgtcatctttagggaatttatttgggaaagattaaaagaagccgatgttgatcctggtgctcctccttatgactccctgcagacatatgcttttgaaggaaatggctcagttgctgaatcactcagctctttagattccatcagctcaaactctgatcagaactatgactacctaagtgactggggacctcgctttaaacgactcgcggacatgtatgggactggccaagagagtttgtactcatagccttggaaccttaattcgaaatgtactgaagaaaaagtaacagc

SEQ ID NO: 646 - protein, 785 aa, Homosapiens
MKLGKVEFCHFLQLIALFLCFSGMSQAELSRSRSKPYFQSGRSRTKRSWVWNQFFVLEEYMGSDPLYVGKLHSDVDKGDGSIKYILSGEGASSIFIIDENTGDIHATKRLDREEQAYYTLRAQALDRLTNKPVEPESEFVIKIQDINDNEPKFLDGPYTAGVPEMSPVGTSVVQVTATDADDPTYGNSARVVYSILQGQPYFSVEPKTGVIKTALPNMDREAKDQYLLVIQAKDMVGQNGGLSGTTSVTVTLTDVNDNPPRFPRRSYQYNVPESLPVASVVARIKAADADIGANAEMEYKIVDGDGLGIFKISVDKETQEGIITIQKELDFEAKTSYTLRIEAANKDADPRFLSLGPFSDTTTVKIIVEDVDEPPVFSSPLYPMEVSEATQVGNIIGTVAAHDPDSSNSPVRYSIDRNTDLERYFNIDANSGVITTAKSLDRETNAIHNITVLAMESQNPSQVGRGYVAITILDINDNAPEFAMDYETTVCENAQPGQVIQKISAVDKDEPSNGHQFYFSLTTDATNNHNFSLKDNKDNTASILTRRNGFRRQEQSVYYLPIFIVDSGSPSLSSTNTLTIRVCDCDADGVAQTCNAEAYVLPAGLSTGALIAILACVLTLLVLILLIVTMRRRKKEPLIFDEERDIRENIVRYDDEGGGEEDTEAFDMAALRNLNVIRDTKTRRDVTPEIQFLSRPAFKSIPDNVIFREFIWERLKEADVDPGAPPYDSLQTYAFEGNGSVAESLSSLDSISSNSDQNYDYLSDWGPRFKRLADMYGTGQESLYS

SEQ ID NO: 647 - DNA, 2728 bp, Homosapiens
ctagggcagtccgaggagattgaaagggcaaaactatcaagcaagaaaactgtaagttctgattagttttatgactttgccttcatgcctcaggagctcaactgatcacggctttcacgacaggctaaggtacttactacaccattctttggcgaaggctattcagcagtggtgacctcttccaatccaacactctacagattattatctctggactcccagctgacaccctgccggaggcaagagctactaagccaactggaactgtgccttttctcttgtcaaggtttttttcttacacaggaaaaagaaagaaaaaaaaaagatgaagttgggcaaagtggagttctgccattttctgcagctaatagctcttttcctgtgtttttctgggatgagtcaagcagaactctcaaggtccagatcaaagccctatttccaatcagggaggtcccggaccaagcgcagctgggtgtggaatcagttctttgtgctggaggaatacatgggttcagaccccctctatgtaggaaagcttcactctgatgttgataaaggagatggttccatcaaatacatcttgtcaggcgaaggggcaagttccattttcattattgatgagaacactggggatattcatgccaccaagagactggatcgtgaggagcaggcctactacacgctccgagctcaagcgctggataggctcaccaacaaacccgtggagcccgagtcggagtttgtcatcaaaattcaggatatcaacgacaatgaacccaaatttttggatggcccatacacggcaggagttcccgaaatgtctcccgtggggacctcagtggtacaagtgacagcgacggatgctgatgatcctacatatggcaacagtgccagagtggtctacagtattctgcaaggacagccgtacttctcagtggagccaaagacaggagtcatcaagactgcccttccaaacatggatagagaggctaaagaccagtatttgcttgtcattcaggcaaaggatatggttggtcaaaatggaggactgtcaggaactacatcagtcactgtgaccctaactgatgtcaacgataatccacctcgctttcctcgaaggtcttatcaatataacgtcccagagtcattacctgtagcctcagttgtggccagaattaaagctgctgatgcagatattggagctaatgctgaaatggagtacaagattgtggatggtgatggtttgggcatttttaagatttctgttgacaaagaaacccaggaaggaatcattactatacagaaggagctggattttgaagccaaaacaagttacacgctacggatagaagctgcaaataaagatgccgaccctcgctttctgagcttgggtccgttcagtgacacgacaactgtgaagataattgtggaagatgtagatgagccccctgtgttctcttcacccttgtaccctatggaggtgtcggaagctacccaggttgggaatatcattggcactgtagcagctcatgacccagattcttccaatagccctgtgaggtactcaattgacagaaacacagacttggagagatacttcaatattgatgccaacagtggggtcatcacaactgccaagtctttggatcgagagacaaatgctattcacaatatcacagtccttgcaatggagagccagaatccatctcaagtaggaagaggctatgtggccatcactatacttgacatcaatgataacgcccctgaatttgccatggactatgagaccaccgtctgtgaaaatgcccagccggggcaggttatccagaaaatcagtgctgtggataaagatgagccatccaatggacaccagttttacttcagcttaacaacggatgcaacaaataaccacaacttttcattgaaagataacaaagacaacacagcctcaatactgaccaggagaaacggcttccggagacaggaacaatcagtttactatctgccaattttcattgtggacagtggatctccctcacttagcagcaccaacaccctcaccatccgcgtgtgtgactgtgatgctgacggcgtagcccagacctgcaatgcagaggcctatgtcctacctgctggcctcagtacaggagccctgatagccatactcgcctgtgtcttgacattattggtgttgatcctccttatcgtcactatgagaagacggaaaaaagagccccttatttttgacgaagaaagagacatcagagaaaatattgtgagatacgatgacgagggcgggggagaggaggacacggaagcgtttgacatggctgcactgagaaacctcaacgtcatccgagacaccaagacccggagggatgtgactccagaaattcaattcctgagtcgaccagcttttaaaagcatcccagataatgtcatctttagggaatttatttgggaaagattaaaagaagccgatgttgatcctggtgctcctccttatgactccctgcagacatatgcttttgaaggaaatggctcagttgctgaatcactcagctctttagattccatcagctcaaactctgatcagaactatgactacctaagtgactggggacctcgctttaaacgactcgcggacatgtatgggactggccaagagagtttgtactcatagccttggaaccttaattcgaaatgtactgaagaaaaagtaacagca

SEQ ID NO: 648 - protein, 785 aa, Homosapiens; identical to SEQ ID NO: 646

SEQ ID NO: 649 - DNA, 1340 bp, Homosapiens
ctcttcccattggctgagaagggtcatgaggatgaactgtgcagtcacctggcaggaaccggaacccgcggttataaagtaaaggaacccgagatctgcgcaggggttccctttgccgatttctctcacctcacctttcaaacctaaactcgagcctactgttcaccggcctagcattgctctcgccatggctctcagcgatgctgacgtgcaaaagcaggcagaagaagagttcaacatagagaaaggtcggcttgtgcaaacccaaagactaaagattatggaatattatgagaagaaagagaaacagattgagcagcagaagaaaattcagatgtccaatttgatgaatcaagcgagactcaaagtcctcagagcaagagatgaccttatcacagacctactaaatgaagcaaaacagagactcagcaaggtggtaaaagatacaaccaggtaccaagtgctgctggatggactggttctccagggtttgtaccagttgctggagccccgaatgattgttcgttgcaggaaacaagatttccctctggtaaaggctgcagtgcagaaggcaattcctatgtacaaaattgccaccaaaaacgatgttgatgtccaaattgaccaggagtcctacctgcctgaagacatagctggtggagttgagatctataatggagatcgtaaaataaaggtttccaacaccctggaaagccggctggatctcatagcccagcagatgatgccagaagtccggggagccttgtttggtgcaaatgccaacaggaagtttttggactaagccttcaggaggtggagctcgtcgtcagctctcctgctgtgatgtggaagcttctgatatttgaagaaacacgaatgtctctgtagcttcctcttcactgccccagtattgctctgtatttatcagcgatgcccctctgtcactcatgccttgcctaattgttcacaatggtggaaagcttcatgtaatatgatcaggacccacctccagttcttctgaaagtgtgacagtgtccagccggttctgcagcactaggggagggggcagatggtggttgcatgggcttcctgggtctccactctccgtctggcctaaaggtgatgtatttggtgtttggccctgcagtccccactcttgaggcttaaggcgcatgtggcacaccactccttccagcagtagtcgctttactgttacctgtttaggcctagaagttttccctcatctgtaaatgtgatttaaaatctaagccatgaatatgctttatttattaaaagagttatgcggatttaatgtgatttctagtgtaaggcactacaaa

SEQ ID NO: 650 - protein, 204 aa, Homosapiens
MALSDADVQKQAEEEFNIEKGRLVQTQRLKIMEYYEKKEKQIEQQKKIQMSNLMNQARLKVLRARDDLITDLLNEAKQRLSKVVKDTTRYQVLLDGLVLQGLYQLLEPRMIVRCRKQDFPLVKAAVQKAIPMYKIATKNDVDVQIDQESYLPEDIAGGVEIYNGDRKIKVSNTLESRLDLIAQQMMPEVRGALFGANANRKFLD

SEQ ID NO: 651 - DNA, 1316 bp, Homosapiens
ctcttcccattggctgagaagggtcatgaggatgaactgtgcagtcacctggcaggaaccggaacccgcggttataaagtaaaggaacccgagatctgcgcaggggttccctttgccgatttctctcacctcacctttcaaacctaaactcgagcctactgttcaccggcctagcattgctctcgccatggctctcagcgatgctgacgtgcaaaagcagataaagcatatgatggctttcattgaacaagaagccaatgagaaagcagaagaaatagatgcaaaggcagaagaagagttcaacatagagaaaggtcggcttgtgcaaacccaaagactaaagattatggaatattatgagaagaaagagaaacagattgagcagcagaagaaaattcagatgtccaatttgatgaatcaagcgagactcaaagtcctcagagcaagagatgaccttatcacaggtttgtaccagttgctggagccccgaatgattgttcgttgcaggaaacaagatttccctctggtaaaggctgcagtgcagaaggcaattcctatgtacaaaattgccaccaaaaacgatgttgatgtccaaattgaccaggagtcctacctgcctgaagacatagctggtggagttgagatctataatggagatcgtaaaataaaggtttccaacaccctggaaagccggctggatctcatagcccagcagatgatgccagaagtccggggagccttgtttggtgcaaatgccaacaggaagtttttggactaagccttcaggaggtggagctcgtcgtcagctctcctgctgtgatgtggaagcttctgatatttgaagaaacacgaatgtctctgtagcttcctcttcactgccccagtattgctctgtatttatcagcgatgcccctctgtcactcatgccttgcctaattgttcacaatggtggaaagcttcatgtaatatgatcaggacccacctccagttcttctgaaagtgtgacagtgtccagccggttctgcagcactaggggagggggcagatggtggttgcatgggcttcctgggtctccactctccgtctggcctaaaggtgatgtatttggtgtttggccctgcagtccccactcttgaggcttaaggcgcatgtggcacaccactccttccagcagtagtcgctttactgttacctgtttaggcctagaagttttccctcatctgtaaatgtgatttaaaatctaagccatgaatatgctttatttattaaaagagttatgcggatttaatgtgatttctagtgtaaggcactacaaa

SEQ ID NO: 652 - protein, 196 aa, Homosapiens
MALSDADVQKQIKHMMAFIEQEANEKAEEIDAKAEEEFNIEKGRLVQTQRLKIMEYYEKKEKQIEQQKKIQMSNLMNQARLKVLRARDDLITGLYQLLEPRMIVRCRKQDFPLVKAAVQKAIPMYKIATKNDVDVQIDQESYLPEDIAGGVEIYNGDRKIKVSNTLESRLDLIAQQMMPEVRGALFGANANRKFLD

SEQ ID NO: 653 - DNA, 1406 bp, Homosapiens
ctcttcccattggctgagaagggtcatgaggatgaactgtgcagtcacctggcaggaaccggaacccgcggttataaagtaaaggaacccgagatctgcgcaggggttccctttgccgatttctctcacctcacctttcaaacctaaactcgagcctactgttcaccggcctagcattgctctcgccatggctctcagcgatgctgacgtgcaaaagcagataaagcatatgatggctttcattgaacaagaagccaatgagaaagcagaagaaatagatgcaaaggcagaagaagagttcaacatagagaaaggtcggcttgtgcaaacccaaagactaaagattatggaatattatgagaagaaagagaaacagattgagcagcagaagaaaattcagatgtccaatttgatgaatcaagcgagactcaaagtcctcagagcaagagatgaccttatcacagacctactaaatgaagcaaaacagagactcagcaaggtggtaaaagatacaaccaggtaccaagtgctgctggatggactggttctccagggtttgtaccagttgctggagccccgaatgattgttcgttgcaggaaacaagatttccctctggtaaaggctgcagtgcagaaggcaattcctatgtacaaaattgccaccaaaaacgatgttgatgtccaaattgaccaggagtcctacctgcctgaagacatagctggtggagttgagatctataatggagatcgtaaaataaaggtttccaacaccctggaaagccggctggatctcatagcccagcagatgatgccagaagtccggggagccttgtttggtgcaaatgccaacaggaagtttttggactaagccttcaggaggtggagctcgtcgtcagctctcctgctgtgatgtggaagcttctgatatttgaagaaacacgaatgtctctgtagcttcctcttcactgccccagtattgctctgtatttatcagcgatgcccctctgtcactcatgccttgcctaattgttcacaatggtggaaagcttcatgtaatatgatcaggacccacctccagttcttctgaaagtgtgacagtgtccagccggttctgcagcactaggggagggggcagatggtggttgcatgggcttcctgggtctccactctccgtctggcctaaaggtgatgtatttggtgtttggccctgcagtccccactcttgaggcttaaggcgcatgtggcacaccactccttccagcagtagtcgctttactgttacctgtttaggcctagaagttttccctcatctgtaaatgtgatttaaaatctaagccatgaatatgctttatttattaaaagagttatgcggatttaatgtgatttctagtgtaaggcactacaaa

SEQ ID NO: 654 - protein, 226 aa, Homosapiens
MALSDADVQKQIKHMMAFIEQEANEKAEEIDAKAEEEFNIEKGRLVQTQRLKIMEYYEKKEKQIEQQKKIQMSNLMNQARLKVLRARDDLITDLLNEAKQRLSKVVKDTTRYQVLLDGLVLQGLYQLLEPRMIVRCRKQDFPLVKAAVQKAIPMYKIATKNDVDVQIDQESYLPEDIAGGVEIYNGDRKIKVSNTLESRLDLIAQQMMPEVRGALFGANANRKFLD

SEQ ID NO: 655 - DNA, 3367 bp, Homosapiens
cgacgccggccgtgacgaaggcacgccggggtgacctcaccctccaacatggcggcggcggtagattagggccgcgggtcggagcactcaccgccgctgggggaccctgtcggaagcaactgccgccgccgcctctttcatctcttctggggcaggggccagggccaggttttacacatccataagtagacctttttggagcctcaccagccaattcaatggcgtcctcttctactgtgcctctgggatttcactatgaaacaaagtatgttgttctcagctacttgggactcctctctcaagagaagctgcaagagcaacatctttcctcaccccaaggggttcaactagatatagcttcacaatctctggatcaagaaattttattaaaagttaaaactgaaattgaagaagagctaaaatctctggacaaagaaatttctgaagccttcaccagcacaggctttgaccgtcacacttctccagtgttcagccctgccaatccagaaagctcaatggaagactgcttggcccatcttggagaaaaagtgtcccaggaactgaaagagcctctccataaagcattgcaaatgctcctgagccagccagtgacatatcaggcatttcgggaatgtacactggagaccacagttcatgccagcggctggaataagattttggtgcctctggttttgctacgacaaatgcttttggaattgacaagacgtggtcaagaacctttgagcgcactgctgcagtttggcgtgacatacctggaggactattcggcagagtacatcattcagcaaggtggctggggcactgtgtttagtcttgagtcagaggaggaggaataccctggaatcactgcagaagatagcaatgacatttacatcctgcccagcgacaactctggacaagtcagtcccccagagtctccaactgtgaccacttcctggcagtctgagagcttacctgtgtcactgtcagctagccagagttggcacacagaaagcctgccagtgtcactaggccctgagtcctggcagcagattgcaatggatcctgaagaagtgaaaagcttagacagcaacggagctggagagaagagtgagaacaactcctctaattctgacattgtgcacgtggagaaagaagaggtgcccgagggcatggaagaggctgctgtggcttctgtggtcttgccagcgcgggagctgcaagaggcacttcctgaagccccagctcccttgcttccacatatcactgccacctccctgctggggacaagggaacctgacacagaagtgatcacagttgagaaatccagccctgctacatctctgtttgtagaacttgatgaagaagaggtgaaagcagcaacaactgaacctactgaagtggaggaggtggtccccgcactggaacccacagaaacgctgctgagtgagaaggagataaacgcaagggaagagagccttgtggaagagctgtcccctgccagcgagaagaagcccgtgccgccgtctgagggcaagtctagactgtcccccgccggtgagatgaagcccatgccgctgtctgagggcaagtctatactgctgtttggaggggctgctgctgttgccatcctggcagtggccatcggggtagccctggctctgagaaagaaataggaggcttttcagaagagaaagacagaaggatgtaaggttggagttgtattggctggaatttgaacctccagcagctgtctggacatttgtggaacactctgggataattggggacttctgctcaacatggcagtggcatgttaggcatgttagggcttgaggtggggcattcacattcatctgactgtaaatcccaagggcctccgctcatgctaaattgagaatcttaggggtaaagcaccccctccaggaccgggtttctcagccttggcactagtgctgttctgaccattctctgtgttggggctgtcctgtgtgtggtgggctccacccactagatgccagtggcaccccctcccagagatgacaaacgaaaatgtctctagacattgccaaatgtcccgtgtgaacatcccctattgagacccactgctttagcgagagagggtttacttaggaagaattgggatagaaattcccagctgagagaacttagctgtgggctcctcagctactgacttcttagctcttaatccccttagaatttcatctttctcgatgagcaggctctgcacccactctttttttgccccccgccctcatcctggagtgtgagggtgctcgcccgtactctcagctgcctctcagggactgcactgttcctcttcacccccaggttcctgctaagatcccacgggcgagggcttgctctggactcagtctgtcaagtccccgaagcttcctgcagctccaccttgtaaaaatgctgcctttgggaatcttcgaaatatgtacacagagaaaatcacatgaaggagacctggggtccccacttgtgagtgcaactgcaagtaactctggctagagagacacatgtgtcttgtgtcaaggcaggaggataacctggatgaccttctgaggtctcttcagcccttttcgctagtggtcacccaccaccatggttacttgccagcaacatctctattgctggatggtccctgtctataaccttgggctagtatattttttccaatatgggaccttagtcttactactgatgagttctatgggtctcttgctagggggtaaggatttttattcttgggcttatagagccagttagatcataattcttatgaaatagagagtgtcctaaatatcactgaaataaaaagtaggaaaaagaagcttgaattttaagactgaggctgctctgcagattctagtttggctttcagagttcaagagtggtggcatcttcacctgaattcttcaatgccagggtaataaaccaaaatagtcctaatcagtatatgctagttgagcatcggcataattttctttcctctggctgatcccagccctaaaggaagggtagacccgtgtctttccagccctaaaggaagggtagacccgtgtctttccagccctaaaggaagggcagacccgtgtctttccatgcccgagggccacgacgtcactatgcagggcacacgtggcttggtttaaaaaggtcatcttagatttatcttagtaaatgtaataaattattttttagatcttgaaatttataataaaaatactttacctaccctgatcaccaaaacctgatgttttaaatgtgctttctttttgaaatttatgttttcaaataaaatctccctaaagcaatatttaaaaattggtcaaaa

SEQ ID NO: 656 - protein, 485 aa, Homosapiens
MASSSTVPLGFHYETKYVVLSYLGLLSQEKLQEQHLSSPQGVQLDIASQSLDQEILLKVKTEIEEELKSLDKEISEAFTSTGFDRHTSPVFSPANPESSMEDCLAHLGEKVSQELKEPLHKALQMLLSQPVTYQAFRECTLETTVHASGWNKILVPLVLLRQMLLELTRRGQEPLSALLQFGVTYLEDYSAEYIIQQGGWGTVFSLESEEEEYPGITAEDSNDIYILPSDNSGQVSPPESPTVTTSWQSESLPVSLSASQSWHTESLPVSLGPESWQQIAMDPEEVKSLDSNGAGEKSENNSSNSDIVHVEKEEVPEGMEEAAVASVVLPARELQEALPEAPAPLLPHITATSLLGTREPDTEVITVEKSSPATSLFVELDEEEVKAATTEPTEVEEVVPALEPTETLLSEKEINAREESLVEELSPASEKKPVPPSEGKSRLSPAGEMKPMPLSEGKSILLFGGAAAVAILAVAIGVALALRKK

SEQ ID NO: 657 - DNA, 2214 bp, Homosapiens
ggaggaagcgcgcggggcgccataaggaggaagcgggtagtcgaccgtgtccgcgcgcctgggagacgctgcctcggcccggacgcgcccgcgcccccgcggctggagggtggtcgccactgggacactgtgaaccaggagtgagtcggagctgccgcgctgcccaggccatggactgtgaggtcaacaacggttccagcctcagggatgagtgcatcacaaacctactggtgtttggcttcctccaaagctgttctgacaacagcttccgcagagagctggacgcactgggccacgagctgccagtgctggctccccagtgggagggctacgatgagctgcagactgatggcaaccgcagcagccactcccgcttgggaagaatagaggcagattctgaaagtcaagaagacatcatccggaatattgccaggcacctcgcccaggtcggggacagcatggaccgtagcatccctccgggcctggtgaacggcctggccctgcagctcaggaacaccagccggtcggaggaggaccggaacagggacctggccactgccctggagcagctgctgcaggcctaccctagagacatggagaaggagaagaccatgctggtgctggccctgctgctggccaagaaggtggccagtcacacgccgtccttgctccgtgatgtctttcacacaacagtgaattttattaaccagaacctacgcacctacgtgaggagcttagccagaaatgggatggactgaacggacagttccagaagtgtgactggctaaagctcgatgtggtcacagctgtatagctgcttccagtgtagacggagccctggcatgtcaacagcgttcctagagaagacaggctggaagatagctgtgacttctattttaaagacaatgttaaacttataacccactttaaaatatctacattaatatacttgaatgaaaatgtccatttacacgtatttgaatggccttcatatcatccacacatgaatctgcacatctgtaaatctacacacggtgcctttatttccactgtgcaggttcccacttaaaaattaaattggaaagcaggtttcaaggaagtagaaacaaaatacaatttttttggtaaaaaaaaattactgtttattaaagtacaaccatagaggatggtcttacagcaggcagtatcctgtttgaggaaagcaagaatcagagaaggaacataccccttacaaatgaaaaattccactcaaaatagggactatctatcttaatactaaggaaccaacaatcttcctgtttaaaaaaccacatggcacagagattctgaactaaagtgctgcactcaaatgatgggaagtccggccccagtacacaggggcttgactttttcaacttcgtttcctttgttggagtcaaaaagaaccacttgtggttctaaaaggtgtgaaggtgatttaagggcccaggtcagccactgtttgtttacaaaatcaggtaactaactgcatacactttttctctttccatgacatcaagactttgctaaagacatgaagccacgggtgccagaagctactgcgatgccccgggagttagccccctggtaatagctgtaaacttccaatttctagccatacgctcagctcatccatgcctcagaagtgcatctggagagaacaggtttctaagcataaaagatgaaagagcagttggactttttaaaaattcagcaaagtggttccctctcttagggacagtcaaaaccaagtcacttaggtagtaccaaaataaataaggaaaagcttagctttagaaacagtgcaacactggtctgctgttccagtggtaagctatgtcccaggaatcagtttaaaagcacgacagtggatgctgggtccatatcacacacattgctgtgaacaggaaactcctgtgaccacaacatgaggccactggagacgcatatgagtaagggcactgacggactcatgatttcttcttaccagatgctttcctgttctttaagagtttaaaatcatcagaaaggaaaaacaaactctatattgttcagcatgcaatacataccacgctagggctggctcaattgaaagtgggcaaaagcttacaaatactaaaaagaagtgctgccgcgcagtgtggaggccactgtttggaaataaatcttcctaacactacaaaaaaaaaaaaaaaa

SEQ ID NO: 658 - protein, 195 aa, Homosapiens
MDCEVNNGSSLRDECITNLLVFGFLQSCSDNSFRRELDALGHELPVLAPQWEGYDELQTDGNRSSHSRLGRIEADSESQEDIIRNIARHLAQVGDSMDRSIPPGLVNGLALQLRNTSRSEEDRNRDLATALEQLLQAYPRDMEKEKTMLVLALLLAKKVASHTPSLLRDVFHTTVNFINQNLRTYVRSLARNGMD

SEQ ID NO: 659 - DNA, 2506 bp, Homosapiens
aaaacccgcgggcctggccgggtgcaggccacccttgccggcggatcggaatccccgcccacaccgtggtctttccagcaccgcagacacctgccggctcctcccgagcggagctcagggctgacaaagcgcggtcagagcggccgcttactggggctcgcccgctccttagagcactggcaatgatgtgcggatcctcgctgctgctgctgggaaactgttgagtggctgaatgaccccaggggaccctgggagagctctgaagccctcagccaccaagtggctgggctggcaagggttcattcattcattcaacaaatacgaatgtgcagcggtgctggggtcatgatggctcggtgggcagcgaggggccgggccggctggaggagcacagtgcggattctgtcgccactgggacactgtgaaccaggagtgagtcggagctgccgcgctgcccaggccatggactgtgaggtcaacaacggttccagcctcagggatgagtgcatcacaaacctactggtgtttggcttcctccaaagctgttctgacaacagcttccgcagagagctggacgcactgggccacgagctgccagtgctggctccccagtgggagggctacgatgagctgcagactgatggcaaccgcagcagccactcccgcttgggaagaatagaggcagattctgaaagtcaagaagacatcatccggaatattgccaggcacctcgcccaggtcggggacagcatggaccgtagcatccctccgggcctggtgaacggcctggccctgcagctcaggaacaccagccggtcggaggaggaccggaacagggacctggccactgccctggagcagctgctgcaggcctaccctagagacatggagaaggagaagaccatgctggtgctggccctgctgctggccaagaaggtggccagtcacacgccgtccttgctccgtgatgtctttcacacaacagtgaattttattaaccagaacctacgcacctacgtgaggagcttagccagaaatgggatggactgaacggacagttccagaagtgtgactggctaaagctcgatgtggtcacagctgtatagctgcttccagtgtagacggagccctggcatgtcaacagcgttcctagagaagacaggctggaagatagctgtgacttctattttaaagacaatgttaaacttataacccactttaaaatatctacattaatatacttgaatgaaaatgtccatttacacgtatttgaatggccttcatatcatccacacatgaatctgcacatctgtaaatctacacacggtgcctttatttccactgtgcaggttcccacttaaaaattaaattggaaagcaggtttcaaggaagtagaaacaaaatacaatttttttggtaaaaaaaaattactgtttattaaagtacaaccatagaggatggtcttacagcaggcagtatcctgtttgaggaaagcaagaatcagagaaggaacataccccttacaaatgaaaaattccactcaaaatagggactatctatcttaatactaaggaaccaacaatcttcctgtttaaaaaaccacatggcacagagattctgaactaaagtgctgcactcaaatgatgggaagtccggccccagtacacaggggcttgactttttcaacttcgtttcctttgttggagtcaaaaagaaccacttgtggttctaaaaggtgtgaaggtgatttaagggcccaggtcagccactgtttgtttacaaaatcaggtaactaactgcatacactttttctctttccatgacatcaagactttgctaaagacatgaagccacgggtgccagaagctactgcgatgccccgggagttagccccctggtaatagctgtaaacttccaatttctagccatacgctcagctcatccatgcctcagaagtgcatctggagagaacaggtttctaagcataaaagatgaaagagcagttggactttttaaaaattcagcaaagtggttccctctcttagggacagtcaaaaccaagtcacttaggtagtaccaaaataaataaggaaaagcttagctttagaaacagtgcaacactggtctgctgttccagtggtaagctatgtcccaggaatcagtttaaaagcacgacagtggatgctgggtccatatcacacacattgctgtgaacaggaaactcctgtgaccacaacatgaggccactggagacgcatatgagtaagggcactgacggactcatgatttcttcttaccagatgctttcctgttctttaagagtttaaaatcatcagaaaggaaaaacaaactctatattgttcagcatgcaatacataccacgctagggctggctcaattgaaagtgggcaaaagcttacaaatactaaaaagaagtgctgccgcgcagtgtggaggccactgtttggaaataaatcttcctaacactacaaaaaaaaaaaaaaaa

SEQ ID NO: 660 - protein, 241 aa, Homosapiens
MCSGAGVMMARWAARGRAGWRSTVRILSPLGHCEPGVSRSCRAAQAMDCEVNNGSSLRDECITNLLVFGFLQSCSDNSFRRELDALGHELPVLAPQWEGYDELQTDGNRSSHSRLGRIEADSESQEDIIRNIARHLAQVGDSMDRSIPPGLVNGLALQLRNTSRSEEDRNRDLATALEQLLQAYPRDMEKEKTMLVLALLLAKKVASHTPSLLRDVFHTTVNFINQNLRTYVRSLARNGMD

SEQ ID NO: 661 - DNA, 2144 bp, Homosapiens
ggaggaagcgcgcggggcgccataaggaggaagcgggtagtcgaccgtgtccgcgcgcctgggagacgctgcctcggcccggacgcgcccgcgcccccgcggctggagggtggtcaacaacggttccagcctcagggatgagtgcatcacaaacctactggtgtttggcttcctccaaagctgttctgacaacagcttccgcagagagctggacgcactgggccacgagctgccagtgctggctccccagtgggagggctacgatgagctgcagactgatggcaaccgcagcagccactcccgcttgggaagaatagaggcagattctgaaagtcaagaagacatcatccggaatattgccaggcacctcgcccaggtcggggacagcatggaccgtagcatccctccgggcctggtgaacggcctggccctgcagctcaggaacaccagccggtcggaggaggaccggaacagggacctggccactgccctggagcagctgctgcaggcctaccctagagacatggagaaggagaagaccatgctggtgctggccctgctgctggccaagaaggtggccagtcacacgccgtccttgctccgtgatgtctttcacacaacagtgaattttattaaccagaacctacgcacctacgtgaggagcttagccagaaatgggatggactgaacggacagttccagaagtgtgactggctaaagctcgatgtggtcacagctgtatagctgcttccagtgtagacggagccctggcatgtcaacagcgttcctagagaagacaggctggaagatagctgtgacttctattttaaagacaatgttaaacttataacccactttaaaatatctacattaatatacttgaatgaaaatgtccatttacacgtatttgaatggccttcatatcatccacacatgaatctgcacatctgtaaatctacacacggtgcctttatttccactgtgcaggttcccacttaaaaattaaattggaaagcaggtttcaaggaagtagaaacaaaatacaatttttttggtaaaaaaaaattactgtttattaaagtacaaccatagaggatggtcttacagcaggcagtatcctgtttgaggaaagcaagaatcagagaaggaacataccccttacaaatgaaaaattccactcaaaatagggactatctatcttaatactaaggaaccaacaatcttcctgtttaaaaaaccacatggcacagagattctgaactaaagtgctgcactcaaatgatgggaagtccggccccagtacacaggggcttgactttttcaacttcgtttcctttgttggagtcaaaaagaaccacttgtggttctaaaaggtgtgaaggtgatttaagggcccaggtcagccactgtttgtttacaaaatcaggtaactaactgcatacactttttctctttccatgacatcaagactttgctaaagacatgaagccacgggtgccagaagctactgcgatgccccgggagttagccccctggtaatagctgtaaacttccaatttctagccatacgctcagctcatccatgcctcagaagtgcatctggagagaacaggtttctaagcataaaagatgaaagagcagttggactttttaaaaattcagcaaagtggttccctctcttagggacagtcaaaaccaagtcacttaggtagtaccaaaataaataaggaaaagcttagctttagaaacagtgcaacactggtctgctgttccagtggtaagctatgtcccaggaatcagtttaaaagcacgacagtggatgctgggtccatatcacacacattgctgtgaacaggaaactcctgtgaccacaacatgaggccactggagacgcatatgagtaagggcactgacggactcatgatttcttcttaccagatgctttcctgttctttaagagtttaaaatcatcagaaaggaaaaacaaactctatattgttcagcatgcaatacataccacgctagggctggctcaattgaaagtgggcaaaagcttacaaatactaaaaagaagtgctgccgcgcagtgtggaggccactgtttggaaataaatcttcctaacactacaaaaaaaaaaaaaaaa

SEQ ID NO: 662 - protein, 99 aa, Homosapiens
MDRSIPPGLVNGLALQLRNTSRSEEDRNRDLATALEQLLQAYPRDMEKEKTMLVLALLLAKKVASHTPSLLRDVFHTTVNFINQNLRTYVRSLARNGMD

SEQ ID NO: 663 - DNA, 6134 bp, Homosapiens
atggaggaggagggagaggaggaggaggaggagcctcgcctgcccccatctgacctgggtggtgttccgtggaaggaggccgaggaagagtccagtgaagccgggaaccagaggctccagcaggtcatgcacgcggcggatcctctggagatccaggctgacgtgcactggactcatatccgtgagagagaggaggaagagaggatggcgccggcctctgagtcctctgcttccggagccccattggatgagaatgacctagaggaagatgtggactcagaaccagccgagatagaaggggaggcagcagaggatggggacccaggggacactggtgctgagctggatgatgatcagcactggtctgacagcccgtcggatgctgacagagagctgcgtttgccgtgcccagctgagggggaagcagagctggagctgagggtgtcggaagatgaggagaagctgcccgcctcaccgaagcaccaagagagaggtccctcccaagccaccagccccatccggtctccccaggaatcagctcttctgttcattccagtccacagcccctcaacagaggggccccaactcccacctgtccctgccgccacccaggagaaatcacctgaggagcgccttttccctgagcctttgctccccaaagagaagcccaaagctgatgccccctcggatctgaaagctgtgcactctcccatccgatcacagccagtgaccctgccagaagctaggactcctgtctcaccagggagcccgcagccccagccacccgtggcggcctccacgcccccacccagcccactccccatctgctcccagccccagccttccaccgaggccactgtcccatcccctacccagtcccccatacgcttccagcctgccccggccaaaacatccaccccactggcccctctccctgtccaaagccaaagtgacaccaaggacagactgggcagcccccttgctgtggatgaggccctcagacggagcgacctggtggaggagttctggatgaagagtgcggagatccgccgcagcctcgggctcacacctgtggaccgcagcaaggggcccgagcccagcttccccacgcctgccttcaggccagtgtccctcaaatcctattccgttgaaaagtccccccaggatgagggactccaccttctcaagcctctgtccatccccaaaaggctgggcctgccaaagccggaaggcgagccgttgtccctgccaaccccccggtccccgtccgacagagagctacgcagcgcccaggaggagcgcagggagctgtccagcagctctggcctgggcctgcacgggagctcctccaacatgaagacactgggcagccagagcttcaacacctcggactccgccatgctcacgcccccctccagcccgcccccaccgccacccccgggcgaggagcccgccaccttgcggaggaagctcagggaggccgagcccaatgcctcggtggtcccgccgcccttgcccgccacctggatgcggcccccccgggagcctgctcagccccccagagaggaggtgcggaagtcgtttgtggagagcgtggaggagattccctttgctgatgatgtggaggacacctatgacgacaagactgaggactcaagcctgcaggagaaattcttcacgcccccgtcctgctggccgcgccccgagaagcctcgccacccgcccctggccaaggagaacgggaggctgcctgctctggaggggacgctgcagccacagaagagggggctgcccttggtgtccgcggaagccaaggagttggccgaggagcgcatgcgagccagggagaagtccgtgaagagccaggcgctgcgggacgccatggccaggcagctgagcaggatgcagcagatggagctggcctcaggcgcccccaggccccgcaaggcgtcctcagcaccctcccagggcaaggagcgccggcctgactcccccacacgccccactctcaggggctccgaggagcccaccctgaagcatgaagccaccagcgaggaggtcctctccccgccgtcggactcagggggcccagatggctctttcacttcatccgagggctccagtgggaagagcaagaagaggtcgtcactcttctccccccgcagaaacaagaaggagaagaagtccaaaggcgagggccggcccccggagaagcccagctccaacctcctagaagaagccgccgccaaacccaagtccctgtggaagtccgtcttctccgggtacaagaaggacaagaagaagaaggccgacgacaagtcctgccccagcaccccctccagcggggccacggtggactctggaaagcacagggtgcttcccgtcgtaagggcagagctgcagctccggcgccagctgagcttctccgaggactcagacctctccagcgacgatgtccttgagaagtcctcacagaagtcccggcgagagccaagaacctacacggaggaggaactgaatgccaagctgacccggcgtgtgcaaaaggcagctcggagacaggccaagcaggaggagcttaagcggctgcatcgagcccagatcatccagcggcagctgcagcaggtggaggagaggcagcggcggctggaggaaaggggcgtggctgtggagaaggcgctccggggcgaagcaggcatgggcaagaaggacgaccccaagctgatgcaggagtggttcaagctagtgcaggagaagaacgccatggtgcgctacgagtcggagctgatgatctttgcccgggagctggagctggaagaccggcagagtcgactgcagcaggagctccgggaacgcatggcagtggaagatcaccttaagactgaggaggagctgtcagaagagaagcagattctcaatgagatgctggaggtggtggagcagagagactcactggtggcgctgctggaggagcagcggctccgggagagagaggaggacaaggacctggaggctgccatgctgtccaagggcttcagccttaactggtcctgagctcccacccaacgctccattttctgttggcatccgcctggccaggcagtggcatccaaaccacccggagccgcgatctgaggaggcctggcacctccttggagtttacgctcagatgcccgtgtgctgcttggaaagtggtcgagtcccgcgtgcagtggggagccccaggtgacagtggttatctgagacggctccacctcctgggaggaggcccacctggacctcccactcagaggagcagcacggcgtgtatggcatgacgcaggggaccaccccgcgcgctccctgaggatgtgctggctgtgccccttttttccactggcacatttggtaagagagggaagctgctccccgtcagaaccacagtgcgccgtgcgaggggcactgtcttcttcatgctccctggagcaccaccaaagaaacgtaaacaataccccacgaaagcagggtcaggggtcagggtgcgatcgagacccaggatgggggcgtccagtcatgcccaccccagcatcacaggagacatggaggtgcgggcaggctcctgaattattatgcaaattaggaggacgcaggaggggtctgccctccagccgaacaccacacactggaccctaagtggccaaatgcctgggccgcttgctggctgtggcctgaggcttgtgggttgctgcattttgcttgtagttcacaaccattttgacactggaaaatgctgactttgggggacaggatgaggccctacattctaagcccccagttggcagacaggcattgtccctgttccacatttatgtcgggacaggagatgaccttttcctccgtgtttttcctgtgtttgcacgttgaaatgaagctgacaacctggcaagacgctcagccgcttcaaaccctttttgtcaattaacttattttttaatacttgaaaagaagtaacttcgtttgtgtatctttactagaggaactgatcacctgcgcccgggtgcgggagccacagcggcatctggtgcgtcctacgcgacctggtccggggctgcccggtgctcctcacgtgcatctatttattagcctttctcttcgtatcactggcctggctggcatcagggagctgcccagaacccctgtgtgggtcctcctcacagctttctgtcccctcctccacccggtgcctgcctcaccctggcgctagaccatctggaccactcatgtgatgagggtgcatttccgttctgttttgggccaggccaacagcagagctgccactctcaccctcccagtgagaattccggctctgcagaactcgcccttgtctcagtttgggggccagggcatcaccttcctccgcacatatgttaaagaaggtttcaggatgggccctcatccacacaggccaagagggtgcaaggtgggaccctggaatcatgtggctggtgagaattccctcctcccagcctaagattcacccagacggaaacgcgagtgctgcagtggatgctgggatgcaggctggtgcctctcaagcagatcagcgactcccgcccttccttccgaaggcgacgggcacctgccttgtgccggatcttcatggggacataaagggcgagccccgaatcactagctcctatagccaaactgttcctttctcacggttccgcaccagcctggctgtgtacagctcatcaagccactgagctaatcggggtggggtgcttgtccatcaaagcagtcagcacatagcccagcgaggagccatccggaccagacccgcctgccaggggcgctccagccgcctgccgcctccgtgggctggggccagctgggagcagaggcctggcccctccaaggcgtcccgcagtggagcaggctgagtggctgtgctgaccttgggctttccatgggaaccacactgtgcttcaacttgaacattcatcccagctgcaaaggagcaaagaacctgtgtcatccttgtctgtccagaagctgccatctctctcccatgcacatccgggagataacgccgctagtggccgccacagcgctgattctccacctgttctcacgtgaggcaaaggtctccttttcttttctctttacttaaaaaaggggagaggagggtttctagattccatcttcaaaccccagtcgtcccataaaattggacgtgggaaaagaccttcactgcctgcgtggcctttcccagacctctcctcgaatgccacaaaaccggtccagccccggcagagccgccttcggcccttgtagctcctgctggccccacaacagggaaacagtttgcaaagtggcttggaaggagtgtggcctagggatctgctgtaagtggccagacgtagcaggagagcccagtgtcaccttctggtcctggtcagccttaacactgtggcatcctccacagcacacacggcagcctgcagtctggaaggtggacccgagcctttgcagagaggcgccgcagagccgcaggcctgcgccccagccttctgctcccgactgtgaggacacccagttctagtagagcactttttttaaagctcccattttgtaaccactagtttgcggttgacttgagtactctggtgacttcctgcgtcaagcgttctcaagctgtgagaatgtgcgcagctccaggcaggttttctctcggagagttaagtcttcccttgaaggcagggaagcaggatggatacacatatatcacacgcataaaacaccaggtgcgggagcagcccagactcaaggctgactaaactggaggctgaataccgtggaggtccacatgcagcttccctggagggcaggccggaggcgctcccgcccctgggcttgaggatgctgcaccccgtgggcttccaggcctgcccagatgatgccttcaggcctctgtccctggcggccatcctcaggccgattttgaccagcaatgatagactcttcttaaccctttcaaaataaatttttcagtgggacagaaaggagagttaaaaaacatttttttaaaggtggtaacatctgacccacaaagggaatgggtctgttttatgcaaaataaaagtttttcaaat

SEQ ID NO: 664 - protein, 1017 aa, Homosapiens
MEEEGEEEEEEPRLPPSDLGGVPWKEAEEESSEAGNQRLQQVMHAADPLEIQADVHWTHIREREEEERMAPASESSASGAPLDENDLEEDVDSEPAEIEGEAAEDGDPGDTGAELDDDQHWSDSPSDADRELRLPCPAEGEAELELRVSEDEEKLPASPKHQERGPSQATSPIRSPQESALLFIPVHSPSTEGPQLPPVPAATQEKSPEERLFPEPLLPKEKPKADAPSDLKAVHSPIRSQPVTLPEARTPVSPGSPQPQPPVAASTPPPSPLPICSQPQPSTEATVPSPTQSPIRFQPAPAKTSTPLAPLPVQSQSDTKDRLGSPLAVDEALRRSDLVEEFWMKSAEIRRSLGLTPVDRSKGPEPSFPTPAFRPVSLKSYSVEKSPQDEGLHLLKPLSIPKRLGLPKPEGEPLSLPTPRSPSDRELRSAQEERRELSSSSGLGLHGSSSNMKTLGSQSFNTSDSAMLTPPSSPPPPPPPGEEPATLRRKLREAEPNASVVPPPLPATWMRPPREPAQPPREEVRKSFVESVEEIPFADDVEDTYDDKTEDSSLQEKFFTPPSCWPRPEKPRHPPLAKENGRLPALEGTLQPQKRGLPLVSAEAKELAEERMRAREKSVKSQALRDAMARQLSRMQQMELASGAPRPRKASSAPSQGKERRPDSPTRPTLRGSEEPTLKHEATSEEVLSPPSDSGGPDGSFTSSEGSSGKSKKRSSLFSPRRNKKEKKSKGEGRPPEKPSSNLLEEAAAKPKSLWKSVFSGYKKDKKKKADDKSCPSTPSSGATVDSGKHRVLPVVRAELQLRRQLSFSEDSDLSSDDVLEKSSQKSRREPRTYTEEELNAKLTRRVQKAARRQAKQEELKRLHRAQIIQRQLQQVEERQRRLEERGVAVEKALRGEAGMGKKDDPKLMQEWFKLVQEKNAMVRYESELMIFARELELEDRQSRLQQELRERMAVEDHLKTEEELSEEKQILNEMLEVVEQRDSLVALLEEQRLREREEDKDLEAAMLSKGFSLNWS

SEQ ID NO: 665 - DNA, 4744 bp, Homosapiens
gagaggaagcatgagaccatgaacccagctcatgtcctctttgaccggtttgtccaggccaccacctgcaagggaaccctcaaggctttccaggagctctgtgaccacctggaactaaagccaaaggactaccgctccttctatcacaagctcaagtccaagcttaactactggaaagccaaagccctctgggcaaaattggacaaacggggcagtcacaaagactacaaaaagggaaaagcgtgcactaacaccaagtgtctcatcattggggctggcccctgtggtctccgtacagccatcgacttatccttactgggggccaaggtggttgttattgagaaacgagatgccttctcccgcaacaacgtcttgcatctctggccattcaccatacatgatctacgaggtctgggtgccaagaagttctatggcaagttctgtgctggagccatcgaccatatcagtatccgtcagctccaactaatacttttgaaagtagccttgatcctaggcattgaaatccacgtcaatgtggaattccaaggacttatacagcctcctgaggaccaagagaatgaacggataggctggcgggcactggtgcaccccaagactcatcctgtgtcagagtatgaatttgaagtgatcatcggtggggatggtcggaggaacaccttggaagggtttcgtcggaaagaattccgtggcaaactggccatcgccatcacggcaaattttatcaaccgaaatacaacagcagaagctaaagtggaagagatcagtggtgtggcttttatattcaaccaaaaatttttccaggaactgagggaagccacaggtattgacttggagaacatcgtttactacaaagatgacacacactatttcgttatgacagccaaaaagcagagtttgctggacaaaggagtgatactacatgactacgccgacacagagctcctgctttcccgagaaaacgtggaccaggaggctctgctcagctatgccagggaggcggcagacttctctacccagcagcagctgccgtctctggattttgccatcaatcactatgggcagcccgatgtggccatgtttgacttcacttgtatgtatgcctccgagaacgccgccttggtgcgggagcagaacggacaccagttactagtggctctggtcggggacagcctcctagagcctttctggccaatgggaacaggaatagcccggggctttctagctgctatggactctgcctggatggtccgaagttggtctctaggaacgagccctttggaagtgctggcagagagggaaagtatttacaggttgctgcctcagaccacccctgagaatgtgagtaagaacttcagccagtacagtatcgaccctgtcactcggtatcccaatatcaacgtcaacttcctccggccaagccaggtgcgccatttatatgatactggcgaaacaaaagatattcacctggaaatggagagcctggtgaattcccgaaccacccccaaattgactcgcaatgagtctgtagctcgttcaagcaaactgctgggttggtgccagaggcagacagatggctatgcaggggtaaacgtgacagatctcaccatgtcctggaaaagtggcttggccctttgtgcaattatccatagataccgccctgacctgatagattttgattctttggatgagcaaaatgtggagaagaataaccaactggcctttgacattgctgagaaggaattgggcatttctcccatcatgacaggcaaagaaatggcctccgtgggggagcctgataagctgtccatggtgatgtacctgactcagttctacgagatgtttaaggactccctcccctctagcgacaccttggacctaaatgccgaggagaaagcagtcctgatagccagcaccagatcccctatctccttcctaagcaaacttggccagaccatctctcggaagcgttctcccaaggataaaaaggaaaaggacttggatggtgctgggaagaggagaaagaccagtcaatcagaggaggaggaagctcctcggggccacagaggagaaagaccgaccctggtgagcactctgacagacaggaggatggacgttgccgttgggaaccagaacaaagtgaagtacatggcgacccagctgctggccaaatttgaagagaatgcgcccgcacagtccatcggcatacggagacagctgacacaagagcgtggggccagccagccgtcctgctgcctgcctgggcaggttcgccctgcccccaccccccggtggaaacagggctccatgaagaaggagttcccgcagaacctgggaggcagcgacacatgctacttctgccagaagcgggtctacgtgatggagaggctgagtgccgagggcaagttcttccaccggagctgcttcaagtgcgagtactgcgccaccaccctgcgcctctcggcctacgcctacgacatcgaggatggtaaattctactgtaagccacactactgctatcgactctctggctacgcacaaaggaagagaccggcagtggctcccctgtctggaaaggaggccaaaggacccctgcaggatggcgccaccacagatgcaaacggacgggccaacgccgtggccagctccactgagagaaccccaggttcaggcgtgaacggcctggaggagcccagcatcgccaagcgactgaggggcaccccagagcggatcgagctggagaactaccgcctgtccctgaggcaggctgaggcactgcaggaggtaccggaggagactcaggccgagcacaacctgagcagcgtgctggacacgggcgccgaggaggacgtcgccagcaggtcagcacgcagggctgcagggcgcccacccgccacacggccctaagagcctcctcacctctgtgtgtctcggtttcttctcagtgaagggaggcctcctgtctttcctgctgcccgcagtccattctccccagtcccttttaggttcttagcctcatcttctagtcagtgaggactcctccatcagactcaattcagagattcaggaagtatttattccttgaggacctgacatgtccccagctccaagtctgtcattgggaaggaaagtggcaggctctgcccccgggttattcacagattcagcagagggaaggacgggcacacggggagggactctgggtgattcagccaccagtgcaccgggccgtcttgagggaggcctagtccgtcccccaggcatctttttttctcctgtaggtaaagaaagggactgaaaatgtgtgccccaggggccgcatgcagcaccagtggatgcatgcttaggcagttccagagctgtaatcacatccagctgggtgacacctttggggatgtgcatgctataaccctaggactccctatatccactgccctgcaccccagggcttccagtatcagcgaaggcttcaaagtgttcagccgattacagatgatcaagagagccaagaatcaaaagggggtccggtgtcctgtggggcttcaggacagaaacacaggctgcaaacccgaggggcagaggcctcaagtggccttggagagcatttgaatcacacaccttgatttagccatgatgaagggaacatgtggggataaggagagcagagcagtttttttaaggtccaagaacgctttccagaaggtgtttgctgggccgagctgctttcagctgcacccgccacctcagccctcatgtcagacaccctctgcctagattcattcttgggctgcctcacagaccgctcctccgtgcatgccgggggcagcctctgccttggtgtctgcagttccaaagctgtcactgatggtgcatcctcatccagaactctgcttccctatccagagcacccatggaggccccactctccccactgtgcccagatgagggggagcccactctctctctccactgaccctgcagtgagggtgagagatgctgtgtgtcaaaacacatttataaacccttgagcagagctactggcttgaccttgggctgagtgtgggtcagcaccattttctccactgtaatttataaattgtgagaggcagtggggcagcaagttcatgtaatgtagcaaggacattccaggaaggctaacccctggcatttatggcaggtatgacaggagggcagcacagaaaacatgaaatcagtcagcatctatgcaatgcaatacatgcctcatcttactcagattgaagttaaaaaaagattttaaaactagcattcatgctgggcgcagtggctcatgcctgtaatcccagcactttgggaggccaaggtgggcacatcacttaaggtcaggagttcaagaccagcctggccaacataatgaaaccctgtctctactaaaaatacaaaaattagctgggcatggtggtgcacacctgtaatcccagctacttgggagggtaaggcatgagaattgcttgaacctgggaggcggaggttgcagcgagccgagatcatgccactgcaccactgcactccagcctgtgtgacagaatgagactccatctcaaaaaaaattaaaattaaaatcaaaaaataaaataaaggccaggcacggtggctcacacaggagaatcacttgaacctgggaggcggaggttgcagtgatctgagatcacaccagtacactccagcctgggagatggtgagactc

SEQ ID NO: 666 - protein, 968 aa, Homosapiens
MNPAHVLFDRFVQATTCKGTLKAFQELCDHLELKPKDYRSFYHKLKSKLNYWKAKALWAKLDKRGSHKDYKKGKACTNTKCLIIGAGPCGLRTAIDLSLLGAKVVVIEKRDAFSRNNVLHLWPFTIHDLRGLGAKKFYGKFCAGAIDHISIRQLQLILLKVALILGIEIHVNVEFQGLIQPPEDQENERIGWRALVHPKTHPVSEYEFEVIIGGDGRRNTLEGFRRKEFRGKLAIAITANFINRNTTAEAKVEEISGVAFIFNQKFFQELREATGIDLENIVYYKDDTHYFVMTAKKQSLLDKGVILHDYADTELLLSRENVDQEALLSYAREAADFSTQQQLPSLDFAINHYGQPDVAMFDFTCMYASENAALVREQNGHQLLVALVGDSLLEPFWPMGTGIARGFLAAMDSAWMVRSWSLGTSPLEVLAERESIYRLLPQTTPENVSKNFSQYSIDPVTRYPNINVNFLRPSQVRHLYDTGETKDIHLEMESLVNSRTTPKLTRNESVARSSKLLGWCQRQTDGYAGVNVTDLTMSWKSGLALCAIIHRYRPDLIDFDSLDEQNVEKNNQLAFDIAEKELGISPIMTGKEMASVGEPDKLSMVMYLTQFYEMFKDSLPSSDTLDLNAEEKAVLIASTRSPISFLSKLGQTISRKRSPKDKKEKDLDGAGKRRKTSQSEEEEAPRGHRGERPTLVSTLTDRRMDVAVGNQNKVKYMATQLLAKFEENAPAQSIGIRRQLTQERGASQPSCCLPGQVRPAPTPRWKQGSMKKEFPQNLGGSDTCYFCQKRVYVMERLSAEGKFFHRSCFKCEYCATTLRLSAYAYDIEDGKFYCKPHYCYRLSGYAQRKRPAVAPLSGKEAKGPLQDGATTDANGRANAVASSTERTPGSGVNGLEEPSIAKRLRGTPERIELENYRLSLRQAEALQEVPEETQAEHNLSSVLDTGAEEDVASRSARRAAGRPPATRP

SEQ ID NO: 667 - DNA, 3027 bp, Homosapiens
gctgagagtgaggcagcatggaggagaggaagcatgagaccatgaacccagctcatgtcctctttgaccggtttgtccaggccaccacctgcaagggaaccctcaaggctttccaggagctctgtgaccacctggaactaaagccaaaggactaccgctccttctatcacaagctcaagtccaagcttaactactggaaagccaaagccctctgggcaaaattggacaaacggggcagtcacaaagactacaaaaagggaaaagcgtgcactaacaccaagtgtctcatcattggggctggcccctgtggtctccgtacagccatcgacttatccttactgggggccaaggtggttgttattgagaaacgagatgccttctcccgcaacaacgtcttgcatctctggccattcaccatacatgatctacgaggtctgggtgccaagaagttctatggcaagttctgtgctggagccatcgaccatatcagtatccgtcagctccaactaatacttttgaaagtagccttgatcctaggcattgaaatccacgtcaatgtggaattccaaggacttatacagcctcctgaggaccaagagaatgaacggataggctggcgggcactggtgcaccccaagactcatcctgtgtcagagtatgaatttgaagtgatcatcggtggggatggtcggaggaacaccttggaagggtttcgtcggaaagaattccgtggcaaactggccatcgccatcacggcaaattttatcaaccgaaatacaacagcagaagctaaagtggaagagatcagtggtgtggcttttatattcaaccaaaaatttttccaggaactgagggaagccacaggtattgacttggagaacatcgtttactacaaagatgacacacactatttcgttatgacagccaaaaagcagagtttgctggacaaaggagtgatactacatgactacgccgacacagagctcctgctttcccgagaaaacgtggaccaggaggctctgctcagctatgccagggaggcggcagacttctctacccagcagcagctgccgtctctggattttgccatcaatcactatgggcagcccgatgtggccatgtttgacttcacttgtatgtatgcctccgagaacgccgccttggtgcgggagcagaacggacaccagttactagtggctctggtcggggacagcctcctagagcctttctggccaatgggaacaggaatagcccggggctttctagctgctatggactctgcctggatggtccgaagttggtctctaggaacgagccctttggaagtgctggcagagagggaaagtatttacaggttgctgcctcagaccacccctgagaatgtgagtaagaacttcagccagtacagtatcgaccctgtcactcggtatcccaatatcaacgtcaacttcctccggccaagccaggtgcgccatttatatgatactggcgaaacaaaagatattcacctggaaatggagagcctggtgaattcccgaaccacccccaaattgactcgcaatgagtctgtagctcgttcaagcaaactgctgggttggtgccagaggcagacagatggctatgcaggggtaaacgtgacagatctcaccatgtcctggaaaagtggcttggccctttgtgcaattatccatagataccgccctgacctgatagattttgattctttggatgagcaaaatgtggagaagaataaccaactggcctttgacattgctgagaaggaattgggcatttctcccatcatgacaggcaaagaaatggcctccgtgggggagcctgataagctgtccatggtgatgtacctgactcagttctacgagatgtttaaggactccctcccctctagcgacaccttggacctaaatgccgaggagaaagcagtcctgatagccagcaccagatcccctatctccttcctaagcaaacttggccagaccatctctcggaagcgttctcccaaggataaaaaggaaaaggacttggatggtgctgggaagaggagaaagaccagtcaatcagaggaggaggaagctcctcggggccacagaggagaaagaccgaccctggtgagcactctgacagacaggaggatggacgttgccgttgggaaccagaacaaagtgaagtacatggcgacccagctgctggccaaatttgaagagaatgcgcccgcacagtccatcggcatacggagacagggctccatgaagaaggagttcccgcagaacctgggaggcagcgacacatgctacttctgccagaagcgggtctacgtgatggagaggctgagtgccgagggcaagttcttccaccggagctgcttcaagtgcgagtactgcgccaccaccctgcgcctctcggcctacgcctacgacatcgaggatggtaaattctactgtaagccacactactgctatcgactctctggctacgcacaaaggaagagaccggcagtggctcccctgtctggaaaggaggccaaaggacccctgcaggatggcgccaccacagatgcaaacggacgggccaacgccgtggccagctccactgagagaaccccaggttcaggcgtgaacggcctggaggagcccagcatcgccaagcgactgaggggcaccccagagcggatcgagctggagaactaccgcctgtccctgaggcaggctgaggcactgcaggaggtaccggaggagactcaggccgagcacaacctgagcagcgtgctggacacgggcgccgaggaggacgtcgccagcagagactgggtctccccatggttgcccaggatggtctcaaactcctgggctcaaatgatccacccacctcagcctcccacagtgctgggatcacagatgtgagctactgggcccagctgagcataagagtcttttctgtgtcacctttgtgttccctacagtgtctagcaagtgcgttgtgaggggaagataattgaataaattttatcca

SEQ ID NO: 668 - protein, 966 aa, Homosapiens
MEERKHETMNPAHVLFDRFVQATTCKGTLKAFQELCDHLELKPKDYRSFYHKLKSKLNYWKAKALWAKLDKRGSHKDYKKGKACTNTKCLIIGAGPCGLRTAIDLSLLGAKVVVIEKRDAFSRNNVLHLWPFTIHDLRGLGAKKFYGKFCAGAIDHISIRQLQLILLKVALILGIEIHVNVEFQGLIQPPEDQENERIGWRALVHPKTHPVSEYEFEVIIGGDGRRNTLEGFRRKEFRGKLAIAITANFINRNTTAEAKVEEISGVAFIFNQKFFQELREATGIDLENIVYYKDDTHYFVMTAKKQSLLDKGVILHDYADTELLLSRENVDQEALLSYAREAADFSTQQQLPSLDFAINHYGQPDVAMFDFTCMYASENAALVREQNGHQLLVALVGDSLLEPFWPMGTGIARGFLAAMDSAWMVRSWSLGTSPLEVLAERESIYRLLPQTTPENVSKNFSQYSIDPVTRYPNINVNFLRPSQVRHLYDTGETKDIHLEMESLVNSRTTPKLTRNESVARSSKLLGWCQRQTDGYAGVNVTDLTMSWKSGLALCAIIHRYRPDLIDFDSLDEQNVEKNNQLAFDIAEKELGISPIMTGKEMASVGEPDKLSMVMYLTQFYEMFKDSLPSSDTLDLNAEEKAVLIASTRSPISFLSKLGQTISRKRSPKDKKEKDLDGAGKRRKTSQSEEEEAPRGHRGERPTLVSTLTDRRMDVAVGNQNKVKYMATQLLAKFEENAPAQSIGIRRQGSMKKEFPQNLGGSDTCYFCQKRVYVMERLSAEGKFFHRSCFKCEYCATTLRLSAYAYDIEDGKFYCKPHYCYRLSGYAQRKRPAVAPLSGKEAKGPLQDGATTDANGRANAVASSTERTPGSGVNGLEEPSIAKRLRGTPERIELENYRLSLRQAEALQEVPEETQAEHNLSSVLDTGAEEDVASRDWVSPWLPRMVSNSWAQMIHPPQPPTVLGSQM

SEQ ID NO: 669 - DNA, 4878 bp, Homosapiens
ccggctgctacctaccgcgccggacgctcgggctgcggaacagggcggcactggcccgccacagcgacgccggcgccgagggacaccgcagtatgaggcagagattaacgtgacagtgtcaggtggacccacagccatcccacctccccctctggggagtgctgagagtgaggcagcatggaggagaggaagcatgagaccatgaacccagctcatgtcctctttgaccggtttgtccaggccaccacctgcaagggaaccctcaaggctttccaggagctctgtgaccacctggaactaaagccaaaggactaccgctccttctatcacaagctcaagtccaagcttaactactggaaagccaaagccctctgggcaaaattggacaaacggggcagtcacaaagactacaaaaagggaaaagcgtgcactaacaccaagtgtctcatcattggggctggcccctgtggtctccgtacagccatcgacttatccttactgggggccaaggtggttgttattgagaaacgagatgccttctcccgcaacaacgtcttgcatctctggccattcaccatacatgatctacgaggtctgggtgccaagaagttctatggcaagttctgtgctggagccatcgaccatatcagtatccgtcagctccaactaatacttttgaaagtagccttgatcctaggcattgaaatccacgtcaatgtggaattccaaggacttatacagcctcctgaggaccaagagaatgaacggataggctggcgggcactggtgcaccccaagactcatcctgtgtcagagtatgaatttgaagtgatcatcggtggggatggtcggaggaacaccttggaagggtttcgtcggaaagaattccgtggcaaactggccatcgccatcacggcaaattttatcaaccgaaatacaacagcagaagctaaagtggaagagatcagtggtgtggcttttatattcaaccaaaaatttttccaggaactgagggaagccacaggactacgccgacacagagctcctgctttcccgagaaaacgtggaccaggaggctctgctcagctatgccagggaggcggcagacttctctacccagcagcagctgccgtctctggattttgccatcaatcactatgggcagcccgatgtggccatgtttgacttcacttgtatgtatgcctccgagaacgccgccttggtgcgggagcagaacggacaccagttactagtggctctggtcggggacagcctcctagagcctttctggccaatgggaacaggaatagcccggggctttctagctgctatggactctgcctggatggtccgaagttggtctctaggaacgagccctttggaagtgctggcagagagggaaagtatttacaggttgctgcctcagaccacccctgagaatgtgagtaagaacttcagccagtacagtatcgaccctgtcactcggtatcccaatatcaacgtcaacttcctccggccaagccaggtgcgccatttatatgatactggcgaaacaaaagatattcacctggaaatggagagcctggtgaattcccgaaccacccccaaattgactcgcaatgagtctgtagctcgttcaagcaaactgctgggttggtgccagaggcagacagatggctatgcaggggtaaacgtgacagatctcaccatgtcctggaaaagtggcttggccctttgtgcaattatccatagataccgccctgacctgatagattttgattctttggatgagcaaaatgtggagaagaataaccaactggcctttgacattgctgagaaggaattgggcatttctcccatcatgacaggcaaagaaatggcctccgtgggggagcctgataagctgtccatggtgatgtacctgactcagttctacgagatgtttaaggactccctcccctctagcgacaccttggacctaaatgccgaggagaaagcagtcctgatagccagcaccagatcccctatctccttcctaagcaaacttggccagaccatctctcggaagcgttctcccaaggataaaaaggaaaaggacttggatggtgctgggaagaggagaaagaccagtcaatcagaggaggaggaagctcctcggggccacagaggagaaagaccgaccctggtgagcactctgacagacaggaggatggacgttgccgttgggaaccagaacaaagtgaagtacatggcgacccagctgctggccaaatttgaagagaatgcgcccgcacagtccatcggcatacggagacagggctccatgaagaaggagttcccgcagaacctgggaggcagcgacacatgctacttctgccagaagcgggtctacgtgatggagaggctgagtgccgagggcaagttcttccaccggagctgcttcaagtgcgagtactgcgccaccaccctgcgcctctcggcctacgcctacgacatcgaggatggtaaattctactgtaagccacactactgctatcgactctctggctacgcacaaaggaagagaccggcagtggctcccctgtctggaaaggaggccaaaggacccctgcaggatggcgccaccacagatgcaaacggacgggccaacgccgtggccagctccactgagagaaccccaggttcaggcgtgaacggcctggaggagcccagcatcgccaagcgactgaggggcaccccagagcggatcgagctggagaactaccgcctgtccctgaggcaggctgaggcactgcaggaggtaccggaggagactcaggccgagcacaacctgagcagcgtgctggacacgggcgccgaggaggacgtcgccagcaggtcagcacgcagggctgcagggcgcccacccgccacacggccctaagagcctcctcacctctgtgtgtctcggtttcttctcagtgaagggaggcctcctgtctttcctgctgcccgcagtccattctccccagtcccttttaggttcttagcctcatcttctagtcagtgaggactcctccatcagactcaattcagagattcaggaagtatttattccttgaggacctgacatgtccccagctccaagtctgtcattgggaaggaaagtggcaggctctgcccccgggttattcacagattcagcagagggaaggacgggcacacggggagggactctgggtgattcagccaccagtgcaccgggccgtcttgagggaggcctagtccgtcccccaggcatctttttttctcctgtaggtaaagaaagggactgaaaatgtgtgccccaggggccgcatgcagcaccagtggatgcatgcttaggcagttccagagctgtaatcacatccagctgggtgacacctttggggatgtgcatgctataaccctaggactccctatatccactgccctgcaccccagggcttccagtatcagcgaaggcttcaaagtgttcagccgattacagatgatcaagagagccaagaatcaaaagggggtccggtgtcctgtggggcttcaggacagaaacacaggctgcaaacccgaggggcagaggcctcaagtggccttggagagcatttgaatcacacaccttgatttagccatgatgaagggaacatgtggggataaggagagcagagcagtttttttaaggtccaagaacgctttccagaaggtgtttgctgggccgagctgctttcagctgcacccgccacctcagccctcatgtcagacaccctctgcctagattcattcttgggctgcctcacagaccgctcctccgtgcatgccgggggcagcctctgccttggtgtctgcagttccaaagctgtcactgatggtgcatcctcatccagaactctgcttccctatccagagcacccatggaggccccactctccccactgtgcccagatgagggggagcccactctctctctccactgaccctgcagtgagggtgagagatgctgtgtgtcaaaacacatttataaacccttgagcagagctactggcttgaccttgggctgagtgtgggtcagcaccattttctccactgtaatttataaattgtgagaggcagtggggcagcaagttcatgtaatgtagcaaggacattccaggaaggctaacccctggcatttatggcaggtatgacaggagggcagcacagaaaacatgaaatcagtcagcatctatgcaatgcaatacatgcctcatcttactcagattgaagttaaaaaaagattttaaaactagcattcatgctgggcgcagtggctcatgcctgtaatcccagcactttgggaggccaaggtgggcacatcacttaaggtcaggagttcaagaccagcctggccaacataatgaaaccctgtctctactaaaaatacaaaaacttgccaggtgtggtggcacgcacctgtaatcccagctactcaggaggctgaggcaggagaatcgcttgaacccaggaggcagaggttgccgtcagccagattgtgccactgcactccagcctgggcaacagagggagacttcgtctcaaaaaaaaaaaaaaaaatgaagagcccggcctggtgcggtagctcatgcctgtaatcccagtactccgggaggccaaagcaggcagatcacctgagcccaggagtttgagagcagcagtaacatgatgaaaccccgtctctacaaaaaatatgaaaattatccggacctgcctgtaatcccaactactcaggaggctgaggcaggagaaccacttgaaccagggaggcagaagttacagtgagccaggatcatgccattgcaatccagcctgtgagacagagcaagaccc

SEQ ID NO: 670 - protein, 581 aa, Homosapiens
MFDFTCMYASENAALVREQNGHQLLVALVGDSLLEPFWPMGTGIARGFLAAMDSAWMVRSWSLGTSPLEVLAERESIYRLLPQTTPENVSKNFSQYSIDPVTRYPNINVNFLRPSQVRHLYDTGETKDIHLEMESLVNSRTTPKLTRNESVARSSKLLGWCQRQTDGYAGVNVTDLTMSWKSGLALCAIIHRYRPDLIDFDSLDEQNVEKNNQLAFDIAEKELGISPIMTGKEMASVGEPDKLSMVMYLTQFYEMFKDSLPSSDTLDLNAEEKAVLIASTRSPISFLSKLGQTISRKRSPKDKKEKDLDGAGKRRKTSQSEEEEAPRGHRGERPTLVSTLTDRRMDVAVGNQNKVKYMATQLLAKFEENAPAQSIGIRRQGSMKKEFPQNLGGSDTCYFCQKRVYVMERLSAEGKFFHRSCFKCEYCATTLRLSAYAYDIEDGKFYCKPHYCYRLSGYAQRKRPAVAPLSGKEAKGPLQDGATTDANGRANAVASSTERTPGSGVNGLEEPSIAKRLRGTPERIELENYRLSLRQAEALQEVPEETQAEHNLSSVLDTGAEEDVASRSARRAAGRPPATRP

SEQ ID NO: 671 - DNA, 4552 bp, Homosapiens
tgaggcagcatggaggagaggaagcatgagaccatgaacccagctcatgtcctctttgaccggtttgtccaggccaccacctgcaagggaaccctcaaggctttccaggagctctgtgaccacctggaactaaagccaaaggactaccgctccttctatcacaagctcaagtccaagcttaactactggaaagccaaagccctctgggcaaaattggacaaacggggcagtcacaaagactacaaaaagggaaaagcgtgcactaacaccaagtgtctcatcattggggctggcccctgtggtctccgtacagccatcgacttatccttactgggggccaaggtggttgttattgagaaacgagatgccttctcccgcaacaacgtcttgcatctctggccattcaccatacatgatctacgaggtctgggtgccaagaagttctatggcaagttctgtgctggagccatcgaccatatcagtatccgtcagctccaactaatacttttgaaagtagccttgatcctaggcattgaaatccacgtcaatgtggaattccaaggacttatacagcctcctgaggaccaagagaatgaacggataggctggcgggcactggtgcaccccaagactcatcctgtgtcagagtatgaatttgaagtgatcatcggtggggatggtcggaggaacaccttggaagggtttcgtcggaaagaattccgtggcaaactggccatcgccatcacggcaaattttatcaaccgaaatacaacagcagaagctaaagtggaagagatcagtggtgtggcttttatattcaaccaaaaatttttccaggaactgagggaagccacaggtattgacttggagaacatcgtttactacaaagatgacacacactatttcgttatgacagccaaaaagcagagtttgctggacaaaggagtgatactacatgactacgccgacacagagctcctgctttcccgagaaaacgtggaccaggaggctctgctcagctatgccagggaggcggcagacttctctacccagcagcagctgccgtctctggattttgccatcaatcactatgggcagcccgatgtggccatgtttgacttcacttgtatgtatgcctccgagaacgccgccttggtgcgggagcagaacggacaccagttactagtggctctggtcggggacagcctcctagagcctttctggccaatgggaacaggaatagcccggggctttctagctgctatggactctgcctggatggtccgaagttggtctctaggaacgagccctttggaagtgctggcagagagggaaagtatttacaggttgctgcctcagaccacccctgagaatgtgagtaagaacttcagccagtacagtatcgaccctgtcactcggtatcccaatatcaacgtcaacttcctccggccaagccaggtgcgccatttatatgatactggcgaaacaaaagatattcacctggaaatggagagcctggtgaattcccgaaccacccccaaattgactcgcaatgagtctgtagctcgttcaagcaaactgctgggttggtgccagaggcagacagatggctatgcaggggtaaacgtgacagatctcaccatgtcctggaaaagtggcttggccctttgtgcaattatccatagataccgccctgacctgatagattttgattctttggatgagcaaaatgtggagaagaataaccaactggcctttgacattgctgagaaggaattgggcatttctcccatcatgacaggcaaagaaatggcctccgtgggggagcctgataagctgtccatggtgatgtacctgactcagttctacgagatgtttaaggactccctcccctctagcgacaccttggacctaaatgccgaggagaaagcagtcctgatagccagcaccagatcccctatctccttcctaagcaaacttggccagaccatctctcggaagcgttctcccaaggataaaaaggaaaaggacttggatggtgctgggaagaggagaaagaccagtcaatcagaggaggaggaagctcctcggggccacagaggagaaagaccgaccctggtgagcactctgacagacaggaggatggacgttgccgttgggaaccagaacaaagtgaagtacatggcgacccagctgctggccaaatttgaagagaatgcgcccgcacagtccatcggcatacggagacagggctccatgaagaaggagttcccgcagaacctgggaggcagcgacacatgctacttctgccagaagcgggtctacgtgatggagaggctgagtgccgagggcaagttcttccaccggagctgcttcaagtgcgagtactgcgccaccaccctgcgcctctcggcctacgcctacgacatcgaggatggtaaattctactgtaagccacactactgctatcgactctctggctacgcacaaaggaagagaccggcagtggctcccctgtctggaaaggaggccaaaggacccctgcaggatggcgccaccacagatgcaaacggacgggccaacgccgtggccagctccactgagagaaccccaggttcaggcgtgaacggcctggaggagcccagcatcgccaagcgactgaggggcaccccagagcggatcgagctggagaactaccgcctgtccctgaggcaggctgaggcactgcaggaggtaccggaggagactcaggccgagcacaacctgagcagcgtgctggacacgggcgccgaggaggacgtcgccagcaggtcagcacgcagggctgcagggcgcccacccgccacacggccctaagagcctcctcacctctgtgtgtctcggtttcttctcagtgaagggaggcctcctgtctttcctgctgcccgcagtccattctccccagtcccttttaggttcttagcctcatcttctagtcagtgaggactcctccatcagactcaattcagagattcaggaagtatttattccttgaggacctgacatgtccccagctccaagtctgtcattgggaaggaaagtggcaggctctgcccccgggttattcacagattcagcagagggaaggacgggcacacggggagggactctgggtgattcagccaccagtgcaccgggccgtcttgagggaggcctagtccgtcccccaggcatctttttttctcctgtaggtaaagaaagggactgaaaatgtgtgccccaggggccgcatgcagcaccagtggatgcatgcttaggcagttccagagctgtaatcacatccagctgggtgacacctttggggatgtgcatgctataaccctaggactccctatatccactgccctgcaccccagggcttccagtatcagcgaaggcttcaaagtgttcagccgattacagatgatcaagagagccaagaatcaaaagggggtccggtgtcctgtggggcttcaggacagaaacacaggctgcaaacccgaggggcagaggcctcaagtggccttggagagcatttgaatcacacaccttgatttagccatgatgaagggaacatgtggggataaggagagcagagcagtttttttaaggtccaagaacgctttccagaaggtgtttgctgggccgagctgctttcagctgcacccgccacctcagccctcatgtcagacaccctctgcctagattcattcttgggctgcctcacagaccgctcctccgtgcatgccgggggcagcctctgccttggtgtctgcagttccaaagctgtcactgatggtgcatcctcatccagaactctgcttccctatccagagcacccatggaggccccactctccccactgtgcccagatgagggggagcccactctctctctccactgaccctgcagtgagggtgagagatgctgtgtgtcaaaacacatttataaacccttgagcagagctactggcttgaccttgggctgagtgtgggtcagcaccattttctccactgtaatttataaattgtgagaggcagtggggcagcaagttcatgtaatgtagcaaggacattccaggaaggctaacccctggcatttatggcaggtatgacaggagggcagcacagaaaacatgaaatcagtcagcatctatgcaatgcaatacatgcctcatcttactcagattgaagttaaaaaaagattttaaaactagcattcatgctgggcgcagtggctcatgcctgtaatcccagcactttgggaggccaaggtgggcacatcacttaaggtcaggagttcaagaccagcctggccaacataatgaaaccctgtctctactaaaaatacaaaaattagctgggcatggtggtgcacacctgtaatcccagctacttgggagggtaaggcatgagaattgcttgaacctgggaggcggaggttgcagcgagccgagatcatgccactgcaccactgcactccagcctgtgtgacagaatgagactccatctcaaaaaaaattaaaattaaaatc

SEQ ID NO: 672 - protein, 948 aa, Homosapiens
MEERKHETMNPAHVLFDRFVQATTCKGTLKAFQELCDHLELKPKDYRSFYHKLKSKLNYWKAKALWAKLDKRGSHKDYKKGKACTNTKCLIIGAGPCGLRTAIDLSLLGAKVVVIEKRDAFSRNNVLHLWPFTIHDLRGLGAKKFYGKFCAGAIDHISIRQLQLILLKVALILGIEIHVNVEFQGLIQPPEDQENERIGWRALVHPKTHPVSEYEFEVIIGGDGRRNTLEGFRRKEFRGKLAIAITANFINRNTTAEAKVEEISGVAFIFNQKFFQELREATGIDLENIVYYKDDTHYFVMTAKKQSLLDKGVILHDYADTELLLSRENVDQEALLSYAREAADFSTQQQLPSLDFAINHYGQPDVAMFDFTCMYASENAALVREQNGHQLLVALVGDSLLEPFWPMGTGIARGFLAAMDSAWMVRSWSLGTSPLEVLAERESIYRLLPQTTPENVSKNFSQYSIDPVTRYPNINVNFLRPSQVRHLYDTGETKDIHLEMESLVNSRTTPKLTRNESVARSSKLLGWCQRQTDGYAGVNVTDLTMSWKSGLALCAIIHRYRPDLIDFDSLDEQNVEKNNQLAFDIAEKELGISPIMTGKEMASVGEPDKLSMVMYLTQFYEMFKDSLPSSDTLDLNAEEKAVLIASTRSPISFLSKLGQTISRKRSPKDKKEKDLDGAGKRRKTSQSEEEEAPRGHRGERPTLVSTLTDRRMDVAVGNQNKVKYMATQLLAKFEENAPAQSIGIRRQGSMKKEFPQNLGGSDTCYFCQKRVYVMERLSAEGKFFHRSCFKCEYCATTLRLSAYAYDIEDGKFYCKPHYCYRLSGYAQRKRPAVAPLSGKEAKGPLQDGATTDANGRANAVASSTERTPGSGVNGLEEPSIAKRLRGTPERIELENYRLSLRQAEALQEVPEETQAEHNLSSVLDTGAEEDVASRSARRAAGRPPATRP

SEQ ID NO: 673 - DNA, 6137 bp, Homosapiens
atggaggaggagggagaggaggaggaggaggagcctcgcctgcccccatctgacctgggtggtgttccgtggaaggaggccgaggaggaagagtccagtgaagccgggaaccagaggctccagcaggtcatgcacgcggcggatcctctggagatccaggctgacgtgcactggactcatatccgtgagagagaggaggaagagaggatggcgccggcctctgagtcctctgcttccggagccccattggatgagaatgacctagaggaagatgtggactcagaaccagccgagatagaaggggaggcagcagaggatggggacccaggggacactggtgctgagctggatgatgatcagcactggtctgacagcccgtcggatgctgacagagagctgcgtttgccgtgcccagctgagggggaagcagagctggagctgagggtgtcggaagatgaggagaagctgcccgcctcaccgaagcaccaagagagaggtccctcccaagccaccagccccatccggtctccccaggaatcagctcttctgttcattccagtccacagcccctcaacagaggggccccaactcccacctgtccctgccgccacccaggagaaatcacctgaggagcgccttttccctgagcctttgctccccaaagagaagcccaaagctgatgccccctcggatctgaaagctgtgcactctcccatccgatcacagccagtgaccctgccagaagctaggactcctgtctcaccagggagcccgcagccccagccacccgtggcggcctccacgcccccacccagcccactccccatctgctcccagccccagccttccaccgaggccactgtcccatcccctacccagtcccccatacgcttccagcctgccccggccaaaacatccaccccactggcccctctccctgtccaaagccaaagtgacaccaaggacagactgggcagcccccttgctgtggatgaggccctcagacggagcgacctggtggaggagttctggatgaagagtgcggagatccgccgcagcctcgggctcacacctgtggaccgcagcaaggggcccgagcccagcttccccacgcctgccttcaggccagtgtccctcaaatcctattccgttgaaaagtccccccaggatgagggactccaccttctcaagcctctgtccatccccaaaaggctgggcctgccaaagccggaaggcgagccgttgtccctgccaaccccccggtccccgtccgacagagagctacgcagcgcccaggaggagcgcagggagctgtccagcagctctggcctgggcctgcacgggagctcctccaacatgaagacactgggcagccagagcttcaacacctcggactccgccatgctcacgcccccctccagcccgcccccaccgccacccccgggcgaggagcccgccaccttgcggaggaagctcagggaggccgagcccaatgcctcggtggtcccgccgcccttgcccgccacctggatgcggcccccccgggagcctgctcagccccccagagaggaggtgcggaagtcgtttgtggagagcgtggaggagattccctttgctgatgatgtggaggacacctatgacgacaagactgaggactcaagcctgcaggagaaattcttcacgcccccgtcctgctggccgcgccccgagaagcctcgccacccgcccctggccaaggagaacgggaggctgcctgctctggaggggacgctgcagccacagaagagggggctgcccttggtgtccgcggaagccaaggagttggccgaggagcgcatgcgagccagggagaagtccgtgaagagccaggcgctgcgggacgccatggccaggcagctgagcaggatgcagcagatggagctggcctcaggcgcccccaggccccgcaaggcgtcctcagcaccctcccagggcaaggagcgccggcctgactcccccacacgccccactctcaggggctccgaggagcccaccctgaagcatgaagccaccagcgaggaggtcctctccccgccgtcggactcagggggcccagatggctctttcacttcatccgagggctccagtgggaagagcaagaagaggtcgtcactcttctccccccgcagaaacaagaaggagaagaagtccaaaggcgagggccggcccccggagaagcccagctccaacctcctagaagaagccgccgccaaacccaagtccctgtggaagtccgtcttctccgggtacaagaaggacaagaagaagaaggccgacgacaagtcctgccccagcaccccctccagcggggccacggtggactctggaaagcacagggtgcttcccgtcgtaagggcagagctgcagctccggcgccagctgagcttctccgaggactcagacctctccagcgacgatgtccttgagaagtcctcacagaagtcccggcgagagccaagaacctacacggaggaggaactgaatgccaagctgacccggcgtgtgcaaaaggcagctcggagacaggccaagcaggaggagcttaagcggctgcatcgagcccagatcatccagcggcagctgcagcaggtggaggagaggcagcggcggctggaggaaaggggcgtggctgtggagaaggcgctccggggcgaagcaggcatgggcaagaaggacgaccccaagctgatgcaggagtggttcaagctagtgcaggagaagaacgccatggtgcgctacgagtcggagctgatgatctttgcccgggagctggagctggaagaccggcagagtcgactgcagcaggagctccgggaacgcatggcagtggaagatcaccttaagactgaggaggagctgtcagaagagaagcagattctcaatgagatgctggaggtggtggagcagagagactcactggtggcgctgctggaggagcagcggctccgggagagagaggaggacaaggacctggaggctgccatgctgtccaagggcttcagccttaactggtcctgagctcccacccaacgctccattttctgttggcatccgcctggccaggcagtggcatccaaaccacccggagccgcgatctgaggaggcctggcacctccttggagtttacgctcagatgcccgtgtgctgcttggaaagtggtcgagtcccgcgtgcagtggggagccccaggtgacagtggttatctgagacggctccacctcctgggaggaggcccacctggacctcccactcagaggagcagcacggcgtgtatggcatgacgcaggggaccaccccgcgcgctccctgaggatgtgctggctgtgccccttttttccactggcacatttggtaagagagggaagctgctccccgtcagaaccacagtgcgccgtgcgaggggcactgtcttcttcatgctccctggagcaccaccaaagaaacgtaaacaataccccacgaaagcagggtcaggggtcagggtgcgatcgagacccaggatgggggcgtccagtcatgcccaccccagcatcacaggagacatggaggtgcgggcaggctcctgaattattatgcaaattaggaggacgcaggaggggtctgccctccagccgaacaccacacactggaccctaagtggccaaatgcctgggccgcttgctggctgtggcctgaggcttgtgggttgctgcattttgcttgtagttcacaaccattttgacactggaaaatgctgactttgggggacaggatgaggccctacattctaagcccccagttggcagacaggcattgtccctgttccacatttatgtcgggacaggagatgaccttttcctccgtgtttttcctgtgtttgcacgttgaaatgaagctgacaacctggcaagacgctcagccgcttcaaaccctttttgtcaattaacttattttttaatacttgaaaagaagtaacttcgtttgtgtatctttactagaggaactgatcacctgcgcccgggtgcgggagccacagcggcatctggtgcgtcctacgcgacctggtccggggctgcccggtgctcctcacgtgcatctatttattagcctttctcttcgtatcactggcctggctggcatcagggagctgcccagaacccctgtgtgggtcctcctcacagctttctgtcccctcctccacccggtgcctgcctcaccctggcgctagaccatctggaccactcatgtgatgagggtgcatttccgttctgttttgggccaggccaacagcagagctgccactctcaccctcccagtgagaattccggctctgcagaactcgcccttgtctcagtttgggggccagggcatcaccttcctccgcacatatgttaaagaaggtttcaggatgggccctcatccacacaggccaagagggtgcaaggtgggaccctggaatcatgtggctggtgagaattccctcctcccagcctaagattcacccagacggaaacgcgagtgctgcagtggatgctgggatgcaggctggtgcctctcaagcagatcagcgactcccgcccttccttccgaaggcgacgggcacctgccttgtgccggatcttcatggggacataaagggcgagccccgaatcactagctcctatagccaaactgttcctttctcacggttccgcaccagcctggctgtgtacagctcatcaagccactgagctaatcggggtggggtgcttgtccatcaaagcagtcagcacatagcccagcgaggagccatccggaccagacccgcctgccaggggcgctccagccgcctgccgcctccgtgggctggggccagctgggagcagaggcctggcccctccaaggcgtcccgcagtggagcaggctgagtggctgtgctgaccttgggctttccatgggaaccacactgtgcttcaacttgaacattcatcccagctgcaaaggagcaaagaacctgtgtcatccttgtctgtccagaagctgccatctctctcccatgcacatccgggagataacgccgctagtggccgccacagcgctgattctccacctgttctcacgtgaggcaaaggtctccttttcttttctctttacttaaaaaaggggagaggagggtttctagattccatcttcaaaccccagtcgtcccataaaattggacgtgggaaaagaccttcactgcctgcgtggcctttcccagacctctcctcgaatgccacaaaaccggtccagccccggcagagccgccttcggcccttgtagctcctgctggccccacaacagggaaacagtttgcaaagtggcttggaaggagtgtggcctagggatctgctgtaagtggccagacgtagcaggagagcccagtgtcaccttctggtcctggtcagccttaacactgtggcatcctccacagcacacacggcagcctgcagtctggaaggtggacccgagcctttgcagagaggcgccgcagagccgcaggcctgcgccccagccttctgctcccgactgtgaggacacccagttctagtagagcactttttttaaagctcccattttgtaaccactagtttgcggttgacttgagtactctggtgacttcctgcgtcaagcgttctcaagctgtgagaatgtgcgcagctccaggcaggttttctctcggagagttaagtcttcccttgaaggcagggaagcaggatggatacacatatatcacacgcataaaacaccaggtgcgggagcagcccagactcaaggctgactaaactggaggctgaataccgtggaggtccacatgcagcttccctggagggcaggccggaggcgctcccgcccctgggcttgaggatgctgcaccccgtgggcttccaggcctgcccagatgatgccttcaggcctctgtccctggcggccatcctcaggccgattttgaccagcaatgatagactcttcttaaccctttcaaaataaatttttcagtgggacagaaaggagagttaaaaaacatttttttaaaggtggtaacatctgacccacaaagggaatgggtctgttttatgcaaaataaaagtttttcaaat

SEQ ID NO: 674 - protein, 1018 aa, Homosapiens
MEEEGEEEEEEPRLPPSDLGGVPWKEAEEEESSEAGNQRLQQVMHAADPLEIQADVHWTHIREREEEERMAPASESSASGAPLDENDLEEDVDSEPAEIEGEAAEDGDPGDTGAELDDDQHWSDSPSDADRELRLPCPAEGEAELELRVSEDEEKLPASPKHQERGPSQATSPIRSPQESALLFIPVHSPSTEGPQLPPVPAATQEKSPEERLFPEPLLPKEKPKADAPSDLKAVHSPIRSQPVTLPEARTPVSPGSPQPQPPVAASTPPPSPLPICSQPQPSTEATVPSPTQSPIRFQPAPAKTSTPLAPLPVQSQSDTKDRLGSPLAVDEALRRSDLVEEFWMKSAEIRRSLGLTPVDRSKGPEPSFPTPAFRPVSLKSYSVEKSPQDEGLHLLKPLSIPKRLGLPKPEGEPLSLPTPRSPSDRELRSAQEERRELSSSSGLGLHGSSSNMKTLGSQSFNTSDSAMLTPPSSPPPPPPPGEEPATLRRKLREAEPNASVVPPPLPATWMRPPREPAQPPREEVRKSFVESVEEIPFADDVEDTYDDKTEDSSLQEKFFTPPSCWPRPEKPRHPPLAKENGRLPALEGTLQPQKRGLPLVSAEAKELAEERMRAREKSVKSQALRDAMARQLSRMQQMELASGAPRPRKASSAPSQGKERRPDSPTRPTLRGSEEPTLKHEATSEEVLSPPSDSGGPDGSFTSSEGSSGKSKKRSSLFSPRRNKKEKKSKGEGRPPEKPSSNLLEEAAAKPKSLWKSVFSGYKKDKKKKADDKSCPSTPSSGATVDSGKHRVLPVVRAELQLRRQLSFSEDSDLSSDDVLEKSSQKSRREPRTYTEEELNAKLTRRVQKAARRQAKQEELKRLHRAQIIQRQLQQVEERQRRLEERGVAVEKALRGEAGMGKKDDPKLMQEWFKLVQEKNAMVRYESELMIFARELELEDRQSRLQQELRERMAVEDHLKTEEELSEEKQILNEMLEVVEQRDSLVALLEEQRLREREEDKDLEAAMLSKGFSLNWS

SEQ ID NO: 675 - DNA, 3075 bp, Homosapiens
acagaaggcgatgggccgagagctgaggaactacaactcctagagtactccgcgccgccgggacgccgcgcggctgcggggctgggcgagcgcaaagatgtccgcgcccgctgccgggaggcgaggccaactcgggatatcccggagcctctggggaggcggtcactccgacgtctgaggacctgggccttggacccggactcgttatgaagagcgattcttcgacctctgcagcccccctcagggggctcgggggacccctgcgcagcagcgagccggtgcgcgcggtcccggcccgggcgccggccgtggaccttctggaggaggcggccgacctcctggtggtgcacctggacttccgggcggcgctggagacctgcgagcgggcctggcagagtctggccaaccacgccgtggcagaggaacccgcgggcacctcattggaggtgaagtgctccctgtgtgttgtggggatccaggccctggcagaaatggatcggtggcaagaagtcctctcctgggtccttcagtattaccaggtccctgaaaagctaccccccaaagtcctggagctgtgcattcttttatacagcaaaatgcaagagcctggagctgtgctggatgtggtgggtgcctggctccaagacccagccaatcaaaaccttccagaatatggagccttggcagaatttcacgtgcagcgggtgctgctgcctctgggctgcttatcggaggctgaggagctagtggtgggctctgcagcctttggtgaggagcggcgactggatgtacttcaggccattcacacagcgaggcagcagcagaaacaggaacactcaggctctgaggaggcccagaagccaaacctggaaggctctgtctcccacaagttcctgtcactaccgatgttggttcgccagctttgggactctgcggtgagccacttcttttctctgcccttcaaaaagagtctcctggctgccttgatcctctgtctcctggtggtgagatttgatccagcttccccttcctccctgcacttcctctacaagctggcccagctcttccgctggatccggaaggctgcattttctcgcctctaccagctccgcatccgtgactgagggtccctgcgcaccacagcctctctgctcctcacgtccgtggccacagaagcagagcgacagagcgacacatccacaggcgcccctggggaaatgggaccagcctaatctcgcggagtgcactgtgtcttgctgcctgggtgccctctcctttgcaccctacttcggctggtcgcggtagatgatgtggaaacaaagcaggaccagcaggcacagcacctccagaacagtgccccggatgaccagaggccccttgaaaaggaggggtttggggacagggactgtgtccatgaaacattccatcttcttggtgaaggcaaggggttggttcttcaggtcaggatgttaatggagctggaagttcagaaaaagcctggtgaagtgacccttggcctttcacttcttgagaaacatacttctttgctgggcatggtgactcacgcctgtaatcccagcactttggaaggccatcgcgcccggccaacttttctttagaaaaatgagtaaagtaggtaaacttcacaggccccttagaattaaatccttagggcatggttcaagtctgtaggaagcaaatctatacttttttatatgggcttttaagtaaagcttagaaccctggggggagaaaagcagtcaggtgaggtttgagattccttctatagaatgatttcttaaaatgaaaatctgggcccacttaactaccctagataaaacgcttcaatggcttcccatggctcactggataacatctaaattcttcatggaattgaaggcccctatgtgctggttttggctaagatctcccctttgatgtgggtcccctgttgattatacgtgcggccttccagctgcccaccatcacagctacagctcgctccccttggcctctgtgccttggctcgcactgttcctactgaaggcctagcacctgctcttggcctggtgagcccctccaccttccaggcttactcaaagaattctttctgcccctccctgtgtcccgggacctgtttcatatcgcttctgtggtcgtgaccccatggtcttgtaattgtgaacttctttgctgccccttcgaagctggggagtgcttgttgcagatgcatccaagaggggtaattgcgtatcaacagtggatttgctggttgtttctacagggttctgaagcatgcaacatagaacagatacctttaaatttaggggcgctaaggaaagcaggaaccagtaatcctcttctgtggtgggatgggagggtgggggagaggggtggaatggagaggaaacaggctattgttggccagccctgggtggaggtgggtgcaagcaggacagatagtgcctgggggtgggggcggagggttcgcctctaggaaggggctagaagggatgaggaaatagttcatagcttcgtgcaggtgatccctattctgcgtgtatgtgtttgcacatgagtgtttgtagaccatagaccattaaaaaatacggaattcaaaagttacaaaaagggtattcttggaaaagaaagttgtttttttttagtcttgctgtgttgcccaggctggacctgaactcctgggcttgagcaagtcttcccctcagcctctggagtagctgggcctacagtgtgtgctgccacacccagctaatacagtctttctactcccgctctctattccccagtttcttgcccagaggcaacccttgccagtctgtttatccctccagatacagtctctgatagtaaacttttctttctcttacacaaatgatagtagtcacatacactacacacactgtgccacgtttaaaaagaaaaaaaacaattctcggctgggcgcggtggcgcatgcctgtaatcccagcactttgggaggccaaggtgggtgaatcacctgaagtcaggagttcgagatcagcatggccaacatggtgaagccccatctctact

SEQ ID NO: 676 - protein, 305 aa, Homosapiens
MKSDSSTSAAPLRGLGGPLRSSEPVRAVPARAPAVDLLEEAADLLVVHLDFRAALETCERAWQSLANHAVAEEPAGTSLEVKCSLCVVGIQALAEMDRWQEVLSWVLQYYQVPEKLPPKVLELCILLYSKMQEPGAVLDVVGAWLQDPANQNLPEYGALAEFHVQRVLLPLGCLSEAEELVVGSAAFGEERRLDVLQAIHTARQQQKQEHSGSEEAQKPNLEGSVSHKFLSLPMLVRQLWDSAVSHFFSLPFKKSLLAALILCLLVVRFDPASPSSLHFLYKLAQLFRWIRKAAFSRLYQLRIRD

SEQ ID NO: 677 - DNA, 2018 bp, Homosapiens
aggcggctgtatctggagcagtcggggcgggcaggcccagctgagaggtgcgcgggcgaggacagcggcagcgatgcgggaatgcatatcagtccacgtgggccaagcgggagttcagattggcaatgcctgctgggagctcttctgcctggaacacggcatccaggcagacggcacttttgatgctcaagctagcaagatcaacgatgatgactccttcaccacctttttcagcgagactggcaatgggaagcatgtgccccgggccgtcatgatagatctggagcctactgtagtggatgaggttcgggcaggaacctaccgccagctcttccatccagagcagctgatcacaggaaaggaggatgcagccaacaactatgcccggggccactacacggtgggcaaggagagcattgacctggtgctggaccgcatacggaagctgacagatgcttgctctggcctgcagggcttcctgattttccacagttttggtgggggcactggctccggcttcacttctctgctgatggaacgcctctccctggattatggcaagaaatccaagctggagtttgccatctacccagccccccaggtctctactgcagtggtggagccctacaactccatcctgaccacccacaccacactggaacattcagattgtgctttcatggtggacaacgaagccatctatgacatctgccgcaggaaccttgacattgagcgccctacctataccaacctcaaccgcctcatcagtcagattgtgtcctcaatcactgcttctctccgctttgacggggccctcaatgtggacctcactgagttccagaccaacctggtgccctacccccgcatccacttcccgctggtcacctacgcgcccatcatctctgccgagaaagcctatcacgaacagctctctgtggccgagataaccagctcctgctttgagcccaacagccagatggtgaagtgcgacccgagacatggcaagtacatggcctgctgcatgctctaccggggcgacgtggtgcccaaggatgtgaatgtcgctattgctgccatcaagaccaagaggaccatccagtttgtagactggtgtcccacaggcttcaaggtgggcatcaactaccagcccccgaccgtggtccccgggggagacctggccaaggtgcagcgggccgtctgcatgctcagcaacaccacggccattgcggaggcctgggcccgcctcgaccacaagttcgacctcatgtacgccaagcgggcctttgtgcattggtatgtgggagaggggatggaagaaggagaattttctgaggccagggaagacttagctgccctggagaaggattatgaagaagtggggactgattcgtttgaagaagaaaatgaaggggaggaattttaaatatataccttccccttggctgtgtctctttatttatgctgtgccattcaaagcacatgttcaagagaacagaacactctccccgccccagcctgattcctgccttacccaggaggagggtgcctggccccagtacccagggtggcacgactgggctaagtggacactgagcttcatcaggccctccctgggtaggagcagctttgtgtcactaaagaaagtgagggccactgtctccggcgggtgaggctgcagcccagtttcacatgcgaggaggcctaatcaggagtttcaattccagatcgggctgggtccagccccaaaacatggcctgctggctggggagtgggaacactcagagaaaggggagatctgggcctgggaagattccggggcaggggtgagcggacgttcacatgagtgggtctatagcccgctccgggcatcatctagacttagcatgcattcactcccccatcacatattccaatacacaccctgccctaggcactgagagctggagagttggtgataagcgagacgaacacatttcctgccctcatacacacataaataaagtgaatgagatcatgtc

SEQ ID NO: 678 - protein, 449 aa, Homosapiens
MRECISVHVGQAGVQIGNACWELFCLEHGIQADGTFDAQASKINDDDSFTTFFSETGNGKHVPRAVMIDLEPTVVDEVRAGTYRQLFHPEQLITGKEDAANNYARGHYTVGKESIDLVLDRIRKLTDACSGLQGFLIFHSFGGGTGSGFTSLLMERLSLDYGKKSKLEFAIYPAPQVSTAVVEPYNSILTTHTTLEHSDCAFMVDNEAIYDICRRNLDIERPTYTNLNRLISQIVSSITASLRFDGALNVDLTEFQTNLVPYPRIHFPLVTYAPIISAEKAYHEQLSVAEITSSCFEPNSQMVKCDPRHGKYMACCMLYRGDVVPKDVNVAIAAIKTKRTIQFVDWCPTGFKVGINYQPPTVVPGGDLAKVQRAVCMLSNTTAIAEAWARLDHKFDLMYAKRAFVHWYVGEGMEEGEFSEAREDLAALEKDYEEVGTDSFEEENEGEEF

SEQ ID NO: 679 - DNA, 1865 bp, Homosapiens
gcagtcaggcagtgactgccttcggctttttttctgctgactaagatctcctatagagagctacaacaatgcccaaaagaaaggctgcaggtcaaggtgatatgaggcaggagccaaagagaagatctgccaggttgtctgctatgcttgtgccagttacaccagaggtgaagcctaaaagaacatcaagttcaaggaaaatgaagacaaaaagtgatatgatggaagaaaacatagatacaagtgcccaagcagttgctgaaaccaagcaagaagcagttgttgaagaagactacaatgaaaatgctaaaaatggagaagccaaaattacagaggcaccagcttctgaaaaagaaattgtggaagtaaaagaagaaaatattgaagatgccacagaaaagggaggagaaaagaaagaagcagtggcagcagaagtaaaaaatgaagaagaagatcagaaagaagatgaagaagatcaaaacgaagagaaaggggaagctggaaaagaagacaaagatgaaaaaggggaagaagatggaaaagaggataaaaatggaaatgagaaaggagaagatgcaaaagagaaagaagatggaaaaaaaggtgaagacggaaaaggaaatggagaagatggaaaagagaaaggagaagatgaaaaagaggaagaagacagaaaagaaacaggagatggaaaagagaatgaagatggaaaagagaagggagataaaaaagaggggaaagatgtaaaagtcaaagaagatgaaaaagagagagaagatggaaaagaagatgaaggtggaaatgaggaagaagctggaaaagagaaagaagatttaaaagaagaggaagaaggaaaagaggaagatgagatcaaagaagatgatggaaaaaaagaggagccacagagtattgtttaaaactgccctatgtagtttcataatttggtaacatgtaccttcatgttgtaaagttaatagagataaatatttttatcaaaaattttataaacacagcctttctttagcattgatttaatttcagaacatcttcatattgattattagccataaagtttctaacatgaaacatttatctataaattttgtgattatagtagtggaatacatagaaaaaaatatgctttcaactttgtgagtgaatttcgtgttgtgtaagttatatgtcaaatctttgaattttaattttactcttttatacatgtgataatttcataaagtgagggatcccaaaaaaagagtttcatccaacattcttgttctgcaggttgcttttataaagaaggtgaactattttcatgtaatgttaagagttaaacttatctttcccaaatataactttattattagcttgggaaaaatgaaattgtattcccatttttaaaataaatacaaatgtttatttcagaagggcagttttgattatatgtgaatacacaaattttactggatttatcttaataaaaagactctgacgatgattgtgttttgttatatcttcaaaaatatagctagtgaaatattgtgcttaatttttttctattgtgttattcatgaaaatatttaatattcactgacataaaattaatataaagtaaaattcaccattttaattataataaaaataaagtatataattcaatggttgtcagtatattcacaatgttgtgtccactgtttaattccagagaatttttatcacccaaataagaaacaaagcaccaattagcagtctcttcccattttcgcccaacttatcccccacctccatcccttggcaaccactaatctgccttctatctctatggatttgcctattctgaacatttattataaatggaatcacat

SEQ ID NO: 680 - protein, 282 aa, Homosapiens
MPKRKAAGQGDMRQEPKRRSARLSAMLVPVTPEVKPKRTSSSRKMKTKSDMMEENIDTSAQAVAETKQEAVVEEDYNENAKNGEAKITEAPASEKEIVEVKEENIEDATEKGGEKKEAVAAEVKNEEEDQKEDEEDQNEEKGEAGKEDKDEKGEEDGKEDKNGNEKGEDAKEKEDGKKGEDGKGNGEDGKEKGEDEKEEEDRKETGDGKENEDGKEKGDKKEGKDVKVKEDEKEREDGKEDEGGNEEEAGKEKEDLKEEEEGKEEDEIKEDDGKKEEPQSIV

SEQ ID NO: 681 - DNA, 1763 bp, Homosapiens
tagctggattccagccattgctgcagctgctccacagcccttttcaggacccaaacaaccgcagccgctgttcccaggatggtgatccgtgtatatattgcatcttcctctggctctacagcgattaagaagaaacaacaagatgtgcttggtttcctagaagccaacaaaataggatttgaagaaaaagatattgcagccaatgaagagaatcggaagtggatgagagaaaatgtacctgaaaatagtcgaccagccacaggttaccccctgccacctcagattttcaatgaaagccagtatcgcggggactatgatgccttctttgaagccagagaaaataatgcagtgtatgccttcttaggcttgacagccccacctggttcaaaggaagcagaagtgcaagcaaagcagcaagcatgaaccttaagcactgtgctttaagcatcctgaaaaatgagtctccattgcttttataaaatagcagaattagctttgcttcaaaagaaataggcttaatgttgaaataatagattagttgggttttcacatgcaaacattcaaaatgaatacaaaattaaaatttgaacattatggtgattatggtgaggagaatgggatattaacataaaattatattaataagtagatatcgtagaaatagtgttgttacctgccaagccatcctgtatacaccaatgattttacaaagaaaacacccttccctccttctgccattactatggcaacttaagtgtatctgcagctctacattaaaaaggagaaagagaaataacctgtctctcattcctaagttgcctcattaattttcatgaacaagaatatgtacctttttgatgctatattactgcgattaaaaaagttcttgcaggtaatgtttatgtatagttaaacgttgtaatttcttatcgtaattataacattcccattctttgtagatgaaactctacatatgaaccacagattttctgagcttctaaatgtagcctttcattgcacatttcagtgatcagaatagatatccttttacacgcacaaaagcaatagattcattcagtggacaagttccttgtttaactacacagctatgatggaatcatatatccaagttccttgcctcagtgaaatatgcatatgtatatcatgaagtgggatgccaagtaagcttaaaatgcattctctagcaaagagattagacttttaaataactcttataaaacaggttggcgatcatttcccaagattggtttcccttgagtttttgttaaaacaaatcttagtagttttgcccgtttaaaacaactcacaatcgtaaatgctactattcctaagatatcttacctttttatttcagtttagccatgtattgtatgagtgtattagtctaagcagtgagaatcttttctatgcctctattccagcaaaaagtagaagtatcaaataaaaagggcaacttttaaaatattaagcctgaagacttctaaaaagacaagaaacatggcctaaataaccaacatagatttacatagtaagtttcacactaccttattaccaaaagcaaacacctcttactttaaactacattatcatgtatatctattgtatgctggtctttactttttgccaaaatcaacatataatgaagagatgcctttgtttgatgagattcaaacttgatgctatgctttaaaataaactcagtacttttagaaacataaaaaaaaaaaaaaaaaaaaaaaaaa

SEQ ID NO: 682 - protein, 114 aa, Homosapiens
MVIRVYIASSSGSTAIKKKQQDVLGFLEANKIGFEEKDIAANEENRKWMRENVPENSRPATGYPLPPQIFNESQYRGDYDAFFEARENNAVYAFLGLTAPPGSKEAEVQAKQQA

SEQ ID NO: 683 - DNA, 672 bp, Homosapiens
atgcgctgtgcacacgcccccgccccgcgcacccgctaccccacccgagcccccagcggcccgcgtcccccatcccggtcccaagcccagacacctccgagatccgtcccgcggctccggccgcgccaccgccaccctcaagacccccgcagcccaggcccggccccgcgccaccgacgccccccgcggcccgacccgcgcgccccgccagcccgggcctcgtaccgtaggtttcggacatggccgtctgcgacatcttgggagcggcgccgcctctcgccgggtcaccgtgcactcgcccgcggtccgccggcgcgtctcggtggggaaggacctggggcgggggaccggaggagggaggggcccgaccggtccccacggcaaccgccggtcctcccagcggctgcggcccagccggactccagctccgcgcaggcgccagggccctccaccctccgtccggccgcgaccgcgaggaggaagaggagatgggctacgcgaggcccggcccaccccgcgttcgcgcgtgcgcacggggaggccggggcggggcgcgtgaggacttcggcgcgcgccggaagcacgtgcgcgggctgggcgctctggcggtgtgcgctgaggtgggcagagcggcaggtgggggcgttgggggctgagtcccgatttccctga

SEQ ID NO: 684 - protein, 223 aa, Homosapiens
MRCAHAPAPRTRYPTRAPSGPRPPSRSQAQTPPRSVPRLRPRHRHPQDPRSPGPAPRHRRPPRPDPRAPPARASYRRFRTWPSATSWERRRLSPGHRALARGPPARLGGEGPGAGDRRREGPDRSPRQPPVLPAAAAQPDSSSAQAPGPSTLRPAATARRKRRWATRGPAHPAFARAHGEAGAGRVRTSARAGSTCAGWALWRCALRWAERQVGALGAESRFP

SEQ ID NO: 685 - DNA, 2747 bp, Homosapiens
ctggaaatctgtcccgatccaaattcttttgcaagccagatgattaaccagagggcacgaaaggttgagaacattcgacttccctgcaaaccttggtatagatcacttccttttctgttaggaaacgaaaggcaccaaagagcacaatgagtacaagaaagcgtcgaggtggagcaataaattctagacaagcccagaagcgaacacgggaagcaacctccacccctgagatttccttggaagcagaacccatagaactcgtggaaactgctggagatgaaattgttgacctcacttgtgaatctttagagcctgtggtggttgatctgactcacaatgactctgttgtgattgttgacaaaagaagaagaccaaggaggaatgctaggaggctgccccaggaccatgctgacagctgcatggtgagcagtgacgatgagttgttgtccagggacagagacgtgtatgtgactacccacacttccagaaacaccagggatgagggcgctataggcctcaggccctcgggtactgtcggttgtcctatctgcatggacagatattcagagatcgtgcagaatagacgtctcatcgtttccacagaatgtggccatgtcttctgtagccagtgcctccgtgattccctgaagaacgctaatacttgcccaacttgtaggaaaaagatcaaccacaaacagtaccactccattcatatatgaagtattcagagacgcccaggagagacggatggacaatcaggttctccagtggtatctgcctccattttcctgagctcaaaaagactgttttgaaacccacgtctgatatgtaaactgctcttttgtttccaaccccttccttttgttatctccagtttgatgctatggcgctggacccagggccctcccaggccatctctgttcctctggggtggtccagttctagagtgagagaaagggagtcaggcacactgggaatcgtggttccagtctggttgcagaacctgcacatttgccaagaaattttccgtttggaaagtttgccccagctttcccgggcacaccaccttttgtcccaagtgtctgccggtcgaccaatctgcctgccacacattgaccaagccagacccggttcacccagctcgaggatcccaggtgcaagagtggccccttgaggccctgaaaagaccaatcactggacttcttcccttgagagtcagaggtcacccgtgattctgcctgcaccttatcattgatctgcagtgatttctgcaaatcaagagaagctctgcagggcaatcccgtttcctaagaatgaaaaagtgcaataaaggccattcgttacctacttttcagcagcccaccagatgtagcactattagtgtccccctcagaggcttaatgttgcctgtggagcagtgcccatcccagcccatttctgcccaccagttgttctcaggaaccttacccatgctccagcgtccttcacctggcacaggacatgcaagataaataggacaggcacatgtttgggtgtcctctcttttctgataaaatccatccggtgtttgccacacgccctccagtcctcagttcccactgcctaacatctgccccccgtgtagatactgagaggtggtggcagtaattgtggccttatcagccgctcagttccagccttttgcccaggtcactgttgccccatgttcggagaacctggcccacctgacttggctttctcatccttcccaaccccgtgccgtttatttcagaagcccactgggcttggatgctttgggcctttgactgctccataggttatgactggtgaaacaggggcccagaggacaacctctccttcactccacaggtaggtgggagcctcaggttcgctcaggggcagcaaagtggcccaagctgcccctgacagcacagggcctggcggtggctaacgagagaggccttacagtgccggcatgcctcctcttccgctgccctccttcctcagagggcttcaagcaaaacaaacagccttttcgtgtgaaacatcttcagggtgggaaaggggccacttctggctttgttagcaataactgaccttcagtttacccttctgaaggagaagggactcagcacagaattcactttagacggggctgaaggagtgtccctcctctatgtgaaaagaaaattgttttattcttcattctgactttttaactgtttggctcacttccagttagtttgaatgaaaataataattttctacttggagttgaagagggcagaatcctcagctcccatcattgtgatgtgtagcgtgtctgccccctgactggacatcattgccattaactttcttctgggcatcacgggaatgtcacaatgcccagacttggagcaaggcaaccttggagtcagtccactaataaaatatggtaacacccattttaaaatttctttaagttttatccttgaagacaacttcagtggttaattataaaagttgtgtacttcgtcctaaattaaattgataaaaagatttaaaaatgtgttttgtttctactattcagaaactgcaaactagggaaaggttggtatgaaaaaatgtctttccttttttcaatgtacatagttcaactctttctttgttacatttaaactacatccatggatatcagtctgctttggactcctctgctagtgttaaagatggaaataaaaccattaatttgaaccaaaaaaaaa

SEQ ID NO: 686 - protein, 190 aa, Homosapiens [sequence omitted]

SEQ ID NO: 687 - DNA, 754 bp, Homosapiens
tgaagctttgtgtttcttgctagctagtcaaaggtgactaattcatgtgcccgtgtgacaggagctacaaatatgttccatgaggtcctgagttgaccagcttctttcaagacgtaggtcagggcagtcacatagaagtatcatggtgaccttggggatggtgacagtggctaaaagacgttgagagagacagtgcaagagaggaaagcatcttcaccctggaccctaatatggagacacctttgactagctagcaagaaagataaaacttaaaatctccctctcttctgtcgaatgtgggcggaacacagtgattctgaagctgcggagagtgggaagccatccccagggaaatgtaaacaccaagagcaggatagaaaaataatacatgccaaaagaaatttgaggaacaaattcagccctgagacaggtcacggaaacagccctccagtcttcctcaagaaatgtagactgaatcagcatttacccacccctggaaaaacgcaggagctgcgcattcctgggatctcagcagggcttttgggaagagcagaactgggctggagtcacggtttctgggctgactctagattttccccggcttttgccacctgtgatggctggagagtatctgaagatgacagccagtgtccttagcttgtgaagattggatgatggccggggccctcagaccccttggcccctccttaactgcaggtcttcaaaagcccaacacctgttcgtcatttctgtg

SEQ ID NO: 688 - protein, 120 aa, Homosapiens
MWAEHSDSEAAESGKPSPGKCKHQEQDRKIIHAKRNLRNKFSPETGHGNSPPVFLKKCRLNQHLPTPGKTQELRIPGISAGLLGRAELGWSHGFWADSRFSPAFATCDGWRVSEDDSQCP

SEQ ID NO: 689 - DNA, 754 bp, Homosapiens; identical to SEQ ID NO: 687

SEQ ID NO: 690 - protein, 120 aa, Homosapiens; identical to SEQ ID NO: 688

SEQ ID NO: 691 - DNA, 6656 bp, Homosapiens
atgtcggggttcaggctgggtgaccacgtgtggctggagcctccctccacccacaagaccggcgtggccatcgggggcatcatcaaagaggcaaagccaggcaaagtcttggttgaagatgacgagggcaaggaacactggatccgagcagaggactttggtgtcctcagtcccatgcaccccaactcagtccagggtgtggacgacatgatccgcctgggggacctgaacgaggcaggcatggtgcacaacctcctgatccgctaccagcagcacaagatctatacatacacaggctccatcctggtggccgtcaacccgttccaggtgctgccgctctacaccctggagcaggtacagctctactacagccgccatatgggcgagctgcccccgcatgtctttgccatcgccaacaactgctacttcagcatgaagaggaacaagagggaccagtgctgcatcatcagcggcgagtctggggctggcaagacggagaccaccaagctcatcctgcagttcctggccaccatcagtggccagcattcgtggattgagcagcaggtcctggaagccaaccccatcctggaggcctttggaaatgccaagacaatccgcaacgacaactcaagccgctttgggaagtacattgacatctactttaaccccagcggggtgatcgagggcgcgcgcatcgagcaatttctcctggagaagtcccgggtctgccggcaggctcccgaggagcggaactaccatatcttctactgcatgctcatgggggtgagtgctgaggacaagcagctgctgagcctgggcacgccctccgagtaccactacctgaccatggggaactgcacttcctgtgaggggctcaacgacgccaaggactacgcccacatccgctcggccatgaagatcctccagttctccgactccgagagctgggacgtcatcaagctgctggctgccattctccacctggggaatgtggggttcatggcttcggtcttcgagaacctggacgcctcagacgtgatggagacgcccgcctttcccaccgtgatgaagttactggaggtgcagcaccaggagctccgggactgtctgatcaagcacaccatcctcatccgaggggaatttgtcaccaggtccctgaacattgcccaggctgctgaccggagggacgcctttgtcaagggcatctatgggcacctcttcctgtggattgtcaagaagatcaatgccgccatcttcacaccaccagcccaggaccccaaaaatgtgcggagggccatcggcctcctggacatatttggctttgaaaatttcgagaacaatagcttcgagcagctctgcatcaacttcgccaacgagcacctgcagcagttctttgtgcagcacgtgttcaccatggagcaagaggagtaccgctcggagaacatctcctgggactatatccactacaccgacaatcggcccaccctggacctgctggccctcaagcccatgagcatcatctccctcctggacgaagaaagccgcttcccgcaggggacagatctcaccatgctgcaaaagctgaacagcgtccatgccaacaacaaggccttcctacagcccaagaacatccacgatgccagatttggcattgcccattttgccggcgaggtgtactaccaagcagaaggcttcctggagaagaaccgagacgtgctgagcacagatatcctcaccctggtttactcctccaaaaacaagtttctgagggagatattcaacttggagttagcagagaccaagctgggccatgggaccatccgccaggcaaaggcaggaaaccatctcttcaagtctgcagactcaaataaacggccctccaccttaggaagccagttcaaacagtctctggaccagctgatgaaaatcctgaccaactgccagccttacttcatccgctgcatcaaacctaatgagtacaagaagccgctgctgttcgaccgggagctgtgcctgcggcagctgcgatactcgggcatgatggagaccgtgcacatccgcaagtcgggcttccccatccgctacacgttcgaggagttctcgcagaggttcggcgtgttgctgcccaacgccatgcggatgcagctgcaaggcaagctccgccagatgaccctgggcatcactgacgtgtggctgcggacagacaaagactggaaagcggggaagacaaaaattttcctgagggatcatcaggacactctgctggaggtacagagaagccaggtgctagacagagcggcgctcagcatccagaaagtccttcggggctacagatacaggaaggagttcctgaggcagaggcgggcagctgtgaccctgcaggcctggtggagaggctactgcaacaggaggaatttcaagctgatcctcgtgggctttgagcgcctgcaggctattgcccggagccagccgctggcgaggcagtaccaggccatgcggcagaggacagtccagctgcaggccctgtgcaggggatacctggtgcgccagcaagtccaggccaagaggagggcagtggtggtcattcaggcccatgccaggggcatggctgcccggcgcaacttccagcaaaggaaggccaatgcgccgctggtcatcccggccgaggggcagaaaagccaaggcgctctccctgccaagaagcgcagatccatctacgacaccgtcactgacacggagatggtggagaaggtgttcggcttcctccctgccatgattgggggccaggagggccaggcctcgccgcactttgaggatctggaatcgaagacccagaagctgcttgaggttgacctggacacagtccccatggcggaggagcctgaggaggatgtggatggcctggccgagtacaccttccccaagtttgctgtgacttacttccagaaatcagccagccacacacacatccggcggcccctccgatacccgttgctttaccacgaagatgacactgactgcttggccgccctggtcatatggaacgtcatcctgaggttcatgggtgatctcccagagccagtgctgtatgccaggagcagccagcagggcagctcagtgatgcggcagatccatgacacgctgggcagggagcacggtgcccaggttccacagcacagtagatctgcacaggtggccagccagctgaacattggagaggaggcattggagcctgatggccttggtgcagaccggcccatgtccaacctggagaaggtgcacttcatcgtgggctacgccatcctgcggcccagcctcagggatgagatttactgccagatctgcaagcagctctcggagaacttcaaaacaagcagcctggcccggggctggatcctgctcagcctctgcctcggctgcttcccaccctcagagaggttcatgaagtatctactgaacttcatcggccaagggccggcgacctacggccccttctgtgccgagcgcctgagacgcacctatgccaatggggtgcgtgcggagccccccacctggctggagctgcaggctgtcaagtccaagaagcacatccccatccaagtcatcttggccactggagagagcctaaccgtccccgtggactcagcctccacatctcgggaaatgtgcatgcacatcgctcacaagcagggcctcagcgaccacctgggcttctccctccaggtcgccgtgtacgacaagttctggtccctgggcagcgggcgcgaccacatgatggatgccatcgcccggtgtgagcagatggcccaggagaggggcgagagccagcgccagtcaccctggcgcatctacttccggaaggaattcttcaccccctggcacgactcccgggaggaccctgtcagcaccgagcttatttaccgccaagtcctccgaggagtctggtctggcgagtacagcttcgagaaggaggaagagctggttgagctgctggcccggcactgctacgtgcagctcggcgcctcagcagagagcaaggctgtccaggagctgctgcccagctgcatcccccacaagctgtacaggaccaagcccccagacaggtgggcgagcctcgtcactgccgcctgcgccaaggccccatacactcagaagcaagtcacaccactggccgtgcgagagcaggtggtggacgccgcccgcctgcagtggccgctgctcttctcccggctcttcgaagtcatcacactctcaggcccccgcctgcccaagacgcagctgatcttggctgttaactggaaggggctttgcttcctggaccagcaggagaagatgctgctggaactctctttcccagaggtcatgggtctggccaccaacagggaggcccagggcgggcagaggctgctgctctccacgatgcatgaggagtacgagtttgtgtcacccagcagtgtggccatcgctgagctggtggccctgttcctggagggcctgaaggagaggtccattttcgccatggccctgcaggacaggaaggccacagatgacaccaccctcctggccttcaagaagggggacctgttggtcctcacaaagaagcaggggctgctggcctctgagaactggaccctcggccagaacgacaggacaggcaagacggggctggtgcccatggcctgcctctacaccatccccacggtcactaagccctcggcacagctgctgagcttgcttgccatgtcaccagagaagaggaagctggcggctcaggaggggcagttcacagagccacgtcctgaggagccacccaaggaaaagctgcacaccctggaggagttctcctatgagttcttcagggctccagagaaggacatggtgagcatggccgtgctgcccctggcccgtgcccgtggccacctgtgggcctattcctgcgagccgctgcgacagccgctgctcaagcgagtccacgccaacgtcgacctctgggacatcgcctgccagatctttgtcgccatcctccggtacatgggcgactacccttctcggcaggcctggcccaccctggagctcaccgaccagatcttcacactggccctgcagcacccggccctccaggacgaggtctactgccagatcctgaagcagctgacgcacaactccaacaggcacagcgaagagcggggctggcagctgctgtggctgtgcacgggcctcttcccgcccagcaaggggctgctgccccatgcccagaagtttatagacactcggagggggaagctgctggcccccgactgcagccgccgaatccagaaggtcctgaggacggggccccggaagcagcccccgcaccaggtggaggtggaggccgcagagcagaacgtctcccgcatctgccacaagatctacttccccaatgacaccagtgagatgctggaggtggttgccaacacacgggtgcgggatgtgtgtgacagcattgccaccaggctgcagctggcctcctgggagggctgcagcctcttcatcaagatttcagacaaggtcatcagccagaaggagggagacttcttctttgattccttgagggaggtgtctgactgggtgaagaagaacaagccccagaaagaaggggcccccgtgacgctcccctaccaggtgtacttcatgcggaaattgtggctcaacatatctccagggaaggatgtgaatgcagacaccatactccattaccaccaggagctgcccaagtacctgcgcggattccacaagtgttcgcgggaggatgccatccacctggcgggcctcatctacaaggcccagttcaacaacgaccggtcccagctggctagtgtccccaagatcctgagggaactggtgcctgagaacctcacacgcctgatgtcctcggaggagtggaaaaagagcatccttctagcctatgacaagcataaggacaagacagtggaggaggccaaggtggccttcctgaagtggatctgccggtggcccaccttcggatccgccttcttcgaggtgaagcaaacctcggagccttcctacccggacgtcatcctcatcgccatcaaccgacatggggttctgctcatccaccccaagaccaaggacctgctcaccacctatcccttcaccaagatctccagctggagcagcggcagcacctacttccacatggcgctggggagcctgggccgtggcagccgcctgctgtgcgagacctccctgggctataagatggatgacctgctgacctcatatgtgcagcagctcctgagtgccatgaacaagcagcggggctccaaggccccagccctggccagcacctagcagcggatgctggcgtgtctgctcaggcgcccttcccgacctctagcctggcggcaccttcccaggccctctcaacccagggcctgtccttggcgggcagccttccatgctgccccccatacaaagcccactcagccccgcaggcggccccctctgtcctgggcgctgcccagggaggccaaaagacgggcccagaatggggtcgggagtctcggacccccaggctattggtggatgactgactgacaggacacctcccaaccccaccccaccccaccagaatgttcaataaaaactcctggagc

SEQ ID NO: 692 - protein, 2116 aa, Homosapiens
MSGFRLGDHVWLEPPSTHKTGVAIGGIIKEAKPGKVLVEDDEGKEHWIRAEDFGVLSPMHPNSVQGVDDMIRLGDLNEAGMVHNLLIRYQQHKIYTYTGSILVAVNPFQVLPLYTLEQVQLYYSRHMGELPPHVFAIANNCYFSMKRNKRDQCCIISGESGAGKTETTKLILQFLATISGQHSWIEQQVLEANPILEAFGNAKTIRNDNSSRFGKYIDIYFNPSGVIEGARIEQFLLEKSRVCRQAPEERNYHIFYCMLMGVSAEDKQLLSLGTPSEYHYLTMGNCTSCEGLNDAKDYAHIRSAMKILQFSDSESWDVIKLLAAILHLGNVGFMASVFENLDASDVMETPAFPTVMKLLEVQHQELRDCLIKHTILIRGEFVTRSLNIAQAADRRDAFVKGIYGHLFLWIVKKINAAIFTPPAQDPKNVRRAIGLLDIFGFENFENNSFEQLCINFANEHLQQFFVQHVFTMEQEEYRSENISWDYIHYTDNRPTLDLLALKPMSIISLLDEESRFPQGTDLTMLQKLNSVHANNKAFLQPKNIHDARFGIAHFAGEVYYQAEGFLEKNRDVLSTDILTLVYSSKNKFLREIFNLELAETKLGHGTIRQAKAGNHLFKSADSNKRPSTLGSQFKQSLDQLMKILTNCQPYFIRCIKPNEYKKPLLFDRELCLRQLRYSGMMETVHIRKSGFPIRYTFEEFSQRFGVLLPNAMRMQLQGKLRQMTLGITDVWLRTDKDWKAGKTKIFLRDHQDTLLEVQRSQVLDRAALSIQKVLRGYRYRKEFLRQRRAAVTLQAWWRGYCNRRNFKLILVGFERLQAIARSQPLARQYQAMRQRTVQLQALCRGYLVRQQVQAKRRAVVVIQAHARGMAARRNFQQRKANAPLVIPAEGQKSQGALPAKKRRSIYDTVTDTEMVEKVFGFLPAMIGGQEGQASPHFEDLESKTQKLLEVDLDTVPMAEEPEEDVDGLAEYTFPKFAVTYFQKSASHTHIRRPLRYPLLYHEDDTDCLAALVIWNVILRFMGDLPEPVLYARSSQQGSSVMRQIHDTLGREHGAQVPQHSRSAQVASQLNIGEEALEPDGLGADRPMSNLEKVHFIVGYAILRPSLRDEIYCQICKQLSENFKTSSLARGWILLSLCLGCFPPSERFMKYLLNFIGQGPATYGPFCAERLRRTYANGVRAEPPTWLELQAVKSKKHIPIQVILATGESLTVPVDSASTSREMCMHIAHKQGLSDHLGFSLQVAVYDKFWSLGSGRDHMMDAIARCEQMAQERGESQRQSPWRIYFRKEFFTPWHDSREDPVSTELIYRQVLRGVWSGEYSFEKEEELVELLARHCYVQLGASAESKAVQELLPSCIPHKLYRTKPPDRWASLVTAACAKAPYTQKQVTPLAVREQVVDAARLQWPLLFSRLFEVITLSGPRLPKTQLILAVNWKGLCFLDQQEKMLLELSFPEVMGLATNREAQGGQRLLLSTMHEEYEFVSPSSVAIAELVALFLEGLKERSIFAMALQDRKATDDTTLLAFKKGDLLVLTKKQGLLASENWTLGQNDRTGKTGLVPMACLYTIPTVTKPSAQLLSLLAMSPEKRKLAAQEGQFTEPRPEEPPKEKLHTLEEFSYEFFRAPEKDMVSMAVLPLARARGHLWAYSCEPLRQPLLKRVHANVDLWDIACQIFVAILRYMGDYPSRQAWPTLELTDQIFTLALQHPALQDEVYCQILKQLTHNSNRHSEERGWQLLWLCTGLFPPSKGLLPHAQKFIDTRRGKLLAPDCSRRIQKVLRTGPRKQPPHQVEVEAAEQNVSRICHKIYFPNDTSEMLEVVANTRVRDVCDSIATRLQLASWEGCSLFIKISDKVISQKEGDFFFDSLREVSDWVKKNKPQKEGAPVTLPYQVYFMRKLWLNISPGKDVNADTILHYHQELPKYLRGFHKCSREDAIHLAGLIYKAQFNNDRSQLASVPKILRELVPENLTRLMSSEEWKKSILLAYDKHKDKTVEEAKVAFLKWICRWPTFGSAFFEVKQTSEPSYPDVILIAINRHGVLLIHPKTKDLLTTYPFTKISSWSSGSTYFHMALGSLGRGSRLLCETSLGYKMDDLLTSYVQQLLSAMNKQRGSKAPALAST

SEQ ID NO: 693 - DNA, 2671 bp, Homosapiens
aattatgtcttcatactatgggacacttccctcagatgcatcctctaaactggaaagagttaatttcccaaagcttaaactggttggcttaggattgggctcaggggaagagaacccagaaactcaacatgctgacaaaagggtgaagttttttaccagtcggatttttggcctccctctctctgtgaaaaacagtaaaaggtctcagtatttttaaattttcctcacccctcccagtgtttcattttgatacgttttctaataacccagtgtgtcttttcttgccttcaagccatcaaactccaaacggtcatgcaactggagcctccggcgatggtcccttttgccagggaccctgagataggcctccgagggagctctgactgccatttccccaaaacagcccccactatcagcaggaaacagctgcctgagcaattgtgtctggttcgtgaagtgacttcccattttcatccaattggccctgatctcacatcccaagcccatggatcataccacattgttctttctgcaaaacagttgagaattaccagtaattgggactgtttacattcaatgccatcatgacagaagcagctttattatattgcagaggaatgattaatacatgatggggattaaagattgcactgcagcaggccaaggcaagaggcaataaagattaataattttagatttccactgtagcaagaacgggaaaaaagcgtcatctgaaatgccaacttcaagcaattgcagtgatttcctggaaccctacgtgacaagtccagattcagtgggaaagactgtgaggatccgttagcaatgtttacgatgggcaagtcttgtgatggggttaccctccttgcattagaatttgcagtcttctattaggccattagtctttgagagcaaaaactgtatgtatctcatttttgtagccccagtgccaggcacacagtagctgctccaaaagcaaaggacatcgagtctgaatcaagctgcttgggtttaatggctgtctttgtcgcttactagctgagtggactcgtcatatttataacttaattgtggttcagtttccttctctacagaaaaggcatgagttcctcattcatagagttataataagggttaaataaagtcatgcatatccaaagcttagcatagtacctgagacatagcaaatacttgaggaatgcaggtataaattaacataggagtgaataacattgcaaggaaacagagaaaaggatcctaaacagtcctgctggtatattcatttatgattcaaaaatcctcaattgttaaaatttgggtcagaaccttattattccaggttgttggtaaatgtgaggacccttctgggtttggaagtagaacaataaattgagaggccaaagaagctgcaaataaaaattggcttctctgggaaaatgattttcacatttatacctacctgccttttgtcctcccatgcatttctccagatgtgataccaatgtgatacaattgttgtttattccttctctgacaatagcaaggtagagtgagccttccagtgagggcttaaaatatagctccagagacattcaccactacttcctgcctccatggttacacattccctttcacaaataaaacatggcctcatgcttcatgctgagcttgcattttacatacatcatttggatcttctctgcaaacctatgaagtgggcatggtaatcttcctttacaaatagagaaactgaggcctaagatggggagcaatttccctttaaaaaccttttattgtcaaggtccaaatggctgatgattcatgccatagacatcccaaaccagctggtaggcagagctcttggcattccaaatggaaacgtggaacagacacagatcacctggccacacagacctcagctctaaagacagatgactacttacctgttaaagttccctgtgcactattttttaaaatctagagatagataataaataggttaagttacattttaaattagcccaagagcatttgagaacagaatcatttttagaatcttaattctgagattcactgttgggcttaagtcactgcttctgtgatggttagttttgggtgtgaacttgactgtattaagggatacttacctgggaaagcattatttactctccatgcttcagtagatactgagcccttcccttttctgctgaaagggaaacccaggtggcttggcgtttgattagaataattgggctgccccaggtgtgtccgtgagggtgcctctgagggaaactgggactaaatgaagaagatctgccctccatatgggcaggcactattccaattggctgggggccccagatagaacaaaaaggcagataaagggcagtctccctggagaagagacctgcctgtagacagacatcagaactccaggttctccagcctttgggctccaggactcacaccaatgcgccaccgggctctctgaccttcagctttggactgagaattacaccatagaatgccctggttctgaggccttcaaactcagactgagccacgctacaggctttccggattgtccagcatacagaaggtctgttgtgggatttctcagcctccatgagtaagtaagaaaattgcctctaataaatcctttttcatatgt

SEQ ID NO: 694 - protein, 91 aa, Homosapiens
MQLEPPAMVPFARDPEIGLRGSSDCHFPKTAPTISRKQLPEQLCLVREVTSHFHPIGPDLTSQAHGSYHIVLSAKQLRITSNWDCLHSMPS

SEQ ID NO: 695 - DNA, 2671 bp, Homosapiens
aattatgtcttcatactatgggacacttccctcagatgcatcctctaaactggaaagagttaatttcccaaagcttaaactggttggcttaggattgggctcaggggaagagaacccagaaactcaacatgctgacaaaagggtgaagttttttaccagtcggatttttggcctccctctctctgtgaaaaacagtaaaaggtctcagtatttttaaattttcctcacccctcccagtgtttcattttgatacgttttctaataacccagtgtgtcttttcttgccttcaagccatcaaactccaaacggtcatgcaactggagcctccggcgatggtcccttttgccagggaccctgagataggcctccgagggagctctgactgccatttccccaaaacagcccccactatcagcaggaaacagctgcctgagcaattgtgtctggttcgtgaagtgacttcccattttcatccaattggccctgatctcacatcccaagcccatggatcataccacattgttctttctgcaaaacagttgagaattaccagtaattgggactgtttacattcaatgccatcatgacagaagcagctttattatattgcagaagaatgattaatacatgatggggattaaagattgcactgcagcaggccaaggcaagaggcaataaagattaataattttagatttccactgtagcaagaacgggaaaaaagcgtcatctgaaatgccaacttcaagcaattgcagtgatttcctggaaccctacgtgacaagtccagattcagtgggaaagactgtgaggatccgttagcaatgtttatgatgggcaagtcttgtgatggggttaccctccttgcattagaatttgcagtcttctattaggccattagtctttgagagcaaaaactgtatgtatctcatttttgtagccccagtgccaggcacacagtagctgctccaaaagcaaaggacatcgagtctgaatcaagctgcttgggtttaatggctgtctttgtcgcttactagctgagtggactcgtcatatttataacttaattgtggttcagtttccttctctacagaaaaggcatgagttcctcattcatagagttataataagggttaaataaagtcatgcatatccaaagcttagcatagtacctgagacatagcaaatacttgaggaatgcaggtataaattaacataggagtgaataacattgcaaggaaacagagaaaaggatcctaaacagtcctgctggtatattcatttatgattcaaaaatcctcaattgttaaaatttgggtcagaaccttattattccaggttgttggtaaatgtgaggacccttctgggtttggaagtagaacaataaattgagaggccaaagaagctgcaaataaaaattggcttctctgggaaaatgattttcacatttatacctacctgccttttgtcctcccatgcatttctccagatgtgataccaatgtgatacaattgttgtttattccttctctgacaatagcaaggtagagtgagccttccagtgagggcttaaaatatagctccagagacattcaccactacttcctgcctccatggttacacattccctttcacaaataaaacatggcctcatgcttcatgctgagcttgcattttacatacatcatttggatcttctctgcaaacctatgaagtgggcatggtaatcttcctttacaaatagagaaactgaggcctaagatggggagcaatttccctttaaaaaccttttattgtcaaggtccaaatggctgatgattcatgccatagacatcccaaaccagctggtaggcagagctcttggcattccaaatggaaacgtggaacagacacagatcacctggccacacagacctcagctctaaagacagatgactacttacctgttaaagttccctgtgcactattttttaaaatctagagatagataataaataggttaagttacattttaaattagcccaagagcatttgagaacagaatcatttttagaatcttaattctgagattcactgttgggcttaagtcactgcttctgtgatggttagttttgggtgtgaacttgactgtattaagggatacttacctgggaaagcattatttactctccatgcttcagtagatactgagcccttcccttttctgctgaaagggaaacccaggtggcttggcgtttgattagaataattgggctgccccaggtgtgtccgtgagggtgcctctgagggaaactgggactaaatgaagaagatctgccctccatatgggcaggcactattccaattggctgggggccccagatagaacaaaaaggcagataaagggcagtctccctggagaagagacctgcctgtagacagacatcagaactccaggttctccagcctttgggctccaggactcacaccaatgcgccaccgggctctctgaccttcagctttggactgagaattacaccatagaatgccctggttctgaggccttcaaactcagactgagccacgctacaggctttccggattgtccagcatacagaaggtctgttgtgggatttctcagcctccatgagtaagtaagaaaattgcctctaataaatcctttttcatatgt

SEQ ID NO: 696 - protein, 91 aa, Homosapiens; identical to SEQ ID NO: 694

SEQ ID NO: 697 - DNA, 3962 bp, Homosapiens
agctcggtcgcttgtgcgttccgctccggccgccctttgcgcttggatccacttccccatctgtaacgaggtgttgagacgaggcggagttgacctggaaacctctccttggccactgtcctttctaaggaactcatttccagagtccaccagcacagaactggtgggggagcctactaggagcagagaaaatggccatcttcaggcagctgtccctaggcgcgaaggccaccctggctgctgtcactgtcttcgtgtccatgatcgcctcccgctcgtatctggcagagagccttgagctcagggcctggcgttggctgcttcgcttgcagcttgccctgtttgtcaactcgctcttgctcattggctccctctacatttggcgcagcacagtgagcaacctctgccactccccagctgcagagtcaacctgttttcagctttggaaggtggtggttctggcatttctggccctggcccattccagtttctttaccatgttctttttagtggccgaagagccctatctcttttccttggcggcctactcctgcctgggtgcttacatcatcatgctcttcttcctcttcatcctcagcggcatggagcaggcctaccagctcttggcctggcgcagtggtagggtcgtgggcagccttgagaagacaaggaagctcgtgctcaggcctgccctggcagtgggagtgactgctgtgctcagcgtggccgggattctgaatgccgcgcagcccccggctgtgaaaactgtggaggtgcccatccatcagctgcctgcctcaatgaacaacctcaaggtcgtgctcctctcagacattcacttgggccccacagtgggcaggaccaagatggaaatgtttgtgaggatggtgaatgtgctggaaccagacatcacggtgattgtgggtgacctctccgactcagaagcctcggtcctgcggacggctgtcgctcctctgggccagcttcgttcacatctcggtgcctacttcgtcacaggcaatcatgagtactacacgtcagatgtcagcaactggtttgcacttctggaatccctgcatgtccagcctcttcataatgagaacgtgaagatttccgccacacgggcccaacgtggtggtggtggcagtggcagtgggagtgaggatgaggactggatctgcttggctggggtggacgatattgaagcagacatcctgcactactctggccatggcatggatcttgacaaggccctggagggctgcagcccagaccacacaatcatcttgctagctcaccagcccctggctgccaagagagctctccaggctcggccagatattaacctgatcctttctgggcacacacatgctgggcagatcttccccttgaacgtagcagcctatctcctgaatcccttctttgctggtctctaccaggtggcccaggctacattcgtgtatgtcagcccaggcacagcctactacgggatacccatgaggctgggtagcagggccgagatcacagagctcatcctgcagcggtctccctgaactggccctgccctgtgcacctctgccctgcccttgtcctcgaccctccatcctgcttcagagtggtttgcctgcttttcccctccagccttgcccactcatccttgcctacacacccttggtcacaagcctgactcaaacagtgacttatggtgggcctgcctggcatgttcaggctggtttaactatttccttggccagttgctttttttgatgcacttgtgagatcactaaggtcacatatattagcactcccctctattttccagatgatgtggaatggggaccttctcctgcagagctcccagggatgaacctcccctcggggttgctagaaaggcatacctctagaaggtggggcggggaggagcaggagcatttttctcctggtgttttaaaattgtctttaggacttaagtggtttccagaatcattgatccagagcctttctggggaaggggtagtgttgccaggtaatttgggagaacaggcaagatggaagggccctctggctgctagagaagaatattttcttttcctctgattctatcaggatcacctctattgagggcatcagcaaaatctactggaatgcaaagctcctcctgttccaggccttgagggatgctatttaactgtctgtgctcctgggcctttgggggcaaggtcaggggagaagaacggtgggcgccatggtcggtgatggtgagaacatggctgcttaggaattcagagggctttgcctcccttgtctcattttatacaacccttcggggagctcactggggacaggctgcttttccctatttggagataaggaaaccaaggcaaagagagatagggcacaggcagtatgacaagatatgtaggagatttggggctagaaaccaggtcttgtacctcccagtaaaagcggtgcttttgcccttttgccagaagcaatagatcctttgatcctgagatggagataagcacccgtgttagaaaaggcctcactgagaagacagggctgggctggtttcctgctgggtgatttaggcttgtgatggaaagtcttcctccaatggggagtgaagacactcgctctgactggagaggctaaccctgctgctcactcatagggcagcgttgggtgggtgactttccctcactcagccttggtttccatcaaccctaaaatggggataattatcgtatctacctcaagattgttttgtcaggagggatccatcaagccttgtgcatgagttccacatggcacagcgtgcacagtaaacactcaatgttaatttttcaacgttccagtggagcttgctaaggaactctgttgggcacaggtgcccagaggattcatggagcagccagtcctggggaatgtgagtgggtagcgagctgcctgctgctggggcaggtgatgtgtcaaagcagcaactgctaggggtttgccttcctcccctcatgtgcattctggcaggcaaagggggtttcttcctttcctccttgtcctcctggtgtatagtggggttctgggggatctggagaccaccctttttgttcccaggcagccacggtattgacagtgggccataccatgcagtttaaaatgtatctttgagttgaaattttggtggtttccttattcttttttctctcttcactgtccttccaaactcacttttcttgtgtcccgaccgcattttgtgaatcatccttactccctttaagttctcgctttggatttcaccaggtgggctagatggtgccatttcacttccactgtttgatgcggctggtaatgtttgactcacctgttacgtgttatttcactggtttcttgattttacatctttctcatcagtgacctgggcttgatgaaattagctttcattaagtcctattttttttttaattttgcatccttacctcttttctttctcttgaatgccatcattgtgtggtcttatgtacccttcatccactctgaagtccttgcttgactgattgctttctattagcagaaagaaaacaggtccatcctatgtatctgagaaacaacatcaacaccctctcgtatgtggtttgtattccctgacgcggcggacatttttgcagcagaaatttctccatcactgtccagattctggccctggtgggcaggtctccatgacacctttagtccctctgttcaacattcttaaaccatggacctttttgtttgtttgtggccgggggaggtggtgagaaacgttacttgaagcttgatcattctttcaatttcatttgtttctttatttttaatctgttagatgcaaattgaaatgcaatgctttttgaaaatcagcaatagtgtctgtagtatatgatgctgtcacaaaatctcaataaattgatcctgctgccattccttcc

SEQ ID NO: 698 - protein, 453 aa, Homosapiens
MAIFRQLSLGAKATLAAVTVFVSMIASRSYLAESLELRAWRWLLRLQLALFVNSLLLIGSLYIWRSTVSNLCHSPAAESTCFQLWKVVVLAFLALAHSSFFTMFFLVAEEPYLFSLAAYSCLGAYIIMLFFLFILSGMEQAYQLLAWRSGRVVGSLEKTRKLVLRPALAVGVTAVLSVAGILNAAQPPAVKTVEVPIHQLPASMNNLKVVLLSDIHLGPTVGRTKMEMFVRMVNVLEPDITVIVGDLSDSEASVLRTAVAPLGQLRSHLGAYFVTGNHEYYTSDVSNWFALLESLHVQPLHNENVKISATRAQRGGGGSGSGSEDEDWICLAGVDDIEADILHYSGHGMDLDKALEGCSPDHTIILLAHQPLAAKRALQARPDINLILSGHTHAGQIFPLNVAAYLLNPFFAGLYQVAQATFVYVSPGTAYYGIPMRLGSRAEITELILQRSP

SEQ ID NO: 699 - DNA, 315 bp, Homosapiens
atgacactgcactaccctatagctgtgggcctcaacaagggccacaaggtgaccaagaatgtgagcaagcccaggcacagccactgtgggcgcctgaccaaactcactaaatttgtgtgggacatgatcccagaggtgtgtggcttcacccctaacgagtggcgtggcatggagttactgaaggtctccaaggtcaaacaggccctcaaattcatcaagaaaagggtagggacaaacatctgcaccaagagaaggcaggaggagctgagcaacgtcctggctgccatgaggaaagcagctgccaagaaggactga

SEQ ID NO: 700 - protein, 104 aa, Homosapiens [sequence omitted]

SEQ ID NO: 701 - DNA, 222 bp, Homosapiens
atggaagctgcaaaccttcgcgtgagtgttacagcttttaaggcggcgcatctggagttgttcctttctccgggtaggttcgtggtttcgctggcttcaagagtgaagctgcagactttcgcggtgagcattacagctcacaaacgcagtgtggacccaaagaatgagcagcagcaaaattcagcacaaagagtaaaacagaacaaagcttccacagcctaa

SEQ ID NO: 702 - protein, 73 aa, Homosapiens [sequence omitted]

SEQ ID NO: 703 - DNA, 1046 bp, Homosapiens
tgaaacggcagaatcagaagaggttccacaaccagaaaatcttggctggaatttcaccatcaggaataaaacagaaaaactaaaagagtgccccagatagcctttcttaggggcctgtgtcaggtcgcaggaatcttgttggtgatccatccagatgttgtgtgttctggaagtggacatcgcggctctgtgtttttgaagtcagatctcattgctgtggtttctatgcctgaccccccgaagttcttgctcctgttgccacagggagccgggagagcacagagcgctgctcccggtgccctgcagccacacaaacatgctcctgctcctggcggaggcagagctgctgggaaagacatttcggaagtttcctgtggctgcaacaaattgttcaaatctgcactggagcaccgctgtgacctgtctttctccatcttagggcaaacagctcctgaaactggaaactccccagcacctcctcaccctacccctcaggctctccttgtgggggtggggcagggggagttgtctggaatgcctggcctctctgtccaagcatggcagccttgccccatgggtggtgcagactcagtttcccatgcaccttgccccagggaggaggtaggggttccttccatagagatggtgaagaataagggaggtagtgatcgtctctgggatccagttagatctgcgtttgcaggcagaaagaggctggggcacatggagagagtgatcaactggaagattctagggtcctcaattttgaaaggtgacatgataccctggaaagggcatgaacttagttgtcagttcgtccttgccttttccaatcaatgctgtgtggccacggcaaattaatgaacatctctgagtttcggtctcctgtctaaaatgaggtgataatagcttcttgaaggttgtaaggccccaaacatgctgcctggcacatagatggctaatcaatattttcctacccttcccttccttcccttctctggagttgctacctgtcttctcctggggccttgcaaataaacttctga

SEQ ID NO: 704 - protein, 211 aa, Homosapiens
MPDPPKFLLLLPQGAGRAQSAAPGALQPHKHAPAPGGGRAAGKDISEVSCGCNKLFKSALEHRCDLSFSILGQTAPETGNSPAPPHPTPQALLVGVGQGELSGMPGLSVQAWQPCPMGGADSVSHAPCPREEVGVPSIEMVKNKGGSDRLWDPVRSAFAGRKRLGHMERVINWKILGSSILKGDMIPWKGHELSCQFVLAFSNQCCVATAN

SEQ ID NO: 705 - DNA, 1245 bp, Homosapiens
atggggaaagtgggccgcgacccgggtactcccagtcatggagccaggacacgagaggagtgtggacgggagcgactgtgcgtgtctccctcccaaactggggacaccccgaggaccagcgcgtacctgtgcgtgggaggccccgcgtggagccccctcagcgagtcccgacctgctggctcctctggctgcccctggataaagctaactcggctcgcgcgagcgagcgcggagcccccacccctcgccagggcagcgccggccgcgctcgcctactattttgagaacaaagaaaggcaaaatatagaacccggcagagagggtgcgggggacgccaagaccctcttgcctcgctcgcacgcacacccacagacacacgcgcgcgtgcacaccacgcctaggtctgtctaccctcgggcggactctcgggaacctgctgggggagggggtgcccagatcccccgcgctcaaggacaggtccgagtcggggtttcctacccagctgagggggacagacaaggtccctcctcccaccctctacctagcacggaggcggacacggcccctccccacccacacctgcgggcccgactgggaggagctgctctcccagacggacggcggagagcccctgccctttctccctcggccgctcgggctcccgaaagtgggggaagccctgcaggggtccagccggccgcccgccgtcccccacaagctcctcggctggggtgggccaagcccgcctgccgcgcccccgcacctcctccagggaggaggactgggggaccagttgctctcgccggctccacaatccaagacatgcaccaaggctgctttgctgggctccaccgctgctgcccttccctcacctgcagctcctgtcccactgagctgcagccaaaatctgcctgtttggccctctctcatggcagggaccacatggcactcacctctgttcccccagctgcttctggcacagtcctgggcacaactgacattaatgttgtgtcagcaaagattgaaagtcccttttttgggaacctactgcctcagtccattgctcccatctacctctccatgtcgaagtccatgcagccgccaaaacccaggtctaatgctgattcctccgtgcaggcctctctgatccccagagctatgagctcacctaccgttagtccctggatcatggggaatggctctcaaggctttgatcacattgcagtgtcaatgtgggatgattag

SEQ ID NO: 706 - protein, 414 aa, Homosapiens
MGKVGRDPGTPSHGARTREECGRERLCVSPSQTGDTPRTSAYLCVGGPAWSPLSESRPAGSSGCPWIKLTRLARASAEPPPLARAAPAALAYYFENKERQNIEPGREGAGDAKTLLPRSHAHPQTHARVHTTPRSVYPRADSREPAGGGGAQIPRAQGQVRVGVSYPAEGDRQGPSSHPLPSTEADTAPPHPHLRARLGGAALPDGRRRAPALSPSAARAPESGGSPAGVQPAARRPPQAPRLGWAKPACRAPAPPPGRRTGGPVALAGSTIQDMHQGCFAGLHRCCPSLTCSSCPTELQPKSACLALSHGRDHMALTSVPPAASGTVLGTTDINVVSAKIESPFFGNLLPQSIAPIYLSMSKSMQPPKPRSNADSSVQASLIPRAMSSPTVSPWIMGNGSQGFDHIAVSMWDD

SEQ ID NO: 707 - DNA, 1245 bp, Homosapiens; identical to SEQ ID NO: 705

SEQ ID NO: 708 - protein, 414 aa, Homosapiens; identical to SEQ ID NO: 706

SEQ ID NO: 709 - DNA, 3689 bp, Homosapiens
tcttaacatccaagacaaggccaccagtcaaaactatcaagttttagtagtattttcctgcttgattatataatagcctggcttagagatacaacctttaaataaggaatcttaagatgatgtgcagctgttctttgccttatttgtttgtttgttggttagtttgtagtttctaagaatctgctctgttcagctgtacagttccttcttctggagttaacctgtggcaaggattatgtttcacctgtcacaaaaatgagatctgtgccttcctctattataaagttagggcatgtgattcattcttcgaaatacttcaaaatgtactttggtatgtttttgtcttgaaaagaggttttctagctagaaattcggggcccagaaggtcaaggctccagagatccccttctcatcatccttcagttgtctgaggagacagaggatcacatgtgtcacagtgagtgctgattccccagaatctgcagtcttaagctcccctgctgacgcacacagccagttctctgcttcatattcatgtgacccactgtgaagtgacaggcagctgccaattctgtcatataagaagcagctctgcccatgcaactttgaaagttcctgcacttctccatagactgctccttcatggaaataaacacatcatcacactgtgggtgcctaagctaagtttgtttgcagtttgatgatgcccagctccttttcaactcagccttaattggcactttaagggccaggatgaggtttctctcaggccaagtcgagatttccagatttccttttgtccaaggctgaccagtttagaagttattcacatccttgttttagttctttccttcttgtcctggtacctcttcctttccaggattatttgcagagtctgtgatggcttacttggtgaccagacatggggtgagctactggtatagtctgattactttggcatctattctgaactggtcattggctgtacatgagtttttgtgctggtaaaggaatatactgggaagattggaaggcacagactgggaactaattctgagaagagaactgctgagttactgaaagaccttttggaccacccctaaatggagcatcttgatagatggcaaatccagtgtttcttaaacttgtccatgctgcccagagcccactgccttttatcagatgtgagacttcactgccacagtgtcatcccacagtttccttccctggacatttgataaagggaaaatcatttcttgtcctttaaggcagggactattattttttcacttttccacataccccacaacacctaacattgatttactcgtagtaggagtttcatactgttgaactctctaaaggccatttgttccagggcctagctgggcttgtgaaggacaacagagtcatttcctaaggaccccaaaagacagcatgaaggaaaaaataataataaactgctgttcacagtgccttgagtgtaccaccgtactttctgctatgccttgtccattccaatctggacagtctctgtgcccctcctttccactcaagtgttatccagcactcaagttctggctcaaggcccaacatctccgtggggacctcagccatcccagggcattgtgaccccttcctctaagtccccggcacactcgctgattggtaccctctcattcgacaaagcatatgccattgtggcttacttgtcatttctttaggtcttgccttcccaagtagatcatgagccactataagaactagctcccatagtcccagcccctgggcctggtacatggcaatgcttagtgattggtgattgaggataatggtggtaaaggatgtaccagacagtcatctcctgaagagatgccgaacaacctgtccttgttttatgtattttctctttctttcctgtccagttttattcctctcatagtaactgctaaaaaaatatcagttcctgtcactcttccaccccttttctccctctcccctgcattgtggtctgggccttggtccactagcaactccccttaggtgttgcttaatctgcctcatggccaaagccaatcccattcctgtcccccgctacccaagggactcccagtctgtatgcacaaggcgggatgtgaagtctggatgtgcaagaaacccagctgtaagaaacagcttccctcggcttggcatggtggctcatgcctatattcccagcactttgagaggtcaaagtgggagaatcacttgagcccaggagttcaggactagcctgggcaacatagcaagatcccacctctacaaaaaaagaaaaaattcagagtctcaaatgtcccttcatctccttactctcgacctgtctccctagttctctgccgccttttcctctcccctggatctgacactcaattgtctgcatgcacttttcaactgaaagagactccaatgccatccttctgatgaaatttttgctttggatactactgcagaaaaaatgctatcttgtattctggtccatggtggggaagaccctgtcgtagaacctggcaactcaagtggagggaggggccagaacattgttcttatgctatttacagtgagacaacaggattgatgcagaactttctttttttttttttttttttgagacagagtttcattcttgttgcccagggctggagtgcagtggcatgatctcagctcactgcaacctccaccccccaggttcaagcagttcttcctcagcctccggagtagctgggattacaggcgtgcgccaccacgccccactaatttttgtatttttggtagagacggggtttcaccagtgttggccaggctggtctcgaactcctgacctcaggtgatccacccacctcggcctcccaaagtgctgggattacaggcatgaaccaccgtgcccggccgtgatgcgcaactttctaataacatacttttgaaagtgcccagacatacatccctcctctggtaccacagtggccatcagttgccagagaacatgaaattatccagccctcagctctgcagcaggattctgaggagtaaagcaggcctgtaaagtactctaaagtacttcagagaggtaatgccacaaagcgaagaacacctcttggaggcagagcccctcagccctatccaggccagcagtgtccacttgaaatctgaaagcagcctccctcaccaaaccagcaagatggaaaacctccctgggttggcaagtggccctgggaagtacatgccccatctctgtcaggatagcagtggagaggtttcgtgccagtgccagctccacccacccagatggtactcaagactccaagcctgtcaatggggtggaaactttctggcattttctgtcagaagggtgagttagcactgaaccatctcatgtgtcttttcactgagtaacagcccatatccattccatgaaatgagtgactgctttgttgaatcagatagtaacaaacatttatttgtagtctggttgtgtcatatcatggttgaattgcaaacaggttggatagaagagtcagcaaaaatcaacaaaagcattctgtaaaaaacttttctagaattacaataaatggcattgtatattttatttataaattatgtgctgcacatcatttttatcaatgaaatttataataaatttctgtacatatata

SEQ ID NO: 710 - DNA, 399 bp, Homosapiens
atggctgacctcagacccctcatgaagcccaagattgtcaaaaagaggaccaagaagttcatctggcaccagtcagatcgatgtgtcaaaattaagtgtaactggtggaaacccagcagtattggcaacagggtttggagaacattcaagggccagatattgatgcccaacactggttatgggaacaaaaaaacaaagcacatgccgcccagtggcttctggaagttcctggtccacaatgtcaaggagctggaagtgccactgacgtgcagcaaatctccctgtgcggagatcgctcacagtgtttcctccaagaaccacaaagccatatggaaagggcagcccagctgccctcagagtcaccaaccccaatgccaggctgcgcagcaaagaaaatga

SEQ ID NO: 711 - protein, 132 aa, Homosapiens
MADLRPLMKPKIVKKRTKKFIWHQSDRCVKIKCNWWKPSSIGNRVWRTFKGQILMPNTGYGNKKTKHMPPSGFWKFLVHNVKELEVPLTCSKSPCAEIAHSVSSKNHKAIWKGQPSCPQSHQPQCQAAQQRK

SEQ ID NO: 712 - DNA, 306 bp, Homosapiens
atgcggcggcgtggtgaaatagatgcggcgaccgagggggatgtggagctggagttagagactgagacccgagaaggagatcagagttccaatctggagacggccatgtctgtgactggagacagaaggtcccgggagcagaaagccaaacaggaagggaagaaagaactggcaataggcagtatcaagaaggaagatctggagctggtaatgaccgagatggagatatctcgagcagcagcggaaggcggcttgcgggaacacatgggcaacgtggtagaggcgcttgttgctctaaccaactga

SEQ ID NO: 713 - protein, 101 aa, Homosapiens
MRRRGEIDAATEGDVELELETETREGDQSSNLETAMSVTGDRRSREQKAKQEGKKELAIGSIKKEDLELVMTEMEISRAAAEGGLREHMGNVVEALVALTN

SEQ ID NO: 714 - DNA, 306 bp, Homosapiens; identical to SEQ ID NO: 712

SEQ ID NO: 715 - protein, 101 aa, Homosapiens; identical to SEQ ID NO: 713

SEQ ID NO: 716 - DNA, 1207 bp, Homosapiens
ttcagctgctttcacaactctggctggattttacctatgtggagagtgtcacccatgttagggagcctctggccaggaggaagctgtggcaagatgtgctgcgtctcctgcttggcattgccatcttgctgccacagaacctccactcaatacaccagaaaacagagagtatcttgcagaaattatgttcgaatcatttaacgttccaggactctacattgcagttcaggcagtgctggccttggcggcatcttggacatctcgacaagtgggtgaacgtacattaacggggatagtcattgacagcggagatggagtcacccatgttatcccagtggcagaaggttatgtaattggaagctgcatcaaacacatcccgattgcaggtagagatattacgtatttcattcaacagctgctaagggagagggaggtgggaatccctcctgagcagtcactggagaccgcaaaagccattaaggagaaatactgttacatttgccccgatatagtcaaggaatttgccaagtatgatgtggatccccagaagtggatcaaacagtacacgggtatcaatgcgatcaaccagaagaagtttgttatagacgttggttacgaaagattcctgggacctgaaatattctttcacccggagtttgccaacccagactctatggagtccatctcagatgttgttgatgaagtaatacagaactgccccatcgatgtgcggcgtccgctgtataagatggaacaaattccactgagctatcctcaaggtcacggattccatcctctgtcacctccatttcattgagatgatatattgagcccatgcgtagccttttatttgagatttccaaggccagcaatgttctcttcctctcccttttctttgtataaaaattcattctcaagaaaaactctcatatcaattgtttacatgtcactatggctaagacactaaaagccctctccctgcaaaactggtggcaaagctctctagagaaccacaaactgttgcatccttactacgtggggcagcagcaagcccaggtgaagatgtgcatgttcttggagaaagtattaataacataccgacacttacatctgggtgaataatttcatcaaatctcttaactcacgcttgcacaaacttcacctggagagagagagggaaagctgtgccagaaataaatggttattg

SEQ ID NO: 717 - protein, 210 aa, Homosapiens
MFESFNVPGLYIAVQAVLALAASWTSRQVGERTLTGIVIDSGDGVTHVIPVAEGYVIGSCIKHIPIAGRDITYFIQQLLREREVGIPPEQSLETAKAIKEKYCYICPDIVKEFAKYDVDPQKWIKQYTGINAINQKKFVIDVGYERFLGPEIFFHPEFANPDSMESISDVVDEVIQNCPIDVRRPLYKMEQIPLSYPQGHGFHPLSPPFH

SEQ ID NO: 718 - DNA, 1325 bp, Homosapiens
gagagatgggtaagggctggctgttccggaagattctggcctctcccagtgtgtttcggcgcgagggcaccgctggcccagcaggtggccccccggggccggcacgggccccgacagccgcccccttccctgaacctcggcggcccagtccccgcttacctgaggggtggagccggcagcctgcggagccactggccaagctgggaagtccggcgcaactccgcaccgcagagccggcgcctcctcggcagacagaacctccactcaatacaccagaaaacagagagtatcttgcagaaattatgttcgaatcatttaacgttccaggactctacattgcagttcaggcagtgctggccttggcggcatcttggacatctcgacaagtgggtgaacgtacattaacggggatagtcattgacagcggagatggagtcacccatgttatcccagtggcagaaggttatgtaattggaagctgcatcaaacacatcccgattgcaggtagagatattacgtatttcattcaacagctgctaagggagagggaggtgggaatccctcctgagcagtcactggagaccgcaaaagccattaaggagaaatactgttacatttgccccgatatagtcaaggaatttgccaagtatgatgtggatccccagaagtggatcaaacagtacacgggtatcaatgcgatcaaccagaagaagtttgttatagacgttggttacgaaagattcctgggacctgaaatattctttcacccggagtttgccaacccagactctatggagtccatctcagatgttgttgatgaagtaatacagaactgccccatcgatgtgcggcgtccgctgtataagatggaacaaattccactgagctatcctcaaggtcacggattccatcctctgtcacctccatttcattgagatgatatattgagcccatgcgtagccttttatttgagatttccaaggccagcaatgttctcttcctctcccttttctttgtataaaaattcattctcaagaaaaactctcatatcaattgtttacatgtcactatggctaagacactaaaagccctctccctgcaaaactggtggcaaagctctctagagaaccacaaactgttgcatccttactacgtggggcagcagcaagcccaggtgaagatgtgcatgttcttggagaaagtattaataacataccgacacttacatctgggtgaataatttcatcaaatctcttaactcacgcttgcacaaacttcacctggagagagagagggaaagctgtgccagaaataaatggttattg

SEQ ID NO: 719 - protein, 309 aa, Homosapiens
MGKGWLFRKILASPSVFRREGTAGPAGGPPGPARAPTAAPFPEPRRPSPRLPEGWSRQPAEPLAKLGSPAQLRTAEPAPPRQTEPPLNTPENREYLAEIMFESFNVPGLYIAVQAVLALAASWTSRQVGERTLTGIVIDSGDGVTHVIPVAEGYVIGSCIKHIPIAGRDITYFIQQLLREREVGIPPEQSLETAKAIKEKYCYICPDIVKEFAKYDVDPQKWIKQYTGINAINQKKFVIDVGYERFLGPEIFFHPEFANPDSMESISDVVDEVIQNCPIDVRRPLYKMEQIPLSYPQGHGFHPLSPPFH

SEQ ID NO: 720 - DNA, 3198 bp, Homosapiens
ctctttcaagggcaggtctccagcccagctctctgaaaacattttgctgaaaatataagcaaacatcggccttgtcctccttgtgttcatacactgtggaagcttttctctgcctcctccgtgagagtgcgtggccgggagaccagaaacgtggtcctttctcttgcctgtgagctggtgcagagatggaggaagaagaatatgaacaaattccccaggagaatcccccagaagagctgtcccaggatcctgtgctggagctgtcaggaggtctcgccagaggtggcagacgctatctgccaagccatcgtcttatccgccccagggccccacgccgtgctcctggtgacacaactgggccggttcacggatgaggatcagcaggtggtcaggcgcctgcaggaggtctttggagtgggggttctgggtcacaccatcctggtgttcacccggaaggaagacctggctggcggctccctggaagactatgtgcgagagaccaacaaccaggcccttgcctggctggatgtgacccttgcacggcgccattgcggcttcaacaacagggcacagggggaggagcaggaggcccaactgcgagagctcatggagaaagttgaagccattatgtgggaaaacgaaggagattattacagcaacaaggcttaccaatatacccagcaaaactttcggctgaaagaactacaggaaaggcaagtaagccagggccaaggctctgaggacgtgcctggtgaggagtcttggctggaaggactgtcccagatccagaaggaatctgaggaagcccacagatgcctgctggggaaggctgacctttgagcctgtgctggacttgagccaaggacaccatcagcctttgcacccccctgtgtccagccctctgtttctctttccatcccatggagtgcttcccagtctccaggtcatgacgtctggtgtaggaagaggggcatggggcttgaggacagggtccagcatgcccagatcacattccagttccttcattccttcttccagaacatctgggtcctccctcctctgtgccccaacagcacgctgtcttcctattggaccttctatctcattggcattgcctttcatgagttacttgtctatactctgatagaaccaaagtttcttgagggcaggcctgtatcttttacttctgtgtaacttccacagcttttgactgcattggagtcatgcagtcacgtttggtgcggcaactccatgcaagctgttgaccagatgacttctcatctctccccacaccatgatggtttaaggtgcctgttgtgtctggtggctggaacatggcagtggtgctgagacatggggagggttggagactgggtggggagggttggagactgggctgggaggagagcaagcaggaacagggatggaggcaggaggagcagcccttttattcactcttgagctgtaacaaacaagccccgttggaacttcctagtgggaatgatgggagaagtttggggcagggtatccaagaagtcagactgtggtcaagtaggtggtcccttgccctggctacagaacatggaagcccctagggatgcaagtggacttgggcagaggaggtcacaccaccccaccaaggtagacttagattagagatgacttgcatctgttacttcccctttttccatgggtttcatggcccctcatgatatttgccttctgctcctagaaggcacagactactttcaacctgcctcgcccttcactgccacccctcccttctcccttgataatgggagcatgtggatggggtgtctgcgtgtgcaaacgggttccctagcaaagtatttgtgggggtccaatgcaaggaggcagggaagaaagggggcctgcaaaggaagcagtagagtgacttaaacatcttgcgaggcagcctgcctggtttatgggagaactctgaagcccatgatgttttcctggaaggctgttcctacagacggggtttataagtactgatactggacaggatgagaagggagtaggatgtcatcctgtctcaggcctcggataggaagctgcctgccagcaagaggagactgatgtgccccgggtgcaccccacctcctttgaggtccaagatgctcctggggagttgaccgacatttgggaagataataggaggcattggggaaactgctccccaatatattcctcttttcctttcttcaagctgcgtagcagggggcctttagctagtttctcccgagaggggcgggaagtacagctggtggagacagtgctgggagatgatcagaaatctcagggcacagcctcaggtctacctggacactcatccactgttggagatgctcaacagctagacacagatgctcacagccgacctgtggcctcttgctctgaagccatcccccatcttccctagacacagcagacatctgagaaagcttcagcatttctcttgctaacagattcagaaaagtgtctcaaagcagagcacagagttatttggtgtttgctgaagacagcctttgtgccacaatcacttattaaataagcgatcaatttcccattgaactgaacatgcaacatttatcatacattcagttctcattcacactccttaagatttggtcagaatttttatttctgttcatgtcttctacttttctactcctgtatgaataaaatattgatttgattacagtggctttgactataatgtgggagccaatttttgcctcagtcttcatttttatatttaccttgttattctcaggcatttttttcttctatgtgagagttaaaatcattctgtaatttccccccaaaatcatattggtattctagttggcaatgtcttacatttatgttaagtttgagggaattggtagttcaagtataagttaattaaggccattttatttctaagtgaacagacttgaaactccagagctactgaagtaaaagttagaatcatttgcattttcattcagataggagataattttgtaaattttgatgctattattttaactctattagcttaagtaatgtcataatagaaaacacaagcatttgaccaaatgagatccattcagcgactaactggcaaggcactcaaaacatgtcattcattaaatgttgtttttatttacctcaaaaaaaaaaaaaaaa

SEQ ID NO: 721 - protein, 212 aa, Homosapiens
MNKFPRRIPQKSCPRILCWSCQEVSPEVADAICQAIVLSAPGPHAVLLVTQLGRFTDEDQQVVRRLQEVFGVGVLGHTILVFTRKEDLAGGSLEDYVRETNNQALAWLDVTLARRHCGFNNRAQGEEQEAQLRELMEKVEAIMWENEGDYYSNKAYQYTQQNFRLKELQERQVSQGQGSEDVPGEESWLEGLSQIQKESEEAHRCLLGKADL

SEQ ID NO: 722 - DNA, 3422 bp, Homosapiens
ctctttcaagggcaggtctccagcccagctctctgaaaacattttgctgaaaatataagcaaacatcggccttgtcctccttgtgttcatacactgtggaagcttttctctgcctcctccgtgagagtgcgtggccgggagaccagaaacgtggtcctttctcttgcctgtgagctggtgcagagatggaggaagaagaatatgaacaaattccccaggagaatcccccagaagagctgtcccaggatcctgtgctggagctgtcaggaggtctaagggagaaagaacagaagaccccaaggagactgaggctcattctcatggggaaaacagggagtgggaagagtgcaacaggaaacagcatcctcggcagggacgtcttcgagtctaaactcagcaccagacccgtgaccaagacctcccagagacggagccgagagtgggctgggaaggagcttgaggtgattgacacacccaacattctgtccccccaggtctcgccagaggtggcagacgctatctgccaagccatcgtcttatccgccccagggccccacgccgtgctcctggtgacacaactgggccggttcacggatgaggatcagcaggtggtcaggcgcctgcaggaggtctttggagtgggggttctgggtcacaccatcctggtgttcacccggaaggaagacctggctggcggctccctggaagactatgtgcgagagaccaacaaccaggcccttgcctggctggatgtgacccttgcacggcgccattgcggcttcaacaacagggcacagggggaggagcaggaggcccaactgcgagagctcatggagaaagttgaagccattatgtgggaaaacgaaggagattattacagcaacaaggcttaccaatatacccagcaaaactttcggctgaaagaactacaggaaaggcaagtaagccagggccaaggctctgaggacgtgcctggtgaggagtcttggctggaaggactgtcccagatccagaaggaatctgaggaagcccacagatgcctgctggggaaggctgacctttgagcctgtgctggacttgagccaaggacaccatcagcctttgcacccccctgtgtccagccctctgtttctctttccatcccatggagtgcttcccagtctccaggtcatgacgtctggtgtaggaagaggggcatggggcttgaggacagggtccagcatgcccagatcacattccagttccttcattccttcttccagaacatctgggtcctccctcctctgtgccccaacagcacgctgtcttcctattggaccttctatctcattggcattgcctttcatgagttacttgtctatactctgatagaaccaaagtttcttgagggcaggcctgtatcttttacttctgtgtaacttccacagcttttgactgcattggagtcatgcagtcacgtttggtgcggcaactccatgcaagctgttgaccagatgacttctcatctctccccacaccatgatggtttaaggtgcctgttgtgtctggtggctggaacatggcagtggtgctgagacatggggagggttggagactgggtggggagggttggagactgggctgggaggagagcaagcaggaacagggatggaggcaggaggagcagcccttttattcactcttgagctgtaacaaacaagccccgttggaacttcctagtgggaatgatgggagaagtttggggcagggtatccaagaagtcagactgtggtcaagtaggtggtcccttgccctggctacagaacatggaagcccctagggatgcaagtggacttgggcagaggaggtcacaccaccccaccaaggtagacttagattagagatgacttgcatctgttacttcccctttttccatgggtttcatggcccctcatgatatttgccttctgctcctagaaggcacagactactttcaacctgcctcgcccttcactgccacccctcccttctcccttgataatgggagcatgtggatggggtgtctgcgtgtgcaaacgggttccctagcaaagtatttgtgggggtccaatgcaaggaggcagggaagaaagggggcctgcaaaggaagcagtagagtgacttaaacatcttgcgaggcagcctgcctggtttatgggagaactctgaagcccatgatgttttcctggaaggctgttcctacagacggggtttataagtactgatactggacaggatgagaagggagtaggatgtcatcctgtctcaggcctcggataggaagctgcctgccagcaagaggagactgatgtgccccgggtgcaccccacctcctttgaggtccaagatgctcctggggagttgaccgacatttgggaagataataggaggcattggggaaactgctccccaatatattcctcttttcctttcttcaagctgcgtagcagggggcctttagctagtttctcccgagaggggcgggaagtacagctggtggagacagtgctgggagatgatcagaaatctcagggcacagcctcaggtctacctggacactcatccactgttggagatgctcaacagctagacacagatgctcacagccgacctgtggcctcttgctctgaagccatcccccatcttccctagacacagcagacatctgagaaagcttcagcatttctcttgctaacagattcagaaaagtgtctcaaagcagagcacagagttatttggtgtttgctgaagacagcctttgtgccacaatcacttattaaataagcgatcaatttcccattgaactgaacatgcaacatttatcatacattcagttctcattcacactccttaagatttggtcagaatttttatttctgttcatgtcttctacttttctactcctgtatgaataaaatattgatttgattacagtggctttgactataatgtgggagccaatttttgcctcagtcttcatttttatatttaccttgttattctcaggcatttttttcttctatgtgagagttaaaatcattctgtaatttccccccaaaatcatattggtattctagttggcaatgtcttacatttatgttaagtttgagggaattggtagttcaagtataagttaattaaggccattttatttctaagtgaacagacttgaaactccagagctactgaagtaaaagttagaatcatttgcattttcattcagataggagataattttgtaaattttgatgctattattttaactctattagcttaagtaatgtcataatagaaaacacaagcatttgaccaaatgagatccattcagcgactaactggcaaggcactcaaaacatgtcattcattaaatgttgtttttatttacctcaaaaaaaaaaaaaaaa

SEQ ID NO: 723 - protein, 292 aa, Homosapiens
MEEEEYEQIPQENPPEELSQDPVLELSGGLREKEQKTPRRLRLILMGKTGSGKSATGNSILGRDVFESKLSTRPVTKTSQRRSREWAGKELEVIDTPNILSPQVSPEVADAICQAIVLSAPGPHAVLLVTQLGRFTDEDQQVVRRLQEVFGVGVLGHTILVFTRKEDLAGGSLEDYVRETNNQALAWLDVTLARRHCGFNNRAQGEEQEAQLRELMEKVEAIMWENEGDYYSNKAYQYTQQNFRLKELQERQVSQGQGSEDVPGEESWLEGLSQIQKESEEAHRCLLGKADL

SEQ ID NO: 724 - DNA, 4800 bp, Homosapiens
agctcagtgtcacagacctttgtggaagcaacaacagctcccatccttccaacctttctggagaagccgtggcctgatggtgagccgaatgggctggggggggagaagaaggcggctggggcggtggggagatctggggcccggatcggtgcccctcctccccatgccactgccacctcctcctcctccttcatgccggggacctgggggagggaggatctccatcttctctctgtcccctgcccctcatacaagaagctccccctcctcattttcccctcccaccgcagggcccccttgctcagtgctacaggggacaggggcttctcagtcttgccacagtgctctccctatcccagccacccccccaacacaggctcaacctgcaatgacacctgcctctgcatctccctcctggggatcccactccaccccacccctggccccggcaacccccactccctcacagcagtgcccccaggactctcctgggctgcgggtaggccctttgatccctgaacaggattatgagcggctggaggactgtgaccctgaggggtcccaagactcacccatccacggggaggagcagcaacccctgcttcatgtccctgaagggctccgaggctcctggcatcacatccagaacctggacagtttcttcaccaagatctacagctaccaccagcggaatggctttgcctgcatcttgctggaggatgtcttccagctgggacaatttattttcattgtcaccttcacaaccttcctccttcgatgcgtggattacaatgttctctttgccaaccaaccaagtaaccataccagacctgggccgttccacagcaaagtgaccctgtcagatgccatcctaccctcagcccagtgtgctgagaggatccgctccagcccgctgctggtcctcctcctggtcctggctgccggcttctggctggtccaactgcttcgctcagtctgcaacctcttcagctactgggacatccaggtgttttacagggaggccctgcacatccccccggaggagctgagctcggttccctgggcagaggtgcagtcccgcctcttggcactgcagcggagcgggggcctgtgcgtgcagccgcggcccctgacggagctggacatccaccaccgcatcctgcgctacaccaactaccaggtggcgctggccaacaaaggcctgctgccggcccgctgcccgctgccctggggaggcagtgcggctttcctcagccgcggcctggcgctcaatgtcgacctgctgctcttccgcggtcccttctcgctcttccgcgggggctgggagctgccgcacgcctacaagcgcagcgaccagcggggcgccctagcagcgcgctgggggcgcacagtgctgctgctggccgccctgaacctggcgctgagcccgctggtgctggcctggcaggttctgcacgtcttctatagccacgtggagctgctgcggcgcgagcctggcgcgctgggggcgcgcggctggtcccgcctggcgcgcttgcagctgcgccacttcaacgagctgccgcacgagctgcgcgcgcgcctggcccgcgcctaccgccccgccgccgccttcctgcgcaccgctgcgccccccgcgcccctgcgcacgctgctggcccgccagctcgttttcttcgcgggtgcactcttcgccgcgctgcttgtgctcaccgtctacgacgaggacgtgctagccgtggagcacgtgctcaccgccatgaccgcgctcggggtcaccgccaccgtcgccaggtctttcattccggaagagcagtgccagggtcgtgcgccgcagctcctgctgcagacagccctggcccacatgcactacctcccggaggagcccggccccggcggcagggaccgcgcctaccggcagatggcgcagctgctgcagtaccgagcggtctccctcctggaggagctcctgtccccgctcctcaccccgctgtttctgcttttctggttccgccctcgtgccctggagattatcgacttttttcatcacttcactgtggatgtggctggggttggggacatctgttcctttgcccttatggatgtgaagcgccacggacaccctcagtggctctcggcgggacagactgaggcctcgctgtctcagcgtgcggaggacggcaagactgagctttctttgatgcggttctccctggcgcatccactctggcgccccccagggcacagctctaagtttcttgggcacctctggggccgagtacaacaagatgcagctgcctggggtgccacctcggctcgcggcccctccaccccgggggtgctcagcaactgcacctcgcccctgcctgaggccttcctggccaacctcttcgtgcaccctctcctgcctccgagagatctgagcccgacagccccctgtccagctgcggccacagccagcctccttgcctccatttcccgaattgcccaggaccccagctctgtgtccccaggaggcactgggggccagaagctggcccagctcccagaacttgcttctgccgagatgagtctccatgtcatctacctgcaccagcttcaccagcagcagcagcagcaggagccgtggggtgaggctgcagcctccatcctgtccaggccctgctccagcccctcacagccaccctcgcctgatgaggagaagccatcctggtcaagtgacggctccagtcctgcctctagccccagacaacagtggggaacccagaaggcccggaatctgttccccggagggtttcaggtgaccacagacacccagaaggagcctgaccgggcctcttgcactgactgagacgactcctcagggccccactcctggcagctgagtgctgcacctgccttctcgatcacgagcctgagaactgcacgggggagcagcccagactggctggaaaccatgttttcagagtgcagggtcaagtggcgtgtaggactctgtcaaaagaatgacccctttccccaccacatacccacaactgcacagcctctggacagatgtgagaaggcaccacctcaagaggggaggagcggggctgatcctggtcgggcggacctgagtcgggcagccgctctcccggaactggaagggaaagccaggcggctctcaggggctgttggtgtctgagccgggagggtcgaacgcccagggcactgcgccccgcaactgacgctcctgcaaggaaaagctctgggtgcgtatgcggcttgtcacctcctgggtgcgcagcgtgagcccgaaaatgtcttcgtggtagcgttgctgatcctgtcggaaaagagcacagtggatcagaacccgactcggagaccttagcaggaaccccgcacgctcaggcccggcccgcccctccgcacccgcagcacgccgatgacgtcgccggcctcgtccagctccatgtcgccctccgtcgccaggatgcgctgcacggtctgcaggacgttggttgccatggtaacatcgccgcagacaaacatgtggccccgctcgaggcacagcacgcggtgcacctccgcagccagctccgtcctcaggatgtcctgcacgttaccattgcgccctcagggtctcacaccttggggttgtcaggttcccgggagaaggcggtgaggactcggccaaacaccccgcgctgctgggcgttctgcacctcgtcgcggtagagatggtcaagttgggagcatcggcagccgaacaccaaagtcatgggagtgggctgcagccctgcaagcaaccccgcgcttgggaaggctcttctccggggcacagtgctagtggggcctccccacaggccaccgtcgcccagcctggcagcccagcgttttgggctgaaaccaccattactttggctgtttcatctctaagagagtgtagaatgctttcacagagaccctgcacagccctgatttacagagggaagggaagcgcgggtgaggtggtggcccctggtggagctgcgctagaatgcgcggcttcggactcagaattccatgccctttgcattgtgtgacatcgcagtccccttccccgctcccacttcatattctcccatacttataactctcctcccagtcacagccctcttcttttgattgacagaccaccctgggcaccccatgctcaatatgaacaccttgtagcatccttaggtcttggacagacctcggtcagctctggcacagtcaagaatccaccttgggcagttcttctttgagtcttagccctaatccctttgaaaattctattttcctttgtcctcaatccagtcaacacctactatgtaccaggcaccaggaagccagaagctcagggcccagcccttgcctttggtacctgccctccccttggtctcatgagcgtcttttcagctttgtggactttgtttcctgccctctctttcctatttcctgccttccagccccacccctctgtccctagattgtgtgactcccttcaggcagtcctttagtccccagcctcacctttgctctcaatgtcatgcagccgctcctgccagaatccccggaagggggcaatgccagtgcctggacccaccaggatgcagggcaagctgggatcgggtggcagccggaaggagggagccctggcaggagagacactccatcaggtcccctttgcctttcctgctccaccattctcaccatgcagggtgggtggagcaaggaggacccaagttcttcccatctcaaaaaaaaattaaaaaaaaaacaaaaaacaaaaaa

SEQ ID NO: 725 - protein, 924 aa, Homosapiens
MVSRMGWGGRRRRLGRWGDLGPGSVPLLPMPLPPPPPPSCRGPGGGRISIFSLSPAPHTRSSPSSFSPPTAGPPCSVLQGTGASQSCHSALPIPATPPTQAQPAMTPASASPSWGSHSTPPLAPATPTPSQQCPQDSPGLRVGPLIPEQDYERLEDCDPEGSQDSPIHGEEQQPLLHVPEGLRGSWHHIQNLDSFFTKIYSYHQRNGFACILLEDVFQLGQFIFIVTFTTFLLRCVDYNVLFANQPSNHTRPGPFHSKVTLSDAILPSAQCAERIRSSPLLVLLLVLAAGFWLVQLLRSVCNLFSYWDIQVFYREALHIPPEELSSVPWAEVQSRLLALQRSGGLCVQPRPLTELDIHHRILRYTNYQVALANKGLLPARCPLPWGGSAAFLSRGLALNVDLLLFRGPFSLFRGGWELPHAYKRSDQRGALAARWGRTVLLLAALNLALSPLVLAWQVLHVFYSHVELLRREPGALGARGWSRLARLQLRHFNELPHELRARLARAYRPAAAFLRTAAPPAPLRTLLARQLVFFAGALFAALLVLTVYDEDVLAVEHVLTAMTALGVTATVARSFIPEEQCQGRAPQLLLQTALAHMHYLPEEPGPGGRDRAYRQMAQLLQYRAVSLLEELLSPLLTPLFLLFWFRPRALEIIDFFHHFTVDVAGVGDICSFALMDVKRHGHPQWLSAGQTEASLSQRAEDGKTELSLMRFSLAHPLWRPPGHSSKFLGHLWGRVQQDAAAWGATSARGPSTPGVLSNCTSPLPEAFLANLFVHPLLPPRDLSPTAPCPAAATASLLASISRIAQDPSSVSPGGTGGQKLAQLPELASAEMSLHVIYLHQLHQQQQQQEPWGEAAASILSRPCSSPSQPPSPDEEKPSWSSDGSSPASSPRQQWGTQKARNLFPGGFQVTTDTQKEPDRASCTD

SEQ ID NO: 726 - DNA, 1458 bp, Homosapiens
atgaggggctggggctgggcaggggagggcacacagggaggcaaggaacagggcacagtgacctacgcactcgtttccaaccagaaaacacctgggaagaaaactgggaaaaagaaggaaaaagatctgacctcagacaggtctgtggagtctctgtacgaagagcttgttatttctggccttctaaggaagagtgagtcagtagcattgaaagactacataggtgacttcctgtatcttggatccactctgagtttggtgaagaagttgcccatgccatccctgtttgacatacgacagaatgtggctttgtatgcggtccttcggcttggctccccggatatccacatcatggccccactcatccgctccatcctcctggtgggcccctctggcatggggaagaagatgctggtcaaggcagtgtgcacagaaactggcgccaacctgttcgacctgtcgccggaaaacctgctgggcaaatatcctggcaggaatggggcacagatgatggtgcatatagtctttaaggtccggagcccccagcttttggcatttgcggttctcagacctgtggcaacaaaggaggggggctttgaggtcacgtcacccatcagcctactgggtatgatttcaggtgctgaactggtagcccgactcctacagccctctgtgatttggattggaaatgctgagaagaatttctataagaagacccccaaagaagacaaggagatggacccaaagcggataaagaaggacctcaccaaggccttgcggctgctgactcccggagaccgtgtgatgctgattgggacaacctcccggccacagctggccgagatgcggggtctgtgccgggtctacgagcggatcctcttcatgccccggcctgactacgcatcccgctatggtgaggcctggggatgtggggacggctgcgcctaccaaagcctgcccacctcccgccccataccccattgctgctgcgagccctcacccccacagcccggtcttctggaagggctgctggacaagcagcccagtggcctgggtcctggctttggctctgtggacgcgagcaggccccatgtcttccacatgcctgcagtgctctggaagcgtatgatagaggcccggggcatccagccgacccagcacctggacatcagtgccctagccaaggtctccgatggctacacgccgggtcacattctccaagccatccaatcggtgctgagtgagcggcggttcctgcaactgtccaagcggcccctggtggcctctgagttcctgggacaactggtgaagctggatccagtgtacagggaggaggaggagtccctgaaggactggtacttcaagaccccactgggcaagaagagcatgaaacacaggatggaccagttggaggccgaggaggccaagctggacaaggagaagaagaaaaggaagtga

SEQ ID NO: 727 - protein, 485 aa, Homosapiens
MRGWGWAGEGTQGGKEQGTVTYALVSNQKTPGKKTGKKKEKDLTSDRSVESLYEELVISGLLRKSESVALKDYIGDFLYLGSTLSLVKKLPMPSLFDIRQNVALYAVLRLGSPDIHIMAPLIRSILLVGPSGMGKKMLVKAVCTETGANLFDLSPENLLGKYPGRNGAQMMVHIVFKVRSPQLLAFAVLRPVATKEGGFEVTSPISLLGMISGAELVARLLQPSVIWIGNAEKNFYKKTPKEDKEMDPKRIKKDLTKALRLLTPGDRVMLIGTTSRPQLAEMRGLCRVYERILFMPRPDYASRYGEAWGCGDGCAYQSLPTSRPIPHCCCEPSPPQPGLLEGLLDKQPSGLGPGFGSVDASRPHVFHMPAVLWKRMIEARGIQPTQHLDISALAKVSDGYTPGHILQAIQSVLSERRFLQLSKRPLVASEFLGQLVKLDPVYREEEESLKDWYFKTPLGKKSMKHRMDQLEAEEAKLDKEKKKRK

SEQ ID NO: 728 - DNA, 955 bp, Homosapiens
gggcccctctggcatggggaagaagatgctggtcaaggcagtgtgcacagaaactggcgccaacctgttcgacctgtcgccggaaaacctgctgggcaaatatcctggcaggaatggggcacagatgatggtgcatatagtctttaaggtccggagcccccagcttttggcatttgcggttctcagacctgtggcaacaaaggaggggggctttgaggtcacgtcacccatcagcctactgggtagcccgactcctacagccctctgtgatttggattggaaatgctgagaagaatttctataagaagacccccaaagaagacaaggagatggacccaaagcggataaagaaggacctcaccaaggccttgcggctgctgactcccggagaccgtgtgatgctgattgggacaacctcccggccacagctggccgagatgcggggtctgtgccgggtctacgagcggatcctcttcatgccccggcctgactacgcatcccgctatgtgctctggaagcgtatgatagaggcccggggcatccagccgacccagcacctggacatcagtgccctagccaaggtctccgatggctacacgccgggtcacattctccaagccatccaatcggtgctgagtgagcggcggttcctgcaactgtccaagcggcccctggtggcctctgagttcctgggacaactggtgaagctggatccagtgtacagggaggaggaggagtccctgaaggactggtacttcaagaccccactgggcaagaagagcatgaaacacaggatggaccagttggaggccgaggaggccaagctggacaaggagaagaagaaaaggaagtgatggctaaggcttgcgggcacctgagattagtggcgtgggacagggcagtggcccaagggtaaagggatggggcagaggcataaatgcccagatgacttggg

SEQ ID NO: 729 - protein, 174 aa, Homosapiens
MDPKRIKKDLTKALRLLTPGDRVMLIGTTSRPQLAEMRGLCRVYERILFMPRPDYASRYVLWKRMIEARGIQPTQHLDISALAKVSDGYTPGHILQAIQSVLSERRFLQLSKRPLVASEFLGQLVKLDPVYREEEESLKDWYFKTPLGKKSMKHRMDQLEAEEAKLDKEKKKRK

SEQ ID NO: 730 - DNA, 2052 bp, Homosapiens
atgccccccacagactccccgctggagcgccagacacacagacacacccaacgcaggccagcaccgggcacacggacacacccaacccaggccagcgccggacacacagacacacccaatgcaggccagcgccggacacacccaacacaggccaacaccggacacacggacacacccaacccaggccagcgccggacacacggacacacccaacccaggccagcgccggacacacggacacacccaacccaggccagcgccggacacacggacacacccaacccaggccagcgccggacacacggacacacccaacccaggccagcgccggacacatggacacacccaacccaggccagcgccggacacacggacacacccaacccaggccagcgccggacacacggacacacccaacgcaggccagtgccggacacacggacacacccaatccaggccagcgctggacacacggacacacccaacccaggccagcgccaggggcagcacgttagctccgtgccttgtggctccatcagcagcagcgagaacctctcagcaccaaaaccctcacgggcgtctcctgagggccaccagcagggctgccagatccagtccagaagcccagctgacggtgcacttccagcccacccccagacagcgtgggtgtcttgtgctgtccccgaagggtgtcgggttaaacagctgtccccgtgtgagaacgcgggcaaaccaaagctggagctgaacctgcaccacacggtctatgccagttctacagaaagcaaaaagggtcttgtttcagacaccaccaccatgaacgctacatcaggcacccgccccgaacagcccacgacagacgctacgtcaggcgccgaccagaagagcccaccacagacgctacgccaggcgccgcccgaaagagcccaccacagacgctacgtcaggcgccgaccggaagagcccaccacagacgctacgccaggcgccgcccggaagagcccaccacagacgctacgtcaggcgccgaccggaagagcccaccacagacgctatgccaggcgccgcccggaagagcccaccacagacgctacgccaggcgccgccccgaacagcccaccacagactgtaagccaggcgcccgcgtggaatagcccaccacagatgctacgtcagacgcccgcgtggaacagcccaccccagacgctacgccaggcgccgcccggaagagcccaccccagacgctatgccaggcgccgcccagaagagcccaccacagacgctacgtcaggcgcccgcgtggaacagcccaccccagacgctacgccaggcgccgcccggaagagcccaccacagacgctacatcaggcgcccgccccgaacagcccaccacagacgctacgtcaggcgcccgcgtggaacagcccaccacagacgctacgtcaggcgcccgcgtggaacagcccaccacagacgctacgtcaggcgcccgcgtggaacagcccaccacagacgctacgtcaggcgccgcccggaacagcccaccacagacgctacgccaggcgccgcccggaacagcccaccacagacgctacgccaggcgccgcccggaagagcccaccacagacgctacgccaggcgccgaccggaagagcccaccacagacgctacgtcaggcgccgcccggaagagcccaccacagacgctacgccaggcgccgcccggaagagcccaccacagacgctacgtcaggcgccgcccggaagagcccaccacagacgctacgccaggcgccgcccggaagagcccaccacagacgctacgtcaggcgcccgcgtggaacagcccaccacagacgctacgtcaagcgcccgcgtggaacagcccaccacaggcgctacgtcaggcgccgcccggaagagcccaccccaggcgctacgtcaggcgccgcccagaacagcctgccacaggtccctctctcagggtcggctgaggagcggcctccattccctcttccgtgaaacacgacttgctctcaggttctggggctga

SEQ ID NO: 731 - protein, 683 aa, Homosapiens
MPPTDSPLERQTHRHTQRRPAPGTRTHPTQASAGHTDTPNAGQRRTHPTQANTGHTDTPNPGQRRTHGHTQPRPAPDTRTHPTQASAGHTDTPNPGQRRTHGHTQPRPAPDTWTHPTQASAGHTDTPNPGQRRTHGHTQRRPVPDTRTHPIQASAGHTDTPNPGQRQGQHVSSVPCGSISSSENLSAPKPSRASPEGHQQGCQIQSRSPADGALPAHPQTAWVSCAVPEGCRVKQLSPCENAGKPKLELNLHHTVYASSTESKKGLVSDTTTMNATSGTRPEQPTTDATSGADQKSPPQTLRQAPPERAHHRRYVRRRPEEPTTDATPGAARKSPPQTLRQAPTGRAHHRRYARRRPEEPTTDATPGAAPNSPPQTVSQAPAWNSPPQMLRQTPAWNSPPQTLRQAPPGRAHPRRYARRRPEEPTTDATSGARVEQPTPDATPGAARKSPPQTLHQAPAPNSPPQTLRQAPAWNSPPQTLRQAPAWNSPPQTLRQAPAWNSPPQTLRQAPPGTAHHRRYARRRPEQPTTDATPGAARKSPPQTLRQAPTGRAHHRRYVRRRPEEPTTDATPGAARKSPPQTLRQAPPGRAHHRRYARRRPEEPTTDATSGARVEQPTTDATSSARVEQPTTGATSGAARKSPPQALRQAPPRTACHRSLSQGRLRSGLHSLFRETRLALRFWG

SEQ ID NO: 732 - DNA, 1619 bp, Homosapiens
ggaccttccgtggacataggactgttgcagacacagttcgcttggtgaaggaggcaccgtgctgcagtaggtccttgatgcggccatgtccctgcgacaggaaggacaaactccagcacacagagtcctcgaagcagcagtgtccctgtgatggggaggacagactccggcacacagagtcctcgaagcagcagtgtccctgtgatggggaggacagactccggcacacagagtcctcgaagcagcagtgtccctgtgatggggaggacagactccggcacacagagtcctcgaagcagcagtgtccctgtgatggggaggacagactccggcacacagagtcctcgaagcagcagtgtccctgtgatggggaggacagactccggcacacagagtcctcgaagcatccgtgtccctgcgacggagaggacagactccggcatgcagagggaagccgtctgcgtggctcggaggcaggagggaagcgctgtgtctgtgggccgagggctgctggcaacgcagaggctgggagtcaggaagggtcggtgtccccttcaaggccctgcagacacctccaagcaaggtctccaaacccagcctgtgagactgcaggcatccactgtttcaagcccatccgtctggagtcctttgttctggcagccccaaaagcctcacacagctcggctttgagtacagggagcgtgtctgcaggtaaggtggggaggccacacagaggcacagcggctgggccctgcaagactcagggagggcgggccagcatgtccgagggcaggaggcagatgccacagggcatcaccagctgcatgttgcacctcgacggcaaaacacagaagccactgcccaccgcagggagcgcagactgaagggacccgggctccttggccgagctccagccggaggtgcttccggtgcaatccaggcctctcatcctcccacggattccccacagagggcttcggttccattattgtatagacttcacgtatgtaaaaggtacaggaattcagcatttggaccccgtggggcagtgtcaccatggagcacgcacagggtgcctccctgagctggcacatccctggaggcatgcgtgcctctgccgacatcccaaagcgcccgtgctggggtcccacatggtgtccgctgtgccgtggggttcctcttccaacccccacaagaaagagaaggtcaccctgccccccacctctccacagctccctggactgggccacatttctttatcctcttcttggtttttaattaactttgggccagcccatctgtgcctgttctggactccagttttgacagctactgactgaattgcctggtcagttccgtgaaaaactagaaatagaaatgcacccggccagctgctgcctgagctgaccagccccggccgtcagtggccttccctggttggacggaccgtgaatgctgccagttctgtttcattttaactatgtgtatttgtataaatataagaaactgtctgctctctacccacagagtaattgtctagctctatcatctaattatctcaacacgtttagtgagcgagatattaaggcccagattagatattaaaaggcatcgttaaa

SEQ ID NO: 733 - protein, 268 aa, Homosapiens
MRPCPCDRKDKLQHTESSKQQCPCDGEDRLRHTESSKQQCPCDGEDRLRHTESSKQQCPCDGEDRLRHTESSKQQCPCDGEDRLRHTESSKQQCPCDGEDRLRHTESSKHPCPCDGEDRLRHAEGSRLRGSEAGGKRCVCGPRAAGNAEAGSQEGSVSPSRPCRHLQARSPNPACETAGIHCFKPIRLESFVLAAPKASHSSALSTGSVSAGKVGRPHRGTAAGPCKTQGGRASMSEGRRQMPQGITSCMLHLDGKTQKPLPTAGSAD

SEQ ID NO: 734 - DNA, 1619 bp, Homosapiens; identical to SEQ ID NO: 732

SEQ ID NO: 735 - protein, 268 aa, Homosapiens; identical to SEQ ID NO: 733

SEQ ID NO: 736 - DNA, 339 bp, Homosapiens
atggatgttctctggccttttagaaaacgtggagttgttcctttggccacgtatatgcgagtctataagaaaggtgatactgtagacatcaagggaatagatattgttcaaaaaggaagctccgcaggtgtgaccgcggcaaagctgggagtcgaccgcgttctccagcgtgctgttgcaaacagacaagggcaagattcctgccgagagaattatgtgcgtatggagcacacggagcactctaagtggcttcctgaaataaaagctcacggtgcgagaaccaaggggaaggaacctgagctgctggaagctattccctgtgaattcatgacatcatag

SEQ ID NO: 737 - protein, 112 aa, Homosapiens [sequence omitted]

SEQ ID NO: 738 - DNA, 339 bp, Homosapiens
atggatgttctctggccttttagaaaacgtggagttgttcctttggccacgtatatgcgagtctataagaaaggtgatactgtggacatcaagggaatagatattgttcaaaaaggaagctccgcaggtgtgaccgcggcaaagctgggagtcgaccgcgttctccagcgtgctgttgcaaacagacaagggcaagattcctgccgagagaattatgtgcgtatggagcacacggagcactctaagtggcttcctgaaataaaagctcacggtgcgagaaccaaggggaaggaacctgagctgctggaagctattccctgtgaattcatgacatcatag

SEQ ID NO: 739 - protein, 112 aa, Homosapiens [sequence omitted]

SEQ ID NO: 740 - DNA, 8192 bp, Homosapiens
cgttccctccggagttcccgagctgctgaggagtctggattgtgtctgtccccagtgtcagatgaaagggcgctgaggctcttggccgctgccccgcgcccagctccgcgcacgcccctctgcgagtccggccgcccagcgcctcttcccgcccgagccgccgcctgcgctccggggcagccgctctgtctccagcgcgatgtggcctcgcctggccttttgttgctggggtctggcgctcgtttcgggctgggcgacctttcagcagatgtccccgtcgcgcaatttcagcttccgcctcttccccgagaccgcgcccggggcccccgggagtatccccgcgccgcccgctcctggcgacgaagcggcggggagcagagtggagcggctgggccaggcgttccggcgacgcgtgcggctgctgcgggagctcagcgagcgcctggagcttgtcttcctggtggatgattcgtccagcgtgggcgaagtcaacttccgcagcgagctcatgttcgtccgcaagctgctgtccgacttccccgtggtgcccacggccacgcgcgtggccatcgtgaccttctcgtccaagaactacgtggtgccgcgcgtcgattacatctccacccgccgcgcgcgccagcacaagtgcgcgctgctcctccaagagatccctgccatctcctaccgaggtggcggcacctacaccaagggcgccttccagcaagccgcgcaaattcttcttcatgctagagaaaactcaacaaaagttgtatttctcatcactgatggatattccaatgggggagaccctagaccaattgcagcgtcactgcgagattcaggagtggagatcttcacttttggcatatggcaagggaacattcgagagctgaatgacatggcttccaccccaaaggaggagcactgttacctgctacacagttttgaagaatttgaggctttagctcgccgggcattgcatgaagatctaccttctgggagttttattcaagatgatatggtccactgctcatatctttgtgatgaaggcaaggactgctgtgaccgaatgggaagctgcaaatgtgggacacacacaggccattttgagtgcatctgtgaaaaggggtattacgggaaaggtctgcagtatgaatgcacagcttgcccatcggggacatacaaacctgaaggctcaccaggaggaatcagcagttgcattccatgtcctgatgaaaatcacacctctccacctggaagcacatcccctgaagactgtgtctgcagagagggatacagggcatctggccagacctgtgaacttgtccactgccctgccctgaagcctcccgaaaatggttactttatccaaaacacttgcaacaaccacttcaatgcagcctgtggggtccgatgtcaccctggatttgatcttgtgggaagcagcatcatcttatgtctacccaatggtttgtggtccggttcagagagctactgcagagtaagaacatgtcctcatctccgccagccgaaacatggccacatcagctgttctacaagggaaatgttatataagacaacatgtttggttgcctgtgatgaagggtacagactagaaggcagtgataagcttacttgtcaaggaaacagccagtgggatgggccagaaccccggtgtgtggagcgccactgttccacctttcagatgcccaaagatgtcatcatatccccccacaactgtggcaagcagccagccaaatttgggacgatctgctatgtaagttgccgccaagggttcattttatctggagtcaaagaaatgctgagatgtaccacttctggaaaatggaatgtcggagttcaggcagctgtgtgtaaagacgtggaggctcctcaaatcaactgtcctaaggacatagaggctaagactctggaacagcaagattctgccaatgttacctggcagattccaacagctaaagacaactctggtgaaaaggtgtcagtccacgttcatccagctttcaccccaccttaccttttcccaattggagatgttgctatcgtatacacggcaactgacctatccggcaaccaggccagctgcattttccatatcaaggttattgatgcagaaccacctgtcatagactggtgcagatctccacctcccgtccaggtctcggagaaggtacatgccgcaagctgggatgagcctcagttctcagacaactcaggggctgaattggtcattaccagaagtcatacacaaggagaccttttccctcaaggggagactatagtacagtatacagccactgacccctcaggcaataacaggacatgtgatatccatattgtcataaaaggttctccctgtgaaattccattcacacctgtaaatggggattttatatgcactccagataatactggagtcaactgtacattaacttgcttggagggctatgatttcacagaagggtctactgacaagtattattgtgcttatgaagatggcgtctggaaaccaacatataccactgaatggccagactgtgccaaaaaacgttttgcaaaccacgggttcaagtcctttgagatgttctacaaagcagctcgttgtgatgacacagatctgatgaagaagttttctgaagcatttgagacgaccctgggaaaaatggtcccatcattttgtagtgatgcagaggacattgactgcagactggaggagaacctgaccaaaaaatattgcctagaatataattatgactatgaaaatggctttgcaattggaccaggtggctggggtgcagctaataggctggattactcttacgatgacttcctggacactgtgcaagaaacagccacaagcatcggcaatgccaagtcctcacggattaaaagaagtgccccattatctgactataaaattaagttaatttttaacatcacagctagtgtgccattacccgatgaaagaaatgatacccttgaatgggaaaatcagcaacgactccttcagacattggaaactatcacaaataaactgaaaaggactctcaacaaagaccccatgtattcctttcagcttgcatcagaaatacttatagccgacagcaattcattagaaacaaaaaaggcttcccccttctgcagaccaggctcagtgctgagagggcgtatgtgtgtcaattgccctttgggaacctattataatctggaacatttcacctgtgaaagctgccggatcggatcctatcaagatgaagaagggcaacttgagtgcaagctttgcccctctgggatgtacacggaatatatccattcaagaaacatctctgattgtaaagctcagtgtaaacaaggcacctactcatacagtggacttgagacttgtgaatcgtgtccactgggcacttatcagccaaaatttggttcccggagctgcctctcgtgtccagaaaacacctcaactgtgaaaagaggagccgtgaacatttctgcatgtggagttccttgtccagaaggaaaattctcgcgttctgggttaatgccctgtcacccatgtcctcgtgactattaccaacctaatgcagggaaggccttctgcctggcctgtcccttttatggaactaccccattcgctggttccagatccatcacagaatgttcaagttttagttcaactttctcagcggcagaggaaagtgtggtgccccctgcctctcttggacatattaaaaagaggcatgaaatcagcagtcaggttttccatgaatgcttctttaacccttgccacaatagtggaacctgccagcaacttgggcgtggttatgtttgtctctgtccacttggatatacaggcttaaagtgtgaaacagacatcgatgagtgcagcccactgccttgcctcaacaatggagtttgtaaagacctagttggggaattcatttgtgagtgcccatcaggttacacaggtcagcggtgtgaagaaaatataaatgagtgtagctccagtccttgtttaaataaaggaatctgtgttgatggtgtggctggctatcgttgcacatgtgtgaaaggatttgtaggcctgcattgtgaaacagaagtcaatgaatgccagtcaaacccatgcttaaataatgcagtctgtgaagaccaggttgggggattcttgtgcaaatgcccacctggatttttgggtacccgatgtggaaagaacgtcgatgagtgtctcagtcagccatgcaaaaatggagctacctgtaaagacggtgccaatagcttcagatgcctgtgtgcagctggcttcacaggatcacactgtgaattgaacatcaatgaatgtcagtctaatccatgtagaaatcaggccacctgtgtggatgaattaaattcatacagttgtaaatgtcagccaggattttcaggcaaaaggtgtgaaacagaacagtctacaggctttaacctggattttgaagtttctggcatctatggatatgtcatgctagatggcatgctcccatctctccatgctctaacctgtaccttctggatgaaatcctctgacgacatgaactatggaacaccaatctcctatgcagttgataacggcagcgacaataccttgctcctgactgattataacggctgggttctttatgtgaatggcagggaaaagataacaaactgtccctcggtgaatgatggcagatggcatcatattgcaatcacttggacaagtgccaatggcatctggaaagtctatatcgatgggaaattatctgacggtggtgctggcctctctgttggtttgcccatacctggtatgtttggtggtggtgcgttagttctggggcaagagcaagacaaaaaaggagagggattcagcccagctgagtcttttgtgggctccataagccagctcaacctctgggactatgtcctgtctccacagcaggtgaagtcactggctacctcctgcccagaggaactcagtaaaggaaacgtgttagcatggcctgatttcttgtcaggaattgtggggaaagtgaagatcgattctaagagcatattttgttctgattgcccacgcttaggagggtcagtgcctcatctgagaactgcatctgaagatttaaagccaggttccaaagtcaatctgttctgtgatccaggcttccagctggtcgggaaccctgtgcagtactgtctgaatcaaggacagtggacacaaccacttcctcactgtgaacgcattagctgtggggtgccacctcctttggagaatggcttccattcagccgatgacttctatgctggcagcacagtaacctaccagtgcaacaatggctactatctattgggtgactcaaggatgttctgtacagataatgggagctggaacggcgtttcaccatcctgccttgatgtcgatgagtgtgcagttggatcagattgtagtgagcatgcttcttgcctgaacgtagatggatcctacatatgttcatgtgtcccaccgtacacaggagatgggaaaaactgtgcagaacctataaaatgtaaggctccaggaaatccggaaaatggccactcctcaggtgagatttatacagtaggtgccgaagtcacattttcgtgtcaggaaggataccagttgatgggagtaaccaaaatcacatgtttggagtctggagaatggaatcatctaataccatattgtaaagctgtttcatgtggtaaaccggctattccagaaaatggttgcattgaggagttagcatttacttttggcagcaaagtgacatataggtgtaataaaggatatactctggccggtgataaagaatcatcctgtcttgctaacagttcttggagtcattcccctcctgtgtgtgaaccagtgaagtgttctagtccggaaaatataaataatggaaaatatattttgagtgggcttacctacctttctactgcatcatattcatgcgatacaggatacagcttacagggcccttccattattgaatgcacggcttctggcatctgggacagagcgccacctgcctgtcacctcgtcttctgtggagaaccacctgccatcaaagatgctgtcattacggggaataacttcactttcaggaacaccgtcacttacacttgcaaagaaggctatactcttgctggtcttgacaccattgaatgcctggccgacggcaagtggagtagaagtgaccagcagtgcctggctgtctcctgtgatgagccacccattgtggaccacgcctctccagagactgcccatcggctctttggagacattgcattctactactgctctgatggttacagcctagcagacaattcccagcttctctgcaatgcccagggcaagtgggtacccccagaaggtcaagacatgccccgttgtatagctcatttctgtgaaaaacctccatcggtttcctatagcatcttggaatctgtgagcaaagcaaaatttgcagctggctcagttgtgagctttaaatgcatggaaggctttgtactgaacacctcagcaaagattgaatgtatgagaggtgggcagtggaacccttcccccatgtccatccagtgcatccctgtgcggtgtggagagccaccaagcatcatgaatggctatgcaagtggatcaaactacagttttggagccatggtggcttacagctgcaacaaggggttctacatcaaaggggaaaagaagagcacctgcgaagccacagggcagtggagtagtcctataccgacgtgccacccggtatcttgtggtgaaccacctaaggttgagaatggctttctggagcatacaactggcaggatctttgagagtgaagtgaggtatcagtgtaacccgggctataagtcagtcggaagtcctgtatttgtctgccaagccaatcgccactggcacagtgaatcccctctgatgtgtgttcctctcgactgtggaaaacctcccccgatccagaatggcttcatgaaaggagaaaactttgaagtagggtccaaggttcagtttttctgtaatgagggttatgagcttgttggtgacagttcttggacatgtcagaaatctggcaaatggaataagaagtcaaatccaaagtgcatgcctgccaagtgcccagagccgcccctcttggaaaaccagctagtattaaaggagttgaccaccgaggtaggagttgtgacattttcctgtaaagaagggcatgtcctgcaaggcccctctgtcctgaaatgcttgccatcccagcaatggaatgactctttccctgtttgtaagattgttctttgtaccccacctcccctaatttcctttggtgtccccattccttcttctgctcttcattttggaagtactgtcaagtattcttgtgtaggtgggtttttcctaagaggaaattctaccaccctctgccaacctgatggcacctggagctctccactgccagaatgtgttccagtagaatgtccccaacctgaggaaatccccaatggaatcattgatgtgcaaggccttgcctatctcagcacagctctctatacctgcaagccaggctttgaattggtgggaaatactaccaccctttgtggagaaaatggtcactggcttggaggaaaaccaacatgtaaagccattgagtgcctgaaacccaaggagattttgaatggcaaattctcttacacggacctacactatggacagaccgttacctactcttgcaaccgaggctttcggctcgaaggtcccagtgccttgacctgtttagagacaggtgattgggatgtagatgccccatcttgcaatgccatccactgtgattccccacaacccattgaaaatggttttgtagaaggtgcagattacagctatggtgccataatcatctacagttgcttccctgggtttcaggtggctggtcatgccatgcagacctgtgaagagtcaggatggtcaagttccatcccaacatgtatgccaatagactgtggcctccctcctcatatagattttggagactgtactaaactcaaagatgaccagggatattttgagcaagaagacgacatgatggaagttccatatgtgactcctcaccctccttatcatttgggagcagtggctaaaacctggg

SEQ ID NO: 741 - protein, 3574 aa, Homosapiens
MWPRLAFCCWGLALVSGWATFQQMSPSRNFSFRLFPETAPGAPGSIPAPPAPGDEAAGSRVERLGQAFRRRVRLLRELSERLELVFLVDDSSSVGEVNFRSELMFVRKLLSDFPVVPTATRVAIVTFSSKNYVVPRVDYISTRRARQHKCALLLQEIPAISYRGGGTYTKGAFQQAAQILLHARENSTKVVFLITDGYSNGGDPRPIAASLRDSGVEIFTFGIWQGNIRELNDMASTPKEEHCYLLHSFEEFEALARRALHEDLPSGSFIQDDMVHCSYLCDEGKDCCDRMGSCKCGTHTGHFECICEKGYYGKGLQYECTACPSGTYKPEGSPGGISSCIPCPDENHTSPPGSTSPEDCVCREGYRASGQTCELVHCPALKPPENGYFIQNTCNNHFNAACGVRCHPGFDLVGSSIILCLPNGLWSGSESYCRVRTCPHLRQPKHGHISCSTREMLYKTTCLVACDEGYRLEGSDKLTCQGNSQWDGPEPRCVERHCSTFQMPKDVIISPHNCGKQPAKFGTICYVSCRQGFILSGVKEMLRCTTSGKWNVGVQAAVCKDVEAPQINCPKDIEAKTLEQQDSANVTWQIPTAKDNSGEKVSVHVHPAFTPPYLFPIGDVAIVYTATDLSGNQASCIFHIKVIDAEPPVIDWCRSPPPVQVSEKVHAASWDEPQFSDNSGAELVITRSHTQGDLFPQGETIVQYTATDPSGNNRTCDIHIVIKGSPCEIPFTPVNGDFICTPDNTGVNCTLTCLEGYDFTEGSTDKYYCAYEDGVWKPTYTTEWPDCAKKRFANHGFKSFEMFYKAARCDDTDLMKKFSEAFETTLGKMVPSFCSDAEDIDCRLEENLTKKYCLEYNYDYENGFAIGPGGWGAANRLDYSYDDFLDTVQETATSIGNAKSSRIKRSAPLSDYKIKLIFNITASVPLPDERNDTLEWENQQRLLQTLETITNKLKRTLNKDPMYSFQLASEILIADSNSLETKKASPFCRPGSVLRGRMCVNCPLGTYYNLEHFTCESCRIGSYQDEEGQLECKLCPSGMYTEYIHSRNISDCKAQCKQGTYSYSGLETCESCPLGTYQPKFGSRSCLSCPENTSTVKRGAVNISACGVPCPEGKFSRSGLMPCHPCPRDYYQPNAGKAFCLACPFYGTTPFAGSRSITECSSFSSTFSAAEESVVPPASLGHIKKRHEISSQVFHECFFNPCHNSGTCQQLGRGYVCLCPLGYTGLKCETDIDECSPLPCLNNGVCKDLVGEFICECPSGYTGQRCEENINECSSSPCLNKGICVDGVAGYRCTCVKGFVGLHCETEVNECQSNPCLNNAVCEDQVGGFLCKCPPGFLGTRCGKNVDECLSQPCKNGATCKDGANSFRCLCAAGFTGSHCELNINECQSNPCRNQATCVDELNSYSCKCQPGFSGKRCETEQSTGFNLDFEVSGIYGYVMLDGMLPSLHALTCTFWMKSSDDMNYGTPISYAVDNGSDNTLLLTDYNGWVLYVNGREKITNCPSVNDGRWHHIAITWTSANGIWKVYIDGKLSDGGAGLSVGLPIPGMFGGGALVLGQEQDKKGEGFSPAESFVGSISQLNLWDYVLSPQQVKSLATSCPEELSKGNVLAWPDFLSGIVGKVKIDSKSIFCSDCPRLGGSVPHLRTASEDLKPGSKVNLFCDPGFQLVGNPVQYCLNQGQWTQPLPHCERISCGVPPPLENGFHSADDFYAGSTVTYQCNNGYYLLGDSRMFCTDNGSWNGVSPSCLDVDECAVGSDCSEHASCLNVDGSYICSCVPPYTGDGKNCAEPIKCKAPGNPENGHSSGEIYTVGAEVTFSCQEGYQLMGVTKITCLESGEWNHLIPYCKAVSCGKPAIPENGCIEELAFTFGSKVTYRCNKGYTLAGDKESSCLANSSWSHSPPVCEPVKCSSPENINNGKYILSGLTYLSTASYSCDTGYSLQGPSIIECTASGIWDRAPPACHLVFCGEPPAIKDAVITGNNFTFRNTVTYTCKEGYTLAGLDTIECLADGKWSRSDQQCLAVSCDEPPIVDHASPETAHRLFGDIAFYYCSDGYSLADNSQLLCNAQGKWVPPEGQDMPRCIAHFCEKPPSVSYSILESVSKAKFAAGSVVSFKCMEGFVLNTSAKIECMRGGQWNPSPMSIQCIPVRCGEPPSIMNGYASGSNYSFGAMVAYSCNKGFYIKGEKKSTCEATGQWSSPIPTCHPVSCGEPPKVENGFLEHTTGRIFESEVRYQCNPGYKSVGSPVFVCQANRHWHSESPLMCVPLDCGKPPPIQNGFMKGENFEVGSKVQFFCNEGYELVGDSSWTCQKSGKWNKKSNPKCMPAKCPEPPLLENQLVLKELTTEVGVVTFSCKEGHVLQGPSVLKCLPSQQWNDSFPVCKIVLCTPPPLISFGVPIPSSALHFGSTVKYSCVGGFFLRGNSTTLCQPDGTWSSPLPECVPVECPQPEEIPNGIIDVQGLAYLSTALYTCKPGFELVGNTTTLCGENGHWLGGKPTCKAIECLKPKEILNGKFSYTDLHYGQTVTYSCNRGFRLEGPSALTCLETGDWDVDAPSCNAIHCDSPQPIENGFVEGADYSYGAIIIYSCFPGFQVAGHAMQTCEESGWSSSIPTCMPIDCGLPPHIDFGDCTKLKDDQGYFEQEDDMMEVPYVTPHPPYHLGAVAKTWENTKESPATHSSNFLYGTMVSYTCNPGYELLGNPVLICQEDGTWNGSAPSCISIECDLPTAPENGFLRFTETSMGSAVQYSCKPGHILAGSDLRLCLENRKWSGASPRCEAISCKKPNPVMNGSIKGSNYTYLSTLYYECDPGYVLNGTERRTCQDDKNWDEDEPICIPVDCSSPPVSANGQVRGDEYTFQKEIEYTCNEGFLLEGARSRVCLANGSWSGATPDCVPVRCATPPQLANGVTEGLDYGFMKEVTFHCHEGYILHGAPKLTCQSDGNWDAEIPLCKPVNCGPPEDLAHGFPNGFSFIHGGHIQYQCFPGYKLHGNSSRRCLSNGSWSGSSPSCLPCRCSTPVIEYGTVNGTDFDCGKAARIQCFKGFKLLGLSEITCEADGQWSSGFPHCEHTSCGSLPMIPNAFISETSSWKENVITYSCRSGYVIQGSSDLICTEKGVWSQPYPVCEPLSCGSPPSVANAVATGEAHTYESEVKLRCLEGYTMDTDTDTFTCQKDGRWFPERISCSPKKCPLPENITHILVHGDDFSVNRQVSVSCAEGYTFEGVNISVCQLDGTWEPPFSDESCSPVSCGKPESPEHGFVVGSKYTFESTIIYQCEPGYELEGNRERVCQENRQWSGGVAICKETRCETPLEFLNGKADIENRTTGPNVVYSCNRGYSLEGPSEAHCTENGTWSHPVPLCKPNPCPVPFVIPENALLSEKEFYVDQNVSIKCREGFLLQGHGIITCNPDETWTQTSAKCEKISCGPPAHVENAIARGVHYQYGDMITYSCYSGYMLEGFLRSVCLENGTWTSPPICRAVCRFPCQNGGICQRPNACSCPEGWMGRLCEEPICILPCLNGGRCVAPYQCDCPPGWTGSRCHTAVCQSPCLNGGKCVRPNRCHCLSSWTGHNCSRKRRTGF

SEQ ID NO: 742 - DNA, 3285 bp, Homosapiens
cgttccctccggagttcccgagctgctgaggagtctggattgtgtctgtccccagtgtcagatgaaagggcgctgaggctcttggccgctgccccgcgcccagctccgcgcacgcccctctgcgagtccggccgcccagcgcctcttcccgcccgagccgccgcctgcgctccggggcagccgctctgtctccagcgcgatgtggcctcgcctggccttttgttgctggggtctggcgctcgtttcgggctgggcgacctttcagcagatgtccccgtcgcgcaatttcagcttccgcctcttccccgagaccgcgcccggggcccccgggagtatccccgcgccgcccgctcctggcgacgaagcggcggggagcagagtggagcggctgggccaggcgttccggcgacgcgtgcggctgctgcgggagctcagcgagcgcctggagcttgtcttcctggtggatgattcgtccagcgtgggcgaagtcaacttccgcagcgagctcatgttcgtccgcaagctgctgtccgacttccccgtggtgcccacggccacgcgcgtggccatcgtgaccttctcgtccaagaactacgtggtgccgcgcgtcgattacatctccacccgccgcgcgcgccagcacaagtgcgcgctgctcctccaagagatccctgccatctcctaccgaggtggcggcacctacaccaagggcgccttccagcaagccgcgcaaattcttcttcatgctagagaaaactcaacaaaagttgtatttctcatcactgatggatattccaatgggggagaccctagaccaattgcagcgtcactgcgagattcaggagtggagatcttcacttttggcatatggcaagggaacattcgagagctgaatgacatggcttccaccccaaaggaggagcactgttacctgctacacagttttgaagaatttgaggctttagctcgccgggcattgcatgaagatctaccttctgggagttttattcaagatgatatggtccactgctcatatctttgtgatgaaggcaaggactgctgtgaccgaatgggaagctgcaaatgtgggacacacacaggccattttgagtgcatctgtgaaaaggggtattacgggaaaggtctgcagtatgaatgcacagcttgcccatcggggacatacaaacctgaaggctcaccaggaggaatcagcagttgcattccatgtcctgatgaaaatcacacctctccacctggaagcacatcccctgaagactgtgtctgcagagagggatacagggcatctggccagacctgtgaacttgtccactgccctgccctgaagcctcccgaaaatggttactttatccaaaacacttgcaacaaccacttcaatgcagcctgtggggtccgatgtcaccctggatttgatcttgtgggaagcagcatcatcttatgtctacccaatggtttgtggtccggttcagagagctactgcagagtaagaacatgtcctcatctccgccagccgaaacatggccacatcagctgttctacaagggaaatgttatataagacaacatgtttggttgcctgtgatgaagggtacagactagaaggcagtgataagcttacttgtcaaggaaacagccagtgggatgggccagaaccccggtgtgtggagcgccactgttccacctttcagatgcccaaagatgtcatcatatccccccacaactgtggcaagcagccagccaaatttgggacgatctgctatgtaagttgccgccaagggttcattttatctggagtcaaagaaatgctgagatgtaccacttctggaaaatggaatgtcggagttcaggcagctgtgtgtaaagacgtggaggctcctcaaatcaactgtcctaaggacatagaggctaagactctggaacagcaagattctgccaatgttacctggcagattccaacagctaaagacaactctggtgaaaaggtgtcagtccacgttcatccagctttcaccccaccttaccttttcccaattggagatgttgctatcgtatacacggcaactgacctatccggcaaccaggccagctgcattttccatatcaaggttattgatgcagaaccacctgtcatagactggtgcagatctccacctcccgtccaggtctcggagaaggtacatgccgcaagctgggatgagcctcagttctcagacaactcaggggctgaattggtcattaccagaagtcatacacaaggagaccttttccctcaaggggagactatagtacagtatacagccactgacccctcaggcaataacaggacatgtgatatccatattgtcataaaaggttctccctgtgaaattccattcacacctgtaaatggggattttatatgcactccagataatactggagtcaactgtacattaacttgcttggagggctatgatttcacagaagggtctactgacaagtattattgtgcttatgaagatggcgtctggaaaccaacatataccactgaatggccagactgtgccaaaaaacgttttgcaaaccacgggttcaagtcctttgagatgttctacaaagcagctcgttgtgatgacacagatctgatgaagaagttttctgaagcatttgagacgaccctgggaaaaatggtcccatcattttgtagtgatgcagaggacattgactgcagactggaggagaacctgaccaaaaaatattgcctagaatataattatgactatgaaaatggctttgcaattggaccaggtggctggggtgcagctaataggctggattactcttacgatgacttcctggacactgtgcaagaaacagccacaagcatcggcaatgccaagtcctcacggattaaaagaagtgccccattatctgactataaaattaagttaatttttaacatcacagctagtgtgccattacccgatgaaagaaatgatacccttgaatgggaaaatcagcaacgactccttcagacattggaaactatcacaaataaactgaaaaggactctcaacaaagaccccatgtattcctttcagcttgcatcagaaatacttatagccgacagcaattcattagaaacaaaaaaggcttcccccttctgcagaccaggctcagtgctgagagggcgtatgtgtggtaagactgttccctgtgatcaaaaatatttggtgcatactgggtcaaatgagatgggtgtagccattttacaactataaagggatat

SEQ ID NO: 743 - protein, 1025 aa, Homosapiens
MWPRLAFCCWGLALVSGWATFQQMSPSRNFSFRLFPETAPGAPGSIPAPPAPGDEAAGSRVERLGQAFRRRVRLLRELSERLELVFLVDDSSSVGEVNFRSELMFVRKLLSDFPVVPTATRVAIVTFSSKNYVVPRVDYISTRRARQHKCALLLQEIPAISYRGGGTYTKGAFQQAAQILLHARENSTKVVFLITDGYSNGGDPRPIAASLRDSGVEIFTFGIWQGNIRELNDMASTPKEEHCYLLHSFEEFEALARRALHEDLPSGSFIQDDMVHCSYLCDEGKDCCDRMGSCKCGTHTGHFECICEKGYYGKGLQYECTACPSGTYKPEGSPGGISSCIPCPDENHTSPPGSTSPEDCVCREGYRASGQTCELVHCPALKPPENGYFIQNTCNNHFNAACGVRCHPGFDLVGSSIILCLPNGLWSGSESYCRVRTCPHLRQPKHGHISCSTREMLYKTTCLVACDEGYRLEGSDKLTCQGNSQWDGPEPRCVERHCSTFQMPKDVIISPHNCGKQPAKFGTICYVSCRQGFILSGVKEMLRCTTSGKWNVGVQAAVCKDVEAPQINCPKDIEAKTLEQQDSANVTWQIPTAKDNSGEKVSVHVHPAFTPPYLFPIGDVAIVYTATDLSGNQASCIFHIKVIDAEPPVIDWCRSPPPVQVSEKVHAASWDEPQFSDNSGAELVITRSHTQGDLFPQGETIVQYTATDPSGNNRTCDIHIVIKGSPCEIPFTPVNGDFICTPDNTGVNCTLTCLEGYDFTEGSTDKYYCAYEDGVWKPTYTTEWPDCAKKRFANHGFKSFEMFYKAARCDDTDLMKKFSEAFETTLGKMVPSFCSDAEDIDCRLEENLTKKYCLEYNYDYENGFAIGPGGWGAANRLDYSYDDFLDTVQETATSIGNAKSSRIKRSAPLSDYKIKLIFNITASVPLPDERNDTLEWENQQRLLQTLETITNKLKRTLNKDPMYSFQLASEILIADSNSLETKKASPFCRPGSVLRGRMCGKTVPCDQKYLVHTGSNEMGVAILQL

SEQ ID NO: 744 - DNA, 2009 bp, Homosapiens
gaggctttagctcgccgggcattgcatgaagatctaccttctgggagttttattcaagatgatatggtccactgctcatatctttgtgatgaaggcaaggactgctgtgaccgaatgggaagctgcaaatgtgggacacacacaggccattttgagtgcatctgtgaaaaggggtattacgggaaaggtctgcagtatgaatgcacagctgatgtgccacataacatggacttctccggcttgtctgcccacagcttgcccatcggggacatacaaacctgaaggctcaccaggaggaatcagcagttgcattccatgtcctgatgaaaatcacacctctccacctggaagcacatcccctgaagactgtgtctgcagagagggatacagggcatctggccagacctgtgaacttgtccactgccctgccctgaagcctcccgaaaatggttactttatccaaaacacttgcaacaaccacttcaatgcagcctgtggggtccgatgtcaccctggatttgatcttgtgggaagcagcatcatcttatgtctacccaatggtttgtggtccggttcagagagctactgcagaggtatgcaaactgccaatttacattgtttatttactgtcttgcctgatttccttgatttaaactctagtaaaccagtcagttcttcatttctttttggatttcatagaccccatactacagaaagagaaaaattataggaaatttgaaatcagaattaccaagttcaattgaccacataattgtaaactacgccttttatagcccttttatgaacaagcaaagaaaaagtttgcctgggaagtaaatggacaggttaccccaaacctcaaatttcaagcctctaagacatgatataaaggagagtttagaataatcagagtggagactgatgcctcttggaattgtaggacttaaggaatcacacaagtatcctgcaacaagagcagttagccaacttgtaatctccagcctttacttcggctagtcgacccgttatagaaagtagagaatttgtcaaagcgagagtccaaggagcctattcaggccaatagaaagtgggcaccaccaatggaatctgaggctcccatgtcaaatacagagaagcaataaaaaaaaaaaaatagtgcctcaatctgcctcaacttgccaactccaggacctactttcctacttcttacaactgtcacacaaccaacttcctagggttttacaagtagggttagaagaggaggatatttaagaaaaggtaaaaggggggcgagcaaagggacttgaggacctccatcagaatccctgcccacaaagcttctcagtacagtacctgctccctacctacggttgccagttgaaacacaggatgccagttaaatttgaatttttgataaataatattttagtatatgtgggtcccctgcaagatttggaacctccttatactaaaaaattatttgttgattttctgaaatttaaatttaactgggcgtgctggttcattggtttgtttgttgctaaatctggcaactttactcccaccacatccactagtcattttttggcagaacactttgctgaggatttgactactccaaaaccccacaaatcagctggaccactggttaaagattagttctgtcttctggtcttttcttggcatccatatccataagggagaaccacctactcatgactccaagatcatttgtgaatcccaggagacatctatgttggtaccaatttattaggtaccaatactgaactcatctataaatgtaaattggcctacatggtatccccaaaagacaaggaaaactgaaaacgatcagcagattgaacaaaagagacctgacagaaaagaaagaaaaatggaatccctgagattcaaaggcaactacattgctaaaataaggccaggattccaagcaatgaaagaaatttgagaggaaaaatatgtattagaagtaaaaaaaaaaaaaaaaa

SEQ ID NO: 745 - protein, 234 aa, Homosapiens
MKIYLLGVLFKMIWSTAHIFVMKARTAVTEWEAANVGHTQAILSASVKRGITGKVCSMNAQLMCHITWTSPACLPTACPSGTYKPEGSPGGISSCIPCPDENHTSPPGSTSPEDCVCREGYRASGQTCELVHCPALKPPENGYFIQNTCNNHFNAACGVRCHPGFDLVGSSIILCLPNGLWSGSESYCRGMQTANLHCLFTVLPDFLDLNSSKPVSSSFLFGFHRPHTTEREKL

SEQ ID NO: 746 - DNA, 1937 bp, Homosapiens
gatgaagtctcactatgtttcccagcctagtctcaagctcctggactcaagtggtcctcctgcctcagccttccaaagtgcagggattacaggcatgagccaccgcacccagctcaactggttgttattgttatgttggtgtttttgcatggcaatgccatccgcctgacatattgattgtgcaacaatcaatatgttgcacaaaatatctactgagccttgtaacagcttcctaaatccaaggatagatcagaaactatattgtacttcatttaaggcactcatttttgcatttccattgcagatgtctggaaggttatacgatggatacagatacagatacattcacctgtcagaaagatggtcgctggttccctgagagaatctcctgcagtcctaaaaaatgtcctctcccggaaaacataacacatatacttgtacatggggacgatttcagtgtgaataggcaagtttctgtgtcatgtgcagaagggtatacctttgagggagttaacatatcagtatgtcagcttgatggaacctgggagccaccattctccgatgaatcttgcagtccagtttcttgtgggaaacctgaaagtccagaacatggatttgtggttggcagtaaatacacctttgaaagcacaattatttatcagtgtgagcctggctatgaactagaggggaacagggaacgtgtctgccaggagaacagacagtggagtggaggggtggcaatatgcaaagagaccaggtgtgaaactccacttgaatttctcaatgggaaagctgacattgaaaacaggacgactggacccaacgtggtatattcctgcaacagaggctacagtcttgaagggccatctgaggcacactgcacagaaaatggaacctggagccacccagtccctctctgcaaaccaaatccatgccctgttccttttgtgattcccgagaatgctctgctgtctgaaaaggagttttatgttgatcagaatgtgtccatcaaatgtagggaaggttttctgctgcagggccacggcatcattacctgcaaccccgacgagacgtggacacagacaagcgccaaatgtgaaaaaatctcatgtggtccaccagctcacgtagaaaatgcaattgctcgaggcgtacattatcaatatggagacatgatcacctactcatgttacagtggatacatgttggagggtttcctgaggagtgtttgtttagaaaatggaacatggacatcacctcctatttgcagagctgtctgtcgatttccatgtcagaatgggggcatctgccaacgcccaaatgcttgttcctgtccagagggctggatggggcgcctctgtgaagaaccaatctgcattcttccctgtctgaacggaggtcgctgtgtggccccttaccagtgtgactgcccgcctggctggacggggtctcgctgtcatacagctgtttgccagtctccctgcttaaatggtggaaaatgtgtaagaccaaaccgatgtcactgtctttcttcttggacgggacataactgttccaggaaaaggaggactgggttttaaccactgcacgaccatctggctctcccaaaagcaggatcatctctcctcggtagtgcctgggcatcctggaacttatgcaaagaaagtccaacatggtgctgggtcttgtttagtaaacttgttacttggggttactttttttattttgtgatatattttgttattccttgtgacatactttcttacatgtttccatttttaaatatgcctgtattttctatataaaaattatattaaatagatgctgctctaccctcacaaaatgtacatattctgctgtctattgggaaagttcctggtacacatttttattcagttacttaaaatgatttttccattaaagtatattttgctact

SEQ ID NO: 747 - protein, 418 aa, Homosapiens
MDTDTDTFTCQKDGRWFPERISCSPKKCPLPENITHILVHGDDFSVNRQVSVSCAEGYTFEGVNISVCQLDGTWEPPFSDESCSPVSCGKPESPEHGFVVGSKYTFESTIIYQCEPGYELEGNRERVCQENRQWSGGVAICKETRCETPLEFLNGKADIENRTTGPNVVYSCNRGYSLEGPSEAHCTENGTWSHPVPLCKPNPCPVPFVIPENALLSEKEFYVDQNVSIKCREGFLLQGHGIITCNPDETWTQTSAKCEKISCGPPAHVENAIARGVHYQYGDMITYSCYSGYMLEGFLRSVCLENGTWTSPPICRAVCRFPCQNGGICQRPNACSCPEGWMGRLCEEPICILPCLNGGRCVAPYQCDCPPGWTGSRCHTAVCQSPCLNGGKCVRPNRCHCLSSWTGHNCSRKRRTGF

SEQ ID NO: 748 - DNA, 3245 bp, Homosapiens
agaaggagggaagcgggagatttttcttgactgccccctttccttcaaacattttataggcttcagggagagagaggaggaggagagagggaagaaaaaaagaggagagcgagaggggtagagagcgcgcgccgttccctccggagttcccgagctgctgaggagtctggattgtgtctgtccccagtgtcagatgaaagggcgctgaggctcttggccgctgccccgcgcccagctccgcgcacgcccctctgcgagtccggccgcccagcgcctcttcccgcccgagccgccgcctgcgctccggggcagccgctctgtctccagcgcgatgtggcctcgcctggccttttgttgctggggtctggcgctcgtttcgggctgggcgacctttcagcagatgtccccgtcgcgcaatttcagcttccgcctcttccccgagaccgcgcccggggcccccgggagtatccccgcgccgcccgctcctggcgacgaagcggcggggagcagagtggagcggctgggccaggcgttccggcgacgcgtgcggctgctgcgggagctcagcgagcgcctggagcttgtcttcctggtggatgattcgtccagcgtgggcgaagtcaacttccgcagcgagctcatgttcgtccgcaagctgctgtccgacttccccgtggtgcccacggccacgcgcgtggccatcgtgaccttctcgtccaagaactacgtggtgccgcgcgtcgattacatctccacccgccgcgcgcgccagcacaagtgcgcgctgctcctccaagagatccctgccatctcctaccgaggtggcggcacctacaccaagggcgccttccagcaagccgcgcaaattcttcttcatgctagagaaaactcaacaaaagttgtatttctcatcactgatggatattccaatgggggagaccctagaccaattgcagcgtcactgcgagattcaggagtggagatcttcacttttggcatatggcaagggaacattcgagagctgaatgacatggcttccaccccaaaggaggagcactgttacctgctacacagttttgaagaatttgaggctttagctcgccgggcattgcatgaagatctaccttctgggagttttattcaagatgatatggtccactgctcatatctttgtgatgaaggcaaggactgctgtgaccgaatgggaagctgcaaatgtgggacacacacaggccattttgagtgcatctgtgaaaaggggtattacgggaaaggtctgcagtatgaatgcacagcttgcccatcggggacatacaaacctgaaggctcaccaggaggaatcagcagttgcattccatgtcctgatgaaaatcacacctctccacctggaagcacatcccctgaagactgtgtctgcagagagggatacagggcatctggccagacctgtgaacttgtccactgccctgccctgaagcctcccgaaaatggttactttatccaaaacacttgcaacaaccacttcaatgcagcctgtggggtccgatgtcaccctggatttgatcttgtgggaagcagcatcatcttatgtctacccaatggtttgtggtccggttcagagagctactgcagagtaagaacatgtcctcatctccgccagccgaaacatggccacatcagctgttctacaagggaaatgttatataagacaacatgtttggttgcctgtgatgaagggtacagactagaaggcagtgataagcttacttgtcaaggaaacagccagtgggatgggccagaaccccggtgtgtggagcgccactgttccacctttcagatgcccaaagatgtcatcatatccccccacaactgtggcaagcagccagccaaatttgggacgatctgctatgtaagttgccgccaagggttcattttatctggagtcaaagaaatgctgagatgtaccacttctggaaaatggaatgtcggagttcaggcagctgtgtgtaaagacgtggaggctcctcaaatcaactgtcctaaggacatagaggctaagactctggaacagcaagattctgccaatgttacctggcagattccaacagctaaagacaactctggtgaaaaggtgtcagtccacgttcatccagctttcaccccaccttaccttttcccaattggagatgttgctatcgtatacacggcaactgacctatccggcaaccaggccagctgcattttccatatcaaggttattgatgcagaaccacctgtcatagactggtgcagatctccacctcccgtccaggtctcggagaaggtacatgccgcaagctgggatgagcctcagttctcagacaactcaggggctgaattggtcattaccagaagtcatacacaaggagaccttttccctcaaggggagactatagtacagtatacagccactgacccctcaggcaataacaggacatgtgatatccatattgtcataaaaggttctccctgtgaaattccattcacacctgtaaatggggattttatatgcactccagataatactggagtcaactgtacattaacttgcttggagggctatgatttcacagaagggtctactgacaagtattattgtgcttatgaagatggcgtctggaaaccaacatataccactgaatggccagactgtgccaaaaaacgttttgcaaaccacgggttcaagtcctttgagatgttctacaaagcagctcgttgtgatgacacagatctgatgaagaagttttctgaagcatttgagacgaccctgggaaaaatggtcccatcattttgtagtgatgcagaggacattgactgcagactggaggagaacctgaccaaaaaatattgcctagaatataattatgactatgaaaatggctttgcaattggtaattaaattctgtggcatcggtagttggcaagactaatctgcaaaataagaataattccagaaaagtgaggcaaactagaaacattaacttctattaatttattcatcaagtattttaggatggctaaataatttgataatgtgctgaaagatcattaaggttatatcaaattttagtaacaaataaattatttaaaattatttgccaggattcttaaaaatgacaaaaactaagaaaactaagtcacatatgctggtaaaattcaaatgttgatgtatcctaaaagagaatagtaataaagtcctaacagca

SEQ ID NO: 749 - protein, 868 aa, Homosapiens
MWPRLAFCCWGLALVSGWATFQQMSPSRNFSFRLFPETAPGAPGSIPAPPAPGDEAAGSRVERLGQAFRRRVRLLRELSERLELVFLVDDSSSVGEVNFRSELMFVRKLLSDFPVVPTATRVAIVTFSSKNYVVPRVDYISTRRARQHKCALLLQEIPAISYRGGGTYTKGAFQQAAQILLHARENSTKVVFLITDGYSNGGDPRPIAASLRDSGVEIFTFGIWQGNIRELNDMASTPKEEHCYLLHSFEEFEALARRALHEDLPSGSFIQDDMVHCSYLCDEGKDCCDRMGSCKCGTHTGHFECICEKGYYGKGLQYECTACPSGTYKPEGSPGGISSCIPCPDENHTSPPGSTSPEDCVCREGYRASGQTCELVHCPALKPPENGYFIQNTCNNHFNAACGVRCHPGFDLVGSSIILCLPNGLWSGSESYCRVRTCPHLRQPKHGHISCSTREMLYKTTCLVACDEGYRLEGSDKLTCQGNSQWDGPEPRCVERHCSTFQMPKDVIISPHNCGKQPAKFGTICYVSCRQGFILSGVKEMLRCTTSGKWNVGVQAAVCKDVEAPQINCPKDIEAKTLEQQDSANVTWQIPTAKDNSGEKVSVHVHPAFTPPYLFPIGDVAIVYTATDLSGNQASCIFHIKVIDAEPPVIDWCRSPPPVQVSEKVHAASWDEPQFSDNSGAELVITRSHTQGDLFPQGETIVQYTATDPSGNNRTCDIHIVIKGSPCEIPFTPVNGDFICTPDNTGVNCTLTCLEGYDFTEGSTDKYYCAYEDGVWKPTYTTEWPDCAKKRFANHGFKSFEMFYKAARCDDTDLMKKFSEAFETTLGKMVPSFCSDAEDIDCRLEENLTKKYCLEYNYDYENGFAIGN

SEQ ID NO: 750 - DNA, 8192 bp, Homosapiens
cgttccctccggagttcccgagctgctgaggagtctggattgtgtctgtccccagtgtcagatgaaagggcgctgaggctcttggccgctgccccgcgcccagctccgcgcacgcccctctgcgagtccggccgcccagcgcctcttcccgcccgagccgccgcctgcgctccggggcagccgctctgtctccagcgcgatgtggcctcgcctggccttttgttgctggggtctggcgctcgtttcgggctgggcgacctttcagcagatgtccccgtcgcgcaatttcagcttccgcctcttccccgagaccgcgcccggggcccccgggagtatccccgcgccgcccgctcctggcgacgaagcggcggggagcagagtggagcggctgggccaggcgttccggcgacgcgtgcggctgctgcgggagctcagcgagcgcctggagcttgtcttcctggtggatgattcgtccagcgtgggcgaagtcaacttccgcagcgagctcatgttcgtccgcaagctgctgtccgacttccccgtggtgcccacggccacgcgcgtggccatcgtgaccttctcgtccaagaactacgtggtgccgcgcgtcgattacatctccacccgccgcgcgcgccagcacaagtgcgcgctgctcctccaagagatccctgccatctcctaccgaggtggcggcacctacaccaagggcgccttccagcaagccgcgcaaattcttcttcatgctagagaaaactcaacaaaagttgtatttctcatcactgatggatattccaatgggggagaccctagaccaattgcagcgtcactgcgagattcaggagtggagatcttcacttttggcatatggcaagggaacattcgagagctgaatgacatggcttccaccccaaaggaggagcactgttacctgctacacagttttgaagaatttgaggctttagctcgccgggcattgcatgaagatctaccttctgggagttttattcaagatgatatggtccactgctcatatctttgtgatgaaggcaaggactgctgtgaccgaatgggaagctgcaaatgtgggacacacacaggccattttgagtgcatctgtgaaaaggggtattacgggaaaggtctgcagtatgaatgcacagcttgcccatcggggacatacaaacctgaaggctcaccaggaggaatcagcagttgcattccatgtcctgatgaaaatcacacctctccacctggaagcacatcccctgaagactgtgtctgcagagagggatacagggcatctggccagacctgtgaacttgtccactgccctgccctgaagcctcccgaaaatggttactttatccaaaacacttgcaacaaccacttcaatgcagcctgtggggtccgatgtcaccctggatttgatcttgtgggaagcagcatcatcttatgtctacccaatggtttgtggtccggttcagagagctactgcagagtaagaacatgtcctcatctccgccagccgaaacatggccacatcagctgttctacaagggaaatgttatataagacaacatgtttggttgcctgtgatgaagggtacagactagaaggcagtgataagcttacttgtcaaggaaacagccagtgggatgggccagaaccccggtgtgtggagcgccactgttccacctttcagatgcccaaagatgtcatcatatccccccacaactgtggcaagcagccagccaaatttgggacgatctgctatgtaagttgccgccaagggttcattttatctggagtcaaagaaatgctgagatgtaccacttctggaaaatggaatgtcggagttcaggcagctgtgtgtaaagacgtggaggctcctcaaatcaactgtcctaaggacatagaggctaagactctggaacagcaagattctgccaatgttacctggcagattccaacagctaaagacaactctggtgaaaaggtgtcagtccacgttcatccagctttcaccccaccttaccttttcccaattggagatgttgctatcgtatacacggcaactgacctatccggcaaccaggccagctgcattttccatatcaaggttattgatgcagaaccacctgtcatagactggtgcagatctccacctcccgtccaggtctcggagaaggtacatgccgcaagctgggatgagcctcagttctcagacaactcaggggctgaattggtcattaccagaagtcatacacaaggagaccttttccctcaaggggagactatagtacagtatacagccactgacccctcaggcaataacaggacatgtgatatccatattgtcataaaaggttctccctgtgaaattccattcacacctgtaaatggggattttatatgcactccagataatactggagtcaactgtacattaacttgcttggagggctatgatttcacagaagggtctactgacaagtattattgtgcttatgaagatggcgtctggaaaccaacatataccactgaatggccagactgtgccaaaaaacgttttgcaaaccacgggttcaagtcctttgagatgttctacaaagcagctcgttgtgatgacacagatctgatgaagaagttttctgaagcatttgagacgaccctgggaaaaatggtcccatcattttgtagtgatgcagaggacattgactgcagactggaggagaacctgaccaaaaaatattgcctagaatataattatgactatgaaaatggctttgcaattggaccaggtggctggggtgcagctaataggctggattactcttacgatgacttcctggacactgtgcaagaaacagccacaagcatcggcaatgccaagtcctcacggattaaaagaagtgccccattatctgactataaaattaagttaatttttaacatcacagctagtgtgccattacccgatgaaagaaatgatacccttgaatgggaaaatcagcaacgactccttcagacattggaaactatcacaaataaactgaaaaggactctcaacaaagaccccatgtattcctttcagcttgcatcagaaatacttatagccgacagcaattcattagaaacaaaaaaggcttcccccttctgcagaccaggctcagtgctgagagggcgtatgtgtgtcaattgccctttgggaacctattataatctggaacatttcacctgtgaaagctgccggatcggatcctatcaagatgaagaagggcaacttgagtgcaagctttgcccctctgggatgtacacggaatatatccattcaagaaacatctctgattgtaaagctcagtgtaaacaaggcacctactcatacagtggacttgagacttgtgaatcgtgtccactgggcacttatcagccaaaatttggttcccggagctgcctctcgtgtccagaaaacacctcaactgtgaaaagaggagccgtgaacatttctgcatgtggagttccttgtccagaaggaaaattctcgcgttctgggttaatgccctgtcacccatgtcctcgtgactattaccaacctaatgcagggaaggccttctgcctggcctgtcccttttatggaactaccccattcgctggttccagatccatcacagaatgttcaagttttagttcaactttctcagcggcagaggaaagtgtggtgccccctgcctctcttggacatattaaaaagaggcatgaaatcagcagtcaggttttccatgaatgcttctttaacccttgccacaatagtggaacctgccagcaacttgggcgtggttatgtttgtctctgtccacttggatatacaggcttaaagtgtgaaacagacatcgatgagtgcagcccactgccttgcctcaacaatggagtttgtaaagacctagttggggaattcatttgtgagtgcccatcaggttacacaggtcagcggtgtgaagaaaatataaatgagtgtagctccagtccttgtttaaataaaggaatctgtgttgatggtgtggctggctatcgttgcacatgtgtgaaaggatttgtaggcctgcattgtgaaacagaagtcaatgaatgccagtcaaacccatgcttaaataatgcagtctgtgaagaccaggttgggggattcttgtgcaaatgcccacctggatttttgggtacccgatgtggaaagaacgtcgatgagtgtctcagtcagccatgcaaaaatggagctacctgtaaagacggtgccaatagcttcagatgcctgtgtgcagctggcttcacaggatcacactgtgaattgaacatcaatgaatgtcagtctaatccatgtagaaatcaggccacctgtgtggatgaattaaattcatacagttgtaaatgtcagccaggattttcaggcaaaaggtgtgaaacagaacagtctacaggctttaacctggattttgaagtttctggcatctatggatatgtcatgctagatggcatgctcccatctctccatgctctaacctgtaccttctggatgaaatcctctgacgacatgaactatggaacaccaatctcctatgcagttgataacggcagcgacaataccttgctcctgactgattataacggctgggttctttatgtgaatggcagggaaaagataacaaactgtccctcggtgaatgatggcagatggcatcatattgcaatcacttggacaagtgccaatggcatctggaaagtctatatcgatgggaaattatctgacggtggtgctggcctctctgttggtttgcccatacctggtatgtacggtggtggtgcgttagttctggggcaagagcaagacaaaaaaggagagggattcagcccagctgagtcttttgtgggctccataagccagctcaacctctgggactatgtcctgtctccacagcaggtgaagtcactggctacctcctgcccagaggaactcagtaaaggaaacgtgttagcatggcctgatttcttgtcaggaattgtggggaaagtgaagatcgattctaagagcatattttgttctgattgcccacgcttaggagggtcagtgcctcatctgagaactgcatctgaagatttaaagccaggttccaaagtcaatctgttctgtgatccaggcttccagctggtcgggaaccctgtgcagtactgtctgaatcaaggacagtggacacaaccacttcctcactgtgaacgcattagctgtggggtgccacctcctttggagaatggcttccattcagccgatgacttctatgctggcagcacagtaacctaccagtgcaacaatggctactatctattgggtgactcaaggatgttctgtacagataatgggagctggaacggcgtttcaccatcctgccttgatgtcgatgagtgtgcagttggatcagattgtagtgagcatgcttcttgcctgaacgtagatggatcctacatatgttcatgtgtcccaccgtacacaggagatgggaaaaactgtgcagaacctataaaatgtaaggctccaggaaatccggaaaatggccactcctcaggtgagatttatacagtaggtgccgaagtcacattttcgtgtcaggaaggataccagttgatgggagtaaccaaaatcacatgtttggagtctggagaatggaatcatctaataccatattgtaaagctgtttcatgtggtaaaccggctattccagaaaatggttgcattgaggagttagcatttacttttggcagcaaagtgacatataggtgtaataaaggatatactctggccggtgataaagaatcatcctgtcttgctaacagttcttggagtcattcccctcctgtgtgtgaaccagtgaagtgttctagtccggaaaatataaataatggaaaatatattttgagtgggcttacctacctttctactgcatcatattcatgcgatacaggatacagcttacagggcccttccattattgaatgcacggcttctggcatctgggacagagcgccacctgcctgtcacctcgtcttctgtggagaaccacctgccatcaaagatgctgtcattacggggaataacttcactttcaggaacaccgtcacttacacttgcaaagaaggctatactcttgctggtcttgacaccattgaatgcctggccgacggcaagtggagtagaagtgaccagcagtgcctggctgtctcctgtgatgagccacccattgtggaccacgcctctccagagactgcccatcggctctttggagacattgcattctactactgctctgatggttacagcctagcagacaattcccagcttctctgcaatgcccagggcaagtgggtacccccagaaggtcaagacatgccccgttgtatagctcatttctgtgaaaaacctccatcggtttcctatagcatcttggaatctgtgagcaaagcaaaatttgcagctggctcagttgtgagctttaaatgcatggaaggctttgtactgaacacctcagcaaagattgaatgtatgagaggtgggcagtggaacccttcccccatgtccatccagtgcatccctgtgcggtgtggagagccaccaagcatcatgaatggctatgcaagtggatcaaactacagttttggagccatggtggcttacagctgcaacaaggggttctacatcaaaggggaaaagaagagcacctgcgaagccacagggcagtggagtagtcctataccgacgtgccacccggtatcttgtggtgaaccacctaaggttgagaatggctttctggagcatacaactggcaggatctttgagagtgaagtgaggtatcagtgtaacccgggctataagtcagtcggaagtcctgtatttgtctgccaagccaatcgccactggcacagtgaatcccctctgatgtgtgttcctctcgactgtggaaaacctcccccgatccagaatggcttcatgaaaggagaaaactttgaagtagggtccaaggttcagtttttctgtaatgagggttatgagcttgttggtgacagttcttggacatgtcagaaatctggcaaatggaataagaagtcaaatccaaagtgcatgcctgccaagtgcccagagccgcccctcttggaaaaccagctagtattaaaggagttgaccaccgaggtaggagttgtgacattttcctgtaaagaagggcatgtcctgcaaggcccctctgtcctgaaatgcttgccatcccagcaatggaatgactctttccctgtttgtaagattgttctttgtaccccacctcccctaatttcctttggtgtccccattccttcttctgctcttcattttggaagtactgtcaagtattcttgtgtaggtgggtttttcctaagaggaaattctaccaccctctgccaacctgatggcacctggagctctccactgccagaatgtgttccagtagaatgtccccaacctgaggaaatccccaatggaatcattgatgtgcaaggccttgcctatctcagcacagctctctatacctgcaagccaggctttgaattggtgggaaatactaccaccctttgtggagaaaatggtcactggcttggaggaaaaccaacatgtaaagccattgagtgcctgaaacccaaggagattttgaatggcaaattctcttacacggacctacactatggacagaccgttacctactcttgcaaccgaggctttcggctcgaaggtcccagtgccttgacctgtttagagacaggtgattgggatgtagatgccccatcttgcaatgccatccactgtgattccccacaacccattgaaaatggttttgtagaaggtgcagattacagctatggtgccataatcatctacagttgcttccctgggtttcaggtggctggtcatgccatgcagacctgtgaagagtcaggatggtcaagttccatcccaacatgtatgccaatagactgtggcctccctcctcatatagattttggagactgtactaaactcaaagatgaccagggatattttgagcaagaagacgacatgatggaagttccatatgtgactcctcaccctccttatcatttgggagcagtggctaaaacctggg

SEQ ID NO: 751 - protein, 3568 aa, Homosapiens
MWPRLAFCCWGLALVSGWATFQQMSPSRNFSFRLFPETAPGAPGSIPAPPAPGDEAAGSRVERLGQAFRRRVRLLRELSERLELVFLVDDSSSVGEVNFRSELMFVRKLLSDFPVVPTATRVAIVTFSSKNYVVPRVDYISTRRARQHKCALLLQEIPAISYRGGGTYTKGAFQQAAQILLHARENSTKVVFLITDGYSNGGDPRPIAASLRDSGVEIFTFGIWQGNIRELNDMASTPKEEHCYLLHSFEEFEALARRALHEDLPSGSFIQDDMVHCSYLCDEGKDCCDRMGSCKCGTHTGHFECICEKGYYGKGLQYECTACPSGTYKPEGSPGGISSCIPCPDENHTSPPGSTSPEDCVCREGYRASGQTCELVHCPALKPPENGYFIQNTCNNHFNAACGVRCHPGFDLVGSSIILCLPNGLWSGSESYCRVRTCPHLRQPKHGHISCSTREMLYKTTCLVACDEGYRLEGSDKLTCQGNSQWDGPEPRCVERHCSTFQMPKDVIISPHNCGKQPAKFGTICYVSCRQGFILSGVKEMLRCTTSGKWNVGVQAAVCKDVEAPQINCPKDIEAKTLEQQDSANVTWQIPTAKDNSGEKVSVHVHPAFTPPYLFPIGDVAIVYTATDLSGNQASCIFHIKVIDAEPPVIDWCRSPPPVQVSEKVHAASWDEPQFSDNSGAELVITRSHTQGDLFPQGETIVQYTATDPSGNNRTCDIHIVIKGSPCEIPFTPVNGDFICTPDNTGVNCTLTCLEGYDFTEGSTDKYYCAYEDGVWKPTYTTEWPDCAKKRFANHGFKSFEMFYKAARCDDTDLMKKFSEAFETTLGKMVPSFCSDAEDIDCRLEENLTKKYCLEYNYDYENGFAIGPGGWGAANRLDYSYDDFLDTVQETATSIGNAKSSRIKRSAPLSDYKIKLIFNITASVPLPDERNDTLEWENQQRLLQTLETITNKLKRTLNKDPMYSFQLASEILIADSNSLETKKASPFCRPGSVLRGRMCVNCPLGTYYNLEHFTCESCRIGSYQDEEGQLECKLCPSGMYTEYIHSRNISDCKAQCKQGTYSYSGLETCESCPLGTYQPKFGSRSCLSCPENTSTVKRGAVNISACGVPCPEGKFSRSGLMPCHPCPRDYYQPNAGKAFCLACPFYGTTPFAGSRSITECSSFSSTFSAAEESVVPPASLGHIKKRHEISSQVFHECFFNPCHNSGTCQQLGRGYVCLCPLGYTGLKCETDIDECSPLPCLNNGVCKDLVGEFICECPSGYTGQRCEENINECSSSPCLNKGICVDGVAGYRCTCVKGFVGLHCETEVNECQSNPCLNNAVCEDQVGGFLCKCPPGFLGTRCGKNVDECLSQPCKNGATCKDGANSFRCLCAAGFTGSHCELNINECQSNPCRNQATCVDELNSYSCKCQPGFSGKRCETEQSTGFNLDFEVSGIYGYVMLDGMLPSLHALTCTFWMKSSDDMNYGTPISYAVDNGSDNTLLLTDYNGWVLYVNGREKITNCPSVNDGRWHHIAITWTSANGIWKVYIDGKLSDGGAGLSVGLPIPGMYGGGALVLGQEQDKKGEGFSPAESFVGSISQLNLWDYVLSPQQVKSLATSCPEELSKGNVLAWPDFLSGIVGKVKIDSKSIFCSDCPRLGGSVPHLRTASEDLKPGSKVNLFCDPGFQLVGNPVQYCLNQGQWTQPLPHCERISCGVPPPLENGFHSADDFYAGSTVTYQCNNGYYLLGDSRMFCTDNGSWNGVSPSCLDVDECAVGSDCSEHASCLNVDGSYICSCVPPYTGDGKNCAEPIKCKAPGNPENGHSSGEIYTVGAEVTFSCQEGYQLMGVTKITCLESGEWNHLIPYCKAVSCGKPAIPENGCIEELAFTFGSKVTYRCNKGYTLAGDKESSCLANSSWSHSPPVCEPVKCSSPENINNGKYILSGLTYLSTASYSCDTGYSLQGPSIIECTASGIWDRAPPACHLVFCGEPPAIKDAVITGNNFTFRNTVTYTCKEGYTLAGLDTIECLADGKWSRSDQQCLAVSCDEPPIVDHASPETAHRLFGDIAFYYCSDGYSLADNSQLLCNAQGKWVPPEGQDMPRCIAHFCEKPPSVSYSILESVSKAKFAAGSVVSFKCMEGFVLNTSAKIECMRGGQWNPSPMSIQCIPVRCGEPPSIMNGYASGSNYSFGAMVAYSCNKGFYIKGEKKSTCEATGQWSSPIPTCHPVSCGEPPKVENGFLEHTTGRIFESEVRYQCNPGYKSVGSPVFVCQANRHWHSESPLMCVPLDCGKPPPIQNGFMKGENFEVGSKVQFFCNEGYELVGDSSWTCQKSGKWNKKSNPKCMPAKCPEPPLLENQLVLKELTTEVGVVTFSCKEGHVLQGPSVLKCLPSQQWNDSFPVCKIVLCTPPPLISFGVPIPSSALHFGSTVKYSCVGGFFLRGNSTTLCQPDGTWSSPLPECVPVECPQPEEIPNGIIDVQGLAYLSTALYTCKPGFELVGNTTTLCGENGHWLGGKPTCKAIECLKPKEILNGKFSYTDLHYGQTVTYSCNRGFRLEGPSALTCLETGDWDVDAPSCNAIHCDSPQPIENGFVEGADYSYGAIIIYSCFPGFQVAGHAMQTCEESGWSSSIPTCMPIDCGLPPHIDFGDCTKLKDDQGYFEQEDDMMEVPYVTPHPPYHLGAVAKTWENTKESPATHSSNFLYGTMVSYTCNPGYELLGNPVLICQEDGTWNGSAPSCISIECDLPTAPENGFLRFTETSMGSAVQYSCKPGHILAGSDLRLCLENRKWSGASPRCEAISCKKPNPVMNGSIKGSNYTYLSTLYYECDPGYVLNGTERRTCQDDKNWDEDEPICIPVDCSSPPVSANGQVRGDEYTFQKEIEYTCNEGFLLEGARSRVCLANGSWSGATPDCVPVRCATPPQLANGVTEGLDYGFMKEVTFHCHEGYILHGAPKLTCQSDGNWDAEIPLCKPVNCGPPEDLAHGFPNGFSFIHGGHIQYQCFPGYKLHGNSSRRCLSNGSWSGSSPSCLPCRCSTPVIEYGTVNGTDFDCGKAARIQCFKGFKLLGLSEITCEADGQWSSGFPHCEHTSCGSLPMIPNAFISETSSWKENVITYSCRSGYVIQGSSDLICTEKGVWSQPYPVCEPLSCGSPPSVANAVATGEAHTYESEVKLRCLEGYTMDTDTDTFTCQKDGRWFPERISCSPKKCPLPENITHILVHGDDFSVNRQVSVSCAEGYTFEGVNISVCQLDGTWEPPFSDESCSPVSCGKPESPEHGFVVGSKYTFESTIIYQCEPGYELEGNRERVCQENRQWSGGVAICKETRCETPLEFLNGKADIENRTTGPNVVYSCNRGYSLEGPSEAHCTENGTWSHPVPLCKPNPCPVPFVIPENALLSEKEFYVDQNVSIKCREGFLLQGHGIITCNPDETWTQTSAKCEKISCGPPAHVENAIARGVHYQYGDMITYSCYSGYMLEGFLRSVCLENGTWTSPPICRAVCRFPCQNGGICQRPNACSCPEGWMGRLCEEPICILPCLNGGRCVAPYQCDCPPGWTGSRCHTAVCQSPCLNGGKCVRPNRCHCLSSWTGHNCSR

SEQ ID NO: 752 - DNA, 1096 bp, Homosapiens
atgaatggaggagggggcgcagaggtcaggggcgctgggggcgccacaccaggtaaggggtccagcttgggagcggggagggcggactctgggggttcgggtgttgctgacttgtgctacgtggaacaagcagaaaagaaggaaggcggaggaagagaggaggctggcgtcggcgctgctcctctggccctccctctgcgccccctcctcctgccagcgcgccaaagccgggcagtaggggccgactggcggctgacgctccctgagtggcgactccgtctccagccccgctgcggagcgcgggccggatctggggcggccagggcccggagccgcggagccctccccgccgcccggccgagcacgggaccccggcgggaggccgcggcgactgctcggcccgccacacggcgcgctgggctcacactgtcccgccgcggacgggctttgtggttgggggcgcgcgtgcgagtgccagtgagagtgtgggtgcgcgctgtgggccgcggcgcgggtgggtggccgtgcgttcttgcgagccggcctgcaggaggcgaggctcccctggcctcccgcacccagcggcggaccgagcccctggagggaagttgccgcagccgcccgggccgccggccctcctgtcccgcgccagggaacagctcctgcccaggtctgtgggcactcagcatggatttcagtctccctgtgagtgatgggaaagaactaacagaggctgcaaggttttactgaatctattccattagtgacctactggaacgttcaaagaataaaaatctcacttgctcagtgtttttgatacacagtgacattcagtctgaagtgtcatccttgaaggatagaataaatcagctgtcgtgttctcagtgaaaagtggaaagaagttttaaaggatctgcaaaatagaattatgagacagaggaaagaaagaaacagacaatctgatctctatcttcatcggccaggtggacgtctgatttatgaagctccccatccacctatctgagtacctgacttctcaggactgacacctacagcatcaggtacacagcttctcctagcatgacttcgatctgat

SEQ ID NO: 753 - protein, 249 aa, Homosapiens
MNGGGGAEVRGAGGATPGKGSSLGAGRADSGGSGVADLCYVEQAEKKEGGGREEAGVGAAPLALPLRPLLLPARQSRAVGADWRLTLPEWRLRLQPRCGARAGSGAARARSRGALPAARPSTGPRREAAATARPATRRAGLTLSRRGRALWLGARVRVPVRVWVRAVGRGAGGWPCVLASRPAGGEAPLASRTQRRTEPLEGSCRSRPGRRPSCPAPGNSSCPGLWALSMDFSLPVSDGKELTEAARFY

SEQ ID NO: 754 - DNA, 1096 bp, Homosapiens; identical to SEQ ID NO: 752

SEQ ID NO: 755 - protein, 249 aa, Homosapiens; identical to SEQ ID NO: 753

SEQ ID NO: 756 - DNA, 358 bp, Homosapiens
atgtgcagaccacaggaatacctaatgccttttttctcttcctgtctttgtccctcacactacagcaggcccctcccttccctcttcaacctcatcctccctccccacaggcccagagaaccagttgggctttgttctcctgcaggctatggttcatcatgcaaatagctcctgtgtcagaaatgctttttggcttcaaataacagaaaagctaacaccagctttatcaataataatatcggtggtttacttaaggtgtccagagatggtggagaacaggattggtttcctcctcaatgtcaaggactcaaagactctttctgtggtagggccacatcctaaaccctgtatcctgtga

SEQ ID NO: 757 - protein, 119 aa, Homosapiens
  misc_feature (56)..(56): Xaa can be any naturally occurring amino acid
  misc_feature (114)..(114): Xaa can be any naturally occurring amino acid
MCRPQEYLMPFFSSCLCPSHYSRPLPSLFNLILPPHRPREPVGLCSPAGYGSSCKXLLCQKCFLASNNRKANTSFINNNIGGLLKVSRDGGEQDWFPPQCQGLKDSFCGRATSXTLYPV

SEQ ID NO: 758 - DNA, 328 bp, Homosapiens
agggcaaaagagattttgcagatgcaattaaggttaaggaccttgacgtgggaagattgtgattatttacctgacagggcaaaagagattttgcagatgcaattaaggttaaggaccttgacgtgggaagattattctggattatctaggtgggcgcaatttgatcacatgggtccccagaagtggagaacctttcccacctgtagaaagccagagagctggcacctgagaaggacagaactgtcattgcaggatttgaagatgaaggggcccatgagccaaggaatgccagtgacctatagaggctaaaaaacagcaaggaaatgga

SEQ ID NO: 759 - protein, 95 aa, Homosapiens
MQLRLRTLTWEDCDYLPDRAKEILQMQLRLRTLTWEDYSGLSRWAQFDHMGPQKWRTFPTCRKPESWHLRRTELSLQDLKMKGPMSQGMPVTYRG

SEQ ID NO: 760 - DNA, 3310 bp, Homosapiens
aaatattatagaggtttttttttcattccaagttttaagttgtccttgtgcatgaaatatgcacatgataaaaagggggttgccatcaatgcatattgtcttgaaaagccaagggctctttttcggtttttctctataatgaagactgttagactgtggactctataattatgctcactgaacaaataccttgaaagggaagtaattccaagtcatgtatcaaagattcaatttgacatgtatttactaaatgcctaacatgcctatgcattttgtttattcatttatagtaacaagatatagtgagttcatattctgtgccagcactgtgctcagtattgaaaaattggagtcacaagattcccactttcaagaacttacagtccaatggaggagaaagaagtatgaaaggatcaattgcagggtgacaagagagtgttccaatagtgcagatccagagctgtgattttaaaaagatgatgcaaaccagttatctcttgcttcatggagtggatgggctacaggaaatttgacaataaaacaaagcttaaataaattgcaacatttgtctacaactctactgtaaaattggaaatgcttttccacagaaaaacctctcaaaatgctgaatgcaaaagttgggatcacagaaacattgtgcctatttttggtctgctggaaactgtatttttacaaggtaatccctgttttcaatatagttcctgtcttgccactggcggttttcttgtagcatttttctagttctgagattgctactacccaaagtattcatttctttcttactggggtgtcctctgtcttcacagcctgcttctggattgtaggttttttcctttctttctgttgagatatttatggcatttgatagagtcaaaccagatgtattgcagccggacatacttatgtggcttcagatgtgtaaaataagtaacttcctatctttgtctgtctagctcaagagttgactgtggacgaggaatgcctgtattgattcattaatgtaataactatttactgactgcctaccatgtacaaccagaaacacagttcctaacctcatgaacttaccatgtaacatgggaagacaagcactaagttcttatttgtttgtaattgtgataaggctcagagaacaaatacagattcctatgaacccatgtatagggggaaatatttaggttccatttaatactgacatggctaagtatctcagtatttaagctgagatctgaaggataattagaagattcctcaggcagagggaagagcaaaggctgtgtgtggggcaggaagaaatgtggtcgtttgaggaacttcgagatcagcgtggccactgatgtgctgcagtgtagcaaagagagcaaaagaaagagagaaacagggaggaatggaattcagctcacgggctctggaatcagagtttcaagttggaatcctgacttcctagctgtatcggttaagaatttttttttgtggcatccaaagaacagaaagcctaccttactgaggttcatataaaaaggggaaattggccaggtgcggtgggtcacacctgtaatcccactactttgggaggccgaggcgggtggatcacctgaggtcaggagttcgagaccagcctggccacagtggtgaaaccccgtctctactaaaaatacagaaattagctgggtgtggtggcgggcgcttgtaatcccagctactcgggaagctgagggaggagaatcgcttgaacccgggaggcagaggttgcagtaagccaagatcgcgccattgcacttcagcctgggcaacaagagcaaaactctgtctcaaaaaaaaaaaaaaaaaaaaaaaaaggcggtggggggaaattatctccacaaaacaaaaagtccgacaataagcaataagctgtccagggctgatacagggcatgatgaggtcatcacagatccaggttctttctgtcttctgctctgcattcgtagcctgtggctttgtcattccctcatctggaaatggcggctgcagccccaggcacaatggcccgttgaggaagaagggggacgatgtgcagtgtcaggttattttatcaggaaagttcaaagcttctcagaaatcttctgttggaattctacctgggtgtcataggccagaacacaacccaaataaccaggaaaaatgtgaaagtgagaaaatagatcgtccacccctaacaatggaggcagcaagtgagaggggattgggaatgtgtgttgatttcctcaacagtgtttgacataaccactttctagctttataatcttaggcaagtaactcaacttcccagttcctcttctgtaaaatggggataacacctgaaaaggttgttacaagattcactgaaatagtttctatgctcagtcagtaatcagcattcaatcaatatgagctctaacatgatgcttgacagttatgcaacgaacagttcatgaagagctttgtaagccatattgataattttgtctttatccttagcacagtgagaaggtattaaaggattttatgcagggaagtgacatgatcatatttgtgttttcaaaagagccctcaggctgggtgtggtaacttgcgcctgtaatcccagcactctgggaggccatggcaggcggtgggcggatcgcttgagcccaggagttccggaccagcatgggcaacttggggaaaccccacctctaaaaaaaaaatgccaaaaaaattttagctgggtgtggtggcactcgcctgtagtcccagctgctcgggaggctgaggtgagagaatcacctgagcctgggagaggctgtagtcagctgtgattgcgccatgcactccagcctgggtgacacagtgagaccctgtctcaaaaaataaataaaaaataaaaaaaggagccctcaatttatcctctgcctctgacaaatatattccattttgttacattgcaaaaatttcagcacattgctttgcttacccatctttgctctggaacgacttttaattcttcttttggcaatcttggttgttttgagatgtgtgaaattagaatcatatgcaggtgtttgagttcttttgattttgctttttaaaagagttttttttttgttttgttttgttttgtttttagaatggggcaatgtaaagccagaatatcaacgtccttttgtcaagattttcaaacctatttggctgatagtacacttacaagaataggtaaaaaagatcccaaagattttacttcacttacttgaactactagccctactattaagagccacagcaagcttac

SEQ ID NO: 761 - protein, 114 aa, Homosapiens
MMRSSQIQVLSVFCSAFVACGFVIPSSGNGGCSPRHNGPLRKKGDDVQCQVILSGKFKASQKSSVGILPGCHRPEHNPNNQEKCESEKIDRPPLTMEAASERGLGMCVDFLNSV

SEQ ID NO: 762 - DNA, 3310 bp, Homosapiens; identical to SEQ ID NO: 760

SEQ ID NO: 763 - protein, 114 aa, Homosapiens; identical to SEQ ID NO: 761

SEQ ID NO: 764 - DNA, 4454 bp, Homosapiens
gtggtttggggaaagtgtaggggcaaccaaagatcatcggcttgactaggccctttgccctgaacctcatgaagaaatgataggaggcagacatatgtgcctaaaaagagcgttgagctcagagaagagcaactcggagttttgggggtgtgctttgatttgtgtacatcaatggcagaatcatccagcgaatcagatcacttccgctgtcgtgaccgattgagtccatgggctgccagatcaacgcacaggggaactcgaagtcttcctacagtagaagttaccgagaaggtcaacactataacaagtactttacaggataccagtcggaacctgcgacaagtggaccagatgcttggacgataccgagaatacagtaatggacaggcgggtgcgatagaacatttaaaagaaagcttggaacaatcaatcgaccaactccggagtcaacgtttattgagaaactcaggagggagaagtatttctgttacaagtttgagtgcaagtgaccttgatggtggcactgggtcagagctccatcattttccacctacctcacctctcaaggactatggggatccacagggtattaaacgaatgagatcaagaactggtgtccggtttgttcaagagactgatgatatgactcagcttcatggttttcatcagtctcttcgagacctcagcagtgaacaaattcgccttggagatgatttcaacagggagctttccagaaggagccggtcagatgccgaaacaaaaagggctttggaagaattgactgaaaaacttaatgaagcccagaaacaagaagtggtttcagatcgggtggagcggcggcttcaggaactggagagagagatgcgcacagaaagggagctggtggaaagacgccaggatcaactgggactcatgtccctgcagctacaggaggcactaaagaaacaagaagctaaagcagatgagcatgagggggcaataaaaaataagctaagacaaactgaaactgagaagaatcaacttgaacaggaattggagctatctcgaaggttattgaatcaatcagaaggcagccgagaaacacttttgcatcaggtagaagaactgcgtacacaacttacgaaagcagaaggtgatcgaaagggtttacagcatcaagtatctcagatttccaagcaacagtcaaactatcaggatgaacaaggggaggactggagatttaggagaggggttgagcgggaaaaacaggacctggagaagcaaatgtcagatttgagagtgcagctgaacttcagcgcaatggcatctgagttagaggaagtgaaacggtgcatggagagaaaagacaaggagaaagcacatttggcatcacaagtagagaatttaacacgtgaactggagaatggggaaaaacagcaactgcagatgttggatcgacttaaggagatccagaatcactttgacacatgtgaggccgagcgtaagcatgctgaccttcagatctcagagctgactcgccatgcggaggatgcaaccaagcaggctgagcggtacctcagtgagctccagcagtcagaggctctgaaagaggaggcggagaagaggagggaagacctgaaactgaaagctcaagaatccattaggcagtggaagcttaagcataagaagttagaacgagcgttggagaaacaatctgaaactgttgatgaactgacaggcaagaataatcagattttaaaagaaaaggatgaattgaaaacccagctgtatgcagcattacaacaaatagagaatcttcgaaaggaattgaatgatgtcctaacaaagcgtgcccttcaggaggaggagcttcactccaaggaggagaaattacgtgatattaagtctcatcaagctgaccttgaattggaagttaagaattccctggataccatccatagactggagagcgaattgaaaaagcagagtaagatccaaagccagatgaaagttgagaaagctcacttggaggaagaaattgcagagctcaagaagagccaggcccaggacaaagctaaacttcttgagatgcaagagtccatcaaggacctgagtgccatccgagcagatcttgctaataaattggctgaggaagagagagccaagaaagcagtgcttaaggacctttctgacctcactgcacaggcaaaatccagggatgaagaaacagctacaatcatcacacagttaaagctggaacgagatgtgcaccagagggagctgaaagatctcacatcatcattgcagagtgtgaaaacaaaacacgaacagaatatccaggagcttatgaagcactttaagaaagaaaagagtgaggctgagaatcatatcaggactctgaaggctgaaagtttagaagagaagaatatggctaaaattcatcgtggtcagctggagaagttgaaatcacagtgtgacagactgacagaggaattaacccagaatgaaaatgagaacaaaaaactgaagctaaaatatcaatgtttgaaggatcaactagaagaaagggaaaaacatataagcattgaagaggagcacttaaggaggatggaagaggccagattgcagctcaaggatcaacttctttgcttggagactgaacaggaatccattcttggtgtgataggaaaggaaattgatgcagcttgtaaaacattctccaaggactcagtggagaaattaaaagttttttcatctggtcctgatatacattatgacccacatcgctggttagcagaaagcaagactaaacttcagtggctctgtgaggaactgaaagagagagaaaacagagagaaaaatctgcgacaccagctgatgctctgcagacaacaactcaggaatttgactgaaaacaaggaatctgagttgcagtgtctctttcaacagatagaaaggcaggagcagcttctggatgaaatacatcgtgagaagagagatctactggaagagacccaaagaaaagatgaagaaatgggatctctgcaggaccgtgtaattgcattagaaacgagtacccaagtggccttggaccatctggagtctgtgcctgagaaactgagcctactagaagatttcaaagacttcagagattcctgcagttcatctgagagaactgatggaagatattccaaatacagggttcgcagaaattctcttcagcatcaccaagatgacaccaagtacagaaccaaaagtttcaaaggtgacagaacctttctggaaggttcccacactcgtgggttagatcactcatcctcttggcaggatcacagtcgcttcctgtctagtccaagattttcatacgtgaactcatttaccaaaagaactgttgctccagattcagcttcaaacaaggaagatgccacaatgaatggaacaagttcacaacccaaaaaagaggaatatgggagctaaaaaagcaaatgtaatttgttattttacatgagtatgttacaaataataacatctctattcttacagcaatttggcccagattatctaacagacatacctgcagctttggctctttggtattgccaaacattgacaaaagtgacaatactgttggtccttgtgaatggtaaaccaatccaaataatatcagatcatgaatgatgtgcagctaatttatttgcaacttatactagcacagaaagaatgatattttttcactttgtattttcctttttcaagtgtggtcagtcacattttcccaaccaaaatttggatttctaattgaggccttttaaaaattactggctaaaaagaaggaaaatgagtttcccttgaggcaaaagttgccagcactttagattcagggagcatttatatacaactgattttttgaaaaattttctccctaataaattatcatgtgttataacatgtggagatgtgcatatataacattagacagtccactttataaatgctcaggacttttatatctatcatcttaacagtccacaactgcataccgtagctgaaaattatttccaatcatccatttttaatagcaataaagaattcataaatgatatctgaactgtagagcactgtaaagaattcatagcacaatttatttatttgtctttttgtggccaaatatcctactgtgatcacttcagtcatatcctggaccgtctttggtttactgtgactaaaatcatagcaccaaactcctttgtccatgagatttatatataatcttgtataatttggtcctatctgcttctaccatcccaacttttttcatcaaagtgtctaagaacgtattccctttacacgctgatctcctagtggagaaggatttatattaaatgctaagtaatagtaaactttcaggaactgaatcctattgggtcatggattctgcatagacaagggcaataaagcaatacctttgtaatatg

SEQ ID NO: 765 - protein, 1094 aa, Homosapiens
MAESSSESDHFRCRDRLSPWAARSTHRGTRSLPTVEVTEKVNTITSTLQDTSRNLRQVDQMLGRYREYSNGQAGAIEHLKESLEQSIDQLRSQRLLRNSGGRSISVTSLSASDLDGGTGSELHHFPPTSPLKDYGDPQGIKRMRSRTGVRFVQETDDMTQLHGFHQSLRDLSSEQIRLGDDFNRELSRRSRSDAETKRALEELTEKLNEAQKQEVVSDRVERRLQELEREMRTERELVERRQDQLGLMSLQLQEALKKQEAKADEHEGAIKNKLRQTETEKNQLEQELELSRRLLNQSEGSRETLLHQVEELRTQLTKAEGDRKGLQHQVSQISKQQSNYQDEQGEDWRFRRGVEREKQDLEKQMSDLRVQLNFSAMASELEEVKRCMERKDKEKAHLASQVENLTRELENGEKQQLQMLDRLKEIQNHFDTCEAERKHADLQISELTRHAEDATKQAERYLSELQQSEALKEEAEKRREDLKLKAQESIRQWKLKHKKLERALEKQSETVDELTGKNNQILKEKDELKTQLYAALQQIENLRKELNDVLTKRALQEEELHSKEEKLRDIKSHQADLELEVKNSLDTIHRLESELKKQSKIQSQMKVEKAHLEEEIAELKKSQAQDKAKLLEMQESIKDLSAIRADLANKLAEEERAKKAVLKDLSDLTAQAKSRDEETATIITQLKLERDVHQRELKDLTSSLQSVKTKHEQNIQELMKHFKKEKSEAENHIRTLKAESLEEKNMAKIHRGQLEKLKSQCDRLTEELTQNENENKKLKLKYQCLKDQLEEREKHISIEEEHLRRMEEARLQLKDQLLCLETEQESILGVIGKEIDAACKTFSKDSVEKLKVFSSGPDIHYDPHRWLAESKTKLQWLCEELKERENREKNLRHQLMLCRQQLRNLTENKESELQCLFQQIERQEQLLDEIHREKRDLLEETQRKDEEMGSLQDRVIALETSTQVALDHLESVPEKLSLLEDFKDFRDSCSSSERTDGRYSKYRVRRNSLQHHQDDTKYRTKSFKGDRTFLEGSHTRGLDHSSSWQDHSRFLSSPRFSYVNSFTKRTVAPDSASNKEDATMNGTSSQPKKEEYGS

SEQ ID NO: 766 - DNA, 1272 bp, Homosapiens
gctttaattccaatggagggagggagaaaacaaccaacctgtgggctggaacagctggtcgtgagtgtcaggactagagaagaagacaggaaccaggatgggaagacggacatgttacattttaagctggagcttcccctgcagtccacggagcacgttctcggtgtgcagctcatcctgactttctcctatcgattacacaggatggcgaccctcgtgatgcagagcatggcgtttctccagtcctcctttcctgtcccgggatcccagttatacgtgaacggagacctgaggctgcagcagaagcagccgctgagctgtggtggcctagatgcccgatacaatgtaagggcgcttctcattgtccagctcctttgtttctgtgtgttactgttcgtcgagttctttgaagagggggataaaaaaaggaaggacagagtaaatgaacttaaattgttgcaagagagtttattcatctttgaagaaaagattattgatactgcagtaggccaccaagaacaagaggtatctgtgaccaacgggaccagcccctttgcctatgactacgacctcacccatattgttgctgcctaccaggagaggaacggtgggtcacaggtagagcccattcagccgctgctcaggactttcaagacccgggaccacccgcacccctccagcatcccgtggtccagcaggctagtgatggttaaatgccatcattatcccaccactggcttgccaggattctgggcgatggtaaagttcgcctgggtgcagtatgtcagcatcctgcttatcttcctctgggtgtttgaaagaatcaagatcttcgtgtttcagaatcaggtggtgaccaccatccctgtgacagtgatgccccagggagaagtgtctttgatttccagagctgaggcctttaactggagacctggaggggcagggcccaagggcaagggccgcattagcacaggcaatcagggagggccgctgaaggacacttggaccgtccacctgccccagcccaacattgggacactgcaccgggtccatgtgtcatccaggtgccgtggccttgggaagggtttggattccaagtcacctcgccgcaaggatgcccccgagaagcccctttcccggcctcaccgggtgtcgcttaatagtcttgggaccttaaggagcaagtcagcccctgcggaccctcccagtgaagagaaagagctggctgtgcggtggaatttggaagagacgacgtttgggagcctttgctga

SEQ ID NO: 767 - protein, 419 aa, Homosapiens [sequence omitted]

SEQ ID NO: 768 - DNA, 1272 bp, Homosapiens; identical to SEQ ID NO: 766

SEQ ID NO: 769 - protein, 419 aa, Homosapiens [sequence omitted]

SEQ ID NO: 770 - DNA, 306 bp, Homosapiens
atggcagacaacgtagaccagcagcaaactaccaacactgtggaggatcccctggatcttaggctcagcccagaggagcgaatttgtgtgaaaatgagaaacgaccgagagcttcgaggcagattacatacttatgatcaacatttaaatatgatcttgggagacgtggaagaaactgtgactactatagaaattgatgaggaaacatatgaagagacatatgaatcaacaaaacagaatattccagtgttctttctccggggagatggcattttcctggttgcccctccactgagagttggctga

SEQ ID NO: 771 - protein, 101 aa, Homosapiens [sequence omitted]

SEQ ID NO: 772 - DNA, 1565 bp, Homosapiens
cactggtgatacttgtaggtgcgggagggtccgaggcagctagggtccgcagtagaccgccagcaaaccacagcagacctgtggaagaggggccggactgttaaatgaaaaacaaacacaaaggagcaacaacaacagcatcagcagcaacaacaacagcatcaacaacaacaaaaaagaccccgctaaaaccccattcaaaggtcagcaacctcaaagatcgaaggtaggtaagcccacaagatgagaagtaatcctcgcaaaaaagctgaaaactcaaaaagccagagtgtcttttctcctccaaatgattgcaacacttctccagcaagggcacagaacttggcggaggctgagatggatgaaatgacagaagtaggcttccgaaggtgggtaataacgaacttcactgagctgaaagaacatgttttaacccaatgcaaggaagctaagaattatgagaaaacattacaggagctgataaccagaagagccattttggaaaggaacataaatgacctgacagagctgaaaaacacaacacaaaaacttcacaatgcaatcacaagtagcaacagctggatagaccaagtggaggaaagaatctcagagcgtgaagactatctttctgaaataagacagagaggaatagagaaaaaaagaatgaaaaggaatgagcaaaacactgtggcaatttctcaaagacctaaaaacagaactaccattcaaccaagcaatcccattactgagtatatactcaaaggaatataaatcattttaccataaaaacaaaggcacacacatgctcaccacagccctattcacaatagcaaagaaatgaaattaataagccggatgcggtgactcacgcctgtaatcccagcactttgggaggtctaggcgggtggattgcctgagctcagaagttcgagaccagcctgggcaacacggtgaaaccctttctctaataaaatacaaaaaattagctggacttagtggcgcatgcttgtagtcctagctacttgggaggctgaggcaagagaatttctagaacctcagaggtggaggttgcagtgagccgagatcatgccactgcactccagcctgggtgacagagcaaaactccatctcaaaaaaaaaaaaggaattaatatagatacccatcaatggtgtactggagaaagaaaatgtggaacatagatatcacagaataccatgcagccatagaaaagagtgaaataatgtcctttgtagcaacatgaatacagctggaggccattatcctcagtaaattaacgtaggaacagaaaaccacatactgcatgttctcgcttataagtgggaaataaacatcgagtacacatggacacaaagaagagaaccacagacactggggcctagttgaaggtggagggcaggaggagagtgaggaccaagaaactacttattgggtaatatactcattacttagggggtgaaataatctgcacagtaagccccgagacatgcaatttacccatgtaactaacctgcacatgtacctcctgaacctacaataaaagttg

SEQ ID NO: 773 - protein, 175 aa, Homosapiens
MRSNPRKKAENSKSQSVFSPPNDCNTSPARAQNLAEAEMDEMTEVGFRRWVITNFTELKEHVLTQCKEAKNYEKTLQELITRRAILERNINDLTELKNTTQKLHNAITSSNSWIDQVEERISEREDYLSEIRQRGIEKKRMKRNEQNTVAISQRPKNRTTIQPSNPITEYILKGI

SEQ ID NO: 774 - DNA, 1565 bp, Homosapiens; identical to SEQ ID NO: 772

SEQ ID NO: 775 - protein, 175 aa, Homosapiens; identical to SEQ ID NO: 773

SEQ ID NO: 776 - DNA, 579 bp, Homosapiens
gcgtgcgaacgcaccacattccggaacgggaagaaggagctgtctctctcttctgaggggtaggcaggtgcttccgaatcgcggaatgtaggtgctcataagctggagacccacggaaagaacctagaagctccgagcggttgcagacagcactgcattgagccaacgactcctgctctactgatggtgattccacagctttgtgaggaataagttaagatgaattacagtttcccctggacttctttctctctcctgccgccttgtgaagaaggtgcctgcctccccttccaccacgattctaagtttcctgaagtctccccagccatgctgaactaatgttatcttatctggaagaagaggaataggaaagaaaaggagtcaggaatggatcttactcagaaggctgactagacacagccaggtggaagagctcccactgcgggaccaagatgactggaatgcccctaacagatcttcagagggaagaaaccaggagtggacagagagaagacacagaagctgggctgaaggtagtgaaagctgggaatgtggcacaggactactgcacaccaggtt

SEQ ID NO: 777 - protein, 39 aa, Homosapiens
MNYSFPWTSFSLLPPCEEGACLPFHHDSKFPEVSPAMLN

SEQ ID NO: 778 - DNA, 816 bp, Homosapiens
gggcatgactctctctcttgagtaggcacacactcccttttctcgggtgtgtactttttgctttgtgatacatctctgcactttcagtattttccaactcatccttaaattccttctcacaacagtgtcaagagcctggacgccagccaggattgaggtcctacgggtgtttggggacctccccaagcccacgagtatcaatggcagtatcaattgtctgtgacagtgattaaggagcaaaacacttggaacccacaagactcccagaaggtgaagttaagagctcccagactcataaggttattagaacagcaaactggcaccccaaagaactttacggagacttgcaacctatcaacaagttggatgagggattaaaagccttcaacaaccaacaaccccaagcatcaaactgaaggaaacattctaaccttcacagacagactggaggctggatggggacctggctgaagacatctggagaatgaaagttaagtaccagcttgcatttttgtgcccctagattatttttgcattttaaaataagaagcatcaaattgcgtgtctctgtgtaaaagttctagcaatttgttttaaggtgaacttattttggcttagggactacaaaaagagaaggtaattcctagggaaggaagaagagaaagaaatgaaaattagagaataagattattttgaatgacttcaggtagcgaggagtgtgtgtttgtgagtgtgtatttgagagacttggctcatgcctgtgggtcttctcttctagtatcagtgaggggagggattactgaagaagaagggggg

SEQ ID NO: 779 - protein, 39 aa, Homosapiens
MTSGSEECVFVSVYLRDLAHACGSSLLVSVRGGITEEEG

SEQ ID NO: 780 - DNA, 4370 bp, Homosapiens
gggcatgactctctctcttgagtaggcacacactcccttttctcgggtgtgtactttttgctttgtgatacatctctgcactttcagtattttccaactcatccttaaattccttctcacaacagtgtcaagagcctggacgccagccaggattgaggtcctacgggtgtttggggacctccccaagcccacgagtatcaatggcagtatcaattgtctgtgacagtgattaaggagcaaaacacttggaacccacaagactcccagaaggtgaagttaagagctcccagactcataaggttattagaacagcaaactggcaccccaaagaactttacggagacttgcaacctatcaacaagttggatgagggattaaaagccttcaacaaccaacaaccccaagcatcaaactgaaggaaacattctaaccttcacagacagactggaggctggatggggacctggctgaagacatctggagaatgaaagttaagtaccagcttgcatttttgtgcccctagattatttttgcattttaaaataagaagcatcaaattgcgtgtctctgtgtaaaagttctagcaatttgttttaaggtgaacttattttggcttagggactacaaaaagagaaggtaattcctagggaaggaagaagagaaagaaatgaaaattagagaataagattattttgaatgacttcaggtagcgaggagtgtgtgtttgtgagtgtgtatttgagagacttggctcatgcctgtgggtcttctcttctagtatcagtgaggggagggattactgaagaagaaggggggaaaaaaaaagaaagaaatctgagctttctgggaggaaattcaaaggaaccaagagaaattaacttcgttctgcaaggactaaagtacagcaagaggagagaggtcaagcgagaagcgtgcgggaagcacatgccctggggaggcatagaagccacactggcagagcggccagcacaggtagccagcagaggcattcttggggctatttgaaaaagtttggtctgtgaacaaaacagtttccctggtgactgcaaatccattgctagctgcctctttctcgtctgcccatcactctggtgtggtacccagaagttgacttctggttctgtagaaagagctaggggaggtatgatgtgcttaaagatcctaagaataagcctggcgattttggctgggtgggcactctgttctgccaactctgagctgggctggacacgcaagaaatccttggttgagagggaacacctgaatcaggtgctgttggaaggagaacgttgttggctgggggccaaggttcgaagacccagagcttctccacagcatcacctctttggagtctaccccagcagggctgggaactacctaaggccctaccccgtgggggagcaagaaatccatcatacaggacgcagcaaaccagacactgaaggaaatgctgtgagccttgttcccccagacctgactgaaaatccagcaggactgaggggtgcagttgaagagccggctgccccatgggtaggggatagtcctattgggcaatctgagctgctgggagatgatgacgcttatctcggcaatcaaagatccaaggagtctctaggtgaggccgggattcagaaaggctcagccatggctgccactactaccaccgccattttcacaaccctgaacgaacccaaaccagagacccaaaggaggggctgggccaagtccaggcagcgtcgccaagtgtggaagaggcgggcggaagatgggcagggagactccggtatctcttcacatttccaaccttggcccaagcattcccttaaacacagggtcaaaaagagtccaccggaggaaagcaaccaaaatggtggagagggctcctaccgagaagcagagacctttaactcccaagtaggactgcccatcttatacttctctgggaggcgggagcggctgctgctgcgtccagaagtgctggctgagattccccgggaggcgttcacagtggaagcctgggttaaaccggagggaggacagaacaacccagccatcatcgcaggtgtgtttgataactgctcccacactgtcagtgacaaaggctgggccctggggatccgctcagggaaggacaagggaaagcgggatgctcgcttcttcttctccctctgcaccgaccgcgtgaagaaagccaccatcttgattagccacagtcgctaccaaccaggcacatggacccatgtggcagccacttacgatggacggcacatggccctgtatgtggatggcactcaggtggctagcagtctagaccagtctggtcccctgaacagccccttcatggcatcttgccgctctttgctcctggggggagacagctctgaggatgggcactatttccgtggacacctgggcacactggttttctggtcgaccgccctgccacaaagccattttcagcacagttctcagcattcaagtggggaggaggaagcgactgacttggtcctgacagcgagctttgagcctgtgaacacagagtgggttccctttagagatgagaagtacccacgacttgaggttctccagggctttgagccagagcctgagattctgtcgcctttgcagcccccactctgtgggcaaacagtctgtgacaatgtggaattgatctcccagtacaatggatactggccccttcggggagagaaggtgatacgctaccaggtggtgaacatctgtgatgatgagggcctaaaccccattgtgagtgaggagcagattcgtctgcagcacgaggcactgaatgaggccttcagccgctacaacatcagctggcagctgagcgtccaccaggtccacaattccaccctgcgacaccgggttgtgcttgtgaactgtgagcccagcaagattggcaatgaccattgtgaccccgagtgtgagcacccactcacaggctatgatgggggtgactgccgcctgcagggccgctgctactcctggaaccgcagggatgggctctgtcacgtggagtgtaacaacatgctgaacgactttgacgacggagactgctgcgacccccaggtggctgatgtgcgcaagacctgctttgaccctgactcacccaagagggcatacatgagtgtgaaggagctgaaggaggccctgcagctgaacagtactcacttcctcaacatctactttgccagctcagtgcgggaagaccttgcaggtgctgccacctggccttgggacaaggacgctgtcactcacctgggtggcattgtcctcagcccagcatattatgggatgcctggccacaccgacaccatgatccatgaagtgggacatgttctgggactctaccatgtctttaaaggagtcagtgaaagagaatcctgcaatgacccctgcaaggagacagtgccatccatggaaacgggagacctctgtgccgacaccgcccccactcccaagagtgagctgtgccgggaaccagagcccactagtgacacctgtggcttcactcgcttcccaggggctccgttcaccaactacatgagctacacgggtatcaccactgtcttgttttgttttctgttaagaatacatgggggcctttgagagctgggagggtggaggtgtgggagctgatgggagaatgattaagtggtcatttgtgtcggagagttgaagtgtatttattataaggtattattattttttcatgtctttgaagaacttgaagaaatactgacatattaaggtactttgttcactgaattctcctctactagatattttaaaatatacttctatcctcgatagtaaaaaaggcacagagccaaaagccctcttgtgatccccttgacttctagaatgtggttattcttatttttgcccgcattcttagacatttactctgaagaagagtccaatggaaataaaggaaaagagtttatgggtcaaggtggcccattgtactgtttttgaagttggtcaacaaggtggcttggttaatttaggctcagcatgttttactgtatgttactaaaaaaaaaaaaaaaaaaaatcagattctctttttccagcactagtcaagcacaaattcttagctgcctaccaccctttccccaccaaaaggtgacatctaattttaaaaaaatggcatcttcctggccctcggaaaaacttgtcatctggtctttcttgccttaattcagcttctgtattattcttcgctgtctctcacgccttccttgtttcttgtgaaaagtaatagtgactggtttcctataatggactcaaagttatccctaaaattaaagacttatttgatgacctag

SEQ ID NO: 781 - protein, 827 aa, Homosapiens
MMCLKILRISLAILAGWALCSANSELGWTRKKSLVEREHLNQVLLEGERCWLGAKVRRPRASPQHHLFGVYPSRAGNYLRPYPVGEQEIHHTGRSKPDTEGNAVSLVPPDLTENPAGLRGAVEEPAAPWVGDSPIGQSELLGDDDAYLGNQRSKESLGEAGIQKGSAMAATTTTAIFTTLNEPKPETQRRGWAKSRQRRQVWKRRAEDGQGDSGISSHFQPWPKHSLKHRVKKSPPEESNQNGGEGSYREAETFNSQVGLPILYFSGRRERLLLRPEVLAEIPREAFTVEAWVKPEGGQNNPAIIAGVFDNCSHTVSDKGWALGIRSGKDKGKRDARFFFSLCTDRVKKATILISHSRYQPGTWTHVAATYDGRHMALYVDGTQVASSLDQSGPLNSPFMASCRSLLLGGDSSEDGHYFRGHLGTLVFWSTALPQSHFQHSSQHSSGEEEATDLVLTASFEPVNTEWVPFRDEKYPRLEVLQGFEPEPEILSPLQPPLCGQTVCDNVELISQYNGYWPLRGEKVIRYQVVNICDDEGLNPIVSEEQIRLQHEALNEAFSRYNISWQLSVHQVHNSTLRHRVVLVNCEPSKIGNDHCDPECEHPLTGYDGGDCRLQGRCYSWNRRDGLCHVECNNMLNDFDDGDCCDPQVADVRKTCFDPDSPKRAYMSVKELKEALQLNSTHFLNIYFASSVREDLAGAATWPWDKDAVTHLGGIVLSPAYYGMPGHTDTMIHEVGHVLGLYHVFKGVSERESCNDPCKETVPSMETGDLCADTAPTPKSELCREPEPTSDTCGFTRFPGAPFTNYMSYTGITTVLFCFLLRIHGGL

SEQ ID NO: 782 - DNA, 6918 bp, Homosapiens
gggcatgactctctctcttgagtaggcacacactcccttttctcgggtgtgtactttttgctttgtgatacatctctgcactttcagtattttccaactcatccttaaattccttctcacaacagtgtcaagagcctggacgccagccaggattgaggtcctacgggtgtttggggacctccccaagcccacgagtatcaatggcagtatcaattgtctgtgacagtgattaaggagcaaaacacttggaacccacaagactcccagaaggtgaagttaagagctcccagactcataaggttattagaacagcaaactggcaccccaaagaactttacggagacttgcaacctatcaacaagttggatgagggattaaaagccttcaacaaccaacaaccccaagcatcaaactgaaggaaacattctaaccttcacagacagactggaggctggatggggacctggctgaagacatctggagaatgaaagttaagtaccagcttgcatttttgtgcccctagattatttttgcattttaaaataagaagcatcaaattgcgtgtctctgtgtaaaagttctagcaatttgttttaaggtgaacttattttggcttagggactacaaaaagagaaggtaattcctagggaaggaagaagagaaagaaatgaaaattagagaataagattattttgaatgacttcaggtagcgaggagtgtgtgtttgtgagtgtgtatttgagagacttggctcatgcctgtgggtcttctcttctagtatcagtgaggggagggattactgaagaagaaggggggaaaaaaaaagaaagaaatctgagctttctgggaggaaattcaaaggaaccaagagaaattaacttcgttctgcaaggactaaagtacagcaagaggagagaggtcaagcgagaagcgtgcgggaagcacatgccctggggaggcatagaagccacactggcagagcggccagcacaggtagccagcagaggcattcttggggctatttgaaaaagtttggtctgtgaacaaaacagtttccctggtgactgcaaatccattgctagctgcctctttctcgtctgcccatcactctggtgtggtacccagaagttgacttctggttctgtagaaagagctaggggaggtatgatgtgcttaaagatcctaagaataagcctggcgattttggctgggtgggcactctgttctgccaactctgagctgggctggacacgcaagaaatccttggttgagagggaacacctgaatcaggtgctgttggaaggagaacgttgttggctgggggccaaggttcgaagacccagagcttctccacagcatcacctctttggagtctaccccagcagggctgggaactacctaaggccctaccccgtgggggagcaagaaatccatcatacaggacgcagcaaaccagacactgaaggaaatgctgtgagccttgttcccccagacctgactgaaaatccagcaggactgaggggtgcagttgaagagccggctgccccatgggtaggggatagtcctattgggcaatctgagctgctgggagatgatgacgcttatctcggcaatcaaagatccaaggagtctctaggtgaggccgggattcagaaaggctcagccatggctgccactactaccaccgccattttcacaaccctgaacgaacccaaaccagagacccaaaggaggggctgggccaagtccaggcagcgtcgccaagtgtggaagaggcgggcggaagatgggcagggagactccggtatctcttcacatttccaaccttggcccaagcattcccttaaacacagggtcaaaaagagtccaccggaggaaagcaaccaaaatggtggagagggctcctaccgagaagcagagacctttaactcccaagtaggactgcccatcttatacttctctgggaggcgggagcggctgctgctgcgtccagaagtgctggctgagattccccgggaggcgttcacagtggaagcctgggttaaaccggagggaggacagaacaacccagccatcatcgcaggtgtgtttgataactgctcccacactgtcagtgacaaaggctgggccctggggatccgctcagggaaggacaagggaaagcgggatgctcgcttcttcttctccctctgcaccgaccgcgtgaagaaagccaccatcttgattagccacagtcgctaccaaccaggcacatggacccatgtggcagccacttacgatggacggcacatggccctgtatgtggatggcactcaggtggctagcagtctagaccagtctggtcccctgaacagccccttcatggcatcttgccgctctttgctcctggggggagacagctctgaggatgggcactatttccgtggacacctgggcacactggttttctggtcgaccgccctgccacaaagccattttcagcacagttctcagcattcaagtggggaggaggaagcgactgacttggtcctgacagcgagctttgagcctgtgaacacagagtgggttccctttagagatgagaagtacccacgacttgaggttctccagggctttgagccagagcctgagattctgtcgcctttgcagcccccactctgtgggcaaacagtctgtgacaatgtggaattgatctcccagtacaatggatactggccccttcggggagagaaggtgatacgctaccaggtggtgaacatctgtgatgatgagggcctaaaccccattgtgagtgaggagcagattcgtctgcagcacgaggcactgaatgaggccttcagccgctacaacatcagctggcagctgagcgtccaccaggtccacaattccaccctgcgacaccgggttgtgcttgtgaactgtgagcccagcaagattggcaatgaccattgtgaccccgagtgtgagcacccactcacaggctatgatgggggtgactgccgcctgcagggccgctgctactcctggaaccgcagggatgggctctgtcacgtggagtgtaacaacatgctgaacgactttgacgacggagactgctgcgacccccaggtggctgatgtgcgcaagacctgctttgaccctgactcacccaagagggcatacatgagtgtgaaggagctgaaggaggccctgcagctgaacagtactcacttcctcaacatctactttgccagctcagtgcgggaagaccttgcaggtgctgccacctggccttgggacaaggacgctgtcactcacctgggtggcattgtcctcagcccagcatattatgggatgcctggccacaccgacaccatgatccatgaagtgggacatgttctgggactctaccatgtctttaaaggagtcagtgaaagagaatcctgcaatgacccctgcaaggagacagtgccatccatggaaacgggagacctctgtgccgacaccgcccccactcccaagagtgagctgtgccgggaaccagagcccactagtgacacctgtggcttcactcgcttcccaggggctccgttcaccaactacatgagctacacggatgataactgcactgacaacttcactcctaaccaagtggcccgaatgcattgctatttggacctagtctatcagcagtggactgaaagcagaaagcccacccccatccccattccacctatggtcatcggacagaccaacaagtccctcactatccactggctgcctcctattagtggagttgtatatgacagggcctcaggcagcttgtgtggcgcttgcactgaagatgggacctttcgtcagtatgtgcacacagcttcctcccggcgggtgtgtgactcctcaggttattggaccccagaggaggctgtggggcctcctgatgtggatcagccctgcgagccaagcttacaggcctggagccctgaggtccacctgtaccacatgaacatgacggtcccctgccccacagaaggctgtagcttggagctgctcttccaacacccggtccaagccgacaccctcaccctgtgggtcacttccttcttcatggagtcctcgcaggtcctctttgacacagagatcttgctggaaaacaaggagtcagtgcacctgggccccttagacactttctgtgacatcccactcaccatcaaactgcacgtggatgggaaggtgtcgggggtgaaagtctacacctttgatgagaggatagagattgatgcagcactcctgacttctcagccccacagtcccttgtgctctggctgcaggcctgtgaggtaccaggttctccgcgatcccccatttgccagtggtttgcccgtggtggtgacacattctcacaggaagttcacggacgtggaggtcacacctggacagatgtatcagtaccaagttctagctgaagctggaggagaactgggagaagcttcgcctcctctgaaccacattcatggagctccttattgtggagatgggaaggtgtcagagagactgggagaagagtgtgatgatggagaccttgtgagcggagatggctgctccaaggtgtgtgagctggaggaaggtttcaactgtgtaggagagccaagcctttgctacatgtatgagggagatggcatatgtgaaccttttgagagaaaaaccagcattgtagactgtggcatctacactcccaaaggatacttggatcaatgggctacccgggcttactcctctcatgaagacaagaagaagtgtcctgtttccttggtaactggagaacctcattccctaatttgcacatcataccatccagatttacccaaccaccgtcccctaactggctggtttccctgtgttgccagtgaaaatgaaactcaggatgacaggagtgaacagccagaaggtagcctgaagaaagaggatgaggtttggctcaaagtgtgtttcaatagaccaggagaggccagagcaatttttatttttttgacaactgatggcctagttcccggagagcatcagcagccgacagtgactctctacctgaccgatgtccgtggaagcaaccactctcttggaacctatggactgtcatgccagcataatccactgattatcaatgtgacccatcaccagaatgtccttttccaccataccacctcagtgctgctgaatttctcatccccacgggtcggcatctcagctgtggctctaaggacatcctcccgcattggtctttcggctcccagtaactgcatctcagaggacgaggggcagaatcatcagggacagagctgtatccatcggccctgtgggaagcaggacagctgtccgtcattgctgcttgatcatgctgatgtggtgaactgtacctctataggcccaggtctcatgaagtgtgctatcacttgtcaaaggggatttgcccttcaggccagcagtgggcagtacatcaggcccatgcagaaggaaattctgctcacatgttcttctgggcactgggaccagaatgtgagctgccttcccgtggactgcggtgttcccgacccgtctttggtgaactatgcaaacttctcctgctcagagggaaccaaatttctgaaacgctgctcaatctcttgtgtcccaccagccaagctgcaaggactgagcccatggctgacatgtcttgaagatggtctctggtctctccctgaagtctactgcaagttggagtgtgatgctccccctattattctgaatgccaacttgctcctgcctcactgcctccaggacaaccacgacgtgggcaccatctgcaaatatgaatgcaaaccagggtactatgtggcagaaagtgcagagggtaaagtcaggaacaagctcctgaagatacaatgcctggaaggtggaatctgggagcaaggcagctgcattcctgtggtgtgtgagccaccccctcctgtgtttgaaggcatgtatgaatgtaccaatggcttcagcctggacagccagtgtgtgctcaactgtaaccaggaacgtgaaaagcttcccatcctctgcactaaagagggcctgtggacccaggagtttaagttgtgtgagaatctgcaaggagaatgcccaccacccccctcagagctgaattctgtggagtacaaatgtgaacaaggatatgggattggtgcagtgtgttccccattgtgtgtaatcccccccagtgaccccgtgatgctacctgagaatatcactgctgacactctggagcactggatggaacctgtcaaagtccagagcattgtgtgcactggccggcgtcaatggcacccagaccccgtcttagtccactgcatccagtcatgtgagcccttccaagcagatggttggtgtgacactatcaacaaccgagcctactgccactatgacgggggagactgctgctcttccacactctcctccaagaaggtcattccatttgctgctgactgtgacctggatgagtgcacctgccgggaccccaaggcagaagaaaatcagtaactgtgggaacaagcccctccctccactgcctcagaggcagtaagaaagagaggccgacccaggaggaaacaaagggtgaatgaagaagaacaatcatgaaatggaagaaggaggaagagcatgaaggatcttataagaaatgcaagaggatattgataggtgtgaactagttcatcaagtagcccaagtaggagagaatcataggcaaaagtttctttaaagtggcagttgattaacatggaaggggaaatatgatagatatataaggaccctcctccctcacttatattctattaaatcctatcctcaactcttgccctgctctccgctccaccccctgccaactactcagtcccacccaacttgtaaaccaatacc

SEQ ID NO: 783 - protein, 1791 aa, Homosapiens
MMCLKILRISLAILAGWALCSANSELGWTRKKSLVEREHLNQVLLEGERCWLGAKVRRPRASPQHHLFGVYPSRAGNYLRPYPVGEQEIHHTGRSKPDTEGNAVSLVPPDLTENPAGLRGAVEEPAAPWVGDSPIGQSELLGDDDAYLGNQRSKESLGEAGIQKGSAMAATTTTAIFTTLNEPKPETQRRGWAKSRQRRQVWKRRAEDGQGDSGISSHFQPWPKHSLKHRVKKSPPEESNQNGGEGSYREAETFNSQVGLPILYFSGRRERLLLRPEVLAEIPREAFTVEAWVKPEGGQNNPAIIAGVFDNCSHTVSDKGWALGIRSGKDKGKRDARFFFSLCTDRVKKATILISHSRYQPGTWTHVAATYDGRHMALYVDGTQVASSLDQSGPLNSPFMASCRSLLLGGDSSEDGHYFRGHLGTLVFWSTALPQSHFQHSSQHSSGEEEATDLVLTASFEPVNTEWVPFRDEKYPRLEVLQGFEPEPEILSPLQPPLCGQTVCDNVELISQYNGYWPLRGEKVIRYQVVNICDDEGLNPIVSEEQIRLQHEALNEAFSRYNISWQLSVHQVHNSTLRHRVVLVNCEPSKIGNDHCDPECEHPLTGYDGGDCRLQGRCYSWNRRDGLCHVECNNMLNDFDDGDCCDPQVADVRKTCFDPDSPKRAYMSVKELKEALQLNSTHFLNIYFASSVREDLAGAATWPWDKDAVTHLGGIVLSPAYYGMPGHTDTMIHEVGHVLGLYHVFKGVSERESCNDPCKETVPSMETGDLCADTAPTPKSELCREPEPTSDTCGFTRFPGAPFTNYMSYTDDNCTDNFTPNQVARMHCYLDLVYQQWTESRKPTPIPIPPMVIGQTNKSLTIHWLPPISGVVYDRASGSLCGACTEDGTFRQYVHTASSRRVCDSSGYWTPEEAVGPPDVDQPCEPSLQAWSPEVHLYHMNMTVPCPTEGCSLELLFQHPVQADTLTLWVTSFFMESSQVLFDTEILLENKESVHLGPLDTFCDIPLTIKLHVDGKVSGVKVYTFDERIEIDAALLTSQPHSPLCSGCRPVRYQVLRDPPFASGLPVVVTHSHRKFTDVEVTPGQMYQYQVLAEAGGELGEASPPLNHIHGAPYCGDGKVSERLGEECDDGDLVSGDGCSKVCELEEGFNCVGEPSLCYMYEGDGICEPFERKTSIVDCGIYTPKGYLDQWATRAYSSHEDKKKCPVSLVTGEPHSLICTSYHPDLPNHRPLTGWFPCVASENETQDDRSEQPEGSLKKEDEVWLKVCFNRPGEARAIFIFLTTDGLVPGEHQQPTVTLYLTDVRGSNHSLGTYGLSCQHNPLIINVTHHQNVLFHHTTSVLLNFSSPRVGISAVALRTSSRIGLSAPSNCISEDEGQNHQGQSCIHRPCGKQDSCPSLLLDHADVVNCTSIGPGLMKCAITCQRGFALQASSGQYIRPMQKEILLTCSSGHWDQNVSCLPVDCGVPDPSLVNYANFSCSEGTKFLKRCSISCVPPAKLQGLSPWLTCLEDGLWSLPEVYCKLECDAPPIILNANLLLPHCLQDNHDVGTICKYECKPGYYVAESAEGKVRNKLLKIQCLEGGIWEQGSCIPVVCEPPPPVFEGMYECTNGFSLDSQCVLNCNQEREKLPILCTKEGLWTQEFKLCENLQGECPPPPSELNSVEYKCEQGYGIGAVCSPLCVIPPSDPVMLPENITADTLEHWMEPVKVQSIVCTGRRQWHPDPVLVHCIQSCEPFQADGWCDTINNRAYCHYDGGDCCSSTLSSKKVIPFAADCDLDECTCRDPKAEENQ

SEQ ID NO: 784 - DNA, 2104 bp, Homosapiens
aacttgggactgccaagagctgaaggagagtggtgagcaaaggaatgaagggagagagagagaaactaaactggaagcttgagttttgtgtagcttcttgaaaccttatgaatggattactagaagctgagagccaggagagacctataggggatgcaagatccctacacattaaaagggggagaaaagcaggcggaattcttcttcctggctgtgttatccctccttcctgaaatgaatggaacccacaagactcccagaaggtgaagttaagagctcccagactcataaggttattagaacagcaaactggcaccccaaagaactttacggagacttgcaacctatcaacaagttggatgagggattaaaagccttcaacaaccaacaaccccaagcatcaaactgaaggaaacattctaaccttcacagacagactggaggctggatggggacctggctgaagacatctggagaatgaaagttaagtaccagcttgcatttttgtgcccctagattatttttgcattttaaaataagaagcatcaaattgcgtgtctctgtgtaaaagttctagcaatttgttttaaggtgaacttattttggcttagggactacaaaaagagaaggtaattcctagggaaggaagaagagaaagaaatgaaaattagagaataagattattttgaatgacttcaggtagcgaggagtgtgtgtttgtgagtgtgtatttgagagacttggctcatgcctgtgggtcttctcttctagtatcagtgaggggagggattactgaagaagaaggggggaaaaaaaaagaaagaaatctgagctttctgggaggaaattcaaaggaaccaagagaaattaacttcgttctgcaaggactaaagtacagcaagaggagagaggtcaagcgagaagcgtgcgggaagcacatgccctggggaggcatagaagccacactggcagagcggccagcacaggtagccagcagaggcattcttggggctatttgaaaaagtttggtctgtgaacaaaacagtttccctggtgactgcaaatccattgctagctgcctctttctcgtctgcccatcactctggtgtggtacccagaagttgacttctggttctgtagaaagagctaggggaggtatgatgtgcttaaagatcctaagaataagcctggcgattttggctgggtgggcactctgttctgccaactctgagctgggctggacacgcaagaaatccttggttgagagggaacacctgaatcaggtgctgttggaaggagaacgttgttggctgggggccaaggttcgaagacccagagcttctccacagcatcacctctttggagtctaccccagcagggctgggaactacctaaggccctaccccgtgggggagcaagaaatccatcatacaggacgcagcaaaccagacactgaaggaaatgctgtgagccttgttcccccagacctgactgaaaatccagcaggactgaggggtgcagttgaagagccggctgccccatgggtaggggatagtcctattgggcaatctgagctgctgggagatgatgacgcttatctcggcaatcaaagatccaaggagtctctaggtgaggccgggattcagaaaggctcagccatggctgccactactaccaccgccattttcacaaccctgaacgaacccaaaccagagacccaaaggaggggctgggccaagtccaggcagcgtcgccaagtgtggaagaggcgggcggaagatgggcagggagactccggtatctcttcacatttccaaccttggcccaagcattcccttaaacacagggtcaaaaagagtccaccggaggaaagcaaccaaaatggtggagagggctcctaccgagaagcagagacctttaactcccaagtaggactgcccatcttatacttctctgggaggcgggagcggctgctgctgcgtccagaagtgctggctgagattccccgggaggcgttcacagtggaagcctgggttaaaccggagggaggacagaacaacccagccatcatcgcaggtaacacccttctcctgggctttctgaa

SEQ ID NO: 785 - protein, 56 aa, Homosapiens [sequence omitted]

SEQ ID NO: 786 - DNA, 472 bp, Homosapiens
agtcacatgaccaagtgttgatttttctggaggaaaaattttatggaaatgatataggggaaaggtgggaggagatgaaagaacaggcaagagctgtcagggttaaatccaggtggcccagggctagctggctctaacaactagcatgacagcctccaatcagaaaggcaggtaaggggacagggtgaggagaatgggcagatactgacagaaattaaagtaaagggattgtgaaagtaaagagctcttcctgattctcatcttctcttttttctattacaaggcattgaacttggcacttcctgtattctttgtgatcactattgagtgcattagttaacacccaaggggatggcttgattgggaatgtagtgaaaggagctgatctactgtattgtaatgtaaaacagctacagccagttattttgtaagattataagttgttcattaaaaaatcagcacacaaaatatg

SEQ ID NO: 787 - protein, 38 aa, Homosapiens
RDCESKELFLILIFSFFYYKALNLALPVFFVITIECIS

SEQ ID NO: 788 - DNA, 4207 bp, Homosapiens
gctccgggaaacaaagaatccggggctctccagacatcagagcttaaacccaggactctgcaagcggcatctcattccggggtccagggctctcccggctctccatcccctccctaacctcccccgcctcccgcgctcgctccctcgctccctccccgctcgcttcctcccccaccatcgcagcgctaggaggaaggcggccggggctcaagatggctttagccgggctctgcgccctgctcgcctgctgctgggggccggcggcggtgctggccacggccgccggcgacgtggatccatccaaggagctggagtgcaagctcaaaagcatcacggtgtcggcactgcccttcctgcgcgagaacgacctgagcatcatgcacagcccctcggcctcggagcccaagctcctcttctcggtgcgcaacgacttcccgggagaaatggtcgtggtggacgacctggagaacacggagctgccctacttcgtgctggagatctcagggaacacagaggatatccctttggtgcgctggaggcagcagtggctggagaatggcactttgctttttcacattcatcaccaagatggtgccccaagccttcctggacaagaccccactgaagaaccccaacatgagtcggcagaagaggagctgaggatcctccacatctcagtcatgggtggcatgatcgctctgctgctgtccatcttgtgcctggtgatgatcctgtatactcgccggcgctggtgcaaacgccgccgggtcccgcagccccagaagagtgccagtgctgaggcagccaatgagattcactacattccttctgtgctgatcggcgggcacggacgggagagcctgcgcaatgcccgcgtgcagggccacaactccagtggcaccctgagcatccgggagacacctatcctggacggctatgagtatgacatcactgatctgcgccaccatctgcagagggagtgcatgaacggaggggaggactttgccagccaggtcacgcgcaccctcgactccctgcagggctgcaatgaaaagtcggggatggacctcacaccaggaagtgacaatgccaagctgtcactgatgaacaagtataaagataatattatagccactagccctgtggactccaaccaccagcaagccacccttctctctcacacctccagcagccagagaaagcggatcaacaacaaagcaagagctggttccgccttcttgaaccctgaaggggattctggcacagaggcagaaaacgacccccagctgaccttttacacggatccttcaaggagcaggaggcgtagtagagtgggttctccccgaagtcctgtgaataagaccaccttgaccctgatcagcatcaccagctgtgtgattggcctcgtgtgctcctctcacgtcaactgccctctcgttgtcaagatcaccctgcatgtccctgagcacctgattgctgatgggagccgcttcatcttgctggaggggagccagctggatgccagtgactggctgaaccctgcccaagtggttctcttctctcagcagaactccagcggaccctgggccatggacctctgtgcccggcggctcctggacccctgtgaacaccaatgtgaccccgaaactggggaatgcctctgctatgaaggctacatgaaggatccagtacataagcacctttgcattcggaacgaatgggggacaaaccaggggccatggccttacacaatatttcagcgaggctttgacctggttttgggagagcagccctctgataaaatatttagattcacctacactcttggggagggcatgtggttgcccctcagcaagagctttgtgattccaccagccgaactggccatcaatccatcagcaaagtgcaagacggacatgactgtgatggaggatgctgtggaggtcagagaggagctgatgacttcatcctccttcgacagcctggaggttctcttagattcctttgggccggtgcgcgactgcagcaaagataacgggggctgcagtaagaatttccgctgtatttcagatcgcaagctggactccactggttgcgtgtgcccatctggactcagtcccatgaaggacagctctggctgctatgaccgccacatcggggtggactgttccgacggcttcaacggcggctgtgagcagctgtgcctccagcagatggcgcccttcccggacgaccccaccttgtataacatcctcatgttctgtgggtgcatcgaggactacaagcttggtgtggatggacgctcttgccaactcatcacggagacctgtccagagggaagtgactgtggggaaagcagggagcttcccatgaaccagaccctctttggggagatgttctttggttacaacaaccattccaaggaagtggctgccggacaggtgctgaaaggaacattcaggcaaaacaactttgctcgtggtttagaccagcaactgccagatggtcttgtggtggccactgtgcccctggagaatcaatgcctagaggagatctcggagcccacccctgaccctgacttcctgactgggatggtgaacttcagtgaagtgtctgggtaccctgtgctgcagcactggaaggtccggtctgtgatgtaccacatcaaactcaaccaagtggccatctctcaggccctcagcaatgctctccactcgctggatggggctacatctcgtgcagattttgtggcgctgttggaccagttcggcaaccattacatccaggaagctatctacggctttgaggagtcctgttctatctggtacccaaacaagcaggtccagcggcgactctggctggagtatgaagacatcagtaaaggcaactccccatcagatgagtctgaggagcgggaaagagaccccaaggtgctgacattcccagaatacatcaccagcttgtcagactccggcaccaagcacatggcggctggagtccgcatggagtgccacagcaagggacgatgcccctcgtcctgccccctgtgtcatgtgacatccagccctgacacccctgctgagccggttctgctggaggtgaccaaagcagcccccatctatgaactagtgaccaacaaccagacccagaggctcttgcaggaggctaccatgagctctctctggtgctcagggactggagatgtcatcgaggactggtgtcgatgtgactccactgcttttggagctgatggactccccacctgtgcgcctctcccacagcctgtgctgagactctccacggttcacgagcccagcagcactcttgtggtcctggagtgggaacactcagagccaccaatcggggtgcagattgtagattacctcctccgtcaagagaaagtcactgacaggatggaccactccaaagtggagacagaaacagtgctgagctttgtggacgacatcatctctggagcaaagtctccttgtgcaatgccatctcaggtgccggacaagcagctcaccaccatctctctgatcatacgatgcctggaacctgacaccatttacatgttcacgctgtggggagtggacaacacaggacggcgctccaggccaagcgacgtgatcgtgaagaccccatgccccgtggtggatgatgtcaaggctcaagaaatagcagacaagatctacaatctcttcaatggctacactagtgggaaggagcagcagaccgcctacaacaccctcctggatctgggttcccccaccttacaccgggtcctctaccactataaccagcactatgagagttttggggaattcacctggcgatgtgaggatgagttaggtcccaggcttccagcgtgttgggacagtcagaggagttgtagatgattggaggaaaggaagaagacggcagccagggtatttccccttctccctgcctcagatggcatctccagcatctccttcatgacctctgtctcctccgtgtgaccttccatcccctcaaagcaggagctgcgccctgatgttgctaatctgataggttgctcctatttgtccttctataatcccaaagtcttcctaattggtttctcatcttgaacttcctctgtggaattacctaaaatgtattttgctttcctgactaggtcttgattaatatatacttcaaactaaaagttagtacatatcgtctg

SEQ ID NO: 789 - protein, 1228 aa, Homosapiens
MALAGLCALLACCWGPAAVLATAAGDVDPSKELECKLKSITVSALPFLRENDLSIMHSPSASEPKLLFSVRNDFPGEMVVVDDLENTELPYFVLEISGNTEDIPLVRWRQQWLENGTLLFHIHHQDGAPSLPGQDPTEEPQHESAEEELRILHISVMGGMIALLLSILCLVMILYTRRRWCKRRRVPQPQKSASAEAANEIHYIPSVLIGGHGRESLRNARVQGHNSSGTLSIRETPILDGYEYDITDLRHHLQRECMNGGEDFASQVTRTLDSLQGCNEKSGMDLTPGSDNAKLSLMNKYKDNIIATSPVDSNHQQATLLSHTSSSQRKRINNKARAGSAFLNPEGDSGTEAENDPQLTFYTDPSRSRRRSRVGSPRSPVNKTTLTLISITSCVIGLVCSSHVNCPLVVKITLHVPEHLIADGSRFILLEGSQLDASDWLNPAQVVLFSQQNSSGPWAMDLCARRLLDPCEHQCDPETGECLCYEGYMKDPVHKHLCIRNEWGTNQGPWPYTIFQRGFDLVLGEQPSDKIFRFTYTLGEGMWLPLSKSFVIPPAELAINPSAKCKTDMTVMEDAVEVREELMTSSSFDSLEVLLDSFGPVRDCSKDNGGCSKNFRCISDRKLDSTGCVCPSGLSPMKDSSGCYDRHIGVDCSDGFNGGCEQLCLQQMAPFPDDPTLYNILMFCGCIEDYKLGVDGRSCQLITETCPEGSDCGESRELPMNQTLFGEMFFGYNNHSKEVAAGQVLKGTFRQNNFARGLDQQLPDGLVVATVPLENQCLEEISEPTPDPDFLTGMVNFSEVSGYPVLQHWKVRSVMYHIKLNQVAISQALSNALHSLDGATSRADFVALLDQFGNHYIQEAIYGFEESCSIWYPNKQVQRRLWLEYEDISKGNSPSDESEERERDPKVLTFPEYITSLSDSGTKHMAAGVRMECHSKGRCPSSCPLCHVTSSPDTPAEPVLLEVTKAAPIYELVTNNQTQRLLQEATMSSLWCSGTGDVIEDWCRCDSTAFGADGLPTCAPLPQPVLRLSTVHEPSSTLVVLEWEHSEPPIGVQIVDYLLRQEKVTDRMDHSKVETETVLSFVDDIISGAKSPCAMPSQVPDKQLTTISLIIRCLEPDTIYMFTLWGVDNTGRRSRPSDVIVKTPCPVVDDVKAQEIADKIYNLFNGYTSGKEQQTAYNTLLDLGSPTLHRVLYHYNQHYESFGEFTWRCEDELGPRLPACWDSQRSCR

SEQ ID NO: 790 - DNA, 7444 bp, Homosapiens
ggggtctctagtgacccgaggcttccggaggaggctgcccttgctccgcggtccctcgcggctcaaatccgaaaggtcggagatttcagaaagaagaggcgtgtgcagggcgcctcccaagaccccgccagccgccggcacacccagcatctttgaagtggggcttcggcactgggccggggcgcacgcggggcggccggggctcaagatggctttagccgggctctgcgccctgctcgcctgctgctgggggccggcggcggtgctggccacggccgccggcgacgtggatccatccaaggagctggagtgcaagctcaaaagcatcacggtgtcggcactgcccttcctgcgcgagaacgacctgagcatcatgcacagcccctcggcctcggagcccaagctcctcttctcggtgcgcaacgacttcccgggagaaatggtcgtggtggacgacctggagaacacggagctgccctacttcgtgctggagatctcagggaacacagaggatatccctttggtgcgctggaggcagcagtggctggagaatggcactttgctttttcacattcatcaccaagatggtgccccaagccttcctggacaagaccccactgaagaaccccaacatgagtcggcagaagaggagctgaggatcctccacatctcagtcatgggtggcatgatcgctctgctgctgtccatcttgtgcctggtgatgatcctgtatactcgccggcgctggtgcaaacgccgccgggtcccgcagccccagaagagtgccagtgctgaggcagccaatgagattcactacattccttctgtgctgatcggcgggcacggacgggagagcctgcgcaatgcccgcgtgcagggccacaactccagtggcaccctgagcatccgggagacacctatcctggacggctatgagtatgacatcactgatctgcgccaccatctgcagagggagtgcatgaacggaggggaggactttgccagccaggtcacgcgcaccctcgactccctgcagggctgcaatgaaaagtcggggatggacctcacaccaggaagtgacaatgccaagctgtcactgatgaacaagtataaagataatattatagccactagccctgtggactccaaccaccagcaagccacccttctctctcacacctccagcagccagagaaagcggatcaacaacaaagcaagagctggttccgccttcttgaaccctgaaggggattctggcacagaggcagaaaacgacccccagctgaccttttacacggatccttcaaggagcaggaggcgtagtagagtgggttctccccgaagtcctgtgaataagaccaccttgaccctgatcagcatcaccagctgtgtgattggcctcgtgtgctcctctcacgtcaactgccctctcgttgtcaagatcaccctgcatgtccctgagcacctgattgctgatgggagccgcttcatcttgctggaggggagccagctggatgccagtgactggctgaaccctgcccaagtggttctcttctctcagcagaactccagcggaccctgggccatggacctctgtgcccggcggctcctggacccctgtgaacaccaatgtgaccccgaaactggggaatgcctctgctatgaaggctacatgaaggatccagtacataagcacctttgcattcggaacgaatgggggacaaaccaggggccatggccttacacaatatttcagcgaggctttgacctggttttgggagagcagccctctgataaaatatttagattcacctacactcttggggagggcatgtggttgcccctcagcaagagctttgtgattccaccagccgaactggccatcaatccatcagcaaagtgcaagacggacatgactgtgatggaggatgctgtggaggtcagagaggagctgatgacttcatcctccttcgacagcctggaggttctcttagattcctttgggccggtgcgcgactgcagcaaagataacgggggctgcagtaagaatttccgctgtatttcagatcgcaagctggactccactggttgcgtgtgcccatctggactcagtcccatgaaggacagctctggctgctatgaccgccacatcggggtggactgttccgacggcttcaacggcggctgtgagcagctgtgcctccagcagatggcgcccttcccggacgaccccaccttgtataacatcctcatgttctgtgggtgcatcgaggactacaagcttggtgtggatggacgctcttgccaactcatcacggagacctgtccagagggaagtgactgtggggaaagcagggagcttcccatgaaccagaccctctttggggagatgttctttggttacaacaaccattccaaggaagtggctgccggacaggtgctgaaaggaacattcaggcaaaacaactttgctcgtggtttagaccagcaactgccagatggtcttgtggtggccactgtgcccctggagaatcaatgcctagaggagatctcggagcccacccctgaccctgacttcctgactgggatggtgaacttcagtgaagtgtctgggtaccctgtgctgcagcactggaaggtccggtctgtgatgtaccacatcaaactcaaccaagtggccatctctcaggccctcagcaatgctctccactcgctggatggggctacatctcgtgcagattttgtggcgctgttggaccagttcggcaaccattacatccaggaagctatctacggctttgaggagtcctgttctatctggtacccaaacaagcaggtccagcggcgactctggctggagtatgaagacatcagtaaaggcaactccccatcagatgagtctgaggagcgggaaagagaccccaaggtgctgacattcccagaatacatcaccagcttgtcagactccggcaccaagcacatggcggctggagtccgcatggagtgccacagcaagggacgatgcccctcgtcctgccccctgtgtcatgtgacatccagccctgacacccctgctgagccggttctgctggaggtgaccaaagcagcccccatctatgaactagtgaccaacaaccagacccagaggctcttgcaggaggctaccatgagctctctctggtgctcagggactggagatgtcatcgaggactggtgtcgatgtgactccactgcttttggagctgatggactccccacctgtgcgcctctcccacagcctgtgctgagactctccacggttcacgagcccagcagcactcttgtggtcctggagtgggaacactcagagccaccaatcggggtgcagattgtagattacctcctccgtcaagagaaagtcactgacaggatggaccactccaaagtggagacagaaacagtgctgagctttgtggacgacatcatctctggagcaaagtctccttgtgcaatgccatctcaggtgccggacaagcagctcaccaccatctctctgatcatacgatgcctggaacctgacaccatttacatgttcacgctgtggggagtggacaacacaggacggcgctccaggccaagcgacgtgatcgtgaagaccccatgccccgtggtggatgatgtcaaggctcaagaaatagcagacaagatctacaatctcttcaatggctacactagtgggaaggagcagcagaccgcctacaacaccctcctggatctgggttcccccaccttacaccgggtcctctaccactataaccagcactatgagagttttggggaattcacctggcgatgtgaggatgagttaggtcccaggaaagctggtctcatcctttcccagcttggggacctcagcagttggtgcaatggactccttcaggaacccaagataagcttgcggcgcagctcactcaagtacctggggtgccgctacagcgagatcaaaccctacggacttgactgggcggagctcagccgggacctcaggaagacgtgtgaggagcagaccctgagtatcccctacaacgactatggggacagcaaagagatctagcaccataaggccagggagctgctgccagaatgaagtaggaaagaggagggatccatctgggttggtctgtggatttttaatattttttaatggaacatgaaaacctccacagcaacatcgaaaccagggagaaagtgatccttgctccctgcagaacttcttcagtatgatgttctccatctgcatgattgggaaatctgccagccagtggcttcatgcagtgccatatttctttagaggattactttggggtttgctttgccattaatttgttccattcatttttttttccctgagaagtttaccaaaatgctcaagagctctgccgtgctccccatgaaaagtctattaagtaggcaccctgtgctcactcagttcctaaatccattgcaactgggagcagaggtgaggccagaaagttgttaggcctgccgcaggccccaccctcaagcattcctcaggaagcgtctcactctgggagccttggccctgctcacagagagagacaatagaaaattgaggaaggtggcccttgtctgtgtctcctggttttcttcctaggccttgctatcactatttccatacccgaaaggtgaaaccagctttcattataggccccagtgggccacttgggttttgagatccttccttattttaagccaggactgggattaaatctccctctgtcagatctctgtcccttcctctgaacaacatgatctttgagagggaacaagatgccatctgtcaactgcaccttcagaaaagtctacctgggagactagttagcagtccacattcaagaggagacttggagtttattgttttttaaaaaaaccatgcttcctttggatagacttctccagcctaccaatatatatccatgtgcctggattatctttaacccccacacctcttaccttggacaggtaaggcttggccgatgtctgattgggaccaggaggggtcaacactttcatatcagtgttacagtgaactaaagctattattgatcacaaaaaacttctgttcatccccaccttgctaaatttgcttgtgttgctagttttgcaaatcgtttctctgatgaccataagcaggaggattccaccatggtcactgcccatccagtcacagggattctgtgtagggaagcaccactgattgcagttaacatctagagtgttgtttccatcccactgcccaagcattggcatggtcatgaatggtggcccagccaacaggaagcccagcctttcagaaagagcctggcaaggccctgttgactagcaatggccttagctgtcccacacaactcagtggcctgaacacacaccttcagccaccatgcctttgaccagggctcctcatctggaaacatatgagaaaggtcagcaaacagatgcaagacctataaggctagtcattgagctatattggttttttttctaaatagtagtagtgacagataacatttattgagtgcttgctgtatgccaggcgctgatgtaagcactttaggtatcattgaattctcacagcaactcctgaggaaagtgctattcttgtctccattttagtgttgaggaaaacgaggcaaagagaggttatacaacttgcctcaaatcccttgtgcactgtaactcacactgagtttcagtgtgatttcaggctgttggtctccagggcacaggatcttagctactctgggatacccagttctgttttcagtatcatctggcacacaactgtccaagctctcagccccacagggaacctgcccagagagctttacctttcccaagcatctgtggcatggacatgtcctctgtgcagtggaaggaggaggggcgaaagtacgcccttagcctttggagctagagcacccttgggacccctagttccactgcacatggccctcctccccaccctcatgactgggaaggaagcctgtgatgaggctgagataaagcacagggtggtttcactctcctctctccttctttccaaacactgaaggatttatttcaaactctctaatgcacctgcctcagagattcccctactttcaaagcaaagatcagcagaaaaattggctgtcccacctgtggcaaatgctggagcctcagttaaagtgcctcaaggggcaaatatttcaccattgccagagaagatgtgacaggccaatcagacagggcccagagcatctctttgctgctactgttttgccatccttctattcatatctgtgcagaacacggtgttttaagcttgagtgaaaggagggtgaggctgccgatgccttcctgcccagaagtggatgatgtgggagttgacaggccagggagagggtgaagcaggtatcagagtcactcctctgtaccctctccttctgtttttattttaggcacactatcttcctctctcctatctttccctcagtctcccaagttcctctaccttctttatctttgtcttttacttcttctttctgtgaccctccttttttggcctcctctttccccaagactttcttcctcctgtttctcgttgagttctccccactgaatgtgtgtatgtatgtacacacacacacacgtgtgcacacacaatgcacacaactcctatgactggctcctacttacattcaagttaaaaaggctgatatgaacagggcaggggaaaatcttaggatggttgtacaattgactggaggattttttccccttggaagacactattgatctcaacctgctgacttttcctaatgcttacctgaaggaacccatcctggctagaaagggtgatggtactggaccggtattcaaccttgagttttcaagctgccaaacaggtcttaagggaggtgcttatatcccaccaacactctcccagctcccatgtccccaagacctctggagtttcctcttgaatgtacatgaaccactgtaatagcattagacttttaattgagtgtgcaatcgttttccatggagtttggtccgttcattattttttagttaactacacttcttgatattcaaatgttctattaaaaaaactgagtatgaagaaaaacactttactactgcagaaggaagaaagaatataatatgaccatcttcaggtataacagtgttgtttaaaagagaattattgtatgattataaaagatgaaataattaactgaataataaaacaaagctattagtaagcattgggtatgtggatgttgtgtctttcagtaatctgagtgaactggttagactcatcagggaacttgttaaggttttaaaggttacacttcagattccagacataatgggccttatagtcatcattctaactgga

SEQ ID NO: 791 - protein, 1294 aa, Homosapiens; identical to SEQ ID NO: 6

SEQ ID NO: 792 - DNA, 7317 bp, Homosapiens
gctccgggaaacaaagaatccggggctctccagacatcagagcttaaacccaggactctgcaagcggcatctcattccggggtccagggctctcccggctctccatcccctccctaacctcccccgcctcccgcgctcgctccctcgctccctccccgctcgcttcctcccccaccatcgcagcgctaggaggaaggcggccggggctcaagatggctttagccgggctctgcgccctgctcgcctgctgctgggggccggcggcggtgctggccacggccgccggcgacgtggatccatccaaggagctggagtgcaagctcaaaagcatcacggtgtcggcactgcccttcctgcgcgagaacgacctgagcatcatgcacagcccctcggcctcggagcccaagctcctcttctcggtgcgcaacgacttcccgggagaaatggtcgtggtggacgacctggagaacacggagctgccctacttcgtgctggagatctcagggaacacagaggatatccctttggtgcgctggaggcagcagtggctggagaatggcactttgctttttcacattcatcaccaagatggtgccccaagccttcctggacaagaccccactgaagaaccccaacatgagtcggcagaagaggagctgaggatcctccacatctcagtcatgggtggcatgatcgctctgctgctgtccatcttgtgcctggtgatgatcctgtatactcgccggcgctggtgcaaacgccgccgggtcccgcagccccagaagagtgccagtgctgaggcagccaatgagattcactacattccttctgtgctgatcggcgggcacggacgggagagcctgcgcaatgcccgcgtgcagggccacaactccagtggcaccctgagcatccgggagacacctatcctggacggctatgagtatgacatcactgatctgcgccaccatctgcagagggagtgcatgaacggaggggaggactttgccagccaggtcacgcgcaccctcgactccctgcagggctgcaatgaaaagtcggggatggacctcacaccaggaagtgacaatgccaagctgtcactgatgaacaagtataaagataatattatagccactagccctgtggactccaaccaccagcaagccacccttctctctcacacctccagcagccagagaaagcggatcaacaacaaagcaagagctggttccgccttcttgaaccctgaaggggattctggcacagaggcagaaaacgacccccagctgaccttttacacggatccttcaaggagcaggaggcgtagtagagtgggttctccccgaagtcctgtgaataagaccaccttgaccctgatcagcatcaccagctgtgtgattggcctcgtgtgctcctctcacgtcaactgccctctcgttgtcaagatcaccctgcatgtccctgagcacctgattgctgatgggagccgcttcatcttgctggaggggagccagctggatgccagtgactggctgaaccctgcccaagtggttctcttctctcagcagaactccagcggaccctgggccatggacctctgtgcccggcggctcctggacccctgtgaacaccaatgtgaccccgaaactggggaatgcctctgctatgaaggctacatgaaggatccagtacataagcacctttgcattcggaacgaatgggggacaaaccaggggccatggccttacacaatatttcagcgaggctttgacctggttttgggagagcagccctctgataaaatatttagattcacctacactcttggggagggcatgtggttgcccctcagcaagagctttgtgattccaccagccgaactggccatcaatccatcagcaaagtgcaagacggacatgactgtgatggaggatgctgtggaggtcagagaggagctgatgacttcatcctccttcgacagcctggaggttctcttagattcctttgggccggtgcgcgactgcagcaaagataacgggggctgcagtaagaatttccgctgtatttcagatcgcaagctggactccactggttgcgtgtgcccatctggactcagtcccatgaaggacagctctggctgctatgaccgccacatcggggtggactgttccgacggcttcaacggcggctgtgagcagctgtgcctccagcagatggcgcccttcccggacgaccccaccttgtataacatcctcatgttctgtgggtgcatcgaggactacaagcttggtgtggatggacgctcttgccaactcatcacggagacctgtccagagggaagtgactgtggggaaagcagggagcttcccatgaaccagaccctctttggggagatgttctttggttacaacaaccattccaaggaagtggctgccggacaggtgctgaaaggaacattcaggcaaaacaactttgctcgtggtttagaccagcaactgccagatggtcttgtggtggccactgtgcccctggagaatcaatgcctagaggagatctcggagcccacccctgaccctgacttcctgactgggatggtgaacttcagtgaagtgtctgggtaccctgtgctgcagcactggaaggtccggtctgtgatgtaccacatcaaactcaaccaagtggccatctctcaggccctcagcaatgctctccactcgctggatggggctacatctcgtgcagattttgtggcgctgttggaccagttcggcaaccattacatccaggaagctatctacggctttgaggagtcctgttctatctggtacccaaacaagcaggtccagcggcgactctggctggagtatgaagacatcagtaaaggcaactccccatcagatgagtctgaggagcgggaaagagaccccaaggtgctgacattcccagaatacatcaccagcttgtcagactccggcaccaagcacatggcggctggagtccgcatggagtgccacagcaagggacgatgcccctcgtcctgccccctgtgtcatgtgacatccagccctgacacccctgctgagccggttctgctggaggtgaccaaagcagcccccatctatgaactagtgaccaacaaccagacccagaggctcttgcaggaggctaccatgagctctctctggtgctcagggactggagatgtcatcgaggactggtgtcgatgtgactccactgcttttggagctgatggactccccacctgtgcgcctctcccacagcctgtgctgagactctccacggttcacgagcccagcagcactcttgtggtcctggagtgggaacactcagagccaccaatcggggtgcagattgtagattacctcctccgtcaagagaaagtcactgacaggatggaccactccaaagtggagacagaaacagtgctgagctttgtggacgacatcatctctggagcaaagtctccttgtgcaatgccatctcaggtgccggacaagcagctcaccaccatctctctgatcatacgatgcctggaacctgacaccatttacatgttcacgctgtggggagtggacaacacaggacggcgctccaggccaagcgacgtgatcgtgaagaccccatgccccgtggtggatgatgtcaaggctcaagaaatagcagacaagatctacaatctcttcaatggctacactagtgggaaggagcagcagaccgcctacaacaccctcctggatctgggttcccccaccttacaccgggtcctctaccactataaccagcactatgagagttttggggaattcacctggcgatgtgaggatgagttaggtcccaggaaagctggtctcatcctttcccagcttggggacctcagcagttggtgcaatggactccttcaggaacccaagataagcttgcggcgcagctcactcaagtacctggggtgccgctacagcgagatcaaaccctacggacttgactgggcggagctcagccgggacctcaggaagacgtgtgaggagcagaccctgagtatcccctacaacgactatggggacagcaaagagatctagcaccataaggccagggagctgctgccagaatgaagtaggaaagaggagggatccatctgggttggtctgtggatttttaatattttttaatggaacatgaaaacctccacagcaacatcgaaaccagggagaaagtgatccttgctccctgcagaacttcttcagtatgatgttctccatctgcatgattgggaaatctgccagccagtggcttcatgcagtgccatatttctttagaggattactttggggtttgctttgccattaatttgttccattcatttttttttccctgagaagtttaccaaaatgctcaagagctctgccgtgctccccatgaaaagtctattaagtaggcaccctgtgctcactcagttcctaaatccattgcaactgggagcagaggtgaggccagaaagttgttaggcctgccgcaggccccaccctcaagcattcctcaggaagcgtctcactctgggagccttggccctgctcacagagagagacaatagaaaattgaggaaggtggcccttgtctgtgtctcctggttttcttcctaggccttgctatcactatttccatacccgaaaggtgaaaccagctttcattataggccccagtgggccacttgggttttgagatccttccttattttaagccaggactgggattaaatctccctctgtcagatctctgtcccttcctctgaacaacatgatctttgagagggaacaagatgccatctgtcaactgcaccttcagaaaagtctacctgggagactagttagcagtccacattcaagaggagacttggagtttattgttttttaaaaaaaccatgcttcctttggatagacttctccagcctaccaatatatatccatgtgcctggattatctttaacccccacacctcttaccttggacaggtaaggcttggccgatgtctgattgggaccaggaggggtcaacactttcatatcagtgttacagtgaactaaagctattattgatcacaaaaaacttctgttcatccccaccttgctaaatttgcttgtgttgctagttttgcaaatcgtttctctgatgaccataagcaggaggattccaccatggtcactgcccatccagtcacagggattctgtgtagggaagcaccactgattgcagttaacatctagagtgttgtttccatcccactgcccaagcattggcatggtcatgaatggtggcccagccaacaggaagcccagcctttcagaaagagcctggcaaggccctgttgactagcaatggccttagctgtcccacacaactcagtggcctgaacacacaccttcagccaccatgcctttgaccagggctcctcatctggaaacatatgagaaaggtcagcaaacagatgcaagacctataaggctagtcattgagctatattggttttttttctaaatagtagtagtgacagataacatttattgagtgcttgctgtatgccaggcgctgatgtaagcactttaggtatcattgaattctcacagcaactcctgaggaaagtgctattcttgtctccattttagtgttgaggaaaacgaggcaaagagaggttatacaacttgcctcaaatcccttgtgcactgtaactcacactgagtttcagtgtgatttcaggctgttggtctccagggcacaggatcttagctactctgggatacccagttctgttttcagtatcatctggcacacaactgtccaagctctcagccccacagggaacctgcccagagagctttacctttcccaagcatctgtggcatggacatgtcctctgtgcagtggaaggaggaggggcgaaagtacgcccttagcctttggagctagagcacccttgggacccctagttccactgcacatggccctcctccccaccctcatgactgggaaggaagcctgtgatgaggctgagataaagcacagggtggtttcactctcctctctccttctttccaaacactgaaggatttatttcaaactctctaatgcacctgcctcagagattcccctactttcaaagcaaagatcagcagaaaaattggctgtcccacctgtggcaaatgctggagcctcagttaaagtgcctcaaggggcaaatatttcaccattgccagagaagatgtgacaggccaatcagacagggcccagagcatctctttgctgctactgttttgccatccttctattcatatctgtgcagaacacggtgttttaagcttgagtgaaaggagggtgaggctgccgatgccttcctgcccagaagtggatgatgtgggagttgacaggccagggagagggtgaagcaggtatcagagtcactcctctgtaccctctccttctgtttttattttaggcacactatcttcctctctcctatctttccctcagtctcccaagttcctctaccttctttatctttgtcttttacttcttctttctgtgaccctccttttttggcctcctctttccccaagactttcttcctcctgtttctcgttgagttctccccactgaatgtgtgtatgtatgtacacacacacacacgtgtgcacacacaatgcacacaactcctatgactggctcctacttacattcaagttaaaaaggctgatatgaacagggcaggggaaaatcttaggatggttgtacaattgactggaggattttttccccttggaagacactattgatctcaacctgctgacttttcctaatgcttacctgaaggaacccatcctggctagaaagggtgatggtactggaccggtattcaaccttgagttttcaagctgccaaacaggtcttaagggaggtgcttatatcccaccaacactctcccagctcccatgtccccaagacctctggagtttcctcttgaatgtacatgaaccactgtaatagcattagacttttaattgagtgtgcaatcgttttccatggagtttggtccgttcattattttttagttaactacacttcttgatattcaaatgttctattaaaaaaactgagtatgaagaaaaacactttactactgcagaaggaagaaagaatataatatgaccatcttcaggtataacagtgttgtttaaaagagaattattgtatgattataaaagatgaaataattaactgaataataaaacaaagctattagtaagcattg

SEQ ID NO: 793 - protein, 1294 aa, Homosapiens; identical to SEQ ID NO: 6

SEQ ID NO: 794 - DNA, 7313 bp, Homosapiens
ggggtctctagtgacccgaggcttccggaggaggctgcccttgctccgcggtccctcgcggctcaaatccgaaaggtcggagatttcagaaagaagaggcgtgtgcagggcgcctcccaagaccccgccagccgccggcacacccagcatctttgaagtggggcttcggcactgggccggggcgcacgcggggcggccggggctcaagatggctttagccgggctctgcgccctgctcgcctgctgctgggggccggcggcggtgctggccacggccgccggcgacgtggatccatccaaggagctggagtgcaagctcaaaagcatcacggtgtcggcactgcccttcctgcgcgagaacgacctgagcatcatgcacagcccctcggcctcggagcccaagctcctcttctcggtgcgcaacgacttcccgggagaaatggtcgtggtggacgacctggagaacacggagctgccctacttcgtgctggagatctcagggaacacagaggatatccctttggtgcgctggaggcagcagtggctggagaatggcactttgctttttcacattcatcaccaagatggtgccccaagccttcctggacaagaccccactgaagaaccccaacatgagtcggcagaagaggagctgaggatcctccacatctcagtcatgggtggcatgatcgctctgctgctgtccatcttgtgcctggtgatgatcctgtatactcgccggcgctggtgcaaacgccgccgggtcccgcagccccagaagagtgccagtgctgaggcagccaatgagattcactacattccttctgtgctgatcggcgggcacggacgggagagcctgcgcaatgcccgcgtgcagggccacaactccagtggcaccctgagcatccgggagacacctatcctggacggctatgagtatgacatcactgatctgcgccaccatctgcagagggagtgcatgaacggaggggaggactttgccagccaggtcacgcgcaccctcgactccctgcagggctgcaatgaaaagtcggggatggacctcacaccaggaagtgacaatgccaagctgtcactgatgaacaagtataaagataatattatagccactagccctgtggactccaaccaccagcaagccacccttctctctcacacctccagcagccagagaaagcggatcaacaacaaagcaagagctggttccgccttcttgaaccctgaaggggattctggcacagaggcagaaaacgacccccagctgaccttttacacggatccttcaaggagcaggaggcgtagtagagtgggttctccccgaagtcctgtgaataagaccaccttgaccctgatcagcatcaccagctgtgtgattggcctcgtgtgctcctctcacgtcaactgccctctcgttgtcaagatcaccctgcatgtccctgagcacctgattgctgatgggagccgcttcatcttgctggaggggagccagctggatgccagtgactggctgaaccctgcccaagtggttctcttctctcagcagaactccagcggaccctgggccatggacctctgtgcccggcggctcctggacccctgtgaacaccaatgtgaccccgaaactggggaatgcctctgctatgaaggctacatgaaggatccagtacataagcacctttgcattcggaacgaatgggggacaaaccaggggccatggccttacacaatatttcagcgaggctttgacctggttttgggagagcagccctctgataaaatatttagattcacctacactcttggggagggcatgtggttgcccctcagcaagagctttgtgattccaccagccgaactggccatcaatccatcagcaaagtgcaagacggacatgactgtgatggaggatgctgtggaggtcagagaggagctgatgacttcatcctccttcgacagcctggaggttctcttagattcctttgggccggtgcgcgactgcagcaaagataacgggggctgcagtaagaatttccgctgtatttcagatcgcaagctggactccactggttgcgtgtgcccatctggactcagtcccatgaaggacagctctggctgctatgaccgccacatcggggtggactgttccgacggcttcaacggcggctgtgagcagctgtgcctccagcagatggcgcccttcccggacgaccccaccttgtataacatcctcatgttctgtgggtgcatcgaggactacaagcttggtgtggatggacgctcttgccaactcatcacggagacctgtccagagggaagtgactgtggggaaagcagggagcttcccatgaaccagaccctctttggggagatgttctttggttacaacaaccattccaaggaagtggctgccggacaggtgctgaaaggaacattcaggcaaaacaactttgctcgtggtttagaccagcaactgccagatggtcttgtggtggccactgtgcccctggagaatcaatgcctagaggagatctcggagcccacccctgaccctgacttcctgactgggatggtgaacttcagtgaagtgtctgggtaccctgtgctgcagcactggaaggtccggtctgtgatgtaccacatcaaactcaaccaagtggccatctctcaggccctcagcaatgctctccactcgctggatggggctacatctcgtgcagattttgtggcgctgttggaccagttcggcaaccattacatccaggaagctatctacggctttgaggagtcctgttctatctggtacccaaacaagcaggtccagcggcgactctggctggagtatgaagacatcagtaaaggcaactccccatcagatgagtctgaggagcgggaaagagaccccaaggtgctgacattcccagaatacatcaccagcttgtcagactccggcaccaagcacatggcggctggagtccgcatggagtgccacagcaagggacgatgcccctcgtcctgccccctgtgtcatgtgacatccagccctgacacccctgctgagccggttctgctggaggtgaccaaagcagcccccatctatgaactagtgaccaacaaccagacccagaggctcttgcaggaggctaccatgagctctctctggtgctcagggactggagatgtcatcgaggactggtgtcgatgtgactccactgcttttggagctgatggactccccacctgtgcgcctctcccacagcctgtgctgagactctccacggttcacgagcccagcagcactcttgtggtcctggagtgggaacactcagagccaccaatcggggtgcagattgtagattacctcctccgtcaagagaaagtcactgacaggatggaccactccaaagtggagacagaaacagtgctgagctttgtggacgacatcatctctggagcaaagtctccttgtgcaatgccatctcaggtgccggacaagcagctcaccaccatctctctgatcatacgatgcctggaacctgacaccatttacatgttcacgctgtggggagtggacaacacaggacggcgctccaggccaagcgacgtgatcgtgaagaccccatgccccgtggtggatgatgtcaaggctcaagaaatagcagacaagatctacaatctcttcaatggctacactagtgggaaggagcagcagaccgcctacaacaccctcctggatctgggttcccccaccttacaccgggtcctctaccactataaccagcactatgagagttttggggaattcacctggcgatgtgaggatgagttaggtcccaggaaagctggtctcatcctttcccagcttggggacctcagcagttggtgcaatggactccttcaggaacccaagataagcttgcggcgcagctcactcaagtacctggggtgccgctacagcgagatcaaaccctacggacttgactgggcggagctcagccgggacctcaggaagacgtgtgaggagcagaccctgagtatcccctacaacgactatggggacagcaaagagatctagcaccataaggccagggagctgctgccagaatgaagtaggaaagaggagggatccatctgggttggtctgtggatttttaatattttttaatggaacatgaaaacctccacagcaacatcgaaaccagggagaaagtgatccttgctccctgcagaacttcttcagtatgatgttctccatctgcatgattgggaaatctgccagccagtggcttcatgcagtgccatatttctttagaggattactttggggtttgctttgccattaatttgttccattcatttttttttccctgagaagtttaccaaaatgctcaagagctctgccgtgctccccatgaaaagtctattaagtaggcaccctgtgctcactcagttcctaaatccattgcaactgggagcagaggtgaggccagaaagttgttaggcctgccgcaggccccaccctcaagcattcctcaggaagcgtctcactctgggagccttggccctgctcacagagagagacaatagaaaattgaggaaggtggcccttgtctgtgtctcctggttttcttcctaggccttgctatcactatttccatacccgaaaggtgaaaccagctttcattataggccccagtgggccacttgggttttgagatccttccttattttaagccaggactgggattaaatctccctctgtcagatctctgtcccttcctctgaacaacatgatctttgagagggaacaagatgccatctgtcaactgcaccttcagaaaagtctacctgggagactagttagcagtccacattcaagaggagacttggagtttattgttttttaaaaaaaccatgcttcctttggatagacttctccagcctaccaatatatatccatgtgcctggattatctttaacccccacacctcttaccttggacaggtaaggcttggccgatgtctgattgggaccaggaggggtcaacactttcatatcagtgttacagtgaactaaagctattattgatcacaaaaaacttctgttcatccccaccttgctaaatttgcttgtgttgctagttttgcaaatcgtttctctgatgaccataagcaggaggattccaccatggtcactgcccatccagtcacagggattctgtgtagggaagcaccactgattgcagttaacatctagagtgttgtttccatcccactgcccaagcattggcatggtcatgaatggtggcccagccaacaggaagcccagcctttcagaaagagcctggcaaggccctgttgactagcaatggccttagctgtcccacacaactcagtggcctgaacacacaccttcagccaccatgcctttgaccagggctcctcatctggaaacatatgagaaaggtcagcaaacagatgcaagacctataaggctagtcattgagctatattggttttttttctaaatagtagtagtgacagataacatttattgagtgcttgctgtatgccaggcgctgatgtaagcactttaggtatcattgaattctcacagcaactcctgaggaaagtgctattcttgtctccattttagtgttgaggaaaacgaggcaaagagaggttatacaacttgcctcaaatcccttgtgcactgtaactcacactgagtttcagtgtgatttcaggctgttggtctccagggcacaggatcttagctactctgggatacccagttctgttttcagtatcatctggcacacaactgtccaagctctcagccccacagggaacctgcccagagagctttacctttcccaagcatctgtggcatggacatgtcctctgtgcagtggaaggaggaggggcgaaagtacgcccttagcctttggagctagagcacccttgggacccctagttccactgcacatggccctcctccccaccctcatgactgggaaggaagcctgtgatgaggctgagataaagcacagggtggtttcactctcctctctccttctttccaaacactgaaggatttatttcaaactctctaatgcacctgcctcagagattcccctactttcaaagcaaagatcagcagaaaaattggctgtcccacctgtggcaaatgctggagcctcagttaaagtgcctcaaggggcaaatatttcaccattgccagagaagatgtgacaggccaatcagacagggcccagagcatctctttgctgctactgttttgccatccttctattcatatctgtgcagaacacggtgttttaagcttgagtgaaaggagggtgaggctgccgatgccttcctgcccagaagtggatgatgtgggagttgacaggccagggagagggtgaagcaggtatcagagtcactcctctgtaccctctccttctgtttttattttaggcacactatcttcctctctcctatctttccctcagtctcccaagttcctctaccttctttatctttgtcttttacttcttctttctgtgaccctccttttttggcctcctctttccccaagactttcttcctcctgtttctcgttgagttctccccactgaatgtgtgtatgtatgtacacacacacacacgtgtgcacacacaatgcacacaactcctatgactggctcctacttacattcaagttaaaaaggctgatatgaacagggcaggggaaaatcttaggatggttgtacaattgactggaggattttttccccttggaagacactattgatctcaacctgctgacttttcctaatgcttacctgaaggaacccatcctggctagaaagggtgatggtactggaccggtattcaaccttgagttttcaagctgccaaacaggtcttaagggaggtgcttatatcccaccaacactctcccagctcccatgtccccaagacctctggagtttcctcttgaatgtacatgaaccactgtaatagcattagacttttaattgagtgtgcaatcgttttccatggagtttggtccgttcattattttttagttaactacacttcttgatattcaaatgttctattaaaaaaactgagtatgaagaaaaacactttactactgcagaaggaagaaagaatataatatgaccatcttcaggtataacagtgttgtttaaaagagaattattgtatgattataaaagatgaaataattaactgaataataaaacaaagctattagtaagcattg

SEQ ID NO: 795 - protein, 1294 aa, Homosapiens; identical to SEQ ID NO: 6

SEQ ID NO: 796 - DNA, 3859 bp, Homosapiens
gctccgggaaacaaagaatccggggctctccagacatcagagcttaaacccaggactctgcaagcggcatctcattccggggtccagggctctcccggctctccatcccctccctaacctcccccgcctcccgcgctcgctccctcgctccctccccgctcgcttcctcccccaccatcgcagcgctaggaggaaggcggccggggctcaagatggctttagccgggctctgcgccctgctcgcctgctgctgggggccggcggcggtgctggccacggccgccggcgacgtggatccatccaaggagctggagtgcaagctcaaaagcatcacggtgtcggcactgcccttcctgcgcgagaacgacctgagcatcatgcacagcccctcggcctcggagcccaagctcctcttctcggtgcgcaacgacttcccgggagaaatggtcgtggtggacgacctggagaacacggagctgccctacttcgtgctggagatctcagggaacacagaggatatccctttggtgcgctggaggcagcagtggctggagaatggcactttgctttttcacattcatcaccaagatggtgccccaagccttcctggacaagaccccactgaagaaccccaacatgagtcggcagaagaggagctgaggatcctccacatctcagtcatgggtggcatgatcgctctgctgctgtccatcttgtgcctggtgatgatcctgtatactcgccggcgctggtgcaaacgccgccgggtcccgcagccccagaagagtgccagtgctgaggcagccaatgagattcactacattccttctgtgctgatcggcgggcacggacgggagagcctgcgcaatgcccgcgtgcagggccacaactccagtggcaccctgagcatccgggagacacctatcctggacggctatgagtatgacatcactgatctgcgccaccatctgcagagggagtgcatgaacggaggggaggactttgccagccaggtcacgcgcaccctcgactccctgcagggctgcaatgaaaagtcggggatggacctcacaccaggaagtgacaatgccaagctgtcactgatgaacaagtataaagataatattatagccactagccctgtggactccaaccaccagcaagccacccttctctctcacacctccagcagccagagaaagcggatcaacaacaaagcaagagctggttccgccttcttgaaccctgaaggggattctggcacagaggcagaaaacgacccccagctgaccttttacacggatccttcaaggagcaggaggcgtagtagagtgggttctccccgaagtcctgtgaataagaccaccttgaccctgatcagcatcaccagctgtgtgattggcctcgtgtgctcctctcacgtcaactgccctctcgttgtcaagatcaccctgcatgtccctgagcacctgattgctgatgggagccgcttcatcttgctggaggggagccagctggatgccagtgactggctgaaccctgcccaagtggttctcttctctcagcagaactccagcggaccctgggccatggacctctgtgcccggcggctcctggacccctgtgaacaccaatgtgaccccgaaactggggaatgcctctgctatgaaggctacatgaaggatccagtacataagcacctttgcattcggaacgaatgggggacaaaccaggggccatggccttacacaatatttcagcgaggctttgacctggttttgggagagcagccctctgataaaatatttagattcacctacactcttggggagggcatgtggttgcccctcagcaagagctttgtgattccaccagccgaactggccatcaatccatcagcaaagtgcaagacggacatgactgtgatggaggatgctgtggaggtcagagaggagctgatgacttcatcctccttcgacagcctggaggttctcttagattcctttgggccggtgcgcgactgcagcaaagataacgggggctgcagtaagaatttccgctgtatttcagatcgcaagctggactccactggttgcgtgtgcccatctggactcagtcccatgaaggacagctctggctgctatgaccgccacatcggggtggactgttccgacggcttcaacggcggctgtgagcagctgtgcctccagcagatggcgcccttcccggacgaccccaccttgtataacatcctcatgttctgtgggtgcatcgaggactacaagcttggtgtggatggacgctcttgccaactcatcacggagacctgtccagagggaagtgactgtggggaaagcagggagcttcccatgaaccagaccctctttggggagatgttctttggttacaacaaccattccaaggaagtggctgccggacaggtgctgaaaggaacattcaggcaaaacaactttgctcgtggtttagaccagcaactgccagatggtcttgtggtggccactgtgcccctggagaatcaatgcctagaggagatctcggagcccacccctgaccctgacttcctgactgggatggtgaacttcagtgaagtgtctgggtaccctgtgctgcagcactggaaggtccggtctgtgatgtaccacatcaaactcaaccaagtggccatctctcaggccctcagcaatgctctccactcgctggatggggctacatctcgtgcagattttgtggcgctgttggaccagttcggcaaccattacatccaggaagctatctacggctttgaggagtcctgttctatctggtacccaaacaagcaggtccagcggcgactctggctggagtatgaagacatcagtaaaggcaactccccatcagatgagtctgaggagcgggaaagagaccccaaggtgctgacattcccagaatacatcaccagcttgtcagactccggcaccaagcacatggcggctggagtccgcatggagtgccacagcaagggacgatgcccctcgtcctgccccctgtgtcatgtgacatccagccctgacacccctgctgagccggttctgctggaggtgaccaaagcagcccccatctatgaactagtgaccaacaaccagacccagaggctcttgcaggaggctaccatgagctctctctggtgctcagggactggagatgtcatcgaggactggtgtcgatgtgactccactgcttttggagctgatggactccccacctgtgcgcctctcccacagcctgtgctgagactctccacggttcacgagcccagcagcactcttgtggtcctggagtgggaacactcagagccaccaatcggggtgcagattgtagattacctcctccgtcaagagaaagtcactgacaggatggaccactccaaagtggagacagaaacagtgctgagctttgtggacgacatcatctctggagcaaagtctccttgtgcaatgccatctcaggtgccggacaagcagctcaccaccatctctctgatcatacgatgcctggaacctgacaccatttacatgttcacgctgtggggagtggacaacacaggacggcgctccaggccaagcgacgtgatcgtgaagaccccatgccccgtggtggatgatgtcaaggctcaagaaatagcagacaagatctacaatctcttcaatggctacactagtgggaaggagcagcagaccgcctacaacaccctcctggatctgggttcccccaccttacaccgggtcctctaccactataaccagcactatgagagttttggggaattcacctggcgatgtgaggatgagttaggtcccag

SEQ ID NO: 797 - protein, 1214 aa, Homosapiens
MALAGLCALLACCWGPAAVLATAAGDVDPSKELECKLKSITVSALPFLRENDLSIMHSPSASEPKLLFSVRNDFPGEMVVVDDLENTELPYFVLEISGNTEDIPLVRWRQQWLENGTLLFHIHHQDGAPSLPGQDPTEEPQHESAEEELRILHISVMGGMIALLLSILCLVMILYTRRRWCKRRRVPQPQKSASAEAANEIHYIPSVLIGGHGRESLRNARVQGHNSSGTLSIRETPILDGYEYDITDLRHHLQRECMNGGEDFASQVTRTLDSLQGCNEKSGMDLTPGSDNAKLSLMNKYKDNIIATSPVDSNHQQATLLSHTSSSQRKRINNKARAGSAFLNPEGDSGTEAENDPQLTFYTDPSRSRRRSRVGSPRSPVNKTTLTLISITSCVIGLVCSSHVNCPLVVKITLHVPEHLIADGSRFILLEGSQLDASDWLNPAQVVLFSQQNSSGPWAMDLCARRLLDPCEHQCDPETGECLCYEGYMKDPVHKHLCIRNEWGTNQGPWPYTIFQRGFDLVLGEQPSDKIFRFTYTLGEGMWLPLSKSFVIPPAELAINPSAKCKTDMTVMEDAVEVREELMTSSSFDSLEVLLDSFGPVRDCSKDNGGCSKNFRCISDRKLDSTGCVCPSGLSPMKDSSGCYDRHIGVDCSDGFNGGCEQLCLQQMAPFPDDPTLYNILMFCGCIEDYKLGVDGRSCQLITETCPEGSDCGESRELPMNQTLFGEMFFGYNNHSKEVAAGQVLKGTFRQNNFARGLDQQLPDGLVVATVPLENQCLEEISEPTPDPDFLTGMVNFSEVSGYPVLQHWKVRSVMYHIKLNQVAISQALSNALHSLDGATSRADFVALLDQFGNHYIQEAIYGFEESCSIWYPNKQVQRRLWLEYEDISKGNSPSDESEERERDPKVLTFPEYITSLSDSGTKHMAAGVRMECHSKGRCPSSCPLCHVTSSPDTPAEPVLLEVTKAAPIYELVTNNQTQRLLQEATMSSLWCSGTGDVIEDWCRCDSTAFGADGLPTCAPLPQPVLRLSTVHEPSSTLVVLEWEHSEPPIGVQIVDYLLRQEKVTDRMDHSKVETETVLSFVDDIISGAKSPCAMPSQVPDKQLTTISLIIRCLEPDTIYMFTLWGVDNTGRRSRPSDVIVKTPCPVVDDVKAQEIADKIYNLFNGYTSGKEQQTAYNTLLDLGSPTLHRVLYHYNQHYESFGEFTWRCEDELG

SEQ ID NO: 798 - DNA, 2104 bp, Homosapiens
gcaaacgccgccgggtcccgcagccccagaagagtgccagtgctgaggcagccaatgagattcactacattccttctgtgctgatcggcgggcacggacgggagagcctgcgcaatgcccgcgtgcagggccacaactccagtggcaccctgagcatccgggagacacctatcctggacggctatgagtatgacatcactgatctgcgccaccatctgcagagggagtgcatgaacggaggggaggactttgccagccaggtcacgcgcaccctcgactccctgcagggctgcaatgaaaagtcggggatggacctcacaccaggaagtgacaatgccaagctgtcactgatgaacaagtataaagataatattatagccactagccctgtggactccaaccaccagcaagccacccttctctctcacacctccagcagccagagaaagcggatcaacaacaaagcaagagctggttccgccttcttgaaccctgaaggggattctggcacagaggcagaaaacgacccccagctgaccttttacacggatccttcaaggagcaggaggcgtagtagagtgggttctccccgaagtcctgtgaataagaccaccttgaccctgatcagcatcaccagctgtgtgattggcctcgtgtgctcctctcacgtcaactgccctctcgttgtcaagatcaccctgcatgtccctgagcacctgattgctgatgaactccagcggaccctgggccatggacctctgtgcccggcggctcctggacccctgtgaacaccaatgtgaccccgaaactggggaatgcctctgctatgaaggctacatgaaggatccagtacataagcacctttgcattcggaacgaatgggggacaaaccagggcacagtgaactgaatagagccaccaccacctggtattcaagccgaactatgagaatcatgccagactcctctctctccttcatcgtcacatccaatcaatcaccacatcatgattgctctactccctcaatatcacttggagctctccagctctgattgctacaggcattccttggcttggagatgcatcacttcagtctctgcctccgtcttcttgtggcattctccctgtgtgtgtctgtgtctcacgtggccatcctcttaaaaggacaccagtcatattggattttggcaccccctactccaggctgacctcatcttaactaattacacctgcaaagaccctatttccaaataagggatggatttgcacaggtccattgccaagctcttgtcctgttcatttgtgagcaaagatgggtgtccggggacacatggcagactgtgcccattgacgggagtaagcgagctgaacaagctttcaggaccactgaacttgagaccttggctatatgagcccagggtaaaagtcaactgagccttgagatgcagaaccagagagaagtggagggaggaagacagtagttactattatcaccattttacagaaaaaggaaactgaagcttggaaaggtcaaatatctttagctgtatcagttgcatgaagttagcaagagacttgaatccagaacttggacttgaatggagatctatctgacttcagagctaacccacaaaaccccagccatggtgagactgtcttggggtgatttgtatgggagactgcagggtcagtgttggtcagcgacggaccctgctctcagcatgctctttctgcctgactgctttcagtgtctgcagcagctgctagcagggtgagagaggaggaagagagcagtcgtgagtctcaccagccatctgactccctacccacaaagaaaatgctgcagctgtgacatgtgtgtttgtcagtgtgtgtcacatgtgcacgaccacatgtgtgtatgtgtgcataggtgggggcatctgtacctgtagatgcatttctgaatgtaggaaaatctcaatgctgcatagtactgttttcatggaactgttgatcctcagaaatagaaatgattgacagtttttcaaaaatgaatatgcatctcatataattgtaatgagatttgggatatcttaattcatcaataaaggggacaggaagg

SEQ ID NO: 799 - protein, 185 aa, Homosapiens
MNGGEDFASQVTRTLDSLQGCNEKSGMDLTPGSDNAKLSLMNKYKDNIIATSPVDSNHQQATLLSHTSSSQRKRINNKARAGSAFLNPEGDSGTEAENDPQLTFYTDPSRSRRRSRVGSPRSPVNKTTLTLISITSCVIGLVCSSHVNCPLVVKITLHVPEHLIADELQRTLGHGPLCPAAPGPL

SEQ ID NO: 800 - DNA, 659 bp, Homosapiens
agactttgtgagcctgtgtcttgcctgggcatgcacatggctttctaaattctctcgtaacagctgcttttgagtgtcctaatttcccaaagagtcttactccagcttctcatctgggccttagatggtctactctatggctccactcaaaatctcttgcccaggccatgagcctatagtgatcttgcagcttttattaacagtgtccacttatttttccagctgtgttctgagttaggtaacacagattatttacaaggaggaaattggaacaaggctggctgctgtgtttcaagacaaagactgctgccacaccggggagaggatggggccagggctgctgtgtatcctgggaccatctgcaaggacactctactgcaggtgcctgatcagacttcaaactgatatttttgttgagaagttgaaagagggagattgtaaacgggcccaaagtccttctggagaaaaactactgtgagggaaaattttagcaggaggaaagattttgtcaggctgaattgatccagttgtgtttccagggcatccaagcctctccctgcggccctggcccgcctcctccccatgcaccaggctctggctcccgggtactcctcctgccatggggcccacgcagcagctacaatgcatgctttgttcag

SEQ ID NO: 801 - protein, 50 aa, Homosapiens
MGPGLLCILGPSARTLYCRCLIRLQTDIFVEKLKEGDCKRAQSPSGEKLL

SEQ ID NO: 802 - DNA, 1006 bp, Homosapiens
atgcttcttttctccactgctgtcgacgtcaacatctatacccctcagagtgcccccgtggcgccaccagagtgcgaggtaatgagcaatggaaagcgtgtctctggcccatgtgtactcacccgaattcacatcatccagacactgctgcttttcccccaggaactgctgggtgcccatgtccagggcagacgatcggcagccacactctggcatggacgtaccagctgtttacagctgcccctctctgttcttgtactggatttccttaaaggagaggcctccagtgcacctcgtcagctgcactcagctcttaaatgcagctattcacagagggcccaggctctcccctgccctgtgacactacgtgggacacacacctccacagggaatttgaagaatctccaggagggccagagagtagacttggatgccacccagccagcaatagagaagttgggaccacccagccagggacaaggccacacctcagccatcaccacccacaagcaacgcagcatgtatgagctgggacaggacaccagaaactacctcatgattgctccggaagaagcagctgcaggtgctcagccatctttatttcctgccacccccaaactatgaagacagcaaagcagcctgtggagaggctgctcacagaggcaaccccacccttacttggtgatggcacgtggaactccacctcccaggtggaaaatggaaaaattgtttccttctctgatctactgcctgagctgtcatcaggattttgaggactgacttaatgaataaaatataaaggcttagcgtgagcctgggatatgcatggtggaagagaataaatagccttttgtatatcaaagatactttctgggtaacccaatctgagaaatagctacttcagccacatctgctgttagggaaggctgagaaaatagtgactataaaatgaaatgaggcttgtaggtgaaccacatgaaatcctgtgaaccggggagaagtcacc

SEQ ID NO: 803 - protein, 207 aa, Homosapiens
MLLFSTAVDVNIYTPQSAPVAPPECEVMSNGKRVSGPCVLTRIHIIQTLLLFPQELLGAHVQGRRSAATLWHGRTSCLQLPLSVLVLDFLKGEASSAPRQLHSALKCSYSQRAQALPCPVTLRGTHTSTGNLKNLQEGQRVDLDATQPAIEKLGPPSQGQGHTSAITTHKQRSMYELGQDTRNYLMIAPEEAAAGAQPSLFPATPKL

SEQ ID NO: 804 - DNA, 515 bp, Homosapiens
caggacttgggagagggatctggactgaagtggaggaatccagtacaagtagtggagccgtctgaaatcttgcatttcagaatggatggtttcttaagtcacagcacttaacaatccctggattgttttggccattcaaaaccaaagtgaatggatccaggttttattactctttgaaaggaaacctgtcaagcacaatgcctgctgtgggagccaccttctccaactgacaccgcctgaccccagcttccagctcactccccgctctgtgaaggaagcagctccagcatttgtccctggagggtctctgaaagtccaggtcagcccctgggctgggtccccacagtaagaagagaactgtgatgggcaacaccccagaaaagaagacttgcagcctcacttcaggtcaatttgcaagaactgacatcacacagcagcttggtttcttcagaccgtccagcttgctgcgtcttgcccagtcacgtggagctaataaagatacgctgttccacacc

SEQ ID NO: 805 - protein, 50 aa, Homosapiens
MGNTPEKKTCSLTSGQFARTDITQQLGFFRPSSLLRLAQSRGANKDTLFH

SEQ ID NO: 806 - DNA, 792 bp, Homosapiens
taggtctttcagttaggatgatagaaagcttccttggcatggagattcaccgtgtacttctacaaatagaagtttaaaagacagaaagctgtatattatcgctgctgagagctttgcagtcacgcctccctgtgatgagactgactgctgtgttactgtgggtaaattgctcagcttctctgaggcagtttctttttatgtaaaaatgggacagaagccagcctggcttctagagttgttggaggagtcagcatgtggctgatagatgtagagctcttagccactgcggtatttaggaattggttaaaagaattcgaggcagcattcttcctgaaggccttttgttattagtttgcttctcaaagtcatcttccgaatcctgctgtgctaagcatcaccccagctcagcccagttatgaatttcattgctgagctctgagcccaggttgtctggcagcatttctgattgtaatcagttttgtgcagtgagatcaccttgctgaccacgagcggtggctcccagcactgcaaagatatgtgtggggccggcctgcttttgtgactgcagcattcacccttcaggggacagacagcggctcttgctgtctcaatgccactggaagaactccaaagggtgcctggaggaccagcttggactttcagttctgttgcttacgagtgtgtgaccttggacatgttgtgcgtctctctgcctctcggttctgtgacctgggcatagttaacacctgcttttgaggtcttgtgaggaataaatgagacattttattgaaa

SEQ ID NO: 807 - protein, 32 aa, Homosapiens
MWLIDVELLATAVFRNWLKEFEAAFFLKAFCY

SEQ ID NO: 808 - DNA, 865 bp, Homosapiens
gcgccggaagcacgtgcgcgggctgggcgctctggcggtgtgcgctgaggctcctgagtataacagattggttctgattaaaaccatttcagaggaaagacagtgatcccaggaagcgggaagaaaacagcatcacctgaagttattcctattcgttagatttgttttcttcctgcgaaaaactgctatgtacaagaaagaagtcagtgagctgcagtgatagttagcattattgactgaaactggaccagagatccctgaaacctggacaaggtggtagaaatacaaattatgctgccatttcaaagctgtgggcagttttctactttgtggaaaatgaagacttaggtaggcctttgggaaagacgatttgttttggaaaaaccacccaaagggatcatttggtttgcaaatgtaactgcagtatcacaactggaagaagaaatatacaagggcgaggtttgaaggagcccttcagtatccttggatgatactgtggaagattctttgcatctcagtaactttggatctttgaagatccaagaaaataaatttcttcaaaatatttttagagactgctttgattctgaggcactgctgattatatggaagaaaaaaatattggaagattaatttgtggttttctccagttatcgtctcccttctctttgggggaggtttgtgacgcagtaaaaacagatatacaaaagcctaggcatgttagagatttgcctaagggaaatgtaattatgaagaaggattttttcaagctgaaactagatcccacttttttccaggtcagtgggtccttcaagtatctggtactttccttcctgcttcctgacaatgttaaagaatgtggcat

SEQ ID NO: 809 - protein, 85 aa, Homosapiens
MEEKNIGRLICGFLQLSSPFSLGEVCDAVKTDIQKPRHVRDLPKGNVIMKKDFFKLKLDPTFFQVSGSFKYLVLSFLLPDNVKEC

SEQ ID NO: 810 - DNA, 1150 bp, Homosapiens
gtgcgcacgcgcgaacgcggggtgggccgggcctcgcgtagcccatctcctcttcctcctcgcggtcgcggccggacggagggtggagggccctgcgcctgcgcggagctggagtccggctgggccgcagccgctgggagaccggcggttgccgtggggaccggtcgggcccctccctcctccggtcccccgccccaggtccttccccaccgagacgcgccggcggaccgcgggcgagtgcagccggtgacccggcgagaggcggcgccgctcccaagatgtcgcagacggccatgtccgaaacctacgattttttgtttaagttcttggttattggaaatgcaggaactggcaaatcttgcttacttcatcagtttattgaaaaaaaattcaaagatgactcaaatcatacaataggagtggaatttggttcaaagataataaatgttggtggtaaatatgtaaagttacaaatatgggatacagcaggacaagaacgattcaggtccgtgacgagaagttattaccgaggcgcggccggggctctcctcgtctatgatatcaccagccgagaaacctacaatgcgcttactaattggttaacagatgcccgaatgctagcgagccagaacattgtgatcatcctttgtggaaacaagaaggacctggatgcagatcgtgaagttaccttcttagaagcctccagatttgctcaagaaaatggcaactgatgtttttggaaacaagtgcgctcacaggggagaatgtagaagaggcttttgtacagtgtgcaagaaaaatacttaacaaaatcgaatcaggtgagctggacccagaaagaatgggctcaggtattcagtacggagatgctgccttgagacagctgaggtcaccgcggcgcgcacaggccccgaacgctcaggagtgtggttgttaggagagcacacaggtgttcatacagtggcatttgggacacaatcgttggaacctgaagaatctgaagttttttttaccaccatctttttctactctgtatggaagtagatctttatggggaaaagagaatttggggtgttctgcaagccagtcaaagtggcacagcaaatcatataaatcgaattaaatggacaacaccgttagatgtgtatgt

SEQ ID NO: 811 - protein, 150 aa, Homosapiens [sequence omitted]

SEQ ID NO: 812 - DNA, 1551 bp, Homosapiens
gtgcgcacgcgcgaacgcggggtgggccgggcctcgcgtagcccatctcctcttcctcctcgcggtcgcggccggacggagggtggagggccctgcgcctgcgcggagctggagtccggctgggccgcagccgctgggagaccggcggttgccgtggggaccggtcgggcccctccctcctccggtcccccgccccaggtccttccccaccgagacgcgccggcggaccgcgggcgagtgcagccggtgacccggcgagaggcggcgccgctcccaagatgtcgcagacggccatgtccgaaacctacgattttttgtttaagttcttggttattggaaatgcaggaactggcaaatcttgcttacttcatcagtttattgaaaaaaaattcaaagatgactcaaatcatacaataggagtggaatttggttcaaagataataaatgttggtggtaaatatgtaaagttacaaatatgggatacagcaggacaagaacgattcaggtccgtgacgagaagttattaccgaggcgcggccggggctctcctcgtctatgatatcaccagccgagaaacctacaatgcgcttactaattggttaacagatgcccgaatgctagcgagccagaacattgtgatcatcctttgtggaaacaagaaggacctggatgcagatcgtgaagttaccttcttagaagcctccagatttgctcaagaaaatggcaactgatgtttttggaaacaagtgcgctcacaggggagaatgtagaagaggcttttgtacagtgtgcaagaaaaatacttaacaaaatcgaatcaggtgagctggacccagaaagaatgggctcaggtattcagtacggagatgctgccttgagacagctgaggtcaccgcggcgcgcacaggccccgaacgctcaggagtgtggttgttaggagagcacacaggtgttcatacagtggcatttgggacacaatcgttggaacctgaagaatctgaagttttttttaccaccatctttttctactctgtatggaagtagatctttatggggaaaagagaatttggggtgttctgcaagccagtcaaagtggcacagcaaatcatataaatcgaattaaatggacaacaccgttagatgtgtatgtaaaaattttctgtttcatatttttcctttcactttcggtttaaaacatgctatatgtactgtatgtcctgtagcccagtgcggctccacagcatggaatctgatgtatgatatgatagaatgtggcactaaatgcagtttcagattttattttttttaatcatatgaactaaaattgtcaattgtgaggtgtgcttttctcatcatgttggttatattgcacaattggttatatttatgacctgatattcaaagactctggcattgatagccagtgtgttttcttatttaactccgtttactacattctacatggtgtttacgtgatccacacttgaaatactagatcagtagacattcactaatataccaaaataaaatgaaaaattgagtttttccgtg

SEQ ID NO: 813 - protein, 150 aa, Homosapiens [sequence omitted]

SEQ ID NO: 814 - DNA, 1914 bp, Homosapiens
gtgcgcacgcgcgaacgcggggtgggccgggcctcgcgtagcccatctcctcttcctcctcgcggtcgcggccggacggagggtggagggccctgcgcctgcgcggagctggagtccggctgggccgcagccgctgggagaccggcggttgccgtggggaccggtcgggcccctccctcctccggtcccccgccccaggtccttccccaccgagacgcgccggcggaccgcgggcgagtgcagccggtgacccggcgagaggcggcgccgctcccaagatgtcgcagacggccatgtccgaaacctacgattttttgtttaagttcttggttattggaaatgcaggaactggcaaatcttgcttacttcatcagtttattgaaaaaaaattcaaagatgactcaaatcatacaataggagtggaatttggttcaaagataataaatgttggtggtaaatatgtaaagttacaaatatgggatacagcaggacaagaacgattcaggtccgtgacgagaagttattaccgaggcgcggccggggctctcctcgtctatgatatcaccagccgagaaacctacaatgcgcttactaattggttaacagatgcccgaatgctagcgagccagaacattgtgatcatcctttgtggaaacaagaaggacctggatgcagatcgtgaagttaccttcttagaagcctccagatttgctcaagaaaatggcaactgatgtttttggaaacaagtgcgctcacaggggagaatgtagaagaggcttttgtacagtgtgcaagaaaaatacttaacaaaatcgaatcaggtgagctggacccagaaagaatgggctcaggtattcagtacggagatgctgccttgagacagctgaggtcaccgcggcgcgcacaggccccgaacgctcaggagtgtggttgttaggagagcacacaggtgttcatacagtggcatttgggacacaatcgttggaacctgaagaatctgaagttttttttaccaccatctttttctactctgtatggaagtagatctttatggggaaaagagaatttggggtgttctgcaagccagtcaaagtggcacagcaaatcatataaatcgaattaaatggacaacaccgttagatgtgtatgtaaaaattttctgtttcatatttttcctttcactttcggtttaaaacatgctatatgtactgtatgtcctgtagcccagtgcggctccacagcatggaatctgatgtatgatatgatagaatgtggcactaaatgcagtttcagattttattttttttaatcatatgaactaaaattgtcaattgtgaggtgtgcttttctcatcatgttggttatattgcacaattggttatatttatgacctgatattcaaagactctggcattgatagccagtgtgttttcttatttaactccgtttactacattctacatggtgtttacgtgatccacacttgaaatactagatcagtagacattcactaatataccaaaataaaatgaaaaattgagtttttccgtgaactttatactgtccagctctgttgattttaaagcctcttcatccaggtcagttcaggaagtatatctggagtacctgctctgtttttggctgtgagactagcactaaggattctggtacctttacccaaacctactgggctactaatacttctctcagcagttgatcaaatacaatagaccatgtaagctggggccgctcatccacttccagtttgctggtctccctgctagaaaacacattgtactgtgctttttctggaattcagtataatggcatcactgcctgtttttcacatcttttgtttcctgttcattttaaggaaacctactaaatccagttaatattaaatggacaccactc

SEQ ID NO: 815 - protein, 150 aa, Homosapiens [sequence omitted]

SEQ ID NO: 816 - DNA, 2648 bp, Homosapiens
gtgcgcacgcgcgaacgcggggtgggccgggcctcgcgtagcccatctcctcttcctcctcgcggtcgcggccggacggagggtggagggccctgcgcctgcgcggagctggagtccggctgggccgcagccgctgggagaccggcggttgccgtggggaccggtcgggcccctccctcctccggtcccccgccccaggtccttccccaccgagacgcgccggcggaccgcgggcgagtgcagccggtgacccggcgagaggcggcgccgctcccaagatgtcgcagacggccatgtccgaaacctacgattttttgtttaagttcttggttattggaaatgcaggaactggcaaatcttgcttacttcatcagtttattgaaaaaaaattcaaagatgactcaaatcatacaataggagtggaatttggttcaaagataataaatgttggtggtaaatatgtaaagttacaaatatgggatacagcaggacaagaacgattcaggtccgtgacgagaagttattaccgaggcgcggccggggctctcctcgtctatgatatcaccagccgagaaacctacaatgcgcttactaattggttaacagatgcccgaatgctagcgagccagaacattgtgatcatcctttgtggaaacaagaaggacctggatgcagatcgtgaagttaccttcttagaagcctccagatttgctcaagaaaatggcaactgatgtttttggaaacaagtgcgctcacaggggagaatgtagaagaggcttttgtacagtgtgcaagaaaaatacttaacaaaatcgaatcaggtgagctggacccagaaagaatgggctcaggtattcagtacggagatgctgccttgagacagctgaggtcaccgcggcgcgcacaggccccgaacgctcaggagtgtggttgttaggagagcacacaggtgttcatacagtggcatttgggacacaatcgttggaacctgaagaatctgaagttttttttaccaccatctttttctactctgtatggaagtagatctttatggggaaaagagaatttggggtgttctgcaagccagtcaaagtggcacagcaaatcatataaatcgaattaaatggacaacaccgttagatgtgtatgtaaaaattttctgtttcatatttttcctttcactttcggtttaaaacatgctatatgtactgtatgtcctgtagcccagtgcggctccacagcatggaatctgatgtatgatatgatagaatgtggcactaaatgcagtttcagattttattttttttaatcatatgaactaaaattgtcaattgtgaggtgtgcttttctcatcatgttggttatattgcacaattggttatatttatgacctgatattcaaagactctggcattgatagccagtgtgttttcttatttaactccgtttactacattctacatggtgtttacgtgatccacacttgaaatactagatcagtagacattcactaatataccaaaataaaatgaaaaattgagtttttccgtgaactttatactgtccagctctgttgattttaaagcctcttcatccaggtcagttcaggaagtatatctggagtacctgctctgtttttggctgtgagactagcactaaggattctggtacctttacccaaacctactgggctactaatacttctctcagcagttgatcaaatacaatagaccatgtaagctggggccgctcatccacttccagtttgctggtctccctgctagaaaacacattgtactgtgctttttctggaattcagtataatggcatcactgcctgtttttcacatcttttgtttcctgttcattttaaggaaacctactaaatccagttaatattaaatggacaccactcattaagaaatttctttatggcttctgctgaatacttaaatgccttactacagttatccagttgacatgtttttaattcatataaggtatattgggtatattgaagtatatattgtattacaaagacttgttcttgtattttaaaatgtcagtgcaaaaaatatatggtggaacctttctttaaagttgaaatgcagtattatttaaatctgaaaggttaaaaagctttcttcaccttatatatgttcttccactgtgactttttagttgaagactagtaaattaacttttagttagaagatgcctactgcttttgttgtttattttaatcagcagagcacagagacacataaaaactctgggaaatgactaggataaaaatatcagtatgtatctgttttagatattttgagttttgctttttttatgccttgaatattttatttcaaaaagtatctgaagcaaattctcagactgaactacttcttagacctcactgtaagaatattttattcaatgtctcatttatgatagatttgcaagctgctcatttttgaacagctttttgcatgggataggagcatgtctattctaacacatcagcttattcaaaagcaagaattttaaaaataagataaatgtaaagttgttttataaacgatcctgttaattaaaccacagacaccatatatccttctgcatcctttggccaataaaagttgctggagaaccaaa

SEQ ID NO: 817 - protein, 150 aa, Homosapiens [sequence omitted]

SEQ ID NO: 818 - DNA, 531 bp, Homosapiens
aacgcggggtgggccgggcctcgcgtagcccatctcctcttcctcctcgcggtcgcggccggacggagggtggagggccctgcgcctgcgcggagctggagtccggctgggccgcagccgctgggagaccggcggttgccgtggggaccggtcgggcccctccctcctccggtcccccgccccaggtccttccccaccgagacgcgccggcggaccgcgggcgagtgcagccggtgacccggcgagaggcggcgccgctcccaagatgtcgcagacggccatgtccgaaacctacgattttttgtttaagttcttggttattggaaatgcaggaactggcaaatcttgcttacttcatcagtttattgaaaaaaaattcaaagatgactcaaatcatacaataggagtggaatttggttcaaagataataaatgttggtggtaaatatgtaaagttacaaatatgggatacagcaggacaagaacgattcaggtagcttttctctaacttaataaaaatatttgaaaattt

SEQ ID NO: 819 - protein, 76 aa, Homosapiens [sequence omitted]

SEQ ID NO: 820 - DNA, 1247 bp, Homosapiens
gccggacggagggtggagggccctgcgcctgcgcggagctggagtccggctgggccgcagccgctgggagaccggcggttgccgtggggaccggtcgggcccctccctcctccggtcccccgccccaggtccttccccaccgagacgcgccggcggaccgcgggcgagtgcagccggtgacccggcgagaggcggcgccgctcccaagatgtcgcagacggccatgtccgaaacctacggtccgtgacgagaagttattaccgaggcgcggccggggctctcctcgtctatgatatcaccagatgcccgaatgctagcgagccagaacattgtgatcatcctttgtggaaacaagaaggacctggatgcagatcgtgaagttaccttcttagaagcctccagatttgctcaagaaaatggcaactgatgtttttggaaacaagtgcgctcacaggggagaatgtagaagaggcttttgtacagtgtgcaagaaaaatacttaacaaaatcgaatcaggtgagctggacccagaaagaatgggctcaggtattcagtacggagatgctgccttgagacagctgaggtcaccgcggcgcgcacaggccccgaacgctcaggagtgtggttgttaggagagcacacaggtgttcatacagtggcatttgggacacaatcgttggaacctgaagaatctgaagttttttttaccaccatctttttctactctgtatggaagtagatctttatggggaaaagagaatttggggtgttctgcaagccagtcaaagtggcacagcaaatcatataaatcgaattaaatggacaacaccgttagatgtgtatgtaaaaattttctgtttcatatttttcctttcactttcggtttaaaacatgctatatgtactgtatgtcctgtagcccagtgcggctccacagcatggaatctgatgtatgatatgatagaatgtggcactaaatgcagtttcagattttattttttttaatcatatgaactaaaattgtcaattgtgaggtgtgcttttctcatcatgttggttatattgcacaattggttatatttatgacctgatattcaaagactctggcattgatagccagtgtgttttcttatttaactccgtttactacattctacatggtgtttacgtgatccacacttgaaatactagatcagtagacattcactaatataccaaaataaaatgaaaaattgagtttttccgtg

SEQ ID NO: 821 - protein, 68 aa, Homosapiens [sequence omitted]

SEQ ID NO: 822 - DNA, 2344 bp, Homosapiens
gccggacggagggtggagggccctgcgcctgcgcggagctggagtccggctgggccgcagccgctgggagaccggcggttgccgtggggaccggtcgggcccctccctcctccggtcccccgccccaggtccttccccaccgagacgcgccggcggaccgcgggcgagtgcagccggtgacccggcgagaggcggcgccgctcccaagatgtcgcagacggccatgtccgaaacctacggtccgtgacgagaagttattaccgaggcgcggccggggctctcctcgtctatgatatcaccagatgcccgaatgctagcgagccagaacattgtgatcatcctttgtggaaacaagaaggacctggatgcagatcgtgaagttaccttcttagaagcctccagatttgctcaagaaaatggcaactgatgtttttggaaacaagtgcgctcacaggggagaatgtagaagaggcttttgtacagtgtgcaagaaaaatacttaacaaaatcgaatcaggtgagctggacccagaaagaatgggctcaggtattcagtacggagatgctgccttgagacagctgaggtcaccgcggcgcgcacaggccccgaacgctcaggagtgtggttgttaggagagcacacaggtgttcatacagtggcatttgggacacaatcgttggaacctgaagaatctgaagttttttttaccaccatctttttctactctgtatggaagtagatctttatggggaaaagagaatttggggtgttctgcaagccagtcaaagtggcacagcaaatcatataaatcgaattaaatggacaacaccgttagatgtgtatgtaaaaattttctgtttcatatttttcctttcactttcggtttaaaacatgctatatgtactgtatgtcctgtagcccagtgcggctccacagcatggaatctgatgtatgatatgatagaatgtggcactaaatgcagtttcagattttattttttttaatcatatgaactaaaattgtcaattgtgaggtgtgcttttctcatcatgttggttatattgcacaattggttatatttatgacctgatattcaaagactctggcattgatagccagtgtgttttcttatttaactccgtttactacattctacatggtgtttacgtgatccacacttgaaatactagatcagtagacattcactaatataccaaaataaaatgaaaaattgagtttttccgtgaactttatactgtccagctctgttgattttaaagcctcttcatccaggtcagttcaggaagtatatctggagtacctgctctgtttttggctgtgagactagcactaaggattctggtacctttacccaaacctactgggctactaatacttctctcagcagttgatcaaatacaatagaccatgtaagctggggccgctcatccacttccagtttgctggtctccctgctagaaaacacattgtactgtgctttttctggaattcagtataatggcatcactgcctgtttttcacatcttttgtttcctgttcattttaaggaaacctactaaatccagttaatattaaatggacaccactcattaagaaatttctttatggcttctgctgaatacttaaatgccttactacagttatccagttgacatgtttttaattcatataaggtatattgggtatattgaagtatatattgtattacaaagacttgttcttgtattttaaaatgtcagtgcaaaaaatatatggtggaacctttctttaaagttgaaatgcagtattatttaaatctgaaaggttaaaaagctttcttcaccttatatatgttcttccactgtgactttttagttgaagactagtaaattaacttttagttagaagatgcctactgcttttgttgtttattttaatcagcagagcacagagacacataaaaactctgggaaatgactaggataaaaatatcagtatgtatctgttttagatattttgagttttgctttttttatgccttgaatattttatttcaaaaagtatctgaagcaaattctcagactgaactacttcttagacctcactgtaagaatattttattcaatgtctcatttatgatagatttgcaagctgctcatttttgaacagctttttgcatgggataggagcatgtctattctaacacatcagcttattcaaaagcaagaattttaaaaataagataaatgtaaagttgttttataaacgatcctgttaattaaaccacagacaccatatatccttctgcatcctttggccaataaaagttgctggagaaccaaa

SEQ ID NO: 823 - protein, 68 aa, Homosapiens [sequence omitted]

SEQ ID NO: 824 - DNA, 706 bp, Homosapiens
gacccggcgagaggcggcgccgctcccaagatgtcgcagacggccatgtccgaaacctacggtccgtgacgagaagttattaccgaggcgcggccggggctctcctcgtctatgatatcaccagccgagaaacctacaatgcgcttactaattggttaacagatgcccgaatgctagcgagccagaacattgtgatcatcctttgtggaaacaagaaggacctggatgcagatcgtgaagttaccttcttagaagcctccagatttgctcaagaaaatggcaactgatgtttttggaaacaagtgcgctcacaggggagaatgtagaagaggcttttgtacagtgtgcaagaaaaatacttaacaaaatcgaatcaggtgagctggacccagaaagaatgggctcaggtattcagtacggagatgctgccttgagacagctgaggtcaccgcggcgcgcacaggccccgaacgctcaggagtgtggttgttaggagagcacacaggtgttcatacagtggcatttgggacacaatcgttggaacctgaagaatctgaagttttttttaccaccatctttttctactctgtatggaagtagatctttatggggaaaagagaatttggggtgttctgcaagccagtcaaagtggcacagcaaatcatataaatcgaattaaatggacaacaccgttagatgtgtatgt

SEQ ID NO: 825 - protein, 68 aa, Homosapiens [sequence omitted]

SEQ ID NO: 826 - DNA, 379 bp, Homosapiens
tccagaagagagcctgactgtttcacttttaaggaacaatgctgtataaatatggccactgatacgtcaaagtgacagcctaggacttggttctaggtgacttttacttcagcttggcaaacttcaactgtcctgcttgctccttctaaaactcattttctttttttgagacagagtctcactctgttgcccaggatggagtgcagtggcacaatcttggctcactgtaaacttcacctcctgggttcaagcaattctcatgcctcagcctcccaagtagccgggactacaagcgtaccaccatgcccaggatgtacagccctcccagcacggtgctcgcttccctaatgccattccacagtatttgttgcagagaagg

SEQ ID NO: 827 - protein, 50 aa, Homosapiens
MECSGTILAHCKLHLLGSSNSHASASQVAGTTSVPPCPGCTALPARCSLP

SEQ ID NO: 828 - DNA, 1649 bp, Homosapiens
caaatgtctccctttaactttttaaagcttcttcttttttcccatttaccacagtggacgttttatttatagtcgacatcatgtagtaggcacaggcaagtgttaaaagacaagatattcacgaattctcttttaggctttaagctgtatttacttttgcatttatagttatgcagattttgaaattgttcttaatattttttaggtgttcatacagtggcatttgggacacaatcgttggaacctgaagaatctgaagttttttttaccaccatctttttctactctgtatggaagtagatctttatggggaaaagagaatttggggtgttctgcaagccagtcaaagtggcacagcaaatcatataaatcgaattaaatggacaacaccgttagatgtgttgtcccaagaattaggaacatgattacaaccacattcatttctagaatgaaaagaaagaattaggaccatcagactgttaacaactatcaaattttcacaggttcaaaaggtaattgacactctttaaaaaagaaagaaaagaaaccctaaccaactaaggacttggatgtaagatgaaggcttacaattcatactgatttattaaccattcatgcactttaaaagcactttaaaaatcccgttcatttgtcttccacttaaaaagaggaaaaaattggccaatatttgccttctacattatatctctgtctggagttttaagtagtaagtacattaaatataagtttgttttctaaacaagagaaaagtctggcggttcaaagtctagaggaagtcgggtttctaaggcagtccgtcagtgtggggcctgcaccactctctaaggccgtctttcctagattgtcagctgcaacacaagcctgagctggatgactaacaccgaacatgcaagaagcgactttaaaggaacagttttcacaatcagctagctacaccatcacaaattgccacattaaggtgatctttaggtacctgtgtcgtttaaagactttaataatagttaataccaaaattcaccagttactagcaaggctgttttggacaacatgtaaaatttcctcttttgaaatatacatctcaatgattaggagagatctgtaaggaaacaaattcacctcaaaactatgcaaatatttaaaaagtttttttaagctcacaatacttcagtatgtgttttcaaagcttaaacagttatcatgtgtgaagagtttatggggaatgaaagcaatatgttctaaaaattgactatggttttccaaagacccagagaaaaatactaaggtaatactcagcctcacgtccactcacacatcttcgggtgccaagctggcataggcagagcaccattatctcttataaggaacttagcacatatccttctagcagattcttgtctccacaggatggagaagacatcattcatttgatggaaaccagtgtttgttaaaaccatttttctacccccaaagcaaacatactaaagagaaggagcactatttacataaatttgtgcctacccacacaccaccattctctcccattaaagtgtagataagatctactggctaggaatcaaagagtaacgtatttcaacctaaagtttgaatactgtacatcatcaagactt

SEQ ID NO: 829 - protein, 44 aa, Homosapiens
MEVDLYGEKRIWGVLQASQSGTANHINRIKWTTPLDVLSQELGT

SEQ ID NO: 830 - DNA, 968 bp, Homosapiens; identical to SEQ ID NO: 11

SEQ ID NO: 831 - protein, 63 aa, Homosapiens; identical to SEQ ID NO: 12

SEQ ID NO: 832 - DNA, 625 bp, Homosapiens
tgtcacttcagttttcaaagcttttgcagtgctatttggattcatcccatatgggccccatcttgtggtctgaggcctgacagggctcacctgcaagctcggttctctgctgtctttgatatggacttaggatcagctctacccataagcactgtgaacatgtgagtaggtggggaagggctagtgttcataaaaaactttgtggagtcactttcttaagctcttctctctctgctctctccctagcactttctagttccctggggctccccttttttggtcctgtggcccaaaattgcccacttctgcaattaagccatatccttcagagaggaaaaaaagcgcatcagctcagccccgcgctcttggtgatgcagctgtacttggtggagatgtgcgaggctgtccctcaggcttccgactcctgcaggctcccactggcagccagggggtgacctgggagcttcagcacgaaaaaatggggaaaaggagaggttgtcccaagaattaggaacatgattacaaccacattcatttctagaatgaaaagaaagaattaggaccatcagactgttaacaactatcaaattttcacaggttcaaaaggtaattgacactctttaaa

SEQ ID NO: 833 - protein, 48 aa, Homosapiens
CSCTWWRCARLSLRLPTPAGSHWQPGGDLGASARKNGEKERLSQELGT

SEQ ID NO: 834 - DNA, 2035 bp, Homosapiens
gcttttaaagtgcatgaatggttaataaatcagtatgaattgtaagccttcatcttacatccaagtccttagttggttagggtttcttttctttcttttttaaagagtgtcaattaccttttgaacctgtgaaaatttgatagttgttaacagtctgatggtcctaattctttcttttcattctagaaatgaatgtggttgtaatcatgttcctaattcttgggacaacctgcaagacagtgagacagtttaaaaattacctttcatgttgaaaaagtctgaaacagagaacccaatgatatttaaaataaatgctacataaaactctttttaaaattttgattttaacttaattaaaacaatgtcataaatatgctttttgattttgttactgcttttaatattaaagtaatagaatattgaagcaatattgtctagcactctgctggacattaagtccgcgggaggagaagtgaacaggaatcgattctttgtcttttaactgcccttagttaggagatgttaaaatacttggcacctctggttatatgtatgttatgtgtgttctcccccctaaaatttctaagcacatttattcacttttaaaatgaatctttaaaagattatagttagtagttatagttaatattctatttacttggaaaaatgtgaataaatggatcttcaaaagattcattttaaaaatgaataaatgtataataggctataggtgatcttacttgcgtattaggtaggaggcacatatttataccatttcatatgtaatatctttgtcattgtgtttcatcgaagatcaattgctagcaacttgaagggtatttatacttgggtcacttgaactcagctgactaaattgtaagaacgagagcaagcaagatggctgttatggtacagtcgcctctcagtatccatggggcattggttccaggcctcccttaggatgccaaactccatggatactcaaaccccttctataaaatggtgtagtatttgcatatatcctagacacatcctcctgtatgctttaaatcatctctagattacttaaaatacctaatacaatgtaaatgctctgtaaatagttgttatactatattgtttagggaataatgacaaggaaaaaaaagcctgtacatgttcagcacaagtgaaaccatcctttttgcccccaaatattttcaatttgtatttggttgaatccatggatgcagaactcacggatacagagggccgactgtactttctttaaagtgttcaaaagtattactagcaaagaggaggaggagcaaagcatatatcagaagtaaaacaatttttcttgttgactgctttggtaaaaaacagtttgatggatagttttacatttcactggactagataaaaaatggtgctaatatttatgtagcttgatgctatagttgctttggtatcaaacttaatacctaacccatataagatccttattatataattttgtgatcagtaaaatgatattttaaagagtgatcttaaaaatatgacctggtcattgcacaacgtttgcatttgaaatgaatttgtgtactatagggtggatatggagttattcagtgcaagtgtgtgcttaatatcaaaccctatgcaaggagctatgtctagatttttggtccaaatttgcctccttcaagcctactagtgtgagatggaaaaaaatcgattgctcttttaatattatttccattttgaaattctcgacacttgaatgaaggcagtagaggcctctttttggatttctcttctaataacaaaactttatttagggaaggtttccctgtgctatcgtaagtttgttttgagcactgcattcactttaaaattctggaggaacaaaggctgggcacataatcacaaagcccaggccacacaataattcggggttgtattttctaagaactatgtattgtttttagcttatagttaatattgtatttacttggaaaaatgtgaataaagttaattaacattacaagctgag

SEQ ID NO: 835 - protein, 55 aa, Homosapiens
MKAVEASFWISLLITKLYLGKVSLCYRKFVLSTAFTLKFWRNKGWAHNHKAQATQ

SEQ ID NO: 836 - DNA, 4908 bp, Homosapiens
ctgctagaaatgcaaataacagaaggtggagggggtagggaacatgccttccagattattcctgtgggtactgatctgctagctaaattgagatgtactttatcaggctaaatggcttttctctccccgatcttttattgtttgtgatggagttgtcaaatatttgcatgcaatataaatacaatttttaggcagcgttgtgatatggatggtgcctgtatttaccagctcagcactgccagtgaaagatgtagaagataaacctgaacaacaaaccagaacaagagagactgacaaatcacccaccagtactgagcctcgacagcaaccaagtgccttatttgctagaggaaacaggaaagcggtcaaaagtccccaaagatcatcgagtaaaataaaagaaaacaagcatccatttgctctttatggctggggagaaaaacagaccgatacaggaagccagaagactcacaacgtctgtgcgtccgctcctgtgcacgagattcatgaatcagcattacgagccaagaacagaagacaggtggaaaaaaggaaactggttgctcaaaggcagcgagctcactctgtggatgtggagaagaacagaaagatgaaggcttcctcctcagagaacccgtggatgacagaatacatgaggtgctattcggcaagagcttaaagaaacacttgcgtggacagcctcttttaaaaagtgtaaatgactgaaaggaaaaacaaaacaaaaaccatcaaaagaaacggacacaggtttaagaaaccaactgattatgcaaggttttttttagggaatttgtaaaagattgttttattttgatgaatattggtcacctacctcggcagtagggcagacagttgaagccatagacatttggttatttatgaagataattccctaaatctttgatattcttataaggtttttgttttaaagcatcttaatcttttaagatactgacaccaaatgcctttaaatggcaacagatgcttacagttcagtattcttttcataagcttaggtagagcctattatcatcttgttctaaataactttccagattccatagctataagatcattccatcctacagcataagactcgttttccttatatgccgttttgtttgtgaaagaatatcaagtcaaaaatgagtgtcagcactactactgattccatgtataatgaaagtagaactttgctagttcctgaaaatttttaacttatttgtatttcagttcagcagcatctttatgtagattgtgatatttaagaattatctgggctgggcgagggtctctttttctctttcagtgatcatctaggcagttattatttaatagtttaatagctcaagtacattccaatagacgaagtgcacacaacacaatatgtgtgtacagtagtagtaaagtttcttttgagtagtcaaagactcactttttttattgcctttttttttttttttaaagaatacatactgtggattcagtcccttgtcacacttgaccttttggcatacacccactgtggacttttgcctcttctgtaatggctggcaatgacatttcaaacttacaatctggaattgcacttggtacattggcattgcttgttccactgggatggggaccagtgtgaagatgcctgttagatagactgcccacccctactttctctttttctttatagcacttaacaataacaaagtcttgatgatgtacagtattcaaactttaggttgaaatacgttactctttgattcctagccagtagatcttatctacactttaatgggagagaatggtggtgtgtgggtaggcacaaatttatgtaaatagtgctccttctctttagtatgtttgctttgggggtagaaaaatggttttaacaaacactggtttccatcaaatgaatgatgtcttctccatcctgtggagacaagaatctgctagaaggatatgtgctaagttccttataagagataatggtgctctgcctatgccagcttggcacccgaagatgtgtgagtggacgtgaggctgagtattaccttagtatttttctctgggtctttggaaaaccatagtcaatttttagaacatattgctttcattccccataaactcttcacacatgataactgtttaagctttgaaaacacatactgaagtattgtgagcttaaaaaaactttttaaatatttgcatagttttgaggtgaatttgtttccttacagatctctcctaatcattgagatgtatatttcaaaagaggaaattttacatgttgtccaaaacagccttgctagtaactggtgaattttggtattaactattattaaagtctttaaacgacacaggtacctaaagatcaccttaatgtggcaatttgtgatggtgtagctagctgattgtgaaaactgttcctttaaagtcgcttcttgcatgttcggtgttagtcatccagctcaggcttgtgttgcagctgacaatctaggaaagacggccttagagagtggtgcaggccccacactgacggactgccttagaaacccgacttcctctagactttgaaccgccagacttttctcttgtttagaaaacaaacttatatttaatgtacttactacttaaaactccagacagagatataatgtagaaggcaaatattggccaattttttcctctttttaagtggaagacaaatgaacgggatttttaaagtgcttttaaagtgcatgaatggttaataaatcagtatgaattgtaagccttcatcttacatccaagtccttagttggttagggtttcttttctttcttttttaaagagtgtcaattaccttttgaacctgtgaaaatttgatagttgttaacagtctgatggtcctaattctttcttttcattctagaaatgaatgtggttgtaatcatgttcctaattcttgggacaacctgcaagacagtgagacagtttaaaaattacctttcatgttgaaaaagtctgaaacagagaacccaatgatatttaaaataaatgctacataaaactctttttaaaattttgattttaacttaattaaaacaatgtcataaatatgctttttgattttgttactgcttttaatattaaagtaatagaatattgaagcaatattgtctagcactctgctggacattaagtccgcgggaggagaagtgaacaggaatcgattctttgtcttttaactgcccttagttaggagatgttaaaatacttggcacctctggttatatgtatgttatgtgtgttctcccccctaaaatttctaagcacatttattcacttttaaaatgaatctttaaaagattatagttagtagttatagttaatattctatttacttggaaaaatgtgaataaatggatcttcaaaagattcattttaaaaatgaataaatgtataataggctataggtgatcttacttgcgtattaggtaggaggcacatatttataccatttcatatgtaatatctttgtcattgtgtttcatcgaagatcaattgctagcaacttgaagggtatttatacttgggtcacttgaactcagctgactaaattgtaagaacgagagcaagcaagatggctgttattggaagccataacttccagaagataattctgcacaattcgtaagttaaaaaaaatctgtagggtcttccactatcctttttcaggttgataatgctgttctgggcacacactttgtaaatggaatgttatggtacagtcgcctctcagtatccatggggcattggttccaggcctcccttaggatgccaaactccatggatactcaaaccccttctataaaatggtgtagtatttgcatatatcctagacacatcctcctgtatgctttaaatcatctctagattacttaaaatacctaatacaatgtaaatgctctgtaaatagttgttatactatattgtttagggaataatgacaaggaaaaaaaagcctgtacatgttcagcacaagtgaaaccatcctttttgcccccaaatattttcaatttgtatttggttgaatccatggatgcagaactcacggatacagagggccgactgtactttctttaaagtgttcaaaagtattactagcaaagaggaggaggagcaaagcatatatcagaagtaaaacaatttttcttgttgactgctttggtaaaaaacagtttgatggatagttttacatttcactggactagataaaaaatggtgctaatatttatgtagcttgatgctatagttgctttggtatcaaacttaatacctaacccatataagatccttattatataattttgtgatcagtaaaatgatattttaaagagtgatcttaaaaatatgacctggtcattgcacaacgtttgcatttgaaatgaatttgtgtactatagggtggatatggagttattcagtgcaagtgtgtgcttaatatcaaaccctatgcaaggagctatgtctagatttttggtccaaatttgcctccttcaagcctactagtgtgagatggaaaaaaatcgattgctcttttaatattatttccattttgaaattctcgacacttgaatgaaggcagtagaggcctctttttggatttctcttctaataacaaaactttatttagggaaggtttccctgtgctatcgtaagtttgttttgagcactgcattcactttaaaattctggaggaacaaaggctgggcacataatcacaaagcccaggccacacaataattcggggttgtattttctaagaactatgtattgtttttagcttatagttaatattgtatttacttggaaaaatgtgaataaagttaattaacattacaagctgag

SEQ ID NO: 837 - protein, 156 aa, Homosapiens
MVPVFTSSALPVKDVEDKPEQQTRTRETDKSPTSTEPRQQPSALFARGNRKAVKSPQRSSSKIKENKHPFALYGWGEKQTDTGSQKTHNVCASAPVHEIHESALRAKNRRQVEKRKLVAQRQRAHSVDVEKNRKMKASSSENPWMTEYMRCYSARA

SEQ ID NO: 838 - DNA, 4826 bp, Homosapiens
ggggcggggcggcctctgtgtcgtgtaccgggtcccgtagagccggcgacccaggaggaggcggaacggcgggcgcgcggggccccggaggagcaggacgcggaggccggggacgcggaggccgaggacgcggaggacgcggctctgccagcactgccagtgaaagatgtagaagataaacctgaacaacaaaccagaacaagagagactgacaaatcacccaccagtactgagcctcgacagcaaccaagtgccttatttgctagaggaaacaggaaagcggtcaaaagtccccaaagatcatcgagtaaaataaaagaaaacaagcatccatttgctctttatggctggggagaaaaacagaccgatacaggaagccagaagactcacaacgtctgtgcgtccgctcctgtgcacgagattcatgaatcagcattacgagccaagaacagaagacaggtggaaaaaaggaaactggttgctcaaaggcagcgagctcactctgtggatgtggagaagaacagaaagatgaaggcttcctcctcagagaacccgtggatgacagaatacatgaggtgctattcggcaagagcttaaagaaacacttgcgtggacagcctcttttaaaaagtgtaaatgactgaaaggaaaaacaaaacaaaaaccatcaaaagaaacggacacaggtttaagaaaccaactgattatgcaaggttttttttagggaatttgtaaaagattgttttattttgatgaatattggtcacctacctcggcagtagggcagacagttgaagccatagacatttggttatttatgaagataattccctaaatctttgatattcttataaggtttttgttttaaagcatcttaatcttttaagatactgacaccaaatgcctttaaatggcaacagatgcttacagttcagtattcttttcataagcttaggtagagcctattatcatcttgttctaaataactttccagattccatagctataagatcattccatcctacagcataagactcgttttccttatatgccgttttgtttgtgaaagaatatcaagtcaaaaatgagtgtcagcactactactgattccatgtataatgaaagtagaactttgctagttcctgaaaatttttaacttatttgtatttcagttcagcagcatctttatgtagattgtgatatttaagaattatctgggctgggcgagggtctctttttctctttcagtgatcatctaggcagttattatttaatagtttaatagctcaagtacattccaatagacgaagtgcacacaacacaatatgtgtgtacagtagtagtaaagtttcttttgagtagtcaaagactcactttttttattgcctttttttttttttttaaagaatacatactgtggattcagtcccttgtcacacttgaccttttggcatacacccactgtggacttttgcctcttctgtaatggctggcaatgacatttcaaacttacaatctggaattgcacttggtacattggcattgcttgttccactgggatggggaccagtgtgaagatgcctgttagatagactgcccacccctactttctctttttctttatagcacttaacaataacaaagtcttgatgatgtacagtattcaaactttaggttgaaatacgttactctttgattcctagccagtagatcttatctacactttaatgggagagaatggtggtgtgtgggtaggcacaaatttatgtaaatagtgctccttctctttagtatgtttgctttgggggtagaaaaatggttttaacaaacactggtttccatcaaatgaatgatgtcttctccatcctgtggagacaagaatctgctagaaggatatgtgctaagttccttataagagataatggtgctctgcctatgccagcttggcacccgaagatgtgtgagtggacgtgaggctgagtattaccttagtatttttctctgggtctttggaaaaccatagtcaatttttagaacatattgctttcattccccataaactcttcacacatgataactgtttaagctttgaaaacacatactgaagtattgtgagcttaaaaaaactttttaaatatttgcatagttttgaggtgaatttgtttccttacagatctctcctaatcattgagatgtatatttcaaaagaggaaattttacatgttgtccaaaacagccttgctagtaactggtgaattttggtattaactattattaaagtctttaaacgacacaggtacctaaagatcaccttaatgtggcaatttgtgatggtgtagctagctgattgtgaaaactgttcctttaaagtcgcttcttgcatgttcggtgttagtcatccagctcaggcttgtgttgcagctgacaatctaggaaagacggccttagagagtggtgcaggccccacactgacggactgccttagaaacccgacttcctctagactttgaaccgccagacttttctcttgtttagaaaacaaacttatatttaatgtacttactacttaaaactccagacagagatataatgtagaaggcaaatattggccaattttttcctctttttaagtggaagacaaatgaacgggatttttaaagtgcttttaaagtgcatgaatggttaataaatcagtatgaattgtaagccttcatcttacatccaagtccttagttggttagggtttcttttctttcttttttaaagagtgtcaattaccttttgaacctgtgaaaatttgatagttgttaacagtctgatggtcctaattctttcttttcattctagaaatgaatgtggttgtaatcatgttcctaattcttgggacaacctgcaagacagtgagacagtttaaaaattacctttcatgttgaaaaagtctgaaacagagaacccaatgatatttaaaataaatgctacataaaactctttttaaaattttgattttaacttaattaaaacaatgtcataaatatgctttttgattttgttactgcttttaatattaaagtaatagaatattgaagcaatattgtctagcactctgctggacattaagtccgcgggaggagaagtgaacaggaatcgattctttgtcttttaactgcccttagttaggagatgttaaaatacttggcacctctggttatatgtatgttatgtgtgttctcccccctaaaatttctaagcacatttattcacttttaaaatgaatctttaaaagattatagttagtagttatagttaatattctatttacttggaaaaatgtgaataaatggatcttcaaaagattcattttaaaaatgaataaatgtataataggctataggtgatcttacttgcgtattaggtaggaggcacatatttataccatttcatatgtaatatctttgtcattgtgtttcatcgaagatcaattgctagcaacttgaagggtatttatacttgggtcacttgaactcagctgactaaattgtaagaacgagagcaagcaagatggctgttattggaagccataacttccagaagataattctgcacaattcgtaagttaaaaaaaatctgtagggtcttccactatcctttttcaggttgataatgctgttctgggcacacactttgtaaatggaatgttatggtacagtcgcctctcagtatccatggggcattggttccaggcctcccttaggatgccaaactccatggatactcaaaccccttctataaaatggtgtagtatttgcatatatcctagacacatcctcctgtatgctttaaatcatctctagattacttaaaatacctaatacaatgtaaatgctctgtaaatagttgttatactatattgtttagggaataatgacaaggaaaaaaaagcctgtacatgttcagcacaagtgaaaccatcctttttgcccccaaatattttcaatttgtatttggttgaatccatggatgcagaactcacggatacagagggccgactgtactttctttaaagtgttcaaaagtattactagcaaagaggaggaggagcaaagcatatatcagaagtaaaacaatttttcttgttgactgctttggtaaaaaacagtttgatggatagttttacatttcactggactagataaaaaatggtgctaatatttatgtagcttgatgctatagttgctttggtatcaaacttaatacctaacccatataagatccttattatataattttgtgatcagtaaaatgatattttaaagagtgatcttaaaaatatgacctggtcattgcacaacgtttgcatttgaaatgaatttgtgtactatagggtggatatggagttattcagtgcaagtgtgtgcttaatatcaaaccctatgcaaggagctatgtctagatttttggtccaaatttgcctccttcaagcctactagtgtgagatggaaaaaaatcgattgctcttttaatattatttccattttgaaattctcgacacttgaatgaaggcagtagaggcctctttttggatttctcttctaataacaaaactttatttagggaaggtttccctgtgctatcgtaagtttgttttgagcactgcattcactttaaaattctggaggaacaaaggctgggcacataatcacaaagcccaggccacacaataattcggggttgtattttctaagaactatgtattgtttttagcttatagttaatattgtatttacttggaaaaatgtgaataaagttaattaacattacaagctgag

SEQ ID NO: 839 - protein, 62 aa, Homosapiens
MAGEKNRPIQEARRLTTSVRPLLCTRFMNQHYEPRTEDRWKKGNWLLKGSELTLWMWRRTER

SEQ ID NO: 840 - DNA, 3491 bp, Homosapiens
aactgacgactcctgcagagtgacgcgtgcctgggacagcgtctgctgggaccagggtggacgggcacctcaaataagtgggccagggacctgggcctgggcccctcggactggcaggcacgcccgcacccccgcgcctcgcgctctctacggaagcagccgcccccacggagcgggcggaggcccgggggccgggagcgcgcgtggaggctccgggactgaggcggcgccaccgcctcccgcctgcagctggagcgcgggccgccgcggcgacatcttgctcaggaggaaagcgcgcgggagagcgagctgcgctttagctgctgcgccacgcgcgcctcgggcctgggcgcagaggatcggccgggcgcggcgggaaggaggctgcgggcagcgaggagcggctggcgctcgaggcggcggacggcaccatgtccccggggagcggggtgaagagcgagtacatgaagcgctaccaggagccgcgctgggaggagtacgggccgtgctaccgcgagctgctgcactaccgcctaggccgccggctgctggagcaggcgcacgcgccctggctctgggacgactggggcccggccggctcctcggaggactcggcgtcgtcagagtcgtcgggcgccgggggccccgcaccccggtgcgccccgccctcgcccccgccgcccgtagagccggcgacccaggaggaggcggaacggcgggcgcgcggggccccggaggagcaggacgcggaggccggggacgcggaggccgaggacgcggaggacgcggctctgccagggaatgcctggctgcgcacctaggcggtaacgatggaaatcactccctgttgtgcggaggggcttttgaatgaaggaagcggctctcaggaggagcacggaaggactaaggagcattttcgggtggagtaactcaaacagcaacctcctgcagctgctggaggatgaccacaaatccagatctttccgtgaaggaaagcaaaattgagatgattggatttatcttgggggattgcggagaaagcccttagggtgtggtgctgtctatcttttaacattccagatgctaagtctcagaatcggagtagcagtggttgcttttgaataagcttggttcaatcttggtatatttgttgttgattttaaaatgagataaatggtttgaaaattatgctaacttgttcctgtatttctactttaagtggatcgtatgagttgagccataagtgaaaatgttactgtcttaagcattatgatttttcaacataaatattttaattatatataaatctgatttcaaagtattttcatctcatttatctcttttcaaaagcactgccagtgaaagatgtagaagataaacctgaacaacaaaccagaacaagagagactgacaaatcacccaccagtactgagcctcgacagcaaccaagtgccttatttgctagaggaaacaggaaagcggtcaaaagtccccaaagatcatcgagtaaaataaaagaaaacaagcatccatttgctctttatggctggggagaaaaacagaccgatacaggaagccagaagactcacaacgtctgtgcgtccgctcctgtgcacgagattcatgaatcagcattacgagccaagaacagaagacaggtggaaaaaaggaaactggttgctcaaaggcagcgagctcactctgtggatgtggagaagaacagaaagatgaaggcttcctcctcagagaacccgtggatgacagaatacatgaggtgctattcggcaagagcttaaagaaacacttgcgtggacagcctcttttaaaaagtgtaaatgactgaaaggaaaaacaaaacaaaaaccatcaaaagaaacggacacaggtttaagaaaccaactgattatgcaaggttttttttagggaatttgtaaaagattgttttattttgatgaatattggtcacctacctcggcagtagggcagacagttgaagccatagacatttggttatttatgaagataattccctaaatctttgatattcttataaggtttttgttttaaagcatcttaatcttttaagatactgacaccaaatgcctttaaatggcaacagatgcttacagttcagtattcttttcataagcttaggtagagcctattatcatcttgttctaaataactttccagattccatagctataagatcattccatcctacagcataagactcgttttccttatatgccgttttgtttgtgaaagaatatcaagtcaaaaatgagtgtcagcactactactgattccatgtataatgaaagtagaactttgctagttcctgaaaatttttaacttatttgtatttcagttcagcagcatctttatgtagattgtgatatttaagaattatctgggctgggcgagggtctctttttctctttcagtgatcatctaggcagttattatttaatagtttaatagctcaagtacattccaatagacgaagtgcacacaacacaatatgtgtgtacagtagtagtaaagtttcttttgagtagtcaaagactcactttttttattgcctttttttttttttttaaagaatacatactgtggattcagtcccttgtcacacttgaccttttggcatacacccactgtggacttttgcctcttctgtaatggctggcaatgacatttcaaacttacaatctggaattgcacttggtacattggcattgcttgttccactgggatggggaccagtgtgaagatgcctgttagatagactgcccacccctactttctctttttctttatagcacttaacaataacaaagtcttgatgatgtacagtattcaaactttaggttgaaatacgttactctttgattcctagccagtagatcttatctacactttaatgggagagaatggtggtgtgtgggtaggcacaaatttatgtaaatagtgctccttctctttagtatgtttgctttgggggtagaaaaatggttttaacaaacactggtttccatcaaatgaatgatgtcttctccatcctgtggagacaagaatctgctagaaggatatgtgctaagttccttataagagataatggtgctctgcctatgccagcttggcacccgaagatgtgtgagtggacgtgaggctgagtattaccttagtatttttctctgggtctttggaaaaccatagtcaatttttagaacatattgctttcattccccataaactcttcacacatgataactgtttaagctttgaaaacacatactgaagtattgtgagcttaaaaaaactttttaaatatttgcatagttttgaggtgaatttgtttccttacagatctctcctaatcattgagatgtatatttcaaaagaggaaattttacatgttgtccaaaacagccttgctagtaactggtgaattttggtattaactattattaaagtctttaaacgac

SEQ ID NO: 841 - protein, 129 aa, Homosapiens
MSPGSGVKSEYMKRYQEPRWEEYGPCYRELLHYRLGRRLLEQAHAPWLWDDWGPAGSSEDSASSESSGAGGPAPRCAPPSPPPPVEPATQEEAERRARGAPEEQDAEAGDAEAEDAEDAALPGNAWLRT

SEQ ID NO: 842 - DNA, 2011 bp, Homosapiens
aactgacgactcctgcagagtgacgcgtgcctgggacagcgtctgctgggaccagggtggacgggcacctcaaataagtgggccagggacctgggcctgggcccctcggactggcaggcacgcccgcacccccgcgcctcgcgctctctacggaagcagccgcccccacggagcgggcggaggcccgggggccgggagcgcgcgtggaggctccgggactgaggcggcgccaccgcctcccgcctgcagctggagcgcgggccgccgcggcgacatcttgctcaggaggaaagcgcgcgggagagcgagctgcgctttagctgctgcgccacgcgcgcctcgggcctgggcgcagaggatcggccgggcgcggcgggaaggaggctgcgggcagcgaggagcggctggcgctcgaggcggcggacggcaccatgtccccggggagcggggtgaagagcgagtacatgaagcgctaccaggagccgcgctgggaggagtacgggccgtgctaccgcgagctgctgcactaccgcctaggccgccggctgctggagcaggcgcacgcgccctggctctgggacgactggggcccggccggctcctcggaggactcggcgtcgtcagagtcgtcgggcgccgggggccccgcaccccggtgcgccccgccctcgcccccgccgcccgtagagccggcgacccaggaggaggcggaacggcgggcgcgcggggccccggaggagcaggacgcggaggccggggacgcggaggccgaggacgcggaggacgcggctctgccagcactgccagtgaaagatgtagaagataaacctgaacaacaaaccagaacaagagagactgacaaatcacccaccagtactgagcctcgacagcaaccaagtgccttatttgctagaggaaacaggaaagcggtcaaaagtccccaaagatcatcgagtaaaataaaagaaaacaagcatccatttgctctttatggctggggagaaaaacagaccgatacaggaagccagaagactcacaacgtctgtgcgtccgctcctgtgcacgagattcatgaatcagcattacgagccaagaacagaagacaggtggaaaaaaggaaactggttgctcaaaggcagcgagctcactctgtggatgtggagaagaacagaaagatgaaggcttcctcctcagagaacccgtggatgacagaatacatgaggtgctattcggcaagagcttaaagaaacacttgcgtggacagcctcttttaaaaagtgtaaatgactgaaaggaaaaacaaaacaaaaaccatcaaaagaaacggacacaggtttaagaaaccaactgattatgcaaggttttttttagggaatttgtaaaagattgttttattttgatgaatattggtcacctacctcggcagtagggcagacagttgaagccatagacatttggttatttatgaagataattccctaaatctttgatattcttataaggtttttgttttaaagcatcttaatcttttaagatactgacaccaaatgcctttaaatggcaacagatgcttacagttcagtattcttttcataagcttaggtagagcctattatcatcttgttctaaataactttccagattccatagctataagatcattccatcctacagcataagactcgttttccttatatgccgttttgtttgtgaaagaatatcaagtcaaaaatgagtgtcagcactactactgattccatgtataatgaaagtagaactttgctagttcctgaaaatttttaacttatttgtatttcagttcagcagcatctttatgtagattgtgatatttaagaattatctgggctgggcgagggtctctttttctctttcagtgatcatctaggcagttattatttaatagtttaatagctcaagtacattccaatagacgaagtgcacacaacacaatatgtgtgtacagtagtagtaaagtttcttttgagtagtc

SEQ ID NO: 843 - protein, 270 aa, Homosapiens
MSPGSGVKSEYMKRYQEPRWEEYGPCYRELLHYRLGRRLLEQAHAPWLWDDWGPAGSSEDSASSESSGAGGPAPRCAPPSPPPPVEPATQEEAERRARGAPEEQDAEAGDAEAEDAEDAALPALPVKDVEDKPEQQTRTRETDKSPTSTEPRQQPSALFARGNRKAVKSPQRSSSKIKENKHPFALYGWGEKQTDTGSQKTHNVCASAPVHEIHESALRAKNRRQVEKRKLVAQRQRAHSVDVEKNRKMKASSSENPWMTEYMRCYSARA

SEQ ID NO: 844 - DNA, 340 bp, Homosapiens
atcaggaaggacctgtatgccaacaacgtcatgtcggggggcaccacgatgtaccctgggatcgctgaccgcatgcagaaagagatcaccgcgctggcacccacacgcgacttctcaggacgacgaatcttctcaatgggggggcggctgagctccagccaccccgcagtcactttctttgtaacaacttccgttgctgccatcgtaaactgacacagtgtttataacgtgtacatacattaacttattacctcattttgttatttttcgaaacaaagccctgtggaagaaaatggaaaacttgaagaagcattaaagtcattctgttaagctgcgtaaa

SEQ ID NO: 845 - protein, 60 aa, Homosapiens
MSGGTTMYPGIADRMQKEITALAPTRDFSGRRIFSMGGRLSSSHPAVTFFVTTSVAAIVN

SEQ ID NO: 846 - DNA, 548 bp, Homosapiens
cgcgagatcgtgcgcgacatcaaggagaagctgtgctacgtggccctggacttcgagaacgagatggcgacggccgcctcctcctcctccctggaaaagagctacgagctgccagacgggcaggtcatcaccatcggcaacgagcgcttccgctgcccggagacgctcttccagccctccttcatcggtatggagtcggcgggcattcacgagaccaccttccagcagatgtggatcaccaagcaggagtacgacgaggccggcccttccatcgtccaccgcaaatgcttctagacacactccacctccagcacgcgacttctcaggacgacgaatcttctcaatgggggggcggctgagctccagccaccccgcagtcactttctttgtaacaacttccgttgctgccatcgtaaactgacacagtgtttataacgtgtacatacattaacttattacctcattttgttatttttcgaaacaaagccctgtggaagaaaatggaaaacttgaagaagcattaaagtcattctgttaagctgcgtaaa

SEQ ID NO: 847 - protein, 76 aa, Homosapiens
MATAASSSSLEKSYELPDGQVITIGNERFRCPETLFQPSFIGMESAGIHETTFQQMWITKQEYDEAGPSIVHRKCF

SEQ ID NO: 848 - DNA, 935 bp, Homosapiens
gtcggtatgggtcagaaagattcctacgtgggcgacgaggctcagagcaagagaggtatcctgaccctgaagtaccctatcgagcacggcatcatcaccaactgggatgacatggagaagatctggcaccacaccttctacaacgagcttcgcgtggctcccgaggagcaccccaccctgctcaccgaggcccccctcaatcccaaggccaaccgcgagaagatgacccagatcatgtttgagaccttcaacgtgcccgccatgtacgtggccatccaggccgtgctgtccctctacgcctccggcaggaccaccggcatcgtgctggactccggcgacggcgtcacccacaacgtgcccatttatgagggcattcacgagaccacctacaacagcatcatgaagtgtgacatcgacatcaggaaggacctgtatgccaacaacgtcatgtcggggggcaccacgatgtaccctgggatcgctgaccgcatgcagaaagagatcaccgcgctggcacccagcaccatgaagatcaagatcatcgccccgccggagcgcaaatactcggtgtggatcggcggctccatcctggcctcgctgtccaccttccagcagatgtggatcaccaagcaggagtacgacgaggccggcccttccatcgtccaccgcaaatgcttctagacacactccacctccagcacgcgacttctcaggacgacgaatcttctcaatgggggggcggctgagctccagccaccccgcagtcactttctttgtaacaacttccgttgctgccatcgtaaactgacacagtgtttataacgtgtacatacattaacttattacctcattttgttatttttcgaaacaaagccctgtggaagaaaatggaaaacttgaagaagcattaaagtcattctgttaagctgcgtaaa

SEQ ID NO: 849 - protein, 224 aa, Homosapiens
MGQKDSYVGDEAQSKRGILTLKYPIEHGIITNWDDMEKIWHHTFYNELRVAPEEHPTLLTEAPLNPKANREKMTQIMFETFNVPAMYVAIQAVLSLYASGRTTGIVLDSGDGVTHNVPIYEGIHETTYNSIMKCDIDIRKDLYANNVMSGGTTMYPGIADRMQKEITALAPSTMKIKIIAPPERKYSVWIGGSILASLSTFQQMWITKQEYDEAGPSIVHRKCF

SEQ ID NO: 850 - DNA, 1121 bp, Homosapiens
gtcggtatgggtcagaaagattcctacgtgggcgacgaggctcagagcaagagaggtatcctgaccctgaagtaccctatcgagcacggcatcatcaccaactgggatgacatggagaagatctggcaccacaccttctacaacgagcttcgcgtggctcccgaggagcaccccaccctgctcaccgaggcccccctcaatcccaaggccaaccgcgagaagatgacccagatcatgtttgagaccttcaacgtgcccgccatgtacgtggccatccaggccgtgctgtccctctacgcctccggcaggaccaccggcatcgtgctggactccggcgacggcgtcacccacaacgtgcccatttatgagggctacgcgctgccgcacgccatcatgcgcctggacttcgagaacgagatggcgacggccgcctcctcctcctccctggaaaagagctacgagctgccagacgggcaggtcatcaccatcggcaacgagcgcttccgctgcccggagacgctcttccagccctccttcatcggtatggagtcggcgggcattcacgagaccacctacaacagcatcatgaagtgtgacatcgacatcaggaaggacctgtatgccaacaacgtcatgtcggggggcaccacgatgtaccctgggatcgctgaccgcatgcagaaagagatcaccgcgctggcacccagcaccatgaagatcaagatcatcgccccgccggagcgcaaatactcggtgtggatcggcggctccatcctggcctcgctgtccaccttccagcagatgtggatcaccaagcaggagtacgacgaggccggcccttccatcgtccaccgcaaatgcttctagacacactccacctccagcacgcgacttctcaggacgacgaatcttctcaatgggggggcggctgagctccagccaccccgcagtcactttctttgtaacaacttccgttgctgccatcgtaaactgacacagtgtttataacgtgtacatacattaacttattacctcattttgttatttttcgaaacaaagccctgtggaagaaaatggaaaacttgaagaagcattaaagtcattctgttaagctgcgtaaa

SEQ ID NO: 851 - protein, 286 aa, Homosapiens
MGQKDSYVGDEAQSKRGILTLKYPIEHGIITNWDDMEKIWHHTFYNELRVAPEEHPTLLTEAPLNPKANREKMTQIMFETFNVPAMYVAIQAVLSLYASGRTTGIVLDSGDGVTHNVPIYEGYALPHAIMRLDFENEMATAASSSSLEKSYELPDGQVITIGNERFRCPETLFQPSFIGMESAGIHETTYNSIMKCDIDIRKDLYANNVMSGGTTMYPGIADRMQKEITALAPSTMKIKIIAPPERKYSVWIGGSILASLSTFQQMWITKQEYDEAGPSIVHRKCF

SEQ ID NO: 852 - DNA, 1072 bp, Homosapiens
agggcgtcatggtcggtatgggtcagaaagattcctacgtgggcgacgaggctcagagcaagagaggtatcctgaccctgaagtaccctatcgagcacggcatcatcaccaactgggatgacatggagaagatctggcaccacaccttctacaacgagcttcgcgtggctcccgaggagcaccccaccctgctcaccgaggcccccctcaatcccaaggccaaccgcgagaagatgacccagatcatgtttgagaccttcaacgtgcccgccatgtacgtggccatccaggccgtgctgtccctctacgcctccggcaggaccaccggcatcgtgctggactccggcgacggcgtcacccacaacgtgcccatttatgagggctacgcgctgccgcacgccatcatgcgcctggacctggcgggccgcgatctcaccgactacctgatgaagatcctcactgagcgtggctactccttcgtgaccacagctgagcgcgagatcgtgcgcgacatcaaggagaagctgtgctacgtggccctggacttcgagaacgagatggcgacggccgcctcctcctcctccctggaaaagagcaccacgatgtaccctgggatcgctgaccgcatgcagaaagagatcaccgcgctggcacccagcaccatgaagatcaagatcatcgccccgccggagcgcaaatactcggtgtggatcggcggctccatcctggcctcgctgtccaccttccagcagatgtggatcaccaagcaggagtacgacgaggccggcccttccatcgtccaccgcaaatgcttctagacacactccacctccagcacgcgacttctcaggacgacgaatcttctcaatgggggggcggctgagctccagccaccccgcagtcactttctttgtaacaacttccgttgctgccatcgtaaactgacacagtgtttataacgtgtacatacattaacttattacctcattttgttatttttcgaaacaaagccctgtggaagaaaatggaaaacttgaagaagcattaaagtcattctgttaagctgcgtaaa

SEQ ID NO: 853 - protein, 269 aa, Homosapiens
MVGMGQKDSYVGDEAQSKRGILTLKYPIEHGIITNWDDMEKIWHHTFYNELRVAPEEHPTLLTEAPLNPKANREKMTQIMFETFNVPAMYVAIQAVLSLYASGRTTGIVLDSGDGVTHNVPIYEGYALPHAIMRLDLAGRDLTDYLMKILTERGYSFVTTAEREIVRDIKEKLCYVALDFENEMATAASSSSLEKSTTMYPGIADRMQKEITALAPSTMKIKIIAPPERKYSVWIGGSILASLSTFQQMWITKQEYDEAGPSIVHRKCF

SEQ ID NO: 854 - DNA, 1388 bp, Homosapiens
accgcagcggacagcgccaagtgaagcctcgcttcccctccgcggcgaccagggcccgagccgagagtagcagttgtagctacccgcccagaaactagacacaatgtgcgacgaagacgagaccaccgccctcgtgtgcgacaatggctccggcctggtgaaagccggcttcgccggggatgacgcccctagggccgtgttcccgtccatcgtgggccgcccccgacaccagggcgtcatggtcggtatgggtcagaaagattcctacgtgggcgacgaggctcagagcaagagaggtatcctgaccctgaagtaccctatcgagcacggcatcatcaccaactggccaaccgcgagaagatgacccagatcatgtttgagaccttcaacgtgcccgccatgtacgtggccatccaggccgtgctgtccctctacgcctccggcaggaccaccggcatcgtgctggactccggcgacggcgtcacccacaacgtgcccatttatgagggctacgcgctgccgcacgccatcatgcgcctggacctggcgggccgcgatctcaccgactacctgatgaagatcctcactgagcgtggctactccttcgtgaccacagctgagcgcgagatcgtgcgcgacatcaaggagaagctgtgctacgtggccctggacttcgagaacgagatggcgacggccgcctcctcctcctccctggaaaagagctacgagctgccagacgggcaggtcatcaccatcggcaacgagcgcttccgctgcccggagacgctcttccagccctccttcatcggtatggagtcggcgggcattcacgagaccacctacaacagcatcatgaagtgtgacatcgacatcaggaaggacctgtatgccaacaacgtcatgtcggggggcaccacgatgtaccctgggatcgctgaccgcatgcagaaagagatcaccgcgctggcacccagcaccatgaagatcaagatcatcgccccgccggagcgcaaatactcggtgtggatcggcggctccatcctggcctcgctgtccaccttccagcagatgtggatcaccaagcaggagtacgacgaggccggcccttccatcgtccaccgcaaatgcttctagacacactccacctccagcacgcgacttctcaggacgacgaatcttctcaatgggggggcggctgagctccagccaccccgcagtcactttctttgtaacaacttccgttgctgccatcgtaaactgacacagtgtttataacgtgtacatacattaacttattacctcattttgttatttttcgaaacaaagccctgtggaagaaaatggaaaacttgaagaagcattaaagtcattctgttaagctgcgtaaa

SEQ ID NO: 855 - protein, 257 aa, Homosapiens
MTQIMFETFNVPAMYVAIQAVLSLYASGRTTGIVLDSGDGVTHNVPIYEGYALPHAIMRLDLAGRDLTDYLMKILTERGYSFVTTAEREIVRDIKEKLCYVALDFENEMATAASSSSLEKSYELPDGQVITIGNERFRCPETLFQPSFIGMESAGIHETTYNSIMKCDIDIRKDLYANNVMSGGTTMYPGIADRMQKEITALAPSTMKIKIIAPPERKYSVWIGGSILASLSTFQQMWITKQEYDEAGPSIVHRKCF

SEQ ID NO: 856 - DNA, 1222 bp, Homosapiens
accgcagcggacagcgccaagtgaagcctcgcttcccctccgcggcgaccagggcccgagccgagagtagcagttgtagctacccgcccagaaactagacacaatgtgcgacgaagacgagaccaccgccctcgtgtgcgacaatggctccggcctggtgaaagccggcttcgccggggatgacgcccctagggccgtgttcccgtccatcgtgggccgcccccgacaccagggcgtcatggtcggtatgggtcagaaagattcctacgtgggcgacgaggctcagagcaagagaggtatcctgaccctgaagtaccctatcgagcacggcatcatcaccaactgggatgacatggagaagatctggcaccacaccttctacaacgagcttcgcgtggctcccgaggagcaccccaccctgctcaccgaggcccccctcaatcccaaggccaacccgcgagatcgtgcgcgacatcaaggagaagctgtgctacgtggccctggacttcgagaacgagatggcgacggccgcctcctcctcctccctggaaaagagctacgagctgccagacgggcaggtcatcaccatcggcaacgagcgcttccgctgcccggagacgctcttccagccctccttcatcggtatggagtcggcgggcattcacgagaccacctacaacagcatcatgaagtgtgacatcgacatcaggaaggacctgtatgccaacaacgtcatgtcggggggcaccacgatgtaccctgggatcgctgaccgcatgcagaaagagatcaccgcgctggcacccagcaccatgaagatcaagatcatcgccccgccggagcgcaaatactcggtgtggatcggcggctccatcctggcctcgctgtccaccttccagcagatgtggatcaccaagcaggagtacgacgaggccggcccttccatcgtccaccgcaaatgcttctagacacactccacctccagcacgcgacttctcaggacgacgaatcttctcaatgggggggcggctgagctccagccaccccgcagtcactttctttgtaacaacttccgttgctgccatcgtaaactgacacagtgtttataacgtgtacatacattaacttattacctcattttgttatttttcgaaacaaagccctgtggaagaaaatggaaaacttgaagaagcattaaagtcattctgttaagctgcgtaaa

SEQ ID NO: 857 - protein, 206 aa, Homosapiens
MTWRRSGTTPSTTSFAWLPRSTPPCSPRPPSIPRPTREIVRDIKEKLCYVALDFENEMATAASSSSLEKSYELPDGQVITIGNERFRCPETLFQPSFIGMESAGIHETTYNSIMKCDIDIRKDLYANNVMSGGTTMYPGIADRMQKEITALAPSTMKIKIIAPPERKYSVWIGGSILASLSTFQQMWITKQEYDEAGPSIVHRKCF

SEQ ID NO: 858 - DNA, 1495 bp, Homosapiens
ggccaccgcagcggacagcgccaagtgaagcctcgcttcccctccgcggcgaccagggcccgagccgagagtagcagttgtagctacccgcccagaaactagacacaatgtgcgacgaagacgagaccaccgccctcgtgtgcgacaatggctccggcctggtgaaagccggcttcgccggggatgacgcccctagggccgtgttcccgtccatcgtgggccgcccccgacaccagggcgtcatggtcggtatgggtcagaaagattcctacgtgggcgacgaggctcagagcaagagaggtatcctgaccctgaagtaccctatcgagcacggcatcatcaccaactgggatgacatggagaagatctggcaccacaccttctacaacgagcttcgcgtggctcccgaggagcaccccaccctgctcaccgaggcccccctcaatcccaaggccaaccgcgagaagatgacccagatcatgtttgagaccttcaacgtgcccgccatgtacgtggccatccaggccgtgctgtccctctacgcctccggcaggaccaccggcatcgtgctggactccggcgacggcgtcacccacaacgtgcccatttatgagggctacgcgctgccgcacgccatcatgcgcctggacctggcgggccgcgatctcaccgactacctgatgaagatcctcactgagcgtggctactccttcgtgaccacagctgagcgcgagatcgtgcgcgacatcaaggagaagctgtgctacgtggccctggacttcgagaacgagatggcgacggccgcctcctcctcctccctggaaaagagctacgagctgccagacgggcaggtcatcaccatcggcaacgagcgcttccgctgcccggagacgctcttccagccctccttcatcggtatggagtcggcgggcattcacgagaccacctacaacagcatcatgaagtgtgacatcgacatcaggaaggacctgtatgccaacaacgtcatgtcggggggcaccacgatgtaccctgggatcgctgaccgcatgcagaaagagatcaccgcgctggcacccagcaccatgaagatcaagatcatcgccccgccggagcgcaaatactcggtgtggatcggcggctccatcctggcctcgctgtccaccttccagcagatgtggatcaccaagcaggagtacgacgaggccggcccttccatcgtccaccgcaaatgcttctagacacactccacctccagcacgcgacttctcaggacgacgaatcttctcaatgggggggcggctgagctccagccaccccgcagtcactttctttgtaacaacttccgttgctgccatcgtaaactgacacagtgtttataacgtgtacatacattaacttattacctcattttgttatttttcgaaacaaagccctgtggaagaaaatggaaaacttgaagaagcattaaagtcattctgttaagctgcgtaaa

SEQ ID NO: 859 - protein, 377 aa, Homosapiens; identical to SEQ ID NO: 16

SEQ ID NO: 860 - DNA, 265 bp, Homosapiens
tacctgatgaagatcctcactgagcgtggctactccttcgtgaccacagctgagcgcgagatcgtgcgcgacatcaaggagaagctgtgctacgtggccctggacttcgagaacgagatggcgacggccgcctcctcctcctccctggaaaagagctacgagctgccagacgggcaggtcatcaccatcggcaacgagcgcttccgctgcccggagacgctcttccagccctccttcatcggtatggagtcggcgggcattcacg

SEQ ID NO: 861 - protein, 85 aa, Homosapiens
MKILTERGYSFVTTAEREIVRDIKEKLCYVALDFENEMATAASSSSLEKSYELPDGQVITIGNERFRCPETLFQPSFIGMESAGI

SEQ ID NO: 862 - DNA, 256 bp, Homosapiens
cgatctcaccgactacctgatgaagatcctcactgagcgtggctactccttcgtgaccacagctgagcgcgagatcgtgcgcgacatcaaggagaagctgtgctacgtggccctggacttcgagaacgagatggcgacggccgcctcctcctcctccctggaaaagagctacgagctgccagacgggcaggtcatcaccatcggcaacgagcgcttccgctgcccggagacgctcttccagccctccttcatcggt

SEQ ID NO: 863 - protein, 78 aa, Homosapiens
MKILTERGYSFVTTAEREIVRDIKEKLCYVALDFENEMATAASSSSLEKSYELPDGQVITIGNERFRCPETLFQPSFI

SEQ ID NO: 864 - DNA, 683 bp, Homosapiens
agggcgtcatggtcggtatgggtcagaaagattcctacgtgggcgacgaggctcagagcaagagaggtatcctgaccctgaagtaccctatcgagcacggcatcatcaccaactgggatgacatggagaagatctggcaccacaccttctacaacgagcttcgcgtggctcccgaggagcaccccaccctgctcaccgaggcccccctcaatcccaaggccaaccgcgagaagatgacccagatcatgtttgagaccttcaacgtgcccgccatgtacgtggccatccaggccgtgctgtccctctacgcctccggcaggaccaccggcatcgtgctggactccggcgacggcgtcacccacaacgtgcccatttatgagggctacgcgctgccgcacgccatcatgcgcctggacctggcgggccgcgatctcaccgactacctgatgaagatcctcactgagcgtggctactccttcgtgaccacagctgagcgcgagatcgtgcgcgacatcaaggagaagctgtgctacgtggccctggacttcgagaacgagatggcgacggccgcctcctcctcctccctggaaaagagctacgagctgccagacgggcaggtcatcaccatcggcaacgagcgcttccgctgcccggagacgctcttccagccctccttcatcggt

SEQ ID NO: 865 - protein, 224 aa, Homosapiens
MVGMGQKDSYVGDEAQSKRGILTLKYPIEHGIITNWDDMEKIWHHTFYNELRVAPEEHPTLLTEAPLNPKANREKMTQIMFETFNVPAMYVAIQAVLSLYASGRTTGIVLDSGDGVTHNVPIYEGYALPHAIMRLDLAGRDLTDYLMKILTERGYSFVTTAEREIVRDIKEKLCYVALDFENEMATAASSSSLEKSYELPDGQVITIGNERFRCPETLFQPSFI

SEQ ID NO: 866 - DNA, 648 bp, Homosapiens
gccaccgcagcggacagcgccaagtgaagcctcgcttcccctccgcggcgaccagggcccgagccgagagtagcagttgtagctacccgcccagaaactagacacaatgtgcgacgaagacgagaccaccgccctcgtgtgcgacaatggctccggcctggtgaaagccggcttcgccggggatgacgcccctagggccgtgttcccgtccatcgtgggccgcccccgacaccagggcgtcatggtcggtatgggtcagaaagattcctacgtgggcgacgaggctcagagcaagagaggtatcctgaccctgaagtaccctatcgagcacggcatcatcaccaactgggatgacatggagaagatctggcaccacaccttctacaacgagcttcgcgtggctcccgaggagcaccccaccctgctcaccgaggcccccctcaatcccaaggccaaccgcgagaagatgacccagatcatgtttgagaccttcaacgtgcccgccatgtacgtggccatccaggccgtgctgtccctctacgcctccggcaggaccaccggcatcgtgctggactccggcgacggcgtcacccacaacgtgcccatttatgagggctacgcgctgccgcacgccatcatgcgcctgga

SEQ ID NO: 867 - protein, 179 aa, Homosapiens
MCDEDETTALVCDNGSGLVKAGFAGDDAPRAVFPSIVGRPRHQGVMVGMGQKDSYVGDEAQSKRGILTLKYPIEHGIITNWDDMEKIWHHTFYNELRVAPEEHPTLLTEAPLNPKANREKMTQIMFETFNVPAMYVAIQAVLSLYASGRTTGIVLDSGDGVTHNVPIYEGYALPHAIMR

SEQ ID NO: 868 - DNA, 1007 bp, Homosapiens
aaataaaggccagaggttggacagggagttgctggcatgtccgcggcttggcccagtagaatgcccactaaccatcttgctccagcagctgaaaaggtcagaagttaaacatggtgaagagtccggttcctggattcacagagcccagcatcaggccgtctcccccgcaggctgcaaggccagcccttgagaccctgtcgggtgataatgtgctgcgagacacacaggctcccatctccctcccgtgctgctgcaaacctggtgatccctggtgtatgggacagtaccgcaggaaagcccatctgatcatgccccagaacccactgatcgcgtggacgtagaacgactgctcttaccgtgtgaagtagagtcatcctgttcaagggaagaaaaagctccctcttttaatcctgtttctctctaagttagtagctattacacccaaatggttgagtttttaaaaattattttaacagtaaaaatgaaattaagacctaggattttgaataattttttctctagaattttaaaaattggtttcacaacgtagtcttcatcaacgagttattaatggtttttatataaatcaagtagctgataagtatacagatgctgtgttgacatttctgtggaaagagatactttactgacttggaaaaggttcgtgatcacacctgtctataagtgctgccctgagagtcccagcttgggaccttgacagaatacaagagtaaagtgtcgtgtgcgatcctgagcagaggggagtgtacgcaggcatggagactggcgcgtctggaggatttgtggacagaatggtgtcaaggattgcagcagacctggagatagacagtaaaaacttgctgaactcctgagtgaggtaaaggctactgacgcctctctttgagggctttcatttttaatgattgaactgtgtttctttttttactttaggggctgaatcgtagttttcctaccatcacccacctacatcctacacacctggacat

SEQ ID NO: 869 - protein, 76 aa, Homosapiens
MVKSPVPGFTEPSIRPSPPQAARPALETLSGDNVLRDTQAPISLPCCCKPGDPWCMGQYRRKAHLIMPQNPLIAWT

SEQ ID NO: 870 - DNA, 2672 bp, Homosapiens
tttgtctcaaaaaaaacaaacaaacaaacaaacaaaaaacaaactacaacttccttacaagacataatgacttcttttctccataaatgtctctagtattagttacatgattgtataatcttctaccttattttaacttgtcatagctatatatctgtgaagaaaatagaagagctaatgaatatgatttcaagaaagctttggacttgttggaatatattgatgaggaagaagatataaatataaatgatctaaaactggaaatcctttgcaaagctcttcagagagataactggtccagttctgatggcaaagatgatccaattgaagtatctaaagacagtatatttgtgaagatcttacagaaacttttaaaagatggcattcagctcagtgagtacttaccggaggtgaaagacctgctacaagcggatcagcttggaagcttaaagtccaatccttacttcgagtttgttttgaaagcaaattatgaatattatgttcagggacaaatataactttttctaaaaatggccattgtttatgaaatctgtataagtgtgtccttatacaaattttaggccataaacaagtgtaagtttgtacaatttcataacatgtatagctgagtttttatactttatatgtaggaagctaatataaaatagttatgtaactgtgattttggttttcagttatgtgacttgttttttccacctgaaatgtgtcagttgttgttcctgtactcggtgccctttctttttactctcacgtggtcccaggttctggagttcttgtcctggttctagctgctcacatgtacaaatcacttctaggcctcagtttctgcgactatgaaaattactagattgcactagcttgtctctaaaattgctgtgactccagatactttgcactgaagagaatctagggtgtttgatatctgtttcagttagggctaatgggaaatgtctagtaagataaatgtcaacttttgctgacttattatgagatgaaaaaccaaaggagagtgggcctaactcatgtgagcttgataactgatgaactcattgggagcattttaaacttttctacataaataataaatgagcactaatgaaagtattttagtgaatgaaacgtttatgtggttttctaacctatctagaaattactgttgatgtttagttctaatctttcagtgtggggattcagccagcctcatgtattttcagaatgactcatgaatctttaccacagtctgcctagctagtcaaaagcatgaatgatactagaaaccattataggttttcctaatatggcaattgatgtgactgaaaggtactgtactctcagagctttgtcctgaccagtgtcatcactcactcaatgtttatctgggttttaaataaaggccagaggttggacagggagttgctggcatgtccgcggcttggcccagtagaatgcccactaaccatcttgctccagcagctgaaaaggtcagaagttaaacatggtgaagagtccggttcctggattcacagagcccagcatcaggccgtctcccccgcaggctgcaaggccagcccttgagtatgtttggaagagcaggttaatggagctgtttgtaaatcaaagggaagaaattagcagcctgttctttttctctttgcagcttgtatgttaggacagcattagggtctgggttaggaacatgttggaaggtactaagagaagttaggaagagcagcttgtcagatggccagtaagaaaccgctgagtacttgtatcgtaagatgaggctttgcttttacgtggaggtcagctgtcagtgttcacgtctcacctgtaggaccctgtcgggtgataatgtgctgcgagacacacaggctcccatctccctcccgtgctgctgcaaacctggtgatccctggtgtatgggacagtaccgcaggaaagcccatctgatcatgccccagaacccactgatcgcgtggacgtagaacgactgctcttaccgtgtgaagtagagtcatcctgttcaagggaagaaaaagctccctcttttaatcctgtttctctctaagttagtagctattacacccaaatggttgagtttttaaaaattattttaacagtaaaaatgaaattaagacctaggattttgaataattttttctctagaattttaaaaattggtttcacaacgtagtcttcatcaacgagttattaatggtttttatataaatcaagtagctgataagtatacagatgctgtgttgacatttctgtggaaagagatactttactgacttggaaaaggttcgtgatcacacctgtctataagtgctgccctgagagtcccagcttgggaccttgacagaatacaagagtaaagtgtcgtgtgcgatcctgagcagaggggagtgtacgcaggcatggagactggcgcgtctggaggatttgtggacagaatggtgtcaaggattgcagcagacctggagatagacagtaaaaacttgctgaactcctgagtgaggtaaaggctactgacgcctctctttgagggctttcatttttaatgattgaactgtgtttctttttttactttaggggctgaatcgtagttttcctaccatcacccacctacatcctacacacctggacat

SEQ ID NO: 871 - protein, 68 aa, Homosapiens
MFIWVLNKGQRLDRELLACPRLGPVECPLTILLQQLKRSEVKHGEESGSWIHRAQHQAVSPAGCKASP

SEQ ID NO: 872 - DNA, 2901 bp, Homosapiens
ggaaagcgaggcaaattattatctcagcccatttctcagcatggacagttggcaaattttttgcaagctcatgaacatctcagctggttacatgaaattaatagccaagaattagaaaaggctcatgcaacacttctgggtttggcaaatatggaaactcgttactttgcaaagaagaaaacccttcttggcttgagtaaattggctgcattagcttcagacttttcagaggatatgctacaagaaaaaattgaagaaatggctgagcaggagcgctttctactgcatcaggagaccctacctgaacagctgctggcggagaaacagctaaatctcagtgcgatgccagtattgactgcaccacaactcattggtctatatatctgtgaagaaaatagaagagctaatgaatatgatttcaagaaagctttggacttgttggaatatattgatgaggaagaagatataaatataaatgatctaaaactggaaatcctttgcaaagctcttcagagagataactggtccagttctgatggcaaagatgatccaattgaagtatctaaagacagtatatttgtgaagatcttacagaaacttttaaaagatggcattcagctcagtgagtacttaccggaggtgaaagacctgctacaagcggatcagcttggaagcttaaagtccaatccttacttcgagtttgttttgaaagcaaattatgaatattatgttcagggacaaatataactttttctaaaaatggccattgtttatgaaatctgtataagtgtgtccttatacaaattttaggccataaacaagtgtaagtttgtacaatttcataacatgtatagctgagtttttatactttatatgtaggaagctaatataaaatagttatgtaactgtgattttggttttcagttatgtgacttgttttttccacctgaaatgtgtcagttgttgttcctgtactcggtgccctttctttttactctcacgtggtcccaggttctggagttcttgtcctggttctagctgctcacatgtacaaatcacttctaggcctcagtttctgcgactatgaaaattactagattgcactagcttgtctctaaaattgctgtgactccagatactttgcactgaagagaatctagggtgtttgatatctgtttcagttagggctaatgggaaatgtctagtaagataaatgtcaacttttgctgacttattatgagatgaaaaaccaaaggagagtgggcctaactcatgtgagcttgataactgatgaactcattgggagcattttaaacttttctacataaataataaatgagcactaatgaaagtattttagtgaatgaaacgtttatgtggttttctaacctatctagaaattactgttgatgtttagttctaatctttcagtgtggggattcagccagcctcatgtattttcagaatgactcatgaatctttaccacagtctgcctagctagtcaaaagcatgaatgatactagaaaccattataggttttcctaatatggcaattgatgtgactgaaaggtactgtactctcagagctttgtcctgaccagtgtcatcactcactcaatgtttatctgggttttaaataaaggccagaggttggacagggagttgctggcatgtccgcggcttggcccagtagaatgcccactaaccatcttgctccagcagctgaaaaggtcagaagttaaacatggtgaagagtccggttcctggattcacagagcccagcatcaggccgtctcccccgcaggctgcaaggccagcccttgagtatgtttggaagagcaggttaatggagctgtttgtaaatcaaagggaagaaattagcagcctgttctttttctctttgcagcttgtatgttaggacagcattagggtctgggttaggaacatgttggaaggtactaagagaagttaggaagagcagcttgtcagatggccagtaagaaaccgctgagtacttgtatcgtaagatgaggctttgcttttacgtggaggtcagctgtcagtgttcacgtctcacctgtaggaccctgtcgggtgataatgtgctgcgagacacacaggctcccatctccctcccgtgctgctgcaaacctggtgatccctggtgtatgggacagtaccgcaggaaagcccatctgatcatgccccagaacccactgatcgcgtggacgtagaacgactgctcttaccgtgtgaagtagagtcatcctgttcaagggaagaaaaagctccctcttttaatcctgtttctctctaagttagtagctattacacccaaatggttgagtttttaaaaattattttaacagtaaaaatgaaattaagacctaggattttgaataattttttctctagaattttaaaaattggtttcacaacgtagtcttcatcaacgagttattaatggtttttatataaatcaagtagctgataagtatacagatgctgtgttgacatttctgtggaaagagatactttactgacttggaaaaggttcgtgatcacacctgtctataagtgctgccctgagagtcccagcttgggaccttgacagaatacaagagtaaagtgtcgtgtgcgatcctgagcagaggggagtgtacgcaggcatggagactggcgcgtctggaggatttgtggacagaatggtgtcaaggattgcagcagacctggagatagacagtaaaaacttgctgaactcctgagtgaggtaaaggctactgacgcctctctttgagggctttcatttttaatgattgaactgtgtttctttttttactttaggggctgaatcgtagttttcctaccatcacccacctacatcctacacacctggacat

SEQ ID NO: 873 - protein, 198 aa, Homosapiens [sequence omitted]

SEQ ID NO: 874 - DNA, 4990 bp, Homosapiens
acgtcatcatcgcgcgccatctcttcccttaggtgtttaagttccgcgcgcaggccaggctgcaacctgacggccagatccctcgctgtcctagtcgctgctccttggagtcatgttcccagccgccccttctccgcggaccccgggtaccgggtcccgaaggggcccgctggccggactcgggcccggctccacgccccggacggctagcaggaagggtctgcccctggggtctgcagtcagctccccagtgctcttctcgccggtcggccggcgtagctcgctaagctcgcggggaacaccaacacgaatgttcccacaccactccataactgagtctgtgaactatgatgtgaaaacgtttggatcttctcttcctgttaaagtcatggaagccctaacattggctgaagtcgatgaccagctgaccattaacatagatgaaggtggatgggcttgtctggtgtgcaaagagaagctcattatttggaagattgctctgtcacctattactaagttatccgtttgcaaagaacttcagctgccacctagtgatttccactggagtgccgacttagtggctctttcttactcttctccctcaggtgaagcacattctactcaggctgttgctgtcatggttgccaccagagaaggatctatccgctattggccaagccttgctggtgaagatacctacacagaggcttttgtagattcgggaggtgataagacttacagtttcctaacagcagtgcagggaggaagttttattttgtcttcatcaggaagccaactaattcggttgatacctgagagctcaggaaagattcatcagcatatcctgcctcaggggcaaggcatgctttcaggaattggtcgaaaagtttcttctctttttggaattttatctcctagtagtgatctcacactttcaagtgttctctgggatagagagagatcaagcttttatagcctgacgagttcaaacatcagtaaatgggaattagatgattcttcagaaaagcatgcatacagttgggatataaatagagccctgaaggaaaacattaccgatgctatttggggatctgaaagtaactatgaagctattaaagaaggagtcaacattcgatatttggacttgaagcaaaactgtgatgggctggtgattttggcagcagcatggcactcagcagacaatccatgtctcatctattactctctgataacaatagaagataatggttgccaaatgtcagatgcagttactgtagaagtcactcaatataatccaccttttcagtctgaagacctgattttgtgtcagttgacggtcccaaacttttcaaaccagactgcctatctgtataacgaaagtgctgtctatgtgtgctccacaggaactgggaaattttctcttccccaggagaaaattgtctttaatgcacaaggagatagtgttttaggtgctggtgcctgtggtggtgttcctatcattttttctagaaacagtggactggtgtctattacttcaagggaaaatgtgtctatattggcagaagacttggaagggtctttagcatcttcagttgctggaccaaacagtgagagtatgatttttgagaccactacaaagaatgaaactatagcccaggaagataaaatcaagttgctgaaagctgcctttctgcaatactgcagaaaagatttaggtcatgctcaaatggtggttgatgagctcttttcctctcactctgatttggattctgattctgaactagacagggcagttacccaaatcagtgtagacctgatggatgactacccagcatctgacccacggtgggctgagtctgtccctgaggaagcacctgggttcagcaatacgtcactgattatccttcaccagctagaagacaagatgaaagctcactcttttcttatggactttattcatcaagttggcttatttggacgtctaggcagttttccagttagagggacaccgatggccactcgactgttgctctgtgagcatgccgaaaagctgtcagccgccattgttctcaagaaccaccactcccggctttctgaccttgtcaacacagccatattgattgctttgaacaagagggagtatgaaatcccatccaacctgactcctgcagatgtctttttcagggaggtatcccaagtagataccatctgtgagtgcttactggagcatgaggagcaagtcttgagggatgcacctatggattccattgaatgggctgaagtggtgatcaatgtgaacaatattctcaaggatatgctgcaggctgctagtcattatcgccaaaatagaaactctttgtatagaagagaagaatcactagaaaaagaacctgaatatgttccatggacggcaacaagtggtcctggtggcatccgaacggtaataatacgccagcatgagattgtcctgaaggtggcttatccacaggcagacagcaacctccgaaacatcgtgaccgagcagctggtagccctgatcgattgcttcctggatggttatgtttctcagcttaagtctgtggataaatccagtaatcgggaaagatatgacaatctggagaaaggaaagcgaggcaaattattatctcagcccatttctcagcatggacagttggcaaattttttgcaagctcatgaacatctcagctggttacatgaaattaatagccaagaattagaaaaggctcatgcaacacttctgggtttggcaaatatggaaactcgttactttgcaaagaagaaaacccttcttggcttgagtaaattggctgcattagcttcagacttttcagaggatatgctacaagaaaaaattgaagaaatggctgagcaggagcgctttctactgcatcaggagaccctacctgaacagctgctggcggagaaacagctaaatctcagtgcgatgccagtattgactgcaccacaactcattggtctatatatctgtgaagaaaatagaagagctaatgaatatgatttcaagaaagctttggacttgttggaatatattgatgaggaagaagatataaatataaatgatctaaaactggaaatcctttgcaaagctcttcagagagataactggtccagttctgatggcaaagatgatccaattgaagtatctaaagacagtatatttgtgaagatcttacagaaacttttaaaagatggcattcagctcagtgagtacttaccggaggtgaaagacctgctacaagcggatcagcttggaagcttaaatgtcaacttttgctgacttattatgagatgaaaaaccaaaggagagtgggcctaactcatgtgagcttgataactgatgaactcattgggagcattttaaacttttctacataaataataaatgagcactaatgaaagtattttagtgaatgaaacgtttatgtggttttctaacctatctagaaattactgttgatgtttagttctaatctttcagtgtggggattcagccagcctcatgtattttcagaatgactcatgaatctttaccacagtctgcctagctagtcaaaagcatgaatgatactagaaaccattataggttttcctaatatggcaattgatgtgactgaaaggtactgtactctcagagctttgtcctgaccagtgtcatcactcactcaatgtttatctgggttttaaataaaggccagaggttggacagggagttgctggcatgtccgcggcttggcccagtagaatgcccactaaccatcttgctccagcagctgaaaaggtcagaagttaaacatggtgaagagtccggttcctggattcacagagcccagcatcaggccgtctcccccgcaggctgcaaggccagcccttgagtatgtttggaagagcaggttaatggagctgtttgtaaatcaaagggaagaaattagcagcctgttctttttctctttgcagcttgtatgttaggacagcattagggtctgggttaggaacatgttggaaggtactaagagaagttaggaagagcagcttgtcagatggccagtaagaaaccgctgagtacttgtatcgtaagatgaggctttgcttttacgtggaggtcagctgtcagtgttcacgtctcacctgtaggaccctgtcgggtgataatgtgctgcgagacacacaggctcccatctccctcccgtgctgctgcaaacctggtgatccctggtgtatgggacagtaccgcaggaaagcccatctgatcatgccccagaacccactgatcgcgtggacgtagaacgactgctcttaccgtgtgaagtagagtcatcctgttcaagggaagaaaaagctccctcttttaatcctgtttctctctaagttagtagctattacacccaaatggttgagtttttaaaaattattttaacagtaaaaatgaaattaagacctaggattttgaataattttttctctagaattttaaaaattggtttcacaacgtagtcttcatcaacgagttattaatggtttttatataaatcaagtagctgataagtatacagatgctgtgttgacatttctgtggaaagagatactttactgacttggaaaaggttcgtgatcacacctgtctataagtgctgccctgagagtcccagcttgggaccttgacagaatacaagagtaaagtgtcgtgtgcgatcctgagcagaggggagtgtacgcaggcatggagactggcgcgtctggaggatttgtggacagaatggtgtcaaggattgcagcagacctggagatagacagtaaaaacttgctgaactcctgagtgaggtaaaggctactgacgcctctctttgagggctttcatttttaatgattgaactgtgtttctttttttactttaggggctgaatcgtagttttcctaccatcacccacctacatcctacacacctggacat

SEQ ID NO: 875 - protein, 1068 aa, Homosapiens
MFPAAPSPRTPGTGSRRGPLAGLGPGSTPRTASRKGLPLGSAVSSPVLFSPVGRRSSLSSRGTPTRMFPHHSITESVNYDVKTFGSSLPVKVMEALTLAEVDDQLTINIDEGGWACLVCKEKLIIWKIALSPITKLSVCKELQLPPSDFHWSADLVALSYSSPSGEAHSTQAVAVMVATREGSIRYWPSLAGEDTYTEAFVDSGGDKTYSFLTAVQGGSFILSSSGSQLIRLIPESSGKIHQHILPQGQGMLSGIGRKVSSLFGILSPSSDLTLSSVLWDRERSSFYSLTSSNISKWELDDSSEKHAYSWDINRALKENITDAIWGSESNYEAIKEGVNIRYLDLKQNCDGLVILAAAWHSADNPCLIYYSLITIEDNGCQMSDAVTVEVTQYNPPFQSEDLILCQLTVPNFSNQTAYLYNESAVYVCSTGTGKFSLPQEKIVFNAQGDSVLGAGACGGVPIIFSRNSGLVSITSRENVSILAEDLEGSLASSVAGPNSESMIFETTTKNETIAQEDKIKLLKAAFLQYCRKDLGHAQMVVDELFSSHSDLDSDSELDRAVTQISVDLMDDYPASDPRWAESVPEEAPGFSNTSLIILHQLEDKMKAHSFLMDFIHQVGLFGRLGSFPVRGTPMATRLLLCEHAEKLSAAIVLKNHHSRLSDLVNTAILIALNKREYEIPSNLTPADVFFREVSQVDTICECLLEHEEQVLRDAPMDSIEWAEVVINVNNILKDMLQAASHYRQNRNSLYRREESLEKEPEYVPWTATSGPGGIRTVIIRQHEIVLKVAYPQADSNLRNIVTEQLVALIDCFLDGYVSQLKSVDKSSNRERYDNLEKGKRGKLLSQPISQHGQLANFLQAHEHLSWLHEINSQELEKAHATLLGLANMETRYFAKKKTLLGLSKLAALASDFSEDMLQEKIEEMAEQERFLLHQETLPEQLLAEKQLNLSAMPVLTAPQLIGLYICEENRRANEYDFKKALDLLEYIDEEEDININDLKLEILCKALQRDNWSSSDGKDDPIEVSKDSIFVKILQKLLKDGIQLSEYLPEVKDLLQADQLGSLNVNFC

SEQ ID NO: 876 - DNA, 5737 bp, Homosapiens
acgtcatcatcgcgcgccatctcttcccttaggtgtttaagttccgcgcgcaggccaggctgcaacctgacggccagatccctcgctgtcctagtcgctgctccttggagtcatgttcccagccgccccttctccgcggaccccgggtaccgggtcccgaaggggcccgctggccggactcgggcccggctccacgccccggacggctagcaggaagggtctgcccctggggtctgcagtcagctccccagtgctcttctcgccggtcggccggcgtagctcgctaagctcgcggggaacaccaacacgaatgttcccacaccactccataactgagtctgtgaactatgatgtgaaaacgtttggatcttctcttcctgttaaagtcatggaagccctaacattggctgaagtcgatgaccagctgaccattaacatagatgaaggtggatgggcttgtctggtgtgcaaagagaagctcattatttggaagattgctctgtcacctattactaagttatccgtttgcaaagaacttcagctgccacctagtgatttccactggagtgccgacttagtggctctttcttactcttctccctcaggtgaagcacattctactcaggctgttgctgtcatggttgccaccagagaaggatctatccgctattggccaagccttgctggtgaagatacctacacagaggcttttgtagattcgggaggtgataagacttacagtttcctaacagcagtgcagggaggaagttttattttgtcttcatcaggaagccaactaattcggttgatacctgagagctcaggaaagattcatcagcatatcctgcctcaggggcaaggcatgctttcaggaattggtcgaaaagtttcttctctttttggaattttatctcctagtagtgatctcacactttcaagtgttctctgggatagagagagatcaagcttttatagcctgacgagttcaaacatcagtaaatgggaattagatgattcttcagaaaagcatgcatacagttgggatataaatagagccctgaaggaaaacattaccgatgctatttggggatctgaaagtaactatgaagctattaaagaaggagtcaacattcgatatttggacttgaagcaaaactgtgatgggctggtgattttggcagcagcatggcactcagcagacaatccatgtctcatctattactctctgataacaatagaagataatggttgccaaatgtcagatgcagttactgtagaagtcactcaatataatccaccttttcagtctgaagacctgattttgtgtcagttgacggtcccaaacttttcaaaccagactgcctatctgtataacgaaagtgctgtctatgtgtgctccacaggaactgggaaattttctcttccccaggagaaaattgtctttaatgcacaaggagatagtgttttaggtgctggtgcctgtggtggtgttcctatcattttttctagaaacagtggactggtgtctattacttcaagggaaaatgtgtctatattggcagaagacttggaagggtctttagcatcttcagttgctggaccaaacagtgagagtatgatttttgagaccactacaaagaatgaaactatagcccaggaagataaaatcaagttgctgaaagctgcctttctgcaatactgcagaaaagatttaggtcatgctcaaatggtggttgatgagctcttttcctctcactctgatttggattctgattctgaactagacagggcagttacccaaatcagtgtagacctgatggatgactacccagcatctgacccacggtgggctgagtctgtccctgaggaagcacctgggttcagcaatacgtcactgattatccttcaccagctagaagacaagatgaaagctcactcttttcttatggactttattcatcaagttggcttatttggacgtctaggcagttttccagttagagggacaccgatggccactcgactgttgctctgtgagcatgccgaaaagctgtcagccgccattgttctcaagaaccaccactcccggctttctgaccttgtcaacacagccatattgattgctttgaacaagagggagtatgaaatcccatccaacctgactcctgcagatgtctttttcagggaggtatcccaagtagataccatctgtgagtgcttactggagcatgaggagcaagtcttgagggatgcacctatggattccattgaatgggctgaagtggtgatcaatgtgaacaatattctcaaggatatgctgcaggctgctagtcattatcgccaaaatagaaactctttgtatagaagagaagaatcactagaaaaagaacctgaatatgttccatggacggcaacaagtggtcctggtggcatccgaacggtaataatacgccagcatgagattgtcctgaaggtggcttatccacaggcagacagcaacctccgaaacatcgtgaccgagcagctggtagccctgatcgattgcttcctggatggttatgtttctcagcttaagtctgtggataaatccagtaatcgggaaagatatgacaatctggagatggaatacctacagaaaagatcagatctcttatctcctcttctttcactaggccagtacctgtgggctgcttctctagcagagaaatactgtgactttgatatattggtacaaatgtgtgagcagactgacaaccagagccgactccagcgctacatgacccagtttgctgatcagaatttttcagactttctcttccgttggtatctggagaaaggaaagcgaggcaaattattatctcagcccatttctcagcatggacagttggcaaattttttgcaagctcatgaacatctcagctggttacatgaaattaatagccaagaattagaaaaggctcatgcaacacttctgggtttggcaaatatggaaactcgttactttgcaaagaagaaaacccttcttggcttgagtaaattggctgcattagcttcagacttttcagaggatatgctacaagaaaaaattgaagaaatggctgagcaggagcgctttctactgcatcaggagaccctacctgaacagctgctggcggagaaacagctaaatctcagtgcgatgccagtattgactgcaccacaactcattggtctatatatctgtgaagaaaatagaagagctaatgaatatgatttcaagaaagctttggacttgttggaatatattgatgaggaagaagatataaatataaatgatctaaaactggaaatcctttgcaaagctcttcagagagataactggtccagttctgatggcaaagatgatccaattgaagtatctaaagacagtatatttgtgaagatcttacagaaacttttaaaagatggcattcagctcagtgagtacttaccggaggtgaaagacctgctacaagcggatcagcttggaagcttaaagtccaatccttacttcgagtttgttttgaaagcaaattatgaatattatgttcagggacaaatataactttttctaaaaatggccattgtttatgaaatctgtataagtgtgtccttatacaaattttaggccataaacaagtgtaagtttgtacaatttcataacatgtatagctgagtttttatactttatatgtaggaagctaatataaaatagttatgtaactgtgattttggttttcagttatgtgacttgttttttccacctgaaatgtgtcagttgttgttcctgtactcggtgccctttctttttactctcacgtggtcccaggttctggagttcttgtcctggttctagctgctcacatgtacaaatcacttctaggcctcagtttctgcgactatgaaaattactagattgcactagcttgtctctaaaattgctgtgactccagatactttgcactgaagagaatctagggtgtttgatatctgtttcagttagggctaatgggaaatgtctagtaagataaatgtcaacttttgctgacttattatgagatgaaaaaccaaaggagagtgggcctaactcatgtgagcttgataactgatgaactcattgggagcattttaaacttttctacataaataataaatgagcactaatgaaagtattttagtgaatgaaacgtttatgtggttttctaacctatctagaaattactgttgatgtttagttctaatctttcagtgtggggattcagccagcctcatgtattttcagaatgactcatgaatctttaccacagtctgcctagctagtcaaaagcatgaatgatactagaaaccattataggttttcctaatatggcaattgatgtgactgaaaggtactgtactctcagagctttgtcctgaccagtgtcatcactcactcaatgtttatctgggttttaaataaaggccagaggttggacagggagttgctggcatgtccgcggcttggcccagtagaatgcccactaaccatcttgctccagcagctgaaaaggtcagaagttaaacatggtgaagagtccggttcctggattcacagagcccagcatcaggccgtctcccccgcaggctgcaaggccagcccttgagtatgtttggaagagcaggttaatggagctgtttgtaaatcaaagggaagaaattagcagcctgttctttttctctttgcagcttgtatgttaggacagcattagggtctgggttaggaacatgttggaaggtactaagagaagttaggaagagcagcttgtcagatggccagtaagaaaccgctgagtacttgtatcgtaagatgaggctttgcttttacgtggaggtcagctgtcagtgttcacgtctcacctgtaggaccctgtcgggtgataatgtgctgcgagacacacaggctcccatctccctcccgtgctgctgcaaacctggtgatccctggtgtatgggacagtaccgcaggaaagcccatctgatcatgccccagaacccactgatcgcgtggacgtagaacgactgctcttaccgtgtgaagtagagtcatcctgttcaagggaagaaaaagctccctcttttaatcctgtttctctctaagttagtagctattacacccaaatggttgagtttttaaaaattattttaacagtaaaaatgaaattaagacctaggattttgaataattttttctctagaattttaaaaattggtttcacaacgtagtcttcatcaacgagttattaatggtttttatataaatcaagtagctgataagtatacagatgctgtgttgacatttctgtggaaagagatactttactgacttggaaaaggttcgtgatcacacctgtctataagtgctgccctgagagtcccagcttgggaccttgacagaatacaagagtaaagtgtcgtgtgcgatcctgagcagaggggagtgtacgcaggcatggagactggcgcgtctggaggatttgtggacagaatggtgtcaaggattgcagcagacctggagatagacagtaaaaacttgctgaactcctgagtgaggtaaaggctactgacgcctctctttgagggctttcatttttaatgattgaactgtgtttctttttttactttaggggctgaatcgtagttttcctaccatcacccacctacatcctacacacctggacat

SEQ ID NO: 877 - protein, 1156 aa, Homosapiens; identical to SEQ ID NO: 18

SEQ ID NO: 878 - DNA, 1133 bp, Homosapiens
tttgtctcaaaaaaaacaaacaaacaaacaaacaaaaaacaaactacaacttccttacaagacataatgacttcttttctccataaatgtctctagtattagttacatgattgtataatcttctaccttattttaacttgtcatagctatatatctgtgaagaaaatagaagagctaatgaatatgatttcaagaaagctttggacttgttggaatatattgatgaggaagaagatataaatataaatgatctaaaactggaaatcctttgcaaagctcttcagagagataactggtccagttctgatggcaaagatgatccaattgaagtatctaaagacagtatatttgtgaagatcttacagaaacttttaaaagatggcattcagctcagtgagtacttaccggaggtgaaagacctgctacaagcggatcagcttggaagcttaaagtccaatccttacttcgagtttgttttgaaagcaaattatgaatattatgttcagggacaaatataactttttctaaaaatggccattgtttatgaaatctgtataagtgtgtccttatacaaattttaggccataaacaagtgtaagtttgtacaatttcataacatgtatagctgagtttttatactttatatgtaggaagctaatataaaatagttatgtaactgtgattttggttttcagttatgtgacttgttttttccacctgaaatgtgtcagttgttgttcctgtactcggtgccctttctttttactctcacgtggtcccaggttctggagttcttgtcctggttctagctgctcacatgtacaaatcacttctaggcctcagtttctgcgactatgaaaattactagattgcactagcttgtctctaaaattgctgtgactccagatactttgcactgaagagaatctagggtgtttgatatctgtttcagttagggctaatgggaaatgtctagtaagataaatgtcaacttttgctgacttattatgagatgaaaaaccaaaggagagtgggcctaactcatgtgagcttgataactgatgaactcattgggagcattttaaacttttctacataaataataaatgagcactaatgaaagtattttagtg

SEQ ID NO: 879 - protein, 123 aa, Homosapiens
LYICEENRRANEYDFKKALDLLEYIDEEEDININDLKLEILCKALQRDNWSSSDGKDDPIEVSKDSIFVKILQKLLKDGIQLSEYLPEVKDLLQADQLGSLKSNPYFEFVLKANYEYYVQGQI

SEQ ID NO: 880 - DNA, 1362 bp, Homosapiens
ggaaagcgaggcaaattattatctcagcccatttctcagcatggacagttggcaaattttttgcaagctcatgaacatctcagctggttacatgaaattaatagccaagaattagaaaaggctcatgcaacacttctgggtttggcaaatatggaaactcgttactttgcaaagaagaaaacccttcttggcttgagtaaattggctgcattagcttcagacttttcagaggatatgctacaagaaaaaattgaagaaatggctgagcaggagcgctttctactgcatcaggagaccctacctgaacagctgctggcggagaaacagctaaatctcagtgcgatgccagtattgactgcaccacaactcattggtctatatatctgtgaagaaaatagaagagctaatgaatatgatttcaagaaagctttggacttgttggaatatattgatgaggaagaagatataaatataaatgatctaaaactggaaatcctttgcaaagctcttcagagagataactggtccagttctgatggcaaagatgatccaattgaagtatctaaagacagtatatttgtgaagatcttacagaaacttttaaaagatggcattcagctcagtgagtacttaccggaggtgaaagacctgctacaagcggatcagcttggaagcttaaagtccaatccttacttcgagtttgttttgaaagcaaattatgaatattatgttcagggacaaatataactttttctaaaaatggccattgtttatgaaatctgtataagtgtgtccttatacaaattttaggccataaacaagtgtaagtttgtacaatttcataacatgtatagctgagtttttatactttatatgtaggaagctaatataaaatagttatgtaactgtgattttggttttcagttatgtgacttgttttttccacctgaaatgtgtcagttgttgttcctgtactcggtgccctttctttttactctcacgtggtcccaggttctggagttcttgtcctggttctagctgctcacatgtacaaatcacttctaggcctcagtttctgcgactatgaaaattactagattgcactagcttgtctctaaaattgctgtgactccagatactttgcactgaagagaatctagggtgtttgatatctgtttcagttagggctaatgggaaatgtctagtaagataaatgtcaacttttgctgacttattatgagatgaaaaaccaaaggagagtgggcctaactcatgtgagcttgataactgatgaactcattgggagcattttaaacttttctacataaataataaatgagcactaatgaaagtattttagtg

SEQ ID NO: 881 - protein, 198 aa, Homosapiens [sequence omitted]

SEQ ID NO: 882 - DNA, 4198 bp, Homosapiens
acgtcatcatcgcgcgccatctcttcccttaggtgtttaagttccgcgcgcaggccaggctgcaacctgacggccagatccctcgctgtcctagtcgctgctccttggagtcatgttcccagccgccccttctccgcggaccccgggtaccgggtcccgaaggggcccgctggccggactcgggcccggctccacgccccggacggctagcaggaagggtctgcccctggggtctgcagtcagctccccagtgctcttctcgccggtcggccggcgtagctcgctaagctcgcggggaacaccaacacgaatgttcccacaccactccataactgagtctgtgaactatgatgtgaaaacgtttggatcttctcttcctgttaaagtcatggaagccctaacattggctgaagtcgatgaccagctgaccattaacatagatgaaggtggatgggcttgtctggtgtgcaaagagaagctcattatttggaagattgctctgtcacctattactaagttatccgtttgcaaagaacttcagctgccacctagtgatttccactggagtgccgacttagtggctctttcttactcttctccctcaggtgaagcacattctactcaggctgttgctgtcatggttgccaccagagaaggatctatccgctattggccaagccttgctggtgaagatacctacacagaggcttttgtagattcgggaggtgataagacttacagtttcctaacagcagtgcagggaggaagttttattttgtcttcatcaggaagccaactaattcggttgatacctgagagctcaggaaagattcatcagcatatcctgcctcaggggcaaggcatgctttcaggaattggtcgaaaagtttcttctctttttggaattttatctcctagtagtgatctcacactttcaagtgttctctgggatagagagagatcaagcttttatagcctgacgagttcaaacatcagtaaatgggaattagatgattcttcagaaaagcatgcatacagttgggatataaatagagccctgaaggaaaacattaccgatgctatttggggatctgaaagtaactatgaagctattaaagaaggagtcaacattcgatatttggacttgaagcaaaactgtgatgggctggtgattttggcagcagcatggcactcagcagacaatccatgtctcatctattactctctgataacaatagaagataatggttgccaaatgtcagatgcagttactgtagaagtcactcaatataatccaccttttcagtctgaagacctgattttgtgtcagttgacggtcccaaacttttcaaaccagactgcctatctgtataacgaaagtgctgtctatgtgtgctccacaggaactgggaaattttctcttccccaggagaaaattgtctttaatgcacaaggagatagtgttttaggtgctggtgcctgtggtggtgttcctatcattttttctagaaacagtggactggtgtctattacttcaagggaaaatgtgtctatattggcagaagacttggaagggtctttagcatcttcagttgctggaccaaacagtgagagtatgatttttgagaccactacaaagaatgaaactatagcccaggaagataaaatcaagttgctgaaagctgcctttctgcaatactgcagaaaagatttaggtcatgctcaaatggtggttgatgagctcttttcctctcactctgatttggattctgattctgaactagacagggcagttacccaaatcagtgtagacctgatggatgactacccagcatctgacccacggtgggctgagtctgtccctgaggaagcacctgggttcagcaatacgtcactgattatccttcaccagctagaagacaagatgaaagctcactcttttcttatggactttattcatcaagttggcttatttggacgtctaggcagttttccagttagagggacaccgatggccactcgactgttgctctgtgagcatgccgaaaagctgtcagccgccattgttctcaagaaccaccactcccggctttctgaccttgtcaacacagccatattgattgctttgaacaagagggagtatgaaatcccatccaacctgactcctgcagatgtctttttcagggaggtatcccaagtagataccatctgtgagtgcttactggagcatgaggagcaagtcttgagggatgcacctatggattccattgaatgggctgaagtggtgatcaatgtgaacaatattctcaaggatatgctgcaggctgctagtcattatcgccaaaatagaaactctttgtatagaagagaagaatcactagaaaaagaacctgaatatgttccatggacggcaacaagtggtcctggtggcatccgaacggtaataatacgccagcatgagattgtcctgaaggtggcttatccacaggcagacagcaacctccgaaacatcgtgaccgagcagctggtagccctgatcgattgcttcctggatggttatgtttctcagcttaagtctgtggataaatccagtaatcgggaaagatatgacaatctggagatggaatacctacagaaaagatcagatctcttatctcctcttctttcactaggccagtacctgtgggctgcttctctagcagagaaatactgtgactttgatatattggtacaaatgtgtgagcagactgacaaccagagccgactccagcgctacatgacccagtttgctgatcagaatttttcagactttctcttccgttggtatctggagaaaggaaagcgaggcaaattattatctcagcccatttctcagcatggacagttggcaaattttttgcaagctcatgaacatctcagctggttacatgaaattaatagccaagaattagaaaaggctcatgcaacacttctgggtttggcaaatatggaaactcgttactttgcaaagaagaaaacccttcttggcttgagtaaattggctgcattagcttcagacttttcagaggatatgctacaagaaaaaattgaagaaatggctgagcaggagcgctttctactgcatcaggagaccctacctgaacagctgctggcggagaaacagctaaatctcagtgcgatgccagtattgactgcaccacaactcattggtctatatatctgtgaagaaaatagaagagctaatgaatatgatttcaagaaagctttggacttgttggaatatattgatgaggaagaagatataaatataaatgatctaaaactggaaatcctttgcaaagctcttcagagagataactggtccagttctgatggcaaagatgatccaattgaagtatctaaagacagtatatttgtgaagatcttacagaaacttttaaaagatggcattcagctcagtgagtacttaccggaggtgaaagacctgctacaagcggatcagcttggaagcttaaagtccaatccttacttcgagtttgttttgaaagcaaattatgaatattatgttcagggacaaatataactttttctaaaaatggccattgtttatgaaatctgtataagtgtgtccttatacaaattttaggccataaacaagtgtaagtttgtacaatttcataacatgtatagctgagtttttatactttatatgtaggaagctaatataaaatagttatgtaactgtgattttggttttcagttatgtgacttgttttttccacctgaaatgtgtcagttgttgttcctgtactcggtgccctttctttttactctcacgtggtcccaggttctggagttcttgtcctggttctagctgctcacatgtacaaatcacttctaggcctcagtttctgcgactatgaaaattactagattgcactagcttgtctctaaaattgctgtgactccagatactttgcactgaagagaatctagggtgtttgatatctgtttcagttagggctaatgggaaatgtctagtaagataaatgtcaacttttgctgacttattatgagatgaaaaaccaaaggagagtgggcctaactcatgtgagcttgataactgatgaactcattgggagcattttaaacttttctacataaataataaatgagcactaatgaaagtattttagtg

SEQ ID NO: 883 - protein, 1156 aa, Homosapiens; identical to SEQ ID NO: 18

SEQ ID NO: 884 - DNA, 720 bp, Homosapiens
tttgtctcaaaaaaaacaaacaaacaaacaaacaaaaaacaaactacaacttccttacaagacataatgacttcttttctccataaatgtctctagtattagttacatgattgtataatcttctaccttattttaacttgtcatagctatatatctgtgaagaaaatagaagagctaatgaatatgatttcaagaaagctttggacttgttggaatatattgatgaggaagaagatataaatataaatgatctaaaactggaaatcctttgcaaagctcttcagagagataactggtccagttctgatggcaaagatgatccaattgaagtatctaaagacagtatatttgtgaagatcttacagaaacttttaaaagatggcattcagctcagtgagtacttaccggaggtgaaagacctgctacaagcggatcagcttggaagcttaaagtccaatccttacttcgagtttgttttgaaagcaaattatgaatattatgttcagggacaaatataactttttctaaaaatggccattgtttatgaaatctgtataagtgtgtccttatacaaattttaggccataaacaagtgtaagtttgtacaatttcataacatgtatagctgagtttttatactttatatgtaggaagctaatataaaatagttatgtaactgtgattttggttttcagttatgtgacttgttttttccacctg

SEQ ID NO: 885 - protein, 123 aa, Homosapiens; identical to SEQ ID NO: 879

SEQ ID NO: 886 - DNA, 949 bp, Homosapiens
ggaaagcgaggcaaattattatctcagcccatttctcagcatggacagttggcaaattttttgcaagctcatgaacatctcagctggttacatgaaattaatagccaagaattagaaaaggctcatgcaacacttctgggtttggcaaatatggaaactcgttactttgcaaagaagaaaacccttcttggcttgagtaaattggctgcattagcttcagacttttcagaggatatgctacaagaaaaaattgaagaaatggctgagcaggagcgctttctactgcatcaggagaccctacctgaacagctgctggcggagaaacagctaaatctcagtgcgatgccagtattgactgcaccacaactcattggtctatatatctgtgaagaaaatagaagagctaatgaatatgatttcaagaaagctttggacttgttggaatatattgatgaggaagaagatataaatataaatgatctaaaactggaaatcctttgcaaagctcttcagagagataactggtccagttctgatggcaaagatgatccaattgaagtatctaaagacagtatatttgtgaagatcttacagaaacttttaaaagatggcattcagctcagtgagtacttaccggaggtgaaagacctgctacaagcggatcagcttggaagcttaaagtccaatccttacttcgagtttgttttgaaagcaaattatgaatattatgttcagggacaaatataactttttctaaaaatggccattgtttatgaaatctgtataagtgtgtccttatacaaattttaggccataaacaagtgtaagtttgtacaatttcataacatgtatagctgagtttttatactttatatgtaggaagctaatataaaatagttatgtaactgtgattttggttttcagttatgtgacttgttttttccacctg

SEQ ID NO: 887 - protein, 198 aa, Homosapiens [sequence omitted]

SEQ ID NO: 888 - DNA, 681 bp, Homosapiens
tttgtctcaaaaaaaacaaacaaacaaacaaacaaaaaacaaactacaacttccttacaagacataatgacttcttttctccataaatgtctctagtattagttacatgattgtataatcttctaccttattttaacttgtcatagctatatatctgtgaagaaaatagaagagctaatgaatatgatttcaagaaagctttggacttgttggaatatattgatgaggaagaagatataaatataaatgatctaaaactggaaatcctttgcaaagctcttcagagagataactggtccagttctgatggcaaagatgatccaattgaagtatctaaagacagtatatttgtgaagatcttacagaaacttttaaaagatggcattcagctcagtgagtacttaccggaggtgaaagacctgctacaagcggatcagcttggaagcttaaagtccaatccttacttcgagtttgttttgaaagcaaattatgaatattatgttcagggacaaatataactttttctaaaaatggccattgtttatgaaatctgtataagtgtgtccttatacaaattttaggccataaacaagtgtaagtttgtacaatttcataacatgtatagctgagtttttatactttatatgtaggaagctaatataaaatagttatgtaactgtg

SEQ ID NO: 889 - protein, 123 aa, Homosapiens; identical to SEQ ID NO: 879

SEQ ID NO: 890 - DNA, 910 bp, Homosapiens
ggaaagcgaggcaaattattatctcagcccatttctcagcatggacagttggcaaattttttgcaagctcatgaacatctcagctggttacatgaaattaatagccaagaattagaaaaggctcatgcaacacttctgggtttggcaaatatggaaactcgttactttgcaaagaagaaaacccttcttggcttgagtaaattggctgcattagcttcagacttttcagaggatatgctacaagaaaaaattgaagaaatggctgagcaggagcgctttctactgcatcaggagaccctacctgaacagctgctggcggagaaacagctaaatctcagtgcgatgccagtattgactgcaccacaactcattggtctatatatctgtgaagaaaatagaagagctaatgaatatgatttcaagaaagctttggacttgttggaatatattgatgaggaagaagatataaatataaatgatctaaaactggaaatcctttgcaaagctcttcagagagataactggtccagttctgatggcaaagatgatccaattgaagtatctaaagacagtatatttgtgaagatcttacagaaacttttaaaagatggcattcagctcagtgagtacttaccggaggtgaaagacctgctacaagcggatcagcttggaagcttaaagtccaatccttacttcgagtttgttttgaaagcaaattatgaatattatgttcagggacaaatataactttttctaaaaatggccattgtttatgaaatctgtataagtgtgtccttatacaaattttaggccataaacaagtgtaagtttgtacaatttcataacatgtatagctgagtttttatactttatatgtaggaagctaatataaaatagttatgtaactgtg

SEQ ID NO: 891 - protein, 198 aa, Homosapiens [sequence omitted]

SEQ ID NO: 892 - DNA, 3746 bp, Homosapiens
acgtcatcatcgcgcgccatctcttcccttaggtgtttaagttccgcgcgcaggccaggctgcaacctgacggccagatccctcgctgtcctagtcgctgctccttggagtcatgttcccagccgccccttctccgcggaccccgggtaccgggtcccgaaggggcccgctggccggactcgggcccggctccacgccccggacggctagcaggaagggtctgcccctggggtctgcagtcagctccccagtgctcttctcgccggtcggccggcgtagctcgctaagctcgcggggaacaccaacacgaatgttcccacaccactccataactgagtctgtgaactatgatgtgaaaacgtttggatcttctcttcctgttaaagtcatggaagccctaacattggctgaagtcgatgaccagctgaccattaacatagatgaaggtggatgggcttgtctggtgtgcaaagagaagctcattatttggaagattgctctgtcacctattactaagttatccgtttgcaaagaacttcagctgccacctagtgatttccactggagtgccgacttagtggctctttcttactcttctccctcaggtgaagcacattctactcaggctgttgctgtcatggttgccaccagagaaggatctatccgctattggccaagccttgctggtgaagatacctacacagaggcttttgtagattcgggaggtgataagacttacagtttcctaacagcagtgcagggaggaagttttattttgtcttcatcaggaagccaactaattcggttgatacctgagagctcaggaaagattcatcagcatatcctgcctcaggggcaaggcatgctttcaggaattggtcgaaaagtttcttctctttttggaattttatctcctagtagtgatctcacactttcaagtgttctctgggatagagagagatcaagcttttatagcctgacgagttcaaacatcagtaaatgggaattagatgattcttcagaaaagcatgcatacagttgggatataaatagagccctgaaggaaaacattaccgatgctatttggggatctgaaagtaactatgaagctattaaagaaggagtcaacattcgatatttggacttgaagcaaaactgtgatgggctggtgattttggcagcagcatggcactcagcagacaatccatgtctcatctattactctctgataacaatagaagataatggttgccaaatgtcagatgcagttactgtagaagtcactcaatataatccaccttttcagtctgaagacctgattttgtgtcagttgacggtcccaaacttttcaaaccagactgcctatctgtataacgaaagtgctgtctatgtgtgctccacaggaactgggaaattttctcttccccaggagaaaattgtctttaatgcacaaggagatagtgttttaggtgctggtgcctgtggtggtgttcctatcattttttctagaaacagtggactggtgtctattacttcaagggaaaatgtgtctatattggcagaagacttggaagggtctttagcatcttcagttgctggaccaaacagtgagagtatgatttttgagaccactacaaagaatgaaactatagcccaggaagataaaatcaagttgctgaaagctgcctttctgcaatactgcagaaaagatttaggtcatgctcaaatggtggttgatgagctcttttcctctcactctgatttggattctgattctgaactagacagggcagttacccaaatcagtgtagacctgatggatgactacccagcatctgacccacggtgggctgagtctgtccctgaggaagcacctgggttcagcaatacgtcactgattatccttcaccagctagaagacaagatgaaagctcactcttttcttatggactttattcatcaagttggcttatttggacgtctaggcagttttccagttagagggacaccgatggccactcgactgttgctctgtgagcatgccgaaaagctgtcagccgccattgttctcaagaaccaccactcccggctttctgaccttgtcaacacagccatattgattgctttgaacaagagggagtatgaaatcccatccaacctgactcctgcagatgtctttttcagggaggtatcccaagtagataccatctgtgagtgcttactggagcatgaggagcaagtcttgagggatgcacctatggattccattgaatgggctgaagtggtgatcaatgtgaacaatattctcaaggatatgctgcaggctgctagtcattatcgccaaaatagaaactctttgtatagaagagaagaatcactagaaaaagaacctgaatatgttccatggacggcaacaagtggtcctggtggcatccgaacggtaataatacgccagcatgagattgtcctgaaggtggcttatccacaggcagacagcaacctccgaaacatcgtgaccgagcagctggtagccctgatcgattgcttcctggatggttatgtttctcagcttaagtctgtggataaatccagtaatcgggaaagatatgacaatctggagatggaatacctacagaaaagatcagatctcttatctcctcttctttcactaggccagtacctgtgggctgcttctctagcagagaaatactgtgactttgatatattggtacaaatgtgtgagcagactgacaaccagagccgactccagcgctacatgacccagtttgctgatcagaatttttcagactttctcttccgttggtatctggagaaaggaaagcgaggcaaattattatctcagcccatttctcagcatggacagttggcaaattttttgcaagctcatgaacatctcagctggttacatgaaattaatagccaagaattagaaaaggctcatgcaacacttctgggtttggcaaatatggaaactcgttactttgcaaagaagaaaacccttcttggcttgagtaaattggctgcattagcttcagacttttcagaggatatgctacaagaaaaaattgaagaaatggctgagcaggagcgctttctactgcatcaggagaccctacctgaacagctgctggcggagaaacagctaaatctcagtgcgatgccagtattgactgcaccacaactcattggtctatatatctgtgaagaaaatagaagagctaatgaatatgatttcaagaaagctttggacttgttggaatatattgatgaggaagaagatataaatataaatgatctaaaactggaaatcctttgcaaagctcttcagagagataactggtccagttctgatggcaaagatgatccaattgaagtatctaaagacagtatatttgtgaagatcttacagaaacttttaaaagatggcattcagctcagtgagtacttaccggaggtgaaagacctgctacaagcggatcagcttggaagcttaaagtccaatccttacttcgagtttgttttgaaagcaaattatgaatattatgttcagggacaaatataactttttctaaaaatggccattgtttatgaaatctgtataagtgtgtccttatacaaattttaggccataaacaagtgtaagtttgtacaatttcataacatgtatagctgagtttttatactttatatgtaggaagctaatataaaatagttatgtaactgtg

SEQ ID NO: 893 - protein, 1156 aa, Homosapiens; identical to SEQ ID NO: 18

SEQ ID NO: 894 - DNA, 802 bp, Homosapiens
aatacagtttccaaatatgagactgtttttactataaaaatacaactggccaggtgcagtggctcacgcctaaaatcccagctctttggatggccaaggcaggcggatcacttgaagtcaggagtttgagaccagcctggccaacagggtgaaatcttctctactaaaaatacaaaaattagccaggtgtggtgatggattcctgtaatcccagctactcaggaggctgaggcaggagaatcacttgaacctgggaggcagaagtttcagtgagctgagatcgtgccactgcaatccagcctgggtgacagagcaagactttgtctcaaaaaaaacaaacaaacaaacaaacaaaaaacaaactacaacttccttacaagacataatgacttcttttctccataaatgtctctagtattagttacatgattgtataatcttctaccttattttaacttgtcatagctatatatctgtgaagaaaatagaagagctaatgaatatgatttcaagaaagctttggacttgttggaatatattgatgaggaagaagatataaatataaatgatctaaaactggaaatcctttgcaaagctcttcagagagataagtaagtgctcgtggcattgcttctttggaaagtatagaaactgcttttcctctgctctcaccacatgacagtcaataacagaagacttctgtgaccagacgtgttgggatttcccacctcctacactgggcaaccagtgagttctgttggtgggcaccagctgaatgtcctttaatttagttcagtcctga

SEQ ID NO: 895 - protein, 49 aa, Homosapiens
LYICEENRRANEYDFKKALDLLEYIDEEEDININDLKLEILCKALQRDK

SEQ ID NO: 896 - DNA, 1890 bp, Homosapiens
tctgtttgttacagcttagatacactactctcttctaccagtcattacttccttggccatgttccgttggaactcagggctcctgcttacctcaattcttcacttctgctgaactctgtgttactgctgcctagaaaagggtgtatgtggttaggagtaataggtgagggtgaattcctgggggacatactgagttagctgcgggatcctgatatttggctgagagtctaagaaattgtttcctaggtaacttggtataattactctttggtcatgctaattttaaatgtcagatgaacaaatcaagagtaaattgggaaagttccataggaagcctaagcactcatcttaaccttacttagtcttctcttaactggacttttctagcccaggaagaggttaggatagttgttcttcagagtttggtctacctttaagttttcatgattcaatactcttaagatactttgttttaaaattactgaaagcctgattaaaaggagatgtgagaagaaagaatatttgtagaatggtgtttccagcagtgagtcagaatctaaaatatgcagagaagggaaatcagatgcatcttcaaaatactggatttgatgtgaaagattttctgtttgggtttgttctacagttatccgtttgcaaagaacttcagctgccacctagtgatttccactggagtgccgacttagtggctctttcttactcttctccctcaggtgaagcacattctactcaggtaggtgacttaaaagcttatttaaataaactttttacaacaaggacatcctaaagttagaggaatcatcctctttgattttgagatataactataaacctatagaaatcaagatattgtggtattggcaaagagagctacacacataggtcagtgtaacagaatagagaatacagttatagatccacataaaggcacccatttggtctttgatgaaggtgcaaaagcaattcagaaaggatggtttttgacgatgatttttctctgtatcaatgcatagtgtaggaacatttgtaattttaaaattacaaatgaccaatttgtattgtattgtattgaattttcccttaaacctcataccttgttacaaagattaatttgaaatgggtcatagatctaaatgtaaaacagtaaaacttttagaagaaaacagaagaaaatcatcatgacctgagattagacagagttcttggaaatcaccaaaagcatgatccataaaagaaaagtttgataaaattaataataaaattaaaataaaataaaaatttaaagcgttgctttgccaaagacaagaaaatgaagagacaagttacagagtaagaagaatttgcaaatcatgtatccagcaaaggacttgtatccagaatattttttaaaattctaaacttgataagaaaacaatgcagtttaaaaacaggggctaggacttgaacagacacttagtgaggatataaggatggcacataagcacatgaagagatgttcagcatcattagccattagaaaaatgcaaaccaaaacactggtgagttcttatttctgatttttcttgatcaaatagtaaattgtcctgtttctttgtatcattgccatcagactgctggtttttgggttcctcttttattgtgattgctgattgttgtgatcttgttttgaggctgttgctgtcatggttgccaccagagaaggatctatccgctattggccaagccttgctggtgaagatacctacacagaggcttttgtagattcgggaggtgataagacttacagtttcctaacagcagtgcaggttcacaaagaaacaaaatctggctgagcatggtggctcatgcgtgcagtctcaccactttgaatgg

SEQ ID NO: 897 - protein, 49 aa, Homosapiens
MVATREGSIRYWPSLAGEDTYTEAFVDSGGDKTYSFLTAVQVHKETKSG

SEQ ID NO: 898 - DNA, 464 bp, Homosapiens
ggagcgctggcgggggcgggatcgtgacgttaagggcggtgcccagtcagcgaggagctagaatgacttgtcagccacctttgagcaagaacttgcctggagtccaaatgtatggctattgaaggatagtaagcagacagcactaaaagtcatccattcgttatggatttagtcttaagaccctcatttgagagatgccttccctgtacctggaggaaagaaacatctttatctctgaagacacagggccacagagaagagtctgaacaaacaggctttaccaatttcccccagttgttaccgttagatcagacctttgtccagtcatatccttccacaagttgtccactcatcaaccctaagcataaaaatgcacaagtttccttgtttgtttgggtcttcatttccaagggctcctatgtcatgttaaacttttaaataaatttgcatgcttttctcttgtg

SEQ ID NO: 899 - protein, 91 aa, Homosapiens
MDLVLRPSFERCLPCTWRKETSLSLKTQGHREESEQTGFTNFPQLLPLDQTFVQSYPSTSCPLINPKHKNAQVSLFVWVFISKGSYVMLNF

SEQ ID NO: 900 - DNA, 483 bp, Homosapiens
ccgctgcagtgccgagcttccagggacgtgaagccggaaagccaggcgcccttcttgactgcgcctaggtggaactggccctccagcagcttgaacgtagcctcttttcacactggtagttcctgaacctcttgtgaaatgaaagatgttcctcattccaagctgaggacggagaaaagccgtaaagctgacactggtcttaagaccctcatttgagagatgccttccctgtacctggaggaaagaaacatctttatctctgaagacacagggccacagagaagagtctgaacaaacaggctttaccaatttcccccagttgttaccgttagatcagacctttgtccagtcatatccttccacaagttgtccactcatcaaccctaagcataaaaatgcacaagtttccttgtttgtttgggtcttcatttccaagggctcctatgtcatgttaaacttttaaataaatttgcatgcttttct

SEQ ID NO: 901 - protein, 41 aa, Homosapiens
PLQCRASRDVKPESQAPFLTAPRWNWPSSSLNVASFHTGSS

SEQ ID NO: 902 - DNA, 2058 bp, Homosapiens
gcataagtttccaaggctcatccacattgtagcatgtgtcagaattttattccttttttattgctgagagtttgtatttttccaataaaattattttatcttttccttttttttccttcttcagaatcccaaaattcttctcctagatgaagcaaccagtgcgctggatgccgaaaatgagtaccttgttcaagaagctctagatcgactgatggatggaagaacggtgttagttattgcccatcgtctgtccaccattaagaatgctaatatggttgctgttcttgaccaaggaaaaattactgaatatggaaaacatgaagagctgctttcaaaaccaaatgggatatacagaaaactaatgaacaaacaaagttttatttcagcataaggaagcaattactggtaaacaatatgagactttaatgcaaaacagtgttgcagaaaaaaaactcagagactatgaaatacataaaccatatatcaagttatttgaaaaatacctatttttttccaaagtgtgtaaaagattgttttgaaacgtacctgttctcaagatctttttattcagagttttaataattgtaactttttaaatgtctatagcactgaagttattttcaggttttgtattttcttttcttgtggaatattttaattaatatagcatggcacctcattttcttttgcctgctgttaaagattgaagctattgtcaaatgacaactttaaaaaggcaattataaataaaaagcctgattattttaggccagtttaccaatcactgtgtaattcttctggtagtattctacctacttttaagtctaattttacagatagaataatggaaattgaaaatttaaccctttattccgataatctcatgaagcaaacctaactatttaacatcagctggaaagaagggaacatttatattgcccatctcctgtgtcttcaaaggtgtgagagctgaggaatatgtgttcctatgggaactatgtttgaatatgtgcagttttcaacattttggcacatgaaagcctgacaagtttttaaaagggcagaagctttattttttgaacaggaaaacatgttttttaaattcacatgtttgtatgagtacttttgcgaagcaaggcatgaactgctaggtattattaagaatgaatgatttttgcatttaagttgtttgaaggcatgtattttgaaaaatatctgttacaaatttataatttcaagacaaattgaatcttattttataatacttttggaatttcattaataaggctaaaatttgaggaatataactaattttcagccttaagacatttaagtttggaagtccttgctattcaacagaataacaagaaaacttcagaatgtatcactctcctgaaaagaagatattaataagcccttttatttatggttatagttttatttatagtctcaaaattcctaaagcaatgctacaaccattgaatttgccatattttgtatcagtgctgttaatttgctgttgcctcaagaaaaagtgctttttctccatggatgaggctagaccctaagaagtaattaagtcaatgtaaatcaaatggaagttttcccatgaactaagcatttattagttccctgattagactggaagaagaaaccactatttcatgaaaagcatggaatattatattttattgttcataattaatgaataaaattgatatgaatgaatatagtgttctttgaattagtaaacagtacatctgtgacaatcatttttaacaagctctacttgtgttctttataaagtgtgattttcagaaagcaaacaacacaattacaaggttgaatctgaggaaaataatccttgtgccatagaagtatttacgaaattgcatttcattgttatgttttattttctgatacatgatgttcaattttatctttaggtaatattttatatcatagattaaaatttatagtgaactttatctgtgtctgtcactttttttttttttatgacccaggaaccaaagatgcagtctgtcatttcttataaaa

SEQ ID NO: 903 - protein, 62 aa, Homosapiens
MYHSPEKKILISPFIYGYSFIYSLKIPKAMLQPLNLPYFVSVLLICCCLKKKCFFSMDEARP

SEQ ID NO: 904 - DNA, 3927 bp, Homosapiens
cgcctggccggcgggctgaggcgtacgggtcgcacgcagcgccatgcgaggcccccctgcctggccgctgcggctgctcgagccaccgagccctgccgagccaggtcggctcctgccggtagcctgcgtgtgggccgcggccagccgcgttcccgggtccctatcgccgttcactggcctgaggccggcgcggctatggggcgcggggcccgcgctgctctggggcgttggagccgcgcgccgctggaggagcggctgccggggcgggggtccgggcgcctcgcggggcgtcctgggcctcgcgcggctcctggggctgtgggctcgcggccccggcagctgcaggtgcggggcttttgccgggccaggcgctcctcggctcccgcgcgcccggttcccgggcggtcccgcagccgctgcctgggcaggggacgaggcctggcggcgcgggccggcggcgcctcccggggacaaggggcggctgcgccccgcagcggccggactcccggaggcccggaagctcctggggctggcgtaccctgagcgccggaggctggcagctgcggttggatttctcacgatgtccagtgttatctccatgtctgcccctttcttcctggggaagatcattgatgtcatctataccaaccccactgtggactacagcgacaacctgacccgcctctgcctagggctcagtgccgtgtttctgtgtggtgctgccgccaatgccattcgtgtctacctcatgcaaacttcaggtcagcgcattgtgaataggctgagaacttcattattctcctccattctgaggcaggaggttgctttctttgacaagactcgcacaggagaattgattaaccgcctctcatcagacactgcactcctggggcgctcagtgactgaaaacctctcagatgggctcagggccggggcccaggcttccgtaggcatcagtatgatgttttttgtctcacctaatctggccacctttgttttgagcgtggtgcctccagtgtcaatcattgctgtaatttatgggcgatatctacggaaactgaccaaagtcactcaggattccctggcacaagccactcagctagctgaggaacgtattggaaatgtaagaactgttcgagcttttgggaaagaaatgactgaaatcgagaaatatgccagcaaagtggaccatgtaatgcagttagcaaggaaagaggcattcgcccgggctggtttctttggagcaactgggctctccggaaacctgatcgtgctttctgtcctgtacaaaggagggctgctgatgggcagtgcccacatgaccgtgggtgaactctcttccttcctaatgtatgctttctgggttggaataagcattggaggtctgagctctttctactcggagctgatgaaaggactgggtgcaggggggcgcctctgggagctcctggagagagagcccaagctgccttttaacgagggggtcatcttaaatgagaaaagcttccagggtgctttggagtttaagaacgtgcattttgcctatccagctcgcccagaggtgcccatatttcaggatttcagcctttccattccgtcaggatctgtcacggcactggttggcccaagtggttctggcaaatcaacagtgctttcactcctgctgaggttgtacgaccctgcttctggaactattagtcttgatggccatgacatccgtcagctaaacccagtgtggctgagatccaaaattgggacagtgagtcaggaacccattttgttttcttgctctattgctgagaacattgcttatggtgctgatgacccttcctctgtgaccgctgaggaaatccagagagtggctgaagtggccaatgcagtggccttcatccggaatttcccccaagggttcaacactgtggttggagaaaagggtgttctcctctcaggtgggcagaaacagcggattgcgattgcccgtgctctgctaaagaatcccaaaattcttctcctagatgaagcaaccagtgcgctggatgccgaaaatgagtaccttgttcaagaagctctagatcgactgatggatggaagaacggtgttagttattgcccatcgtctgtccaccattaagaatgctaatatggttgctgttcttgaccaaggaaaaattactgaatatggaaaacatgaagagctgctttcaaaaccaaatgggatatacagaaaactaatgaacaaacaaagttttatttcagcataaggaagcaattactggtaaacaatatgagactttaatgcaaaacagtgttgcagaaaaaaaactcagagactatgaaatacataaaccatatatcaagttatttgaaaaatacctatttttttccaaagtgtgtaaaagattgttttgaaacgtacctgttctcaagatctttttattcagagttttaataattgtaactttttaaatgtctatagcactgaagttattttcaggttttgtattttcttttcttgtggaatattttaattaatatagcatggcacctcattttcttttgcctgctgttaaagattgaagctattgtcaaatgacaactttaaaaaggcaattataaataaaaagcctgattattttaggccagtttaccaatcactgtgtaattcttctggtagtattctacctacttttaagtctaattttacagatagaataatggaaattgaaaatttaaccctttattccgataatctcatgaagcaaacctaactatttaacatcagctggaaagaagggaacatttatattgcccatctcctgtgtcttcaaaggtgtgagagctgaggaatatgtgttcctatgggaactatgtttgaatatgtgcagttttcaacattttggcacatgaaagcctgacaagtttttaaaagggcagaagctttattttttgaacaggaaaacatgttttttaaattcacatgtttgtatgagtacttttgcgaagcaaggcatgaactgctaggtattattaagaatgaatgatttttgcatttaagttgtttgaaggcatgtattttgaaaaatatctgttacaaatttataatttcaagacaaattgaatcttattttataatacttttggaatttcattaataaggctaaaatttgaggaatataactaattttcagccttaagacatttaagtttggaagtccttgctattcaacagaataacaagaaaacttcagaatgtatcactctcctgaaaagaagatattaataagcccttttatttatggttatagttttatttatagtctcaaaattcctaaagcaatgctacaaccattgaatttgccatattttgtatcagtgctgttaatttgctgttgcctcaagaaaaagtgctttttctccatggatgaggctagaccctaagaagtaattaagtcaatgtaaatcaaatggaagttttcccatgaactaagcatttattagttccctgattagactggaagaagaaaccactatttcatgaaaagcatggaatattatattttattgttcataattaatgaataaaattgatatgaatgaatatagtgttctttgaattagtaaacagtacatctgtgacaatcatttttaacaagctctacttgtgttctttataaagtgtgattttcagaaagcaaacaacacaattacaaggttgaatctgaggaaaataatccttgtgccatagaagtatttacgaaattgcatttcattgttatgttttattttctgatacatgatgttcaattttatctttaggtaatattttatatcatagattaaaatttatagtgaactttatctgtgtctgtcactttttttttttttatgacccaggaaccaaagatgcagtctgtcatttcttataaaa

SEQ ID NO: 905 - protein, 738 aa, Homosapiens
MRGPPAWPLRLLEPPSPAEPGRLLPVACVWAAASRVPGSLSPFTGLRPARLWGAGPALLWGVGAARRWRSGCRGGGPGASRGVLGLARLLGLWARGPGSCRCGAFAGPGAPRLPRARFPGGPAAAAWAGDEAWRRGPAAPPGDKGRLRPAAAGLPEARKLLGLAYPERRRLAAAVGFLTMSSVISMSAPFFLGKIIDVIYTNPTVDYSDNLTRLCLGLSAVFLCGAAANAIRVYLMQTSGQRIVNRLRTSLFSSILRQEVAFFDKTRTGELINRLSSDTALLGRSVTENLSDGLRAGAQASVGISMMFFVSPNLATFVLSVVPPVSIIAVIYGRYLRKLTKVTQDSLAQATQLAEERIGNVRTVRAFGKEMTEIEKYASKVDHVMQLARKEAFARAGFFGATGLSGNLIVLSVLYKGGLLMGSAHMTVGELSSFLMYAFWVGISIGGLSSFYSELMKGLGAGGRLWELLEREPKLPFNEGVILNEKSFQGALEFKNVHFAYPARPEVPIFQDFSLSIPSGSVTALVGPSGSGKSTVLSLLLRLYDPASGTISLDGHDIRQLNPVWLRSKIGTVSQEPILFSCSIAENIAYGADDPSSVTAEEIQRVAEVANAVAFIRNFPQGFNTVVGEKGVLLSGGQKQRIAIARALLKNPKILLLDEATSALDAENEYLVQEALDRLMDGRTVLVIAHRLSTIKNANMVAVLDQGKITEYGKHEELLSKPNGIYRKLMNKQSFISA

SEQ ID NO: 906 - DNA, 1987 bp, Homosapiens
gcataagtttccaaggctcatccacattgtagcatgtgtcagaattttattccttttttattgctgagagtttgtatttttccaataaaattattttatcttttccttttttttccttcttcagaatcccaaaattcttctcctagatgaagcaaccagtgcgctggatgccgaaaatgagtaccttgttcaagaagctctagatcgactgatggatggaagaacggtgttagttattgcccatcgtctgtccaccattaagaatgctaatatggttgctgttcttgaccaaggaaaaattactgaatatggaaaacatgaagagctgctttcaaaaccaaatgggatatacagaaaactaatgaacaaacaaagttttatttcagcataaggaagcaattactggtaaacaatatgagactttaatgcaaaacagtgttgcagaaaaaaaactcagagactatgaaatacataaaccatatatcaagttatttgaaaaatacctatttttttccaaagtgtgtaaaagattgttttgaaacgtacctgttctcaagatctttttattcagagttttaataattgtaactttttaaatgtctatagcactgaagttattttcaggttttgtattttcttttcttgtggaatattttaattaatatagcatggcacctcattttcttttgcctgctgttaaagattgaagctattgtcaaatgacaactttaaaaaggcaattataaataaaaagcctgattattttaggccagtttaccaatcactgtgtaattcttctggtagtattctacctacttttaagtctaattttacagatagaataatggaaattgaaaatttaaccctttattccgataatctcatgaagcaaacctaactatttaacatcagctggaaagaagggaacatttatattgcccatctcctgtgtcttcaaaggtgtgagagctgaggaatatgtgttcctatgggaactatgtttgaatatgtgcagttttcaacattttggcacatgaaagcctgacaagtttttaaaagggcagaagctttattttttgaacaggaaaacatgttttttaaattcacatgtttgtatgagtacttttgcgaagcaaggcatgaactgctaggtattattaagaatgaatgatttttgcatttaagttgtttgaaggcatgtattttgaaaaatatctgttacaaatttataatttcaagacaaattgaatcttattttataatacttttggaatttcattaataaggctaaaatttgaggaatataactaattttcagccttaagacatttaagtttggaagtccttgctattcaacagaataacaagaaaacttcagaatgtatcactctcctgaaaagaagatattaataagcccttttatttatggttatagttttatttatagtctcaaaattcctaaagcaatgctacaaccattgaatttgccatattttgtatcagtgctgttaatttgctgttgcctcaagaaaaagtgctttttctccatggatgaggctagaccctaagaagtaattaagtcaatgtaaatcaaatggaagttttcccatgaactaagcatttattagttccctgattagactggaagaagaaaccactatttcatgaaaagcatggaatattatattttattgttcataattaatgaataaaattgatatgaatgaatatagtgttctttgaattagtaaacagtacatctgtgacaatcatttttaacaagctctacttgtgttctttataaagtgtgattttcagaaagcaaacaacacaattacaaggttgaatctgaggaaaataatccttgtgccatagaagtatttacgaaattgcatttcattgttatgttttattttctgatacatgatgttcaattttatctttaggtaatattttatatcatagattaaaatttatagtgaacttt

SEQ ID NO: 907 - protein, 62 aa, Homosapiens; identical to SEQ ID NO: 903

SEQ ID NO: 908 - DNA, 3856 bp, Homosapiens
cgcctggccggcgggctgaggcgtacgggtcgcacgcagcgccatgcgaggcccccctgcctggccgctgcggctgctcgagccaccgagccctgccgagccaggtcggctcctgccggtagcctgcgtgtgggccgcggccagccgcgttcccgggtccctatcgccgttcactggcctgaggccggcgcggctatggggcgcggggcccgcgctgctctggggcgttggagccgcgcgccgctggaggagcggctgccggggcgggggtccgggcgcctcgcggggcgtcctgggcctcgcgcggctcctggggctgtgggctcgcggccccggcagctgcaggtgcggggcttttgccgggccaggcgctcctcggctcccgcgcgcccggttcccgggcggtcccgcagccgctgcctgggcaggggacgaggcctggcggcgcgggccggcggcgcctcccggggacaaggggcggctgcgccccgcagcggccggactcccggaggcccggaagctcctggggctggcgtaccctgagcgccggaggctggcagctgcggttggatttctcacgatgtccagtgttatctccatgtctgcccctttcttcctggggaagatcattgatgtcatctataccaaccccactgtggactacagcgacaacctgacccgcctctgcctagggctcagtgccgtgtttctgtgtggtgctgccgccaatgccattcgtgtctacctcatgcaaacttcaggtcagcgcattgtgaataggctgagaacttcattattctcctccattctgaggcaggaggttgctttctttgacaagactcgcacaggagaattgattaaccgcctctcatcagacactgcactcctggggcgctcagtgactgaaaacctctcagatgggctcagggccggggcccaggcttccgtaggcatcagtatgatgttttttgtctcacctaatctggccacctttgttttgagcgtggtgcctccagtgtcaatcattgctgtaatttatgggcgatatctacggaaactgaccaaagtcactcaggattccctggcacaagccactcagctagctgaggaacgtattggaaatgtaagaactgttcgagcttttgggaaagaaatgactgaaatcgagaaatatgccagcaaagtggaccatgtaatgcagttagcaaggaaagaggcattcgcccgggctggtttctttggagcaactgggctctccggaaacctgatcgtgctttctgtcctgtacaaaggagggctgctgatgggcagtgcccacatgaccgtgggtgaactctcttccttcctaatgtatgctttctgggttggaataagcattggaggtctgagctctttctactcggagctgatgaaaggactgggtgcaggggggcgcctctgggagctcctggagagagagcccaagctgccttttaacgagggggtcatcttaaatgagaaaagcttccagggtgctttggagtttaagaacgtgcattttgcctatccagctcgcccagaggtgcccatatttcaggatttcagcctttccattccgtcaggatctgtcacggcactggttggcccaagtggttctggcaaatcaacagtgctttcactcctgctgaggttgtacgaccctgcttctggaactattagtcttgatggccatgacatccgtcagctaaacccagtgtggctgagatccaaaattgggacagtgagtcaggaacccattttgttttcttgctctattgctgagaacattgcttatggtgctgatgacccttcctctgtgaccgctgaggaaatccagagagtggctgaagtggccaatgcagtggccttcatccggaatttcccccaagggttcaacactgtggttggagaaaagggtgttctcctctcaggtgggcagaaacagcggattgcgattgcccgtgctctgctaaagaatcccaaaattcttctcctagatgaagcaaccagtgcgctggatgccgaaaatgagtaccttgttcaagaagctctagatcgactgatggatggaagaacggtgttagttattgcccatcgtctgtccaccattaagaatgctaatatggttgctgttcttgaccaaggaaaaattactgaatatggaaaacatgaagagctgctttcaaaaccaaatgggatatacagaaaactaatgaacaaacaaagttttatttcagcataaggaagcaattactggtaaacaatatgagactttaatgcaaaacagtgttgcagaaaaaaaactcagagactatgaaatacataaaccatatatcaagttatttgaaaaatacctatttttttccaaagtgtgtaaaagattgttttgaaacgtacctgttctcaagatctttttattcagagttttaataattgtaactttttaaatgtctatagcactgaagttattttcaggttttgtattttcttttcttgtggaatattttaattaatatagcatggcacctcattttcttttgcctgctgttaaagattgaagctattgtcaaatgacaactttaaaaaggcaattataaataaaaagcctgattattttaggccagtttaccaatcactgtgtaattcttctggtagtattctacctacttttaagtctaattttacagatagaataatggaaattgaaaatttaaccctttattccgataatctcatgaagcaaacctaactatttaacatcagctggaaagaagggaacatttatattgcccatctcctgtgtcttcaaaggtgtgagagctgaggaatatgtgttcctatgggaactatgtttgaatatgtgcagttttcaacattttggcacatgaaagcctgacaagtttttaaaagggcagaagctttattttttgaacaggaaaacatgttttttaaattcacatgtttgtatgagtacttttgcgaagcaaggcatgaactgctaggtattattaagaatgaatgatttttgcatttaagttgtttgaaggcatgtattttgaaaaatatctgttacaaatttataatttcaagacaaattgaatcttattttataatacttttggaatttcattaataaggctaaaatttgaggaatataactaattttcagccttaagacatttaagtttggaagtccttgctattcaacagaataacaagaaaacttcagaatgtatcactctcctgaaaagaagatattaataagcccttttatttatggttatagttttatttatagtctcaaaattcctaaagcaatgctacaaccattgaatttgccatattttgtatcagtgctgttaatttgctgttgcctcaagaaaaagtgctttttctccatggatgaggctagaccctaagaagtaattaagtcaatgtaaatcaaatggaagttttcccatgaactaagcatttattagttccctgattagactggaagaagaaaccactatttcatgaaaagcatggaatattatattttattgttcataattaatgaataaaattgatatgaatgaatatagtgttctttgaattagtaaacagtacatctgtgacaatcatttttaacaagctctacttgtgttctttataaagtgtgattttcagaaagcaaacaacacaattacaaggttgaatctgaggaaaataatccttgtgccatagaagtatttacgaaattgcatttcattgttatgttttattttctgatacatgatgttcaattttatctttaggtaatattttatatcatagattaaaatttatagtgaacttt

SEQ ID NO: 909 - protein, 738 aa, Homosapiens; identical to SEQ ID NO: 905

SEQ ID NO: 910 - DNA, 3590 bp, Homosapiens
ggccggcgggctgaggcgtacgggtcgcacgcagcgccatgcgaggcccccctgcctggccgctgcggctgctcgagccaccgagccctgccgagccaggtcggctcctgccggtagcctgcgtgtgggccgcggccagccgcgttcccgggtccctatcgccgttcactggcctgaggccggcgcggctatggggcgcggggcccgcgctgctctggggcgttggagccgcgcgccgctggaggagcggctgccggggcgggggtccgggcgcctcgcggggcgtcctgggcctcgcgcggctcctggggctgtgggctcgcggccccggcagctgcaggtgcggggcttttgccgggccaggcgctcctcggctcccgcgcgcccggttcccgggcggtcccgcagccgctgcctgggcaggggacgaggcctggcggcgcgggccggcggcgcctcccggggacaaggggcggctgcgccccgcagcggccggactcccggaggcccggaagctcctggggctggcgtaccctgagcgccggaggctggcagctgcggttggatttctcacgatgtccagtgttatctccatgtctgcccctttcttcctggggaagatcattgatgtcatctataccaaccccactgtggactacagcgacaacctgacccgcctctgcctagggctcagtgccgtgtttctgtgtggtgctgccgccaatgccattcgtgtctacctcatgcaaacttcaggtcagcgcattgtgaataggctgagaacttcattattctcctccattctgaggcaggaggttgctttctttgacaagactcgcacaggagaattgattaaccgcctctcatcagacactgcactcctggggcgctcagtgactgaaaacctctcagatgggctcagggccggggcccaggcttccgtaggcatcagtatgatgttttttgtctcacctaatctggccacctttgttttgagcgtggtgcctccagtgtcaatcattgctgtaatttatgggcgatatctacggaaactgaccaaagtcactcaggattccctggcacaagccactcagctagctgaggaacgtattggaaatgtaagaactgttcgagcttttgggaaagaaatgactgaaatcgagaaatatgccagcaaagtggaccatgtaatgcagttagcaaggaaagaggcattcgcccgggctggtttctttggagcaactgggctctccggaaacctgatcgtgctttctgtcctgtacaaaggagggctgctgatgggcagtgcccacatgaccgtgggtgaactctcttccttcctaatgtatgctttctgggttggaataagcattggaggtctgagctctttctactcggagctgatgaaaggactgggtgcaggggggcgcctctgggagctcctggagagagagcccaagctgccttttaacgagggggtcatcttaaatgagaaaagcttccagggtgctttggagtttaagaacgtgcattttgcctatccagctcgcccagaggtgcccatatttcaggatttcagcctttccattccgtcaggatctgtcacggcactggttggcccaagtggttctggcaaatcaacagtgctttcactcctgctgaggttgtacgaccctgcttctggaactattagtcttgatggccatgacatccgtcagctaaacccagtgtggctgagatccaaaattgggacagtgagtcaggaacccattttgttttcttgctctattgctgagaacattgcttatggtgctgatgacccttcctctgtgaccgctgaggaaatccagagagtggctgaagtggccaatgcagtggccttcatccggaatttcccccaagggttcaacactgtggttggagaaaagggtgttctcctctcaggtgggcagaaacagcggattgcgattgcccgtgctctgctaaagaatcccaaaattcttctcctagatgaagcaaccagtgcgctggatgccgaaaatgagtaccttgttcaagaagctctagatcgactgatggatggaagaacggtgttagttattgcccatcgtctgtccaccattaagaatgctaatatggttgctgttcttgaccaaggaaaaattactgaatatggaaaacatgaagagctgctttcaaaaccaaatgggatatacagaaaactaatgaacaaacaaagttttatttcagcataaggaagcaattactggtaaacaatatgagactttaatgcaaaacagtgttgcagaaaaaaaactcagagactatgaaatacataaaccatatatcaagttatttgaaaaatacctatttttttccaaagtgtgtaaaagattgttttgaaacgtacctgttctcaagatctttttattcagagttttaataattgtaactttttaaatgtctatagcactgaagttattttcaggttttgtattttcttttcttgtggaatattttaattaatatagcatggcacctcattttcttttgcctgctgttaaagattgaagctattgtcaaatgacaactttaaaaaggcaattataaataaaaagcctgattattttaggccagtttaccaatcactgtgtaattcttctggtagtattctacctacttttaagtctaattttacagatagaataatggaaattgaaaatttaaccctttattccgataatctcatgaagcaaacctaactatttaacatcagctggaaagaagggaacatttatattgcccatctcctgtgtcttcaaaggtgtgagagctgaggaatatgtgttcctatgggaactatgtttgaatatgtgcagttttcaacattttggcacatgaaagcctgacaagtttttaaaagggcagaagctttattttttgaacaggaaaacatgttttttaaattcacatgtttgtatgagtacttttgcgaagcaaggcatgaactgctaggtattattaagaatgaatgatttttgcatttaagttgtttgaaggcatgtattttgaaaaatatctgttacaaatttataatttcaagacaaattgaatcttattttataatacttttggaatttcattaataaggctaaaatttgaggaatataactaattttcagccttaagacatttaagtttggaagtccttgctattcaacagaataacaagaaaacttcagaatgtatcactctcctgaaaagaagatattaataagcccttttatttatggttatagttttatttatagtctcaaaattcctaaagcaatgctacaaccattgaatttgccatattttgtatcagtgctgttaatttgctgttgcctcaagaaaaagtgctttttctccatggatgaggctagaccctaagaagtaattaagtcaatgtaaatcaaatggaagttttcccatgaactaagcatttattagttccctgattagactggaagaagaaaccactatttcatgaaaagcatggaatattatattttattgttcataattaatgaataaaattgatatgaatg

SEQ ID NO: 911 - protein, 738 aa, Homosapiens; identical to SEQ ID NO: 905

SEQ ID NO: 912 - DNA, 426 bp, Homosapiens
ttgatcagggattgaaaaacatatatagtcatactcatcaaccactggattaaaatcataatgccgcagaggaaatctacctagttaaaagcattgtaatttaactgaaatgtaatgctatctcataatttaaaaaaatataaaatacttcaatgttgattttaaagacaaatccacaaaataatacctcaccttcagccactcaataaatacaactttgatacgctactcacatactcccatatacttcaagtaatctctagattacttataatacctcatacaatgtaatgctatgtttaaaaaaaaaaaaaaaggaatctagacacagaccttacacctttcccaaaaactaatgtagagtgaattacagacctaatgtaaaacacaaaacaataaactcctagaaggcaacctaggagcaag

SEQ ID NO: 913 - DNA, 476 bp, Homosapiens
atgttggcggaagcggacccccctgtgccgtggaaactggcggtggccgcggccgccgagtcggtctgcgcagcctcctgcgttttctcgcttggatcttggcactgagaggcggtggccggcgggatggagaaaagtaggatgaacctgcccaaggggccggacacgctctgcttcgacaaggacgagttcatgaaggaagatttcgatgtcgatcattttgtgtctgactgtaggaagcgggtccagctggaagaactgagagatgacctggagctctactataaacttcttaaaacagccatggtcgaactcatcaacaaggattatgcagattttgtcaatctttcaacaaacttggttggcatggacaaagccctcaaccagctttctgtgcctttgggacaattacgagaagaggttctggtaagtttcccgaataacatcaaacagtttaccctaaagcatgatatgct

SEQ ID NO: 914 - protein, 115 aa, Homosapiens
MEKSRMNLPKGPDTLCFDKDEFMKEDFDVDHFVSDCRKRVQLEELRDDLELYYKLLKTAMVELINKDYADFVNLSTNLVGMDKALNQLSVPLGQLREEVLVSFPNNIKQFTLKHD

SEQ ID NO: 915 - DNA, 7825 bp, Homosapiens
atgttggcggaagcggacccccctgtgccgtggaaactggcggtggccgcggccgccgagtcggtctgcgcagcctcctgcgttttctcgcttggatcttggcactgagaggcggtggccggcgggatggagaaaagtaggatgaacctgcccaaggggccggacacgctctgcttcgacaaggacgagttcatgaaggaagatttcgatgtcgatcattttgtgtctgactgtaggaagcgggtccagctggaagaactgagagatgacctggagctctactataaacttcttaaaacagccatggtcgaactcatcaacaaggattatgcagattttgtcaatctttcaacaaacttggttggcatggacaaagccctcaaccagctttctgtgcctttgggacaattacgagaagaggttctgagccttagatcgtctgtcagtgaaggaattcgggcagttgatgaacgaatgtctaaacaagaggacattaggaaaaaaaagatgtgtgtattgaggcttatacaagttattcggtcagttgagaaaattgaaaaaatcttaaactctcaaagttctaaagaaacctctgcactagaagcaagcagcccccttttgactggacaaattttggagagaattgccacagaatttaatcagttacagtttcatgctgttcaaagcaaaggcatgcctcttttggacaaagtaagaccgcttcctaagtgtcacacattatagattttgtgtaaagactcagtcacattctccagatgataagagtaaaattaattctgaatttcatggaattggacatcttatatgatgtagacaattaatttatccaaagcccttaattggattttaaatccatgatgtttcctcaagattgacttcgtagcttaagaggaagcgtatagctggcattacagccatgttacagcagtcactggaaggtctcctattagaaggccttcagacgtctgacgtcgatataatacggcactgcttgcggacttacgccacgattgacaagacacgggacgcggaggccttagttggccaagtactagtgaaaccatacatagacgaggtctgtgtacctccttcaacaaacattcatgagcttctgttctgtctttgactctttactgggtgtgaggaagataagaagagagaacagagatctttctggaaagattctcagttcctacagtaccagctataaggaaggattggtctccatgggttatagttgggaagtaatgttacgatgccaggaattgggcgtgccgtctcaggtgtcctaggaatgctgcggctcaggcttcaagggcgagattcaagggcatccacgtgcttttaggtcaattttatgggaggcgatggttcctcagtaattgttaaaagaatgttttcaaatcactggtcttgtgggtggactaaggcaattaagcagtgacaacactgcagtgtacgaggaaggtgcagggagtgctgtgagtgtggaaaggtgtgtgagtggggtagacagtggtaccctcaagtcttcagggaataaatgacatttggcccaagtcttgaaaaatacagaggagtttgctggacgaggaaggtgagaggaggaatattcaaagatcaagggcttttatagcaaattagccaagtaataccttaaatctagaacttggctatgcagtatccttcacctagtaggatatagttaaaatgtaggaaacaagtatatcccacttctgagcagccagagtatagattgtgccatataaagttgctgatattcaacagtttctgacatacaaaaacagcagctttgtctgcttcaaactgagagaagtcactgagcccgtcctcggtgtttggggactttcctccagtgtcctgtcagtatgaatgttctgactgttagtaaatacaaagattatactcacatgatttcagggtgaaagtcttttattttttaaagtggaaagttgagactcccaatgataaaaatgaaatgtagggactcattttaataattattttggccttgttaagattactaaaaataaatgatatttcagttctctctgtttatatcatgttatattccatagctgtctctatgggggtgaaaaaattacatacattatttctttgtcaataagtgaaaaaatttttttgtgctttgggggacagggtctcactctgtcacgcaggctggggtgcagaggcatgatcatggctcactgtagcctcaacctcctgggctcaagcagtcctcctacctcagcctcccaattagctggaactacaggtacacaccaccatgcctggctaatgttttttttgtagagatgaggttttgccatgttgtccaaactaatcttgaactcctgagcgcaagtgatctgcctgccttggtctcccaaagtgctgggattacaggcgtgatccactgcgcccaaccgatgaaaatattttagtcactaatctattcctttttcacggaactgaatctagtgtgctaaattaaagaactatttgaactttcagtggcatattaaattcagtagccacattgtgttttatttaaactcagcttatcttgtcatatcattcttgtctcccaattttatcacaaaaaataaaataatgaactaatatattttcttctgtctttctctgcctcaaacccttccctaatctgaatgatggtagaaaaaaaggccaggatgaagacagtgaggagttgtggtggcgaatcatgtgctctgctttaaatctttttttaaaagttgttattttattttcagactcccagggaagcagatgagagtgcatggtttgtcagcccatgtctcccccacagttgtatctgtacagcctaatccaaggaagtagttttgaatgtgacctgttatttacttcactgtttagaaaatgtgtcacagggaggagggtgagtgtgaggaagcagatttgtaaagttttctttattgttttctctgaaatagatcgtttgtacttcccttttaaatgcttttttaaaaaatgatttttcttttaataggtgattatagagcagtttgttgaatctcatcccaatggccttcaggtcatgtataataaactcctggagtttgttcctcaccattgccgccttcttcgagaagtcacaggaggtgccatctccagtgaaaaaggcaatactgttcctggatatgactttttggtgaattctgtttggccacaaatagtacaaggattagaagaaaagttaccctcgctttttaatcctgggaatcccgatgcatttcatgagaaatataccataagtatggattttgtcagaagattggaacggcagtgtggatcacaggctagtgtaaagagattaagagcccatcctgcctatcacagcttcaataagaagtggaacttgcctgtttattttcaaataaggttggtcatctattcaccgcccccgccccgcacccttctaaaacagaattggaatgccagttaaggatgttgcctcagttagcggctccttttctctgatcatcataataagctttgggagacaaaattgaaagtggagaaagagatataagaagtattatggttgccaaagtctggcttgcatgacaaaaagataagttttcttttttggtaattggagagctcagaacacaagagttggaaggagctgactccaagcccagcctcattcccacccaccatgtcctcattcattgtgaaaagagaaagtaggagttatacagcagctctttttttccattttccctatttcatcgtctgcctcaaataatgaacctgtctcacatctgtttttgctcgtctgagatacttttcccctagagggaatggggagaagcagagctttaagtgttctttgcagctggttccatctattagtttatgagaagcctggtcattatttcagcctccctgatcgtctttgtgacatttgtaccctctattcaggaaaatggtgacatttttcttccaggtttcatgatgatatcacctttgtcaataagccattctataaaatacttgggggaaatttaggatgaacccttatcatacactgcattggaaaaacatgataagagtcatttttgcagattctcttgaatgaggtcatggtatgttcttccgtagaatggattttacttgaaatgctctttgaagaatcataggcttttttatttaaattgctggatgctttcattaattatgatgcagtcctttcccctagcgttctgaggaataattacagagagggaaatcaagaattaggtaccctgatgataattgcttgagatgattgagaatgtatgtaatgatctttttataatgaaatcacagttctcagaatgaagtagtaaggtgccctttcacttacaatactgtgttttatgctaaattttccaaggttgcatcatcatgtagttggtctctcagcaggaaattacggatttgttcatctaagatattaatgggatgcactggaaatagttggtatatgataatcaacatcaagccagggcaagaaacctttttgatttgtgagcaggatttaaaatagcaaagcatcattttataaaatgatactgctatgtagaaataatgtttacatttccccatctctttttgtcgtccaggtttggagttagattgctttagttatctaatgctgtcacctcacaaacatactcctctgcttcctgcctccaaactttcctggtccttttcctcagaccctgggacccatgcagcatcacctcactcttccatcccacccctgcacctcctggagctcccatgggctatttcagcccatgctcttggctctgccaggctgggccccttggtgacggcccagcttggcttcagctgcatctcccttccatttcagtttctctcaaagctggtaattggaccttaaactacattgaaactcagccagttccctgaaagtcttttttaccttcaccagatttcagccttaagccttcaaaggagctgattagccttttttaaaaaacctcttttatttaaaattcatgaaattttaaaaaaacacgtttgagttacggaagtgtagaacttgtctttagtacatttgtttttccatctaaaaagtaaattccattaagactttgtagaacttttctattgatttttatcaggtgttgagttgtttgctctgaaggatgacaaaaagttccgcaaacatgattagggtcagagttgcattgtcatcagattcatttcaaggtcatttgaagtaaacctaaagacagtggggtgtgatggttggacatttcctaagaagaaatattactctcagtaatagttttctgctcctggatctgactatatacccacatcccaatcaccttcaggaaaaaggccacctccccaccccagccaccaccacaattcttgtgaacacattttgtatcctctcactcttcctgagaccccactgtgtctacatttcatttgcacctacaggcatattggaaagtagatgaggacttagtatctcataggaagaaattaaatgcagatgtgatcaaaacagccccaaattataatgagtcagtggctgcctggaaactgcaggtgttagctctttaaatgctaaagcctaaatttcagtttgctgttctttttaaaattgaaatctttatagtacattcacatgtatatactgtattacatagtatatgctgaacacagtcttatgatgtggaatctacatagtagtattaaggtgcaagtagccctttcctgttcctgcactcctctcagacatgtgtatccacaagagacgggtgcacttaatgatgtttccaatacttcagagaaaaaaaacaataggcatcactattattatcgccattgttatttttatttaagtattattgtagacctgtgatgttcgtggaggaatatgtctagagaccttccccaggcctatatttaagaatttagaaatgtttgtatttggggttgcccttcttacatggatcctgttgagagtagaatgacattcgatgtgcacatgaaaaccacagcatggcttttcagatttcagcagaggttccctctcacttttggccattttccaagaagaaatatgatctgttgcttcattcctggaagtgactgcacagcagagctgtgtgaggggctggtcccctggctggggagcacacctaggccaagtgactcaggcagttgtaatcatgtatcactgtccctgctcacagacaggcagaacgtctctgtgaagtgcagggatcaaggctctgctgcatttctttggtcctttttcatttctatgcttttcagaattatcataaatatacataaaactttgtgtcccatgtctttggatagtactaaattatacctatttttccttattggaaaatagcatcaagcttccacattaatactgcatactagtccattgaatatatctcaggttccataagcatattccttcttttggccatttaggttgcttccagtttttccctgatataaacagtgctgtgccagctatcaggccttttctgtatcagggctaacttcctatattttgtttagattttgaaaaaaggcaggacttgggggtctgagattgagctctaggtgctggtttgctctcccaggtgcagagcaatcccatctcccttgttcccgtgctcagtgtcactgcctcctcttactgctgttcctgggctagtttccagtgctctcttatcccacttttccatctgtcacttgttccttctgtacctctcaactgcagcttgaaaagactagccttttgtaagcttcactgggcaattagagttcctttccttccatggggcagacgggacagctactggaaaccagccagctacaatggtacaggatagccttagtgtcttcagtgctcagctgtgttgggtagggctgctgctttttgtctcaagctgttctttttactcttcagacagttgcctttagctcagtctgtgaaccgctttgtaaaagcacattatgtactataaaaaataatttaatatcagttggataaattgatattgagcatgcatcagaattcattactagtaaggcaattagcaggtgacaaaagagcatgctagtaaagagatatatgaaattgcaagagttatatagttagaaaacaatgcctgcaaaagcagctagcttaaaaaaactatataacacatttgcctttcacaaagtcataaaaacatgtccatatccattattagaacagaagtctgtgacaggatgagctgaggtgccaggtgagccagctgtcatcagggaaaaaagaacgcacatctaggaagcgctggtacagacagccgtagaacccgaagggcaagtaccatggacgtgggagagggtcacagattagaagagcaccaagcagtgagttctagttttaactggccacttcctgtgatttttctcaagctgccaacacaggtacagaatgcagctttcttagcttggggacgtttaccttcctgtgatggtgttaagatagatgggttggaggaaccaaagttttatggccttgaagtgaatagaggatcataatcaggtgctgctcaccagcaacaacttcttgatggagacttaactggcagtttgtttaatttgagaaacatggggtaagttatgattcagaccagctgcaaataacagagaacccttatataacagtggcttagtcacgatttcttgttcagtt

SEQ ID NO: 916 - protein, 205 aa, Homosapiens [sequence omitted]

SEQ ID NO: 917 - DNA, 2935 bp, Homosapiens
atgttggcggaagcggacccccctgtgccgtggaaactggcggtggccgcggccgccgagtcggtctgcgcagcctcctgcgttttctcgcttggatcttggcactgagaggcggtggccggcgggatggagaaaagtaggatgaacctgcccaaggggccggacacgctctgcttcgacaaggacgagttcatgaaggaagatttcgatgtcgatcattttgtgtctgactgtaggaagcgggtccagctggaagaactgagagatgacctggagctctactataaacttcttaaaacagccatggtcgaactcatcaacaaggattatgcagattttgtcaatctttcaacaaacttggttggcatggacaaagccctcaaccagctttctgtgcctttgggacaattacgagaagaggttctgagccttagatcgtctgtcagtgaaggaattcgggcagttgatgaacgaatgtctaaacaagaggacattaggaaaaaaaagatgtgtgtattgaggcttatacaagttattcggtcagttgagaaaattgaaaaaatcttaaactctcaaagttctaaagaaacctctgcactagaagcaagcagcccccttttgactggacaaattttggagagaattgccacagaatttaatcagttacagtttcatgctgttcaaagcaaaggcatgcctcttttggacaaagtaagaccgcgtatagctggcattacagccatgttacagcagtcactggaaggtctcctattagaaggccttcagacgtctgacgtcgatataatacggcactgcttgcggacttacgccacgattgacaagacacgggacgcggaggccttagttggccaagtactagtgaaaccatacatagacgaggtgattatagagcagtttgttgaatctcatcccaatggccttcaggtcatgtataataaactcctggagtttgttcctcaccattgccgccttcttcgagaagtcacaggaggtgccatctccagtgaaaaaggcaatactgttcctggatatgactttttggtgaattctgtttggccacaaatagtacaaggattagaagaaaagttaccctcgctttttaatcctgggaatcccgatgcatttcatgagaaatataccataagtatggattttgtcagaagattggaacggcagtgtggatcacaggctagtgtaaagagattaagagcccatcctgcctatcacagcttcaataagaagtggaacttgcctgtttattttcaaataagatttagagaaatagcgggatccttagaagcagcacttacagatgtcctggaagatgccccagctgaaagtccgtattgccttttggcttctcatagaacttggagcagccttaggaggtgttggtcagatgagatgttcttgccattactggtgcatcgcctgtggagactcactctgcagattttggcacgatactctgtgtttgtcaatgagctttcactcaggcccatttctaatgaaagtcccaaggagatcaagaaacctttggtaactggtagcaaagaaccttccatcacccaaggaaacactgaagaccaaggaagtggtccttcggaaacaaagcctgtggtttccatttcccgcactcagctcgtgtatgtggttgcagacctggacaagcttcaggagcagcttccagaactcttggaaataatcaagccaaaacttgaaatgattggctttaagaatttttcttctatctcagcagccctggaggactcccagagctctttttcagcctgtgtgccctccttgagtagcaagatcatccaggatttaagtgactcttgcttcggtttcctaaaaagcgccctggaggttcccaggctttaccgaagaaccaataaggaggtcccaaccacagcttcctcctatgtggacagtgctctgaagcccttattccagcttcagagcggacacaaggataagctcaaacaagcaataattcagcagtggctagaaggcactctcagtgaaagcactcataagtactatgaaaccgtgtcagatgtattaaactctgtgaagaagatggaagagagcctgaaaaggctgaaacaagccagaaaaaccactcccgccaaccccgtcggtcccagtggtggcatgagcgacgacgacaaaatcaggctgcagttggccctagatgttgagtacttgggagagcagatacaaaagttgggactacaagcaagtgacataaaaagcttctcagctctcgcagagcttgttgctgctgccaaggaccaggcaacagcagagcagccttaagcatcttggaagatcccgaggttagattcttaagcaagagaagagttggacttccaggctgaaggggagaaagtgactctgttctcttagcaaccgtctgtagcaaagaagtgcttccagcatcactccagcaacacgcccatgcgtcttctctcagcgtatttgggtcttctttgcccaaaagaacacaaaagcctttttccattgtatggaagatagtttttaagacatttgaaactttctactatagtttacagaacaaattattttatttttattgtaaatcttagtgtggaagagctgatttctaaaatatgattaaagtaaatatatacctatgaatatcaagagtcgtctccctgagcctgtagttggaagtgacgactgtaatggaatgatgtcttgtatagaaatgcccttctctgaaataaagagaactcctgggctttctaaagaggctgcgggaagccatcctccactcccactgtgtgtgagagcagtgcttctgatcctgctgtcaccccgacctctggcaggagccggcgccagtaggaaagacctccttcctaaataaaagaagtgtctcccatga

SEQ ID NO: 918 - protein, 738 aa, Homosapiens; identical to SEQ ID NO: 22

SEQ ID NO: 919 - DNA, 825 bp, Homosapiens
agagtttgtagatgcaaatagaattgcctcttcctttgatttataaaaagtaactgaatatataaagtgcatatttatttcagcttccagaactcttggaaataatcaagccaaaacttgaaatgattggctttaagaatttttcttctatctcaggtaaaaatgaatcttgactaagcaaatctttgaataagaaatgatttaaaataaaatctcagagactgtagggtatatttaacattttcttctgtagttgtaaatccttggttgtttctctattctgtattataacttacctaaataagatgttttatttaattcatttgatctgatttattatagtacacaatgtaaatgctgtgacagtatttcaaatgaagttcatgtctgggcctgagcatgatgattaaatccagtctttaatctcaacagcagccctggaggactcccagagctctttttcagcctgtgtgccctccttgagtagcaagatcatccaggatttaagtgactcttgcttcggtttcctaaaaagcgccctggaggttcccaggctttaccgaagaaccaataaggaggtcccaaccacagcttcctcctatgtggacagtgctctgaagcccttattccagcttcagagcggacacaaggataagctcaaacaagcaataattcagcagtggctagaaggcactctcagtgaaagcactcataagtaagtaaattaaaagcagaccttgtgggccttgcttagaagagtctgcggcagaaacccccaaggcaatcaagcactgcgtatggataaggcagtgagactgcctagca

SEQ ID NO: 920 - protein, 102 aa, Homosapiens
IQSLISTAALEDSQSSFSACVPSLSSKIIQDLSDSCFGFLKSALEVPRLYRRTNKEVPTTASSYVDSALKPLFQLQSGHKDKLKQAIIQQWLEGTLSESTHK

SEQ ID NO: 921 - DNA, 508 bp, Homosapiens
cctgtgcatctttatctcctaccatcatcattccaggaggtcccaaccacagcttcctcctatgtggacagtgctctgaagcccttattccagcttcagagcggacacaaggataagctcaaacaagcaataattcagcagtggctagaaggcactctcagtgaaagcactcataagtactatgaaaccgtgtcagatgtattaaactctgtgaagaagatggaagagagcctgaaaaggctgaaacaagccagaaaaaccactcccgccaaccccgtcggtcccagtggtggcatgagcgacgacgacaaaatcaggctgcagttggccctagatgttgagtacttgggagagcaggtaacccatcagccgccggcagctccagcgagcctgaaaccaaattctgagagccgggcagttacttggtggctcgcgtgatcccagagatgctgtcgcagtggctagggaattgcttcctgtgttaagactaggagtcggggctcccaaa

SEQ ID NO: 922 - protein, 72 aa, Homosapiens
MEESLKRLKQARKTTPANPVGPSGGMSDDDKIRLQLALDVEYLGEQVTHQPPAAPASLKPNSESRAVTWWLA

SEQ ID NO: 923 - DNA, 2671 bp, Homosapiens
aagacttcctggaagaggtcccagcgtgagtgtcgcttctggcatctgtccttctggccagcctgtggtctggccaagtgatgtaaccctcctctccagcctgtgcacaggcagcctgggaacagctccatccccacccctcagctataaatagggcatcgtgacccggccgggggaagaagctgccgttgttctgggtactacagcagaagggtatgcggaagcgagcaccccagtctgagatggctcctgccggtgtgagcctgagggccaccatcctctgcctcctggcctgggctggcctggctgcaggtgaccgggtgtacatacaccccttccacctcgtcatccacaatgagagtacctgtgagcagctggcaaaggccaatgccgggaagcccaaagaccccaccttcatacctgctccaattcaggccaagacatcccctgtggatgaaaaggccctacaggaccagctggtgctagtcgctgcaaaacttgacaccgaagacaagttgagggccgcaatggtcgggatgctggccaacttcttgggcttccgtatatatggcatgcacagtgagctatggggcgtggtccatggggccaccgtcctctccccaacggctgtctttggcaccctggcctctctctatctgggagccttggaccacacagctgacaggctacaggcaatcctgggtgttccttggaaggacaagaactgcacctcccggctggatgcgcacaaggtcctgtctgccctgcaggctgtacagggcctgctagtggcccagggcagggctgatagccaggcccagctgctgctgtccacggtggtgggcgtgttcacagccccaggcctgcacctgaagcagccgtttgtgcagggcctggctctctatacccctgtggtcctcccacgctctctggacttcacagaactggatgttgctgctgagaagattgacaggttcatgcaggctgtgacaggatggaagactggctgctccctgatgggagccagtgtggacagcaccctggctttcaacacctacgtccacttccaagggaagatgaagggcttctccctgctggccgagccccaggagttctgggtggacaacagcacctcagtgtctgttcccatgctctctggcatgggcaccttccagcactggagtgacatccaggacaacttctcggtgactcaagtgcccttcactgagagcgcctgcctgctgctgatccagcctcactatgcctctgacctggacaaggtggagggtctcactttccagcaaaactccctcaactggatgaagaaactatctccccggaccatccacctgaccatgccccaactggtgctgcaaggatcttatgacctgcaggacctgctcgcccaggctgagctgcccgccattctgcacaccgagctgaacctgcaaaaattgagcaatgaccgcatcagggtgggggaggtgctgaacagcattttttttgagcttgaagcggatgagagagagcccacagagtctacccaacagcttaacaagcctgaggtcttggaggtgaccctgaaccgcccattcctgtttgctgtgtatgatcaaagcgccactgccctgcacttcctgggccgcgtggccaacccgctgagcacagcatgaggccagggccccagaacacagtgcctggcaaggcctctgcccctggcctttgaggcaaaggccagcagcagataacaaccccggacaaatcagcgatgtgtcacccccagtctcccaccttttcttctaatgagtcgactttgagctggaaagcagccgtttctccttggtctaagtgtgctgcatggagtgagcagtagaagcctgcagcggcacaaatgcacctcccagtttgctgggtttattttagagaatgggggtggggaggcaagaaccagtgtttagcgcgggactactgttccaaaaagaattccaaccgaccagcttgtttgtgaaacaaaaaagtgttcccttttcaagttgagaacaaaaattgggttttaaaattaaagtatacatttttgcattgccttcggtttgtatttagtgtcttgaatgtaagaacatgacctccgtgtagtgtctgtaataccttagttttttccacagatgcttgtgatttttgaacaatacgtgaaagatgcaagcacctgaatttctgtttgaatgcggaaccatagctggttatttctcccttgtgttagtaataaacgtcttgccacaataagcctccaaaaattttatctttcatttagcagccaaacagatgtatacaattcagcagatagactgtgcaaacgaaagtgctttcctggactttggatggaatttccatgggaggtctgagccagtacttagcagtcctttgaagttttaggtgatgcttttctctggacacttccattggtaagcagtggtggccatctgtgtgatggacagggggcgggaagagggtgacagggaaggccccataccccatgtggcacctgggaaaggaaccaggcagatgggacttcttccgtcctggtgacacagggccagactgctgctggtattgtgccccgggagtggaaggtagagaaataaatcttcacaaataaatatttgcaattttcccc

SEQ ID NO: 924 - protein, 485 aa, Homosapiens; identical to SEQ ID NO: 24

SEQ ID NO: 925 - DNA, 1246 bp, Homosapiens
agggtatgcggaagcgagcaccccagtctgagatggctcctgccggtgtgagcctgagggccaccatcctctgcctcctggcctgggctggcctggctgcaggtgaccgggtgtacatacaccccttccacctcgtcatccacaatgagagtacctgtgagcagctggcaaaggccaatgccgggaagcccaaagaccccaccttcatacctgctccaattcaggccaagacatcccctgtggatgaaaaggccctacaggaccagctggtgctagtcgctgcaaaacttgacaccgaagacaagttgagggccgcaatggtcgggatgctggccaacttcttgggcttccgtatatatggcatgcacagtgagctatggggcgtggtccatggggccaccgtcctctccccaacggctgtctttggcaccctggcctctctctatctgggagccttggaccacacagctgacaggctacaggcaatcctgggtgttccttggaaggacaagaactgcacctcccggctggatgcgcacaaggtcctgtctgccctgcaggctgtacagggcctgctagtggcccagggcagggctgatagccgcgtggccaacccgctgagcacagcatgaggccagggccccagaacacagtgcctggcaaggcctctgcccctggcctttgaggcaaaggccagcagcagataacaaccccggacaaatcagcgatgtgtcacccccagtctcccaccttttcttctaatgagtcgactttgagctggaaagcagccgtttctccttggtctaagtgtgctgcatggagtgagcagtagaagcctgcagcggcacaaatgcacctcccagtttgctgggtttattttagagaatgggggtggggaggcaagaaccagtgtttagcgcgggactactgttccaaaaagaattccaaccgaccagcttgtttgtgaaacaaaaaagtgttcccttttcaagttgagaacaaaaattgggttttaaaattaaagtatacatttttgcattgccttcggtttgtatttagtgtcttgaatgtaagaacatgacctccgtgtagtgtctgtaataccttagttttttccacagatgcttgtgatttttgaacaatacgtgaaagatgcaagcacctgaatttctgtttgaatgcggaaccatagctggttatttctcccttgtgttagtaataaacgtcttgccacaataagcctcca

SEQ ID NO: 926 - protein, 208 aa, Homosapiens
MRKRAPQSEMAPAGVSLRATILCLLAWAGLAAGDRVYIHPFHLVIHNESTCEQLAKANAGKPKDPTFIPAPIQAKTSPVDEKALQDQLVLVAAKLDTEDKLRAAMVGMLANFLGFRIYGMHSELWGVVHGATVLSPTAVFGTLASLYLGALDHTADRLQAILGVPWKDKNCTSRLDAHKVLSALQAVQGLLVAQGRADSRVANPLSTA

SEQ ID NO: 927 - DNA, 2286 bp, Homosapiens
aagacttcctggaagaggtcccagcgtgagtgtcgcttctggcatctgtccttctggccagcctgtggtctggccaagtgatgtaaccctcctctccagcctgtgcacaggcagcctgggaacagctccatccccacccctcagctataaatagggcatcgtgacccggccgggggaagaagctgccgttgttctgggtactacagcagaagggtatgcggaagcgagcaccccagtctgagatggctcctgccggtgtgagcctgagggccaccatcctctgcctcctggcctgggctggcctggctgcaggtgaccgggtgtacatacaccccttccacctcgtcatccacaatgagagtacctgtgagcagctggcaaaggccaatgccgggaagcccaaagaccccaccttcatacctgctccaattcaggccaagacatcccctgtggatgaaaaggccctacaggaccagctggtgctagtcgctgcaaaacttgacaccgaagacaagttgagggccgcaatggtcgggatgctggccaacttcttgggcttccgtatatatggcatgcacagtgagctatggggcgtggtccatggggccaccgtcctctccccaacggctgtctttggcaccctggcctctctctatctgggagccttggaccacacagctgacaggctacaggcaatcctgggtgttccttggaaggacaagaactgcacctcccggctggatgcgcacaaggtcctgtctgccctgcaggctgtacagggcctgctagtggcccagggcagggctgatagccaggcccagctgctgctgtccacggtggtgggcgtgttcacagccccaggcctgcacctgaagcagccgtttgtgcagggcctggctctctatacccctgtggtcctcccacgctctctggacttcacagaactggatgttgctgctgagaagattgacaggttcatgcaggctgtgacaggatggaagactggctgctccctgatgggagccagtgtggacagcaccctggctttcaacacctacgtccacttccaagggaagatgaagggcttctccctgctggccgagccccaggagttctgggtggacaacagcacctcagtgtctgttcccatgctctctggcatgggcaccttccagcactggagtgacatccaggacaacttctcggtgactcaagtgcccttcactgagagcgcctgcctgctgctgatccagcctcactatgcctctgacctggacaaggtggagggtctcactttccagcaaaactccctcaactggatgaagaaactatctccccggaccatccacctgaccatgccccaactggtgctgcaaggatcttatgacctgcaggacctgctcgcccaggctgagctgcccgccattctgcacaccgagctgaacctgcaaaaattgagcaatgaccgcatcagggtgggggaggtgctgaacagcattttttttgagcttgaagcggatgagagagagcccacagagtctacccaacagcttaacaagcctgaggtcttggaggtgaccctgaaccgcccattcctgtttgctgtgtatgatcaaagcgccactgccctgcacttcctgggccgcgtggccaacccgctgagcacagcatgaggccagggccccagaacacagtgcctggcaaggcctctgcccctggcctttgaggcaaaggccagcagcagataacaaccccggacaaatcagcgatgtgtcacccccagtctcccaccttttcttctaatgagtcgactttgagctggaaagcagccgtttctccttggtctaagtgtgctgcatggagtgagcagtagaagcctgcagcggcacaaatgcacctcccagtttgctgggtttattttagagaatgggggtggggaggcaagaaccagtgtttagcgcgggactactgttccaaaaagaattccaaccgaccagcttgtttgtgaaacaaaaaagtgttcccttttcaagttgagaacaaaaattgggttttaaaattaaagtatacatttttgcattgccttcggtttgtatttagtgtcttgaatgtaagaacatgacctccgtgtagtgtctgtaataccttagttttttccacagatgcttgtgatttttgaacaatacgtgaaagatgcaagcacctgaatttctgtttgaatgcggaaccatagctggttatttctcccttgtgttagtaataaacgtcttgccacaataagcctcc

SEQ ID NO: 928 - protein, 485 aa, Homosapiens; identical to SEQ ID NO: 24

SEQ ID NO: 929 - DNA, 472 bp, Homosapiens
gtctacccaacagcttaacaagcctgaggtcttggaggtgaccccgctgagcacagcatgaggccagggccccagaacacagtgcctggcaaggcctctgcccctggcctttgaggcaaaggccagcagcagataacaaccccggacaaatcagcgatgtgtcacccccagtctcccaccttttcttctaatgagtcgactttgagctggaaagcagccgtttctccttggtctaagtgtgctgcatggagtgagcagtagaagcctgcagcggcacaaatgcacctcccagtttgctgggtttattttagagaatgggggtggggaggcaagaaccagtgtttagcgcgggactactgttccaaaaagaattccaaccgaccagcttgtttgtgaaacaaaaaagtgttcccttttcaagttgagaacaaaaattgggttttaaaattaaagtatacatttttgcattgcc

SEQ ID NO: 930 - protein, 38 aa, Homosapiens
MHLPVCWVYFREWGWGGKNQCLARDYCSKKNSNRPACL

SEQ ID NO: 931 - DNA, 1043 bp, Homosapiens
agggtatgcggaagcgagcaccccagtctgagatggctcctgccggtgtgagcctgagggccaccatcctctgcctcctggcctgggctggcctggctgcaggtgaccgggtgtacatacaccccttccacctcgtcatccacaatgagagtacctgtgagcagctggcaaaggccaatgccgggaagcccaaagaccccaccttcatacctgctccaattcaggccaagacatcccctgtggatgaaaaggccctacaggaccagctggtgctagtcgctgcaaaacttgacaccgaagacaagttgagggccgcaatggtcgggatgctggccaacttcttgggcttccgtatatatggcatgcacagtgagctatggggcgtggtccatggggccaccgtcctctccccaacggctgtctttggcaccctggcctctctctatctgggagccttggaccacacagctgacaggctacaggcaatcctgggtgttccttggaaggacaagaactgcacctcccggctggatgcgcacaaggtcctgtctgccctgcaggctgtacagggcctgctagtggcccagggcagggctgatagccgcgtggccaacccgctgagcacagcatgaggccagggccccagaacacagtgcctggcaaggcctctgcccctggcctttgaggcaaaggccagcagcagataacaaccccggacaaatcagcgatgtgtcacccccagtctcccaccttttcttctaatgagtcgactttgagctggaaagcagccgtttctccttggtctaagtgtgctgcatggagtgagcagtagaagcctgcagcggcacaaatgcacctcccagtttgctgggtttattttagagaatgggggtggggaggcaagaaccagtgtttagcgcgggactactgttccaaaaagaattccaaccgaccagcttgtttgtgaaacaaaaaagtgttcccttttcaagttgagaacaaaaattgggttttaaaattaaagtatacatttttgcattgcc

SEQ ID NO: 932 - protein, 208 aa, Homosapiens; identical to SEQ ID NO: 926

SEQ ID NO: 933 - DNA, 2084 bp, Homosapiens
aagacttcctggaagaggtcccagcgtgagtgtcgcttctggcatctgtccttctggccagcctgtggtctggccaagtgatgtaaccctcctctccagcctgtgcacaggcagcctgggaacagctccatccccacccctcagctataaatagggcatcgtgacccggccgggggaagaagctgccgttgttctgggtactacagcagaagggtatgcggaagcgagcaccccagtctgagatggctcctgccggtgtgagcctgagggccaccatcctctgcctcctggcctgggctggcctggctgcaggtgaccgggtgtacatacaccccttccacctcgtcatccacaatgagagtacctgtgagcagctggcaaaggccaatgccgggaagcccaaagaccccaccttcatacctgctccaattcaggccaagacatcccctgtggatgaaaaggccctacaggaccagctggtgctagtcgctgcaaaacttgacaccgaagacaagttgagggccgcaatggtcgggatgctggccaacttcttgggcttccgtatatatggcatgcacagtgagctatggggcgtggtccatggggccaccgtcctctccccaacggctgtctttggcaccctggcctctctctatctgggagccttggaccacacagctgacaggctacaggcaatcctgggtgttccttggaaggacaagaactgcacctcccggctggatgcgcacaaggtcctgtctgccctgcaggctgtacagggcctgctagtggcccagggcagggctgatagccaggcccagctgctgctgtccacggtggtgggcgtgttcacagccccaggcctgcacctgaagcagccgtttgtgcagggcctggctctctatacccctgtggtcctcccacgctctctggacttcacagaactggatgttgctgctgagaagattgacaggttcatgcaggctgtgacaggatggaagactggctgctccctgatgggagccagtgtggacagcaccctggctttcaacacctacgtccacttccaagggaagatgaagggcttctccctgctggccgagccccaggagttctgggtggacaacagcacctcagtgtctgttcccatgctctctggcatgggcaccttccagcactggagtgacatccaggacaacttctcggtgactcaagtgcccttcactgagagcgcctgcctgctgctgatccagcctcactatgcctctgacctggacaaggtggagggtctcactttccagcaaaactccctcaactggatgaagaaactatctccccggaccatccacctgaccatgccccaactggtgctgcaaggatcttatgacctgcaggacctgctcgcccaggctgagctgcccgccattctgcacaccgagctgaacctgcaaaaattgagcaatgaccgcatcagggtgggggaggtgctgaacagcattttttttgagcttgaagcggatgagagagagcccacagagtctacccaacagcttaacaagcctgaggtcttggaggtgaccctgaaccgcccattcctgtttgctgtgtatgatcaaagcgccactgccctgcacttcctgggccgcgtggccaacccgctgagcacagcatgaggccagggccccagaacacagtgcctggcaaggcctctgcccctggcctttgaggcaaaggccagcagcagataacaaccccggacaaatcagcgatgtgtcacccccagtctcccaccttttcttctaatgagtcgactttgagctggaaagcagccgtttctccttggtctaagtgtgctgcatggagtgagcagtagaagcctgcagcggcacaaatgcacctcccagtttgctgggtttattttagagaatgggggtggggaggcaagaaccagtgtttagcgcgggactactgttccaaaaagaattccaaccgaccagcttgtttgtgaaacaaaaaagtgttcccttttcaagttgagaacaaaaattgggttttaaaattaaagtatacatttttgcattgcc

SEQ ID NO: 934 - protein, 485 aa, Homosapiens; identical to SEQ ID NO: 24

SEQ ID NO: 935 - DNA, 2362 bp, Homosapiens; identical to SEQ ID NO: 25

SEQ ID NO: 936 - protein, 690 aa, Homosapiens; identical to SEQ ID NO: 26

SEQ ID NO: 937 - DNA, 2611 bp, Homosapiens
gtggccctctgagctgttccttcttgaccggcacacacagctcgcttcttcactttcttttccatccactgccggacccaagccagccttccagggagcagccatgccttacctctaccgggccccagggcctcaggcacacccggttcccaaggacgcccggatcacccactcctcaggccagagctttgagcaaatgaggcaggagtgcctgcagagaggcaccctgtttgaggatgcagacttcccagccagcaattcctccctgttctacagtgagaggccgcagatcccctttgtgtggaaacgaccaggggaaatcgtgaaaaacccagaattcattcttggaggggccaccaggactgatatctgccagggagagctgggagactgctggctattagccgccatcgcctcccttacgcttaatcaaaaagcactggccagagtcatcccccaggaccaaagctttggccctggttatgccgggatattccatttccagttctggcagcacagtgagtggctggacgtggtgatcgatgaccgcctgcccaccttcagggaccgcttggttttcctccactctgccgaccacaacgagttctggagcgccttgctggaaaaagcctacgccaagctaaatgggagctatgaagctctgaagggaggcagcgccatcgaggccatggaagacttcactgggggtgtggcagagaccttccaaactaaagaggcccccgagaacttctatgagattctagagaaggctttgaagagaggctccctgctgggctgcttcattgataccagaagtgctgcagaatctgaggcccggacgccgtttggtcttattaagggtcatgcctacagtgtaacgggaattgaccaggtaagcttccgaggccagagaatcgagctcatccgaatccggaacccttggggccaggttgagtggaacgggtcgtggagcgacaggatggcatttaaggacttcaaggcccactttgataaagtggagatctgcaacctcactcccgatgccctggaggaagacgcgatccacaaatgggaggtgacggtccatcagggaagctgggttcgcggctccacggctgggggctgccgcaatttcctggataccttttggaccaatccacaaataaaattgtctctgactgagaaagatgaggggcaggaggagtgtagtttccttgtagccctgatgcagaaagatagaaggaaactcaagagatttggtgccaatgtgctgacaatcggctatgccatttatgagtgccctgacaaagacgaacacctgaacaaagacttcttcagataccacgcttctcgggccagaagcaagacgttcatcaacctgagagaagtctccgaccggttcaagctgccccctggggagtacatcctgattcccagcacttttgagccccaccaggaagctgatttctgtctgagaatcttttcagagaaaaaagccattacccgggatatggatggaaatgtagacattgaccttcctgagcctccaaagccaactccacctgaccaggagacagaggaggagcagcggtttcgggctctgtttgaacaagtcgctggtgaggacatggaggtgacagcagaggaacttgagtatgttttaaatgctgtgctgcaaaagaaaaaggacatcaaattcaagaagctaagcctgatctcctgtaaaaacatcatttccctgatggacaccagcggcaatgggaagctggagtttgatgaattcaaagtgttctgggacaagctgaagcagtggattaaccttttccttcggtttgatgctgacaagtccggcaccatgtctacctatgaactacggactgcactgaaagctgcaggctttcagctgagcagccacctcctgcagctgattgtgctcaggtatgcggatgaggagctccagctggacttcgatgacttcctcaactgcctggtccggctggagaatgcgagccgggtgttccaggctctcagtacaaagaacaaggagttcattcatctcaatataaatgagttcatccatttgacaatgaacatctgaggctgccttgtagagatgcagcctgcccagctgaatcttggcttctggaccttgaccttcagaacttctcttggtgtggaaccattacgcccagggttcactcccctctcatcgtccggccttctcccttcatcttgatctgggaagaatgaaatgaactcagctacactctctgattttgtgctactcctttgtaaagtcactgccttaagggggctgatggcgccacctgtgccttacatccaggttcaggcatcactagctttcccacactctactttccttatttccttccattaagaattactcagagttctaacgcacagaatcctgacttccatgtagctccagtcattgtgatcagacatcctttataaaacatgtttttataaatgtgtatgtggaataagatgaggaggaaaaggagtgaggtcataatttagcatttctgcatcataagtgtgcttccttatcagggaagacatcaggtagttccgataattggacaagagt

SEQ ID NO: 938 - protein, 664 aa, Homosapiens; identical to SEQ ID NO: 28

SEQ ID NO: 939 - DNA, 2125 bp, Homosapiens
agctcgcttcttcactttcttttccatccactgccggacccaagccagccttccagggagcagccatgccttacctctaccgggccccagggcctcaggcacacccggttcccaaggacgcccggatcacccactcctcaggccagagctttgagcaaatgaggcaggagtgcctgcagagaggcaccctgtttgaggatgcagacttcccagccagcaattcctccctgttctacagtgagaggccgcagatcccctttgtgtggaaacgaccagggttctggcagcacagtgagtggctggacgtggtgatcgatgaccgcctgcccaccttcagggaccgcttggttttcctccactctgccgaccacaacgagttctggagcgccttgctggaaaaagcctacgccaagctaaatgggagctatgaagctctgaagggaggcagcgccatcgaggccatggaagacttcactgggggtgtggcagagaccttccaaactaaagaggcccccgagaacttctatgagattctagagaaggctttgaagagaggctccctgctgggctgcttcattgataccagaagtgctgcagaatctgaggcccggacgccgtttggtcttattaagggtcatgcctacagtgtaacgggaattgaccaggtaagcttccgaggccagagaatcgagctcatccgaatccggaacccttggggccaggttgagtggaacgggtcgtggagcgacagttctccggagtggcgttctgttggtccagctgagcagaagcgtctgtgtcacactgctctggatgatggggaattctggatggcatttaaggacttcaaggcccactttgataaagtggagatctgcaacctcactcccgatgccctggaggaagacgcgatccacaaatgggaggtgacggtccatcagggaagctgggttcgcggctccacggctgggggctgccgcaatttcctggataccttttggaccaatccacaaataaaattgtctctgactgagaaagatgaggggcaggaggagtgtagtttccttgtagccctgatgcagaaagatagaaggaaactcaagagatttggtgccaatgtgctgacaatcggctatgccatttatgagtgccctgacaaagacgaacacctgaacaaagacttcttcagataccacgcttctcgggccagaagcaagacgttcatcaacctgagagaagtctccgaccggttcaagctgccccctggggagtacatcctgattcccagcacttttgagccccaccaggaagctgatttctgtctgagaatcttttcagagaaaaaagccattacccgggatatggatggaaatgtagacattgaccttcctgagcctccaaagccaactccacctgaccaggagacagaggaggagcagcggtttcgggctctgtttgaacaagtcgctggtgaggacatggaggtgacagcagaggaacttgagtatgttttaaatgctgtgctgcaaaagaaaaaggacatcaaattcaagaagctaagcctgatctcctgtaaaaacatcatttccctgatggacaccagcggcaatgggaagctggagtttgatgaattcaaagtgttctgggacaagctgaagcagtggattaaccttttccttcggtttgatgctgacaagtccggcaccatgtctacctatgaactacggactgcactgaaagctgcaggctttcagctgagcagccacctcctgcagctgattgtgctcaggtatgcggatgaggagctccagctggacttcgatgacttcctcaactgcctggtccggctggagaatgcgagccgggtgttccaggctctcagtacaaagaacaaggagttcattcatctcaatataaatgagttcatccatttgacaatgaacatctgaggctgccttgtagagatgcagcctgcccagctgaatcttggcttctggaccttgaccttcagaacttctcttggtgtggaaccattacgcccagggttcactcccctctcatcgtccggccttctcccttcatcttgatctgggaagaatgaaatgaactcagctacactctctga

SEQ ID NO: 940 - protein, 627 aa, Homosapiens
MPYLYRAPGPQAHPVPKDARITHSSGQSFEQMRQECLQRGTLFEDADFPASNSSLFYSERPQIPFVWKRPGFWQHSEWLDVVIDDRLPTFRDRLVFLHSADHNEFWSALLEKAYAKLNGSYEALKGGSAIEAMEDFTGGVAETFQTKEAPENFYEILEKALKRGSLLGCFIDTRSAAESEARTPFGLIKGHAYSVTGIDQVSFRGQRIELIRIRNPWGQVEWNGSWSDSSPEWRSVGPAEQKRLCHTALDDGEFWMAFKDFKAHFDKVEICNLTPDALEEDAIHKWEVTVHQGSWVRGSTAGGCRNFLDTFWTNPQIKLSLTEKDEGQEECSFLVALMQKDRRKLKRFGANVLTIGYAIYECPDKDEHLNKDFFRYHASRARSKTFINLREVSDRFKLPPGEYILIPSTFEPHQEADFCLRIFSEKKAITRDMDGNVDIDLPEPPKPTPPDQETEEEQRFRALFEQVAGEDMEVTAEELEYVLNAVLQKKKDIKFKKLSLISCKNIISLMDTSGNGKLEFDEFKVFWDKLKQWINLFLRFDADKSGTMSTYELRTALKAAGFQLSSHLLQLIVLRYADEELQLDFDDFLNCLVRLENASRVFQALSTKNKEFIHLNINEFIHLTMNI

SEQ ID NO: 941 - DNA, 1140 bp, Homosapiens
aaagaaaggcgatgctaagaaacgtgctgcaggggaggctggcacattctgctccttagctaaccgcacaggcccatgggtccacacacatcagaccatggctctctgtggtctatctttgccattactttaaccaggctgtttctcatgcgctcatggagggtgactgaagatgccaccccgaggtgcaccctcagcctcgctggacacttacggctcgcattctccagccggaccaggcagttgaggaagtcatcgaagtccagctggagctcctcatccgcatacctgagcacaatcagctgcaggaggtggctgctcagctgaaagcctgtggggacaaaggaggagacccaggactcgctgtatccgagccccgagcttgggaatctctcaagcaccctgcatgtgttccacaaatctggggaacctaaaccctcatggttcccgaggcagagatggctggcagtcatcagcacaggaccaagactgcaccccactccttccatttgggagtagaatatgatgacgtgaccttagaagatggcagagccacacaatagaaggcgtttgggttcctgaatcactgtatgaacagagccacccacagaatatgaacatcctccctggactgtcataatgagtgaggaaaaaactttactgtgtttgagcctttatatatttggggtctattcactactgcagctagtgttaccttgagtcattggtgccttgaattacagaactgccacaacgaaattctaaaatatgttagcagttgagcaagagggatcatggaactgttcgagctggaaaatggttatctatgttatgcagtggcaaaacattgggtaaatctgttgcatgttgttatggactgaatgtttgtggtctcccctaaattcatatgttgaatcctaaccctcgaagtagtagtgtcaggaggtggggcctttgggaggtgactaggttgtgagggtggagccctcatggatggggttagtgccattataaaagaggccccagagagctgccttgccctctttctaccatgtgaggacagagtgagaaggatccatctataaatcagaaacagggccctccacagatataggtactgcctgtgtcatcttcttggac

SEQ ID NO: 942 - protein, 40 aa, Homosapiens
MVPEAEMAGSHQHRTKTAPHSFHLGVEYDDVTLEDGRATQ

SEQ ID NO: 943 - DNA, 308 bp, Homosapiens
cccagaagctagctgggcctgagctggacatttagtgccagaagattctcaaaggggtccctgattcagaaaaataagaaccactccacagagggactgctgagattctgagcgtcgcaagccttctggagttctaaatggtgctcctggcagtcccctctgtgggtctctatgctgcagaggcaaagccatgtgtcctcatcccgccctgcacctggcagtgtgactgagaggggaagccaggatggggttcctgttggatcccacatgtgtttcctccctggcttgtggaagaaaatgtgttctcc

SEQ ID NO: 944 - protein, 44 aa, Homosapiens
MLQRQSHVSSSRPAPGSVTERGSQDGVPVGSHMCFLPGLWKKMC

SEQ ID NO: 945 - DNA, 1198 bp, Homosapiens
caacttttgatttggttcttgccaattgttttatgtccctaaacctcatttggatccttggggtatagttttatctttctgcttcagtgatttactgtaacttttcaaatattggttctttctgtaccatttaagtatagttgatatatgtgaggcaaaaaaaggtttcagcatggtggtgagggaaaaaggagcttagaaatcccagttggcacagcctgggcaagcgccagctcccctcagggctaacggcactgttcacacagggatcctcagaatcagcggccacctgcctccaccttctgcctggagggcatggggctgttgtagaacctatggtagcaaatgtatatgtatgagtttgtattctgtagtgttggtgtagcacagaagaaagacctgtgtcctagagagtaggccaaggtgatctgcctcttctattgggagaaattctaatttctttcccactttctcaacaagcccaatattccctccaagttcttcttggtgctgagggctgtaggaattattgaaagcttctgcctcacttagtatcgtctggggcccagcacccagcaataactctaataatgtttcttaatggtatagcctcctgagattaaatgtaaaatcaaaaattaggaaatcttggagggagtcctcaagttgtattgctttgctgtgcttttggaagaagggacgacctggaggacacaggctcctgtgtgggtcttcatcctgcctgaccggcagatcttcctctacaccttgggcaaagtctatgcgaagatggtttcttagctctccatttgccatgattttcctcccattcatcatgagggagtttctcaaaccaggagtttatatttattttttagaaaatacacacttttcaggagaaacctgagcatgattttggattctccacctccccccagtctctgcacctgggattcagctcaaggattcagtgtcttcatttttacaaaagttcccccaagaaatcagcaaccagcctctgtttcatctgggagcccctcccttggccccctgtgtggatttcaggaagagcctccctttctttgcgtctccctttctttaattaacattttcaaaagtaataaattcttactgacgacttgtaacttagtcatattttatacttgtagcctttaataaagccatttaaaaaatgcta

SEQ ID NO: 946 - protein, 88 aa, Homosapiens
MILDSPPPPSLCTWDSAQGFSVFIFTKVPPRNQQPASVSSGSPSLGPLCGFQEEPPFLCVSLSLINIFKSNKFLLTTCNLVIFYTCSL

SEQ ID NO: 947 - DNA, 3931 bp, Homosapiens
cgggggggggcccggagggaggagctcccggggagggggccacggagggccggggtcccggggcttggggagctgggttggcttggagacccgggtacgcggcggtgcagggcggggttcccggagggggcggggctccgggtggcgcggggcggggcgagggcgggcacagcgaggggcggggcgcgggccgggagcggcgggcaggccgggcatggcgtccatggcggcggcgatcgcggcttcgcgctcggcggtcatgagcgggaaccggcctctggacgaccgggagcgaaagcgcttcacttacttctcgtcgctgagccccatggccaggaagatcatgcaggacaaggagaagatccgcgagaagtacgggcccgagtgggcgcggctgccgcccgcgcagcaggacgagatcatcgaccggtgcctggtggggccgcgcgccccggcgccccgagaccccggggactcggaggagctcacgcgcttccccggcttgcgcgggcccacgggccagaaggtggtgcgcttcggggacgaggatctaacttggcaagatgagcactctgcccctttctcctgggaaacaaagagtcagatggagttcagtatctccgccctatccatccaggagccgagcaacggcaccgccgccagcgagcccagaccactgtccaaagcttcccagggctcccaggccctcaagtcctcccaaggcagcaggtcctccagcctggacgccctgggccccaccaggaaggaggaggaagcgtcattctggaagatcaatgctgagcggtcccgaggggaggggcctgaggccgagttccagtcgctgacccctagccagatcaagtccatggagaagggggaaaaggtcttgcctccctgctaccggcaggaacctgccccgaaggacagggaggccaaggtggaaaggcccagcaccctccgtcaggagcagcgtcctcttcccaacgtgagcaccgaacgtgagagaccccagcctgtccaggccttcagcagtgcactgcacgaggctgccccctcccagctcgaggggaagctgccatctcctgatgtcaggcaggacgatggggaagacaccctgttctcggaacccaagtttgcacaggtcagctcaagtaatgtcgtcttgaagacgggatttgattttctggacaattggtaaaatgtattagaaaaatacaatgaagaaccctaaaatgttttccaaagtggtgtggtggaggaggataaaaagggccaccttttcctatgtattttactggtttcttgacactcttttcttaatcatttggaaactggtcaatattgccagatttttttcttttttggtagaaccagatatatatgctattttcagtgatttgataacagaagttttccatttggaatttttaaggtctgttaataattcaggagatcttgtaaataaaacttctgttcccagctccacccaactttccccctcctcaaaggatgtgtttcaaccatgtcacaaaaatcatataagtgatttccatctccttctccattattccccctcccccctccgctttttaccgtatgggttccttttggtgggtgattgagggtgatgttatcagccatgacatcagcatgctggctgtgaccccggaaagactggcccccagcgacgttctcagccagcgctcgcagctgtccggggcttctctggcagaagccatgtctctcacatcatgtgccagcctccaccctcacgccatttccagggaacagactgcgggtatgtagcagtgtagtctttaacctgctctgatacatattcagagtatggattgttgtttaaaaagagttgcatgtttaaagagttttgtactagcttttcattattttgtatctagattatcaacaatggggctaccactttccttggttttatatccatttcctcttggaagttcttgttgcttatgtgacctgttggttgttccccggactgggcacctacaggagtcagggcagacggcagatgtggctggaggtcagggctcttctgcttagttgtgttagagtcttccagcatgggactgatgggagcagtgggcattctttatcccaagggctagccaggttgcgtcatgacggaccttccccagccctgaccaccaccagaagtggaagagtggagtttgcggtcaactcagcagtgcccatggagacctgcgtggtgtcagagcagcagtatctcttggagctggtgcagacaccaaggctgcccagtggtacaacgtggtccacctcccctagggaagctgctgcactcagaggctgtcctgcccagtggcccctgagccgtgtgagcctgcaggaggcgtctgagcagagcctcaagcccggtatggcgccatctccatgttgccatcactgcgttctcacctgaagccttaatctttgcgacacctgccagtgagcgctcggtttcaataccaaagtgtgtcttcttcttttttttttttttttaaatgcctgtttcataggaccttctgaaatgatttccagaatattttatctggctccaaaataaagcacatagcaactcacctcaacccctcatcatctccaggaaagtttctgccaaagctgtggcatagccaacttttgatttggttcttgccaattgttttatgtccctaaacctcatttggatccttggggtatagttttatctttctgcttcagtgatttactgtaacttttcaaatattggttctttctgtaccatttaagtatagttgatatatgtgaggcaaaaaaaggtttcagcatggtggtgagggaaaaaggagcttagaaatcccagttggcacagcctgggcaagcgccagctcccctcagggctaacggcactgttcacacagggatcctcagaatcagcggccacctgcctccaccttctgcctggagggcatggggctgttgtagaacctatggtagcaaatgtatatgtatgagtttgtattctgtagtgttggtgtagcacagaagaaagacctgtgtcctagagagtaggccaaggtgatctgcctcttctattgggagaaattctaatttctttcccactttctcaacaagcccaatattccctccaagttcttcttggtgctgagggctgtaggaattattgaaagcttctgcctcacttagtatcgtctggggcccagcacccagcaataactctaataatgtttcttaatggtatagcctcctgagattaaatgtaaaatcaaaaattaggaaatcttggagggagtcctcaagttgtattgctttgctgtgcttttggaagaagggacgacctggaggacacaggctcctgtgtgggtcttcatcctgcctgaccggcagatcttcctctacaccttgggcaaagtctatgcgaagatggtttcttagctctccatttgccatgattttcctcccattcatcatgagggagtttctcaaaccaggagtttatatttattttttagaaaatacacacttttcaggagaaacctgagcatgattttggattctccacctccccccagtctctgcacctgggattcagctcaaggattcagtgtcttcatttttacaaaagttcccccaagaaatcagcaaccagcctctgtttcatctgggagcccctcccttggccccctgggtttgggggtgctgccctactgggaacagcgggggtctgtcacccgtctgagccgcacccccctgtgtggatttcaggaagagcctccctttctttgcgtctccctttctttaattaacattttcaaaagtaataaattcttactgacgacttgtaacttagtcatattttatacttgtagcctttaataaagccatttaaaaaatgcta

SEQ ID NO: 948 - protein, 327 aa, Homosapiens; identical to SEQ ID NO: 30

SEQ ID NO: 949 - DNA, 3815 bp, Homosapiens
gtgttcagaactatccaggcaaagaccctggataacagctgaaatgctggtttttgtttttgtttttttattttacgagtggacacaattctcacctgagtccttggccacgtggcgctatggcggtcactaccgggaattaaccacggccaccctctcagagcgccgggcgcggactcagggacacgccggctaccacctgagccggccccatggccaggaagatcatgcaggacaaggagaagatccgcgagaagtacgggcccgagtgggcgcggctgccgcccgcgcagcaggacgagatcatcgaccggtgcctggtggggccgcgcgccccggcgccccgagaccccggggactcggaggagctcacgcgcttccccggcttgcgcgggcccacgggccagaaggtggtgcgcttcggggacgaggatctaacttggcaagatgagcactctgcccctttctcctgggaaacaaagagtcagatggagttcagtatctccgccctatccatccaggagccgagcaacggcaccgccgccagcgagcccagaccactgtccaaagcttcccagggctcccaggccctcaagtcctcccaaggcagcaggtcctccagcctggacgccctgggccccaccaggaaggaggaggaagcgtcattctggaagatcaatgctgagcggtcccgaggggaggggcctgaggccgagttccagtcgctgacccctagccagatcaagtccatggagaagggggaaaaggtcttgcctccctgctaccggcaggaacctgccccgaaggacagggaggccaaggtggaaaggcccagcaccctccgtcaggagcagcgtcctcttcccaacgtgagcaccgaacgtgagagaccccagcctgtccaggccttcagcagtgcactgcacgaggctgccccctcccagctcgaggggaagctgccatctcctgatgtcaggcaggacgatggggaagacaccctgttctcggaacccaagtttgcacaggtcagctcaagtaatgtcgtcttgaagacgggatttgattttctggacaattggtaaaatgtattagaaaaatacaatgaagaaccctaaaatgttttccaaagtggtgtggtggaggaggataaaaagggccaccttttcctatgtattttactggtttcttgacactcttttcttaatcatttggaaactggtcaatattgccagatttttttcttttttggtagaaccagatatatatgctattttcagtgatttgataacagaagttttccatttggaatttttaaggtctgttaataattcaggagatcttgtaaataaaacttctgttcccagctccacccaactttccccctcctcaaaggatgtgtttcaaccatgtcacaaaaatcatataagtgatttccatctccttctccattattccccctcccccctccgctttttaccgtatgggttccttttggtgggtgattgagggtgatgttatcagccatgacatcagcatgctggctgtgaccccggaaagactggcccccagcgacgttctcagccagcgctcgcagctgtccggggcttctctggcagaagccatgtctctcacatcatgtgccagcctccaccctcacgccatttccagggaacagactgcgggtatgtagcagtgtagtctttaacctgctctgatacatattcagagtatggattgttgtttaaaaagagttgcatgtttaaagagttttgtactagcttttcattattttgtatctagattatcaacaatggggctaccactttccttggttttatatccatttcctcttggaagttcttgttgcttatgtgacctgttggttgttccccggactgggcacctacaggagtcagggcagacggcagatgtggctggaggtcagggctcttctgcttagttgtgttagagtcttccagcatgggactgatgggagcagtgggcattctttatcccaagggctagccaggttgcgtcatgacggaccttccccagccctgaccaccaccagaagtggaagagtggagtttgcggtcaactcagcagtgcccatggagacctgcgtggtgtcagagcagcagtatctcttggagctggtgcagacaccaaggctgcccagtggtacaacgtggtccacctcccctagggaagctgctgcactcagaggctgtcctgcccagtggcccctgagccgtgtgagcctgcaggaggcgtctgagcagagcctcaagcccggtatggcgccatctccatgttgccatcactgcgttctcacctgaagccttaatctttgcgacacctgccagtgagcgctcggtttcaataccaaagtgtgtcttcttcttttttttttttttttaaatgcctgtttcataggaccttctgaaatgatttccagaatattttatctggctccaaaataaagcacatagcaactcacctcaacccctcatcatctccaggaaagtttctgccaaagctgtggcatagccaacttttgatttggttcttgccaattgttttatgtccctaaacctcatttggatccttggggtatagttttatctttctgcttcagtgatttactgtaacttttcaaatattggttctttctgtaccatttaagtatagttgatatatgtgaggcaaaaaaaggtttcagcatggtggtgagggaaaaaggagcttagaaatcccagttggcacagcctgggcaagcgccagctcccctcagggctaacggcactgttcacacagggatcctcagaatcagcggccacctgcctccaccttctgcctggagggcatggggctgttgtagaacctatggtagcaaatgtatatgtatgagtttgtattctgtagtgttggtgtagcacagaagaaagacctgtgtcctagagagtaggccaaggtgatctgcctcttctattgggagaaattctaatttctttcccactttctcaacaagcccaatattccctccaagttcttcttggtgctgagggctgtaggaattattgaaagcttctgcctcacttagtatcgtctggggcccagcacccagcaataactctaataatgtttcttaatggtatagcctcctgagattaaatgtaaaatcaaaaattaggaaatcttggagggagtcctcaagttgtattgctttgctgtgcttttggaagaagggacgacctggaggacacaggctcctgtgtgggtcttcatcctgcctgaccggcagatcttcctctacaccttgggcaaagtctatgcgaagatggtttcttagctctccatttgccatgattttcctcccattcatcatgagggagtttctcaaaccaggagtttatatttattttttagaaaatacacacttttcaggagaaacctgagcatgattttggattctccacctccccccagtctctgcacctgggattcagctcaaggattcagtgtcttcatttttacaaaagttcccccaagaaatcagcaaccagcctctgtttcatctgggagcccctcccttggccccctgggtttgggggtgctgccctactgggaacagcgggggtctgtcacccgtctgagccgcacccccctgtgtggatttcaggaagagcctccctttctttgcgtctccctttctttaattaacattttcaaaagtaataaattcttactgacgacttgtaacttagtcatattttatacttgtagcctttaataaagccatttaaaaaatgcta

SEQ ID NO: 950 - protein, 289 aa, Homosapiens
MARKIMQDKEKIREKYGPEWARLPPAQQDEIIDRCLVGPRAPAPRDPGDSEELTRFPGLRGPTGQKVVRFGDEDLTWQDEHSAPFSWETKSQMEFSISALSIQEPSNGTAASEPRPLSKASQGSQALKSSQGSRSSSLDALGPTRKEEEASFWKINAERSRGEGPEAEFQSLTPSQIKSMEKGEKVLPPCYRQEPAPKDREAKVERPSTLRQEQRPLPNVSTERERPQPVQAFSSALHEAAPSQLEGKLPSPDVRQDDGEDTLFSEPKFAQVSSSNVVLKTGFDFLDNW

SEQ ID NO: 951 - DNA, 1256 bp, Homosapiens
caggcaaagaccctggataacagctgaaatgctggtttttgtttttgtttttttattttacgagtggacacaattctcacctgagtcctgttagtcttgttaaaatcagtcagatggagagaggggcttgggggaagtgggggctcgctataattttaattttgtggtctgtctgggacacacctcaaaattacaaaccctggccccctacctgttgggatgtcgcctctgagtctgaaaactttctgctcctctttggtttgtttgcaaacgtcgaactgccaagagttctgagctccttgggttggggaaaggcacctgggccaccgggtacttcatgcacccacctggccccgaggggcggcgggagctgactttccttgagcaccagatgccccgaaccggtccagccttccaggtcgccctccagcctccgggctgccctgcgcccccggctatctgcagctcaccgcgccaggccccgggcccagcgtcctggacgggcccagagaaagcagagaagtggccacgtggcgctatggcggtcactaccgggaattaaccacggccaccctctcagagcgccgggcgcggactcagggacacgccggctaccacctgagccgggtaaggggagcccgaaacctgcgggcaccgcggtaatccactatggaggcgtaaagggggactcgtggggtccgcgagggggtggcgggggggggcccggagggaggagctcccggggagggggccacggagggccggggtcccggggcttggggagctgggttggcttggagacccgggtacgcggcggtgcagggcggggttcccggagggggcggggctccgggtggcgcggggcggggcgagggcgggcacagcgaggggcggggcgcgggccgggagcggcgggcaggccgggcatggcgtccatggcggcggcgatcgcggcttcgcgctcggcggtcatgagcgggaaccggcctctggacgaccgggagcgaaagcgcttcacttacttctcgtcgctgagccccatggccaggaagatcatgcaggacaaggagaagatccgcgagaagtacgggcccgagtgggcgcggctgccgcccgcgcagcaggacgagatcatcgaccggtgcctggtggggccgcgcgccccggcgccccgagaccccggggactcggaggagctcacgcgcttccccggcttgcgcgggcccacgggccagaaggtggtgcgcttcggggac

SEQ ID NO: 952 - protein, 74 aa, Homosapiens
MHPPGPEGRRELTFLEHQMPRTGPAFQVALQPPGCPAPPAICSSPRQAPGPASWTGPEKAEKWPRGAMAVTTGN

SEQ ID NO: 953 - DNA, 459 bp, Homosapiens
cctggaaggctggaccggttcggggcatctggtgctcaaggaaagtcagctcccgccgcccctcggggccaggtgggtgcatgaagtacccggtggcccaggtgcctttccccaacccaaggagctcagaactcttggcagttcgacgtttgcaaacaaaccaaagaggagcagaaagttttcagactcagaggcgacatcccaacagcttggcttgaaggagtactttaggactcagaacaacaggatgaagacagcagctaaaatagaacacaccagcagagacgttcagctccttgagctgtgcttccgaagctcaagcatggcagagtggccttgttaaatcagagttcagggtgccaccctgacagtttctgattccgtaggtgcccagtagggaccaagaatcctttttttttttcctttttctttttaatagagtcagggtcttgctatgtt

SEQ ID NO: 954 - protein, 45 aa, Homosapiens
MKYPVAQVPFPNPRSSELLAVRRLQTNQRGAESFQTQRRHPNSLA

SEQ ID NO: 955 - DNA, 794 bp, Homosapiens
ctggaattccaggcataagccaccgtgcctggccaagaacgtttttttttttaacaagtttctaaatgatgctggtctattggtcctgggaccacactttgaaattggtgggataggaggctgggatctttatccattcactcaactcccattccccatggttgaaagtttccctggggcatccctgggaggcctgggggctgacaagattcaaacgttttggtgaaaagccccaagacagtgaagtggggtgtgcttgaagtggggcaccgtcatcacccacctacccaccacagaggtgagctaaaaggttaccagaccggagcctccagcaatccaggagcacaaacaaggatgccttaaaacaaaacttgtgtcagggtacccttcgctgcctcagaggaaatcagaatgacctggtggacaactgttcataaggacaagagccagtatcactgcctttgagtcccagcctcctcaaatccattttctgccctgcaccacctcatcatatcccggatattgttagtgtcgtgtcatttcatgactcaggagctgcgggtgactttggctgccctgacatttgttaaattggctcctgggtcctggtttgcaaatgttgccactttgagatccgtagatggtcatccctggctcccttggggagtgtcctggaatccaccagctccatctgctcgacaagagacttgagtttgttctgttacctctttcatcattagccaaagctccgggacttggttaaaactttaggcaattaaaaagactgacttatg

SEQ ID NO: 956 - protein, 55 aa, Homosapiens
MTQELRVTLAALTFVKLAPGSWFANVATLRSVDGHPWLPWGVSWNPPAPSARQET

SEQ ID NO: 957 - DNA, 3253 bp, Homosapiens
gagggaagatggcacctgccggctgctgctgctgctgctgcttctggggcggcgctgtggccgccgcgggcgccgcccggcgtgtcctgctgctgctgctgctgggggtcctgtccgccgggctgcggccaggcgccctggccaccgagcactactcgccgctctccctgctcaagcaggagctgcagcaccggcagcagcaggaggccccggcgggcggcggcggctgcagcccgcagtccggggactggggggaccagtactctgccgagtgcggcgagtcatcctttttgaacttccatgactcagactgcgaacccaagggatcatcaccctgtgactccttgctttccctcaacactgagaagattctgagccaggccaagtctattgcagaacagaagagattcccgtttgccactgataatgacagcacaaatgaagagttagctattgcttatgtcttgattggcagtggtctgtatgatgaagcaatacggcatttttcaacaatgcttcaggaggagcctgatctggttagtgcaatttatggccgagggatagcctatggaaagaagggactacatgacattaagaatgctgagcttgctctgttcgaactgagccgagtaattaccttggaaccagatcgtccagaggtatttgagcagcgagcagaaattctgtcccctctgggacgaattaatgaagcagtgaatgacctcactaaagctatccaactgcagccctcagcacggctgtacagacatcggggaaccctgtacttcatatcagaggactatgcaacagcccatgaagactttcagcagtccttagaactgaacaaaaaccagcctatagctatgctatacaaaggtttaactttctttcacagaggacttctgaaggaagctattgaatccttcaaagaagctttgaagcagaaagttgactttattgatgcatataaaagtctagggcaggcatatagagaactgggcaattttgaagcagccactgagagctttcaaaaggcactgttgctcaaccaaaatcatgtgcaaaccctccagctccggggaatgatgctctaccaccacggcagcttacaggaagcccttaagaactttaagcggtgtctgcagctagagccatataatgaagtgtgccagtatatgaaagggctcagccatgttgccatgggacagttttatgaagggataaaagcacaaacaaaagttatgctgaatgatcctctcccaggccagaaggctagccctgagtatcttaaagtaaagtatctccgagagtattctcgatatcttcatgcacaccttgataccccccttacggaatataacattgatgtggatctgcctggaagctttaaggaccactgggctaaaaatttgcctttcctcatagaagactacgaagagcagccagggttgcaaccccacataaaagatgtgttacatcagaattttgagagttataagcctgaagtacaggagctgatttgtgtggctgatcgtttgggatccctgatgcaatatgaaacacctggtttcctgccaaacaagagaatacacagagctatgggtttggccgcattggaggtcatgcaagccgtgcagcgtacatggaccaactcgaaagttcgaatgaatgggaagacacggttgatgcagtggagagacatgtttgacattgcagttaaatggagaaggattgctgacccagaccagcccgtgctgtggttagatcaaatgccagcacgaagtcttagcagaggttttaacaaccacattaatttaatcaggggtcaggtgatcaacatgagatacctagaatattttgagaaaatacttcattttattaaagacagaattcttgtttatcatggagctaataatcctaaaggattgctggaagttcgggaagccctggaaaaggtacacaaagtagaagaccttcttccgattatgaagcagtttaatactaaaacgaaggatgggttcaccgtgaacacaaaagttcccagccttaaagaccaagggaaggaatatgatggattcacaatcacgattacaggagacaaagttggcaatatattattttctgtggaaactcaaaccacggaagaaaggacacaattatatcatgctgaaatagatgcactttataaagatttgacagcaaaaggaaaagtattgattctttcatcagaatttggggaggctgatgctgtctgcaacttaatcttatccttagtttattacttttataatttaatgccactctctcgaggatccagtgtaattgcttactcggtcatcgtgggagcactgatggcaagtggaaaagaagtagcaggaaaaattcccaaagggaagttagtcgactttgaagctatgacagcccctggttcagaggcctttagcaaagtcgccaaaagctggatgaacttgaaaagtatttcaccttcttataagactcttccatcagtatcagaaacgtttccaacgttaagatcgatgattgaggtgctaaacacagactcttctccacgttgtcttaagaaactctagttctgctgctgtatttatacaagtaaagggccggacctcttgcttcttaagttattttttaaaacatggaattataaagaaattaggtcctctattacttttgataccaatttttataggaattgaatacttgaaatcattttctttacttttctgaaccataatgaaaatcatgaaagaggctttcggggggaaaaagctacttgacttggagggaaagcgtatgtattagccggcagcctgttggttcccacttataaagtcatataactccttccttacagtaaaaaaaattttcctcaacaactaaaatataatactgaagatgaacaaaaacaaaaccaaataggagtgtttgtattcctttagagatctggatatttttcaaagacttgctttttacgcacattgtgatagagcatcttttgttgactcacgtaacctccatgtgtgggtcctttgttttattagaaccatggaagaaggttcctgggccatcagtatgtgttgcagagctcacagccaggaacacttattttgaacaatgcagacagtacttgccagagtcccaaatgctgaattattgaaccatgtttttttttcctttgttgaaaaaaataaaccagggtgatttctataaatcaccagtttttggcattgga

SEQ ID NO: 958 - protein, 860 aa, Homosapiens
MAPAGCCCCCCFWGGAVAAAGAARRVLLLLLLGVLSAGLRPGALATEHYSPLSLLKQELQHRQQQEAPAGGGGCSPQSGDWGDQYSAECGESSFLNFHDSDCEPKGSSPCDSLLSLNTEKILSQAKSIAEQKRFPFATDNDSTNEELAIAYVLIGSGLYDEAIRHFSTMLQEEPDLVSAIYGRGIAYGKKGLHDIKNAELALFELSRVITLEPDRPEVFEQRAEILSPLGRINEAVNDLTKAIQLQPSARLYRHRGTLYFISEDYATAHEDFQQSLELNKNQPIAMLYKGLTFFHRGLLKEAIESFKEALKQKVDFIDAYKSLGQAYRELGNFEAATESFQKALLLNQNHVQTLQLRGMMLYHHGSLQEALKNFKRCLQLEPYNEVCQYMKGLSHVAMGQFYEGIKAQTKVMLNDPLPGQKASPEYLKVKYLREYSRYLHAHLDTPLTEYNIDVDLPGSFKDHWAKNLPFLIEDYEEQPGLQPHIKDVLHQNFESYKPEVQELICVADRLGSLMQYETPGFLPNKRIHRAMGLAALEVMQAVQRTWTNSKVRMNGKTRLMQWRDMFDIAVKWRRIADPDQPVLWLDQMPARSLSRGFNNHINLIRGQVINMRYLEYFEKILHFIKDRILVYHGANNPKGLLEVREALEKVHKVEDLLPIMKQFNTKTKDGFTVNTKVPSLKDQGKEYDGFTITITGDKVGNILFSVETQTTEERTQLYHAEIDALYKDLTAKGKVLILSSEFGEADAVCNLILSLVYYFYNLMPLSRGSSVIAYSVIVGALMASGKEVAGKIPKGKLVDFEAMTAPGSEAFSKVAKSWMNLKSISPSYKTLPSVSETFPTLRSMIEVLNTDSSPRCLKKL

SEQ ID NO: 959 - DNA, 3116 bp, Homosapiens
agggctgtcgcgcatgcgccttgagggaagatggcacctgccggctgctgctgctgctgctgcttctggggcggcgctgtggccgccgcgggcgccgcccggcgtgtcctgctgctgctgctgctgggggtcctgtccgccgggctgcggccaggcgccctggccaccgagcactactcgccgctctccctgctcaagcaggagctgcagcaccggcagcagcaggaggccccggcgggcggcggcggctgcagcccgcagtccggggactggggggaccagtactctgccgagtgcggcgagtcatcctttttgaacttccatgactcagactgcgaacccaagggatcatcaccctgtgactccttgctttccctcaacactgagaagattctgagccaggccaagtctattgcagaacagaagagattcccgtttgccactgataatgacagcacaaatgaagagttagctattgcttatgtcttgattggcagtggtctgtatgatgaagcaatacggcatttttcaacaatgcttcagattctgtcccctctgggacgaattaatgaagcagtgaatgacctcactaaagctatccaactgcagccctcagcacggctgtacagacatcggggaaccctgtacttcatatcagaggactatgcaacagcccatgaagactttcagcagtccttagaactgaacaaaaaccagcctatagctatgctatacaaaggtttaactttctttcacagaggacttctgaaggaagctattgaatccttcaaagaagctttgaagcagaaagttgactttattgatgcatataaaagtctagggcaggcatatagagaactgggcaattttgaagcagccactgagagctttcaaaaggcactgttgctcaaccaaaatcatgtgcaaaccctccagctccggggaatgatgctctaccaccacggcagcttacaggaagcccttaagaactttaagcggtgtctgcagctagagccatataatgaagtgtgccagtatatgaaagggctcagccatgttgccatgggacagttttatgaagggataaaagcacaaacaaaagttatgctgaatgatcctctcccaggccagaaggctagccctgagtatcttaaagtaaagtatctccgagagtattctcgatatcttcatgcacaccttgataccccccttacggaatataacattgatgtggatctgcctggaagctttaaggaccactgggctaaaaatttgcctttcctcatagaagactacgaagagcagccagggttgcaaccccacataaaagatgtgttacatcagaattttgagagttataagcctgaagtacaggagctgatttgtgtggctgatcgtttgggatccctgatgcaatatgaaacacctggtttcctgccaaacaagagaatacacagagctatgggtttggccgcattggaggtcatgcaagccgtgcagcgtacatggaccaactcgaaagttcgaatgaatgggaagacacggttgatgcagtggagagacatgtttgacattgcagttaaatggagaaggattgctgacccagaccagcccgtgctgtggttagatcaaatgccagcacgaagtcttagcagaggttttaacaaccacattaatttaatcaggggtcaggtgatcaacatgagatacctagaatattttgagaaaatacttcattttattaaagacagaattcttgtttatcatggagctaataatcctaaaggattgctggaagttcgggaagccctggaaaaggtacacaaagtagaagaccttcttccgattatgaagcagtttaatactaaaacgaaggatgggttcaccgtgaacacaaaagttcccagccttaaagaccaagggaaggaatatgatggattcacaatcacgattacaggagacaaagttggcaatatattattttctgtggaaactcaaaccacggaagaaaggacacaattatatcatgctgaaatagatgcactttataaagatttgacagcaaaaggaaaagtattgattctttcatcagaatttggggaggctgatgctgtctgcaacttaatcttatccttagtttattacttttataatttaatgccactctctcgaggatccagtgtaattgcttactcggtcatcgtgggagcactgatggcaagtggaaaagaagtagcaggaaaaattcccaaagggaagttagtcgactttgaagctatgacagcccctggttcagaggcctttagcaaagtcgccaaaagctggatgaacttgaaaagtatttcaccttcttataagactcttccatcagtatcagaaacgtttccaacgttaagatcgatgattgaggtgctaaacacagactcttctccacgttgtcttaagaaactctagttctgctgctgtatttatacaagtaaagggccggacctcttgcttcttaagttattttttaaaacatggaattataaagaaattaggtcctctattacttttgataccaatttttataggaattgaatacttgaaatcattttctttacttttctgaaccataatgaaaatcatgaaagaggctttcggggggaaaaagctacttgacttggagggaaagcgtatgtattagccggcagcctgttggttcccacttataaagtcatataactccttccttacagtaaaaaaaattttcctcaacaactaaaatataatactgaagatgaacaaaaacaaaaccaaataggagtgtttgtattcctttagagatctggatatttttcaaagacttgctttttacgcacattgtgatagagcatcttttgttgactcacgtaacctccatgtgtgggtcctttgttttattagaaccatggaagaaggttcctgggccatcagtatgtgttgcagagctcacagccaggaacacttattttgaacaatgcagacagtacttgccagagtcccaaatgctgaattattgaaccatgtttttttttcctttgttgaaaaaaataaaccagggtgatttctataaatcaccagtttttggcattgga

SEQ ID NO: 960 - protein, 807 aa, Homosapiens
MAPAGCCCCCCFWGGAVAAAGAARRVLLLLLLGVLSAGLRPGALATEHYSPLSLLKQELQHRQQQEAPAGGGGCSPQSGDWGDQYSAECGESSFLNFHDSDCEPKGSSPCDSLLSLNTEKILSQAKSIAEQKRFPFATDNDSTNEELAIAYVLIGSGLYDEAIRHFSTMLQILSPLGRINEAVNDLTKAIQLQPSARLYRHRGTLYFISEDYATAHEDFQQSLELNKNQPIAMLYKGLTFFHRGLLKEAIESFKEALKQKVDFIDAYKSLGQAYRELGNFEAATESFQKALLLNQNHVQTLQLRGMMLYHHGSLQEALKNFKRCLQLEPYNEVCQYMKGLSHVAMGQFYEGIKAQTKVMLNDPLPGQKASPEYLKVKYLREYSRYLHAHLDTPLTEYNIDVDLPGSFKDHWAKNLPFLIEDYEEQPGLQPHIKDVLHQNFESYKPEVQELICVADRLGSLMQYETPGFLPNKRIHRAMGLAALEVMQAVQRTWTNSKVRMNGKTRLMQWRDMFDIAVKWRRIADPDQPVLWLDQMPARSLSRGFNNHINLIRGQVINMRYLEYFEKILHFIKDRILVYHGANNPKGLLEVREALEKVHKVEDLLPIMKQFNTKTKDGFTVNTKVPSLKDQGKEYDGFTITITGDKVGNILFSVETQTTEERTQLYHAEIDALYKDLTAKGKVLILSSEFGEADAVCNLILSLVYYFYNLMPLSRGSSVIAYSVIVGALMASGKEVAGKIPKGKLVDFEAMTAPGSEAFSKVAKSWMNLKSISPSYKTLPSVSETFPTLRSMIEVLNTDSSPRCLKKL

SEQ ID NO: 961 - DNA, 467 bp, Homosapiens
agttagtcgactttgaagctatgacagcccctggttcagaggcctttagcaaagtcgccaaaagctggatgaacttgaaaaggtaactaattttattgcagccaggaattatccctgacggacactgtgtgtgaggagtctagcagaccatgatcgttcctggctcttgtttccagaagcactggagaggactgtgtgaatttgaagtgtgtgaaattaaactcatagatgcctcagtagttaatgaagaataagtaagcctcactgttcaactttagttatttttgccccttctcctggttttttacatcccaaccacccccagttttgcctttcacgtctatttgacatagcaaccactctattgctgggtaatttatgttctgtttaaaacagaaatatttgtgcctgtagtctaccattgctcaatttgtaatttagctttgcaatgaaagcttctaacagtt

SEQ ID NO: 962 - protein, 34 aa, Homosapiens
MIVPGSCFQKHWRGLCEFEVCEIKLIDASVVNEE

SEQ ID NO: 963 - DNA, 1312 bp, Homosapiens
gggaggccggcggcgggaacagggctgccccgggccacctgccatctcctccgccacccttccaacagttgcttcagactcaggagagaggccgccctggccccaggagcatgctgtcagctcatttctcgactcgccgccctgcccaaaggcggctgcaggagggcgcgcggcggcgtgggtggcagcggcgggaagctgcccgccaggacccctggccgagccggctcccgcggatcgcgcgccgcagccggaggcgtgaggcccgggcgacccgtaccccggcccgggaccccagccccgctgccccgccgccccggccgactcggacgcccgccgccgcccactcaccgccgcactcggcagagtactggtccccccagtccccggactgcgggctgcagccgccgccgcccgccggggcctcctgctgctgccggtgctgcagctcctgcttgagcagggagagcggcgagtagtgctcggtggccagggcgcctggccgcagcccggcggacaggacccccagcagcagcagcagcaggacacgccgggcggcgcccgcggcggccacagcgccgccccagaagcagcagcagcagcagcagccggcaggtgccatcttccctcaaggcgcatgcgcgacagcccttgcccggctctcaggcctccccgcctctaacctacggcgggcaggtggaccgtggcaagggggcgggacaaggggagaagcattgtgtgctgggaatggtagtcccagctcggccagcccggggccgccttgccggtgccgggactacgaatcccaataagcccgcgcggcgcaagtcttccggtctggcgtctgacgtcttaccctccacagaatcggaagttctggactgcagttgagtggaaatgggcaacggcgggcggagcggcctgcagcaggggaaggggaacgtggatggggtggcagcgactcctactgctgcctcggcctcctgccagtacaggtgcatcgaatgcaaccaggaggccaaagagttgtaccgagactataaccacggtgtgctgaagataaccatctgtaaatcctgccagaaacctgtagacaaatatatcgagtatgatcctgttatcatcttgattaatgctatattgtgcaaagctcaggcctacagacatattcttttcaatactcaaataaatatccatggaaaactctgcatattttgtttgctttgtgaagcatacctgaggtggtggcagcttcaagattccaaccagaatactgcccctgatgacttgatcagatatgctaaggaatggg

SEQ ID NO: 964 - protein, 137 aa, Homosapiens
MGNGGRSGLQQGKGNVDGVAATPTAASASCQYRCIECNQEAKELYRDYNHGVLKITICKSCQKPVDKYIEYDPVIILINAILCKAQAYRHILFNTQINIHGKLCIFCLLCEAYLRWWQLQDSNQNTAPDDLIRYAKE

SEQ ID NO: 965 - DNA, 1270 bp, Homosapiens
gggaggccggcggcgggaacagggctgccccgggccacctgccatctcctccgccacccttccaacagttgcttcagactcaggagagaggccgccctggccccaggagcatgctgtcagctcatttctcgactcgccgccctgcccaaaggcggctgcaggagggcgcgcggcggcgtgggtggcagcggcgggaagctgcccgccaggacccctggccgagccggctcccgcggatcgcgcgccgcagccggaggcgtgaggcccgggcgacccgtaccccggcccgggaccccagccccgctgccccgccgccccggccgactcggacgcccgccgccgcccactcaccgccgcactcggcagagtactggtccccccagtccccggactgcgggctgcagccgccgccgcccgccggggcctcctgctgctgccggtgctgcagctcctgcttgagcagggagagcggcgagtagtgctcggtggccagggcgcctggccgcagcccggcggacaggacccccagcagcagcagcagcaggacacgccgggcggcgcccgcggcggccacagcgccgccccagaagcagcagcagcagcagcagccggcaggtgccatcttccctcaaggcgcatgcgcgacagcccttgcccggctctcaggcctccccgcctctaacctacggcgggcaggtggaccgtggcaagggggcgggacaaggggagaagcattgtgtgctgggaatggtagtcccagctcggccagcccggggccgccttgccggtgccgggactacgaatcccaataagcccgcgcggcgcaagtcttccggtctggcgtctgacgtcttaccctccacagaatcggaagttctggactgcagttgagtggaaatgggcaacggcgggcggagcggcctgcagcaggggaaggggaacgtggatggggtggcagcgactcctactgctgcctcggcctcctgccagtacaggtgcatcgaatgcaaccaggaggccaaagagttgtaccgagactataaccacggtgtgctgaagataaccatctgtaaatcctgccagaaacctgtagacaaatatatcgagtatgatcctgttatcatcttgattaatgctatattgtgcaaagctcaggcctacagacatattcttttcaatactcaaataaatcttcaagattccaaccagaatactgcccctgatgacttgatcagatatgctaaggaatgggatttctatagaatgtttg

SEQ ID NO: 966 - protein, 123 aa, Homosapiens
MGNGGRSGLQQGKGNVDGVAATPTAASASCQYRCIECNQEAKELYRDYNHGVLKITICKSCQKPVDKYIEYDPVIILINAILCKAQAYRHILFNTQINLQDSNQNTAPDDLIRYAKEWDFYRM

SEQ ID NO: 967 - DNA, 2075 bp, Homosapiens
gggaggccggcggcgggaacagggctgccccgggccacctgccatctcctccgccacccttccaacagttgcttcagactcaggagagaggccgccctggccccaggagcatgctgtcagctcatttctcgactcgccgccctgcccaaaggcggctgcaggagggcgcgcggcggcgtgggtggcagcggcgggaagctgcccgccaggacccctggccgagccggctcccgcggatcgcgcgccgcagccggaggcgtgaggcccgggcgacccgtaccccggcccgggaccccagccccgctgccccgccgccccggccgactcggacgcccgccgccgcccactcaccgccgcactcggcagagtactggtccccccagtccccggactgcgggctgcagccgccgccgcccgccggggcctcctgctgctgccggtgctgcagctcctgcttgagcagggagagcggcgagtagtgctcggtggccagggcgcctggccgcagcccggcggacaggacccccagcagcagcagcagcaggacacgccgggcggcgcccgcggcggccacagcgccgccccagaagcagcagcagcagcagcagccggcaggtgccatcttccctcaaggcgcatgcgcgacagcccttgcccggctctcaggcctccccgcctctaacctacggcgggcaggtggaccgtggcaagggggcgggacaaggggagaagcattgtgtgctgggaatggtagtcccagctcggccagcccggggccgccttgccggtgccgggactacgaatcccaataagcccgcgcggcgcaagtcttccggtctggcgtctgacgtcttaccctccacagaatcggaagttctggactgcagttgagtggaaatgggcaacggcgggcggagcggcctgcagcaggggaaggggaacgtggatggggtggcagcgactcctactgctgcctcggcctcctgccagtacaggtgcatcgaatgcaaccaggaggccaaagagttgtaccgagactataaccacggtgtgctgaagataaccatctgtaaatcctgccagaaacctgtagacaaatatatcgagtatgatcctgttatcatcttgattaatgctatattgtgcaaagctcaggcctacagacatattcttttcaatactcaaataaatatccatggaaaactctgcatattttgtttgctttgtgaagcatacctgaggtggtggcagcttcaagattccaaccagaatactgcccctgatgacttgatcagatatgctaaggaatgggatttctatagaatgtttgcgattgctgctttagaacaaactgcctattttattggcatttttaccttcctctgtcatttgggaacatgactacacatctgtgtgcctcaaactcattaaagtatttgttcttacatcaaattttcaggcaattagagtgaccctaaacatcaaccgtaagctctccttcttggccgtgttgagtggcttactgctggaaagcatcatggtctacttcttccagagtatggaatgggatgttggaagtgattatgccatctttaaatctcaggacttctgaagagttttattcttcttcactatctgtggcatgaccagctgtatctgaaagagaaaagacatgaaatataaaccaacctcctcatttctgttgagtaaaatgaagcaaagattggaaacactttctgaaaaagaaagcaatgataatagcggtggatacccacccccacaaatgcacccaagagacaagccatttacatacagatattcacagtcacacatagaaacacccacatggacacaaggaatgttgctgcagagactgaatgacatgcaacaggtgaaggtttatacgttatacacaaggccaggtaagcgctcataattcacacataataaaacatctaggtttcattcctttgacatgtttatatctttttaatttaaatgttgttactggcttaaaatattttgtgttcttacaatagaaacgcttttaataaagtctttcagaataaaccaag

SEQ ID NO: 968 - protein, 167 aa, Homosapiens
MGNGGRSGLQQGKGNVDGVAATPTAASASCQYRCIECNQEAKELYRDYNHGVLKITICKSCQKPVDKYIEYDPVIILINAILCKAQAYRHILFNTQINIHGKLCIFCLLCEAYLRWWQLQDSNQNTAPDDLIRYAKEWDFYRMFAIAALEQTAYFIGIFTFLCHLGT

SEQ ID NO: 969 - DNA, 1903 bp, Homosapiens
gggaggccggcggcgggaacagggctgccccgggccacctgccatctcctccgccacccttccaacagttgcttcagactcaggagagaggccgccctggccccaggagcatgctgtcagctcatttctcgactcgccgccctgcccaaaggcggctgcaggagggcgcgcggcggcgtgggtggcagcggcgggaagctgcccgccaggacccctggccgagccggctcccgcggatcgcgcgccgcagccggaggcgtgaggcccgggcgacccgtaccccggcccgggaccccagccccgctgccccgccgccccggccgactcggacgcccgccgccgcccactcaccgccgcactcggcagagtactggtccccccagtccccggactgcgggctgcagccgccgccgcccgccggggcctcctgctgctgccggtgctgcagctcctgcttgagcagggagagcggcgagtagtgctcggtggccagggcgcctggccgcagcccggcggacaggacccccagcagcagcagcagcaggacacgccgggcggcgcccgcggcggccacagcgccgccccagaagcagcagcagcagcagcagccggcaggtgccatcttccctcaaggcgcatgcgcgacagcccttgcccggctctcaggcctccccgcctctaacctacggcgggcaggtggaccgtggcaagggggcgggacaaggggagaagcattgtgtgctgggaatggtagtcccagctcggccagcccggggccgccttgccggtgccgggactacgaatcccaataagcccgcgcggcgcaagtcttccggtctggcgtctgacgtcttaccctccacagaatcggaagttctggactgcagttgagtggaaatgggcaacggcgggcggagcggcctgcagcaggggaaggggaacgtggatggggtggcagcgactcctactgctgcctcggcctcctgccagtacaggtgcatcgaatgcaaccaggaggccaaagagttgtaccgagactataaccacggtgtgctgaagataaccatctgtaacaaactgcctattttattggcatttttaccttcctgtgggtagaacggcccatgacggcaaaaaaaaagcccaacttcattttgctgctgaaagcattattattatctagctacggaaaactcttgctgattccagctgtcatttgggaacatgactacacatctgtgtgcctcaaactcattaaagtatttgttcttacatcaaattttcaggcaattagagtgaccctaaacatcaaccgtaagctctccttcttggccgtgttgagtggcttactgctggaaagcatcatggtctacttcttccagagtatggaatgggatgttggaagtgattatgccatctttaaatctcaggacttctgaagagttttattcttcttcactatctgtggcatgaccagctgtatctgaaagagaaaagacatgaaatataaaccaacctcctcatttctgttgagtaaaatgaagcaaagattggaaacactttctgaaaaagaaagcaatgataatagcggtggatacccacccccacaaatgcacccaagagacaagccatttacatacagatattcacagtcacacatagaaacacccacatggacacaaggaatgttgctgcagagactgaatgacatgcaacaggtgaaggtttatacgttatacacaaggccaggtaagcgctcataattcacacataataaaacatctaggtttcattcctttgacatgtttatatctttttaatttaaatgttgttactggcttaaaatattttgtgttcttacaatagaaacgcttttaataaagtctttcagaataaaccaagt

SEQ ID NO: 970 - protein, 104 aa, Homosapiens
MTAKKKPNFILLLKALLLSSYGKLLLIPAVIWEHDYTSVCLKLIKVFVLTSNFQAIRVTLNINRKLSFLAVLSGLLLESIMVYFFQSMEWDVGSDYAIFKSQDF

SEQ ID NO: 971 - DNA, 2177 bp, Homosapiens
gggaggccggcggcgggaacagggctgccccgggccacctgccatctcctccgccacccttccaacagttgcttcagactcaggagagaggccgccctggccccaggagcatgctgtcagctcatttctcgactcgccgccctgcccaaaggcggctgcaggagggcgcgcggcggcgtgggtggcagcggcgggaagctgcccgccaggacccctggccgagccggctcccgcggatcgcgcgccgcagccggaggcgtgaggcccgggcgacccgtaccccggcccgggaccccagccccgctgccccgccgccccggccgactcggacgcccgccgccgcccactcaccgccgcactcggcagagtactggtccccccagtccccggactgcgggctgcagccgccgccgcccgccggggcctcctgctgctgccggtgctgcagctcctgcttgagcagggagagcggcgagtagtgctcggtggccagggcgcctggccgcagcccggcggacaggacccccagcagcagcagcagcaggacacgccgggcggcgcccgcggcggccacagcgccgccccagaagcagcagcagcagcagcagccggcaggtgccatcttccctcaaggcgcatgcgcgacagcccttgcccggctctcaggcctccccgcctctaacctacggcgggcaggtggaccgtggcaagggggcgggacaaggggagaagcattgtgtgctgggaatggtagtcccagctcggccagcccggggccgccttgccggtgccgggactacgaatcccaataagcccgcgcggcgcaagtcttccggtctggcgtctgacgtcttaccctccacagaatcggaagttctggactgcagttgagtggaaatgggcaacggcgggcggagcggcctgcagcaggggaaggggaacgtggatggggtggcagcgactcctactgctgcctcggcctcctgccagtacaggtgcatcgaatgcaaccaggaggccaaagagttgtaccgagactataaccacggtgtgctgaagataaccatctgtaaatcctgccagaaacctgtagacaaatatatcgagtatgatcctgttatcatcttgattaatgctatattgtgcaaagctcaggcctacagacatattcttttcaatactcaaataaatatccatggaaaactctgcatattttgtttgctttgtgaagcatacctgaggtggtggcagcttcaagattccaaccagaatactgcccctgatgacttgatcagatatgctaaggaatgggatttctatagaatgtttgcgattgctgctttagaacaaactgcctattttattggcatttttaccttcctgtgggtagaacggcccatgacggcaaaaaaaaagcccaacttcattttgctgctgaaagcattattattatctagctacggaaaactcttgctgattccagctgtcatttgggaacatgactacacatctgtgtgcctcaaactcattaaagtatttgttcttacatcaaattttcaggcaattagagtgaccctaaacatcaaccgtaagctctccttcttggccgtgttgagtggcttactgctggaaagcatcatggtctacttcttccagagtatggaatgggatgttggaagtgattatgccatctttaaatctcaggacttctgaagagttttattcttcttcactatctgtggcatgaccagctgtatctgaaagagaaaagacatgaaatataaaccaacctcctcatttctgttgagtaaaatgaagcaaagattggaaacactttctgaaaaagaaagcaatgataatagcggtggatacccacccccacaaatgcacccaagagacaagccatttacatacagatattcacagtcacacatagaaacacccacatggacacaaggaatgttgctgcagagactgaatgacatgcaacaggtgaaggtttatacgttatacacaaggccaggtaagcgctcataattcacacataataaaacatctaggtttcattcctttgacatgtttatatctttttaatttaaatgttgttactggcttaaaatattttgtgttcttacaatagaaacgcttttaataaagtctttcagaataaaccaagt

SEQ ID NO: 972 - protein, 271 aa, Homosapiens; identical to SEQ ID NO: 34

SEQ ID NO: 973 - DNA, 2040 bp, Homosapiens
gggaggccggcggcgggaacagggctgccccgggccacctgccatctcctccgccacccttccaacagttgcttcagactcaggagagaggccgccctggccccaggagcatgctgtcagctcatttctcgactcgccgccctgcccaaaggcggctgcaggagggcgcgcggcggcgtgggtggcagcggcgggaagctgcccgccaggacccctggccgagccggctcccgcggatcgcgcgccgcagccggaggcgtgaggcccgggcgacccgtaccccggcccgggaccccagccccgctgccccgccgccccggccgactcggacgcccgccgccgcccactcaccgccgcactcggcagagtactggtccccccagtccccggactgcgggctgcagccgccgccgcccgccggggcctcctgctgctgccggtgctgcagctcctgcttgagcagggagagcggcgagtagtgctcggtggccagggcgcctggccgcagcccggcggacaggacccccagcagcagcagcagcaggacacgccgggcggcgcccgcggcggccacagcgccgccccagaagcagcagcagcagcagcagccggcaggtgccatcttccctcaaggcgcatgcgcgacagcccttgcccggctctcaggcctccccgcctctaacctacggcgggcaggtggaccgtggcaagggggcgggacaaggggagaagcattgtgtgctgggaatggtagtcccagctcggccagcccggggccgccttgccggtgccgggactacgaatcccaataagcccgcgcggcgcaagtcttccggtctggcgtctgacgtcttaccctccacagaatcggaagttctggactgcagttgagtggaaatgggcaacggcgggcggagcggcctgcagcaggggaaggggaacgtggatggggtggcagcgactcctactgctgcctcggcctcctgccagtacaggtgcatcgaatgcaaccaggaggccaaagagttgtaccgagactataaccacggtgtgctgaagataaccatctgtaacaaactgcctattttattggcatttttaccttcctgtgggtagaacggcccatgacggcaaaaaaaaagcccaacttcattttgctgctgaaagcattattattatctagctacggaaaactcttgctgattccagctgtcatttgggaacatgactacacatctgtgtgcctcaaactcattaaagtatttgttcttacatcaaattttcaggcaattagagtgaccctaaacatcaaccgtaagctctccttcttggccgtgttgagtggcttactgctggaaagcatcatggtctacttcttccagagtatggaatgggatgttggaagtgattatgccatctttaaatctcaggacttctgaagagttttattcttcttcactatctgtggcatgaccagctgtatctgaaagagaaaagacatgaaatataaaccaacctcctcatttctgttgagtaaaatgaagcaaagattggaaacactttctgaaaaagaaagcaatgataatagcggtggatacccacccccacaaatgcacccaagagacaagccatttacatacagatattcacagtcacacatagaaacacccacatggacacaaggaatgttgctgcagagactgaatgacatgcaacaggtgaaggtttatacgttatacacaaggccaggtaagcgctcataattcacacataataaaacatctaggtttcattcctttgacatgtttatatctttttaatttaaatgttgttactggcttaaaatattttgtgttcttacaatagaaacgcttttaataaagtctttcagaataaaccaagtttttgtaaattttcaattcaataattaaggtaatctttaaaattggatgatccaaaaataagtgataatgaaaaccactgagttatatactttgcaagggtaaattacatctgaataaagctgtaattaaaaacaac

SEQ ID NO: 974 - protein, 104 aa, Homosapiens; identical to SEQ ID NO: 970

SEQ ID NO: 975 - DNA, 2314 bp, Homosapiens
gggaggccggcggcgggaacagggctgccccgggccacctgccatctcctccgccacccttccaacagttgcttcagactcaggagagaggccgccctggccccaggagcatgctgtcagctcatttctcgactcgccgccctgcccaaaggcggctgcaggagggcgcgcggcggcgtgggtggcagcggcgggaagctgcccgccaggacccctggccgagccggctcccgcggatcgcgcgccgcagccggaggcgtgaggcccgggcgacccgtaccccggcccgggaccccagccccgctgccccgccgccccggccgactcggacgcccgccgccgcccactcaccgccgcactcggcagagtactggtccccccagtccccggactgcgggctgcagccgccgccgcccgccggggcctcctgctgctgccggtgctgcagctcctgcttgagcagggagagcggcgagtagtgctcggtggccagggcgcctggccgcagcccggcggacaggacccccagcagcagcagcagcaggacacgccgggcggcgcccgcggcggccacagcgccgccccagaagcagcagcagcagcagcagccggcaggtgccatcttccctcaaggcgcatgcgcgacagcccttgcccggctctcaggcctccccgcctctaacctacggcgggcaggtggaccgtggcaagggggcgggacaaggggagaagcattgtgtgctgggaatggtagtcccagctcggccagcccggggccgccttgccggtgccgggactacgaatcccaataagcccgcgcggcgcaagtcttccggtctggcgtctgacgtcttaccctccacagaatcggaagttctggactgcagttgagtggaaatgggcaacggcgggcggagcggcctgcagcaggggaaggggaacgtggatggggtggcagcgactcctactgctgcctcggcctcctgccagtacaggtgcatcgaatgcaaccaggaggccaaagagttgtaccgagactataaccacggtgtgctgaagataaccatctgtaaatcctgccagaaacctgtagacaaatatatcgagtatgatcctgttatcatcttgattaatgctatattgtgcaaagctcaggcctacagacatattcttttcaatactcaaataaatatccatggaaaactctgcatattttgtttgctttgtgaagcatacctgaggtggtggcagcttcaagattccaaccagaatactgcccctgatgacttgatcagatatgctaaggaatgggatttctatagaatgtttgcgattgctgctttagaacaaactgcctattttattggcatttttaccttcctgtgggtagaacggcccatgacggcaaaaaaaaagcccaacttcattttgctgctgaaagcattattattatctagctacggaaaactcttgctgattccagctgtcatttgggaacatgactacacatctgtgtgcctcaaactcattaaagtatttgttcttacatcaaattttcaggcaattagagtgaccctaaacatcaaccgtaagctctccttcttggccgtgttgagtggcttactgctggaaagcatcatggtctacttcttccagagtatggaatgggatgttggaagtgattatgccatctttaaatctcaggacttctgaagagttttattcttcttcactatctgtggcatgaccagctgtatctgaaagagaaaagacatgaaatataaaccaacctcctcatttctgttgagtaaaatgaagcaaagattggaaacactttctgaaaaagaaagcaatgataatagcggtggatacccacccccacaaatgcacccaagagacaagccatttacatacagatattcacagtcacacatagaaacacccacatggacacaaggaatgttgctgcagagactgaatgacatgcaacaggtgaaggtttatacgttatacacaaggccaggtaagcgctcataattcacacataataaaacatctaggtttcattcctttgacatgtttatatctttttaatttaaatgttgttactggcttaaaatattttgtgttcttacaatagaaacgcttttaataaagtctttcagaataaaccaagtttttgtaaattttcaattcaataattaaggtaatctttaaaattggatgatccaaaaataagtgataatgaaaaccactgagttatatactttgcaagggtaaattacatctgaataaagctgtaattaaaaacaac

SEQ ID NO: 976 - protein, 271 aa, Homosapiens; identical to SEQ ID NO: 34

SEQ ID NO: 977 - DNA, 2213 bp, Homosapiens
gggaggccggcggcgggaacagggctgccccgggccacctgccatctcctccgccacccttccaacagttgcttcagactcaggagagaggccgccctggccccaggagcatgctgtcagctcatttctcgactcgccgccctgcccaaaggcggctgcaggagggcgcgcggcggcgtgggtggcagcggcgggaagctgcccgccaggacccctggccgagccggctcccgcggatcgcgcgccgcagccggaggcgtgaggcccgggcgacccgtaccccggcccgggaccccagccccgctgccccgccgccccggccgactcggacgcccgccgccgcccactcaccgccgcactcggcagagtactggtccccccagtccccggactgcgggctgcagccgccgccgcccgccggggcctcctgctgctgccggtgctgcagctcctgcttgagcagggagagcggcgagtagtgctcggtggccagggcgcctggccgcagcccggcggacaggacccccagcagcagcagcagcaggacacgccgggcggcgcccgcggcggccacagcgccgccccagaagcagcagcagcagcagcagccggcaggtgccatcttccctcaaggcgcatgcgcgacagcccttgcccggctctcaggcctccccgcctctaacctacggcgggcaggtggaccgtggcaagggggcgggacaaggggagaagcattgtgtgctgggaatggtagtcccagctcggccagcccggggccgccttgccggtgccgggactacgaatcccaataagcccgcgcggcgcaagtcttccggtctggcgtctgacgtcttaccctccacagaatcggaagttctggactgcagttgagtggaaatgggcaacggcgggcggagcggcctgcagcaggggaaggggaacgtggatggggtggcagcgactcctactgctgcctcggcctcctgccagtacaggtgcatcgaatgcaaccaggaggccaaagagttgtaccgagactataaccacggtgtgctgaagataaccatctgtaaatcctgccagaaacctgtagacaaatatatcgagtatgatcctgttatcatcttgattaatgctatattgtgcaaagctcaggcctacagacatattcttttcaatactcaaataaatatccatggaaaactctgcatattttgtttgctttgtgaagcatacctgaggtggtggcagcttcaagattccaaccagaatactgcccctgatgacttgatcagatatgctaaggaatgggatttctatagaatgtttgcgattgctgctttagaacaaactgcctattttattggcatttttaccttcctctgtcatttgggaacatgactacacatctgtgtgcctcaaactcattaaagtatttgttcttacatcaaattttcaggcaattagagtgaccctaaacatcaaccgtaagctctccttcttggccgtgttgagtggcttactgctggaaagcatcatggtctacttcttccagagtatggaatgggatgttggaagtgattatgccatctttaaatctcaggacttctgaagagttttattcttcttcactatctgtggcatgaccagctgtatctgaaagagaaaagacatgaaatataaaccaacctcctcatttctgttgagtaaaatgaagcaaagattggaaacactttctgaaaaagaaagcaatgataatagcggtggatacccacccccacaaatgcacccaagagacaagccatttacatacagatattcacagtcacacatagaaacacccacatggacacaaggaatgttgctgcagagactgaatgacatgcaacaggtgaaggtttatacgttatacacaaggccaggtaagcgctcataattcacacataataaaacatctaggtttcattcctttgacatgtttatatctttttaatttaaatgttgttactggcttaaaatattttgtgttcttacaatagaaacgcttttaataaagtctttcagaataaaccaagtttttgtaaattttcaattcaataattaaggtaatctttaaaattggatgatccaaaaataagtgataatgaaaaccactgagttatatactttgcaagggtaaattacatctgaataaagctgtaattaaaaacaac

SEQ ID NO: 978 - protein, 167 aa, Homosapiens; identical to SEQ ID NO: 968

SEQ ID NO: 979 - DNA, 1187 bp, Homosapiens
gaaatgggcaacggcgggcggagcggcctgcagcaggggaaggggaacgtggatggggtggcagcgactcctactgctgcctcggcctcctgccagtacaggtgcatcgaatgcaaccaggaggccaaagagttgtaccgagactataaccacggtgtgctgaagataaccatctgtaacaaactgcctattttattggcatttttaccttcctgtgggtagaacggcccatgacggcaaaaaaaaagcccaacttcattttgctgctgaaagcattattattatctagctacggaaaactcttgctgattccagctgtcatttgggaacatgactacacatctgtgtgcctcaaactcattaaagtatttgttcttacatcaaattttcaggcaattagagtgaccctaaacatcaaccgtaagctctccttcttggccgtgttgagtggcttactgctggaaagcatcatggtctacttcttccagagtatggaatgggatgttggaagtgattatgccatctttaaatctcaggacttctgaagaggtcctgcagtgcccttgtctccacctaaccagatacggtcagctttgcctctccatggaataagtgaagactttccaaaaactccagtttgcagtgcttactttttccgttgacctccgagtgctcagcttaacacctacagcagtcacgtgcccaagaacttctgacattgccccaggttttattcttcttcactatctgtggcatgaccagctgtatctgaaagagaaaagacatgaaatataaaccaacctcctcatttctgttgagtaaaatgaagcaaagattggaaacactttctgaaaaagaaagcaatgataatagcggtggatacccacccccacaaatgcacccaagagacaagccatttacatacagatattcacagtcacacatagaaacacccacatggacacaaggaatgttgctgcagagactgaatgacatgcaacaggtgaaggtttatacgttatacacaaggccaggtaagcgctcataattcacacataataaaacatctaggtttcattcctttgacatgtttatatctttttaatttaaatgttgttactggcttaaaatattttgtgttcttacaatagaaacgcttttaataaagtctttcagaataaaccaag

SEQ ID NO: 980 - protein, 104 aa, Homosapiens; identical to SEQ ID NO: 970

SEQ ID NO: 981 - DNA, 1325 bp, Homosapiens
gaaatgggcaacggcgggcggagcggcctgcagcaggggaaggggaacgtggatggggtggcagcgactcctactgctgcctcggcctcctgccagtacaggtgcatcgaatgcaaccaggaggccaaagagttgtaccgagactataaccacggtgtgctgaagataaccatctgtaacaaactgcctattttattggcatttttaccttcctgtgggtagaacggcccatgacggcaaaaaaaaagcccaacttcattttgctgctgaaagcattattattatctagctacggaaaactcttgctgattccagctgtcatttgggaacatgactacacatctgtgtgcctcaaactcattaaagtatttgttcttacatcaaattttcaggcaattagagtgaccctaaacatcaaccgtaagctctccttcttggccgtgttgagtggcttactgctggaaagcatcatggtctacttcttccagagtatggaatgggatgttggaagtgattatgccatctttaaatctcaggacttctgaagaggtcctgcagtgcccttgtctccacctaaccagatacggtcagctttgcctctccatggaataagtgaagactttccaaaaactccagtttgcagtgcttactttttccgttgacctccgagtgctcagcttaacacctacagcagtcacgtgcccaagaacttctgacattgccccaggttttattcttcttcactatctgtggcatgaccagctgtatctgaaagagaaaagacatgaaatataaaccaacctcctcatttctgttgagtaaaatgaagcaaagattggaaacactttctgaaaaagaaagcaatgataatagcggtggatacccacccccacaaatgcacccaagagacaagccatttacatacagatattcacagtcacacatagaaacacccacatggacacaaggaatgttgctgcagagactgaatgacatgcaacaggtgaaggtttatacgttatacacaaggccaggtaagcgctcataattcacacataataaaacatctaggtttcattcctttgacatgtttatatctttttaatttaaatgttgttactggcttaaaatattttgtgttcttacaatagaaacgcttttaataaagtctttcagaataaaccaagtttttgtaaattttcaattcaataattaaggtaatctttaaaattggatgatccaaaaataagtgataatgaaaaccactgagttatatactttgcaagggtaaattacatctgaataaagctgtaattaaaaacaac

SEQ ID NO: 982 - protein, 104 aa, Homosapiens; identical to SEQ ID NO: 970

SEQ ID NO: 983 - DNA, 1355 bp, Homosapiens
cttctttagaacaaactgcctattttattggcatttttaccttcctgtgggtagaacggcccatgacggcaaaaaaaaagcccaacttcattttgctgctgaaagcattattattatctagctacggaaaactcttgctgattccagctgtcatttgggaacatgactacacatctgtgtgcctcaaactcattaaagtatttgttcttacatcaaattttcaggcaattagagtgaccctaaacatcaaccgtaagctctccttcttggccgtgttgagtggcttactgctggaaagcatcatggtctacttcttccagagtatggaatgggatgttggaagtgattatgccatctttaaatctcaggacttctgaagaggtcctgcagtgcccttgtctccacctaaccagatacggtcagctttgcctctccatggaataagtgaagactttccaaaaactccagtttgcagtgcttactttttccgttgacctccgagtgctcagcttaacacctacagcagtcacgtgcccaagaacttctgacattgccccagggtcagatcttttgtttctacttttcataagtgcatctgcttgtctgacaatcaattataatttatagttaggaaaataaggtcacatatcttgaatcacttgaaagccattaccctgttttttattatctcatgttttatacttatctatgtctgtctggtattaaaatttcatgtgtttatgcctcactctcccagcctgttcagaagtctggtgctgggagaggcatgccttgggttcctttgtatccaccttaactcagggcctgccctagtgtctgtcagtttgattttcagcagaatgtggcattctaaatacatcctttatttttcacagttttattcttcttcactatctgtggcatgaccagctgtatctgaaagagaaaagacatgaaatataaaccaacctcctcatttctgttgagtaaaatgaagcaaagattggaaacactttctgaaaaagaaagcaatgataatagcggtggatacccacccccacaaatgcacccaagagacaagccatttacatacagatattcacagtcacacatagaaacacccacatggacacaaggaatgttgctgcagagactgaatgacatgcaacaggtgaaggtttatacgttatacacaaggccaggtaagcgctcataattcacacataataaaacatctaggtttcattcctttgacatgtttatatctttttaatttaaatgttgttactggcttaaaatattttgtgttcttacaatagaaacgcttttaataaagtctttcagaataaaccaag

SEQ ID NO: 984 - protein, 104 aa, Homosapiens; identical to SEQ ID NO: 970

SEQ ID NO: 985 - DNA, 1493 bp, Homosapiens
cttctttagaacaaactgcctattttattggcatttttaccttcctgtgggtagaacggcccatgacggcaaaaaaaaagcccaacttcattttgctgctgaaagcattattattatctagctacggaaaactcttgctgattccagctgtcatttgggaacatgactacacatctgtgtgcctcaaactcattaaagtatttgttcttacatcaaattttcaggcaattagagtgaccctaaacatcaaccgtaagctctccttcttggccgtgttgagtggcttactgctggaaagcatcatggtctacttcttccagagtatggaatgggatgttggaagtgattatgccatctttaaatctcaggacttctgaagaggtcctgcagtgcccttgtctccacctaaccagatacggtcagctttgcctctccatggaataagtgaagactttccaaaaactccagtttgcagtgcttactttttccgttgacctccgagtgctcagcttaacacctacagcagtcacgtgcccaagaacttctgacattgccccagggtcagatcttttgtttctacttttcataagtgcatctgcttgtctgacaatcaattataatttatagttaggaaaataaggtcacatatcttgaatcacttgaaagccattaccctgttttttattatctcatgttttatacttatctatgtctgtctggtattaaaatttcatgtgtttatgcctcactctcccagcctgttcagaagtctggtgctgggagaggcatgccttgggttcctttgtatccaccttaactcagggcctgccctagtgtctgtcagtttgattttcagcagaatgtggcattctaaatacatcctttatttttcacagttttattcttcttcactatctgtggcatgaccagctgtatctgaaagagaaaagacatgaaatataaaccaacctcctcatttctgttgagtaaaatgaagcaaagattggaaacactttctgaaaaagaaagcaatgataatagcggtggatacccacccccacaaatgcacccaagagacaagccatttacatacagatattcacagtcacacatagaaacacccacatggacacaaggaatgttgctgcagagactgaatgacatgcaacaggtgaaggtttatacgttatacacaaggccaggtaagcgctcataattcacacataataaaacatctaggtttcattcctttgacatgtttatatctttttaatttaaatgttgttactggcttaaaatattttgtgttcttacaatagaaacgcttttaataaagtctttcagaataaaccaagtttttgtaaattttcaattcaataattaaggtaatctttaaaattggatgatccaaaaataagtgataatgaaaaccactgagttatatactttgcaagggtaaattacatctgaataaagctgtaattaaaaacaac

SEQ ID NO: 986 - protein, 104 aa, Homosapiens; identical to SEQ ID NO: 970

SEQ ID NO: 987 - DNA, 919 bp, Homosapiens
tgaaagtatcattttgttgttgttgtcgttattctcttatagcgttagaattttttgttttctcctttgatattcacgggaatctgccgcttgatatgaggagaaggggctcagtgttttgttgtaagtagaggctttggttctctaaaaatgtgtagatggaaaagtgggagaaggtaacagcatagattaataagaacaaacattgatttttccaaaaacagctttacaaaacaattcatactacccgaaaatttacatgtcaatatcgtttcattaattctgaacttattggctgccttctcctttccagtgaccctaaacatcaaccgtaagctctccttcttggccgtgttgagtggcttactgctggaaagcatcatggtctacttcttccagagtatggaatgggatgttggaagtgattatgccatctttaaatctcaggacttctgaagagttttattcttcttcactatctgtggcatgaccagctgtatctgaaagagaaaagacatgaaatataaaccaacctcctcatttctgttgagtaaaatgaagcaaagattggaaacactttctgaaaaagaaagcaatgataatagcggtggatacccacccccacaaatgcacccaagagacaagccatttacatacagatattcacagtcacacatagaaacacccacatggacacaaggaatgttgctgcagagactgaatgacatgcaacaggtgaaggtttatacgttatacacaaggccaggtaagcgctcataattcacacataataaaacatctaggtttcattcctttgacatgtttatatctttttaatttaaatgttgttactggcttaaaatattttgtgttcttacaatagaaacgcttttaataaagtctttcagaataaaccaag

SEQ ID NO: 988 - protein, 87 aa, Homosapiens
MKYKPTSSFLLSKMKQRLETLSEKESNDNSGGYPPPQMHPRDKPFTYRYSQSHIETPTWTQGMLLQRLNDMQQVKVYTLYTRPGKRS

SEQ ID NO: 989 - DNA, 1057 bp, Homosapiens
tgaaagtatcattttgttgttgttgtcgttattctcttatagcgttagaattttttgttttctcctttgatattcacgggaatctgccgcttgatatgaggagaaggggctcagtgttttgttgtaagtagaggctttggttctctaaaaatgtgtagatggaaaagtgggagaaggtaacagcatagattaataagaacaaacattgatttttccaaaaacagctttacaaaacaattcatactacccgaaaatttacatgtcaatatcgtttcattaattctgaacttattggctgccttctcctttccagtgaccctaaacatcaaccgtaagctctccttcttggccgtgttgagtggcttactgctggaaagcatcatggtctacttcttccagagtatggaatgggatgttggaagtgattatgccatctttaaatctcaggacttctgaagagttttattcttcttcactatctgtggcatgaccagctgtatctgaaagagaaaagacatgaaatataaaccaacctcctcatttctgttgagtaaaatgaagcaaagattggaaacactttctgaaaaagaaagcaatgataatagcggtggatacccacccccacaaatgcacccaagagacaagccatttacatacagatattcacagtcacacatagaaacacccacatggacacaaggaatgttgctgcagagactgaatgacatgcaacaggtgaaggtttatacgttatacacaaggccaggtaagcgctcataattcacacataataaaacatctaggtttcattcctttgacatgtttatatctttttaatttaaatgttgttactggcttaaaatattttgtgttcttacaatagaaacgcttttaataaagtctttcagaataaaccaagtttttgtaaattttcaattcaataattaaggtaatctttaaaattggatgatccaaaaataagtgataatgaaaaccactgagttatatactttgcaagggtaaattacatctgaataaagctgtaattaaaaacaac

SEQ ID NO: 990 - protein, 87 aa, Homosapiens; identical to SEQ ID NO: 988

SEQ ID NO: 991 - DNA, 397 bp, Homosapiens
gccgctctggcgctgctccgcaaagagatgaatttgcagtggtgtgctgcttctttcaaaggatttgtaaattcttttggcttgcctggcatgttcctgtggtggtccttggagcaaaagtccatgatacagctggtcatgccacagatagtgaagaagaataaaactgtgaaaaataaaggatgtatttagaatgccacattctgctgaaaatcaaactgacagacactagggcaggccctgagttaaggtggatacaaaggaacccaaggcatgcctctcccagcaccagacttctgaacaggctgggagagtgaggcataaacacatgaaattttaataccagacagacatagataagtataaaacatgagataataaaaaacagggtaatggc

SEQ ID NO: 992 - protein, 54 aa, Homosapiens
MNLQWCAASFKGFVNSFGLPGMFLWWSLEQKSMIQLVMPQIVKKNKTVKNKGCI

SEQ ID NO: 993 - DNA, 1542 bp, Homosapiens
gccatggaagctgctgattgttcttgaatttaaagtggagaataagggaccacaaattgcagggtttgagcattccatgtttttcttaaatgagcctgtctgcattttcaaaacgtgtgctttcaaaagagagctgtattttctgaatccagctgtgaatgtggagaccagccgtcctccaagggcatgcgagaacacaccgttgagatccaggctgcttctgctcggagagtggcttgctcggcggctccccagccactctttttctggaagggttggtctccgccagctggacatgtccttgctctgccaactgtacagcctctacgagtcgattcaggagtacaagggggcatgccaggcagcctccagcccagactgcacttacgctctggagaacggcttcttcgatgaagaggaggaatatttccaggagcagaactccctgcacgacaggagggaccgaggccctcctcgggacttgtcactgcctgtctcctccctctccagcagcgactggattctggagtccatctagagggtcttgggagggatgtgactgttgggaagcccttcctactggacacgctgtcatcatttgctgcttctcttgcaagaaagcacctccgttgtggacggtcctcgggcacaggggatgagcgctaccagtttcatttgtaggcagggagttctccgcggatgcatggtggcagtctgctttgatggcagcagtttctgcttaggtgacctagaggtcctcagcagtatcctccacacctatttattgaggtgcacctgctggggattcataatgagaatataacaagaggatctcggtgaaaggccttagtgggtgttttgtgtgaggtggcttgtagctagctacttccttacagatggtagagtattccaatcctctttgtgttagggttcttgcttccagtttgggatgtattaaaaccaccatttcactgcttcccttcctcaatatgctctgcagcttttcttgctgtttaaacctctcgcctcagctttatttatttgtaagctgcattactaactgcccagtgattcggtgaaagctttttactgaaaaagttaacatttctagtcatcccaatcaactggcttttttcaaccaaaattttatatcattctttgtctatcagatacgagaggaaggaagataatacgaagacatgttgaatagtgaaaaaaaaaaaaagaacacaaaaactggggcaagccaatgtgatgtatcactcactgtaagatggcaaatgttttcatttttaagattccgaatgtaaactagtgtgctagaaagcaaaccacccgccactcaaaccagtaattaccttaagccttaatatatttattaaaatactttatgagaacattacactttgtaggttaaaaatgaggataaaatgctaaactatctgtgtcatgtgttattttattctgaatttggaatcatcaactttcatgacttgaatgcattgagtccagtcaaataatgaaagaaaattagtttgtttt

SEQ ID NO: 994 - protein, 153 aa, Homosapiens
MFFLNEPVCIFKTCAFKRELYFLNPAVNVETSRPPRACENTPLRSRLLLLGEWLARRLPSHSFSGRVGLRQLDMSLLCQLYSLYESIQEYKGACQAASSPDCTYALENGFFDEEEEYFQEQNSLHDRRDRGPPRDLSLPVSSLSSSDWILESI

SEQ ID NO: 995 - DNA, 1929 bp, Homosapiens
gcttagtaggttcggagctagggagtggcacagaagggttcgtgacggggctggaggtgagtcggggggttagagggtagtcacgcggagttggagatgaattagggcgctggaggggcgcgagggaggaggagacccgggtggaggcgagcccggctgctggacgcggacgccacccggacccggggcccgcgcaggggcctcgaggagagggggcggggccgggggggcgtggcgcgggaggggaagtgggcggggcaccgccgggaagggggcgggccgggggaaagccttggttcgctgcagcggggcaggcgcgtggccgggccgcggcgcgatgagtggggcccgggcggcgcccggggccgcgggcaacggcgcggtccgggggctgcgggtggacgggctgcccccgctgccaaagagcttgagcgggctgctgcactcggcgtcgggcggcggcgcgtctgggggctggcggcacctggagcggctgtacgcgcagaagtcgcgcatccaggacgagctgagccgcgggggcccgggcggcggcggggcccgggcggcagcgctgcccgccaagcctcccaacctggacgccgctctggcgctgctccgcaaagagatggagctgagcaatttatccacagtttctcagctggttggtctccgccagctggacatgtccttgctctgccaactgtacagcctctacgagtcgattcaggagtacaagggggcatgccaggcagcctccagcccagactgcacttacgctctggagaacggcttcttcgatgaagaggaggaatatttccaggagcagaactccctgcacgacaggagggaccgaggccctcctcgggacttgtcactgcctgtctcctccctctccagcagcgactggattctggagtccatctagagggtcttgggagggatgtgactgttgggaagcccttcctactggacacgctgtcatcatttgctgcttctcttgcaagaaagcacctccgttgtggacggtcctcgggcacaggggatgagcgctaccagtttcatttgtaggcagggagttctccgcggatgcatggtggcagtctgctttgatggcagcagtttctgcttaggtgacctagaggtcctcagcagtatcctccacacctatttattgaggtgcacctgctggggattcataatgagaatataacaagaggatctcggtgaaaggccttagtgggtgttttgtgtgaggtggcttgtagctagctacttccttacagatggtagagtattccaatcctctttgtgttagggttcttgcttccagtttgggatgtattaaaaccaccatttcactgcttcccttcctcaatatgctctgcagcttttcttgctgtttaaacctctcgcctcagctttatttatttgtaagctgcattactaactgcccagtgattcggtgaaagctttttactgaaaaagttaacatttctagtcatcccaatcaactggcttttttcaaccaaaattttatatcattctttgtctatcagatacgagaggaaggaagataatacgaagacatgttgaatagtgaaaaaaaaaaaaagaacacaaaaactggggcaagccaatgtgatgtatcactcactgtaagatggcaaatgttttcatttttaagattccgaatgtaaactagtgtgctagaaagcaaaccacccgccactcaaaccagtaattaccttaagccttaatatatttattaaaatactttatgagaacattacactttgtaggttaaaaatgaggataaaatgctaaactatctgtgtcatgtgttattttattctgaatttggaatcatcaactttcatgacttgaatgcattgagtccagtcaaataatgaaagaaaattagtttgtttt

SEQ ID NO: 996 - protein, 195 aa, Homosapiens
MSGARAAPGAAGNGAVRGLRVDGLPPLPKSLSGLLHSASGGGASGGWRHLERLYAQKSRIQDELSRGGPGGGGARAAALPAKPPNLDAALALLRKEMELSNLSTVSQLVGLRQLDMSLLCQLYSLYESIQEYKGACQAASSPDCTYALENGFFDEEEEYFQEQNSLHDRRDRGPPRDLSLPVSSLSSSDWILESI

SEQ ID NO: 997 - DNA, 1896 bp, Homosapiens
gcttagtaggttcggagctagggagtggcacagaagggttcgtgacggggctggaggtgagtcggggggttagagggtagtcacgcggagttggagatgaattagggcgctggaggggcgcgagggaggaggagacccgggtggaggcgagcccggctgctggacgcggacgccacccggacccggggcccgcgcaggggcctcgaggagagggggcggggccgggggggcgtggcgcgggaggggaagtgggcggggcaccgccgggaagggggcgggccgggggaaagccttggttcgctgcagcggggcaggcgcgtggccgggccgcggcgcgatgagtggggcccgggcggcgcccggggccgcgggcaacggcgcggtccgggggctgcgggtggacgggctgcccccgctgccaaagagcttgagcgggctgctgcactcggcgtcgggcggcggcgcgtctgggggctggcggcacctggagcggctgtacgcgcagaagtcgcgcatccaggacgagctgagccgcgggggcccgggcggcggcggggcccgggcggcagcgctgcccgccaagcctcccaacctggacgccgctctggcgctgctccgcaaagagatggttggtctccgccagctggacatgtccttgctctgccaactgtacagcctctacgagtcgattcaggagtacaagggggcatgccaggcagcctccagcccagactgcacttacgctctggagaacggcttcttcgatgaagaggaggaatatttccaggagcagaactccctgcacgacaggagggaccgaggccctcctcgggacttgtcactgcctgtctcctccctctccagcagcgactggattctggagtccatctagagggtcttgggagggatgtgactgttgggaagcccttcctactggacacgctgtcatcatttgctgcttctcttgcaagaaagcacctccgttgtggacggtcctcgggcacaggggatgagcgctaccagtttcatttgtaggcagggagttctccgcggatgcatggtggcagtctgctttgatggcagcagtttctgcttaggtgacctagaggtcctcagcagtatcctccacacctatttattgaggtgcacctgctggggattcataatgagaatataacaagaggatctcggtgaaaggccttagtgggtgttttgtgtgaggtggcttgtagctagctacttccttacagatggtagagtattccaatcctctttgtgttagggttcttgcttccagtttgggatgtattaaaaccaccatttcactgcttcccttcctcaatatgctctgcagcttttcttgctgtttaaacctctcgcctcagctttatttatttgtaagctgcattactaactgcccagtgattcggtgaaagctttttactgaaaaagttaacatttctagtcatcccaatcaactggcttttttcaaccaaaattttatatcattctttgtctatcagatacgagaggaaggaagataatacgaagacatgttgaatagtgaaaaaaaaaaaaagaacacaaaaactggggcaagccaatgtgatgtatcactcactgtaagatggcaaatgttttcatttttaagattccgaatgtaaactagtgtgctagaaagcaaaccacccgccactcaaaccagtaattaccttaagccttaatatatttattaaaatactttatgagaacattacactttgtaggttaaaaatgaggataaaatgctaaactatctgtgtcatgtgttattttattctgaatttggaatcatcaactttcatgacttgaatgcattgagtccagtcaaataatgaaagaaaattagtttgtttt

SEQ ID NO: 998 - protein, 184 aa, Homosapiens; identical to SEQ ID NO: 36

SEQ ID NO: 999 - DNA, 1759 bp, Homosapiens
gcgtcgtgtttatttttgcctgagctgatggataatttccgagatttaatccctttctctggtttcctgacatttccacttagagttactcttgtgtttatggccagaatgaaaggcatgtttactagtgttttgaagtttcaaaagtgggtctggcgttcttgctgactgctgcgggtactgctggacaaggccgtgctgagaaggccagcgcgcccggcggcaaggagcgacctgcccgggtctggggcccccagccgccccccgcggcgagtgggaggcagcaggaggcgggctggattccgccctcggggagggccgggggtcctgggaccagagccaggcctcctgccctcgacgtcctgccggttgtgagccagagcctcggtacccccaccccctgcaacggcctgcttcgtgggatctgaagctgggccgccccctgggcagggcagggatcggtgaggcaaggagctgaggagcgctggcaggttggtctccgccagctggacatgtccttgctctgccaactgtacagcctctacgagtcgattcaggagtacaagggggcatgccaggcagcctccagcccagactgcacttacgctctggagaacggcttcttcgatgaagaggaggaatatttccaggagcagaactccctgcacgacaggagggaccgaggccctcctcgggacttgtcactgcctgtctcctccctctccagcagcgactggattctggagtccatctagagggtcttgggagggatgtgactgttgggaagcccttcctactggacacgctgtcatcatttgctgcttctcttgcaagaaagcacctccgttgtggacggtcctcgggcacaggggatgagcgctaccagtttcatttgtaggcagggagttctccgcggatgcatggtggcagtctgctttgatggcagcagtttctgcttaggtgacctagaggtcctcagcagtatcctccacacctatttattgaggtgcacctgctggggattcataatgagaatataacaagaggatctcggtgaaaggccttagtgggtgttttgtgtgaggtggcttgtagctagctacttccttacagatggtagagtattccaatcctctttgtgttagggttcttgcttccagtttgggatgtattaaaaccaccatttcactgcttcccttcctcaatatgctctgcagcttttcttgctgtttaaacctctcgcctcagctttatttatttgtaagctgcattactaactgcccagtgattcggtgaaagctttttactgaaaaagttaacatttctagtcatcccaatcaactggcttttttcaaccaaaattttatatcattctttgtctatcagatacgagaggaaggaagataatacgaagacatgttgaatagtgaaaaaaaaaaaaagaacacaaaaactggggcaagccaatgtgatgtatcactcactgtaagatggcaaatgttttcatttttaagattccgaatgtaaactagtgtgctagaaagcaaaccacccgccactcaaaccagtaattaccttaagccttaatatatttattaaaatactttatgagaacattacactttgtaggttaaaaatgaggataaaatgctaaactatctgtgtcatgtgttattttattctgaatttggaatcatcaactttcatgacttgaatgcattgagtccagtcaaataatgaaagaaaattagtttgtttt

SEQ ID NO: 1000 - protein, 82 aa, Homosapiens
MKRRNISRSRTPCTTGGTEALLGTCHCLSPPSPAATGFWSPSRGSWEGCDCWEALPTGHAVIICCFSCKKAPPLWTVLGHRG

SEQ ID NO: 1001 - DNA, 1074 bp, Homosapiens
tgaatcatgcgccgtgtggaaggaatgtgctggcaggcgcagatcgccggctgagtgttccactgaaattaaactcaagtgctgacttctcgttttttacctccccaccccttccctcaaggttggtctccgccagctggacatgtccttgctctgccaactgtacagcctctacgagtcgattcaggagtacaagggggcatgccaggcagcctccagcccagactgcacttacgctctggagaacggcttcttcgatgaagaggaggaatatttccaggagcagaactccctgcacgacaggagggaccgaggccctcctcgggacttgtcactgcctgtctcctccctctccagcagcgactggattctggagtccatctagagggtcttgggagggatgtgactgttgggaagcccttcctactggacacgctgtcatcatttgctgcttctcttgcaagaaagcacctccgttgtggacggtcctcgggcacaggggatgagcgctaccagtttcatttgtaggcagggagttctccgcggatgcatggtggcagtctgctttgatggcagcagtttctgcttaggtgacctagaggtcctcagcagtatcctccacacctatttattgaggtgcacctgctggggattcataatgagaatataacaagaggatctcggtgaaaggccttagtgggtgttttgtgtgaggtggcttgtagctagctacttccttacagatggtagagtattccaatcctctttgtgttagggttcttgcttccagtttgggatgtattaaaaccaccatttcactgcttcccttcatgttgaatagtgaaaaaaaaaaaaagaacacaaaaactggggcaagccaatgtgatgtatcactcactgtaagatggcaaatgttttcatttttaagattccgaatgtaaactagtgtgctagaaagcaaaccacccgccactcaaaccagtaattaccttaagccttaatatatttattaaaatactttatgagaacattacactttgtaggttaaaaatgaggataaaatgctaaactatc

SEQ ID NO: 1002 - protein, 65 aa, Homosapiens
MVEYSNPLCVRVLASSLGCIKTTISLLPFMLNSEKKKKNTKTGASQCDVSLTVRWQMFSFLRFRM

SEQ ID NO: 1003 - DNA, 2005 bp, Homosapiens
attacaccagctctctcagtccggggaggaggaggagcaggaggaacgcgaggaggaaggagaggaggagcggccagcagtagccacgaccgccaccaccaggcagaggaagagttcgtggggaggaaaagacctctcctcccccttggagcgccttctctctgcttttggagaaagggaatacacgataaagaaggagacggaaagaagagaaaaagtgaggcgggagacagagggaaaagggcgtgaacagaaagggccggagcgtgcaggggagcacagggcgcgggggcggcactgccgagccgggagcgctgccgcttgggcaggtgccgcggccgctgcccggaggcggcatgtgacgcgcggccgcagctgcccgcgggcggagcgctctcagaccccggagcgcacaccgcggggccatcggtgccatcgcggatctccaggctcctcatcagtccgccggggccgcagcagcgcttctgggaagacgggcgatgaactgaagggcggctccgggcaggggggcacgatcttaaggacagtcgctccctgaacgcggagccggaggagacgaagggaaggtggagcggacgccacccgcgcaccgggcaggcgcggagaccggcgtgggacagccacctggagcgcagctgccagaaagaaggactttgctgctttgggccaggatctgaacttaggtgtaaaccattgccctggcagagggaacctacccagtccattgctgcctgctacaagatatgaacagtaatggcacatattttggttatgagtcactcagaggactgtggattgaatgaactgtatccatccccatcatgatgtacagaaccaagtctcttcactacacttgtgttctgattagtggccaaataaatgacagtcagaacttcagctaaggtacaataaggttttgctgtggcgtggcacctggtctctttctagaaggaaagttcaacatacagcacaattctggacacattgtattggtttgatgctcctacctggaacagatcctcatgagctagtaagtttgaaggggagtcataaagaggaacaggcattatacgcaaggctgaagaagcagttggtaactaacagtacatctttttctaaggccaacactaaacataagttgcagagctggcctgtggtggaactcacaagtcttattggcaatatatgtgaggagacaaaaagcaacatatggagaaatacaaaaatatactccctagagatactgcctcttcagatgtcaagaaaaacctggatgaaatgaagcaagagtggcacgctgcaaagttacaaattcaaggccacccacagaaccaaacattaacacttaggtggagctggtctcttgggcagcctgacatctggtccactcctctgtcctatgccgggatcatcatgaccgtagagattatgtcactgttttgcatccttgttacataactcagttcctggtagattccagtgaaaggcacatggtggtgatatttttgagaaagtagagaagaaaagaatgaatccggatggttgttgagacagaaactgagcgtcgaacctcattttctctcgtacccaaaccttgatgaaacaacagaggaaagtattgggctgcaattgtaggcgcacaaaagcaaaccttgagtcatggatgaccgaccaaggaagagtccccttgggaggaggaggtgccaaagaccagtgatactgctttgggttatgtgcactgagggtttccaaccctgacggatatggattctaatttaaaatatcacagggaagaaaaaaatagacgttcccatggcaacattttctcagggccagctcttctgtcttattatcatatcttatttaaatatttcctggaatcagtttaaacttaatccctctgtgtgtcttctattttcagtggccatggagagcgtaacatctggtcagaggttttccttaaataaatcatataattgtaggc

SEQ ID NO: 1004 - protein, 94 aa, Homosapiens
MLLPGTDPHELVSLKGSHKEEQALYARLKKQLVTNSTSFSKANTKHKLQSWPVVELTSLIGNICEETKSNIWRNTKIYSLEILPLQMSRKTWMK

SEQ ID NO: 1005 - DNA, 1923 bp, Homosapiens
gggcaatggcgggcgcccctcccccagcctcgttgccgccttgcagtttgatctcagactgctgtgctagcaatcagcgagactccgtgggcgtaggaccctccgagccaggtgtgggatatagtctcgtggtgcgccgtttcttaagctggtctgaaaagcgcaatattcgggtgggagtgacccgattttccaggtgcttccgtcacccctttctttgactcggaaagggaactccctgaccccttgcgcttcccaggtgaggcaatgcctcgccctgcttcggctcgcgcacggtgcgcgcacacactggcctgcgcccactgtctagcactccctagtgagatgaacccggtacctcagatggaaatgcagaaatcacccgtcttctgcgtcgctcacgctgggagctgtagaccggagctgttcctattcggccatcttggctcctagtatttttaattaagcacttgtgttctgattagtggccaaataaatgacagtcagaacttcagctaaggtacaataaggttttgctgtggcgtggcacctggtctctttctagaaggaaagttcaacatacagcacaattctggacacattgtattggtttgatgctcctacctggaacaggtggagctggtctcttgggcagcctgacatctggtccactcctctgtcctatgccgggatcatcatgaccgtagagattatgtcactgttttgcatccttgttacataactcagttcctggtagattactatgtcagagagtcacaatgaccttgcacaataacagtacaacctcgcctttgtttccaaacatcagctcctcctggatacacagcccctccgatgcagggctgcccccgggaaccgtcactcatttcggcagctacaatgtttctcgagcagctggcaatttctcctctccagacggtaccaccgatgaccctctgggaggtcataccgtctggcaagtggtcttcatcgctttcttaacgggcatcctggccttggtgaccatcatcggcaacatcctggtaattgtgtcatttaaggtcaacaagcagctgaagacggtcaacaactacttcctcttaagcctggcctgtgccgatctgattatcggggtcatttcaatgaatctgtttacgacctacatcatcatgaatcgatgggccttagggaacttggcctgtgacctctggcttgccattgactacgtagccagcaatgcctctgttatgaatcttctggtcatcagctttgacagatacttttccatcacgaggccgctcacgtaccgagccaaacgaacaacaaagagagccggtgtgatgatcggtctggcttgggtcatctcctttgtcctttgggctcctgccatcttgttctggcaatactttgttggaaagagaactgtgcctccgggagagtgcttcattcagttcctcagtgagcccaccattacttttggcacagccatcgctgctttttatatgcctgtcaccattatgactattttatactggaggatctataaggaaactgaaaagcgtaccaaagagcttgctggcctgcaagcctctgggacagaggcagagacagaaaactttgtccaccccacgggcagttctcgaagctgcagcagttacgaacttcaacagcaaagcatgaaacgctccaacaggaggaagtatggccgctgccacttctggttcacaaccaagagctggaaacccagctccgagcagatggaccaagaccacagcagcagtgacagttggaacaacaatgatgctgctgcctccctggagaactccgcctcctccgacgaggaggacattggctccgagacgagagccatctactccatcgtgctcaagcttccgggtcacagcaccatcctcaactccacca

SEQ ID NO: 1006 - protein, 380 aa, Homosapiens
MTLHNNSTTSPLFPNISSSWIHSPSDAGLPPGTVTHFGSYNVSRAAGNFSSPDGTTDDPLGGHTVWQVVFIAFLTGILALVTIIGNILVIVSFKVNKQLKTVNNYFLLSLACADLIIGVISMNLFTTYIIMNRWALGNLACDLWLAIDYVASNASVMNLLVISFDRYFSITRPLTYRAKRTTKRAGVMIGLAWVISFVLWAPAILFWQYFVGKRTVPPGECFIQFLSEPTITFGTAIAAFYMPVTIMTILYWRIYKETEKRTKELAGLQASGTEAETENFVHPTGSSRSCSSYELQQQSMKRSNRRKYGRCHFWFTTKSWKPSSEQMDQDHSSSDSWNNNDAAASLENSASSDEEDIGSETRAIYSIVLKLPGHSTILNS

SEQ ID NO: 1007 - DNA, 567 bp, Homosapiens
aggttttgctgtggcgtggcacctggtctctttctagaaggaaagttcaacatacagcacaattctggacacattgtattggtttgatgctcctacctggaacaggtaacagaggaagttcctaagttgtctggagattgcatgtcctcacacactaaaatcctctgagctgaatgattcagctttcactattgctgtgtctgtggacaaaaaagcaaaatgtgagtcaattccaggttccgtcacatttgggagttgccaagtaaaggaaaacataaaagattaatgttattattctgattttattttgttttgaggagaagcgtgggaaatgactaccatacaaatcaagaaattcatgaaggcaaacagttgatgactgtcacctagcaatctgttattttcttttatcctttccccaagacatatgccctctgacataagcattaaaatcaaattatacaattgtcagaaaacctgttctcaaagctttagggtaaaaattgtttaatcaaattgtaacacaaattgagaaatatcattaaagtgataatgccatcctgtaag

SEQ ID NO: 1008 - protein, 30 aa, Homosapiens
MIQLSLLLCLWTKKQNVSQFQVPSHLGVAK

SEQ ID NO: 1009 - DNA, 2441 bp, Homosapiens
tttaatctatagagtgttattctacactggacctctctcttattttttggagtctagcatcttgcatcttcctggagccccaactaaactcataacttctaagcttctaagaaatatatgacgagctccatgagggccaaggctctccattcttgttcaccactgcacactcaggagctcatggcatgctggctgtgctagttctatcctcaacagaataattgctgacaaactctcttgcccagaaaatgtctactggaattatggagtacaaaaaaactacaaaagcaatgaaaaaaagaaggatgttttatttacatcctatttcaaaaccattgctttcttgctattgtatgtctctgcaggcccaatatcgcgcatcttcataagaagtttagaattgttccttatgtttccttctaacaaacactggtgttaagtttcaagaagttggtgaaatggagacagccaatccaacccaggagacagtgtttgaaaacagggcttcagctacttgcatgatgtggattggggaaatggtctgtcctcctagccatgggatgtccctgctgtgttcaggaatctttccatctcttggattttaaaggaaagttaatttttccttccctataaagatagggcctttatagaggtaatcgccttaaaatgaggctattagagtggccttaatccaacatcactagagttcttagaagaaggggacatttggacacagagacatggggagaacgccatatgaagacgaaggcagagattcatctacaaaccaaggaactacaaagactgccagcagcccccagaagccaggcggcagacatggaacagattctccctcacagctgtcaggaggagccaaccctgcctccagaattgtgaagcactaagtttctgttgtttaggccttccagtctctgctactttattgcaacaactctagcaaattaatgcacaaatggcagaatggtatttttcaacttttatgagaaaagtaaaggcagttatagtagaagagagcatcatgagtcgactgtgctcagatagggctatttgcttttccccaactatgctccatacttttttcttttcatatgttttttttgagtcggggtcttgctctgctgcccaggttggagtgcagtgtcatgatcatagctcactgtaacctcgaccttctgagcttgagtgatcctcctgtctcagcctcccaagtagctgagactgcaggtgcatgccaacacagctggctatttatttgtttttattttattgtagagacagggtctcattgtgttgcccaggctggcctcaaacttctggccttaagtcatcctcctgtcttggcctcccaaagtgctgggactatgggtgtgaacccatcgcacccagacattttgtacttctttaatttggagtgtctttcctttccatgcatgcctatagaatttatgattatcatttagcccaaagaagactttcgcataaattctgccgtaacccttgttggaataaatgtattcctctaagctccctctagctctatttgtatctttattataaatattaatatatctttccttgcattgctgttacatgtatgcacatcttatcttctggcaataaataagcctcgtcccttgggggaagggctaacctttcctccttctggtattgctcaggatgctgaccacagcaccctgcacagagaagaggtttaatatttattttattacttaaattgcataagagggatctacctacttgtgaaaaaggttgctgtgacctgtgttccttcttctgtgacaagaaactaaaatgtacatatattctcttcttgatgttctttcgagttttatctccttcctagatctggttcaccagatttcctcccctccttttttttcatcaatacaaaacttcaagtcgcagtcttgccaataattcttctttgactaatttatgagttaaataaagaaaaaattcctcacacacatatcatgtccaaggtcagctcaacattgctttattccacacctctcaatgggtgtatgatgcgggcccactttaacactgtatcagtggttgattcctacgtgcagatctttctgctctttttgcctgaattatcttcaatgttctttgtgcaaaaatcacagccagtatagtctatttccaaaagagctgtaaagaggcatttcagaaacttccctaaacaatatttctttaaaatgcaccaagctggataaagccgctttgtgacctgcataaaaactccaacggataaatgtgtattaccttcccaaagaactacttctccaaagttattccagctctttccagttgaaatgtcaaacttgacataaaaatgagatgttcttgcatcaattaataaacaaataaatctgtgtttcccattgcccttt

SEQ ID NO: 1010 - protein, 123 aa, Homosapiens [sequence omitted]

SEQ ID NO: 1011 - DNA, 1332 bp, Homosapiens
gcacattcacttactgccatttcctgcctatgaggagttaaatggtatttttttcttcaagaaatattccacagtagttgtttaacatgttagagacagattgaagaaagagttaaaatagtattcataaatgaatttaatctgtatcatagtctgaaagattgtttcaaggccaaggcccaatactcttctatattaaattatctcaaggtatgtttattttcaatccatgcttaagtttagctacagagtcagggataaagtaggataagtgaaggtatttaattattgttttcttttccagatcctcaacagaataattgctgacaaactctcttgcccagaaaatgtctactggaattatggagtacaaaaaaactacaaaagcaatgaaaaaaagaaggatgttttatttacatcctatttcaaaaccattgctttcttgctattgtatgtctctgcaggcccaatatcgcgcatcttcataagaagtttagaattgttccttatgtttccttctaacaaacactggtatattcacatgaaagtgtatattttattcacttccaaaacagttagctcataattcagaacattgaggtttgcaaaatgactgaaggaaactttacctaaacaatagttgccagttctgctgagaattatcacgggcccacaacggctgtgtgtttttccatacagatattctaatttttttattatgcagctaatttttttttagactcgcgaataaaatagcaagtcagtctgtgcataagcatatgtttaaatctaccaggagaaatgtctggaatctttttggttattaaaattaaaattcaggataatgaaaggcatatgcaacttattatattctttatataacttatttcatctaatcctccaaatagctatataacatatttatccccaccttacatagatgttaaccaaagtctgtaaggttcgttcatttgtccacagttacccagaaaattgtttgtggagctcagtacaaggctgactgccagactccaaagtctatgttccttctactaccatacattgcctttgtttttcttttataaaagttgaaaaaatatcattctgcttttcctacttttccgaaaactatttatgatgataaatccagttttttgtgttaagtttcaagaagttggtgaaatggagacagccaatccaacccaggagacagtgtttgaaaacagggcttcagctacttgcatgatgtggattggggaaatggtctgtcctcctagccatgggatgtccctgctgtgttcaggaatctttccatctcttggattttaaagg

SEQ ID NO: 1012 - protein, 64 aa, Homosapiens
MMINPVFCVKFQEVGEMETANPTQETVFENRASATCMMWIGEMVCPPSHGMSLLCSGIFPSLGF

SEQ ID NO: 1013 - DNA, 1332 bp, Homosapiens
agtacggtattgttgcagctgacctgtatacgtaaggaattactgggtcatcagctctggggaatgtcttttgattatgaacacattttcagcatgtgtccactgaaggtggagctggtctcttgggcagcctgacatctggtccactcctctgtcctatgccgggatcatcatgaccgtagagattatgtcactgttttgcatccttgttacataactcagttcctggtagattactatgtcagagagtcacaatgaccttgcacaataacagtacaacctcgcctttgtttccaaacatcagctcctcctggatacacagcccctccgatgcagggctgcccccgggaaccgtcactcatttcggcagctacaatgtttctcgagcagctggcaatttctcctctccagacggtaccaccgatgaccctctgggaggtcataccgtctggcaagtggtcttcatcgctttcttaacgggcatcctggccttggtgaccatcatcggcaacatcctggtaattgtgtcatttaaggtcaacaagcagctgaagacggtcaacaactacttcctcttaagcctggcctgtgccgatctgattatcggggtcatttcaatgaatctgtttacgacctacatcatcatgaatcgatgggccttagggaacttggcctgtgacctctggcttgccattgactacgtagccagcaatgcctctgttatgaatcttctggtcatcagctttgacagatacttttccatcacgaggccgctcacgtaccgagccaaacgaacaacaaagagagccggtgtgatgatcggtctggcttgggtcatctcctttgtcctttgggctcctgccatcttgttctggcaatactttgttggaaagagaactgtgcctccgggagagtgcttcattcagttcctcagtgagcccaccattacttttggcacagccatcgctgctttttatatgcctgtcaccattatgactattttatactggaggatctataaggaaactgaaaagcgtaccaaagagcttgctggcctgcaagcctctgggacagaggcagagacagaaaactttgtccaccccacgggcagttctcgaagctgcagcagttacgaacttcaacagcaaagcatgaaacgctccaacaggaggaagtatggccgctgccacttctggttcacaaccaagagctggaaacccagctccgagcagatggaccaagaccacagcagcagtgacagttggaacaacaatgatgctgctgcctccctggagaactccgcctcctccgacgaggaggacattggctccg

SEQ ID NO: 1014 - protein, 358 aa, Homosapiens
MTLHNNSTTSPLFPNISSSWIHSPSDAGLPPGTVTHFGSYNVSRAAGNFSSPDGTTDDPLGGHTVWQVVFIAFLTGILALVTIIGNILVIVSFKVNKQLKTVNNYFLLSLACADLIIGVISMNLFTTYIIMNRWALGNLACDLWLAIDYVASNASVMNLLVISFDRYFSITRPLTYRAKRTTKRAGVMIGLAWVISFVLWAPAILFWQYFVGKRTVPPGECFIQFLSEPTITFGTAIAAFYMPVTIMTILYWRIYKETEKRTKELAGLQASGTEAETENFVHPTGSSRSCSSYELQQQSMKRSNRRKYGRCHFWFTTKSWKPSSEQMDQDHSSSDSWNNNDAAASLENSASSDEEDIG

SEQ ID NO: 1015 - DNA, 486 bp, Homosapiens
aggctccctccctgccaggttgtgggtgcaacattcagggaatggttactgaagtgttccaggcaccagagctcaggcaagaagtggaaaactgcgcaagatcctgcaccattcaacggctaaaatgacttttaaaactacctggtgaatggcaataccacatcaaaccactaggtggcaaagcagactcggagaacgacctctctgccagcaggcgctgaagcagctacccgttccccatgctggtgaccaggaacttcagcttagctcagtcatgcagttcgcggaggatatcaaacagagtcaacaaagctttgcaatcaaacgtgtctttaaagggaatccaacttgtgaacctggctcttgatattcatttgaagctgcaagggggaaaagatgttacctaatatggagcaatggctcttattgtgaacaaaacatctctgaacaccaaaaccggaataaaattctatttaaaaaggggaa

SEQ ID NO: 1016 - protein, 72 aa, Homosapiens [sequence omitted]

SEQ ID NO: 1017 - DNA, 2320 bp, Homosapiens
aatgaacttgatgtttggcttcatagagattcagcaccctgtaataggccttccatgtcttttaacgtatgtaatgcaaagaacaaacaaataaaggcagaaatttttctaactctgtctcttctctctttcccccagactatgtcagagagtcacaatgaccttgcacaataacagtacaacctcgcctttgtttccaaacatcagctcctcctggatacacagcccctccgatgcagggctgcccccgggaaccgtcactcatttcggcagctacaatgtttctcgagcagctggcaatttctcctctccagacggtaccaccgatgaccctctgggaggtcataccgtctggcaagtggtcttcatcgctttcttaacgggcatcctggccttggtgaccatcatcggcaacatcctggtaattgtgtcatttaaggtcaacaagcagctgaagacggtcaacaactacttcctcttaagcctggcctgtgccgatctgattatcggggtcatttcaatgaatctgtttacgacctacatcatcatgaatcgatgggccttagggaacttggcctgtgacctctggcttgccattgactacgtagccagcaatgcctctgttatgaatcttctggtcatcagctttgacagatacttttccatcacgaggccgctcacgtaccgagccaaacgaacaacaaagagagccggtgtgatgatcggtctggcttgggtcatctcctttgtcctttgggctcctgccatcttgttctggcaatactttgttggaaagagaactgtgcctccgggagagtgcttcattcagttcctcagtgagcccaccattacttttggcacagccatcgctgctttttatatgcctgtcaccattatgactattttatactggaggatctataaggaaactgaaaagcgtaccaaagagcttgctggcctgcaagcctctgggacagaggcagagacagaaaactttgtccaccccacgggcagttctcgaagctgcagcagttacgaacttcaacagcaaagcatgaaacgctccaacaggaggaagtatggccgctgccacttctggttcacaaccaagagctggaaacccagctccgagcagatggaccaagaccacagcagcagtgacagttggaacaacaatgatgctgctgcctccctggagaactccgcctcctccgacgaggaggacattggctccgagacgagagccatctactccatcgtgctcaagcttccgggtcacagcaccatcctcaactccaccaagttaccctcatcggacaacctgcaggtgcctgaggaggagctggggatggtggacttggagaggaaagccgacaagctgcaggcccagaagagcgtggacgatggaggcagttttccaaaaagcttctccaagcttcccatccagctagagtcagccgtggacacagctaagacttctgacgtcaactcctcagtgggtaagagcacggccactctacctctgtccttcaaggaagccactctggccaagaggtttgctctgaagaccagaagtcagatcactaagcggaaaaggatgtccctggtcaaggagaagaaagcggcccagaccctcagtgcgatcttgcttgccttcatcatcacttggaccccatacaacatcatggttctggtgaacaccttttgtgacagctgcatacccaaaaccttttggaatctgggctactggctgtgctacatcaacagcaccgtgaaccccgtgtgctatgctctgtgcaacaaaacattcagaaccactttcaagatgctgctgctgtgccagtgtgacaaaaaaaagaggcgcaagcagcagtaccagcagagacagtcggtcatttttcacaagcgcgcacccgagcaggccttgtagaatgaggttgtatcaatagcagtgacaaaacgcacacatcaacccacagaccttaggaggaggaaggcgagggcggggtgacttctggtgatgataaaaatggttttatcacccagatgtgaaagaagctgcctgtttactgatccattgaataaacccattttaatagaaaaagtcaataccaattcagcaaaaagaaaaaaaaaacatactactgaatataaagaaatttattctgaaatagactttacgtgtttttttcttaaagaggagaaaaatattgcttgacggcaattatatacccaaagtgatttgcctgggtcctttaattcccattagctttggaatctcagatgagcatagctgacccagttcccacattcttcccaa

SEQ ID NO: 1018 - protein, 590 aa, Homosapiens; identical to SEQ ID NO: 38

SEQ ID NO: 1019 - DNA, 438 bp, Homosapiens
aaggaacttccacttccaagccgtagctggctgcatcctcttcatgactcttgggaaaatattttctgtggagtctaaaagaaacaaaaatacacctgaaaagaaaaaaaggtaagcattccttacaaaagagaaaatttcccttccatgttatgtgtctacagacaaatatttttcttcacatgcacttttggagtaaggactatatgcgtagctatagtttacacctgtatatactcaggaagtatttggattatgatggtatgatgatagttgttaaagaaagttcttttgcatgtgaaaaagaaagggaagacaaggcaaacagcagtctgttcagcattatcctttcaatgaattctacccttttatacaataaaaagctgtggctgtattataggccctgggttaaataaaagcaaaccacactctttgttc

SEQ ID NO: 1020 - protein, 87 aa, Homosapiens [sequence omitted]

SEQ ID NO: 1021 - DNA, 953 bp, Homosapiens
aggaacatgctgcttgcccaaaattctccacaatcctccacctccgctcttccatttaggatataaaagagggttttctcagaccttctgccaatgcgcagacagatgaaagacgacacagaggttctcatcattctgctgaggaactgaaagcgggtttcccactccaatgtcttagtttggaatcacggcttttgtcccctctccgagaatgaataatcaccaagaaaagagaggccgtggtaggtgaaggaatgcccaattcagccgaaaagaagtcaatccctcctgcctccttcagcttggagtttagggtggcactcagcaaggagaaggccatgtttagtcgagcaccaggatcatgaagcccaagagcgagaagccagacaagttcaagtccggtatctcccaggctcttctggagctggagattaactcacacctcaaggttcagttcagggagctgaatattacagcagccaaggaaactgaagatggtggtggtgggaaagctatcataatttttgttccctttcctcaactgaaatctttccagaaaatccaagtctggctagtacgtgaattggagaaaaagtttgggggaagcatgttgtctttattgctcagaggagaattctgcctaagccaacccgaaaaagctgtacaaaaaataagcaaaagcatcccaggagccgtaccctgaaagccatgcatgactcaatccccgaggacttggtcttcccaagtgaaattgtgggcaagagaatccacgtgaaactggatggcagccgtctcataaaggctcatttggacaaagcgcagcaaaacaatgtggaacgcaacgttgaaactttttctggtgtctacatgaagctcacaggcaaggatataaatgttgaattcccagagtttcaactctaaacaaaaatgactaaataaagtgtattcacagt

SEQ ID NO: 1022 - protein, 36 aa, Homosapiens
MPNSAEKKSIPPASFSLEFRVALSKEKAMFSRAPGS

SEQ ID NO: 1023 - DNA, 625 bp, Homosapiens
atgcctgcccggacctgcagcaccgtgtccacctactcctggcccagctggagcacccagagtccactgaggcagggtctgagggctcttctggagctggagattaactcacacctcaaggttcagttcagggagctgaatattacagcagccaaggaaactgaagatggtggtggtgggaaagctatcataatttttgttccctttcctcaactgaaatctttccagaaaatccaagtctggctagtacgtgaattggagaaaaagtttgggggaagcatgttgtctttattgctcagaggagaattctgcctaagccaacccgaaaaagctgtacaaaaaataagcaaaagcatcccaggagccgtaccctgaaagccatgcatgactcaatccccgaggacttggtcttcccaagtgaaattgtgggcaagagaatccacgtgaaactggatggcagccgtctcataaaggctcatttggacaaagcgcagcaaaacaatgtggaacgcaacgttgaaactttttctggtgtctacatgaagctcacaggcaaggatataaatgttgaattcccagagtttcaactctaaacaaaaatgactaaataaagtgtattcacagt

SEQ ID NO: 1024 - protein, 124 aa, Homosapiens
MPARTCSTVSTYSWPSWSTQSPLRQGLRALLELEINSHLKVQFRELNITAAKETEDGGGGKAIIIFVPFPQLKSFQKIQVWLVRELEKKFGGSMLSLLLRGEFCLSQPEKAVQKISKSIPGAVP

SEQ ID NO: 1025 - DNA, 1645 bp, Homosapiens
atcgccagaatggctgaacccaggcgctttctacggctctctttcctcttggtcagctccaagtatgagatttatgaacgttgaagaggttcattgattcaccattgtggtacaggatgttgacagcaaagaagggcgaacgctgttggagaagctgttcagccagcaggagaacgggcctccagaagaagcagagaagttttgctcccggatcattgccatgggtcttctccttccttttagtgattgcttcagggaaccgtgtaatcagaatgcccagacgaatgcagcttcgtttgatcaagatcaactttatacctgggctgcagttagtcaacccacacactcattggactattcagaagggcagtttcctaggcgagttccatccatggggccaccatccaaacctcccgatgaggaacacaggctcgaggatgctgaaacagaggatgatggagaatctcaatctgctgtttcagaaactccccaaaaacgctcagatgctgtccagaaggaagttgttgacatgaagtctgagggacaggccactgtaattcagcagctggaacagactattgaggatctgagaaccaaaatagctgaactagagaggcagtatcctgccctggacacagaggtggccagtggtcatcaagggcttgagaatggagtgacagcctcaggcgatgtctgtctcgaagctctcaggttagaagaaaaggaagtacggcatcataggattttagaggcgaaatcgatacagacttcccccacggaagagggcggggtgctgacactgcctcctgtggatgggctgccagggcgtcctccatgcccccctggggctgaaagtggacctcagacaaagttctgttcagagatttctttgattgtgtctccaaggcgaatatcagtccagctcgacagccatcagcccacacagagcatctcacagcctccaccacctccatcccttctgtggtctgctgggcaaggacagcctgggtcacagccgccccattctatttctaccgagtttcaaaccagccacgaacactctgtttcctctgcctttaaaaacagctgtaacatcccatctccaccacctctgccttgcacagagtcctccagctccatgcctggcctgggcatggtgcctcccccacctccccctctccctggcatgacagtgcctactctgcccagtacagccattccccaacctcctcctctgcagggtacagaaatgctgccaccccctccccctcctcttcccggagcgggcatacctcctccgccgcctctacccggagcaggcatactccctctgccccctctacccggagcgggaatacctcctccgccccctctacccggagcggcaataccccctccgccccctcttcccggggcaggcataccccttcctccccctcttcccggagcaggaatacctcctccaccccctctacccggagcgggcataccccctcctcccccacttcccggagcgggcataccccctccgcccccacttcccggagcgggcataccccctcctccccctcttcccggagcgggcatacctcctccaccccctctacccggagcgggcataccccctccgcccccacttcccgga

SEQ ID NO: 1026 - protein, 474 aa, Homosapiens
MGLLLPFSDCFREPCNQNAQTNAASFDQDQLYTWAAVSQPTHSLDYSEGQFPRRVPSMGPPSKPPDEEHRLEDAETEDDGESQSAVSETPQKRSDAVQKEVVDMKSEGQATVIQQLEQTIEDLRTKIAELERQYPALDTEVASGHQGLENGVTASGDVCLEALRLEEKEVRHHRILEAKSIQTSPTEEGGVLTLPPVDGLPGRPPCPPGAESGPQTKFCSEISLIVSPRRISVQLDSHQPTQSISQPPPPPSLLWSAGQGQPGSQPPHSISTEFQTSHEHSVSSAFKNSCNIPSPPPLPCTESSSSMPGLGMVPPPPPPLPGMTVPTLPSTAIPQPPPLQGTEMLPPPPPPLPGAGIPPPPPLPGAGILPLPPLPGAGIPPPPPLPGAAIPPPPPLPGAGIPLPPPLPGAGIPPPPPLPGAGIPPPPPLPGAGIPPPPPLPGAGIPPPPPLPGAGIPPPPPLPGAGIPPPPPLP

SEQ ID NO: 1027 - DNA, 6024 bp, Homosapiens
atgcattcgattcgcacggtggagattaaagtccccgagatagaggaaacgtttttcgcgcccagccgcagccgcagccgcagcgacggcagccacgggagccgccgcgcattatgcaaagcggcggcagatgcgagcggggccagccgggcgcgcgtcggcctcccctcccagcggctccccccgccgccgcctgactctcccgggagactccctaggcccggacctggggccgaggagggccgggatggcctgagtgcccgcggcgcggcggcgcagcagcgggattgcaccatggggaaccaggatgggaagctgaagaggagcgcaggtgatgctttgcacgaaggcggcggtggcgccgaggatgcgctggggcccagggatgtggaagccacaaagaaggggagcgggggcaagaaggcgctaggcaagcacggcaaggggggagggggcggcggcggcggcggggagtcgggcaagaagaagagcaagtccgactccagagcctcggtgttttccaacctgcggatcaggaagaatctgtccaaggggaaaggcgccggcggctcccgcgaagatgtactggattcccaggccctgcagaccggggagctggacagcgctcactccctgctcaccaagactccagacctcagcctctcggcggacgaggccggcctgtcggataccgagtgtgcggacccttttgaggtgaccggtccagggggtcctgggcctgccgaggctaggggcgccgaggagcctgcagcgccccccactgccgtctcccctcagcccggggccttcctgggcctggaccggttcctgctggggccgagcggcggggctggggaggccccgggcagtccggacaccgagcaggcgctgtccgcgctctccgacctgcccgagagcctggccgccgagccccgggagccccagcaaccgccgtcccccggcggcctcccggtctccgaggcgcccagtctcccggcagcgcaacccgcggccaaagactcgccctcctccacggctttcccatttcccgaggccgggccgggggaggaagcggccggagcccccgtgcgaggggctggggacacggatgaggagggtgaggaggatgcttttgaggatgcgccccggggctctccgggggaggagtgggccccggaggtgggagaggacgccccgcagaggctgggggaagagccggaggaggaggcgcaaggacctgacgcccccgcggccgcttccctgcccggcagccccgcgcctagccagcgctgtttcaagccctacccgctcatcaccccctgctacatcaagaccaccacccggcagctcagctcgcccaatcactccccgtctcagtcccctaatcagagccccaggatcaagaggcggccggaaccctccctgagccgagggtccagaactgccctggcctccgtagccgccccggccaagaagcaccgggccgacggcggccttgcggccggcctgagccgctcggctgactggacggaggagctaggcgcccgcacgccccgggtgggaggctccgcgcacctgctggagcgcggggtggcgagtgacagcggcggtggggtgtccccagcactggccgccaaggcgtctggggcccccgcggctgcggatggcttccagaacgtgttcacagggcgaacgctgttggagaagctgttcagccagcaggagaacgggcctccagaagaagcagagaagttttgctcccggatcattgccatgggtcttctccttccttttagtgattgcttcagggaaccgtgtaatcagaatgcccagacgaatgcagcttcgtttgatcaagatcaactttatacctgggctgcagttagtcaacccacacactcattggactattcagaagggcagtttcctaggcgagttccatccatggggccaccatccaaacctcccgatgaggaacacaggctcgaggatgctgaaacagaatctcaatctgctgtttcagaaactccccaaaaacgctcagatgctgtccagaaggaagttgttgacatgaagtctgagggacaggccactgtaattcagcagctggaacagactattgaggatctgagaaccaaaatagctgaactagagaggcagtatcctgccctggacacagaggtggccagtggtcatcaagggcttgagaatggagtgacagcctcaggcgatgtctgtctcgaagctctcaggttagaagaaaaggaagtacggcatcataggattttagaggcgaaatcgatacagacttcccccacggaagagggcggggtgctgacactgcctcctgtggatgggctgccagggcgtcctccatgcccccctggggctgaaagtggacctcagacaaagttctgttcagagatttctttgattgtgtctccaaggcgaatatcagtccagctcgacagccatcagcccacacagagcatctcacagcctccaccacctccatcccttctgtggtctgctgggcaaggacagcctgggtcacagccgccccattctatttctaccgagtttcaaaccagccacgaacactctgtttcctctgcctttaaaaacagctgtaacatcccatctccaccacctctgccttgcacagagtcctccagctccatgcctggcctgggcatggtgcctcccccacctccccctctccctggcatgacagtgcctactctgcccagtacagccattccccaacctcctcctctgcagggtacagaaatgctgccaccccctccccctcctcttcccggagcgggcatacctcctccgccgcctctacccggagcaggcatactccctctgccccctctacccggagcgggaatacctcctccgccccctctacccggagcggcaataccccctccgccccctcttcccggggcaggcataccccttcctccccctcttcccggagcaggaatacctcctccaccccctctacccggagcgggcataccccctcctcccccacttcccggagcgggcataccccctccgcccccacttcccggagcgggcataccccctcctccccctcttcccggagcgggcatacctcctccaccccctctacccggagcgggcataccccctccgcccccacttcccggagcgggcataccccctccgcccccacttcccggagcgggcataccccctcctccccctcttcccggagcgggcatacctcctccaccccctctacccggagcgggcataccccctccgcccccacttcccggagcgggcatacccccacctccccctctacccggagcgggcataccccctccgccccctctacccggagtgggcatacctcctccgccccctctacccggagcgggcataccccctcctccccctctacccggagcgggcataccccctcctccccctcttcccggagcgggcatacctcctccaccccctctacccagagtgggcataccccctccgcccccacttcccggagcgggcatacccccacctccccctctacccggagcgggcataccccctccgccccctctacctggagtgggaatacctcctccgccccctctacctggagtgggaatacctcctccgccccctctacctggtgctgggattcccccacctcctcccttgccaggtatggggattccacctgctccagctcccccactccctccacctgggacaggaatcccaccgccccctctgcttcctgtatcaggccctccactcctcccacaagttgggagtagcactttaccaaccccacaggtgtgtggatttcttcctcctccattgccaagtggcttgtttggattagggatgaatcaggacaaagggagtaggaagcagcccatagagccttgtcgaccaatgaagcctctttactggaccaggattcaactacatagtaaaagagactccagtacttcacttatttgggaaaaaattgaagagccatccatagattgtcatgaatttgaggaattattttctaaaactgctgtaaaggagagaaagaaacctatctctgatactatctcaaagacgaaggctaaacaagttgtcaagttattaagcaacaaaagatcacaagcagttggaatactaatgtctagccttcatttagatatgaaagacatacaacatgctgttgtgaacttggataattctgtggttgacctggagacccttcaagctctctatgagaatagagcacagtcagacgaactcgaaaaaatagaaaagcatggccgatcttccaaagacaaggaaaatgccaagtctctggacaaacctgaacagttcctttatgaactgtcactaatccccaacttttcagagcgagtcttttgcatcctgttccagtccacattttcagaaagcatttgctcaattcgtcgcaaactggaattactacagaaattgtgtgagacattaaaaaatggcccaggggttatgcaggttctaggtttggttcttgcctttggcaactacatgaatggaggaaataagactcgaggacaggcagatggctttggattagacattcttccaaaactgaaagatgtcaagagcagtgacaatagcagaagccttttgtcatatattgtttcgtattatctccgaaattttgatgaggatgctggaaaagaacagtgcctctttccactgccagaaccccaggacctttttcaggcctcacagatgaagtttgaagattttcaaaaagatctcagaaaactgaagaaagacttgaaagcctgtgaagttgaagcagggaaagtataccaggtctcctcaaaagagcatatgcagcctttcaaggaaaacatggaacaatttattattcaagccaaaattgaccaagaggcagaggaaaattcactgacagagactcataaatgctttttggagaccacggcatatttcttcatgaaaccaaaacttggagagaaggaggtgtccccaaatgctttcttcagtatctggcatgaattcagctctgactttaaagacttctggaagaaagagaacaaacttcttctacaagagagagtaaaagaagccgaagaggtgtgtagacagaagaaaggaaaatcactttataaaataaaaccaagacatgactctggaattaaagcaaagataagcatgaaaacttgaacaatgaaaagcagaatgaaaatgagtcattgcaacgactttcacaaaattcagctgacctgagagtgggagggaaactaccgtcattctgctcatgtttcttcttgacctcttgcataatctttttgttttctagacagttcactaattgttgaattttactgtatattcatataaaaatgcaaacgtactagaccagtggagaatttgacaccttttctttttgtaaaagtttatggtattataccgatagaccaaaacagcatgtgtaagaggcagtatctgcactaattctcaacatgctaaacattaactacaattcactgttgtgagaatattcctcgtcacagcaaaaacactttcctttctactgacaaccagtcctccacatcacagcatttagacatatgggtaaaatgttatttctagtgaattgtttgtatcagtttcatgtctaagtataaattttctattttaaacaacttaagaaaaccaatgttctaaatcataattgtttgtatttatgtaaagtatggtctcttactttttagtttgtagtttaagtgcaaagaaacagtagtggttttttttctattgttttgtagtcttcctgtccccttcagtccctccagtgtgtatattaccattctccaatgaaataatagggcatttaacaaagatcgctatgtgcaatactgtatttagtgtttctatttcaatttttctaggatgttaatttatatgaaaataaaatgaataataaaagaataaagatacttgcaa

SEQ ID NO: 1028 - protein, 1746 aa, Homosapiens
MHSIRTVEIKVPEIEETFFAPSRSRSRSDGSHGSRRALCKAAADASGASRARVGLPSQRLPPPPPDSPGRLPRPGPGAEEGRDGLSARGAAAQQRDCTMGNQDGKLKRSAGDALHEGGGGAEDALGPRDVEATKKGSGGKKALGKHGKGGGGGGGGGESGKKKSKSDSRASVFSNLRIRKNLSKGKGAGGSREDVLDSQALQTGELDSAHSLLTKTPDLSLSADEAGLSDTECADPFEVTGPGGPGPAEARGAEEPAAPPTAVSPQPGAFLGLDRFLLGPSGGAGEAPGSPDTEQALSALSDLPESLAAEPREPQQPPSPGGLPVSEAPSLPAAQPAAKDSPSSTAFPFPEAGPGEEAAGAPVRGAGDTDEEGEEDAFEDAPRGSPGEEWAPEVGEDAPQRLGEEPEEEAQGPDAPAAASLPGSPAPSQRCFKPYPLITPCYIKTTTRQLSSPNHSPSQSPNQSPRIKRRPEPSLSRGSRTALASVAAPAKKHRADGGLAAGLSRSADWTEELGARTPRVGGSAHLLERGVASDSGGGVSPALAAKASGAPAAADGFQNVFTGRTLLEKLFSQQENGPPEEAEKFCSRIIAMGLLLPFSDCFREPCNQNAQTNAASFDQDQLYTWAAVSQPTHSLDYSEGQFPRRVPSMGPPSKPPDEEHRLEDAETESQSAVSETPQKRSDAVQKEVVDMKSEGQATVIQQLEQTIEDLRTKIAELERQYPALDTEVASGHQGLENGVTASGDVCLEALRLEEKEVRHHRILEAKSIQTSPTEEGGVLTLPPVDGLPGRPPCPPGAESGPQTKFCSEISLIVSPRRISVQLDSHQPTQSISQPPPPPSLLWSAGQGQPGSQPPHSISTEFQTSHEHSVSSAFKNSCNIPSPPPLPCTESSSSMPGLGMVPPPPPPLPGMTVPTLPSTAIPQPPPLQGTEMLPPPPPPLPGAGIPPPPPLPGAGILPLPPLPGAGIPPPPPLPGAAIPPPPPLPGAGIPLPPPLPGAGIPPPPPLPGAGIPPPPPLPGAGIPPPPPLPGAGIPPPPPLPGAGIPPPPPLPGAGIPPPPPLPGAGIPPPPPLPGAGIPPPPPLPGAGIPPPPPLPGAGIPPPPPLPGAGIPPPPPLPGAGIPPPPPLPGVGIPPPPPLPGAGIPPPPPLPGAGIPPPPPLPGAGIPPPPPLPRVGIPPPPPLPGAGIPPPPPLPGAGIPPPPPLPGVGIPPPPPLPGVGIPPPPPLPGAGIPPPPPLPGMGIPPAPAPPLPPPGTGIPPPPLLPVSGPPLLPQVGSSTLPTPQVCGFLPPPLPSGLFGLGMNQDKGSRKQPIEPCRPMKPLYWTRIQLHSKRDSSTSLIWEKIEEPSIDCHEFEELFSKTAVKERKKPISDTISKTKAKQVVKLLSNKRSQAVGILMSSLHLDMKDIQHAVVNLDNSVVDLETLQALYENRAQSDELEKIEKHGRSSKDKENAKSLDKPEQFLYELSLIPNFSERVFCILFQSTFSESICSIRRKLELLQKLCETLKNGPGVMQVLGLVLAFGNYMNGGNKTRGQADGFGLDILPKLKDVKSSDNSRSLLSYIVSYYLRNFDEDAGKEQCLFPLPEPQDLFQASQMKFEDFQKDLRKLKKDLKACEVEAGKVYQVSSKEHMQPFKENMEQFIIQAKIDQEAEENSLTETHKCFLETTAYFFMKPKLGEKEVSPNAFFSIWHEFSSDFKDFWKKENKLLLQERVKEAEEVCRQKKGKSLYKIKPRHDSGIKAKISMKT

SEQ ID NO: 1029 - DNA, 1795 bp, Homosapiens
ttccggtctcgtgccgccttcccaggaccctcagggagagcgggcagccttccaggtggacaggtaacccaggtttttctgccttttatgtgccatttgcaaaggctttatactctttgacaaacagacgctttccagtttggactatcagtcatgctgggcatgcgttggctcccaaagacaagaagattcttacaacatcagaggattcaaacgctcaagaaattaaggacatttatggactaaatggacaaatagagcacaaactagctttcctgagaactcatgtgccaaaggacatgaaacttgtgctcattggccattcaataggcagctatttcacacttcagatgctgaagcgagtccctgagctcccggtaattcgtgcctttctgctctttccaacaattgaacgaatgtctgagtcacccaatggcagaattgccactccacttttgtgctggtttcgatatgttctctatgttactggctacttattattgaaaccgtgtcctgagacaatcaagtccttgctaatcagaaggggccttcaagtaatgaacctagagaatgaattttcaccattgaatatattagaaccattctgccttgctaatgctgcctaccttgggggccaagaaatgatggaggtggtgaagagagatgacgaaaccataaaggagcatttatgtaagcttacattttattatggtactatagatccttggtgtccaaaagagtactatgaagacattaagaaggattttccagaaggagacattcgactctaggaaatccctcatggcattatcattccctaaggacaatgagatgtccctccgctcaaatcctaaagccccctgatgaaagatttggctctgatttgctgccaacttattggtggaagaatcagatttcaagagactgaagttcattctgtttcattagggattagactaaaatggacaaacagtggaagaaatccattttccagaagcagctctgcctgtatgtcccagtcaaccacatggatggtctttgtgaaagttttaacttcctgcagagttaccgagtgctcagcgattgagctttgaccacacccgtgtttgttcctagtctgttcccagccataagcatctccacaagccctctgtggcttgtgtggcctgatgtccatggccaccaagggcctctcaccatacgcttctccactcaacctttggagagacacggaccaccaaaggcttgatttttcttcatcctacattatattcaaaacaaacaggctgggtgccgtagctcacacctgtgatcccagcaccttgggaggatgagctgggaagatcgtttgaggctaggagtttgagaccagcccgtgcaaaaaacgagacctcgtgtctaaaataatttttaaaaaagagcaaaaaaaaaaagcaatttcagattaaaggagactgaagagacatgacaattggacacaacatctgattctgaattggatgtttttgttataaaagacattgttgagacaatttgcacaacttgaatgaggtctgaagattagctgggagtaagatgccactgttaattttctgatttcagtggttgtactgggaagaagtaagagagtgtccttgtttgtactggagacactgaggtatctgggggtgaggggcatcatgtctgtttactgtcagatggttgaggggaaaataatgttctttgtacttgcagattttttggaagtttgagatgttttagaatttgtaaaaataattatttttaaaaccccacc

SEQ ID NO: 1030 - protein, 163 aa, Homosapiens
MKLVLIGHSIGSYFTLQMLKRVPELPVIRAFLLFPTIERMSESPNGRIATPLLCWFRYVLYVTGYLLLKPCPETIKSLLIRRGLQVMNLENEFSPLNILEPFCLANAAYLGGQEMMEVVKRDDETIKEHLCKLTFYYGTIDPWCPKEYYEDIKKDFPEGDIRL

SEQ ID NO: 1031 - DNA, 2907 bp, Homosapiens
acctgaggggggcacttccggtctcgtgccgccttcccaggaccctcagggagagcgggcagccttccaggtggacagaaatggactcagaactcaaggaagaaattcctgtgcatgaggaattcattttgtgtggtggagccgaaacccaggttctaaaatgtgggccctggacagacctctttcatgatcaaagtgtcaaaaggcctaagctgcttattttcattattcctggtaacccaggtttttctgccttttatgtgccatttgcaaaggctttatactctttgacaaacagacgctttccagtttggactatcagtcatgctgggcatgcgttggctcccaaagacaagaagattcttacaacatcagaggattcaaacgctcaagaaattaaggacatttatggactaaatggacaaatagagcacaaactagctttcctgagaactcatgtgccaaaggacatgaaacttgtgctcattggccattcaataggcagctatttcacacttcagatgctgaagcgagtccctgagctcccggtaattcgtgcctttctgctctttccaacaattgaacgaatgtctgagtcacccaatggcagaattgccactccacttttgtgctggtttcgatatgttctctatgttactggctacttattattgaaaccgtgtcctgagacaatcaagtccttgctaatcagaaggggccttcaagtaatgaacctagagaatgaattttcaccattgaatatattagaaccattctgccttgctaatgctgcctaccttgggggccaagaaatgatggaggtggtgaagagagatgacgaaaccataaaggagcatttatgtaagcttacattttattatggtactatagatccttggtgtccaaaagagtactatgaagacattaagaaggattttccagaaggagacattcgactctgtgagaaaaacatacctcatgctttcatcacccattttaaccaggaaatggcagacatgattgctgactccctaaaggatgacttgtccaaaatgtaaattggcctgaggaacaagcccccactgccagtacatggaggcagtcagtgtactagacttagtaggtaaatgtttaattttgaagactgatattagaaatgaagaaagtgagaacctttgtcttacaaaccaactctccgctcgccatgttataggctgaagtaaacacagttgatgaatcattccataggtttaaccatacattttccaagactcagggaacacagtgatctacacagagtcttgtgtttgcacaagatgcccagtggcaccatatggtttattttggtaggcaggatctttgcagatgaaaaaaaaatctacatgtacttgattttaattgagttacattgtagaataggctcctctggaggaaattatgaaatacctactagaaaatgtaaaataaatcagtgaatgttaagagtatagttagatatgtgaagtgtatgagattatgacaaggatacactcatgttccaggagcaggaagtgaacctgggtctcctgtaagacagaagatgaagatgagcccaggctaacttagcacagatcttggctgagatcatcaatgtgacgtctaatgtacctgcactagacagagaataaagttcaccagacattactctggtcagctaaccagataaagaattgttgaaggaccccaactgtgcctcctgccacaggacaaccagcaagttctatgctgagccttagcctcccaggttataagctccctgcaggctcctcctctccagagccaggatggagaggcactgggctgtcccaaagcaggcttggatgtgccaacgtacagttgctccttctgtaattcttgcactaaaactccattaaagaccatcaatgagccaaatagtgtgctagccattgaggatggagttcttagctacttaatgattcttttcttctggaaatcttctagtgaataatttttaaaagcttcttttaaactgctcagtaaaacattgccatacattaactctccatttctgcattaacttcatttgctggaaagaaattattttgttaatgaaccaaacccagccattaagttatgtgaattcaccttctctagacacattgaggtatggcagagaagacacatattccctggcctagagtgggctgacaatattgctgcctcccctaaattgactcaatcttgagaaccacatactgcagtgacagttgatcatggatcagaaatattcctttttctcctagaggaaatccctcatggcattatcattccctaaggacaatgagatgtccctccgctcaaatcctaaagccccctgatgaaagatttggctctgatttgctgccaacttattggtaagtgctgaatgagttactgtgctttggcatagcttctacatcacagcaagtgacttctcagaggggaaaagccaagctccagacaaggagtgctgttagcccaaggggaagagctaatagatacataggccgtaagcacagggctgtacacagatcctttattggcatctgcatgagaggcctagaaatcggatgttagaagctaggaatcatggctctgagcgccttgcatacaggagatactcactgatactaaatcaaggcatgtaaacaatactgggtaaatcatacctaccagaataaagagtaacattcagagcttttcttttatctgttattttaaatgttactccatatttcaaaagtctgcacgtatgaaattgtgtcttatttctggtttttagagcctaagaaagatactcattcttaattcctatttatcatctgaaaaccaaatgaatttttgaaataaatgttttaccagcatttc

SEQ ID NO: 1032 - protein, 325 aa, Homosapiens; identical to SEQ ID NO: 42

SEQ ID NO: 1033 - DNA, 2734 bp, Homosapiens
acctgaggggggcacttccggtctcgtgccgccttcccaggaccctcagggagagcgggcagccttccaggtggacagaaatggactcagaactcaaggaagaaattcctgtgcatgaggaattcattttgtgtggtggagccgaaacccaggttctaaaatgtgggccctggacagacctctttcatgatcaaagtgtcaaaaggcctaagctgcttattttcattattcctggtaacccaggtttttctgccttttatgtgccatttgcaaaggctttatactctttgacaaacagacgctttccagtttggactatcagtcatgctgggcatgcgttggctcccaaagacaagaagattcttacaacatcagaggattcaaacgctcaagaaattaaggacatttatggactaaatggacaaatagagcacaaactagctttcctgagaactcatgtgccaaaggacatgaaacttgtgctcattggccattcaataggcagctatttcacacttcagatgctgaagcgagtccctgagctcccggtaattcgtgcctttctgctctttccaacaattgaacgaatgtctgagtcacccaatggcagaattgccactccacttttgtgctggtttcgatatgttctctatgttactggctacttattattgaaaccgtgtcctgagacaatcaagtccttgctaatcagaaggggccttcaagtaatgaacctagagaatgaattttcaccattgaatatattagaaccattctgccttgctaatgctgcctaccttgggggccaagaaatgatggaggtggtgaagagagatgacgaaaccataaaggagcatttatgtaagcttacattttattatggtactatagatccttggtgtccaaaagagtactatgaagacattaagaaggattttccagaaggagacattcgactctgtgagaaaaacatacctcatgctttcatcacccattttaaccaggaaatggcagacatgattgctgactccctaaaggatgacttgtccaaaatgtaaattggcctgaggaacaagcccccactgccagtacatggaggcagtcagtgtactagacttagtaggtaaatgtttaattttgaagactgatattagaaatgaagaaagtgagaacctttgtcttacaaaccaactctccgctcgccatgttataggctgaagtaaacacagttgatgaatcattccataggtttaaccatacattttccaagactcagggaacacagtgatctacacagagtcttgtgtttgcacaagatgcccagtggcaccatatggtttattttggtaggcaggatctttgcagatgaaaaaaaaatctacatgtacttgattttaattgagttacattgtagaataggctcctctggaggaaattatgaaatacctactagaaaatgtaaaataaatcagtgaatgttaagagtatagttagatatgtgaagtgtatgagattatgacaaggatacactcatgttccaggagcaggaagtgaacctgggtctcctgtaagacagaagatgaagatgagcccaggctaacttagcacagatcttggctgagatcatcaatgtgacgtctaatgtacctgcactagacagagaataaagttcaccagacattactctggtcagctaaccagataaagaattgttgaaggaccccaactgtgcctcctgccacaggacaaccagcaagttctatgctgagccttagcctcccaggttataagctccctgcaggctcctcctctccagagccaggatggagaggcactgggctgtcccaaagcaggcttggatgtgccaacgtacagttgctccttctgtaattcttgcactaaaactccattaaagaccatcaatgagccaaatagtgtgctagccattgaggatggagttcttagctacttaatgattcttttcttctggaaatcttctagtgaataatttttaaaagcttcttttaaactgctcagtaaaacattgccatacattaactctccatttctgcattaacttcatttgctggaaagaaattattttgttaatgaaccaaacccagccattaagttatgtgaattcaccttctctagacacattgaggtatggcagagaagacacatattccctggcctagagtgggctgacaatattgctgcctcccctaaattgactcaatcttgagaaccacatactgcagtgacagttgatcatggatcagaaatattcctttttctcctagaggaaatccctcatggcattatcattccctaaggacaatgagatgtccctccgctcaaatcctaaagccccctgatgaaagatttggctctgatttgctgccaacttattggtaagtgctgaatgagttactgtgctttggcatagcttctacatcacagcaagtgacttctcagaggggaaaagccaagctccagacaaggagtgctgttagcccaaggggaagagctaatagatacataggccgtaagcacagggctgtacacagatcctttattggcatctgcatgagaggcctagaaatcggatgttagaagctaggaatcatggctctgagcgccttgcatacaggagatactcactgatactaaatcaaggcatgtaaacaatactgggtaaatcatacctaccagaataaagagtaacattcag

SEQ ID NO: 1034 - protein, 325 aa, Homosapiens; identical to SEQ ID NO: 42

SEQ ID NO: 1035 - DNA, 816 bp, Homosapiens
gaggggggcacttccggtctcgtgccgccttcccaggaccctcagggagagcgggcagccttccaggtggacagaaatggactcagaactcaaggaagaaattcctgtgcatgaggaattcattttgtgtggtggagccgaaacccaggttctaaaatgtgggccctggacagacctctttcatgatcaaagtgtcaaaaggcctaagctgcttattttcattattcctggtaacccaggtttttctgccttttatgtgccatttgcaaaggctttatactctttgacaaacagacgctttccagtttggactatcagtcatgctgggcatgcgttggctcccaaagacaagaagattcttacaacatcagagggtggcattcttgctgtcctctcgtggtggacacaggaggcaagccctcttgggactctcgcgggctctaccctcatgaccccatctgatcctaattacttcccaaagacccctctccacctcttaatagcatttgggcatagggtttcacctatggatttgggggccatataagcattcagaccattacagctggttttcacaattgaataaaatttggatttagggcatggaggtgggtgcagaggtacaacagacagaaagagtagcacagaagggagcaagatttaatagcgatgttactgctaagcagggccagtttgagagggactttgagagctggagagagagccaggactccatgctggaaggtttctaaatggaagaagtaataccatggagatgcaaactacctcctttaaatctgtgagaattctagcatg

SEQ ID NO: 1036 - protein, 156 aa, Homosapiens
MDSELKEEIPVHEEFILCGGAETQVLKCGPWTDLFHDQSVKRPKLLIFIIPGNPGFSAFYVPFAKALYSLTNRRFPVWTISHAGHALAPKDKKILTTSEGGILAVLSWWTQEASPLGTLAGSTLMTPSDPNYFPKTPLHLLIAFGHRVSPMDLGAI

SEQ ID NO: 1037 - DNA, 1497 bp, Homosapiens
attctgtcttagaagcacaggtaacggtggaagatcatggaagtcttcacagaagacaagatatcaaaacagagccttgaaggctaagtaggtttgtttatttgcttctttgtttttccagatagaaggggccacataagcaaagatgaagaaacataaaagagcctcagtgtggattttttgaaagaatgagaaagagcacttgatgaagagtctagaagtctgtgtttcagtccaaaacctgccaataatgctggaaaaccttagaaggtcaacaaaccctcctgaggttaaaattcttcacccctcaaaaagacagggactttctgagcctcctgccccataagattgtcgtcagtttcagacaagaaccaagttggtaaatgcagtttaaaacctaccatgagccagagcaaaggaaggaagtttccaattttctatagatatttcacatcagacatcatgcagtttcagtatacttagtttcctttgatattatccatagccttggccctcaaatatttcacattcttagattaatttaataatagcctggtgttgctgcttatgtatcctaccatatccacagccaactatgaagacaataactttctcacctgagaactaaagacttacctggctatagctccatattataatctacttaaattataaattatatggtatcagaccatcatctgaaccattttagatctaagagatttgccatgtcctcatatactgtctattataatctgattcttctttcagtccacaaatatttattaagcaaacactctgcaaagttccagcaacagagacacttggaagtagctagaaactaggaaattaagaaagaatacactttatacaatgtgaattctaggaggattttgtgggaaaaaaaattttaagggaagatatgttttcagagttttacacttaattattaaaaattacaatgattttcaaaatgtatctttgacagtggagattatgttttgtctggtaatcgatcagctttttcttttaaccaacagttcatctaaaacattttaccaaatccaaagataagagaatttacagtgaagtttggagggtagggaacccaaaatcaactgataggaaactaaagtttccttggatagagcctgcatgaaatctctgcacttatgtatagacctgctcagagcaatgtctgtggaaatgacttcaaaagctccaagtgccagaaataacaactgctctggatcaagtccaggaacagatattgggactagaaagagggattttccaaaaatctgagtttcatttttatctataatattgttgaaaaatggaaatgctactatgtgaaactctggcacttttttggctataaaaaagccatgtgtacagtatgagctatcatgctttatcaagtctgaagaacagagaaagccataggggaaccttataatggttaataacctcctaataaagtacatttgtgcattg

SEQ ID NO: 1038 - protein, 54 aa, Homosapiens [sequence omitted]

SEQ ID NO: 1039 - DNA, 8192 bp, Homosapiens
cattcccaccgggacctgcggggctgagtgcccttctcggttgctgccgctgaggagcccgcccagccagccagggccgcgaggccgaggccaggccgcagcccaggagccgccccaccgcagctggcgatggacccgccgaggcccgcgctgctggcgctgctggcgctgcctgcgctgctgctgctgctgctggcgggcgccagggccgaagaggaaatgctggaaaatgtcagcctggtctgtccaaaagatgcgacccgattcaagcacctccggaagtacacatacaactatgaggctgagagttccagtggagtccctgggactgctgattcaagaagtgccaccaggatcaactgcaaggttgagctggaggttccccagctctgcagcttcatcctgaagaccagccagtgcaccctgaaagaggtgtatggcttcaaccctgagggcaaagccttgctgaagaaaaccaagaactctgaggagtttgctgcagccatgtccaggtatgagctcaagctggccattccagaagggaagcaggttttcctttacccggagaaagatgaacctacttacatcctgaacatcaagaggggcatcatttctgccctcctggttcccccagagacagaagaagccaagcaagtgttgtttctggataccgtgtatggaaactgctccactcactttaccgtcaagacgaggaagggcaatgtggcaacagaaatatccactgaaagagacctggggcagtgtgatcgcttcaagcccatccgcacaggcatcagcccacttgctctcatcaaaggcatgacccgccccttgtcaactctgatcagcagcagccagtcctgtcagtacacactggacgctaagaggaagcatgtggcagaagccatctgcaaggagcaacacctcttcctgcctttctcctacaagaataagtatgggatggtagcacaagtgacacagactttgaaacttgaagacacaccaaagatcaacagccgcttctttggtgaaggtactaagaagatgggcctcgcatttgagagcaccaaatccacatcacctccaaagcaggccgaagctgttttgaagactctccaggaactgaaaaaactaaccatctctgagcaaaatatccagagagctaatctcttcaataagctggttactgagctgagaggcctcagtgatgaagcagtcacatctctcttgccacagctgattgaggtgtccagccccatcactttacaagccttggttcagtgtggacagcctcagtgctccactcacatcctccagtggctgaaacgtgtgcatgccaacccccttctgatagatgtggtcacctacctggtggccctgatccccgagccctcagcacagcagctgcgagagatcttcaacatggcgagggatcagcgcagccgagccaccttgtatgcgctgagccacgcggtcaacaactatcataagacaaaccctacagggacccaggagctgctggacattgctaattacctgatggaacagattcaagatgactgcactggggatgaagattacacctatttgattctgcgggtcattggaaatatgggccaaaccatggagcagttaactccagaactcaagtcttcaatcctgaaatgtgtccaaagtacaaagccatcactgatgatccagaaagctgccatccaggctctgcggaaaatggagcctaaagacaaggaccaggaggttcttcttcagactttccttgatgatgcttctccgggagataagcgactggctgcctatcttatgttgatgaggagtccttcacaggcagatattaacaaaattgtccaaattctaccatgggaacagaatgagcaagtgaagaactttgtggcttcccatattgccaatatcttgaactcagaagaattggatatccaagatctgaaaaagttagtgaaagaagctctgaaagaatctcaacttccaactgtcatggacttcagaaaattctctcggaactatcaactctacaaatctgtttctcttccatcacttgacccagcctcagccaaaatagaagggaatcttatatttgatccaaataactaccttcctaaagaaagcatgctgaaaactaccctcactgcctttggatttgcttcagctgacctcatcgagattggcttggaaggaaaaggctttgagccaacattggaagctctttttgggaagcaaggatttttcccagacagtgtcaacaaagctttgtactgggttaatggtcaagttcctgatggtgtctctaaggtcttagtggaccactttggctataccaaagatgataaacatgagcaggatatggtaaatggaataatgctcagtgttgagaagctgattaaagatttgaaatccaaagaagtcccggaagccagagcctacctccgcatcttgggagaggagcttggttttgccagtctccatgacctccagctcctgggaaagctgcttctgatgggtgcccgcactctgcaggggatcccccagatgattggagaggtcatcaggaagggctcaaagaatgacttttttcttcactacatcttcatggagaatgcctttgaactccccactggagctggattacagttgcaaatatcttcatctggagtcattgctcccggagccaaggctggagtaaaactggaagtagccaacatgcaggctgaactggtggcaaaaccctccgtgtctgtggagtttgtgacaaatatgggcatcatcattccggacttcgctaggagtggggtccagatgaacaccaacttcttccacgagtcgggtctggaggctcatgttgccctaaaagctgggaagctgaagtttatcattccttccccaaagagaccagtcaagctgctcagtggaggcaacacattacatttggtctctaccaccaaaacggaggtgatcccacctctcattgagaacaggcagtcctggtcagtttgcaagcaagtctttcctggcctgaattactgcacctcaggcgcttactccaacgccagctccacagactccgcctcctactatccgctgaccggggacaccagattagagctggaactgaggcctacaggagagattgagcagtattctgtcagcgcaacctatgagctccagagagaggacagagccttggtggataccctgaagtttgtaactcaagcagaaggtgcgaagcagactgaggctaccatgacattcaaatataatcggcagagtatgaccttgtccagtgaagtccaaattccggattttgatgttgacctcggaacaatcctcagagttaatgatgaatctactgagggcaaaacgtcttacagactcaccctggacattcagaacaagaaaattactgaggtcgccctcatgggccacctaagttgtgacacaaaggaagaaagaaaaatcaagggtgttatttccataccccgtttgcaagcagaagccagaagtgagatcctcgcccactggtcgcctgccaaactgcttctccaaatggactcatctgctacagcttatggctccacagtttccaagagggtggcatggcattatgatgaagagaagattgaatttgaatggaacacaggcaccaatgtagataccaaaaaaatgacttccaatttccctgtggatctctccgattatcctaagagcttgcatatgtatgctaatagactcctggatcacagagtccctcaaacagacatgactttccggcacgtgggttccaaattaatagttgcaatgagctcatggcttcagaaggcatctgggagtcttccttatacccagactttgcaagaccacctcaatagcctgaaggagttcaacctccagaacatgggattgccagacttccacatcccagaaaacctcttcttaaaaagcgatggccgggtcaaatataccttgaacaagaacagtttgaaaattgagattcctttgccttttggtggcaaatcctccagagatctaaagatgttagagactgttaggacaccagccctccacttcaagtctgtgggattccatctgccatctcgagagttccaagtccctacttttaccattcccaagttgtatcaactgcaagtgcctctcctgggtgttctagacctctccacgaatgtctacagcaacttgtacaactggtccgcctcctacagtggtggcaacaccagcacagaccatttcagccttcgggctcgttaccacatgaaggctgactctgtggttgacctgctttcctacaatgtgcaaggatctggagaaacaacatatgaccacaagaatacgttcacactatcatatgatgggtctctacgccacaaatttctagattcgaatatcaaattcagtcatgtagaaaaacttggaaacaacccagtctcaaaaggtttactaatattcgatgcatctagttcctggggaccacagatgtctgcttcagttcatttggactccaaaaagaaacagcatttgtttgtcaaagaagtcaagattgatgggcagttcagagtctcttcgttctatgctaaaggcacatatggcctgtcttgtcagagggatcctaacactggccggctcaatggagagtccaacctgaggtttaactcctcctacctccaaggcaccaaccagataacaggaagatatgaagatggaaccctctccctcacctccacctctgatctgcaaagtggcatcattaaaaatactgcttccctaaagtatgagaactacgagctgactttaaaatctgacaccaatgggaagtataagaactttgccacttctaacaagatggatatgaccttctctaagcaaaatgcactgctgcgttctgaatatcaggctgattacgagtcattgaggttcttcagcctgctttctggatcactaaattcccatggtcttgagttaaatgctgacatcttaggcactgacaaaattaatagtggtgctcacaaggcgacactaaggattggccaagatggaatatctaccagtgcaacgaccaacttgaagtgtagtctcctggtgctggagaatgagctgaatgcagagcttggcctctctggggcatctatgaaattaacaacaaatggccgcttcagggaacacaatgcaaaattcagtctggatgggaaagccgccctcacagagctatcactgggaagtgcttatcaggccatgattctgggtgtcgacagcaaaaacattttcaacttcaaggtcagtcaagaaggacttaagctctcaaatgacatgatgggctcatatgctgaaatgaaatttgaccacacaaacagtctgaacattgcaggcttatcactggacttctcttcaaaacttgacaacatttacagctctgacaagttttataagcaaactgttaatttacagctacagccctattctctggtaactactttaaacagtgacctgaaatacaatgctctggatctcaccaacaatgggaaactacggctagaacccctgaagctgcatgtggctggtaacctaaaaggagcctaccaaaataatgaaataaaacacatctatgccatctcttctgctgccttatcagcaagctataaagcagacactgttgctaaggttcagggtgtggagtttagccatcggctcaacacagacatcgctgggctggcttcagccattgacatgagcacaaactataattcagactcactgcatttcagcaatgtcttccgttctgtaatggccccgtttaccatgaccatcgatgcacatacaaatggcaatgggaaactcgctctctggggagaacatactgggcagctgtatagcaaattcctgttgaaagcagaacctctggcatttactttctctcatgattacaaaggctccacaagtcatcatctcgtgtctaggaaaagcatcagtgcagctcttgaacacaaagtcagtgccctgcttactccagctgagcagacaggcacctggaaactcaagacccaatttaacaacaatgaatacagccaggacttggatgcttacaacactaaagataaaattggcgtggagcttactggacgaactctggctgacctaactctactagactccccaattaaagtgccacttttactcagtgagcccatcaatatcattgatgctttagagatgagagatgccgttgagaagccccaagaatttacaattgttgcttttgtaaagtatgataaaaaccaagatgttcactccattaacctcccattttttgagaccttgcaagaatattttgagaggaatcgacaaaccattatagttgtactggaaaacgtacagagaaacctgaagcacatcaatattgatcaatttgtaagaaaatacagagcagccctgggaaaactcccacagcaagctaatgattatctgaattcattcaattgggagagacaagtttcacatgccaaggagaaactgactgctctcacaaaaaagtatagaattacagaaaatgatatacaaattgcattagatgatgccaaaatcaactttaatgaaaaactatctcaactgcagacatatatgatacaatttgatcagtatattaaagatagttatgatttacatgatttgaaaatagctattgctaatattattgatgaaatcattgaaaaattaaaaagtcttgatgagcactatcatatccgtgtaaatttagtaaaaacaatccatgatctacatttgtttattgaaaatattgattttaacaaaagtggaagtagtactgcatcctggattcaaaatgtggatactaagtaccaaatcagaatccagatacaagaaaaactgcagcagcttaagagacacatacagaatatagacatccagcacctagctggaaagttaaaacaacacattgaggctattgatgttagagtgcttttagatcaattgggaactacaatttcatttgaaagaataaatgacattcttgagcatgtcaaacactttgttataaatcttattggggattttgaagtagctgagaaaatcaatgccttcagagccaaagtccatgagttaatcgagaggtatgaagtagaccaacaaatccaggttttaatggataaattagtagagttggcccaccaatacaagttgaaggagactattcagaagctaagcaatgtcctacaacaagttaagataaaagattactttgagaaattggttggatttattgatgatgctgtcaagaagcttaatgaattatcttttaaaacattcattgaagatgttaacaaattccttgacatgttgataaagaaattaaagtcatttgattaccaccagtttgtagatgaaaccaatgacaaaatccgtgaggtgactcagagactcaatggtgaaattcaggctctggaactaccacaaaaagctgaagcattaaaactgtttttagaggaaaccaaggccacagttgcagtgtatctggaaagcctacaggacaccaaaataaccttaatcatcaattggttacaggaggctttaagttcagcatctttggctcacatgaaggccaaattccgagagaccctagaagatacacgagaccgaatgtatcaaatggacattcagcaggaacttcaacgatacctgtctctggtaggccaggtttatagcacacttgtcacctacatttctgattggtggactcttgctgctaagaaccttactgactttgcagagcaatattctatccaagattgggctaaacgtatgaaagcattggtagagcaagggttcactgttcctgaaatcaagaccatccttgggaccatgcctgcctttgaagtcagtcttcaggctcttcagaaagctaccttccagacacctgattttatagtccccctaacagatttgaggattccatcagttcagataaacttcaaagacttaaaaaatataaaaatcccatccaggttttccacaccagaatttaccatccttaacaccttccacattccttcctttacaattgactttgtagaaatgaaagtaaagatcatcagaaccattgaccagatgctgaacagtgagctgcagtggcccgt

SEQ ID NO: 1040 - protein, 4000 aa, Homosapiens
MDPPRPALLALLALPALLLLLLAGARAEEEMLENVSLVCPKDATRFKHLRKYTYNYEAESSSGVPGTADSRSATRINCKVELEVPQLCSFILKTSQCTLKEVYGFNPEGKALLKKTKNSEEFAAAMSRYELKLAIPEGKQVFLYPEKDEPTYILNIKRGIISALLVPPETEEAKQVLFLDTVYGNCSTHFTVKTRKGNVATEISTERDLGQCDRFKPIRTGISPLALIKGMTRPLSTLISSSQSCQYTLDAKRKHVAEAICKEQHLFLPFSYKNKYGMVAQVTQTLKLEDTPKINSRFFGEGTKKMGLAFESTKSTSPPKQAEAVLKTLQELKKLTISEQNIQRANLFNKLVTELRGLSDEAVTSLLPQLIEVSSPITLQALVQCGQPQCSTHILQWLKRVHANPLLIDVVTYLVALIPEPSAQQLREIFNMARDQRSRATLYALSHAVNNYHKTNPTGTQELLDIANYLMEQIQDDCTGDEDYTYLILRVIGNMGQTMEQLTPELKSSILKCVQSTKPSLMIQKAAIQALRKMEPKDKDQEVLLQTFLDDASPGDKRLAAYLMLMRSPSQADINKIVQILPWEQNEQVKNFVASHIANILNSEELDIQDLKKLVKEALKESQLPTVMDFRKFSRNYQLYKSVSLPSLDPASAKIEGNLIFDPNNYLPKESMLKTTLTAFGFASADLIEIGLEGKGFEPTLEALFGKQGFFPDSVNKALYWVNGQVPDGVSKVLVDHFGYTKDDKHEQDMVNGIMLSVEKLIKDLKSKEVPEARAYLRILGEELGFASLHDLQLLGKLLLMGARTLQGIPQMIGEVIRKGSKNDFFLHYIFMENAFELPTGAGLQLQISSSGVIAPGAKAGVKLEVANMQAELVAKPSVSVEFVTNMGIIIPDFARSGVQMNTNFFHESGLEAHVALKAGKLKFIIPSPKRPVKLLSGGNTLHLVSTTKTEVIPPLIENRQSWSVCKQVFPGLNYCTSGAYSNASSTDSASYYPLTGDTRLELELRPTGEIEQYSVSATYELQREDRALVDTLKFVTQAEGAKQTEATMTFKYNRQSMTLSSEVQIPDFDVDLGTILRVNDESTEGKTSYRLTLDIQNKKITEVALMGHLSCDTKEERKIKGVISIPRLQAEARSEILAHWSPAKLLLQMDSSATAYGSTVSKRVAWHYDEEKIEFEWNTGTNVDTKKMTSNFPVDLSDYPKSLHMYANRLLDHRVPQTDMTFRHVGSKLIVAMSSWLQKASGSLPYTQTLQDHLNSLKEFNLQNMGLPDFHIPENLFLKSDGRVKYTLNKNSLKIEIPLPFGGKSSRDLKMLETVRTPALHFKSVGFHLPSREFQVPTFTIPKLYQLQVPLLGVLDLSTNVYSNLYNWSASYSGGNTSTDHFSLRARYHMKADSVVDLLSYNVQGSGETTYDHKNTFTLSYDGSLRHKFLDSNIKFSHVEKLGNNPVSKGLLIFDASSSWGPQMSASVHLDSKKKQHLFVKEVKIDGQFRVSSFYAKGTYGLSCQRDPNTGRLNGESNLRFNSSYLQGTNQITGRYEDGTLSLTSTSDLQSGIIKNTASLKYENYELTLKSDTNGKYKNFATSNKMDMTFSKQNALLRSEYQADYESLRFFSLLSGSLNSHGLELNADILGTDKINSGAHKATLRIGQDGISTSATTNLKCSLLVLENELNAELGLSGASMKLTTNGRFREHNAKFSLDGKAALTELSLGSAYQAMILGVDSKNIFNFKVSQEGLKLSNDMMGSYAEMKFDHTNSLNIAGLSLDFSSKLDNIYSSDKFYKQTVNLQLQPYSLVTTLNSDLKYNALDLTNNGKLRLEPLKLHVAGNLKGAYQNNEIKHIYAISSAALSASYKADTVAKVQGVEFSHRLNTDIAGLASAIDMSTNYNSDSLHFSNVFRSVMAPFTMTIDAHTNGNGKLALWGEHTGQLYSKFLLKAEPLAFTFSHDYKGSTSHHLVSRKSISAALEHKVSALLTPAEQTGTWKLKTQFNNNEYSQDLDAYNTKDKIGVELTGRTLADLTLLDSPIKVPLLLSEPINIIDALEMRDAVEKPQEFTIVAFVKYDKNQDVHSINLPFFETLQEYFERNRQTIIVVLENVQRNLKHINIDQFVRKYRAALGKLPQQANDYLNSFNWERQVSHAKEKLTALTKKYRITENDIQIALDDAKINFNEKLSQLQTYMIQFDQYIKDSYDLHDLKIAIANIIDEIIEKLKSLDEHYHIRVNLVKTIHDLHLFIENIDFNKSGSSTASWIQNVDTKYQIRIQIQEKLQQLKRHIQNIDIQHLAGKLKQHIEAIDVRVLLDQLGTTISFERINDILEHVKHFVINLIGDFEVAEKINAFRAKVHELIERYEVDQQIQVLMDKLVELAHQYKLKETIQKLSNVLQQVKIKDYFEKLVGFIDDAVKKLNELSFKTFIEDVNKFLDMLIKKLKSFDYHQFVDETNDKIREVTQRLNGEIQALELPQKAEALKLFLEETKATVAVYLESLQDTKITLIINWLQEALSSASLAHMKAKFRETLEDTRDRMYQMDIQQELQRYLSLVGQVYSTLVTYISDWWTLAAKNLTDFAEQYSIQDWAKRMKALVEQGFTVPEIKTILGTMPAFEVSLQALQKATFQTPDFIVPLTDLRIPSVQINFKDLKNIKIPSRFSTPEFTILNTFHIPSFTIDFVEMKVKIIRTIDQMLNSELQWPVPDIYLRDLKVEDIPLARITLPDFRLPEIAIPEFIIPTLNLNDFQVPDLHIPEFQLPHISHTIEVPTFGKLYSILKIQSPLFTLDANADIGNGTTSANEAGIAASITAKGESKLEVLNFDFQANAQLSNPKINPLALKESVKFSSKYLRTEHGSEMLFFGNAIEGKSNTVASLHTEKNTLELSNGVIVKINNQLTLDSNTKYFHKLNIPKLDFSSQADLRNEIKTLLKAGHIAWTSSGKGSWKWACPRFSDEGTHESQISFTIEGPLTSFGLSNKINSKHLRVNQNLVYESGSLNFSKLEIQSQVDSQHVGHSVLTAKGMALFGEGKAEFTGRHDAHLNGKVIGTLKNSLFFSAQPFEITASTNNEGNLKVRFPLRLTGKIDFLNNYALFLSPSAQQASWQVSARFNQYKYNQNFSAGNNENIMEAHVGINGEANLDFLNIPLTIPEMRLPYTIITTPPLKDFSLWEKTGLKEFLKTTKQSFDLSVKAQYKKNKHRHSITNPLAVLCEFISQSIKSFDRHFEKNRNNALDFVTKSYNETKIKFDKYKAEKSHDELPRTFQIPGYTVPVVNVEVSPFTIEMSAFGYVFPKAVSMPSFSILGSDVRVPSYTLILPSLELPVLHVPRNLKLSLPDFKELCTISHIFIPAMGNITYDFSFKSSVITLNTNAELFNQSDIVAHLLSSSSSVIDALQYKLEGTTRLTRKRGLKLATALSLSNKFVEGSHNSTVSLTTKNMEVSVATTTKAQIPILRMNFKQELNGNTKSKPTVSSSMEFKYDFNSSMLYSTAKGAVDHKLSLESLTSYFSIESSTKGDVKGSVLSREYSGTIASEANTYLNSKSTRSSVKLQGTSKIDDIWNLEVKENFAGEATLQRIYSLWEHSTKNHLQLEGLFFTNGEHTSKATLELSPWQMSALVQVHASQPSSFHDFPDLGQEVALNANTKNQKIRWKNEVRIHSGSFQSQVELSNDQEKAHLDIAGSLEGHLRFLKNIILPVYDKSLWDFLKLDVTTSIGRRQHLRVSTAFVYTKNPNGYSFSIPVKVLADKFIIPGLKLNDLNSVLVMPTFHVPFTDLQVPSCKLDFREIQIYKKLRTSSFALNLPTLPEVKFPEVDVLTKYSQPEDSLIPFFEITVPESQLTVSQFTLPKSVSDGIAALDLNAVANKIADFELPTIIVPEQTIEIPSIKFSVPAGIVIPSFQALTARFEVDSPVYNATWSASLKNKADYVETVLDSTCSSTVQFLEYELNVLGTHKIEDGTLASKTKGTFAHRDFSAEYEEDGKYEGLQEWEGKAHLNIKSPAFTDLHLRYQKDKKGISTS

SEQ ID NO: 1041 - DNA, 8192 bp, Homosapiens; identical to SEQ ID NO: 1039

SEQ ID NO: 1042 - protein, 4000 aa, Homosapiens; identical to SEQ ID NO: 1040

SEQ ID NO: 1043 - DNA, 1497 bp, Homosapiens
cactgaagtcacggtgtgcaaatgttcctttattcatattctaggaactgtacggttgagctgcatgtggaatccaggactgtttcaacataatctgctttgtttttcaaactggcactccaagtggcattatacacgggagagtctacctcaaagcgtgcagtcagtgcttgaaaggaaggaatgacaattccagcaggtacagagaacttaatggagggaatctcaatggtctgctcaggcacgatgatggtgggcaactcaaagtctgcgatcttgttggctactgcatttagatccaaagcagcaatgccatctgaaacactttttggaagcgtgaactgggacacagttaactgagattcaggcacggttatctcaaaaaagggaatcaaggagtcttctggttgagaatattttgttaacacatcaacttcagggaattttacctcggggagtgttggtaggttgagggcaaatgatgaagttctcagcttcttatagatttgtatttctctgaagtcaagtttgcacgatggaacctgaagatctgtaaatgggacatggaacgtaggcatgacaagaactgaatttagatcatttagtttcagcccaggaataatgaatttatcagccaaaacttttacagggatggagaatgaatagccattggggtttttggtgtacacaaaggcagttgaaacacgaagatgctgtctcctaccaatgctggtggttacatccagctttaggaaatcccataagctcttgtcatagactggtaggatgatatttttgaggaaccttaggtgtccttctaaggatcctgcaatgtcaaggtgtgccttttcttggtcattggaaagctcgacctggctctggaaagacccagaatgaatccggacttcatttttccatctgatcttctggttcttagtgttagcattcagggccacttcctggccaaggtcagggaaatcatggaaggaactgggctgacttgcatggacctgaacaagagctgacatttgccatggagagagttccagggtggctttgcttgtatgttctccgttggtgaaaaagaggccctctagctgtaagtggtttttcgtactgtgctcccagagggaatatatgcgttggagtgtggcttctccagcaaaattttcttttacttcaaggttccagatatcatcaattttggaagtgccctgcagcttcactgaagaccgtgtgctcttggaattcaagtaagtgttggcctcactagcaatagttcctgaatattcccgagaaagaaccgaacccttgacatctcctttggtagatgactcaatggaaaagtaagaggtgaggctttccaagctaagcttgtggtcaactgctcctttagcggtagagtacagcattgaagaattgaaatcatacttaaattccatggaggaagagacagtaggttttgacttggtatttccattaagttcttgcttgaaa

SEQ ID NO: 1044 - protein, 58 aa, Homosapiens
MTIPAGTENLMEGISMVCSGTMMVGNSKSAILLATAFRSKAAMPSETLFGSVNWDTVN

SEQ ID NO: 1045 - DNA, 3236 bp, Homosapiens
cattcccaccgggacctgcggggctgagtgcccttctcggttgctgccgctgaggagcccgcccagccagccagggccgcgaggccgaggccaggccgcagcccaggagccgccccaccgcagctggcgatggacccgccgaggcccgcgctgctggcgctgctggcgctgcctgcgctgctgctgctgctgctggcgggcgccagggccgaagaggaaatgctggaaaatgtcagcctggtctgtccaaaagatgcgacccgattcaagcacctccggaagtacacatacaactatgaggctgagagttccagtggagtccctgggactgctgattcaagaagtgccaccaggatcaactgcaaggttgagctggaggttccccagctctgcagcttcatcctgaagaccagccagtgcaccctgaaagaggtgtatggcttcaaccctgagggcaaagccttgctgaagaaaaccaagaactctgaggagtttgctgcagccatgtccaggtatgagctcaagctggccattccagaagggaagcaggttttcctttacccggagaaagatgaacctacttacatcctgaacatcaagaggggcatcatttctgccctcctggttcccccagagacagaagaagccaagcaagtgttgtttctggataccgtgtatggaaactgctccactcactttaccgtcaagacgaggaagggcaatgtggcaacagaaatatccactgaaagagacctggggcagtgtgatcgcttcaagcccatccgcacaggcatcagcccacttgctctcatcaaaggcatgacccgccccttgtcaactctgatcagcagcagccagtcctgtcagtacacactggacgctaagaggaagcatgtggcagaagccatctgcaaggagcaacacctcttcctgcctttctcctacaagaataagtatgggatggtagcacaagtgacacagactttgaaacttgaagacacaccaaagatcaacagccgcttctttggtgaaggtactaagaagatgggcctcgcatttgagagcaccaaatccacatcacctccaaagcaggccgaagctgttttgaagactctccaggaactgaaaaaactaaccatctctgagcaaaatatccagagagctaatctcttcaataagctggttactgagctgagaggcctcagtgatgaagcagtcacatctctcttgccacagctgattgaggtgtccagccccatcactttacaagccttggttcagtgtggacagcctcagtgctccactcacatcctccagtggctgaaacgtgtgcatgccaacccccttctgatagatgtggtcacctacctggtggccctgatccccgagccctcagcacagcagctgcgagagatcttcaacatggcgagggatcagcgcagccgagccaccttgtatgcgctgagccacgcggtcaacaactatcataagacaaaccctacagggacccaggagctgctggacattgctaattacctgatggaacagattcaagatgactgcactggggatgaagattacacctatttgattctgcgggtcattggaaatatgggccaaaccatggagcagttaactccagaactcaagtcttcaatcctgaaatgtgtccaaagtacaaagccatcactgatgatccagaaagctgccatccaggctctgcggaaaatggagcctaaagacaaggaccaggaggttcttcttcagactttccttgatgatgcttctccgggagataagcgactggctgcctatcttatgttgatgaggagtccttcacaggcagatattaacaaaattgtccaaattctaccatgggaacagaatgagcaagtgaagaactttgtggcttcccatattgccaatatcttgaactcagaagaattggatatccaagatctgaaaaagttagtgaaagaagctctgaaagaatctcaacttccaactgtcatggacttcagaaaattctctcggaactatcaactctacaaatctgtttctcttccatcacttgacccagcctcagccaaaatagaagggaatcttatatttgatccaaataactaccttcctaaagaaagcatgctgaaaactaccctcactgcctttggatttgcttcagctgacctcatcgagattggcttggaaggaaaaggctttgagccaacattggaagctctttttgggaagcaaggatttttcccagacagtgtcaacaaagctttgtactgggttaatggtcaagttcctgatggtgtctctaaggtcttagtggaccactttggctataccaaagatgataaacatgagcaggatatggtaaatggaataatgctcagtgttgagaagctgattaaagatttgaaatccaaagaagtcccggaagccagagcctacctccgcatcttgggagaggagcttggttttgccagtctccatgacctccagctcctgggaaagctgcttctgatggatcgcccagactcccttacgatcccagctgcacaagcccgaaaagatgcttgtactttcttcagagatggaggtttgccttgaatttcactgaagatgactcttggatcacatggaaatgttaacatttagaaattaagctattcataatgttagctgtatttttaagagcattaatttattcatctggaaaacaatgttcggtataccttcctctacctttgctgaaggtccttttatttttatttttatttttttaattttttgagatggagtcttgctcccaggctggagtgcagtgatacaatctcggctcactgcaactctgccttccgggttcaagcaattctcctgcctcagcctcccaagtagctgggactgtggacgtgcaccagcatgcccggctaatttgtgtatctttagtagagacaagcctgttgacaaccatgtcaggctggtttcgaactcctgacctcaagtgatcctccagcctgggcctcccacagtgctggaataacaggtgtgagccactgcacctgacctgaaggtccttttaagattgaaatgatacaatgattataaaagaaagtatttggcaaactataattcactatctaaatatgctataatttttattattaattcataaaaggaaatatataaatgtactcctatggcttgattaaaaaaatgttgactttaag

SEQ ID NO: 1046 - protein, 828 aa, Homosapiens
MDPPRPALLALLALPALLLLLLAGARAEEEMLENVSLVCPKDATRFKHLRKYTYNYEAESSSGVPGTADSRSATRINCKVELEVPQLCSFILKTSQCTLKEVYGFNPEGKALLKKTKNSEEFAAAMSRYELKLAIPEGKQVFLYPEKDEPTYILNIKRGIISALLVPPETEEAKQVLFLDTVYGNCSTHFTVKTRKGNVATEISTERDLGQCDRFKPIRTGISPLALIKGMTRPLSTLISSSQSCQYTLDAKRKHVAEAICKEQHLFLPFSYKNKYGMVAQVTQTLKLEDTPKINSRFFGEGTKKMGLAFESTKSTSPPKQAEAVLKTLQELKKLTISEQNIQRANLFNKLVTELRGLSDEAVTSLLPQLIEVSSPITLQALVQCGQPQCSTHILQWLKRVHANPLLIDVVTYLVALIPEPSAQQLREIFNMARDQRSRATLYALSHAVNNYHKTNPTGTQELLDIANYLMEQIQDDCTGDEDYTYLILRVIGNMGQTMEQLTPELKSSILKCVQSTKPSLMIQKAAIQALRKMEPKDKDQEVLLQTFLDDASPGDKRLAAYLMLMRSPSQADINKIVQILPWEQNEQVKNFVASHIANILNSEELDIQDLKKLVKEALKESQLPTVMDFRKFSRNYQLYKSVSLPSLDPASAKIEGNLIFDPNNYLPKESMLKTTLTAFGFASADLIEIGLEGKGFEPTLEALFGKQGFFPDSVNKALYWVNGQVPDGVSKVLVDHFGYTKDDKHEQDMVNGIMLSVEKLIKDLKSKEVPEARAYLRILGEELGFASLHDLQLLGKLLLMDRPDSLTIPAAQARKDACTFFRDGGLP

SEQ ID NO: 1047 - DNA, 6243 bp, Homosapiens
atgaactccaacccttgcacagccaggaagtggggtgataccaccccaatgtgtcacacccatatgacaagctacatcctctccaccacattagcccgtccagagtctctccatggcctggccctgagagacaaggctgtgaggctgcccacctggagcctaatgccagcttcaagaactcccagtgggcaccacccttaccaggccgcacacagcttccgccctcaggaagccagggacagcgccaggcgggacgctttgcgcagctgcaggcctcccccgccgcattcggccttcaagcccgcacatgctccctggggcccctgcgggattacgagggggtgggaacagggcccgagtctcccgccatcttgggccctagcggtatttttccagctctgggaagagcggcctgacccgcagcagagattcttgaaaatggattctacatctttcttaccaacatttttagatgtggatctgacaatatcacatattaaatgtcttcccaaggatattctggtgaaatttcaaggcataaagagtaatgaatgtgagtttgactaccatgtattgcagagagaaatacaacatactccaaaagtgaaaaataatgtggaaattgatgaattttgtttggtggaagaaagagtatctggagaatggcagagaggaagagtcatggaaaagaaaaatgaactctatacagtgctcctcatagatcgcggagaagaactaagagttgctggtccacagattgcttcagcctgtggcaatttatttgagctaccgccacgggtagtatttggtatttttgcgaatatactaccagttggggaaaaatggtcccctaaagctttgaattatttcaagtcattagtaggaatacaagtgaaaggttatgtgcaagctattttacctctgcaaatgtttctttttgaagtgccaaaaattatatctcaggctctcgagttacaattaggaagacttgttgatggagattcatttcgtcttattgtggaaatgttagaagaattccctcaacaaatgccagatttattacaacataaaaggcctgaattgtcattaggtaataaagatacttcacttgatattcagcatgttctggataagttgcagccatctttgtcagtaggaagtactgaaagtgtaaaggtatcatctgcattgagcccaagtaaattttattgtcagttaattaaatggactccagagctagaaaacttgacagcacatatgactttgcattatgataccgtctgtcaagaaactagtcccacgtgtgataattttggactgctttgtgttgccagaaggcgaaatggacagtggcatagaggaattcttcagcagctcttgcccccaaatcaagtaaaaatttggtttatggattatggcagtagcgaggctataccctcaatttatgtaaagaaacttaaacaggattttattttagtaccattattttcatttccatgttctctgacatgtttgcacagtccagatagagatgcaagaatatttcaactgagtatatttaaacaggccttattaggacaagtggtatatgcacacattgattggttcaataaggatgagtgtttgtattatgtgacattacaaactcaagagtctacagttaattctaagtgtctactgaagactgtaggcacacaagtactttgtccgatgtctgattcaaaaatctccaatatcttgagtgagacaagtgtgtctgatgtaaacagctttgcagttgagagttttatgggaaatattgaatggtcaatagactctctaaataaaaaaggcattttaaaagtaggttttcccattaaaacagtacaaatggagatagaggctgcctacatagcttttatagcatatgtattaaacccatcaaatttctgggtacgcactaatgaccatcggaatgaatttcaagaaataatgaaaaacataaacaaattttatgatttgtgtgaaaacgatgaaatgattctaagaaaacctgaacctggattattttgttgtgctagatatagcaaggacagacgtttttacagagctgtcatcactgaaattaatggttataagattaatgtttattttttggattatggtaatactgattccataccattttttgatgtaaaaattttgcttccagaattttgtgagttgcctgccttagcgatgtgctgttcacttgcacatatatttcctgttgaagatttatggactaaggctgcaattgattattttaaaaaattagttttgaacaaagcaattttgcttcaggttatagcaaaaaaagatgacaagtacactgtaaatattcaaagtgttgaagcctcagaaaatattgatgttatctctcttatgttacaagctggatatgcagaatattttcaagtagaactagaatattttccaaaatctgtaagtgaatattcaatgctaaattcagaatctaaaaacaaagttaatattaaaaaagtcatatctgcccttcttgaaggacctaaatctaaaaagtaccattcaaataacctggtggaaaataacttgtctttgccaaagtccctagctgttaatatctcagaatttaaaaatcctttcaccttgtctgtgggacctgagtcatcctggccttataaagaatatatttttagaccaggaacagttcttgaagttaaatgttcctgttattatggcccaggtgacttttcatgccagctccaatgtaagtcagaagacctaaaattactaatggagcaaattcagaattactatagtattcattctgatccttatgagattgggcagactgcttgtgttgctaagtattctgggaagtggtgtagagctgctgttttgactcaagtatcaaaagaagttgacatagtgtttgttgattatggttaccaaaaaagggttttaattgaagatctttgtgcaattaacccacgttttctcttgttagaaagccaagccttcagatgttgtcttaaccattttattgagcctgttagttgtaaattattcagttggacaagaaaagcattcagagacttgtggaattttatctcttcatctagagggttattgacttgtatcatctatgccttagttattatacatccaaaccatttatataacttagtggatttacagtcctcatttactagtgcaaaagaatttcttatgaatcgtggctctgctcagtatatcacattatcagagacattcccatctttatttagtctttacagttactgttattcttcctttaatatacaaattggaagtgaagaagaagtatatatatctcacatatatagtccccaaaagttttattgccagcttggcagaaataataaagatctagagatgatagaaacaaaaatcacagagagtgttaacctccaaaattttccaaaatatgattctaataaaatgagagtgtgcatatctaagtatgtagaggatggtctctcatacagagctttagcaataccaacagattcatcatctgagtttcaagtctattttgtagactttggaaataagcaattagtaggagaaaatatgttgagggccatttcagctcagtttccagagttgttgtttacacctatgcaagctattaagtgttttttgtcagatcttagggatgtagatattccagcagaaatcagtagttggtttaaagacaatttcttgggaagatcattaaaggcgataatattgtcccaggagtcagatggacagcttggtatagaattgtatgatggatctcaatatataaatgagaaaattaaagtgttgcttcatgcttatggaaaaagacattgtgaccaagcatgctgcatggaaaagagtaataaaataaatgagaataagagatttactacttctttgaaaggcaaaacaggaaacaactatcgccataatgtgataaataaacctagtccagtaacatattccgaaagaaaaatagaccaattgatgcatcccaaaaatatacatgccaggtttttgaagccatcagtttgttataaaatggaacctgtgtcaaaaaacaaaatgaagacttctttgaatgatgggcttaaaggtataaaaattgtccctggagctgcacatattcttgagaacaggcgtgtgggccaaaaatcagtaaaggttgtatcacagtcttttatcagagcattaaatcaaacaacctcacaaaacccatatgaccttattaggccacagatcaaagaccttcctcaaccgcaaatttatttgaatgccaaagttaaagggtatgtatctaatatcagtaatccagcgaatttccatattcagcttgctgagaatgaaagtgtaattatcagacttgctgatgctctaaatgcaacagcaaggagattgagagagagaaaatcagttaaacctctagtgggagatcttgtagttgcagaatattctggtgacaatgccatttacagggcagttattaagaaaattttgccaggaaattcttttgaagtagaatttattgactatggtaactctgcaatagtaaacacatctaaaatttacgaacttcagagggaatttttaactgttcctcagctaggaatccatgcttttcttagtggagtaaaatggaatgagcctgatgaaatatgggatgacaaaactgtggattattttacttcgaaagtacataacaaaacagtttattgtgaatttttgaaaaagcatgatcagaaatgggaagtaaatatgatttgtgatgaaaaatgtgtcattaatgaactactgaaatggaaagcatgttcaaaactgcagaagtcagcattgcagatgcctcaggttctctctcaaaaggtgaggccaggtgataatgaaatgaagaaaggaaaatcaaatgagtctgaaggttctatgaattcaaaccaacagctgtttaaaattcctttggaagaattcaaacttggacaacttgaaaaagctgaaatgcttaatgtttcaaaaagtggaagattttatgtgaagttatccaaaaataaaaaaattttatcagatttaatagtattaattacgaaagaagaaaaaaaatccccttttttatcaatggaaagtattgaaaaaggtttagaatgcttggcaaaatctaaaaataccttgaaatggcatcgatcaaaagtagaagaaaagtatgttgatgataaagtacttgtttttttagtagattgtggtatctatgaaatagtacctgtatgtaataccaagctgcttagtaatgaaataagaaacattcctagacaagctgtaccttgtaaatggatttggtttgaaaattctaagaacatatcatttgagtgcttatttgctgatttggaaataaatattcttttcctgaaatatttagatgctgtttgggaagtagaaattttggtagatgacctgttacttttggaatacttaaatttgaatacagttcctgttgaagaaaacaaacttagacttgcagaaattgtttacaacattgaatctaagactcctgtatcatcatgcacaataaaatcatttacttgggttcaattccaaaatgataggcagtattctggtattgcaactgctgtttctgatccatcagacttcagtattcagttagaagatttctttgacataatgaaatacctttttatgttgctttctgatctaccagagaccttacaaacattgcctcaggagttcataattcccggttctagttgtttgttcaaatataaatcggaagatcagtggaatagagtagaaatttctgaagtctcacctcagtctttatgtcttgtgttggttgactatggattttctttttatatacgttattcagaaattataaatcttaaagttgttcctgaggaacttttgaatttgccaaggctgagttatccatgtattttatatggtatcttacctgctaaaggaaaacattggagtgaagaagccaaaatcttttttcgagatttcctaagtaaaccagacttagtttttcagtttagggaatatcattctgaaacaaaactgaaagtagatgtcattcatgagaaaaacaatttggcagatatattagttgcatctggtctcgcaacttattctaaagattcacctcatcttgatgcaattactgctactgaatctgctaaaaatccaatataa

SEQ ID NO: 1048 - protein, 2080 aa, Homosapiens
MNSNPCTARKWGDTTPMCHTHMTSYILSTTLARPESLHGLALRDKAVRLPTWSLMPASRTPSGHHPYQAAHSFRPQEARDSARRDALRSCRPPPPHSAFKPAHAPWGPCGITRGWEQGPSLPPSWALAVFFQLWEERPDPQQRFLKMDSTSFLPTFLDVDLTISHIKCLPKDILVKFQGIKSNECEFDYHVLQREIQHTPKVKNNVEIDEFCLVEERVSGEWQRGRVMEKKNELYTVLLIDRGEELRVAGPQIASACGNLFELPPRVVFGIFANILPVGEKWSPKALNYFKSLVGIQVKGYVQAILPLQMFLFEVPKIISQALELQLGRLVDGDSFRLIVEMLEEFPQQMPDLLQHKRPELSLGNKDTSLDIQHVLDKLQPSLSVGSTESVKVSSALSPSKFYCQLIKWTPELENLTAHMTLHYDTVCQETSPTCDNFGLLCVARRRNGQWHRGILQQLLPPNQVKIWFMDYGSSEAIPSIYVKKLKQDFILVPLFSFPCSLTCLHSPDRDARIFQLSIFKQALLGQVVYAHIDWFNKDECLYYVTLQTQESTVNSKCLLKTVGTQVLCPMSDSKISNILSETSVSDVNSFAVESFMGNIEWSIDSLNKKGILKVGFPIKTVQMEIEAAYIAFIAYVLNPSNFWVRTNDHRNEFQEIMKNINKFYDLCENDEMILRKPEPGLFCCARYSKDRRFYRAVITEINGYKINVYFLDYGNTDSIPFFDVKILLPEFCELPALAMCCSLAHIFPVEDLWTKAAIDYFKKLVLNKAILLQVIAKKDDKYTVNIQSVEASENIDVISLMLQAGYAEYFQVELEYFPKSVSEYSMLNSESKNKVNIKKVISALLEGPKSKKYHSNNLVENNLSLPKSLAVNISEFKNPFTLSVGPESSWPYKEYIFRPGTVLEVKCSCYYGPGDFSCQLQCKSEDLKLLMEQIQNYYSIHSDPYEIGQTACVAKYSGKWCRAAVLTQVSKEVDIVFVDYGYQKRVLIEDLCAINPRFLLLESQAFRCCLNHFIEPVSCKLFSWTRKAFRDLWNFISSSRGLLTCIIYALVIIHPNHLYNLVDLQSSFTSAKEFLMNRGSAQYITLSETFPSLFSLYSYCYSSFNIQIGSEEEVYISHIYSPQKFYCQLGRNNKDLEMIETKITESVNLQNFPKYDSNKMRVCISKYVEDGLSYRALAIPTDSSSEFQVYFVDFGNKQLVGENMLRAISAQFPELLFTPMQAIKCFLSDLRDVDIPAEISSWFKDNFLGRSLKAIILSQESDGQLGIELYDGSQYINEKIKVLLHAYGKRHCDQACCMEKSNKINENKRFTTSLKGKTGNNYRHNVINKPSPVTYSERKIDQLMHPKNIHARFLKPSVCYKMEPVSKNKMKTSLNDGLKGIKIVPGAAHILENRRVGQKSVKVVSQSFIRALNQTTSQNPYDLIRPQIKDLPQPQIYLNAKVKGYVSNISNPANFHIQLAENESVIIRLADALNATARRLRERKSVKPLVGDLVVAEYSGDNAIYRAVIKKILPGNSFEVEFIDYGNSAIVNTSKIYELQREFLTVPQLGIHAFLSGVKWNEPDEIWDDKTVDYFTSKVHNKTVYCEFLKKHDQKWEVNMICDEKCVINELLKWKACSKLQKSALQMPQVLSQKVRPGDNEMKKGKSNESEGSMNSNQQLFKIPLEEFKLGQLEKAEMLNVSKSGRFYVKLSKNKKILSDLIVLITKEEKKSPFLSMESIEKGLECLAKSKNTLKWHRSKVEEKYVDDKVLVFLVDCGIYEIVPVCNTKLLSNEIRNIPRQAVPCKWIWFENSKNISFECLFADLEINILFLKYLDAVWEVEILVDDLLLLEYLNLNTVPVEENKLRLAEIVYNIESKTPVSSCTIKSFTWVQFQNDRQYSGIATAVSDPSDFSIQLEDFFDIMKYLFMLLSDLPETLQTLPQEFIIPGSSCLFKYKSEDQWNRVEISEVSPQSLCLVLVDYGFSFYIRYSEIINLKVVPEELLNLPRLSYPCILYGILPAKGKHWSEEAKIFFRDFLSKPDLVFQFREYHSETKLKVDVIHEKNNLADILVASGLATYSKDSPHLDAITATESAKNPI

SEQ ID NO: 1049 - DNA, 488 bp, Homosapiens
ggcacagaggcagcacagctatgtgggaagaacacaggctggtctgcaggtgtctagatttggatcctagctctgttacttactactttgtgactttgagcaaattcacgtctctgaaagaaacaaagctccaaatttggaagcagcagtgaaactccacagattactgagggcaaaattgctgggtcatatggcaccaaggaaaggtcttgtgctgacacagggagaaagctgtcatttacaagctgggaggagaccttcaccagaaactgaatttgctaccacctggatcatgaacttttactctccaaaacggaaggaggtgatgaagagagaaagaaaggatggaaggaaggaggaagtggacaatgagatcctggctgatggatgtaatgaaggcatgaactatactagttgaacaaggaaatgaacttgaaccaaattgtgaagttctctgcagtgaaatattaaaggtacagatcaaagct

SEQ ID NO: 1050 - protein, 75 aa, Homosapiens
MAPRKGLVLTQGESCHLQAGRRPSPETEFATTWIMNFYSPKRKEVMKRERKDGRKEEVDNEILADGCNEGMNYTS

SEQ ID NO: 1051 - DNA, 503 bp, Homosapiens
cagcacagctatgtgggaagaacacaggctggtctgcaggtgtctagatttggatcctagctctgttacttactactttgtgactttgagcaaattcacgtctctgaaagaccaggaccagagaccatgctgggaagcctggctgctctttgaggactgagatgaacttagcaatgcagagaagaacaaagagaggcttgtgctcaccgtgttccagagggatcaccgtgttccctttgttcatttgaggacatgaatacaactatggtctttggacaaaaggcatatgccaggcagtatgaatggtctctcttgtctgtgcaattagtatgtaagagcacgtgaactggtgcctgggacctctacctgttttagtatgatagcaccacagtaaagggcctggactttgtatgagcttgggaaaatcatgtcacctctgcaagtcttggtttccctgggtgttaaatgtcaatttaagtaaaatgctatctactttgttttgg

SEQ ID NO: 1052 - protein, 49 aa, Homosapiens
MWEEHRLVCRCLDLDPSSVTYYFVTLSKFTSLKDQDQRPCWEAWLLFED

SEQ ID NO: 1053 - DNA, 8192 bp, Homosapiens
cttgtgagaccacgcacaaggaattaggctttggctgcagcggtgctgaagcccatgctatgacagaagaagcaggcctttgaagctatcctcgggttaagaaatggtgccctaaagaggcaagcatccctttctccgttctgctgtaagacaccacatctgaaggagacagacttgaggcattcacaagcatccaaggatactggctcactgctggcttcctgtactttcttgagaaaagtgttttctttttactgactctcactgcttccttttggcctggtaccactggtggaacctggcagataatgggatttgaggagttaagtatctgttgacactgcagatactcttaaattagttaatcagactcaaatgggtcagtgctttcccttgatcttttgttgaagccttttccagaacgttgtctccaaagtgcatcctccctttggtctggaagttctgtggctaccctgtaccactggggtcaacgttttccagttggaagaggactacagggagagagggcggggttattggaagaagaagaagaaaaaaagaactagataaaggagggcacatccctctcactcccgcctttccccttacctttctgtctctcgggacccttatttcttcgtcacggtgtccaggaccattttgaccctgtcggccccggcacccccccgccgcaccccagccccgagcatggggacggcgctgctccagcgcgggggctgttttcttctgtgcctctcgctgctgctcctgggctgctgggcggagctgggcagcgggctggagtttccgggcgccgagggccaatggacgcgcttccccaagtggaacgcctgctgcgagagcgagatgagcttccagctcaagactcgcagcgcccgcggcctcgtgctctacttcgacgacgagggcttctgcgacttcctggagctgattctgacgcgcggcggccgcctgcagctcagcttctccatcttctgcgctgagcctgcgacgctcctggccgacacgccggttaacgacggcgcctggcacagcgtgcgcatccgccgccagttccgcaacaccacgctcttcatcgaccaggtggaggccaagtgggtggaggtcaagtccaagcgcagggacatgacggtgttcagcggccttttcgtcggggggctgcccccggaactgcgcgccgcggcgctcaagctcaccctggcctcggtgagggagcgggagcccttcaaggggtggattcgtgacgtgagggtcaactcctcgcaggtcctgcccgtggacagcggcgaggtgaagctggacgatgagccgcccaacagcggcgggggaagcccgtgcgaggcgggcgaggagggcgagggcggggtgtgcctcaacggaggtgtgtgctccgtggtggacgaccaggccgtgtgcgactgctcgcgaaccggcttccgcggcaaggactgcagccaaggtctggcgcacctgatgatgggcgaccaaggtatgggctctgaaaagaagaatatattgccacgttcaaaggatctgaatacttctgctacgacttgtctcaaaaccccattcaaagcagcagtgatgaaataactctgtcatttaaaacccttcagaggaatggactgatgcttcacactgggaaatcggctgattatgtcaatcttgccctgaaaaatggagctgtctctctggtcattaatttgggatcaggggcctttgaagcactagtggagcctgtgaatggaaagtttaatgataatgcctggcatgatgtgaaagtcaccaggaatctgcgtcaggtgacaatatcagtggatgggattcttaccacaacgggctacacgcaagaagattataccatgctggggtctgatgactttttctatgttggaggcagtcccagcacagccgaccttccagggtcaccagtcagtaacaactttatgggctgtctcaaagaggttgtatataaaaataatgatgtgaggctggaattatctcgacttgccaagcaaggagatcctaagatgaagatccatggagtggtggcatttaaatgtgagaatgttgcaactttagacccaatcacctttgaaaccccagagtctttcatctctttgcctaaatggaatgcaaagaaaactggctccatatcatttgatttccgtacaacagagccaaatggcctcatcttatttagccatggcaagccaagacatcagaaagatgccaagcacccacagatgataaaggtggacttctttgctattgagatgctagatggccacctctacctcctcctggacatggggtcaggtactataaaaataaaagccctgttgaagaaagtgaatgatggagaatggtatcatgtggacttccagagagacggacggtcaggtaccatttctgtcaacacgttgcgtactccctacactgctcctggtgagagtgagattctggacctggatgatgagttgtacctgggggggctgccagaaaataaagctggccttgtcttccccaccgaggtgtggactgctctgctcaactatggctacgtgggctgcatcagggatttgttcatcgatggccaaagcaaagatatccggcaaatggctgaagttcaaagtactgctggagtgaagccttcctgctcaaaggaaacagcaaaaccgtgccttagcaacccttgcaaaaacaatggcatgtgcagggatgggtggaacagatatgtctgtgattgttccggaacaggctatcttggcaggtcctgtgagagagaggcaacggttttgagctatgatgggagcatgtttatgaaaattcagctccccgtagtcatgcatacggaggctgaggatgtttccttacggttccgatcccagcgtgcatatggcattctgatggcaaccacttctagagactctgctgacaccctccgcctggagctagacgcaggacgtgtgaaactgacggtcaatctagattgtatcaggattaactgtaattccagcaaaggtcccgagactctttttgctggctataacctcaatgataacgagtggcacacagtgcgtgtagttcggcgtggaaaaagtttaaagttaacagtggatgaccaacaggccatgacaggtcaaatggcaggtgatcatactaggctggagttccataacatagagactggcatcatcacagaacgacggtatctttcttctgtcccctccaacttcattggacacctgcagagcttgacatttaatggaatggcatacattgacctgtgtaaaaatggcgacatagattactgtgagcttaatgccagatttggcttcaggaacatcatagcagatcctgtcaccttcaagaccaaatcgagctatgttgccttagctaccttgcaagcctacacttctatgcatctttttttccagttcaagacaacatccctagatggattaattctatataacagtggggatggaaatgactttattgtggttgaattagttaaagggtacttacattacgtgtttgatttgggaaatggtgctaacctcatcaaaggaagctcaaataaacctctcaatgacaatcagtggcacaacgtgatgatatcaagggacaccagcaacctccacactgtaaagattgacacaaaaatcacaacgcaaatcaccgccggagccaggaacttagacctcaagagtgacttatatataggaggagtagctaaagaaacatacaaatccttaccaaaacttgtacatgccaaagaaggctttcaaggctgcctggcatcagttgatttaaatggacggcttccggacctcatctccgatgctcttttctgcaacggacagatcgagagaggatgtgaagggcccagcacaacctgccaagaggactcatgttccaatcaaggtgtgtgcttgcaacaatgggatggcttcagctgtgactgtagtatgacttccttcagtggaccactctgcaatgaccctgggacgacatatatctttagcaaaggtggtggacaaatcacgtataagtggcctcctaatgaccgacccagtacacgagcagacagactggccataggttttagcactgttcagaaagaagccgtattggtgcgagtggacagttcttcaggcttgggtgactacctagaactgcatatacaccagggaaaaattggagttaagtttaatgttgggacagatgacatcgccattgaagaatccaatgcaatcattaatgatgggaaataccatgtagttcgtttcacgaggagtggtggcaatgccacgttgcaggtggacagctggccagtgatcgagcgctaccctgcaggaaacaatgataacgagcgcctggcgattgctagacagcgaattccatatcgacttggtcgagtagttgatgaatggctactcgacaaagggcgtcagctcacaatcttcaatagccaagcaaccataataattggcgggaaagagcagggccagcccttccagggccagctctctgggctgtactacaatggcttgaaagttctgaatatggcagccgaaaacgatgccaacatcgccatagtgggaaatgtgagactggttggtgaagtgccttcctctatgacaactgagtcaacagccactgccatgcaatcagagatgtccacatcaattatggagactaccacgaccctggctactagcacagccagaagaggaaagcccccgacaaaagaacccattagccagaccacagatgacatccttgtggcctcagcagagtgtcccagcgatgatgaggacattgacccctgtgagccgagctcaggtgggttagccaacccaacccgagcaggcggcagagagccgtatccaggctcagcagaagtgatccgggagtccagcagcaccacgggtatggtcgttgggatagtagccgctgccgccctgtgcatccttatcctcctctatgccatgtacaagtacagaaaccgggatgaaggctcataccatgtggacgagagtcgaaactacatcagtaactcagcacagtccaatggggctgttgtaaaggagaaacaacccagcagtgcgaaaagctccaacaaaaataagaaaaacaaggataaagagtattatgtctgatcccaagatcttaaatggacacttgtatagaaatagtcttcattttatctgagacataatataaacttatttactttcctttttatgaagcacatacaaaagaagacagggaatgcaatcaggaaggaaagactttttaaaaaataaaaacaagtatctcatgctcttgtttctcaaaaaagaaaaacaaaaaacaaaaaacaggggccaataaattccctaacatccacagtgttttcatttactctgcttgtctttatgttgctggaacatttctaaaagacagtgatgaccgcacgcattcataaagcaaaggagtactacagcatcaaggcacaacacaaaaaccaacacaaaacataacacaaaaaagaagctacctatgatcctggatttagccaaagtgctagcgctttcctgagaagtcagtccaattgccagagaagactgtccttttgagtgactcaacctgcaaacctttaagagtttgccgcctggtgcaactggagcagtggttggaacttgcatttgaaacaaagtgctggcttttttgaagacttgtgtaggaacacattcaaaaagcccctttctggttgtgagagaggaaaaaaaagtatggaggccttattttcaaaaatgtgaaatataaggcacgttttcacacaaaatttcaaaacaaaaacaagagggcatagatgcaatcattgggaaattttcatgcacgcttattatgttattacatatgtttatataaaatccatctctgtgtgctttctggactgtgataagtgacgttttatagcctgttgtatagaaaatgcaaaatatatctctgctcttcagccatttttggtaaattcaatgttataagtgttgctaagtatagggagttttatgacatcagagcaacaattatttcagttgggtttttctttttttttgccaccattataaattgccacaattacttttattttttaaagaaattacagtgtagtgtttattctaaggaagatatgtatgaatgtatatacaaagactcagctacttcttttcttatatgtacagccttcattctgttgcaattaagttttagtacttgtatgaaaggtgtgaattagaaagtcacatatatacatatgtatcttataatcttttctccctgaaatactcacattcccacatacattcactattttcacacacacacacacacacacacacacacacacacacacacacacacgaatccacagcaatccatcagatatgctggaagatccaaacgtgcatacagtagcaaatatttattgacaaattgaaaagcaggaaggaagagggttgtgccaaggtattgatgacaaatggggtgatttgcttcattgagatcttgctcccaggtaaccttaagaagattttagtccctaaagaaatgaacctttccttatcaaatagaatatcactgatatactgctgcatgaataagaaccattatgtgggcaggttatggaagcaaaattggttaatctacaccttaactctggctgctgcaattgaaaactttctttctaataaaataatatatatatctctgaatctgatgtgcatgatgaacatttctggaaagtaaacactttctctcgactaagaaagtatttttcagtaatttttgattctgtattactacccacttaaaaaatcattctctgttaattattgactatgttttaacttttctggttttacatatatatcattaaatatagttttagtttaacacattaagtagtggaaaagtatagattatacacttgttttgcatattattcaatgatgttcacagcaataaattactaatatgagaaggtagtgcaaaaaatgcattattacattgcaagttgatgtttcaggaaaaattggttgcattacttgaataccttctaaaagaacgataaaaaattttgtagaagagaagaatatctttccaattagctttaatcagcaaaggcaaaaaatgcaaaacatcttttgtgatactttagttgatgaaaaaaaagccaagaagtggcctggatttcagacatacagcaccttagaaatatgtataattcatagcaaatcaccactatctatggttgccaagtaattgttgtgtacaaagaaatttagtggctttttatgacccagaaagtagaaggtataaaatgaaaatttaatatccattgcttcttttctagattttcattttttttaatttgccacattaaataattcacgagtcttttcttttcccccgtctcattcagtcttactcagggaaagccagttaaataagaagggaagtgtaaaactactaatttacagcttgaagggtttttttttttaagattgcttttctattttatctattaagcttgaaccagtttccatctggaaagattctaaaatataatagaaaataaattgaataatggtaattttaagcagtatatctatgaaatgtgttgtttgggattgatttcaatgtttctccccagcgtaaattttaaagttacatgcaatgattgatatagtttattatcagcaaaattatttctaatattattggcttacacaaactctagcaaaaattattttttcctcaatggaaaaagaaaagagaggaacagagttagaaagagaaaatgacttgaatcccaagtatcttcataccaaacatatcagggttccctgcatagtttgcagttgattgaggatttcacacgacttggcataaatttgattacatctctagactgtaacttttctgattgattatgcttcttttttatccatgtaatgtgttgccttttttaaaagaacaaatactacaataacgtgtgaagtggtcaatccctaagacatcaaagaaaggccacataaccctacccttctagtgctttgtgtgattgggtatcaaaggggttttcttcttctttttttgtttgtttgtttttctgttgc

SEQ ID NO: 1054 - protein, 1179 aa, Homosapiens
MLHTGKSADYVNLALKNGAVSLVINLGSGAFEALVEPVNGKFNDNAWHDVKVTRNLRQVTISVDGILTTTGYTQEDYTMLGSDDFFYVGGSPSTADLPGSPVSNNFMGCLKEVVYKNNDVRLELSRLAKQGDPKMKIHGVVAFKCENVATLDPITFETPESFISLPKWNAKKTGSISFDFRTTEPNGLILFSHGKPRHQKDAKHPQMIKVDFFAIEMLDGHLYLLLDMGSGTIKIKALLKKVNDGEWYHVDFQRDGRSGTISVNTLRTPYTAPGESEILDLDDELYLGGLPENKAGLVFPTEVWTALLNYGYVGCIRDLFIDGQSKDIRQMAEVQSTAGVKPSCSKETAKPCLSNPCKNNGMCRDGWNRYVCDCSGTGYLGRSCEREATVLSYDGSMFMKIQLPVVMHTEAEDVSLRFRSQRAYGILMATTSRDSADTLRLELDAGRVKLTVNLDCIRINCNSSKGPETLFAGYNLNDNEWHTVRVVRRGKSLKLTVDDQQAMTGQMAGDHTRLEFHNIETGIITERRYLSSVPSNFIGHLQSLTFNGMAYIDLCKNGDIDYCELNARFGFRNIIADPVTFKTKSSYVALATLQAYTSMHLFFQFKTTSLDGLILYNSGDGNDFIVVELVKGYLHYVFDLGNGANLIKGSSNKPLNDNQWHNVMISRDTSNLHTVKIDTKITTQITAGARNLDLKSDLYIGGVAKETYKSLPKLVHAKEGFQGCLASVDLNGRLPDLISDALFCNGQIERGCEGPSTTCQEDSCSNQGVCLQQWDGFSCDCSMTSFSGPLCNDPGTTYIFSKGGGQITYKWPPNDRPSTRADRLAIGFSTVQKEAVLVRVDSSSGLGDYLELHIHQGKIGVKFNVGTDDIAIEESNAIINDGKYHVVRFTRSGGNATLQVDSWPVIERYPAGNNDNERLAIARQRIPYRLGRVVDEWLLDKGRQLTIFNSQATIIIGGKEQGQPFQGQLSGLYYNGLKVLNMAAENDANIAIVGNVRLVGEVPSSMTTESTATAMQSEMSTSIMETTTTLATSTARRGKPPTKEPISQTTDDILVASAECPSDDEDIDPCEPSSGGLANPTRAGGREPYPGSAEVIRESSSTTGMVVGIVAAAALCILILLYAMYKYRNRDEGSYHVDESRNYISNSAQSNGAVVKEKQPSSAKSSNKNKKNKDKEYYV

SEQ ID NO: 1055 - DNA, 3676 bp, Homosapiens
actgataggccgggctgatgcgcaggcaatttatcatcttgatctcccactgagtcagggagctctcctgtcaccagtattgatttcagaggatggactaaatttcctaggatttccattaagaattaagaaaaaagctctaagcacgcagggtagccagacagacatggatatgagatggcactgtgaaaacttgcagaccacagatgacatccttgtggcctcagcagagtgtcccagcgatgatgaggacattgacccctgtgagccgagctcaggtgggttagccaacccaacccgagcaggcggcagagagccgtatccaggctcagcagaagtgatccgggagtccagcagcaccacgggtatggtcgttgggatagtagccgctgccgccctgtgcatccttatcctcctctatgccatgtacaagtacagaaaccgggatgaaggctcataccatgtggacgagagtcgaaactacatcagtaactcagcacagtccaatggggctgttgtaaaggagaaacaacccagcagtgcgaaaagctccaacaaaaataagaaaaacaaggataaagagtattatgtctgatcccaagatcttaaatggacacttgtatagaaatagtcttcattttatctgagacataatataaacttatttactttcctttttatgaagcacatacaaaagaagacagggaatgcaatcaggaaggaaagactttttaaaaaataaaaacaagtatctcatgctcttgtttctcaaaaaagaaaaacaaaaaacaaaaaacaggggccaataaattccctaacatccacagtgttttcatttactctgcttgtctttatgttgctggaacatttctaaaagacagtgatgaccgcacgcattcataaagcaaaggagtactacagcatcaaggcacaacacaaaaaccaacacaaaacataacacaaaaaagaagctacctatgatcctggatttagccaaagtgctagcgctttcctgagaagtcagtccaattgccagagaagactgtccttttgagtgactcaacctgcaaacctttaagagtttgccgcctggtgcaactggagcagtggttggaacttgcatttgaaacaaagtgctggcttttttgaagacttgtgtaggaacacattcaaaaagcccctttctggttgtgagagaggaaaaaaaagtatggaggccttattttcaaaaatgtgaaatataaggcacgttttcacacaaaatttcaaaacaaaaacaagagggcatagatgcaatcattgggaaattttcatgcacgcttattatgttattacatatgtttatataaaatccatctctgtgtgctttctggactgtgataagtgacgttttatagcctgttgtatagaaaatgcaaaatatatctctgctcttcagccatttttggtaaattcaatgttataagtgttgctaagtatagggagttttatgacatcagagcaacaattatttcagttgggtttttctttttttttgccaccattataaattgccacaattacttttattttttaaagaaattacagtgtagtgtttattctaaggaagatatgtatgaatgtatatacaaagactcagctacttcttttcttatatgtacagccttcattctgttgcaattaagttttagtacttgtatgaaaggtgtgaattagaaagtcacatatatacatatgtatcttataatcttttctccctgaaatactcacattcccacatacattcactattttcacacacacacacacacacacacacacacacacacacacacacacacgaatccacagcaatccatcagatatgctggaagatccaaacgtgcatacagtagcaaatatttattgacaaattgaaaagcaggaaggaagagggttgtgccaaggtattgatgacaaatggggtgatttgcttcattgagatcttgctcccaggtaaccttaagaagattttagtccctaaagaaatgaacctttccttatcaaatagaatatcactgatatactgctgcatgaataagaaccattatgtgggcaggttatggaagcaaaattggttaatctacaccttaactctggctgctgcaattgaaaactttctttctaataaaataatatatatatctctgaatctgatgtgcatgatgaacatttctggaaagtaaacactttctctcgactaagaaagtatttttcagtaatttttgattctgtattactacccacttaaaaaatcattctctgttaattattgactatgttttaacttttctggttttacatatatatcattaaatatagttttagtttaacacattaagtagtggaaaagtatagattatacacttgttttgcatattattcaatgatgttcacagcaataaattactaatatgagaaggtagtgcaaaaaatgcattattacattgcaagttgatgtttcaggaaaaattggttgcattacttgaataccttctaaaagaacgataaaaaattttgtagaagagaagaatatctttccaattagctttaatcagcaaaggcaaaaaatgcaaaacatcttttgtgatactttagttgatgaaaaaaaagccaagaagtggcctggatttcagacatacagcaccttagaaatatgtataattcatagcaaatcaccactatctatggttgccaagtaattgttgtgtacaaagaaatttagtggctttttatgacccagaaagtagaaggtataaaatgaaaatttaatatccattgcttcttttctagattttcattttttttaatttgccacattaaataattcacgagtcttttcttttcccccgtctcattcagtcttactcagggaaagccagttaaataagaagggaagtgtaaaactactaatttacagcttgaagggtttttttttttaagattgcttttctattttatctattaagcttgaaccagtttccatctggaaagattctaaaatataatagaaaataaattgaataatggtaattttaagcagtatatctatgaaatgtgttgtttgggattgatttcaatgtttctccccagcgtaaattttaaagttacatgcaatgattgatatagtttattatcagcaaaattatttctaatattattggcttacacaaactctagcaaaaattattttttcctcaatggaaaaagaaaagagaggaacagagttagaaagagaaaatgacttgaatcccaagtatcttcataccaaacatatcagggttccctgcatagtttgcagttgattgaggatttcacacgacttggcataaatttgattacatctctagactgtaacttttctgattgattatgcttcttttttatccatgtaatgtgttgccttttttaaaagaacaaatactacaataacgtgtgaagtggtcaatccctaagacatcaaagaaaggccacataaccctacccttctagtgctttgtgtgattgggtatcaaaggggttttcttcttctttttttgtttgtttgtttttctgttgcaaggccaatttatccattattggaaatgctaagcaagtggaatttactgttttgttaataaaatatttcttaatacaa

SEQ ID NO: 1056 - protein, 142 aa, Homosapiens
MDMRWHCENLQTTDDILVASAECPSDDEDIDPCEPSSGGLANPTRAGGREPYPGSAEVIRESSSTTGMVVGIVAAAALCILILLYAMYKYRNRDEGSYHVDESRNYISNSAQSNGAVVKEKQPSSAKSSNKNKKNKDKEYYV

SEQ ID NO: 1057 - DNA, 3525 bp, Homosapiens
tccacgatgattgtaagtttcctgaggcctccgtagccctgcggaactaccacagatgacatccttgtggcctcagcagagtgtcccagcgatgatgaggacattgacccctgtgagccgagctcaggtgggttagccaacccaacccgagcaggcggcagagagccgtatccaggctcagcagaagtgatccgggagtccagcagcaccacgggtatggtcgttgggatagtagccgctgccgccctgtgcatccttatcctcctctatgccatgtacaagtacagaaaccgggatgaaggctcataccatgtggacgagagtcgaaactacatcagtaactcagcacagtccaatggggctgttgtaaaggagaaacaacccagcagtgcgaaaagctccaacaaaaataagaaaaacaaggataaagagtattatgtctgatcccaagatcttaaatggacacttgtatagaaatagtcttcattttatctgagacataatataaacttatttactttcctttttatgaagcacatacaaaagaagacagggaatgcaatcaggaaggaaagactttttaaaaaataaaaacaagtatctcatgctcttgtttctcaaaaaagaaaaacaaaaaacaaaaaacaggggccaataaattccctaacatccacagtgttttcatttactctgcttgtctttatgttgctggaacatttctaaaagacagtgatgaccgcacgcattcataaagcaaaggagtactacagcatcaaggcacaacacaaaaaccaacacaaaacataacacaaaaaagaagctacctatgatcctggatttagccaaagtgctagcgctttcctgagaagtcagtccaattgccagagaagactgtccttttgagtgactcaacctgcaaacctttaagagtttgccgcctggtgcaactggagcagtggttggaacttgcatttgaaacaaagtgctggcttttttgaagacttgtgtaggaacacattcaaaaagcccctttctggttgtgagagaggaaaaaaaagtatggaggccttattttcaaaaatgtgaaatataaggcacgttttcacacaaaatttcaaaacaaaaacaagagggcatagatgcaatcattgggaaattttcatgcacgcttattatgttattacatatgtttatataaaatccatctctgtgtgctttctggactgtgataagtgacgttttatagcctgttgtatagaaaatgcaaaatatatctctgctcttcagccatttttggtaaattcaatgttataagtgttgctaagtatagggagttttatgacatcagagcaacaattatttcagttgggtttttctttttttttgccaccattataaattgccacaattacttttattttttaaagaaattacagtgtagtgtttattctaaggaagatatgtatgaatgtatatacaaagactcagctacttcttttcttatatgtacagccttcattctgttgcaattaagttttagtacttgtatgaaaggtgtgaattagaaagtcacatatatacatatgtatcttataatcttttctccctgaaatactcacattcccacatacattcactattttcacacacacacacacacacacacacacacacacacacacacacacacgaatccacagcaatccatcagatatgctggaagatccaaacgtgcatacagtagcaaatatttattgacaaattgaaaagcaggaaggaagagggttgtgccaaggtattgatgacaaatggggtgatttgcttcattgagatcttgctcccaggtaaccttaagaagattttagtccctaaagaaatgaacctttccttatcaaatagaatatcactgatatactgctgcatgaataagaaccattatgtgggcaggttatggaagcaaaattggttaatctacaccttaactctggctgctgcaattgaaaactttctttctaataaaataatatatatatctctgaatctgatgtgcatgatgaacatttctggaaagtaaacactttctctcgactaagaaagtatttttcagtaatttttgattctgtattactacccacttaaaaaatcattctctgttaattattgactatgttttaacttttctggttttacatatatatcattaaatatagttttagtttaacacattaagtagtggaaaagtatagattatacacttgttttgcatattattcaatgatgttcacagcaataaattactaatatgagaaggtagtgcaaaaaatgcattattacattgcaagttgatgtttcaggaaaaattggttgcattacttgaataccttctaaaagaacgataaaaaattttgtagaagagaagaatatctttccaattagctttaatcagcaaaggcaaaaaatgcaaaacatcttttgtgatactttagttgatgaaaaaaaagccaagaagtggcctggatttcagacatacagcaccttagaaatatgtataattcatagcaaatcaccactatctatggttgccaagtaattgttgtgtacaaagaaatttagtggctttttatgacccagaaagtagaaggtataaaatgaaaatttaatatccattgcttcttttctagattttcattttttttaatttgccacattaaataattcacgagtcttttcttttcccccgtctcattcagtcttactcagggaaagccagttaaataagaagggaagtgtaaaactactaatttacagcttgaagggtttttttttttaagattgcttttctattttatctattaagcttgaaccagtttccatctggaaagattctaaaatataatagaaaataaattgaataatggtaattttaagcagtatatctatgaaatgtgttgtttgggattgatttcaatgtttctccccagcgtaaattttaaagttacatgcaatgattgatatagtttattatcagcaaaattatttctaatattattggcttacacaaactctagcaaaaattattttttcctcaatggaaaaagaaaagagaggaacagagttagaaagagaaaatgacttgaatcccaagtatcttcataccaaacatatcagggttccctgcatagtttgcagttgattgaggatttcacacgacttggcataaatttgattacatctctagactgtaacttttctgattgattatgcttcttttttatccatgtaatgtgttgccttttttaaaagaacaaatactacaataacgtgtgaagtggtcaatccctaagacatcaaagaaaggccacataaccctacccttctagtgctttgtgtgattgggtatcaaaggggttttcttcttctttttttgtttgtttgtttttctgttgcaaggccaatttatccattattggaaatgctaagcaagtggaatttactgttttgttaataaaatatttcttaatacaa

SEQ ID NO: 1058 - protein, 90 aa, Homosapiens
MTNGVICFIEILLPGNLKKILVPKEMNLSLSNRISLIYCCMNKNHYVGRLWKQNWLIYTLTLAAAIENFLSNKIIYISLNLMCMMNISGK

SEQ ID NO: 1059 - DNA, 3516 bp, Homosapiens
acttatggagaacaggccaaaacccaaataagaaaacaaaccacagatgacatccttgtggcctcagcagagtgtcccagcgatgatgaggacattgacccctgtgagccgagctcaggtgggttagccaacccaacccgagcaggcggcagagagccgtatccaggctcagcagaagtgatccgggagtccagcagcaccacgggtatggtcgttgggatagtagccgctgccgccctgtgcatccttatcctcctctatgccatgtacaagtacagaaaccgggatgaaggctcataccatgtggacgagagtcgaaactacatcagtaactcagcacagtccaatggggctgttgtaaaggagaaacaacccagcagtgcgaaaagctccaacaaaaataagaaaaacaaggataaagagtattatgtctgatcccaagatcttaaatggacacttgtatagaaatagtcttcattttatctgagacataatataaacttatttactttcctttttatgaagcacatacaaaagaagacagggaatgcaatcaggaaggaaagactttttaaaaaataaaaacaagtatctcatgctcttgtttctcaaaaaagaaaaacaaaaaacaaaaaacaggggccaataaattccctaacatccacagtgttttcatttactctgcttgtctttatgttgctggaacatttctaaaagacagtgatgaccgcacgcattcataaagcaaaggagtactacagcatcaaggcacaacacaaaaaccaacacaaaacataacacaaaaaagaagctacctatgatcctggatttagccaaagtgctagcgctttcctgagaagtcagtccaattgccagagaagactgtccttttgagtgactcaacctgcaaacctttaagagtttgccgcctggtgcaactggagcagtggttggaacttgcatttgaaacaaagtgctggcttttttgaagacttgtgtaggaacacattcaaaaagcccctttctggttgtgagagaggaaaaaaaagtatggaggccttattttcaaaaatgtgaaatataaggcacgttttcacacaaaatttcaaaacaaaaacaagagggcatagatgcaatcattgggaaattttcatgcacgcttattatgttattacatatgtttatataaaatccatctctgtgtgctttctggactgtgataagtgacgttttatagcctgttgtatagaaaatgcaaaatatatctctgctcttcagccatttttggtaaattcaatgttataagtgttgctaagtatagggagttttatgacatcagagcaacaattatttcagttgggtttttctttttttttgccaccattataaattgccacaattacttttattttttaaagaaattacagtgtagtgtttattctaaggaagatatgtatgaatgtatatacaaagactcagctacttcttttcttatatgtacagccttcattctgttgcaattaagttttagtacttgtatgaaaggtgtgaattagaaagtcacatatatacatatgtatcttataatcttttctccctgaaatactcacattcccacatacattcactattttcacacacacacacacacacacacacacacacacacacacacacacacgaatccacagcaatccatcagatatgctggaagatccaaacgtgcatacagtagcaaatatttattgacaaattgaaaagcaggaaggaagagggttgtgccaaggtattgatgacaaatggggtgatttgcttcattgagatcttgctcccaggtaaccttaagaagattttagtccctaaagaaatgaacctttccttatcaaatagaatatcactgatatactgctgcatgaataagaaccattatgtgggcaggttatggaagcaaaattggttaatctacaccttaactctggctgctgcaattgaaaactttctttctaataaaataatatatatatctctgaatctgatgtgcatgatgaacatttctggaaagtaaacactttctctcgactaagaaagtatttttcagtaatttttgattctgtattactacccacttaaaaaatcattctctgttaattattgactatgttttaacttttctggttttacatatatatcattaaatatagttttagtttaacacattaagtagtggaaaagtatagattatacacttgttttgcatattattcaatgatgttcacagcaataaattactaatatgagaaggtagtgcaaaaaatgcattattacattgcaagttgatgtttcaggaaaaattggttgcattacttgaataccttctaaaagaacgataaaaaattttgtagaagagaagaatatctttccaattagctttaatcagcaaaggcaaaaaatgcaaaacatcttttgtgatactttagttgatgaaaaaaaagccaagaagtggcctggatttcagacatacagcaccttagaaatatgtataattcatagcaaatcaccactatctatggttgccaagtaattgttgtgtacaaagaaatttagtggctttttatgacccagaaagtagaaggtataaaatgaaaatttaatatccattgcttcttttctagattttcattttttttaatttgccacattaaataattcacgagtcttttcttttcccccgtctcattcagtcttactcagggaaagccagttaaataagaagggaagtgtaaaactactaatttacagcttgaagggtttttttttttaagattgcttttctattttatctattaagcttgaaccagtttccatctggaaagattctaaaatataatagaaaataaattgaataatggtaattttaagcagtatatctatgaaatgtgttgtttgggattgatttcaatgtttctccccagcgtaaattttaaagttacatgcaatgattgatatagtttattatcagcaaaattatttctaatattattggcttacacaaactctagcaaaaattattttttcctcaatggaaaaagaaaagagaggaacagagttagaaagagaaaatgacttgaatcccaagtatcttcataccaaacatatcagggttccctgcatagtttgcagttgattgaggatttcacacgacttggcataaatttgattacatctctagactgtaacttttctgattgattatgcttcttttttatccatgtaatgtgttgccttttttaaaagaacaaatactacaataacgtgtgaagtggtcaatccctaagacatcaaagaaaggccacataaccctacccttctagtgctttgtgtgattgggtatcaaaggggttttcttcttctttttttgtttgtttgtttttctgttgcaaggccaatttatccattattggaaatgctaagcaagtggaatttactgttttgttaataaaatatttcttaatacaa

SEQ ID NO: 1060 - protein, 90 aa, Homosapiens; identical to SEQ ID NO: 1058

SEQ ID NO: 1061 - DNA, 5253 bp, Homosapiens
gccccttgcttcaccagcgtgtgtggtttttcttttctttttttctttttctttttctttttctgtttctctcccttactccttcgtctgcatcttcttctcagctgcctttccgccgttcgattcccacttccttcagaagggcgcactcttccctctgaacccctcgccgggcgtaagtgtcaggaggcggcggacgcggagattgcctcgggagcaggcgatgcgcgccgctgctccgcgcgctgcccgggggaggctggcgctagcgggcgagccggccggggctgaatggagggaaggggcgcctggattccatggggtctgcttctgtcttgaaaggaggttgggccggcgaagtggcctccctagtccccgcacacaaagctaaatggatttacctagtggattcgcggtggatgtctgtcatgtagaagtgaggaccttccaggaggagctttaaacaatttctcggccccccacccgccggcacgcactctcgcccgaaactctttgggagtatctctcgagaacctggagccctggaaatctgggagcagccacccgctccgcgcttgctgttcccggggctgcctttccggacaagcccctctccagctgcattcgcctcggctatgtttcggattgtttggggtgctaggcacggcggactccaggaccccgagaagactgtccgaaggagggagaggatgggtgccctggcgcggtgaggcggccggcccctcagcccactccgcgccgcccgctcccctgcgccctctcctctccccgcgccccaaactttgcctcccgcggcggctgcccctcggcgggcgccccgccatgtaccagaggatgctccggtgcggcgccgagctgggctcgcccgggggcggcggcggcggcggcggcggcggcggcgcaggggggcgcctggccctgctttggatagtcccgctcaccctcagcggcctcctaggagtggcgtggggggcatccagtttgggagcgcaccacatccaccatttccatggcagcagcaagcatcattcagtgcctattgcaatctacaggtcaccggcatccttgcgaggcggacacgctgggacgacatatatctttagcaaaggtggtggacaaatcacgtataagtggcctcctaatgaccgacccagtacacgagcagacagactggccataggttttagcactgttcagaaagaagccgtattggtgcgagtggacagttcttcaggcttgggtgactacctagaactgcatatacaccagggaaaaattggagttaagtttaatgttgggacagatgacatcgccattgaagaatccaatgcaatcattaatgatgggaaataccatgtagttcgtttcacgaggagtggtggcaatgccacgttgcaggtggacagctggccagtgatcgagcgctaccctgcagggcgtcagctcacaatcttcaatagccaagcaaccataataattggcgggaaagagcagggccagcccttccagggccagctctctgggctgtactacaatggcttgaaagttctgaatatggcagccgaaaacgatgccaacatcgccatagtgggaaatgtgagactggttggtgaagtgccttcctctatgacaactgagtcaacagccactgccatgcaatcagagatgtccacatcaattatggagactaccacgaccctggctactagcacagccagaagaggaaagcccccgacaaaagaacccattagccagaccacagatgacatccttgtggcctcagcagagtgtcccagcgatgatgaggacattgacccctgtgagccgagctcaggtgggttagccaacccaacccgagcaggcggcagagagccgtatccaggctcagcagaagtgatccgggagtccagcagcaccacgggtatggtcgttgggatagtagccgctgccgccctgtgcatccttatcctcctctatgccatgtacaagtacagaaaccgggatgaaggctcataccatgtggacgagagtcgaaactacatcagtaactcagcacagtccaatggggctgttgtaaaggagaaacaacccagcagtgcgaaaagctccaacaaaaataagaaaaacaaggataaagagtattatgtctgatcccaagatcttaaatggacacttgtatagaaatagtcttcattttatctgagacataatataaacttatttactttcctttttatgaagcacatacaaaagaagacagggaatgcaatcaggaaggaaagactttttaaaaaataaaaacaagtatctcatgctcttgtttctcaaaaaagaaaaacaaaaaacaaaaaacaggggccaataaattccctaacatccacagtgttttcatttactctgcttgtctttatgttgctggaacatttctaaaagacagtgatgaccgcacgcattcataaagcaaaggagtactacagcatcaaggcacaacacaaaaaccaacacaaaacataacacaaaaaagaagctacctatgatcctggatttagccaaagtgctagcgctttcctgagaagtcagtccaattgccagagaagactgtccttttgagtgactcaacctgcaaacctttaagagtttgccgcctggtgcaactggagcagtggttggaacttgcatttgaaacaaagtgctggcttttttgaagacttgtgtaggaacacattcaaaaagcccctttctggttgtgagagaggaaaaaaaagtatggaggccttattttcaaaaatgtgaaatataaggcacgttttcacacaaaatttcaaaacaaaaacaagagggcatagatgcaatcattgggaaattttcatgcacgcttattatgttattacatatgtttatataaaatccatctctgtgtgctttctggactgtgataagtgacgttttatagcctgttgtatagaaaatgcaaaatatatctctgctcttcagccatttttggtaaattcaatgttataagtgttgctaagtatagggagttttatgacatcagagcaacaattatttcagttgggtttttctttttttttgccaccattataaattgccacaattacttttattttttaaagaaattacagtgtagtgtttattctaaggaagatatgtatgaatgtatatacaaagactcagctacttcttttcttatatgtacagccttcattctgttgcaattaagttttagtacttgtatgaaaggtgtgaattagaaagtcacatatatacatatgtatcttataatcttttctccctgaaatactcacattcccacatacattcactattttcacacacacacacacacacacacacacacacacacacacacacacacgaatccacagcaatccatcagatatgctggaagatccaaacgtgcatacagtagcaaatatttattgacaaattgaaaagcaggaaggaagagggttgtgccaaggtattgatgacaaatggggtgatttgcttcattgagatcttgctcccaggtaaccttaagaagattttagtccctaaagaaatgaacctttccttatcaaatagaatatcactgatatactgctgcatgaataagaaccattatgtgggcaggttatggaagcaaaattggttaatctacaccttaactctggctgctgcaattgaaaactttctttctaataaaataatatatatatctctgaatctgatgtgcatgatgaacatttctggaaagtaaacactttctctcgactaagaaagtatttttcagtaatttttgattctgtattactacccacttaaaaaatcattctctgttaattattgactatgttttaacttttctggttttacatatatatcattaaatatagttttagtttaacacattaagtagtggaaaagtatagattatacacttgttttgcatattattcaatgatgttcacagcaataaattactaatatgagaaggtagtgcaaaaaatgcattattacattgcaagttgatgtttcaggaaaaattggttgcattacttgaataccttctaaaagaacgataaaaaattttgtagaagagaagaatatctttccaattagctttaatcagcaaaggcaaaaaatgcaaaacatcttttgtgatactttagttgatgaaaaaaaagccaagaagtggcctggatttcagacatacagcaccttagaaatatgtataattcatagcaaatcaccactatctatggttgccaagtaattgttgtgtacaaagaaatttagtggctttttatgacccagaaagtagaaggtataaaatgaaaatttaatatccattgcttcttttctagattttcattttttttaatttgccacattaaataattcacgagtcttttcttttcccccgtctcattcagtcttactcagggaaagccagttaaataagaagggaagtgtaaaactactaatttacagcttgaagggtttttttttttaagattgcttttctattttatctattaagcttgaaccagtttccatctggaaagattctaaaatataatagaaaataaattgaataatggtaattttaagcagtatatctatgaaatgtgttgtttgggattgatttcaatgtttctccccagcgtaaattttaaagttacatgcaatgattgatatagtttattatcagcaaaattatttctaatattattggcttacacaaactctagcaaaaattattttttcctcaatggaaaaagaaaagagaggaacagagttagaaagagaaaatgacttgaatcccaagtatcttcataccaaacatatcagggttccctgcatagtttgcagttgattgaggatttcacacgacttggcataaatttgattacatctctagactgtaacttttctgattgattatgcttcttttttatccatgtaatgtgttgccttttttaaaagaacaaatactacaataacgtgtgaagtggtcaatccctaagacatcaaagaaaggccacataaccctacccttctagtgctttgtgtgattgggtatcaaaggggttttcttcttctttttttgtttgtttgtttttctgttgcaaggccaatttatccattattggaaatgctaagcaagtggaatttactgttttgttaataaaatatttcttaatacaa

SEQ ID NO: 1062 - protein, 442 aa, Homosapiens; identical to SEQ ID NO: 48

SEQ ID NO: 1063 - DNA, 8192 bp, Homosapiens
cttgtgagaccacgcacaaggaattaggctttggctgcagcggtgctgaagcccatgctatgacagaagaagcaggcctttgaagctatcctcgggttaagaaatggtgccctaaagaggcaagcatccctttctccgttctgctgtaagacaccacatctgaaggagacagacttgaggcattcacaagcatccaaggatactggctcactgctggcttcctgtactttcttgagaaaagtgttttctttttactgactctcactgcttccttttggcctggtaccactggtggaacctggcagataatgggatttgaggagttaagtatctgttgacactgcagatactcttaaattagttaatcagactcaaatgggtcagtgctttcccttgatcttttgttgaagccttttccagaacgttgtctccaaagtgcatcctccctttggtctggaagttctgtggctaccctgtaccactggggtcaacgttttccagttggaagaggactacagggagagagggcggggttattggaagaagaagaagaaaaaaagaactagataaaggagggcacatccctctcactcccgcctttccccttacctttctgtctctcgggacccttatttcttcgtcacggtgtccaggaccattttgaccctgtcggccccggcacccccccgccgcaccccagccccgagcatggggacggcgctgctccagcgcgggggctgttttcttctgtgcctctcgctgctgctcctgggctgctgggcggagctgggcagcgggctggagtttccgggcgccgagggccaatggacgcgcttccccaagtggaacgcctgctgcgagagcgagatgagcttccagctcaagactcgcagcgcccgcggcctcgtgctctacttcgacgacgagggcttctgcgacttcctggagctgattctgacgcgcggcggccgcctgcagctcagcttctccatcttctgcgctgagcctgcgacgctcctggccgacacgccggttaacgacggcgcctggcacagcgtgcgcatccgccgccagttccgcaacaccacgctcttcatcgaccaggtggaggccaagtgggtggaggtcaagtccaagcgcagggacatgacggtgttcagcggccttttcgtcggggggctgcccccggaactgcgcgccgcggcgctcaagctcaccctggcctcggtgagggagcgggagcccttcaaggggtggattcgtgacgtgagggtcaactcctcgcaggtcctgcccgtggacagcggcgaggtgaagctggacgatgagccgcccaacagcggcgggggaagcccgtgcgaggcgggcgaggagggcgagggcggggtgtgcctcaacggaggtgtgtgctccgtggtggacgaccaggccgtgtgcgactgctcgcgaaccggcttccgcggcaaggactgcagccaaggtctggcgcacctgatgatgggcgaccaaggtatgggctctgaaaagaagaatatattgccacgttcaaaggatctgaatacttctgctacgacttgtctcaaaaccccattcaaagcagcagtgatgaaataactctgtcatttaaaacccttcagaggaatggactgatgcttcacactgggaaatcggctgattatgtcaatcttgccctgaaaaatggagctgtctctctggtcattaatttgggatcaggggcctttgaagcactagtggagcctgtgaatggaaagtttaatgataatgcctggcatgatgtgaaagtcaccaggaatctgcgtcagcactcaggcattggacacgctatggtgacaatatcagtggatgggattcttaccacaacgggctacacgcaagaagattataccatgctggggtctgatgactttttctatgttggaggcagtcccagcacagccgaccttccagggtcaccagtcagtaacaactttatgggctgtctcaaagaggttgtatataaaaataatgatgtgaggctggaattatctcgacttgccaagcaaggagatcctaagatgaagatccatggagtggtggcatttaaatgtgagaatgttgcaactttagacccaatcacctttgaaaccccagagtctttcatctctttgcctaaatggaatgcaaagaaaactggctccatatcatttgatttccgtacaacagagccaaatggcctcatcttatttagccatggcaagccaagacatcagaaagatgccaagcacccacagatgataaaggtggacttctttgctattgagatgctagatggccacctctacctcctcctggacatggggtcaggtactataaaaataaaagccctgttgaagaaagtgaatgatggagaatggtatcatgtggacttccagagagacggacggtcaggtaccatttctgtcaacacgttgcgtactccctacactgctcctggtgagagtgagattctggacctggatgatgagttgtacctgggggggctgccagaaaataaagctggccttgtcttccccaccgaggtgtggactgctctgctcaactatggctacgtgggctgcatcagggatttgttcatcgatggccaaagcaaagatatccggcaaatggctgaagttcaaagtactgctggagtgaagccttcctgctcaaaggaaacagcaaaaccgtgccttagcaacccttgcaaaaacaatggcatgtgcagggatgggtggaacagatatgtctgtgattgttccggaacaggctatcttggcaggtcctgtgagagagaggcaacggttttgagctatgatgggagcatgtttatgaaaattcagctccccgtagtcatgcatacggaggctgaggatgtttccttacggttccgatcccagcgtgcatatggcattctgatggcaaccacttctagagactctgctgacaccctccgcctggagctagacgcaggacgtgtgaaactgacggtcaatctagattgtatcaggattaactgtaattccagcaaaggtcccgagactctttttgctggctataacctcaatgataacgagtggcacacagtgcgtgtagttcggcgtggaaaaagtttaaagttaacagtggatgaccaacaggccatgacaggtcaaatggcaggtgatcatactaggctggagttccataacatagagactggcatcatcacagaacgacggtatctttcttctgtcccctccaacttcattggacacctgcagagcttgacatttaatggaatggcatacattgacctgtgtaaaaatggcgacatagattactgtgagcttaatgccagatttggcttcaggaacatcatagcagatcctgtcaccttcaagaccaaatcgagctatgttgccttagctaccttgcaagcctacacttctatgcatctttttttccagttcaagacaacatccctagatggattaattctatataacagtggggatggaaatgactttattgtggttgaattagttaaagggtacttacattacgtgtttgatttgggaaatggtgctaacctcatcaaaggaagctcaaataaacctctcaatgacaatcagtggcacaacgtgatgatatcaagggacaccagcaacctccacactgtaaagattgacacaaaaatcacaacgcaaatcaccgccggagccaggaacttagacctcaagagtgacttatatataggaggagtagctaaagaaacatacaaatccttaccaaaacttgtacatgccaaagaaggctttcaaggctgcctggcatcagttgatttaaatggacggcttccggacctcatctccgatgctcttttctgcaacggacagatcgagagaggatgtgaagggcccagcacaacctgccaagaggactcatgttccaatcaaggtgtgtgcttgcaacaatgggatggcttcagctgtgactgtagtatgacttccttcagtggaccactctgcaatgaccctgggacgacatatatctttagcaaaggtggtggacaaatcacgtataagtggcctcctaatgaccgacccagtacacgagcagacagactggccataggttttagcactgttcagaaagaagccgtattggtgcgagtggacagttcttcaggcttgggtgactacctagaactgcatatacaccagggaaaaattggagttaagtttaatgttgggacagatgacatcgccattgaagaatccaatgcaatcattaatgatgggaaataccatgtagttcgtttcacgaggagtggtggcaatgccacgttgcaggtggacagctggccagtgatcgagcgctaccctgcagggcgtcagctcacaatcttcaatagccaagcaaccataataattggcgggaaagagcagggccagcccttccagggccagctctctgggctgtactacaatggcttgaaagttctgaatatggcagccgaaaacgatgccaacatcgccatagtgggaaatgtgagactggttggtgaagtgccttcctctatgacaactgagtcaacagccactgccatgcaatcagagatgtccacatcaattatggagactaccacgaccctggctactagcacagccagaagaggaaagcccccgacaaaagaacccattagccagaccacagatgacatccttgtggcctcagcagagtgtcccagcgatgatgaggacattgacccctgtgagccgagctcaggtgggttagccaacccaacccgagcaggcggcagagagccgtatccaggctcagcagaagtgatccgggagtccagcagcaccacgggtatggtcgttgggatagtagccgctgccgccctgtgcatccttatcctcctctatgccatgtacaagtacagaaaccgggatgaaggctcataccatgtggacgagagtcgaaactacatcagtaactcagcacagtccaatggggctgttgtaaaggagaaacaacccagcagtgcgaaaagctccaacaaaaataagaaaaacaaggataaagagtattatgtctgatcccaagatcttaaatggacacttgtatagaaatagtcttcattttatctgagacataatataaacttatttactttcctttttatgaagcacatacaaaagaagacagggaatgcaatcaggaaggaaagactttttaaaaaataaaaacaagtatctcatgctcttgtttctcaaaaaagaaaaacaaaaaacaaaaaacaggggccaataaattccctaacatccacagtgttttcatttactctgcttgtctttatgttgctggaacatttctaaaagacagtgatgaccgcacgcattcataaagcaaaggagtactacagcatcaaggcacaacacaaaaaccaacacaaaacataacacaaaaaagaagctacctatgatcctggatttagccaaagtgctagcgctttcctgagaagtcagtccaattgccagagaagactgtccttttgagtgactcaacctgcaaacctttaagagtttgccgcctggtgcaactggagcagtggttggaacttgcatttgaaacaaagtgctggcttttttgaagacttgtgtaggaacacattcaaaaagcccctttctggttgtgagagaggaaaaaaaagtatggaggccttattttcaaaaatgtgaaatataaggcacgttttcacacaaaatttcaaaacaaaaacaagagggcatagatgcaatcattgggaaattttcatgcacgcttattatgttattacatatgtttatataaaatccatctctgtgtgctttctggactgtgataagtgacgttttatagcctgttgtatagaaaatgcaaaatatatctctgctcttcagccatttttggtaaattcaatgttataagtgttgctaagtatagggagttttatgacatcagagcaacaattatttcagttgggtttttctttttttttgccaccattataaattgccacaattacttttattttttaaagaaattacagtgtagtgtttattctaaggaagatatgtatgaatgtatatacaaagactcagctacttcttttcttatatgtacagccttcattctgttgcaattaagttttagtacttgtatgaaaggtgtgaattagaaagtcacatatatacatatgtatcttataatcttttctccctgaaatactcacattcccacatacattcactattttcacacacacacacacacacacacacacacacacacacacacacacacgaatccacagcaatccatcagatatgctggaagatccaaacgtgcatacagtagcaaatatttattgacaaattgaaaagcaggaaggaagagggttgtgccaaggtattgatgacaaatggggtgatttgcttcattgagatcttgctcccaggtaaccttaagaagattttagtccctaaagaaatgaacctttccttatcaaatagaatatcactgatatactgctgcatgaataagaaccattatgtgggcaggttatggaagcaaaattggttaatctacaccttaactctggctgctgcaattgaaaactttctttctaataaaataatatatatatctctgaatctgatgtgcatgatgaacatttctggaaagtaaacactttctctcgactaagaaagtatttttcagtaatttttgattctgtattactacccacttaaaaaatcattctctgttaattattgactatgttttaacttttctggttttacatatatatcattaaatatagttttagtttaacacattaagtagtggaaaagtatagattatacacttgttttgcatattattcaatgatgttcacagcaataaattactaatatgagaaggtagtgcaaaaaatgcattattacattgcaagttgatgtttcaggaaaaattggttgcattacttgaataccttctaaaagaacgataaaaaattttgtagaagagaagaatatctttccaattagctttaatcagcaaaggcaaaaaatgcaaaacatcttttgtgatactttagttgatgaaaaaaaagccaagaagtggcctggatttcagacatacagcaccttagaaatatgtataattcatagcaaatcaccactatctatggttgccaagtaattgttgtgtacaaagaaatttagtggctttttatgacccagaaagtagaaggtataaaatgaaaatttaatatccattgcttcttttctagattttcattttttttaatttgccacattaaataattcacgagtcttttcttttcccccgtctcattcagtcttactcagggaaagccagttaaataagaagggaagtgtaaaactactaatttacagcttgaagggtttttttttttaagattgcttttctattttatctattaagcttgaaccagtttccatctggaaagattctaaaatataatagaaaataaattgaataatggtaattttaagcagtatatctatgaaatgtgttgtttgggattgatttcaatgtttctccccagcgtaaattttaaagttacatgcaatgattgatatagtttattatcagcaaaattatttctaatattattggcttacacaaactctagcaaaaattattttttcctcaatggaaaaagaaaagagaggaacagagttagaaagagaaaatgacttgaatcccaagtatcttcataccaaacatatcagggttccctgcatagtttgcagttgattgaggatttcacacgacttggcataaatttgattacatctctagactgtaacttttctgattgattatgcttcttttttatccatgtaatgtgttgccttttttaaaagaacaaatactacaataacgtgtgaagtggtcaatccctaagacatcaaagaaaggccacataaccctacccttctagtgctttgtgtgattgggtatcaaaggggttttcttcttctttttttgtttgtttgtttttctgttgcaaggccaatttatccattattggaaatgctaagcaagtggaatttactgttttgttaataaaatat

SEQ ID NO: 1064 - protein, 1157 aa, Homosapiens
MLHTGKSADYVNLALKNGAVSLVINLGSGAFEALVEPVNGKFNDNAWHDVKVTRNLRQHSGIGHAMVTISVDGILTTTGYTQEDYTMLGSDDFFYVGGSPSTADLPGSPVSNNFMGCLKEVVYKNNDVRLELSRLAKQGDPKMKIHGVVAFKCENVATLDPITFETPESFISLPKWNAKKTGSISFDFRTTEPNGLILFSHGKPRHQKDAKHPQMIKVDFFAIEMLDGHLYLLLDMGSGTIKIKALLKKVNDGEWYHVDFQRDGRSGTISVNTLRTPYTAPGESEILDLDDELYLGGLPENKAGLVFPTEVWTALLNYGYVGCIRDLFIDGQSKDIRQMAEVQSTAGVKPSCSKETAKPCLSNPCKNNGMCRDGWNRYVCDCSGTGYLGRSCEREATVLSYDGSMFMKIQLPVVMHTEAEDVSLRFRSQRAYGILMATTSRDSADTLRLELDAGRVKLTVNLDCIRINCNSSKGPETLFAGYNLNDNEWHTVRVVRRGKSLKLTVDDQQAMTGQMAGDHTRLEFHNIETGIITERRYLSSVPSNFIGHLQSLTFNGMAYIDLCKNGDIDYCELNARFGFRNIIADPVTFKTKSSYVALATLQAYTSMHLFFQFKTTSLDGLILYNSGDGNDFIVVELVKGYLHYVFDLGNGANLIKGSSNKPLNDNQWHNVMISRDTSNLHTVKIDTKITTQITAGARNLDLKSDLYIGGVAKETYKSLPKLVHAKEGFQGCLASVDLNGRLPDLISDALFCNGQIERGCEGPSTTCQEDSCSNQGVCLQQWDGFSCDCSMTSFSGPLCNDPGTTYIFSKGGGQITYKWPPNDRPSTRADRLAIGFSTVQKEAVLVRVDSSSGLGDYLELHIHQGKIGVKFNVGTDDIAIEESNAIINDGKYHVVRFTRSGGNATLQVDSWPVIERYPAGRQLTIFNSQATIIIGGKEQGQPFQGQLSGLYYNGLKVLNMAAENDANIAIVGNVRLVGEVPSSMTTESTATAMQSEMSTSIMETTTTLATSTARRGKPPTKEPISQTTDDILVASAECPSDDEDIDPCEPSSGGLANPTRAGGREPYPGSAEVIRESSSTTGMVVGIVAAAALCILILLYAMYKYRNRDEGSYHVDESRNYISNSAQSNGAVVKEKQPSSAKSSNKNKKNKDKEYYV

SEQ ID NO: 1065 - DNA, 396 bp, Homosapiens
agaaggccacagatgacttcataaccctatgcatatgtacatacagaacccacatggagtgaatgttgcctattaacaaaactgtgaaatctgagttagaaacaaagctcagcttggactgaatatataaaaaaatcagtgaacagaagatattttcaaatggacacttacataaatacagcattccaagggaaaattccagcctcagatgcacttatttcatgaagactcaatattttatagcaatggttttccaaaattattagcaactcaagggatgagccgctgtccacttcatctttggaacatcagcttctagcacaggggctggttatattagacattcaataaatgtttgttaagcaaatgaggaataaatgagtaaatgtcaatgtg

SEQ ID NO: 1066 - protein, 36 aa, Homosapiens
MHLFHEDSIFYSNGFPKLLATQGMSRCPLHLWNISF

SEQ ID NO: 1067 - DNA, 3039 bp, Homosapiens
atttgtgacttcttcagaccactttcatgacttctggaagcaaatgtcctagtacagactcaggaaaagaagaatatattgccacgttcaaaggatctgaatacttctgctacgacttgtctcaaaaccccattcaaagcagcagtgatgaaataactctgtcatttaaaacccttcagaggaatggactgatgcttcacactgggaaatcggctgattatgtcaatcttgccctgaaaaatggagctgtctctctggtcattaatttgggatcaggggcctttgaagcactagtggagcctgtgaatggaaagtttaatgataatgcctggcatgatgtgaaagtcaccaggaatctgcgtcaggtgacaatatcagtggatgggattcttaccacaacgggctacacgcaagaagattataccatgctggggtctgatgactttttctatgttggaggcagtcccagcacagccgaccttccagggtcaccagtcagtaacaactttatgggctgtctcaaagaggttgtatataaaaataatgatgtgaggctggaattatctcgacttgccaagcaaggagatcctaagatgaagatccatggagtggtggcatttaaatgtgagaatgttgcaactttagacccaatcacctttgaaaccccagagtctttcatctctttgcctaaatggaatgcaaagaaaactggctccatatcatttgatttccgtacaacagagccaaatggcctcatcttatttagccatggcaagccaagacatcagaaagatgccaagcacccacagatgataaaggtggacttctttgctattgagatgctagatggccacctctacctcctcctggacatggggtcaggtactataaaaataaaagccctgttgaagaaagtgaatgatggagaatggtatcatgtggacttccagagagacggacggtcaggtaccatttctgtcaacacgttgcgtactccctacactgctcctggtgagagtgagattctggacctggatgatgagttgtacctgggggggctgccagaaaataaagctggccttgtcttccccaccgaggtgtggactgctctgctcaactatggctacgtgggctgcatcagggatttgttcatcgatggccaaagcaaagatatccggcaaatggctgaagttcaaagtactgctggagtgaagccttcctgctcaaaggaaacagcaaaaccgtgccttagcaacccttgcaaaaacaatggcatgtgcagggatgggtggaacagatatgtctgtgattgttccggaacaggctatcttggcaggtcctgtgagagagaggcaacggttttgagctatgatgggagcatgtttatgaaaattcagctccccgtagtcatgcatacggaggctgaggatgtttccttacggttccgatcccagcgtgcatatggcattctgatggcaaccacttctagagactctgctgacaccctccgcctggagctagacgcaggacgtgtgaaactgacggtcaatctaggcaaaggtcccgagactctttttgctggctataacctcaatgataacgagtggcacacagtgcgtgtagttcggcgtggaaaaagtttaaagttaacagtggatgaccaacaggccatgacaggtcaaatggcaggtgatcatactaggctggagttccataacatagagactggcatcatcacagaacgacggtatctttcttctgtcccctccaacttcattggacacctgcagagcttgacatttaatggaatggcatacattgacctgtgtaaaaatggcgacatagattactgtgagcttaatgccagatttggcttcaggaacatcatagcagatcctgtcaccttcaagaccaaatcgagctatgttgccttagctaccttgcaagcctacacttctatgcatctttttttccagttcaagacaacatccctagatggattaattctatataacagtggggatggaaatgactttattgtggttgaattagttaaagggtacttacattacgtgtttgatttgggaaatggtgctaacctcatcaaaggaagctcaaataaacctctcaatgacaatcagtggcacaacgtgatgatatcaagggacaccagcaacctccacactgtaaagattgacacaaaaatcacaacgcaaatcaccgccggagccaggaacttagacctcaagagtgacttatatataggaggagtagctaaagaaacatacaaatccttaccaaaacttgtacatgccaaagaaggctttcaaggctgcctggcatcagttgatttaaatggacggcttccggacctcatctccgatgctcttttctgcaacggacagatcgagagaggatgtgaagggcccagcacaacctgccaagaggactcatgttccaatcaaggtgtgtgcttgcaacaatgggatggcttcagctgtgactgtagtatgacttccttcagtggaccactctgcaatgaccctgggacgacatatatctttagcaaaggtggtggacaaatcacgtataagtggcctcctaatgaccgacccagtacacgagcagacagactggccataggttttagcactgttcagaaagaagccgtattggtgcgagtggacagttcttcaggcttgggtgactacctagaactgcatataactcttcaatgatcagaatgcttttgtggaggcaactgctatgcttgaaagaacatagatggcctttgaagtataatatttgattcaaagtcaagttccgtcacatagtagctacggaatcataagcaaattatctaacatctgcaaccttctgtttccttattggaatccttgacctgcagtcattataatgaaatctggagccaatgatggatatatgaacctttggattcaatctttccaaacatatttctgactagaaggaatttggttttattttcatccagctaacgtgaaataaaattgtcctttc

SEQ ID NO: 1068 - protein, 903 aa, Homosapiens
MTSGSKCPSTDSGKEEYIATFKGSEYFCYDLSQNPIQSSSDEITLSFKTLQRNGLMLHTGKSADYVNLALKNGAVSLVINLGSGAFEALVEPVNGKFNDNAWHDVKVTRNLRQVTISVDGILTTTGYTQEDYTMLGSDDFFYVGGSPSTADLPGSPVSNNFMGCLKEVVYKNNDVRLELSRLAKQGDPKMKIHGVVAFKCENVATLDPITFETPESFISLPKWNAKKTGSISFDFRTTEPNGLILFSHGKPRHQKDAKHPQMIKVDFFAIEMLDGHLYLLLDMGSGTIKIKALLKKVNDGEWYHVDFQRDGRSGTISVNTLRTPYTAPGESEILDLDDELYLGGLPENKAGLVFPTEVWTALLNYGYVGCIRDLFIDGQSKDIRQMAEVQSTAGVKPSCSKETAKPCLSNPCKNNGMCRDGWNRYVCDCSGTGYLGRSCEREATVLSYDGSMFMKIQLPVVMHTEAEDVSLRFRSQRAYGILMATTSRDSADTLRLELDAGRVKLTVNLGKGPETLFAGYNLNDNEWHTVRVVRRGKSLKLTVDDQQAMTGQMAGDHTRLEFHNIETGIITERRYLSSVPSNFIGHLQSLTFNGMAYIDLCKNGDIDYCELNARFGFRNIIADPVTFKTKSSYVALATLQAYTSMHLFFQFKTTSLDGLILYNSGDGNDFIVVELVKGYLHYVFDLGNGANLIKGSSNKPLNDNQWHNVMISRDTSNLHTVKIDTKITTQITAGARNLDLKSDLYIGGVAKETYKSLPKLVHAKEGFQGCLASVDLNGRLPDLISDALFCNGQIERGCEGPSTTCQEDSCSNQGVCLQQWDGFSCDCSMTSFSGPLCNDPGTTYIFSKGGGQITYKWPPNDRPSTRADRLAIGFSTVQKEAVLVRVDSSSGLGDYLELHITLQ

SEQ ID NO: 1069 - DNA, 849 bp, Homosapiens
tttgatctaagggtttccaaagaagcatgatgcctttgagatgaagaggcatgtcgtcataggttacccccgacagggcccctgttgctgcctgccacaccttctcaccttttcaagaagcttcattctttcctacgggaccttgaacgtcacttcaccggtattcttcaaaaacagaaaatacaggctactaaagaggaggcacactgggcatgccaaattgtggacatccttatcatatcccaacctctgtgtgcatctatcagtgatacttgttacagagacattttaacatcctttcaaaaggcaatcttctgatgcttgcttttcctgaaagaactcaggcccaaattctttagggggattgtcaatcaagagaagcgaggataagatgaaaaataaaggcaaggcgaggctctgtggctcacatctgtaatcccagcactttgggaggctgaggagagagaatcacttgagtccaggagttcaagaccacctgggcaacacagcaagacccccgtctctacgaaaaaataaaacatttagctgggcatagtggcacacacctgtggtctcagctactctggaggctgaggtgggaagatcacctaagcccagaaggtcgaaacagctgtgagccatgattgtaccactgcactccagcctgggcgacagagcgaaaccctgtctcacacacaaaaaaggtaaattgtaagaacaaaatatggtacacattttcattgagagacacatttagaacttggtttttaatttaagaacttttgtaaatacatttaaattgttctattctgtaaactgtcttcagtcataaggtagttagatattcgt

SEQ ID NO: 1070 - protein, 83 aa, Homosapiens
MKRHVVIGYPRQGPCCCLPHLLTFSRSFILSYGTLNVTSPVFFKNRKYRLLKRRHTGHAKLWTSLSYPNLCVHLSVILVTETF

SEQ ID NO: 1071 - DNA, 398 bp, Homosapiens
ggtgacaatatcagtggatgggattcttaccacaacgggctacacgcaagaagattataccatgctggggtctgatgactttttctatgttggaggcagtcccagcacagccgaccttccagggtcaccagtcagtaacaactttatgggctgtctcaaagagattaaagaaaaaaaaggaaatcactcaacatattgaaacaacctataatctcatattccttagaagcaacttaggtctttccctatatggcatttaataatgtctatttgaaatgagactttgcttgcacgtagaacaactaaccctcaattggaaagttacttttgtgtatgtgattatcaaatttcaaaataaaataagattagctcaaaataatttggtaaaacctaacctg

SEQ ID NO: 1072 - protein, 80 aa, Homosapiens
MGFLPQRATRKKIIPCWGLMTFSMLEAVPAQPTFQGHQSVTTLWAVSKRLKKKKEITQHIETTYNLIFLRSNLGLSLYGI

SEQ ID NO: 1073 - DNA, 1635 bp, Homosapiens
tcctctccaagaattcgtggtttagcaattccttctattctgaaaagaagaatatattgccacgttcaaaggatctgaatacttctgctacgacttgtctcaaaaccccattcaaagcagcagtgatgaaataactctgtcatttaaaacccttcagaggaatggactgatgcttcacactgggaaatcggctgattatgtcaatcttgccctgaaaaatggagctgtctctctggtcattaatttgggatcaggggcctttgaagcactagtggagcctgtgaatggaaagtttaatgataatgcctggcatgatgtgaaagtcaccaggaatctgcgtcaggtgacaatatcagtggatgggattcttaccacaacgggctacacgcaagaagattataccatgctggggtctgatgactttttctatgttggaggcagtcccagcacagccgaccttccagggtcaccaatccagcatgaaagcacctttgctgaagacccgatgttccagagtcaaacggcacaactttaaattcaatattctactattgtttatgtaggattgggggagggaaacagctcatagatcattatgaaggaattaggttcctcttctttattagtctgtaagtaatttacatttgagatttgtgtggacagttgatattagctataaaagaaagtcaaacaaaaagagatactgggtctaaagttgagctaaatggtttacttgcttatttctacttaaatgccataggtgttatgcatacagtgatgacttttttgagtattaaaagaaaaaagaagaaaaagcaattagcctataggagaagcaacgactatgtaattcaaaacaaaactaaaacaaaataagtctatataatgacataattttcttcccttattttcaacacattctggaggaagtaaatgttatctggtgaatttacttgatatttatctgagcaagatcatcaaactaaatgacatcaataatttcatccctcattatcagctgtagttgtgtattgtaactttgtataagattggaatttgttgggttttggggagagaaagatgaagaagtccctgaatttcattttttaatgaatattttccataaaagctgtctttaaaaaaattcattcagacacaatccaatttctttgggctactggaaccagaggttcctcttacattgtatgcctacaatttaatggtgtagatttctaaacatcaaagttaaataactttgaattcactgttagccataggtgctgttggtaagcagtgatgtacttggtttattctgaagtaaataatttaatcatataaacttgattcagttaagcattagggaaaaacaattactactgaattatccttccctgtcttctctttatgtgaacatactggttgatttgttgcccagtatgtggatgtatatagaataatcctaagggagatttaaaggtgcaatagttttaacaaacatgaagaggtgcagttctgaaaggccaaacctacccatgctttgtagtaggagtgatagattgcctttcagaaagtaacttttactggttacaaatatgtagtatgatccaggtttgtgttaagctctgtagaggatga

SEQ ID NO: 1074 - protein, 121 aa, Homosapiens
MLHTGKSADYVNLALKNGAVSLVINLGSGAFEALVEPVNGKFNDNAWHDVKVTRNLRQVTISVDGILTTTGYTQEDYTMLGSDDFFYVGGSPSTADLPGSPIQHESTFAEDPMFQSQTAQL

SEQ ID NO: 1075 - DNA, 759 bp, Homosapiens
aggtaaacctcgagaccaatccagaaataaattgccaagcttctatcaaataattcaaaaggagacccaggactcttgatgatacacttgaagtcactaaatatgaaagatgatagcatcttggaaggcaagagcagaggaaaggagaattttcacagggaagaagaaagagttggtgaaagtgaaattgctttaacaaaataatgatctctatacctccttctcgaactgtggtttgaaggacagtatcatcagcattacttggagcttgtgagaaatttagaatttcaaggccccctcgaccccaacttactggtgcaaactctgtattgtaacccgatccccaaggtgattctagtgtacattaaagtgtgagagtcttgttatgaatggattcttatagtgctgcaatttagaacatcttttaagaattataaagacaattttgtgtctcttgtatctgaaataagtattaaaggcaaaatatatattgatatcatggcactgttcttaaggaattaacatccagatgaattattttgcatcttttcattggaaataaaaagcccggggctgggtggcgggcgaaagaatcagagagctctgatcagtgtgtagatgtatcaatatctatttaatatgtactccagcagagagtccaggctttaaatcattggaagcaatctctcaatttttattctcaacatgtttcacctttaggcaatattacaataaaattctctgtgggtttgtaaactt

SEQ ID NO: 1076 - protein, 41 aa, Homosapiens
MIHLKSLNMKDDSILEGKSRGKENFHREEERVGESEIALTK

SEQ ID NO: 1077 - DNA, 5491 bp, Homosapiens
ctctctctctctctctctctctctctttctttctttccgatggggaagagagggtggtgacaagttagaagcgcttgcggaaggtccccgcccccaggatcaggctccccctgcaaggggacgatgcaaaggtaaaagcacctcgctccgcagcatccagacctggaggggctgcgaccacgggccgagcccacccattccccagccaaaggacgggcccgccgctctccatggtactgcggagagctcagctccgcccttctctttcagaaggacagcacccggcgtcacgtaacccagccttctcaggctccaccaccgccttttccttcccagctctttccctctcctccccctcctcctccttctcctcctcctcctcctcctgctcccctccgttgcctgttctcccctcccgcactcctggagatagacgctcaagcctgacgcctctgaaaaggcagcagcagtcgccttatccatagacctcaggaaattcgctttgaccgatgcatgcttcaggctctggctcgagctgaggggaataaccgggcagatgtctgagtccttaaaaaagacaagataaaaccaaaatgcatcaccaacacacaaccaattgatgtgctggcatcttagcttggccctgcagaggcagagagaaaagaagaggagctgttgcgatttccacatctaacagcttctggctatttcgcaactgctgggtttgagtcctactgttgccgtggctgaaaagagaagtaaaatccaacttgtgagaccacgcacaaggaattaggctttggctgcagcggtgctgaagcccatgctatgacagaagaagcaggcctttgaagctatcctcgggttaagaaatggtgccctaaagaggcaagcatccctttctccgttctgctgtaagacaccacatctgaaggagacagacttgaggcattcacaagcatccaaggatactggctcactgctggcttcctgtactttcttgagaaaagtgttttctttttactgactctcactgcttccttttggcctggtaccactggtggaacctggcagataatgggatttgaggagttaagtatctgttgacactgcagatactcttaaattagttaatcagactcaaatgggtcagtgctttcccttgatcttttgttgaagccttttccagaacgttgtctccaaagtgcatcctccctttggtctggaagttctgtggctaccctgtaccactggggtcaacgttttccagttggaagaggactacagggagagagggcggggttattggaagaagaagaagaaaaaaagaactagataaaggagggcacatccctctcactcccgcctttccccttacctttctgtctctcgggacccttatttcttcgtcacggtgtccaggaccattttgaccctgtcggccccggcacccccccgccgcaccccagccccgagcatggggacggcgctgctccagcgcgggggctgttttcttctgtgcctctcgctgctgctcctgggctgctgggcggagctgggcagcgggctggagtttccgggcgccgagggccaatggacgcgcttccccaagtggaacgcctgctgcgagagcgagatgagcttccagctcaagactcgcagcgcccgcggcctcgtgctctacttcgacgacgagggcttctgcgacttcctggagctgattctgacgcgcggcggccgcctgcagctcagcttctccatcttctgcgctgagcctgcgacgctcctggccgacacgccggttaacgacggcgcctggcacagcgtgcgcatccgccgccagttccgcaacaccacgctcttcatcgaccaggtggaggccaagtgggtggaggtcaagtccaagcgcagggacatgacggtgttcagcggccttttcgtcggggggctgcccccggaactgcgcgccgcggcgctcaagctcaccctggcctcggtgagggagcgggagcccttcaaggggtggattcgtgacgtgagggtcaactcctcgcaggtcctgcccgtggacagcggcgaggtgaagctggacgatgagccgcccaacagcggcgggggaagcccgtgcgaggcgggcgaggagggcgagggcggggtgtgcctcaacggaggtgtgtgctccgtggtggacgaccaggccgtgtgcgactgctcgcgaaccggcttccgcggcaaggactgcagccaagaagacaacaatgtggaaggtctggcgcacctgatgatgggcgaccaagctaattgcagattaattcaacaaatctatattctagagcagaaatacaatcatgactatgacatggcatccacagagtgttcatataacaaggaaatgaaaacatttgggcaagttagaatgaatgacagaatggaagtgctgtgagactggtacaaagtgaagtaggaattcagaaaaaggaaagcataacatcaatccaagtctgtcttatgtgaatatccccaccttgtgccatctgttggaggaattaaaaaaaaatctggaaaaaataatttaggaactttacattgcaatttcctatgtggagttaaatcctagttgtgcataaaatcggggttaagtctggacagtttatataactgatttacagtgtaaacttatgtttcctaaatttttatatctcaatataatcatggagcaattttctcaatttccccacttttctcttgtgtgagtagtgaattcaggggatctggaatgaagttttgtggattaatgtctttctttatgaaaaaaagactataaaaaaataaattcaagaacatcttcattattttgatttcttctttatgaattcttaaatattttctaactgtttaaatgtccagtgatagatgaatatatttcattaaaaaataattaacacatgtaaaaagaacatgccttttgataaccttcttcatcctcctctcaagtcctttctctcgaggtaagcactggtctcactttgtgatgtgtccttacagagttgatgttgatccttctgtgctccataacaactcagggtttggaaactgcaaaatcccttatcatgtgtacatgacaaaaatggcgaagtcagctggagacatgttagagaccactgctgtgggctggcagaatcacaatgaattaaacacgagtttactcattcttctcataggccatagtgcctcctatttttaattagtcatcctgtttcaaactttagagtcagtctgttacttgtgttttttacattcctaaacaaagatatgtcacctttaactggatatggttaagaataaactttgaatgaattatagttttctttggggcagctgaagatctgttattcaaagccaaccttacttttgctggttgtgggtagatggattcaaatagtcttcatgaaatttggatcacatttttttggggcttgaaatttgtcaatgatgttgttgttaggatcattgataatgctaattttattctcctttctatttagaatttaggtttatctgtttgccttgaatgaagtatgtcttttctcttttgttcttgtttcttttcctatgtatgtgtaactggtcacttcattccaataattgctttgattgtttatttatattttactttaatggcttatcagaaatgaatgactatttaaattacaaaaaagtcaaaatatgttatacatgaaaatcaagccataatagctggttaatagctcaggagcacaagttaataattatcagcgaatgttggcactttgattggaggcttgtacttttccttcataagtcatcataattgtaattacatatttgtatttgtgattatacttaatgctaacttttcctagtagagtgtaagctctatgagggcagaaagcttgtctttctctttgaccattgtatttccagaacatttttcttattgtatcttgaatttgcgattttcatgacttaaatgtatttgtttgggggcggtggtttcaactgtccattttaaagagtcaaatggacatttactgtttaattatccaggcttctcatgttactagaagagcaaaatattacaagtagaactgaaaagaatatagttacacattctgaaagtgcataagccttattctctttgtgaagagtagatcttaaattagtataatttataaaagtaataaagatagatttttctcaaaactaattgttaaagctaattgtaattgttaagacctggatacaactcttccacctgaactaattgatgagtaatatctaatattaccatgtgctttaaatttttatctatactgtcataccacaataatatttcattaaacttactcttataatagatttgatattattaatacttagaaaagaataaagcatttggtgtttttttaatacattttcttttgtctttgtcttagtccatttgggcttctatataaaaataccataaactgggtagcttgtaagtaacagaaacttatttctcaaacgtctggaggctgggaagtccaagaccaagggctgacacagtcggtgtccagtgagattttgcttcctggttcatagatcactaccttctctttgtgtcctcacttgaaagggagaaagagagctctctggagtgtcttttataaggacagcaatcccattcataaaggctctgccctcaggacctaatcaaatcccaaaatccccctctcctaatccgtcattttgtgggttcggatttcagtttatcaattttggaaagatacaacattcagatcacacagtttccatgatttttatttttataccattttcaagtcctgtgttgctatatagcgaatttgtctgtgaagtgcacaacttccagttactaaaatcctaatgcatatttgttttatgctttttaaaatatattttgctgtgatttctgatatagacctaatttggttattaaaatatgatatgtatcttcttctgtataaattcttaaattgtatttcctcatttagtttcataataataagtcatctgtttgttcagaaaagtttgtgaatgttgacagacccttactgttgaaatgcctgtgtttggtgcatatacaaactaagaagtaagaatatttgtttaaattttctactgtgttacctctactcttgcaatactggatccccttaactcacagccgcagaccgtgggaagaccggagtttcaccttataatatcagacattaaatatctacttttatctatacagtacacatagaaggctatgtgactatttagaattcaatgtttgtttactagttcatctttagcttacatgttcattagttctgagtagaaccaagaaaaactaattgaagagtatatgcttatgtattatctcttgctgtgatttaaccaatcttgttacatgtattactaataaaagtcccagcttgaatgt

SEQ ID NO: 1078 - protein, 321 aa, Homosapiens
MGTALLQRGGCFLLCLSLLLLGCWAELGSGLEFPGAEGQWTRFPKWNACCESEMSFQLKTRSARGLVLYFDDEGFCDFLELILTRGGRLQLSFSIFCAEPATLLADTPVNDGAWHSVRIRRQFRNTTLFIDQVEAKWVEVKSKRRDMTVFSGLFVGGLPPELRAAALKLTLASVREREPFKGWIRDVRVNSSQVLPVDSGEVKLDDEPPNSGGGSPCEAGEEGEGGVCLNGGVCSVVDDQAVCDCSRTGFRGKDCSQEDNNVEGLAHLMMGDQANCRLIQQIYILEQKYNHDYDMASTECSYNKEMKTFGQVRMNDRMEVL

SEQ ID NO: 1079 - DNA, 589 bp, Homosapiens
aaggtctggcgcacctgatgatgggcgaccaaggtaaaagtaaagattaattcaacaaatctatattctagagcagaaatacaatcatgactatgacatggcatccacagagtgttcatataacaaggaaatgaaaacatttgggcaagttagaatgaatgacagaatggaagtgctgtgagactggtacaaagtgaagtaggaattcagaaaaaggaaagcataacatcaatccaagtctgtcttatgtgaatatccccaccttgtgccatctgttggaggaattaaaaaaaaatctggaaaaaataatttaggaactttacattgcaatttcctatgtggagttaaatcctagttgtgcataaaatcggggttaagtctggacagtttatataactgatttacagtgtaaacttatgtttcctaaatttttatatctcaatataatcatggagcaattttctcaatttccccacttttctcttgtgtgagtagtgaattcaggggatctggaatgaagttttgtggattaatgtctttctttatgaaaaaaagactataaaaaaataaattcaagaacatcttcatt

SEQ ID NO: 1080 - protein, 42 aa, Homosapiens
HQSKSVLCEYPHLVPSVGGIKKKSGKNNLGTLHCNFLCGVKS

SEQ ID NO: 1081 - DNA, 446 bp, Homosapiens
gcggcgctcaagctcaccctggcctcggtgagggagcgggagcccttcaaggggtggattcgtgacgtgagggtcaactcctcgcaggtcctgcccgtggacagcggcgaggtgaagctggacgatgagccgcccaacagcggcgggggaagcccgtgcgaggcgggcgaggagggcgagggcggggtgtgcctcaacggaggtgtgtgctccgtggtggacgaccaggccgtgtgcgactgctcgcgaaccggcttccgcggcaaggactgcagccaaggtctggcgcacctgatgatgggcgaccaaggtatgggctctgttccttttccactctgctttcagtgttttcttgttctgtagctgctttcaaaccatcactgcaaaggatgggcaaatgcttgcaaattatatggctgcaaattaaatacatatcttttgttcac

SEQ ID NO: 1082 - protein, 56 aa, Homosapiens
MSRPTAAGEARARRARRARAGCASTEVCAPWWTTRPCATAREPASAARTAAKVWRT

SEQ ID NO: 1083 - DNA, 561 bp, Homosapiens
gcctgcagctcagcttctccatcttctgcgctgagcctgcgacgctcctggccgacacgccggttaacgacggcgcctggcacagcgtgcgcatccgccgccagttccgcaacaccacgctcttcatcgaccaggtggaggccaagtgggtggaggtcaagtccaagcgcagggacatgacggtgttcagcggccttttcgtcggggggctgcccccggaactgcgcgccgcggcgctcaagctcaccctggcctcggtgagggagcgggagcccttcaaggggtggattcgtgacgtgagggtcaactcctcgcaggtcctgcccgtggacagcggcgaggtgaagctggacgatgagccgcccaacagcggcgggggaagcccgtgcgaggcgggcgaggagggcgagggcggggtgtgcctcaacggaggtgtgtgctccgtggtggacgaccaggccgtgtgcgactgctcgcgaaccggcttccgcggcaaggactgcagccaagaagacaacaatgtggaaggtctggcgcacctgatgatgggcgaccaaggta

SEQ ID NO: 1084 - protein, 127 aa, Homosapiens
MTVFSGLFVGGLPPELRAAALKLTLASVREREPFKGWIRDVRVNSSQVLPVDSGEVKLDDEPPNSGGGSPCEAGEEGEGGVCLNGGVCSVVDDQAVCDCSRTGFRGKDCSQEDNNVEGLAHLMMGDQ

SEQ ID NO: 1085 - DNA, 3939 bp, Homosapiens
aggcccctgctagacccatggaaagctgtatggagattccacttctccggggtttggtagtgattgggcggggatacctgagagggtgccaggaaagggtccagcagtcaaagagaaggggccaaggagtcgataattatgatgagctctggctttacttgtgcaccttggtctcctgctcggaacccttgaaaagaagctgcagcttttcgaggaatgcaggggcaagcaagactcacacaggcactggcattcttctagatccgatgtcccttgccccaccccttactgtggctctgccttgggtaatcacaacaaatcttcatgacttgcctaggctgtgccaaaaagatgtaaaaggaacccaccagggtaagatgccaacttgcagacgacgatcaactgtgtctgacaaggttgttctggaatcatagttgaagaaacagttggctagactctaacagctgttcacaatttctcgtatctctcctgatggaggacagtgtttttaaagtggctactccaaaaataatcacacaaggcaggatttcatctatccctaatattctcagaaggttcatcagtggcatgatgacagaaaaagtgctacaaaagccatgtgaagaagtacatgtttgcttccccttctgtcatgattgtaagtttcctgaggcctccagagccatgctgaactaaaccttgtgattacattgagcctacctgaatgatccaggataatcgtcccatatcaaggagagcaaagtgaatagtgtgatttgcttagaggacaatgctgctacaaaaacctgttccactccaaggccaactgcagttttgagatgtttgagttgctcccagttttatgctaccatgaatgagaggacggatccaacattcaaatggtcttgggtctgcatcttagctcggccactggatagctgtacaactacggagtcttgctctgttgcccaggctggagtgcagtggcgcgatctcgactcactacaacttccgcctcccggattcaagcgattctcctgccttagcctcccgagcagctggaactacaggcacgtgccaccacgcccagctaatttttttgtatttttagtagagacggggtttcaccatgttagccaggatggtctcaattgttctggagtctttctctaatacactacatacaatccataggcaaattctgttggcgtcaccttcgaaatctaccccaaatcttactatttttacagcacttcaaccaccagtaccttatcaaaaaccacttctatatttcttgtaaattattggaacagccctttacctggtcttcctgtttctgccttttgcatcccttcttccttcctctcctccacacataccactaaaatcgcagcattgcaactacagtaataaatacatcacttctctgcacaaaagcttctggtggcttcccccctcactcaggaagtctttatagtactccagaagatcactttctggccttccctgttgggctcattttctatttctaccttgcccactctgttgcagccacactgtcctccctgctgattcgtgaacacactgaccatgctcttgcttcaagaacacttacattgctgttccctctgccaggacagttcctctagtatccactcacctcattcagtttctgcacaaatgtcacttttacaataaagtcatccctaaagaactaatttaaaattgtaccctactaaatagaaatccccttacctcacttagaacactctaaaagtgctctaaaggactaaattagcaatttagccctttagtaccccactgattagcaatccccttaccccacttagagagtgctctactagtactttaggtagtaccatctaaacagtgatgccactgtcagactaaaaatcaccatcataggtagatacattaatttaaatcagataaacgtaatcatctaatttgaacattatatttcatctacaatatccacttattcaacaggtatttattgaccatgctgtacaattttctaggtgcagaagatacatcacttaacaaagaagatcactacacttggttacttggagtttatatttgaattggtaaaatatatggcagaaactgaaagtgctgagaaggaccaaattagtaatgagtaatttagccctttagtgccctactgattagcaatcctcttaccccacttatagagtgctcttctagtactttagatagcagcatctaaacagtagcatctaaaccccttgggattgctaattaccctactttaggaggtaattacatgaggatggtgaagcctttatggaaggaattagggtccttataaaagcacttgaggcagtgggtccactctcttttgctcttccaccatgtgaggacacagcattcaaagcaccaccttggaagcagagataaggctctcaccagacaccaaacctgcctgccccttgattttggacatccagccttcagaactgtgagaagtacatttctattatttatgaattacccagtctggtattttattatagcagcataaagagactgtgatagaaggtatgaatttttgttctaaacgaggactgggggtggtaggaacttgaaaacaacgctaatataacaaatcaattagattgcttctagctattttatttttctttcattaattagtaattccaatccagttctgggtgtgaagttctacaggtaaaacatgttccttttagatattttcctctgaaaagaattggggaaatattgcaaaggaaaaggaaaagggaaaggagtgattctgacatttatgaatttgtgatattatgtactgaaattatgacctgattgtatatttctccctagtctgcatatagggaggttattcagcccttccaccttctgccatgggatggcacagcaagaaggccctcatcagatacaggcccttcagccttggttttccagtcattagaactcattgccatctatattttcactcctgagaagtttgaaaattaaaaaaaaaaaaaaagatcatcaagaataagggatgaaccacaaaaagaaagaaaggctggaaaaaggttttacagatttttaagaaatataactcatttgcctgagcattctttcaacatcctcattttaaggttacttctaaaaagaagaaatgatttttaatatttccttcatctggagaaataactgtcgctgttcggtattcacagacttcctgctgaggactgctatcgcaataaactctggtctcacgataggcagccatgatgagaaacggcccctgcatagagatggtttgaactgtgtggctccctcctgccccatataaccatcgcgagaagaatgtaacagcggccctccattagtgaaccttttaccgtgattcccgagtcataaccccgacccaccttgaaatctactgctggcattttctcgtcattggtttgacacatgaattagcagtttaagactttgcctccctactaacaccaacatcttatttgtatggctctggcactagttcctgcctccttgtcctctaactctaatcccagttatcacccttaattcagtatgctcttggatctctggttaaatctcttagaactttccattcaaaataacatactttatacttcagagccacccttaggtttggtacttctactatgtccatgaattgaatttttgcatctgtttctctatatatgtatttttcatttaaaatatttgttcttaagtcgtataatttacctggtgaaagaccatacaacagtacttgcatgtagtctccctataactgatgaacgtgcatgtttcttttctccgataaattttatgtcaattttactacattattgaaattcccccagcgtaatgtgataaaatttatcaact

SEQ ID NO: 1086 - protein, 138 aa, Homosapiens
MESCMEIPLLRGLVVIGRGYLRGCQERVQQSKRRGQGVDNYDELWLYLCTLVSCSEPLKRSCSFSRNAGASKTHTGTGILLDPMSLAPPLTVALPWVITTNLHDLPRLCQKDVKGTHQGKMPTCRRRSTVSDKVVLES

SEQ ID NO: 1087 - DNA, 636 bp, Homosapiens
acaatgaaaagtcagcagtctgcaacctggaagagggtcctcaccagaacctgaccaggctggcacacccatctcagacttccagcctccagagttttcaaatttaggctggtctgcgatttgctttggctgacagaatatgatgaagtgatgttatatgggttccttactcagcctttaagtggacttgcagctactgctctctactccacactgctaccaccatctgaagaaccctacagtaggagacacttggcccagataatcacaaagaaaaagagtatgcagtgagaaggacaagtctcataaccacatgttgttaatgaagaagctgaggcaccaagcgacttaaggatttgaccaaaatcagacagcagcagattcaaagataatgccagctcctcatcttcgtttctggtgctgtttacaccgtgatacttcaacactgaaagaaacacctatcaattctcgtacaactttaaagatgcattcttactgtctcgaggcatcctctaattttgtgttcctatttgcttcatctagtttaggttattaactcctaaaggctagggcatacattttgaaatttttttttctcaggacattaggaaccttaataaattacttttgatggtt

SEQ ID NO: 1088 - protein, 46 aa, Homosapiens
MLYGFLTQPLSGLAATALYSTLLPPSEEPYSRRHLAQIITKKKSMQ

SEQ ID NO: 1089 - DNA, 8192 bp, Homosapiens
ttcggagcgcgaagccgccgctgggtcctcggcgcgccccgcgtctgcgcttgctgccgcgccccggtcggcgcgctgggagttccagccatgctcttctggcacacgcagcccgagcactacaaccagcacaactccggcagctacctgcgtgatgtgctcgctctgcccatcttcaagcaggaggaaccccagctgtcccccgagaacgaggcccgcctgccacccctgcaatatgtgttgtgtgctgccacgtccccagccgtgaagctgcatgaagagacgctgacctacctcaaccaaggtcagtcttatgaaatccgactactggagaatcggaagctgggagactttcaagatctgaacacaaaatatgtcaagagcatcatccgtgtggtcttccatgaccgccggctgcagtatacggagcaccagcagctggagggctggcggtggagtcggccaggggaccggatcctggacatcgatattccactgtctgttggtatcttggaccccagggccagcccgacccagctgaatgcagtcgagtttttgtgggaccctgcgaagagagcttctgcattcattcaggtacactgcatcagcacagaattcacccccaggaagcacgggggcgagaagggagtgccctttcgagtccagattgacacgtttaagcagaacgagaatggggagtacacggagcacctgcactcagccagctgccagatcaaggtgttcaagccgaagggagccgatcggaaacagaagactgaccgggagaagatggagaaaagaactgcccaagagaaggagaaataccagccgtcctatgaaaccaccatcctcacagagtgctctccatggcccgacgtggcctaccaggtgaacagcgccccgtccccaagctacaatggttctccaaacagctttggcctcggcgaaggcaacgcctctccgacccacccggtggaggccctgcccgtgggcagtgaccacctgctcccatcagcttcgatccaggatgcccagcagtggcttcaccgcaacaggttctcgcagttctgccggctctttgccagcttctcaggtgctgacttgctgaagatgtcccgagatgatttggtccagatctgtggtcccgcagatgggatccggctcttcaacgccatcaaaggccggaatgtgaggccaaagatgaccatttatgtctgtcaggagctggagcagaatcgagtgcccctgcagcagaagcgggacggcagtggagacagcaacctgtctgtgtaccacgccatcttcctggaagagctgaccaccttggagctgattgagaagatcgccaacctgtacagcatctccccccagcacatccaccgagtctaccggcagggccccacgggcatccatgtggtggtgagcaacgagatggtgcagaacttccaagatgaatcctgttttgtcctcagcacaattaaagctgagagcaatgatggctaccacatcatcctgaaatgtggactctgagcagcagtggacctcatacctgtctccagctcccagccctgtggatccccgtggatgtagacattgccccactgtaagctgtggcctcaccaggcaagctgaggccaggagggaccctgcccagtctgtgaaagctacagagcaccaaccagcagaagcctgtggacaccaagtacggtgtacagaaagccagtggctcctttctcccttcctcttggcctccagattttgaatggttccttgttcttttctattggtccaaccctgacgttctaaaagggcaaacagtggagacgtctgctctgaaatccctcatcccttagttggaagctgattgggtatcttggtgctgcctgtattggtcccttctgaccactctcctgcctccagagaaagctctgcttcaccctggaagctggtacctttacctcctcctctgggagttggctgcatggccagcactgccgacttgatgggagcagtttgccctcattctcctgtttcaggtttgcttcccttctcagtgaccctggtgagcatccgcctttcctgttcttggatgaattgatgggagtggggctattctgtgccttctacctctttcttctctacgttgtttctaaggatctgctgctgcggaacccaaagatgtgctcctgtctctgcactggcgcattggcatggtagatgccacaatgtatgtgcacggcctttctcagagacattagttctgaggccctttgtggggaggttagggggatggtaatagaaaaagactattttatttcctggcaatcacgggtaaggaggattaggaatgagtattccattcctaggtgtcatcagatgaccttgaccaccacaataccaggccctcttggatggacttatagaaagttagagaagaccttgttgaaccgctgctaaacttgccacaggagcgatgtgttttctctgagtgcccctcacttacatgtttatctttgtttgtagaggctatgtttaggatattttgcctgcatcagaatgggtgcatcatctttcttaatggcctaactatcgggaaatttgagtgtcagtaactgtggtagactcagaaattcgtctttgtcttgcctctggttcctgggatccagtgatctctactggcccagggcttcagctcttggttaatttaggttcatggggaaccctctgaccacctgaatgggatgtcatagcttctaaatggagcttctgtggaatgaagtgctagactgaaggactaccagaataaaacagggtctacaatggggagaacttgttttatagatgaggaaaccaaggctcagaggggcaaagtcacctgcatggtagcacatagtgatagggtagcgatataaatttatcatataaaccaggacatctcggaataaaaggggctctgttagtcattatgttgggtaatagccgtggcattcctacagaacagagtgaggacaggctcctgattcctcttccttctttagaggagaagcggggagtgggttaactaacagctttattgagatgtcattcacatgccattcagtttacccattgctagtgtccaattgtattcacagaaccaccatcaattcacagaattacagtcaacgttggtacattttcatcacccccagtaaaaccccgtacccttggtctgtcactcctgctttcctaactcctgcagtccaaggcagccatgaatctactttctatgtaagattaacctactctggacatttcatatatctggaatcatgtgatatctcttttgtgactggcttcttccactgaatgttttctagggccgtccaagttgaggatgtatcagtacttcattcttttgtattgctgaataatacttcattgtatagatagaccacatttgtttattgattcatcagttgatggacatttgtgtgtttttactttttggctactctgaatgatgctgctatgaacatatttctacaagattttgtgtggacatatgttttcatttcttttagcaatatacataggagtggaattgctaggtcttacagtaactccgtgttttaactttttgagaaactgccagactgttttctatagcagctgtaccattttacattcccaccagcaatgtatccaggtttcaatttgtctacatcctcatcaacacttgctattatctgtctttttgcttttagcatcctaatgagtatgaaatgctatcttgtggttttgatttgcattcccctgatggcaactgatgctgagtgtcttttcctgtgcttacgggccatgcgtatttctttggagaaaggtctatccaggtcctttgcctatttttaattgagttgtctttttttttttaagttttctgttttcctaaccactagactaccagggatgagccttctttttattattgagttgggtgagctatttgtatattctagacgccagtcttttatcaggtatatgactggtaaaaatgttctccccttctgtggattgttttcagtttcttgttggtgtcctttgagacacaaaactttttaactttgatgatttccaagatacgtattttttttctattgtcacttgtgcttttggtgccatatctagaaaaccattgcctaatccaaggtcaagaagattaatgcctgtgttttcttctaagaactatacttttagttctcacaatggtctttgatccatttcgagtatatttttatatatgatgtgatgtaggggtccagcttcattcttttgcttgtggatctccacttgtcccactgctgattattgagaaaaatatcctttctccacggaattgtcttggcatccttgctaaaggcctctgcttcttactggatcttctttcctgggacatggtgtcgttgggaagcttaccttttttttttttttacttagtctgtgtttggttccaccagttttatgctgcctttctactctgttcttgctgtctccctctttacctgagtcaacggtactgagtcctatctctctctgatgttccccagtcttccttggtgcatgttctagctccacacactagtccttggaggaaggttgagaccaatgatttcctgttatgagtcatgaggaaactgaatcacctagaagtggaataatgtgctcagggtcaccatagcccattagtggaaggaccaggactagacctttagtcttctgaggtccagccccttaggctgtctgtcatcactgtacccaagtgatgtcactaccaaggccaaatgatggtgggctaaattttaattctcaaaagtgtaggaggctaatattgtcttctaagttccaaaagaagatgtaataaaagtctgttaccttaagtgtgctattagtagagtcttccatttttctggcatgcccctggcatctgctcttcttaccttctcgtggttgtagttaaagcttatagcttatgaaagaatagaaaataataaataccaaaaaaaagtacacatggtaatttggtaccaaaatatctcagctgcctaatttagcagctcatcccttccacaggggtcagatgagctaaagctccaggttttatttttcatttgattgacatacagaaaagccatagcccttcccacagctgtccagggtctttcctgtgagtccggaggtgctggcctattgagcaggacagctcttcccagggcattcccaccaacctgtggcttctgaactgtagcttctttttacagtgaaccccagagggaaataagacagacacatgtgctcaggccaccatcttgaactggaagcccaaagctgagttccttactcttaggtcgtcacggtttttgcggggtatctgcaaggttgagataaaccctttcctgtttaccaggttgtcctttctggatgaagggacagaggctgttgaatggaggaataataggtttgctggaggaggggcatggtatgcctgtggaaaggacaggatggggtggggaggtcgaggctttgacttggggtcctaaacaaaggtcaggtgttgccctagtgacctcttgcccagacagcccagagccccttacacagagctattaacctagggaaggctttaccagcagtggactggagccagccagggtcacaagtttccaagtccagcattgcttcaggggctggcctgagtaactgaagatctgaaaatcattaacaagtcgatgaaataaacggaaaagcctcttaggctgttgtcagtggagcagagggagaaagtccctaggcgctcagagggggtgagaaagcagtggatgattgggcgggggtgggggattagatgttgacactgcctggggtgtaggaagaggaacagagaacccagagtcagggtcctagatcccagaccctcgctcagtatgagtctctttgcctctctgggtctctatctcctcctcttacaaatacaggcttggtgatctctgaagatggcaccaacctgccatgaaatgaatctgaggggttttcccatttttccctccatcaaaatcgtacaaaaagctggacgtggtggcccatgcctctaatcctagcattttgggaggccgaggtgggagaatcacttgacgccaagagttcgagaccagcctgggcatcgtagtgagactccatctctgtctttttgaaaataaaaaatctttgaaaattgcacaacaggcaggagacctttacgtgtgcccatcctggttgtacacagtgccaccagtgctcctgcagtgcaaggcggcatgcttcttgacatgggtcagattgtgtccatcgtgtctttgggaatcagccctagctcctaactgggctgactacttcctccgcaaacttatgggggctcccagatattccttgccagccaggggccagacacagtgcaggcacagtctgtgtcattggtgcacatgtgcgtgtttacatgtgtacctgggttccttcccttgcccatgaatttgccatgagcacagccagaagcagcctcagcttggcaaggtgtggagatgactgctgttcccttcgcatttggggaaaacaggctccctcggtagctcgatgatcctcttttgatcttgtgtgacctcctggagagtggatgaagctggtggccttagcttttctagacagtgtaagtggcactgggcaaggcccccagagcagggcaaggtctctagagcgggtctcccacatgactggcttcacacaggcacttccgctcgggttgcatgctctgtgtcatcttaccggtccagggttgcaggtaggaaatgtttgtaccctcttctgattgccacctccttcccatcgccccttagggacagggcttgagggccagtgaggcgctggtcaggcaccccaggcctccttgggacctgcccaggggcaccctgagagctcctgaaacccccacttagcttccagacctttctgcaaaagctcctcctggctttcctccctcccccaatctatgggtcacagctaacagatctgagggcaactgctgtgctagtggccagggctgcacctgccatccccggctctgccactttagggccttctagaggcagtgtccttaggaagtagctctgaggcatgggttttctgctcctgtgcagggcagctgatgggataaggtggggaaggacggtcagtgcttgggccccagctggccagcctggcgatggggaaaccaaaccatgtcccccagcgaagggccagagtgggaacctgtcctcatgcccttcgtcctgaggagccctgaggtgggcagcaggggccaggggaagttttcaggccttcatcaaagagaacaacatcctcagctccgcacccctcatcctgtatcagcacttaccggtgtgtgactgcccttgtcagctagcatacggtgggcccacctggcccactggctgtttatgccactgatttatgatagggaatattatctttgaacccaatgaagtgttttctcccccatcacaaaaaaaaaaattcttatttttagtagacatgtatttaccaaaaatatgtactcaattattgtattttggattttatcaatttaaaaattgtggaaatttgtttgctcttacgccaacataatattgattttgcctcttggctctgaaagcccaaaatatttaccgtctagcccgttacagaaaaagtctgctgactactgagccagacctccattacctccatccctgttggattatttaaagaaagcctcagacagtaagggcttttttaaaagaataaaatgacttggtttgcgcttggaagcaggggaagcattcagatgagcggtttctgcattaaccctgcctatcacgcatctcgtgtcctgtgtggctggcgagccccccttggaaggttctggtgcttcagctggctcctgcagagtccaccccgcctcgtggtgggaatgcagagccctttgctttccttcttgccgcctgcttcctgttcctggggacccgctgggcctttggtctgcatcccctggccaggtccctcagggttgatgcgtggagaaggactttgagcagtggtgggcagcagtggcctcctggccagctcacactcttgtcctgggaggggca

SEQ ID NO: 1090 - protein, 479 aa, Homosapiens; identical to SEQ ID NO: 50

SEQ ID NO: 1091 - DNA, 7567 bp, Homosapiens
ttcggagcgcgaagccgccgctgggtcctcggcgcgccccgcgtctgcgcttgctgccgcgccccggtcggcgcgctgggagttccagccatgctcttctggcacacgcagcccgagcactacaaccagcacaactccggcagctacctgcgtgatgtgctcgctctgcccatcttcaagcaggaggaaccccagctgtcccccgagaacgaggcccgcctgccacccctgcaatatgtgttgtgtgctgccacgtccccagccgtgaagctgcatgaagagacgctgacctacctcaaccaaggtcagtcttatgaaatccgactactggagaatcggaagctgggagactttcaagatctgaacacaaaatatgtcaagagcatcatccgtgtggtcttccatgaccgccggctgcagtatacggagcaccagcagctggagggctggcggtggagtcggccaggggaccggatcctggacatcgatattccactgtctgttggtatcttggaccccagggccagcccgacccagctgaatgcagtcgagtttttgtgggaccctgcgaagagagcttctgcattcattcaggtacactgcatcagcacagaattcacccccaggaagcacgggggcgagaagggagtgccctttcgagtccagattgacacgtttaagcagaacgagaatggggagtacacggagcacctgcactcagccagctgccagatcaaggtgttcaagccgaagggagccgatcggaaacagaagactgaccgggagaagatggagaaaagaactgcccaagagaaggagaaataccagccgtcctatgaaaccaccatcctcacagagtgctctccatggcccgacgtggcctaccaggtgaacagcgccccgtccccaagctacaatggttctccaaacagctttggcctcggcgaaggcaacgcctctccgacccacccggtggaggccctgcccgtgggcagtgaccacctgctcccatcagcttcgatccaggatgcccagcagtggcttcaccgcaacaggttctcgcagttctgccggctctttgccagcttctcaggtgctgacttgctgaagatgtcccgagatgatttggtccagatctgtggtcccgcagatgggatccggctcttcaacgccatcaaaggccggaatgtgaggccaaagatgaccatttatgtctgtcaggagctggagcagaatcgagtgcccctgcagcagaagcgggacggcagtggagacagcaacctgtctgtgtaccacgccatcttcctggaagagctgaccaccttggagctgattgagaagatcgccaacctgtacagcatctccccccagcacatccaccgagtctaccggcagggccccacgggcatccatgtggtggtgagcaacgagatggtgcagaacttccaagatgaatcctgttttgtcctcagcacaattaaagctgagagcaatgatggctaccacatcatcctgaaatgtggactctgagcagcagtggacctcatacctgtctccagctcccagccctgtggatccccgtggatgtagacattgccccactgtaagctgtggcctcaccaggcaagctgaggccaggagggaccctgcccagtctgtgaaagctacagagcaccaaccagcagaagcctgtggacaccaagtacggtgtacagaaagccagtggctcctttctcccttcctcttggcctccagattttgaatggttccttgttcttttctattggtccaaccctgacgttctaaaagggcaaacagtggagacgtctgctctgaaatccctcatcccttagttggaagctgattgggtatcttggtgctgcctgtattggtcccttctgaccactctcctgcctccagagaaagctctgcttcaccctggaagctggtacctttacctcctcctctgggagttggctgcatggccagcactgccgacttgatgggagcagtttgccctcattctcctgtttcaggtttgcttcccttctcagtgaccctggtgagcatccgcctttcctgttcttggatgaattgatgggagtggggctattctgtgccttctacctctttcttctctacgttgtttctaaggatctgctgctgcggaacccaaagatgtgctcctgtctctgcactggcgcattggcatggtagatgccacaatgtatgtgcacggcctttctcagagacattagttctgaggccctttgtggggaggttagggggatggtaatagaaaaagactattttatttcctggcaatcacgggtaaggaggattaggaatgagtattccattcctaggtgtcatcagatgaccttgaccaccacaataccaggccctcttggatggacttatagaaagttagagaagaccttgttgaaccgctgctaaacttgccacaggagcgatgtgttttctctgagtgcccctcacttacatgtttatctttgtttgtagaggctatgtttaggatattttgcctgcatcagaatgggtgcatcatctttcttaatggcctaactatcgggaaatttgagtgtcagtaactgtggtagactcagaaattcgtctttgtcttgcctctggttcctgggatccagtgatctctactggcccagggcttcagctcttggttaatttaggttcatggggaaccctctgaccacctgaatgggatgtcatagcttctaaatggagcttctgtggaatgaagtgctagactgaaggactaccagaataaaacagggtctacaatggggagaacttgttttatagatgaggaaaccaaggctcagaggggcaaagtcacctgcatggtagcacatagtgatagggtagcgatataaatttatcatataaaccaggacatctcggaataaaaggggctctgttagtcattatgttgggtaatagccgtggcattcctacagaacagagtgaggacaggctcctgattcctcttccttctttagaggagaagcggggagtgggttaactaacagctttattgagatgtcattcacatgccattcagtttacccattgctagtgtccaattgtattcacagaaccaccatcaattcacagaattacagtcaacgttggtacattttcatcacccccagtaaaaccccgtacccttggtctgtcactcctgctttcctaactcctgcagtccaaggcagccatgaatctactttctatgtaagattaacctactctggacatttcatatatctggaatcatgtgatatctcttttgtgactggcttcttccactgaatgttttctagggccgtccaagttgaggatgtatcagtacttcattcttttgtattgctgaataatacttcattgtatagatagaccacatttgtttattgattcatcagttgatggacatttgtgtgtttttactttttggctactctgaatgatgctgctatgaacatatttctacaagattttgtgtggacatatgttttcatttcttttagcaatatacataggagtggaattgctaggtcttacagtaactccgtgttttaactttttgagaaactgccagactgttttctatagcagctgtaccattttacattcccaccagcaatgtatccaggtttcaatttgtctacatcctcatcaacacttgctattatctgtctttttgcttttagcatcctaatgagtatgaaatgctatcttgtggttttgatttgcattcccctgatggcaactgatgctgagtgtcttttcctgtgcttacgggccatgcgtatttctttggagaaaggtctatccaggtcctttgcctatttttaattgagttgtctttttttttttaagttttctgttttcctaaccactagactaccagggatgagccttctttttattattgagttgggtgagctatttgtatattctagacgccagtcttttatcaggtatatgactggtaaaaatgttctccccttctgtggattgttttcagtttcttgttggtgtcctttgagacacaaaactttttaactttgatgatttccaagatacgtattttttttctattgtcacttgtgcttttggtgccatatctagaaaaccattgcctaatccaaggtcaagaagattaatgcctgtgttttcttctaagaactatacttttagttctcacaatggtctttgatccatttcgagtatatttttatatatgatgtgatgtaggggtccagcttcattcttttgcttgtggatctccacttgtcccactgctgattattgagaaaaatatcctttctccacggaattgtcttggcatccttgctaaaggcctctgcttcttactggatcttctttcctgggacatggtgtcgttgggaagcttaccttttttttttttttacttagtctgtgtttggttccaccagttttatgctgcctttctactctgttcttgctgtctccctctttacctgagtcaacggtactgagtcctatctctctctgatgttccccagtcttccttggtgcatgttctagctccacacactagtccttggaggaaggttgagaccaatgatttcctgttatgagtcatgaggaaactgaatcacctagaagtggaataatgtgctcagggtcaccatagcccattagtggaaggaccaggactagacctttagtcttctgaggtccagccccttaggctgtctgtcatcactgtacccaagtgatgtcactaccaaggccaaatgatggtgggctaaattttaattctcaaaagtgtaggaggctaatattgtcttctaagttccaaaagaagatgtaataaaagtctgttaccttaagtgtgctattagtagagtcttccatttttctggcatgcccctggcatctgctcttcttaccttctcgtggttgtagttaaagcttatagcttatgaaagaatagaaaataataaataccaaaaaaaagtacacatggtaatttggtaccaaaatatctcagctgcctaatttagcagctcatcccttccacaggggtcagatgagctaaagctccaggttttatttttcatttgattgacatacagaaaagccatagcccttcccacagctgtccagggtctttcctgtgagtccggaggtgctggcctattgagcaggacagctcttcccagggcattcccaccaacctgtggcttctgaactgtagcttctttttacagtgaaccccagagggaaataagacagacacatgtgctcaggccaccatcttgaactggaagcccaaagctgagttccttactcttaggtcgtcacggtttttgcggggtatctgcaaggttgagataaaccctttcctgtttaccaggttgtcctttctggatgaagggacagaggctgttgaatggaggaataataggtttgctggaggaggggcatggtatgcctgtggaaaggacaggatggggtggggaggtcgaggctttgacttggggtcctaaacaaaggtcaggtgttgccctagtgacctcttgcccagacagcccagagccccttacacagagctattaacctagggaaggctttaccagcagtggactggagccagccagggtcacaagtttccaagtccagcattgcttcaggggctggcctgagtaactgaagatctgaaaatcattaacaagtcgatgaaataaacggaaaagcctcttaggctgttgtcagtggagcagagggagaaagtccctaggcgctcagagggggtgagaaagcagtggatgattgggcgggggtgggggattagatgttgacactgcctggggtgtaggaagaggaacagagaacccagagtcagggtcctagatcccagaccctcgctcagtatgagtctctttgcctctctgggtctctatctcctcctcttacaaatacaggcttggtgatctctgaagatggcaccaacctgccatgaaatgaatctgaggggttttcccatttttccctccatcaaaatcgtacaaaaagctggacgtggtggcccatgcctctaatcctagcattttgggaggccgaggtgggagaatcacttgacgccaagagttcgagaccagcctgggcatcgtagtgagactccatctctgtctttttgaaaataaaaaatctttgaaaattgcacaacaggcaggagacctttacgtgtgcccatcctggttgtacacagtgccaccagtgctcctgcagtgcaaggcggcatgcttcttgacatgggtcagattgtgtccatcgtgtctttgggaatcagccctagctcctaactgggctgactacttcctccgcaaacttatgggggctcccagatattccttgccagccaggggccagacacagtgcaggcacagtctgtgtcattggtgcacatgtgcgtgtttacatgtgtacctgggttccttcccttgcccatgaatttgccatgagcacagccagaagcagcctcagcttggcaaggtgtggagatgactgctgttcccttcgcatttggggaaaacaggctccctcggtagctcgatgatcctcttttgatcttgtgtgacctcctggagagtggatgaagctggtggccttagcttttctagacagtgtaagtggcactgggcaaggcccccagagcagggcaaggtctctagagcgggtctcccacatgactggcttcacacaggcacttccgctcgggttgcatgctctgtgtcatcttaccggtccagggttgcaggtaggaaatgtttgtaccctcttctgattgccacctccttcccatcgccccttagggacagggcttgagggccagtgaggcgctggtcaggcaccccaggcctccttgggacctgcccaggggcaccctgagagctcctgaaacccccacttagcttccagacctttctgcaaaagctcctcctggctttcctccctcccccaatctatgggtcacagctaacagatctgagggcaactgctgtgctagtggccagggctgcacctgccatccccggctctgccactttagggccttctagaggcagtgtccttaggaagtagctctgaggcatgggttttctgctcctgtgcagggcagctgatgggataaggtggggaaggacggtcagtgcttgggccccagctggccagcctggcgatggggaaaccaaaccatgtcccccagcgaagggccagagtgggaacctgtcctcatgcccttcgtcctgaggagccctgaggtgggcagcaggggccaggggaagttttcaggccttcatcaaagagaacaacatcctcagctccgcacccctcatcctgtatcagcacttaccggtgtgtgactgcccttgtcagctagcatacggtgggcccacctggcccactggctgtttatgccactgatttatgatagggaatattatctttgaacccaatgaagtgttttctcccccatcac

SEQ ID NO: 1092 - protein, 479 aa, Homosapiens; identical to SEQ ID NO: 50

SEQ ID NO: 1093 - DNA, 4917 bp, Homosapiens
gggttcggagcgcgaagccgccgctgggtcctcggcgcgccccgcgtctgcgcttgctgccgcgccccggtcggcgcgctgggagttccagccatgctcttctggcacacgcagcccgagcactacaaccagcacaactccggcagctacctgcgtgatgtgctcgctctgcccatcttcaagcaggaggaaccccagctgtcccccgagaacgaggcccgcctgccacccctgcaatatgtgttgtgtgctgccacgtccccagccgtgaagctgcatgaagagacgctgacctacctcaaccaaggtcagtcttatgaaatccgactactggagaatcggaagctgggagactttcaagatctgaacacaaaatatgtcaagagcatcatccgtgtggtcttccatgaccgccggctgcagtatacggagcaccagcagctggagggctggcggtggagtcggccaggggaccggatcctggacatcgatattccactgtctgttggtatcttggaccccagggccagcccgacccagctgaatgcagtcgagtttttgtgggaccctgcgaagagagcttctgcattcattcaggtacactgcatcagcacagaattcacccccaggaagcacgggggcgagaagggagtgccctttcgagtccagattgacacgtttaagcagaacgagaatggggagtacacggagcacctgcactcagccagctgccagatcaaggtgttcaagccgaagggagccgatcggaaacagaagactgaccgggagaagatggagaaaagaactgcccaagagaaggagaaataccagccgtcctatgaaaccaccatcctcacagagtgctctccatggcccgacgtggcctaccaggtgaacagcgccccgtccccaagctacaatggttctccaaacagctttggcctcggcgaaggcaacgcctctccgacccacccggtggaggccctgcccgtgggcagtgaccacctgctcccatcagcttcgatccaggatgcccagcagtggcttcaccgcaacaggttctcgcagttctgccggctctttgccagcttctcaggtgctgacttgctgaagatgtcccgagatgatttggtccagatctgtggtcccgcagatgggatccggctcttcaacgccatcaaaggccggaatgtgaggccaaagatgaccatttatgtctgtcaggagctggagcagaatcgagtgcccctgcagcagaagcgggacggcagtggagacagcaacctgtctgtgtaccacgccatcttcctggaagagctgaccaccttggagctgattgagaagatcgccaacctgtacagcatctccccccagcacatccaccgagtctaccggcagggccccacgggcatccatgtggtggtgagcaacgagatggtgcagaacttccaagatgaatcctgttttgtcctcagcacaattaaagctgagagcaatgatggctaccacatcatcctgaaatgtggactctgagcagcagtggacctcatacctgtctccagctcccagccctgtggatccccgtggatgtagacattgccccactgtaagctgtggcctcaccaggcaagctgaggccaggagggaccctgcccagtctgtgaaagctacagagcaccaaccagcagaagcctgtggacaccaagtacggtgtacagaaagccagtggctcctttctcccttcctcttggcctccagattttgaatggttccttgttcttttctattggtccaaccctgacgttctaaaagggcaaacagtggagacgtctgctctgaaatccctcatcccttagttggaagctgattgggtatcttggtgctgcctgtattggtcccttctgaccactctcctgcctccagagaaagctctgcttcaccctggaagctggtacctttacctcctcctctgggagttggctgcatggccagcactgccgacttgatgggagcagtttgccctcattctcctgtttcaggtttgcttcccttctcagtgaccctggtgagcatccgcctttcctgttcttggatgaattgatgggagtggggctattctgtgccttctacctctttcttctctacgttgtttctaaggatctgctgctgcggaacccaaagatgtgctcctgtctctgcactggcgcattggcatggtagatgccacaatgtatgtgcacggcctttctcagagacattagttctgaggccctttgtggggaggttagggggatggtaatagaaaaagactattttatttcctggcaatcacgggtaaggaggattaggaatgagtattccattcctaggtgtcatcagatgaccttgaccaccacaataccaggccctcttggatggacttatagaaagttagagaagaccttgttgaaccgctgctaaacttgccacaggagcgatgtgttttctctgagtgcccctcacttacatgtttatctttgtttgtagaggctatgtttaggatattttgcctgcatcagaatgggtgcatcatctttcttaatggcctaactatcgggaaatttgagtgtcagtaactgtggtagactcagaaattcgtctttgtcttgcctctggttcctgggatccagtgatctctactggcccagggcttcagctcttggttaatttaggttcatggggaaccctctgaccacctgaatgggatgtcatagcttctaaatggagcttctgtggaatgaagtgctagactgaaggactaccagaataaaacagggtctacaatggggagaacttgttttatagatgaggaaaccaaggctcagaggggcaaagtcacctgcatggtagcacatagtgatagggtagcgatataaatttatcatataaaccaggacatctcggaataaaaggggctctgttagtcattatgttgggtaatagccgtggcattcctacagaacagagtgaggacaggctcctgattcctcttccttctttagaggagaagcggggagtgggttaactaacagctttattgagatgtcattcacatgccattcagtttacccattgctagtgtccaattgtattcacagaaccaccatcaattcacagaattacagtcaacgttggtacattttcatcacccccagtaaaaccccgtacccttggtctgtcactcctgctttcctaactcctgcagtccaaggcagccatgaatctactttctatgtaagattaacctactctggacatttcatatatctggaatcatgtgatatctcttttgtgactggcttcttccactgaatgttttctagggccgtccaagttgaggatgtatcagtacttcattcttttgtattgctgaataatacttcattgtatagatagaccacatttgtttattgattcatcagttgatggacatttgtgtgtttttactttttggctactctgaatgatgctgctatgaacatatttctacaagattttgtgtggacatatgttttcatttcttttagcaatatacataggagtggaattgctaggtcttacagtaactccgtgttttaactttttgagaaactgccagactgttttctatagcagctgtaccattttacattcccaccagcaatgtatccaggtttcaatttgtctacatcctcatcaacacttgctattatctgtctttttgcttttagcatcctaatgagtatgaaatgctatcttgtggttttgatttgcattcccctgatggcaactgatgctgagtgtcttttcctgtgcttacgggccatgcgtatttctttggagaaaggtctatccaggtcctttgcctatttttaattgagttgtctttttttttttaagttttctgttttcctaaccactagactaccagggatgagccttctttttattattgagttgggtgagctatttgtatattctagacgccagtcttttatcaggtatatgactggtaaaaatgttctccccttctgtggattgttttcagtttcttgttggtgtcctttgagacacaaaactttttaactttgatgatttccaagatacgtattttttttctattgtcacttgtgcttttggtgccatatctagaaaaccattgcctaatccaaggtcaagaagattaatgcctgtgttttcttctaagaactatacttttagttctcacaatggtctttgatccatttcgagtatatttttatatatgatgtgatgtaggggtccagcttcattcttttgcttgtggatctccacttgtcccactgctgattattgagaaaaatatcctttctccacggaattgtcttggcatccttgctaaaggcctctgcttcttactggatcttctttcctgggacatggtgtcgttgggaagcttaccttttttttttttttacttagtctgtgtttggttccaccagttttatgctgcctttctactctgttcttgctgtctccctctttacctgagtcaacggtactgagtcctatctctctctgatgttccccagtcttccttggtgcatgttctagctccacacactagtccttggaggaaggttgagaccaatgatttcctgttatgagtcatgaggaaactgaatcacctagaagtggaataatgtgctcagggtcaccatagcccattagtggaaggaccaggactagacctttagtcttctgaggtccagccccttaggctgtctgtcatcactgtacccaagtgatgtcactaccaaggccaaatgatggtgggctaaattttaattctcaaaagtgtaggaggctaatattgtcttctaagttccaaaagaagatgtaataaaagtctgttacctt

SEQ ID NO: 1094 - protein, 479 aa, Homosapiens; identical to SEQ ID NO: 50

SEQ ID NO: 1095 - DNA, 4722 bp, Homosapiens
gggttcggagcgcgaagccgccgctgggtcctcggcgcgccccgcgtctgcgcttgctgccgcgccccggtcggcgcgctgggagttccagccatgctcttctggcacacgcagcccgagcactacaaccagcacaactccggcagctacctgcgtgatgtgctcgctctgcccatcttcaagcaggaggaaccccagctgtcccccgagaacgaggcccgcctgccacccctgcaatatgtgttgtgtgctgccacgtccccagccgtgaagctgcatgaagagacgctgacctacctcaaccaaggtcagtcttatgaaatccgactactggagaatcggaagctgggagactttcaagatctgaacacaaaatatgtcaagagcatcatccgtgtggtcttccatgaccgccggctgcagtatacggagcaccagcagctggagggctggcggtggagtcggccaggggaccggatcctggacatcgatattccactgtctgttggtatcttggaccccagggccagcccgacccagctgaatgcagtcgagtttttgtgggaccctgcgaagagagcttctgcattcattcaggtacactgcatcagcacagaattcacccccaggaagcacgggggcgagaagggagtgccctttcgagtccagattgacacgtttaagcagaacgagaatggggagtacacggagcacctgcactcagccagctgccagatcaaggtgttcaagccgaagggagccgatcggaaacagaagactgaccgggagaagatggagaaaagaactgcccaagagaaggagaaataccagccgtcctatgaaaccaccatcctcacagagtgctctccatggcccgacgtggcctaccaggtgaacagcgccccgtccccaagctacaatggttctccaaacagctttggcctcggcgaaggcaacgcctctccgacccacccggtggaggccctgcccgtgggcagtgaccacctgctcccatcagcttcgatccaggatgcccagcagtggcttcaccgcaacaggttctcgcagttctgccggctctttgccagcttctcaggtgctgacttgctgaagatgtcccgagatgatttggtccagatctgtggtcccgcagatgggatccggctcttcaacgccatcaaaggccggaatgtgaggccaaagatgaccatttatgtctgtcaggagctggagcagaatcgagtgcccctgcagcagaagcgggacggcagtggagacagcaacctgtctgctgagagcaatgatggctaccacatcatcctgaaatgtggactctgagcagcagtggacctcatacctgtctccagctcccagccctgtggatccccgtggatgtagacattgccccactgtaagctgtggcctcaccaggcaagctgaggccaggagggaccctgcccagtctgtgaaagctacagagcaccaaccagcagaagcctgtggacaccaagtacggtgtacagaaagccagtggctcctttctcccttcctcttggcctccagattttgaatggttccttgttcttttctattggtccaaccctgacgttctaaaagggcaaacagtggagacgtctgctctgaaatccctcatcccttagttggaagctgattgggtatcttggtgctgcctgtattggtcccttctgaccactctcctgcctccagagaaagctctgcttcaccctggaagctggtacctttacctcctcctctgggagttggctgcatggccagcactgccgacttgatgggagcagtttgccctcattctcctgtttcaggtttgcttcccttctcagtgaccctggtgagcatccgcctttcctgttcttggatgaattgatgggagtggggctattctgtgccttctacctctttcttctctacgttgtttctaaggatctgctgctgcggaacccaaagatgtgctcctgtctctgcactggcgcattggcatggtagatgccacaatgtatgtgcacggcctttctcagagacattagttctgaggccctttgtggggaggttagggggatggtaatagaaaaagactattttatttcctggcaatcacgggtaaggaggattaggaatgagtattccattcctaggtgtcatcagatgaccttgaccaccacaataccaggccctcttggatggacttatagaaagttagagaagaccttgttgaaccgctgctaaacttgccacaggagcgatgtgttttctctgagtgcccctcacttacatgtttatctttgtttgtagaggctatgtttaggatattttgcctgcatcagaatgggtgcatcatctttcttaatggcctaactatcgggaaatttgagtgtcagtaactgtggtagactcagaaattcgtctttgtcttgcctctggttcctgggatccagtgatctctactggcccagggcttcagctcttggttaatttaggttcatggggaaccctctgaccacctgaatgggatgtcatagcttctaaatggagcttctgtggaatgaagtgctagactgaaggactaccagaataaaacagggtctacaatggggagaacttgttttatagatgaggaaaccaaggctcagaggggcaaagtcacctgcatggtagcacatagtgatagggtagcgatataaatttatcatataaaccaggacatctcggaataaaaggggctctgttagtcattatgttgggtaatagccgtggcattcctacagaacagagtgaggacaggctcctgattcctcttccttctttagaggagaagcggggagtgggttaactaacagctttattgagatgtcattcacatgccattcagtttacccattgctagtgtccaattgtattcacagaaccaccatcaattcacagaattacagtcaacgttggtacattttcatcacccccagtaaaaccccgtacccttggtctgtcactcctgctttcctaactcctgcagtccaaggcagccatgaatctactttctatgtaagattaacctactctggacatttcatatatctggaatcatgtgatatctcttttgtgactggcttcttccactgaatgttttctagggccgtccaagttgaggatgtatcagtacttcattcttttgtattgctgaataatacttcattgtatagatagaccacatttgtttattgattcatcagttgatggacatttgtgtgtttttactttttggctactctgaatgatgctgctatgaacatatttctacaagattttgtgtggacatatgttttcatttcttttagcaatatacataggagtggaattgctaggtcttacagtaactccgtgttttaactttttgagaaactgccagactgttttctatagcagctgtaccattttacattcccaccagcaatgtatccaggtttcaatttgtctacatcctcatcaacacttgctattatctgtctttttgcttttagcatcctaatgagtatgaaatgctatcttgtggttttgatttgcattcccctgatggcaactgatgctgagtgtcttttcctgtgcttacgggccatgcgtatttctttggagaaaggtctatccaggtcctttgcctatttttaattgagttgtctttttttttttaagttttctgttttcctaaccactagactaccagggatgagccttctttttattattgagttgggtgagctatttgtatattctagacgccagtcttttatcaggtatatgactggtaaaaatgttctccccttctgtggattgttttcagtttcttgttggtgtcctttgagacacaaaactttttaactttgatgatttccaagatacgtattttttttctattgtcacttgtgcttttggtgccatatctagaaaaccattgcctaatccaaggtcaagaagattaatgcctgtgttttcttctaagaactatacttttagttctcacaatggtctttgatccatttcgagtatatttttatatatgatgtgatgtaggggtccagcttcattcttttgcttgtggatctccacttgtcccactgctgattattgagaaaaatatcctttctccacggaattgtcttggcatccttgctaaaggcctctgcttcttactggatcttctttcctgggacatggtgtcgttgggaagcttaccttttttttttttttacttagtctgtgtttggttccaccagttttatgctgcctttctactctgttcttgctgtctccctctttacctgagtcaacggtactgagtcctatctctctctgatgttccccagtcttccttggtgcatgttctagctccacacactagtccttggaggaaggttgagaccaatgatttcctgttatgagtcatgaggaaactgaatcacctagaagtggaataatgtgctcagggtcaccatagcccattagtggaaggaccaggactagacctttagtcttctgaggtccagccccttaggctgtctgtcatcactgtacccaagtgatgtcactaccaaggccaaatgatggtgggctaaattttaattctcaaaagtgtaggaggctaatattgtcttctaagttccaaaagaagatgtaataaaagtctgttacctt

SEQ ID NO: 1096 - protein, 414 aa, Homosapiens
MLFWHTQPEHYNQHNSGSYLRDVLALPIFKQEEPQLSPENEARLPPLQYVLCAATSPAVKLHEETLTYLNQGQSYEIRLLENRKLGDFQDLNTKYVKSIIRVVFHDRRLQYTEHQQLEGWRWSRPGDRILDIDIPLSVGILDPRASPTQLNAVEFLWDPAKRASAFIQVHCISTEFTPRKHGGEKGVPFRVQIDTFKQNENGEYTEHLHSASCQIKVFKPKGADRKQKTDREKMEKRTAQEKEKYQPSYETTILTECSPWPDVAYQVNSAPSPSYNGSPNSFGLGEGNASPTHPVEALPVGSDHLLPSASIQDAQQWLHRNRFSQFCRLFASFSGADLLKMSRDDLVQICGPADGIRLFNAIKGRNVRPKMTIYVCQELEQNRVPLQQKRDGSGDSNLSAESNDGYHIILKCGL

SEQ ID NO: 1097 - DNA, 2067 bp, Homosapiens
ctcccctcaaagttctgcctaagccgttcagttctaacatggtctcagttaatctggtaaatggcatctttaccatcttagttctgacttctcagtttaatgtgggattaagagccaagaaaagcctagagagactggatatcacaattttttttaattttataaactgaagtagttccttgaatgtctgttgatgaaatagtcactgtttaaggaaaaaagtaattatgaggtgtagcagattgcagaaaaacaggattagaaacacacttaaaaagaacacacatttagagtctctcttcctcctcagcgaaccactaggccccctttttaaaaacacctttagagcctaattactccaataaaagtaactagaggtttggagtctggttaaataaattctgagtaaaattcttaagccaaatggaaattcttaatgcaatcatgaggacttctattgtctcttactgttgtattagatcctataaattgaactgatttttccataaggaaaatgcttcttttgagattaattctaataacgtatttgctattgcagtgcagagcccactgcaactgctaggactgaaagcagaggctgggtgccagagcacgtgattcttaacatcatttccacagacccctctgccctgaccctctgcattggatgcaggaagctgggaaagactgatgttgatttggaaacatgggctgaaaatgaaggccccatagtgcataggaacaatgtgtggtacctcactgctgctgtttagggaacttgagggacgcgtttcaaggggttgggtattactgacgagctttggctcaaaatatagcaggaccaggtcttttgttgataagtactgtttgtttattaatatgtcattaatggtatttcttttttacactctacaagtgaattagggagtctcttgttgacccctttgttgcaggaatgtgcgtcgggctaggttatccatgagtttctttattcctaatgcagttagaaagacctttctccttgagctctttgactcccagaaggtaccccagtccccagtgtacttagaaaggatctcgaacattgctggacgtcctcatagtactcacaaagggctagccttgaatgtcactcgcccagtcttcagtctcctgacttagagatacaatcacgtcacaggtctcttggcctcaatctgaaaactgctgccgccgcgccgaggagactcgcatgccgccaccacctcactgggagggcgccgagcccaccgtcgccccctagaccctgacagctgcagctgccttgccttgccgccgcctccctgcagggcccctgttccaatgaaaaacagaacacaaaagagcagagcacctaagcctgtctctgcctccctgtctaccggactggccagggcccaagacccccgctgctccactgcggggctgggcgggctgactccctgcttcctccaagctgctgcctcccctgcagccagggtctgggcagggtgcagccggtcctcggggcacgcagcttccttcaagtacactgtgtgtgcttcccggacctgcggcgatgccacgggcctgccttttctatgcgcctcactagcttaccaccctgtgcaggtaatgcaactgactttgtctcatcagtctttttctttccctgccaccctttatttatcaagcgtaatgttacactttaaaggacagcaaataagaactttgtagaatcccaccaggactttgctaacaataatgtttggaaataaagaagtgctctgaaaaaatatcagccaccaaaatagttatgttggcactgtgttcacacgcatggtccccacacccccaggttgggtgggtttttttgttttttgggtttttttgggggggggggctttttcatgttacatccatatctgtatttatatcttatttgtttcactttcaagtgtatcatggcaaatgtacagatttttttgttaataatgtgctaggatttgctaaaaaagaaaaaaaaaaaacccttttgagtttgccctagaataaatgagacttaattca

SEQ ID NO: 1098 - protein, 59 aa, Homosapiens
MCGTSLLLFRELEGRVSRGWVLLTSFGSKYSRTRSFVDKYCLFINMSLMVFLFYTLQVN

SEQ ID NO: 1099 - DNA, 5201 bp, Homosapiens
taacttgcccttggttgactgttgcttcgtgttttgcttgctttatgctgatatatccatcccatgcttttcttttatattctcaggatggtttttgttctcaggattctccctgtttcagtgcactttccagacatctaaaaggcacttgttgacaaactgcagtgcaccaaaaaggattgtttggcttttttgcttcatttcatgttttgctgtgcccaatgtctataaagacagcagtcaataacacttttctgtgaacaacaaatatttcttgcttttatgaggatttttagatgtccatccaggaatgtgactttttataaaatctgctttgattataaaactccaaacagaagcatgtagaagagtctgatattaatagcaagctcatgggtgagatgatgtgagagttactttctgggcctgttcatagggtggatctgactttgagtctagggttttttgttttgttttgttttaatagggttttatttgttttctggattggatacctgggagtataacctagccttgtgaggtcatttactttgctcctttgaaatttgcttatagtactagctttatttccaactgcccattcctcttaagtttgtacatttgagaccagtaacaaccaaactccttttttccatcttcaaaataagaaagttatttttccactttcattatctcgtgccttcagtcaccagtgtcactctttgagttcctgcattctcgtggttactgttgtttcccactggtttttattgagtgctgatgtaatgtgtttggcagatttaacaaagaagatgtgtaattgtccggtggtggtactctaacaaaagacgtctccttttcattccaaatcacccaataaacaaaactataaatatgtcttattctttaaattgtgggaagtaacttatgcccatatctcagttctatgtatatgcctcgatttaagaaataaaatattttttatctttagcatgctggactatgatacagagaacctgaactctgaagaaatctatagttctctacgtggagttacagaagccattgaaaagtttagttttcgaagccaagaagatctgaatgagccaattaaacgagatggcaaaaaggagtgtgatattgtgtcccgcgatgggggcgctgcctcccctgccactgagggccgggggggtagtgaagtagaaggaggccggacagctctggataacaagacctcactactcaacacccagcctccgcgcgccttcccggggccgcgggcgcgagactacaacccgtacccctactcagatgccatcaacacctacgacaagaccgccctgaaagaggctgtgttcgatgacgacatggagcagcttcgagacgtgcccatcgaccattctgacctggtggctgaccttctgaaagagctgtccaaccacaatgagcgagtggaggaacggaagggagccctgctggagctgctcaagatcacgcgggaagacagccttggtgtctgggaggagcacttcaagaccattctgctcctgctgctggagacccttggagacaaagaccattcaattcgagcactggcgttaagagttttgagggaaattctgagaaatcaaccagcaagatttaaaaactacgccgagctgacgattatgaagactctggaagcccacaaagactcccataaggaggtggtgagagcggctgaggaggctgcgtccacactggccagttccatccacccggagcagtgcatcaaggtgctctgccccatcatccagacggccgactaccccatcaaccttgctgccatcaagatgcagaccaaagtcgtcgagaggatcgcaaaggagtcattgctgcagctccttgtcgacatcatcccaggcttgctgcagggttatgacaacaccgaaagtagtgtgcgtaaggccagcgtgttttgcttagtggcaatttattccgtaatcggagaagacctgaaacctcaccttgcacagctcacagggagcaagatgaagctactaaacttatacataaagagggcccagaccaccaacagcaacagcagctcctcctccgatgtctccacgcacagctaatggcagtacctgtctcttgtgtagacctagaagcaatcggtggtgcctctcagagacctttccccacccccttcatcggctgcccagtcagtacaaggaggcccacaaatatttattacaatcagtattttggtcccttccagcttttctgtagaatcttactggtattgaatgtaaaggaagcaaggcctgtattgcagtcttcatacaaaacaaaaggaataagaacagaaaagagccatactgaaacatgtcttgtacagcctgctgagatggcgaaaccctgtgtgtggggtgcagtttttaaaaatcagagcgctctagccactacttggtagaaagtagcattttttttttcagttaataacatatttgggggtggggtggggtgttactttgtgttcttcctccttagcctattttcttgtgcgtatggtctgtgtggggcccctttcacagctgacaccacgaaaggtgatatatctttaagttgtgttctgagacctactaaaaatgggaatcaagtcttggcaagaacagtctgaagatggccttttaacaaacgctgggaattttgcttgtcatatccagactggaggccgactgccctggctttcagcgtagaattgggagtgcaccctgacagtctccttccagctctccctaatcgactccaccgacaaggtccctaccccagagcttccatgcaaaggaattcttcaagtttaaatctggacacaaaaataagataaatgtatggcatcatttagggatgcctgagatggcagttcatgaagcacagaagataaagaagaagtctttcatctttactgctgagatccttgggaacactgttgtcatgggggctctgccaagaccctcatctctgggctacacggtgattcagattgagcaccaacttgtttcctcccctcaaagttctgcctaagccgttcagttctaacatggtctcagttaatctggtaaatggcatctttaccatcttagttctgacttctcagtttaatgtgggattaagagccaagaaaagcctagagagactggatatcacaattttttttaattttataaactgaagtagttccttgaatgtctgttgatgaaatagtcactgtttaaggaaaaaagtaattatgaggtgtagcagattgcagaaaaacaggattagaaacacacttaaaaagaacacacatttagagtctctcttcctcctcagcgaaccactaggccccctttttaaaaacacctttagagcctaattactccaataaaagtaactagaggtttggagtctggttaaataaattctgagtaaaattcttaagccaaatggaaattcttaatgcaatcatgaggacttctattgtctcttactgttgtattagatcctataaattgaactgatttttccataaggaaaatgcttcttttgagattaattctaataacgtatttgctattgcagtgcagagcccactgcaactgctaggactgaaagcagaggctgggtgccagagcacgtgattcttaacatcatttccacagacccctctgccctgaccctctgcattggatgcaggaagctgggaaagactgatgttgatttggaaacatgggctgaaaatgaaggccccatagtgcataggaacagtaaagccagggtgctgacgtgtgtgtgtgtgtgtgtgtgtgtgtgtgtgtgtgtgtggtgttgtgtgtgtttgtgcgtgcaccctacacatgtgtggtacctcactgctgctgtttagggaacttgagggacgcgtttcaaggggttgggtattactgacgagctttggctcaaaatatagcaggaccaggtcttttgttgataagtactgtttgtttattaatatgtcattaatggtatttcttttttacactctacaagtgaattagggagtctcttgttgacccctttgttgcaggaatgtgcgtcgggctaggttatccatgagtttctttattcctaatgcagttagaaagacctttctccttgagctctttgactcccagaaggtaccccagtccccagtgtacttagaaaggatctcgaacattgctggacgtcctcatagtactcacaaagggctagccttgaatgtcactcgcccagtcttcagtctcctgacttagagatacaatcacgtcacaggtctcttggcctcaatctgaaaactgctgccgccgcgccgaggagactcgcatgccgccaccacctcactgggagggcgccgagcccaccgtcgccccctagaccctgacagctgcagctgccttgccttgccgccgcctccctgcagggcccctgttccaatgaaaaacagaacacaaaagagcagagcacctaagcctgtctctgcctccctgtctaccggactggccagggcccaagacccccgctgctccactgcggggctgggcgggctgactccctgcttcctccaagctgctgcctcccctgcagccagggtctgggcagggtgcagccggtcctcggggcacgcagcttccttcaagtacactgtgtgtgcttcccggacctgcggcgatgccacgggcctgccttttctatgcgcctcactagcttaccaccctgtgcaggtaatgcaactgactttgtctcatcagtctttttctttccctgccaccctttatttatcaagcgtaatgttacactttaaaggacagcaaataagaactttgtagaatcccaccaggactttgctaacaataatgtttggaaataaagaagtgctctgaaaaaatatcagccaccaaaatagttatgttggcactgtgttcacacgcatggtccccacacccccaggttgggtgggtttttttgttttttgggtttttttgggggggggggctttttcatgttacatccatatctgtatttatatcttatttgtttcactttcaagtgtatcatggcaaatgtacagatttttttgttaataatgtgctaggatttgctaaaaaagaaaaaaaaaaaacccttttgagtttgccctagaataaatgagacttaattca

SEQ ID NO: 1100 - protein, 374 aa, Homosapiens [sequence omitted]

SEQ ID NO: 1101 - DNA, 5741 bp, Homosapiens
cagtcgcgctaaagtggtttcacagtcccagcgatccagatctgctaatcctgctggtgctggcagccggtcaagttccccaggaaaattgttgggaagtggttatggtggacttactgggggctcctcacgaggcccacctgtgacaccgtcttcagaaaagcgaagcaagattcccaggagccagggatgtagccgggaaacaagtccaaaccgaataggattagcacggagcagccgtatccctcgacccagcatgagtcaggggtgcagccgcgataccagccgtgagagcagccgagatacaagccctgctcggggctttcctccacttgatcggtttgggcttggccagccaggaagaatacctggttctgtgaatgccatgagagttctgagcacaagtacagatcttgaagctgctgttgctgatgctttgctgttaggagactccaggagcaagaagaagcctgtgaggaggagatatgagccgtatgggatgtattctgacgatgatgccaacagtgatgcctcaagtgtttgctctgagcgctcatatggctccaggaatggtggcattccccattatctgcggcagactgaggatgtagcagaagttctcaaccactgtgctagttcaaactggtcagaaaggaaagaagggcttctgggcctgcagaacttactgaagagccaaagaacactgagtcgagttgaactgaaaaggttgtgtgagatcttcactcggatgtttgctgaccctcatagcaaggtaagttttcagtatgtttttggagactcttgtggattttataataattcataaggatgatttacaagactggctttttgttcttctcacacaattacttaagaaaatgggagcagatttacttggatctgtgcaagcaaaagttcaaaaggctctagatgtcacaagggactcctttccatttgatcaacaatttaacattttgatgagatttattgtggatcaaactcaaactccaaacctcaaggtcaaagttgcaatcctgaaatacattgagtctctggccagacagatggatccaacagattttgtaaactctagtgagacaaggcttgctgtttctagaatcataacctggacaacagaaccaaagagttcagacgtgagaaaggcagcacagattgtgctaatctctctgtttgaattgaatactcctgaatttaccatgttacttggtgccttgccaaaaacattccaggatggtgccaccaaactcctgcacaaccacctcaagaattccagtaacaccagtgtgggctctccaagcaatacgattggccggacgccctcccgacacaccagcagcaggaccagccccctgacctcacccaccaactgttcccatgggggtctgtctccaagtcggttatggggttggagtgccgacgggttagcgaagcacccacctcccttttctcagcctaactccatccccaccgctccctcccacaaggctctcaggcgctcttactctcccagcatgctggactatgatacagagaacctgaactctgaagaaatctatagttctctacgtggagttacagaagccattgaaaagtttagttttcgaagccaagaagatctgaatgagccaattaaacgagatggcaaaaaggagtgtgatattgtgtcccgcgatgggggcgctgcctcccctgccactgagggccgggggggtagtgaagtagaaggaggccggacagctctggataacaagacctcactactcaacacccagcctccgcgcgccttcccggggccgcgggcgcgagactacaacccgtacccctactcagatgccatcaacacctacgacaagaccgccctgaaagaggctgtgttcgatgacgacatggagcagcttcgagacgtgcccatcgaccattctgacctggtggctgaccttctgaaagagctgtccaaccacaatgagcgagtggaggaacggaagggagccctgctggagctgctcaagatcacgcgggaagacagccttggtgtctgggaggagcacttcaagaccattctgctcctgctgctggagacccttggagacaaagaccattcaattcgagcactggcgttaagagttttgagggaaattctgagaaatcaaccagcaagatttaaaaactacgccgagctgacgattatgaagactctggaagcccacaaagactcccataaggaggtggtgagagcggctgaggaggctgcgtccacactggccagttccatccacccggagcagtgcatcaaggtgctctgccccatcatccagacggccgactaccccatcaaccttgctgccatcaagatgcagaccaaagtcgtcgagaggatcgcaaaggagtcattgctgcagctccttgtcgacatcatcccaggcttgctgcagggttatgacaacaccgaaagtagtgtgcgtaaggccagcgtgttttgcttagtggcaatttattccgtaatcggagaagacctgaaacctcaccttgcacagctcacagggagcaagatgaagctactaaacttatacataaagagggcccagaccaccaacagcaacagcagctcctcctccgatgtctccacgcacagctaatggcagtacctgtctcttgtgtagacctagaagcaatcggtggtgcctctcagagacctttccccacccccttcatcggctgcccagtcagtacaaggaggcccacaaatatttattacaatcagtattttggtcccttccagcttttctgtagaatcttactggtattgaatgtaaaggaagcaaggcctgtattgcagtcttcatacaaaacaaaaggaataagaacagaaaagagccatactgaaacatgtcttgtacagcctgctgagatggcgaaaccctgtgtgtggggtgcagtttttaaaaatcagagcgctctagccactacttggtagaaagtagcattttttttttcagttaataacatatttgggggtggggtggggtgttactttgtgttcttcctccttagcctattttcttgtgcgtatggtctgtgtggggcccctttcacagctgacaccacgaaaggtgatatatctttaagttgtgttctgagacctactaaaaatgggaatcaagtcttggcaagaacagtctgaagatggccttttaacaaacgctgggaattttgcttgtcatatccagactggaggccgactgccctggctttcagcgtagaattgggagtgcaccctgacagtctccttccagctctccctaatcgactccaccgacaaggtccctaccccagagcttccatgcaaaggaattcttcaagtttaaatctggacacaaaaataagataaatgtatggcatcatttagggatgcctgagatggcagttcatgaagcacagaagataaagaagaagtctttcatctttactgctgagatccttgggaacactgttgtcatgggggctctgccaagaccctcatctctgggctacacggtgattcagattgagcaccaacttgtttcctcccctcaaagttctgcctaagccgttcagttctaacatggtctcagttaatctggtaaatggcatctttaccatcttagttctgacttctcagtttaatgtgggattaagagccaagaaaagcctagagagactggatatcacaattttttttaattttataaactgaagtagttccttgaatgtctgttgatgaaatagtcactgtttaaggaaaaaagtaattatgaggtgtagcagattgcagaaaaacaggattagaaacacacttaaaaagaacacacatttagagtctctcttcctcctcagcgaaccactaggccccctttttaaaaacacctttagagcctaattactccaataaaagtaactagaggtttggagtctggttaaataaattctgagtaaaattcttaagccaaatggaaattcttaatgcaatcatgaggacttctattgtctcttactgttgtattagatcctataaattgaactgatttttccataaggaaaatgcttcttttgagattaattctaataacgtatttgctattgcagtgcagagcccactgcaactgctaggactgaaagcagaggctgggtgccagagcacgtgattcttaacatcatttccacagacccctctgccctgaccctctgcattggatgcaggaagctgggaaagactgatgttgatttggaaacatgggctgaaaatgaaggccccatagtgcataggaacagtaaagccagggtgctgacgtgtgtgtgtgtgtgtgtgtgtgtgtgtgtgtgtgtgtggtgttgtgtgtgtttgtgcgtgcaccctacacatgtgtggtacctcactgctgctgtttagggaacttgagggacgcgtttcaaggggttgggtattactgacgagctttggctcaaaatatagcaggaccaggtcttttgttgataagtactgtttgtttattaatatgtcattaatggtatttcttttttacactctacaagtgaattagggagtctcttgttgacccctttgttgcaggaatgtgcgtcgggctaggttatccatgagtttctttattcctaatgcagttagaaagacctttctccttgagctctttgactcccagaaggtaccccagtccccagtgtacttagaaaggatctcgaacattgctggacgtcctcatagtactcacaaagggctagccttgaatgtcactcgcccagtcttcagtctcctgacttagagatacaatcacgtcacaggtctcttggcctcaatctgaaaactgctgccgccgcgccgaggagactcgcatgccgccaccacctcactgggagggcgccgagcccaccgtcgccccctagaccctgacagctgcagctgccttgccttgccgccgcctccctgcagggcccctgttccaatgaaaaacagaacacaaaagagcagagcacctaagcctgtctctgcctccctgtctaccggactggccagggcccaagacccccgctgctccactgcggggctgggcgggctgactccctgcttcctccaagctgctgcctcccctgcagccagggtctgggcagggtgcagccggtcctcggggcacgcagcttccttcaagtacactgtgtgtgcttcccggacctgcggcgatgccacgggcctgccttttctatgcgcctcactagcttaccaccctgtgcaggtaatgcaactgactttgtctcatcagtctttttctttccctgccaccctttatttatcaagcgtaatgttacactttaaaggacagcaaataagaactttgtagaatcccaccaggactttgctaacaataatgtttggaaataaagaagtgctctgaaaaaatatcagccaccaaaatagttatgttggcactgtgttcacacgcatggtccccacacccccaggttgggtgggtttttttgttttttgggtttttttgggggggggggctttttcatgttacatccatatctgtatttatatcttatttgtttcactttcaagtgtatcatggcaaatgtacagatttttttgttaataatgtgctaggatttgctaaaaaagaaaaaaaaaaaacccttttgagtttgccctagaataaatgagacttaattca

SEQ ID NO: 1102 - protein, 623 aa, Homosapiens
MFLETLVDFIIIHKDDLQDWLFVLLTQLLKKMGADLLGSVQAKVQKALDVTRDSFPFDQQFNILMRFIVDQTQTPNLKVKVAILKYIESLARQMDPTDFVNSSETRLAVSRIITWTTEPKSSDVRKAAQIVLISLFELNTPEFTMLLGALPKTFQDGATKLLHNHLKNSSNTSVGSPSNTIGRTPSRHTSSRTSPLTSPTNCSHGGLSPSRLWGWSADGLAKHPPPFSQPNSIPTAPSHKALRRSYSPSMLDYDTENLNSEEIYSSLRGVTEAIEKFSFRSQEDLNEPIKRDGKKECDIVSRDGGAASPATEGRGGSEVEGGRTALDNKTSLLNTQPPRAFPGPRARDYNPYPYSDAINTYDKTALKEAVFDDDMEQLRDVPIDHSDLVADLLKELSNHNERVEERKGALLELLKITREDSLGVWEEHFKTILLLLLETLGDKDHSIRALALRVLREILRNQPARFKNYAELTIMKTLEAHKDSHKEVVRAAEEAASTLASSIHPEQCIKVLCPIIQTADYPINLAAIKMQTKVVERIAKESLLQLLVDIIPGLLQGYDNTESSVRKASVFCLVAIYSVIGEDLKPHLAQLTGSKMKLLNLYIKRAQTTNSNSSSSSDVSTHS

SEQ ID NO: 1103 - DNA, 8192 bp, Homosapiens
gctctctatggtgtacccgggttggtggcggtaagaagaaaaagggtgaccgcactgcgcaggcgccctcggcgtctctctcgctctctcggtcttttttttttttttctttttttttttttttaatccccgcaccaagcgcttaacctcattggggtggaggagaaggcggcggctctctggtccgcagcggcaacagtaacgaaaaacagggctaatggactgctgaattatgaagtatttcagacccagtagtagaacatcactctgccactcactcctttatctcctactagttatttaaattggacttttaatatcctaccagctgctcttcagacacacatggtgcattgttgccattccccagattgcatctttgaaacacaggctcttagtaaccttcagcgaacaaagaggcaacctcccagatacgtctgctgggagggagtcatcgtgactgccctctagcttttgctggatctggatttgaattccactatggagcctcgcatggagtcctgcctggcgcaggtgttgcagaaggatgtggggaaacgattgcaggttggccaagaactgatagactatttctcagacaaacagaagtctgctgaccttgagcatgaccagaccatgttagataaacttgtggatggacttgctacctcttgggtgaactctagcaattacaaggtggttctgctgggcatggacatcctgtccgccctggtgacccggctgcaggatcggttcaaggcgcagatcggcacagtgctgccaagtctaatagacagactaggagatgctaaagactctgtgagggagcaggaccaaactctgctgctaaagatcatggatcaagctgctaatccccagtacgtatgggacagaatgcttggaggcttcaaacacaagaatttccgtactcgagaaggcatctgtctctgccttatagcaacactcaatgcctctggagcacagactttaacactaagcaagattgtgccacatatatgcaacttacttggagatccaaacagccaggttcgagatgcagcaataaacagcttagtggaaatttacagacatgtaggagaacgtgtgagggcagatctcagtaaaaaaggattgccacagtcccggttgaatgtaatttttacaaaatttgatgaagtccagaaatctggaaacatgatacaatctgcaaatgataaaaatttcgacgatgaagattctgtggatggtaacagaccttcctctgctagttctacatcatccaaggctccaccaagttctcggagaaacgttggaatgggaaccacccgccggcttggttcatccacccttggatccaagtcttcagctgcaaaagaaggagctggtgctgttgatgaagaggattttattaaagcatttgatgatgtacctgtagtacagatttattccagccgagaccttgaggaatccataaacaaaattagggaaatattatctgatgacaagcatgattgggagcagagagtaaatgctctaaaaaagattagatctttacttttggctggtgctgctgagtatgataacttctttcaacatttgcgtcttttggatggagcctttaaactctctgctaaggacctgcggtctcaggtagtgcgggaggcttgtatcacgttggggcatctgtcatcagttctggggaataagtttgaccatggagctgaagccattatgccaactatctttaatttaattccaaacagtgccaaaattatggccacatctggtgttgtagctgttaggttaattattcggcacacacacatccctaggttaatacctgtcataacaagcaactgtacctctaagtctgtcgcagttagaaggcgctgttttgaatttttagatttgcttttacaagaatggcagacacattcactagaacgacacatatcagtattagctgaaacaataaagaagggaatacatgatgctgattccgaagcaagaatagaagccagaaaatgttactggggtttccacagtcacttcagcagagaagcagagcacttgtaccacaccttggagtcctcctaccagaaagccctgcagtcccacctgaagaactcagacagcatagtgtctctgcctcagtcagaccgctcatcttccagctctcaagagagtctaaatcgtccgctgtctgccaaaagaagtcctactggaagtaccacatctagagcttctacagttagtaccaaatctgtgtcaacgactgggtccctccagcgatctcgaagtgatattgatgtgaacgcagcagccagtgccaaatccaaagtctcctcatcttcgggcacgacgcctttcagctctgcagcagctttgcctccagggtcatacgcatccttaggtcggatccgcacaagacggcaaagctctgggagtgccaccaacgtcgcctctacacctgataaccggggccgcagtcgcgctaaagtggtttcacagtcccagcgatccagatctgctaatcctgctggtgctggcagccggtcaagttccccaggaaaattgttgggaagtggttatggtggacttactgggggctcctcacgaggcccacctgtgacaccgtcttcagaaaagcgaagcaagattcccaggagccagggatgtagccgggaaacaagtccaaaccgaataggattagcacggagcagccgtatccctcgacccagcatgagtcaggggtgcagccgcgataccagccgtgagagcagccgagatacaagccctgctcggggctttcctccacttgatcggtttgggcttggccagccaggaagaatacctggttctgtgaatgccatgagagttctgagcacaagtacagatcttgaagctgctgttgctgatgctttgaagaagcctgtgaggaggagatatgagccgtatgggatgtattctgacgatgatgccaacagtgatgcctcaagtgtttgctctgagcgctcatatggctccaggaatggtggcattccccattatctgcggcagactgaggatgtagcagaagttctcaaccactgtgctagttcaaactggtcagaaaggaaagaagggcttctgggcctgcagaacttactgaagagccaaagaacactgagtcgagttgaactgaaaaggttgtgtgagatcttcactcggatgtttgctgaccctcatagcaaggtaagttttcagtatgtttttggagactcttgtggattttataataattcataaggatgatttacaagactggctttttgttcttctcacacaattacttaagaaaatgggagcagatttacttggatctgtgcaagcaaaagttcaaaaggctctagatgtcacaagggactcctttccatttgatcaacaatttaacattttgatgagatttattgtggatcaaactcaaactccaaacctcaaggtcaaagttgcaatcctgaaatacattgagtctctggccagacagatggatccaacagattttgtaaactctagtgagacaaggcttgctgtttctagaatcataacctggacaacagaaccaaagagttcagacgtgagaaaggcagcacagattgtgctaatctctctgtttgaattgaatactcctgaatttaccatgttacttggtgccttgccaaaaacattccaggatggtgccaccaaactcctgcacaaccacctcaagaattccagtaacaccagtgtgggctctccaagcaatacgattggccggacgccctcccgacacaccagcagcaggaccagccccctgacctcacccaccaactgttcccatgggggtctgtctccaagtcggttatggggttggagtgccgacgggttagcgaagcacccacctcccttttctcagcctaactccatccccaccgctccctcccacaaggctctcaggcgctcttactctcccagcatgctggactatgatacagagaacctgaactctgaagaaatctatagttctctacgtggagttacagaagccattgaaaagtttagttttcgaagccaagaagatctgaatgagccaattaaacgagatggcaaaaaggagtgtgatattgtgtcccgcgatgggggcgctgcctcccctgccactgagggccgggggggtagtgaagtagaaggaggccggacagctctggataacaagacctcactactcaacacccagcctccgcgcgccttcccggggccgcgggcgcgagactacaacccgtacccctactcagatgccatcaacacctacgacaagaccgccctgaaagaggctgtgttcgatgacgacatggagcagcttcgagacgtgcccatcgaccattctgacctggtggctgaccttctgaaagagctgtccaaccacaatgagcgagtggaggaacggaagggagccctgctggagctgctcaagatcacgcgggaagacagccttggtgtctgggaggagcacttcaagaccattctgctcctgctgctggagacccttggagacaaagaccattcaattcgagcactggcgttaagagttttgagggaaattctgagaaatcaaccagcaagatttaaaaactacgccgagctgacgattatgaagactctggaagcccacaaagactcccataaggaggtggtgagagcggctgaggaggctgcgtccacactggccagttccatccacccggagcagtgcatcaaggtgctctgccccatcatccagacggccgactaccccatcaaccttgctgccatcaagatgcagaccaaagtcgtcgagaggatcgcaaaggagtcattgctgcagctccttgtcgacatcatcccaggcttgctgcagggttatgacaacaccgaaagtagtgtgcgtaaggccagcgtgttttgcttagtggcaatttattccgtaatcggagaagacctgaaacctcaccttgcacagctcacagggagcaagatgaagctactaaacttatacataaagagggcccagaccaccaacagcaacagcagctcctcctccgatgtctccacgcacagctaatggcagtacctgtctcttgtgtagacctagaagcaatcggtggtgcctctcagagacctttccccacccccttcatcggctgcccagtcagtacaaggaggcccacaaatatttattacaatcagtattttggtcccttccagcttttctgtagaatcttactggtattgaatgtaaaggaagcaaggcctgtattgcagtcttcatacaaaacaaaaggaataagaacagaaaagagccatactgaaacatgtcttgtacagcctgctgagatggcgaaaccctgtgtgtggggtgcagtttttaaaaatcagagcgctctagccactacttggtagaaagtagcattttttttttcagttaataacatatttgggggtggggtggggtgttactttgtgttcttcctccttagcctattttcttgtgcgtatggtctgtgtggggcccctttcacagctgacaccacgaaaggtgatatatctttaagttgtgttctgagacctactaaaaatgggaatcaagtcttggcaagaacagtctgaagatggccttttaacaaacgctgggaattttgcttgtcatatccagactggaggccgactgccctggctttcagcgtagaattgggagtgcaccctgacagtctccttccagctctccctaatcgactccaccgacaaggtccctaccccagagcttccatgcaaaggaattcttcaagtttaaatctggacacaaaaataagataaatgtatggcatcatttagggatgcctgagatggcagttcatgaagcacagaagataaagaagaagtctttcatctttactgctgagatccttgggaacactgttgtcatgggggctctgccaagaccctcatctctgggctacacggtgattcagattgagcaccaacttgtttcctcccctcaaagttctgcctaagccgttcagttctaacatggtctcagttaatctggtaaatggcatctttaccatcttagttctgacttctcagtttaatgtgggattaagagccaagaaaagcctagagagactggatatcacaattttttttaattttataaactgaagtagttccttgaatgtctgttgatgaaatagtcactgtttaaggaaaaaagtaattatgaggtgtagcagattgcagaaaaacaggattagaaacacacttaaaaagaacacacatttagagtctctcttcctcctcagcgaaccactaggccccctttttaaaaacacctttagagcctaattactccaataaaagtaactagaggtttggagtctggttaaataaattctgagtaaaattcttaagccaaatggaaattcttaatgcaatcatgaggacttctattgtctcttactgttgtattagatcctataaattgaactgatttttccataaggaaaatgcttcttttgagattaattctaataacgtatttgctattgcagtgcagagcccactgcaactgctaggactgaaagcagaggctgggtgccagagcacgtgattcttaacatcatttccacagacccctctgccctgaccctctgcattggatgcaggaagctgggaaagactgatgttgatttggaaacatgggctgaaaatgaaggccccatagtgcataggaacagtaaagccagggtgctgacgtgtgtgtgtgtgtgtgtgtgtgtgtgtgtgtgtgtgtggtgttgtgtgtgtttgtgcgtgcaccctacacatgtgtggtacctcactgctgctgtttagggaacttgagggacgcgtttcaaggggttgggtattactgacgagctttggctcaaaatatagcaggaccaggtcttttgttgataagtactgtttgtttattaatatgtcattaatggtatttcttttttacactctacaagtgaattagggagtctcttgttgacccctttgttgcaggaatgtgcgtcgggctaggttatccatgagtttctttattcctaatgcagttagaaagacctttctccttgagctctttgactcccagaaggtaccccagtccccagtgtacttagaaaggatctcgaacattgctggacgtcctcatagtactcacaaagggctagccttgaatgtcactcgcccagtcttcagtctcctgacttagagatacaatcacgtcacaggtctcttggcctcaatctgaaaactgctgccgccgcgccgaggagactcgcatgccgccaccacctcactgggagggcgccgagcccaccgtcgccccctagaccctgacagctgcagctgccttgccttgccgccgcctccctgcagggcccctgttccaatgaaaaacagaacacaaaagagcagagcacctaagcctgtctctgcctccctgtctaccggactggccagggcccaagacccccgctgctccactgcggggctgggcgggctgactccctgcttcctccaagctgctgcctcccctgcagccagggtctgggcagggtgcagccggtcctcggggcacgcagcttccttcaagtacactgtgtgtgcttcccggacctgcggcgatgccacgggcctgccttttctatgcgcctcactagcttaccaccctgtgcaggtaatgcaactgactttgtctcatcagtctttttctttccctgccaccctttatttatcaagcgtaatgttacactttaaaggacagcaaataagaactttgtagaatcccaccaggactttgctaacaataatgtttggaaataaagaagtgctctgaaaaaatatcagccaccaaaatagttatgttggcactgtgttcacacgcatggtccccacacccccaggttgggtgggtttttttgttttttgggtttttttgggggggggggctttttcatgttacatccatatctgtatttatatcttatttgtttcactttcaagtgtatcatggcaaatgtacagatttttttgttaataatgtgctaggatttgctaaaaaagaaaaaaaaaaaacccttttgagtttgccctagaataaatga

SEQ ID NO: 1104 - protein, 928 aa, Homosapiens [sequence omitted]

SEQ ID NO: 1105 - DNA, 5045 bp, Homosapiens
gctctctatggtgtacccgggttggtggcggtaagaagaaaaagggtgaccgcactgcgcaggcgccctcggcgtctctctcgctctctcggtcttttttttttttttctttttttttttttttaatccccgcaccaagcgcttaacctcattggggtggaggagaaggcggcggctctctggtccgcagcggcaacagtaacgaaaaacagggctaatggactgctgaattatgaagtatttcagacccagtagtagaacatcactctgccactcactcctttatctcctactagttatttaaattggacttttaatatcctaccagctgctcttcagacacacatggtgcattgttgccattccccagattgcatctttgaaacacaggctcttagtaaccttcagcgaacaaagaggcaacctcccagatacgtctgctgggagggagtcatcgtgactgccctctagcttttgctggatctggatttgaattccactatggagcctcgcatggagtcctgcctggcgcaggtgttgcagaaggatgtggggaaacgattgcaggttggccaagaactgatagactatttctcagacaaacagaagtctgctgaccttgagcatgaccagaccatgttagataaacttgtggatggacttgctacctcttgggtgaactctagcaattacaaggtggttctgctgggcatggacatcctgtccgccctggtgacccggctgcaggatcggttcaaggcgcagatcggcacagtgctgccaagtctaatagacagactaggagatgctaaagactctgtgagggagcaggaccaaactctgctgctaaagatcatggatcaagctgctaatccccagtacgtatgggacagaatgcttggaggcttcaaacacaagaatttccgtactcgagaaggcatctgtctctgccttatagcaacactcaatgcctctggagcacagactttaacactaagcaagattgtgccacatatatgcaacttacttggagatccaaacagccaggttcgagatgcagcaataaacagcttagtggaaatttacagacatgtaggagaacgtgtgagggcagatctcagtaaaaaaggattgccacagtcccggttgaatgtaatttttacaaaatttgatgaagtccagaaatctggaaacatgatacaatctgcaaatgataaaaatttcgacgatgaagattctgtggatggtaacagaccttcctctgctagttctacatcatccaaggctccaccaagttctcggagaaacgttggaatgggaaccacccgccggcttggttcatccacccttggatccaagtcttcagctgcaaaagaaggagctggtgctgttgatgaagaggattttattaaagcatttgatgatgtacctgtagtacagatttattccagccgagaccttgaggaatccataaacaaaattagggaaatattatctgatgacaagcatgattgggagcagagagtaaatgctctaaaaaagattagatctttacttttggctggtgctgctgagtatgataacttctttcaacatttgcgtcttttggatggagcctttaaactctctgctaaggacctgcggtctcaggtagtgcgggaggcttgtatcacgttggggcatctgtcatcagttctggggaataagtttgaccatggagctgaagccattatgccaactatctttaatttaattccaaacagtgccaaaattatggccacatctggtgttgtagctgttaggttaattattcggcacacacacatccctaggttaatacctgtcataacaagcaactgtacctctaagtctgtcgcagttagaaggcgctgttttgaatttttagatttgcttttacaagaatggcagacacattcactagaacgacacatatcagtattagctgaaacaataaagaagggaatacatgatgctgattccgaagcaagaatagaagccagaaaatgttactggggtttccacagtcacttcagcagagaagcagagcacttgtaccacaccttggagtcctcctaccagaaagccctgcagtcccacctgaagaactcagacagcatagtgtctctgcctcagtcagaccgctcatcttccagctctcaagagagtctaaatcgtccgctgtctgccaaaagaagtcctactggaagtaccacatctagagcttctacagttagtaccaaatctgtgtcaacgactgggtccctccagcgatctcgaagtgatattgatgtgaacgcagcagccagtgccaaatccaaagtctcctcatcttcgggcacgacgcctttcagctctgcagcagctttgcctccagggtcatacgcatccttagagtccagacacatgagggaagacatggagtacataggcctggactcaggtcggatccgcacaagacggcaaagctctgggagtgccaccaacgtcgcctctacacctgataaccggggccgcagtcgcgctaaagtggtttcacagtcccagcctggcagccggtcaagttccccaggaaaattgttgggaagtggttatggtggacttactgggggctcctcacgaggcccacctgtgacaccgtcttcagaaaagcgaagcaagattcccaggagccagggatgtagccgggaaacaagtccaaaccgaataggattagatcggtttgggcttggccagccaggaagaatacctggttctgtgaatgccatgagagttctgagcacaagtacagatcttgaagctgctgttgctgatgctttgaagaagcctgtgaggaggagatatgagccgtatgggatgtattctgacgatgatgccaacagtgatgcctcaagtgtttgctctgagcgctcatatggctccaggaatggtggcattccccattatctgcggcagactgaggatgtagcagaagttctcaaccactgtgctagttcaaactggtcagaaaggaaagaagggcttctgggcctgcagaacttactgaagagccaaagaacactgagtcgagttgaactgaaaaggttgtgtgagatcttcactcggatgtttgctgaccctcatagcaaggtaagttttcagtatgtttttggagactcttgtggattttataataattcataaggatgatttacaagactggctttttgttcttctcacacaattactccaataaaagtaactagaggtttggagtctggttaaataaattctgagtaaaattcttaagccaaatggaaattcttaatgcaatcatgaggacttctattgtctcttactgttgtattagatcctataaattgaactgatttttccataaggaaaatgcttcttttgagattaattctaataacgtatttgctattgcagtgcagagcccactgcaactgctaggactgaaagcagaggctgggtgccagagcacgtgattcttaacatcatttccacagacccctctgccctgaccctctgcattggatgcaggaagctgggaaagactgatgttgatttggaaacatgggctgaaaatgaaggccccatagtgcataggaacagtaaagccagggtgctgacgtgtgtgtgtgtgtgtgtgtgtgtgtgtgtgtgtgtgtggtgttgtgtgtgtttgtgcgtgcaccctacacatgtgtggtacctcactgctgctgtttagggaacttgagggacgcgtttcaaggggttgggtattactgacgagctttggctcaaaatatagcaggaccaggtcttttgttgataagtactgtttgtttattaatatgtcattaatggtatttcttttttacactctacaagtgaattagggagtctcttgttgacccctttgttgcaggaatgtgcgtcgggctaggttatccatgagtttctttattcctaatgcagttagaaagacctttctccttgagctctttgactcccagaaggtaccccagtccccagtgtacttagaaaggatctcgaacattgctggacgtcctcatagtactcacaaagggctagccttgaatgtcactcgcccagtcttcagtctcctgacttagagatacaatcacgtcacaggtctcttggcctcaatctgaaaactgctgccgccgcgccgaggagactcgcatgccgccaccacctcactgggagggcgccgagcccaccgtcgccccctagaccctgacagctgcagctgccttgccttgccgccgcctccctgcagggcccctgttccaatgaaaaacagaacacaaaagagcagagcacctaagcctgtctctgcctccctgtctaccggactggccagggcccaagacccccgctgctccactgcggggctgggcgggctgactccctgcttcctccaagctgctgcctcccctgcagccagggtctgggcagggtgcagccggtcctcggggcacgcagcttccttcaagtacactgtgtgtgcttcccggacctgcggcgatgccacgggcctgccttttctatgcgcctcactagcttaccaccctgtgcaggtaatgcaactgactttgtctcatcagtctttttctttccctgccaccctttatttatcaagcgtaatgttacactttaaaggacagcaaataagaactttgtagaatcccaccaggactttgctaacaataatgtttggaaataaagaagtgctctgaaaaaatatcagccaccaaaatagttatgttggcactgtgttcacacgcatggtccccacacccccaggttgggtgggtttttttgttttttgggtttttttgggggggggggctttttcatgttacatccatatctgtatttatatcttatttgtttcactttcaagtgtatcatggcaaatgtacagatttttttgttaataatgtgctaggatttgctaaaaaagaaaaaaaaaaaacccttttgagtttgccctagaataaatgagacttaattca

SEQ ID NO: 1106 - protein, 899 aa, Homosapiens
MEPRMESCLAQVLQKDVGKRLQVGQELIDYFSDKQKSADLEHDQTMLDKLVDGLATSWVNSSNYKVVLLGMDILSALVTRLQDRFKAQIGTVLPSLIDRLGDAKDSVREQDQTLLLKIMDQAANPQYVWDRMLGGFKHKNFRTREGICLCLIATLNASGAQTLTLSKIVPHICNLLGDPNSQVRDAAINSLVEIYRHVGERVRADLSKKGLPQSRLNVIFTKFDEVQKSGNMIQSANDKNFDDEDSVDGNRPSSASSTSSKAPPSSRRNVGMGTTRRLGSSTLGSKSSAAKEGAGAVDEEDFIKAFDDVPVVQIYSSRDLEESINKIREILSDDKHDWEQRVNALKKIRSLLLAGAAEYDNFFQHLRLLDGAFKLSAKDLRSQVVREACITLGHLSSVLGNKFDHGAEAIMPTIFNLIPNSAKIMATSGVVAVRLIIRHTHIPRLIPVITSNCTSKSVAVRRRCFEFLDLLLQEWQTHSLERHISVLAETIKKGIHDADSEARIEARKCYWGFHSHFSREAEHLYHTLESSYQKALQSHLKNSDSIVSLPQSDRSSSSSQESLNRPLSAKRSPTGSTTSRASTVSTKSVSTTGSLQRSRSDIDVNAAASAKSKVSSSSGTTPFSSAAALPPGSYASLESRHMREDMEYIGLDSGRIRTRRQSSGSATNVASTPDNRGRSRAKVVSQSQPGSRSSSPGKLLGSGYGGLTGGSSRGPPVTPSSEKRSKIPRSQGCSRETSPNRIGLDRFGLGQPGRIPGSVNAMRVLSTSTDLEAAVADALKKPVRRRYEPYGMYSDDDANSDASSVCSERSYGSRNGGIPHYLRQTEDVAEVLNHCASSNWSERKEGLLGLQNLLKSQRTLSRVELKRLCEIFTRMFADPHSKVSFQYVFGDSCGFYNNS

SEQ ID NO: 1107 - DNA, 377 bp, Homosapiens
gtgcccatcgaccattctgacctggtggctgaccttctgaaagagctgtccaaccacaatgagcgagtggaggaacggaagggagccctgctggagctgctcaagatcacgcgggaagacagccttggtgtctgggaggagcacttcaagaccattctgctcctgctgctggagacccttggagacaaagaccattcaattcgagcactggcgttaagagttttgagggaaattctgagaaatcaaccagcaagatttaaaaactacgccgagctgacgattatgaagactctggaagcccacaaagaaaatatttattacaatcagtattttggtcccttccagcttttctgtagaatcttactggtattgaatgt

SEQ ID NO: 1108 - protein, 52 aa, Homosapiens
MSEWRNGREPCWSCSRSRGKTALVSGRSTSRPFCSCCWRPLETKTIQFEHWR

SEQ ID NO: 1109 - DNA, 1969 bp, Homosapiens
cagactgcttgtgattggtattattttcttcagatgcttttttgtttttgatgcctagaatgccctcttattagtgattttacttataaaatatttttttaaacaactttaatcaacattttgatgacctattgtacattacataaattaatcatggttcctttttctaggcagcacagattgtgctaatctctctgtttgaattgaatactcctgaatttaccatgttacttggtgccttgccaaaaacattccaggatggtgccaccaaactcctgcacaaccacctcaagaattccagtaacaccagtgtgggctctccaagcaatacgattggccggacgccctcccgacacaccagcagcaggaccagccccctgacctcacccaccaactgttcccatgggggtctgtctccaagcatgctggactatgatacagagaacctgaactctgaagaaatctatagttctctacgtggagttacagaagccattgaaaagtttagttttcgaagccaagaagatctgaatgagccaattaaacgagatggcaaaaaggagtgtgatattgtgtcccgcgatgggggcgctgcctcccctgccactgagggccgggggggtagtgaagtagaaggaggccggacagctctggataacaagacctcactactcaacacccagcctccgcgcgccttcccggggccgcgggcgcgagactacaacccgtacccctactcagatgccatcaacacctacgacaagaccgccctgaaagaggctgtgttcgatgacgacatggagcagcttcgagacgtgcccatcgaccattctgacctggtggctgaccttctgaaagagctgtccaaccacaatgagcgagtggaggaacggaagggagccctgctggagctgctcaagatcacgcgggaagacagccttggtgtctgggaggagcacttcaagaccattctgctcctgctgctggagacccttggagacaaagacgtgagatgctggtttggccttatcttgcccctttccatgtaatggggtcacgatgtccttttcttattgggcttagcttcagctttactttctgggttgtgcttactgtttacatcaaaacatttatttgttcatttttcacatattttctgagcacgtttagtaaggtcatgtttttatcagcaacaagctgctgcttggcttacgtgcatggtctgcaactgggtttatagtagttgaggaaacttcattcctgcatctagttgctttaacacagaatttcttaaaactttattagcatagaatgtggtcttttaggatgtacttttttacttgtgagtttcatttttgtttcatatgtaattgagaaaaagtttcattttaaaagacctgattaaatgctacattccatgaaattccatcttggtccccccctacatatgttaagagttccaataattttaatcagtcaagtggcaggttccagaagcatgattctgatttttgtattattaatttaaaaataaaaaaagcttcatcatgctgggacacttgaatgtgacaaactaggcatttctgacatgcctggtctgtgatctgcacatcgcacatagagaactcttaaaggggggagtaatctggtcaaagtcctgccttctcccacctgtggagctggtcccttatatggaaacaggaatagatgctgagaattaccagaattaaacctctacaagaaaaagtttctccatccacatggagaagagaaatgagaagagagtgctgtggggaggggctggaggaaggggatgggaggattgccaggaggtggcaggccatgcccagggccagctagaggggacttgcatggcaactgagtgacagggaggctgctgcatgccatgccgtggtgactcagatagctttctgatgctttggattaatggtttggtttagggataagt

SEQ ID NO: 1110 - protein, 274 aa, Homosapiens
MLLGALPKTFQDGATKLLHNHLKNSSNTSVGSPSNTIGRTPSRHTSSRTSPLTSPTNCSHGGLSPSMLDYDTENLNSEEIYSSLRGVTEAIEKFSFRSQEDLNEPIKRDGKKECDIVSRDGGAASPATEGRGGSEVEGGRTALDNKTSLLNTQPPRAFPGPRARDYNPYPYSDAINTYDKTALKEAVFDDDMEQLRDVPIDHSDLVADLLKELSNHNERVEERKGALLELLKITREDSLGVWEEHFKTILLLLLETLGDKDVRCWFGLILPLSM

SEQ ID NO: 1111 - DNA, 803 bp, Homosapiens
agatttattccagccgagaccttgaggaatccataaacaaaattagggaaatattatctgatgacaagcatgattgggagcagagagtaaatgctctaaaaaagattagatctttacttttggctggtgctgctgagtatgataacttctttcaacatttgcgtcttttggatggagcctttaaactctctgctaaggacctgcggtctcaggtagtgcgggaggcttgtatcacgttggggtaaggactgcgatgctccatattctcaccataaaatagtgtcaccacagagcttcagagatgtctccttgaacatgtgagctgggtctctttaatgtaacttctgactagtctccaagacccattccagttaacacttctttcagtagttttacaatactttttgctcaattatgtgaagtgtgacagattttaaattttattcagtgacatagctctgaagtctttatttcaaactttgaagcagttattaatatggaaaagtgaaattctataaaatcctgtttctctgatttttcattgatttttgctggcaggcaatagcgtgtttatcagaatgtttgttcctagaagagtactgtagttataaagttaaaggcatttactgcagtaagattttattctagctgtacgtgtactagtgatcaaagctattaaaactttgtgttagaatgtatgtcggaatatcaaagcagcagcagcagcaggaggaggcattgcagctgttttaagttttggctgaagtcagattttgaagcctgaatattttatgttaagataa

SEQ ID NO: 1112 - protein, 80 aa, Homosapiens
IYSSRDLEESINKIREILSDDKHDWEQRVNALKKIRSLLLAGAAEYDNFFQHLRLLDGAFKLSAKDLRSQVVREACITLG

SEQ ID NO: 1113 - DNA, 728 bp, Homosapiens
cacggaggctcacgtctgtaatcccaacactttgggaggccgaggcgggcggatcacaaggtcaggagatagagaccatcctggctaacacagtgaaactccatctctactaaaaatacaaacaaattagctgggcgtggtggcaggtgcctgtactctcagctactcaggaggctgaggcagctgaatggcatgaacccaggaggcagagattgcagtgagccgagatggcaccactgccctccagcctgggcgacagagctggactccgtctctaaaacataaataaataaaaatatttaaagagtattgtcactttaaagaatacaatggctgggcgcggtggctcacgcctgtaataccagcgttgggaggctgaggcaggagaagcgctcgaaccagggaggcggaggttgcggtgagccgagatcatgccattgcactccagcctgggcaacaagagcaaaactccatctcaaaaaaacgaataaaaaatttaaaaagtaaataaataatacattaaattttaaatgcatactccaaaataatctgaaaatctacaagtatgacagttattctcaaatattctttttattgaaaaaatgaatatacccctaaaattgagcaactggaggagaatctattattctgagcaccaaccatgtcccaggcactaagaaattcgctaagaattttacacacaatctcatttattctccacaaaatcc

SEQ ID NO: 1114 - protein, 30 aa, Homosapiens
MNPGGRDCSEPRWHHCPPAWATELDSVSKT

SEQ ID NO: 1115 - DNA, 6341 bp, Homosapiens
ggggggggacttatgctacgcagctttctcaggtcatcttgacagctttgattctgcgcagcagtgcagtaacatgcagcctcacatccacaccacaccagtgcaagtacctgtacctttactgggatcattggaaacaacgtttcttagcaggggcttggtgctttttgtgaatacagtcccacaggcctttctccgcagtttcaaaattcaaagcactctgaaagcctagtgtttttaattactaatttgccatttgacctgaagtgaactaacatgagactatttatagtctgtatgtacctggctaggctatgtttcactacaaaaatattaatgtgcttgattgtgagttgctgccccggattctattcaaggggctatattacacatacacacacacatacacactatctctctctccgtgcactattttatcttcctaaaaatctgaaaaattctttattccagaatatacctggcctctagagttttggataagcaattgtggacctgtatttaatactgtacaataataatgatagtctatggctgtggtgcatttactgtgagccagaaattgtgctaaatatgtgttcattttttaaattgtaattaccatatgaggtagacattatttttcccattttacaaatgagaagactgatgctcaaaaaattagctaacttgttcaaggtgataaaactagtaattaagatttctgagacttgaactcaagtccttatgcaacaaccagagttaattaaacacgtatgatgtgccagttgctgtacttacacagtagggaaaaactgggtacggtcccggcccagtgtctaagctgtctaggtctgtccagtctgtgtgggcttcatctccgtgtacatttgtctcaaggcccattccgtgctgccttatatttgaaatttgtgggttccctattaacccagagcttccttttcttctgccctgtggtctgattggaggaacggggagggcacatgagagggcggtgcacagtgtaggataggaaataagtcagtgctaaattgcatcataggaatttgtataaattctgtcatgcggagaaagaagaaacattagggtatgcttagttggagaggccttgacagagaagtgggattaaagagggttatgaagaaccaaaaggtgtaagctgcagagggttctgagaaagtctctcttcctttcctgtttctccctttctggttagcacttccttggtagactgtaaaagatgtagtctctcctaagctgctttacagagcacatgttaccgctagatcaagtgtgtttatgggcaggaggagactgtgttgacagataagggaggttcctctcatttcctttgcctatctccaaaaccttggctttcatcgaggtttttattttcccgcttgtgtccttgagaggagagccagaaaagattattggattcagattaagtgacttctgtttccttttctggcagtctcctcgctactgccaccaagtgacacatcttttcagagactgtccatttttttccaggttttccttgcagtgtttgtcctattggctgtaggaggtgaatttccatggtttaatctaaaaagacaggtgcctctgtcataagtagaaaagctacagttagcagcactaagcaaaagcaaaaaaccttaggaaaggttatgtcaagaaaatttatatggattgttggtaaaaatggtgtccttgatgtatgtaattagtggcatttcttcctaaatgtgtttacctatatgcaagggcaacaaagtgtactgaaagtattttagatttgagtgtgaattgtctggattcctcttctggctctgccactcatatatttgagcaggtagctttctctctagaatgtatttcctcatctgtaaaaggggtctgatgatatttactacatagaggattcagtaagcccatgtatataagcccatgtagtgcttttaatatgtagcatgtggtcagtaaaaggaagttgacgaaaatgtatattatgggaccaaatactcataaaatctgaggaaagttaacttttatgtgggactgaggttacatgttttcttgtggcctagtcagttagcctgtgctctggaacagaggccttgggtctcttgtaataagatatgaatccatcagttgttcagtgttgataataaagtccctgagtagagcagcagctggctgggaagtctgtgaagggtgagttaaaaactgactggtataaaacaatccattgactgaggccccctgttttaggaagatttcacttgattgtaaaatttttaacacttatactttcccttgtttcagaaaactaaaatttaaataaggatacatgcaacagaagaagtaataaattgaatgtcaaggcagaaagtaaaacagctggagtgagaacgtggacctaacaatgaggctaatgattaacagctaatgtttactagtagctaacacttattaagcgccattatgtgctagacactgttaagtgttttgcatgcattgcctggtgtaattataacatagatgctgtatgataagccctgtgattattcctattctttaagtggggacactgaagaaacttgcccgaggttacatgactagaaagtgtcagaggcaggatgttagtcggaatagtctgactgtagcacccactgctgaagcaatatgcagtattttctttataattttgtagcagaggtaatagtagcatttattggagcataaaagaaaagggtgtaaggacgtaccccacagttgatttcttaaagggagggaattttgagttagactttaatgaaaaatatttaagatgaatatatttaaaatagttctttggtcctgttagaatcatgaccatatatactttttaaactttttattttggaaaatattcagacatgtgaaaacctcagaaaacagttaaaaaaattttcatgtatgtttcacctggaccccagtgttaactctttatcacatatgtcttgttttctctattattatgcttattgtaatcatttgagagtagtagacacagtgcttcactgcaatacctgtgtatacagtggttcttagaaacaaggtcattcatttatataatgttaggacagctatctaaatcaggattaagatgttgggattacaggcgtgagccaccgcgccaggccttttttttgagacggagttttgctcttgttactgaggctggagtgcagtggcgcgatctcggctcaccgcaacctccgcctcccgggttcagtgattctcctggctcagcctcccaagtagctgggatcacaggcatgcaccaccaccctggctaattttgtatttttagtaaagatggggtttctccatgttggtcatgctggtcttgaactcccaacctcaggtgatccacccacctcggcctcccaaagtggtgggattacaggcgtgagccactgcgcctggccgaaaaaaaaatttttttaatcctgtttcatgatccagttctggaacacacactacatttaggtctcatatctgtgtagtttcctttttttttttttttttttgagacggagtttttctcttttctcttgttgcccaggctggagtgcagtggcacgatctcagctccctgcaacttccgcctccccggatcaagcgattcttctgcctcagcctcccaagtagctgggattataggcaggcaccagcatgcccggctacttttgtatttttagtagaggcggagttttaccatgttggtcaggctggtctcgaactcctgacctcaggtgatccacccgcctgggcctccctaagtgctgggattacaggtgtgagccaccgtgcccggccatagtttcctttacactggaacagttcattgtcagtctttccttatttttcttggcttaataattttgaagaattaggtcaccttactgtgtgtagttcgtcaatttgacgttgtttgatgcttcttcctggttagattttggcaggaatactgtagatgtgacatatccttctcagtgcctcacatcgggaggcacacgatatctcttcctcctacgtggttaaagaggtgtttgccaggtttcttcaaaaagttacttttttcccctctttctaattaatagatatcttgtggggagatagtttgagactgtataaatatcctattactcattaaactttcacctatagcttcagaatccattgatgatttttacttaaaacagttattaggccgggcgtggtggctcacgcctgtaatcccagcactttgggaggccgaggtgggcggatcacgaggtcaggagaccatcctggctagcacggtgaaaccccgtctctactaaaaatacaaaaaattagccaggtgaggtggcgggcacctatagtcccagctacacgggaggctgaggcaggagaatggcgtgaaccctggggggcagagcctgcagtgagccgagatcatgccactgcactacagcctgggtgacggcgagactctgtctcaaacaaaaaaacaaacaaaaaaaaacagttattaattattatgctggttgccaaagggtgattttctagttcaccattccttcttcatttattagttggcttcatatgtttttgaaatgtatatcctatgttggcttcatatatttttgaaatgtatagaaagaatgaagttctatcaaaatagaatattttgatagttatcacaaaaaggaactgctttgaaggagaaaaaagtgtttaaaattaatgttacttaggtacatttatattcatacattgtttaaggcaacctaataattttgtgaacatataaaaatgcgatgaagtttggtttgagcctgaagtaaaaatggagcgatggctacctgaaagttttcataaatattatgaagggaatacaaaaagacatgtaatagcaaaatatcttcctggagttagcaggatattaaaggacgctttgtgggaggggaagaaaagcaaaacatgcaaatggatgacacaatctgagtataagtgagatccaggttattcagctatagacagaactcaccagcttgaactgtgggttaagggggaattgtcagacagcattggagtaaaaagaaaaccaagctggtggccctgccaagttatctattgaacaggttaggtagagggagagtctgtgacaaggaccatggtaagaaatccagagaaatcagatgaaaatggctcgaagtagagaatgggaggtcaacctggaagaattatttgatctacagctgcattttacatgggattttggggaggggcaaagaaggagctgttagagatggctgtccattatggaacaaataggtgtggttataaatggggaagaagttctttgatgactggtaggaatctcttggtgtttaaacatccttaaaagctttgtggatgagatggcctttaggattcttttggatgagggacaagagatagcccagccggctccatgaaggaagatgttcaggcgtccttaatagagataaaattctgagatacaagtggcctggttgtgcaccagcgaggctgagcacgtttcctaggtggaggagccctgagggcaatcaagagagacttccctgcagcactgtagtataggaatttagtactgattcgcagggcaatcgaagccattgaaagacctcagggagaggtgtctgggtctcacccacacaccgcagcagtgggtgctgaagattgtctgatgaaggcattgtggactaggactaagaggaagtgagggagaagcaaatttgagtaatgtcattagggaggaggacaacctagtggtttttggtattagtgtgcatatataaaggactgggatgaatttgataattgtttgagatttcaggcttcatgatacaatttattggctatggatagccttgtaaaaaaagatgtccaagttctttttctgcatggtgcatttgacttctttttgatttagagaagtaatttttaaaaatcaaataatttggccggacgcagtggctcacacctgtaatcccagcagtttgggaggccgaagcgggcggatcacgaggtcaggagatggagaccaccctggccaacatggtgaaaccccgtctccactaaaaatacaaaaattagctgggcgtggtggtgcacgcctgtagtcccagctgcttggcaggctgaggcaggagaatcgcttgaacccgggaggcggaggttgcagtgagccgagattgcaccattgctctccagcctgggcaacagagcgagactccatctca

SEQ ID NO: 1116 - protein, 74 aa, Homosapiens
MLGQLSKSGLRCWDYRREPPRQAFFLRRSFALVTEAGVQWRDLGSPQPPPPGFSDSPGSASQVAGITGMHHHPG

SEQ ID NO: 1117 - DNA, 1038 bp, Homosapiens
ggccgtgttaggcttcgctggcgtaaagtccccgggagctttgcccctcacggagaacgttagttgaccctgatggggacccgtagggtaaaggttttgtttttgtttttttttacggaaaaggttgtggttaggccccttggaaagttgcgacaaaactcgagttagacaaggaaggtcggaactaagtggccacagcaacaatgcaccagcaagcagggagcgtgataggaagagctaaagaggaatcgggaaaccctggggtctcaccgccgtcgcccaggccggatggagtgcagtggcgcgatcacggctcactgcagcctcgacttcccaggctcagagatgggtttcaccatgtttcccagccttgtctcaaactcctgacctcaagtgatccgccgtcttgggtcttcgaaagtgctgggacagcaggagtgagccaccgcatctggcccggaaagtgttttggagcgtagaaaaatgcaaattatagggctgccttcaaggatcccgaaggacccacagatttgccgcatcaggctcctatgcacgccggtaatttgatgtgttgagatgcactgcccagtgcgttgtttttactggaggagcttgtgtgcggagctccttgctagtgtatgtgttgggatgggagagaagtgcgggagaactatgagataatgccccctgatcctcagggtcttaggaggtatggtcggagaggctaagctaaagtatgaaagccgtgtgtaggcccttctgtgtagtgcagaaaaggtagaggtatgtgatttgaaagagtagggatgacatggaggatgcgactcctggttggatctataaactaatgtctttggaacgaaagcacatgcaaccttttgaaaatggatgggtgataatgaaagaccattccagagaagaaacaccatggtgcaaaggctcaagaggcatactggaagtacaatgaagagagcaatctaactgaaatgggaaaaaaagaaacaaagagtaaaaagtaagatttgatgagaaagatgg

SEQ ID NO: 1118 - protein, 91 aa, Homosapiens
MHQQAGSVIGRAKEESGNPGVSPPSPRPDGVQWRDHGSLQPRLPRLRDGFHHVSQPCLKLLTSSDPPSWVFESAGTAGVSHRIWPGKCFGA

SEQ ID NO: 1119 - DNA, 1414 bp, Homosapiens
ggccgtgttaggcttcgctggcgtaaagtccccgggagctttgcccctcacggagaacgttagttgaccctgatggggacccgtagggtaaaggttttgtttttgtttttttttacggaaaaggttgtggttaggccccttggaaagttgcgacaaaactcgagttagacaaggaaggtcggaactaagtggccacagcaacaatgcaccagcaagcagggagcgtgataggaagagctaaagaggaatcgggaaaccctggggtctcaccgccgtcgcccaggccggatggagtgcagtggcgcgatcacggctcactgcagcctcgacttcccaggctcagagatgggtttcaccatgtttcccagccttgtctcaaactcctgacctcaagtgatccgccgtcttgggtcttcgaaagtgctgggacagcaggagtgagccaccgcatctggcccggaaagtgttttggagcgtagaaaaatgcaaattatagggctgccttcaaggatcccgaaggacccacagatttgccgcatcaggctcctatgcacgccggtaatttgatgtgttgagatgcactgcccagtgcgttgtttttactggaggagcttgtgtgcggagctccttgctagtgtatgtgttgggatgggagagaagtgcgggagaactatgagataatgccccctgatcctcagggtcttaggaggtatggtcggagaggctaagctaaagtatgaaagccgtgtgtaggcccttctgtgtagtgcagaaaaggtagaggtatgtgatttgaaagagtagggatgacatggaggatgcgactcctggttggatctataaactaatgtctttggaacgaaagcacatgcaaccttttgaaaatggatgggtgataatgaaagaccattccagagaagaaacaccatggtgcaaaggctcaagaggcatactggaagtacaatgaagagagcaatctaactgaaatgggaaaaaaagaaacaaagagtaaaaagtaagatttgatgagaaagatggaatcgatttttaaatttttttatctacacaacaaaatttattatcttaaccatttttgagtgaataattcgttagtattaagtatatttacctcgtgcggccagtctccagaattcttttcatcttgcaaaacaaaccccgaacccattaaacaatttctcattcgccattttccagctagccttggtaacctccattctagttctgtctctgtgaatttgactgtgtaccccgtgtaagtggtatcatacagtatttgtatttttgtgactggcatatttcacatagcataatctccttgtggtttatccatcttgtagcatgtgtcagaatttccttcccttttaagactaaataatattccattgtgtgtata

SEQ ID NO: 1120 - protein, 91 aa, Homosapiens; identical to SEQ ID NO: 1118

SEQ ID NO: 1121 - DNA, 1407 bp, Homosapiens
gcgtaaagtccccgggagctttgcccctcacggagaacgttagttgaccctgatggggacccgtagggtaaaggttttgtttttgtttttttttacggaaaaggttgtggttaggccccttggaaagttgcgacaaaactcgagttagacaaggaaggtcggaactaagtggccacagcaacaatgcaccagcaagcagggagcgtgataggaagagctaaagaggaatcgggaaaccctgggtaaaagtcgtccaagtggaacttcctttggtcgggggtctgatactcgaaggaaacggtctttcacttctgggttagggcgtccgcccagagggcgactgcaatgaaggaaattgtgccctgcgacttcccgtaacagagctgtgtgtccacgctcccttttccgagcaggcgcggacgcttgtgccggaagtaaacttgttaacggttctttgccttttggggaggggagacagcccagagaaggctttggagacccttgagtcggccagcgagcagggtttcttacttgagcgcctccacaaataaacgctccttcgctcctccgtcgcgtgcgtttccctgggataataagtgggaaagtggtggcttttatttttttgagacagggtctcaccgccgtcgcccaggccggatggagtgcagtggcgcgatcacggctcactgcagcctcgacttcccaggctcagagatgggtttcaccatgtttcccagccttgtctcaaactcctgacctcaagtgatccgccgtcttgggtcttcgaaagtgctgggacagcaggagtgagccaccgcatctggcccggaaagtgttttggagcgtagaaaaatgcaaattatagggctgccttcaaggatcccgaaggacccacagatttgccgcatcaggctcctatgcacgccggtaatttgatgtgttgagatgcactgcccagtgcgttgtttttactggaggagcttgtgtgcggagctccttgctagtgtatgtgttgggatgggagagaagtgcgggagaactatgagataatgccccctgatcctcagggtcttaggaggtatggtcggagaggctaagctaaagtatgaaagccgtgtgtaggcccttctgtgtagtgcagaaaaggtagaggtatgtgatttgaaagagtagggatgacatggaggatgcgactcctggttggatctataaactaatgtctttggaacgaaagcacatgcaaccttttgaaaatggatgggtgataatgaaagaccattccagagaagaaacaccatggtgcaaaggctcaagaggcatactggaagtacaatgaagagagcaatctaactgaaatgggaaaaaaagaaacaaagagtaaaaagtaagatttgatgagaaagatgg

SEQ ID NO: 1122 - protein, 32 aa, Homosapiens
MECSGAITAHCSLDFPGSEMGFTMFPSLVSNS

SEQ ID NO: 1123 - DNA, 1783 bp, Homosapiens
gcgtaaagtccccgggagctttgcccctcacggagaacgttagttgaccctgatggggacccgtagggtaaaggttttgtttttgtttttttttacggaaaaggttgtggttaggccccttggaaagttgcgacaaaactcgagttagacaaggaaggtcggaactaagtggccacagcaacaatgcaccagcaagcagggagcgtgataggaagagctaaagaggaatcgggaaaccctgggtaaaagtcgtccaagtggaacttcctttggtcgggggtctgatactcgaaggaaacggtctttcacttctgggttagggcgtccgcccagagggcgactgcaatgaaggaaattgtgccctgcgacttcccgtaacagagctgtgtgtccacgctcccttttccgagcaggcgcggacgcttgtgccggaagtaaacttgttaacggttctttgccttttggggaggggagacagcccagagaaggctttggagacccttgagtcggccagcgagcagggtttcttacttgagcgcctccacaaataaacgctccttcgctcctccgtcgcgtgcgtttccctgggataataagtgggaaagtggtggcttttatttttttgagacagggtctcaccgccgtcgcccaggccggatggagtgcagtggcgcgatcacggctcactgcagcctcgacttcccaggctcagagatgggtttcaccatgtttcccagccttgtctcaaactcctgacctcaagtgatccgccgtcttgggtcttcgaaagtgctgggacagcaggagtgagccaccgcatctggcccggaaagtgttttggagcgtagaaaaatgcaaattatagggctgccttcaaggatcccgaaggacccacagatttgccgcatcaggctcctatgcacgccggtaatttgatgtgttgagatgcactgcccagtgcgttgtttttactggaggagcttgtgtgcggagctccttgctagtgtatgtgttgggatgggagagaagtgcgggagaactatgagataatgccccctgatcctcagggtcttaggaggtatggtcggagaggctaagctaaagtatgaaagccgtgtgtaggcccttctgtgtagtgcagaaaaggtagaggtatgtgatttgaaagagtagggatgacatggaggatgcgactcctggttggatctataaactaatgtctttggaacgaaagcacatgcaaccttttgaaaatggatgggtgataatgaaagaccattccagagaagaaacaccatggtgcaaaggctcaagaggcatactggaagtacaatgaagagagcaatctaactgaaatgggaaaaaaagaaacaaagagtaaaaagtaagatttgatgagaaagatggaatcgatttttaaatttttttatctacacaacaaaatttattatcttaaccatttttgagtgaataattcgttagtattaagtatatttacctcgtgcggccagtctccagaattcttttcatcttgcaaaacaaaccccgaacccattaaacaatttctcattcgccattttccagctagccttggtaacctccattctagttctgtctctgtgaatttgactgtgtaccccgtgtaagtggtatcatacagtatttgtatttttgtgactggcatatttcacatagcataatctccttgtggtttatccatcttgtagcatgtgtcagaatttccttcccttttaagactaaataatattccattgtgtgtata

SEQ ID NO: 1124 - protein, 32 aa, Homosapiens; identical to SEQ ID NO: 1122

SEQ ID NO: 1125 - DNA, 2139 bp, Homosapiens
gcgtaaagtccccgggagctttgcccctcacggagaacgttagttgaccctgatggggacccgtagggtaaaggttttgtttttgtttttttttacggaaaaggttgtggttaggccccttggaaagttgcgacaaaactcgagttagacaaggaaggtcggaactaagtggccacagcaacaatgcaccagcaagcagggagcgtgataggaagagctaaagaggaatcgggaaaccctgggtaaaagtcgtccaagtggaacttcctttggtcgggggtctgatactcgaaggaaacggtctttcacttctgggttagggcgtccgcccagagggcgactgcaatgaaggaaattgtgccctgcgacttcccgtaacagagctgtgtgtccacgctcccttttccgagcaggcgcggacgcttgtgccggaagtaaacttgttaacggttctttgccttttggggaggggagacagcccagagaaggctttggagacccttgagtcggccagcgagcagggtttcttacttgagcgcctccacaaataaacgctccttcgctcctccgtcgcgtgcgtttccctgggataataagtgggaaagtggtggcttttatttttttgagacagggtctcaccgccgtcgcccaggccggatggagtgcagtggcgcgatcacggctcactgcagcctcgacttcccaggctcagagatgggtttcaccatgtttcccagccttgtctcaaactcctgacctcaagtgatccgccgtcttgggtcttcgaaagtgctgggacagcaggagtgagccaccgcatctggcccggaaagtgttttggagcgtagaaaaatgcaaattatagggctgccttcaaggatcccgaaggacccacagatttgccgcatcaggctcctatgcacgccgaaatgcccaggaggattgacgagattgaggtcaagatcgtggcccagtgtgtggcgctccaagccagctcttcccctttcaaaaccagaaaagccgcatgtttagatcgctctaggagattcatctccattacgatacaggatatgggctgtttgaaaactatttcatcatctttatcatcatcattcagttcagccacttgagattttcgcctctccaaaaatgttggtgtacaaactggtgtggggccctggattcaacaagtaaagattataatacataaatgtaaaacatgattatgactttacccaaaaatatcatctctcctctatttttacaagttgtgccccattattttagctctgttaccatcttttggtgatactattgcaaagaataaagaacttagatgcttatcaaacttggtacagaaattcacaattaacaaatatagcatgttccattataaggttttaggcagaaaattgctaaatcaacaataaagatctaccaaatgtcacaatatttaatttgaaatcttaaaatgagagtagcagaaactgcttctcctccttcaaattatttctataatatctggtgtctggagtattgaaaaccattttacctggctatccacagtcttctcaggagtgtcaagagtacctgaaacttttttcttcttcttacgtaaaaccttaaaataaattttaaaacacatcaatttgaatattgatcagctacagtagtcttgaatatgttttcctacttatccttctctaatatcttgcatgtaaaatgataaaaaaaattttacctggccttttgtagacgtctgacgattagtttttgaaatactttccgttttctgtaaaatctttaataaagaagttagaaattgacactcatatcttttctttctaaacttagcattagatcctcatatatattatcagtaaatcctccctaaatgacaagagcatttcattttaaaaaatcaaaactcataaatacagtgaattatctcaagtaaagggcaaaactaggaaaaacccagtagaggaattgacagagctgcagaggttgaagggaaggccaaaacctggagctcactgattcacagaatcctgaattcaggagggtggaagcaggaagaatgtgcaaaggcaggccacccccatctcctaagtcacaaacagggtacaggaaaagcag

SEQ ID NO: 1126 - protein, 70 aa, Homosapiens
MHAEMPRRIDEIEVKIVAQCVALQASSSPFKTRKAACLDRSRRFISITIQDMGCLKTISSSLSSSFSSAT

SEQ ID NO: 1127 - DNA, 809 bp, Homosapiens
tgcgacaaaactcgagttagacaaggaaggtcggaactaagtggccacagcaacaatgcaccagcaagcagggagcgtgataggaagagctaaagaggaatcgggaaaccctggagatgggtttcaccatgtttcccagccttgtctcaaactcctgacctcaagtgatccgccgtcttgggtcttcgaaagtgctgggacagcaggagtgagccaccgcatctggcccggaaagtgttttggagcgtagaaaaatgcaaattatagggctgccttcaaggatcccgaaggacccacagatttgccgcatcaggctcctatgcacgccggtaatttgatgtgttgagatgcactgcccagtgcgttgtttttactggaggagcttgtgtgcggagctccttgctagtgtatgtgttgggatgggagagaagtgcgggagaactatgagataatgccccctgatcctcagggtcttaggaggtatggtcggagaggctaagctaaagtatgaaagccgtgtgtaggcccttctgtgtagtgcagaaaaggtagaggtatgtgatttgaaagagtagggatgacatggaggatgcgactcctggttggatctataaactaatgtctttggaacgaaagcacatgcaaccttttgaaaatggatgggtgataatgaaagaccattccagagaagaaacaccatggtgcaaaggctcaagaggcatactggaagtacaatgaagagagcaatctaactgaaatgggaaaaaaagaaacaaagagtaaaaagtaagatttgatgagaaagatgg

SEQ ID NO: 1128 - protein, 64 aa, Homosapiens
MHQQAGSVIGRAKEESGNPGDGFHHVSQPCLKLLTSSDPPSWVFESAGTAGVSHRIWPGKCFGA

SEQ ID NO: 1129 - DNA, 1185 bp, Homosapiens
tgcgacaaaactcgagttagacaaggaaggtcggaactaagtggccacagcaacaatgcaccagcaagcagggagcgtgataggaagagctaaagaggaatcgggaaaccctggagatgggtttcaccatgtttcccagccttgtctcaaactcctgacctcaagtgatccgccgtcttgggtcttcgaaagtgctgggacagcaggagtgagccaccgcatctggcccggaaagtgttttggagcgtagaaaaatgcaaattatagggctgccttcaaggatcccgaaggacccacagatttgccgcatcaggctcctatgcacgccggtaatttgatgtgttgagatgcactgcccagtgcgttgtttttactggaggagcttgtgtgcggagctccttgctagtgtatgtgttgggatgggagagaagtgcgggagaactatgagataatgccccctgatcctcagggtcttaggaggtatggtcggagaggctaagctaaagtatgaaagccgtgtgtaggcccttctgtgtagtgcagaaaaggtagaggtatgtgatttgaaagagtagggatgacatggaggatgcgactcctggttggatctataaactaatgtctttggaacgaaagcacatgcaaccttttgaaaatggatgggtgataatgaaagaccattccagagaagaaacaccatggtgcaaaggctcaagaggcatactggaagtacaatgaagagagcaatctaactgaaatgggaaaaaaagaaacaaagagtaaaaagtaagatttgatgagaaagatggaatcgatttttaaatttttttatctacacaacaaaatttattatcttaaccatttttgagtgaataattcgttagtattaagtatatttacctcgtgcggccagtctccagaattcttttcatcttgcaaaacaaaccccgaacccattaaacaatttctcattcgccattttccagctagccttggtaacctccattctagttctgtctctgtgaatttgactgtgtaccccgtgtaagtggtatcatacagtatttgtatttttgtgactggcatatttcacatagcataatctccttgtggtttatccatcttgtagcatgtgtcagaatttccttcccttttaagactaaataatattccattgtgtgtata

SEQ ID NO: 1130 - protein, 64 aa, Homosapiens; identical to SEQ ID NO: 1128

SEQ ID NO: 1131 - DNA, 891 bp, Homosapiens
gggcgtccgcccagagggcgactgcaatgaaggaaattgtgccctgcgacttcccgtaacagagctgtgtgtccacgctcccttttccgagcaggcgcggacgcttgtgccggaaggtctcaccgccgtcgcccaggccggatggagtgcagtggcgcgatcacggctcactgcagcctcgacttcccaggctcagagatgggtttcaccatgtttcccagccttgtctcaaactcctgacctcaagtgatccgccgtcttgggtcttcgaaagtgctgggacagcaggagtgagccaccgcatctggcccggaaagtgttttggagcgtagaaaaatgcaaattatagggctgccttcaaggatcccgaaggacccacagatttgccgcatcaggctcctatgcacgccggtaatttgatgtgttgagatgcactgcccagtgcgttgtttttactggaggagcttgtgtgcggagctccttgctagtgtatgtgttgggatgggagagaagtgcgggagaactatgagataatgccccctgatcctcagggtcttaggaggtatggtcggagaggctaagctaaagtatgaaagccgtgtgtaggcccttctgtgtagtgcagaaaaggtagaggtatgtgatttgaaagagtagggatgacatggaggatgcgactcctggttggatctataaactaatgtctttggaacgaaagcacatgcaaccttttgaaaatggatgggtgataatgaaagaccattccagagaagaaacaccatggtgcaaaggctcaagaggcatactggaagtacaatgaagagagcaatctaactgaaatgggaaaaaaagaaacaaagagtaaaaagtaagatttgatgagaaagatgg

SEQ ID NO: 1132 - protein, 32 aa, Homosapiens; identical to SEQ ID NO: 1122

SEQ ID NO: 1133 - DNA, 1267 bp, Homosapiens
gggcgtccgcccagagggcgactgcaatgaaggaaattgtgccctgcgacttcccgtaacagagctgtgtgtccacgctcccttttccgagcaggcgcggacgcttgtgccggaaggtctcaccgccgtcgcccaggccggatggagtgcagtggcgcgatcacggctcactgcagcctcgacttcccaggctcagagatgggtttcaccatgtttcccagccttgtctcaaactcctgacctcaagtgatccgccgtcttgggtcttcgaaagtgctgggacagcaggagtgagccaccgcatctggcccggaaagtgttttggagcgtagaaaaatgcaaattatagggctgccttcaaggatcccgaaggacccacagatttgccgcatcaggctcctatgcacgccggtaatttgatgtgttgagatgcactgcccagtgcgttgtttttactggaggagcttgtgtgcggagctccttgctagtgtatgtgttgggatgggagagaagtgcgggagaactatgagataatgccccctgatcctcagggtcttaggaggtatggtcggagaggctaagctaaagtatgaaagccgtgtgtaggcccttctgtgtagtgcagaaaaggtagaggtatgtgatttgaaagagtagggatgacatggaggatgcgactcctggttggatctataaactaatgtctttggaacgaaagcacatgcaaccttttgaaaatggatgggtgataatgaaagaccattccagagaagaaacaccatggtgcaaaggctcaagaggcatactggaagtacaatgaagagagcaatctaactgaaatgggaaaaaaagaaacaaagagtaaaaagtaagatttgatgagaaagatggaatcgatttttaaatttttttatctacacaacaaaatttattatcttaaccatttttgagtgaataattcgttagtattaagtatatttacctcgtgcggccagtctccagaattcttttcatcttgcaaaacaaaccccgaacccattaaacaatttctcattcgccattttccagctagccttggtaacctccattctagttctgtctctgtgaatttgactgtgtaccccgtgtaagtggtatcatacagtatttgtatttttgtgactggcatatttcacatagcataatctccttgtggtttatccatcttgtagcatgtgtcagaatttccttcccttttaagactaaataatattccattgtgtgtata

SEQ ID NO: 1134 - protein, 32 aa, Homosapiens; identical to SEQ ID NO: 1122

SEQ ID NO: 1135 - DNA, 1446 bp, Homosapiens
ctgcttttcctgtaccctgtttgtgacttaggagatgggggtggcctgcctttgcacattcttcctgcttccaccctcctgaattcaggattctgtgaatcagtgagctccaggttttggccttcccttcaacctctgcagctctgtcaattcctctactgggtttttcctagttttgccctttacttgagataattcactgtatttatgagttttgattttttaaaatgaaatgctcttgtcatttagggaggatttactgataatatatatgaggatctaatgctaagtttagaaagaaaagatatgagtgtcaatttctaacttctttattaaagattttacagaaaacggaaagtatttcaaaaactaatcgtcagacgtctacaaaaggccaggttttacgtaagaagaagaaaaaagtttcaggtactcttgacactcctgagaagactgtggatagccagggccccacaccagtttgtacaccaacatttttggagaggcgaaaatctcaagtggctgaactgaatgatgatgataaagatgatgaaatagttttcaaacagcccatatcctgtgtaaaagaagaaatacaagagactcaaacacctacacattcacggaaaaaaagacgaagaagcagcaatcagtgattttcaatgtattatatttcttttgaaaaatataatatttttatgagagtggactttgtatttcactaggtacaatggaatacaacctttgacaagattttcagaggaaaaatacactgtttggtcaagttaaggaaagcagtgtgtaattttggattgcctgcccttggctgaaatacaggggtgcataccatcttgcagtggcttggctgacattgcctctttgtcctggcctctagttttcttttgatatttcatagctctccttagtttactctgcctggatagaaagttgaccactaactgcaggtttaagtactaaactgcagccttttctgtcgccagcaattaaagaccaccaatcttgtttgtccatctacatggtttgtcggggacatttaactcatggaggtgctttagatttcaacatcagatggttgaagctggaagtttaattatatgtagagtgagaaggcagttccagttttagcacagatttgtttatgtgttcagattttaatagagattcaaaaatgactcatttttaccaataatgttaaattagttttggttgtgctagcatgaattaataaccaccattttataccagtatcatcagtgaagaattgtatttcaagattcaaacaataaccagcaattaaacttttttctacaatgtatttgtttgcgagtaggacttgggagtcattgggaaaaaaaaataataaattttccccttcattaacgaattcagactcattaaaaacattgccatcagatgtagtagctt

SEQ ID NO: 1136 - protein, 37 aa, Homosapiens
MYLFASRTWESLGKKNNKFSPSLTNSDSLKTLPSDVV

SEQ ID NO: 1137 - DNA, 1566 bp, Homosapiens
ctgcttttcctgtaccctgtttgtgacttaggagatgggggtggcctgcctttgcacattcttcctgcttccaccctcctgaattcaggattctgtgaatcagtgagctccaggttttggccttcccttcaacctctgcagctctgtcaattcctctactgggtttttcctagttttgccctttacttgagataattcactgtatttatgagttttgattttttaaaatgaaatgctcttgtcatttagggaggatttactgataatatatatgaggatctaatgctaagtttagaaagaaaagatatgagtgtcaatttctaacttctttattaaagattttacagaaaacggaaagtatttcaaaaactaatcgtcagacgtctacaaaaggccaggtaaaattttttttatcattttacatgcaagatattagagaaggataagtaggaaaacatattcaagactactgtagctgatcaatattcaaattgatgtgttttaaaatttattttaaggttttacgtaagaagaagaaaaaagtttcaggtactcttgacactcctgagaagactgtggatagccagggccccacaccagtttgtacaccaacatttttggagaggcgaaaatctcaagtggctgaactgaatgatgatgataaagatgatgaaatagttttcaaacagcccatatcctgtgtaaaagaagaaatacaagagactcaaacacctacacattcacggaaaaaaagacgaagaagcagcaatcagtgattttcaatgtattatatttcttttgaaaaatataatatttttatgagagtggactttgtatttcactaggtacaatggaatacaacctttgacaagattttcagaggaaaaatacactgtttggtcaagttaaggaaagcagtgtgtaattttggattgcctgcccttggctgaaatacaggggtgcataccatcttgcagtggcttggctgacattgcctctttgtcctggcctctagttttcttttgatatttcatagctctccttagtttactctgcctggatagaaagttgaccactaactgcaggtttaagtactaaactgcagccttttctgtcgccagcaattaaagaccaccaatcttgtttgtccatctacatggtttgtcggggacatttaactcatggaggtgctttagatttcaacatcagatggttgaagctggaagtttaattatatgtagagtgagaaggcagttccagttttagcacagatttgtttatgtgttcagattttaatagagattcaaaaatgactcatttttaccaataatgttaaattagttttggttgtgctagcatgaattaataaccaccattttataccagtatcatcagtgaagaattgtatttcaagattcaaacaataaccagcaattaaacttttttctacaatgtatttgtttgcgagtaggacttgggagtcattgggaaaaaaaaataataaattttccccttcattaacgaattcagactcattaaaaacattgccatcagatgtagtagctt

SEQ ID NO: 1138 - protein, 93 aa, Homosapiens
MCFKIYFKVLRKKKKKVSGTLDTPEKTVDSQGPTPVCTPTFLERRKSQVAELNDDDKDDEIVFKQPISCVKEEIQETQTPTHSRKKRRRSSNQ

SEQ ID NO: 1139 - DNA, 1729 bp, Homosapiens
ccatggcctttgtggggagagaaacactaaacagccagttctttaattactactgtggtaagtggaaatgcagaataggttcttgggccgagggctaggggttttgttacaatgtgattttcttatttatatatttaatttacctggtctttacgtctttagcgaaaaaaacaagaacaacttactcctggagtagtctatgtgcgccacctacctaacctacttgacgaaacccagatcttttcatatttctcccagtttggcactgtgacacggttcaggctgtccagaagtaaaaggactggaaatagcaaaggctatgcatttgtggagtttgagtctgaggatgttgccaaaatagttgctgaaacaatgaacaactacctgtttggtgaaagactcttggagtgtcattttatgccacctgaaaaagtacataaagaactctttaaagactggaatattccatttaagcagccatcatatccatcagtgaaacggtataatcggaatcggacactaacacaaaagctacggatggaggagcgatttaaaaagaaagaaagattactcaggaagaaattagctaaaaaaggaattgactatgattttccttctttgattttacagaaaacggaaagtatttcaaaaactaatcgtcagacgtctacaaaaggccaggttttacgtaagaagaagaaaaaagtttcaggtactcttgacactcctgagaagactgtggatagccagggccccacaccagtttgtacaccaacatttttggagaggcgaaaatctcaagtggctgaactgaatgatgatgataaagatgatgaaatagttttcaaacagcccatatcctgtgtaaaagaagaaatacaagagactcaaacacctacacattcacggaaaaaaagacgaagaagcagcaatcagtgattttcaatgtattatatttcttttgaaaaatataatatttttatgagagtggactttgtatttcactaggtacaatggaatacaacctttgacaagattttcagaggaaaaatacactgtttggtcaagttaaggaaagcagtgtgtaattttggattgcctgcccttggctgaaatacaggggtgcataccatcttgcagtggcttggctgacattgcctctttgtcctggcctctagttttcttttgatatttcatagctctccttagtttactctgcctggatagaaagttgaccactaactgcaggtttaagtactaaactgcagccttttctgtcgccagcaattaaagaccaccaatcttgtttgtccatctacatggtttgtcggggacatttaactcatggaggtgctttagatttcaacatcagatggttgaagctggaagtttaattatatgtagagtgagaaggcagttccagttttagcacagatttgtttatgtgttcagattttaatagagattcaaaaatgactcatttttaccaataatgttaaattagttttggttgtgctagcatgaattaataaccaccattttataccagtatcatcagtgaagaattgtatttcaagattcaaacaataaccagcaattaaacttttttctacaatgtatttgtttgcgagtaggacttgggagtcattgggaaaaaaaaataataaattttccccttcattaacgaattcagactcattaaaaacattgccatcagatgtagtagctt

SEQ ID NO: 1140 - protein, 188 aa, Homosapiens
MNNYLFGERLLECHFMPPEKVHKELFKDWNIPFKQPSYPSVKRYNRNRTLTQKLRMEERFKKKERLLRKKLAKKGIDYDFPSLILQKTESISKTNRQTSTKGQVLRKKKKKVSGTLDTPEKTVDSQGPTPVCTPTFLERRKSQVAELNDDDKDDEIVFKQPISCVKEEIQETQTPTHSRKKRRRSSNQ

SEQ ID NO: 1141 - DNA, 1736 bp, Homosapiens
tcgggggagctgggagcccgacgtttccgggagcgccgcgtggttagcgtcggcggcttttggcatggcgactttttctggcccggctgggccaatcctgtcgcttaatccgcaggaagatgtcgagtttcaaaaggaggtggcgcaggttcgcaagcgcataacccagcgaaaaaaacaagaacaacttactcctggagtagtctatgtgcgccacctacctaacctacttgacgaaacccagatcttttcatatttctcccagtttggcactgtgacacggttcaggctgtccagaagtaaaaggactggaaatagcaaaggctatgcatttgtggagtttgagtctgaggatgttgccaaaatagttgctgaaacaatgaacaactacctgtttggtgaaagactcttggagtgtcattttatgccacctgaaaaagtacataaagaactctttaaagactggaatattccatttaagcagccatcatatccatcagtgaaacggtataatcggaatcggacactaacacaaaagctacggatggaggagcgatttaaaaagaaagaaagattactcaggaagaaattagctaaaaaaggaattgactatgattttccttctttgattttacagaaaacggaaagtatttcaaaaactaatcgtcagacgtctacaaaaggccaggttttacgtaagaagaagaaaaaagtttcaggtactcttgacactcctgagaagactgtggatagccagggccccacaccagtttgtacaccaacatttttggagaggcgaaaatctcaagtggctgaactgaatgatgatgataaagatgatgaaatagttttcaaacagcccatatcctgtgtaaaagaagaaatacaagagactcaaacacctacacattcacggaaaaaaagacgaagaagcagcaatcagtgattttcaatgtattatatttcttttgaaaaatataatatttttatgagagtggactttgtatttcactaggtacaatggaatacaacctttgacaagattttcagaggaaaaatacactgtttggtcaagttaaggaaagcagtgtgtaattttggattgcctgcccttggctgaaatacaggggtgcataccatcttgcagtggcttggctgacattgcctctttgtcctggcctctagttttcttttgatatttcatagctctccttagtttactctgcctggatagaaagttgaccactaactgcaggtttaagtactaaactgcagccttttctgtcgccagcaattaaagaccaccaatcttgtttgtccatctacatggtttgtcggggacatttaactcatggaggtgctttagatttcaacatcagatggttgaagctggaagtttaattatatgtagagtgagaaggcagttccagttttagcacagatttgtttatgtgttcagattttaatagagattcaaaaatgactcatttttaccaataatgttaaattagttttggttgtgctagcatgaattaataaccaccattttataccagtatcatcagtgaagaattgtatttcaagattcaaacaataaccagcaattaaacttttttctacaatgtatttgtttgcgagtaggacttgggagtcattgggaaaaaaaaataataaattttccccttcattaacgaattcagactcattaaaaacattgccatcagatgtagtagctt

SEQ ID NO: 1142 - protein, 293 aa, Homosapiens
MATFSGPAGPILSLNPQEDVEFQKEVAQVRKRITQRKKQEQLTPGVVYVRHLPNLLDETQIFSYFSQFGTVTRFRLSRSKRTGNSKGYAFVEFESEDVAKIVAETMNNYLFGERLLECHFMPPEKVHKELFKDWNIPFKQPSYPSVKRYNRNRTLTQKLRMEERFKKKERLLRKKLAKKGIDYDFPSLILQKTESISKTNRQTSTKGQVLRKKKKKVSGTLDTPEKTVDSQGPTPVCTPTFLERRKSQVAELNDDDKDDEIVFKQPISCVKEEIQETQTPTHSRKKRRRSSNQ

SEQ ID NO: 1143 - DNA, 1403 bp, Homosapiens
ctgcttttcctgtaccctgtttgtgacttaggagatgggggtggcctgcctttgcacattcttcctgcttccaccctcctgaattcaggattctgtgaatcagtgagctccaggttttggccttcccttcaacctctgcagctctgtcaattcctctactgggtttttcctagttttgccctttacttgagataattcactgtatttatgagttttgattttttaaaatgaaatgctcttgtcatttagggaggatttactgataatatatatgaggatctaatgctaagtttagaaagaaaagatatgagtgtcaatttctaacttctttattaaagattttacagaaaacggaaagtatttcaaaaactaatcgtcagacgtctacaaaaggccaggttttacgtaagaagaagaaaaaagtttcaggtactcttgacactcctgagaagactgtggatagccagggccccacaccagtttgtacaccaacatttttggagaggcgaaaatctcaagtggctgaactgaatgatgatgataaagatgatgaaatagttttcaaacagcccatatcctgtgtaaaagaagaaatacaagagactcaaacacctacacattcacggaaaaaaagacgaagaagcagcaatcagtgattttcaatgtattatatttcttttgaaaaatataatatttttatgagagtggactttgtatttcactaggtacaatggaatacaacctttgacaagattttcagaggaaaaatacactgtttggtcaagttaaggaaagcagtgtgtaattttggattgcctgcccttggctgaaatacaggggtgcataccatcttgcagtggcttggctgacattgcctctttgtcctggcctctagttttcttttgatatttcatagctctccttagtttactctgcctggatagaaagttgaccactaactgcaggtttaagtactaaactgcagccttttctgtcgccagcaattaaagaccaccaatcttgtttgtccatctacatggtttgtcggggacatttaactcatggaggtgctttagatttcaacatcagatggttgaagctggaagtttaattatatgtagagtgagaaggcagttccagttttagcacagatttgtttatgtgttcagattttaatagagattcaaaaatgactcatttttaccaataatgttaaattagttttggttgtgctagcatgaattaataaccaccattttataccagtatcatcagtgaagaattgtatttcaagattcaaacaataaccagcaattaaacttttttctacaatgtatttgtttgcgagtaggacttgggagtcattgggaaaaaaaaataataaattttccccttcattaacg

SEQ ID NO: 1144 - protein, 126 aa, Homosapiens
GSNAKFRKKRYECQFLTSLLKILQKTESISKTNRQTSTKGQVLRKKKKKVSGTLDTPEKTVDSQGPTPVCTPTFLERRKSQVAELNDDDKDDEIVFKQPISCVKEEIQETQTPTHSRKKRRRSSNQ

SEQ ID NO: 1145 - DNA, 1523 bp, Homosapiens
ctgcttttcctgtaccctgtttgtgacttaggagatgggggtggcctgcctttgcacattcttcctgcttccaccctcctgaattcaggattctgtgaatcagtgagctccaggttttggccttcccttcaacctctgcagctctgtcaattcctctactgggtttttcctagttttgccctttacttgagataattcactgtatttatgagttttgattttttaaaatgaaatgctcttgtcatttagggaggatttactgataatatatatgaggatctaatgctaagtttagaaagaaaagatatgagtgtcaatttctaacttctttattaaagattttacagaaaacggaaagtatttcaaaaactaatcgtcagacgtctacaaaaggccaggtaaaattttttttatcattttacatgcaagatattagagaaggataagtaggaaaacatattcaagactactgtagctgatcaatattcaaattgatgtgttttaaaatttattttaaggttttacgtaagaagaagaaaaaagtttcaggtactcttgacactcctgagaagactgtggatagccagggccccacaccagtttgtacaccaacatttttggagaggcgaaaatctcaagtggctgaactgaatgatgatgataaagatgatgaaatagttttcaaacagcccatatcctgtgtaaaagaagaaatacaagagactcaaacacctacacattcacggaaaaaaagacgaagaagcagcaatcagtgattttcaatgtattatatttcttttgaaaaatataatatttttatgagagtggactttgtatttcactaggtacaatggaatacaacctttgacaagattttcagaggaaaaatacactgtttggtcaagttaaggaaagcagtgtgtaattttggattgcctgcccttggctgaaatacaggggtgcataccatcttgcagtggcttggctgacattgcctctttgtcctggcctctagttttcttttgatatttcatagctctccttagtttactctgcctggatagaaagttgaccactaactgcaggtttaagtactaaactgcagccttttctgtcgccagcaattaaagaccaccaatcttgtttgtccatctacatggtttgtcggggacatttaactcatggaggtgctttagatttcaacatcagatggttgaagctggaagtttaattatatgtagagtgagaaggcagttccagttttagcacagatttgtttatgtgttcagattttaatagagattcaaaaatgactcatttttaccaataatgttaaattagttttggttgtgctagcatgaattaataaccaccattttataccagtatcatcagtgaagaattgtatttcaagattcaaacaataaccagcaattaaacttttttctacaatgtatttgtttgcgagtaggacttgggagtcattgggaaaaaaaaataataaattttccccttcattaacg

SEQ ID NO: 1146 - protein, 93 aa, Homosapiens; identical to SEQ ID NO: 1138

SEQ ID NO: 1147 - DNA, 1686 bp, Homosapiens
ccatggcctttgtggggagagaaacactaaacagccagttctttaattactactgtggtaagtggaaatgcagaataggttcttgggccgagggctaggggttttgttacaatgtgattttcttatttatatatttaatttacctggtctttacgtctttagcgaaaaaaacaagaacaacttactcctggagtagtctatgtgcgccacctacctaacctacttgacgaaacccagatcttttcatatttctcccagtttggcactgtgacacggttcaggctgtccagaagtaaaaggactggaaatagcaaaggctatgcatttgtggagtttgagtctgaggatgttgccaaaatagttgctgaaacaatgaacaactacctgtttggtgaaagactcttggagtgtcattttatgccacctgaaaaagtacataaagaactctttaaagactggaatattccatttaagcagccatcatatccatcagtgaaacggtataatcggaatcggacactaacacaaaagctacggatggaggagcgatttaaaaagaaagaaagattactcaggaagaaattagctaaaaaaggaattgactatgattttccttctttgattttacagaaaacggaaagtatttcaaaaactaatcgtcagacgtctacaaaaggccaggttttacgtaagaagaagaaaaaagtttcaggtactcttgacactcctgagaagactgtggatagccagggccccacaccagtttgtacaccaacatttttggagaggcgaaaatctcaagtggctgaactgaatgatgatgataaagatgatgaaatagttttcaaacagcccatatcctgtgtaaaagaagaaatacaagagactcaaacacctacacattcacggaaaaaaagacgaagaagcagcaatcagtgattttcaatgtattatatttcttttgaaaaatataatatttttatgagagtggactttgtatttcactaggtacaatggaatacaacctttgacaagattttcagaggaaaaatacactgtttggtcaagttaaggaaagcagtgtgtaattttggattgcctgcccttggctgaaatacaggggtgcataccatcttgcagtggcttggctgacattgcctctttgtcctggcctctagttttcttttgatatttcatagctctccttagtttactctgcctggatagaaagttgaccactaactgcaggtttaagtactaaactgcagccttttctgtcgccagcaattaaagaccaccaatcttgtttgtccatctacatggtttgtcggggacatttaactcatggaggtgctttagatttcaacatcagatggttgaagctggaagtttaattatatgtagagtgagaaggcagttccagttttagcacagatttgtttatgtgttcagattttaatagagattcaaaaatgactcatttttaccaataatgttaaattagttttggttgtgctagcatgaattaataaccaccattttataccagtatcatcagtgaagaattgtatttcaagattcaaacaataaccagcaattaaacttttttctacaatgtatttgtttgcgagtaggacttgggagtcattgggaaaaaaaaataataaattttccccttcattaacg

SEQ ID NO: 1148 - protein, 188 aa, Homosapiens; identical to SEQ ID NO: 1140

SEQ ID NO: 1149 - DNA, 1693 bp, Homosapiens
tcgggggagctgggagcccgacgtttccgggagcgccgcgtggttagcgtcggcggcttttggcatggcgactttttctggcccggctgggccaatcctgtcgcttaatccgcaggaagatgtcgagtttcaaaaggaggtggcgcaggttcgcaagcgcataacccagcgaaaaaaacaagaacaacttactcctggagtagtctatgtgcgccacctacctaacctacttgacgaaacccagatcttttcatatttctcccagtttggcactgtgacacggttcaggctgtccagaagtaaaaggactggaaatagcaaaggctatgcatttgtggagtttgagtctgaggatgttgccaaaatagttgctgaaacaatgaacaactacctgtttggtgaaagactcttggagtgtcattttatgccacctgaaaaagtacataaagaactctttaaagactggaatattccatttaagcagccatcatatccatcagtgaaacggtataatcggaatcggacactaacacaaaagctacggatggaggagcgatttaaaaagaaagaaagattactcaggaagaaattagctaaaaaaggaattgactatgattttccttctttgattttacagaaaacggaaagtatttcaaaaactaatcgtcagacgtctacaaaaggccaggttttacgtaagaagaagaaaaaagtttcaggtactcttgacactcctgagaagactgtggatagccagggccccacaccagtttgtacaccaacatttttggagaggcgaaaatctcaagtggctgaactgaatgatgatgataaagatgatgaaatagttttcaaacagcccatatcctgtgtaaaagaagaaatacaagagactcaaacacctacacattcacggaaaaaaagacgaagaagcagcaatcagtgattttcaatgtattatatttcttttgaaaaatataatatttttatgagagtggactttgtatttcactaggtacaatggaatacaacctttgacaagattttcagaggaaaaatacactgtttggtcaagttaaggaaagcagtgtgtaattttggattgcctgcccttggctgaaatacaggggtgcataccatcttgcagtggcttggctgacattgcctctttgtcctggcctctagttttcttttgatatttcatagctctccttagtttactctgcctggatagaaagttgaccactaactgcaggtttaagtactaaactgcagccttttctgtcgccagcaattaaagaccaccaatcttgtttgtccatctacatggtttgtcggggacatttaactcatggaggtgctttagatttcaacatcagatggttgaagctggaagtttaattatatgtagagtgagaaggcagttccagttttagcacagatttgtttatgtgttcagattttaatagagattcaaaaatgactcatttttaccaataatgttaaattagttttggttgtgctagcatgaattaataaccaccattttataccagtatcatcagtgaagaattgtatttcaagattcaaacaataaccagcaattaaacttttttctacaatgtatttgtttgcgagtaggacttgggagtcattgggaaaaaaaaataataaattttccccttcattaacg

SEQ ID NO: 1150 - protein, 293 aa, Homosapiens; identical to SEQ ID NO: 1142

SEQ ID NO: 1151 - DNA, 1455 bp, Homosapiens
ctgcttttcctgtaccctgtttgtgacttaggagatgggggtggcctgcctttgcacattcttcctgcttccaccctcctgaattcaggattctgtgaatcagtgagctccaggttttggccttcccttcaacctctgcagctctgtcaattcctctactgggtttttcctagttttgccctttacttgagataattcactgtatttatgagttttgattttttaaaatgaaatgctcttgtcatttagggaggatttactgataatatatatgaggatctaatgctaagtttagaaagaaaagatatgagtgtcaatttctaacttctttattaaagattttacagaaaacggaaagtatttcaaaaactaatcgtcagacgtctacaaaaggccaggtaaaattttttttatcattttacatgcaagatattagagaaggataagtaggaaaacatattcaagactactgtagctgatcaatattcaaattgatgtgttttaaaatttattttaaggttttacgtaagaagaagaaaaaagtttcaggtactcttgacactcctgagaagactgtggatagccagggccccacaccagtttgtacaccaacatttttggagaggcgaaaatctcaagtggctgaactgaatgatgatgataaagatgatgaaatagttttcaaacagcccatatcctgtgtaaaagaagaaatacaagagactcaaacacctacacattcacggaaaaaaagacgaagaagcagcaatcagtgattttcaatgtattatatttcttttgaaaaatataatatttttatgagagtggactttgtatttcactaggtacaatggaatacaacctttgacaagattttcagaggaaaaatacactgtttggtcaagttaaggaaagcagtgtgtaattttggattgcctgcccttggctgaaatacaggggtgcataccatcttgcagtggcttggctgacattgcctctttgtcctggcctctagttttcttttgatatttcatagctctccttagtttactctgcctggatagaaagttgaccactaactgcaggtttaagtactaaactgcagccttttctgtcgccagcaattaaagaccaccaatcttgtttgtccatctacatggtttgtcggggacatttaactcatggaggtgctttagatttcaacatcagatggttgaagctggaagtttaattatatgtagagtgagaaggcagttccagttttagcacagatttgtttatgtgttcagattttaatagagattcaaaaatgactcatttttaccaataatgttaaattagttttggttgtgctagcatgaattaataaccaccattttataccagtatcatcagtgaagaattgtatttcaagattcaaacaataaccagcaattaaacttttttctacaatgt

SEQ ID NO: 1152 - protein, 93 aa, Homosapiens; identical to SEQ ID NO: 1138

SEQ ID NO: 1153 - DNA, 1335 bp, Homosapiens
ctgcttttcctgtaccctgtttgtgacttaggagatgggggtggcctgcctttgcacattcttcctgcttccaccctcctgaattcaggattctgtgaatcagtgagctccaggttttggccttcccttcaacctctgcagctctgtcaattcctctactgggtttttcctagttttgccctttacttgagataattcactgtatttatgagttttgattttttaaaatgaaatgctcttgtcatttagggaggatttactgataatatatatgaggatctaatgctaagtttagaaagaaaagatatgagtgtcaatttctaacttctttattaaagattttacagaaaacggaaagtatttcaaaaactaatcgtcagacgtctacaaaaggccaggttttacgtaagaagaagaaaaaagtttcaggtactcttgacactcctgagaagactgtggatagccagggccccacaccagtttgtacaccaacatttttggagaggcgaaaatctcaagtggctgaactgaatgatgatgataaagatgatgaaatagttttcaaacagcccatatcctgtgtaaaagaagaaatacaagagactcaaacacctacacattcacggaaaaaaagacgaagaagcagcaatcagtgattttcaatgtattatatttcttttgaaaaatataatatttttatgagagtggactttgtatttcactaggtacaatggaatacaacctttgacaagattttcagaggaaaaatacactgtttggtcaagttaaggaaagcagtgtgtaattttggattgcctgcccttggctgaaatacaggggtgcataccatcttgcagtggcttggctgacattgcctctttgtcctggcctctagttttcttttgatatttcatagctctccttagtttactctgcctggatagaaagttgaccactaactgcaggtttaagtactaaactgcagccttttctgtcgccagcaattaaagaccaccaatcttgtttgtccatctacatggtttgtcggggacatttaactcatggaggtgctttagatttcaacatcagatggttgaagctggaagtttaattatatgtagagtgagaaggcagttccagttttagcacagatttgtttatgtgttcagattttaatagagattcaaaaatgactcatttttaccaataatgttaaattagttttggttgtgctagcatgaattaataaccaccattttataccagtatcatcagtgaagaattgtatttcaagattcaaacaataaccagcaattaaacttttttctacaatgt

SEQ ID NO: 1154 - protein, 126 aa, Homosapiens; identical to SEQ ID NO: 1144

SEQ ID NO: 1155 - DNA, 1618 bp, Homosapiens
ccatggcctttgtggggagagaaacactaaacagccagttctttaattactactgtggtaagtggaaatgcagaataggttcttgggccgagggctaggggttttgttacaatgtgattttcttatttatatatttaatttacctggtctttacgtctttagcgaaaaaaacaagaacaacttactcctggagtagtctatgtgcgccacctacctaacctacttgacgaaacccagatcttttcatatttctcccagtttggcactgtgacacggttcaggctgtccagaagtaaaaggactggaaatagcaaaggctatgcatttgtggagtttgagtctgaggatgttgccaaaatagttgctgaaacaatgaacaactacctgtttggtgaaagactcttggagtgtcattttatgccacctgaaaaagtacataaagaactctttaaagactggaatattccatttaagcagccatcatatccatcagtgaaacggtataatcggaatcggacactaacacaaaagctacggatggaggagcgatttaaaaagaaagaaagattactcaggaagaaattagctaaaaaaggaattgactatgattttccttctttgattttacagaaaacggaaagtatttcaaaaactaatcgtcagacgtctacaaaaggccaggttttacgtaagaagaagaaaaaagtttcaggtactcttgacactcctgagaagactgtggatagccagggccccacaccagtttgtacaccaacatttttggagaggcgaaaatctcaagtggctgaactgaatgatgatgataaagatgatgaaatagttttcaaacagcccatatcctgtgtaaaagaagaaatacaagagactcaaacacctacacattcacggaaaaaaagacgaagaagcagcaatcagtgattttcaatgtattatatttcttttgaaaaatataatatttttatgagagtggactttgtatttcactaggtacaatggaatacaacctttgacaagattttcagaggaaaaatacactgtttggtcaagttaaggaaagcagtgtgtaattttggattgcctgcccttggctgaaatacaggggtgcataccatcttgcagtggcttggctgacattgcctctttgtcctggcctctagttttcttttgatatttcatagctctccttagtttactctgcctggatagaaagttgaccactaactgcaggtttaagtactaaactgcagccttttctgtcgccagcaattaaagaccaccaatcttgtttgtccatctacatggtttgtcggggacatttaactcatggaggtgctttagatttcaacatcagatggttgaagctggaagtttaattatatgtagagtgagaaggcagttccagttttagcacagatttgtttatgtgttcagattttaatagagattcaaaaatgactcatttttaccaataatgttaaattagttttggttgtgctagcatgaattaataaccaccattttataccagtatcatcagtgaagaattgtatttcaagattcaaacaataaccagcaattaaacttttttctacaatgt

SEQ ID NO: 1156 - protein, 188 aa, Homosapiens; identical to SEQ ID NO: 1140

SEQ ID NO: 1157 - DNA, 1625 bp, Homosapiens
tcgggggagctgggagcccgacgtttccgggagcgccgcgtggttagcgtcggcggcttttggcatggcgactttttctggcccggctgggccaatcctgtcgcttaatccgcaggaagatgtcgagtttcaaaaggaggtggcgcaggttcgcaagcgcataacccagcgaaaaaaacaagaacaacttactcctggagtagtctatgtgcgccacctacctaacctacttgacgaaacccagatcttttcatatttctcccagtttggcactgtgacacggttcaggctgtccagaagtaaaaggactggaaatagcaaaggctatgcatttgtggagtttgagtctgaggatgttgccaaaatagttgctgaaacaatgaacaactacctgtttggtgaaagactcttggagtgtcattttatgccacctgaaaaagtacataaagaactctttaaagactggaatattccatttaagcagccatcatatccatcagtgaaacggtataatcggaatcggacactaacacaaaagctacggatggaggagcgatttaaaaagaaagaaagattactcaggaagaaattagctaaaaaaggaattgactatgattttccttctttgattttacagaaaacggaaagtatttcaaaaactaatcgtcagacgtctacaaaaggccaggttttacgtaagaagaagaaaaaagtttcaggtactcttgacactcctgagaagactgtggatagccagggccccacaccagtttgtacaccaacatttttggagaggcgaaaatctcaagtggctgaactgaatgatgatgataaagatgatgaaatagttttcaaacagcccatatcctgtgtaaaagaagaaatacaagagactcaaacacctacacattcacggaaaaaaagacgaagaagcagcaatcagtgattttcaatgtattatatttcttttgaaaaatataatatttttatgagagtggactttgtatttcactaggtacaatggaatacaacctttgacaagattttcagaggaaaaatacactgtttggtcaagttaaggaaagcagtgtgtaattttggattgcctgcccttggctgaaatacaggggtgcataccatcttgcagtggcttggctgacattgcctctttgtcctggcctctagttttcttttgatatttcatagctctccttagtttactctgcctggatagaaagttgaccactaactgcaggtttaagtactaaactgcagccttttctgtcgccagcaattaaagaccaccaatcttgtttgtccatctacatggtttgtcggggacatttaactcatggaggtgctttagatttcaacatcagatggttgaagctggaagtttaattatatgtagagtgagaaggcagttccagttttagcacagatttgtttatgtgttcagattttaatagagattcaaaaatgactcatttttaccaataatgttaaattagttttggttgtgctagcatgaattaataaccaccattttataccagtatcatcagtgaagaattgtatttcaagattcaaacaataaccagcaattaaacttttttctacaatgt

SEQ ID NO: 1158 - protein, 293 aa, Homosapiens; identical to SEQ ID NO: 1142

SEQ ID NO: 1159 - DNA, 708 bp, Homosapiens
ctgcttttcctgtaccctgtttgtgacttaggagatgggggtggcctgcctttgcacattcttcctgcttccaccctcctgaattcaggattctgtgaatcagtgagctccaggttttggccttcccttcaacctctgcagctctgtcaattcctctactgggtttttcctagttttgccctttacttgagataattcactgtatttatgagttttgattttttaaaatgaaatgctcttgtcatttagggaggatttactgataatatatatgaggatctaatgctaagtttagaaagaaaagatatgagtgtcaatttctaacttctttattaaagattttacagaaaacggaaagtatttcaaaaactaatcgtcagacgtctacaaaaggccaggttttacgtaagaagaagaaaaaagtttcaggtactcttgacactcctgagaagactgtggatagccagggccccacaccagtttgtacaccaacatttttggagaggcgaaaatctcaagtggctgaactgaatgatgatgataaagatgatgaaatagttttcaaacagcccatatcctgtgtaaaagaagaaatacaagagactcaaacacctacacattcacggaaaaaaagacgaagaagcagcaatcagtgattttcaatgtattatatttcttttgaaaaatataatatttttatgagagtgg

SEQ ID NO: 1160 - protein, 126 aa, Homosapiens; identical to SEQ ID NO: 1144

SEQ ID NO: 1161 - DNA, 828 bp, Homosapiens
ctgcttttcctgtaccctgtttgtgacttaggagatgggggtggcctgcctttgcacattcttcctgcttccaccctcctgaattcaggattctgtgaatcagtgagctccaggttttggccttcccttcaacctctgcagctctgtcaattcctctactgggtttttcctagttttgccctttacttgagataattcactgtatttatgagttttgattttttaaaatgaaatgctcttgtcatttagggaggatttactgataatatatatgaggatctaatgctaagtttagaaagaaaagatatgagtgtcaatttctaacttctttattaaagattttacagaaaacggaaagtatttcaaaaactaatcgtcagacgtctacaaaaggccaggtaaaattttttttatcattttacatgcaagatattagagaaggataagtaggaaaacatattcaagactactgtagctgatcaatattcaaattgatgtgttttaaaatttattttaaggttttacgtaagaagaagaaaaaagtttcaggtactcttgacactcctgagaagactgtggatagccagggccccacaccagtttgtacaccaacatttttggagaggcgaaaatctcaagtggctgaactgaatgatgatgataaagatgatgaaatagttttcaaacagcccatatcctgtgtaaaagaagaaatacaagagactcaaacacctacacattcacggaaaaaaagacgaagaagcagcaatcagtgattttcaatgtattatatttcttttgaaaaatataatatttttatgagagtgg

SEQ ID NO: 1162 - protein, 93 aa, Homosapiens; identical to SEQ ID NO: 1138

SEQ ID NO: 1163 - DNA, 667 bp, Homosapiens
tcattttgttgtgtgaggaatggcactgcggagattctaaagttaacattaaaatacctttatgtttttttctttttgaaaataggtcattttatgccacctgaaaaagtacataaagaactctttaaagactggaatattccatttaagcagccatcatatccatcagtgaaacggtataatcggaatcggacactaacacaaaagctacggatggaggagcgatttaaaaagaaagaaagattactcaggaagaaattagctaaaaaaggaattgactatgattttccttctttgattttacagaaaacggaaagtatttcaaaaactaatcgtcagacgtctacaaaaggccaggttttacgtaagaagaagaaaaaagtttcaggtactcttgacactcctgagaagactgtggatagccagggccccacaccagtttgtacaccaacatttttggagaggcgaaaatctcaagtggctgaactgaatgatgatgataaagatgatgaaatagttttcaaacagcccatatcctgtgtaaaagaagaaatacaagagactcaaacacctacacattcacggaaaaaaagacgaagaagcagcaatcagtgattttcaatgtattatatttcttttgaaaaatataatatttttatgagagtgg

SEQ ID NO: 1164 - protein, 173 aa, Homosapiens
MPPEKVHKELFKDWNIPFKQPSYPSVKRYNRNRTLTQKLRMEERFKKKERLLRKKLAKKGIDYDFPSLILQKTESISKTNRQTSTKGQVLRKKKKKVSGTLDTPEKTVDSQGPTPVCTPTFLERRKSQVAELNDDDKDDEIVFKQPISCVKEEIQETQTPTHSRKKRRRSSNQ

SEQ ID NO: 1165 - DNA, 991 bp, Homosapiens
ccatggcctttgtggggagagaaacactaaacagccagttctttaattactactgtggtaagtggaaatgcagaataggttcttgggccgagggctaggggttttgttacaatgtgattttcttatttatatatttaatttacctggtctttacgtctttagcgaaaaaaacaagaacaacttactcctggagtagtctatgtgcgccacctacctaacctacttgacgaaacccagatcttttcatatttctcccagtttggcactgtgacacggttcaggctgtccagaagtaaaaggactggaaatagcaaaggctatgcatttgtggagtttgagtctgaggatgttgccaaaatagttgctgaaacaatgaacaactacctgtttggtgaaagactcttggagtgtcattttatgccacctgaaaaagtacataaagaactctttaaagactggaatattccatttaagcagccatcatatccatcagtgaaacggtataatcggaatcggacactaacacaaaagctacggatggaggagcgatttaaaaagaaagaaagattactcaggaagaaattagctaaaaaaggaattgactatgattttccttctttgattttacagaaaacggaaagtatttcaaaaactaatcgtcagacgtctacaaaaggccaggttttacgtaagaagaagaaaaaagtttcaggtactcttgacactcctgagaagactgtggatagccagggccccacaccagtttgtacaccaacatttttggagaggcgaaaatctcaagtggctgaactgaatgatgatgataaagatgatgaaatagttttcaaacagcccatatcctgtgtaaaagaagaaatacaagagactcaaacacctacacattcacggaaaaaaagacgaagaagcagcaatcagtgattttcaatgtattatatttcttttgaaaaatataatatttttatgagagtgg

SEQ ID NO: 1166 - protein, 188 aa, Homosapiens; identical to SEQ ID NO: 1140

SEQ ID NO: 1167 - DNA, 998 bp, Homosapiens
tcgggggagctgggagcccgacgtttccgggagcgccgcgtggttagcgtcggcggcttttggcatggcgactttttctggcccggctgggccaatcctgtcgcttaatccgcaggaagatgtcgagtttcaaaaggaggtggcgcaggttcgcaagcgcataacccagcgaaaaaaacaagaacaacttactcctggagtagtctatgtgcgccacctacctaacctacttgacgaaacccagatcttttcatatttctcccagtttggcactgtgacacggttcaggctgtccagaagtaaaaggactggaaatagcaaaggctatgcatttgtggagtttgagtctgaggatgttgccaaaatagttgctgaaacaatgaacaactacctgtttggtgaaagactcttggagtgtcattttatgccacctgaaaaagtacataaagaactctttaaagactggaatattccatttaagcagccatcatatccatcagtgaaacggtataatcggaatcggacactaacacaaaagctacggatggaggagcgatttaaaaagaaagaaagattactcaggaagaaattagctaaaaaaggaattgactatgattttccttctttgattttacagaaaacggaaagtatttcaaaaactaatcgtcagacgtctacaaaaggccaggttttacgtaagaagaagaaaaaagtttcaggtactcttgacactcctgagaagactgtggatagccagggccccacaccagtttgtacaccaacatttttggagaggcgaaaatctcaagtggctgaactgaatgatgatgataaagatgatgaaatagttttcaaacagcccatatcctgtgtaaaagaagaaatacaagagactcaaacacctacacattcacggaaaaaaagacgaagaagcagcaatcagtgattttcaatgtattatatttcttttgaaaaatataatatttttatgagagtgg

SEQ ID NO: 1168 - protein, 293 aa, Homosapiens; identical to SEQ ID NO: 1142

SEQ ID NO: 1169 - DNA, 1233 bp, Homosapiens
cctctcctctgccctttggacgcgcgcctcggttccgaacgcagcggacggcgcctcaggcagcgcggcggacagcccgtcctccggcgcgccgcgagcctcggaggaccctagcgacggtcgtggcgtaagaccggggggacgcggcggtagcggcggccgttgcgattgattgcgctggttgcctgcggcgtccacttccttggccgcccttgctacactggctgattgttgtgcagccggcgccatgtctgtgagcgagatcttcgtggagctgcagggctttttggctgccgagcaggacatccgagaggaaatcagaaaagttgtacagagtttagaacaaacagctcgagagattttaactctactgcaaggggtccatcagggtgctgggtttcaggacattccaaagaggtgtttgaaagctcgagaacattttggtacagtaaaaacacatctaacatctttgaagaccaaatttcctgctgaacagtattacagatttcatgagcactggaggtttgtgttgcagcgcttggtcttcttggcagcatttgttgtgtatttggaaacagaaacactagtgactcgagaagcagttacagaaattcttggcattgagccagatcgggagaaaggatttcatctggatgtagaagattatctctcaggagttctaattcttgccagtgaactgtcgaggctgtctgtcaacagcgtgactgctggagactactcccgacccctccacatctccaccttcatcaatgagctggattccggttttcgccttctcaacctgaaaaatgactccctgaggaagcgctacgacggattgaaatatgacgtgaagaaagtagaggaagtggtctatgatctctccatccggggctttaataaggagacggcagcagcttgtgttgaaaaataggaggctctccttgctcctggccttgctgacctcagcggttgccaggaaggggtgagcacagagtgcctcttacggtagttaggatgctcagttgctaaacactgcgctttattttcttaaccagttgtggtgtgagtatcagaattgaaacacttttttgggggtaaaaaatatagcctttacatggacagaattttttttgttgtttcagtgaatatgcctgtaattcagtgtatttcagttccgtcagaaagtgtaaatgttagtttcttggtaaagtccttttcttgcttaccttg

SEQ ID NO: 1170 - protein, 228 aa, Homosapiens; identical to SEQ ID NO: 58

SEQ ID NO: 1171 - DNA, 1390 bp, Homosapiens
cctctcctctgccctttggacgcgcgcctcggttccgaacgcagcggacggcgcctcaggcagcgcggcggacagcccgtcctccggcgcgccgcgagcctcggaggaccctagcgacggtcgtggcgtaagaccggggggacgcggcggtagcggcggccgttgcgattgattgcgctggttgcctgcggcgtccacttccttggccgcccttgctacactggctgattgttgtgcagccggcgccatgtctgtgagcgagatcttcgtggagctgcagggctttttggctgccgagcaggacatccgagaggaaatcagaaaagttgtacagagtttagaacaaacagctcgagagattttaactctactgcaaggggtccatcagggtgctgggtttcaggacattccaaagaggtgtttgaaagctcgagaacattttggtacagtaaaaacacatctaacatctttgaagaccaaatttcctgctgaacagtattacagatttcatgagcactggaggtttgtgttgcagcgcttggtcttcttggcagcatttgttgtgtatttggaaacagaaacactagtgactcgagaagcagttacagaaattcttggcattgagccagatcgggagaaaggatttcatctggatgtagaagattatctctcaggagttctaattcttgccagtgaactgtcgaggctgtctgtcaacagcgtgactgctggagactactcccgacccctccacatctccaccttcatcaatgagctggattccggttttcgccttctcaacctgaaaaatgactccctgaggaagcgctacgacggattgaaatatgacgtgaagaaagtagaggaagtggtctatgatctctccatccggggctttaataaggagacggcagcagcttgtgttgaaaaataggaggctctccttgctcctggccttgctgacctcagcggttgccaggaaggggtgagcacagagtgcctcttacggtagttaggatgctcagttgctaaacactgcgctttattttcttaaccagttgtggtgtgagtatcagaattgaaacacttttttgggggtaaaaaatatagcctttacatggacagaattttttttgttgtttcagtgaatatgcctgtaattcagtgtatttcagttccgtcagaaagtgtaaatgttagtttcttggtaaagtccttttcttgcttaccttgactgttgatgtactgattgagaagttcattgtctcgtttgtgattcttccagatgtgatgcttgatattttctatatgcgagttagccatccacacccaggcatagcctggatacagtataaaaatagataattaaaaagatggttgccaagcaagg

SEQ ID NO: 1172 - protein, 228 aa, Homosapiens; identical to SEQ ID NO: 58

SEQ ID NO: 1173 - DNA, 2858 bp, Homosapiens
cctctcctctgccctttggacgcgcgcctcggttccgaacgcagcggacggcgcctcaggcagcgcggcggacagcccgtcctccggcgcgccgcgagcctcggaggaccctagcgacggtcgtggcgtaagaccggggggacgcggcggtagcggcggccgttgcgattgattgcgctggttgcctgcggcgtccacttccttggccgcccttgctacactggctgattgttgtgcagccggcgccatgtctgtgagcgagatcttcgtggagctgcagggctttttggctgccgagcaggacatccgagaggaaatcagaaaagttgtacagagtttagaacaaacagctcgagagattttaactctactgcaaggggtccatcagggtgctgggtttcaggacattccaaagaggtgtttgaaagctcgagaacattttggtacagtaaaaacacatctaacatctttgaagaccaaatttcctgctgaacagtattacagatttcatgagcactggaggtttgtgttgcagcgcttggtcttcttggcagcatttgttgtgtatttggaaacagaaacactagtgactcgagaagcagttacagaaattcttggcattgagccagatcgggagaaaggatttcatctggatgtagaagattatctctcaggagttctaattcttgccagtgaactgtcgaggctgtctgtcaacagcgtgactgctggagactactcccgacccctccacatctccaccttcatcaatgagctggattccggttttcgccttctcaacctgaaaaatgactccctgaggaagcgctacgacggattgaaatatgacgtgaagaaagtagaggaagtggtctatgatctctccatccggggctttaataaggagacggcagcagcttgtgttgaaaaataggaggctctccttgctcctggccttgctgacctcagcggttgccaggaaggggtgagcacagagtgcctcttacggtagttaggatgctcagttgctaaacactgcgctttattttcttaaccagttgtggtgtgagtatcagaattgaaacacttttttgggggtaaaaaatatagcctttacatggacagaattttttttgttgtttcagtgaatatgcctgtaattcagtgtatttcagttccgtcagaaagtgtaaatgttagtttcttggtaaagtccttttcttgcttaccttgactgttgatgtactgattgagaagttcattgtctcgtttgtgattcttccagatgtgatgcttgatattttctatatgcgagttagccatccacacccaggcatagcctggatacagtataaaaatagataattaaaaagatggttgccaagcaaggaaaacttattttatattttcccttccttattttaagcattgtgagtaaatcagatgttgaattcttttgccaagggaattatagctgcaggttctctctcactgccatcaaactgtaaaagattaaactgcgaagtcaagctcaacagattattttggaaagtttttgtattaagggatttagtaacatcattttgttttccaccaggcagggagtagggcttagtgttttaaaacacctctgctttctgatgttgccttaatattctgctattgcagcaattaaaaattgtcttcatgtacatttggaactaacacgtgatgtgatatattcctaaactatgaaacctttttcctagtagtcagctagatcatttgttctgggagtataaagccacccacgtaagttaataagcaaaatcctgactattatgttgttagagaaaaatgctttgctttgtctggaagaaagataaaatagtgaattataaataagtcaggccgggcgtggtggctcacacctgtaatcccagcacactgggaggccgaggcagggggactgcttgagctcaggagttcgagaccagcctgggcaacaaagtgagactccatctctatataaaaacaaaaaccacgaaagcacacacaaaataaatcagtgggatttggtaatgtgttttagagtaagaaatttcaggttgttggtgactatcccaacagtcatgttttaaatgtacagtttggggcaagtcatgtaaatactgttggtggtcttccccacacgccccaattttcaggtagtactaagagtatgtgccaggaaactcttgctattgaattgagatgattaaaatggtgacttaatccgtagttattttgcacccactgaaaggaaagtgctttccagaataatatgaagtatctaaaagtgtcaccttttcttgcctgatcaacaatttgggcttcctgtttgtacaaggggccatttggcatacctttcacagcttttatcaggccaagttaaaggctgactacattttttcatcatgaggaaagcagttgaaatgaggcatgagttactgtgcattgggattttagaacaattttcttgtgacagctctttttgtgaagttaggttcttaaaagtgcccatgatggtcacttaaaatgtgcagtaatagcactgccaggatcaagcatgaaaggcttttaaattagatcatcccacagacaatacgtttgataatagttttttcttttaacctctttaagtattgattctgcttgagaatattgaagtacttgccagaagttgtggatttcagttttaacaaatgctattaaagtggagaagcacactctggtcttggaattccatttgaggatttagaagtgtcatgtttataactattcagttgtgtttgttgctggcttgttgtaaagcaataaaatttttttggtctttttgt

SEQ ID NO: 1174 - protein, 228 aa, Homosapiens; identical to SEQ ID NO: 58

SEQ ID NO: 1175 - DNA, 3420 bp, Homosapiens
cctctcctctgccctttggacgcgcgcctcggttccgaacgcagcggacggcgcctcaggcagcgcggcggacagcccgtcctccggcgcgccgcgagcctcggaggaccctagcgacggtcgtggcgtaagaccggggggacgcggcggtagcggcggccgttgcgattgattgcgctggttgcctgcggcgtccacttccttggccgcccttgctacactggctgattgttgtgcagccggcgccatgtctgtgagcgagatcttcgtggagctgcagggctttttggctgccgagcaggacatccgagaggaaatcagaaaagttgtacagagtttagaacaaacagctcgagagattttaactctactgcaaggggtccatcagggtgctgggtttcaggacattccaaagaggtgtttgaaagctcgagaacattttggtacagtaaaaacacatctaacatctttgaagaccaaatttcctgctgaacagtattacagatttcatgagcactggaggtttgtgttgcagcgcttggtcttcttggcagcatttgttgtgtatttggaaacagaaacactagtgactcgagaagcagttacagaaattcttggcattgagccagatcgggagaaaggatttcatctggatgtagaagattatctctcaggagttctaattcttgccagtgaactgtcgaggctgtctgtcaacagcgtgactgctggagactactcccgacccctccacatctccaccttcatcaatgagctggattccggttttcgccttctcaacctgaaaaatgactccctgaggaagcgctacgacggattgaaatatgacgtgaagaaagtagaggaagtggtctatgatctctccatccggggctttaataaggagacggcagcagcttgtgttgaaaaataggaggctctccttgctcctggccttgctgacctcagcggttgccaggaaggggtgagcacagagtgcctcttacggtagttaggatgctcagttgctaaacactgcgctttattttcttaaccagttgtggtgtgagtatcagaattgaaacacttttttgggggtaaaaaatatagcctttacatggacagaattttttttgttgtttcagtgaatatgcctgtaattcagtgtatttcagttccgtcagaaagtgtaaatgttagtttcttggtaaagtccttttcttgcttaccttgactgttgatgtactgattgagaagttcattgtctcgtttgtgattcttccagatgtgatgcttgatattttctatatgcgagttagccatccacacccaggcatagcctggatacagtataaaaatagataattaaaaagatggttgccaagcaaggaaaacttattttatattttcccttccttattttaagcattgtgagtaaatcagatgttgaattcttttgccaagggaattatagctgcaggttctctctcactgccatcaaactgtaaaagattaaactgcgaagtcaagctcaacagattattttggaaagtttttgtattaagggatttagtaacatcattttgttttccaccaggcagggagtagggcttagtgttttaaaacacctctgctttctgatgttgccttaatattctgctattgcagcaattaaaaattgtcttcatgtacatttggaactaacacgtgatgtgatatattcctaaactatgaaacctttttcctagtagtcagctagatcatttgttctgggagtataaagccacccacgtaagttaataagcaaaatcctgactattatgttgttagagaaaaatgctttgctttgtctggaagaaagataaaatagtgaattataaataagtcaggccgggcgtggtggctcacacctgtaatcccagcacactgggaggccgaggcagggggactgcttgagctcaggagttcgagaccagcctgggcaacaaagtgagactccatctctatataaaaacaaaaaccacgaaagcacacacaaaataaatcagtgggatttggtaatgtgttttagagtaagaaatttcaggttgttggtgactatcccaacagtcatgttttaaatgtacagtttggggcaagtcatgtaaatactgttggtggtcttccccacacgccccaattttcaggtagtactaagagtatgtgccaggaaactcttgctattgaattgagatgattaaaatggtgacttaatccgtagttattttgcacccactgaaaggaaagtgctttccagaataatatgaagtatctaaaagtgtcaccttttcttgcctgatcaacaatttgggcttcctgtttgtacaaggggccatttggcatacctttcacagcttttatcaggccaagttaaaggctgactacattttttcatcatgaggaaagcagttgaaatgaggcatgagttactgtgcattgggattttagaacaattttcttgtgacagctctttttgtgaagttaggttcttaaaagtgcccatgatggtcacttaaaatgtgcagtaatagcactgccaggatcaagcatgaaaggcttttaaattagatcatcccacagacaatacgtttgataatagttttttcttttaacctctttaagtattgattctgcttgagaatattgaagtacttgccagaagttgtggatttcagttttaacaaatgctattaaagtggagaagcacactctggtcttggaattccatttgaggatttagaagtgtcatgtttataactattcagttgtgtttgttgctggcttgttgtaaagcaataaaatttttttggtctttttgtaagtgagtgtgctgctgtaagaaatctcccatgtgcataacaaattctgaatattttttgaggctaaagaagaccggggtgacaagcagatactgctgtgtaatggttacactaaccaaaagacaccagccactcagagttctatactgtaaagcgcagataacatttgtgtgttataccttgattggggaattaaaagtcatttaactgaagatgttgagaaacctgggctctggttttagtataccggaattacttttttccaattttagaaaatcaagcaggttagagaaaatagagatgaattaggggacactgtcttatggattcatttataagaagagaaccagccatatacacttggggagatttgccacatcttaaacttgaataatagtatgagtaatgcttaagggagtttaatagagaaggaaagctttggcagtgttttgagaacttaagtggctaaagagatgagacaaacatgcaggtcgctactggcatagtttcataattgtgtactcggaaattaaagtttgcttgtttcttggtctggattaaa

SEQ ID NO: 1176 - protein, 228 aa, Homosapiens; identical to SEQ ID NO: 58

SEQ ID NO: 1177 - DNA, 1141 bp, Homosapiens
cctttggacgcgcgcctcggttccgaacgcagcggacggcgcctcaggcagcgcggcggacagcccgtcctccggcgcgccgcgagcctcggaggaccctagcgacggtcgtggcgtaagaccggggggacgcggcggtagcggcggccgttgcgattgattgcgctggttgcctgcggcgtccacttccttggccgcccttgctacactggctgattgttgtgcagccggcgccatgtctgtgagcgagatcttcgtggagctgcagggctttttggctgccgagcaggacatccgagaggaaatcagaaaagttgtacagagtttagaacaaacagctcgagagattttaactctactgcaaggggtccatcagggtgctgggtttcaggacattccaaagaggtgtttgaaagctcgagaacattttggtacagtaaaaacacatctaacatctttgaagaccaaatttcctgctgaacagtattacagatttcatgagcactggaggtttgtgttgcagcgcttggtcttcttggcagcatttgttgtgtatttggaaacagaaacactagtgactcgagaagcagttacagaaattcttggcatcgaggctgtctgtcaacagcgtgactgctggagactactcccgacccctccacatctccaccttcatcaatgagctggattccggttttcgccttctcaacctgaaaaatgactccctgaggaagcgctacgacggattgaaatatgacgtgaagaaagtagaggaagtggtctatgatctctccatccggggctttaataaggagacggcagcagcttgtgttgaaaaataggaggctctccttgctcctggccttgctgacctcagcggttgccaggaaggggtgagcacagagtgcctcttacggtagttaggatgctcagttgctaaacactgcgctttattttcttaaccagttgtggtgtgagtatcagaattgaaacacttttttgggggtaaaaaatatagcctttacatggacagaattttttttgttgtttcagtgaatatgcctgtaattcagtgtatttcagttccgtcagaaagtgtaaatgttagtttcttggtaaagtccttttcttgcttaccttg

SEQ ID NO: 1178 - protein, 148 aa, Homosapiens
MSVSEIFVELQGFLAAEQDIREEIRKVVQSLEQTAREILTLLQGVHQGAGFQDIPKRCLKAREHFGTVKTHLTSLKTKFPAEQYYRFHEHWRFVLQRLVFLAAFVVYLETETLVTREAVTEILGIEAVCQQRDCWRLLPTPPHLHLHQ

SEQ ID NO: 1179 - DNA, 1298 bp, Homosapiens
cctttggacgcgcgcctcggttccgaacgcagcggacggcgcctcaggcagcgcggcggacagcccgtcctccggcgcgccgcgagcctcggaggaccctagcgacggtcgtggcgtaagaccggggggacgcggcggtagcggcggccgttgcgattgattgcgctggttgcctgcggcgtccacttccttggccgcccttgctacactggctgattgttgtgcagccggcgccatgtctgtgagcgagatcttcgtggagctgcagggctttttggctgccgagcaggacatccgagaggaaatcagaaaagttgtacagagtttagaacaaacagctcgagagattttaactctactgcaaggggtccatcagggtgctgggtttcaggacattccaaagaggtgtttgaaagctcgagaacattttggtacagtaaaaacacatctaacatctttgaagaccaaatttcctgctgaacagtattacagatttcatgagcactggaggtttgtgttgcagcgcttggtcttcttggcagcatttgttgtgtatttggaaacagaaacactagtgactcgagaagcagttacagaaattcttggcatcgaggctgtctgtcaacagcgtgactgctggagactactcccgacccctccacatctccaccttcatcaatgagctggattccggttttcgccttctcaacctgaaaaatgactccctgaggaagcgctacgacggattgaaatatgacgtgaagaaagtagaggaagtggtctatgatctctccatccggggctttaataaggagacggcagcagcttgtgttgaaaaataggaggctctccttgctcctggccttgctgacctcagcggttgccaggaaggggtgagcacagagtgcctcttacggtagttaggatgctcagttgctaaacactgcgctttattttcttaaccagttgtggtgtgagtatcagaattgaaacacttttttgggggtaaaaaatatagcctttacatggacagaattttttttgttgtttcagtgaatatgcctgtaattcagtgtatttcagttccgtcagaaagtgtaaatgttagtttcttggtaaagtccttttcttgcttaccttgactgttgatgtactgattgagaagttcattgtctcgtttgtgattcttccagatgtgatgcttgatattttctatatgcgagttagccatccacacccaggcatagcctggatacagtataaaaatagataattaaaaagatggttgccaagcaagg

SEQ ID NO: 1180 - protein, 148 aa, Homosapiens; identical to SEQ ID NO: 1178

SEQ ID NO: 1181 - DNA, 2766 bp, Homosapiens
cctttggacgcgcgcctcggttccgaacgcagcggacggcgcctcaggcagcgcggcggacagcccgtcctccggcgcgccgcgagcctcggaggaccctagcgacggtcgtggcgtaagaccggggggacgcggcggtagcggcggccgttgcgattgattgcgctggttgcctgcggcgtccacttccttggccgcccttgctacactggctgattgttgtgcagccggcgccatgtctgtgagcgagatcttcgtggagctgcagggctttttggctgccgagcaggacatccgagaggaaatcagaaaagttgtacagagtttagaacaaacagctcgagagattttaactctactgcaaggggtccatcagggtgctgggtttcaggacattccaaagaggtgtttgaaagctcgagaacattttggtacagtaaaaacacatctaacatctttgaagaccaaatttcctgctgaacagtattacagatttcatgagcactggaggtttgtgttgcagcgcttggtcttcttggcagcatttgttgtgtatttggaaacagaaacactagtgactcgagaagcagttacagaaattcttggcatcgaggctgtctgtcaacagcgtgactgctggagactactcccgacccctccacatctccaccttcatcaatgagctggattccggttttcgccttctcaacctgaaaaatgactccctgaggaagcgctacgacggattgaaatatgacgtgaagaaagtagaggaagtggtctatgatctctccatccggggctttaataaggagacggcagcagcttgtgttgaaaaataggaggctctccttgctcctggccttgctgacctcagcggttgccaggaaggggtgagcacagagtgcctcttacggtagttaggatgctcagttgctaaacactgcgctttattttcttaaccagttgtggtgtgagtatcagaattgaaacacttttttgggggtaaaaaatatagcctttacatggacagaattttttttgttgtttcagtgaatatgcctgtaattcagtgtatttcagttccgtcagaaagtgtaaatgttagtttcttggtaaagtccttttcttgcttaccttgactgttgatgtactgattgagaagttcattgtctcgtttgtgattcttccagatgtgatgcttgatattttctatatgcgagttagccatccacacccaggcatagcctggatacagtataaaaatagataattaaaaagatggttgccaagcaaggaaaacttattttatattttcccttccttattttaagcattgtgagtaaatcagatgttgaattcttttgccaagggaattatagctgcaggttctctctcactgccatcaaactgtaaaagattaaactgcgaagtcaagctcaacagattattttggaaagtttttgtattaagggatttagtaacatcattttgttttccaccaggcagggagtagggcttagtgttttaaaacacctctgctttctgatgttgccttaatattctgctattgcagcaattaaaaattgtcttcatgtacatttggaactaacacgtgatgtgatatattcctaaactatgaaacctttttcctagtagtcagctagatcatttgttctgggagtataaagccacccacgtaagttaataagcaaaatcctgactattatgttgttagagaaaaatgctttgctttgtctggaagaaagataaaatagtgaattataaataagtcaggccgggcgtggtggctcacacctgtaatcccagcacactgggaggccgaggcagggggactgcttgagctcaggagttcgagaccagcctgggcaacaaagtgagactccatctctatataaaaacaaaaaccacgaaagcacacacaaaataaatcagtgggatttggtaatgtgttttagagtaagaaatttcaggttgttggtgactatcccaacagtcatgttttaaatgtacagtttggggcaagtcatgtaaatactgttggtggtcttccccacacgccccaattttcaggtagtactaagagtatgtgccaggaaactcttgctattgaattgagatgattaaaatggtgacttaatccgtagttattttgcacccactgaaaggaaagtgctttccagaataatatgaagtatctaaaagtgtcaccttttcttgcctgatcaacaatttgggcttcctgtttgtacaaggggccatttggcatacctttcacagcttttatcaggccaagttaaaggctgactacattttttcatcatgaggaaagcagttgaaatgaggcatgagttactgtgcattgggattttagaacaattttcttgtgacagctctttttgtgaagttaggttcttaaaagtgcccatgatggtcacttaaaatgtgcagtaatagcactgccaggatcaagcatgaaaggcttttaaattagatcatcccacagacaatacgtttgataatagttttttcttttaacctctttaagtattgattctgcttgagaatattgaagtacttgccagaagttgtggatttcagttttaacaaatgctattaaagtggagaagcacactctggtcttggaattccatttgaggatttagaagtgtcatgtttataactattcagttgtgtttgttgctggcttgttgtaaagcaataaaatttttttggtctttttgt

SEQ ID NO: 1182 - protein, 148 aa, Homosapiens; identical to SEQ ID NO: 1178

SEQ ID NO: 1183 - DNA, 3325 bp, Homosapiens
cctttggacgcgcgcctcggttccgaacgcagcggacggcgcctcaggcagcgcggcggacagcccgtcctccggcgcgccgcgagcctcggaggaccctagcgacggtcgtggcgtaagaccggggggacgcggcggtagcggcggccgttgcgattgattgcgctggttgcctgcggcgtccacttccttggccgcccttgctacactggctgattgttgtgcagccggcgccatgtctgtgagcgagatcttcgtggagctgcagggctttttggctgccgagcaggacatccgagaggaaatcagaaaagttgtacagagtttagaacaaacagctcgagagattttaactctactgcaaggggtccatcagggtgctgggtttcaggacattccaaagaggtgtttgaaagctcgagaacattttggtacagtaaaaacacatctaacatctttgaagaccaaatttcctgctgaacagtattacagatttcatgagcactggaggtttgtgttgcagcgcttggtcttcttggcagcatttgttgtgtatttggaaacagaaacactagtgactcgagaagcagttacagaaattcttggcatcgaggctgtctgtcaacagcgtgactgctggagactactcccgacccctccacatctccaccttcatcaatgagctggattccggttttcgccttctcaacctgaaaaatgactccctgaggaagcgctacgacggattgaaatatgacgtgaagaaagtagaggaagtggtctatgatctctccatccggggctttaataaggagacggcagcagcttgtgttgaaaaataggaggctctccttgctcctggccttgctgacctcagcggttgccaggaaggggtgagcacagagtgcctcttacggtagttaggatgctcagttgctaaacactgcgctttattttcttaaccagttgtggtgtgagtatcagaattgaaacacttttttgggggtaaaaaatatagcctttacatggacagaattttttttgttgtttcagtgaatatgcctgtaattcagtgtatttcagttccgtcagaaagtgtaaatgttagtttcttggtaaagtccttttcttgcttaccttgactgttgatgtactgattgagaagttcattgtctcgtttgtgattcttccagatgtgatgcttgatattttctatatgcgagttagccatccacacccaggcatagcctggatacagtataaaaatagataattaaaaagatggttgccaagcaaggaaaacttattttatattttcccttccttattttaagcattgtgagtaaatcagatgttgaattcttttgccaagggaattatagctgcaggttctctctcactgccatcaaactgtaaaagattaaactgcgaagtcaagctcaacagattattttggaaagtttttgtattaagggatttagtaacatcattttgttttccaccaggcagggagtagggcttagtgttttaaaacacctctgctttctgatgttgccttaatattctgctattgcagcaattaaaaattgtcttcatgtacatttggaactaacacgtgatgtgatatattcctaaactatgaaacctttttcctagtagtcagctagatcatttgttctgggagtataaagccacccacgtaagttaataagcaaaatcctgactattatgttgttagagaaaaatgctttgctttgtctggaagaaagataaaatagtgaattataaataagtcaggccgggcgtggtggctcacacctgtaatcccagcacactgggaggccgaggcagggggactgcttgagctcaggagttcgagaccagcctgggcaacaaagtgagactccatctctatataaaaacaaaaaccacgaaagcacacacaaaataaatcagtgggatttggtaatgtgttttagagtaagaaatttcaggttgttggtgactatcccaacagtcatgttttaaatgtacagtttggggcaagtcatgtaaatactgttggtggtcttccccacacgccccaattttcaggtagtactaagagtatgtgccaggaaactcttgctattgaattgagatgattaaaatggtgacttaatccgtagttattttgcacccactgaaaggaaagtgctttccagaataatatgaagtatctaaaagtgtcaccttttcttgcctgatcaacaatttgggcttcctgtttgtacaaggggccatttggcatacctttcacagcttttatcaggccaagttaaaggctgactacattttttcatcatgaggaaagcagttgaaatgaggcatgagttactgtgcattgggattttagaacaattttcttgtgacagctctttttgtgaagttaggttcttaaaagtgcccatgatggtcacttaaaatgtgcagtaatagcactgccaggatcaagcatgaaaggcttttaaattagatcatcccacagacaatacgtttgataatagttttttcttttaacctctttaagtattgattctgcttgagaatattgaagtacttgccagaagttgtggatttcagttttaacaaatgctattaaagtggagaagcacactctggtcttggaattccatttgaggatttagaagtgtcatgtttataactattcagttgtgtttgttgctggcttgttgtaaagcaataaaatttttttggtctttttgtaagtgagtgtgctgctgtaagaaatctcccatgtgcataacaaattctgaatattttttgaggctaaagaagaccggggtgacaagcagatactgctgtgtaatggttacactaaccaaaagacaccagccactcagagttctatactgtaaagcgcagataacatttgtgtgttataccttgattggggaattaaaagtcatttaactgaagatgttgagaaacctgggctctggttttagtataccggaattacttttttccaattttagaaaatcaagcaggttagagaaaatagagatgaattaggggacactgtcttatggattcatttataagaagagaaccagccatatacacttggggagatttgccacatcttaaacttgaataatagtatgagtaatgcttaagggagtttaatagagaaggaaagctttggcagtgttttgagaacttaagtggctaaagagatgagacaaacatgcaggtcgctactggcatagtttcataattgtgtactcggaaattaaagtttgcttgtttcttggtctggatt

SEQ ID NO: 1184 - protein, 148 aa, Homosapiens; identical to SEQ ID NO: 1178

SEQ ID NO: 1185 - DNA, 811 bp, Homosapiens
gacggtcgtggcgtaagaccggggggacgcggcggtagcggcggccgttgcgattgattgcgctggttgcctgcggcgtccacttccttggccgcccttgctacactggctgattgttgtgcagccggcgccatgtctgtgagcgagatcttcgtggagctgcagggctttttggctgccgagcaggacatccgagagttgagccagatcgggagaaaggatttcatctggatgtagaagattatctctcaggagttctaattcttgccagtgaactgtcgaggctgtctgtcaacagcgtgactgctggagactactcccgacccctccacatctccaccttcatcaatgagctggattccggttttcgccttctcaacctgaaaaatgactccctgaggaagcgctacgacggattgaaatatgacgtgaagaaagtagaggaagtggtctatgatctctccatccggggctttaataaggagacggcagcagcttgtgttgaaaaataggaggctctccttgctcctggccttgctgacctcagcggttgccaggaaggggtgagcacagagtgcctcttacggtagttaggatgctcagttgctaaacactgcgctttattttcttaaccagttgtggtgtgagtatcagaattgaaacacttttttgggggtaaaaaatatagcctttacatggacagaattttttttgttgtttcagtgaatatgcctgtaattcagtgtatttcagttccgtcagaaagtgtaaatgttagtttcttggtaaagtccttttcttgcttaccttg

SEQ ID NO: 1186 - protein, 34 aa, Homosapiens
MSVSEIFVELQGFLAAEQDIRELSQIGRKDFIWM

SEQ ID NO: 1187 - DNA, 968 bp, Homosapiens
gacggtcgtggcgtaagaccggggggacgcggcggtagcggcggccgttgcgattgattgcgctggttgcctgcggcgtccacttccttggccgcccttgctacactggctgattgttgtgcagccggcgccatgtctgtgagcgagatcttcgtggagctgcagggctttttggctgccgagcaggacatccgagagttgagccagatcgggagaaaggatttcatctggatgtagaagattatctctcaggagttctaattcttgccagtgaactgtcgaggctgtctgtcaacagcgtgactgctggagactactcccgacccctccacatctccaccttcatcaatgagctggattccggttttcgccttctcaacctgaaaaatgactccctgaggaagcgctacgacggattgaaatatgacgtgaagaaagtagaggaagtggtctatgatctctccatccggggctttaataaggagacggcagcagcttgtgttgaaaaataggaggctctccttgctcctggccttgctgacctcagcggttgccaggaaggggtgagcacagagtgcctcttacggtagttaggatgctcagttgctaaacactgcgctttattttcttaaccagttgtggtgtgagtatcagaattgaaacacttttttgggggtaaaaaatatagcctttacatggacagaattttttttgttgtttcagtgaatatgcctgtaattcagtgtatttcagttccgtcagaaagtgtaaatgttagtttcttggtaaagtccttttcttgcttaccttgactgttgatgtactgattgagaagttcattgtctcgtttgtgattcttccagatgtgatgcttgatattttctatatgcgagttagccatccacacccaggcatagcctggatacagtataaaaatagataattaaaaagatggttgccaagcaagg

SEQ ID NO: 1188 - protein, 34 aa, Homosapiens; identical to SEQ ID NO: 1186

SEQ ID NO: 1189 - DNA, 2436 bp, Homosapiens
gacggtcgtggcgtaagaccggggggacgcggcggtagcggcggccgttgcgattgattgcgctggttgcctgcggcgtccacttccttggccgcccttgctacactggctgattgttgtgcagccggcgccatgtctgtgagcgagatcttcgtggagctgcagggctttttggctgccgagcaggacatccgagagttgagccagatcgggagaaaggatttcatctggatgtagaagattatctctcaggagttctaattcttgccagtgaactgtcgaggctgtctgtcaacagcgtgactgctggagactactcccgacccctccacatctccaccttcatcaatgagctggattccggttttcgccttctcaacctgaaaaatgactccctgaggaagcgctacgacggattgaaatatgacgtgaagaaagtagaggaagtggtctatgatctctccatccggggctttaataaggagacggcagcagcttgtgttgaaaaataggaggctctccttgctcctggccttgctgacctcagcggttgccaggaaggggtgagcacagagtgcctcttacggtagttaggatgctcagttgctaaacactgcgctttattttcttaaccagttgtggtgtgagtatcagaattgaaacacttttttgggggtaaaaaatatagcctttacatggacagaattttttttgttgtttcagtgaatatgcctgtaattcagtgtatttcagttccgtcagaaagtgtaaatgttagtttcttggtaaagtccttttcttgcttaccttgactgttgatgtactgattgagaagttcattgtctcgtttgtgattcttccagatgtgatgcttgatattttctatatgcgagttagccatccacacccaggcatagcctggatacagtataaaaatagataattaaaaagatggttgccaagcaaggaaaacttattttatattttcccttccttattttaagcattgtgagtaaatcagatgttgaattcttttgccaagggaattatagctgcaggttctctctcactgccatcaaactgtaaaagattaaactgcgaagtcaagctcaacagattattttggaaagtttttgtattaagggatttagtaacatcattttgttttccaccaggcagggagtagggcttagtgttttaaaacacctctgctttctgatgttgccttaatattctgctattgcagcaattaaaaattgtcttcatgtacatttggaactaacacgtgatgtgatatattcctaaactatgaaacctttttcctagtagtcagctagatcatttgttctgggagtataaagccacccacgtaagttaataagcaaaatcctgactattatgttgttagagaaaaatgctttgctttgtctggaagaaagataaaatagtgaattataaataagtcaggccgggcgtggtggctcacacctgtaatcccagcacactgggaggccgaggcagggggactgcttgagctcaggagttcgagaccagcctgggcaacaaagtgagactccatctctatataaaaacaaaaaccacgaaagcacacacaaaataaatcagtgggatttggtaatgtgttttagagtaagaaatttcaggttgttggtgactatcccaacagtcatgttttaaatgtacagtttggggcaagtcatgtaaatactgttggtggtcttccccacacgccccaattttcaggtagtactaagagtatgtgccaggaaactcttgctattgaattgagatgattaaaatggtgacttaatccgtagttattttgcacccactgaaaggaaagtgctttccagaataatatgaagtatctaaaagtgtcaccttttcttgcctgatcaacaatttgggcttcctgtttgtacaaggggccatttggcatacctttcacagcttttatcaggccaagttaaaggctgactacattttttcatcatgaggaaagcagttgaaatgaggcatgagttactgtgcattgggattttagaacaattttcttgtgacagctctttttgtgaagttaggttcttaaaagtgcccatgatggtcacttaaaatgtgcagtaatagcactgccaggatcaagcatgaaaggcttttaaattagatcatcccacagacaatacgtttgataatagttttttcttttaacctctttaagtattgattctgcttgagaatattgaagtacttgccagaagttgtggatttcagttttaacaaatgctattaaagtggagaagcacactctggtcttggaattccatttgaggatttagaagtgtcatgtttataactattcagttgtgtttgttgctggcttgttgtaaagcaataaaatttttttggtctttttgt

SEQ ID NO: 1190 - protein, 34 aa, Homosapiens; identical to SEQ ID NO: 1186

SEQ ID NO: 1191 - DNA, 2995 bp, Homosapiens
gacggtcgtggcgtaagaccggggggacgcggcggtagcggcggccgttgcgattgattgcgctggttgcctgcggcgtccacttccttggccgcccttgctacactggctgattgttgtgcagccggcgccatgtctgtgagcgagatcttcgtggagctgcagggctttttggctgccgagcaggacatccgagagttgagccagatcgggagaaaggatttcatctggatgtagaagattatctctcaggagttctaattcttgccagtgaactgtcgaggctgtctgtcaacagcgtgactgctggagactactcccgacccctccacatctccaccttcatcaatgagctggattccggttttcgccttctcaacctgaaaaatgactccctgaggaagcgctacgacggattgaaatatgacgtgaagaaagtagaggaagtggtctatgatctctccatccggggctttaataaggagacggcagcagcttgtgttgaaaaataggaggctctccttgctcctggccttgctgacctcagcggttgccaggaaggggtgagcacagagtgcctcttacggtagttaggatgctcagttgctaaacactgcgctttattttcttaaccagttgtggtgtgagtatcagaattgaaacacttttttgggggtaaaaaatatagcctttacatggacagaattttttttgttgtttcagtgaatatgcctgtaattcagtgtatttcagttccgtcagaaagtgtaaatgttagtttcttggtaaagtccttttcttgcttaccttgactgttgatgtactgattgagaagttcattgtctcgtttgtgattcttccagatgtgatgcttgatattttctatatgcgagttagccatccacacccaggcatagcctggatacagtataaaaatagataattaaaaagatggttgccaagcaaggaaaacttattttatattttcccttccttattttaagcattgtgagtaaatcagatgttgaattcttttgccaagggaattatagctgcaggttctctctcactgccatcaaactgtaaaagattaaactgcgaagtcaagctcaacagattattttggaaagtttttgtattaagggatttagtaacatcattttgttttccaccaggcagggagtagggcttagtgttttaaaacacctctgctttctgatgttgccttaatattctgctattgcagcaattaaaaattgtcttcatgtacatttggaactaacacgtgatgtgatatattcctaaactatgaaacctttttcctagtagtcagctagatcatttgttctgggagtataaagccacccacgtaagttaataagcaaaatcctgactattatgttgttagagaaaaatgctttgctttgtctggaagaaagataaaatagtgaattataaataagtcaggccgggcgtggtggctcacacctgtaatcccagcacactgggaggccgaggcagggggactgcttgagctcaggagttcgagaccagcctgggcaacaaagtgagactccatctctatataaaaacaaaaaccacgaaagcacacacaaaataaatcagtgggatttggtaatgtgttttagagtaagaaatttcaggttgttggtgactatcccaacagtcatgttttaaatgtacagtttggggcaagtcatgtaaatactgttggtggtcttccccacacgccccaattttcaggtagtactaagagtatgtgccaggaaactcttgctattgaattgagatgattaaaatggtgacttaatccgtagttattttgcacccactgaaaggaaagtgctttccagaataatatgaagtatctaaaagtgtcaccttttcttgcctgatcaacaatttgggcttcctgtttgtacaaggggccatttggcatacctttcacagcttttatcaggccaagttaaaggctgactacattttttcatcatgaggaaagcagttgaaatgaggcatgagttactgtgcattgggattttagaacaattttcttgtgacagctctttttgtgaagttaggttcttaaaagtgcccatgatggtcacttaaaatgtgcagtaatagcactgccaggatcaagcatgaaaggcttttaaattagatcatcccacagacaatacgtttgataatagttttttcttttaacctctttaagtattgattctgcttgagaatattgaagtacttgccagaagttgtggatttcagttttaacaaatgctattaaagtggagaagcacactctggtcttggaattccatttgaggatttagaagtgtcatgtttataactattcagttgtgtttgttgctggcttgttgtaaagcaataaaatttttttggtctttttgtaagtgagtgtgctgctgtaagaaatctcccatgtgcataacaaattctgaatattttttgaggctaaagaagaccggggtgacaagcagatactgctgtgtaatggttacactaaccaaaagacaccagccactcagagttctatactgtaaagcgcagataacatttgtgtgttataccttgattggggaattaaaagtcatttaactgaagatgttgagaaacctgggctctggttttagtataccggaattacttttttccaattttagaaaatcaagcaggttagagaaaatagagatgaattaggggacactgtcttatggattcatttataagaagagaaccagccatatacacttggggagatttgccacatcttaaacttgaataatagtatgagtaatgcttaagggagtttaatagagaaggaaagctttggcagtgttttgagaacttaagtggctaaagagatgagacaaacatgcaggtcgctactggcatagtttcataattgtgtactcggaaattaaagtttgcttgtttcttggtctggatt

SEQ ID NO: 1192 - protein, 34 aa, Homosapiens; identical to SEQ ID NO: 1186

SEQ ID NO: 1193 - DNA, 990 bp, Homosapiens
gtaagaccggggggacgcggcggtagcggcggccgttgcgattgattgcgctggttgcctgcggcgtccacttccttggccgcccttgctacactggctgattgttgtgcagccggcgccatgtctgtgagcgagatcttcgtggagctgcagggctttttggctgccgagcaggacatccgagaggaaatcagaaaagttgtacagagtttagaacaaacagctcgagagattttaactctactgcaaggggtccatcagggtgctgggtttcaggacattccaaagaggtgtttgaaagctcgagaacattttggtacagtaaaaacacatctaacatctttgaagaccaaatttcctgctgaacagtattacagttgagccagatcgggagaaaggatttcatctggatgtagaagattatctctcaggagttctaattcttgccagtgaactgtcgaggctgtctgtcaacagcgtgactgctggagactactcccgacccctccacatctccaccttcatcaatgagctggattccggttttcgccttctcaacctgaaaaatgactccctgaggaagcgctacgacggattgaaatatgacgtgaagaaagtagaggaagtggtctatgatctctccatccggggctttaataaggagacggcagcagcttgtgttgaaaaataggaggctctccttgctcctggccttgctgacctcagcggttgccaggaaggggtgagcacagagtgcctcttacggtagttaggatgctcagttgctaaacactgcgctttattttcttaaccagttgtggtgtgagtatcagaattgaaacacttttttgggggtaaaaaatatagcctttacatggacagaattttttttgttgtttcagtgaatatgcctgtaattcagtgtatttcagttccgtcagaaagtgtaaatgttagtttcttggtaaagtccttttcttgcttaccttg

SEQ ID NO: 1194 - protein, 86 aa, Homosapiens
MSVSEIFVELQGFLAAEQDIREEIRKVVQSLEQTAREILTLLQGVHQGAGFQDIPKRCLKAREHFGTVKTHLTSLKTKFPAEQYYS

SEQ ID NO: 1195 - DNA, 915 bp, Homosapiens
gtaagaccggggggacgcggcggtagcggcggccgttgcgattgattgcgctggttgcctgcggcgtccacttccttggccgcccttgctacactggctgattgttgtgcagccggcgccatgtctgtgagcgagatcttcgtggagctgcagggctttttggctgccgagcaggacatccgagagatttcatgagcactggaggtttgtgttgcagcgcttggtcttcttggcagcatttgttgtgtatttggaaacagaaacactagtgactcgagaagcagttacagaaattcttggcattgagccagatcgggagaaaggatttcatctggatgtagaagattatctctcaggagttctaattcttgccagtgaactgtcgaggctgtctgtcaacagcgtgactgctggagactactcccgacccctccacatctccaccttcatcaatgagctggattccggttttcgccttctcaacctgaaaaatgactccctgaggaagcgctacgacggattgaaatatgacgtgaagaaagtagaggaagtggtctatgatctctccatccggggctttaataaggagacggcagcagcttgtgttgaaaaataggaggctctccttgctcctggccttgctgacctcagcggttgccaggaaggggtgagcacagagtgcctcttacggtagttaggatgctcagttgctaaacactgcgctttattttcttaaccagttgtggtgtgagtatcagaattgaaacacttttttgggggtaaaaaatatagcctttacatggacagaattttttttgttgtttcagtgaatatgcctgtaattcagtgtatttcagttccgtcagaaagtgtaaatgttagtttcttggtaaagtccttttcttgcttaccttg

SEQ ID NO: 1196 - protein, 37 aa, Homosapiens
MDRIFFVVSVNMPVIQCISVPSESVNVSFLVKSFSCL

SEQ ID NO: 1197 - DNA, 1147 bp, Homosapiens
gtaagaccggggggacgcggcggtagcggcggccgttgcgattgattgcgctggttgcctgcggcgtccacttccttggccgcccttgctacactggctgattgttgtgcagccggcgccatgtctgtgagcgagatcttcgtggagctgcagggctttttggctgccgagcaggacatccgagaggaaatcagaaaagttgtacagagtttagaacaaacagctcgagagattttaactctactgcaaggggtccatcagggtgctgggtttcaggacattccaaagaggtgtttgaaagctcgagaacattttggtacagtaaaaacacatctaacatctttgaagaccaaatttcctgctgaacagtattacagttgagccagatcgggagaaaggatttcatctggatgtagaagattatctctcaggagttctaattcttgccagtgaactgtcgaggctgtctgtcaacagcgtgactgctggagactactcccgacccctccacatctccaccttcatcaatgagctggattccggttttcgccttctcaacctgaaaaatgactccctgaggaagcgctacgacggattgaaatatgacgtgaagaaagtagaggaagtggtctatgatctctccatccggggctttaataaggagacggcagcagcttgtgttgaaaaataggaggctctccttgctcctggccttgctgacctcagcggttgccaggaaggggtgagcacagagtgcctcttacggtagttaggatgctcagttgctaaacactgcgctttattttcttaaccagttgtggtgtgagtatcagaattgaaacacttttttgggggtaaaaaatatagcctttacatggacagaattttttttgttgtttcagtgaatatgcctgtaattcagtgtatttcagttccgtcagaaagtgtaaatgttagtttcttggtaaagtccttttcttgcttaccttgactgttgatgtactgattgagaagttcattgtctcgtttgtgattcttccagatgtgatgcttgatattttctatatgcgagttagccatccacacccaggcatagcctggatacagtataaaaatagataattaaaaagatggttgccaagcaagg

SEQ ID NO: 1198 - protein, 86 aa, Homosapiens; identical to SEQ ID NO: 1194

SEQ ID NO: 1199 - DNA, 1072 bp, Homosapiens
gtaagaccggggggacgcggcggtagcggcggccgttgcgattgattgcgctggttgcctgcggcgtccacttccttggccgcccttgctacactggctgattgttgtgcagccggcgccatgtctgtgagcgagatcttcgtggagctgcagggctttttggctgccgagcaggacatccgagagatttcatgagcactggaggtttgtgttgcagcgcttggtcttcttggcagcatttgttgtgtatttggaaacagaaacactagtgactcgagaagcagttacagaaattcttggcattgagccagatcgggagaaaggatttcatctggatgtagaagattatctctcaggagttctaattcttgccagtgaactgtcgaggctgtctgtcaacagcgtgactgctggagactactcccgacccctccacatctccaccttcatcaatgagctggattccggttttcgccttctcaacctgaaaaatgactccctgaggaagcgctacgacggattgaaatatgacgtgaagaaagtagaggaagtggtctatgatctctccatccggggctttaataaggagacggcagcagcttgtgttgaaaaataggaggctctccttgctcctggccttgctgacctcagcggttgccaggaaggggtgagcacagagtgcctcttacggtagttaggatgctcagttgctaaacactgcgctttattttcttaaccagttgtggtgtgagtatcagaattgaaacacttttttgggggtaaaaaatatagcctttacatggacagaattttttttgttgtttcagtgaatatgcctgtaattcagtgtatttcagttccgtcagaaagtgtaaatgttagtttcttggtaaagtccttttcttgcttaccttgactgttgatgtactgattgagaagttcattgtctcgtttgtgattcttccagatgtgatgcttgatattttctatatgcgagttagccatccacacccaggcatagcctggatacagtataaaaatagataattaaaaagatggttgccaagcaagg

SEQ ID NO: 1200 - protein, 38 aa, Homosapiens
MDRIFFVVSVNMPVIQCISVPSESVNVSFLVKSFSCLP

SEQ ID NO: 1201 - DNA, 2615 bp, Homosapiens
gtaagaccggggggacgcggcggtagcggcggccgttgcgattgattgcgctggttgcctgcggcgtccacttccttggccgcccttgctacactggctgattgttgtgcagccggcgccatgtctgtgagcgagatcttcgtggagctgcagggctttttggctgccgagcaggacatccgagaggaaatcagaaaagttgtacagagtttagaacaaacagctcgagagattttaactctactgcaaggggtccatcagggtgctgggtttcaggacattccaaagaggtgtttgaaagctcgagaacattttggtacagtaaaaacacatctaacatctttgaagaccaaatttcctgctgaacagtattacagttgagccagatcgggagaaaggatttcatctggatgtagaagattatctctcaggagttctaattcttgccagtgaactgtcgaggctgtctgtcaacagcgtgactgctggagactactcccgacccctccacatctccaccttcatcaatgagctggattccggttttcgccttctcaacctgaaaaatgactccctgaggaagcgctacgacggattgaaatatgacgtgaagaaagtagaggaagtggtctatgatctctccatccggggctttaataaggagacggcagcagcttgtgttgaaaaataggaggctctccttgctcctggccttgctgacctcagcggttgccaggaaggggtgagcacagagtgcctcttacggtagttaggatgctcagttgctaaacactgcgctttattttcttaaccagttgtggtgtgagtatcagaattgaaacacttttttgggggtaaaaaatatagcctttacatggacagaattttttttgttgtttcagtgaatatgcctgtaattcagtgtatttcagttccgtcagaaagtgtaaatgttagtttcttggtaaagtccttttcttgcttaccttgactgttgatgtactgattgagaagttcattgtctcgtttgtgattcttccagatgtgatgcttgatattttctatatgcgagttagccatccacacccaggcatagcctggatacagtataaaaatagataattaaaaagatggttgccaagcaaggaaaacttattttatattttcccttccttattttaagcattgtgagtaaatcagatgttgaattcttttgccaagggaattatagctgcaggttctctctcactgccatcaaactgtaaaagattaaactgcgaagtcaagctcaacagattattttggaaagtttttgtattaagggatttagtaacatcattttgttttccaccaggcagggagtagggcttagtgttttaaaacacctctgctttctgatgttgccttaatattctgctattgcagcaattaaaaattgtcttcatgtacatttggaactaacacgtgatgtgatatattcctaaactatgaaacctttttcctagtagtcagctagatcatttgttctgggagtataaagccacccacgtaagttaataagcaaaatcctgactattatgttgttagagaaaaatgctttgctttgtctggaagaaagataaaatagtgaattataaataagtcaggccgggcgtggtggctcacacctgtaatcccagcacactgggaggccgaggcagggggactgcttgagctcaggagttcgagaccagcctgggcaacaaagtgagactccatctctatataaaaacaaaaaccacgaaagcacacacaaaataaatcagtgggatttggtaatgtgttttagagtaagaaatttcaggttgttggtgactatcccaacagtcatgttttaaatgtacagtttggggcaagtcatgtaaatactgttggtggtcttccccacacgccccaattttcaggtagtactaagagtatgtgccaggaaactcttgctattgaattgagatgattaaaatggtgacttaatccgtagttattttgcacccactgaaaggaaagtgctttccagaataatatgaagtatctaaaagtgtcaccttttcttgcctgatcaacaatttgggcttcctgtttgtacaaggggccatttggcatacctttcacagcttttatcaggccaagttaaaggctgactacattttttcatcatgaggaaagcagttgaaatgaggcatgagttactgtgcattgggattttagaacaattttcttgtgacagctctttttgtgaagttaggttcttaaaagtgcccatgatggtcacttaaaatgtgcagtaatagcactgccaggatcaagcatgaaaggcttttaaattagatcatcccacagacaatacgtttgataatagttttttcttttaacctctttaagtattgattctgcttgagaatattgaagtacttgccagaagttgtggatttcagttttaacaaatgctattaaagtggagaagcacactctggtcttggaattccatttgaggatttagaagtgtcatgtttataactattcagttgtgtttgttgctggcttgttgtaaagcaataaaatttttttggtctttttgt

SEQ ID NO: 1202 - protein, 86 aa, Homosapiens; identical to SEQ ID NO: 1194

SEQ ID NO: 1203 - DNA, 2540 bp, Homosapiens
gtaagaccggggggacgcggcggtagcggcggccgttgcgattgattgcgctggttgcctgcggcgtccacttccttggccgcccttgctacactggctgattgttgtgcagccggcgccatgtctgtgagcgagatcttcgtggagctgcagggctttttggctgccgagcaggacatccgagagatttcatgagcactggaggtttgtgttgcagcgcttggtcttcttggcagcatttgttgtgtatttggaaacagaaacactagtgactcgagaagcagttacagaaattcttggcattgagccagatcgggagaaaggatttcatctggatgtagaagattatctctcaggagttctaattcttgccagtgaactgtcgaggctgtctgtcaacagcgtgactgctggagactactcccgacccctccacatctccaccttcatcaatgagctggattccggttttcgccttctcaacctgaaaaatgactccctgaggaagcgctacgacggattgaaatatgacgtgaagaaagtagaggaagtggtctatgatctctccatccggggctttaataaggagacggcagcagcttgtgttgaaaaataggaggctctccttgctcctggccttgctgacctcagcggttgccaggaaggggtgagcacagagtgcctcttacggtagttaggatgctcagttgctaaacactgcgctttattttcttaaccagttgtggtgtgagtatcagaattgaaacacttttttgggggtaaaaaatatagcctttacatggacagaattttttttgttgtttcagtgaatatgcctgtaattcagtgtatttcagttccgtcagaaagtgtaaatgttagtttcttggtaaagtccttttcttgcttaccttgactgttgatgtactgattgagaagttcattgtctcgtttgtgattcttccagatgtgatgcttgatattttctatatgcgagttagccatccacacccaggcatagcctggatacagtataaaaatagataattaaaaagatggttgccaagcaaggaaaacttattttatattttcccttccttattttaagcattgtgagtaaatcagatgttgaattcttttgccaagggaattatagctgcaggttctctctcactgccatcaaactgtaaaagattaaactgcgaagtcaagctcaacagattattttggaaagtttttgtattaagggatttagtaacatcattttgttttccaccaggcagggagtagggcttagtgttttaaaacacctctgctttctgatgttgccttaatattctgctattgcagcaattaaaaattgtcttcatgtacatttggaactaacacgtgatgtgatatattcctaaactatgaaacctttttcctagtagtcagctagatcatttgttctgggagtataaagccacccacgtaagttaataagcaaaatcctgactattatgttgttagagaaaaatgctttgctttgtctggaagaaagataaaatagtgaattataaataagtcaggccgggcgtggtggctcacacctgtaatcccagcacactgggaggccgaggcagggggactgcttgagctcaggagttcgagaccagcctgggcaacaaagtgagactccatctctatataaaaacaaaaaccacgaaagcacacacaaaataaatcagtgggatttggtaatgtgttttagagtaagaaatttcaggttgttggtgactatcccaacagtcatgttttaaatgtacagtttggggcaagtcatgtaaatactgttggtggtcttccccacacgccccaattttcaggtagtactaagagtatgtgccaggaaactcttgctattgaattgagatgattaaaatggtgacttaatccgtagttattttgcacccactgaaaggaaagtgctttccagaataatatgaagtatctaaaagtgtcaccttttcttgcctgatcaacaatttgggcttcctgtttgtacaaggggccatttggcatacctttcacagcttttatcaggccaagttaaaggctgactacattttttcatcatgaggaaagcagttgaaatgaggcatgagttactgtgcattgggattttagaacaattttcttgtgacagctctttttgtgaagttaggttcttaaaagtgcccatgatggtcacttaaaatgtgcagtaatagcactgccaggatcaagcatgaaaggcttttaaattagatcatcccacagacaatacgtttgataatagttttttcttttaacctctttaagtattgattctgcttgagaatattgaagtacttgccagaagttgtggatttcagttttaacaaatgctattaaagtggagaagcacactctggtcttggaattccatttgaggatttagaagtgtcatgtttataactattcagttgtgtttgttgctggcttgttgtaaagcaataaaatttttttggtctttttgt

SEQ ID NO: 1204 - protein, 54 aa, Homosapiens [sequence omitted]

SEQ ID NO: 1205 - DNA, 2832 bp, Homosapiens
gtaagaccggggggacgcggcggtagcggcggccgttgcgattgattgcgctggttgcctgcggcgtccacttccttggccgcccttgctacactggctgattgttgtgcagccggcgccatgtctgtgagcgagatcttcgtggagctgcagggctttttggctgccgagcaggacatccgagaggaaatcagaaaagttgtacagagtttagaacaaacagctcgagagattttaactctactgcaaggggtccatcagggtgctgggtttcaggacagtaagttctttgttttgtatccaattatcagtctcttatttagagggagagtttctatccagaagacattttataatgaaaaatggctatcatgctttatgttccaaagaggtgtttgaaagctcgagaacattttggtacagtaaaaacacatctaacatctttgaagaccaaatttcctgctgaacagtattacagatttcatgagcactggaggtttgtgttgcagcgcttggtcttcttggcagcatttgttgtgtatttggaaacagaaacactagtgactcgagaagcagttacagaaattcttggcattgagccagatcgggagaaaggatttcatctggatgtagaagattatctctcaggagttctaattcttgccagtgaactgtcgaggctgtctgtcaacagcgtgactgctggagactactcccgacccctccacatctccaccttcatcaatgagctggattccggttttcgccttctcaacctgaaaaatgactccctgaggaagcgctacgacggattgaaatatgacgtgaagaaagtagaggaagtggtctatgatctctccatccggggctttaataaggagacggcagcagcttgtgttgaaaaataggaggctctccttgctcctggccttgctgacctcagcggttgccaggaaggggtgagcacagagtgcctcttacggtagttaggatgctcagttgctaaacactgcgctttattttcttaaccagttgtggtgtgagtatcagaattgaaacacttttttgggggtaaaaaatatagcctttacatggacagaattttttttgttgtttcagtgaatatgcctgtaattcagtgtatttcagttccgtcagaaagtgtaaatgttagtttcttggtaaagtccttttcttgcttaccttgactgttgatgtactgattgagaagttcattgtctcgtttgtgattcttccagatgtgatgcttgatattttctatatgcgagttagccatccacacccaggcatagcctggatacagtataaaaatagataattaaaaagatggttgccaagcaaggaaaacttattttatattttcccttccttattttaagcattgtgagtaaatcagatgttgaattcttttgccaagggaattatagctgcaggttctctctcactgccatcaaactgtaaaagattaaactgcgaagtcaagctcaacagattattttggaaagtttttgtattaagggatttagtaacatcattttgttttccaccaggcagggagtagggcttagtgttttaaaacacctctgctttctgatgttgccttaatattctgctattgcagcaattaaaaattgtcttcatgtacatttggaactaacacgtgatgtgatatattcctaaactatgaaacctttttcctagtagtcagctagatcatttgttctgggagtataaagccacccacgtaagttaataagcaaaatcctgactattatgttgttagagaaaaatgctttgctttgtctggaagaaagataaaatagtgaattataaataagtcaggccgggcgtggtggctcacacctgtaatcccagcacactgggaggccgaggcagggggactgcttgagctcaggagttcgagaccagcctgggcaacaaagtgagactccatctctatataaaaacaaaaaccacgaaagcacacacaaaataaatcagtgggatttggtaatgtgttttagagtaagaaatttcaggttgttggtgactatcccaacagtcatgttttaaatgtacagtttggggcaagtcatgtaaatactgttggtggtcttccccacacgccccaattttcaggtagtactaagagtatgtgccaggaaactcttgctattgaattgagatgattaaaatggtgacttaatccgtagttattttgcacccactgaaaggaaagtgctttccagaataatatgaagtatctaaaagtgtcaccttttcttgcctgatcaacaatttgggcttcctgtttgtacaaggggccatttggcatacctttcacagcttttatcaggccaagttaaaggctgactacattttttcatcatgaggaaagcagttgaaatgaggcatgagttactgtgcattgggattttagaacaattttcttgtgacagctctttttgtgaagttaggttcttaaaagtgcccatgatggtcacttaaaatgtgcagtaatagcactgccaggatcaagcatgaaaggcttttaaattagatcatcccacagacaatacgtttgataatagttttttcttttaacctctttaagtattgattctgcttgagaatattgaagtacttgccagaagttgtggatttcagttttaacaaatgctattaaagtggagaagcacactctggtcttggaattccatttgaggatttagaagtgtcatgtttataactattcagttgtgtttgttgctggcttgttgtaaagcaataaaatttttttggtctttttgt

SEQ ID NO: 1206 - protein, 181 aa, Homosapiens
MAIMLYVPKRCLKAREHFGTVKTHLTSLKTKFPAEQYYRFHEHWRFVLQRLVFLAAFVVYLETETLVTREAVTEILGIEPDREKGFHLDVEDYLSGVLILASELSRLSVNSVTAGDYSRPLHISTFINELDSGFRLLNLKNDSLRKRYDGLKYDVKKVEEVVYDLSIRGFNKETAAACVEK

SEQ ID NO: 1207 - DNA, 3174 bp, Homosapiens
gtaagaccggggggacgcggcggtagcggcggccgttgcgattgattgcgctggttgcctgcggcgtccacttccttggccgcccttgctacactggctgattgttgtgcagccggcgccatgtctgtgagcgagatcttcgtggagctgcagggctttttggctgccgagcaggacatccgagaggaaatcagaaaagttgtacagagtttagaacaaacagctcgagagattttaactctactgcaaggggtccatcagggtgctgggtttcaggacattccaaagaggtgtttgaaagctcgagaacattttggtacagtaaaaacacatctaacatctttgaagaccaaatttcctgctgaacagtattacagttgagccagatcgggagaaaggatttcatctggatgtagaagattatctctcaggagttctaattcttgccagtgaactgtcgaggctgtctgtcaacagcgtgactgctggagactactcccgacccctccacatctccaccttcatcaatgagctggattccggttttcgccttctcaacctgaaaaatgactccctgaggaagcgctacgacggattgaaatatgacgtgaagaaagtagaggaagtggtctatgatctctccatccggggctttaataaggagacggcagcagcttgtgttgaaaaataggaggctctccttgctcctggccttgctgacctcagcggttgccaggaaggggtgagcacagagtgcctcttacggtagttaggatgctcagttgctaaacactgcgctttattttcttaaccagttgtggtgtgagtatcagaattgaaacacttttttgggggtaaaaaatatagcctttacatggacagaattttttttgttgtttcagtgaatatgcctgtaattcagtgtatttcagttccgtcagaaagtgtaaatgttagtttcttggtaaagtccttttcttgcttaccttgactgttgatgtactgattgagaagttcattgtctcgtttgtgattcttccagatgtgatgcttgatattttctatatgcgagttagccatccacacccaggcatagcctggatacagtataaaaatagataattaaaaagatggttgccaagcaaggaaaacttattttatattttcccttccttattttaagcattgtgagtaaatcagatgttgaattcttttgccaagggaattatagctgcaggttctctctcactgccatcaaactgtaaaagattaaactgcgaagtcaagctcaacagattattttggaaagtttttgtattaagggatttagtaacatcattttgttttccaccaggcagggagtagggcttagtgttttaaaacacctctgctttctgatgttgccttaatattctgctattgcagcaattaaaaattgtcttcatgtacatttggaactaacacgtgatgtgatatattcctaaactatgaaacctttttcctagtagtcagctagatcatttgttctgggagtataaagccacccacgtaagttaataagcaaaatcctgactattatgttgttagagaaaaatgctttgctttgtctggaagaaagataaaatagtgaattataaataagtcaggccgggcgtggtggctcacacctgtaatcccagcacactgggaggccgaggcagggggactgcttgagctcaggagttcgagaccagcctgggcaacaaagtgagactccatctctatataaaaacaaaaaccacgaaagcacacacaaaataaatcagtgggatttggtaatgtgttttagagtaagaaatttcaggttgttggtgactatcccaacagtcatgttttaaatgtacagtttggggcaagtcatgtaaatactgttggtggtcttccccacacgccccaattttcaggtagtactaagagtatgtgccaggaaactcttgctattgaattgagatgattaaaatggtgacttaatccgtagttattttgcacccactgaaaggaaagtgctttccagaataatatgaagtatctaaaagtgtcaccttttcttgcctgatcaacaatttgggcttcctgtttgtacaaggggccatttggcatacctttcacagcttttatcaggccaagttaaaggctgactacattttttcatcatgaggaaagcagttgaaatgaggcatgagttactgtgcattgggattttagaacaattttcttgtgacagctctttttgtgaagttaggttcttaaaagtgcccatgatggtcacttaaaatgtgcagtaatagcactgccaggatcaagcatgaaaggcttttaaattagatcatcccacagacaatacgtttgataatagttttttcttttaacctctttaagtattgattctgcttgagaatattgaagtacttgccagaagttgtggatttcagttttaacaaatgctattaaagtggagaagcacactctggtcttggaattccatttgaggatttagaagtgtcatgtttataactattcagttgtgtttgttgctggcttgttgtaaagcaataaaatttttttggtctttttgtaagtgagtgtgctgctgtaagaaatctcccatgtgcataacaaattctgaatattttttgaggctaaagaagaccggggtgacaagcagatactgctgtgtaatggttacactaaccaaaagacaccagccactcagagttctatactgtaaagcgcagataacatttgtgtgttataccttgattggggaattaaaagtcatttaactgaagatgttgagaaacctgggctctggttttagtataccggaattacttttttccaattttagaaaatcaagcaggttagagaaaatagagatgaattaggggacactgtcttatggattcatttataagaagagaaccagccatatacacttggggagatttgccacatcttaaacttgaataatagtatgagtaatgcttaagggagtttaatagagaaggaaagctttggcagtgttttgagaacttaagtggctaaagagatgagacaaacatgcaggtcgctactggcatagtttcataattgtgtactcggaaattaaagtttgcttgtttcttggtctggatt

SEQ ID NO: 1208 - protein, 86 aa, Homosapiens; identical to SEQ ID NO: 1194

SEQ ID NO: 1209 - DNA, 3099 bp, Homosapiens
gtaagaccggggggacgcggcggtagcggcggccgttgcgattgattgcgctggttgcctgcggcgtccacttccttggccgcccttgctacactggctgattgttgtgcagccggcgccatgtctgtgagcgagatcttcgtggagctgcagggctttttggctgccgagcaggacatccgagagatttcatgagcactggaggtttgtgttgcagcgcttggtcttcttggcagcatttgttgtgtatttggaaacagaaacactagtgactcgagaagcagttacagaaattcttggcattgagccagatcgggagaaaggatttcatctggatgtagaagattatctctcaggagttctaattcttgccagtgaactgtcgaggctgtctgtcaacagcgtgactgctggagactactcccgacccctccacatctccaccttcatcaatgagctggattccggttttcgccttctcaacctgaaaaatgactccctgaggaagcgctacgacggattgaaatatgacgtgaagaaagtagaggaagtggtctatgatctctccatccggggctttaataaggagacggcagcagcttgtgttgaaaaataggaggctctccttgctcctggccttgctgacctcagcggttgccaggaaggggtgagcacagagtgcctcttacggtagttaggatgctcagttgctaaacactgcgctttattttcttaaccagttgtggtgtgagtatcagaattgaaacacttttttgggggtaaaaaatatagcctttacatggacagaattttttttgttgtttcagtgaatatgcctgtaattcagtgtatttcagttccgtcagaaagtgtaaatgttagtttcttggtaaagtccttttcttgcttaccttgactgttgatgtactgattgagaagttcattgtctcgtttgtgattcttccagatgtgatgcttgatattttctatatgcgagttagccatccacacccaggcatagcctggatacagtataaaaatagataattaaaaagatggttgccaagcaaggaaaacttattttatattttcccttccttattttaagcattgtgagtaaatcagatgttgaattcttttgccaagggaattatagctgcaggttctctctcactgccatcaaactgtaaaagattaaactgcgaagtcaagctcaacagattattttggaaagtttttgtattaagggatttagtaacatcattttgttttccaccaggcagggagtagggcttagtgttttaaaacacctctgctttctgatgttgccttaatattctgctattgcagcaattaaaaattgtcttcatgtacatttggaactaacacgtgatgtgatatattcctaaactatgaaacctttttcctagtagtcagctagatcatttgttctgggagtataaagccacccacgtaagttaataagcaaaatcctgactattatgttgttagagaaaaatgctttgctttgtctggaagaaagataaaatagtgaattataaataagtcaggccgggcgtggtggctcacacctgtaatcccagcacactgggaggccgaggcagggggactgcttgagctcaggagttcgagaccagcctgggcaacaaagtgagactccatctctatataaaaacaaaaaccacgaaagcacacacaaaataaatcagtgggatttggtaatgtgttttagagtaagaaatttcaggttgttggtgactatcccaacagtcatgttttaaatgtacagtttggggcaagtcatgtaaatactgttggtggtcttccccacacgccccaattttcaggtagtactaagagtatgtgccaggaaactcttgctattgaattgagatgattaaaatggtgacttaatccgtagttattttgcacccactgaaaggaaagtgctttccagaataatatgaagtatctaaaagtgtcaccttttcttgcctgatcaacaatttgggcttcctgtttgtacaaggggccatttggcatacctttcacagcttttatcaggccaagttaaaggctgactacattttttcatcatgaggaaagcagttgaaatgaggcatgagttactgtgcattgggattttagaacaattttcttgtgacagctctttttgtgaagttaggttcttaaaagtgcccatgatggtcacttaaaatgtgcagtaatagcactgccaggatcaagcatgaaaggcttttaaattagatcatcccacagacaatacgtttgataatagttttttcttttaacctctttaagtattgattctgcttgagaatattgaagtacttgccagaagttgtggatttcagttttaacaaatgctattaaagtggagaagcacactctggtcttggaattccatttgaggatttagaagtgtcatgtttataactattcagttgtgtttgttgctggcttgttgtaaagcaataaaatttttttggtctttttgtaagtgagtgtgctgctgtaagaaatctcccatgtgcataacaaattctgaatattttttgaggctaaagaagaccggggtgacaagcagatactgctgtgtaatggttacactaaccaaaagacaccagccactcagagttctatactgtaaagcgcagataacatttgtgtgttataccttgattggggaattaaaagtcatttaactgaagatgttgagaaacctgggctctggttttagtataccggaattacttttttccaattttagaaaatcaagcaggttagagaaaatagagatgaattaggggacactgtcttatggattcatttataagaagagaaccagccatatacacttggggagatttgccacatcttaaacttgaataatagtatgagtaatgcttaagggagtttaatagagaaggaaagctttggcagtgttttgagaacttaagtggctaaagagatgagacaaacatgcaggtcgctactggcatagtttcataattgtgtactcggaaattaaagtttgcttgtttcttggtctggatt

SEQ ID NO: 1210 - protein, 58 aa, Homosapiens
MCITNSEYFLRLKKTGVTSRYCCVMVTLTKRHQPLRVLYCKAQITFVCYTLIGELKVI

SEQ ID NO: 1211 - DNA, 3391 bp, Homosapiens
gtaagaccggggggacgcggcggtagcggcggccgttgcgattgattgcgctggttgcctgcggcgtccacttccttggccgcccttgctacactggctgattgttgtgcagccggcgccatgtctgtgagcgagatcttcgtggagctgcagggctttttggctgccgagcaggacatccgagaggaaatcagaaaagttgtacagagtttagaacaaacagctcgagagattttaactctactgcaaggggtccatcagggtgctgggtttcaggacagtaagttctttgttttgtatccaattatcagtctcttatttagagggagagtttctatccagaagacattttataatgaaaaatggctatcatgctttatgttccaaagaggtgtttgaaagctcgagaacattttggtacagtaaaaacacatctaacatctttgaagaccaaatttcctgctgaacagtattacagatttcatgagcactggaggtttgtgttgcagcgcttggtcttcttggcagcatttgttgtgtatttggaaacagaaacactagtgactcgagaagcagttacagaaattcttggcattgagccagatcgggagaaaggatttcatctggatgtagaagattatctctcaggagttctaattcttgccagtgaactgtcgaggctgtctgtcaacagcgtgactgctggagactactcccgacccctccacatctccaccttcatcaatgagctggattccggttttcgccttctcaacctgaaaaatgactccctgaggaagcgctacgacggattgaaatatgacgtgaagaaagtagaggaagtggtctatgatctctccatccggggctttaataaggagacggcagcagcttgtgttgaaaaataggaggctctccttgctcctggccttgctgacctcagcggttgccaggaaggggtgagcacagagtgcctcttacggtagttaggatgctcagttgctaaacactgcgctttattttcttaaccagttgtggtgtgagtatcagaattgaaacacttttttgggggtaaaaaatatagcctttacatggacagaattttttttgttgtttcagtgaatatgcctgtaattcagtgtatttcagttccgtcagaaagtgtaaatgttagtttcttggtaaagtccttttcttgcttaccttgactgttgatgtactgattgagaagttcattgtctcgtttgtgattcttccagatgtgatgcttgatattttctatatgcgagttagccatccacacccaggcatagcctggatacagtataaaaatagataattaaaaagatggttgccaagcaaggaaaacttattttatattttcccttccttattttaagcattgtgagtaaatcagatgttgaattcttttgccaagggaattatagctgcaggttctctctcactgccatcaaactgtaaaagattaaactgcgaagtcaagctcaacagattattttggaaagtttttgtattaagggatttagtaacatcattttgttttccaccaggcagggagtagggcttagtgttttaaaacacctctgctttctgatgttgccttaatattctgctattgcagcaattaaaaattgtcttcatgtacatttggaactaacacgtgatgtgatatattcctaaactatgaaacctttttcctagtagtcagctagatcatttgttctgggagtataaagccacccacgtaagttaataagcaaaatcctgactattatgttgttagagaaaaatgctttgctttgtctggaagaaagataaaatagtgaattataaataagtcaggccgggcgtggtggctcacacctgtaatcccagcacactgggaggccgaggcagggggactgcttgagctcaggagttcgagaccagcctgggcaacaaagtgagactccatctctatataaaaacaaaaaccacgaaagcacacacaaaataaatcagtgggatttggtaatgtgttttagagtaagaaatttcaggttgttggtgactatcccaacagtcatgttttaaatgtacagtttggggcaagtcatgtaaatactgttggtggtcttccccacacgccccaattttcaggtagtactaagagtatgtgccaggaaactcttgctattgaattgagatgattaaaatggtgacttaatccgtagttattttgcacccactgaaaggaaagtgctttccagaataatatgaagtatctaaaagtgtcaccttttcttgcctgatcaacaatttgggcttcctgtttgtacaaggggccatttggcatacctttcacagcttttatcaggccaagttaaaggctgactacattttttcatcatgaggaaagcagttgaaatgaggcatgagttactgtgcattgggattttagaacaattttcttgtgacagctctttttgtgaagttaggttcttaaaagtgcccatgatggtcacttaaaatgtgcagtaatagcactgccaggatcaagcatgaaaggcttttaaattagatcatcccacagacaatacgtttgataatagttttttcttttaacctctttaagtattgattctgcttgagaatattgaagtacttgccagaagttgtggatttcagttttaacaaatgctattaaagtggagaagcacactctggtcttggaattccatttgaggatttagaagtgtcatgtttataactattcagttgtgtttgttgctggcttgttgtaaagcaataaaatttttttggtctttttgtaagtgagtgtgctgctgtaagaaatctcccatgtgcataacaaattctgaatattttttgaggctaaagaagaccggggtgacaagcagatactgctgtgtaatggttacactaaccaaaagacaccagccactcagagttctatactgtaaagcgcagataacatttgtgtgttataccttgattggggaattaaaagtcatttaactgaagatgttgagaaacctgggctctggttttagtataccggaattacttttttccaattttagaaaatcaagcaggttagagaaaatagagatgaattaggggacactgtcttatggattcatttataagaagagaaccagccatatacacttggggagatttgccacatcttaaacttgaataatagtatgagtaatgcttaagggagtttaatagagaaggaaagctttggcagtgttttgagaacttaagtggctaaagagatgagacaaacatgcaggtcgctactggcatagtttcataattgtgtactcggaaattaaagtttgcttgtttcttggtctggatt

SEQ ID NO: 1212 - protein, 181 aa, Homosapiens; identical to SEQ ID NO: 1206

SEQ ID NO: 1213 - DNA, 1390 bp, Homosapiens
aaggaaaacttattttatattttcccttccttattttaagcattgtgagtaaatcagatgttgaattcttttgccaagggaattatagctgcaggttctctctcactgccatcaaactgtaaaagattaaactgcgaagtcaagctcaacagattattttggaaagtttttgtattaagggatttagtaacatcattttgttttccaccaggcagggagtagggcttagtgttttaaaacacctctgctttctgatgttgccttaatattctgctattgcagcaattaaaaattgtcttcatgtacatttggaactaacacgtgatgtgatatattcctaaactatgaaacctttttcctagtagtcagctagatcatttgttctgggagtataaagccacccacgtaagttaataagcaaaatcctgactattatgttgttagagaaaaatgctttgctttgtctggaagaaagataaaatagtgaattataaataagtcaggccgggcgtggtggctcacacctgtaatcccagcacactgggaggccgaggcagggggactgcttgagctcaggagttcgagaccagcctgggcaacaaagtgagactccatctctatataaaaacaaaaaccacgaaagcacacacaaaataaatcagtgggatttggtaatgtgttttagagtaagaaatttcaggttgttggtgactatcccaacagtcatgttttaaatgtacagtttggggcaagtcatgtaaatactgttggtggtcttccccacacgccccaattttcaggtagtactaagagtatgtgccaggaaactcttgctattgaattgagatgattaaaatggtgacttaatccgtagttattttgcacccactgaaaggaaagtgctttccagaataatatgaagtatctaaaagtgtcaccttttcttgcctgatcaacaatttgggcttcgaggaaagcagttgaaatgaggcatgagttactgtgcattgggattttagaacaattttcttgtgacagctctttttgtgaagttaggttcttaaaagtgcccatgatggtcacttaaaatgtgcagtaatagcactgccaggatcaagcatgaaaggcttttaaattagatcatcccacagacaatacgtttgataatagttttttcttttaacctctttaagtattgattctgcttgagaatattgaagtacttgccagaagttgtggatttcagttttaacaaatgctattaaagtggagaagcacactctggtcttggaattccatttgaggatttagaagtgtcatgtttataactattcagttgtgtttgttgctggcttgttgtaaagcaataaaatttttttggtctttttgt

SEQ ID NO: 1214 - protein, 54 aa, Homosapiens [sequence omitted]

SEQ ID NO: 1215 - DNA, 1949 bp, Homosapiens
aaggaaaacttattttatattttcccttccttattttaagcattgtgagtaaatcagatgttgaattcttttgccaagggaattatagctgcaggttctctctcactgccatcaaactgtaaaagattaaactgcgaagtcaagctcaacagattattttggaaagtttttgtattaagggatttagtaacatcattttgttttccaccaggcagggagtagggcttagtgttttaaaacacctctgctttctgatgttgccttaatattctgctattgcagcaattaaaaattgtcttcatgtacatttggaactaacacgtgatgtgatatattcctaaactatgaaacctttttcctagtagtcagctagatcatttgttctgggagtataaagccacccacgtaagttaataagcaaaatcctgactattatgttgttagagaaaaatgctttgctttgtctggaagaaagataaaatagtgaattataaataagtcaggccgggcgtggtggctcacacctgtaatcccagcacactgggaggccgaggcagggggactgcttgagctcaggagttcgagaccagcctgggcaacaaagtgagactccatctctatataaaaacaaaaaccacgaaagcacacacaaaataaatcagtgggatttggtaatgtgttttagagtaagaaatttcaggttgttggtgactatcccaacagtcatgttttaaatgtacagtttggggcaagtcatgtaaatactgttggtggtcttccccacacgccccaattttcaggtagtactaagagtatgtgccaggaaactcttgctattgaattgagatgattaaaatggtgacttaatccgtagttattttgcacccactgaaaggaaagtgctttccagaataatatgaagtatctaaaagtgtcaccttttcttgcctgatcaacaatttgggcttcgaggaaagcagttgaaatgaggcatgagttactgtgcattgggattttagaacaattttcttgtgacagctctttttgtgaagttaggttcttaaaagtgcccatgatggtcacttaaaatgtgcagtaatagcactgccaggatcaagcatgaaaggcttttaaattagatcatcccacagacaatacgtttgataatagttttttcttttaacctctttaagtattgattctgcttgagaatattgaagtacttgccagaagttgtggatttcagttttaacaaatgctattaaagtggagaagcacactctggtcttggaattccatttgaggatttagaagtgtcatgtttataactattcagttgtgtttgttgctggcttgttgtaaagcaataaaatttttttggtctttttgtaagtgagtgtgctgctgtaagaaatctcccatgtgcataacaaattctgaatattttttgaggctaaagaagaccggggtgacaagcagatactgctgtgtaatggttacactaaccaaaagacaccagccactcagagttctatactgtaaagcgcagataacatttgtgtgttataccttgattggggaattaaaagtcatttaactgaagatgttgagaaacctgggctctggttttagtataccggaattacttttttccaattttagaaaatcaagcaggttagagaaaatagagatgaattaggggacactgtcttatggattcatttataagaagagaaccagccatatacacttggggagatttgccacatcttaaacttgaataatagtatgagtaatgcttaagggagtttaatagagaaggaaagctttggcagtgttttgagaacttaagtggctaaagagatgagacaaacatgcaggtcgctactggcatagtttcataattgtgtactcggaaattaaagtttgcttgtttcttggtctggatt

SEQ ID NO: 1216 - protein, 58 aa, Homosapiens; identical to SEQ ID NO: 1210

SEQ ID NO: 1217 - DNA, 810 bp, Homosapiens
cccacactcagggtgagagggagattctgaagctttgtgtttcttgctagctagtcaaaggtgactaattcatgtggatagaaaaataatacatgccaaaagaaatttgaggaacaaattcagccctgagacaggtcacggaaacagccctccagtcttcctcaagaaatgtagactgaatcagcatttacccacccctggaaaaacgcaggagctgcgcattcctgggatctcagcagggcttttgggaagagcagaactgggctggagtcacggtttctgggctgactctagattttccccggcttttgccacctgtgatggctggagagtatctgaagatgacagccagtgtccttagcttgtgaagattggatgatggccggggccctcagaccccttggcccctccttaactgcaggtcttcaaaagcccaacacctgttcgtcatttctgtggcttcccagggagtcttactcttctgcttcaagctgctgggtttgactctgagcagtttctgtgcagccacaaagattcttatgtgagacacactgctgcttcagagtgctccaacccatctcccctgattaaacactaaccagggctgccacagcaaagtggctcaaatgggtgacgtcaacaacagatttactttctcatagttctggaggcaggtgtctaggatcaaggtggtggcaaggctattccttctgttgcctccctccttgccttgtggatgaccgtcttctccgcgtctttccaagatctctcctctgtgcatgtcagtgtccttgcttcctcttcttatga

SEQ ID NO: 1218 - protein, 42 aa, Homosapiens
MMAGALRPLGPSLTAGLQKPNTCSSFLWLPRESYSSASSCWV

SEQ ID NO: 1219 - DNA, 647 bp, Homosapiens
ggagattctgaagctttgtgtttcttgctagctagtcaaaggtgactaattcatgtggatagaaaaataatacatgccaaaagaaatttgaggaacaaattcagccctgagacaggtcacggaaacagccctccagtcttcctcaagaaatgtagactgaatcagcatttacccacccctggaaaaacgcaggagctgcgcattcctgggatctcagcagggcttttgggaagagcagaactgggctggagtcacggtttctgggctgactctagattttccccggcttttgccacctgtgatggctggagagtatctgaagatgacaggtgactccaggacctagggctccctccttaggagcagggtggggtaccaggttgcacacaggtgatgatgggggggggggtgggctgtccagcacacagcttggtgagcaggatttgagatactcaccccactttctggtgatacagaccccctactcccagtgacacaagatggttggacccacggctgatttactgctttactcccattctttatggggccagctttaatgagcacccaagcagaaatgcctttgactcctgcactgtgaataactgttattaataaaagggcaagctgcttgccatggaaccttg

SEQ ID NO: 1220 - protein, 95 aa, Homosapiens
LIHVDRKIIHAKRNLRNKFSPETGHGNSPPVFLKKCRLNQHLPTPGKTQELRIPGISAGLLGRAELGWSHGFWADSRFSPAFATCDGWRVSEDDR

SEQ ID NO: 1221 - DNA, 762 bp, Homosapiens
tctgaagctttgtgtttcttgctagctagtcaaaggtgactaattcatgtgcccgtgtgacaggagctacaaatatgttccatgaggtcctgagttgaccagcttctttcaagacgtaggtcagggcagtcacatagaagtatcatggtgaccttggggatggtgacagtggctaaaagacgttgagagagacagtgcaagagaggaaagcatcttcaccctggaccctaatatggagacacctttgactagctagcaagaaagataaaacttaaaatctccctctcttctgtcgaatgtgggcggaacacagtgattctgaagctgcggagagtgggaagccatccccagggaaatgtaaacaccaagagcaggatagaaaaataatacatgccaaaagaaatttgaggaacaaattcagccctgagacaggtcacggaaacagccctccagtcttcctcaagaaatgtagactgaatcagcatttacccacccctggaaaaacgcaggagctgcgcattcctgggatctcagcagggcttttgggaagagcagaactgggctggagtcacggtttctgggctgactctagattttccccggcttttgccacctgtgatggctggagagtatctgaagatgacagccagtgtccttagcttgtgaagattggatgatggccggggccctcagaccccttggcccctccttaactgcaggtcttcaaaagcccaacacctgttcgtcatttctgtggcttcc

SEQ ID NO: 1222 - protein, 120 aa, Homosapiens; identical to SEQ ID NO: 688

SEQ ID NO: 1223 - DNA, 444 bp, Homosapiens
ggatagaaaaataatacatgccaaaagaaatttgaggaacaaattcagccctgagacaggtcacggaaacagccctccagtcttcctcaagaaatgtagactgaatcagcatttacccacccctggaaaaacgcaggagctgcgcattcctgggatctcagcagggcttttgggaagagcagaactgggctggagtcacggtttctgggctgactctagattttccccggcttttgccacctgtgatggctggagagtatctgaagatgacagaccccctactcccagtgacacaagatggttggacccacggctgatttactgctttactcccattctttatggggccagctttaatgagcacccaagcagaaatgcctttgactcctgcactgtgaataactgttattaataaaagggcaagctgcttgccatggaaccttg

SEQ ID NO: 1224 - protein, 136 aa, Homosapiens
DRKIIHAKRNLRNKFSPETGHGNSPPVFLKKCRLNQHLPTPGKTQELRIPGISAGLLGRAELGWSHGFWADSRFSPAFATCDGWRVSEDDRPPTPSDTRWLDPRLIYCFTPILYGASFNEHPSRNAFDSCTVNNCY

SEQ ID NO: 1225 - DNA, 485 bp, Homosapiens
atagaaaaataatacatgccaaaagaaatttgaggaacaaattcagccctgagacaggtcacggaaacagccctccagtcttcctcaagaaatgtagactgaatcagcatttacccacccctggaaaaacgcaggagctgcgcattcctgggatctcagcagggcttttgggaagagcagaactgggctggagtcacggtttctgggctgactctagattttccccggcttttgccacctgtgatggctggagagtatctgaagatgacagccagtgtccttagcttgtgaagattggatgatgggccatggagaggaactgggggtgatggctatggggcgctgggtttcttttgggttaataaacatgttctattattgattgcggtgaactttgcgaatgtgctaaaagccattgaattgtacactttcaatgggagaattgtatgtgatgtgaattatatcaataaaactgttaaataaag

SEQ ID NO: 1226 - protein, 93 aa, Homosapiens
RKIIHAKRNLRNKFSPETGHGNSPPVFLKKCRLNQHLPTPGKTQELRIPGISAGLLGRAELGWSHGFWADSRFSPAFATCDGWRVSEDDSQCP

SEQ ID NO: 1227 - DNA, 601 bp, Homosapiens
atggaggtgtatggaacaggaatcaataacaagccacaggcggaggtaaacactgagggcttcagagaaaaggtagcatggccccctggcctgaccctgagtcccgggcgtaacggcgttgttgaaccaccacaaccccaggcggcgccttcctcttggcccaggggctctcttggggacagtgtgcagtactccccaagggggctttgctgtgcaaaagcagcccctgccgatgctgcggctcccgtggatggagcactgccgtgggaacagagttggaactcatccaaaagaataaaagacaactgtgttggaagattgccaaggtttgtagctgtgccaccgcagacttcagagatgaacactgccttggagacgaggaggattcaagttgcagaagcatttaggtgctgcgtgaaccccagcagggccattccagatgctccacaggacagcgctgaacgcaccgcagtgagcctgggaggccctgggctactgctgcctccccttctctgggctgaacatcaaggtagtgcttctgtgttcttctcccaacttgtgcaagaaaggacattaaagttatttttatgaaattgcctaa

SEQ ID NO: 1228 - protein, 196 aa, Homosapiens
MEVYGTGINNKPQAEVNTEGFREKVAWPPGLTLSPGRNGVVEPPQPQAAPSSWPRGSLGDSVQYSPRGLCCAKAAPADAAAPVDGALPWEQSWNSSKRIKDNCVGRLPRFVAVPPQTSEMNTALETRRIQVAEAFRCCVNPSRAIPDAPQDSAERTAVSLGGPGLLLPPLLWAEHQGSASVFFSQLVQERTLKLFL

SEQ ID NO: 1229 - DNA, 622 bp, Homosapiens
ggatgctgcccggggcttgagtggtttttagaggtcttgagtggctcactctccaatcagcgctttctagagacagcgtggtcagcgtacttgcttactttcaggattgcgagacgtctttaacccttgctgatcggctgacgctgcagcttcctgtggcttcctgctcatttcccgcaagatagcactgataggcaattccattttggaaaatttatcctgaggaaataaataaagatgtaaacagagaataacttacagatgtgacgtttgtgatcgttaaaactggaaacagcgcaagagtggacgataggggatgagagagccacacagcgcatagaagatgatcagtctgaagagagggttttcagacatgcaattaactgctattcactgtacttcattttaactgcaaactagcagaaagcctggatctttgagttgtgttgatgggcatattcgtgtttgccacttgaaggagtaagaggcccgcgtggatctggaggcaagtggctgtgccctcctgcaatctgctcacctgcagaaatgctcgcgtagggcagctctcaattttctgccacctcctcagctttttctgtgaaacagaagttggttactttgg

SEQ ID NO: 1230 - protein, 54 aa, Homosapiens
VVFRGLEWLTLQSALSRDSVVSVLAYFQDCETSLTLADRLTLQLPVASCSFPAR

SEQ ID NO: 1231 - DNA, 5151 bp, Homosapiens
gaacagtggtcgctgctaggaagggttggggatggtgggcctcaagcccctatgcaaagactaggactagaactaaggaactgaggctgcaggtgtctgggtgggtgacgccctagttcaggggcctggcaggcgcgggagcccctctctgtgggatagtggcagagggcgatgtaggaagagcagtgtgggggcagggctgaggacctccagggctgcttgctgctggcctccccggctcgagcatgcctccgccctggtgatgcccagtgtgtgtgcaggcgagggagacgggatggcatggacactggcaaatactgagcagagaacggtgccagccacttcctataccccattgtttggttttcaatcaccctctgggaggacatcatgcccccatttaacaggtgaggaaaggaacccagggcctgtgccgcgggcccacgccagagcaaggtgtgccaggccaggaggtggtgcagagaccacccgcacccaggctctgagcgcgcctatccctccataccatacctgcctccctggccaccgcgtgtgccatctccaggcaactggtcttcccggtctggtctggggtcggggagccatgacctttgggtggggcatggggcaggggtgggcttgcctttgtccatgacacgggtgcccacgggcttcccggctgtggggtggtgagtagcctgtgtccctgcatggagggacagtcccgggcctgcatggcgaggtgccacctgccggggcagcacagcgaagggatggtcagctctctggcggatgaccctcccctcagcacatgacggatattgctgcctgggttggctgacttttctgagacaggagggaggggtgttgctggggcagggtgggggccactggggagagatgctggccgcccgctggtgggaggcacctcgaggctgtgcaccggcgtcctcagggctccttcagagacggccggttatggggcagagcagtgacctccctgccctgggttccccagacagggctggacctaaaggaaagtcagctgctgggattggcccagggcagggcttggggcctagggcccctggttctaggaagtgagtccacttggcctgagctgtctgacaccttggcttggccatgtggactgctccacgccttgtcccctgagctgcaggacagctgggtcctcttaggactgaggaccttgggtctctcccaatgggccctcggctcagctatggaggtgcctctggggagcccggcccacagccccaggtctcacatccttcatggtggaggccgggtgggagggcgcccctgtcagtgtccggtgcctgtcaagagtgtgtagagccgggaagccgctggcctgggctgcggggctggagttcttccagcactgcctgagggccccggaggggagcaccccggccacgtccctctccttttaaacctgggcaaagttctctctggcccccaaagggaagccccaggtacaagatggagaccgcagccgagccagtccctgctcctcagaaggcagcttgtgccctgggcatggatgctgccccagggctcaccggagtcattgtctccgcctgtgccgggggctctaaggaagccccttcctcccatgctagtctggcccagcttatggggaggcttgtccctgtgtggccagggccaccgtgtcccatccctggggccatgcctgtcacatgcctattcctgggctcactggaaggagatcttggcgaggggctgctgggaggggtcaggggcctgcagttttaacccaagtgccccgggtggttctgaagcccccgaatgttgaagaccccactttgaagcttggcctgttgggctttgtggctggctccactctttctccgtccctggagctgacggctggtggtgtcgccagagagtgacctccctgtctggggtggaggaaaagccagtgtgaagtctctgcctttggaactttcccagtcgggagcactgagggtggctgtggcatggtgttactctcgccactggggggtagcaagatcagcagaactcttggcgcagggagcggagaggaggttcgggcattggtggggaggggcccaccagtctgtggatggtggcggaagagagctggggcctggtgctggccctgcggggtggcggccacgggcggacctatgactgggagtttgaggcgggcactggggtcgtcctcctggtgtgggcgggagcctgtgccggggcgcgtggctttgggcagtgctcccgtgtgtgaggtggatgagttggtgcctgggctgtgtgccagcgtgtgtgcgtgtatgtgcgcttgctctgcatgcgtggtgtgtgtatgtgtgtgtgtccacgcgtgtgcctgtgcctgcagtgtctgcctggggtgagggctcccagcttaacactaactgcttcctcctctgctgctgctgctgctgccaagtttgaggccccggggcctttctcggagcaggccagtctgctggacctggactttgaccccctcccgcccgtgacgagccctgtgaaggcacccacgccctctggtcaggttggttgtgcccaccactgcccatgggcccaccagcttccaggtgcccaaccctgggctcatgttgcctattggccacgtgaccccagctaggcctgggtcactgcccttcccctggcacctcagccttcagccctcatcacctcctggttgtagggcaggaagcagcccctgatcagctgggagaactctcagtagggggttactgaacacttcctggcaactttgtgctcatcgcttggggcagaagcatcctggcttggggtcttgaagctccctgagaggtgtcgggagctcggccacctgcaaatcttggagtctacctggctccgagccactcctgtgcctgctgggctggatggcctggggcgagcgggggtagggtccctggggactgcttgccgccctgtctctaacctctgtgctaactgtccttctcgccctcactgctgcgctcagtcaattccatgggacctctgggaggtaagctgcacgtctgctctttgtccagcccctgggggagccactcttccgtatgtgtccaggcccacatgctcctagcctgttcacaggtgcatgcaccccacacaccccccacacgcaggacacacaggcacgtgctcacgcacagggagctggtgaagccacccgcctccagccattctgctgcttctccctctggcaggcccttggaaaaggggatcttcggtttagcttgagacaggggtcccctgagatctggtcctgttttcacagcctgtgagtgtttgcctccagacagaagtgggccggtcacccaggatggacgagtgtcctcagggtgtggggcaggagggcctcagggtagaaggttcttgccttctctgagctttttggcagtggggagctgtttgcgaggaaggggagaggggaggaatggatggtttgagagagtcagggaagacagggtgtggctgagtgccttctgagagcagggcctgcaggcaggtgcaaggccatctcacacagcaccatgtcactgtcacctgatagctcaggacacagaggctcagggaaggctcagtacttgcccaagaactggtcatggtagagccagaattccaacagggtctcctgggctctgtccctgagaccccctgatacaggcagagatgctgggaggggcaggcgggtgtgcaggcgcccttggggcatgcgctggcagcccaggctcctgggagctctggaggctccaccgcaggatttccctctggaggaagccagaaagagccagcctggtgcgagctggtagggccattttgacaagtggatttcggtaggtgctgagcttgggcagcacagtcacacctgcctgtccctttgacagtggtaggagagaggatgtgggaggcgggtggctggccgggctccgctggtacccaccctgcccccaccaaccccagccgctggtgacattttctcttgtcttgtgatcctgcccattgcctttccaccccggcctccccgccccctccctgttctctcctcgtggcctgttaccagcccacagagagtccagccggcagcctgccttccggggagcccagcgctgccgagggcacctttgctgtgtcctggcccagccagacggccgagccggggcctgcccaaccagcagaggcctcggaggtggcgggtgggacccaacctgcggctggagcccaggagccaggggagacggcggcaagtgaagcagcctccagctctcttcctgctgtcgtggtggagaccttcccagcaactgtgaatggcaccgtggagggcggcagtggggccgggcgcttggacctgcccccaggtttcatgttcaaggtacaggcccagcacgactacacggccactgacacagacgagctgcagctcaaggctggtgatgtggtgctggtgatccccttccagaaccctgaagagcaggatgaaggctggctcatgggcgtgaaggagagcgactggaaccagcacaaggagctggagaagtgccgtggcgtcttccccgagaacttcactgagagggtcccatgacggcggggcccaggcagcctccgggcgtgtgaagaacacctcctcccgaaaaatgtgtggttcttttttttgttttgttttcgtttttcatcttttgaagagcaaagggaaatcaagaggagacccccaggcagaggggcgttctcccaaagattaggtcgttttccaaagagccgcgtcccggcaagtccggcggaattcaccagtgttcctgaagctgctgtgtcctctagttgagtttctggcgcccctgcctgtgcccgcatgtgtgcctggccgcagggcggggctgggggctgccgagccaccatgcttgcctgaagcttcggccgcgccacccgggcaagggtcctcttttcctggcagctgctgtgggtggggcccagacaccagcctagcctggctctgccccgcagacggtctgtgtgctgtttgaaaataaatcttagtgttcaaaacaaaatgaaacaaaaaaaaaatgataaaaactctcagaaaacgtg

SEQ ID NO: 1232 - protein, 72 aa, Homosapiens
MFKVQAQHDYTATDTDELQLKAGDVVLVIPFQNPEEQDEGWLMGVKESDWNQHKELEKCRGVFPENFTERVP

SEQ ID NO: 1233 - DNA, 663 bp, Homosapiens
tgcgccgcgatggcagagatgggcagtaaaggggtgacggcgggaaagatcgccagcaacgtgcagaagaagctcacccgcgcgcaggagaaggttctccagaagctggggaaggcagatgagaccaaggatgagcagtttgagcagtgcggtcccatgacggcggggcccaggcagcctccgggcgtgtgaagaacacctcctcccgaaaaatgtgtggttcttttttttgttttgttttcgtttttcatcttttgaagagcaaagggaaatcaagaggagacccccaggcagaggggcgttctcccaaagattaggtcgttttccaaagagccgcgtcccggcaagtccggcggaattcaccagtgttcctgaagctgctgtgtcctctagttgagtttctggcgcccctgcctgtgcccgcatgtgtgcctggccgcagggcggggctgggggctgccgagccaccatgcttgcctgaagcttcggccgcgccacccgggcaagggtcctcttttcctggcagctgctgtgggtggggcccagacaccagcctagcctggctctgccccgcagacggtctgtgtgctgtttgaaaataaatcttagtgttcaaaacaaaatgaaacaaaaaaaaaatgataaaaactctcagaaaacgtg

SEQ ID NO: 1234 - protein, 60 aa, Homosapiens
MAEMGSKGVTAGKIASNVQKKLTRAQEKVLQKLGKADETKDEQFEQCGPMTAGPRQPPGV

SEQ ID NO: 1235 - DNA, 875 bp, Homosapiens
gcgcgcaagatctccccgcgcgagagcggcccctgccaccgggcgaggcctgcgccgcgatggcagagatgggcagtaaaggggtgacggcgggaaagatcgccagcaacgtgcagaagaagctcaccccgcttggacctgcccccaggtttcatgttcaaggtacaggcccagcacgactacacggccactgacacagacgagctgcagctcaaggctggtgatgtggtgctggtgatccccttccagaaccctgaagagcaggatgaaggctggctcatgggcgtgaaggagagcgactggaaccagcacaaggagctggagaagtgccgtggcgtcttccccgagaacttcactgagagggtcccatgacggcggggcccaggcagcctccgggcgtgtgaagaacacctcctcccgaaaaatgtgtggttcttttttttgttttgttttcgtttttcatcttttgaagagcaaagggaaatcaagaggagacccccaggcagaggggcgttctcccaaagattaggtcgttttccaaagagccgcgtcccggcaagtccggcggaattcaccagtgttcctgaagctgctgtgtcctctagttgagtttctggcgcccctgcctgtgcccgcatgtgtgcctggccgcagggcggggctgggggctgccgagccaccatgcttgcctgaagcttcggccgcgccacccgggcaagggtcctcttttcctggcagctgctgtgggtggggcccagacaccagcctagcctggctctgccccgcagacggtctgtgtgctgtttgaaaataaatcttagtgttcaaaacaaaatgaaacaaaaaaaaaatgataaaaactctcagaaaacgtg

SEQ ID NO: 1236 - protein, 72 aa, Homosapiens; identical to SEQ ID NO: 1232

SEQ ID NO: 1237 - DNA, 1579 bp, Homosapiens
ggcggtgcagctggagcgtcaggggagtcccgctcgccgcagccccagcgccgcgcgcgcccctccctcctcgcggacctggcggtgccggcgcccggagtggccctttaaaaggcagcttattgtccggagggggcgggcggggggcgccgaccgcggcctgaggcccggcccctcccctctccctccctctgtccccgcgtcgctcgctggctagctcgctggctcgctcgcccgtccggcgcacgctccgcctccgtcagttggctccgctgtcgggtgcgcggcgtggagcggcagccggtctggacgcgcggccggggctgggggctgggagcgcggcgcgcaagatctccccgcgcgagagcggcccctgccaccgggcgaggcctgcgccgcgatggcagagatgggcagtaaaggggtgacggcgggaaagatcgccagcaacgtgcagaagaagctcacccgcgcgcaggagaaggttctccagaagctggggaaggcagatgagaccaaggatgagcagtttgagcagtgcgtccagaatttcaacaagcagctgacggagggcacccggctgcagaaggatctccggacctacctggcctccgtcaaagccatgcacgaggcttccaagaagctgaatgagtgtctgcaggaggtgtatgagcccgattggcccggcagggatgaggcaaacaagatcgcagagaacaacgacctgctgtggatggattaccaccagaagctggtggaccaggcgctgctgaccatggacacgtacctgggccagttccccgacatcaagtcacgcattgccaagcgggggccgcttggacctgcccccaggtttcatgttcaaggtacaggcccagcacgactacacggccactgacacagacgagctgcagctcaaggctggtgatgtggtgctggtgatccccttccagaaccctgaagagcaggatgaaggctggctcatgggcgtgaaggagagcgactggaaccagcacaaggagctggagaagtgccgtggcgtcttccccgagaacttcactgagagggtcccatgacggcggggcccaggcagcctccgggcgtgtgaagaacacctcctcccgaaaaatgtgtggttcttttttttgttttgttttcgtttttcatcttttgaagagcaaagggaaatcaagaggagacccccaggcagaggggcgttctcccaaagattaggtcgttttccaaagagccgcgtcccggcaagtccggcggaattcaccagtgttcctgaagctgctgtgtcctctagttgagtttctggcgcccctgcctgtgcccgcatgtgtgcctggccgcagggcggggctgggggctgccgagccaccatgcttgcctgaagcttcggccgcgccacccgggcaagggtcctcttttcctggcagctgctgtgggtggggcccagacaccagcctagcctggctctgccccgcagacggtctgtgtgctgtttgaaaataaatcttagtgttcaaaacaaaatgaaacaaaaaaaaaatgataaaaactctcagaaaacgtg

SEQ ID NO: 1238 - protein, 165 aa, Homosapiens
MAEMGSKGVTAGKIASNVQKKLTRAQEKVLQKLGKADETKDEQFEQCVQNFNKQLTEGTRLQKDLRTYLASVKAMHEASKKLNECLQEVYEPDWPGRDEANKIAENNDLLWMDYHQKLVDQALLTMDTYLGQFPDIKSRIAKRGPLGPAPRFHVQGTGPARLHGH

SEQ ID NO: 1239 - DNA, 2429 bp, Homosapiens
cccggggcggtgcagctggagcgtcaggggagtcccgctcgccgcagccccagcgccgcgcgcgcccctccctcctcgcggacctggcggtgccggcgcccggagtggccctttaaaaggcagcttattgtccggagggggcgggcggggggcgccgaccgcggcctgaggcccggcccctcccctctccctccctctgtccccgcgtcgctcgctggctagctcgctggctcgctcgcccgtccggcgcacgctccgcctccgtcagttggctccgctgtcgggtgcgcggcgtggagcggcagccggtctggacgcgcggccggggctgggggctgggagcgcggcgcgcaagatctccccgcgcgagagcggcccctgccaccgggcgaggcctgcgccgcgatggcagagatgggcagtaaaggggtgacggcgggaaagatcgccagcaacgtgcagaagaagctcacccgcgcgcaggagaaggttctccagaagctggggaaggcagatgagaccaaggatgagcagtttgagcagtgcgtccagaatttcaacaagcagctgacggagggcacccggctgcagaaggatctccggacctacctggcctccgtcaaagccatgcacgaggcttccaagaagctgaatgagtgtctgcaggaggtgtatgagcccgattggcccggcagggatgaggcaaacaagatcgcagagaacaacgacctgctgtggatggattaccaccagaagctggtggaccaggcgctgctgaccatggacacgtacctgggccagttccccgacatcaagtcacgcattgccaagcgggggcgcaagctggtggactacgacagtgcccggcaccactacgagtcccttcaaactgccaaaaagaaggatgaagccaaaattgccaagcctgtctcgctgcttgagaaagccgccccccagtggtgccaaggcaaactgcaggctcatctcgtagctcaaactaacctgctccgaaatcaggccgaggaggagctcatcaaagcccagaaggtgtttgaggagatgaatgtggatctgcaggaggagctgccgtccctgtggaacagccgcgtaggtttctacgtcaacacgttccagagcatcgcgggcctggaggaaaacttccacaaggagatgagcaagctcaaccagaacctcaatgatgtgctggtcggcctggagaagcaacacgggagcaacaccttcacggtcaaggcccagcccagtgacaacgcgcctgcaaaagggaacaagagcccttcgcctccagatggctcccctgccgccacccccgagatcagagtcaaccacgagccagagccggccggcggggccacgcccggggccaccctccccaagtccccatctcagcccacagagagtccagccggcagcctgccttccggggagcccagcgctgccgagggcacctttgctgtgtcctggcccagccagacggccgagccggggcctgcccaaccagcagaggcctcggaggtggcgggtgggacccaacctgcggctggagcccaggagccaggggagacggcggcaagtgaagcagcctccagctctcttcctgctgtcgtggtggagaccttcccagcaactgtgaatggcaccgtggagggcggcagtggggccgggcgcttggacctgcccccaggtttcatgttcaaggtacaggcccagcacgactacacggccactgacacagacgagctgcagctcaaggctggtgatgtggtgctggtgatccccttccagaaccctgaagagcaggatgaaggctggctcatgggcgtgaaggagagcgactggaaccagcacaaggagctggagaagtgccgtggcgtcttccccgagaacttcactgagagggtcccatgacggcggggcccaggcagcctccgggcgtgtgaagaacacctcctcccgaaaaatgtgtggttcttttttttgttttgttttcgtttttcatcttttgaagagcaaagggaaatcaagaggagacccccaggcagaggggcgttctcccaaagattaggtcgttttccaaagagccgcgtcccggcaagtccggcggaattcaccagtgttcctgaagctgctgtgtcctctagttgagtttctggcgcccctgcctgtgcccgcatgtgtgcctggccgcagggcggggctgggggctgccgagccaccatgcttgcctgaagcttcggccgcgccacccgggcaagggtcctcttttcctggcagctgctgtgggtggggcccagacaccagcctagcctggctctgccccgcagacggtctgtgtgctgtttgaaaataaatcttagtgttcaaaacaaaatgaaacaaaaaaaaaatgataaaaactctcagaaaacgtg

SEQ ID NO: 1240 - protein, 506 aa, Homosapiens; identical to SEQ ID NO: 66

SEQ ID NO: 1241 - DNA, 2402 bp, Homosapiens
cccggggcggtgcagctggagcgtcaggggagtcccgctcgccgcagccccagcgccgcgcgcgcccctccctcctcgcggacctggcggtgccggcgcccggagtggccctttaaaaggcagcttattgtccggagggggcgggcggggggcgccgaccgcggcctgaggcccggcccctcccctctccctccctctgtccccgcgtcgctcgctggctagctcgctggctcgctcgcccgtccggcgcacgctccgcctccgtcagttggctccgctgtcgggtgcgcggcgtggagcggcagccggtctggacgcgcggccggggctgggggctgggagcgcggcgcgcaagatctccccgcgcgagagcggcccctgccaccgggcgaggcctgcgccgcgatggcagagatgggcagtaaaggggtgacggcgggaaagatcgccagcaacgtgcagaagaagctcacccgcgcgcaggagaaggttctccagaagctggggaaggcagatgagaccaaggatgagcagtttgagcagtgcgtccagaatttcaacaagcagctgacggagggcacccggctgcagaaggatctccggacctacctggcctccgtcaaagccatgcacgaggcttccaagaagctgaatgagtgtctgcaggaggtgtatgagcccgattggcccggcagggatgaggcaaacaagatcgcagagaacaacgacctgctgtggatggattaccaccagaagctggtggaccaggcgctgctgaccatggacacgtacctgggccagttccccgacatcaagtcacgcattgccaagcgggggcgcaagctggtggactacgacagtgcccggcaccactacgagtcccttcaaactgccaaaaagaaggatgaagccaaaattgccaaggccgaggaggagctcatcaaagcccagaaggtgtttgaggagatgaatgtggatctgcaggaggagctgccgtccctgtggaacagccgcgtaggtttctacgtcaacacgttccagagcatcgcgggcctggaggaaaacttccacaaggagatgagcaagctcaaccagaacctcaatgatgtgctggtcggcctggagaagcaacacgggagcaacaccttcacggtcaaggcccagcccagaaagaaaagtaaactgttttcgcggctgcgcagaaagaagaacagtgacaacgcgcctgcaaaagggaacaagagcccttcgcctccagatggctcccctgccgccacccccgagatcagagtcaaccacgagccagagccggccggcggggccacgcccggggccaccctccccaagtccccatctcagctccggaaaggcccaccagtccctccgcctcccaaacacaccccgtccaaggaagtcaagcaggagcagatcctcagcctgtttgaggacacgtttgtccctgagatcagcgtgaccaccccctcccagccagcagaggcctcggaggtggcgggtgggacccaacctgcggctggagcccaggagccaggggagacggcggcaagtgaagcagcctccagctctcttcctgctgtcgtggtggagaccttcccagcaactgtgaatggcaccgtggagggcggcagtggggccgggcgcttggacctgcccccaggtttcatgttcaaggtacaggcccagcacgactacacggccactgacacagacgagctgcagctcaaggctggtgatgtggtgctggtgatccccttccagaaccctgaagagcaggatgaaggctggctcatgggcgtgaaggagagcgactggaaccagcacaaggagctggagaagtgccgtggcgtcttccccgagaacttcactgagagggtcccatgacggcggggcccaggcagcctccgggcgtgtgaagaacacctcctcccgaaaaatgtgtggttcttttttttgttttgttttcgtttttcatcttttgaagagcaaagggaaatcaagaggagacccccaggcagaggggcgttctcccaaagattaggtcgttttccaaagagccgcgtcccggcaagtccggcggaattcaccagtgttcctgaagctgctgtgtcctctagttgagtttctggcgcccctgcctgtgcccgcatgtgtgcctggccgcagggcggggctgggggctgccgagccaccatgcttgcctgaagcttcggccgcgccacccgggcaagggtcctcttttcctggcagctgctgtgggtggggcccagacaccagcctagcctggctctgccccgcagacggtctgtgtgctgtttgaaaataaatcttagtgttcaaaacaaaatgaaacaaaaaaaaaatgataaaaactctcagaaaacgtg

SEQ ID NO: 1242 - protein, 497 aa, Homosapiens; identical to SEQ ID NO: 68

SEQ ID NO: 1243 - DNA, 2690 bp, Homosapiens
cccggggcggtgcagctggagcgtcaggggagtcccgctcgccgcagccccagcgccgcgcgcgcccctccctcctcgcggacctggcggtgccggcgcccggagtggccctttaaaaggcagcttattgtccggagggggcgggcggggggcgccgaccgcggcctgaggcccggcccctcccctctccctccctctgtccccgcgtcgctcgctggctagctcgctggctcgctcgcccgtccggcgcacgctccgcctccgtcagttggctccgctgtcgggtgcgcggcgtggagcggcagccggtctggacgcgcggccggggctgggggctgggagcgcggcgcgcaagatctccccgcgcgagagcggcccctgccaccgggcgaggcctgcgccgcgatggcagagatgggcagtaaaggggtgacggcgggaaagatcgccagcaacgtgcagaagaagctcacccgcgcgcaggagaaggttctccagaagctggggaaggcagatgagaccaaggatgagcagtttgagcagtgcgtccagaatttcaacaagcagctgacggagggcacccggctgcagaaggatctccggacctacctggcctccgtcaaagccatgcacgaggcttccaagaagctgaatgagtgtctgcaggaggtgtatgagcccgattggcccggcagggatgaggcaaacaagatcgcagagaacaacgacctgctgtggatggattaccaccagaagctggtggaccaggcgctgctgaccatggacacgtacctgggccagttccccgacatcaagtcacgcattgccaagcgggggcgcaagctggtggactacgacagtgcccggcaccactacgagtcccttcaaactgccaaaaagaaggatgaagccaaaattgccaagcctgtctcgctgcttgagaaagccgccccccagtggtgccaaggcaaactgcaggctcatctcgtagctcaaactaacctgctccgaaatcaggccgaggaggagctcatcaaagcccagaaggtgtttgaggagatgaatgtggatctgcaggaggagctgccgtccctgtggaacagccgcgtaggtttctacgtcaacacgttccagagcatcgcgggcctggaggaaaacttccacaaggagatgagcaagctcaaccagaacctcaatgatgtgctggtcggcctggagaagcaacacgggagcaacaccttcacggtcaaggcccagcccagtgacaacgcgcctgcaaaagggaacaagagcccttcgcctccagatggctcccctgccgccacccccgagatcagagtcaaccacgagccagagccggccggcggggccacgcccggggccaccctccccaagtccccatctcagctccggaaaggcccaccagtccctccgcctcccaaacacaccccgtccaaggaagtcaagcaggagcagatcctcagcctgtttgaggacacgtttgtccctgagatcagcgtgaccaccccctcccagtttgaggccccggggcctttctcggagcaggccagtctgctggacctggactttgaccccctcccgcccgtgacgagccctgtgaaggcacccacgccctctggtcagtcaattccatgggacctctgggagcccacagagagtccagccggcagcctgccttccggggagcccagcgctgccgagggcacctttgctgtgtcctggcccagccagacggccgagccggggcctgcccaaccagcagaggcctcggaggtggcgggtgggacccaacctgcggctggagcccaggagccaggggagacggcggcaagtgaagcagcctccagctctcttcctgctgtcgtggtggagaccttcccagcaactgtgaatggcaccgtggagggcggcagtggggccgggcgcttggacctgcccccaggtttcatgttcaaggtacaggcccagcacgactacacggccactgacacagacgagctgcagctcaaggctggtgatgtggtgctggtgatccccttccagaaccctgaagagcaggatgaaggctggctcatgggcgtgaaggagagcgactggaaccagcacaaggagctggagaagtgccgtggcgtcttccccgagaacttcactgagagggtcccatgacggcggggcccaggcagcctccgggcgtgtgaagaacacctcctcccgaaaaatgtgtggttcttttttttgttttgttttcgtttttcatcttttgaagagcaaagggaaatcaagaggagacccccaggcagaggggcgttctcccaaagattaggtcgttttccaaagagccgcgtcccggcaagtccggcggaattcaccagtgttcctgaagctgctgtgtcctctagttgagtttctggcgcccctgcctgtgcccgcatgtgtgcctggccgcagggcggggctgggggctgccgagccaccatgcttgcctgaagcttcggccgcgccacccgggcaagggtcctcttttcctggcagctgctgtgggtggggcccagacaccagcctagcctggctctgccccgcagacggtctgtgtgctgtttgaaaataaatcttagtgttcaaaacaaaatgaaacaaaaaaaaaatgataaaaactctcagaaaacgtg

SEQ ID NO: 1244 - protein, 593 aa, Homosapiens; identical to SEQ ID NO: 62

SEQ ID NO: 1245 - DNA, 2561 bp, Homosapiens
cccggggcggtgcagctggagcgtcaggggagtcccgctcgccgcagccccagcgccgcgcgcgcccctccctcctcgcggacctggcggtgccggcgcccggagtggccctttaaaaggcagcttattgtccggagggggcgggcggggggcgccgaccgcggcctgaggcccggcccctcccctctccctccctctgtccccgcgtcgctcgctggctagctcgctggctcgctcgcccgtccggcgcacgctccgcctccgtcagttggctccgctgtcgggtgcgcggcgtggagcggcagccggtctggacgcgcggccggggctgggggctgggagcgcggcgcgcaagatctccccgcgcgagagcggcccctgccaccgggcgaggcctgcgccgcgatggcagagatgggcagtaaaggggtgacggcgggaaagatcgccagcaacgtgcagaagaagctcacccgcgcgcaggagaaggttctccagaagctggggaaggcagatgagaccaaggatgagcagtttgagcagtgcgtccagaatttcaacaagcagctgacggagggcacccggctgcagaaggatctccggacctacctggcctccgtcaaagccatgcacgaggcttccaagaagctgaatgagtgtctgcaggaggtgtatgagcccgattggcccggcagggatgaggcaaacaagatcgcagagaacaacgacctgctgtggatggattaccaccagaagctggtggaccaggcgctgctgaccatggacacgtacctgggccagttccccgacatcaagtcacgcattgccaagcgggggcgcaagctggtggactacgacagtgcccggcaccactacgagtcccttcaaactgccaaaaagaaggatgaagccaaaattgccaagcctgtctcgctgcttgagaaagccgccccccagtggtgccaaggcaaactgcaggctcatctcgtagctcaaactaacctgctccgaaatcaggccgaggaggagctcatcaaagcccagaaggtgtttgaggagatgaatgtggatctgcaggaggagctgccgtccctgtggaacagccgcgtaggtttctacgtcaacacgttccagagcatcgcgggcctggaggaaaacttccacaaggagatgagcaagctcaaccagaacctcaatgatgtgctggtcggcctggagaagcaacacgggagcaacaccttcacggtcaaggcccagcccagtgacaacgcgcctgcaaaagggaacaagagcccttcgcctccagatggctcccctgccgccacccccgagatcagagtcaaccacgagccagagccggccggcggggccacgcccggggccaccctccccaagtccccatctcagtttgaggccccggggcctttctcggagcaggccagtctgctggacctggactttgaccccctcccgcccgtgacgagccctgtgaaggcacccacgccctctggtcagtcaattccatgggacctctgggagcccacagagagtccagccggcagcctgccttccggggagcccagcgctgccgagggcacctttgctgtgtcctggcccagccagacggccgagccggggcctgcccaaccagcagaggcctcggaggtggcgggtgggacccaacctgcggctggagcccaggagccaggggagacggcggcaagtgaagcagcctccagctctcttcctgctgtcgtggtggagaccttcccagcaactgtgaatggcaccgtggagggcggcagtggggccgggcgcttggacctgcccccaggtttcatgttcaaggtacaggcccagcacgactacacggccactgacacagacgagctgcagctcaaggctggtgatgtggtgctggtgatccccttccagaaccctgaagagcaggatgaaggctggctcatgggcgtgaaggagagcgactggaaccagcacaaggagctggagaagtgccgtggcgtcttccccgagaacttcactgagagggtcccatgacggcggggcccaggcagcctccgggcgtgtgaagaacacctcctcccgaaaaatgtgtggttcttttttttgttttgttttcgtttttcatcttttgaagagcaaagggaaatcaagaggagacccccaggcagaggggcgttctcccaaagattaggtcgttttccaaagagccgcgtcccggcaagtccggcggaattcaccagtgttcctgaagctgctgtgtcctctagttgagtttctggcgcccctgcctgtgcccgcatgtgtgcctggccgcagggcggggctgggggctgccgagccaccatgcttgcctgaagcttcggccgcgccacccgggcaagggtcctcttttcctggcagctgctgtgggtggggcccagacaccagcctagcctggctctgccccgcagacggtctgtgtgctgtttgaaaataaatcttagtgttcaaaacaaaatgaaacaaaaaaaaaatgataaaaactctcagaaaacgtg

SEQ ID NO: 1246 - protein, 550 aa, Homosapiens; identical to SEQ ID NO: 64

SEQ ID NO: 1247 - DNA, 2183 bp, Homosapiens
cccggggcggtgcagctggagcgtcaggggagtcccgctcgccgcagccccagcgccgcgcgcgcccctccctcctcgcggacctggcggtgccggcgcccggagtggccctttaaaaggcagcttattgtccggagggggcgggcggggggcgccgaccgcggcctgaggcccggcccctcccctctccctccctctgtccccgcgtcgctcgctggctagctcgctggctcgctcgcccgtccggcgcacgctccgcctccgtcagttggctccgctgtcgggtgcgcggcgtggagcggcagccggtctggacgcgcggccggggctgggggctgggagcgcggcgcgcaagatctccccgcgcgagagcggcccctgccaccgggcgaggcctgcgccgcgatggcagagatgggcagtaaaggggtgacggcgggaaagatcgccagcaacgtgcagaagaagctcacccgcgcgcaggagaaggttctccagaagctggggaaggcagatgagaccaaggatgagcagtttgagcagtgcgtccagaatttcaacaagcagctgacggagggcacccggctgcagaaggatctccggacctacctggcctccgtcaaagccatgcacgaggcttccaagaagctgaatgagtgtctgcaggaggtgtatgagcccgattggcccggcagggatgaggcaaacaagatcgcagagaacaacgacctgctgtggatggattaccaccagaagctggtggaccaggcgctgctgaccatggacacgtacctgggccagttccccgacatcaagtcacgcattgccaagcgggggcgcaagctggtggactacgacagtgcccggcaccactacgagtcccttcaaactgccaaaaagaaggatgaagccaaaattgccaaggccgaggaggagctcatcaaagcccagaaggtgtttgaggagatgaatgtggatctgcaggaggagctgccgtccctgtggaacagccgcgtaggtttctacgtcaacacgttccagagcatcgcgggcctggaggaaaacttccacaaggagatgagcaagctcaaccagaacctcaatgatgtgctggtcggcctggagaagcaacacgggagcaacaccttcacggtcaaggcccagcccagaaagaaaagtaaactgttttcgcggctgcgcagaaagaagaacagtgacaacgcgcctgcaaaagggaacaagagcccttcgcctccagatggctcccctgccgccacccccgagatcagagtcaaccacgagccagagccggccggcggggccacgcccggggccaccctccccaagtccccatctcagagctctcttcctgctgtcgtggtggagaccttcccagcaactgtgaatggcaccgtggagggcggcagtggggccgggcgcttggacctgcccccaggtttcatgttcaaggtacaggcccagcacgactacacggccactgacacagacgagctgcagctcaaggctggtgatgtggtgctggtgatccccttccagaaccctgaagagcaggatgaaggctggctcatgggcgtgaaggagagcgactggaaccagcacaaggagctggagaagtgccgtggcgtcttccccgagaacttcactgagagggtcccatgacggcggggcccaggcagcctccgggcgtgtgaagaacacctcctcccgaaaaatgtgtggttcttttttttgttttgttttcgtttttcatcttttgaagagcaaagggaaatcaagaggagacccccaggcagaggggcgttctcccaaagattaggtcgttttccaaagagccgcgtcccggcaagtccggcggaattcaccagtgttcctgaagctgctgtgtcctctagttgagtttctggcgcccctgcctgtgcccgcatgtgtgcctggccgcagggcggggctgggggctgccgagccaccatgcttgcctgaagcttcggccgcgccacccgggcaagggtcctcttttcctggcagctgctgtgggtggggcccagacaccagcctagcctggctctgccccgcagacggtctgtgtgctgtttgaaaataaatcttagtgttcaaaacaaaatgaaacaaaaaaaaaatgataaaaactctcagaaaacgtg

SEQ ID NO: 1248 - protein, 424 aa, Homosapiens
MAEMGSKGVTAGKIASNVQKKLTRAQEKVLQKLGKADETKDEQFEQCVQNFNKQLTEGTRLQKDLRTYLASVKAMHEASKKLNECLQEVYEPDWPGRDEANKIAENNDLLWMDYHQKLVDQALLTMDTYLGQFPDIKSRIAKRGRKLVDYDSARHHYESLQTAKKKDEAKIAKAEEELIKAQKVFEEMNVDLQEELPSLWNSRVGFYVNTFQSIAGLEENFHKEMSKLNQNLNDVLVGLEKQHGSNTFTVKAQPRKKSKLFSRLRRKKNSDNAPAKGNKSPSPPDGSPAATPEIRVNHEPEPAGGATPGATLPKSPSQSSLPAVVVETFPATVNGTVEGGSGAGRLDLPPGFMFKVQAQHDYTATDTDELQLKAGDVVLVIPFQNPEEQDEGWLMGVKESDWNQHKELEKCRGVFPENFTERVP

SEQ ID NO: 1249 - DNA, 2336 bp, Homosapiens
cccggggcggtgcagctggagcgtcaggggagtcccgctcgccgcagccccagcgccgcgcgcgcccctccctcctcgcggacctggcggtgccggcgcccggagtggccctttaaaaggcagcttattgtccggagggggcgggcggggggcgccgaccgcggcctgaggcccggcccctcccctctccctccctctgtccccgcgtcgctcgctggctagctcgctggctcgctcgcccgtccggcgcacgctccgcctccgtcagttggctccgctgtcgggtgcgcggcgtggagcggcagccggtctggacgcgcggccggggctgggggctgggagcgcggcgcgcaagatctccccgcgcgagagcggcccctgccaccgggcgaggcctgcgccgcgatggcagagatgggcagtaaaggggtgacggcgggaaagatcgccagcaacgtgcagaagaagctcacccgcgcgcaggagaaggttctccagaagctggggaaggcagatgagaccaaggatgagcagtttgagcagtgcgtccagaatttcaacaagcagctgacggagggcacccggctgcagaaggatctccggacctacctggcctccgtcaaagccatgcacgaggcttccaagaagctgaatgagtgtctgcaggaggtgtatgagcccgattggcccggcagggatgaggcaaacaagatcgcagagaacaacgacctgctgtggatggattaccaccagaagctggtggaccaggcgctgctgaccatggacacgtacctgggccagttccccgacatcaagtcacgcattgccaagcgggggcgcaagctggtggactacgacagtgcccggcaccactacgagtcccttcaaactgccaaaaagaaggatgaagccaaaattgccaaggccgaggaggagctcatcaaagcccagaaggtgtttgaggagatgaatgtggatctgcaggaggagctgccgtccctgtggaacagccgcgtaggtttctacgtcaacacgttccagagcatcgcgggcctggaggaaaacttccacaaggagatgagcaagctcaaccagaacctcaatgatgtgctggtcggcctggagaagcaacacgggagcaacaccttcacggtcaaggcccagcccagtgacaacgcgcctgcaaaagggaacaagagcccttcgcctccagatggctcccctgccgccacccccgagatcagagtcaaccacgagccagagccggccggcggggccacgcccggggccaccctccccaagtccccatctcagcccacagagagtccagccggcagcctgccttccggggagcccagcgctgccgagggcacctttgctgtgtcctggcccagccagacggccgagccggggcctgcccaaccagcagaggcctcggaggtggcgggtgggacccaacctgcggctggagcccaggagccaggggagacggcggcaagtgaagcagcctccagctctcttcctgctgtcgtggtggagaccttcccagcaactgtgaatggcaccgtggagggcggcagtggggccgggcgcttggacctgcccccaggtttcatgttcaaggtacaggcccagcacgactacacggccactgacacagacgagctgcagctcaaggctggtgatgtggtgctggtgatccccttccagaaccctgaagagcaggatgaaggctggctcatgggcgtgaaggagagcgactggaaccagcacaaggagctggagaagtgccgtggcgtcttccccgagaacttcactgagagggtcccatgacggcggggcccaggcagcctccgggcgtgtgaagaacacctcctcccgaaaaatgtgtggttcttttttttgttttgttttcgtttttcatcttttgaagagcaaagggaaatcaagaggagacccccaggcagaggggcgttctcccaaagattaggtcgttttccaaagagccgcgtcccggcaagtccggcggaattcaccagtgttcctgaagctgctgtgtcctctagttgagtttctggcgcccctgcctgtgcccgcatgtgtgcctggccgcagggcggggctgggggctgccgagccaccatgcttgcctgaagcttcggccgcgccacccgggcaagggtcctcttttcctggcagctgctgtgggtggggcccagacaccagcctagcctggctctgccccgcagacggtctgtgtgctgtttgaaaataaatcttagtgttcaaaacaaaatgaaacaaaaaaaaaatgataaaaactctcagaaaacgtg

SEQ ID NO: 1250 - protein, 475 aa, Homosapiens; identical to SEQ ID NO: 74

SEQ ID NO: 1251 - DNA, 2273 bp, Homosapiens
cccggggcggtgcagctggagcgtcaggggagtcccgctcgccgcagccccagcgccgcgcgcgcccctccctcctcgcggacctggcggtgccggcgcccggagtggccctttaaaaggcagcttattgtccggagggggcgggcggggggcgccgaccgcggcctgaggcccggcccctcccctctccctccctctgtccccgcgtcgctcgctggctagctcgctggctcgctcgcccgtccggcgcacgctccgcctccgtcagttggctccgctgtcgggtgcgcggcgtggagcggcagccggtctggacgcgcggccggggctgggggctgggagcgcggcgcgcaagatctccccgcgcgagagcggcccctgccaccgggcgaggcctgcgccgcgatggcagagatgggcagtaaaggggtgacggcgggaaagatcgccagcaacgtgcagaagaagctcacccgcgcgcaggagaaggttctccagaagctggggaaggcagatgagaccaaggatgagcagtttgagcagtgcgtccagaatttcaacaagcagctgacggagggcacccggctgcagaaggatctccggacctacctggcctccgtcaaagccatgcacgaggcttccaagaagctgaatgagtgtctgcaggaggtgtatgagcccgattggcccggcagggatgaggcaaacaagatcgcagagaacaacgacctgctgtggatggattaccaccagaagctggtggaccaggcgctgctgaccatggacacgtacctgggccagttccccgacatcaagtcacgcattgccaagcgggggcgcaagctggtggactacgacagtgcccggcaccactacgagtcccttcaaactgccaaaaagaaggatgaagccaaaattgccaaggccgaggaggagctcatcaaagcccagaaggtgtttgaggagatgaatgtggatctgcaggaggagctgccgtccctgtggaacagccgcgtaggtttctacgtcaacacgttccagagcatcgcgggcctggaggaaaacttccacaaggagatgagcaagctcaaccagaacctcaatgatgtgctggtcggcctggagaagcaacacgggagcaacaccttcacggtcaaggcccagcccagaaagaaaagtaaactgttttcgcggctgcgcagaaagaagaacagtgacaacgcgcctgcaaaagggaacaagagcccttcgcctccagatggctcccctgccgccacccccgagatcagagtcaaccacgagccagagccggccggcggggccacgcccggggccaccctccccaagtccccatctcagccagcagaggcctcggaggtggcgggtgggacccaacctgcggctggagcccaggagccaggggagacggcggcaagtgaagcagcctccagctctcttcctgctgtcgtggtggagaccttcccagcaactgtgaatggcaccgtggagggcggcagtggggccgggcgcttggacctgcccccaggtttcatgttcaaggtacaggcccagcacgactacacggccactgacacagacgagctgcagctcaaggctggtgatgtggtgctggtgatccccttccagaaccctgaagagcaggatgaaggctggctcatgggcgtgaaggagagcgactggaaccagcacaaggagctggagaagtgccgtggcgtcttccccgagaacttcactgagagggtcccatgacggcggggcccaggcagcctccgggcgtgtgaagaacacctcctcccgaaaaatgtgtggttcttttttttgttttgttttcgtttttcatcttttgaagagcaaagggaaatcaagaggagacccccaggcagaggggcgttctcccaaagattaggtcgttttccaaagagccgcgtcccggcaagtccggcggaattcaccagtgttcctgaagctgctgtgtcctctagttgagtttctggcgcccctgcctgtgcccgcatgtgtgcctggccgcagggcggggctgggggctgccgagccaccatgcttgcctgaagcttcggccgcgccacccgggcaagggtcctcttttcctggcagctgctgtgggtggggcccagacaccagcctagcctggctctgccccgcagacggtctgtgtgctgtttgaaaataaatcttagtgttcaaaacaaaatgaaacaaaaaaaaaatgataaaaactctcagaaaacgtg

SEQ ID NO: 1252 - protein, 454 aa, Homosapiens; identical to SEQ ID NO: 60

SEQ ID NO: 1253 - DNA, 2228 bp, Homosapiens
cccggggcggtgcagctggagcgtcaggggagtcccgctcgccgcagccccagcgccgcgcgcgcccctccctcctcgcggacctggcggtgccggcgcccggagtggccctttaaaaggcagcttattgtccggagggggcgggcggggggcgccgaccgcggcctgaggcccggcccctcccctctccctccctctgtccccgcgtcgctcgctggctagctcgctggctcgctcgcccgtccggcgcacgctccgcctccgtcagttggctccgctgtcgggtgcgcggcgtggagcggcagccggtctggacgcgcggccggggctgggggctgggagcgcggcgcgcaagatctccccgcgcgagagcggcccctgccaccgggcgaggcctgcgccgcgatggcagagatgggcagtaaaggggtgacggcgggaaagatcgccagcaacgtgcagaagaagctcacccgcgcgcaggagaaggttctccagaagctggggaaggcagatgagaccaaggatgagcagtttgagcagtgcgtccagaatttcaacaagcagctgacggagggcacccggctgcagaaggatctccggacctacctggcctccgtcaaagccatgcacgaggcttccaagaagctgaatgagtgtctgcaggaggtgtatgagcccgattggcccggcagggatgaggcaaacaagatcgcagagaacaacgacctgctgtggatggattaccaccagaagctggtggaccaggcgctgctgaccatggacacgtacctgggccagttccccgacatcaagtcacgcattgccaagcgggggcgcaagctggtggactacgacagtgcccggcaccactacgagtcccttcaaactgccaaaaagaaggatgaagccaaaattgccaaggccgaggaggagctcatcaaagcccagaaggtgtttgaggagatgaatgtggatctgcaggaggagctgccgtccctgtggaacagccgcgtaggtttctacgtcaacacgttccagagcatcgcgggcctggaggaaaacttccacaaggagatgagcaagctcaaccagaacctcaatgatgtgctggtcggcctggagaagcaacacgggagcaacaccttcacggtcaaggcccagcccagtgacaacgcgcctgcaaaagggaacaagagcccttcgcctccagatggctcccctgccgccacccccgagatcagagtcaaccacgagccagagccggccggcggggccacgcccggggccaccctccccaagtccccatctcagccagcagaggcctcggaggtggcgggtgggacccaacctgcggctggagcccaggagccaggggagacggcggcaagtgaagcagcctccagctctcttcctgctgtcgtggtggagaccttcccagcaactgtgaatggcaccgtggagggcggcagtggggccgggcgcttggacctgcccccaggtttcatgttcaaggtacaggcccagcacgactacacggccactgacacagacgagctgcagctcaaggctggtgatgtggtgctggtgatccccttccagaaccctgaagagcaggatgaaggctggctcatgggcgtgaaggagagcgactggaaccagcacaaggagctggagaagtgccgtggcgtcttccccgagaacttcactgagagggtcccatgacggcggggcccaggcagcctccgggcgtgtgaagaacacctcctcccgaaaaatgtgtggttcttttttttgttttgttttcgtttttcatcttttgaagagcaaagggaaatcaagaggagacccccaggcagaggggcgttctcccaaagattaggtcgttttccaaagagccgcgtcccggcaagtccggcggaattcaccagtgttcctgaagctgctgtgtcctctagttgagtttctggcgcccctgcctgtgcccgcatgtgtgcctggccgcagggcggggctgggggctgccgagccaccatgcttgcctgaagcttcggccgcgccacccgggcaagggtcctcttttcctggcagctgctgtgggtggggcccagacaccagcctagcctggctctgccccgcagacggtctgtgtgctgtttgaaaataaatcttagtgttcaaaacaaaatgaaacaaaaaaaaaatgataaaaactctcagaaaacgtg

SEQ ID NO: 1254 - protein, 439 aa, Homosapiens; identical to SEQ ID NO: 76

SEQ ID NO: 1255 - DNA, 2138 bp, Homosapiens
cccggggcggtgcagctggagcgtcaggggagtcccgctcgccgcagccccagcgccgcgcgcgcccctccctcctcgcggacctggcggtgccggcgcccggagtggccctttaaaaggcagcttattgtccggagggggcgggcggggggcgccgaccgcggcctgaggcccggcccctcccctctccctccctctgtccccgcgtcgctcgctggctagctcgctggctcgctcgcccgtccggcgcacgctccgcctccgtcagttggctccgctgtcgggtgcgcggcgtggagcggcagccggtctggacgcgcggccggggctgggggctgggagcgcggcgcgcaagatctccccgcgcgagagcggcccctgccaccgggcgaggcctgcgccgcgatggcagagatgggcagtaaaggggtgacggcgggaaagatcgccagcaacgtgcagaagaagctcacccgcgcgcaggagaaggttctccagaagctggggaaggcagatgagaccaaggatgagcagtttgagcagtgcgtccagaatttcaacaagcagctgacggagggcacccggctgcagaaggatctccggacctacctggcctccgtcaaagccatgcacgaggcttccaagaagctgaatgagtgtctgcaggaggtgtatgagcccgattggcccggcagggatgaggcaaacaagatcgcagagaacaacgacctgctgtggatggattaccaccagaagctggtggaccaggcgctgctgaccatggacacgtacctgggccagttccccgacatcaagtcacgcattgccaagcgggggcgcaagctggtggactacgacagtgcccggcaccactacgagtcccttcaaactgccaaaaagaaggatgaagccaaaattgccaaggccgaggaggagctcatcaaagcccagaaggtgtttgaggagatgaatgtggatctgcaggaggagctgccgtccctgtggaacagccgcgtaggtttctacgtcaacacgttccagagcatcgcgggcctggaggaaaacttccacaaggagatgagcaagctcaaccagaacctcaatgatgtgctggtcggcctggagaagcaacacgggagcaacaccttcacggtcaaggcccagcccagtgacaacgcgcctgcaaaagggaacaagagcccttcgcctccagatggctcccctgccgccacccccgagatcagagtcaaccacgagccagagccggccggcggggccacgcccggggccaccctccccaagtccccatctcagagctctcttcctgctgtcgtggtggagaccttcccagcaactgtgaatggcaccgtggagggcggcagtggggccgggcgcttggacctgcccccaggtttcatgttcaaggtacaggcccagcacgactacacggccactgacacagacgagctgcagctcaaggctggtgatgtggtgctggtgatccccttccagaaccctgaagagcaggatgaaggctggctcatgggcgtgaaggagagcgactggaaccagcacaaggagctggagaagtgccgtggcgtcttccccgagaacttcactgagagggtcccatgacggcggggcccaggcagcctccgggcgtgtgaagaacacctcctcccgaaaaatgtgtggttcttttttttgttttgttttcgtttttcatcttttgaagagcaaagggaaatcaagaggagacccccaggcagaggggcgttctcccaaagattaggtcgttttccaaagagccgcgtcccggcaagtccggcggaattcaccagtgttcctgaagctgctgtgtcctctagttgagtttctggcgcccctgcctgtgcccgcatgtgtgcctggccgcagggcggggctgggggctgccgagccaccatgcttgcctgaagcttcggccgcgccacccgggcaagggtcctcttttcctggcagctgctgtgggtggggcccagacaccagcctagcctggctctgccccgcagacggtctgtgtgctgtttgaaaataaatcttagtgttcaaaacaaaatgaaacaaaaaaaaaatgataaaaactctcagaaaacgtg

SEQ ID NO: 1256 - protein, 409 aa, Homosapiens; identical to SEQ ID NO: 78

SEQ ID NO: 1257 - DNA, 2357 bp, Homosapiens
cccggggcggtgcagctggagcgtcaggggagtcccgctcgccgcagccccagcgccgcgcgcgcccctccctcctcgcggacctggcggtgccggcgcccggagtggccctttaaaaggcagcttattgtccggagggggcgggcggggggcgccgaccgcggcctgaggcccggcccctcccctctccctccctctgtccccgcgtcgctcgctggctagctcgctggctcgctcgcccgtccggcgcacgctccgcctccgtcagttggctccgctgtcgggtgcgcggcgtggagcggcagccggtctggacgcgcggccggggctgggggctgggagcgcggcgcgcaagatctccccgcgcgagagcggcccctgccaccgggcgaggcctgcgccgcgatggcagagatgggcagtaaaggggtgacggcgggaaagatcgccagcaacgtgcagaagaagctcacccgcgcgcaggagaaggttctccagaagctggggaaggcagatgagaccaaggatgagcagtttgagcagtgcgtccagaatttcaacaagcagctgacggagggcacccggctgcagaaggatctccggacctacctggcctccgtcaaagccatgcacgaggcttccaagaagctgaatgagtgtctgcaggaggtgtatgagcccgattggcccggcagggatgaggcaaacaagatcgcagagaacaacgacctgctgtggatggattaccaccagaagctggtggaccaggcgctgctgaccatggacacgtacctgggccagttccccgacatcaagtcacgcattgccaagcgggggcgcaagctggtggactacgacagtgcccggcaccactacgagtcccttcaaactgccaaaaagaaggatgaagccaaaattgccaaggccgaggaggagctcatcaaagcccagaaggtgtttgaggagatgaatgtggatctgcaggaggagctgccgtccctgtggaacagccgcgtaggtttctacgtcaacacgttccagagcatcgcgggcctggaggaaaacttccacaaggagatgagcaagctcaaccagaacctcaatgatgtgctggtcggcctggagaagcaacacgggagcaacaccttcacggtcaaggcccagcccagtgacaacgcgcctgcaaaagggaacaagagcccttcgcctccagatggctcccctgccgccacccccgagatcagagtcaaccacgagccagagccggccggcggggccacgcccggggccaccctccccaagtccccatctcagctccggaaaggcccaccagtccctccgcctcccaaacacaccccgtccaaggaagtcaagcaggagcagatcctcagcctgtttgaggacacgtttgtccctgagatcagcgtgaccaccccctcccagccagcagaggcctcggaggtggcgggtgggacccaacctgcggctggagcccaggagccaggggagacggcggcaagtgaagcagcctccagctctcttcctgctgtcgtggtggagaccttcccagcaactgtgaatggcaccgtggagggcggcagtggggccgggcgcttggacctgcccccaggtttcatgttcaaggtacaggcccagcacgactacacggccactgacacagacgagctgcagctcaaggctggtgatgtggtgctggtgatccccttccagaaccctgaagagcaggatgaaggctggctcatgggcgtgaaggagagcgactggaaccagcacaaggagctggagaagtgccgtggcgtcttccccgagaacttcactgagagggtcccatgacggcggggcccaggcagcctccgggcgtgtgaagaacacctcctcccgaaaaatgtgtggttcttttttttgttttgttttcgtttttcatcttttgaagagcaaagggaaatcaagaggagacccccaggcagaggggcgttctcccaaagattaggtcgttttccaaagagccgcgtcccggcaagtccggcggaattcaccagtgttcctgaagctgctgtgtcctctagttgagtttctggcgcccctgcctgtgcccgcatgtgtgcctggccgcagggcggggctgggggctgccgagccaccatgcttgcctgaagcttcggccgcgccacccgggcaagggtcctcttttcctggcagctgctgtgggtggggcccagacaccagcctagcctggctctgccccgcagacggtctgtgtgctgtttgaaaataaatcttagtgttcaaaacaaaatgaaacaaaaaaaaaatgataaaaactctcagaaaacgtg

SEQ ID NO: 1258 - protein, 482 aa, Homosapiens; identical to SEQ ID NO: 72

SEQ ID NO: 1259 - DNA, 2465 bp, Homosapiens
cccggggcggtgcagctggagcgtcaggggagtcccgctcgccgcagccccagcgccgcgcgcgcccctccctcctcgcggacctggcggtgccggcgcccggagtggccctttaaaaggcagcttattgtccggagggggcgggcggggggcgccgaccgcggcctgaggcccggcccctcccctctccctccctctgtccccgcgtcgctcgctggctagctcgctggctcgctcgcccgtccggcgcacgctccgcctccgtcagttggctccgctgtcgggtgcgcggcgtggagcggcagccggtctggacgcgcggccggggctgggggctgggagcgcggcgcgcaagatctccccgcgcgagagcggcccctgccaccgggcgaggcctgcgccgcgatggcagagatgggcagtaaaggggtgacggcgggaaagatcgccagcaacgtgcagaagaagctcacccgcgcgcaggagaaggttctccagaagctggggaaggcagatgagaccaaggatgagcagtttgagcagtgcgtccagaatttcaacaagcagctgacggagggcacccggctgcagaaggatctccggacctacctggcctccgtcaaagccatgcacgaggcttccaagaagctgaatgagtgtctgcaggaggtgtatgagcccgattggcccggcagggatgaggcaaacaagatcgcagagaacaacgacctgctgtggatggattaccaccagaagctggtggaccaggcgctgctgaccatggacacgtacctgggccagttccccgacatcaagtcacgcattgccaagcgggggcgcaagctggtggactacgacagtgcccggcaccactacgagtcccttcaaactgccaaaaagaaggatgaagccaaaattgccaaggccgaggaggagctcatcaaagcccagaaggtgtttgaggagatgaatgtggatctgcaggaggagctgccgtccctgtggaacagccgcgtaggtttctacgtcaacacgttccagagcatcgcgggcctggaggaaaacttccacaaggagatgagcaagctcaaccagaacctcaatgatgtgctggtcggcctggagaagcaacacgggagcaacaccttcacggtcaaggcccagcccagtgacaacgcgcctgcaaaagggaacaagagcccttcgcctccagatggctcccctgccgccacccccgagatcagagtcaaccacgagccagagccggccggcggggccacgcccggggccaccctccccaagtccccatctcagctccggaaaggcccaccagtccctccgcctcccaaacacaccccgtccaaggaagtcaagcaggagcagatcctcagcctgtttgaggacacgtttgtccctgagatcagcgtgaccaccccctcccagcccacagagagtccagccggcagcctgccttccggggagcccagcgctgccgagggcacctttgctgtgtcctggcccagccagacggccgagccggggcctgcccaaccagcagaggcctcggaggtggcgggtgggacccaacctgcggctggagcccaggagccaggggagacggcggcaagtgaagcagcctccagctctcttcctgctgtcgtggtggagaccttcccagcaactgtgaatggcaccgtggagggcggcagtggggccgggcgcttggacctgcccccaggtttcatgttcaaggtacaggcccagcacgactacacggccactgacacagacgagctgcagctcaaggctggtgatgtggtgctggtgatccccttccagaaccctgaagagcaggatgaaggctggctcatgggcgtgaaggagagcgactggaaccagcacaaggagctggagaagtgccgtggcgtcttccccgagaacttcactgagagggtcccatgacggcggggcccaggcagcctccgggcgtgtgaagaacacctcctcccgaaaaatgtgtggttcttttttttgttttgttttcgtttttcatcttttgaagagcaaagggaaatcaagaggagacccccaggcagaggggcgttctcccaaagattaggtcgttttccaaagagccgcgtcccggcaagtccggcggaattcaccagtgttcctgaagctgctgtgtcctctagttgagtttctggcgcccctgcctgtgcccgcatgtgtgcctggccgcagggcggggctgggggctgccgagccaccatgcttgcctgaagcttcggccgcgccacccgggcaagggtcctcttttcctggcagctgctgtgggtggggcccagacaccagcctagcctggctctgccccgcagacggtctgtgtgctgtttgaaaataaatcttagtgttcaaaacaaaatgaaacaaaaaaaaaatgataaaaactctcagaaaacgtg

SEQ ID NO: 1260 - protein, 518 aa, Homosapiens; identical to SEQ ID NO: 70

SEQ ID NO: 1261 - DNA, 452 bp, Homosapiens
atgcttttcactcatgcagcgcttggtgcttttgagggcattggtgcaggaaggcttgatgcagaatctctgcttatcatttgctgtctgtgtgacctacatcagcggcgcctcagtctgtcttcctgcagaataagaatacagtcagccctctgcatctgtgggttgggcatccatggatccaaccaactgtggactgaaaatatttggaaaaatacaataaaaagagacaacccggcgtatggtggtggagcacctgggagacagaggcagagatctcgttcctcgatcccggcgcgttggttgtaaagtaggaacagtaatagcacctacctctagggccacggagaccgaatgaaataatgcctgtcaagtcacttagtacacagtaagcactcagtaatgctaggttgttgttattataataaatttttagcgaacgggaagaccaa

SEQ ID NO: 1262 - protein, 102 aa, Homosapiens
MLFTHAALGAFEGIGAGRLDAESLLIICCLCDLHQRRLSLSSCRIRIQSALCICGLGIHGSNQLWTENIWKNTIKRDNPAYGGGAPGRQRQRSRSSIPARWL

SEQ ID NO: 1263 - DNA, 235 bp, Homosapiens
ttgtcacctgcatgatctttacctctttatgtctcagagtccccatctgcagaacaggattaagtggcccagactgcacaccatgtttgtcattattaaaggagaaaggcctggtgaggctgctggttccagctgctgtgtgatggtgataatgatgagttaccacttgatgtcctaggagtcctaacgtgtacatcaggttgtccaaaaagaggatgggtagactggagaggaa

SEQ ID NO: 1264 - protein, 49 aa, Homosapiens
MSQSPHLQNRIKWPRLHTMFVIIKGERPGEAAGSSCCVMVIMMSYHLMS

SEQ ID NO: 1265 - DNA, 4685 bp, Homosapiens
agtctccttgtgcgatctcccagacatgagagccctgctgggctttctggctcctcctccgtgcagagttgtcccgtcaggagccaggaggggcgacgctggctccgtgggagggtgaacagtggctcaagatgagaagcgtattgagacaaagaattctgaaaccgaaagatgtggccatttattctggagaagtcaaccaagttattgctgacttaattaaaagaatctacctcctcaggagccaggcagaagatggagaaaccgtgaccaatgtcaatgatcttttcttcaaatattcaatggaaggagtggccaccatcctttatgagagtcgtttgggctgcctggaaaacagcatcccacagctgactgtggaatacatcgaggccctggagctcatgtttagcatgttcaagacctccatgtatgcaggcgccatccccagatggcttcgccccttcatcccaaagccctggcgggaattctgcaggtcctgggatggactcttcaaattcagccaaattcatgttgacaacaagttgagggacatacagtaccaaatggaccgaggccggagggtgagcgggggacttctcacatacctcttccttagccaggctctgacgctgcaggagatctacgccaacgtgactgagatgctgctggccggcgtcgacacgacgtccttcaccttgtcttggactgtgtacctcctggcaaggcacccagaagtgcagcagacggtgtaccgggagattgtgaagaatttaggggaaaggcatgttccaactgcagctgatgtccccaaggtcccgctggtcagagctctccttaaggaaaccctgaggctgtttccagtgctgccagggaacggccgggtcacccaggaagacctggttattggcgggtatctgattccgaaaggcacccagctggccctttgccactatgccacatcgtaccaggatgagaacttccctcgggccaaggagttccggcctgagcgctggctgcggaaaggagacttagatagagttgacaattttggatccatcccctttggtcatggggttcgcagctgcatagggcggagaattgcagaactggagattcacctcgtcgtgatccagttgcttcaacattttgagatcaaaacatcttctcagaccaatgctgttcatgcaaaaacccacgggctcctgacgccaggggggcccatccacgtgcgatttgttaacagaaagtaagcctagattttaaacctgggctgatgtagcagaccagctcgccgacacacagtgggtatttgtgttcgctgatcaccgtggagaaggaaagcgatgtcgctaaaggctgtcttgttatagactggcctcccaggtcctgggacacttgtaaatctttatgcaaagtaatgtaaaaaggttgctattttactggtgcataccagaagttgccctttctttgggggaaacagctgtttaaaaaccagtggcagtgaatttttatgcttcatacattgtgctagactcaatatttaatgactggcagtatcctgtgcatttacttgtacagggaaatggtggtttacttacaaattcagttcttcaatatatgttctctaatactggcatctgggctcaaattgccatcaacagtaagttgaaggcaatttcaacttactgtttctaatttgaagagggaacattaagaatgcctctgtaatactgtaattatgggaagaaagcaccagaggcaacattttatcctgagcaccagatttagatcctgttaaagggctcaaacttaaaagggctggccgggtgcggtggctcacgcctgtaatcccagcactttgggaggtcaaggtgggaggattgcttgagccagaagttcgagaccagcctgagcaacatggtgaaaccctgtctctaccaaaaatacaaaaattagccgggcgtggtggtgcacacctatggtcctagttactcggaagactgaggcaggaggatcgtttgagctcaggaggttgggtctgcagtgagctatctatgatggcaccactgcacttcagcctgggtgacagagtgagaccctttctcaaaaataaaataaaataaaataaaataaaataaaataaaataaaatggctgtataagaatacttttctctccacaacgagtgcttaattttctagtcataatgcctaatgaagttgactattagtttttatttggaagaaataaataataaataaataataaataaataaaaaagaaagctcctggtgaaatcaagaataatcagattttctaaccaaatctaaatacagagtagagcagacgtataagaactggaaatatgatgacgtaaaattttgttgcctaagttgtgagaagtaataaaacaggcagcatggaaaacaatgtaactttagaacatttttatttcaagggaaaataaatacataaatagagatgctacagatacaacaatatttttatcttgatggtgttgttttaaatatccacacaagaaccctcacccagttgtgtgcctgtgccaggctctctgggaagccgtggctccgggagtgctgggtcctgaggagttctgttgcctttcctgctgctcaccggttgctaagaggaaacaccgtgatttcctgatgctcttgccttgtcatcatgcctgaaacagcttattcccaattctgtaattccttttacataatccttctccaaaaattactttcttactaatatagaccatacagttttttttccatttagtaagtcactctgcaaaataacccttaagtaaatagacataatatccatttcacataccatttttgttaaagtatataataaagttgaaatctctgtgtggtagcagaataactctagtatgaatgctgtaaatgtacaggtaaatgtgaaattaggtcatattaactggccaagtgttggattgattactttgaggtagcagtatacgtatattaagttttataaactagatgaaattgcattctgtttgagactgaaatttaaaaatattgagaataactaagcgacttgaagtgacctcttattccctgggtatacatacagtgtgaccctctcgtgaagtgtggctctgcctggggatcagcacagggtgaatagcaaagtgcgggctgggggtagcacctgtgcccgctgctgagtctcactgaacaggaagggaagcagccagacacgggggcctcctggtgtgatgtagcaggaagtgcagggcgccacccaggaagcatccacgccaaagaaatggagattcagctggacaagtttctaggttcgctactggtttataggaaatatgtggtatacagggagatgtcaaaactccatgggggctgggcgtggtggctcacacctgtaatttcagcactctggggaggttgaggcaggaggattgcttgaggccaggagtttgagacaagcttgggcaacacagtgagatcctgtctactaaaaatcaaaaaacttagctgagtgtggtggtgcatgcctgtagtcctagctatttgggaggctgaggctggaggattgcttaagtctgggaggttgaggctgcagtgagctgtgatccgccattacactccagcctgggtgacagagcaagacttcataacaaacaaacacacaaacaaactccatggggatgcagtcagcaaaatccagaatagagtgaggtctataggaccaatgtctcgggtttccaacaaaacaaatacgtgacaggcaaaaaacaagaggaggggccaggcgaggtggctcatgcctgtaatcccagcactttgggaggccaaggcgggcggataacctgaggtcaggggttccagaccagcctggccaacatggtgaaaccccatctctactaaaaatacagaaattatccaggcatggtggcgggcttctgtaattccagctacttgggaggctgaggcaggagaattgcttgaacctgggaggcagtttgcagtgagctgagatcacgccactgcactccacctgggcaacaagaacgaaactccgtatctaaaaaaaacaaaaaccaaaaagcaaaaaaaaaaccaaggggagaggagaactgttacagatgaagcaatataggagacatattaaccaagtacaatgctggacttcgtttgaatcagattcaaataaaccacttgtaaaaagacatttaagagataatttttaaaaataaaataaaagccaaaaatattaattcttccaatgcatgaaaaaaagagagcaactcggggaaatttgaatgctgactgtgtgtatttgatgatatttgggaattactgttaatttttttgttgtgataatggtagttatgttttaaaaaaagagactttatctcttggagatagctcttaaagatataaatgtttatggctgaaatgttatggcatcttggatttgctttaaaataacccagcttgctgcaggaggtgggtattgtgtgtgtgggaaggtggggaggctgcgggaggaagagatgacccaagattaggcagatgttgttaactgtggaagcagggtggtgagtgggggctcatgacattatgctctctactttgtgtacgtgtgaacatttccgtaataaaagatgccttcagaaac

SEQ ID NO: 1266 - protein, 372 aa, Homosapiens
MRSVLRQRILKPKDVAIYSGEVNQVIADLIKRIYLLRSQAEDGETVTNVNDLFFKYSMEGVATILYESRLGCLENSIPQLTVEYIEALELMFSMFKTSMYAGAIPRWLRPFIPKPWREFCRSWDGLFKFSQIHVDNKLRDIQYQMDRGRRVSGGLLTYLFLSQALTLQEIYANVTEMLLAGVDTTSFTLSWTVYLLARHPEVQQTVYREIVKNLGERHVPTAADVPKVPLVRALLKETLRLFPVLPGNGRVTQEDLVIGGYLIPKGTQLALCHYATSYQDENFPRAKEFRPERWLRKGDLDRVDNFGSIPFGHGVRSCIGRRIAELEIHLVVIQLLQHFEIKTSSQTNAVHAKTHGLLTPGGPIHVRFVNRK

SEQ ID NO: 1267 - DNA, 4586 bp, Homosapiens
ctatacaccagtaacattcaagctgagagccaaatcaagaacacaatccaatttataatagctgtaaaaacaaaagacaaaacctaggaataactacagaacactcctgaaataaatcataggtgacagaaacaaatggaaaaacattctgtgcttgaggattggaagaagcaatatcattaaaattgccaaactgcccaaaacaatctacagattcaacactattctatcaaattgccaacatcatttttcacagaattagaaaaaaaacttataaaattcatctggaaccacaaaagcacctgaatagccaaagcaatcctaagcaaaaggaacaaagccaaaggcctcacagtatccaacttcaaactatgctacagggcttacagtaaccaaaacagcatggtactggtacagaacaggcacatagaccaatggagcagaatagagagctcagaaataatgccatgtacctgcagccaactgatgttcaacaaaattggcaaaaatatgcagtggggaaagtactccctattcaataaatggtgctggggaaactggctaactgtatgcagaaggatgaaaccagacccctgcctatcaccacatacaaaaatcaactcataatggattaaagatgtaaatgtaagacctcaaactataaggatcctcgaagaaaacctaggaaatacaatattcacaaagttgtgcaactatcaacacaattcatgtttagaatattctcatcagctcccaaaagaaaccctcatccatgcacagccactcctaatttcctcttgttcccaacccccagctctaggcagcccctaatctactttgatgtctgtaggccttttctggacatttcatgtaaatgcagtcagaccacttggggccttctgtgactggtttcttttcacttagcataatgttttgtttgtttgttttttggagatggaatctcgctctatcgcccaggctggagtacagtggggcgatcttggctcactgcaaccactgcctcgcaggttcaagggattctcctgcctcagcctcccgcgtagctggaattacaggcatgagccaccacgcctggctaatttttctatttttagtagagatggagtttcaccatgttggccaggctggtctcaaactcctgaccttgagtgatccacgcccacctcagcctcccaaagggctgggattacaggactgggtcaccacacccggcagcataatgttttcaaaaagattatctatattgtagcatctgtcagtacttcattcttttttattgctaaataatattcgattccatggacataccacattttatttatccacacatctgttgatggacatttgggctgtttccactttttggctcttagaagaattctgctatgaaattcatgtacaaatttttgtgtggatatagtttcatttctcttggatttatgcctggaagtggaattgccaggtcatgtggttataacagtgtgtttaacattttgatgaactgccagactgttttccaaagcagccgcatcatttacattctcaacagcaatgcatgcgggttctagtttttccacatccttgacaacagtggcagttatctgcttttttgattgtagccatcctcggagaggggcgtgaggtgataatctcattgtgcttttgagttgcatttccctggtgattaatggtgtggagcatcatttcatgtgcttactggctatttttatattgtttttggagaagtaatctgttcatattcttctctcatttataattaatttgtcttgttgttgagtttcaacagttctttgtataacctagatacaaatcccttatcagatatatgctttccacatttttttattctgaggattgttttttcacttgatggtgtccttggaagcacaaaagacttccaaattttgatgcaatcccatgccaagttcaggtggtaaccccgagtgcagggcttttccactccagtgcttgcttttgagcctgggacccttagctcttggcattctaatggctaatgttgtcttctttattgccgtttctcattttttcctgcagggatggttgcagaagagtacaatgcctttttctactcactggtatcccaggacacacaggaaatggcttactcaaccaagcggcagagattcttggtagatcaaggttatagcttcaaggtacatatccatttggcttctggttagactaggaccaaggccttcttgataccctggcctccaggagaagcgagggccactgtcagcaggcaggcaccaagcattaggagattagaggccttgcctcaaactccctttatctctgcatgaatctctgagggcagctgttggtggaaagtgtgccgtcctggcaggactgaggtgccatggcactatgaccagcactgtgtgaatctgagccccgcagggctgctttctcagggatgcctctctaggtagctaggagagctcttcctttcatcagctggtaagctccaggccttagtttgcctcagtttgcctcccagacatcagagctatcctgtactacaaatcaggtattttaataattgggaaattctaaagctttggctaactttcactggctgaggcatttgctttctttcctgttacacaaatattacgtttatgtcagtatttggtgtccagagggctttatattttggggatagatggagggttctagaagtaggggaattaaattccccctatggtccactaaaaggacatccctagaacattagactcccaggttcttgattgcaaaagactgcaatccaggctgccttttgagatacgtttttaatgtgtctctttatgcattggtgagagttcccattattggccttaggaggacagggttgtctgaccttccctcttttagctagaggcagtgacacttcagacctctcatgctggcctagaggacaagatgcttgggttttgagcccagttttttggaggatttgcatcatgacctttttatccatccatgaaaatccctgttggtaatagcattcctacctcctgattcctgccgagctgtgagggtaagaggagcaccaggtcagaaagagcaattctttgaaaggtgacctcgacaaaaaggcacaatgccatgccgtagtagtttgtgttggttggagctgtgtcttcggtgctgcctgttgaggagcagtggttggagttcccagagtcatgacgtggagtggctgggcctgggcagatgtgcacatcgtctgtactctggatccctggcccagaaggactcagatccttacttctaggaattttcatttaatgaacattatgagaattggagggaaggagaattccctttacagaatcaacccaagttttctgcagggatagggagcccttgtagtaagttatccccatagaaatgaaaacccagtctccaccatgctgttcttactctctcagagaagctctataaataatcttcctgatatcctatcattttcattttcacgtgctcattcctgctggaagccccagttgcggagcacagcagatgccagggaccttcacaaagggccacagcctgtgccttccagtcacttgtcccttcctttgtctgctccaagatgtgaaggctacccgaaggagccttttaaaatcactaagattcttcctgttgatcttccatacatgatcatttagatgctgtgtgctgggggcagatttctctgaaattcctgcatccctctggtcttgagatcattagtcaagctccctgttaaaggcggctcctgatgctggtctctggaatgctagggaggagctctccattgttggccaccagggtggctgggcctggggagggaagtgaccaaagcaggtggacccaggagaaggcagaggagggctggggagagagagcagaaaggggcatgtctgctggcttgggctttgcaggtgatcacgaaactcgctggcatggaggaggaagacttggcgttttcgacaaaagaagagcaacagcagctcttacagaaagtcctggcagccactgacctggatgccgaggaggaggtggtggctggggaatttggctccagatccagccaggcatctcggcgctttggcaccatgagttctatgtctggggccgacgacactgtgtacatggagtaccactcatcgcggagcaaggcgcccagcaaacatgtacacccgctcttcaagcgctttaggaaatgatgcttaggcagggtacttcgttcaagaccggcgcttggcacccttgttggaaagggattttcagcataacattttccttccacctctttgaccttccctccagcgttggccaaattgtgctgaggaagatgcatcaagggcttggctgtgccttcataggtcatctagggttttataaaggaggaggagacaatattttttcaaactttttggggagtggggtcatttctgtatataaaaaatgttaatatttaaggtgtatttatgttaccgttctgaataaacagaatggaccattgaaccagt

SEQ ID NO: 1268 - protein, 87 aa, Homosapiens
MEEEDLAFSTKEEQQQLLQKVLAATDLDAEEEVVAGEFGSRSSQASRRFGTMSSMSGADDTVYMEYHSSRSKAPSKHVHPLFKRFRK

SEQ ID NO: 1269 - DNA, 676 bp, Homosapiens
cagatacttcgttgaaagttgccaccctgatgtaatccagcatcttctccagagattcttggtagatcaaggttatagcttcaaggtgatcacgaaactcgctggcatggaggaggaagacttggcgttttcgacaaaagaagagcaacagcagctcttacagaaagtcctggcagccactgacctggatgccgaggaggaggtggtggctggggaatttggctccagatccagccaggcatctcggcgctttggcaccatgagttctatgtctggggccgacgacactgtgtacatggagtaccactcatcgcggagcaaggcgcccagcaaacatgtacacccgctcttcaagcgctttaggaaatgatgcttaggcagggtacttcgttcaagaccggcgcttggcacccttgttggaaagggattttcagcataacattttccttccacctctttgaccttccctccagcgttggccaaattgtgctgaggaagatgcatcaagggcttggctgtgccttcataggtcatctagggttttataaaggaggaggagacaatattttttcaaactttttggggagtggggtcatttctgtatataaaaaatgttaatatttaaggtgtatttatgttaccgttctgaataaacagaatggaccattgaaccagt

SEQ ID NO: 1270 - protein, 87 aa, Homosapiens; identical to SEQ ID NO: 1268

SEQ ID NO: 1271 - DNA, 4626 bp, Homosapiens
aactgcctactccttgtatgcagctgtcagcgttgggctgcaaaccagtgacatcaccgagtacctcaggaagctcagcaagactggagtccctgatggaattatgcagtttattaaggcaagtgacagctgagaccagcaattccacctgccctgctaatgtaacaataggcataggtgctccatgttgtcagcctgtggcagccatgagaatgtgccattcagatttcctgtggggagcataacgactgattaccccagccgctacactctggatccagcattgtgttctgggtgaggccatgcttctcatgagccgctacactctggatccagcattgtgttctgggtgaggccacgcttctcatgagccgctcccagctgtgggtattaacacagaggggctactaattcaggcccattgtagccagggagaatttggaaatgcagcccaaagtgagtgtgctggggactgaattgtgtgtgttcccctcaaattttgtcttcaaaacctaatatccaatggtaatgtatttggagtaagaaagtagttaagactaaatgaggtcgtgatccgctatgattagtgtcctcctaagaagagacaccggagcatgctttctctcacctgcccttcttgtcatgtgagtacacaatgggaaggtggtccatagacaagagccttcaccagaaactgaatcggctgataccttgatcatagactttcagcctccacagctctgagaaaatacagttctaatgttgaagccacccagtctggaattttattatggcagcccaagctgactaacacaggtggtaaactctgtctaaagctaagtatctgcaggagaccaatagtcaacaagttccatgagggaaagtcaaaaacaacttcagatgtttttgacaaaacaaagagggttccatgtgattaatagttgaacatgctaggtttcttctgcgagatgggtgaatgccatttaaaagagatggacagtggctttcattgcctttggctgatccaaaaggagtcagattcagaccttgggatctggagtggcagaagagtgccacaggaattcagtatggtactgcagccagtcccagagaagctgcaggagtcctggagagaactctcttttcctgtgatgtgaaagcgtgcccggccaggtgcagtggctcactcctgtaatcccagcactttgggtggctgaggtgggtggaccacctggggtcaggctggtctcgaactcctgacctcaggtgatccacctggctcggcctcccaaagtgctaggattacaggtgtgagccaccgtgcctggcctgagtggcaaatttttattgttgccacacagcctctactgtattccttcctaaaggtggttgggaacctgggaggatttaagctgtattctctgccatcaagatgcttacattctatttggggaaataggagcattggtgaagaggctttgcattttatttaagccgcaattactgtgcacatactctgtggagttgtagtaatactggtgtggtcttctctagactagggtgggggctgtgggaatagagaggaaaggcagaatgcaagattttaagcagcgttttataacttaatggatatgcatcagaattacccaggcaagaggaagattttgttctcagaaagcagaggccaatggaaaaagctcagtttaggcacatctgaccactttaggattgcaagttgggtttccctaaagtaaaatgaacttttcacttggttggtaggtgtaagatgtgaccagtaatgaatgtgttctgagttagctgcacatttacctgttggatgttatctgtatttgcagttgtgtactgtcagctatggaaaagtcaagctggtcttgaagcacaacaggtaagagattccatgacaggcctgtcccaaggcactgtcactttctgcgcaccagcaggaataaagggatatgggaaggacctgatgtttatgctgtcttttctgtgaagcacagataagagaagagaaacaagagatgtggcccagactggaaactcatccactggccactgtatttcctctagcagtggagctgggctcaggcccctgcctacttgacctcaaagtcacaaccctcatatgttaaatcatggccggcagctcatggtacagatttggcgaagggttgtggggagagtcatgaggcttgtatttccagaccatctaattgaatgagcagtggaatctccaggaggtacctgctggtcagtagaccccttcttcctcccctgcttgcagatacttcgttgaaagttgccaccctgatgtaatccagcatcttctccaggaccccgtgatccgagaatgccgcttaagaaactctgaaggggaggccactgagctcatcacagagactttcacaagcaaatctgccgtatgtggactcctgggccacccttgggtgggggcaggcatttaggatttcagttctctcaggtgtctttaacccagcacttacaacctagcagccctgctggttctaccctttacaacttcacccattgcttgataacagcagaattaaatgttgtgtgcacgttcagcacctacctctctcacagatttctaagactgctgaaagcagtggtgggccctccacttcccgagtgacagatccacagggtaaatctgacatccccatggacctgtttgacttctatgagcaaatggacaaggatgaagaagaagaagaagagacacagacagtgtcttttgaagtcaagcaggaaatgattgaggaactccagaaacgttgcatccacctggagtaccctctgttggcagaatatgacttccggaatgattctgtcaaccctgatatcaacattgacctaaagcccacagctgtcctcagaccctatcaggagaagagcttgcgaaagatgtttggaaacgggcgtgcacgttcgggggtcattgttcttccctgcggtgctggaaagtccctggttggtgtgactgctgcatgcactgtcagaaaacgctgtctggtgctgggcaactcagctgtttctgtggagcagtggaaagcccagttcaagatgtggtccaccattgacgacagccagatctgccggttcacctccgatgccaaggacaagcccatcggctgctccgttgccattagcacctactccatgctgggccacaccaccaaaaggtcctgggaggccgagcgagtcatggagtggctcaagacccaggagtggggcctcatgatcctggatgaagtgcacaccataccagccaagatgttccgaagggtgctcaccatcgtgcaggcccactgtaagctgggtttgactgcgaccctcgtccgcgaagatgacaaaattgtggatttaaattttctgattgggcctaagctctacgaagccaactggatggagctgcagaataatggctacatcgccaaagtccagtgtgctgaggtctggtgccctatgtctcctgaattttaccgggaatatgtggcaatcaaaaccaagaaacgaatcttgctgtacaccatgaaccccaacaaatttagagcttgccagtttctgatcaagtttcatgaaaggaggaatgacaagattattgtctttgctgacaatgtgtttgccctaaaggaatatgccattcgactgaacaaaccctatatctacggacctacgtctcagggggaaaggatgcaaattctccagaatttcaagcacaaccccaaaattaacaccatcttcatatccaaggtaggtgacacttcgtttgatctgccggaagcaaatgtcctcattcagatctcatcccatggtggctccaggcgtcaggaagcccaaaggctagggcgggtgcttcgagctaaaaaagggatggttgcagaagagtacaatgcctttttctactcactggtatcccaggacacacaggaaatggcttactcaaccaagcggcagagattcttggtagatcaaggttatagcttcaaggtgatcacgaaactcgctggcatggaggaggaagacttggcgttttcgacaaaagaagagcaacagcagctcttacagaaagtcctggcagccactgacctggatgccgaggaggaggtggtggctggggaatttggctccagatccagccaggcatctcggcgctttggcaccatgagttctatgtctggggccgacgacactgtgtacatggagtaccactcatcgcggagcaaggcgcccagcaaacatgtacacccgctcttcaagcgctttaggaaatgatgcttaggcagggtacttcgttcaagaccggcgcttggcacccttgttggaaagggattttcagcataacattttccttccacctctttgaccttccctccagcgttggccaaattgtgctgaggaagatgcatcaagggcttggctgtgccttcataggtcatctagggttttataaaggaggaggagacaatattttttcaaactttttggggagtggggtcatttctgtatataaaaaatgttaatatttaaggtgtatttatgttaccgttctgaataaacagaatggaccattgaaccagt

SEQ ID NO: 1272 - protein, 537 aa, Homosapiens [sequence omitted]

SEQ ID NO: 1273 - DNA, 2852 bp, Homosapiens
atgggcaaaagagaccgagcggaccgcggtgagacgttgcgcgggcacgctcagccacgactgcccttgccggccctgccccccgctctgcctcggagctgctccgggcctctgcgccggccgaccctgctggccctcccgcgcgcaccccgttgggacaggcctttgggcgggagagatgctggacctgggcgcagcccagcgaactcggcctaggggagacggacaagaagaaatccaggaagcggcactatgaggatgaagaggatgatgaagaggacgccccggggaacgaccctcaggaagcggttccctcggcggcggggaagcaggtggatgagtcaggcaccaaagtggatgaatatggagccaaggactacaggctgcaaatgccgctgaaggacgaccacacctccaggcccctctgggtggctcccgatggccatatcttcttggaagccttctctccagtttacaaatatgcccaagacttcttggtggctattgcagagccagtgtgccgaccaacccatgtgcatgagtacaaactaactgcctactccttgtatgcagctgtcagcgttgggctgcaaaccagtgacatcaccgagtacctcaggaagctcagcaagactggagtccctgatggaattatgcagtttattaagttgtgtactgtcagctatggaaaagtcaagctggtcttgaagcacaacagatacttcgttgaaagttgccaccctgatgtaatccagcatcttctccaggaccccgtgatccgagaatgccgcttaagaaactctgaaggggaggccactgagctcatcacagagactttcacaagcaaatctgccatttctaagactgctgaaagcagtggtgggccctccacttcccgagtgacagatccacagggtaaatctgacatccccatggacctgtttgacttctatgagcaaatggacaaggatgaagaagaagaagaagagacacagacagtgtcttttgaagtcaagcaggaaatgattgaggaactccagaaacgttgcatccacctggagtaccctctgttggcagaatatgacttccggaatgattctgtcaaccctgatatcaacattgacctaaagcccacagctgtcctcagaccctatcaggagaagagcttgcgaaagatgtttggaaacgggcgtgcacgttcgggggtcattgttcttccctgcggtgctggaaagtccctggttggtgtgactgctgcatgcactgtcagaaaacgctgtctggtgctgggcaactcagctgtttctgtggagcagtggaaagcccagttcaagatgtggtccaccattgacgacagccagatctgccggttcacctccgatgccaaggacaagcccatcggctgctccgttgccattagcacctactccatgctgggccacaccaccaaaaggtcctgggaggccgagcgagtcatggagtggctcaagacccaggagtggggcctcatgatcctggatgaagtgcacaccataccagccaagatgttccgaagggtgctcaccatcgtgcaggcccactgtaagctgggtttgactgcgaccctcgtccgcgaagatgacaaaattgtggatttaaattttctgattgggcctaagctctacgaagccaactggatggagctgcagaataatggctacatcgccaaagtccagtgtgctgaggtctggtgccctatgtctcctgaattttaccgggaatatgtggcaatcaaaaccaagaaacgaatcttgctgtacaccatgaaccccaacaaatttagagcttgccagtttctgatcaagtttcatgaaaggaggaatgacaagattattgtctttgctgacaatgtgtttgccctaaaggaatatgccattcgactgaacaaaccctatatctacggacctacgtctcagggggaaaggatgcaaattctccagaatttcaagcacaaccccaaaattaacaccatcttcatatccaaggtaggtgacacttcgtttgatctgccggaagcaaatgtcctcattcagatctcatcccatggtggctccaggcgtcaggaagcccaaaggctagggcgggtgcttcgagctaaaaaagggatggttgcagaagagtacaatgcctttttctactcactggtatcccaggacacacaggaaatggcttactcaaccaagcggcagagattcttggtagatcaaggttatagcttcaaggtgatcacgaaactcgctggcatggaggaggaagacttggcgttttcgacaaaagaagagcaacagcagctcttacagaaagtcctggcagccactgacctggatgccgaggaggaggtggtggctggggaatttggctccagatccagccaggcatctcggcgctttggcaccatgagttctatgtctggggccgacgacactgtgtacatggagtaccactcatcgcggagcaaggcgcccagcaaacatgtacacccgctcttcaagcgctttaggaaatgatgcttaggcagggtacttcgttcaagaccggcgcttggcacccttgttggaaagggattttcagcataacattttccttccacctctttgaccttccctccagcgttggccaaattgtgctgaggaagatgcatcaagggcttggctgtgccttcataggtcatctagggttttataaaggaggaggagacaatattttttcaaactttttggggagtggggtcatttctgtatataaaaaatgttaatatttaaggtgtatttatgttaccgttctgaataaacagaatggaccattgaaccagt

SEQ ID NO: 1274 - protein, 718 aa, Homosapiens
MPLKDDHTSRPLWVAPDGHIFLEAFSPVYKYAQDFLVAIAEPVCRPTHVHEYKLTAYSLYAAVSVGLQTSDITEYLRKLSKTGVPDGIMQFIKLCTVSYGKVKLVLKHNRYFVESCHPDVIQHLLQDPVIRECRLRNSEGEATELITETFTSKSAISKTAESSGGPSTSRVTDPQGKSDIPMDLFDFYEQMDKDEEEEEETQTVSFEVKQEMIEELQKRCIHLEYPLLAEYDFRNDSVNPDINIDLKPTAVLRPYQEKSLRKMFGNGRARSGVIVLPCGAGKSLVGVTAACTVRKRCLVLGNSAVSVEQWKAQFKMWSTIDDSQICRFTSDAKDKPIGCSVAISTYSMLGHTTKRSWEAERVMEWLKTQEWGLMILDEVHTIPAKMFRRVLTIVQAHCKLGLTATLVREDDKIVDLNFLIGPKLYEANWMELQNNGYIAKVQCAEVWCPMSPEFYREYVAIKTKKRILLYTMNPNKFRACQFLIKFHERRNDKIIVFADNVFALKEYAIRLNKPYIYGPTSQGERMQILQNFKHNPKINTIFISKVGDTSFDLPEANVLIQISSHGGSRRQEAQRLGRVLRAKKGMVAEEYNAFFYSLVSQDTQEMAYSTKRQRFLVDQGYSFKVITKLAGMEEEDLAFSTKEEQQQLLQKVLAATDLDAEEEVVAGEFGSRSSQASRRFGTMSSMSGADDTVYMEYHSSRSKAPSKHVHPLFKRFRK

SEQ ID NO: 1275 - DNA, 2927 bp, Homosapiens
tgctgtagctgccatgggcaaaagagaccgagcggaccgcggtgagacgttgcgcgggcacgctcagccacgactgcccttgccggccctgccccccgctctgcctcggagctgctccgggcctctgcgccggccgaccctgctggccctcccgcgcgcaccccgttgggacaggcctttgggcgggagagatgctggacctgggcgcagcccagcgaactcggcctaggggagacgggtgaggggcgcaacgcctgcgggatgcaggtggctcttagctaggagtttgcggcggcgcagacaagaagaaatccaggaagcggcactatgaggatgaagaggatgatgaagaggacgccccggggaacgaccctcaggaagcggttccctcggcggcggggaagcaggtggatgagtcaggcaccaaagtggatgaatatggagccaaggactacaggctgcaaatgccgctgaaggacgaccacacctccaggcccctctgggtggctcccgatggccatatcttcttggaagccttctctccagtttacaaatatgcccaagacttcttggtggctattgcagagccagtgtgccgaccaacccatgtgcatgagtacaaactaactgcctactccttgtatgcagctgtcagcgttgggctgcaaaccagtgacatcaccgagtacctcaggaagctcagcaagactggagtccctgatggaattatgcagtttattaagttgtgtactgtcagctatggaaaagtcaagctggtcttgaagcacaacagatacttcgttgaaagttgccaccctgatgtaatccagcatcttctccaggaccccgtgatccgagaatgccgcttaagaaactctgaaggggaggccactgagctcatcacagagactttcacaagcaaatctgccatttctaagactgctgaaagcagtggtgggccctccacttcccgagtgacagatccacagggtaaatctgacatccccatggacctgtttgacttctatgagcaaatggacaaggatgaagaagaagaagaagagacacagacagtgtcttttgaagtcaagcaggaaatgattgaggaactccagaaacgttgcatccacctggagtaccctctgttggcagaatatgacttccggaatgattctgtcaaccctgatatcaacattgacctaaagcccacagctgtcctcagaccctatcaggagaagagcttgcgaaagatgtttggaaacgggcgtgcacgttcgggggtcattgttcttccctgcggtgctggaaagtccctggttggtgtgactgctgcatgcactgtcagaaaacgctgtctggtgctgggcaactcagctgtttctgtggagcagtggaaagcccagttcaagatgtggtccaccattgacgacagccagatctgccggttcacctccgatgccaaggacaagcccatcggctgctccgttgccattagcacctactccatgctgggccacaccaccaaaaggtcctgggaggccgagcgagtcatggagtggctcaagacccaggagtggggcctcatgatcctggatgaagtgcacaccataccagccaagatgttccgaagggtgctcaccatcgtgcaggcccactgtaagctgggtttgactgcgaccctcgtccgcgaagatgacaaaattgtggatttaaattttctgattgggcctaagctctacgaagccaactggatggagctgcagaataatggctacatcgccaaagtccagtgtgctgaggtctggtgccctatgtctcctgaattttaccgggaatatgtggcaatcaaaaccaagaaacgaatcttgctgtacaccatgaaccccaacaaatttagagcttgccagtttctgatcaagtttcatgaaaggaggaatgacaagattattgtctttgctgacaatgtgtttgccctaaaggaatatgccattcgactgaacaaaccctatatctacggacctacgtctcagggggaaaggatgcaaattctccagaatttcaagcacaaccccaaaattaacaccatcttcatatccaaggtaggtgacacttcgtttgatctgccggaagcaaatgtcctcattcagatctcatcccatggtggctccaggcgtcaggaagcccaaaggctagggcgggtgcttcgagctaaaaaagggatggttgcagaagagtacaatgcctttttctactcactggtatcccaggacacacaggaaatggcttactcaaccaagcggcagagattcttggtagatcaaggttatagcttcaaggtgatcacgaaactcgctggcatggaggaggaagacttggcgttttcgacaaaagaagagcaacagcagctcttacagaaagtcctggcagccactgacctggatgccgaggaggaggtggtggctggggaatttggctccagatccagccaggcatctcggcgctttggcaccatgagttctatgtctggggccgacgacactgtgtacatggagtaccactcatcgcggagcaaggcgcccagcaaacatgtacacccgctcttcaagcgctttaggaaatgatgcttaggcagggtacttcgttcaagaccggcgcttggcacccttgttggaaagggattttcagcataacattttccttccacctctttgaccttccctccagcgttggccaaattgtgctgaggaagatgcatcaagggcttggctgtgccttcataggtcatctagggttttataaaggaggaggagacaatattttttcaaactttttggggagtggggtcatttctgtatataaaaaatgttaatatttaaggtgtatttatgttaccgttctgaataaacagaatggaccattgaaccagt

SEQ ID NO: 1276 - protein, 718 aa, Homosapiens; identical to SEQ ID NO: 1274

SEQ ID NO: 1277 - DNA, 2750 bp, Homosapiens
gggagcttccggattgagccggaagtccccccagagcggatgccgcggcgggcctgtgggagcggggtcatcttctctctgctgctgtagctgccatgggcaaaagagaccgagcggaccgcgacaagaagaaatccaggaagcggcactatgaggatgaagaggatgatgaagaggacgccccggggaacgaccctcaggaagcggttccctcggcggcggggaagcaggtggatgagtcaggcaccaaagtggatgaatatggagccaaggactacaggctgcaaatgccgctgaaggacgaccacacctccaggcccctctgggtggctcccgatggccatatcttcttggaagccttctctccagtttacaaatatgcccaagacttcttggtggctattgcagagccagtgtgccgaccaacccatgtgcatgagtacaaactaactgcctactccttgtatgcagctgtcagcgttgggctgcaaaccagtgacatcaccgagtacctcaggaagctcagcaagactggagtccctgatggaattatgcagtttattaagttgtgtactgtcagctatggaaaagtcaagctggtcttgaagcacaacagatacttcgttgaaagttgccaccctgatgtaatccagcatcttctccaggaccccgtgatccgagaatgccgcttaagaaactctgaaggggaggccactgagctcatcacagagactttcacaagcaaatctgccatttctaagactgctgaaagcagtggtgggccctccacttcccgagtgacagatccacagggtaaatctgacatccccatggacctgtttgacttctatgagcaaatggacaaggatgaagaagaagaagaagagacacagacagtgtcttttgaagtcaagcaggaaatgattgaggaactccagaaacgttgcatccacctggagtaccctctgttggcagaatatgacttccggaatgattctgtcaaccctgatatcaacattgacctaaagcccacagctgtcctcagaccctatcaggagaagagcttgcgaaagatgtttggaaacgggcgtgcacgttcgggggtcattgttcttccctgcggtgctggaaagtccctggttggtgtgactgctgcatgcactgtcagaaaacgctgtctggtgctgggcaactcagctgtttctgtggagcagtggaaagcccagttcaagatgtggtccaccattgacgacagccagatctgccggttcacctccgatgccaaggacaagcccatcggctgctccgttgccattagcacctactccatgctgggccacaccaccaaaaggtcctgggaggccgagcgagtcatggagtggctcaagacccaggagtggggcctcatgatcctggatgaagtgcacaccataccagccaagatgttccgaagggtgctcaccatcgtgcaggcccactgtaagctgggtttgactgcgaccctcgtccgcgaagatgacaaaattgtggatttaaattttctgattgggcctaagctctacgaagccaactggatggagctgcagaataatggctacatcgccaaagtccagtgtgctgaggtctggtgccctatgtctcctgaattttaccgggaatatgtggcaatcaaaaccaagaaacgaatcttgctgtacaccatgaaccccaacaaatttagagcttgccagtttctgatcaagtttcatgaaaggaggaatgacaagattattgtctttgctgacaatgtgtttgccctaaaggaatatgccattcgactgaacaaaccctatatctacggacctacgtctcagggggaaaggatgcaaattctccagaatttcaagcacaaccccaaaattaacaccatcttcatatccaaggtaggtgacacttcgtttgatctgccggaagcaaatgtcctcattcagatctcatcccatggtggctccaggcgtcaggaagcccaaaggctagggcgggtgcttcgagctaaaaaagggatggttgcagaagagtacaatgcctttttctactcactggtatcccaggacacacaggaaatggcttactcaaccaagcggcagagattcttggtagatcaaggttatagcttcaaggtgatcacgaaactcgctggcatggaggaggaagacttggcgttttcgacaaaagaagagcaacagcagctcttacagaaagtcctggcagccactgacctggatgccgaggaggaggtggtggctggggaatttggctccagatccagccaggcatctcggcgctttggcaccatgagttctatgtctggggccgacgacactgtgtacatggagtaccactcatcgcggagcaaggcgcccagcaaacatgtacacccgctcttcaagcgctttaggaaatgatgcttaggcagggtacttcgttcaagaccggcgcttggcacccttgttggaaagggattttcagcataacattttccttccacctctttgaccttccctccagcgttggccaaattgtgctgaggaagatgcatcaagggcttggctgtgccttcataggtcatctagggttttataaaggaggaggagacaatattttttcaaactttttggggagtggggtcatttctgtatataaaaaatgttaatatttaaggtgtatttatgttaccgttctgaataaacagaatggaccattgaaccagt

SEQ ID NO: 1278 - protein, 782 aa, Homosapiens; identical to SEQ ID NO: 82

SEQ ID NO: 1279 - DNA, 480 bp, Homosapiens
ctgtatttcctctagcagtggagctgggctcaggcccctgcctacttgacctcaaagtcacaaccctcatatgttaaatcatggccggcagctcatggtacagatttggcgaagggttgtggggagagtcatgaggcttgtatttccagaccatctaattgaatgagcagtggaatctccaggaggtacctgctggtcagtagaccccttcttcctcccctgcttgcagatacttcgttgaaagttgccaccctgatgtaatccagcatcttctccagcgttggccaaattgtgctgaggaagatgcatcaagggcttggctgtgccttcataggtcatctagggttttataaaggaggaggagacaatattttttcaaactttttggggagtggggtcatttctgtatataaaaaatgttaatatttaaggtgtatttatgttaccgttctgaataaacagaatggaccattgaaccag

SEQ ID NO: 1280 - protein, 39 aa, Homosapiens
MHQGLGCAFIGHLGFYKGGGDNIFSNFLGSGVISVYKKC

SEQ ID NO: 1281 - DNA, 1385 bp, Homosapiens
cccccgctctgcctcggagctgctccgggcctctgcgccggccgaccctgctggccctcccgcgcgcaccccgttgggacaggcctttgggcgggagagatgctggacctgggcgcagcccagcgaactcggcctaggggagacggacaagaagaaatccaggaagcggcactatgaggatgaagaggatgatgaagaggacgccccggggaacgaccctcaggaagcggttccctcggcggcggggaagcaggtggatgagtcaggcaccaaagtggatgaatatggagccaaggactacaggctgcaaatgccgctgaaggacgaccacacctccaggcccctctgggtgctgtcagcgttgggctgcaaaccagtgacatcaccgagtacctcaggaagctcagcaagactggagtccctgatggaattatgcagtttattaagttgtgtactgtcagctatggaaaagtcaagctggtcttgaagcacaacaggtaagagattccatgacaggcctgtcccaaggcactgtcactttctgcgcaccagcaggaataaagggatatgggaaggacctgatgtttatgctgtcttttctgtgaagcacagataagagaagagaaacaagagatgtggcccagactggaaactcatccactggccactgtatttcctctagcagtggagctgggctcaggcccctgcctacttgacctcaaagtcacaaccctcatatgttaaatcatggccggcagctcatggtacagatttggcgaagggttgtggggagagtcatgaggcttgtatttccagaccatctaattgaatgagcagtggaatctccaggaggtacctgctggtcagtagaccccttcttcctcccctgcttgcagatacttcgttgaaagttgccaccctgatgtaatccagcatcttctccaggaccccgtgatccgagaatgccgcttaagaaactctgaaggggaggccactgagctcatcacagagactttcacaagcaaatctgccgtatgtggactcctgggccacccttgggtgggggcaggcatttaggatttcagttctctcaggtgtctttaacccagcacttacaacctagcagccctgctggttctaccctttacaacttcacccattgcttgataacagcagaattaaatgttgtgtgcacgttcagcacctacctctctcacagatttctaagactgctgaaagcagtggtgggccctccacttcccgagtgacagatccacagggtaaatctgacatccccatggacctgtttgacttctatgagcaaatggacaaggatgaagaagaagaagaagagacacagacagtgtcttttgaagtcaagcagg

SEQ ID NO: 1282 - protein, 58 aa, Homosapiens
MPLKDDHTSRPLWVLSALGCKPVTSPSTSGSSARLESLMELCSLLSCVLSAMEKSSWS

SEQ ID NO: 1283 - DNA, 1237 bp, Homosapiens
actgcaacctctacctcccaggctcaagcagttctcctgcctcagcctcccaagtagctgggattataggcgcccgtcaccatgcccggctaatttttatatttttagtagagatggggtttcaccatgttggccaggctggtctcgaactcctgacctcaggtgatccacctggctcggcctcccaaagtgctaggattacaggtgtgagccaccgtgcctggcctgagtggcaaatttttattgttgccacacagcctctactgtattccttcctaaaggtggttgggaacctgggaggatttaagctgtattctctgccatcaagatgcttacattctatttggggaaataggagcattggtgaagaggctttgcattttatttaagccgcaattactgtgcacatactctgtggagttgtagtaatactggtgtggtcttctctagactagggtgggggctgtgggaatagagaggaaaggcagaatgcaagattttaagcagcgttttataacttaatggatatgcatcagaattacccaggcaagaggaagattttgttctcagaaagcagaggccaatggaaaaagctcagtttaggcacatctgaccactttaggattgcaagttgggtttccctaaagtaaaatgaacttttcacttggttggtaggtgtaagatgtgaccagtaatgaatgtgttctgagttagctgcacatttacctgttggatgttatctgtatttgcagttgtgtactgtcagctatggaaaagtcaagctggtcttgaagcacaacagatacttcgttgaaagttgccaccctgatgtaatccagcatcttctccaggaccccgtgatccgagaatgccgcttaagaaactctgaaggggaggccactgagctcatcacagagactttcacaagcaaatctgccgtatgtggactcctgggccacccttgggtgggggcaggcatttaggatttcagttctctcaggtgtctttaacccagcacttacaacctagcagccctgctggttctaccctttacaacttcacccattgcttgataacagcagaattaaatgttgtgtgcacgttcagcacctacctctctcacagatttctaagactgctgaaagcagtggtgggccctccacttcccgagtgacagatccacagggtaaatctgacatccccatggacctgtttgacttctatgagcaaatggaca

SEQ ID NO: 1284 - protein, 94 aa, Homosapiens
MCSELAAHLPVGCYLYLQLCTVSYGKVKLVLKHNRYFVESCHPDVIQHLLQDPVIRECRLRNSEGEATELITETFTSKSAVCGLLGHPWVGAGI

SEQ ID NO: 1285 - DNA, 874 bp, Homosapiens
cagagcggatgccgcggcgggcctgtgggagcggggtcatcttctctctgctgctgtagctgccatgggcaaaagagaccgagcggaccgcgacaagaagaaatccaggaagcggcactatgaggatgaagaggatgatgaagaggacgccccggggaacgaccctcaggaagcggttccctcggcggcggggaagcaggtggatgagtcaggcaccaaagtggatgaatatggagccaaggactacaggctgcaaatgccgctgaaggacgaccacacctccaggcccctctgggtggctcccgatggccatatcttcttggaagccttctctccagtttacaaatatgcccaagacttcttggtggctattgcagagccagtgtgccgaccaacccatgtgcatgagtacaaactaactgcctactccttgtatgcagctgtcagcgttgggctgcaaaccagtgacatcaccgagtacctcaggaagctcagcaagactggagtccctgatggaattatgcagtttattaagttgtgtactgtcagctatggaaaagtcaagctggtcttgaagcacaacagatacttcgttgaaagttgccaccctgatgtaatccagcatcttctccaggaccccgtgatccgagaatgccgcttaagaaactctgaaggggaggccactgagctcatcacagagactttcacaagcaaatctgccgtatgtggactcctgggccacccttgggtgggggcaggcatttaggatttcagttctctcaggtgtctttaacccagcacttacaacctagcagccctgctggttctaccctttacaacttcacccattgcttgataacagcagaattaaatg

SEQ ID NO: 1286 - protein, 233 aa, Homosapiens
MGKRDRADRDKKKSRKRHYEDEEDDEEDAPGNDPQEAVPSAAGKQVDESGTKVDEYGAKDYRLQMPLKDDHTSRPLWVAPDGHIFLEAFSPVYKYAQDFLVAIAEPVCRPTHVHEYKLTAYSLYAAVSVGLQTSDITEYLRKLSKTGVPDGIMQFIKLCTVSYGKVKLVLKHNRYFVESCHPDVIQHLLQDPVIRECRLRNSEGEATELITETFTSKSAVCGLLGHPWVGAGI

SEQ ID NO: 1287 - DNA, 709 bp, Homosapiens
agttgaacatgctaggtttcttctgcgagatgggtgaatgccatttaaaagagatggacagtggctttcattgcctttggctgatccaaaaggagtcagattcagaccttgggatctggagtggcagaagagtgccacaggaattcagtatggtactgcagccagtcccagagaagctgcaggagtcctggagagaactctcttttcctgtgatgtgaaagcgtgcccggccaggtgcagtggctcactctcctgacctcaggtgatccacctggctcggcctcccaaagtgctaggattacaggtgtgagccaccgtgcctggcctgagtggcaaatttttattgttgccacacagcctctactgtattccttcctaaaggtggttgggaacctgggaggatttaagctgtattctctgccatcaagatgcttacattctatttggggaaataggagcattggtgaagaggctttgcattttatttaagccgcaattactgtgcacatactctgtggagttgtagtaatactggtgtggtcttctctagactagggtgggggctgtgggaatagagaggaaaggcagaatgcaagattttaagcagcgttttataacttaatggatatgcatcagaattacccaggcaagaggaagattttgttctcagaaagcagaggccaatggaaaaagctcagtttaggcacat

SEQ ID NO: 1288 - protein, 72 aa, Homosapiens
MPFKRDGQWLSLPLADPKGVRFRPWDLEWQKSATGIQYGTAASPREAAGVLERTLFSCDVKACPARCSGSLS

SEQ ID NO: 1289 - DNA, 698 bp, Homosapiens
cggattgagccggaagtccccccagagcggatgccgcggcgggcctgtgggagcggggtcatcttctctctgctgctgtagctgccatgggcaaaagagaccgagcggaccgcgacaagaagaaatccaggaagcggcactatgaggatgaagaggatgatgaagaggacgccccggggaacgaccctcaggaagcggttccctcggcggcggggaagcaggtggatgagtcaggcaccaaagtggatgaatatggagccaaggactacaggctgcaaatgccgctgaaggacgaccacacctccaggcccctctgggtggctcccgatggccatatcttcttggaagccttctctccagtttacaaatatgcccaagacttcttggtggctattgcagagccagtgtgccgaccaacccatgtgcatgagtacaaactaactgcctactccttgtatgcagctgtcagcgttgggctgcaaaccagtgacatcaccgagtacctcaggaagctcagcaagactggagtccctgatggaattatgcagtttattaaggcaagtgacagctgagaccagcaattccacctgccctgctaatgtaacaataggcataggtgctccatgttgtcagcctgtggcagccatgagaatgtgccattcagatttcctgtggggagcataacgactgattacccc

SEQ ID NO: 1290 - protein, 161 aa, Homosapiens
MGKRDRADRDKKKSRKRHYEDEEDDEEDAPGNDPQEAVPSAAGKQVDESGTKVDEYGAKDYRLQMPLKDDHTSRPLWVAPDGHIFLEAFSPVYKYAQDFLVAIAEPVCRPTHVHEYKLTAYSLYAAVSVGLQTSDITEYLRKLSKTGVPDGIMQFIKASDS

SEQ ID NO: 1291 - DNA, 8192 bp, Homosapiens
gagagttcctgcctccaactgataatggtttgtacaaacactatggtttatgctgaatacctgcttttcttctgggagtctggaattttggtatgtgttaggcaagggggtgcctacatgatcaaccttcaatataaaacacctccccctagcgaaatgtgtaaagtattcatattgtatatttttcattagtattatttaaactgacttttttttttcttttcctggctccttttctgtttctttttattaatatgctgatctgttttatcttctcaggccataaagaatgctgatgggagaaccattttcctaattttcaaattgttgagctgtttgccataatggatgatcagcaagctttgaactcaatcatgcaagatttggctgtccttcataaggccagtcgaccagcattatccttgcaggaaaccagaaaagcaaaatcttcatcaccaaaaaaacagaatgatgtccgagtcaaatttgaacatagaggagaaaaaagaatccttcagttccccagaccagttaaactggaagatctgagatctaaagctaaaattgcctttggacagtctatggatctacattataccaataacgagttggtaattccattaactactcaagatgacttggacaaagctgtggaactgctggatcgtagtattcatatgaagagcctcaagatattacttgtaataaatggaagtacacaggctactaatttagaaccattgccatcactagaagatttggataatacagtatttggagcagagaggaaaaaacggctatctataataggtcctactagtagagatagaagttctcctcccccaggttacattccagatgaattacaccaggttgcccggaatgggtcattcactagtatcaacagtgaaggagagttcattccagagagcatggaccaaatgctggatccattatctttaagcagccctgaaaattctggctcaggaagttgtccatcacttgatagtcctttggatggagagagctatccaaaatcacgaatgcctagggctcagagctacccagataatcatcaggaattttcagactatgataaccctatctttgagaaatttggaaaaggaggaacatatccaagaaggtatcatgtttcatatcatcatcaagagtataatgatggtcgtaaaacttttccaagagctagaaggacccaggggaccagcttacggtctcctgtgagtttcagtcctactgatcattccttaagcactagtagtggaagcagtatctttaccccagagtatgatgatagtcgaataagaagaaggggaagtgacatagacaatcctactttgaccgtaatggacatcagcccacccagccgttcacctcgagctccgaccaactggagattgggcaaactgcttggccaaggagcctttggaagggtctacctctgttatgatgttgatacaggaagagaattggctgttaagcaagttcaatttgaccccgatagtcctgagaccagcaaggaagtaaatgcacttgagtgtgaaattcagttgctgaaaaacttgctacatgagcgaattgttcagtattatggctgtttgagggatccccaggaaaaaacactttccatatttatggaatatatgccagggggttcaattaaggaccaattaaaagcatatggcgctcttactgagaatgtgactaggaaatacacccgtcagattctggagggtgtccattatttgcacagtaatatgattgtccatagagatatcaaaggcgcaaatatcctgcgagattcaacaggcaacgtcaaactaggagattttggggccagcaaacggcttcagaccatctgtctctcagggacaggaatgaagtctgtcacgggcacaccatactggatgagccctgaagtcatcagtggagaaggctatggaagaaaagcagacatctggagtgttgcatgtactgtggtagaaatgctaactgaaaagccgccttgggctgaatttgaagcaatggctgccatctttaaaatcgccactcagccaacaaacccaaagctgccacctcatgtctcagactatactcgagatttcctcaaacggatttttgtagaggccaaactgagaccttcagctgatgaactcttaaggcacatgtttgtgcattatcactagcagccagtaacctctcctgtgcctctacctagctcccatctattcattcaccttctctctgactgcacttttcttttttataaaaaaagagagatgggggagaaaaaagacaagagggaaagtatttctcttgattcttggttaaatttgtttaataataataatatcctaaattttttatatttaatctttttttcccttacaagaacttgaagtttttttttttaatttttataatgtactgatgtggttcagagagataaagcactttagtacatagtcactctttttagtacaaacaaatcatttggaatacctaaagattgtagagtcattccctctatcactgacacatcagtgacgatgggaagacatggaaaacaaggagaagaaaatgatgtataatttgtagtttttagtgatagtatttaaaatatatcctcatttgtggggttgagccctaaactttagtttagggtaggtactcaacttaaagaatataggtttcttcttatatctgtattctttagatcctaacctctgtctaccaacctttttgctcagtaggagtcttgatagaagatatgaatctctgagaggtatgtttatttgttaatcctaaccagtataataagcaaatacactataatagatccacgttactggaatctgtaaaccttgagggatagctttctgcttaaaaacacacacacacacacacacacacacacggaaaacctttattttaaagtcaagttgtgagcaaatagaaataaaagacaaaaggacatcactcttatcaaatgtgtgagcagtagaagagaccacatttacagtcaatagaaataatgaaaaaaaattaggtgtttagtgtattttaaacagttttgttttgttttacttgagggggacgtcccaaaattaaaggaatggagaaataatcaaaatcatgtataccatcttctatttccagctcctgattccccataggtaacatcccttaggagcgaagagttcaattagtaatgtttatgtgttatgtcaggagatgaaacccttgttcttaggatcacagaatactaaagcacctcaaaaaaacaggtatcatgtgaaacagtggttgccaaaagtggagcgaggatgatttcactaggcatttggcaattcttagagacatttccggttgtcacaattggagggatactagtaacatgaattgggtagaggccagggatgttgctaaatagattataatacacaaggaaagcagcctcaaagaattacccctcccaaaatgtcagaagtgctgaggctgagaaaccctgatgtaaagatcagtcccagttataaactgaaaacagctatttacaaagcagtaaatgcaagaaagaaaaggaagtcgcaaagagaaagtgatgtaatgcaaattgaggattttacaagatcagatactgctgctttaagtcaagggtgaataatctcaacaaacagcaaatagcaatcactttaccagctgcatattgcacccacataggtaactcttcattttaggaacaaactgaatttgaacactgagccttttgaactcagccatctctatatattctttccttaaaattcatgattttgggcaaaaaaaaaaaaaaaagcatatcaaaacaaaattttaactactaatgggaaggttaaaaagctgccacgtatttctagtacaatgtatccaataagagcaaggacattgttaaatggaacaagacagctgggaaaggccccactatctctaatagaattgtgctactataaaacatgaagatatcagcaatttggccacttgcagtttttttcagcatgttaaagcaagtgctaagtactttattagtactttatttagtactttattttaaaggtctagaaaacaacagtcttcctggaggccccagaatccctttcatgggattcataagggactcaggtattcttattttctgccaaaaggtgtgcttatttagggactcttttacgatactttgtttctgaagttaggtagatcttggtttactgtgccaaggtcctacctagcattccctgtaggaatatttgaaattccactagctagtctaagaagtcaaagcacaaaattaattgtcaacgcttctctcatattcttaaaattgaagcagtttgcagggaagaacaagaatgaggtgtccctgccttggtaaagcaactgccaaattttgttctagaaagaatccccaagtgtgtggatctattataatttctttatcttttatgaatgagggcatcttttctacttgagcaagatcatggtccttgaccagtgggcttttccttcatatctgtcttgtgtagttgtgcttttcctttggctcgtttttggtctgtcagggtaaccagcagtgcacaatatgagacaaatgctctttagagagaaatctggtgagactgtagaacccagagcaaaactgtttttttttcagtctctgttttcttttctaaatgctatagaaaataaaggcacctgaaaagaaactactactttaacactgctgtggaaggcctttgctttataagaaaaatattattagctatgggaaagtaatgttctttatgtaaagacttaaaaatagactaatagtttacagagttattatataaaatacgatgtgaatttatttcaaacaagttgtgaaggtaccaaaaaccacaataaaagttaatatatataaaaactactagaacaaaaaagcttgaaggtgtgggggtggagggtatggaagaccaaaagtaaatttaaaaaagaaatttttgaaaggaaacagctttatcaggggaagttaaatataacactccgtttttttcttctttctaataatgatatggatcaacaaatgcaatttgaactttttaagataactctaaatgtgttttgtttcttaaatgcacaattgattcttctatactgtaatgcttctttgctgacgctggaaaatggtcagactgctgactttgtgcctttaaaatgcattctgctttgacagtggcagactttttggtgctggagaagattcactagcagtcttatatgtgcttttcaggaaatatctttctacttaaggccttgagagattcaaagtggcatgacttaggcttggaccaaatataagatcttttacattgcaaacaaaatgttgtattgaataaaagggttaaaaaaatcataatgactagtggaaattttgatgggttgttaattatttaaaatgtatttgaaagtatacagactgaaaatttcagtatgaatatcttgaaaattttcagcacttttccttgtttacaaaacatctttctaacttaaaaaaatgactattgccttagaaagttttaaaaggcacagttacccttacataacatatataaggaattaaaatattaatgcatttgctgaactgtaaaagaaaattttaaaccttgatttcagagtgaattggattggctttcacttgagagagtctttaccttattcccaaagaaactgcattaaaaagatgaaactatttctttagactaagtctctgctactccagctcatatatatgtcagatctgctctgtagtatttctgacatggagttgttataagatatgtgaaatcacttagaaaataaaatcagatgtgaatagtttagcaggatgaccaagccagatgcagactccttggcctatggcaaagttctgtgccagtgattttatttggagtctgggaactgatagcttgatataaaatcacctggtgtcaattaaatatacaaatctatcttttttaatagaatgaatcttctttgtttgttcaataattgtaacttattatgtcaggtactaaattaacatccttaaggaggtcacaatctaggaggaacatgggcaaacagttacttattttatggcatacgctaactctgaaagttcagcaatgatgttttaaaatgttattttttattaagggaaaagcaattttaggtaatcattggctgttataaacggaaatgtcactgacaacagggattagagtaaaagtatctccaaactagagggatcccctccccaaccaggtcacatagcatctctctcaggaccccctcttactgcaaaacccagcctctactcaacagttctggtgatggggagcatttattccataacagtgtttttttgttcttttttttttttttccccagtgtctcttttaaagaaaacatactttattttggtctaaattgtgaaaatacccaaaacatttgatagaaattgaactctgtcaacagtgttatttatactaagatcaggacagttccttgagatcatactgttttattactaagtttggcctttgttttacaaatgtaatgttcatatttatttgaattttaagattggttaaatgttaatgaaaagcaatccaattgttaatttttagtagtgccttttctctgtatgccttaattttattttatattaataattcaagttacccaccaaaatgaagattttttccaaaatcagtaggcttcacaagttcatttggccttagactgtgtattggtccttaaatgtttcttaatgcctgcctcctcctacccttttctacctcctttttaaaaaaataaataaataaataaataaatgttaggagagaaacattaggatttgtctgtgatagacatgctgcagcttccactagacatgaattcccaacacaagcatagaaagaggtattctcgttctaaagagacatgtaaatgttttctgggttgaatatttgattttcaatcacattggcactgtccaagttcttggcatattatagttcagttatgattttcatggtagagttacaatacttgtttttgccctaaagaagtcattcacatggtttacaaatgttaaggcaatgagataggacagtgagtaggaaatccagggatagcagattctagtccttaattctcagctaacattttgggtaatactcacagaaaagttacttttctgtgaagtgtgtgcatgtgtgcatgtatgtgtgcgtttgcatgcatgtgtgtgtgtgtgtgtgtgtggttagagttggaggcagggatgggaaggaagaaggggaaaggtatgagtgttcaattaggtcagtttctggttttggaagaacaactcaaatgtatgacctactgatgacatacagtgagtgtagtcatccttgggtaggaacaccagtacattttccagaagtagctagtacaaatgattgtataataatattgattgtaaattgccatactcttggttgctaaaggtagattaaaattcaatttgtgtatatgtaaaataatcttatatataattcttaaatagaaagtaattgattttacatagttcttcctgaactttttggaactgaaattctgccaaacattatcaaaataagcttccttagcttaccaagtattcacaaggaaattctcttgtacctctttttggttggctaggggaagcatgctgtgaagcagctattcctacttatagttgtctttggcttggctttgacttctgccatggtttggacaggatgccatggtaggtgtgggaagtatcagggcctcccatcttcccatactcaccttccagagctgttgatggaaatgagctcttgggggagcctagagattcttttttcagtggtcctgtaagcattcaaggttgagcttcagaaagatgagggaggagtcatagctacagtaaagaaaagaatagattttatctgttgcctgtatacagtctcatagaattcttatttttcataattgtgcattttaattgatagtcatatggtatttttgttaataacagcaaaggcattaaatcagtaccattgttccttctgcctgatgacttcttgtttgtaacacaatctgtatta

SEQ ID NO: 1292 - protein, 619 aa, Homosapiens; identical to SEQ ID NO: 84

SEQ ID NO: 1293 - DNA, 8192 bp, Homosapiens; identical to SEQ ID NO: 1291

SEQ ID NO: 1294 - protein, 619 aa, Homosapiens; identical to SEQ ID NO: 84

SEQ ID NO: 1295 - DNA, 5445 bp, Homosapiens
gagagttcctgcctccaactgataatggtttgtacaaacactatggtttatgctgaatacctgcttttcttctgggagtctggaattttggtatgtgttaggcaagggggtgcctacatgatcaaccttcaatataaaacacctccccctagcgaaatgtgtaaagtattcatattgtatatttttcattagtattatttaaactgacttttttttttcttttcctggctccttttctgtttctttttattaatatgctgatctgttttatcttctcaggccataaagaatgctgatgggagaaccattttcctaattttcaaattgttgagctgtttgccataatggatgatcagcaagctttgaactcaatcatgcaagatttggctgtccttcataaggccagtcgaccagcattatccttgcaggaaaccagaaaagcaaaatcttcatcaccaaaaaaacagaatgatgtccgagtcaaatttgaacatagaggagaaaaaagaatccttcagttccccagaccagttaaactggaagatctgagatctaaagctaaaattgcctttggacagtctatggatctacattataccaataacgagttggtaattccattaactactcaagatgacttggacaaagctgtggaactgctggatcgtagtattcatatgaagagcctcaagatattacttgtaataaatggaagtacacaggctactaatttagaaccattgccatcactagaagatttggataatacagtatttggagcagagaggaaaaaacggctatctataataggtcctactagtagagatagaagttctcctcccccaggttacattccagatgaattacaccaggttgcccggaatgggtcattcactagtatcaacagtgaaggagagttcattccagagagcatggaccaaatgctggatccattatctttaagcagccctgaaaattctggctcaggaagttgtccatcacttgatagtcctttggatggagagagctatccaaaatcacgaatgcctagggctcagagctacccagataatcatcaggaattttcagactatgataaccctatctttgagaaatttggaaaaggaggaacatatccaagaaggtatcatgtttcatatcatcatcaagagtataatgatggtcgtaaaacttttccaagagctagaaggacccaggggaccagcttacggtctcctgtgagtttcagtcctactgatcattccttaagcactagtagtggaagcagtatctttaccccagagtatgatgatagtcgaataagaagaaggggaagtgacatagacaatcctactttgaccgtaatggacatcagcccacccagccgttcacctcgagctccgaccaactggagattgggcaaactgcttggccaaggagcctttggaagggtctacctctgttatgatgttgatacaggaagagaattggctgttaagcaagttcaatttgaccccgatagtcctgagaccagcaaggaagtaaatgcacttgagtgtgaaattcagttgctgaaaaacttgctacatgagcgaattgttcagtattatggctgtttgagggatccccaggaaaaaacactttccatatttatggaatatatgccagggggttcaattaaggaccaattaaaagcatatggcgctcttactgagaatgtgactaggaaatacacccgtcagattctggagggtgtccattatttgcacagtaatatgattgtccatagagatatcaaaggcgcaaatatcctgcgagattcaacaggcaacgtcaaactaggagattttggggccagcaaacggcttcagaccatctgtctctcagggacaggaatgaagtctgtcacgggcacaccatactggatgagccctgaagtcatcagtggagaaggctatggaagaaaagcagacatctggagtgttgcatgtactgtggtagaaatgctaactgaaaagccgccttgggctgaatttgaagcaatggctgccatctttaaaatcgccactcagccaacaaacccaaagctgccacctcatgtctcagactatactcgagatttcctcaaacggatttttgtagaggccaaactgagaccttcagctgatgaactcttaaggcacatgtttgtgcattatcactagcagccagtaacctctcctgtgcctctacctagctcccatctattcattcaccttctctctgactgcacttttcttttttataaaaaaagagagatgggggagaaaaaagacaagagggaaagtatttctcttgattcttggttaaatttgtttaataataataatatcctaaattttttatatttaatctttttttcccttacaagaacttgaagtttttttttttaatttttataatgtactgatgtggttcagagagataaagcactttagtacatagtcactctttttagtacaaacaaatcatttggaatacctaaagattgtagagtcattccctctatcactgacacatcagtgacgatgggaagacatggaaaacaaggagaagaaaatgatgtataatttgtagtttttagtgatagtatttaaaatatatcctcatttgtggggttgagccctaaactttagtttagggtaggtactcaacttaaagaatataggtttcttcttatatctgtattctttagatcctaacctctgtctaccaacctttttgctcagtaggagtcttgatagaagatatgaatctctgagaggtatgtttatttgttaatcctaaccagtataataagcaaatacactataatagatccacgttactggaatctgtaaaccttgagggatagctttctgcttaaaaacacacacacacacacacacacacacacggaaaacctttattttaaagtcaagttgtgagcaaatagaaataaaagacaaaaggacatcactcttatcaaatgtgtgagcagtagaagagaccacatttacagtcaatagaaataatgaaaaaaaattaggtgtttagtgtattttaaacagttttgttttgttttacttgagggggacgtcccaaaattaaaggaatggagaaataatcaaaatcatgtataccatcttctatttccagctcctgattccccataggtaacatcccttaggagcgaagagttcaattagtaatgtttatgtgttatgtcaggagatgaaacccttgttcttaggatcacagaatactaaagcacctcaaaaaaacaggtatcatgtgaaacagtggttgccaaaagtggagcgaggatgatttcactaggcatttggcaattcttagagacatttccggttgtcacaattggagggatactagtaacatgaattgggtagaggccagggatgttgctaaatagattataatacacaaggaaagcagcctcaaagaattacccctcccaaaatgtcagaagtgctgaggctgagaaaccctgatgtaaagatcagtcccagttataaactgaaaacagctatttacaaagcagtaaatgcaagaaagaaaaggaagtcgcaaagagaaagtgatgtaatgcaaattgaggattttacaagatcagatactgctgctttaagtcaagggtgaataatctcaacaaacagcaaatagcaatcactttaccagctgcatattgcacccacataggtaactcttcattttaggaacaaactgaatttgaacactgagccttttgaactcagccatctctatatattctttccttaaaattcatgattttgggcaaaaaaaaaaaaaaaagcatatcaaaacaaaattttaactactaatgggaaggttaaaaagctgccacgtatttctagtacaatgtatccaataagagcaaggacattgttaaatggaacaagacagctgggaaaggccccactatctctaatagaattgtgctactataaaacatgaagatatcagcaatttggccacttgcagtttttttcagcatgttaaagcaagtgctaagtactttattagtactttatttagtactttattttaaaggtctagaaaacaacagtcttcctggaggccccagaatccctttcatgggattcataagggactcaggtattcttattttctgccaaaaggtgtgcttatttagggactcttttacgatactttgtttctgaagttaggtagatcttggtttactgtgccaaggtcctacctagcattccctgtaggaatatttgaaattccactagctagtctaagaagtcaaagcacaaaattaattgtcaacgcttctctcatattcttaaaattgaagcagtttgcagggaagaacaagaatgaggtgtccctgccttggtaaagcaactgccaaattttgttctagaaagaatccccaagtgtgtggatctattataatttctttatcttttatgaatgagggcatcttttctacttgagcaagatcatggtccttgaccagtgggcttttccttcatatctgtcttgtgtagttgtgcttttcctttggctcgtttttggtctgtcagggtaaccagcagtgcacaatatgagacaaatgctctttagagagaaatctggtgagactgtagaacccagagcaaaactgtttttttttcagtctctgttttcttttctaaatgctatagaaaataaaggcacctgaaaagaaactactactttaacactgctgtggaaggcctttgctttataagaaaaatattattagctatgggaaagtaatgttctttatgtaaagacttaaaaatagactaatagtttacagagttattatataaaatacgatgtgaatttatttcaaacaagttgtgaaggtaccaaaaaccacaataaaagttaatatatataaaaactactagaacaaaaaagcttgaaggtgtgggggtggagggtatggaagaccaaaagtaaatttaaaaaagaaatttttgaaaggaaacagctttatcaggggaagttaaatataacactccgtttttttcttctttctaataatgatatggatcaacaaatgcaatttgaactttttaagataactctaaatgtgttttgtttcttaaatgcacaattgattcttctatactgtaatgcttctttgctgacgctggaaaatggtcagactgctgactttgtgcctttaaaatgcattctgctttgacagtggcagactttttggtgctggagaagattcactagcagtcttatatgtgcttttcaggaaatatctttctacttaaggccttgagagattcaaagtggcatgacttaggcttggaccaaatataagatcttttacattgcaaacaaaatgttgtattgaataaaagggttaaaaaaatc

SEQ ID NO: 1296 - protein, 619 aa, Homosapiens; identical to SEQ ID NO: 84

SEQ ID NO: 1297 - DNA, 3121 bp, Homosapiens
gagagttcctgcctccaactgataatggtttgtacaaacactatggtttatgctgaatacctgcttttcttctgggagtctggaattttggtatgtgttaggcaagggggtgcctacatgatcaaccttcaatataaaacacctccccctagcgaaatgtgtaaagtattcatattgtatatttttcattagtattatttaaactgacttttttttttcttttcctggctccttttctgtttctttttattaatatgctgatctgttttatcttctcaggccataaagaatgctgatgggagaaccattttcctaattttcaaattgttgagctgtttgccataatggatgatcagcaagctttgaactcaatcatgcaagatttggctgtccttcataaggccagtcgaccagcattatccttgcaggaaaccagaaaagcaaaatcttcatcaccaaaaaaacagaatgatgtccgagtcaaatttgaacatagaggagaaaaaagaatccttcagttccccagaccagttaaactggaagatctgagatctaaagctaaaattgcctttggacagtctatggatctacattataccaataacgagttggtaattccattaactactcaagatgacttggacaaagctgtggaactgctggatcgtagtattcatatgaagagcctcaagatattacttgtaataaatggaagtacacaggctactaatttagaaccattgccatcactagaagatttggataatacagtatttggagcagagaggaaaaaacggctatctataataggtcctactagtagagatagaagttctcctcccccaggttacattccagatgaattacaccaggttgcccggaatgggtcattcactagtatcaacagtgaaggagagttcattccagagagcatggaccaaatgctggatccattatctttaagcagccctgaaaattctggctcaggaagttgtccatcacttgatagtcctttggatggagagagctatccaaaatcacgaatgcctagggctcagagctacccagataatcatcaggaattttcagactatgataaccctatctttgagaaatttggaaaaggaggaacatatccaagaaggtatcatgtttcatatcatcatcaagagtataatgatggtcgtaaaacttttccaagagctagaaggacccaggggaccagcttacggtctcctgtgagtttcagtcctactgatcattccttaagcactagtagtggaagcagtatctttaccccagagtatgatgatagtcgaataagaagaaggggaagtgacatagacaatcctactttgaccgtaatggacatcagcccacccagccgttcacctcgagctccgaccaactggagattgggcaaactgcttggccaaggagcctttggaagggtctacctctgttatgatgttgatacaggaagagaattggctgttaagcaagttcaatttgaccccgatagtcctgagaccagcaaggaagtaaatgcacttgagtgtgaaattcagttgctgaaaaacttgctacatgagcgaattgttcagtattatggctgtttgagggatccccaggaaaaaacactttccatatttatggaatatatgccagggggttcaattaaggaccaattaaaagcatatggcgctcttactgagaatgtgactaggaaatacacccgtcagattctggagggtgtccattatttgcacagtaatatgattgtccatagagatatcaaaggcgcaaatatcctgcgagattcaacaggcaacgtcaaactaggagattttggggccagcaaacggcttcagaccatctgtctctcagggacaggaatgaagtctgtcacgggcacaccatactggatgagccctgaagtcatcagtggagaaggctatggaagaaaagcagacatctggagtgttgcatgtactgtggtagaaatgctaactgaaaagccgccttgggctgaatttgaagcaatggctgccatctttaaaatcgccactcagccaacaaacccaaagctgccacctcatgtctcagactatactcgagatttcctcaaacggatttttgtagaggccaaactgagaccttcagctgatgaactcttaaggcacatgtttgtgcattatcactagcagccagtaacctctcctgtgcctctacctagctcccatctattcattcaccttctctctgactgcacttttcttttttataaaaaaagagagatgggggagaaaaaagacaagagggaaagtatttctcttgattcttggttaaatttgtttaataataataatatcctaaattttttatatttaatctttttttcccttacaagaacttgaagtttttttttttaatttttataatgtactgatgtggttcagagagataaagcactttagtacatagtcactctttttagtacaaacaaatcatttggaatacctaaagattgtagagtcattccctctatcactgacacatcagtgacgatgggaagacatggaaaacaaggagaagaaaatgatgtataatttgtagtttttagtgatagtatttaaaatatatcctcatttgtggggttgagccctaaactttagtttagggtaggtactcaacttaaagaatataggtttcttcttatatctgtattctttagatcctaacctctgtctaccaacctttttgctcagtaggagtcttgatagaagatatgaatctctgagaggtatgtttatttgttaatcctaaccagtataataagcaaatacactataatagatccacgttactggaatctgtaaaccttgagggatagctttctgcttaaaaacacacacacacacacacacacacacacggaaaacctttattttaaagtcaagttgtgagcaaatagaaataaaagacaaaaggacatcactcttatcaaatgtgtgagcagtagaagagaccacatttacagtcaatagaaataatgaaaaaaaattaggtgtttagtgtattttaaacagttttgttttgttttacttgagggggacgtccc

SEQ ID NO: 1298 - protein, 619 aa, Homosapiens; identical to SEQ ID NO: 84

SEQ ID NO: 1299 - DNA, 424 bp, Homosapiens
aataaagaaaaatttaaaaacatacatgttcattctaagattttagtggcggtagaatgaggagggcaaaacaatatacacatacacattcagactttcatcatagtaacaaatcaaagagcaaggtattttgacatttgtaattccttagtagtggagatgctcatggaagaacttgacctggtgagatagctgcatggttccttatgtttgtttttagttggtaattccattaactactcaagatgacttggacaaagctgtggaactgctggatcgtagtattcatatgaagagcctcaagatattacttgtaataaatggaagtacacaggctactaatttagaaccattgccatcactagaagatttggataatacagtatttggagcagagaggaaaaaacggctatctataataggt

SEQ ID NO: 1300 - protein, 44 aa, Homosapiens
MKSLKILLVINGSTQATNLEPLPSLEDLDNTVFGAERKKRLSII

SEQ ID NO: 1301 - DNA, 507 bp, Homosapiens
gggacgtagagagccgcaggcccaaggaggggccgcccccgccgagcccgcccctccgccccagcgcggcctgtcaccgcggccccagcttcttcttggtttcttcgtacattctggatccacccctttcatgcatattccagaccacatttccactggagcagttgaaatgagagagatgggaatgggactcacccgaaccagaggaatttttattacagacccattaacagaggtgtcaaagtcacaggaacaaggatgtgcacctcagaaacacagaggtcagtggaaaatcagtttgcttctatttgtttaaaaaatgggggacttatgcataaatctaagaccttcttgaatctaacattctaagacctgtatgccacagaaaggagggtctcagaacgccggaggatagtatttaaatcttaaatatctatattgttctccacagttactgggtcaccacatagcaggcattcaataaaaacgtgtttgtttactaagtaa

SEQ ID NO: 1302 - protein, 61 aa, Homosapiens
MHIPDHISTGAVEMREMGMGLTRTRGIFITDPLTEVSKSQEQGCAPQKHRGQWKISLLLFV

SEQ ID NO: 1303 - DNA, 470 bp, Homosapiens
agcctgcggtagtggccagatcccagacatccgagtagatcccgtgaaaagcttcttcttggtttcttcgtacattctggatccacccctttcatgcatattccagaccacatttccactggagcagttgaaatgagagagatgggaatgggactcacccgaaccagaggaatttttattacagacccattaacagaggtgtcaaagtcacaggaacaaggatgtgcacctcagaaacacagaggtcagtggaaaatcagtttgcttctatttgtttaaaaaatgggggacttatgcataaatctaagaccttcttgaatctaacattctaagacctgtatgccacagaaaggagggtctcagaacgccggaggatagtatttaaatcttaaatatctatattgttctccacagttactgggtcaccacatagcaggcattcaataaaaacgtgtttgtttactaagtaa

SEQ ID NO: 1304 - protein, 61 aa, Homosapiens; identical to SEQ ID NO: 1302

SEQ ID NO: 1305 - DNA, 1009 bp, Homosapiens
agacatccgagtagatcccgtgaaaaggtctcccacgtgggctgtggacagggcccaagggtagcagagctagcagaggcagtgacggactgtgtggcaggtcatttgcaaggagaaaagccgtctgcctcttaatttgtggctcaagtttcagaatttttttcctgagggactttagaaattacttcaggcttgccacctaaccttaaaccacccccttggagactggctaagtgttatttgtgttttctgtttagttcttatcaccatcgatacttggttatgactggttgtgtacattggttagcccagcaagtattacttctccagcttaacagatgtggaaacttaagcccagagacatgagttgacaccccacccccaaagctagagtctaaaaccctttctttcgctcctcatctcccacaggataaaatgcaaattaatcagactagtggtgaggccctccgtggtgtgactaacctgcatcccgacgttttcaccctactttgatccagaaagcacctttccgccccatctcttctcctttccttaaataccccttacaacttcctgtaccattcttccctgttcagcttcttcttggtttcttcgtacattctggatccacccctttcatgcatattccagaccacatttccactggagcagttgaaatgagagagatgggaatgggactcacccgaaccagaggaatttttattacagacccattaacagaggtgtcaaagtcacaggaacaaggatgtgcacctcagaaacacagaggtcagtggaaaatcagtttgcttctatttgtttaaaaaatgggggacttatgcataaatctaagaccttcttgaatctaacattctaagacctgtatgccacagaaaggagggtctcagaacgccggaggatagtatttaaatcttaaatatctatattgttctccacagttactgggtcaccacatagcaggcattcaataaaaacgtgtttgtttact

SEQ ID NO: 1306 - protein, 61 aa, Homosapiens; identical to SEQ ID NO: 1302

SEQ ID NO: 1307 - DNA, 2685 bp, Homosapiens
acagaggtgtcaaagtcacaggaacaaggatgtgcacctcagaaacacagaggctagcctggctgaagctcagctgcacagagtctgtcctgagaagcagaatgccactgtcccctgggccctccagactgccaaggctgctcagtttcagagagcaggctccctgtggcctcacacgccggctgccagctgggccaggtaactctggccaggctgcactgtgaagaacacgagagtcggcggagacctgtgcctgctcttctcagcctcaatgtctggaagacaaaaaaaggcatcctgctcccaagattgtggtggaggccagcagggtgacgcacatgaaagccactggagatagatggcacttgttcccacccactgcccacaacaggcccaggactgcctcagccccggtggaccccagagccagcaggcccttcagaatggaaggtgccaaacaccatcggaaggcgtggttcttttcagagaaccagactctgagactgtggcctcccactatgagtcaccacctctgattcctgaggtcccctccagtcattggctctctcccaagccagccagctgatcagccttgaggacagcagagtgtctgccaagagagatctgtgaagtttcccatcaccgtggcagtccacaatgtgaagcccctgaggccacccttctccatgtgtcccccacactgtccctgaccctcccaccatcctagaaaaccagcctcccaggtcctctgtcatggaagtaatttacagcaaggcagaaagagctgaaagatttataaatgtgtaaaatttacaaaggtgtttctttctttctttctttctttttttttttttttttttttgaggcagagtctcactctgttgcccaggctggagtgcagtggcacaattttggctcactgcaacctccgcctcccgggttcaagtgattctcctgcctcagcctcccaagtagctgggattacaggtgcatgccaccacgcctagctaatttttgtatttttagtagagacagagttttttgccatgttggccaggctggtcttgaactcctgacctcaggtgatctgcctgcctcagcctcccaaagtgctgggattacaggcgtgagtcaccgtgcccggcctacagaggtgtttctgagtggagaaaccactgcctggttggactgactgcccagttccaccaccctgtgagcccatgagtgagctcactgcacttgttatagacatcctaccaccagcagcctgattttgctgagtccgtagcttacaactccaatctcatggccctgcctttcacctcacttgctgccttaaaaacctgcagactgaggtggcgtagaagctgtgacatcccagtacccagaagttcatctcacacccagatcttggtttctaaatgtcattctctactaaaagggaccagggctggtacaggagaagagcaagagcttggaatatcttatacctgagagtaaggaagtgctcagagaatcacaggagcacgttaaaaggacatagaagtcagtttaatgagactgcttctggccaaagttggaacacatcaaacattaaaacaatgatggtaatggattagattccatagaataaaatccttgaggacatagttatataaacataactgaggaagaaggaaaagctctccctaacagaataatacaactagtaaatgggaaaggaaaggagttaggaattcacgctgggtattgaaactagtgggtgaaagctcaatgaatcggattcttagtctcaatgtctctcctctcaatttagtaattatagtggagtaatcatgactttacagtggagaaacctggccaacactaccttcacaacactaacaaaaaccttgcagacctgcagcctaagctcccagaagtcacctgctgaaatgccttcaaagagtgacctctctgcgtgtagtgctcagcaacttgggctcagtgtctatttccacaagctacaaaccagaatacagtggaattcagcccatatgtggtaatttatctaccaatcaaggacctttgactccaaaaattaccttttttgtacaagtgactacctggtgtagagctcagacatggctttgaatttttgccatgctgtgtgagctcaggcaagctgcttcacctctttgagcttcaatcttttatctataaaatgggaataacaataacttaatgaaacagcaattccagtgttaggtatttcctcaggagaaatgaaaacacgttcacacaaataattgtacatgtatgtttctacacgctttattcataatagtcataaacaacctaaatattcatcaactggttagcagagaaaagagcaaaccactgatgacatgaacgaatttcagaagcactgtgctcagtgaaagaagccagacaaaaattacatcttacataaatttcatttatatgaaattctagtgaaggcaaaacatatagccaggggccaagaggggaggatggtctgcaaagaggcaggaacttcttcctggggtgatgggaatattctgtgtcatgaacatcgtgattgtggttacaagactatacttttgtcaaaactcatcaaattgtacacctaaaatggatgcattaagcctcaatacagccaataaaagatacctacgttacagt

SEQ ID NO: 1308 - protein, 64 aa, Homosapiens
MCTSETQRLAWLKLSCTESVLRSRMPLSPGPSRLPRLLSFREQAPCGLTRRLPAGPGNSGQAAL

SEQ ID NO: 1309 - DNA, 925 bp, Homosapiens
gcctgcggattaattgttgtgctttgtattgagacactgctagtttaattttagcatggtgactactgaggccatgttttcttaagcattcaggtgatgaaaatgaggaaatggtgttgcaatatcaatgcccgcgtgacccaaatggccatgttattttaacgacaggaggagtgacacagacaactggatgagggaggctgtaactgaaatatcacgtgggtgaacaaagggagaaatgtcgatggcagctgtgttgaccctttacaacatgcagcggattctgccagatcccaccaacaatcatgctttctacagtaaccaagtgctgcatccaatcatggcaatgaaaaacagttctcctaacttgtaaatactttgatttgaaaaaatggagtttcaaatcatcctttttatttctatgaagattttaatccacctgcagaaaaaaaaaaagaatgttgatgctatcttgtccaaatacaaacatgactttgcccatctgtctgcctatttggcagaccgtgcaaatgtaaatttttgcaaattccatgcagtctatgaacgctttaccaaagaaaagttaaaaatattagccacgaagtgtcctgcacattttgtacacatcagtaaaaaggggtggagtttccttccctgtgatattgatgctttcaaaatgaaagcttttatttacttttcagtttcctcaaagcatgaaaaagcacttaatgagatttttcacattccagaaatggaaggagatggcctcctttggacatgtgcctacacgagggctgtcactgttgccagggtaaaaaggcagcctgccatacaaccatattttcaaagcatgggacaagaagaatgtccttgtctaatttggaaatatattaagaatgaaaatagagaaaaagattatggttaa

SEQ ID NO: 1310 - protein, 177 aa, Homosapiens [sequence omitted]

SEQ ID NO: 1311 - DNA, 1772 bp, Homosapiens
aactcgaactccaggctgtcatggcggcaggacggcgaacttgcagtatctccacgacccgcccctacaggtgccagtgcctccagaatgtggcagctcacaagcctcctgctgttcgtggccacctggggaatttccggcacaccagctcctcttgactcagtgttctccagcagcgagcgtgcccaccaggtgctgcggatccgcaaacgtgccaactccttcctggaggagctccgtcacagcagcctggagcgggagtgcatagaggagatctgtgacttcgaggaggccaaggaaattttccaaaatgtggatgacacactggccttctggtccaagcacgtcgacggtgaccagtgcttggtcttgcccttggagcacccgtgcgccagcctgtgctgcgggcacggcacgtgcatcgacggcatcggcagcttcagctgcgactgccgcagcggctgggagggccgcttctgccagcgcgaggtgagcttcctcaattgctcgctggacaacggcggctgcacgcattactgcctagaggaggtgggctggcggcgctgtagctgtgcgcctggctacaagctgggggacgacctcctgcagtgtcaccccgcagtgaagttcccttgtgggaggccctggaagcggatggagaagaagcgcagtcacctgaaacgagacacagaagaccaagaagaccaagtagatccgcggctcattgatgggaagatgaccaggcggggagacagcccctggcaggtggtcctgctggactcaaagaagaagctggcctgcggggcagtgctcatccacccctcctgggtgctgacagcggcccactgcatggatgagtccaagaagctccttgtcaggcttggagagtatgacctgcggcgctgggagaagtgggagctggacctggacatcaaggaggtcttcgtccaccccaactacagcaagagcaccaccgacaatgacatcgcactgctgcacctggcccagcccgccaccctctcgcagaccatagtgcccatctgcctcccggacagcggccttgcagagcgcgagctcaatcaggccggccaggagaccctcgtgacgggctggggctaccacagcagccgagagaaggaggccaagagaaaccgcaccttcgtcctcaacttcatcaagattcccgtggtcccgcacaatgagtgcagcgaggtcatgagcaacatggtgtctgagaacatgctgtgtgcgggcatcctcggggaccggcaggatgcctgcgagggcgacagtggggggcccatggtcgcctccttccacggcacctggttcctggtgggcctggtgagctggggtgagggctgtgggctccttcacaactacggcgtttacaccaaagtcagccgctacctcgactggatccatgggcacatcagagacaaggaagccccccagaagagctgggcaccttagcgaccctccctgcagggctgggcttttgcatggcaatggatgggacattaaagggacatgtaacaagcacaccggcctgctgttctgtccttccatccctcttttgggctcttctggagggaagtaacatttactgagcacctgttgtatgtcacatgccttatgaatagaatcttaactcctagagcaactctgtggggtggggaggagcagatccaagttttgcggggtctaaagctgtgtgtgttgagggggatactctgtttatgaaaaagaataaaaaacacaaccacgaagcc

SEQ ID NO: 1312 - protein, 461 aa, Homosapiens; identical to SEQ ID NO: 86

SEQ ID NO: 1313 - DNA, 339 bp, Homosapiens
gactcagtgttctccagcagcgagcgtgcccaccaggtgctgcggatccgcaaacgtgccaactccttcctggaggagctccgtcacagcagcctggagcgggagtgcatagaggagatctgtgacttcgaggaggccaaggaaattttccaaaattgcttggtcttgcccttggagcacccgtgcgccagcctgtgctgcgggcacggcacgtgcatcgacggcatcggcagcttcagctgcgactgccgcagcggctgggagggccgcttctgccagcgcggtgagggggagaggtggatgctggcgggcggcggggcggggctggggccgggttgg

SEQ ID NO: 1314 - protein, 74 aa, Homosapiens
RRSVTSRRPRKFSKIAWSCPWSTRAPACAAGTARASTASAASAATAAAAGRAASASAVRGRGGCWRAAGRGWGR

SEQ ID NO: 1315 - DNA, 1009 bp, Homosapiens
attgctcgctggacaacggcggctgcacgcattactgcctagaggaggtgggctggcggcgctgtagctgtgcgcctggctacaagctgggggacgacctcctgcagtgtcaccccgcaggagagtatgacctgcggcgctgggagaagtgggagctggacctggacatcaaggaggtcttcgtccaccccaactacagcaagagcaccaccgacaatgacatcgcactgctgcacctggcccagcccgccaccctctcgcagaccatagtgcccatctgcctcccggacagcggccttgcagagcgcgagctcaatcaggccggccaggagaccctcgtgacgggctggggctaccacagcagccgagagaaggaggccaagagaaaccgcaccttcgtcctcaacttcatcaagattcccgtggtcccgcacaatgagtgcagcgaggtcatgagcaacatggtgtctgagaacatgctgtgtgcgggcatcctcggggaccggcaggatgcctgcgagggcgacagtggggggcccatggtcgcctccttccacggcacctggttcctggtgggcctggtgagctggggtgagggctgtgggctccttcacaactacggcgtttacaccaaagtcagccgctacctcgactggatccatgggcacatcagagacaaggaagccccccagaagagctgggcaccttagcgaccctccctgcagggctgggcttttgcatggcaatggatgggacattaaagggacatgtaacaagcacaccggcctgctgttctgtccttccatccctcttttgggctcttctggagggaagtaacatttactgagcacctgttgtatgtcacatgccttatgaatagaatcttaactcctagagcaactctgtggggtggggaggagcagatccaagttttgcggggtctaaagctgtgtgtgttgagggggatactctgtttatgaaaaagaataaaaaacacaaccacgaagcc

SEQ ID NO: 1316 - protein, 85 aa, Homosapiens [sequence omitted]

SEQ ID NO: 1317 - DNA, 532 bp, Homosapiens
atgcagagagccctgtgatggggctgctggagccgaggcctgggggttcagtcccctgagaagcccccaccagcttagcctgggggacgagttatgggaaggacagatgagaaactgctaactaaacaaggccaaaaggaccagggcaagctgggggagaccatggaggctgtggaaggaacaggctgactaagctcaggagactccccacccacagggctgcagtcctgcctcagggctcagcaagcaaacacgtaagagcactgcacagttgaaaaaatgagttttaaaacaatctgccaagaaaaaagatgtcaaagtagtcatcacgggaaaagtcagaattttggtggacttcactgcacttattctgtggctattaattttaaattatgtatgtgggggaggggagcacaccataatctttctagtgccctgaggctcttaaaccaggctctgttcacctggacctgtgttcatgggcaggaaactgttctaggccctttatatgcattgtttgatttaatcctgt

SEQ ID NO: 1318 - protein, 83 aa, Homosapiens
MSFKTICQEKRCQSSHHGKSQNFGGLHCTYSVAINFKLCMWGRGAHHNLSSALRLLNQALFTWTCVHGQETVLGPLYALFDLI

SEQ ID NO: 1319 - DNA, 571 bp, Homosapiens
ggtcccagctgagtaggagatgggattcaacagtactggtctaatgtgctggagtggcccaggcggaggcccacttgcagagactaatgggagcctcaagagaaaatctaccataagaaaaggaccagtctgatagcaagcccagcttcccaagaagatagaaggttggaggcaagctgctgtccaggtatgtcccaaaccagccaacttgaaggtaagtttgctccctggggagagaagggctctaggtgtgaactaaaagctgtgtccatagacactgtaacactggagttcaaaaaatgttgctgtggaacggcccttctcatccaaacccagacggaatgttctcacctgccaagagtagtgtcttgtattgaggcacagtggtagctttctggatccacaggcaaggccctgtggagtctcagaataatgataaatcctctggatgacctaggggctggtgaggtgagtggagcaccctactgtggtgtgtctgtaggaccactggagcctgatgctgccaaagcatgacctgaccagccctggcaactggtttaggatcatacaa

SEQ ID NO: 1320 - protein, 37 aa, Homosapiens
MGFNSTGLMCWSGPGGGPLAETNGSLKRKSTIRKGPV

SEQ ID NO: 1321 - DNA, 468 bp, Homosapiens
cgactcagcaaagtgcatcgtgctgtcaagttcagcattgaaggcaacaggatgcccctataggcctggccctaccagagtatatacacgagagtttcaggcgacctccaagaagggtatcagtcgactggataaacagatgagaaagttcacagatataaggaaaaaaagcagatctgcacacgcagtgaaaatcagcattgagggcaacaaaatgccattgtgaccttgcctggaatgtgtccccatctctactctaagaaatgcgcaatggactctttggagaaagaagatattttaaaacatttttagtgtgtctgtaaatggttcagcgtgtatcagatgttgtcataggactcacatttctctcagttatatttaaaaccgttgtgtactttgtacaaaggaatactagtcatacttctataaactttacacaataaaatttcattctggtttttggggggc

SEQ ID NO: 1322 - protein, 39 aa, Homosapiens [sequence omitted]

SEQ ID NO: 1323 - DNA, 1038 bp, Homosapiens
tttcctctcagcttgatatgtgtacataattcataatatccttttagtttaaatgtgatagtgtatagtgagggtcctgtcctcctaaccagacctttctgggtcagtttgttggaacagggcctgtttcaggatactgattgcttgtgttgttccatccacttgagaaaacaactttctgggtcccgtttccgagttcctagaagaaaaaatgttatagttttagtttgtattgataatagtggatacagttgcatccaggaggacagggtcattagttacaaatgtggcaattacggctcatccacaaggaaacctgttatgcaaatgaatactaaaatgagtagtactttttaaagattaggaattattttccctgatccatcgtaaaagagctattaatagttatggtctaagtttgatttttagtttgctctttttctgagttattaggttctaatattcctggtatctccttgtttacttttttttcagcactggtggtcagacacccagaagagacctggaaaaggtgctgacaggagaggagaaggctcttagacctggagatcctggattctgtgcccgtgcaagggtcccaatgccttcaaacaaggactatgttgtcaggcccaaatggaatgtggaaatggagtcatccaggtttcaggcgacctccaagaagggtatcagtcgactggataaacagatgagaaagttcacagatataaggaaaaaaagcagatctgcacacgcagtgaaaatcagcattgagggcaacaaaatgccattgtgaccttgcctggaatgtgtccccatctctactctaagaaatgcgcaatggactctttggagaaagaagatattttaaaacatttttagtgtgtctgtaaatggttcagcgtgtatcagatgttgtcataggactcacatttctctcagttatatttaaaaccgttgtgtactttgtacaaaggaatactagtcatacttctataaactttacacaataaaatttcattctggtttttggggggc

SEQ ID NO: 1324 - protein, 64 aa, Homosapiens
MPSNKDYVVRPKWNVEMESSRFQATSKKGISRLDKQMRKFTDIRKKSRSAHAVKISIEGNKMPL

SEQ ID NO: 1325 - DNA, 757 bp, Homosapiens
ctcgcatgcctgcccgcccgccagcctgccgggtacggccttttccgccggggcttccaggtcaaagaattcgcctttgccgctaccgctttcttaccctccgcacccgttaagttctccggtcgggcggcagtctctgaacacttagccgcgccatccggggtcacaccgcctggaaggaggtgacgggggcggcgcggggcgcggacactccccgctgagagtccgcctgccatggactcggaatattacagcggcgaccagtcagatgatggtggtgctaccccagtacaggatgaacgggattcagggtcagacggtgaggatgatgtaaatgagcaacactccggatcagacactggaagtgtagaacgtcatcttagtttcaggcgacctccaagaagggtatcagtcgactggataaacagatgagaaagttcacagatataaggaaaaaaagcagatctgcacacgcagtgaaaatcagcattgagggcaacaaaatgccattgtgaccttgcctggaatgtgtccccatctctactctaagaaatgcgcaatggactctttggagaaagaagatattttaaaacatttttagtgtgtctgtaaatggttcagcgtgtatcagatgttgtcataggactcacatttctctcagttatatttaaaaccgttgtgtactttgtacaaaggaatactagtcatacttctataaactttacacaataaaatttcattctggtttttggggggc

SEQ ID NO: 1326 - protein, 65 aa, Homosapiens
MDSEYYSGDQSDDGGATPVQDERDSGSDGEDDVNEQHSGSDTGSVERHLSFRRPPRRVSVDWINR

SEQ ID NO: 1327 - DNA, 2006 bp, Homosapiens
acgccattttggccccagcggtgcttctaggaagtagaacgccggctcgcatgcctgcccgcccgccagcctgccgggtacggccttttccgccggggcttccaggtcaaagaattcgcctttgccgctaccgctttcttaccctccgcacccgttaagttctccggtcgggcggcagtctctgaacacttagccgcgccatccggggtcacaccgcctggaaggaggtgacgggggcggcgcggggcgcggacactccccgctgagagtccgcctgccatggactcggaatattacagcggcgaccagtcagatgatggtggtgctaccccagtacagaatgactccttccattcagacagccatatggacagaaaaaagtttcacagttctgatagtgaggaggaagaacacaaaaagcaaaaaatggacagtgatgaagatgaaaaagagggtgaggaggagaaagtagcgaagagaaaagctgctgtgctttctgatagtgaagatgaagagaaagcatcagcaaagaagagtcgtgttgtctctgatgcagatgactctgacagtgatgctgtatcagacaagtcaggcaaaagagagaagaccatagcatctgacagtgaggaagaagctgggaaagaattgtctgataagaaaaatgaagagaaggatctgtttgggagtgacagtgagtcaggcaatgaagaagaaaatcttattgcagacatatttggagaatctggtgatgaagaggaagaagaatttacaggttttaaccaagaagatctggaagaagaaaaaggtgaaacacaggtaaaagaagcagaagattcagattctgatgataacataaagagaggaaaacatatggactttctgtcagattttgagatgatgttgcagcgaaaaaagagcatgagtggcaagcgcagacggaaccgcgatggtggcacctttattagtgatgcagacgacgtcgtgagtgccatgatcgtcaagatgaatgaagctgctgaggaagacagacagttgaacaatcaaaaaaagccagcactgaaaaaattaactttactgcctgctgtagttatgcaccttaagaagcaggaccttaaagaaacattcattgacagtggtgtgatgtctgccatcaaagaatggctctcacctctaccagataggagtttgcctgcactcaagatccgggaggagctgctgaagatcctgcaagagctgcctagtgtgagccaggagaccctgaagcatagtgggattggacgagcagtgatgtatctctataaacaccccaaggagtcaaggtctaacaaggacatggcagggaaattaatcaatgagtggtctaggcctatatttggtcttacctcaaactacaaaggaatgacaagagaagaaagggagcagagagatctagaacagatgcctcaacgacgaagaatgaacagcactggtggtcagacacccagaagagacctggaaaaggtgctgacaggagaggagaaggctcttagacctggagatcctggattctgtgcccgtgcaagggtcccaatgccttcaaacaaggactatgttgtcaggcccaaatggaatgtggaaatggagtcatccaggtttcaggcgacctccaagaagggtatcagtcgactggataaacagatgagaaagttcacagatataaggaaaaaaagcagatctgcacacgcagtgaaaatcagcattgagggcaacaaaatgccattgtgaccttgcctggaatgtgtccccatctctactctaagaaatgcgcaatggactctttggagaaagaagatattttaaaacatttttagtgtgtctgtaaatggttcagcgtgtatcagatgttgtcataggactcacatttctctcagttatatttaaaaccgttgtgtactttgtacaaaggaatactagtcatacttctataaactttacacaataaaatttcattctggtttttggggggc

SEQ ID NO: 1328 - protein, 494 aa, Homosapiens
MDSEYYSGDQSDDGGATPVQNDSFHSDSHMDRKKFHSSDSEEEEHKKQKMDSDEDEKEGEEEKVAKRKAAVLSDSEDEEKASAKKSRVVSDADDSDSDAVSDKSGKREKTIASDSEEEAGKELSDKKNEEKDLFGSDSESGNEEENLIADIFGESGDEEEEEFTGFNQEDLEEEKGETQVKEAEDSDSDDNIKRGKHMDFLSDFEMMLQRKKSMSGKRRRNRDGGTFISDADDVVSAMIVKMNEAAEEDRQLNNQKKPALKKLTLLPAVVMHLKKQDLKETFIDSGVMSAIKEWLSPLPDRSLPALKIREELLKILQELPSVSQETLKHSGIGRAVMYLYKHPKESRSNKDMAGKLINEWSRPIFGLTSNYKGMTREEREQRDLEQMPQRRRMNSTGGQTPRRDLEKVLTGEEKALRPGDPGFCARARVPMPSNKDYVVRPKWNVEMESSRFQATSKKGISRLDKQMRKFTDIRKKSRSAHAVKISIEGNKMPL

SEQ ID NO: 1329 - DNA, 2983 bp, Homosapiens
agacgccattttggccccagcggtgcttctaggaagtagaacgccggctcgcatgcctgcccgcccgccagcctgccgggtacggccttttccgccggggcttccaggtcaaagaattcgcctttgccgctaccgctttcttaccctccgcacccgttaagttctccggtcgggcggcagtctctgaacacttagccgcgccatccggggtcacaccgcctggaaggaggtgacgggggcggcgcggggcgcggacactccccgctgagagtccgcctgccatggactcggaatattacagcggcgaccagtcagatgatggtggtgctaccccagtacaggatgaacgggattcagggtcagacggtgaggatgatgtaaatgagcaacactccggatcagacactggaagtgtagaacgtcattcagagaatgaaactagtgatcgagaagatggcctccccaaaggacatcatgtgacagactctgagaacgatgagcccttaaatcttaatgctagtgactctgaaagtgaggagcttcacaggcaaaaggacagcgactctgaatctgaggaacgtgcagagcctcctgcaagcgattctgaaaatgaggatgtcaatcagcatgggagcgactctgagagtgaagagaccaggaaattacctggtagtgactctgaaaatgaggaacttcttaatgggcatgcaagtgactcagaaaacgaagatgttgggaagcatcccgccagtgattctgagattgaggagctccagaagagtcctgctagtgactctgaaacagaagatgctctaaaacctcaaatcagtgactctgagagtgaggaacccccaaggcaccaagccagtgactccgaaaatgaggagcctcccaaacctcgaatgagtgattctgaaagtgaggagcttcctaaacctcaggtcagtgattcagaaagtgaggaacccccaaggcaccaggccagtgactctgaaaatgaggagcttcccaaacctcgtatcagtgactcagaaagtgaggaccctccgaggcaccaggccagtgactcagaaaatgaagagcttcccaaaccccgaatcagtgattcggaaagtgaggatcccccaaggaaccaggccagtgattcggaaaatgaggagctacccaaaccccgagtcagtgactctgagagtgaggggcctcagaaggggcctgccagtgactcagaaactgaggatgcgtccagacacaaacagaagccagagtcagatgatgacagcgacagggagaataagggagaggatacagaaatgcagaatgactccttccattcagacagccatatggacagaaaaaagtttcacagttctgatagtgaggaggaagaacacaaaaagcaaaaaatggacagtgatgaagatgaaaaagagggtgaggaggagaaagtagcgaagagaaaagctgctgtgctttctgatagtgaagatgaagagaaagcatcagcaaagaagagtcgtgttgtctctgatgcagatgactctgacagtgatgctgtatcagacaagtcaggcaaaagagagaagaccatagcatctgacagtgaggaagaagctgggaaagaattgtctgataagaaaaatgaagagaaggatctgtttgggagtgacagtgagtcaggcaatgaagaagaaaatcttattgcagacatatttggagaatctggtgatgaagaggaagaagaatttacaggttttaaccaagaagatctggaagaagaaaaaggtgaaacacaggtaaaagaagcagaagattcagattctgatgataacataaagagaggaaaacatatggactttctgtcagattttgagatgatgttgcagcgaaaaaagagcatgagtggcaagcgcagacggaaccgcgatggtggcacctttattagtgatgcagacgacgtcgtgagtgccatgatcgtcaagatgaatgaagctgctgaggaagacagacagttgaacaatcaaaaaaagccagcactgaaaaaattaactttactgcctgctgtagttatgcaccttaagaagcaggaccttaaagaaacattcattgacagtggtgtgatgtctgccatcaaagaatggctctcacctctaccagataggagtttgcctgcactcaagatccgggaggagctgctgaagatcctgcaagagctgcctagtgtgagccaggagaccctgaagcatagtgggattggacgagcagtgatgtatctctataaacaccccaaggagtcaaggtctaacaaggacatggcagggaaattaatcaatgagtggtctaggcctatatttggtcttacctcaaactacaaaggaatgacaagagaagaaagggagcagagagatctagaacagatgcctcaacgacgaagaatgaacagcactggtggtcagacacccagaagagacctggaaaaggtgctgacaggagaggagaaggctcttagacctggagatcctggattctgtgcccgtgcaagggtcccaatgccttcaaacaaggactatgttgtcaggcccaaatggaatgtggaaatggagtcatccaggtttcaggcgacctccaagaagggtatcagtcgactggataaacagatgagaaagttcacagatataaggaaaaaaagcagatctgcacacgcagtgaaaatcagcattgagggcaacaaaatgccattgtgaccttgcctggaatgtgtccccatctctactctaagaaatgcgcaatggactctttggagaaagaagatattttaaaacatttttagtgtgtctgtaaatggttcagcgtgtatcagatgttgtcataggactcacatttctctcagttatatttaaaaccgttgtgtactttgtacaaaggaatactagtcatacttctataaactttacacaataaaatttcattctggtttttggggggc

SEQ ID NO: 1330 - protein, 819 aa, Homosapiens
MDSEYYSGDQSDDGGATPVQDERDSGSDGEDDVNEQHSGSDTGSVERHSENETSDREDGLPKGHHVTDSENDEPLNLNASDSESEELHRQKDSDSESEERAEPPASDSENEDVNQHGSDSESEETRKLPGSDSENEELLNGHASDSENEDVGKHPASDSEIEELQKSPASDSETEDALKPQISDSESEEPPRHQASDSENEEPPKPRMSDSESEELPKPQVSDSESEEPPRHQASDSENEELPKPRISDSESEDPPRHQASDSENEELPKPRISDSESEDPPRNQASDSENEELPKPRVSDSESEGPQKGPASDSETEDASRHKQKPESDDDSDRENKGEDTEMQNDSFHSDSHMDRKKFHSSDSEEEEHKKQKMDSDEDEKEGEEEKVAKRKAAVLSDSEDEEKASAKKSRVVSDADDSDSDAVSDKSGKREKTIASDSEEEAGKELSDKKNEEKDLFGSDSESGNEEENLIADIFGESGDEEEEEFTGFNQEDLEEEKGETQVKEAEDSDSDDNIKRGKHMDFLSDFEMMLQRKKSMSGKRRRNRDGGTFISDADDVVSAMIVKMNEAAEEDRQLNNQKKPALKKLTLLPAVVMHLKKQDLKETFIDSGVMSAIKEWLSPLPDRSLPALKIREELLKILQELPSVSQETLKHSGIGRAVMYLYKHPKESRSNKDMAGKLINEWSRPIFGLTSNYKGMTREEREQRDLEQMPQRRRMNSTGGQTPRRDLEKVLTGEEKALRPGDPGFCARARVPMPSNKDYVVRPKWNVEMESSRFQATSKKGISRLDKQMRKFTDIRKKSRSAHAVKISIEGNKMPL

SEQ ID NO: 1331 - DNA, 1332 bp, Homosapiens
gtgacagactctgagaacgatgagcccttaaatcttaatgctagtgactctgaaagtgaggagcttcacaggcaaaaggacagcgactctgaatctgaggaacgtgcagagcctcctgcaagcgattctgaaaatgaggatgtcaatcagcatgggagcgactctgagagtgaagagaccaggaaattacctggtagtgactctgaaaatgaggaacttcttaatgggcatgcaagtgactcagaaaacgaagatgttgggaagcatcccgccagtgattctgagattgaggagctccagaagagtcctgctagtgactctgaaacagaagatgctctaaaacctcaaatcagtgactctgagagtgaggaacccccaaggcaccaagccagtgactccgaaaatgaggagcctcccaaacctcgaatgagtgattctgaaagtgaggagcttcctaaacctcaggtcagtgattcagaaagtgaggaacccccaaggcaccaggccagtgactctgaaaatgaggagcttcccaaacctcgtatcagtgactcagaaagtgaggaccctccgaggcaccaggccagtgactcagaaaatgaagagcttcccaaaccccgaatcagtgattcggaaagtgaggatcccccaaggaaccaggccagtgattcggaaaatgaggagctacccaaaccccgagtcagtgactctgagagtgaggggcctcagaaggggcctgccagtgactcagaaactgaggatgcgtccagacacaaacagaagccagagtcagatgatgacagcgacagggagaataagggagaggatacagaaatgcagaatgactccttccattcagacagccatatggacagaaaaaagtttcacagttctgatagtgaggaggaagaacacaaaaagcaaaaaatggacagtgatgaagatgaaaaagagggtgaggaggagaaagtagcgaagagaaaagctgctgtgctttctgatagtgaagatgaagagaaagcatcagcaaagaagagtcgtgttgtctctgatgcagatgactctgacagtgatgctgtatcagacaagtcaggcaaaagagagaagaccatagcatctgacagtgaggaagaagctgggaaagaattgtctgataagaaaaatgaagagaaggatctgtttgggagtgacagtgagtcaggcaatgaagaagaaaatcttattgcagacatatttggagaatctggtgatgaagaggaagaagaatttacagtaagtataagatggaaatatttcctccttgattgtgcttttttttggtgtttttatggc

SEQ ID NO: 1332 - protein, 301 aa, Homosapiens
MSDSESEELPKPQVSDSESEEPPRHQASDSENEELPKPRISDSESEDPPRHQASDSENEELPKPRISDSESEDPPRNQASDSENEELPKPRVSDSESEGPQKGPASDSETEDASRHKQKPESDDDSDRENKGEDTEMQNDSFHSDSHMDRKKFHSSDSEEEEHKKQKMDSDEDEKEGEEEKVAKRKAAVLSDSEDEEKASAKKSRVVSDADDSDSDAVSDKSGKREKTIASDSEEEAGKELSDKKNEEKDLFGSDSESGNEEENLIADIFGESGDEEEEEFTVSIRWKYFLLDCAFFWCFY

SEQ ID NO: 1333 - DNA, 534 bp, Homosapiens
accaggaaattacctggtagtgactctgaaaatgaggaacttcttaatgggcatgcaagtgactcagaaaacgaagatgttgggaagcatcccgccagtgattctgagattgaggagctccagaagagtcctgctagtgactctgaaacagaagatgctctaaaacctcaaatcagtgactctgagagtgaggaacccccaaggcaccaagccatgactctgagagtgaggggcctcagaaggggcctgccagtgactcagaaactgaggatgcgtccagacacaaacagaagccagagtcagatgatgacagcgacagggagaataagggagaggatacagaaatgcagaatgactccttccattcagacagccatatggacagaaaaaagtttcacagttctgatagtgaggaggaagaacacaaaaagcaaaaaatggacagtgatgaagatgaaaaagagggtgaggaggagaaagtagcgaagagaaaagctgctgtgctttctgatagtgaagatgaagagaaagcat

SEQ ID NO: 1334 - protein, 89 aa, Homosapiens
MTLRVRGLRRGLPVTQKLRMRPDTNRSQSQMMTATGRIRERIQKCRMTPSIQTAIWTEKSFTVLIVRRKNTKSKKWTVMKMKKRVRRRK

SEQ ID NO: 1335 - DNA, 805 bp, Homosapiens
aggaagtagaacgccggctcgcatgcctgcccgcccgccagcctgccgggtacggccttttccgccggggcttccaggtcaaagaattcgcctttgccgctaccgctttcttaccctccgcacccgttaagttctccggtcgggcggcagtctctgaacacttagccgcgccatccggggtcacaccgcctggaaggaggtgacgggggcggcgcggggcgcggacactccccgctgagagtccgcctgccatggactcggaatattacagcggcgaccagtcagatgatggtggtgctaccccagtacaggatgaacgggattcagggtcagacggtgaggatgatgtaaatgagcaacactccggatcagacactggaagtgtagaacgtcattcagagaatgaaactatgactcagaaaatgaagagcttcccaaaccccgaatcagtgattcggaaagtgaggatcccccaaggaaccaggccagtgattcggaaaatgaggagctacccaaaccccgagtcagtgactctgagagtgaggggcctcagaaggggcctgccagtgactcagaaactgaggatgcgtccagacacaaacagaagccagagtcagatgatgacagcgacagggagaataagggagaggatacagaaatgcagaatgactccttccattcagacagccatatggacagaaaaaagtttcacagttctgatagtgaggaggaagaacacaaaaagcaaaaaatggacagtgatgaagatgaaaaagagggtgaggaggagaaagtagcgaagaga

SEQ ID NO: 1336 - protein, 181 aa, Homosapiens
MDSEYYSGDQSDDGGATPVQDERDSGSDGEDDVNEQHSGSDTGSVERHSENETMTQKMKSFPNPESVIRKVRIPQGTRPVIRKMRSYPNPESVTLRVRGLRRGLPVTQKLRMRPDTNRSQSQMMTATGRIRERIQKCRMTPSIQTAIWTEKSFTVLIVRRKNTKSKKWTVMKMKKRVRRRK

SEQ ID NO: 1337 - DNA, 1134 bp, Homosapiens
ggtgcttctaggaagtagaacgccggctcgcatgcctgcccgcccgccagcctgccggatgatggtggtgctaccccagtacaggatgaacgggattcagggtcagacggtgaggatgatgtaaatgagcaacactccggatcagacactggaagtgtagaacgtcattcagagaatgaaactagtgatcgagaagatggcctccccaaaggacatcatgtgacagactctgagaacgatgagcccttaaatcttaatgctagtgactctgaaagtgaggagcttcacaggcaaaaggacagcgactctgaatctgaggaacgtgcagagcctcctgcaagcgattctgaaaatgaggatgtcaatcagcatgggagcgactctgagagtgaagagaccaggaaattacctggtagtgactctgaaaatgaggaacttcttaatgggcatgcaagtgactcagaaaacgaagatgttgggaagcatcccgccagtgattctgagattgaggagctccagaagagtcctgctagtgactctgaaacagaagatgctctaaaacctcaaatcagtgactctgagagtgaggaacccccaaggcaccaagccagtgactccgaaaatgaggagcctcccaaacctcgaatgagtgattctgaaagtgaggagcttcctaaacctcaggtcagtgattcagaaagtgaggaacccccaaggcaccaggccagtgactctgaaaatgaggagcttcccaaacctcgtatcagtgactcagaaagtgaggaccctccgaggcaccaggccagtgactcagaaaatgaagagcttcccaaaccccgaatcagtgattcggaaagtgaggatcccccaaggaaccaggccagtgattcggaaaatgaggagctacccaaaccccgagtcagtgactctgagagtgaggggcctcagaaggggcctgccagtgactcagaaactgaggatgcgtccagacacaaacagaagccagagtcagatgatgacagcgacagggagaataagggagaggatacagaaatgcagaatgactccttccattcagacagccatatggacagaaaaaagtttcacagttctgatagtgaggaggaagaacac

SEQ ID NO: 1338 - protein, 30 aa, Homosapiens
MPARPPACRMMVVLPQYRMNGIQGQTVRMM

SEQ ID NO: 1339 - DNA, 1391 bp, Homosapiens
agacgccattttggccccagcggtgcttctaggaagtagaacgccggctcgcatgcctgcccgcccgccagcctgccgggtacggccttttccgccggggcttccaggtcaaagaattcgcctttgccgctaccgctttcttaccctccgcacccgttaagttctccggtcgggcggcagtctctgaacacttagccgcgccatccggggtcacaccgcctggaaggaggtgacgggggcggcgcggggcgcggacactccccgctgagagtccgcctgccatggactcggaatattacagcggcgaccagtcagatgatggtggtgctaccccagtacaggatgaacgggattcagggtcagacggtgaggatgatgtaaatgagcaacactccggatcagacactggaagtgtagaacgtcattcagagaatgaaactagtgatcgagaagatggcctccccaaaggacatcatgtgacagactctgagaacgatgagcccttaaatcttaatgctagtgactctgaaagtgaggagcttcacaggcaaaaggacagcgactctgaatctgaggaacgtgcagagcctcctgcaagcgattctgaaaatgaggatgtcaatcagcatgggagcgactctgagagtgaagagaccaggaaattacctggtagtgactctgaaaatgaggaacttcttaatgggcatgcaagtgactcagaaaacgaagatgttgggaagcatcccgccagtgattctgagattgaggagctccagaagagtcctgctagtgactctgaaacagaagatgctctaaaacctcaaatcagtgactctgagagtgaggaacccccaaggcaccaagccagtgactccgaaaatgaggagcctcccaaacctcgaatgagtgattctgaaagtgaggagcttcctaaacctcaggtcagtgattcagaaagtgaggaacccccaaggcaccaggccagtgactctgaaaatgaggagcttcccaaacctcgtatcagtgactcagaaagtgaggaccctccgaggcaccaggccagtgactcagaaaatgaagagcttcccaaaccccgaatcagtgattcggaaagtgaggatcccccaaggaaccaggccagtgattcggaaaatgaggagctacccaaaccccgagtcagtgactctgagagtgaggggcctcagaaggggcctgccagtgactcagaaactgaggatgcgtccagacacaaacagaagccagagtcagatgatgacagcgacagggagaataagggagaggatacagaaatgcagaatgactccttccattcagacagccatatggacagaaaaaagtttcacagttctgatagtgaggaggaagaacac

SEQ ID NO: 1340 - protein, 369 aa, Homosapiens
MDSEYYSGDQSDDGGATPVQDERDSGSDGEDDVNEQHSGSDTGSVERHSENETSDREDGLPKGHHVTDSENDEPLNLNASDSESEELHRQKDSDSESEERAEPPASDSENEDVNQHGSDSESEETRKLPGSDSENEELLNGHASDSENEDVGKHPASDSEIEELQKSPASDSETEDALKPQISDSESEEPPRHQASDSENEEPPKPRMSDSESEELPKPQVSDSESEEPPRHQASDSENEELPKPRISDSESEDPPRHQASDSENEELPKPRISDSESEDPPRNQASDSENEELPKPRVSDSESEGPQKGPASDSETEDASRHKQKPESDDDSDRENKGEDTEMQNDSFHSDSHMDRKKFHSSDSEEEE

SEQ ID NO: 1341 - DNA, 1231 bp, Homosapiens
gaatgacggaaaagtcatttgagcaggtcttcatttttcggaagagtatctcaaaagctcttcaaacaaggcacggacacagaatctaggaaatgataaagaatcaatgataacgttattaccacgggggtcagaccaggatccacccgaggaagatgatggtggtgctaccccagtacaggatgaacgggattcagggtcagacggtgaggatgatgtaaatgagcaacactccggatcagacactggaagtgtagaacgtcattcagagaatgaaactagtgatcgagaagatggcctccccaaaggacatcatgtgacagactctgagaacgatgagcccttaaatcttaatgctagtgactctgaaagtgaggagcttcacaggcaaaaggacagcgactctgaatctgaggaacgtgcagagcctcctgcaagcgattctgaaaatgaggatgtcaatcagcatgggagcgactctgagagtgaagagaccaggaaattacctggtagtgactctgaaaatgaggaacttcttaatgggcatgcaagtgactcagaaaacgaagatgttgggaagcatcccgccagtgattctgagattgaggagctccagaagagtcctgctagtgactctgaaacagaagatgctctaaaacctcaaatcagtgactctgagagtgaggaacccccaaggcaccaagccagtgactccgaaaatgaggagcctcccaaacctcgaatgagtgattctgaaagtgaggagcttcctaaacctcaggtcagtgattcagaaagtgaggaacccccaaggcaccaggccagtgactctgaaaatgaggagcttcccaaacctcgtatcagtgactcagaaagtgaggaccctccgaggcaccaggccagtgactcagaaaatgaagagcttcccaaaccccgaatcagtgattcggaaagtgaggatcccccaaggaaccaggccagtgattcggaaaatgaggagctacccaaaccccgagtcagtgactctgagagtgaggggcctcagaaggggcctgccagtgactcagaaactgaggatgcgtccagacacaaacagaagccagagtcagatgatgacagcgacagggagaataagggagaggatacagaaatgcagaatgactccttccattcagacagccatatggacagaaaaaagtttcacagttctgatagtgaggaggaagaacac

SEQ ID NO: 1342 - protein, 374 aa, Homosapiens
MITLLPRGSDQDPPEEDDGGATPVQDERDSGSDGEDDVNEQHSGSDTGSVERHSENETSDREDGLPKGHHVTDSENDEPLNLNASDSESEELHRQKDSDSESEERAEPPASDSENEDVNQHGSDSESEETRKLPGSDSENEELLNGHASDSENEDVGKHPASDSEIEELQKSPASDSETEDALKPQISDSESEEPPRHQASDSENEEPPKPRMSDSESEELPKPQVSDSESEEPPRHQASDSENEELPKPRISDSESEDPPRHQASDSENEELPKPRISDSESEDPPRNQASDSENEELPKPRVSDSESEGPQKGPASDSETEDASRHKQKPESDDDSDRENKGEDTEMQNDSFHSDSHMDRKKFHSSDSEEEE

SEQ ID NO: 1343 - DNA, 3596 bp, Homosapiens
gggagtcagccagacccccatcctgacaaggcttgtggaactgctgactcaggatgtcggggttcaggctgggtgaccacgtgtggctggagcctccctccacccacaagaccggcgtggccatcgggggcatcatcaaagaggcaaagccaggcaaagtcttggttgaagatgacgagggcaaggaacactggatccgagcagaggactttggtgtcctcagtcccatgcaccccaactcagtccagggtgtggacgacatgatccgcctgggggacctgaacgaggcaggcatggtgcacaacctcctgatccgctaccagcagcacaagatctatacatacacaggctccatcctggtggccgtcaacccgttccaggtgctgccgctctacaccctggagcaggtacagctctactacagccgccatatgggcgagctgcccccgcatgtctttgccatcgccaacaactgctacttcagcatgaagaggaacaagagggaccagtgctgcatcatcagcggcgagtctggggctggcaagacggagaccaccaagctcatcctgcagttcctggccaccatcagtggccagcattcgtggattgagcagcaggtcctggaagccaaccccatcctggaggcctttggaaatgccaagacaatccgcaacgacaactcaagccgctttgggaagtacattgacatctactttaaccccagcggggtgatcgagggcgcgcgcatcgagcaatttctcctggagaagtcccgggtctgccggcaggctcccgaggagcggaactaccatatcttctactgcatgctcatgggggtgagtgctgaggacaagcagctgctgagcctgggcacgccctccgagtaccactacctgaccatggggaactgcacttcctgtgaggggctcaacgacgccaaggactacgcccacatccgctcggccatgaagatcctccagttctccgactccgagagctgggacgtcatcaagctgctggctgccattctccacctggggaatgtggggttcatggcttcggtcttcgagaacctggacgcctcagacgtgatggagacgcccgcctttcccaccgtgatgaagttactggaggtgcagcaccaggagctccgggactgtctgatcaagcacaccatcctcatccgaggggaatttgtcaccaggtccctgaacattgcccaggctgctgaccggagggacgcctttgtcaagggcatctatgggcacctcttcctgtggattgtcaagaagatcaatgccgccatcttcacaccaccagcccaggaccccaaaaatgtgcggagggccatcggcctcctggacatatttggctttgaaaatttcgagaacaatagcttcgagcagctctgcatcaacttcgccaacgagcacctgcagcagttctttgtgcagcacgtgttcaccatggagcaagaggagtaccgctcggagaacatctcctgggactatatccactacaccgacaatcggcccaccctggacctgctggccctcaagcccatgagcatcatctccctcctggacgaagaaagccgcttcccgcaggggacagatctcaccatgctgcaaaagctgaacagcgtccatgccaacaacaaggccttcctacagcccaagaacatccacgatgccagatttggcattgcccattttgccggcgaggtgtactaccaagcagaaggcttcctggagaagaaccgagacgtgctgagcacagatatcctcaccctggtttactcctccaaaaacaagtttctgagggagatattcaacttggagttagcagagaccaagctgggccatgggaccatccgccaggcaaaggcaggaaaccatctcttcaagtctgcagactcaaataaacggccctccaccttaggaagccagttcaaacagtctctggaccagctgatgaaaatcctgaccaactgccagccttacttcatccgctgcatcaaacctaatgagtacaagaagccgctgctgttcgaccgggagctgtgcctgcggcagctgcgatactcgggcatgatggagaccgtgcacatccgcaagtcgggcttccccatccgctacacgttcgaggagttctcgcagaggttcggcgtgttgctgcccaacgccatgcggatgcagctgcaaggcaagctccgccagatgaccctgggcatcactgacgtgtggctgcggacagacaaagactggaaagcggggaagacaaaaattttcctgagggatcatcaggacactctgctggaggtacagagaagccaggtgctagacagagcggcgctcagcatccagaaagtccttcggggctacagatacaggaaggagttcctgaggcagaggcgggcagctgtgaccctgcaggcctggtggagaggctactgcaacaggaggaatttcaagctgatcctcgtgggctttgagcgcctgcaggctattgcccggagccagccgctggcgaggcagtaccaggccatgcggcagaggacagtccagctgcaggccctgtgcaggggatacctggtgcgccagcaagtccaggccaagaggagggcagtggtggtcattcaggcccatgccaggggcatggctgcccggcgcaacttccagcaaaggaaggccaatgcgccgctggtcatcccggccgaggggcagaaaagccaaggcgctctccctgccaagaagcgcagatccatctacgacaccgtcactgacacggagatggtggagaaggtgttcggcttcctccctgccatgattgggggccaggagggccaggcctcgccgcactttgaggatctggaatcgaagacccagaagctgcttgaggttgacctggacacagtccccatggcggaggagcctgaggaggatgtggatggcctggccgagtacaccttccccaagtttgctgtgacttacttccagaaatcagccagccacacacacatccggcggcccctccgatacccgttgctttaccacgaagatgacactgactgcttggccgccctggtcatatggaacgtcatcctgaggttcatgggtgatctcccagagccagtgctgtatgccaggagcagccagcagggcagctcagtgatgcggcagatccatgacacgctgggcagggagcacggtgcccaggttccacagcacagtagatctgcacaggcaagtggggggcagcagcgggcagaggagggcgacacctaccaggtggccagccagctgaacattggagaggaggcattggagcctgatggccttggtgcagaccggcccatgtccaacctggagaaggtgcacttcatcgtgggctacgccatcctgcggcccagcctcaggatgggctcagaattctccaggaacaagcaggcgctaatgtctttgttcatggaggtccctaactccagagtacaaaagtcaagcactagcaagaactcaatcaacaggctctattctagtaccctgggaggtggcaaatgggcttctggagctcagcaggcatcagatggggagtga

SEQ ID NO: 1344 - protein, 1180 aa, Homosapiens
MSGFRLGDHVWLEPPSTHKTGVAIGGIIKEAKPGKVLVEDDEGKEHWIRAEDFGVLSPMHPNSVQGVDDMIRLGDLNEAGMVHNLLIRYQQHKIYTYTGSILVAVNPFQVLPLYTLEQVQLYYSRHMGELPPHVFAIANNCYFSMKRNKRDQCCIISGESGAGKTETTKLILQFLATISGQHSWIEQQVLEANPILEAFGNAKTIRNDNSSRFGKYIDIYFNPSGVIEGARIEQFLLEKSRVCRQAPEERNYHIFYCMLMGVSAEDKQLLSLGTPSEYHYLTMGNCTSCEGLNDAKDYAHIRSAMKILQFSDSESWDVIKLLAAILHLGNVGFMASVFENLDASDVMETPAFPTVMKLLEVQHQELRDCLIKHTILIRGEFVTRSLNIAQAADRRDAFVKGIYGHLFLWIVKKINAAIFTPPAQDPKNVRRAIGLLDIFGFENFENNSFEQLCINFANEHLQQFFVQHVFTMEQEEYRSENISWDYIHYTDNRPTLDLLALKPMSIISLLDEESRFPQGTDLTMLQKLNSVHANNKAFLQPKNIHDARFGIAHFAGEVYYQAEGFLEKNRDVLSTDILTLVYSSKNKFLREIFNLELAETKLGHGTIRQAKAGNHLFKSADSNKRPSTLGSQFKQSLDQLMKILTNCQPYFIRCIKPNEYKKPLLFDRELCLRQLRYSGMMETVHIRKSGFPIRYTFEEFSQRFGVLLPNAMRMQLQGKLRQMTLGITDVWLRTDKDWKAGKTKIFLRDHQDTLLEVQRSQVLDRAALSIQKVLRGYRYRKEFLRQRRAAVTLQAWWRGYCNRRNFKLILVGFERLQAIARSQPLARQYQAMRQRTVQLQALCRGYLVRQQVQAKRRAVVVIQAHARGMAARRNFQQRKANAPLVIPAEGQKSQGALPAKKRRSIYDTVTDTEMVEKVFGFLPAMIGGQEGQASPHFEDLESKTQKLLEVDLDTVPMAEEPEEDVDGLAEYTFPKFAVTYFQKSASHTHIRRPLRYPLLYHEDDTDCLAALVIWNVILRFMGDLPEPVLYARSSQQGSSVMRQIHDTLGREHGAQVPQHSRSAQASGGQQRAEEGDTYQVASQLNIGEEALEPDGLGADRPMSNLEKVHFIVGYAILRPSLRMGSEFSRNKQALMSLFMEVPNSRVQKSSTSKNSINRLYSSTLGGGKWASGAQQASDGE

SEQ ID NO: 1345 - DNA, 2116 bp, Homosapiens
acgcaatggaattctactcagcattaaaaaggaatgaatcactgatgcaggcagcaacaaggaagaatcccaaatagccaaggccacagcctagaaacttctccttggaggctaagcctgcagcacccagctgagcacagaggacaatctgaggagctaagtgaccggctggacactccattcacagaagaaaggccatgtgaagataagatgagaagacagccatctaccagccaggaagagaggcttcaccagacaccaaccctaaaggcaccttgaccttggacttccagcttccaggactgtgagaacgcaaatgtctgtggtttaggccatccagtctgtgataccttgttatggcagtccaagccccagtgaagtcagacagtccggctgggttctaatctctactctatattacaggagttatacggccttgggaaagtcacttaactgctctgaaccttaactttcttatctgttgaaagggcccgcttcacagggctgctgtgaagatggaatgccctatggcagggaccccgcatagtgtccagcacagagggcaccacagagggctcaacaaccacatgggccctctgaaagacttattcattaaaaacatgaccactctgcactttgggaggccgaggcgggtgggcagatcacctgaggtcaggagttcgagacaagcttggccaacgtggtgaaaccctgtctctactaaaaatacaaaaattaactgggcatggtggtgggtgcctgtagtcccagctactcaggaggctgaggtgggaggattgcttgaacctgggaggccgaggttgcagtgagccgagattgcgcactccagcctgggtgacagagtaagactctgtctaaaaaaaaaaaaattactctcctctcaaagacttacaatctctgaagacagagcaggcctgcaattgtaattgtgagtaatagggccccaagaggtgtttttctaaactctgcttgcagttagtcgcattcccagagggacatttggcgttgatgcatcccgtggcatattcctttgtgaaatgtttggctttgtcttaaaaccacatcatgctccaaagtggagccacgctctcatgtttgcaacttagttaccagaagcgctcacaacctgaccttttagaccatgtgtgtcctttctccaaactaaaacagcctaagctctattctgtaactgaaaacaagaagccaatcttggctgtccattctgtgagtcagatgctgccaggcttagtggcagcaccaggggccgctgcgtagtgaaggtcctcctcgcagcagtgtgctccagcagccaggaacgatgtcctgtgtggctttgcactcaggaggagaacattcggggcattttcttatcaaagagcacttcgcagcactgtcctgctctcctggactctgtagggcatggggcaagggtggaaatgtggagggcagggaaggatgcacaggctggtttggggcctctgctctctgggctcaccagcctctgagctctccaccctgcactccccgccgccaggcttctcaaggcctgtccctgcctcccagggcagggcagttccccagggtctgttgatttgacagtaaatgcaaaactcctctgctttcttcctgtggaggagccatctcttggccaccggaacacaggaatatttgttgagtgaagggaacacgatgcagagtccaaaggggtgattcagacctgggtttcagtcctacccatgcccacagttccccagttccctgttttctctgggggagctcccggcaactgccgcaatgaggcaactgggaaatccctttgttggctgggcaaggtggctcacacccagcactttgggaggccaaggctagtggattgctttgagctcaggaattcgagaccagcctgggcaacatggcaaaaccctctccctacaaaaatacaaaaattagctgggtgtggtggcatgcacctgtggtcccagctacttgggagactgaggctggaagatcgcttgaacccaggaggcagaggtcaccgtgagctgagatcgtgccactggactccagcctgggtgacagagtgagaccctgtctg

SEQ ID NO: 1346 - protein, 115 aa, Homosapiens
MPTVPQFPVFSGGAPGNCRNEATGKSLCWLGKVAHTQHFGRPRLVDCFELRNSRPAWATWQNPLPTKIQKLAGCGGMHLWSQLLGRLRLEDRLNPGGRGHRELRSCHWTPAWVTE

SEQ ID NO: 1347 - DNA, 1955 bp, Homosapiens
agataaccaagttaaatctagctcaaatgaaccttttagtttttgaggagggcaataatagtagtgaacaccaaaacgaaaggggatctgggcttcaaaatactaacagttctatttcctagccagtcgtctcccgggctggatgtgccgccgtcccagatctcagcggcggccgcagagcgcagaggtagggagagaaaaaggaggcgtcggcggggcgcgagcgaccagggcgctaagtgccgcctcacagtcctgccagagacaggagacgccgggccgcccgcgccgtctgtcccaagagctcctcctggacatccgcttgactctccgtcgtctccaattggccgtcggggaacggaagccgaagcaaactagtgaacccggaagtgcttcgcggcggaggcccgggcaactcttttgaatggaatcgggctgattcatcgccggtttgcagacagagccgcgtcgggtgtgcgccgctgctgctgttgcctctgtcttcgcgtcaccacagaggcaagacaagggtccatatcgcggcatccggctcccgcccgtcttcaggagagaaagaaaaaataaaatatacttggggaagttgtacctgccagaattagcaagagctttctttaagaagacatttgtcaaactcaacaaattgaaggttaacaccttaagagttgtagttactgaccagaaatatggacagacttcttagacttggaggaggtatgcctggactgggccaggggccacctacagatgctcctgcagtggacacagcagaacaagtctatatctcttccctggcactgttaaaaatgttaaaacatggccgtgctggagttccaatggaagttatgggtttgatgcttggagaatttgttgatgattataccgtcagagtgattgatgtgtttgctatgccacagtcaggaacaggtgtcagtgtggaggcagttgatccagtgttccaagctaaaatgttggatatgttgaagcagacaggaaggccggagatggttgttggttggtatcacagtcaccctggctttggttgttggctttctggtgtggatatcaacactcagcagagctttgaagccttgtcggagagagctgtggcagtggttgtggatcccattcagagtgtaaaaggaaaggttgttattgatgccttcagattgatcaatgctaatatgatggtcttaggacatgaaccaagacaaacaacttcgaatctgggtcacttaaacaagccatctatccaggcattaattcatggactaaacagacattattactccattactattaactatcggaaaaatgaactggaacagaagatgttgctaaatttgcataagaagagttggatggaaggtttgacacttcaggactacagtgaacattgtaaacacaatgaatcagtggtaaaagagatgttggaattagccaagaattacaataaggctgtagaagaagaagataagatgacacctgaacagctggcaataaagaatgttggcaagcaggaccccaaacgtcatttggaggaacatgtggatgtacttatgacctcaaatattgtccagtgtttagcagctatgttggatactgtcgtatttaaataaagcaacgaaaaacgctattaatgatgccttcagtgtatattcctctgttgttcctaatgctcaaaatcaagggacctctgaaggtgtacttggctaaatgtaagacatctggcatcatttgcagcactgtaacaccttcagtctcagttgtgcaattacttctgtttctttagtcagggtctttgcagattctaaagttatacatgaatacatcaaagtggacaaattttgttaagatcccatttaatatttgaaaaaatcagtagcacaaatatattttgattgtcacttacaaaataaaatacatttacagtctat

SEQ ID NO: 1348 - protein, 310 aa, Homosapiens; identical to SEQ ID NO: 90

SEQ ID NO: 1349 - DNA, 659 bp, Homosapiens
ctgggattacaggaatgagccaccgtgcctggcctaagagttatttttgatcagaggcatgatatgcttagaacctgactttagaaacatgatttcacaacagtatagaaggaacactgtaagagaagatttgaaatggagagtgtgtttaagaggagcttgctactacccaaacaaaaggctgtagaagaagaagataagatgacacctgaacagctggcaataaagaatgttggcaagcaggaccccaaacgtcatttggaggaacatgtggatgtacttatgacctcaaatattgtccagtgtttagcagctatgttggatactgtcgtatttaaataaagcaacgaaaaacgctattaatgatgccttcagtgtatattcctctgttgttcctaatgctcaaaatcaagggacctctgaaggtgtacttggctaaatgtaagacatctggcatcatttgcagcactgtaacaccttcagtctcagttgtgcaattacttctgtttctttagtcagggtctttgcagattctaaagttatacatgaatacatcaaagtggacaaattttgttaagatcccatttaatatttgaaaaaatcagtagcacaaatatattttgattgtcacttacaaaataaaatacatttacagtcta

SEQ ID NO: 1350 - protein, 68 aa, Homosapiens
MESVFKRSLLLPKQKAVEEEDKMTPEQLAIKNVGKQDPKRHLEEHVDVLMTSNIVQCLAAMLDTVVFK

SEQ ID NO: 1351 - DNA, 1788 bp, Homosapiens
attagacacttgccatctttgctcattttcaagttctctgtttacaaaactattaagaaggtgtgaaatgcagccaaacttcccagtttatggggaatgtctgatgattacatttcctacatgttcattgttcgcacatgaagaaatttggcagctgtgagattataaagttcagagtatccaaatctaaccctcactgggattttggttccctgctttctgccaccaccatctcacctccttttgtaactctttttgtggtaaatgctgtgttggcatttcttaaggttagtgatccttaaattttcttgtttttttttccatttatcagatgctatgaataaatcatagattaaaagttcacctgatacagagtcttgtcttcaggccataacatacccaaactgttaagatttcttacgtgtgaaattctcaataaagaggttttatattggtgccattattgggagaggagggcagtagtggtagccaatctaaatgttataattatttcagaattactctgccagaaagttatgatcatacatagaagagtttgtagctaactttgaaagtagtggaaagtggttttcatgtattgtttgggttaatttaattttgattatatttggtttttagttcaggtaatttttttgttgaaaacttcaaatgacaatttcttcatggttactaaagatcactcatgtggagtagtttcagatttttttctgaatacatgtattacttttagagatgtaaagatgtgaaattactaagagagaaacccatgtgatttgtttagtggatcaaaagtcggtagctcctttgatcctaagtgccactgatagttaaatagatactgaagctatgggcaggctggattgataagaaaaaaggagacagagaaatgggaaattgggaaagaactgtgcaaataggaaaaggagagagcaacagaacagaattagtaccacagtgccgtaagtgccacctcaggtacttccatctcccatctcctgaagaattcagtaacagtttgcaaatggtcaacacaatcatttagtgatcctgtttgatattttcaatactttctgtgtatttcttgtctgttttcaaaatgatgatgctgatagtttttattgccctgaaggttattctgaagtttagcataattttatttgttcagtaaattatttgaataaaagttgtatgaatgaaaattctggtcatcattatttttggtgattatcctgcagtgggaatagaggatttataattttaaactctgtcctttgtgtttcattcacaggctgtagaagaagaagataagatgacacctgaacagctggcaataaagaatgttggcaagcaggaccccaaacgtcatttggaggaacatgtggatgtacttatgacctcaaatattgtccagtgtttagcagctatgttggatactgtcgtatttaaataaagcaacgaaaaacgctattaatgatgccttcagtgtatattcctctgttgttcctaatgctcaaaatcaagggacctctgaaggtgtacttggctaaatgtaagacatctggcatcatttgcagcactgtaacaccttcagtctcagttgtgcaattacttctgtttctttagtcagggtctttgcagattctaaagttatacatgaatacatcaaagtggacaaattttgttaagatcccatttaatatttgaaaaaatcagtagcacaaatatattttgattgtcacttacaaaataaaatacatttacagtcta

SEQ ID NO: 1352 - protein, 46 aa, Homosapiens
MTPEQLAIKNVGKQDPKRHLEEHVDVLMTSNIVQCLAAMLDTVVFK

SEQ ID NO: 1353 - DNA, 3289 bp, Homosapiens
caggtgattatcctaattaatgtctatctaattaaattactgtcagcagctaaccaatggcaggagccgtttcatcggctgcacaagcagcaagatcaaaagtgagccttttctgattgctgcatagtgtcaattggccaatctcttctcccagggaaaaaaaaaagtaaatcaaacctttgagaagcatttgctggttgaagtgctttctgtctagtgagggggtctgtggatttctagtttatgataaataggactttaaaaaccagggacgggagggcgagtgttcaggttctagagctatgcagctggagcactgcctttctccttctatcatgctctccaagaaatttctcaatgtgagcagcagctacccacattcaggcggatccgagcttgtcttgcacgatcatcccattatctcgaccactgacaacctggagagaagttcacctttgaaaaaaattaccagggggatgacgaatcagtcagatacagacaattttcctgactccaaggactcaccaggggacgtccagagaagtaaactctctcctgtcttggacggggtctctgagcttcgtcacagtttcgatggctctgctgcagatcgctacctcctctctcagtccagccagccacagtctgcggccactgctcccagtgccatgttcccgtaccccggccagcacggaccggcgcaccccgccttctccatcggcagccctagccgctacatggcccaccacccggtcatcaccaacggagcctacaacagcctcctgtccaactcctcgccgcagggataccccacggccggctacccctacccacagcagtacggccactcctaccaaggagctccgttctaccagttctcctccacccagccggggctggtgcccggcaaagcacaggtgtacctgtgcaacaggcccctttggctgaaatttcaccggcaccaaacggagatgatcatcaccaaacagggaaggcgcatgtttccttttttaagttttaacatttctggtctcgatcccacggctcattacaatatttttgtggatgtgattttggcggatcccaatcactggaggtttcaaggaggcaaatgggttccttgcggcaaagcggacaccaatgtgcaaggaaatcgggtctatatgcatccggattcccccaacactggggctcactggatgcgccaagaaatctcttttggaaaattaaaacttacgaacaacaaaggagcttcaaataacaatgggcagatggtggttttacagtccttgcacaagtaccagccccgcctgcatgtggtggaagtgaacgaggacggcacggaggacactagccagcccggccgcgtgcagacgttcactttccctgagactcagttcatcgccgtcaccgcctaccagaacacggatattacacaactgaaaatagatcacaacccttttgcaaaaggatttcgggataattatgacacgatctacaccggctgtgacatggaccgcctgaccccctcgcccaacgactcgccgcgctcgcagatcgtgcccggggcccgctacgccatggccggctctttcctgcaggaccagttcgtgagcaactacgccaaggcccgcttccacccgggcgcgggcgcgggccccgggccgggtacggaccgcagcgtgccgcacaccaacgggctgctgtcgccgcagcaggccgaggacccgggcgcgccctcgccgcaacgctggtttgtgacgccggccaacaaccggctggacttcgcggcctcggcctatgacacggccacggacttcgcgggcaacgcggccacgctgctctcttacgcggcggcgggcgtgaaggcgctgccgctgcaggctgcaggctgcactggccgcccgctcggctactacgccgacccgtcgggctggggcgcccgcagtcccccgcagtactgcggcaccaagtcgggctcggtgctgccctgctggcccaacagcgccgcggccgccgcgcgcatggccggcgccaatccctacctgggcgaggaggccgagggcctggccgccgagcgctcgccgctgccgcccggcgccgccgaggacgccaagcccaaggacctgtccgattccagctggatcgagacgccctcctcgatcaagtccatcgactccagcgactcggggatttacgagcaggccaagcggaggcggatctcgccggccgacacgcccgtgtccgagagttcgtccccgctcaagagcgaggtgctggcccagcgggactgcgagaagaactgcgccaaggacattagcggctactatggcttctactcgcacagctaggccgcccctgcccgcccggccccgccgcggcccggacccccagccagcccctcacagctcttccccagctccgcctccccacactcctccttgcgcacccactcattttatttgaccctcgatggccgtctgcagcgaataagtgcaggtctccgagcgtgattttaaccttttttgcacagcagtctctgcaattagctcaccgaccttcaactttgctgtaaaccttttggttttcctacttactcttcttctgtggagttatcctcctacaattcccctccccctcgtctttctcttacctcctacttctctttcttgtaatgaaactcttcacctttaggagacctgggcagtcctgtcaggcagcagcgattccgacccgccaagtctcggcctccacattaaccataggatgttgactctagaacctggacccacccagcgcgtcctttcttatccccgagtggatggatggatggatggatggtagggatgttaataattttagtggaacaaagcctgtgaaatgattgtacatagtgttaatttattgtaacgaatggctagtttttattctcgtcaaggcacaaaaccagttcatgcttaacctttttttcctttcctttctttgcttttctttctctcctctcatactttctcttctctctcttttaattttcttgtgagataatattctaagaggctctagaaacatgaaatactcagtagtgatgggtttcccacttctcctcaatccgttgcatgaaataattactatgtgccctaatgcacacaaatagctaaggagaatccacccaaacacctttaaaggataggtgtctgttcataggcaagtcgattaagtggcatgatgcctgcaaagcaaagtcaactggagttgtatgttccccccaccttctaaatagaatagctcg

SEQ ID NO: 1354 - protein, 682 aa, Homosapiens; identical to SEQ ID NO: 92

SEQ ID NO: 1355 - DNA, 403 bp, Homosapiens
gcaagatacagaccatcaagggaacgacttccctcttctcttgctctctctcgtcaagtgtactggggtactgagagaggggcacaagcaaggactttcatcccacttctccaacatatgtgtgcacattaaggcagatttacctagggagtaagatgctctttgcccagtgggcctttcctctgcggtcagtttatgagtgaaatttctaagcaagattgtttcagaaacccctaggaaaaagccgcgcacgcagtaatcatgaaagactggccttcacccgtgttctggaacccgaggtttgctgctggaagcctccaaagtacttagtgtctattgtttcccctgtgtgaaactttcactcccacctctactaatacaaacaagaattactactctgaaa

SEQ ID NO: 1356 - protein, 46 aa, Homosapiens
ARLFQKPLGKSRARSNHERLAFTRVLEPEVCCWKPPKYLVSIVSPV

SEQ ID NO: 1357 - DNA, 402 bp, Homosapiens
gcccgttggtgtgcggcacgctgcggtccgtacccggcccggggcccgcgcccgcgcccgggtggaagcgggccttggcgtagttgctcacgaactggtcctgcaggaaagagccggccatggcgtagcgggccccgggcacgatctgcgagcgcggcgagtcgttgggcgagggggtcaggcggtccatgtcacagccggtgtagatcctgcgggattgtttcagaaacccctaggaaaaagccgcgcacgcagtaatcatgaaagactggccttcacccgtgttctggaacccgaggtttgctgctggaagcctccaaagtacttagtgtctattgtttcccctgtgtgaaactttcactcccacctctactaatacaaacaagaattactactctgaaa

SEQ ID NO: 1358 - protein, 116 aa, Homosapiens
PVGVRHAAVRTRPGARARARVEAGLGVVAHELVLQERAGHGVAGPGHDLRARRVVGRGGQAVHVTAGVDPAGLFQKPLGKSRARSNHERLAFTRVLEPEVCCWKPPKYLVSIVSPV

SEQ ID NO: 1359 - DNA, 5572 bp, Homosapiens
gcaaaacctggccagcagcccgagtgagtaggagccatgtgactctggtgagttggagtgtgcaattgcctcctgcttcagagctacctgatccgaatactaagcagagcgagtgccgggctgagtgtaagacactgaagacactgcagagcaaggtgcttattccagaggcgttacaaaacatggagattaaagaccagggagcccaaatggagccgctgctgcctacgagaaatgatgaagaagcagttgtggatagaggtggaactcgttctattctcaaaacacactttgagaaagaagatttagaaggtcatcgaacactatttattggagtacatgtgcccttgggaggaagaaaaagccatcgacgtcacaggcatcgtggtcataaacacagaaagagagacagagaaagagattcaggattagaggatggaagggagtcaccttcttttgacaccccatcacagagggtacagtttattcttggaaccgaggatgatgacgaggaacacattcctcatgaccttttcacagaactggatgagatttgttggcgtgaaggtgaggacgctgagtggcgagaaacagccaggtggttgaagtttgaagaagatgtggaagatggaggagaaaggtggagcaagccttatgtggctactctttcattgcacagcttgtttgaattgagaagttgtattctgaatggaactgtgttgctggacatgcatgccaacactttagaagaaattgcagatatggttcttgaccaacaagtgagctcaggtcagctgaatgaagatgtacgccatagggtccatgaggcattgatgaaacagcatcatcatcagaatcagaaaaaactcaccaacaggattcccattgttcgttcctttgctgatattggcaagaaacagtcagaaccaaattccatggacaaaaatgcaggtcaggttgtttctcctcagtctgctccagcctgtgttgaaaataaaaatgatgttagcagagaaaacagcactgttgactttagcaaggttgatctgcattttatgaaaaagattcctccaggtgctgaagcatcgaacatcttagtgggagaactggagttcttggatcgaacagtagttgcgtttgtcaggttgtctccagctgtattgcttcaaggactggctgaagtcccaatcccaaccagatttttgttcattcttctgggacccctgggaaagggtcaacagtaccatgagattggcagatcaattgcaaccctaatgacagatgaggtatttcatgatgttgcctataaagctaaagatcgtaatgacttggtatcaggaattgatgagtttctggatcaggttactgttctccctcctggagaatgggatccaagcattcgaatagagcctcccaaaaatgttccttcccaggagaagaggaagattcctgctgtaccaaatggaacagcagctcatggggaagcagagccccacggaggacatagtggacctgaactccagcgaactggaaggatttttgggggacttattttagatatcaaaagaaaagctccatacttctggagtgacttcagagatgctttcagcctgcagtgcttagcatcttttctatttctctactgcgcgtgtatgtctcctgtcatcacgtttggaggactgctgggagaagcaactgaagggcgtataagtgcaattgaatctctctttggagcatccatgaccgggatagcctattctctctttggtggacagcctcttaccatattaggcagtacaggaccagttttggtgtttgaaaagattttgtttaaattttgcaaagaatatgggctgtcatacctatctttaagagctagcattggactttggactgcaactctatgtatcatacttgtggccacagatgctagttcccttgtctgctacatcactcggtttactgaagaagcttttgcttccctgatttgcatcattttcatttatgaggccctggagaagttgtttgaactcagtgaagcatatccaatcaacatgcataatgatctggaactgctgacacaatactcgtgtaactgtgtggaaccgcataatcccagcaatggcacattgaaggaatggagggaatccaatatttctgcctctgacataatttgggagaacctaactgtgtcagaatgcaaatcattgcatggagagtatgttggacgggcctgtggccatgatcacccatatgttccagatgttctattttggtctgtgatcctgttcttttccacagttactctgtcagccaccctgaagcagttcaagactagcagatattttccaaccaaggttcgatccatagtgagtgactttgctgtctttcttacaattctgtgtatggttttaattgactatgccattgggatcccatctccaaaactacaagtaccaagtgttttcaagcccactagagatgatcgtggctggtttgttacgcctttaggtccaaacccatggtggacagtaatagctgctataattccagctctgctttgtactattctaatttttatggaccaacagattacagctgtcatcatcaacaggaaagagcataagctaaagaaaggttgtgggtaccatctggacctattaatggtggctgtcatgctcggtgtatgctccatcatgggcctgccatggtttgtggctgccacagtcctctccatcactcatgtcaatagcctaaaactggaatcagaatgctcagctccaggagaacaacccaaatttctcggcattcgggagcaaagggttactgggcttatgatttttattcttatgggttcatcagtctttatgaccagtattctgaagtttattcccatgccagtgctatatggagtgtttctttatatgggtgcttcatctctaaagggaattcagttctttgataggataaagctcttctggatgccggcaaaacatcaaccagattttatatacctaaggcacgtaccgcttcgaaaagtgcatctcttcacaattattcagatgagttgccttggccttttgtggataataaaagtttcaagagctgctattgtctttcccatgatggtgttagccctggtatttgtaagaaagttgatggacttgttgttcacgaagcgggaactcagctggttggatgatttgatgcccgagagtaagaaaaagaaactggaagatgctgaaaaagaagaagaacaaagtatgctagctatggaagatgagggcacagtacaactcccattggaagggcactatagagatgatccatctgtgatcaatatatctgatgaaatgtcaaagactgccttgtggaggaaccttctgattactgccgataactcaaaagataaggagtcaagctttccttccaaaagctccccttcctaatcactctagaagctgattccccaaagcattgaaagccgaaaagagaagaaagctgactcagggaaaggtgttgacagggagacttgtctatgactcgatcttcaatttattttttacatatatatgagaagagtgtcacaattattaataaaactgctttgatcatgtattgtaaattctgtccctcaacccaaatccaccttcatactgtaagtagtgcaatacttgtttcatttctgtgtttaaacttctgagcagtgagacatccctgtgagcagatacaatagccaatgcaagaatctgtgtgttccttgctgtacgttagacatttgtaaactggattctgattgtcagttttatgagagcaatagcttccttaaagagataagtcatatttacctagtttgtattttcctactttagtgacctgaagatgcctgataatttcattcagaagaatttttgaaaggtagtcttacttctttttagtttttatagcttagcattagtgacttatttcaaaagacccaaatcaaaaagttagtttgaaagcattttttaataattgtatttatgcatttccttgatttaatatgataaatttaatacttaacaatttatatgtaactaaaacttaaagtcatttgaaaaatatatagaaacctatttacaacttgttaaggacaatcagacataatgcagagttaagtagtatttgcttaaaattcaagttgtgactaatgatcaaatactaggcttgtacgaaatgctttagaaaaactttgtaacagttttgtgggatttttcaatataaacctttatcagaaatatactaagtttgtctcccactgacaacagatgttttccaaataaacatattctatacatacttgtggaatgccacatggtgaatcattgtatatgaaattccactcctgtacagttactctgcagctaatggtcatgcactgcttaatgctggtcctgaatcatgttctcatgttagaccaacagctctccaattgtcattttttttctgcagagttttttttttccacttttaaattaaatgcatgttgtggaaaaacagtcttttaaaatgaaatttcagattccatttgagaaggttctgtagatatttcagtccatataaaataatacatctttactaaacttatataaggggagagaaagttatgaagttttggacattactaaaagtacagtatttgatttcactttcaatgaatgtgaagttaataaaactaaatctcataatgctcttggttcctaagaatgagtagtaatcatcaactttataatactccaatattccgttttataataattcagagccctgtggcttttacacaccgttaattatgtactctgttggaagtgcacatgaaaagtgaagaaaagttcctcttgtgattaaactaatgggaggaaataaatcaacaaagtctccattaagttctacattttgagaccttttaaaaattcccctcacaattctttaaggagcccccctttttatggaacatgagcctaaaaattatagaaagaagaattttaagttaataaagtttgtatttataaatgctgaaaaaatacagaaactttctgttccaaatgtgttgcctttgtgtattttataatacagatactacattgtaaacatttccattgttttatgatttagccagtgattccccaaagcagcctcttagtgttttaatatattaataactgttttgttaaaaatgatcatagtgaatttaaatcttcacatgatcacctatttgaataagcaatcatatccaatgaaattctgtatttctgagtatttttatagtcattttgttcttgtgtgaattttaaagctatccctatgttaatcctaatattttgaaatcatataaaatataataaaaatgtagtattatatatttacttctaatttcagattcctggtcaaaattactaaatatcttgaatgtaatttagtgccaagtttaaataatgtgtaaatgtgactaggatattgtgtttttcacaattaagaaatgttatgtggaaataaatatttatcctaacttccttgcacattttaaattgtg

SEQ ID NO: 1360 - protein, 1088 aa, Homosapiens
MEIKDQGAQMEPLLPTRNDEEAVVDRGGTRSILKTHFEKEDLEGHRTLFIGVHVPLGGRKSHRRHRHRGHKHRKRDRERDSGLEDGRESPSFDTPSQRVQFILGTEDDDEEHIPHDLFTELDEICWREGEDAEWRETARWLKFEEDVEDGGERWSKPYVATLSLHSLFELRSCILNGTVLLDMHANTLEEIADMVLDQQVSSGQLNEDVRHRVHEALMKQHHHQNQKKLTNRIPIVRSFADIGKKQSEPNSMDKNAGQVVSPQSAPACVENKNDVSRENSTVDFSKVDLHFMKKIPPGAEASNILVGELEFLDRTVVAFVRLSPAVLLQGLAEVPIPTRFLFILLGPLGKGQQYHEIGRSIATLMTDEVFHDVAYKAKDRNDLVSGIDEFLDQVTVLPPGEWDPSIRIEPPKNVPSQEKRKIPAVPNGTAAHGEAEPHGGHSGPELQRTGRIFGGLILDIKRKAPYFWSDFRDAFSLQCLASFLFLYCACMSPVITFGGLLGEATEGRISAIESLFGASMTGIAYSLFGGQPLTILGSTGPVLVFEKILFKFCKEYGLSYLSLRASIGLWTATLCIILVATDASSLVCYITRFTEEAFASLICIIFIYEALEKLFELSEAYPINMHNDLELLTQYSCNCVEPHNPSNGTLKEWRESNISASDIIWENLTVSECKSLHGEYVGRACGHDHPYVPDVLFWSVILFFSTVTLSATLKQFKTSRYFPTKVRSIVSDFAVFLTILCMVLIDYAIGIPSPKLQVPSVFKPTRDDRGWFVTPLGPNPWWTVIAAIIPALLCTILIFMDQQITAVIINRKEHKLKKGCGYHLDLLMVAVMLGVCSIMGLPWFVAATVLSITHVNSLKLESECSAPGEQPKFLGIREQRVTGLMIFILMGSSVFMTSILKFIPMPVLYGVFLYMGASSLKGIQFFDRIKLFWMPAKHQPDFIYLRHVPLRKVHLFTIIQMSCLGLLWIIKVSRAAIVFPMMVLALVFVRKLMDLLFTKRELSWLDDLMPESKKKKLEDAEKEEEQSMLAMEDEGTVQLPLEGHYRDDPSVINISDEMSKTALWRNLLITADNSKDKESSFPSKSSPS

SEQ ID NO: 1361 - DNA, 982 bp, Homosapiens
gtttctctttaccttagcacctcaaaataccatgccatttaaagcttattaaaactcatttttgttttcattatctcaaaactgcactgtcaagatgatgatgatctttaaaatacacactcaaatcaagaaacttaaggttacctttgttcccaaatttcatacctatcatcttaagtagggacttctgtcttcacaacagattattaccttacagaagtttgaattatccggtcgggttttattgtttaaaatcatttctgcatcagctgctgaaacaacaaataggaattgtttttatggaggctttgcatagattccctgagcaggattttaatctttttctaactggactggttcaaatgttgttctcttctttaaagggatggcaagatgtgggcagtgatgtcactagggcagggacaggataagagggattagggagagaagatagcagggcatggctgggaacccaagtccaagcataccaacacgagcaggctactgtcagctcccctcggagaagagctgttcacagccagactggcacagttttctgagaaagactattcaaacagtctcaggaaatcaaatatgcaaagcactgacttctaagtaaaaccacagcagttgaaaagaacagcaagggtgatgggaaagcattgtaaatgtgcttttaaaaaaaaatactgatgttcctagtgaaagaggcagcttgaaactgagatgtgaacacatcagcttgccctgttaaaagatgaaaatatttgtatcacaaatcttaacttgaaggagtccttgcatcaatttttcttatttcatttctttgagtgtcttaattaaaagaatattttaacttccttggactcattttaaaaaatggaacataaaatacaatgttatgtattattattcccattctacatactatggaatttctcccagtcatttaataaatgtgccttcattttttcagaagtaa

SEQ ID NO: 1362 - protein, 52 aa, Homosapiens
MAGNPSPSIPTRAGYCQLPSEKSCSQPDWHSFLRKTIQTVSGNQICKALTSK

SEQ ID NO: 1363 - DNA, 745 bp, Homosapiens
gtggtatactgatgaagaccatggaatagctagcagcacagcacaccaacatatatatacccacatgagccacttcataaaacaatgtttctctttaccttagcacctcaaaataccatgccatttaaagcttattaaaactcatttttgttttcattatctcaaaactgcactgtcaagatgatgatgatctttaaaatacacactcaaatcaagaaacttaaggttacctttgttcccaaatttcatacctatcatcttaagtagggacttctgtcttcacaacagattattaccttacagaagtttgaattatccggtcgggttttattgtttaaaatcatttctgcatcagctgctgaaacaacaaataggaattgtttttatggaggctttgcatagattccctgagcaggattttaatctttttctaactggactggttcaaatgttgttctcttctttaaagggatggcaagatgtgggcagtgatgtcactagggcagggacaggataagagatgaaaatatttgtatcacaaatcttaacttgaaggagtccttgcatcaatttttcttatttcatttctttgagtgtcttaattaaaagaatattttaacttccttggactcattttaaaaaatggaacataaaatacaatgttatgtattattattcccattctacatactatggaatttctcccagtcatttaataaatgtgccttcattttttcagaagtaa

SEQ ID NO: 1364 - protein, 43 aa, Homosapiens [sequence omitted]

SEQ ID NO: 1365 - DNA, 3904 bp, Homosapiens
ctttcactggcaagagacggagtcctgggtttcagttccagttgcctgcggtgggctgtgtgagtttgccaaagtcccctgccctctctgggtctcggttccctcgcctgtccacgtgaggttggaggagctgaacgccgacgtcatttttagctaagagggagcagggtccccgagtcgccggcccagggtctgcgcatccgaggccgcgcgccctttcccctcccccacggctcctccgggccccgcactctgcgccccggctgccgcccagcgccctacaccgccctcagggggccctcgcgggctccccccggccgggatgccagtgccccgcgccacgcgcgcctgctcccgcgccgcctgccctgcagcctgcccgcggcgcctttatacccagcgggctcggcgctcactaatgtttaactcggggccgaaacttgccagcggcgagtgactccaccgcccggagcagcggtgcaggacgcgcgtctccgccgcccgcggtgacttctgcctgcgctccttctctgaacgctcacttccgaggagacgccgacgatgaagacaccgtggaaggttcttctgggactgctgggtgctgctgcgcttgtcaccatcatcaccgtgcccgtggttctgctgaacaaaggcacagatgatgctacagctgacagtcgcaaaacttacactctaactgattacttaaaaaatacttatagactgaagttatactccttaagatggatttcagatcatgaatatctctacaaacaagaaaataatatcttggtattcaatgctgaatatggaaacagctcagttttcttggagaacagtacatttgatgagtttggacattctatcaatgattattcaatatctcctgatgggcagtttattctcttagaatacaactacgtgaagcaatggaggcattcctacacagcttcatatgacatttatgatttaaataaaaggcagctgattacagaagagaggattccaaacaacacacagtgggtcacatggtcaccagtgggtcataaattggcatatgtttggaacaatgacatttatgttaaaattgaaccaaatttaccaagttacagaatcacatggacggggaaagaagatataatatataatggaataactgactgggtttatgaagaggaagtcttcagtgcctactctgctctgtggtggtctccaaacggcacttttttagcatatgcccaatttaacgacacagaagtcccacttattgaatactccttctactctgatgagtcactgcagtacccaaagactgtacgggttccatatccaaaggcaggagctgtgaatccaactgtaaagttctttgttgtaaatacagactctctcagctcagtcaccaatgcaacttccatacaaatcactgctcctgcttctatgttgataggggatcactacttgtgtgatgtgacatgggcaacacaagaaagaatttctttgcagtggctcaggaggattcagaactattcggtcatggatatttgtgactatgatgaatccagtggaagatggaactgcttagtggcacggcaacacattgaaatgagtactactggctgggttggaagatttaggccttcagaacctcattttacccttgatggtaatagcttctacaagatcatcagcaatgaagaaggttacagacacatttgctatttccaaatagataaaaaagactgcacatttattacaaaaggcacctgggaagtcatcgggatagaagctctaaccagtgattatctatactacattagtaatgaatataaaggaatgccaggaggaaggaatctttataaaatccaacttagtgactatacaaaagtgacatgcctcagttgtgagctgaatccggaaaggtgtcagtactattctgtgtcattcagtaaagaggcgaagtattatcagctgagatgttccggtcctggtctgcccctctatactctacacagcagcgtgaatgataaagggctgagagtcctggaagacaattcagctttggataaaatgctgcagaatgtccagatgccctccaaaaaactggacttcattattttgaatgaaacaaaattttggtatcagatgatcttgcctcctcattttgataaatccaagaaatatcctctactattagatgtgtatgcaggcccatgtagtcaaaaagcagacactgtcttcagactgaactgggccacttaccttgcaagcacagaaaacattatagtagctagctttgatggcagaggaagtggttaccaaggagataagatcatgcatgcaatcaacagaagactgggaacatttgaagttgaagatcaaattgaagcagccagacaattttcaaaaatgggatttgtggacaacaaacgaattgcaatttggggctggtcatatggagggtacgtaacctcaatggtcctgggatcgggaagtggcgtgttcaagtgtggaatagccgtggcgcctgtatcccggtgggagtactatgactcagtgtacacagaacgttacatgggtctcccaactccagaagacaaccttgaccattacagaaattcaacagtcatgagcagagctgaaaattttaaacaagttgagtacctccttattcatggaacagcagatgataacgttcactttcagcagtcagctcagatctccaaagccctggtcgatgttggagtggatttccaggcaatgtggtatactgatgaagaccatggaatagctagcagcacagcacaccaacatatatatacccacatgagccacttcataaaacaatgtttctctttaccttagcacctcaaaataccatgccatttaaagcttattaaaactcatttttgttttcattatctcaaaactgcactgtcaagatgatgatgatctttaaaatacacactcaaatcaagaaacttaaggttacctttgttcccaaatttcatacctatcatcttaagtagggacttctgtcttcacaacagattattaccttacagaagtttgaattatccggtcgggttttattgtttaaaatcatttctgcatcagctgctgaaacaacaaataggaattgtttttatggaggctttgcatagattccctgagcaggattttaatctttttctaactggactggttcaaatgttgttctcttctttaaagggatggcaagatgtgggcagtgatgtcactagggcagggacaggataagagggattagggagagaagatagcagggcatggctgggaacccaagtccaagcataccaacacgagcaggctactgtcagctcccctcggagaagagctgttcacagccagactggcacagttttctgagaaagactattcaaacagtctcaggaaatcaaatatgcaaagcactgacttctaagtaaaaccacagcagttgaaaagactccaaagaaatgtaagggaaactgccagcaacgcaggcccccaggtgccagttatggctataggtgctacaaaaacacagcaagggtgatgggaaagcattgtaaatgtgcttttaaaaaaaaatactgatgttcctagtgaaagaggcagcttgaaactgagatgtgaacacatcagcttgccctgttaaaagatgaaaatatttgtatcacaaatcttaacttgaaggagtccttgcatcaatttttcttatttcatttctttgagtgtcttaattaaaagaatattttaacttccttggactcattttaaaaaatggaacataaaatacaatgttatgtattattattcccattctacatactatggaatttctcccagtcatttaataaatgtgccttcattttttcagaagtaa

SEQ ID NO: 1366 - protein, 766 aa, Homosapiens; identical to SEQ ID NO: 96

SEQ ID NO: 1367 - DNA, 806 bp, Homosapiens
aacaacaactgggaagccttctcagctacacttcggggcactggtccaaccccacgcaaaatccctcgtttcccttagcgtgcagaaccacgggcacggtgatgatggtgacaagcgcagcagcacccagcagtcccagaagaaccttccacggtgtctgcaagccgagcagatcaagtccaattagagggaagcgtgtggccccagtttccgtaggagggtcggggctgctccagaggcagcaggatttgcaggaaggaagactgtacacagagaataaataacttggccaagccattcagctaggaagttgtagatcctaaattaagagttcaaggtcttaatggctactctatgcggcctctcatagtcttttcaagggttttggagaagaataaaagatcaggtatggcttctccctcccccagctctctattgttccctaaaggattattcattcgttcattcattcctacatcctcccatttattccagtcatccacagatgtttgagtggttacaatgtgccagcctcccttctaggtactggagataaagtgggacaagagaggtgaggtctggacccttggcactttcacgataaaatacacaggtaaacatttgcctttagggccccctgtgattacttccactcttgcagataagaggataaggcctcttcagcttgttcacagcagctgaaaagcaaagcctctctgtcagtagaggtaaaagattaagaatgcagagtccgatggggcattaccacatgattatgaattaatgcaattttccatcttttattt

SEQ ID NO: 1368 - protein, 60 aa, Homosapiens
MMVTSAAAPSSPRRTFHGVCKPSRSSPIRGKRVAPVSVGGSGLLQRQQDLQEGRLYTENK

SEQ ID NO: 1369 - DNA, 629 bp, Homosapiens
gaatgggctttggttcgaaggatggtgagcagatggtcaccggcctcacagagaagaaggttgtgcaacagggcctggaggccctctgaagatctgagacaaggggaagaggacaactttaccagggacaagacagcctgagcttcagcaaaacactataaaagagtatccttggttccatatgacccaggcagagggaggagtgatgggttttcaaggactgagaatgcacatatggatagaacaaatctagaaattcaagctacttctattgctaaacaagtatagagtttcatataaatataattcataaaaggtataaacggcaagagtttctacccaaagattttgtgaaacacctggcattctagctacagcagcaaattatggcatcccttagcccctcagagacctctgtcctcagcagatgtgaccgccttcttggatctcagcagtgcaagggttcagtgtgccagcatctctacatctgaggtcttgctgtcttctgcaggccttccagctgctttgagagagaagtgaccaaagtattctcacttttgaagggagtgaaataaaacctggacaaaccaggttctcaaattaaaattcatggatcttcctattttccc

(The sequence listing continues in the following parts.)
